United States Patent Application Publication US 2020/0216857 A1 - sequence listing, part 2

SEQ ID NO: 5725 - DNA, 20 bp, Artificial Sequence
  Description of Artificial Sequence: Synthetic oligonucleotide
  Target: ATXN2; (+) strand; PAM type: NAAAAC; PAM sequence: AAAAAC
cgtttgcaggcactaaaaat

SEQ ID NO: 5726 - DNA, 20 bp, Artificial Sequence
  Description of Artificial Sequence: Synthetic oligonucleotide
  Target: ATXN2; (+) strand; PAM type: NAAAAC; PAM sequence: AAAAAC
ctatgtacccataaaaaaat

SEQ ID NO: 5727 - DNA, 20 bp, Artificial Sequence
  Description of Artificial Sequence: Synthetic oligonucleotide
  Target: ATXN2; (+) strand; PAM type: NAAAAC; PAM sequence: CAAAAC
aaaacctttaaagtagactg

SEQ ID NO: 5728 - DNA, 20 bp, Artificial Sequence
  Description of Artificial Sequence: Synthetic oligonucleotide
  Target: ATXN2; (+) strand; PAM type: NAAAAC; PAM sequence: GAAAAC
ggcatcctctacaaaagaaa

SEQ ID NO: 5729 - DNA, 20 bp, Artificial Sequence
  Description of Artificial Sequence: Synthetic oligonucleotide
  Target: ATXN2; (+) strand; PAM type: NAAAAC; PAM sequence: AAAAAC
ggggagcaagtacaagcaac

SEQ ID NO: 5730 - DNA, 20 bp, Artificial Sequence
  Description of Artificial Sequence: Synthetic oligonucleotide
  Target: ATXN2; (+) strand; PAM type: NAAAAC; PAM sequence: GAAAAC
gcactatactaaatctaatg

SEQ ID NO: 5731 - DNA, 20 bp, Artificial Sequence
  Description of Artificial Sequence: Synthetic oligonucleotide
  Target: ATXN2; (+) strand; PAM type: NAAAAC; PAM sequence: GAAAAC
gtgagccatcatgcccagca

SEQ ID NO: 5732 - DNA, 20 bp, Artificial Sequence
  Description of Artificial Sequence: Synthetic oligonucleotide
  Target: ATXN2; (+) strand; PAM type: NAAAAC; PAM sequence: TAAAAC
aacctaggtccatttacctc

SEQ ID NO: 5733 - DNA, 20 bp, Artificial Sequence
  Description of Artificial Sequence: Synthetic oligonucleotide
  Target: ATXN2; (+) strand; PAM type: NAAAAC; PAM sequence: CAAAAC
taaaacccacattattaacc

SEQ ID NO: 5734 - DNA, 20 bp, Artificial Sequence
  Description of Artificial Sequence: Synthetic oligonucleotide
  Target: ATXN2; (+) strand; PAM type: NAAAAC; PAM sequence: TAAAAC
ggtacacaggaaatacgcaa

SEQ ID NO: 5735 - DNA, 20 bp, Artificial Sequence
  Description of Artificial Sequence: Synthetic oligonucleotide
  Target: ATXN2; (+) strand; PAM type: NAAAAC; PAM sequence: AAAAAC
ccggcccactctcatttttt

SEQ ID NO: 5736 - DNA, 20 bp, Artificial Sequence
  Description of Artificial Sequence: Synthetic oligonucleotide
  Target: ATXN2; (+) strand; PAM type: NAAAAC; PAM sequence: TAAAAC
gcacctaaaagtagtaagac

SEQ ID NO: 5737 - DNA, 20 bp, Artificial Sequence
  Description of Artificial Sequence: Synthetic oligonucleotide
  Target: ATXN2; (+) strand; PAM type: NAAAAC; PAM sequence: AAAAAC
cctctaaatgtaattcttaa

SEQ ID NO: 5738 - DNA, 20 bp, Artificial Sequence
  Description of Artificial Sequence: Synthetic oligonucleotide
  Target: ATXN2; (+) strand; PAM type: NAAAAC; PAM sequence: GAAAAC
agacaaccaacagaacagga

SEQ ID NO: 5739 - DNA, 20 bp, Artificial Sequence
  Description of Artificial Sequence: Synthetic oligonucleotide
  Target: ATXN2; (+) strand; PAM type: NAAAAC; PAM sequence: AAAAAC
atgaaaagataggacgagaa

SEQ ID NO: 5740 - DNA, 20 bp, Artificial Sequence
  Description of Artificial Sequence: Synthetic oligonucleotide
  Target: ATXN2; (+) strand; PAM type: NAAAAC; PAM sequence: AAAAAC
tacaacattgtgaatatttt

SEQ ID NO: 5741 - DNA, 20 bp, Artificial Sequence
  Description of Artificial Sequence: Synthetic oligonucleotide
  Target: ATXN2; (+) strand; PAM type: NAAAAC; PAM sequence: AAAAAC
tatgtaaattatatctcatt

SEQ ID NO: 5742 - DNA, 20 bp, Artificial Sequence
  Description of Artificial Sequence: Synthetic oligonucleotide
  Target: ATXN2; (+) strand; PAM type: NAAAAC; PAM sequence: AAAAAC
tatctcaataaagctgttat

SEQ ID NO: 5743 - DNA, 20 bp, Artificial Sequence
  Description of Artificial Sequence: Synthetic oligonucleotide
  Target: ATXN2; (+) strand; PAM type: NAAAAC; PAM sequence: GAAAAC
ccgcagggtcctctgcctag

SEQ ID NO: 5744 - DNA, 20 bp, Artificial Sequence
  Description of Artificial Sequence: Synthetic oligonucleotide
  Target: ATXN2; (+) strand; PAM type: NAAAAC; PAM sequence: AAAAAC
aactattgtttaacaaattg

SEQ ID NO: 5745 - DNA, 20 bp, Artificial Sequence
  Description of Artificial Sequence: Synthetic oligonucleotide
  Target: ATXN2; (+) strand; PAM type: NAAAAC; PAM sequence: GAAAAC
caccgtgcccgccaacaaat

SEQ ID NO: 5746 - DNA, 20 bp, Artificial Sequence
  Description of Artificial Sequence: Synthetic oligonucleotide
  Target: ATXN2; (+) strand; PAM type: NAAAAC; PAM sequence: TAAAAC
attgttaacatttagaaagc

SEQ ID NO: 5747 - DNA, 20 bp, Artificial Sequence
  Description of Artificial Sequence: Synthetic oligonucleotide
  Target: ATXN2; (+) strand; PAM type: NAAAAC; PAM sequence: TAAAAC
ctttagtaatgcttattttc

SEQ ID NO: 5748 - DNA, 20 bp, Artificial Sequence
  Description of Artificial Sequence: Synthetic oligonucleotide
  Target: ATXN2; (+) strand; PAM type: NAAAAC; PAM sequence: GAAAAC
aagcctggaatctttagcta

SEQ ID NO: 5749 - DNA, 20 bp, Artificial Sequence
  Description of Artificial Sequence: Synthetic oligonucleotide
  Target: ATXN2; (+) strand; PAM type: NAAAAC; PAM sequence: CAAAAC
attcagataagttagaaaag

SEQ ID NO: 5750 - DNA, 20 bp, Artificial Sequence
  Description of Artificial Sequence: Synthetic oligonucleotide
  Target: ATXN2; (+) strand; PAM type: NAAAAC; PAM sequence: GAAAAC
aagttagaaaagcaaaacaa

SEQ ID NO: 5751 - DNA, 20 bp, Artificial Sequence
  Description of Artificial Sequence: Synthetic oligonucleotide
  Target: ATXN2; (+) strand; PAM type: NAAAAC; PAM sequence: TAAAAC
tctctgaagatctaggtaaa

SEQ ID NO: 5752 - DNA, 20 bp, Artificial Sequence
  Description of Artificial Sequence: Synthetic oligonucleotide
  Target: ATXN2; (+) strand; PAM type: NAAAAC; PAM sequence: CAAAAC
gttaggaatttgctggcaat

SEQ ID NO: 5753 - DNA, 20 bp, Artificial Sequence
  Description of Artificial Sequence: Synthetic oligonucleotide
  Target: ATXN2; (+) strand; PAM type: NAAAAC; PAM sequence: GAAAAC
aagtcacaagggtcacggaa

SEQ ID NO: 5754 - DNA, 20 bp, Artificial Sequence
  Description of Artificial Sequence: Synthetic oligonucleotide
  Target: ATXN2; (+) strand; PAM type: NAAAAC; PAM sequence: CAAAAC
tgctattctgagtgtatctc

SEQ ID NO: 5755 - DNA, 20 bp, Artificial Sequence
  Description of Artificial Sequence: Synthetic oligonucleotide
  Target: ATXN2; (+) strand; PAM type: NAAAAC; PAM sequence: AAAAAC
agcagaaatgtatagcaact

SEQ ID NO: 5756 - DNA, 20 bp, Artificial Sequence
  Description of Artificial Sequence: Synthetic oligonucleotide
  Target: ATXN2; (+) strand; PAM type: NAAAAC; PAM sequence: TAAAAC
ttccttatgctaatcacaaa

SEQ ID NO: 5757 - DNA, 20 bp, Artificial Sequence
  Description of Artificial Sequence: Synthetic oligonucleotide
  Target: ATXN2; (+) strand; PAM type: NAAAAC; PAM sequence: CAAAAC
catattagagaggtacttta

SEQ ID NO: 5758 - DNA, 20 bp, Artificial Sequence
  Description of Artificial Sequence: Synthetic oligonucleotide
  Target: ATXN2; (+) strand; PAM type: NAAAAC; PAM sequence: AAAAAC
tggttaaaaatagaaaaaaa

SEQ ID NO: 5759 - DNA, 20 bp, Artificial Sequence
  Description of Artificial Sequence: Synthetic oligonucleotide
  Target: ATXN2; (+) strand; PAM type: NAAAAC; PAM sequence: TAAAAC
cctatacaccccgataccac

SEQ ID NO: 5760 - DNA, 20 bp, Artificial Sequence
  Description of Artificial Sequence: Synthetic oligonucleotide
  Target: ATXN2; (+) strand; PAM type: NAAAAC; PAM sequence: TAAAAC
tctatcatgatcatcaattt

SEQ ID NO: 5761 - DNA, 20 bp, Artificial Sequence
  Description of Artificial Sequence: Synthetic oligonucleotide
  Target: ATXN2; (+) strand; PAM type: NAAAAC; PAM sequence: TAAAAC
atcaattttaaaactcggct

SEQ ID NO: 5762 - DNA, 20 bp, Artificial Sequence
  Description of Artificial Sequence: Synthetic oligonucleotide
  Target: ATXN2; (+) strand; PAM type: NAAAAC; PAM sequence: GAAAAC
tactggtgttaacaccaagc

SEQ ID NO: 5763 - DNA, 20 bp, Artificial Sequence
  Description of Artificial Sequence: Synthetic oligonucleotide
  Target: ATXN2; (+) strand; PAM type: NAAAAC; PAM sequence: GAAAAC
ggagaaacacattttgtgcg

SEQ ID NO: 5764 - DNA, 20 bp, Artificial Sequence
  Description of Artificial Sequence: Synthetic oligonucleotide
  Target: ATXN2; (+) strand; PAM type: NAAAAC; PAM sequence: GAAAAC
caaaaggacattatgattca

SEQ ID NO: 5765 - DNA, 20 bp, Artificial Sequence
  Description of Artificial Sequence: Synthetic oligonucleotide
  Target: ATXN2; (+) strand; PAM type: NAAAAC; PAM sequence: GAAAAC
tcgctctcaaaaaagaccca

SEQ ID NO: 5766 - DNA, 20 bp, Artificial Sequence
  Description of Artificial Sequence: Synthetic oligonucleotide
  Target: ATXN2; (+) strand; PAM type: NAAAAC; PAM sequence: TAAAAC
tagttttaataaactaaagt

SEQ ID NO: 5767 - DNA, 20 bp, Artificial Sequence
  Description of Artificial Sequence: Synthetic oligonucleotide
  Target: ATXN2; (+) strand; PAM type: NAAAAC; PAM sequence: AAAAAC
ggagttaaacaaagacaaac

SEQ ID NO: 5768 - DNA, 20 bp, Artificial Sequence
  Description of Artificial Sequence: Synthetic oligonucleotide
  Target: ATXN2; (+) strand; PAM type: NAAAAC; PAM sequence: AAAAAC
aatgatatgaaggaaagtat

SEQ ID NO: 5769 - DNA, 20 bp, Artificial Sequence
  Description of Artificial Sequence: Synthetic oligonucleotide
  Target: ATXN2; (+) strand; PAM type: NAAAAC; PAM sequence: TAAAAC
aagtcccatttaagtagaaa

SEQ ID NO: 5770 - DNA, 20 bp, Artificial Sequence
  Description of Artificial Sequence: Synthetic oligonucleotide
  Target: ATXN2; (+) strand; PAM type: NAAAAC; PAM sequence: GAAAAC
ttctggagaaaagactcaat

SEQ ID NO: 5771 - DNA, 20 bp, Artificial Sequence
  Description of Artificial Sequence: Synthetic oligonucleotide
  Target: ATXN2; (+) strand; PAM type: NAAAAC; PAM sequence: GAAAAC
ttaagtattttaagtattta

SEQ ID NO: 5772 - DNA, 20 bp, Artificial Sequence
  Description of Artificial Sequence: Synthetic oligonucleotide
  Target: ATXN2; (+) strand; PAM type: NAAAAC; PAM sequence: AAAAAC
ttagagtttagaatactggt

SEQ ID NO: 5773 - DNA, 20 bp, Artificial Sequence
  Description of Artificial Sequence: Synthetic oligonucleotide
  Target: ATXN2; (+) strand; PAM type: NAAAAC; PAM sequence: TAAAAC
atactggtaaaaacagaaac

SEQ ID NO: 5774 - DNA, 20 bp, Artificial Sequence
  Description of Artificial Sequence: Synthetic oligonucleotide
  Target: ATXN2; (+) strand; PAM type: NAAAAC; PAM sequence: TAAAAC
gtaaaaacagaaactaaaac

SEQ ID NO: 5775 - DNA, 20 bp, Artificial Sequence
  Description of Artificial Sequence: Synthetic oligonucleotide
  Target: ATXN2; (+) strand; PAM type: NAAAAC; PAM sequence: TAAAAC
acagaaactaaaactaaaac

SEQ ID NO: 5776 - DNA, 20 bp, Artificial Sequence
  Description of Artificial Sequence: Synthetic oligonucleotide
  Target: ATXN2; (+) strand; PAM type: NAAAAC; PAM sequence: AAAAAC
tctccagaggaacatatttc

SEQ ID NO: 5777 - DNA, 20 bp, Artificial Sequence
  Description of Artificial Sequence: Synthetic oligonucleotide
  Target: ATXN2; (+) strand; PAM type: NAAAAC; PAM sequence: CAAAAC
ttttttaacaacttagaaga

SEQ ID NO: 5778 - DNA, 20 bp, Artificial Sequence
  Description of Artificial Sequence: Synthetic oligonucleotide
  Target: ATXN2; (+) strand; PAM type: NAAAAC; PAM sequence: CAAAAC
tctcaaaagaaaaaaaaaga

SEQ ID NO: 5779 - DNA, 20 bp, Artificial Sequence
  Description of Artificial Sequence: Synthetic oligonucleotide
  Target: ATXN2; (+) strand; PAM type: NAAAAC; PAM sequence: AAAAAC
ccaaaatttgtttagagcat

SEQ ID NO: 5780 - DNA, 20 bp, Artificial Sequence
  Description of Artificial Sequence: Synthetic oligonucleotide
  Target: ATXN2; (+) strand; PAM type: NAAAAC; PAM sequence: AAAAAC
ttcatgtaattgtttaactt

SEQ ID NO: 5781 - DNA, 20 bp, Artificial Sequence
  Description of Artificial Sequence: Synthetic oligonucleotide
  Target: ATXN2; (+) strand; PAM type: NAAAAC; PAM sequence: AAAAAC
aaagacaaatgcactaaaat

SEQ ID NO: 5782 - DNA, 20 bp, Artificial Sequence
  Description of Artificial Sequence: Synthetic oligonucleotide
  Target: ATXN2; (+) strand; PAM type: NAAAAC; PAM sequence: AAAAAC
ggtgaaaccccttctctact

SEQ ID NO: 5783 - DNA, 20 bp, Artificial Sequence
  Description of Artificial Sequence: Synthetic oligonucleotide
  Target: ATXN2; (+) strand; PAM type: NAAAAC; PAM sequence: CAAAAC
cagagtgagactccatctct

SEQ ID NO: 5784 - DNA, 20 bp, Artificial Sequence
  Description of Artificial Sequence: Synthetic oligonucleotide
  Target: ATXN2; (+) strand; PAM type: NAAAAC; PAM sequence: TAAAAC
gatcaccctgggcaacatgg

SEQ ID NO: 5785 - DNA, 20 bp, Artificial Sequence
  Description of Artificial Sequence: Synthetic oligonucleotide
  Target: ATXN2; (+) strand; PAM type: NAAAAC; PAM sequence: CAAAAC
taatgcattaaagagagaaa

SEQ ID NO: 5786 - DNA, 20 bp, Artificial Sequence
  Description of Artificial Sequence: Synthetic oligonucleotide
  Target: ATXN2; (+) strand; PAM type: NAAAAC; PAM sequence: CAAAAC
tatttggctgggtgttaaag

SEQ ID NO: 5787 - DNA, 20 bp, Artificial Sequence
  Description of Artificial Sequence: Synthetic oligonucleotide
  Target: ATXN2; (+) strand; PAM type: NAAAAC; PAM sequence: AAAAAC
accaacaaagacatatgtta

SEQ ID NO: 5788 - DNA, 20 bp, Artificial Sequence
  Description of Artificial Sequence: Synthetic oligonucleotide
  Target: ATXN2; (+) strand; PAM type: NAAAAC; PAM sequence: GAAAAC
tgaacataatttaggttgat

SEQ ID NO: 5789 - DNA, 20 bp, Artificial Sequence
  Description of Artificial Sequence: Synthetic oligonucleotide
  Target: ATXN2; (+) strand; PAM type: NAAAAC; PAM sequence: TAAAAC
cactataataaaggtaaact

SEQ ID NO: 5790 - DNA, 20 bp, Artificial Sequence
  Description of Artificial Sequence: Synthetic oligonucleotide
  Target: ATXN2; (+) strand; PAM type: NAAAAC; PAM sequence: GAAAAC
aagaatgtaaaatgttccaa

SEQ ID NO: 5791 - DNA, 20 bp, Artificial Sequence
  Description of Artificial Sequence: Synthetic oligonucleotide
  Target: ATXN2; (+) strand; PAM type: NAAAAC; PAM sequence: AAAAAC
aattctcacaacactagaca

SEQ ID NO: 5792 - DNA, 20 bp, Artificial Sequence
  Description of Artificial Sequence: Synthetic oligonucleotide
  Target: ATXN2; (+) strand; PAM type: NAAAAC; PAM sequence: AAAAAC
ttagatagaagctcagtatt

SEQ ID NO: 5793 - DNA, 20 bp, Artificial Sequence
  Description of Artificial Sequence: Synthetic oligonucleotide
  Target: ATXN2; (+) strand; PAM type: NAAAAC; PAM sequence: TAAAAC
tggaaaagcaagcaagcgtc

SEQ ID NO: 5794 - DNA, 20 bp, Artificial Sequence
  Description of Artificial Sequence: Synthetic oligonucleotide
  Target: ATXN2; (+) strand; PAM type: NAAAAC; PAM sequence: GAAAAC
gagacagaaatggggaaggg

SEQ ID NO: 5795 - DNA, 20 bp, Artificial Sequence
  Description of Artificial Sequence: Synthetic oligonucleotide
  Target: ATXN2; (+) strand; PAM type: NAAAAC; PAM sequence: AAAAAC
aagtctggattttaaaaaaa

SEQ ID NO: 5796 - DNA, 20 bp, Artificial Sequence
  Description of Artificial Sequence: Synthetic oligonucleotide
  Target: ATXN2; (+) strand; PAM type: NAAAAC; PAM sequence: AAAAAC
gattcctgcaaagttgagaa

SEQ ID NO: 5797 - DNA, 20 bp, Artificial Sequence
  Description of Artificial Sequence: Synthetic oligonucleotide
  Target: ATXN2; (+) strand; PAM type: NAAAAC; PAM sequence: AAAAAC
aggtatagagagaaaaaagg

SEQ ID NO: 5798 - DNA, 20 bp, Artificial Sequence
  Description of Artificial Sequence: Synthetic oligonucleotide
  Target: ATXN2; (+) strand; PAM type: NAAAAC; PAM sequence: AAAAAC
agagaaaaaaggaaaaacat

SEQ ID NO: 5799 - DNA, 20 bp, Artificial Sequence
  Description of Artificial Sequence: Synthetic oligonucleotide
  Target: ATXN2; (+) strand; PAM type: NAAAAC; PAM sequence: AAAAAC
ataaatatacttaaatgtat

SEQ ID NO: 5800 - DNA, 20 bp, Artificial Sequence
  Description of Artificial Sequence: Synthetic oligonucleotide
  Target: ATXN2; (+) strand; PAM type: NAAAAC; PAM sequence: TAAAAC
ataaaaactataaaatgaca

SEQ ID NO: 5801 - DNA, 20 bp, Artificial Sequence
  Description of Artificial Sequence: Synthetic oligonucleotide
  Target: ATXN2; (+) strand; PAM type: NAAAAC; PAM sequence: AAAAAC
atgagtgctacaatacaatt

SEQ ID NO: 5802 - DNA, 20 bp, Artificial Sequence
  Description of Artificial Sequence: Synthetic oligonucleotide
  Target: ATXN2; (+) strand; PAM type: NAAAAC; PAM sequence: AAAAAC
agagcgagactccatctcaa

SEQ ID NO: 5803 - DNA, 20 bp, Artificial Sequence
  Description of Artificial Sequence: Synthetic oligonucleotide
  Target: ATXN2; (+) strand; PAM type: NAAAAC; PAM sequence: AAAAAC
gactccatctcaaaaaaaca

SEQ ID NO: 5804 - DNA, 20 bp, Artificial Sequence
  Description of Artificial Sequence: Synthetic oligonucleotide
  Target: ATXN2; (+) strand; PAM type: NAAAAC; PAM sequence: CAAAAC
ggatgtatggactggaacaa

SEQ ID NO: 5805 - DNA, 20 bp, Artificial Sequence
  Description of Artificial Sequence: Synthetic oligonucleotide
  Target: ATXN2; (+) strand; PAM type: NAAAAC; PAM sequence: AAAAAC
aacaatgaaatgcagttatc

SEQ ID NO: 5806 - DNA, 20 bp, Artificial Sequence
  Description of Artificial Sequence: Synthetic oligonucleotide
  Target: ATXN2; (+) strand; PAM type: NAAAAC; PAM sequence: CAAAAC
agacatcagtgtcccagcca

SEQ ID NO: 5807 - DNA, 20 bp, Artificial Sequence
  Description of Artificial Sequence: Synthetic oligonucleotide
  Target: ATXN2; (+) strand; PAM type: NAAAAC; PAM sequence: AAAAAC
catgcctatgtaagagaaaa

SEQ ID NO: 5808 - DNA, 20 bp, Artificial Sequence
  Description of Artificial Sequence: Synthetic oligonucleotide
  Target: ATXN2; (+) strand; PAM type: NAAAAC; PAM sequence: AAAAAC
aaaaatattttttaaaatat

SEQ ID NO: 5809 - DNA, 20 bp, Artificial Sequence
  Description of Artificial Sequence: Synthetic oligonucleotide
  Target: ATXN2; (+) strand; PAM type: NAAAAC; PAM sequence: AAAAAC
tgggatctcatcagagggaa

SEQ ID NO: 5810 - DNA, 20 bp, Artificial Sequence
  Description of Artificial Sequence: Synthetic oligonucleotide
  Target: ATXN2; (+) strand; PAM type: NAAAAC; PAM sequence: AAAAAC
agtgagacatctgtctctac

SEQ ID NO: 5811 - DNA, 20 bp, Artificial Sequence
  Description of Artificial Sequence: Synthetic oligonucleotide
  Target: ATXN2; (+) strand; PAM type: NAAAAC; PAM sequence: AAAAAC
tctacaaaaactaaactaaa

SEQ ID NO: 5812 - DNA, 20 bp, Artificial Sequence
  Description of Artificial Sequence: Synthetic oligonucleotide
  Target: ATXN2; (+) strand; PAM type: NAAAAC; PAM sequence: AAAAAC
cagccattgttacaggcaat

SEQ ID NO: 5813 - DNA, 20 bp, Artificial Sequence
  Description of Artificial Sequence: Synthetic oligonucleotide
  Target: ATXN2; (+) strand; PAM type: NAAAAC; PAM sequence: TAAAAC
cttggttttgaaaaagtatc

SEQ ID NO: 5814 - DNA, 20 bp, Artificial Sequence
  Description of Artificial Sequence: Synthetic oligonucleotide
  Target: ATXN2; (+) strand; PAM type: NAAAAC; PAM sequence: AAAAAC
acagagtgagactccaactc

SEQ ID NO: 5815 - DNA, 20 bp, Artificial Sequence
  Description of Artificial Sequence: Synthetic oligonucleotide
  Target: ATXN2; (+) strand; PAM type: NAAAAC; PAM sequence: TAAAAC
gagatcgagaccatcccggc

SEQ ID NO: 5816 - DNA, 20 bp, Artificial Sequence
  Description of Artificial Sequence: Synthetic oligonucleotide
  Target: ATXN2; (+) strand; PAM type: NAAAAC; PAM sequence: AAAAAC
tccgtctcaaaaaaaaaaaa

SEQ ID NO: 5817 - DNA, 20 bp, Artificial Sequence
  Description of Artificial Sequence: Synthetic oligonucleotide
  Target: ATXN2; (+) strand; PAM type: NAAAAC; PAM sequence: GAAAAC
caatatttgccttggtggaa

SEQ ID NO: 5818 - DNA, 20 bp, Artificial Sequence
  Description of Artificial Sequence: Synthetic oligonucleotide
  Target: ATXN2; (+) strand; PAM type: NAAAAC; PAM sequence: AAAAAC
caaatgctggtgaggatgtg

SEQ ID NO: 5819 - DNA, 20 bp, Artificial Sequence
  Description of Artificial Sequence: Synthetic oligonucleotide
  Target: ATXN2; (+) strand; PAM type: NAAAAC; PAM sequence: GAAAAC
ttttcaaaaaataataaaaa

SEQ ID NO: 5820 - DNA, 20 bp, Artificial Sequence
  Description of Artificial Sequence: Synthetic oligonucleotide
  Target: ATXN2; (+) strand; PAM type: NAAAAC; PAM sequence: CAAAAC
aaaaaataataaaaagaaaa

SEQ ID NO: 5821 - DNA, 20 bp, Artificial Sequence
  Description of Artificial Sequence: Synthetic oligonucleotide
  Target: ATXN2; (+) strand; PAM type: NAAAAC; PAM sequence: GAAAAC
cacacacccccatgagaatt

SEQ ID NO: 5822 - DNA, 20 bp, Artificial Sequence
  Description of Artificial Sequence: Synthetic oligonucleotide
  Target: ATXN2; (+) strand; PAM type: NAAAAC; PAM sequence: AAAAAC
ccaccacacccggcccacac

SEQ ID NO: 5823 - DNA, 20 bp, Artificial Sequence
  Description of Artificial Sequence: Synthetic oligonucleotide
  Target: ATXN2; (+) strand; PAM type: NAAAAC; PAM sequence: AAAAAC
tctcaaaatagaagaaaaaa

SEQ ID NO: 5824 - DNA, 20 bp, Artificial Sequence
  Description of Artificial Sequence: Synthetic oligonucleotide
  Target: ATXN2; (+) strand; PAM type: NAAAAC; PAM sequence: GAAAAC
tcttcagttaaaattcaagg

SEQ ID NO: 5825 - DNA, 20 bp, Artificial Sequence
  Description of Artificial Sequence: Synthetic oligonucleotide
  Target: ATXN2; (+) strand; PAM type: NAAAAC; PAM sequence: AAAAAC
aaatcaactaaaaaataata

SEQ ID NO: 5826 - DNA, 20 bp, Artificial Sequence
  Description of Artificial Sequence: Synthetic oligonucleotide
  Target: ATXN2; (+) strand; PAM type: NAAAAC; PAM sequence: CAAAAC
acagcaaagcctgagtggtg

SEQ ID NO: 5827 - DNA, 20 bp, Artificial Sequence
  Description of Artificial Sequence: Synthetic oligonucleotide
  Target: ATXN2; (+) strand; PAM type: NAAAAC; PAM sequence: AAAAAC
atgaggtttgctgtatttaa

SEQ ID NO: 5828 - DNA, 20 bp, Artificial Sequence
  Description of Artificial Sequence: Synthetic oligonucleotide
  Target: ATXN2; (+) strand; PAM type: NAAAAC; PAM sequence: AAAAAC
tcagaaatgttcaagaatca

SEQ ID NO: 5829 - DNA, 20 bp, Artificial Sequence
  Description of Artificial Sequence: Synthetic oligonucleotide
  Target: ATXN2; (+) strand; PAM type: NAAAAC; PAM sequence: TAAAAC
ctgtttccctggcaaatatg

SEQ ID NO: 5830 - DNA, 20 bp, Artificial Sequence
  Description of Artificial Sequence: Synthetic oligonucleotide
  Target: ATXN2; (+) strand; PAM type: NAAAAC; PAM sequence: AAAAAC
attcggattcttttctaata

SEQ ID NO: 5831 - DNA, 20 bp, Artificial Sequence
  Description of Artificial Sequence: Synthetic oligonucleotide
  Target: ATXN2; (+) strand; PAM type: NAAAAC; PAM sequence: TAAAAC
acaagagaaaaaaataatac

SEQ ID NO: 5832 - DNA, 20 bp, Artificial Sequence
  Description of Artificial Sequence: Synthetic oligonucleotide
  Target: ATXN2; (+) strand; PAM type: NAAAAC; PAM sequence: TAAAAC
acaatcatattccactgctt

SEQ ID NO: 5833 - DNA, 20 bp, Artificial Sequence
  Description of Artificial Sequence: Synthetic oligonucleotide
  Target: ATXN2; (+) strand; PAM type: NAAAAC; PAM sequence: TAAAAC
atacattcactggtcatttt

SEQ ID NO: 5834 - DNA, 20 bp, Artificial Sequence
  Description of Artificial Sequence: Synthetic oligonucleotide
  Target: ATXN2; (+) strand; PAM type: NAAAAC; PAM sequence: AAAAAC
atcattttgtcaatttctac

SEQ ID NO: 5835 - DNA, 20 bp, Artificial Sequence
  Description of Artificial Sequence: Synthetic oligonucleotide
  Target: ATXN2; (+) strand; PAM type: NAAAAC; PAM sequence: CAAAAC
cgtgagccaacgtgcccggc

SEQ ID NO: 5836 - DNA, 20 bp, Artificial Sequence
  Description of Artificial Sequence: Synthetic oligonucleotide
  Target: ATXN2; (+) strand; PAM type: NAAAAC; PAM sequence: TAAAAC
tctatatactctaaaaatta

SEQ ID NO: 5837 - DNA, 20 bp, Artificial Sequence
  Description of Artificial Sequence: Synthetic oligonucleotide
  Target: ATXN2; (+) strand; PAM type: NAAAAC; PAM sequence: TAAAAC
aacacaacagcacaccagaa

SEQ ID NO: 5838 - DNA, 20 bp, Artificial Sequence
  Description of Artificial Sequence: Synthetic oligonucleotide
  Target: ATXN2; (+) strand; PAM type: NAAAAC; PAM sequence: AAAAAC
caagagcgagactctgtctc

SEQ ID NO: 5839 - DNA, 20 bp, Artificial Sequence
  Description of Artificial Sequence: Synthetic oligonucleotide
  Target: ATXN2; (+) strand; PAM type: NAAAAC; PAM sequence: AAAAAC
cgagactctgtctcaaaaac

SEQ ID NO: 5840 - DNA, 20 bp, Artificial Sequence
  Description of Artificial Sequence: Synthetic oligonucleotide
  Target: ATXN2; (+) strand; PAM type: NAAAAC; PAM sequence: CAAAAC
ctctgtctcaaaaacaaaaa

SEQ ID NO: 5841 - DNA, 20 bp, Artificial Sequence
  Description of Artificial Sequence: Synthetic oligonucleotide
  Target: ATXN2; (+) strand; PAM type: NAAAAC; PAM sequence: CAAAAC
tctcaaaaacaaaaacaaaa

SEQ ID NO: 5842 - DNA, 20 bp, Artificial Sequence
  Description of Artificial Sequence: Synthetic oligonucleotide
  Target: ATXN2; (+) strand; PAM type: NAAAAC; PAM sequence: TAAAAC
ggcttaaaaatcctctctac

SEQ ID NO: 5843 - DNA, 20 bp, Artificial Sequence
  Description of Artificial Sequence: Synthetic oligonucleotide
  Target: ATXN2; (+) strand; PAM type: NAAAAC; PAM sequence: CAAAAC
aactctatggctacagccat

SEQ ID NO: 5844 - DNA, 20 bp, Artificial Sequence
  Description of Artificial Sequence: Synthetic oligonucleotide
  Target: ATXN2; (+) strand; PAM type: NAAAAC; PAM sequence: GAAAAC
agttgagttggagtaaagag

SEQ ID NO: 5845 - DNA, 20 bp, Artificial Sequence
  Description of Artificial Sequence: Synthetic oligonucleotide
  Target: ATXN2; (+) strand; PAM type: NAAAAC; PAM sequence: AAAAAC
aatggatggaaaatcaagta

SEQ ID NO: 5846 - DNA, 20 bp, Artificial Sequence
  Description of Artificial Sequence: Synthetic oligonucleotide
  Target: ATXN2; (+) strand; PAM type: NAAAAC; PAM sequence: CAAAAC
tccagcctgggcgacaagag

SEQ ID NO: 5847 - DNA, 20 bp, Artificial Sequence
  Description of Artificial Sequence: Synthetic oligonucleotide
  Target: ATXN2; (+) strand; PAM type: NAAAAC; PAM sequence: GAAAAC
gagcaaaactccgtcccaag

SEQ ID NO: 5848 - DNA, 20 bp, Artificial Sequence
  Description of Artificial Sequence: Synthetic oligonucleotide
  Target: ATXN2; (+) strand; PAM type: NAAAAC; PAM sequence: AAAAAC
aaagattaaaaaaaaaaaaa

SEQ ID NO: 5849 - DNA, 20 bp, Artificial Sequence
  Description of Artificial Sequence: Synthetic oligonucleotide
  Target: ATXN2; (+) strand; PAM type: NAAAAC; PAM sequence: TAAAAC
aatcagcctggccaacatgg

SEQ ID NO: 5850 - DNA, 20 bp, Artificial Sequence
  Description of Artificial Sequence: Synthetic oligonucleotide
  Target: ATXN2; (+) strand; PAM type: NAAAAC; PAM sequence: CAAAAC
gacagagcaagactctgtct

SEQ ID NO: 5851 - DNA, 20 bp, Artificial Sequence
  Description of Artificial Sequence: Synthetic oligonucleotide
  Target: ATXN2; (+) strand; PAM type: NAAAAC; PAM sequence: AAAAAC
attcatccacttctattata

SEQ ID NO: 5852 - DNA, 20 bp, Artificial Sequence
  Description of Artificial Sequence: Synthetic oligonucleotide
  Target: ATXN2; (+) strand; PAM type: NAAAAC; PAM sequence: AAAAAC
ctagaagtgagaacattttt

SEQ ID NO: 5853 - DNA, 20 bp, Artificial Sequence
  Description of Artificial Sequence: Synthetic oligonucleotide
  Target: ATXN2; (+) strand; PAM type: NAAAAC; PAM sequence: GAAAAC
gccttaattttgttattaag

SEQ ID NO: 5854 - DNA, 20 bp, Artificial Sequence
  Description of Artificial Sequence: Synthetic oligonucleotide
  Target: ATXN2; (+) strand; PAM type: NAAAAC; PAM sequence: GAAAAC
atagtggatgtcctcatcaa

SEQ ID NO: 5855 - DNA, 20 bp, Artificial Sequence
  Description of Artificial Sequence: Synthetic oligonucleotide
  Target: ATXN2; (+) strand; PAM type: NAAAAC; PAM sequence: AAAAAC
gggaaatatcaattcatcat

SEQ ID NO: 5856 - DNA, 20 bp, Artificial Sequence
  Description of Artificial Sequence: Synthetic oligonucleotide
  Target: ATXN2; (+) strand; PAM type: NAAAAC; PAM sequence: AAAAAC
aaggacatttgagaagattc

SEQ ID NO: 5857 - DNA, 20 bp, Artificial Sequence
  Description of Artificial Sequence: Synthetic oligonucleotide
  Target: ATXN2; (+) strand; PAM type: NAAAAC; PAM sequence: AAAAAC
agaagaatcagcccaacaat

SEQ ID NO: 5858 - DNA, 20 bp, Artificial Sequence
  Description of Artificial Sequence: Synthetic oligonucleotide
  Target: ATXN2; (+) strand; PAM type: NAAAAC; PAM sequence: CAAAAC
cataatcgcttttaaattct

SEQ ID NO: 5859 - DNA, 20 bp, Artificial Sequence
  Description of Artificial Sequence: Synthetic oligonucleotide
  Target: ATXN2; (+) strand; PAM type: NAAAAC; PAM sequence: CAAAAC
atcagtagcattcttgacca

SEQ ID NO: 5860 - DNA, 20 bp, Artificial Sequence
  Description of Artificial Sequence: Synthetic oligonucleotide
  Target: ATXN2; (+) strand; PAM type: NAAAAC; PAM sequence: AAAAAC
ctaattttttaagagatcac

SEQ ID NO: 5861 - DNA, 20 bp, Artificial Sequence
  Description of Artificial Sequence: Synthetic oligonucleotide
  Target: ATXN2; (+) strand; PAM type: NAAAAC; PAM sequence: CAAAAC
atgaggcatatttaggaaat

SEQ ID NO: 5862 - DNA, 20 bp, Artificial Sequence
  Description of Artificial Sequence: Synthetic oligonucleotide
  Target: ATXN2; (+) strand; PAM type: NAAAAC; PAM sequence: AAAAAC
taccaaatcacactaaaatg

SEQ ID NO: 5863 - DNA, 20 bp, Artificial Sequence
  Description of Artificial Sequence: Synthetic oligonucleotide
  Target: ATXN2; (+) strand; PAM type: NAAAAC; PAM sequence: AAAAAC
aataataatttttaagagga

SEQ ID NO: 5864 - DNA, 20 bp, Artificial Sequence
  Description of Artificial Sequence: Synthetic oligonucleotide
  Target: ATXN2; (+) strand; PAM type: NAAAAC; PAM sequence: AAAAAC
aaatcattcaaagtggcttt

SEQ ID NO: 5865 - DNA, 20 bp, Artificial Sequence
  Description of Artificial Sequence: Synthetic oligonucleotide
  Target: ATXN2; (+) strand; PAM type: NAAAAC; PAM sequence: TAAAAC
aagtggctttaaaaactagg

SEQ ID NO: 5866 - DNA, 20 bp, Artificial Sequence
  Description of Artificial Sequence: Synthetic oligonucleotide
  Target: ATXN2; (+) strand; PAM type: NAAAAC; PAM sequence: AAAAAC
accttcggactgtaagtttt

SEQ ID NO: 5867 - DNA, 20 bp, Artificial Sequence
  Description of Artificial Sequence: Synthetic oligonucleotide
  Target: ATXN2; (+) strand; PAM type: NAAAAC; PAM sequence: AAAAAC
tacttcacatttggagccct

SEQ ID NO: 5868 - DNA, 20 bp, Artificial Sequence
  Description of Artificial Sequence: Synthetic oligonucleotide
  Target: ATXN2; (+) strand; PAM type: NAAAAC; PAM sequence: CAAAAC
caatattaggtattcactaa

SEQ ID NO: 5869 - DNA, 20 bp, Artificial Sequence
  Description of Artificial Sequence: Synthetic oligonucleotide
  Target: ATXN2; (+) strand; PAM type: NAAAAC; PAM sequence: CAAAAC
acaaaacaataaaaaaattt

SEQ ID NO: 5870 - DNA, 20 bp, Artificial Sequence
  Description of Artificial Sequence: Synthetic oligonucleotide
  Target: ATXN2; (+) strand; PAM type: NAAAAC; PAM sequence: AAAAAC
gttttaggaataatgacaag

SEQ ID NO: 5871 - DNA, 20 bp, Artificial Sequence
  Description of Artificial Sequence: Synthetic oligonucleotide
  Target: ATXN2; (+) strand; PAM type: NAAAAC; PAM sequence: AAAAAC
tctggaatattaaaaaaaaa

SEQ ID NO: 5872 - DNA, 20 bp, Artificial Sequence
  Description of Artificial Sequence: Synthetic oligonucleotide
  Target: ATXN2; (+) strand; PAM type: NAAAAC; PAM sequence: TAAAAC
cactgattgtatgcaattgt

SEQ ID NO: 5873 - DNA, 20 bp, Artificial Sequence
  Description of Artificial Sequence: Synthetic oligonucleotide
  Target: ATXN2; (+) strand; PAM type: NAAAAC; PAM sequence: TAAAAC
gtatatcttcctgattcttg

SEQ ID NO: 5874 - DNA, 20 bp, Artificial Sequence
  Description of Artificial Sequence: Synthetic oligonucleotide
  Target: ATXN2; (+) strand; PAM type: NAAAAC; PAM sequence: AAAAAC
attttatacagagtcattaa

SEQ ID NO: 5875 - DNA, 20 bp, Artificial Sequence
  Description of Artificial Sequence: Synthetic oligonucleotide
  Target: ATXN2; (+) strand; PAM type: NAAAAC; PAM sequence: AAAAAC
aaaatagcctactggaagaa

SEQ ID NO: 5876 - DNA, 20 bp, Artificial Sequence
  Description of Artificial Sequence: Synthetic oligonucleotide
  Target: ATXN2; (+) strand; PAM type: NAAAAC; PAM sequence: CAAAAC
tataaagagctattcagaag

SEQ ID NO: 5877 - DNA, 20 bp, Artificial Sequence
  Description of Artificial Sequence: Synthetic oligonucleotide
  Target: ATXN2; (+) strand; PAM type: NAAAAC; PAM sequence: AAAAAC
ttctcccccatctataaaag

SEQ ID NO: 5878 - DNA, 20 bp, Artificial Sequence
  Description of Artificial Sequence: Synthetic oligonucleotide
  Target: ATXN2; (+) strand; PAM type: NAAAAC; PAM sequence: AAAAAC
tcaaaaaaaaaaaaagaaag

SEQ ID NO: 5879 - DNA, 20 bp, Artificial Sequence
  Description of Artificial Sequence: Synthetic oligonucleotide
  Target: ATXN2; (+) strand; PAM type: NAAAAC; PAM sequence: AAAAAC
gattacaactgcagaaaaaa

SEQ ID NO: 5880 - DNA, 20 bp, Artificial Sequence
  Description of Artificial Sequence: Synthetic oligonucleotide
  Target: ATXN2; (+) strand; PAM type: NAAAAC; PAM sequence: AAAAAC
taggccccttagaataatta

SEQ ID NO: 5881 - DNA, 20 bp, Artificial Sequence
  Description of Artificial Sequence: Synthetic oligonucleotide
  Target: ATXN2; (+) strand; PAM type: NAAAAC; PAM sequence: CAAAAC
acaacactcaagccaaaatt

SEQ ID NO: 5882 - DNA, 20 bp, Artificial Sequence
  Description of Artificial Sequence: Synthetic oligonucleotide
  Target: ATXN2; (+) strand; PAM type: NAAAAC; PAM sequence: GAAAAC
tcactttcttctctcatcca

SEQ ID NO: 5883 - DNA, 20 bp, Artificial Sequence
  Description of Artificial Sequence: Synthetic oligonucleotide
  Target: ATXN2; (+) strand; PAM type: NAAAAC; PAM sequence: CAAAAC
atcttttatagatcttacta

SEQ ID NO: 5884 - DNA, 20 bp, Artificial Sequence
  Description of Artificial Sequence: Synthetic oligonucleotide
  Target: ATXN2; (+) strand; PAM type: NAAAAC; PAM sequence: CAAAAC
gctgctgagatgccaagtta

SEQ ID NO: 5885 - DNA, 20 bp, Artificial Sequence
  Description of Artificial Sequence: Synthetic oligonucleotide
  Target: ATXN2; (+) strand; PAM type: NAAAAC; PAM sequence: AAAAAC
caaagctatataaaagactt

SEQ ID NO: 5886 - DNA, 20 bp, Artificial Sequence
  Description of Artificial Sequence: Synthetic oligonucleotide
  Target: ATXN2; (+) strand; PAM type: NAAAAC; PAM sequence: AAAAAC
aggaaaatattatcatataa

SEQ ID NO: 5887 - DNA, 20 bp, Artificial Sequence
  Description of Artificial Sequence: Synthetic oligonucleotide
  Target: ATXN2; (+) strand; PAM type: NAAAAC; PAM sequence: CAAAAC
attagatagatcaggtttaa

SEQ ID NO: 5888 - DNA, 20 bp, Artificial Sequence
  Description of Artificial Sequence: Synthetic oligonucleotide
  Target: ATXN2; (+) strand; PAM type: NAAAAC; PAM sequence: CAAAAC
gatcagtctgggcaacaaag

SEQ ID NO: 5889 - DNA, 20 bp, Artificial Sequence
  Description of Artificial Sequence: Synthetic oligonucleotide
  Target: ATXN2; (+) strand; PAM type: NAAAAC; PAM sequence: AAAAAC
ccctgtttctacaaaaaata

SEQ ID NO: 5890 - DNA, 20 bp, Artificial Sequence
  Description of Artificial Sequence: Synthetic oligonucleotide
  Target: ATXN2; (+) strand; PAM type: NAAAAC; PAM sequence: CAAAAC
ctccagcattggtgacagag

SEQ ID NO: 5891 - DNA, 20 bp, Artificial Sequence
  Description of Artificial Sequence: Synthetic oligonucleotide
  Target: ATXN2; (+) strand; PAM type: NAAAAC; PAM sequence: AAAAAC
acaaataaatcacatgggac

SEQ ID NO: 5892 - DNA, 20 bp, Artificial Sequence
  Description of Artificial Sequence: Synthetic oligonucleotide
  Target: ATXN2; (+) strand; PAM type: NAAAAC; PAM sequence: AAAAAC
gacagagcaagactatctca

SEQ ID NO: 5893 - DNA, 20 bp, Artificial Sequence
  Description of Artificial Sequence: Synthetic oligonucleotide
  Target: ATXN2; (+) strand; PAM type: NAAAAC; PAM sequence: AAAAAC
atctcaaaaaacaaaaaaaa

SEQ ID NO: 5894 - DNA, 20 bp, Artificial Sequence
  Description of Artificial Sequence: Synthetic oligonucleotide
  Target: ATXN2; (+) strand; PAM type: NAAAAC; PAM sequence: AAAAAC
aaaaaaaaactacaaaaaaa

SEQ ID NO: 5895 - DNA, 20 bp, Artificial Sequence
  Description of Artificial Sequence: Synthetic oligonucleotide
  Target: ATXN2; (+) strand; PAM type: NAAAAC; PAM sequence: AAAAAC
gcaccataatttaggagaaa

SEQ ID NO: 5896 - DNA, 20 bp, Artificial Sequence
  Description of Artificial Sequence: Synthetic oligonucleotide
  Target: ATXN2; (+) strand; PAM type: NAAAAC; PAM sequence: GAAAAC
tttaggcccaaagctccacg

SEQ ID NO: 5897 - DNA, 20 bp, Artificial Sequence
  Description of Artificial Sequence: Synthetic oligonucleotide
  Target: ATXN2; (+) strand; PAM type: NAAAAC; PAM sequence: AAAAAC
agattcaatcactcgagatt

SEQ ID NO: 5898 - DNA, 20 bp, Artificial Sequence
  Description of Artificial Sequence: Synthetic oligonucleotide
  Target: ATXN2; (+) strand; PAM type: NAAAAC; PAM sequence: GAAAAC
tacccaaggctgcatcccaa

SEQ ID NO: 5899 - DNA, 20 bp, Artificial Sequence
  Description of Artificial Sequence: Synthetic oligonucleotide
  Target: ATXN2; (+) strand; PAM type: NAAAAC; PAM sequence: AAAAAC
cagttttcaacaacaaaaaa

SEQ ID NO: 5900 - DNA, 20 bp, Artificial Sequence
  Description of Artificial Sequence: Synthetic oligonucleotide
  Target: ATXN2; (+) strand; PAM type: NAAAAC; PAM sequence: GAAAAC
aacatgttttaagaacgaaa

SEQ ID NO: 5901 - DNA, 20 bp, Artificial Sequence
  Description of Artificial Sequence: Synthetic oligonucleotide
  Target: ATXN2; (+) strand; PAM type: NAAAAC; PAM sequence: AAAAAC
cccatctctactaaaaatac

SEQ ID NO: 5902 - DNA, 20 bp, Artificial Sequence
  Description of Artificial Sequence: Synthetic oligonucleotide
  Target: ATXN2; (+) strand; PAM type: NAAAAC; PAM sequence: TAAAAC
tggtgaaactccacctctac

SEQ ID NO: 5903 - DNA, 20 bp, Artificial Sequence
  Description of Artificial Sequence: Synthetic oligonucleotide
  Target: ATXN2; (+) strand; PAM type: NAAAAC; PAM sequence: AAAAAC
ccatctctaaaatagtttta

SEQ ID NO: 5904 - DNA, 20 bp, Artificial Sequence
  Description of Artificial Sequence: Synthetic oligonucleotide
  Target: ATXN2; (+) strand; PAM type: NAAAAC; PAM sequence: AAAAAC
ttctgatatcatgcaatgag

SEQ ID NO: 5905 - DNA, 20 bp, Artificial Sequence
  Description of Artificial Sequence: Synthetic oligonucleotide
  Target: ATXN2; (+) strand; PAM type: NAAAAC; PAM sequence: CAAAAC
ggtcatagccccacattaga

SEQ ID NO: 5906 - DNA, 20 bp, Artificial Sequence
  Description of Artificial Sequence: Synthetic oligonucleotide
  Target: ATXN2; (+) strand; PAM type: NAAAAC; PAM sequence: GAAAAC
tcaggaactcttggacaaat

SEQ ID NO: 5907 - DNA, 20 bp, Artificial Sequence
  Description of Artificial Sequence: Synthetic oligonucleotide
  Target: ATXN2; (+) strand; PAM type: NAAAAC; PAM sequence: TAAAAC
gaaagaaaaaaaaagaaagt

SEQ ID NO: 5908 - DNA, 20 bp, Artificial Sequence
  Description of Artificial Sequence: Synthetic oligonucleotide
  Target: ATXN2; (+) strand; PAM type: NAAAAC; PAM sequence: AAAAAC
tcctcacactgaagaaaaaa

SEQ ID NO: 5909 - DNA, 20 bp, Artificial Sequence
  Description of Artificial Sequence: Synthetic oligonucleotide
  Target: ATXN2; (+) strand; PAM type: NAAAAC; PAM sequence: AAAAAC
gttacaagaccctgtctttt

SEQ ID NO: 5910 - DNA, 20 bp, Artificial Sequence
  Description of Artificial Sequence: Synthetic oligonucleotide
  Target: ATXN2; (+) strand; PAM type: NAAAAC; PAM sequence: GAAAAC
ggcatttctggtaaagactg

SEQ ID NO: 5911 - DNA, 20 bp, Artificial Sequence
  Description of Artificial Sequence: Synthetic oligonucleotide
  Target: ATXN2; (+) strand; PAM type: NAAAAC; PAM sequence: AAAAAC
ttgatccacctactgaaaaa

SEQ ID NO: 5912 - DNA, 20 bp, Artificial Sequence
  Description of Artificial Sequence: Synthetic oligonucleotide
  Target: ATXN2; (+) strand; PAM type: NAAAAC; PAM sequence: AAAAAC
gcctgggtgacaagagcaaa

SEQ ID NO: 5913 - DNA, 20 bp, Artificial Sequence
  Description of Artificial Sequence: Synthetic oligonucleotide
  Target: ATXN2; (+) strand; PAM type: NAAAAC; PAM sequence: GAAAAC
ctctgatggcaaaataaatt

SEQ ID NO: 5914 - DNA, 20 bp, Artificial Sequence
  Description of Artificial Sequence: Synthetic oligonucleotide
  Target: ATXN2; (+) strand; PAM type: NAAAAC; PAM sequence: TAAAAC
ccatgagcatgggaggaggt

SEQ ID NO: 5915 - DNA, 20 bp, Artificial Sequence
  Description of Artificial Sequence: Synthetic oligonucleotide
  Target: ATXN2; (+) strand; PAM type: NAAAAC; PAM sequence: TAAAAC
gaattgctgcaatctcatga

SEQ ID NO: 5916 - DNA, 20 bp, Artificial Sequence
  Description of Artificial Sequence: Synthetic oligonucleotide
  Target: ATXN2; (+) strand; PAM type: NAAAAC; PAM sequence: CAAAAC
tgtgttacttaattaacaag

SEQ ID NO: 5917 - DNA, 20 bp, Artificial Sequence
  Description of Artificial Sequence: Synthetic oligonucleotide
  Target: ATXN2; (+) strand; PAM type: NAAAAC; PAM sequence: AAAAAC
ctaacacatcctgataactg

SEQ ID NO: 5918 - DNA, 20 bp, Artificial Sequence
  Description of Artificial Sequence: Synthetic oligonucleotide
  Target: ATXN2; (+) strand; PAM type: NAAAAC; PAM sequence: AAAAAC
acacagtgagactctgtctc

SEQ ID NO: 5919 - DNA, 20 bp, Artificial Sequence
  Description of Artificial Sequence: Synthetic oligonucleotide
  Target: ATXN2; (+) strand; PAM type: NAAAAC; PAM sequence: AAAAAC
gagactctgtctcaaaaaca

SEQ ID NO: 5920 - DNA, 20 bp, Artificial Sequence
  Description of Artificial Sequence: Synthetic oligonucleotide
  Target: ATXN2; (+) strand; PAM type: NAAAAC; PAM sequence: CAAAAC
tctgtctcaaaaacaaaaaa

SEQ ID NO: 5921 - DNA, 20 bp, Artificial Sequence
  Description of Artificial Sequence: Synthetic oligonucleotide
  Target: ATXN2; (+) strand; PAM type: NAAAAC; PAM sequence: AAAAAC
acaaaaaacaaaacaaaaaa

SEQ ID NO: 5922 - DNA, 20 bp, Artificial Sequence
  Description of Artificial Sequence: Synthetic oligonucleotide
  Target: ATXN2; (+) strand; PAM type: NAAAAC; PAM sequence: AAAAAC
aaaaaaaaaaactggggaga

SEQ ID NO: 5923 - DNA, 20 bp, Artificial Sequence
  Description of Artificial Sequence: Synthetic oligonucleotide
  Target: ATXN2; (+) strand; PAM type: NAAAAC; PAM sequence: TAAAAC
tacctctaacccccttccag

SEQ ID NO: 5924 - DNA, 20 bp, Artificial Sequence
  Description of Artificial Sequence: Synthetic oligonucleotide
  Target: ATXN2; (+) strand; PAM type: NAAAAC; PAM sequence: CAAAAC
atcatctaggatcattgttt

SEQ ID NO: 5925 - DNA, 20 bp, Artificial Sequence
  Description of Artificial Sequence: Synthetic oligonucleotide
  Target: ATXN2; (+) strand; PAM type: NAAAAC; PAM sequence: TAAAAC
tccatacagatcgcatagct

SEQ ID NO: 5926 - DNA, 20 bp, Artificial Sequence
  Description of Artificial Sequence: Synthetic oligonucleotide
  Target: ATXN2; (+) strand; PAM type: NAAAAC; PAM sequence: TAAAAC
gacagagcgagaccctgtct

SEQ ID NO: 5927 - DNA, 20 bp, Artificial Sequence
  Description of Artificial Sequence: Synthetic oligonucleotide
  Target: ATXN2; (+) strand; PAM type: NAAAAC; PAM sequence: CAAAAC
ttatccctttctggaggcca

SEQ ID NO: 5928 - DNA, 20 bp, Artificial Sequence
  Description of Artificial Sequence: Synthetic oligonucleotide
  Target: ATXN2; (+) strand; PAM type: NAAAAC; PAM sequence: AAAAAC
acgttgaaattttacatttt

SEQ ID NO: 5929 - DNA, 20 bp, Artificial Sequence
  Description of Artificial Sequence: Synthetic oligonucleotide
  Target: ATXN2; (+) strand; PAM type: NAAAAC; PAM sequence: GAAAAC
cctctcttcatggccttact

SEQ ID NO: 5930 - DNA, 20 bp, Artificial Sequence
  Description of Artificial Sequence: Synthetic oligonucleotide
  Target: ATXN2; (+) strand; PAM type: NAAAAC; PAM sequence: CAAAAC
gtaactttaggcattctcca

SEQ ID NO: 5931 - DNA, 20 bp, Artificial Sequence
  Description of Artificial Sequence: Synthetic oligonucleotide
  Target: ATXN2; (+) strand; PAM type: NAAAAC; PAM sequence: GAAAAC
gggcttttaaaatatgtaaa

SEQ ID NO: 5932 - DNA, 20 bp, Artificial Sequence
  Description of Artificial Sequence: Synthetic oligonucleotide
  Target: ATXN2; (+) strand; PAM type: NAAAAC; PAM sequence: CAAAAC
tccagcctgggtgacaagag

SEQ ID NO: 5933 - DNA, 20 bp, Artificial Sequence
  Description of Artificial Sequence: Synthetic oligonucleotide
  Target: ATXN2; (+) strand; PAM type: NAAAAC; PAM sequence: AAAAAC
aaaactccatctcaaaaaaa

SEQ ID NO: 5934 - DNA, 20 bp, Artificial Sequence
  Description of Artificial Sequence: Synthetic oligonucleotide
  Target: ATXN2; (+) strand; PAM type: NAAAAC; PAM sequence: GAAAAC
tgccaaaatagggagctgca

SEQ ID NO: 5935 - DNA, 20 bp, Artificial Sequence
  Description of Artificial Sequence: Synthetic oligonucleotide
  Target: ATXN2; (+) strand; PAM type: NAAAAC; PAM sequence: TAAAAC
atccatcacttcctcatctg

SEQ ID NO: 5936 - DNA, 20 bp, Artificial Sequence
  Description of Artificial Sequence: Synthetic oligonucleotide
  Target: ATXN2; (+) strand; PAM type: NAAAAC; PAM sequence: TAAAAC
caactactactgcttaataa

SEQ ID NO: 5937 - DNA, 20 bp, Artificial Sequence
  Description of Artificial Sequence: Synthetic oligonucleotide
  Target: ATXN2; (+) strand; PAM type: NAAAAC; PAM sequence: CAAAAC
actaagcatacaaagttgta

SEQ ID NO: 5938 - DNA, 20 bp, Artificial Sequence
  Description of Artificial Sequence: Synthetic oligonucleotide
  Target: ATXN2; (+) strand; PAM type: NAAAAC; PAM sequence: CAAAAC
gagcattggtcaacagttca

SEQ ID NO: 5939 - DNA, 20 bp, Artificial Sequence
  Description of Artificial Sequence: Synthetic oligonucleotide
  Target: ATXN2; (+) strand; PAM type: NAAAAC; PAM sequence: AAAAAC
tagagcgagactccatctca

SEQ ID NO: 5940 - DNA, 20 bp, Artificial Sequence
  Description of Artificial Sequence: Synthetic oligonucleotide
  Target: ATXN2; (+) strand; PAM type: NAAAAC; PAM sequence: CAAAAC
agatcaccgaaaaaatttct

SEQ ID NO: 5941 - DNA, 20 bp, Artificial Sequence
  Description of Artificial Sequence: Synthetic oligonucleotide
  Target: ATXN2; (+) strand; PAM type: NAAAAC; PAM sequence: TAAAAC
ggcattagggaaatgcaaat

SEQ ID NO: 5942 - DNA, 20 bp, Artificial Sequence
  Description of Artificial Sequence: Synthetic oligonucleotide
  Target: ATXN2; (+) strand; PAM type: NAAAAC; PAM sequence: CAAAAC
ggaaaaataaacacttgcca

SEQ ID NO: 5943 - DNA, 20 bp, Artificial Sequence
  Description of Artificial Sequence: Synthetic oligonucleotide
  Target: ATXN2; (+) strand; PAM type: NAAAAC; PAM sequence: CAAAAC
aataaaatcatatgttcaca

SEQ ID NO: 5944 - DNA, 20 bp, Artificial Sequence
  Description of Artificial Sequence: Synthetic oligonucleotide
  Target: ATXN2; (+) strand; PAM type: NAAAAC; PAM sequence: CAAAAC
ccagctttatttttaatagc

SEQ ID NO: 5945 - DNA, 20 bp, Artificial Sequence
  Description of Artificial Sequence: Synthetic oligonucleotide
  Target: ATXN2; (+) strand; PAM type: NAAAAC; PAM sequence: CAAAAC
accccatctctactaaaata

SEQ ID NO: 5946 - DNA, 20 bp, Artificial Sequence
  Description of Artificial Sequence: Synthetic oligonucleotide
  Target: ATXN2; (+) strand; PAM type: NAAAAC; PAM sequence: AAAAAC
cgtaaatagaatgagtacta

SEQ ID NO: 5947 - DNA, 20 bp, Artificial Sequence
  Description of Artificial Sequence: Synthetic oligonucleotide
  Target: ATXN2; (+) strand; PAM type: NAAAAC; PAM sequence: AAAAAC
ttctggtttaaaaaaaaaaa

SEQ ID NO: 5948 - DNA, 20 bp, Artificial Sequence
  Description of Artificial Sequence: Synthetic oligonucleotide
  Target: ATXN2; (+) strand; PAM type: NAAAAC; PAM sequence: CAAAAC
agtacttgagggcagaagtt

SEQ ID NO: 5949 - DNA, 20 bp, Artificial Sequence
  Description of Artificial Sequence: Synthetic oligonucleotide
  Target: ATXN2; (+) strand; PAM type: NAAAAC; PAM sequence: AAAAAC
atctcaaaaaataaatacat

SEQ ID NO: 5950 - DNA, 20 bp, Artificial Sequence
  Description of Artificial Sequence: Synthetic oligonucleotide
  Target: ATXN2; (+) strand; PAM type: NAAAAC; PAM sequence: CAAAAC
gggatacaatcaatagtgaa

SEQ ID NO: 5951 - DNA, 20 bp, Artificial Sequence
  Description of Artificial Sequence: Synthetic oligonucleotide
  Target: ATXN2; (+) strand; PAM type: NAAAAC; PAM sequence: GAAAAC
accagcctgaacaacatggc

SEQ ID NO: 5952 - DNA, 20 bp, Artificial Sequence
  Description of Artificial Sequence: Synthetic oligonucleotide
  Target: ATXN2; (+) strand; PAM type: NAAAAC; PAM sequence: AAAAAC
caaaaaaaaaaaaaaaaaaa

SEQ ID NO: 5953 - DNA, 20 bp, Artificial Sequence
  Description of Artificial Sequence: Synthetic oligonucleotide
  Target: ATXN2; (+) strand; PAM type: NAAAAC; PAM sequence: AAAAAC
tttaatacacaattatacta

SEQ ID NO: 5954 - DNA, 20 bp, Artificial Sequence
  Description of Artificial Sequence: Synthetic oligonucleotide
  Target: ATXN2; (+) strand; PAM type: NAAAAC; PAM sequence: CAAAAC
ccctagcttagatataacct

SEQ ID NO: 5955 - DNA, 20 bp, Artificial Sequence
  Description of Artificial Sequence: Synthetic oligonucleotide
  Target: ATXN2; (+) strand; PAM type: NAAAAC; PAM sequence: CAAAAC
gactagcctgaacaacatgg

SEQ ID NO: 5956 - DNA, 20 bp, Artificial Sequence
  Description of Artificial Sequence: Synthetic oligonucleotide
  Target: ATXN2; (+) strand; PAM type: NAAAAC; PAM sequence: TAAAAC
cattaactcaaaccaaagct

SEQ ID NO: 5957 - DNA, 20 bp, Artificial Sequence
  Description of Artificial Sequence: Synthetic oligonucleotide
  Target: ATXN2; (+) strand; PAM type: NAAAAC; PAM sequence: TAAAAC
tggagaaaccccatctctac

SEQ ID NO: 5958 - DNA, 20 bp, Artificial Sequence
  Description of Artificial Sequence: Synthetic oligonucleotide
  Target: ATXN2; (+) strand; PAM type: NAAAAC; PAM sequence: AAAAAC
taagagcgaaactccatctc

SEQ ID NO: 5959 - DNA, 20 bp, Artificial Sequence
  Description of Artificial Sequence: Synthetic oligonucleotide
  Target: ATXN2; (+) strand; PAM type: NAAAAC; PAM sequence: TAAAAC
taactaactacactgtgcta

SEQ ID NO: 5960 - DNA, 20 bp, Artificial Sequence
  Description of Artificial Sequence: Synthetic oligonucleotide
  Target: ATXN2; (+) strand; PAM type: NAAAAC; PAM sequence: CAAAAC
tacagctataaacttacagt

SEQ ID NO: 5961 - DNA, 20 bp, Artificial Sequence
  Description of Artificial Sequence: Synthetic oligonucleotide
  Target: ATXN2; (+) strand; PAM type: NAAAAC; PAM sequence: CAAAAC
gaccggcctggccaatatgg

SEQ ID NO: 5962 - DNA, 20 bp, Artificial Sequence
  Description of Artificial Sequence: Synthetic oligonucleotide
  Target: ATXN2; (+) strand; PAM type: NAAAAC; PAM sequence: CAAAAC
tccagcctgggtgacaagag

SEQ ID NO: 5963 - DNA, 20 bp, Artificial Sequence
  Description of Artificial Sequence: Synthetic oligonucleotide
  Target: ATXN2; (+) strand; PAM type: NAAAAC; PAM sequence: AAAAAC
aaaaaaaaaaaaaaaaaaaa

SEQ ID NO: 5964 - DNA, 20 bp, Artificial Sequence
  Description of Artificial Sequence: Synthetic oligonucleotide
  Target: ATXN2; (+) strand; PAM type: NAAAAC; PAM sequence: GAAAAC
ctgttaatatatctgcctct

SEQ ID NO: 5965 - DNA, 20 bp, Artificial Sequence
  Description of Artificial Sequence: Synthetic oligonucleotide
  Target: ATXN2; (+) strand; PAM type: NAAAAC; PAM sequence: CAAAAC
gaaaaatgcagtacttgttt

SEQ ID NO: 5966 - DNA, 20 bp, Artificial Sequence
  Description of Artificial Sequence: Synthetic oligonucleotide
  Target: ATXN2; (+) strand; PAM type: NAAAAC; PAM sequence: AAAAAC
ttcaaaacccgccctttata

SEQ ID NO: 5967 - DNA, 20 bp, Artificial Sequence
  Description of Artificial Sequence: Synthetic oligonucleotide
  Target: ATXN2; (+) strand; PAM type: NAAAAC; PAM sequence: AAAAAC
tgactttaaaaagcaatatg

SEQ ID NO: 5968 - DNA, 20 bp, Artificial Sequence
  Description of Artificial Sequence: Synthetic oligonucleotide
  Target: ATXN2; (+) strand; PAM type: NAAAAC; PAM sequence: GAAAAC
atgtaattaaagcactttgg

SEQ ID NO: 5969 - DNA, 20 bp, Artificial Sequence
  Description of Artificial Sequence: Synthetic oligonucleotide
  Target: ATXN2; (+) strand; PAM type: NAAAAC; PAM sequence: AAAAAC
aaaaaaaaggaaatttaaaa

SEQ ID NO: 5970 - DNA, 20 bp, Artificial Sequence
  Description of Artificial Sequence: Synthetic oligonucleotide
  Target: ATXN2; (+) strand; PAM type: NAAAAC; PAM sequence: CAAAAC
tgagttcaagatcaacatgg

SEQ ID NO: 5971 - DNA, 20 bp, Artificial Sequence
  Description of Artificial Sequence: Synthetic oligonucleotide
  Target: ATXN2; (+) strand; PAM type: NAAAAC; PAM sequence: AAAAAC
cacatctactgaaaatacaa

SEQ ID NO: 5972 - DNA, 20 bp, Artificial Sequence
  Description of Artificial Sequence: Synthetic oligonucleotide
  Target: ATXN2; (+) strand; PAM type: NAAAAC; PAM sequence: TAAAAC
taaataaataaataaataaa

SEQ ID NO: 5973 - DNA, 20 bp, Artificial Sequence
  Description of Artificial Sequence: Synthetic oligonucleotide
  Target: ATXN2; (+) strand; PAM type: NAAAAC; PAM sequence: AAAAAC
aaaaaaaaaaaaaaaaaaaa

SEQ ID NO: 5974 - DNA, 20 bp, Artificial Sequence
  Description of Artificial Sequence: Synthetic oligonucleotide
  Target: ATXN2; (+) strand; PAM type: NAAAAC; PAM sequence: AAAAAC
caaacaataataataattta

SEQ ID NO: 5975 - DNA, 20 bp, Artificial Sequence
  Description of Artificial Sequence: Synthetic oligonucleotide
  Target: ATXN2; (+) strand; PAM type: NAAAAC; PAM sequence: AAAAAC
aatctctgtccctacaaaat

SEQ ID NO: 5976 - DNA, 20 bp, Artificial Sequence
  Description of Artificial Sequence: Synthetic oligonucleotide
  Target: ATXN2; (+) strand; PAM type: NAAAAC; PAM sequence: TAAAAC
gaccagcctggccaacatga

SEQ ID NO: 5977 - DNA, 20 bp, Artificial Sequence
  Description of Artificial Sequence: Synthetic oligonucleotide
  Target: ATXN2; (+) strand; PAM type: NAAAAC; PAM sequence: CAAAAC
agtggctcatgctgtaatcc

SEQ ID NO: 5978 - DNA, 20 bp, Artificial Sequence
  Description of Artificial Sequence: Synthetic oligonucleotide
  Target: ATXN2; (+) strand; PAM type: NAAAAC; PAM sequence: AAAAAC
agtacagaaccacatacatt

SEQ ID NO: 5979 - DNA, 20 bp, Artificial Sequence
  Description of Artificial Sequence: Synthetic oligonucleotide
  Target: ATXN2; (+) strand; PAM type: NAAAAC; PAM sequence: TAAAAC
ctgtccgtgactgtattcca

SEQ ID NO: 5980 - DNA, 20 bp, Artificial Sequence
  Description of Artificial Sequence: Synthetic oligonucleotide
  Target: ATXN2; (+) strand; PAM type: NAAAAC; PAM sequence: AAAAAC
ctccatctaattaaaaaaaa

SEQ ID NO: 5981 - DNA, 20 bp, Artificial Sequence
  Description of Artificial Sequence: Synthetic oligonucleotide
  Target: ATXN2; (+) strand; PAM type: NAAAAC; PAM sequence: AAAAAC
atcatcccctgcccctatgg

SEQ ID NO: 5982 - DNA, 20 bp, Artificial Sequence
  Description of Artificial Sequence: Synthetic oligonucleotide
  Target: ATXN2; (+) strand; PAM type: NAAAAC; PAM sequence: CAAAAC
tatggaaaaaccatcttcca

SEQ ID NO: 5983 - DNA, 20 bp, Artificial Sequence
  Description of Artificial Sequence: Synthetic oligonucleotide
  Target: ATXN2; (+) strand; PAM type: NAAAAC; PAM sequence: CAAAAC
cactccagcctgggaaagag

SEQ ID NO: 5984 - DNA, 20 bp, Artificial Sequence
  Description of Artificial Sequence: Synthetic oligonucleotide
  Target: ATXN2; (+) strand; PAM type: NAAAAC; PAM sequence: AAAAAC
aaaactgtctcaaaaaaaaa

SEQ ID NO: 5985 - DNA, 20 bp, Artificial Sequence
  Description of Artificial Sequence: Synthetic oligonucleotide
  Target: ATXN2; (+) strand; PAM type: NAAAAC; PAM sequence: CAAAAC
ctccatatctactaaaaatg

SEQ ID NO: 5986 - DNA, 20 bp, Artificial Sequence
  Description of Artificial Sequence: Synthetic oligonucleotide
  Target: ATXN2; (+) strand; PAM type: NAAAAC; PAM sequence: AAAAAC
ggcgacagagactctgtctc

SEQ ID NO: 5987 - DNA, 20 bp, Artificial Sequence
  Description of Artificial Sequence: Synthetic oligonucleotide
  Target: ATXN2; (+) strand; PAM type: NAAAAC; PAM sequence: AAAAAC
tctgtctcaaaaacaaacaa

SEQ ID NO: 5988 - DNA, 20 bp, Artificial Sequence
  Description of Artificial Sequence: Synthetic oligonucleotide
  Target: ATXN2; (+) strand; PAM type: NAAAAC; PAM sequence: AAAAAC
gacccagatatcctttggaa

SEQ ID NO: 5989 - DNA, 20 bp, Artificial Sequence
  Description of Artificial Sequence: Synthetic oligonucleotide
  Target: ATXN2; (+) strand; PAM type: NAAAAC; PAM sequence: AAAAAC
atcctttggaaaaaaacaaa

SEQ ID NO: 5990 - DNA, 20 bp, Artificial Sequence
  Description of Artificial Sequence: Synthetic oligonucleotide
  Target: ATXN2; (+) strand; PAM type: NAAAAC; PAM sequence: CAAAAC
atcaaaatactatcactagt

SEQ ID NO: 5991 - DNA, 20 bp, Artificial Sequence
  Description of Artificial Sequence: Synthetic oligonucleotide
  Target: ATXN2; (+) strand; PAM type: NAAAAC; PAM sequence: TAAAAC
aattctagagaacaatcttc

SEQ ID NO: 5992 - DNA, 20 bp, Artificial Sequence
  Description of Artificial Sequence: Synthetic oligonucleotide
  Target: ATXN2; (+) strand; PAM type: NAAAAC; PAM sequence: AAAAAC
taaaattcgtttcaaagtaa

SEQ ID NO: 5993 - DNA, 20 bp, Artificial Sequence
  Description of Artificial Sequence: Synthetic oligonucleotide
  Target: ATXN2; (+) strand; PAM type: NAAAAC; PAM sequence: GAAAAC
aaaaaaaagaaaaagaaaaa

SEQ ID NO: 5994 - DNA, 20 bp, Artificial Sequence
  Description of Artificial Sequence: Synthetic oligonucleotide
  Target: ATXN2; (+) strand; PAM type: NAAAAC; PAM sequence: AAAAAC
tttctccacatacttgaaac

SEQ ID NO: 5995 - DNA, 20 bp, Artificial Sequence
  Description of Artificial Sequence: Synthetic oligonucleotide
  Target: ATXN2; (+) strand; PAM type: NAAAAC; PAM sequence: AAAAAC
aaaatacgtaagcccaaaag

SEQ ID NO: 5996 - DNA, 20 bp, Artificial Sequence
  Description of Artificial Sequence: Synthetic oligonucleotide
  Target: ATXN2; (+) strand; PAM type: NAAAAC; PAM sequence: CAAAAC
acgtaagcccaaaagaaaaa

SEQ ID NO: 5997 - DNA, 20 bp, Artificial Sequence
  Description of Artificial Sequence: Synthetic oligonucleotide
  Target: ATXN2; (+) strand; PAM type: NAAAAC; PAM sequence: AAAAAC
tttattcactgattcatccc

SEQ ID NO: 5998 - DNA, 20 bp, Artificial Sequence
  Description of Artificial Sequence: Synthetic oligonucleotide
  Target: ATXN2; (+) strand; PAM type: NAAAAC; PAM sequence: AAAAAC
tcataggctagcagctaata

SEQ ID NO: 5999 - DNA, 20 bp, Artificial Sequence
  Description of Artificial Sequence: Synthetic oligonucleotide
  Target: ATXN2; (+) strand; PAM type: NAAAAC; PAM sequence: CAAAAC
ataataatggttacaggttt

SEQ ID NO: 6000 - DNA, 20 bp, Artificial Sequence
  Description of Artificial Sequence: Synthetic oligonucleotide
  Target: ATXN2; (+) strand; PAM type: NAAAAC; PAM sequence: TAAAAC
cctgaagccctctgaactag

SEQ ID NO: 6001 - DNA, 20 bp, Artificial Sequence
  Description of Artificial Sequence: Synthetic oligonucleotide
  Target: ATXN2; (+) strand; PAM type: NAAAAC; PAM sequence: AAAAAC
caacaatagaatggttaagt

SEQ ID NO: 6002 - DNA, 20 bp, Artificial Sequence
  Description of Artificial Sequence: Synthetic oligonucleotide
  Target: ATXN2; (+) strand; PAM type: NAAAAC; PAM sequence: CAAAAC
cgacagagtgagattccatc

SEQ ID NO: 6003 - DNA, 20 bp, Artificial Sequence
  Description of Artificial Sequence: Synthetic oligonucleotide
  Target: ATXN2; (+) strand; PAM type: NAAAAC; PAM sequence: TAAAAC
tgtgattacattatctttcc

SEQ ID NO: 6004 - DNA, 20 bp, Artificial Sequence
  Description of Artificial Sequence: Synthetic oligonucleotide
  Target: ATXN2; (+) strand; PAM type: NAAAAC; PAM sequence: AAAAAC
aatcacttctgaaagtcatg

SEQ ID NO: 6005 - DNA, 20 bp, Artificial Sequence
  Description of Artificial Sequence: Synthetic oligonucleotide
  Target: ATXN2; (+) strand; PAM type: NAAAAC; PAM sequence: TAAAAC
attaacgatctgttcaagaa

SEQ ID NO: 6006 - DNA, 20 bp, Artificial Sequence
  Description of Artificial Sequence: Synthetic oligonucleotide
  Target: ATXN2; (+) strand; PAM type: NAAAAC; PAM sequence: TAAAAC
gaaaaaagaccttgtggtac

SEQ ID NO: 6007 - DNA, 20 bp, Artificial Sequence
  Description of Artificial Sequence: Synthetic oligonucleotide
  Target: ATXN2; (+) strand; PAM type: NAAAAC; PAM sequence: AAAAAC
ttcctaatacctaagaaagt

SEQ ID NO: 6008 - DNA, 20 bp, Artificial Sequence
  Description of Artificial Sequence: Synthetic oligonucleotide
  Target: ATXN2; (+) strand; PAM type: NAAAAC; PAM sequence: AAAAAC
tgaaggcagcagaattcctt

SEQ ID NO: 6009 - DNA, 20 bp, Artificial Sequence
  Description of Artificial Sequence: Synthetic oligonucleotide
  Target: ATXN2; (+) strand; PAM type: NAAAAC; PAM sequence: GAAAAC
tgaaaatgtgttttcaaaaa

SEQ ID NO: 6010 - DNA, 20 bp, Artificial Sequence
  Description of Artificial Sequence: Synthetic oligonucleotide
  Target: ATXN2; (+) strand; PAM type: NAAAAC; PAM sequence: GAAAAC
atggagggggacatgttccg

SEQ ID NO: 6011 - DNA, 20 bp, Artificial Sequence
  Description of Artificial Sequence: Synthetic oligonucleotide
  Target: ATXN2; (+) strand; PAM type: NAAAAC; PAM sequence: CAAAAC
gccgccgttgccgttgctac

SEQ ID NO: 6012 - DNA, 20 bp, Artificial Sequence
  Description of Artificial Sequence: Synthetic oligonucleotide
  Target: ATXN2; (+) strand; PAM type: NAAAAC; PAM sequence: GAAAAC
ccagccgcgcacagtcacca

SEQ ID NO: 6013 - DNA, 20 bp, Artificial Sequence
  Description of Artificial Sequence: Synthetic oligonucleotide
  Target: ATXN2; (+) strand; PAM type: NAAAAC; PAM sequence: CAAAAC
ggtagagacagagccgacct

SEQ ID NO: 6014 - DNA, 20 bp, Artificial Sequence
  Description of Artificial Sequence: Synthetic oligonucleotide
  Target: ATXN2; (+) strand; PAM type: NAAAAC; PAM sequence: CAAAAC
agtagatcaagggaccattg

SEQ ID NO: 6015 - DNA, 20 bp, Artificial Sequence
  Description of Artificial Sequence: Synthetic oligonucleotide
  Target: ATXN2; (+) strand; PAM type: NAAAAC; PAM sequence: AAAAAC
cctaaaggaaactggaacta

SEQ ID NO: 6016 - DNA, 20 bp, Artificial Sequence
  Description of Artificial Sequence: Synthetic oligonucleotide
  Target: ATXN2; (+) strand; PAM type: NAAAAC; PAM sequence: AAAAAC
ttaactcactaccattgaat

SEQ ID NO: 6017 - DNA, 20 bp, Artificial Sequence
  Description of Artificial Sequence: Synthetic oligonucleotide
  Target: ATXN2; (+) strand; PAM type: NAAAAC; PAM sequence: AAAAAC
agagagaccctgtctctatg

SEQ ID NO: 6018 - DNA, 20 bp, Artificial Sequence
  Description of Artificial Sequence: Synthetic oligonucleotide
  Target: ATXN2; (+) strand; PAM type: NAAAAC; PAM sequence: TAAAAC
cgttcagttaatagagttgc

SEQ ID NO: 6019 - DNA, 20 bp, Artificial Sequence
  Description of Artificial Sequence: Synthetic oligonucleotide
  Target: ATXN2; (+) strand; PAM type: NAAAAC; PAM sequence: TAAAAC
aatcctccccacctgaattt

SEQ ID NO: 6020 - DNA, 20 bp, Artificial Sequence
  Description of Artificial Sequence: Synthetic oligonucleotide
  Target: ATXN2; (-) strand; PAM type: NNAGAAW; PAM sequence: GGAGAAA
tctgaatcccagtgaggaag

SEQ ID NO: 6021 - DNA, 20 bp, Artificial Sequence
  Description of Artificial Sequence: Synthetic oligonucleotide
  Target: ATXN2; (-) strand; PAM type: NNAGAAW; PAM sequence: GGAGAAA
actacatctgtaaacaataa

SEQ ID NO: 6022 - DNA, 20 bp, Artificial Sequence
  Description of Artificial Sequence: Synthetic oligonucleotide
  Target: ATXN2; (-) strand; PAM type: NNAGAAW; PAM sequence: GTAGAAA
atgatccccccctcctcccc

SEQ ID NO: 6023 - DNA, 20 bp, Artificial Sequence
  Description of Artificial Sequence: Synthetic oligonucleotide
  Target: ATXN2; (-) strand; PAM type: NNAGAAW; PAM sequence: AAAGAAA
gttttgaacctgaatccttt

SEQ ID NO: 6024 - DNA, 20 bp, Artificial Sequence
  Description of Artificial Sequence: Synthetic oligonucleotide
  Target: ATXN2; (-) strand; PAM type: NNAGAAW; PAM sequence: CCAGAAT
cactgtaaagctgctgtaaa

SEQ ID NO: 6025 - DNA, 20 bp, Artificial Sequence
  Description of Artificial Sequence: Synthetic oligonucleotide
  Target: ATXN2; (-) strand; PAM type: NNAGAAW; PAM sequence: CTAGAAA
ccttgttgctgaaggattta

SEQ ID NO: 6026 - DNA, 20 bp, Artificial Sequence
  Description of Artificial Sequence: Synthetic oligonucleotide
  Target: ATXN2; (-) strand; PAM type: NNAGAAW; PAM sequence: AAAGAAA
ctccatctcaaaaaaaaaaa

SEQ ID NO: 6027 - DNA, 20 bp, Artificial Sequence
  Description of Artificial Sequence: Synthetic oligonucleotide
  Target: ATXN2; (-) strand; PAM type: NNAGAAW; PAM sequence: AGAGAAA
gcactccagcccggttgaca

SEQ ID NO: 6028 - DNA, 20 bp, Artificial Sequence
  Description of Artificial Sequence: Synthetic oligonucleotide
  Target: ATXN2; (-) strand; PAM type: NNAGAAW; PAM sequence: GCAGAAT
cagctacttgagaggtcgag

SEQ ID NO: 6029 - DNA, 20 bp, Artificial Sequence
  Description of Artificial Sequence: Synthetic oligonucleotide
  Target: ATXN2; (-) strand; PAM type: NNAGAAW; PAM sequence: AGAGAAA
ctaattagcattcattttcc

SEQ ID NO: 6030 - DNA, 20 bp, Artificial Sequence
  Description of Artificial Sequence: Synthetic oligonucleotide
  Target: ATXN2; (-) strand; PAM type: NNAGAAW; PAM sequence: TAAGAAA
gatgtatgtagagaggctgc

SEQ ID NO: 6031 - DNA, 20 bp, Artificial Sequence
  Description of Artificial Sequence: Synthetic oligonucleotide
  Target: ATXN2; (-) strand; PAM type: NNAGAAW; PAM sequence: ACAGAAT
gtgccttccaaatctctgcc

SEQ ID NO: 6032 - DNA, 20 bp, Artificial Sequence
  Description of Artificial Sequence: Synthetic oligonucleotide
  Target: ATXN2; (-) strand; PAM type: NNAGAAW; PAM sequence: AAAGAAA
agctgattctgctcccacat

SEQ ID NO: 6033 - DNA, 20 bp, Artificial Sequence
  Description of Artificial Sequence: Synthetic oligonucleotide
  Target: ATXN2; (-) strand; PAM type: NNAGAAW; PAM sequence: CCAGAAA
ctattcctttttcctacggt

SEQ ID NO: 6034 - DNA, 20 bp, Artificial Sequence
  Description of Artificial Sequence: Synthetic oligonucleotide
  Target: ATXN2; (-) strand; PAM type: NNAGAAW; PAM sequence: TAAGAAA
ccaaggccttgactttaggt

SEQ ID NO: 6035 - DNA, 20 bp, Artificial Sequence
  Description of Artificial Sequence: Synthetic oligonucleotide
  Target: ATXN2; (-) strand; PAM type: NNAGAAW; PAM sequence: ATAGAAA
agtaagggacttagtcctga

SEQ ID NO: 6036 - DNA, 20 bp, Artificial Sequence
  Description of Artificial Sequence: Synthetic oligonucleotide
  Target: ATXN2; (-) strand; PAM type: NNAGAAW; PAM sequence: CAAGAAT
atagcaaaatttgcattatt

SEQ ID NO: 6037 - DNA, 20 bp, Artificial Sequence
  Description of Artificial Sequence: Synthetic oligonucleotide
  Target: ATXN2; (-) strand; PAM type: NNAGAAW; PAM sequence: AAAGAAA
actcagaaaaaaattgcaat

SEQ ID NO: 6038 - DNA, 20 bp, Artificial Sequence
  Description of Artificial Sequence: Synthetic oligonucleotide
  Target: ATXN2; (-) strand; PAM type: NNAGAAW; PAM sequence: TCAGAAA
cagtagggggcaggagacac

SEQ ID NO: 6039 - DNA, 20 bp, Artificial Sequence
  Description of Artificial Sequence: Synthetic oligonucleotide
  Target: ATXN2; (-) strand; PAM type: NNAGAAW; PAM sequence: CTAGAAA
agttctggttcaaggtatct

SEQ ID NO: 6040 - DNA, 20 bp, Artificial Sequence
  Description of Artificial Sequence: Synthetic oligonucleotide
  Target: ATXN2; (-) strand; PAM type: NNAGAAW; PAM sequence: CTAGAAT
ccaactggaagcacagaaaa

SEQ ID NO: 6041 - DNA, 20 bp, Artificial Sequence
  Description of Artificial Sequence: Synthetic oligonucleotide
  Target: ATXN2; (-) strand; PAM type: NNAGAAW; PAM sequence: ACAGAAA
tgcttctaccaactggaagc

SEQ ID NO: 6042 - DNA, 20 bp, Artificial Sequence
  Description of Artificial Sequence: Synthetic oligonucleotide
  Target: ATXN2; (-) strand; PAM type: NNAGAAW; PAM sequence: TGAGAAA
agctctggagaagatactgc

SEQ ID NO: 6043 - DNA, 20 bp, Artificial Sequence
  Description of Artificial Sequence: Synthetic oligonucleotide
  Target: ATXN2; (-) strand; PAM type: NNAGAAW; PAM sequence: TCAGAAA
ccatacatagaatacaatga

SEQ ID NO: 6044 - DNA, 20 bp, Artificial Sequence
  Description of Artificial Sequence: Synthetic oligonucleotide
  Target: ATXN2; (-) strand; PAM type: NNAGAAW; PAM sequence: ATAGAAT
gtgaagatcttaccccatac

SEQ ID NO: 6045 - DNA, 20 bp, Artificial Sequence
  Description of Artificial Sequence: Synthetic oligonucleotide
  Target: ATXN2; (-) strand; PAM type: NNAGAAW; PAM sequence: TGAGAAA
aatcttgtatgatattaagt

SEQ ID NO: 6046 - DNA, 20 bp, Artificial Sequence
  Description of Artificial Sequence: Synthetic oligonucleotide
  Target: ATXN2; (-) strand; PAM type: NNAGAAW; PAM sequence: GTAGAAT
caactttctgtgaaggccaa

SEQ ID NO: 6047 - DNA, 20 bp, Artificial Sequence
  Description of Artificial Sequence: Synthetic oligonucleotide
  Target: ATXN2; (-) strand; PAM type: NNAGAAW; PAM sequence: ACAGAAT
gcctccaacacgcagtcgcc

SEQ ID NO: 6048 - DNA, 20 bp, Artificial Sequence
  Description of Artificial Sequence: Synthetic oligonucleotide
  Target: ATXN2; (-) strand; PAM type: NNAGAAW; PAM sequence: CTAGAAA
gagaatcaggcttctgtacc

SEQ ID NO: 6049 - DNA, 20 bp, Artificial Sequence
  Description of Artificial Sequence: Synthetic oligonucleotide
  Target: ATXN2; (-) strand; PAM type: NNAGAAW; PAM sequence: TGAGAAT
gaagtttctaactgccagac

SEQ ID NO: 6050 - DNA, 20 bp, Artificial Sequence
  Description of Artificial Sequence: Synthetic oligonucleotide
  Target: ATXN2; (-) strand; PAM type: NNAGAAW; PAM sequence: GGAGAAT
cttctcgggaggctgaggaa

SEQ ID NO: 6051 - DNA, 20 bp, Artificial Sequence
  Description of Artificial Sequence: Synthetic oligonucleotide
  Target: ATXN2; (-) strand; PAM type: NNAGAAW; PAM sequence: TAAGAAT
tgcccctggggtggtggttt

SEQ ID NO: 6052 - DNA, 20 bp, Artificial Sequence
  Description of Artificial Sequence: Synthetic oligonucleotide
  Target: ATXN2; (-) strand; PAM type: NNAGAAW; PAM sequence: CAAGAAA
gagttatgcattgtaaccat

SEQ ID NO: 6053 - DNA, 20 bp, Artificial Sequence
  Description of Artificial Sequence: Synthetic oligonucleotide
  Target: ATXN2; (-) strand; PAM type: NNAGAAW; PAM sequence: ATAGAAA
tggtttaaatggagtcatct

SEQ ID NO: 6054 - DNA, 20 bp, Artificial Sequence
  Description of Artificial Sequence: Synthetic oligonucleotide
  Target: ATXN2; (-) strand; PAM type: NNAGAAW; PAM sequence: GAAGAAA
aacaaaaaactgaaagacat

SEQ ID NO: 6055 - DNA, 20 bp, Artificial Sequence
  Description of Artificial Sequence: Synthetic oligonucleotide
  Target: ATXN2; (-) strand; PAM type: NNAGAAW; PAM sequence: GGAGAAT
ctactcgggaggctgaggca

SEQ ID NO: 6056 - DNA, 20 bp, Artificial Sequence
  Description of Artificial Sequence: Synthetic oligonucleotide
  Target: ATXN2; (-) strand; PAM type: NNAGAAW; PAM sequence: GAAGAAT
tgtttgctaacacgttatat

SEQ ID NO: 6057 - DNA, 20 bp, Artificial Sequence
  Description of Artificial Sequence: Synthetic oligonucleotide
  Target: ATXN2; (-) strand; PAM type: NNAGAAW; PAM sequence: TTAGAAA
cctgttaataagccaccaag

SEQ ID NO: 6058 - DNA, 20 bp, Artificial Sequence
  Description of Artificial Sequence: Synthetic oligonucleotide
  Target: ATXN2; (-) strand; PAM type: NNAGAAW; PAM sequence: GGAGAAT
ctactcggcaggctgaggca

SEQ ID NO: 6059 - DNA, 20 bp, Artificial Sequence
  Description of Artificial Sequence: Synthetic oligonucleotide
  Target: ATXN2; (-) strand; PAM type: NNAGAAW; PAM sequence: GGAGAAT
ctactcaggaggctgacaca

SEQ ID NO: 6060 - DNA, 20 bp, Artificial Sequence
  Description of Artificial Sequence: Synthetic oligonucleotide
  Target: ATXN2; (-) strand; PAM type: NNAGAAW; PAM sequence: ACAGAAT
atctttatgaacctccatga

SEQ ID NO: 6061 - DNA, 20 bp, Artificial Sequence
  Description of Artificial Sequence: Synthetic oligonucleotide
  Target: ATXN2; (-) strand; PAM type: NNAGAAW; PAM sequence: TTAGAAA
gcatgcaaattagctataga

SEQ ID NO: 6062 - DNA, 20 bp, Artificial Sequence
  Description of Artificial Sequence: Synthetic oligonucleotide
  Target: ATXN2; (-) strand; PAM type: NNAGAAW; PAM sequence: AAAGAAT
aatttcaaattcaaggagga

SEQ ID NO: 6063 - DNA, 20 bp, Artificial Sequence
  Description of Artificial Sequence: Synthetic oligonucleotide
  Target: ATXN2; (-) strand; PAM type: NNAGAAW; PAM sequence: CCAGAAT
aacctctctgggatctttag

SEQ ID NO: 6064 - DNA, 20 bp, Artificial Sequence
  Description of Artificial Sequence: Synthetic oligonucleotide
  Target: ATXN2; (-) strand; PAM type: NNAGAAW; PAM sequence: TTAGAAT
atttttgactgatcatatgt

SEQ ID NO: 6065 - DNA, 20 bp, Artificial Sequence
  Description of Artificial Sequence: Synthetic oligonucleotide
  Target: ATXN2; (-) strand; PAM type: NNAGAAW; PAM sequence: AAAGAAA
gggagtatcagtacttttta

SEQ ID NO: 6066 - DNA, 20 bp, Artificial Sequence
  Description of Artificial Sequence: Synthetic oligonucleotide
  Target: ATXN2; (-) strand; PAM type: NNAGAAW; PAM sequence: TTAGAAA
ctaatatttgtagaaatcct

SEQ ID NO: 6067 - DNA, 20 bp, Artificial Sequence
  Description of Artificial Sequence: Synthetic oligonucleotide
  Target: ATXN2; (-) strand; PAM type: NNAGAAW; PAM sequence: GTAGAAA
aggaaggagtactaatattt

SEQ ID NO: 6068 - DNA, 20 bp, Artificial Sequence
  Description of Artificial Sequence: Synthetic oligonucleotide
  Target: ATXN2; (-) strand; PAM type: NNAGAAW; PAM sequence: GGAGAAA
agaaatagttgctccttcat

SEQ ID NO: 6069 - DNA, 20 bp, Artificial Sequence
  Description of Artificial Sequence: Synthetic oligonucleotide
  Target: ATXN2; (-) strand; PAM type: NNAGAAW; PAM sequence: ACAGAAA
ctccccacctggcaaaaagt

SEQ ID NO: 6070 - DNA, 20 bp, Artificial Sequence
  Description of Artificial Sequence: Synthetic oligonucleotide
  Target: ATXN2; (-) strand; PAM type: NNAGAAW; PAM sequence: GGAGAAT
ctactagggaggctgagaca

SEQ ID NO: 6071 - DNA, 20 bp, Artificial Sequence
  Description of Artificial Sequence: Synthetic oligonucleotide
  Target: ATXN2; (-) strand; PAM type: NNAGAAW; PAM sequence: AGAGAAA
tgcctaatattttccttgtt

SEQ ID NO: 6072 - DNA, 20 bp, Artificial Sequence
  Description of Artificial Sequence: Synthetic oligonucleotide
  Target: ATXN2; (-) strand; PAM type: NNAGAAW; PAM sequence: TCAGAAA
taatgaaaaatggagttgtt

SEQ ID NO: 6073 - DNA, 20 bp, Artificial Sequence
  Description of Artificial Sequence: Synthetic oligonucleotide
  Target: ATXN2; (-) strand; PAM type: NNAGAAW; PAM sequence: CCAGAAA
ttactaatatgtcaaccttt

SEQ ID NO: 6074 - DNA, 20 bp, Artificial Sequence
  Description of Artificial Sequence: Synthetic oligonucleotide
  Target: ATXN2; (-) strand; PAM type: NNAGAAW; PAM sequence: AAAGAAA
tgaattatgcatgaatacaa

SEQ ID NO: 6075 - DNA, 20 bp, Artificial Sequence
  Description of Artificial Sequence: Synthetic oligonucleotide
  Target: ATXN2; (-) strand; PAM type: NNAGAAW; PAM sequence: GTAGAAT
atttatatcaaggttgttca

SEQ ID NO: 6076 - DNA, 20 bp, Artificial Sequence
  Description of Artificial Sequence: Synthetic oligonucleotide
  Target: ATXN2; (-) strand; PAM type: NNAGAAW; PAM sequence: TAAGAAA
tttatgtagacatgttttaa

SEQ ID NO: 6077 - DNA, 20 bp, Artificial Sequence
  Description of Artificial Sequence: Synthetic oligonucleotide
  Target: ATXN2; (-) strand; PAM type: NNAGAAW; PAM sequence: TAAGAAA
ggtagtttaatgcagataag

SEQ ID NO: 6078 - DNA, 20 bp, Artificial Sequence
  Description of Artificial Sequence: Synthetic oligonucleotide
  Target: ATXN2; (-) strand; PAM type: NNAGAAW; PAM sequence: CCAGAAT
gccattaggaagaattagat

SEQ ID NO: 6079 - DNA, 20 bp, Artificial Sequence
  Description of Artificial Sequence: Synthetic oligonucleotide
  Target: ATXN2; (-) strand; PAM type: NNAGAAW; PAM sequence: GAAGAAT
cgactaactagagccattag

SEQ ID NO: 6080 - DNA, 20 bp, Artificial Sequence
  Description of Artificial Sequence: Synthetic oligonucleotide
  Target: ATXN2; (-) strand; PAM type: NNAGAAW; PAM sequence: TCAGAAA
tatggtgatgcttttacctt

SEQ ID NO: 6081 - DNA, 20 bp, Artificial Sequence
  Description of Artificial Sequence: Synthetic oligonucleotide
  Target: ATXN2; (-) strand; PAM type: NNAGAAW; PAM sequence: TTAGAAA
ttgacctctttctagctatc

SEQ ID NO: 6082 - DNA, 20 bp, Artificial Sequence
  Description of Artificial Sequence: Synthetic oligonucleotide
  Target: ATXN2; (-) strand; PAM type: NNAGAAW; PAM sequence: AAAGAAT
taaaaaaaagaaaacataag

SEQ ID NO: 6083 - DNA, 20 bp, Artificial Sequence
  Description of Artificial Sequence: Synthetic oligonucleotide
  Target: ATXN2; (-) strand; PAM type: NNAGAAW; PAM sequence: TAAGAAA
tatttaaaaaaaagaaaaca

SEQ ID NO: 6084 - DNA, 20 bp, Artificial Sequence
  Description of Artificial Sequence: Synthetic oligonucleotide
  Target: ATXN2; (-) strand; PAM type: NNAGAAW; PAM sequence: AAAGAAA
accctgtctctatttaaaaa

SEQ ID NO: 6085 - DNA, 20 bp, Artificial Sequence
  Description of Artificial Sequence: Synthetic oligonucleotide
  Target: ATXN2; (-) strand; PAM type: NNAGAAW; PAM sequence: TGAGAAT
tttaacattccgtaggttaa

SEQ ID NO: 6086 - DNA, 20 bp, Artificial Sequence
  Description of Artificial Sequence: Synthetic oligonucleotide
  Target: ATXN2; (-) strand; PAM type: NNAGAAW; PAM sequence: GAAGAAT
ataccacctctgtccttttt

SEQ ID NO: 6087 - DNA, 20 bp, Artificial Sequence
  Description of Artificial Sequence: Synthetic oligonucleotide
  Target: ATXN2; (-) strand; PAM type: NNAGAAW; PAM sequence: AAAGAAT
ccaaaaaaaaaaaaaaaaaa

SEQ ID NO: 6088 - DNA, 20 bp, Artificial Sequence
  Description of Artificial Sequence: Synthetic oligonucleotide
  Target: ATXN2; (-) strand; PAM type: NNAGAAW; PAM sequence: ACAGAAT
ctacttcggaggctgaggca

SEQ ID NO: 6089 - DNA, 20 bp, Artificial Sequence
  Description of Artificial Sequence: Synthetic oligonucleotide
  Target: ATXN2; (-) strand; PAM type: NNAGAAW; PAM sequence: TAAGAAT
ttaggcaaaattgagttatt

SEQ ID NO: 6090 - DNA, 20 bp, Artificial Sequence
  Description of Artificial Sequence: Synthetic oligonucleotide
  Target: ATXN2; (-) strand; PAM type: NNAGAAW; PAM sequence: TAAGAAT
ctttgaactttttgaaatac

SEQ ID NO: 6091 - DNA, 20 bp, Artificial Sequence
  Description of Artificial Sequence: Synthetic oligonucleotide
  Target: ATXN2; (-) strand; PAM type: NNAGAAW; PAM sequence: TGAGAAT
agttgaaaagtgtactgcta

SEQ ID NO: 6092 - DNA, 20 bp, Artificial Sequence
  Description of Artificial Sequence: Synthetic oligonucleotide
  Target: ATXN2; (-) strand; PAM type: NNAGAAW; PAM sequence: TCAGAAT
tggattgcttcaaatgtttt

SEQ ID NO: 6093 - DNA, 20 bp, Artificial Sequence
  Description of Artificial Sequence: Synthetic oligonucleotide
  Target: ATXN2; (-) strand; PAM type: NNAGAAW; PAM sequence: ACAGAAT
ccatttgtatatcttatgat

SEQ ID NO: 6094 - DNA, 20 bp, Artificial Sequence
  Description of Artificial Sequence: Synthetic oligonucleotide
  Target: ATXN2; (-) strand; PAM type: NNAGAAW; PAM sequence: AGAGAAA
tcttcgttttgtgactaaac

SEQ ID NO: 6095 - DNA, 20 bp, Artificial Sequence
  Description of Artificial Sequence: Synthetic oligonucleotide
  Target: ATXN2; (-) strand; PAM type: NNAGAAW; PAM sequence: TGAGAAT
aactaagcagtatttatatg

SEQ ID NO: 6096 - DNA, 20 bp, Artificial Sequence
  Description of Artificial Sequence: Synthetic oligonucleotide
  Target: ATXN2; (-) strand; PAM type: NNAGAAW; PAM sequence: ACAGAAT
tttaaatataaccaatgtga

SEQ ID NO: 6097 - DNA, 20 bp, Artificial Sequence
  Description of Artificial Sequence: Synthetic oligonucleotide
  Target: ATXN2; (-) strand; PAM type: NNAGAAW; PAM sequence: AGAGAAT
tatcctgcctacgacatgca

SEQ ID NO: 6098 - DNA, 20 bp, Artificial Sequence
  Description of Artificial Sequence: Synthetic oligonucleotide
  Target: ATXN2; (-) strand; PAM type: NNAGAAW; PAM sequence: GGAGAAA
taatggcaaagcatctttgt

SEQ ID NO: 6099 - DNA, 20 bp, Artificial Sequence
  Description of Artificial Sequence: Synthetic oligonucleotide
  Target: ATXN2; (-) strand; PAM type: NNAGAAW; PAM sequence: CAAGAAT
ccttttatgacattgagggt

SEQ ID NO: 6100 - DNA, 20 bp, Artificial Sequence
  Description of Artificial Sequence: Synthetic oligonucleotide
  Target: ATXN2; (-) strand; PAM type: NNAGAAW; PAM sequence: TAAGAAT
ttctgaaaacatactctatc

SEQ ID NO: 6101 - DNA, 20 bp, Artificial Sequence
  Description of Artificial Sequence: Synthetic oligonucleotide
  Target: ATXN2; (-) strand; PAM type: NNAGAAW; PAM sequence: CTAGAAT
tcctgtaatacagggtaatg

SEQ ID NO: 6102 - DNA, 20 bp, Artificial Sequence
  Description of Artificial Sequence: Synthetic oligonucleotide
  Target: ATXN2; (-) strand; PAM type: NNAGAAW; PAM sequence: CAAGAAA
agaggttcagaggaaacagc

SEQ ID NO: 6103 - DNA, 20 bp, Artificial Sequence
  Description of Artificial Sequence: Synthetic oligonucleotide
  Target: ATXN2; (-) strand; PAM type: NNAGAAW; PAM sequence: GCAGAAT
gctgacacctgaaggatgaa

SEQ ID NO: 6104 - DNA, 20 bp, Artificial Sequence
  Description of Artificial Sequence: Synthetic oligonucleotide
  Target: ATXN2; (-) strand; PAM type: NNAGAAW; PAM sequence: AGAGAAA
gatcaagtctgagggccatg

SEQ ID NO: 6105 - DNA, 20 bp, Artificial Sequence
  Description of Artificial Sequence: Synthetic oligonucleotide
  Target: ATXN2; (-) strand; PAM type: NNAGAAW; PAM sequence: CCAGAAA
aaatgaatgcagtgcccgtc

SEQ ID NO: 6106 - DNA, 20 bp, Artificial Sequence
  Description of Artificial Sequence: Synthetic oligonucleotide
  Target: ATXN2; (-) strand; PAM type: NNAGAAW; PAM sequence: ATAGAAA
gtggttggaaattaaggaag

SEQ ID NO: 6107 - DNA, 20 bp, Artificial Sequence
  Description of Artificial Sequence: Synthetic oligonucleotide
  Target: ATXN2; (-) strand; PAM type: NNAGAAW; PAM sequence: AAAGAAT
tgtgttatactgggtttgag

SEQ ID NO: 6108 - DNA, 20 bp, Artificial Sequence
  Description of Artificial Sequence: Synthetic oligonucleotide
  Target: ATXN2; (-) strand; PAM type: NNAGAAW; PAM sequence: TGAGAAA
gtgctgtgttatactgggtt

SEQ ID NO: 6109 - DNA, 20 bp, Artificial Sequence
  Description of Artificial Sequence: Synthetic oligonucleotide
  Target: ATXN2; (-) strand; PAM type: NNAGAAW; PAM sequence: TTAGAAA
tcttttaaaagaactattat

SEQ ID NO: 6110 - DNA, 20 bp, Artificial Sequence
  Description of Artificial Sequence: Synthetic oligonucleotide
  Target: ATXN2; (-) strand; PAM type: NNAGAAW; PAM sequence: TAAGAAA
ggtcacagacaatagtgctg

SEQ ID NO: 6111 - DNA, 20 bp, Artificial Sequence
  Description of Artificial Sequence: Synthetic oligonucleotide
  Target: ATXN2; (-) strand; PAM type: NNAGAAW; PAM sequence: CCAGAAA
gtggcttggttaatgccaca

SEQ ID NO: 6112 - DNA, 20 bp, Artificial Sequence
  Description of Artificial Sequence: Synthetic oligonucleotide
  Target: ATXN2; (-) strand; PAM type: NNAGAAW; PAM sequence: TGAGAAT
ctggggatcatgttttaaca

SEQ ID NO: 6113 - DNA, 20 bp, Artificial Sequence
  Description of Artificial Sequence: Synthetic oligonucleotide
  Target: ATXN2; (-) strand; PAM type: NNAGAAW; PAM sequence: AAAGAAA
accgagcgacactctgtctc

SEQ ID NO: 6114 - DNA, 20 bp, Artificial Sequence
  Description of Artificial Sequence: Synthetic oligonucleotide
  Target: ATXN2; (-) strand; PAM type: NNAGAAW; PAM sequence: GGAGAAT
ctactctggaggctgaggta

SEQ ID NO: 6115 - DNA, 20 bp, Artificial Sequence
  Description of Artificial Sequence: Synthetic oligonucleotide
  Target: ATXN2; (-) strand; PAM type: NNAGAAW; PAM sequence: GAAGAAA
aaacttataaattaacttga

SEQ ID NO: 6116 - DNA, 20 bp, Artificial Sequence
  Description of Artificial Sequence: Synthetic oligonucleotide
  Target: ATXN2; (-) strand; PAM type: NNAGAAW; PAM sequence: CCAGAAT
gcatgagccaccatggcagg

SEQ ID NO: 6117 - DNA, 20 bp, Artificial Sequence
  Description of Artificial Sequence: Synthetic oligonucleotide
  Target: ATXN2; (-) strand; PAM type: NNAGAAW; PAM sequence: AAAGAAA
attgcctggaatatttctat

SEQ ID NO: 6118 - DNA, 20 bp, Artificial Sequence
  Description of Artificial Sequence: Synthetic oligonucleotide
  Target: ATXN2; (-) strand; PAM type: NNAGAAW; PAM sequence: ACAGAAA
aaaaaaaaaaaaaaaaagaa

SEQ ID NO: 6119 - DNA, 20 bp, Artificial Sequence
  Description of Artificial Sequence: Synthetic oligonucleotide
  Target: ATXN2; (-) strand; PAM type: NNAGAAW; PAM sequence: AAAGAAA
cttaaaaaaaaaaaaaaaaa

SEQ ID NO: 6120 - DNA, 20 bp, Artificial Sequence
  Description of Artificial Sequence: Synthetic oligonucleotide
  Target: ATXN2; (-) strand; PAM type: NNAGAAW; PAM sequence: GAAGAAT
ctacttgggagactgaggca

SEQ ID NO: 6121 - DNA, 20 bp, Artificial Sequence
  Description of Artificial Sequence: Synthetic oligonucleotide
  Target: ATXN2; (-) strand; PAM type: NNAGAAW; PAM sequence: GGAGAAT
ctacttgagaggctgaggaa

SEQ ID NO: 6122 - DNA, 20 bp, Artificial Sequence
  Description of Artificial Sequence: Synthetic oligonucleotide
  Target: ATXN2; (-) strand; PAM type: NNAGAAW; PAM sequence: GGAGAAA
gaatctttatatcagttctg

SEQ ID NO: 6123 - DNA, 20 bp, Artificial Sequence
  Description of Artificial Sequence: Synthetic oligonucleotide
  Target: ATXN2; (-) strand; PAM type: NNAGAAW; PAM sequence: TTAGAAT
tttgaatttgcaaataaatt

SEQ ID NO: 6124 - DNA, 20 bp, Artificial Sequence
  Description of Artificial Sequence: Synthetic oligonucleotide
  Target: ATXN2; (-) strand; PAM type: NNAGAAW; PAM sequence: TAAGAAA
catgcttttttgtatcataa

SEQ ID NO: 6125 - DNA, 20 bp, Artificial Sequence
  Description of Artificial Sequence: Synthetic oligonucleotide
  Target: ATXN2; (-) strand; PAM type: NNAGAAW; PAM sequence: TCAGAAT
ttctggttacaagtcctttc

SEQ ID NO: 6126 - DNA, 20 bp, Artificial Sequence
  Description of Artificial Sequence: Synthetic oligonucleotide
  Target: ATXN2; (-) strand; PAM type: NNAGAAW; PAM sequence: AAAGAAA
cagaccctgtctcacaaaaa

SEQ ID NO: 6127 - DNA, 20 bp, Artificial Sequence
  Description of Artificial Sequence: Synthetic oligonucleotide
  Target: ATXN2; (-) strand; PAM type: NNAGAAW; PAM sequence: AAAGAAA
ttgcaaaaaaaaaaaagaaa

SEQ ID NO: 6128 - DNA, 20 bp, Artificial Sequence
  Description of Artificial Sequence: Synthetic oligonucleotide
  Target: ATXN2; (-) strand; PAM type: NNAGAAW; PAM sequence: AAAGAAA
cctgtctttgcaaaaaaaaa

SEQ ID NO: 6129 - DNA, 20 bp, Artificial Sequence
  Description of Artificial Sequence: Synthetic oligonucleotide
  Target: ATXN2; (-) strand; PAM type: NNAGAAW; PAM sequence: TAAGAAA
taaatacatatttcaattaa

SEQ ID NO: 6130 - DNA, 20 bp, Artificial Sequence
  Description of Artificial Sequence: Synthetic oligonucleotide
  Target: ATXN2; (-) strand; PAM type: NNAGAAW; PAM sequence: CTAGAAT
tatttcttttagttaaatac

SEQ ID NO: 6131 - DNA, 20 bp, Artificial Sequence
  Description of Artificial Sequence: Synthetic oligonucleotide
  Target: ATXN2; (-) strand; PAM type: NNAGAAW; PAM sequence: CCAGAAT
atggagtcttgttctgtgtc

SEQ ID NO: 6132 - DNA, 20 bp, Artificial Sequence
  Description of Artificial Sequence: Synthetic oligonucleotide
  Target: ATXN2; (-) strand; PAM type: NNAGAAW; PAM sequence: TAAGAAA
tagcaaaacttataatgttt

SEQ ID NO: 6133 - DNA, 20 bp, Artificial Sequence
  Description of Artificial Sequence: Synthetic oligonucleotide
  Target: ATXN2; (-) strand; PAM type: NNAGAAW; PAM sequence: GAAGAAT
ttccctgggtcatattggaa

SEQ ID NO: 6134 - DNA, 20 bp, Artificial Sequence
  Description of Artificial Sequence: Synthetic oligonucleotide
  Target: ATXN2; (-) strand; PAM type: NNAGAAW; PAM sequence: CAAGAAA
attagtctgtaatttacata

SEQ ID NO: 6135 - DNA, 20 bp, Artificial Sequence
  Description of Artificial Sequence: Synthetic oligonucleotide
  Target: ATXN2; (-) strand; PAM type: NNAGAAW; PAM sequence: TTAGAAT
accattatgcctggctaatt

SEQ ID NO: 6136 - DNA, 20 bp, Artificial Sequence
  Description of Artificial Sequence: Synthetic oligonucleotide
  Target: ATXN2; (-) strand; PAM type: NNAGAAW; PAM sequence: GTAGAAA
agattttcatttctcctaaa

SEQ ID NO: 6137 - DNA, 20 bp, Artificial Sequence
  Description of Artificial Sequence: Synthetic oligonucleotide
  Target: ATXN2; (-) strand; PAM type: NNAGAAW; PAM sequence: TCAGAAT
aggaggctgaggcaggagca

SEQ ID NO: 6138 - DNA, 20 bp, Artificial Sequence
  Description of Artificial Sequence: Synthetic oligonucleotide
  Target: ATXN2; (-) strand; PAM type: NNAGAAW; PAM sequence: AGAGAAA
aaaaaaaaaaaaaaaatagt

SEQ ID NO: 6139 - DNA, 20 bp, Artificial Sequence
  Description of Artificial Sequence: Synthetic oligonucleotide
  Target: ATXN2; (-) strand; PAM type: NNAGAAW; PAM sequence: GGAGAAT
ctactcgggaggctgaggca

SEQ ID NO: 6140 - DNA, 20 bp, Artificial Sequence
  Description of Artificial Sequence: Synthetic oligonucleotide
  Target: ATXN2; (-) strand; PAM type: NNAGAAW; PAM sequence: ATAGAAA
caggaggtactgtcttttta

SEQ ID NO: 6141 - DNA, 20 bp, Artificial Sequence
  Description of Artificial Sequence: Synthetic oligonucleotide
  Target: ATXN2; (-) strand; PAM type: NNAGAAW; PAM sequence: GAAGAAA
agggcctttagaaattctga

SEQ ID NO: 6142 - DNA, 20 bp, Artificial Sequence
  Description of Artificial Sequence: Synthetic oligonucleotide
  Target: ATXN2; (-) strand; PAM type: NNAGAAW; PAM sequence: TTAGAAA
taatcttattttgagggcct

SEQ ID NO: 6143 - DNA, 20 bp, Artificial Sequence
  Description of Artificial Sequence: Synthetic oligonucleotide
  Target: ATXN2; (-) strand; PAM type: NNAGAAW; PAM sequence: ACAGAAA
tagaaagtagaataatttat

SEQ ID NO: 6144 - DNA, 20 bp, Artificial Sequence
  Description of Artificial Sequence: Synthetic oligonucleotide
  Target: ATXN2; (-) strand; PAM type: NNAGAAW; PAM sequence: GTAGAAT
cagttgagaaactatagaaa

SEQ ID NO: 6145 - DNA, 20 bp, Artificial Sequence
  Description of Artificial Sequence: Synthetic oligonucleotide
  Target: ATXN2; (-) strand; PAM type: NNAGAAW; PAM sequence: ATAGAAA
ctgctatcagttgagaaact

SEQ ID NO: 6146 - DNA, 20 bp, Artificial Sequence
  Description of Artificial Sequence: Synthetic oligonucleotide
  Target: ATXN2; (-) strand; PAM type: NNAGAAW; PAM sequence: TGAGAAA
agtgattaactgctatcagt

SEQ ID NO: 6147 - DNA, 20 bp, Artificial Sequence
  Description of Artificial Sequence: Synthetic oligonucleotide
  Target: ATXN2; (-) strand; PAM type: NNAGAAW; PAM sequence: GTAGAAA
tgtgtggttaaagagccttc

SEQ ID NO: 6148 - DNA, 20 bp, Artificial Sequence
  Description of Artificial Sequence: Synthetic oligonucleotide
  Target: ATXN2; (-) strand; PAM type: NNAGAAW; PAM sequence: AAAGAAA
agagcgaaaccctgcctcaa

SEQ ID NO: 6149 - DNA, 20 bp, Artificial Sequence
  Description of Artificial Sequence: Synthetic oligonucleotide
  Target: ATXN2; (-) strand; PAM type: NNAGAAW; PAM sequence: ATAGAAA
cctatctctgcaaaaaaaaa

SEQ ID NO: 6150 - DNA, 20 bp, Artificial Sequence
  Description of Artificial Sequence: Synthetic oligonucleotide
  Target: ATXN2; (-) strand; PAM type: NNAGAAW; PAM sequence: CCAGAAT
ctacagttatttccccaaag

SEQ ID NO: 6151 - DNA, 20 bp, Artificial Sequence
  Description of Artificial Sequence: Synthetic oligonucleotide
  Target: ATXN2; (-) strand; PAM type: NNAGAAW; PAM sequence: GGAGAAT
tactaggtggggctgaggca

SEQ ID NO: 6152 - DNA, 20 bp, Artificial Sequence
  Description of Artificial Sequence: Synthetic oligonucleotide
  Target: ATXN2; (-) strand; PAM type: NNAGAAW; PAM sequence: GGAGAAA
attttatgaagaaaaacagg

SEQ ID NO: 6153 - DNA, 20 bp, Artificial Sequence
  Description of Artificial Sequence: Synthetic oligonucleotide
  Target: ATXN2; (-) strand; PAM type: NNAGAAW; PAM sequence: GAAGAAA
gatattcacatggattttat

SEQ ID NO: 6154 - DNA, 20 bp, Artificial Sequence
  Description of Artificial Sequence: Synthetic oligonucleotide
  Target: ATXN2; (-) strand; PAM type: NNAGAAW; PAM sequence: TGAGAAT
acatatagagcaggtaaagg

SEQ ID NO: 6155 - DNA, 20 bp, Artificial Sequence
  Description of Artificial Sequence: Synthetic oligonucleotide
  Target: ATXN2; (-) strand; PAM type: NNAGAAW; PAM sequence: ACAGAAT
gcaatataaaactaagagtg

SEQ ID NO: 6156 - DNA, 20 bp, Artificial Sequence
  Description of Artificial Sequence: Synthetic oligonucleotide
  Target: ATXN2; (-) strand; PAM type: NNAGAAW; PAM sequence: GGAGAAT
ctaattttttaatgactaat

SEQ ID NO: 6157 - DNA, 20 bp, Artificial Sequence
  Description of Artificial Sequence: Synthetic oligonucleotide
  Target: ATXN2; (-) strand; PAM type: NNAGAAW; PAM sequence: TGAGAAT
taagtatgaggacctaaatc

SEQ ID NO: 6158 - DNA, 20 bp, Artificial Sequence
  Description of Artificial Sequence: Synthetic oligonucleotide
  Target: ATXN2; (-) strand; PAM type: NNAGAAW; PAM sequence: ATAGAAT
cccaggcgtgcaagtaagtc

SEQ ID NO: 6159 - DNA, 20 bp, Artificial Sequence
  Description of Artificial Sequence: Synthetic oligonucleotide
  Target: ATXN2; (-) strand; PAM type: NNAGAAW; PAM sequence: TTAGAAA
catagttaaagcaagtaaaa

SEQ ID NO: 6160 - DNA, 20 bp, Artificial Sequence
  Description of Artificial Sequence: Synthetic oligonucleotide
  Target: ATXN2; (-) strand; PAM type: NNAGAAW; PAM sequence: CCAGAAT
aatctttgaatttctctgac

SEQ ID NO: 6161 - DNA, 20 bp, Artificial Sequence
  Description of Artificial Sequence: Synthetic oligonucleotide
  Target: ATXN2; (-) strand; PAM type: NNAGAAW; PAM sequence: AAAGAAA
gaggttatctagtcccaaaa

SEQ ID NO: 6162 - DNA, 20 bp, Artificial Sequence
  Description of Artificial Sequence: Synthetic oligonucleotide
  Target: ATXN2; (-) strand; PAM type: NNAGAAW; PAM sequence: AGAGAAT
ctaatcaggaggctaaggca

SEQ ID NO: 6163 - DNA, 20 bp, Artificial Sequence
  Description of Artificial Sequence: Synthetic oligonucleotide
  Target: ATXN2; (-) strand; PAM type: NNAGAAW; PAM sequence: TAAGAAT
ataaaaggatactgttatgt

SEQ ID NO: 6164 - DNA, 20 bp, Artificial Sequence
  Description of Artificial Sequence: Synthetic oligonucleotide
  Target: ATXN2; (-) strand; PAM type: NNAGAAW; PAM sequence: GGAGAAT
ctactcgggaggctgaggca

SEQ ID NO: 6165 - DNA, 20 bp, Artificial Sequence
  Description of Artificial Sequence: Synthetic oligonucleotide
  Target: ATXN2; (-) strand; PAM type: NNAGAAW; PAM sequence: CTAGAAT
cacataagaattactgcatg

SEQ ID NO: 6166 - DNA, 20 bp, Artificial Sequence
  Description of Artificial Sequence: Synthetic oligonucleotide
  Target: ATXN2; (-) strand; PAM type: NNAGAAW; PAM sequence: TAAGAAT
atgtaaaatatcttctcaca

SEQ ID NO: 6167 - DNA, 20 bp, Artificial Sequence
  Description of Artificial Sequence: Synthetic oligonucleotide
  Target: ATXN2; (-) strand; PAM type: NNAGAAW; PAM sequence: TCAGAAA
ggaattcaaaatatttttca

SEQ ID NO: 6168 - DNA, 20 bp, Artificial Sequence
  Description of Artificial Sequence: Synthetic oligonucleotide
  Target: ATXN2; (-) strand; PAM type: NNAGAAW; PAM sequence: TAAGAAA
tagaaaaacaaggcataaat

SEQ ID NO: 6169 - DNA, 20 bp, Artificial Sequence
  Description of Artificial Sequence: Synthetic oligonucleotide
  Target: ATXN2; (-) strand; PAM type: NNAGAAW; PAM sequence: CTAGAAA
cccttttttgtaccccaggg

SEQ ID NO: 6170 - DNA, 20 bp, Artificial Sequence
  Description of Artificial Sequence: Synthetic oligonucleotide
  Target: ATXN2; (-) strand; PAM type: NNAGAAW; PAM sequence: GAAGAAT
atttaggtccttccaactgt

SEQ ID NO: 6171 - DNA, 20 bp, Artificial Sequence
  Description of Artificial Sequence: Synthetic oligonucleotide
  Target: ATXN2; (-) strand; PAM type: NNAGAAW; PAM sequence: GAAGAAA
gagaaagacgataaggaaga

SEQ ID NO: 6172 - DNA, 20 bp, Artificial Sequence
  Description of Artificial Sequence: Synthetic oligonucleotide
  Target: ATXN2; (-) strand; PAM type: NNAGAAW; PAM sequence: AGAGAAA
tccagcccagcatgtaaaca

SEQ ID NO: 6173 - DNA, 20 bp, Artificial Sequence
  Description of Artificial Sequence: Synthetic oligonucleotide
  Target: ATXN2; (-) strand; PAM type: NNAGAAW; PAM sequence: GGAGAAA
tactaaacaaaaatagagag

SEQ ID NO: 6174 - DNA, 20 bp, Artificial Sequence
  Description of Artificial Sequence: Synthetic oligonucleotide
  Target: ATXN2; (-) strand; PAM type: NNAGAAW; PAM sequence: ATAGAAA
taaatgacaagtataagagg

SEQ ID NO: 6175 - DNA, 20 bp, Artificial Sequence
  Description of Artificial Sequence: Synthetic oligonucleotide
  Target: ATXN2; (-) strand; PAM type: NNAGAAW; PAM sequence: TGAGAAA
tagactagctgacactttac

SEQ ID NO: 6176 - DNA, 20 bp, Artificial Sequence
  Description of Artificial Sequence: Synthetic oligonucleotide
  Target: ATXN2; (-) strand; PAM type: NNAGAAW; PAM sequence: TGAGAAT
tatagactgcccatttgccc

SEQ ID NO: 6177 - DNA, 20 bp, Artificial Sequence
  Description of Artificial Sequence: Synthetic oligonucleotide
  Target: ATXN2; (-) strand; PAM type: NNAGAAW; PAM sequence: TTAGAAT
tcctttttttacttaggggt

SEQ ID NO: 6178 - DNA, 20 bp, Artificial Sequence
  Description of Artificial Sequence: Synthetic oligonucleotide
  Target: ATXN2; (-) strand; PAM type: NNAGAAW; PAM sequence: CTAGAAT
tgtcatctgggagctatggc

SEQ ID NO: 6179 - DNA, 20 bp, Artificial Sequence
  Description of Artificial Sequence: Synthetic oligonucleotide
  Target: ATXN2; (-) strand; PAM type: NNAGAAW; PAM sequence: CTAGAAA
ccttctggtccagaatatgt

SEQ ID NO: 6180 - DNA, 20 bp, Artificial Sequence
  Description of Artificial Sequence: Synthetic oligonucleotide
  Target: ATXN2; (-) strand; PAM type: NNAGAAW; PAM sequence: CCAGAAT
gcaatgggttcccttctggt

SEQ ID NO: 6181 - DNA, 20 bp, Artificial Sequence
  Description of Artificial Sequence: Synthetic oligonucleotide
  Target: ATXN2; (-) strand; PAM type: NNAGAAW; PAM sequence: CTAGAAA
ccttctggcccagggtgtgt

SEQ ID NO: 6182 - DNA, 20 bp, Artificial Sequence
  Description of Artificial Sequence: Synthetic oligonucleotide
  Target: ATXN2; (-) strand; PAM type: NNAGAAW; PAM sequence: GAAGAAT
gggtgctttagtcagtaggt

SEQ ID NO: 6183 - DNA, 20 bp, Artificial Sequence
  Description of Artificial Sequence: Synthetic oligonucleotide
  Target: ATXN2; (-) strand; PAM type: NNAGAAW; PAM sequence: GGAGAAT
gtagtcttggggaagatctg

SEQ ID NO: 6184 - DNA, 20 bp, Artificial Sequence
  Description of Artificial Sequence: Synthetic oligonucleotide
  Target: ATXN2; (-) strand; PAM type: NNAGAAW; PAM sequence: GGAGAAT
ctactcaggaggctgaggca

SEQ ID NO: 6185 - DNA, 20 bp, Artificial Sequence
  Description of Artificial Sequence: Synthetic oligonucleotide
  Target: ATXN2; (-) strand; PAM type: NNAGAAW; PAM sequence: GGAGAAT
gctactcggaggctgaggca

SEQ ID NO: 6186 - DNA, 20 bp, Artificial Sequence
  Description of Artificial Sequence: Synthetic oligonucleotide
  Target: ATXN2; (-) strand; PAM type: NNAGAAW; PAM sequence: ATAGAAA
aaaccccctctctactaaaa

SEQ ID NO: 6187 - DNA, 20 bp, Artificial Sequence
  Description of Artificial Sequence: Synthetic oligonucleotide
  Target: ATXN2; (-) strand; PAM type: NNAGAAW; PAM sequence: AGAGAAA
ttgcaaaaacaagcaagcaa

SEQ ID NO: 6188 - DNA, 20 bp, Artificial Sequence
  Description of Artificial Sequence: Synthetic oligonucleotide
  Target: ATXN2; (-) strand; PAM type: NNAGAAW; PAM sequence: GGAGAAT
atactcaggaggctgaggca

SEQ ID NO: 6189 - DNA, 20 bp, Artificial Sequence
  Description of Artificial Sequence: Synthetic oligonucleotide
  Target: ATXN2; (-) strand; PAM type: NNAGAAW; PAM sequence: GAAGAAT
agcaatccatatgttgagga

SEQ ID NO: 6190 - DNA, 20 bp, Artificial Sequence
  Description of Artificial Sequence: Synthetic oligonucleotide
  Target: ATXN2; (-) strand; PAM type: NNAGAAW; PAM sequence: GTAGAAT
agttcttctttaaaggttta

SEQ ID NO: 6191 - DNA, 20 bp, Artificial Sequence
  Description of Artificial Sequence: Synthetic oligonucleotide
  Target: ATXN2; (-) strand; PAM type: NNAGAAW; PAM sequence: GTAGAAT
tatagggtaatagtggcctt

SEQ ID NO: 6192 - DNA, 20 bp, Artificial Sequence
  Description of Artificial Sequence: Synthetic oligonucleotide
  Target: ATXN2; (-) strand; PAM type: NNAGAAW; PAM sequence: ATAGAAA
agtgttttaaagttgtcatt

SEQ ID NO: 6193 - DNA, 20 bp, Artificial Sequence
  Description of Artificial Sequence: Synthetic oligonucleotide
  Target: ATXN2; (-) strand; PAM type: NNAGAAW; PAM sequence: TTAGAAT
tttgtggttccctacaaatt

SEQ ID NO: 6194 - DNA, 20 bp, Artificial Sequence
  Description of Artificial Sequence: Synthetic oligonucleotide
  Target: ATXN2; (-) strand; PAM type: NNAGAAW; PAM sequence: CAAGAAA
tgtacttttggggtattact

SEQ ID NO: 6195 - DNA, 20 bp, Artificial Sequence
  Description of Artificial Sequence: Synthetic oligonucleotide
  Target: ATXN2; (-) strand; PAM type: NNAGAAW; PAM sequence: TGAGAAA
ccagcctgtatgtcgtcttt

SEQ ID NO: 6196 - DNA, 20 bp, Artificial Sequence
  Description of Artificial Sequence: Synthetic oligonucleotide
  Target: ATXN2; (-) strand; PAM type: NNAGAAW; PAM sequence: TAAGAAT
ttttagtgcctgcaaacgag

SEQ ID NO: 6197 - DNA, 20 bp, Artificial Sequence
  Description of Artificial Sequence: Synthetic oligonucleotide
  Target: ATXN2; (-) strand; PAM type: NNAGAAW; PAM sequence: TAAGAAA
tgcagatgtgtttgacattg

SEQ ID NO: 6198 - DNA, 20 bp, Artificial Sequence
  Description of Artificial Sequence: Synthetic oligonucleotide
  Target: ATXN2; (-) strand; PAM type: NNAGAAW; PAM sequence: TAAGAAA
aaaaagtgtccaacccatag

SEQ ID NO: 6199 - DNA, 20 bp, Artificial Sequence
  Description of Artificial Sequence: Synthetic oligonucleotide
  Target: ATXN2; (-) strand; PAM type: NNAGAAW; PAM sequence: GGAGAAT
ctactcaggaggctgaggtg

SEQ ID NO: 6200 - DNA, 20 bp, Artificial Sequence
  Description of Artificial Sequence: Synthetic oligonucleotide
  Target: ATXN2; (-) strand; PAM type: NNAGAAW; PAM sequence: AAAGAAA
cgaaactccgtctccaaaaa

SEQ ID NO: 6201 - DNA, 20 bp, Artificial Sequence
  Description of Artificial Sequence: Synthetic oligonucleotide
  Target: ATXN2; (-) strand; PAM type: NNAGAAW; PAM sequence: GGAGAAA
ctactcgcaagactgaggca

SEQ ID NO: 6202 - DNA, 20 bp, Artificial Sequence
  Description of Artificial Sequence: Synthetic oligonucleotide
  Target: ATXN2; (-) strand; PAM type: NNAGAAW; PAM sequence: TAAGAAT
ccatttcatgtggagtcaca

SEQ ID NO: 6203 - DNA, 20 bp, Artificial Sequence
  Description of Artificial Sequence: Synthetic oligonucleotide
  Target: ATXN2; (-) strand; PAM type: NNAGAAW; PAM sequence: TAAGAAT
tgctgatagctttatttgtg

SEQ ID NO: 6204 - DNA, 20 bp, Artificial Sequence
  Description of Artificial Sequence: Synthetic oligonucleotide
  Target: ATXN2; (-) strand; PAM type: NNAGAAW; PAM sequence: ATAGAAA
agtccttcatttaggcagaa

SEQ ID NO: 6205 - DNA, 20 bp, Artificial Sequence
  Description of Artificial Sequence: Synthetic oligonucleotide
  Target: ATXN2; (-) strand; PAM type: NNAGAAW; PAM sequence: GCAGAAA
atctgtagtccttcatttag

SEQ ID NO: 6206 - DNA, 20 bp, Artificial Sequence
  Description of Artificial Sequence: Synthetic oligonucleotide
  Target: ATXN2; (-) strand; PAM type: NNAGAAW; PAM sequence: AAAGAAA
acagagcgagaatctgtctc

SEQ ID NO: 6207 - DNA, 20 bp, Artificial Sequence
  Description of Artificial Sequence: Synthetic oligonucleotide
  Target: ATXN2; (-) strand; PAM type: NNAGAAW; PAM sequence: CGAGAAT
tgcatcagtgggcgacagag

SEQ ID NO: 6208 - DNA, 20 bp, Artificial Sequence
  Description of Artificial Sequence: Synthetic oligonucleotide
  Target: ATXN2; (-) strand; PAM type: NNAGAAW; PAM sequence: GGAGAAT
ctactcaggaggctgaggca

SEQ ID NO: 6209 - DNA, 20 bp, Artificial Sequence
  Description of Artificial Sequence: Synthetic oligonucleotide
  Target: ATXN2; (-) strand; PAM type: NNAGAAW; PAM sequence: GAAGAAA
gatccataggggcataccag

SEQ ID NO: 6210 - DNA, 20 bp, Artificial Sequence
  Description of Artificial Sequence: Synthetic oligonucleotide
  Target: ATXN2; (-) strand; PAM type: NNAGAAW; PAM sequence: GCAGAAA
aggctgtactttttcagtta

SEQ ID NO: 6211 - DNA, 20 bp, Artificial Sequence
  Description of Artificial Sequence: Synthetic oligonucleotide
  Target: ATXN2; (-) strand; PAM type: NNAGAAW; PAM sequence: TGAGAAT
cctttcctataacaatatta

SEQ ID NO: 6212 - DNA, 20 bp, Artificial Sequence
  Description of Artificial Sequence: Synthetic oligonucleotide
  Target: ATXN2; (-) strand; PAM type: NNAGAAW; PAM sequence: ACAGAAT
ttttgtatttttttgtagag

SEQ ID NO: 6213 - DNA, 20 bp, Artificial Sequence
  Description of Artificial Sequence: Synthetic oligonucleotide
  Target: ATXN2; (-) strand; PAM type: NNAGAAW; PAM sequence: ACAGAAT
aactttttttttcttttgac

SEQ ID NO: 6214 - DNA, 20 bp, Artificial Sequence
  Description of Artificial Sequence: Synthetic oligonucleotide
  Target: ATXN2; (-) strand; PAM type: NNAGAAW; PAM sequence: TAAGAAT
attactcttctgggtttttt

SEQ ID NO: 6215 - DNA, 20 bp, Artificial Sequence
  Description of Artificial Sequence: Synthetic oligonucleotide
  Target: ATXN2; (-) strand; PAM type: NNAGAAW; PAM sequence: TAAGAAA
taagcttttggtgtcgtatc

SEQ ID NO: 6216 - DNA, 20 bp, Artificial Sequence
  Description of Artificial Sequence: Synthetic oligonucleotide
  Target: ATXN2; (-) strand; PAM type: NNAGAAW; PAM sequence: AAAGAAA
aaacatactcttcaccccca

SEQ ID NO: 6217 - DNA, 20 bp, Artificial Sequence
  Description of Artificial Sequence: Synthetic oligonucleotide
  Target: ATXN2; (-) strand; PAM type: NNAGAAW; PAM sequence: GAAGAAA
gattgaatttaatatctcat

SEQ ID NO: 6218 - DNA, 20 bp, Artificial Sequence
  Description of Artificial Sequence: Synthetic oligonucleotide
  Target: ATXN2; (-) strand; PAM type: NNAGAAW; PAM sequence: GGAGAAT
gcactaggcaggctgaggca

SEQ ID NO: 6219 - DNA, 20 bp, Artificial Sequence
  Description of Artificial Sequence: Synthetic oligonucleotide
  Target: ATXN2; (-) strand; PAM type: NNAGAAW; PAM sequence: GAAGAAT
atcaacaggatcccaaggca

SEQ ID NO: 6220 - DNA, 20 bp, Artificial Sequence
  Description of Artificial Sequence: Synthetic oligonucleotide
  Target: ATXN2; (-) strand; PAM type: NNAGAAW; PAM sequence: AAAGAAT
ttaacacatacaaatgatac

SEQ ID NO: 6221 - DNA, 20 bp, Artificial Sequence
  Description of Artificial Sequence: Synthetic oligonucleotide
  Target: ATXN2; (-) strand; PAM type: NNAGAAW; PAM sequence: ATAGAAA
aaaccctgtcttgaccaaaa

SEQ ID NO: 6222 - DNA, 20 bp, Artificial Sequence
  Description of Artificial Sequence: Synthetic oligonucleotide
  Target: ATXN2; (-) strand; PAM type: NNAGAAW; PAM sequence: TTAGAAA
tcttcttgaaacttagcttc

SEQ ID NO: 6223 - DNA, 20 bp, Artificial Sequence
  Description of Artificial Sequence: Synthetic oligonucleotide
  Target: ATXN2; (-) strand; PAM type: NNAGAAW; PAM sequence: GTAGAAA
agaaacatcaaaccatatat

SEQ ID NO: 6224 - DNA, 20 bp, Artificial Sequence
  Description of Artificial Sequence: Synthetic oligonucleotide
  Target: ATXN2; (-) strand; PAM type: NNAGAAW; PAM sequence: TCAGAAA
aaaatgcgttatgtatacag

SEQ ID NO: 6225 - DNA, 20 bp, Artificial Sequence
  Description of Artificial Sequence: Synthetic oligonucleotide
  Target: ATXN2; (-) strand; PAM type: NNAGAAW; PAM sequence: TTAGAAA
ctaactgatgaatttgagtt

SEQ ID NO: 6226 - DNA, 20 bp, Artificial Sequence
  Description of Artificial Sequence: Synthetic oligonucleotide
  Target: ATXN2; (-) strand; PAM type: NNAGAAW; PAM sequence: TAAGAAT
attgatgatttaaagaaatt

SEQ ID NO: 6227 - DNA, 20 bp, Artificial Sequence
  Description of Artificial Sequence: Synthetic oligonucleotide
  Target: ATXN2; (-) strand; PAM type: NNAGAAW; PAM sequence: AAAGAAA
agaaaacagattgatgattt

SEQ ID NO: 6228 - DNA, 20 bp, Artificial Sequence
  Description of Artificial Sequence: Synthetic oligonucleotide
  Target: ATXN2; (-) strand; PAM type: NNAGAAW; PAM sequence: ATAGAAA
atcaccagttgtttctgaac

SEQ ID NO: 6229 - DNA, 20 bp, Artificial Sequence
  Description of Artificial Sequence: Synthetic oligonucleotide
  Target: ATXN2; (-) strand; PAM type: NNAGAAW; PAM sequence: AAAGAAT
tttctatcatctcatactaa

SEQ ID NO: 6230 - DNA, 20 bp, Artificial Sequence
  Description of Artificial Sequence: Synthetic oligonucleotide
  Target: ATXN2; (-) strand; PAM type: NNAGAAW; PAM sequence: ACAGAAT
atgtctaatttcatgcccat

SEQ ID NO: 6231 - DNA, 20 bp, Artificial Sequence
  Description of Artificial Sequence: Synthetic oligonucleotide
  Target: ATXN2; (-) strand; PAM type: NNAGAAW; PAM sequence: AAAGAAA
agaactctcctgcagggaat

SEQ ID NO: 6232 - DNA, 20 bp, Artificial Sequence
  Description of Artificial Sequence: Synthetic oligonucleotide
  Target: ATXN2; (-) strand; PAM type: NNAGAAW; PAM sequence: TGAGAAT
ttaggaagtaacatttgaac

SEQ ID NO: 6233 - DNA, 20 bp, Artificial Sequence
  Description of Artificial Sequence: Synthetic oligonucleotide
  Target: ATXN2; (-) strand; PAM type: NNAGAAW; PAM sequence: AAAGAAA
caaattcctaacattttgga

SEQ ID NO: 6234 - DNA, 20 bp, Artificial Sequence
  Description of Artificial Sequence: Synthetic oligonucleotide
  Target: ATXN2; (-) strand; PAM type: NNAGAAW; PAM sequence: AGAGAAA
acttgatacatttagttagg

SEQ ID NO: 6235 - DNA, 20 bp, Artificial Sequence
  Description of Artificial Sequence: Synthetic oligonucleotide
  Target: ATXN2; (-) strand; PAM type: NNAGAAW; PAM sequence: GGAGAAT
ctactccagaggctgaggca

SEQ ID NO: 6236 - DNA, 20 bp, Artificial Sequence
  Description of Artificial Sequence: Synthetic oligonucleotide
  Target: ATXN2; (-) strand; PAM type: NNAGAAW; PAM sequence: AAAGAAT
gtggaccttgatgttgctat

SEQ ID NO: 6237 - DNA, 20 bp, Artificial Sequence
  Description of Artificial Sequence: Synthetic oligonucleotide
  Target: ATXN2; (-) strand; PAM type: NNAGAAW; PAM sequence: TCAGAAT
gcatagttttggagatacac

SEQ ID NO: 6238 - DNA, 20 bp, Artificial Sequence
  Description of Artificial Sequence: Synthetic oligonucleotide
  Target: ATXN2; (-) strand; PAM type: NNAGAAW; PAM sequence: TGAGAAT
gatggtctggaaataaattt

SEQ ID NO: 6239 - DNA, 20 bp, Artificial Sequence
  Description of Artificial Sequence: Synthetic oligonucleotide
  Target: ATXN2; (-) strand; PAM type: NNAGAAW; PAM sequence: GGAGAAT
ctgctcaggaggctgaggca

SEQ ID NO: 6240 - DNA, 20 bp, Artificial Sequence
  Description of Artificial Sequence: Synthetic oligonucleotide
  Target: ATXN2; (-) strand; PAM type: NNAGAAW; PAM sequence: CAAGAAA
ttcaattatcttaagactac

SEQ ID NO: 6241 - DNA, 20 bp, Artificial Sequence
  Description of Artificial Sequence: Synthetic oligonucleotide
  Target: ATXN2; (-) strand; PAM type: NNAGAAW; PAM sequence: AAAGAAA
tctatctcaaaaaaaagaaa

SEQ ID NO: 6242 - DNA, 20 bp, Artificial Sequence
  Description of Artificial Sequence: Synthetic oligonucleotide
  Target: ATXN2; (-) strand; PAM type: NNAGAAW; PAM sequence: AAAGAAA
gcgaaactctatctcaaaaa

SEQ ID NO: 6243 - DNA, 20 bp, Artificial Sequence
  Description of Artificial Sequence: Synthetic oligonucleotide
  Target: ATXN2; (-) strand; PAM type: NNAGAAW; PAM sequence: GGAGAAT
ctatttgagaggctgaggca

SEQ ID NO: 6244 - DNA, 20 bp, Artificial Sequence
  Description of Artificial Sequence: Synthetic oligonucleotide
  Target: ATXN2; (-) strand; PAM type: NNAGAAW; PAM sequence: AAAGAAA
atcagtccagagaaccttta

SEQ ID NO: 6245 - DNA, 20 bp, Artificial Sequence
  Description of Artificial Sequence: Synthetic oligonucleotide
  Target: ATXN2; (-) strand; PAM type: NNAGAAW; PAM sequence: AAAGAAT
tgtggtaagcaagagcttac

SEQ ID NO: 6246 - DNA, 20 bp, Artificial Sequence
  Description of Artificial Sequence: Synthetic oligonucleotide
  Target: ATXN2; (-) strand; PAM type: NNAGAAW; PAM sequence: GGAGAAT
ctacttgggaggctgaggca

SEQ ID NO: 6247 - DNA, 20 bp, Artificial Sequence
  Description of Artificial Sequence: Synthetic oligonucleotide
  Target: ATXN2; (-) strand; PAM type: NNAGAAW; PAM sequence: GTAGAAT
gtatgtatatgttaaaaata

SEQ ID NO: 6248 - DNA, 20 bp, Artificial Sequence
  Description of Artificial Sequence: Synthetic oligonucleotide
  Target: ATXN2; (-) strand; PAM type: NNAGAAW; PAM sequence: CTAGAAT
ggggttccatatccagtggc

SEQ ID NO: 6249 - DNA, 20 bp, Artificial Sequence
  Description of Artificial Sequence: Synthetic oligonucleotide
  Target: ATXN2; (-) strand; PAM type: NNAGAAW; PAM sequence: GCAGAAA
tgtgtgaatgggtgtattta

SEQ ID NO: 6250 - DNA, 20 bp, Artificial Sequence
  Description of Artificial Sequence: Synthetic oligonucleotide
  Target: ATXN2; (-) strand; PAM type: NNAGAAW; PAM sequence: AAAGAAT
cattccacaaaataattctg

SEQ ID NO: 6251 - DNA, 20 bp, Artificial Sequence
  Description of Artificial Sequence: Synthetic oligonucleotide
  Target: ATXN2; (-) strand; PAM type: NNAGAAW; PAM sequence: GTAGAAA
tttctaattttagaagtaat

SEQ ID NO: 6252 - DNA, 20 bp, Artificial Sequence
  Description of Artificial Sequence: Synthetic oligonucleotide
  Target: ATXN2; (-) strand; PAM type: NNAGAAW; PAM sequence: AGAGAAA
gataaataaactaaaatttt

SEQ ID NO: 6253 - DNA, 20 bp, Artificial Sequence
  Description of Artificial Sequence: Synthetic oligonucleotide
  Target: ATXN2; (-) strand; PAM type: NNAGAAW; PAM sequence: TAAGAAA
agctcacagcctgctaagcc

SEQ ID NO: 6254 - DNA, 20 bp, Artificial Sequence
  Description of Artificial Sequence: Synthetic oligonucleotide
  Target: ATXN2; (-) strand; PAM type: NNAGAAW; PAM sequence: ATAGAAT
taatacaagtcatcccttta

SEQ ID NO: 6255 - DNA, 20 bp, Artificial Sequence
  Description of Artificial Sequence: Synthetic oligonucleotide
  Target: ATXN2; (-) strand; PAM type: NNAGAAW; PAM sequence: GTAGAAT
ggcatggcagaatcaataat

SEQ ID NO: 6256 - DNA, 20 bp, Artificial Sequence
  Description of Artificial Sequence: Synthetic oligonucleotide
  Target: ATXN2; (-) strand; PAM type: NNAGAAW; PAM sequence: GCAGAAT
gagtagtcactagtggcatg

SEQ ID NO: 6257 - DNA, 20 bp, Artificial Sequence
  Description of Artificial Sequence: Synthetic oligonucleotide
  Target: ATXN2; (-) strand; PAM type: NNAGAAW; PAM sequence: TTAGAAA
ctaatgcacagtagactgat

SEQ ID NO: 6258 - DNA, 20 bp, Artificial Sequence
  Description of Artificial Sequence: Synthetic oligonucleotide
  Target: ATXN2; (-) strand; PAM type: NNAGAAW; PAM sequence: GGAGAAT
ctacttgggaggctgaggca

SEQ ID NO: 6259 - DNA, 20 bp, Artificial Sequence
  Description of Artificial Sequence: Synthetic oligonucleotide
  Target: ATXN2; (-) strand; PAM type: NNAGAAW; PAM sequence: ACAGAAA
tgctcatgtattaacttcac

SEQ ID NO: 6260 - DNA, 20 bp, Artificial Sequence
  Description of Artificial Sequence: Synthetic oligonucleotide
  Target: ATXN2; (-) strand; PAM type: NNAGAAW; PAM sequence: TGAGAAT
agtaagcgatgtttatttaa

SEQ ID NO: 6261 - DNA, 20 bp, Artificial Sequence
  Description of Artificial Sequence: Synthetic oligonucleotide
  Target: ATXN2; (-) strand; PAM type: NNAGAAW; PAM sequence: GGAGAAA
tgtgtttctcctgcttccct

SEQ ID NO: 6262 - DNA, 20 bp, Artificial Sequence
  Description of Artificial Sequence: Synthetic oligonucleotide
  Target: ATXN2; (-) strand; PAM type: NNAGAAW; PAM sequence: GTAGAAA
atcaaatacagggatatgtt

SEQ ID NO: 6263 - DNA, 20 bp, Artificial Sequence
  Description of Artificial Sequence: Synthetic oligonucleotide
  Target: ATXN2; (-) strand; PAM type: NNAGAAW; PAM sequence: TAAGAAT
atttctttcctcgtcaaaaa

SEQ ID NO: 6264 - DNA, 20 bp, Artificial Sequence
  Description of Artificial Sequence: Synthetic oligonucleotide
  Target: ATXN2; (-) strand; PAM type: NNAGAAW; PAM sequence: GAAGAAT
agttgatttttagaatgcca

SEQ ID NO: 6265 - DNA, 20 bp, Artificial Sequence
  Description of Artificial Sequence: Synthetic oligonucleotide
  Target: ATXN2; (-) strand; PAM type: NNAGAAW; PAM sequence: TTAGAAT
tagattaaagtagttgattt

SEQ ID NO: 6266 - DNA, 20 bp, Artificial Sequence
  Description of Artificial Sequence: Synthetic oligonucleotide
  Target: ATXN2; (-) strand; PAM type: NNAGAAW; PAM sequence: AGAGAAA
attaaccttttgttcattag

SEQ ID NO: 6267 - DNA, 20 bp, Artificial Sequence
  Description of Artificial Sequence: Synthetic oligonucleotide
  Target: ATXN2; (-) strand; PAM type: NNAGAAW; PAM sequence: CAAGAAA
cctcaaagggttaaaatgta

SEQ ID NO: 6268 - DNA, 20 bp, Artificial Sequence
  Description of Artificial Sequence: Synthetic oligonucleotide
  Target: ATXN2; (-) strand; PAM type: NNAGAAW; PAM sequence: TGAGAAA
tcctttaaacaaccagttac

SEQ ID NO: 6269 - DNA, 20 bp, Artificial Sequence
  Description of Artificial Sequence: Synthetic oligonucleotide
  Target: ATXN2; (-) strand; PAM type: NNAGAAW; PAM sequence: TGAGAAA
ttaaaaaacctgaagggggc

SEQ ID NO: 6270 - DNA, 20 bp, Artificial Sequence
  Description of Artificial Sequence: Synthetic oligonucleotide
  Target: ATXN2; (-) strand; PAM type: NNAGAAW; PAM sequence: ACAGAAT
aagattttagttgtttataa

SEQ ID NO: 6271 - DNA, 20 bp, Artificial Sequence
  Description of Artificial Sequence: Synthetic oligonucleotide
  Target: ATXN2; (-) strand; PAM type: NNAGAAW; PAM sequence: CCAGAAT
gttttcattgagtcttttct

SEQ ID NO: 6272 - DNA, 20 bp, Artificial Sequence
  Description of Artificial Sequence: Synthetic oligonucleotide
  Target: ATXN2; (-) strand; PAM type: NNAGAAW; PAM sequence: AAAGAAA
acagtttagcaacttaagta

SEQ ID NO: 6273 - DNA, 20 bp, Artificial Sequence
  Description of Artificial Sequence: Synthetic oligonucleotide
  Target: ATXN2; (-) strand; PAM type: NNAGAAW; PAM sequence: AGAGAAA
gtcatgtgaagaaagtgact

SEQ ID NO: 6274 - DNA, 20 bp, Artificial Sequence
  Description of Artificial Sequence: Synthetic oligonucleotide
  Target: ATXN2; (-) strand; PAM type: NNAGAAW; PAM sequence: GAAGAAA
gacatgatcaagagtcatgt

SEQ ID NO: 6275 - DNA, 20 bp, Artificial Sequence
  Description of Artificial Sequence: Synthetic oligonucleotide
  Target: ATXN2; (-) strand; PAM type: NNAGAAW; PAM sequence: CAAGAAA
tttctatattatgcttactt

SEQ ID NO: 6276 - DNA, 20 bp, Artificial Sequence
  Description of Artificial Sequence: Synthetic oligonucleotide
  Target: ATXN2; (-) strand; PAM type: NNAGAAW; PAM sequence: AAAGAAA
gccaaaaacacttcacatat

SEQ ID NO: 6277 - DNA, 20 bp, Artificial Sequence
  Description of Artificial Sequence: Synthetic oligonucleotide
  Target: ATXN2; (-) strand; PAM type: NNAGAAW; PAM sequence: ACAGAAT
atatcctggggaagtgggag

SEQ ID NO: 6278 - DNA, 20 bp, Artificial Sequence
  Description of Artificial Sequence: Synthetic oligonucleotide
  Target: ATXN2; (-) strand; PAM type: NNAGAAW; PAM sequence: AAAGAAA
taaatatattcctcctggac

SEQ ID NO: 6279 - DNA, 20 bp, Artificial Sequence
  Description of Artificial Sequence: Synthetic oligonucleotide
  Target: ATXN2; (-) strand; PAM type: NNAGAAW; PAM sequence: TTAGAAT
tttcattggcttggtacctt

SEQ ID NO: 6280 - DNA, 20 bp, Artificial Sequence
  Description of Artificial Sequence: Synthetic oligonucleotide
  Target: ATXN2; (-) strand; PAM type: NNAGAAW; PAM sequence: GCAGAAT
gttaaactttgtgcttagga

SEQ ID NO: 6281 - DNA, 20 bp, Artificial Sequence
  Description of Artificial Sequence: Synthetic oligonucleotide
  Target: ATXN2; (-) strand; PAM type: NNAGAAW; PAM sequence: TGAGAAT
catagagaggtcaagtggga

SEQ ID NO: 6282 - DNA, 20 bp, Artificial Sequence
  Description of Artificial Sequence: Synthetic oligonucleotide
  Target: ATXN2; (-) strand; PAM type: NNAGAAW; PAM sequence: TGAGAAA
gatctcagagaaaataaaat

SEQ ID NO: 6283 - DNA, 20 bp, Artificial Sequence
  Description of Artificial Sequence: Synthetic oligonucleotide
  Target: ATXN2; (-) strand; PAM type: NNAGAAW; PAM sequence: AGAGAAA
ccagtgagagaagagatctc

SEQ ID NO: 6284 - DNA, 20 bp, Artificial Sequence
  Description of Artificial Sequence: Synthetic oligonucleotide
  Target: ATXN2; (-) strand; PAM type: NNAGAAW; PAM sequence: TGAGAAA
tcatttattcataaacgtgt

SEQ ID NO: 6285 - DNA, 20 bp, Artificial Sequence
  Description of Artificial Sequence: Synthetic oligonucleotide
  Target: ATXN2; (-) strand; PAM type: NNAGAAW; PAM sequence: TGAGAAT
gcactgaaatagttcaactg

SEQ ID NO: 6286 - DNA, 20 bp, Artificial Sequence
  Description of Artificial Sequence: Synthetic oligonucleotide
  Target: ATXN2; (-) strand; PAM type: NNAGAAW; PAM sequence: TGAGAAA
gccatgtacaagcatggcta

SEQ ID NO: 6287 - DNA, 20 bp, Artificial Sequence
  Description of Artificial Sequence: Synthetic oligonucleotide
  Target: ATXN2; (-) strand; PAM type: NNAGAAW; PAM sequence: AGAGAAA
ctagcataacctgtagagtc

SEQ ID NO: 6288 - DNA, 20 bp, Artificial Sequence
  Description of Artificial Sequence: Synthetic oligonucleotide
  Target: ATXN2; (-) strand; PAM type: NNAGAAW; PAM sequence: ACAGAAT
gttcaaagtactaggaacat

SEQ ID NO: 6289 - DNA, 20 bp, Artificial Sequence
  Description of Artificial Sequence: Synthetic oligonucleotide
  Target: ATXN2; (-) strand; PAM type: NNAGAAW; PAM sequence: AGAGAAA
gaattggtttaagatctgtt

SEQ ID NO: 6290 - DNA, 20 bp, Artificial Sequence
  Description of Artificial Sequence: Synthetic oligonucleotide
  Target: ATXN2; (-) strand; PAM type: NNAGAAW; PAM sequence: GTAGAAT
agcttaggtagagaatgcaa

SEQ ID NO: 6291 - DNA, 20 bp, Artificial Sequence
  Description of Artificial Sequence: Synthetic oligonucleotide
  Target: ATXN2; (-) strand; PAM type: NNAGAAW; PAM sequence: AGAGAAT
tcctttaatatagcttaggt

SEQ ID NO: 6292 - DNA, 20 bp, Artificial Sequence
  Description of Artificial Sequence: Synthetic oligonucleotide
  Target: ATXN2; (-) strand; PAM type: NNAGAAW; PAM sequence: AGAGAAA
agaaaaatacacagcagttc

SEQ ID NO: 6293 - DNA, 20 bp, Artificial Sequence
  Description of Artificial Sequence: Synthetic oligonucleotide
  Target: ATXN2; (-) strand; PAM type: NNAGAAW; PAM sequence: GAAGAAA
aaaatgatgataggagtgag

SEQ ID NO: 6294 - DNA, 20 bp, Artificial Sequence
  Description of Artificial Sequence: Synthetic oligonucleotide
  Target: ATXN2; (-) strand; PAM type: NNAGAAW; PAM sequence: GAAGAAA
caagggcaaaccagttagca

SEQ ID NO: 6295 - DNA, 20 bp, Artificial Sequence
  Description of Artificial Sequence: Synthetic oligonucleotide
  Target: ATXN2; (-) strand; PAM type: NNAGAAW; PAM sequence: GAAGAAT
ccttagaaagagataactca

SEQ ID NO: 6296 - DNA, 20 bp, Artificial Sequence
  Description of Artificial Sequence: Synthetic oligonucleotide
  Target: ATXN2; (-) strand; PAM type: NNAGAAW; PAM sequence: TTAGAAA
cctcatgtttcagagtgccc

SEQ ID NO: 6297 - DNA, 20 bp, Artificial Sequence
  Description of Artificial Sequence: Synthetic oligonucleotide
  Target: ATXN2; (-) strand; PAM type: NNAGAAW; PAM sequence: TTAGAAT
aaaggtaacagaaaaaaaag

SEQ ID NO: 6298 - DNA, 20 bp, Artificial Sequence
  Description of Artificial Sequence: Synthetic oligonucleotide
  Target: ATXN2; (-) strand; PAM type: NNAGAAW; PAM sequence: ACAGAAA
gttcctctggagaaaaggta

SEQ ID NO: 6299 - DNA, 20 bp, Artificial Sequence
  Description of Artificial Sequence: Synthetic oligonucleotide
  Target: ATXN2; (-) strand; PAM type: NNAGAAW; PAM sequence: GGAGAAA
tttttgaaatatgttcctct

SEQ ID NO: 6300 - DNA, 20 bp, Artificial Sequence
  Description of Artificial Sequence: Synthetic oligonucleotide
  Target: ATXN2; (-) strand; PAM type: NNAGAAW; PAM sequence: GAAGAAA
atgatatgtttcgatataat

SEQ ID NO: 6301 - DNA, 20 bp, Artificial Sequence
  Description of Artificial Sequence: Synthetic oligonucleotide
  Target: ATXN2; (-) strand; PAM type: NNAGAAW; PAM sequence: AGAGAAA
aaaggtggcttttacaggtt

SEQ ID NO: 6302 - DNA, 20 bp, Artificial Sequence
  Description of Artificial Sequence: Synthetic oligonucleotide
  Target: ATXN2; (-) strand; PAM type: NNAGAAW; PAM sequence: GTAGAAT
taatttcctatagtttcctc

SEQ ID NO: 6303 - DNA, 20 bp, Artificial Sequence
  Description of Artificial Sequence: Synthetic oligonucleotide
  Target: ATXN2; (-) strand; PAM type: NNAGAAW; PAM sequence: AAAGAAT
ttggttgattcttttacgtt

SEQ ID NO: 6304 - DNA, 20 bp, Artificial Sequence
  Description of Artificial Sequence: Synthetic oligonucleotide
  Target: ATXN2; (-) strand; PAM type: NNAGAAW; PAM sequence: AGAGAAT
aaaaaaggagttgaaacatt

SEQ ID NO: 6305 - DNA, 20 bp, Artificial Sequence
  Description of Artificial Sequence: Synthetic oligonucleotide
  Target: ATXN2; (-) strand; PAM type: NNAGAAW; PAM sequence: CAAGAAA
aagatgtctgaaattacacc

SEQ ID NO: 6306 - DNA, 20 bp, Artificial Sequence
  Description of Artificial Sequence: Synthetic oligonucleotide
  Target: ATXN2; (-) strand; PAM type: NNAGAAW; PAM sequence: AGAGAAA
aagatatctaagatttatta

SEQ ID NO: 6307 - DNA, 20 bp, Artificial Sequence
  Description of Artificial Sequence: Synthetic oligonucleotide
  Target: ATXN2; (-) strand; PAM type: NNAGAAW; PAM sequence: AAAGAAT
aaacactacatatctcccaa

SEQ ID NO: 6308 - DNA, 20 bp, Artificial Sequence
  Description of Artificial Sequence: Synthetic oligonucleotide
  Target: ATXN2; (-) strand; PAM type: NNAGAAW; PAM sequence: AGAGAAT
aattgatagagtctttctgg

SEQ ID NO: 6309 - DNA, 20 bp, Artificial Sequence
  Description of Artificial Sequence: Synthetic oligonucleotide
  Target: ATXN2; (-) strand; PAM type: NNAGAAW; PAM sequence: AGAGAAT
gaatcttccattgagtagaa

SEQ ID NO: 6310 - DNA, 20 bp, Artificial Sequence
  Description of Artificial Sequence: Synthetic oligonucleotide
  Target: ATXN2; (-) strand; PAM type: NNAGAAW; PAM sequence: GTAGAAA
aatgaagaatcttccattga

SEQ ID NO: 6311 - DNA, 20 bp, Artificial Sequence
  Description of Artificial Sequence: Synthetic oligonucleotide
  Target: ATXN2; (-) strand; PAM type: NNAGAAW; PAM sequence: GAAGAAT
taccaatatttgagtagaat

SEQ ID NO: 6312 - DNA, 20 bp, Artificial Sequence
  Description of Artificial Sequence: Synthetic oligonucleotide
  Target: ATXN2; (-) strand; PAM type: NNAGAAW; PAM sequence: GTAGAAT
gttatggtaccaatatttga

SEQ ID NO: 6313 - DNA, 20 bp, Artificial Sequence
  Description of Artificial Sequence: Synthetic oligonucleotide
  Target: ATXN2; (-) strand; PAM type: NNAGAAW; PAM sequence: TAAGAAA
acataaggagaccccttctc

SEQ ID NO: 6314 - DNA, 20 bp, Artificial Sequence
  Description of Artificial Sequence: Synthetic oligonucleotide
  Target: ATXN2; (-) strand; PAM type: NNAGAAW; PAM sequence: GAAGAAA
acattttaagcctcttgtct

SEQ ID NO: 6315 - DNA, 20 bp, Artificial Sequence
  Description of Artificial Sequence: Synthetic oligonucleotide
  Target: ATXN2; (-) strand; PAM type: NNAGAAW; PAM sequence: TTAGAAA
agaagtagcttaaattaaaa

SEQ ID NO: 6316 - DNA, 20 bp, Artificial Sequence
  Description of Artificial Sequence: Synthetic oligonucleotide
  Target: ATXN2; (-) strand; PAM type: NNAGAAW; PAM sequence: AAAGAAA
ctttctcccaagcaatatat

SEQ ID NO: 6317 - DNA, 20 bp, Artificial Sequence
  Description of Artificial Sequence: Synthetic oligonucleotide
  Target: ATXN2; (-) strand; PAM type: NNAGAAW; PAM sequence: AAAGAAA
tgtggcttaaaattatatga

SEQ ID NO: 6318 - DNA, 20 bp, Artificial Sequence
  Description of Artificial Sequence: Synthetic oligonucleotide
  Target: ATXN2; (-) strand; PAM type: NNAGAAW; PAM sequence: GGAGAAT
ctactcgggagactgaggca

SEQ ID NO: 6319 - DNA, 20 bp, Artificial Sequence
  Description of Artificial Sequence: Synthetic oligonucleotide
  Target: ATXN2; (-) strand; PAM type: NNAGAAW; PAM sequence: CCAGAAA
gcatgagccaccacatctgg

SEQ ID NO: 6320 - DNA, 20 bp, Artificial Sequence
  Description of Artificial Sequence: Synthetic oligonucleotide
  Target: ATXN2; (-) strand; PAM type: NNAGAAW; PAM sequence: ATAGAAA
gagatatttttgatggattg

SEQ ID NO: 6321 - DNA, 20 bp, Artificial Sequence
  Description of Artificial Sequence: Synthetic oligonucleotide
  Target: ATXN2; (-) strand; PAM type: NNAGAAW; PAM sequence: AAAGAAA
agagcaagctccatctcaaa

SEQ ID NO: 6322 - DNA, 20 bp, Artificial Sequence
  Description of Artificial Sequence: Synthetic oligonucleotide
  Target: ATXN2; (-) strand; PAM type: NNAGAAW; PAM sequence: TTAGAAT
tctgggaggggttaaaccac

SEQ ID NO: 6323 - DNA, 20 bp, Artificial Sequence
  Description of Artificial Sequence: Synthetic oligonucleotide
  Target: ATXN2; (-) strand; PAM type: NNAGAAW; PAM sequence: AGAGAAA
gctgagtctaactcccaact

SEQ ID NO: 6324 - DNA, 20 bp, Artificial Sequence
  Description of Artificial Sequence: Synthetic oligonucleotide
  Target: ATXN2; (-) strand; PAM type: NNAGAAW; PAM sequence: TTAGAAT
tagtttgggataagaagagg

SEQ ID NO: 6325 - DNA, 20 bp, Artificial Sequence
  Description of Artificial Sequence: Synthetic oligonucleotide
  Target: ATXN2; (-) strand; PAM type: NNAGAAW; PAM sequence: TTAGAAT
cctcagcacactcttggctc

SEQ ID NO: 6326 - DNA, 20 bp, Artificial Sequence
  Description of Artificial Sequence: Synthetic oligonucleotide
  Target: ATXN2; (-) strand; PAM type: NNAGAAW; PAM sequence: TTAGAAT
ggtaagatagcattagtctc

SEQ ID NO: 6327 - DNA, 20 bp, Artificial Sequence
  Description of Artificial Sequence: Synthetic oligonucleotide
  Target: ATXN2; (-) strand; PAM type: NNAGAAW; PAM sequence: TGAGAAT
tagttttttgtctagtgttg

SEQ ID NO: 6328 - DNA, 20 bp, Artificial Sequence
  Description of Artificial Sequence: Synthetic oligonucleotide
  Target: ATXN2; (-) strand; PAM type: NNAGAAW; PAM sequence: TGAGAAA
cacacacacataccctgtag

SEQ ID NO: 6329 - DNA, 20 bp, Artificial Sequence
  Description of Artificial Sequence: Synthetic oligonucleotide
  Target: ATXN2; (-) strand; PAM type: NNAGAAW; PAM sequence: TTAGAAT
ggatccttttagaaatttgt

SEQ ID NO: 6330 - DNA, 20 bp, Artificial Sequence
  Description of Artificial Sequence: Synthetic oligonucleotide
  Target: ATXN2; (-) strand; PAM type: NNAGAAW; PAM sequence: TTAGAAA
gctcttacttggggatcctt

SEQ ID NO: 6331 - DNA, 20 bp, Artificial Sequence
  Description of Artificial Sequence: Synthetic oligonucleotide
  Target: ATXN2; (-) strand; PAM type: NNAGAAW; PAM sequence: TGAGAAA
ttaagattaaaatgtagcat

SEQ ID NO: 6332 - DNA, 20 bp, Artificial Sequence
  Description of Artificial Sequence: Synthetic oligonucleotide
  Target: ATXN2; (-) strand; PAM type: NNAGAAW; PAM sequence: ATAGAAT
accaaggaatatcattcttt

SEQ ID NO: 6333 - DNA, 20 bp, Artificial Sequence
  Description of Artificial Sequence: Synthetic oligonucleotide
  Target: ATXN2; (-) strand; PAM type: NNAGAAW; PAM sequence: TTAGAAA
cctaagtcctttactcatct

SEQ ID NO: 6334 - DNA, 20 bp, Artificial Sequence
  Description of Artificial Sequence: Synthetic oligonucleotide
  Target: ATXN2; (-) strand; PAM type: NNAGAAW; PAM sequence: GCAGAAT
tagtggatattattaatagt

SEQ ID NO: 6335 - DNA, 20 bp, Artificial Sequence
  Description of Artificial Sequence: Synthetic oligonucleotide
  Target: ATXN2; (-) strand; PAM type: NNAGAAW; PAM sequence: TCAGAAT
tgtaaccactgtaaaacaaa

SEQ ID NO: 6336 - DNA, 20 bp, Artificial Sequence
  Description of Artificial Sequence: Synthetic oligonucleotide
  Target: ATXN2; (-) strand; PAM type: NNAGAAW; PAM sequence: ACAGAAA
aacaaattttttttaaagaa

SEQ ID NO: 6337 - DNA, 20 bp, Artificial Sequence
  Description of Artificial Sequence: Synthetic oligonucleotide
  Target: ATXN2; (-) strand; PAM type: NNAGAAW; PAM sequence: AAAGAAA
aacaaaaacaaatttttttt

SEQ ID NO: 6338 - DNA, 20 bp, Artificial Sequence
  Description of Artificial Sequence: Synthetic oligonucleotide
  Target: ATXN2; (-) strand; PAM type: NNAGAAW; PAM sequence: TCAGAAA
tctctatacctgtagttcct

SEQ ID NO: 6339 - DNA, 20 bp, Artificial Sequence
  Description of Artificial Sequence: Synthetic oligonucleotide
  Target: ATXN2; (-) strand; PAM type: NNAGAAW; PAM sequence: CCAGAAT
caaaatgactaagtttctgc

SEQ ID NO: 6340 - DNA, 20 bp, Artificial Sequence
  Description of Artificial Sequence: Synthetic oligonucleotide
  Target: ATXN2; (-) strand; PAM type: NNAGAAW; PAM sequence: GAAGAAA
gaaaaggctgatttagttga

SEQ ID NO: 6341 - DNA, 20 bp, Artificial Sequence
  Description of Artificial Sequence: Synthetic oligonucleotide
  Target: ATXN2; (-) strand; PAM type: NNAGAAW; PAM sequence: TGAGAAA
ttatatggaactttgatgtt

SEQ ID NO: 6342 - DNA, 20 bp, Artificial Sequence
  Description of Artificial Sequence: Synthetic oligonucleotide
  Target: ATXN2; (-) strand; PAM type: NNAGAAW; PAM sequence: TGAGAAA
catataacgatgacacataa

SEQ ID NO: 6343 - DNA, 20 bp, Artificial Sequence
  Description of Artificial Sequence: Synthetic oligonucleotide
  Target: ATXN2; (-) strand; PAM type: NNAGAAW; PAM sequence: TTAGAAA
gataggctgtcactgtcact

SEQ ID NO: 6344 - DNA, 20 bp, Artificial Sequence
  Description of Artificial Sequence: Synthetic oligonucleotide
  Target: ATXN2; (-) strand; PAM type: NNAGAAW; PAM sequence: TCAGAAA
cctgtgttcttgtgtacaat

SEQ ID NO: 6345 - DNA, 20 bp, Artificial Sequence
  Description of Artificial Sequence: Synthetic oligonucleotide
  Target: ATXN2; (-) strand; PAM type: NNAGAAW; PAM sequence: TAAGAAT
ccatggattaagaaaaaggc

SEQ ID NO: 6346 - DNA, 20 bp, Artificial Sequence
  Description of Artificial Sequence: Synthetic oligonucleotide
  Target: ATXN2; (-) strand; PAM type: NNAGAAW; PAM sequence: TAAGAAA
tattgaaggggcccatggat

SEQ ID NO: 6347 - DNA, 20 bp, Artificial Sequence
  Description of Artificial Sequence: Synthetic oligonucleotide
  Target: ATXN2; (-) strand; PAM type: NNAGAAW; PAM sequence: ACAGAAT
gcctcaaattatttttagaa

SEQ ID NO: 6348 - DNA, 20 bp, Artificial Sequence
  Description of Artificial Sequence: Synthetic oligonucleotide
  Target: ATXN2; (-) strand; PAM type: NNAGAAW; PAM sequence: TTAGAAA
cacccggcctcaaattattt

SEQ ID NO: 6349 - DNA, 20 bp, Artificial Sequence
  Description of Artificial Sequence: Synthetic oligonucleotide
  Target: ATXN2; (-) strand; PAM type: NNAGAAW; PAM sequence: AGAGAAA
gcattgatgaccttggatga

SEQ ID NO: 6350 - DNA, 20 bp, Artificial Sequence
  Description of Artificial Sequence: Synthetic oligonucleotide
  Target: ATXN2; (-) strand; PAM type: NNAGAAW; PAM sequence: AGAGAAT
gattctcaaagaatttgtgg

SEQ ID NO: 6351 - DNA, 20 bp, Artificial Sequence
  Description of Artificial Sequence: Synthetic oligonucleotide
  Target: ATXN2; (-) strand; PAM type: NNAGAAW; PAM sequence: AAAGAAT
acctggatctgtggattctc

SEQ ID NO: 6352 - DNA, 20 bp, Artificial Sequence
  Description of Artificial Sequence: Synthetic oligonucleotide
  Target: ATXN2; (-) strand; PAM type: NNAGAAW; PAM sequence: GGAGAAA
ccagcctgctgggtgtggct

SEQ ID NO: 6353 - DNA, 20 bp, Artificial Sequence
  Description of Artificial Sequence: Synthetic oligonucleotide
  Target: ATXN2; (-) strand; PAM type: NNAGAAW; PAM sequence: CCAGAAT
cggaaggaactgcttctctt

SEQ ID NO: 6354 - DNA, 20 bp, Artificial Sequence
  Description of Artificial Sequence: Synthetic oligonucleotide
  Target: ATXN2; (-) strand; PAM type: NNAGAAW; PAM sequence: AAAGAAA
aaagaaaaaaaactgtctga

SEQ ID NO: 6355 - DNA, 20 bp, Artificial Sequence
  Description of Artificial Sequence: Synthetic oligonucleotide
  Target: ATXN2; (-) strand; PAM type: NNAGAAW; PAM sequence: AAAGAAA
cgcaacagagtgtgagaaga

SEQ ID NO: 6356 - DNA, 20 bp, Artificial Sequence
  Description of Artificial Sequence: Synthetic oligonucleotide
  Target: ATXN2; (-) strand; PAM type: NNAGAAW; PAM sequence: GAAGAAA
gcctgcgcaacagagtgtga

SEQ ID NO: 6357 - DNA, 20 bp, Artificial Sequence
  Description of Artificial Sequence: Synthetic oligonucleotide
  Target: ATXN2; (-) strand; PAM type: NNAGAAW; PAM sequence: ATAGAAT
ggagttcagaaaacaaattt

SEQ ID NO: 6358 - DNA, 20 bp, Artificial Sequence
  Description of Artificial Sequence: Synthetic oligonucleotide
  Target: ATXN2; (-) strand; PAM type: NNAGAAW; PAM sequence: TCAGAAA
gcattaaacttttctggagt

SEQ ID NO: 6359 - DNA, 20 bp, Artificial Sequence
  Description of Artificial Sequence: Synthetic oligonucleotide
  Target: ATXN2; (-) strand; PAM type: NNAGAAW; PAM sequence: ATAGAAT
tttaacattttctttttagt

SEQ ID NO: 6360 - DNA, 20 bp, Artificial Sequence
  Description of Artificial Sequence: Synthetic oligonucleotide
  Target: ATXN2; (-) strand; PAM type: NNAGAAW; PAM sequence: CTAGAAT
gtctctctctgtcaccccta

SEQ ID NO: 6361 - DNA, 20 bp, Artificial Sequence
  Description of Artificial Sequence: Synthetic oligonucleotide
  Target: ATXN2; (-) strand; PAM type: NNAGAAW; PAM sequence: TGAGAAA
gtttgtatgtatttatttgt

SEQ ID NO: 6362 - DNA, 20 bp, Artificial Sequence
  Description of Artificial Sequence: Synthetic oligonucleotide
  Target: ATXN2; (-) strand; PAM type: NNAGAAW; PAM sequence: GAAGAAT
cctggatttaatcccaacgt

SEQ ID NO: 6363 - DNA, 20 bp, Artificial Sequence
  Description of Artificial Sequence: Synthetic oligonucleotide
  Target: ATXN2; (-) strand; PAM type: NNAGAAW; PAM sequence: ACAGAAT
ttcagtggccactgttgttt

SEQ ID NO: 6364 - DNA, 20 bp, Artificial Sequence
  Description of Artificial Sequence: Synthetic oligonucleotide
  Target: ATXN2; (-) strand; PAM type: NNAGAAW; PAM sequence: AAAGAAA
tcaatcttgggcattgacat

SEQ ID NO: 6365 - DNA, 20 bp, Artificial Sequence
  Description of Artificial Sequence: Synthetic oligonucleotide
  Target: ATXN2; (-) strand; PAM type: NNAGAAW; PAM sequence: ATAGAAA
caaaagatttaacagtgaaa

SEQ ID NO: 6366 - DNA, 20 bp, Artificial Sequence
  Description of Artificial Sequence: Synthetic oligonucleotide
  Target: ATXN2; (-) strand; PAM type: NNAGAAW; PAM sequence: AGAGAAT
gctactagggaggctgaggc

SEQ ID NO: 6367 - DNA, 20 bp, Artificial Sequence
  Description of Artificial Sequence: Synthetic oligonucleotide
  Target: ATXN2; (-) strand; PAM type: NNAGAAW; PAM sequence: AAAGAAA
ttacattttcatcaccctga

SEQ ID NO: 6368 - DNA, 20 bp, Artificial Sequence
  Description of Artificial Sequence: Synthetic oligonucleotide
  Target: ATXN2; (-) strand; PAM type: NNAGAAW; PAM sequence: GGAGAAA
taatcattcatttgagatag

SEQ ID NO: 6369 - DNA, 20 bp, Artificial Sequence
  Description of Artificial Sequence: Synthetic oligonucleotide
  Target: ATXN2; (-) strand; PAM type: NNAGAAW; PAM sequence: CTAGAAA
tatctcactttatcgtagtg

SEQ ID NO: 6370 - DNA, 20 bp, Artificial Sequence
  Description of Artificial Sequence: Synthetic oligonucleotide
  Target: ATXN2; (-) strand; PAM type: NNAGAAW; PAM sequence: ACAGAAT
ccaatttgtacctctcacaa

SEQ ID NO: 6371 - DNA, 20 bp, Artificial Sequence
  Description of Artificial Sequence: Synthetic oligonucleotide
  Target: ATXN2; (-) strand; PAM type: NNAGAAW; PAM sequence: GAAGAAT
ttttcccttgaattttaact

SEQ ID NO: 6372 - DNA, 20 bp, Artificial Sequence
  Description of Artificial Sequence: Synthetic oligonucleotide
  Target: ATXN2; (-) strand; PAM type: NNAGAAW; PAM sequence: TAAGAAA
aagttagctaatttagagct

SEQ ID NO: 6373 - DNA, 20 bp, Artificial Sequence
  Description of Artificial Sequence: Synthetic oligonucleotide
  Target: ATXN2; (-) strand; PAM type: NNAGAAW; PAM sequence: GTAGAAT
tgcaccactcaggctttgct

SEQ ID NO: 6374 - DNA, 20 bp, Artificial Sequence
  Description of Artificial Sequence: Synthetic oligonucleotide
  Target: ATXN2; (-) strand; PAM type: NNAGAAW; PAM sequence: ACAGAAT
gcctaatggagaaaatgaaa

SEQ ID NO: 6375 - DNA, 20 bp, Artificial Sequence
  Description of Artificial Sequence: Synthetic oligonucleotide
  Target: ATXN2; (-) strand; PAM type: NNAGAAW; PAM sequence: GGAGAAA
tcctgatccagaagcctaat

SEQ ID NO: 6376 - DNA, 20 bp, Artificial Sequence
  Description of Artificial Sequence: Synthetic oligonucleotide
  Target: ATXN2; (-) strand; PAM type: NNAGAAW; PAM sequence: TTAGAAT
ctgtctctttcactctcttt

SEQ ID NO: 6377 - DNA, 20 bp, Artificial Sequence
  Description of Artificial Sequence: Synthetic oligonucleotide
  Target: ATXN2; (-) strand; PAM type: NNAGAAW; PAM sequence: ACAGAAT
ttttttgtcttagttcttct

SEQ ID NO: 6378 - DNA, 20 bp, Artificial Sequence
  Description of Artificial Sequence: Synthetic oligonucleotide
  Target: ATXN2; (-) strand; PAM type: NNAGAAW; PAM sequence: TGAGAAT
gaacacttttgccataggtt

SEQ ID NO: 6379 - DNA, 20 bp, Artificial Sequence
  Description of Artificial Sequence: Synthetic oligonucleotide
  Target: ATXN2; (-) strand; PAM type: NNAGAAW; PAM sequence: TAAGAAT
aaaagatatttgtacagctg

SEQ ID NO: 6380 - DNA, 20 bp, Artificial Sequence
  Description of Artificial Sequence: Synthetic oligonucleotide
  Target: ATXN2; (-) strand; PAM type: NNAGAAW; PAM sequence: ACAGAAA
tttacatatttgccagggaa

SEQ ID NO: 6381 - DNA, 20 bp, Artificial Sequence
  Description of Artificial Sequence: Synthetic oligonucleotide
  Target: ATXN2; (-) strand; PAM type: NNAGAAW; PAM sequence: AAAGAAT
ttgttctgttttttattaga

SEQ ID NO: 6382 - DNA, 20 bp, Artificial Sequence
  Description of Artificial Sequence: Synthetic oligonucleotide
  Target: ATXN2; (-) strand; PAM type: NNAGAAW; PAM sequence: TTAGAAA
aacagttgttctgtttttta

SEQ ID NO: 6383 - DNA, 20 bp, Artificial Sequence
  Description of Artificial Sequence: Synthetic oligonucleotide
  Target: ATXN2; (-) strand; PAM type: NNAGAAW; PAM sequence: AAAGAAT
ttctatttcatactcctggg

SEQ ID NO: 6384 - DNA, 20 bp, Artificial Sequence
  Description of Artificial Sequence: Synthetic oligonucleotide
  Target: ATXN2; (-) strand; PAM type: NNAGAAW; PAM sequence: AAAGAAT
tcttaaactctctattaggt

SEQ ID NO: 6385 - DNA, 20 bp, Artificial Sequence
  Description of Artificial Sequence: Synthetic oligonucleotide
  Target: ATXN2; (-) strand; PAM type: NNAGAAW; PAM sequence: TGAGAAA
cttgcgctgaatggtaaatg

SEQ ID NO: 6386 - DNA, 20 bp, Artificial Sequence
  Description of Artificial Sequence: Synthetic oligonucleotide
  Target: ATXN2; (-) strand; PAM type: NNAGAAW; PAM sequence: AAAGAAA
ttttattttattgtattttt

SEQ ID NO: 6387 - DNA, 20 bp, Artificial Sequence
  Description of Artificial Sequence: Synthetic oligonucleotide
  Target: ATXN2; (-) strand; PAM type: NNAGAAW; PAM sequence: TAAGAAA
cctcctcacttgtaatgatt

SEQ ID NO: 6388 - DNA, 20 bp, Artificial Sequence
  Description of Artificial Sequence: Synthetic oligonucleotide
  Target: ATXN2; (-) strand; PAM type: NNAGAAW; PAM sequence: GTAGAAA
catgccacaaactgggaaaa

SEQ ID NO: 6389 - DNA, 20 bp, Artificial Sequence
  Description of Artificial Sequence: Synthetic oligonucleotide
  Target: ATXN2; (-) strand; PAM type: NNAGAAW; PAM sequence: GGAGAAT
ctactcaggaggctaaggca

SEQ ID NO: 6390 - DNA, 20 bp, Artificial Sequence
  Description of Artificial Sequence: Synthetic oligonucleotide
  Target: ATXN2; (-) strand; PAM type: NNAGAAW; PAM sequence: TGAGAAA
aataaaaccaaatagattaa

SEQ ID NO: 6391 - DNA, 20 bp, Artificial Sequence
  Description of Artificial Sequence: Synthetic oligonucleotide
  Target: ATXN2; (-) strand; PAM type: NNAGAAW; PAM sequence: AAAGAAT
caaaaaaaaaaaaaaaaaaa

SEQ ID NO: 6392 - DNA, 20 bp, Artificial Sequence
  Description of Artificial Sequence: Synthetic oligonucleotide
  Target: ATXN2; (-) strand; PAM type: NNAGAAW; PAM sequence: GGAGAAT
ctactcgggaggctgaggca

SEQ ID NO: 6393 - DNA, 20 bp, Artificial Sequence
  Description of Artificial Sequence: Synthetic oligonucleotide
  Target: ATXN2; (-) strand; PAM type: NNAGAAW; PAM sequence: GGAGAAA
atgaccagcctgaccaacat

SEQ ID NO: 6394 - DNA, 20 bp, Artificial Sequence
  Description of Artificial Sequence: Synthetic oligonucleotide
  Target: ATXN2; (-) strand; PAM type: NNAGAAW; PAM sequence: TCAGAAT
gacttgccctacaaaatatg

SEQ ID NO: 6395 - DNA, 20 bp, Artificial Sequence
  Description of Artificial Sequence: Synthetic oligonucleotide
  Target: ATXN2; (-) strand; PAM type: NNAGAAW; PAM sequence: GTAGAAA
atatatatatatccgttttt

SEQ ID NO: 6396 - DNA, 20 bp, Artificial Sequence
  Description of Artificial Sequence: Synthetic oligonucleotide
  Target: ATXN2; (-) strand; PAM type: NNAGAAW; PAM sequence: GGAGAAT
ctacttgggaagctgaggca

SEQ ID NO: 6397 - DNA, 20 bp, Artificial Sequence
  Description of Artificial Sequence: Synthetic oligonucleotide
  Target: ATXN2; (-) strand; PAM type: NNAGAAW; PAM sequence: GGAGAAT
ctacttgggaggctgaggca

SEQ ID NO: 6398 - DNA, 20 bp, Artificial Sequence
  Description of Artificial Sequence: Synthetic oligonucleotide
  Target: ATXN2; (-) strand; PAM type: NNAGAAW; PAM sequence: GTAGAAA
atgggagcagaatccaaagt

SEQ ID NO: 6399 - DNA, 20 bp, Artificial Sequence
  Description of Artificial Sequence: Synthetic oligonucleotide
  Target: ATXN2; (-) strand; PAM type: NNAGAAW; PAM sequence: GCAGAAT
ttgattcaagatacatggga

SEQ ID NO: 6400 - DNA, 20 bp, Artificial Sequence
  Description of Artificial Sequence: Synthetic oligonucleotide
  Target: ATXN2; (-) strand; PAM type: NNAGAAW; PAM sequence: ATAGAAT
ataaaaacctctagcataaa

SEQ ID NO: 6401 - DNA, 20 bp, Artificial Sequence
  Description of Artificial Sequence: Synthetic oligonucleotide
  Target: ATXN2; (-) strand; PAM type: NNAGAAW; PAM sequence: ATAGAAA
ttttataatttttagagtat

SEQ ID NO: 6402 - DNA, 20 bp, Artificial Sequence
  Description of Artificial Sequence: Synthetic oligonucleotide
  Target: ATXN2; (-) strand; PAM type: NNAGAAW; PAM sequence: GTAGAAA
agaatagttcgtggtacaca

SEQ ID NO: 6403 - DNA, 20 bp, Artificial Sequence
  Description of Artificial Sequence: Synthetic oligonucleotide
  Target: ATXN2; (-) strand; PAM type: NNAGAAW; PAM sequence: ACAGAAT
tctatgtaatggaaagctaa

SEQ ID NO: 6404 - DNA, 20 bp, Artificial Sequence
  Description of Artificial Sequence: Synthetic oligonucleotide
  Target: ATXN2; (-) strand; PAM type: NNAGAAW; PAM sequence: AAAGAAA
gagattattgagattaaaag

SEQ ID NO: 6405 - DNA, 20 bp, Artificial Sequence
  Description of Artificial Sequence: Synthetic oligonucleotide
  Target: ATXN2; (-) strand; PAM type: NNAGAAW; PAM sequence: AAAGAAA
tacagagattattgagatta

SEQ ID NO: 6406 - DNA, 20 bp, Artificial Sequence
  Description of Artificial Sequence: Synthetic oligonucleotide
  Target: ATXN2; (-) strand; PAM type: NNAGAAW; PAM sequence: TTAGAAA
ctcttctgaacggcgtgaca

SEQ ID NO: 6407 - DNA, 20 bp, Artificial Sequence
  Description of Artificial Sequence: Synthetic oligonucleotide
  Target: ATXN2; (-) strand; PAM type: NNAGAAW; PAM sequence: TGAGAAA
aatgtgtaattagagaacag

SEQ ID NO: 6408 - DNA, 20 bp, Artificial Sequence
  Description of Artificial Sequence: Synthetic oligonucleotide
  Target: ATXN2; (-) strand; PAM type: NNAGAAW; PAM sequence: AAAGAAT
catctcaaaaataaaaaata

SEQ ID NO: 6409 - DNA, 20 bp, Artificial Sequence
  Description of Artificial Sequence: Synthetic oligonucleotide
  Target: ATXN2; (-) strand; PAM type: NNAGAAW; PAM sequence: GGAGAAT
ctactcgggaggctgagaca

SEQ ID NO: 6410 - DNA, 20 bp, Artificial Sequence
  Description of Artificial Sequence: Synthetic oligonucleotide
  Target: ATXN2; (-) strand; PAM type: NNAGAAW; PAM sequence: CAAGAAA
gcaaagcacgtgaataaatt

SEQ ID NO: 6411 - DNA, 20 bp, Artificial Sequence
  Description of Artificial Sequence: Synthetic oligonucleotide
  Target: ATXN2; (-) strand; PAM type: NNAGAAW; PAM sequence: AAAGAAA
taattttttttctttttttt

SEQ ID NO: 6412 - DNA, 20 bp, Artificial Sequence
  Description of Artificial Sequence: Synthetic oligonucleotide
  Target: ATXN2; (-) strand; PAM type: NNAGAAW; PAM sequence: CTAGAAA
tgaaactgtataccctcacc

SEQ ID NO: 6413 - DNA, 20 bp, Artificial Sequence
  Description of Artificial Sequence: Synthetic oligonucleotide
  Target: ATXN2; (-) strand; PAM type: NNAGAAW; PAM sequence: CAAGAAT
atggacagtacggagaaata

SEQ ID NO: 6414 - DNA, 20 bp, Artificial Sequence
  Description of Artificial Sequence: Synthetic oligonucleotide
  Target: ATXN2; (-) strand; PAM type: NNAGAAW; PAM sequence: GGAGAAA
cttgttgctatggacagtac

SEQ ID NO: 6415 - DNA, 20 bp, Artificial Sequence
  Description of Artificial Sequence: Synthetic oligonucleotide
  Target: ATXN2; (-) strand; PAM type: NNAGAAW; PAM sequence: AAAGAAT
gtagaagcattattttatgg

SEQ ID NO: 6416 - DNA, 20 bp, Artificial Sequence
  Description of Artificial Sequence: Synthetic oligonucleotide
  Target: ATXN2; (-) strand; PAM type: NNAGAAW; PAM sequence: TCAGAAT
aatgttggtttcaccctcct

SEQ ID NO: 6417 - DNA, 20 bp, Artificial Sequence
  Description of Artificial Sequence: Synthetic oligonucleotide
  Target: ATXN2; (-) strand; PAM type: NNAGAAW; PAM sequence: GAAGAAT
attctaattggatttagtct

SEQ ID NO: 6418 - DNA, 20 bp, Artificial Sequence
  Description of Artificial Sequence: Synthetic oligonucleotide
  Target: ATXN2; (-) strand; PAM type: NNAGAAW; PAM sequence: ACAGAAT
atactggctttggtgaagta

SEQ ID NO: 6419 - DNA, 20 bp, Artificial Sequence
  Description of Artificial Sequence: Synthetic oligonucleotide
  Target: ATXN2; (-) strand; PAM type: NNAGAAW; PAM sequence: ACAGAAA
gaaaatttgactgtctcttt

SEQ ID NO: 6420 - DNA, 20 bp, Artificial Sequence
  Description of Artificial Sequence: Synthetic oligonucleotide
  Target: ATXN2; (-) strand; PAM type: NNAGAAW; PAM sequence: CCAGAAA
tgactgtaggacttgcaaag

SEQ ID NO: 6421 - DNA, 20 bp, Artificial Sequence
  Description of Artificial Sequence: Synthetic oligonucleotide
  Target: ATXN2; (-) strand; PAM type: NNAGAAW; PAM sequence: TGAGAAA
catgttccagtttgatttac

SEQ ID NO: 6422 - DNA, 20 bp, Artificial Sequence
  Description of Artificial Sequence: Synthetic oligonucleotide
  Target: ATXN2; (-) strand; PAM type: NNAGAAW; PAM sequence: TCAGAAT
ctcacagtcccctttctgtc

SEQ ID NO: 6423 - DNA, 20 bp, Artificial Sequence
  Description of Artificial Sequence: Synthetic oligonucleotide
  Target: ATXN2; (-) strand; PAM type: NNAGAAW; PAM sequence: AAAGAAT
gcctgggcaacagaataaaa

SEQ ID NO: 6424 - DNA, 20 bp, Artificial Sequence
  Description of Artificial Sequence: Synthetic oligonucleotide
  Target: ATXN2; (-) strand; PAM type: NNAGAAW; PAM sequence: ACAGAAT
actgcactccagcctgggca

SEQ ID NO: 6425 - DNA, 20 bp, Artificial Sequence
  Description of Artificial Sequence: Synthetic oligonucleotide
  Target: ATXN2; (-) strand; PAM type: NNAGAAW; PAM sequence: GAAGAAT
cttggggagaggctgaggca

SEQ ID NO: 6426 - DNA, 20 bp, Artificial Sequence
  Description of Artificial Sequence: Synthetic oligonucleotide
  Target: ATXN2; (-) strand; PAM type: NNAGAAW; PAM sequence: TGAGAAT
gtggctctgttctgtggcct

SEQ ID NO: 6427 - DNA, 20 bp, Artificial Sequence
  Description of Artificial Sequence: Synthetic oligonucleotide
  Target: ATXN2; (-) strand; PAM type: NNAGAAW; PAM sequence: TTAGAAT
tcagtatggagaaaaccatt

SEQ ID NO: 6428 - DNA, 20 bp, Artificial Sequence
  Description of Artificial Sequence: Synthetic oligonucleotide
  Target: ATXN2; (-) strand; PAM type: NNAGAAW; PAM sequence: GGAGAAA
ttaggaagtactatcagtat

SEQ ID NO: 6429 - DNA, 20 bp, Artificial Sequence
  Description of Artificial Sequence: Synthetic oligonucleotide
  Target: ATXN2; (-) strand; PAM type: NNAGAAW; PAM sequence: GAAGAAA
aattgccctcttctataaaa

SEQ ID NO: 6430 - DNA, 20 bp, Artificial Sequence
  Description of Artificial Sequence: Synthetic oligonucleotide
  Target: ATXN2; (-) strand; PAM type: NNAGAAW; PAM sequence: GCAGAAA
cttaagctaagactatccag

SEQ ID NO: 6431 - DNA, 20 bp, Artificial Sequence
  Description of Artificial Sequence: Synthetic oligonucleotide
  Target: ATXN2; (-) strand; PAM type: NNAGAAW; PAM sequence: CAAGAAA
tttagttcattatagaaagg

SEQ ID NO: 6432 - DNA, 20 bp, Artificial Sequence
  Description of Artificial Sequence: Synthetic oligonucleotide
  Target: ATXN2; (-) strand; PAM type: NNAGAAW; PAM sequence: ATAGAAA
tcagataattttagttcatt

SEQ ID NO: 6433 - DNA, 20 bp, Artificial Sequence
  Description of Artificial Sequence: Synthetic oligonucleotide
  Target: ATXN2; (-) strand; PAM type: NNAGAAW; PAM sequence: TGAGAAT
cagagtatgagacaaggttt

SEQ ID NO: 6434 - DNA, 20 bp, Artificial Sequence
  Description of Artificial Sequence: Synthetic oligonucleotide
  Target: ATXN2; (-) strand; PAM type: NNAGAAW; PAM sequence: GTAGAAA
agaaaggtagagaacggttg

SEQ ID NO: 6435 - DNA, 20 bp, Artificial Sequence
  Description of Artificial Sequence: Synthetic oligonucleotide
  Target: ATXN2; (-) strand; PAM type: NNAGAAW; PAM sequence: GAAGAAA
aatcaaagtataaggctaag

SEQ ID NO: 6436 - DNA, 20 bp, Artificial Sequence
  Description of Artificial Sequence: Synthetic oligonucleotide
  Target: ATXN2; (-) strand; PAM type: NNAGAAW; PAM sequence: AAAGAAA
tgggcatgtggcaaatctgg

SEQ ID NO: 6437 - DNA, 20 bp, Artificial Sequence
  Description of Artificial Sequence: Synthetic oligonucleotide
  Target: ATXN2; (-) strand; PAM type: NNAGAAW; PAM sequence: CAAGAAT
attttctacagttttgtggt

SEQ ID NO: 6438 - DNA, 20 bp, Artificial Sequence
  Description of Artificial Sequence: Synthetic oligonucleotide
  Target: ATXN2; (-) strand; PAM type: NNAGAAW; PAM sequence: AGAGAAA
tggaaaacaattagaacttt

SEQ ID NO: 6439 - DNA, 20 bp, Artificial Sequence
  Description of Artificial Sequence: Synthetic oligonucleotide
  Target: ATXN2; (-) strand; PAM type: NNAGAAW; PAM sequence: TGAGAAT
aaggtaattttttagaaaaa

SEQ ID NO: 6440 - DNA, 20 bp, Artificial Sequence
  Description of Artificial Sequence: Synthetic oligonucleotide
  Target: ATXN2; (-) strand; PAM type: NNAGAAW; PAM sequence: TTAGAAA
agcccaagtaaggtaatttt

SEQ ID NO: 6441 - DNA, 20 bp, Artificial Sequence
  Description of Artificial Sequence: Synthetic oligonucleotide
  Target: ATXN2; (-) strand; PAM type: NNAGAAW; PAM sequence: CTAGAAT
aaaaaagaaatatctacttt

SEQ ID NO: 6442 - DNA, 20 bp, Artificial Sequence
  Description of Artificial Sequence: Synthetic oligonucleotide
  Target: ATXN2; (-) strand; PAM type: NNAGAAW; PAM sequence: AAAGAAA
caaaaaaaaaaagaaagaaa

SEQ ID NO: 6443 - DNA, 20 bp, Artificial Sequence
  Description of Artificial Sequence: Synthetic oligonucleotide
  Target: ATXN2; (-) strand; PAM type: NNAGAAW; PAM sequence: AAAGAAA
tccgtttcaaaaaaaaaaag

SEQ ID NO: 6444 - DNA, 20 bp, Artificial Sequence
  Description of Artificial Sequence: Synthetic oligonucleotide
  Target: ATXN2; (-) strand; PAM type: NNAGAAW; PAM sequence: AAAGAAA
agactccgtttcaaaaaaaa

SEQ ID NO: 6445 - DNA, 20 bp, Artificial Sequence
  Description of Artificial Sequence: Synthetic oligonucleotide
  Target: ATXN2; (-) strand; PAM type: NNAGAAW; PAM sequence: ACAGAAT
tagctactagggaggctgag

SEQ ID NO: 6446 - DNA, 20 bp, Artificial Sequence
  Description of Artificial Sequence: Synthetic oligonucleotide
  Target: ATXN2; (-) strand; PAM type: NNAGAAW; PAM sequence: AAAGAAA
tgatcttacaaacttttttt

SEQ ID NO: 6447 - DNA, 20 bp, Artificial Sequence
  Description of Artificial Sequence: Synthetic oligonucleotide
  Target: ATXN2; (-) strand; PAM type: NNAGAAW; PAM sequence: GAAGAAA
ccagttcggggccgaaacgt

SEQ ID NO: 6448 - DNA, 20 bp, Artificial Sequence
  Description of Artificial Sequence: Synthetic oligonucleotide
  Target: ATXN2; (-) strand; PAM type: NNAGAAW; PAM sequence: ACAGAAT
atgccgcacatgagaaaagt

SEQ ID NO: 6449 - DNA, 20 bp, Artificial Sequence
  Description of Artificial Sequence: Synthetic oligonucleotide
  Target: ATXN2; (-) strand; PAM type: NNAGAAW; PAM sequence: TGAGAAA
ttggtacttgatgccgcaca

SEQ ID NO: 6450 - DNA, 20 bp, Artificial Sequence
  Description of Artificial Sequence: Synthetic oligonucleotide
  Target: ATXN2; (-) strand; PAM type: NNAGAAW; PAM sequence: AAAGAAT
aactggtaccttgatgagct

SEQ ID NO: 6451 - DNA, 20 bp, Artificial Sequence
  Description of Artificial Sequence: Synthetic oligonucleotide
  Target: ATXN2; (-) strand; PAM type: NNAGAAW; PAM sequence: ATAGAAA
taatgtacttaagacaaacc

SEQ ID NO: 6452 - DNA, 20 bp, Artificial Sequence
  Description of Artificial Sequence: Synthetic oligonucleotide
  Target: ATXN2; (-) strand; PAM type: NNAGAAW; PAM sequence: GAAGAAT
aactctgagtagagcctcct

SEQ ID NO: 6453 - DNA, 20 bp, Artificial Sequence
  Description of Artificial Sequence: Synthetic oligonucleotide
  Target: ATXN2; (-) strand; PAM type: NNAGAAW; PAM sequence: TCAGAAA
gtcacttaaaatagctgggg

SEQ ID NO: 6454 - DNA, 20 bp, Artificial Sequence
  Description of Artificial Sequence: Synthetic oligonucleotide
  Target: ATXN2; (-) strand; PAM type: NNAGAAW; PAM sequence: GGAGAAT
gggatagtttaaagtatttg

SEQ ID NO: 6455 - DNA, 20 bp, Artificial Sequence
  Description of Artificial Sequence: Synthetic oligonucleotide
  Target: ATXN2; (-) strand; PAM type: NNAGAAW; PAM sequence: TGAGAAA
tttttttttttttttttttt

SEQ ID NO: 6456 - DNA, 20 bp, Artificial Sequence
  Description of Artificial Sequence: Synthetic oligonucleotide
  Target: ATXN2; (-) strand; PAM type: NNAGAAW; PAM sequence: AGAGAAA
atgtttagtcaggatgattt

SEQ ID NO: 6457 - DNA, 20 bp, Artificial Sequence
  Description of Artificial Sequence: Synthetic oligonucleotide
  Target: ATXN2; (-) strand; PAM type: NNAGAAW; PAM sequence: GTAGAAT
ggggataaactgccttgggg

SEQ ID NO: 6458 - DNA, 20 bp, Artificial Sequence
  Description of Artificial Sequence: Synthetic oligonucleotide
  Target: ATXN2; (-) strand; PAM type: NNAGAAW; PAM sequence: CAAGAAT
gcctttattagattgtttta

SEQ ID NO: 6459 - DNA, 20 bp, Artificial Sequence
  Description of Artificial Sequence: Synthetic oligonucleotide
  Target: ATXN2; (-) strand; PAM type: NNAGAAW; PAM sequence: GAAGAAA
actataagtcccacatgatg

SEQ ID NO: 6460 - DNA, 20 bp, Artificial Sequence
  Description of Artificial Sequence: Synthetic oligonucleotide
  Target: ATXN2; (-) strand; PAM type: NNAGAAW; PAM sequence: GCAGAAA
aattgaaccggacatgaagg

SEQ ID NO: 6461 - DNA, 20 bp, Artificial Sequence
  Description of Artificial Sequence: Synthetic oligonucleotide
  Target: ATXN2; (-) strand; PAM type: NNAGAAW; PAM sequence: CGAGAAT
ctggtcttgcccttgacaca

SEQ ID NO: 6462 - DNA, 20 bp, Artificial Sequence
  Description of Artificial Sequence: Synthetic oligonucleotide
  Target: ATXN2; (-) strand; PAM type: NNAGAAW; PAM sequence: CAAGAAT
gtcatctgtgttggttaaat

SEQ ID NO: 6463 - DNA, 20 bp, Artificial Sequence
  Description of Artificial Sequence: Synthetic oligonucleotide
  Target: ATXN2; (-) strand; PAM type: NNAGAAW; PAM sequence: GGAGAAA
gtttttcttttatagatggg

SEQ ID NO: 6464 - DNA, 20 bp, Artificial Sequence
  Description of Artificial Sequence: Synthetic oligonucleotide
  Target: ATXN2; (-) strand; PAM type: NNAGAAW; PAM sequence: TTAGAAA
cacatatagacgcatattat

SEQ ID NO: 6465 - DNA, 20 bp, Artificial Sequence
  Description of Artificial Sequence: Synthetic oligonucleotide
  Target: ATXN2; (-) strand; PAM type: NNAGAAW; PAM sequence: ATAGAAT
attctataattcacttgaaa

SEQ ID NO: 6466 - DNA, 20 bp, Artificial Sequence
  Description of Artificial Sequence: Synthetic oligonucleotide
  Target: ATXN2; (-) strand; PAM type: NNAGAAW; PAM sequence: TGAGAAA
attgtcatgactaatgttta

SEQ ID NO: 6467 - DNA, 20 bp, Artificial Sequence
  Description of Artificial Sequence: Synthetic oligonucleotide
  Target: ATXN2; (-) strand; PAM type: NNAGAAW; PAM sequence: TCAGAAT
agaccaagctaggactggcc

SEQ ID NO: 6468 - DNA, 20 bp, Artificial Sequence
  Description of Artificial Sequence: Synthetic oligonucleotide
  Target: ATXN2; (-) strand; PAM type: NNAGAAW; PAM sequence: GAAGAAA
ccattgttttctggatgaga

SEQ ID NO: 6469 - DNA, 20 bp, Artificial Sequence
  Description of Artificial Sequence: Synthetic oligonucleotide
  Target: ATXN2; (-) strand; PAM type: NNAGAAW; PAM sequence: TTAGAAA
acagttacagaattagaatg

SEQ ID NO: 6470 - DNA, 20 bp, Artificial Sequence
  Description of Artificial Sequence: Synthetic oligonucleotide
  Target: ATXN2; (-) strand; PAM type: NNAGAAW; PAM sequence: TTAGAAT
tgaggcaaacagttacagaa

SEQ ID NO: 6471 - DNA, 20 bp, Artificial Sequence
  Description of Artificial Sequence: Synthetic oligonucleotide
  Target: ATXN2; (-) strand; PAM type: NNAGAAW; PAM sequence: ACAGAAT
catgtttgaggcaaacagtt

SEQ ID NO: 6472 - DNA, 20 bp, Artificial Sequence
  Description of Artificial Sequence: Synthetic oligonucleotide
  Target: ATXN2; (-) strand; PAM type: NNAGAAW; PAM sequence: ATAGAAT
caaatgatgtttgaaaaagc

SEQ ID NO: 6473 - DNA, 20 bp, Artificial Sequence
  Description of Artificial Sequence: Synthetic oligonucleotide
  Target: ATXN2; (-) strand; PAM type: NNAGAAW; PAM sequence: AGAGAAT
tttagacttcagtggatttc

SEQ ID NO: 6474 - DNA, 20 bp, Artificial Sequence
  Description of Artificial Sequence: Synthetic oligonucleotide
  Target: ATXN2; (-) strand; PAM type: NNAGAAW; PAM sequence: CAAGAAT
tgaatggatacaaaaagaaa

SEQ ID NO: 6475 - DNA, 20 bp, Artificial Sequence
  Description of Artificial Sequence: Synthetic oligonucleotide
  Target: ATXN2; (-) strand; PAM type: NNAGAAW; PAM sequence: AAAGAAA
cataacttgaatggatacaa

SEQ ID NO: 6476 - DNA, 20 bp, Artificial Sequence
  Description of Artificial Sequence: Synthetic oligonucleotide
  Target: ATXN2; (-) strand; PAM type: NNAGAAW; PAM sequence: GTAGAAA
tggctagttttttatttttt

SEQ ID NO: 6477 - DNA, 20 bp, Artificial Sequence
  Description of Artificial Sequence: Synthetic oligonucleotide
  Target: ATXN2; (-) strand; PAM type: NNAGAAW; PAM sequence: ACAGAAT
gggaaattgtgtgaaagtag

SEQ ID NO: 6478 - DNA, 20 bp, Artificial Sequence
  Description of Artificial Sequence: Synthetic oligonucleotide
  Target: ATXN2; (-) strand; PAM type: NNAGAAW; PAM sequence: TCAGAAA
cgacagagtgagactctgtc

SEQ ID NO: 6479 - DNA, 20 bp, Artificial Sequence
  Description of Artificial Sequence: Synthetic oligonucleotide
  Target: ATXN2; (-) strand; PAM type: NNAGAAW; PAM sequence: TAAGAAT
tggtgaaaccccgtctctac

SEQ ID NO: 6480 - DNA, 20 bp, Artificial Sequence
  Description of Artificial Sequence: Synthetic oligonucleotide
  Target: ATXN2; (-) strand; PAM type: NNAGAAW; PAM sequence: GTAGAAA
ggctaatttttctattttta

SEQ ID NO: 6481 - DNA, 20 bp, Artificial Sequence
  Description of Artificial Sequence: Synthetic oligonucleotide
  Target: ATXN2; (-) strand; PAM type: NNAGAAW; PAM sequence: CTAGAAT
tgggtatgcctaccatcact

SEQ ID NO: 6482 - DNA, 20 bp, Artificial Sequence
  Description of Artificial Sequence: Synthetic oligonucleotide
  Target: ATXN2; (-) strand; PAM type: NNAGAAW; PAM sequence: ACAGAAA
tagactctgtctcaaaaaaa

SEQ ID NO: 6483 - DNA, 20 bp, Artificial Sequence
  Description of Artificial Sequence: Synthetic oligonucleotide
  Target: ATXN2; (-) strand; PAM type: NNAGAAW; PAM sequence: GGAGAAT
ctactcgggaggctgaggca

SEQ ID NO: 6484 - DNA, 20 bp, Artificial Sequence
  Description of Artificial Sequence: Synthetic oligonucleotide
  Target: ATXN2; (-) strand; PAM type: NNAGAAW; PAM sequence: TCAGAAA
gtttttctcattgcatgata

SEQ ID NO: 6485 - DNA, 20 bp, Artificial Sequence
  Description of Artificial Sequence: Synthetic oligonucleotide
  Target: ATXN2; (-) strand; PAM type: NNAGAAW; PAM sequence: ACAGAAA
ttatttttggcaggaataca

SEQ ID NO: 6486 - DNA, 20 bp, Artificial Sequence
  Description of Artificial Sequence: Synthetic oligonucleotide
  Target: ATXN2; (-) strand; PAM type: NNAGAAW; PAM sequence: AAAGAAT
aaaaattgcaaagatattat

SEQ ID NO: 6487 - DNA, 20 bp, Artificial Sequence
  Description of Artificial Sequence: Synthetic oligonucleotide
  Target: ATXN2; (-) strand; PAM type: NNAGAAW; PAM sequence: TTAGAAA
ttaaacataattttagactt

SEQ ID NO: 6488 - DNA, 20 bp, Artificial Sequence
  Description of Artificial Sequence: Synthetic oligonucleotide
  Target: ATXN2; (-) strand; PAM type: NNAGAAW; PAM sequence: GTAGAAA
ctctgctaattttggtagtg

SEQ ID NO: 6489 - DNA, 20 bp, Artificial Sequence
  Description of Artificial Sequence: Synthetic oligonucleotide
  Target: ATXN2; (-) strand; PAM type: NNAGAAW; PAM sequence: CCAGAAA
agcaggttttccagtcttta

SEQ ID NO: 6490 - DNA, 20 bp, Artificial Sequence
  Description of Artificial Sequence: Synthetic oligonucleotide
  Target: ATXN2; (-) strand; PAM type: NNAGAAW; PAM sequence: ACAGAAT
actggagtgttgcagctctt

SEQ ID NO: 6491 - DNA, 20 bp, Artificial Sequence
  Description of Artificial Sequence: Synthetic oligonucleotide
  Target: ATXN2; (-) strand; PAM type: NNAGAAW; PAM sequence: AGAGAAA
tgcgaccccatctctacaaa

SEQ ID NO: 6492 - DNA, 20 bp, Artificial Sequence
  Description of Artificial Sequence: Synthetic oligonucleotide
  Target: ATXN2; (-) strand; PAM type: NNAGAAW; PAM sequence: GGAGAAT
aatataaagcattacttaaa

SEQ ID NO: 6493 - DNA, 20 bp, Artificial Sequence
  Description of Artificial Sequence: Synthetic oligonucleotide
  Target: ATXN2; (-) strand; PAM type: NNAGAAW; PAM sequence: GCAGAAT
gtgaatttcaataaagcaaa

SEQ ID NO: 6494 - DNA, 20 bp, Artificial Sequence
  Description of Artificial Sequence: Synthetic oligonucleotide
  Target: ATXN2; (-) strand; PAM type: NNAGAAW; PAM sequence: TGAGAAT
tgaaaatattgtgagattta

SEQ ID NO: 6495 - DNA, 20 bp, Artificial Sequence
  Description of Artificial Sequence: Synthetic oligonucleotide
  Target: ATXN2; (-) strand; PAM type: NNAGAAW; PAM sequence: AAAGAAA
ggaccgtttgtggtgcctta

SEQ ID NO: 6496 - DNA, 20 bp, Artificial Sequence
  Description of Artificial Sequence: Synthetic oligonucleotide
  Target: ATXN2; (-) strand; PAM type: NNAGAAW; PAM sequence: GGAGAAA
cagggaatagagaggcacga

SEQ ID NO: 6497 - DNA, 20 bp, Artificial Sequence
  Description of Artificial Sequence: Synthetic oligonucleotide
  Target: ATXN2; (-) strand; PAM type: NNAGAAW; PAM sequence: ACAGAAT
attttttttttttttttgag

SEQ ID NO: 6498 - DNA, 20 bp, Artificial Sequence
  Description of Artificial Sequence: Synthetic oligonucleotide
  Target: ATXN2; (-) strand; PAM type: NNAGAAW; PAM sequence: ACAGAAT
tgaatggcagtagtagcctt

SEQ ID NO: 6499 - DNA, 20 bp, Artificial Sequence
  Description of Artificial Sequence: Synthetic oligonucleotide
  Target: ATXN2; (-) strand; PAM type: NNAGAAW; PAM sequence: AGAGAAT
tttcaatttattttgccatc

SEQ ID NO: 6500 - DNA, 20 bp, Artificial Sequence
  Description of Artificial Sequence: Synthetic oligonucleotide
  Target: ATXN2; (-) strand; PAM type: NNAGAAW; PAM sequence: TTAGAAA
tctagaatggtgaatacttt

SEQ ID NO: 6501 - DNA, 20 bp, Artificial Sequence
  Description of Artificial Sequence: Synthetic oligonucleotide
  Target: ATXN2; (-) strand; PAM type: NNAGAAW; PAM sequence: CTAGAAT
gatggcattctcagtggcat

SEQ ID NO: 6502 - DNA, 20 bp, Artificial Sequence
  Description of Artificial Sequence: Synthetic oligonucleotide
  Target: ATXN2; (-) strand; PAM type: NNAGAAW; PAM sequence: AAAGAAA
tctatcttaaaaaaaaaaaa

SEQ ID NO: 6503 - DNA, 20 bp, Artificial Sequence
  Description of Artificial Sequence: Synthetic oligonucleotide
  Target: ATXN2; (-) strand; PAM type: NNAGAAW; PAM sequence: GGAGAAT
ctacttgggagactgaggca

SEQ ID NO: 6504 - DNA, 20 bp, Artificial Sequence
  Description of Artificial Sequence: Synthetic oligonucleotide
  Target: ATXN2; (-) strand; PAM type: NNAGAAW; PAM sequence: TAAGAAA
accaggtgtagattccatct

SEQ ID NO: 6505 - DNA, 20 bp, Artificial Sequence
  Description of Artificial Sequence: Synthetic oligonucleotide
  Target: ATXN2; (-) strand; PAM type: NNAGAAW; PAM sequence: GCAGAAT
tgaaaaatggtgatggatga

SEQ ID NO: 6506 - DNA, 20 bp, Artificial Sequence
  Description of Artificial Sequence: Synthetic oligonucleotide
  Target: ATXN2; (-) strand; PAM type: NNAGAAW; PAM sequence: TTAGAAA
caggtcttgttgaaatagca

SEQ ID NO: 6507 - DNA, 20 bp, Artificial Sequence
  Description of Artificial Sequence: Synthetic oligonucleotide
  Target: ATXN2; (-) strand; PAM type: NNAGAAW; PAM sequence: CTAGAAA
tctatacaaccagtctgatt

SEQ ID NO: 6508 - DNA, 20 bp, Artificial Sequence
  Description of Artificial Sequence: Synthetic oligonucleotide
  Target: ATXN2; (-) strand; PAM type: NNAGAAW; PAM sequence: AAAGAAA
gtatgtggtacccttatgcc

SEQ ID NO: 6509 - DNA, 20 bp, Artificial Sequence
  Description of Artificial Sequence: Synthetic oligonucleotide
  Target: ATXN2; (-) strand; PAM type: NNAGAAW; PAM sequence: CAAGAAA
acatttaagttggtaactaa

SEQ ID NO: 6510 - DNA, 20 bp, Artificial Sequence
  Description of Artificial Sequence: Synthetic oligonucleotide
  Target: ATXN2; (-) strand; PAM type: NNAGAAW; PAM sequence: GGAGAAA
catttgactcaactttttag

SEQ ID NO: 6511 - DNA, 20 bp, Artificial Sequence
  Description of Artificial Sequence: Synthetic oligonucleotide
  Target: ATXN2; (-) strand; PAM type: NNAGAAW; PAM sequence: CCAGAAA
atacaattgttttgtggcct

SEQ ID NO: 6512 - DNA, 20 bp, Artificial Sequence
  Description of Artificial Sequence: Synthetic oligonucleotide
  Target: ATXN2; (-) strand; PAM type: NNAGAAW; PAM sequence: TTAGAAA
aatgtaaaatttcaacgtat

SEQ ID NO: 6513 - DNA, 20 bp, Artificial Sequence
  Description of Artificial Sequence: Synthetic oligonucleotide
  Target: ATXN2; (-) strand; PAM type: NNAGAAW; PAM sequence: TTAGAAA
tttggaagaatatgtttcag

SEQ ID NO: 6514 - DNA, 20 bp, Artificial Sequence
  Description of Artificial Sequence: Synthetic oligonucleotide
  Target: ATXN2; (-) strand; PAM type: NNAGAAW; PAM sequence: GAAGAAT
aaagtaaggaaacacatttg

SEQ ID NO: 6515 - DNA, 20 bp, Artificial Sequence
  Description of Artificial Sequence: Synthetic oligonucleotide
  Target: ATXN2; (-) strand; PAM type: NNAGAAW; PAM sequence: GAAGAAT
atttggttcacagtgtgata

SEQ ID NO: 6516 - DNA, 20 bp, Artificial Sequence
  Description of Artificial Sequence: Synthetic oligonucleotide
  Target: ATXN2; (-) strand; PAM type: NNAGAAW; PAM sequence: GTAGAAA
ttgctatacacatggtgtat

SEQ ID NO: 6517 - DNA, 20 bp, Artificial Sequence
  Description of Artificial Sequence: Synthetic oligonucleotide
  Target: ATXN2; (-) strand; PAM type: NNAGAAW; PAM sequence: GAAGAAA
gactgccatgggtgggcagt

SEQ ID NO: 6518 - DNA, 20 bp, Artificial Sequence
  Description of Artificial Sequence: Synthetic oligonucleotide
  Target: ATXN2; (-) strand; PAM type: NNAGAAW; PAM sequence: GTAGAAA
attagcatgtttggaaacca

SEQ ID NO: 6519 - DNA, 20 bp, Artificial Sequence
  Description of Artificial Sequence: Synthetic oligonucleotide
  Target: ATXN2; (-) strand; PAM type: NNAGAAW; PAM sequence: GGAGAAT
tttccctcacactgttttgt

SEQ ID NO: 6520 - DNA, 20 bp, Artificial Sequence
  Description of Artificial Sequence: Synthetic oligonucleotide
  Target: ATXN2; (-) strand; PAM type: NNAGAAW; PAM sequence: CAAGAAT
tagtagcttactataaatta

SEQ ID NO: 6521 - DNA, 20 bp, Artificial Sequence
  Description of Artificial Sequence: Synthetic oligonucleotide
  Target: ATXN2; (-) strand; PAM type: NNAGAAW; PAM sequence: AGAGAAT
gggaaggaatataatagttg

SEQ ID NO: 6522 - DNA, 20 bp, Artificial Sequence
  Description of Artificial Sequence: Synthetic oligonucleotide
  Target: ATXN2; (-) strand; PAM type: NNAGAAW; PAM sequence: GAAGAAA
ataaaaataataacaataat

SEQ ID NO: 6523 - DNA, 20 bp, Artificial Sequence
  Description of Artificial Sequence: Synthetic oligonucleotide
  Target: ATXN2; (-) strand; PAM type: NNAGAAW; PAM sequence: GGAGAAT
tactcagtaggctgaggcaa

SEQ ID NO: 6524 - DNA, 20 bp, Artificial Sequence
  Description of Artificial Sequence: Synthetic oligonucleotide
  Target: ATXN2; (-) strand; PAM type: NNAGAAW; PAM sequence: GGAGAAA
agatgaggaagtgatggatt

SEQ ID NO: 6525 - DNA, 20 bp, Artificial Sequence
  Description of Artificial Sequence: Synthetic oligonucleotide
  Target: ATXN2; (-) strand; PAM type: NNAGAAW; PAM sequence: AAAGAAA
ctggaaaaaaaaaaaaaaag

SEQ ID NO: 6526 - DNA, 20 bp, Artificial Sequence
  Description of Artificial Sequence: Synthetic oligonucleotide
  Target: ATXN2; (-) strand; PAM type: NNAGAAW; PAM sequence: AAAGAAA
ttttctggaaaaaaaaaaaa

SEQ ID NO: 6527 - DNA, 20 bp, Artificial Sequence
  Description of Artificial Sequence: Synthetic oligonucleotide
  Target: ATXN2; (-) strand; PAM type: NNAGAAW; PAM sequence: TCAGAAA
ttttttctatataaaacatt

SEQ ID NO: 6528 - DNA, 20 bp, Artificial Sequence
  Description of Artificial Sequence: Synthetic oligonucleotide
  Target: ATXN2; (-) strand; PAM type: NNAGAAW; PAM sequence: TAAGAAT
taaaatggtaaggaaatata

SEQ ID NO: 6529 - DNA, 20 bp, Artificial Sequence
  Description of Artificial Sequence: Synthetic oligonucleotide
  Target: ATXN2; (-) strand; PAM type: NNAGAAW; PAM sequence: AAAGAAA
ccccaccgccaaaaaaaaga

SEQ ID NO: 6530 - DNA, 20 bp, Artificial Sequence
  Description of Artificial Sequence: Synthetic oligonucleotide
  Target: ATXN2; (-) strand; PAM type: NNAGAAW; PAM sequence: AAAGAAA
tatccccccaccgccaaaaa

SEQ ID NO: 6531 - DNA, 20 bp, Artificial Sequence
  Description of Artificial Sequence: Synthetic oligonucleotide
  Target: ATXN2; (-) strand; PAM type: NNAGAAW; PAM sequence: AAAGAAA
tcaacagtatgaaaaacgga

SEQ ID NO: 6532 - DNA, 20 bp, Artificial Sequence
  Description of Artificial Sequence: Synthetic oligonucleotide
  Target: ATXN2; (-) strand; PAM type: NNAGAAW; PAM sequence: AAAGAAA
tattttggatctctggaaag

SEQ ID NO: 6533 - DNA, 20 bp, Artificial Sequence
  Description of Artificial Sequence: Synthetic oligonucleotide
  Target: ATXN2; (-) strand; PAM type: NNAGAAW; PAM sequence: AAAGAAA
attgtattttggatctctgg

SEQ ID NO: 6534 - DNA, 20 bp, Artificial Sequence
  Description of Artificial Sequence: Synthetic oligonucleotide
  Target: ATXN2; (-) strand; PAM type: NNAGAAW; PAM sequence: CCAGAAA
gggacagccactggctatgc

SEQ ID NO: 6535 - DNA, 20 bp, Artificial Sequence
  Description of Artificial Sequence: Synthetic oligonucleotide
  Target: ATXN2; (-) strand; PAM type: NNAGAAW; PAM sequence: TGAGAAA
ccaggagttcaagaccaggc

SEQ ID NO: 6536 - DNA, 20 bp, Artificial Sequence
  Description of Artificial Sequence: Synthetic oligonucleotide
  Target: ATXN2; (-) strand; PAM type: NNAGAAW; PAM sequence: GAAGAAT
tgaagaggaaaacaaaatca

SEQ ID NO: 6537 - DNA, 20 bp, Artificial Sequence
  Description of Artificial Sequence: Synthetic oligonucleotide
  Target: ATXN2; (-) strand; PAM type: NNAGAAW; PAM sequence: GCAGAAA
tatgtggtagtatagactag

SEQ ID NO: 6538 - DNA, 20 bp, Artificial Sequence
  Description of Artificial Sequence: Synthetic oligonucleotide
  Target: ATXN2; (-) strand; PAM type: NNAGAAW; PAM sequence: GTAGAAA
gtagtagttgaccctgtcat

SEQ ID NO: 6539 - DNA, 20 bp, Artificial Sequence
  Description of Artificial Sequence: Synthetic oligonucleotide
  Target: ATXN2; (-) strand; PAM type: NNAGAAW; PAM sequence: GTAGAAA
gactaatttttgtattttta

SEQ ID NO: 6540 - DNA, 20 bp, Artificial Sequence
  Description of Artificial Sequence: Synthetic oligonucleotide
  Target: ATXN2; (-) strand; PAM type: NNAGAAW; PAM sequence: GGAGAAT
tgactcagaaggctgaggca

SEQ ID NO: 6541 - DNA, 20 bp, Artificial Sequence
  Description of Artificial Sequence: Synthetic oligonucleotide
  Target: ATXN2; (-) strand; PAM type: NNAGAAW; PAM sequence: GGAGAAT
ctactcgggaggctgaggca

SEQ ID NO: 6542 - DNA, 20 bp, Artificial Sequence
  Description of Artificial Sequence: Synthetic oligonucleotide
  Target: ATXN2; (-) strand; PAM type: NNAGAAW; PAM sequence: ACAGAAA
accaatgctcttttctgcag

SEQ ID NO: 6543 - DNA, 20 bp, Artificial Sequence
  Description of Artificial Sequence: Synthetic oligonucleotide
  Target: ATXN2; (-) strand; PAM type: NNAGAAW; PAM sequence: ATAGAAA
gaatctaaacatatctaaac

SEQ ID NO: 6544 - DNA, 20 bp, Artificial Sequence
  Description of Artificial Sequence: Synthetic oligonucleotide
  Target: ATXN2; (-) strand; PAM type: NNAGAAW; PAM sequence: TGAGAAA
ttaatgatggggatgtgttt

SEQ ID NO: 6545 - DNA, 20 bp, Artificial Sequence
  Description of Artificial Sequence: Synthetic oligonucleotide
  Target: ATXN2; (-) strand; PAM type: NNAGAAW; PAM sequence: TGAGAAA
attcataccatctttggtga

SEQ ID NO: 6546 - DNA, 20 bp, Artificial Sequence
  Description of Artificial Sequence: Synthetic oligonucleotide
  Target: ATXN2; (-) strand; PAM type: NNAGAAW; PAM sequence: ATAGAAA
atttctcttggttggaatgc

SEQ ID NO: 6547 - DNA, 20 bp, Artificial Sequence
  Description of Artificial Sequence: Synthetic oligonucleotide
  Target: ATXN2; (-) strand; PAM type: NNAGAAW; PAM sequence: GGAGAAT
ctactcaggaggctgaggca

SEQ ID NO: 6548 - DNA, 20 bp, Artificial Sequence
  Description of Artificial Sequence: Synthetic oligonucleotide
  Target: ATXN2; (-) strand; PAM type: NNAGAAW; PAM sequence: GGAGAAA
gagaccagcctgaccaacat

SEQ ID NO: 6549 - DNA, 20 bp, Artificial Sequence
  Description of Artificial Sequence: Synthetic oligonucleotide
  Target: ATXN2; (-) strand; PAM type: NNAGAAW; PAM sequence: GGAGAAT
tactcgggggggctgagaca

SEQ ID NO: 6550 - DNA, 20 bp, Artificial Sequence
  Description of Artificial Sequence: Synthetic oligonucleotide
  Target: ATXN2; (-) strand; PAM type: NNAGAAW; PAM sequence: ACAGAAT
tttttttttcttttttggag

SEQ ID NO: 6551 - DNA, 20 bp, Artificial Sequence
  Description of Artificial Sequence: Synthetic oligonucleotide
  Target: ATXN2; (-) strand; PAM type: NNAGAAW; PAM sequence: TTAGAAT
cattggctgcataactggca

SEQ ID NO: 6552 - DNA, 20 bp, Artificial Sequence
  Description of Artificial Sequence: Synthetic oligonucleotide
  Target: ATXN2; (-) strand; PAM type: NNAGAAW; PAM sequence: GAAGAAA
tactcattctatttacgggt

SEQ ID NO: 6553 - DNA, 20 bp, Artificial Sequence
  Description of Artificial Sequence: Synthetic oligonucleotide
  Target: ATXN2; (-) strand; PAM type: NNAGAAW; PAM sequence: GCAGAAT
caacactgggatgatgctga

SEQ ID NO: 6554 - DNA, 20 bp, Artificial Sequence
  Description of Artificial Sequence: Synthetic oligonucleotide
  Target: ATXN2; (-) strand; PAM type: NNAGAAW; PAM sequence: GTAGAAA
gcagtttattgaatgccatt

SEQ ID NO: 6555 - DNA, 20 bp, Artificial Sequence
  Description of Artificial Sequence: Synthetic oligonucleotide
  Target: ATXN2; (-) strand; PAM type: NNAGAAW; PAM sequence: CCAGAAA
gttttttttttttttttaaa

SEQ ID NO: 6556 - DNA, 20 bp, Artificial Sequence
  Description of Artificial Sequence: Synthetic oligonucleotide
  Target: ATXN2; (-) strand; PAM type: NNAGAAW; PAM sequence: GGAGAAT
ctacttgggaggctgaggca

SEQ ID NO: 6557 - DNA, 20 bp, Artificial Sequence
  Description of Artificial Sequence: Synthetic oligonucleotide
  Target: ATXN2; (-) strand; PAM type: NNAGAAW; PAM sequence: ATAGAAA
gaaacctcatctctactaaa

SEQ ID NO: 6558 - DNA, 20 bp, Artificial Sequence
  Description of Artificial Sequence: Synthetic oligonucleotide
  Target: ATXN2; (-) strand; PAM type: NNAGAAW; PAM sequence: AAAGAAT
ttatttacctattaaaagag

SEQ ID NO: 6559 - DNA, 20 bp, Artificial Sequence
  Description of Artificial Sequence: Synthetic oligonucleotide
  Target: ATXN2; (-) strand; PAM type: NNAGAAW; PAM sequence: AGAGAAA
tagtttatttacctattaaa

SEQ ID NO: 6560 - DNA, 20 bp, Artificial Sequence
  Description of Artificial Sequence: Synthetic oligonucleotide
  Target: ATXN2; (-) strand; PAM type: NNAGAAW; PAM sequence: ATAGAAA
ataattgtgtattaaattgc

SEQ ID NO: 6561 - DNA, 20 bp, Artificial Sequence
  Description of Artificial Sequence: Synthetic oligonucleotide
  Target: ATXN2; (-) strand; PAM type: NNAGAAW; PAM sequence: ATAGAAA
agggttgtcagatttggcaa

SEQ ID NO: 6562 - DNA, 20 bp, Artificial Sequence
  Description of Artificial Sequence: Synthetic oligonucleotide
  Target: ATXN2; (-) strand; PAM type: NNAGAAW; PAM sequence: TGAGAAA
gagaaacgcagtaaaaggat

SEQ ID NO: 6563 - DNA, 20 bp, Artificial Sequence
  Description of Artificial Sequence: Synthetic oligonucleotide
  Target: ATXN2; (-) strand; PAM type: NNAGAAW; PAM sequence: AGAGAAA
aaagttactgctttagagcc

SEQ ID NO: 6564 - DNA, 20 bp, Artificial Sequence
  Description of Artificial Sequence: Synthetic oligonucleotide
  Target: ATXN2; (-) strand; PAM type: NNAGAAW; PAM sequence: CCAGAAA
tgatccacccaccttggtgt

SEQ ID NO: 6565 - DNA, 20 bp, Artificial Sequence
  Description of Artificial Sequence: Synthetic oligonucleotide
  Target: ATXN2; (-) strand; PAM type: NNAGAAW; PAM sequence: CTAGAAT
cagggtctctgtcaccaagg

SEQ ID NO: 6566 - DNA, 20 bp, Artificial Sequence
  Description of Artificial Sequence: Synthetic oligonucleotide
  Target: ATXN2; (-) strand; PAM type: NNAGAAW; PAM sequence: CAAGAAT
gagccactgcacccagctgc

SEQ ID NO: 6567 - DNA, 20 bp, Artificial Sequence
  Description of Artificial Sequence: Synthetic oligonucleotide
  Target: ATXN2; (-) strand; PAM type: NNAGAAW; PAM sequence: AAAGAAT
agcatttttagaaaaatgaa

SEQ ID NO: 6568 - DNA, 20 bp, Artificial Sequence
  Description of Artificial Sequence: Synthetic oligonucleotide
  Target: ATXN2; (-) strand; PAM type: NNAGAAW; PAM sequence: TTAGAAA
gtggattatgacaagcattt

SEQ ID NO: 6569 - DNA, 20 bp, Artificial Sequence
  Description of Artificial Sequence: Synthetic oligonucleotide
  Target: ATXN2; (-) strand; PAM type: NNAGAAW; PAM sequence: ATAGAAT
cctggctttttttttttgac

SEQ ID NO: 6570 - DNA, 20 bp, Artificial Sequence
  Description of Artificial Sequence: Synthetic oligonucleotide
  Target: ATXN2; (-) strand; PAM type: NNAGAAW; PAM sequence: GGAGAAT
ctacttgggaggctgaggca

SEQ ID NO: 6571 - DNA, 20 bp, Artificial Sequence
  Description of Artificial Sequence: Synthetic oligonucleotide
  Target: ATXN2; (-) strand; PAM type: NNAGAAW; PAM sequence: GGAGAAT
ctactcgggaggctgaggca

SEQ ID NO: 6572 - DNA, 20 bp, Artificial Sequence
  Description of Artificial Sequence: Synthetic oligonucleotide
  Target: ATXN2; (-) strand; PAM type: NNAGAAW; PAM sequence: ACAGAAA
aaccctgtctctactgaaaa

SEQ ID NO: 6573 - DNA, 20 bp, Artificial Sequence
  Description of Artificial Sequence: Synthetic oligonucleotide
  Target: ATXN2; (-) strand; PAM type: NNAGAAW; PAM sequence: ATAGAAA
tgagaaataacagtagcgtg

SEQ ID NO: 6574 - DNA, 20 bp, Artificial Sequence
  Description of Artificial Sequence: Synthetic oligonucleotide
  Target: ATXN2; (-) strand; PAM type: NNAGAAW; PAM sequence: TGAGAAA
ggcagatatattaacagcaa

SEQ ID NO: 6575 - DNA, 20 bp, Artificial Sequence
  Description of Artificial Sequence: Synthetic oligonucleotide
  Target: ATXN2; (-) strand; PAM type: NNAGAAW; PAM sequence: GTAGAAA
gatgtacatattggcagcaa

SEQ ID NO: 6576 - DNA, 20 bp, Artificial Sequence
  Description of Artificial Sequence: Synthetic oligonucleotide
  Target: ATXN2; (-) strand; PAM type: NNAGAAW; PAM sequence: GTAGAAA
tttttttttttttttttttg

SEQ ID NO: 6577 - DNA, 20 bp, Artificial Sequence
  Description of Artificial Sequence: Synthetic oligonucleotide
  Target: ATXN2; (-) strand; PAM type: NNAGAAW; PAM sequence: TTAGAAA
cactgaagcttgagcagatt

SEQ ID NO: 6578 - DNA, 20 bp, Artificial Sequence
  Description of Artificial Sequence: Synthetic oligonucleotide
  Target: ATXN2; (-) strand; PAM type: NNAGAAW; PAM sequence: TTAGAAT
ttattaactgtatcagaact

SEQ ID NO: 6579 - DNA, 20 bp, Artificial Sequence
  Description of Artificial Sequence: Synthetic oligonucleotide
  Target: ATXN2; (-) strand; PAM type: NNAGAAW; PAM sequence: TGAGAAA
tttttttttttttttttttt

SEQ ID NO: 6580 - DNA, 20 bp, Artificial Sequence
  Description of Artificial Sequence: Synthetic oligonucleotide
  Target: ATXN2; (-) strand; PAM type: NNAGAAW; PAM sequence: AGAGAAT
ctactccggaggccgaggca

SEQ ID NO: 6581 - DNA, 20 bp, Artificial Sequence
  Description of Artificial Sequence: Synthetic oligonucleotide
  Target: ATXN2; (-) strand; PAM type: NNAGAAW; PAM sequence: ATAGAAA
gggcccctcccttgaaataa

SEQ ID NO: 6582 - DNA, 20 bp, Artificial Sequence
  Description of Artificial Sequence: Synthetic oligonucleotide
  Target: ATXN2; (-) strand; PAM type: NNAGAAW; PAM sequence: CTAGAAT
acagggtttcaccatgttgg

SEQ ID NO: 6583 - DNA, 20 bp, Artificial Sequence
  Description of Artificial Sequence: Synthetic oligonucleotide
  Target: ATXN2; (-) strand; PAM type: NNAGAAW; PAM sequence: CTAGAAT
aggttttagaagattgttct

SEQ ID NO: 6584 - DNA, 20 bp, Artificial Sequence
  Description of Artificial Sequence: Synthetic oligonucleotide
  Target: ATXN2; (-) strand; PAM type: NNAGAAW; PAM sequence: AGAGAAT
cttcttgggaggctgaggga

SEQ ID NO: 6585 - DNA, 20 bp, Artificial Sequence
  Description of Artificial Sequence: Synthetic oligonucleotide
  Target: ATXN2; (-) strand; PAM type: NNAGAAW; PAM sequence: AGAGAAA
tttttcttttttttttttta

SEQ ID NO: 6586 - DNA, 20 bp, Artificial Sequence
  Description of Artificial Sequence: Synthetic oligonucleotide
  Target: ATXN2; (-) strand; PAM type: NNAGAAW; PAM sequence: GGAGAAA
agtttttgtttcaagtatgt

SEQ ID NO: 6587 - DNA, 20 bp, Artificial Sequence
  Description of Artificial Sequence: Synthetic oligonucleotide
  Target: ATXN2; (-) strand; PAM type: NNAGAAW; PAM sequence: GAAGAAA
gtataagagctatggaatta

SEQ ID NO: 6588 - DNA, 20 bp, Artificial Sequence
  Description of Artificial Sequence: Synthetic oligonucleotide
  Target: ATXN2; (-) strand; PAM type: NNAGAAW; PAM sequence: TTAGAAT
taaacctaaataatatgaca

SEQ ID NO: 6589 - DNA, 20 bp, Artificial Sequence
  Description of Artificial Sequence: Synthetic oligonucleotide
  Target: ATXN2; (-) strand; PAM type: NNAGAAW; PAM sequence: AGAGAAA
ttcagtgtaattatttcctt

SEQ ID NO: 6590 - DNA, 20 bp, Artificial Sequence
  Description of Artificial Sequence: Synthetic oligonucleotide
  Target: ATXN2; (-) strand; PAM type: NNAGAAW; PAM sequence: TAAGAAA
ctggaaattcacatctgctt

SEQ ID NO: 6591 - DNA, 20 bp, Artificial Sequence
  Description of Artificial Sequence: Synthetic oligonucleotide
  Target: ATXN2; (-) strand; PAM type: NNAGAAW; PAM sequence: CTAGAAT
ttgtaaataagtttcagctt

SEQ ID NO: 6592 - DNA, 20 bp, Artificial Sequence
  Description of Artificial Sequence: Synthetic oligonucleotide
  Target: ATXN2; (-) strand; PAM type: NNAGAAW; PAM sequence: GTAGAAT
aacagatcgttaatgtactt

SEQ ID NO: 6593 - DNA, 20 bp, Artificial Sequence
  Description of Artificial Sequence: Synthetic oligonucleotide
  Target: ATXN2; (-) strand; PAM type: NNAGAAW; PAM sequence: AGAGAAT
ggcttaaaaattagattata

SEQ ID NO: 6594 - DNA, 20 bp, Artificial Sequence
  Description of Artificial Sequence: Synthetic oligonucleotide
  Target: ATXN2; (-) strand; PAM type: NNAGAAW; PAM sequence: ATAGAAA
aaatttaaaatacaactttt

SEQ ID NO: 6595 - DNA, 20 bp, Artificial Sequence
  Description of Artificial Sequence: Synthetic oligonucleotide
  Target: ATXN2; (-) strand; PAM type: NNAGAAW; PAM sequence: GCAGAAA
ccaaagaatttttatttaca

SEQ ID NO: 6596 - DNA, 20 bp, Artificial Sequence
  Description of Artificial Sequence: Synthetic oligonucleotide
  Target: ATXN2; (-) strand; PAM type: NNAGAAW; PAM sequence: AAAGAAT
attttcagcaacccatttcc

SEQ ID NO: 6597 - DNA, 20 bp, Artificial Sequence
  Description of Artificial Sequence: Synthetic oligonucleotide
  Target: ATXN2; (-) strand; PAM type: NNAGAAW; PAM sequence: TAAGAAA
tcagttcgtatttcacgaac

SEQ ID NO: 6598 - DNA, 20 bp, Artificial Sequence
  Description of Artificial Sequence: Synthetic oligonucleotide
  Target: ATXN2; (-) strand; PAM type: NNAGAAW; PAM sequence: GCAGAAA
acgtggtcgggttcctgaag

SEQ ID NO: 6599 - DNA, 20 bp, Artificial Sequence
  Description of Artificial Sequence: Synthetic oligonucleotide
  Target: ATXN2; (-) strand; PAM type: NNAGAAW; PAM sequence: CGAGAAA
cctggccctcacccgacccc

SEQ ID NO: 6600 - DNA, 20 bp, Artificial Sequence
  Description of Artificial Sequence: Synthetic oligonucleotide
  Target: ATXN2; (-) strand; PAM type: NNAGAAW; PAM sequence: GAAGAAA
gctgaaggaatacagtagga

SEQ ID NO: 6601 - DNA, 20 bp, Artificial Sequence
  Description of Artificial Sequence: Synthetic oligonucleotide
  Target: ATXN2; (-) strand; PAM type: NNAGAAW; PAM sequence: TTAGAAT
cccaatcccatatatttcct

SEQ ID NO: 6602 - DNA, 20 bp, Artificial Sequence
  Description of Artificial Sequence: Synthetic oligonucleotide
  Target: ATXN2; (-) strand; PAM type: NNAGAAW; PAM sequence: GCAGAAT
aaaactgatttcctacattg

SEQ ID NO: 6603 - DNA, 20 bp, Artificial Sequence
  Description of Artificial Sequence: Synthetic oligonucleotide
  Target: ATXN2; (-) strand; PAM type: NNAGAAW; PAM sequence: AAAGAAT
tgtttgtatttctattaaag

SEQ ID NO: 6604 - DNA, 20 bp, Artificial Sequence
  Description of Artificial Sequence: Synthetic oligonucleotide
  Target: ATXN2; (-) strand; PAM type: NNAGAAW; PAM sequence: AAAGAAA
caagtgtttgtatttctatt

SEQ ID NO: 6605 - DNA, 20 bp, Artificial Sequence
  Description of Artificial Sequence: Synthetic oligonucleotide
  Target: ATXN2; (-) strand; PAM type: NNAGAAW; PAM sequence: AGAGAAA
ctgggaccttgattccaatc

SEQ ID NO: 6606 - DNA, 20 bp, Artificial Sequence
  Description of Artificial Sequence: Synthetic oligonucleotide
  Target: ATXN2; (-) strand; PAM type: NNAGAAW; PAM sequence: TGAGAAT
aatttactgtgtaaatttac

SEQ ID NO: 6607 - DNA, 20 bp, Artificial Sequence
  Description of Artificial Sequence: Synthetic oligonucleotide
  Target: ATXN2; (-) strand; PAM type: NNAGAAW; PAM sequence: AGAGAAA
aaatctggacaaatccatag

SEQ ID NO: 6608 - DNA, 20 bp, Artificial Sequence
  Description of Artificial Sequence: Synthetic oligonucleotide
  Target: ATXN2; (-) strand; PAM type: NNAGAAW; PAM sequence: AGAGAAA
gcttaagccttctgaagtcc

SEQ ID NO: 6609 - DNA, 20 bp, Artificial Sequence
  Description of Artificial Sequence: Synthetic oligonucleotide
  Target: ATXN2; (-) strand; PAM type: NNAGAAW; PAM sequence: CAAGAAT
agtgtctgaacaccaggagg

SEQ ID NO: 6610 - DNA, 20 bp, Artificial Sequence
  Description of Artificial Sequence: Synthetic oligonucleotide
  Target: ATXN2; (+) strand; PAM type: NNAGAAW; PAM sequence: AGAGAAA
attgatctttccttccttcc

SEQ ID NO: 6611 - DNA, 20 bp, Artificial Sequence
  Description of Artificial Sequence: Synthetic oligonucleotide
  Target: ATXN2; (+) strand; PAM type: NNAGAAW; PAM sequence: AGAGAAA
gcccagtccccgttactctt

SEQ ID NO: 6612 - DNA, 20 bp, Artificial Sequence
  Description of Artificial Sequence: Synthetic oligonucleotide
  Target: ATXN2; (+) strand; PAM type: NNAGAAW; PAM sequence: TCAGAAA
cacccatgctatttttgtag

SEQ ID NO: 6613 - DNA, 20 bp, Artificial Sequence
  Description of Artificial Sequence: Synthetic oligonucleotide
  Target: ATXN2; (+) strand; PAM type: NNAGAAW; PAM sequence: TGAGAAA
gaatctggtgccataactaa

SEQ ID NO: 6614 - DNA, 20 bp, Artificial Sequence
  Description of Artificial Sequence: Synthetic oligonucleotide
  Target: ATXN2; (+) strand; PAM type: NNAGAAW; PAM sequence: TGAGAAT
tggctactgcttcactggat

SEQ ID NO: 6615 - DNA, 20 bp, Artificial Sequence
  Description of Artificial Sequence: Synthetic oligonucleotide
  Target: ATXN2; (+) strand; PAM type: NNAGAAW; PAM sequence: TCAGAAA
cccagaacctgtctggaggc

SEQ ID NO: 6616 - DNA, 20 bp, Artificial Sequence
  Description of Artificial Sequence: Synthetic oligonucleotide
  Target: ATXN2; (+) strand; PAM type: NNAGAAW; PAM sequence: CTAGAAT
aagaggtcaaatttttgctt

SEQ ID NO: 6617 - DNA, 20 bp, Artificial Sequence
  Description of Artificial Sequence: Synthetic oligonucleotide
  Target: ATXN2; (+) strand; PAM type: NNAGAAW; PAM sequence: GGAGAAA
gagtctgaagtttttttaaa

SEQ ID NO: 6618 - DNA, 20 bp, Artificial Sequence
  Description of Artificial Sequence: Synthetic oligonucleotide
  Target: ATXN2; (+) strand; PAM type: NNAGAAW; PAM sequence: ACAGAAA
gacagctcaaaaacatgctg

SEQ ID NO: 6619 - DNA, 20 bp, Artificial Sequence
  Description of Artificial Sequence: Synthetic oligonucleotide
  Target: ATXN2; (+) strand; PAM type: NNAGAAW; PAM sequence: GCAGAAT
acacctttctttatgtggga

SEQ ID NO: 6620 - DNA, 20 bp, Artificial Sequence
  Description of Artificial Sequence: Synthetic oligonucleotide
  Target: ATXN2; (+) strand; PAM type: NNAGAAW; PAM sequence: AAAGAAT
aactaacagtcaccagcacc

SEQ ID NO: 6621 - DNA, 20 bp, Artificial Sequence
  Description of Artificial Sequence: Synthetic oligonucleotide
  Target: ATXN2; (+) strand; PAM type: NNAGAAW; PAM sequence: TTAGAAT
atctgacatcctgtgtttgg

SEQ ID NO: 6622 - DNA, 20 bp, Artificial Sequence
  Description of Artificial Sequence: Synthetic oligonucleotide
  Target: ATXN2; (+) strand; PAM type: NNAGAAW; PAM sequence: TCAGAAT
atatgtgaattaaaaagttt

SEQ ID NO: 6623 - DNA, 20 bp, Artificial Sequence
  Description of Artificial Sequence: Synthetic oligonucleotide
  Target: ATXN2; (+) strand; PAM type: NNAGAAW; PAM sequence: GTAGAAA
tcctgccccctactggtaaa

SEQ ID NO: 6624 - DNA, 20 bp, Artificial Sequence
  Description of Artificial Sequence: Synthetic oligonucleotide
  Target: ATXN2; (+) strand; PAM type: NNAGAAW; PAM sequence: ACAGAAT
agatattaaaaaggaagctt

SEQ ID NO: 6625 - DNA, 20 bp, Artificial Sequence
  Description of Artificial Sequence: Synthetic oligonucleotide
  Target: ATXN2; (+) strand; PAM type: NNAGAAW; PAM sequence: AGAGAAT
gcagatctctaatccaccaa

SEQ ID NO: 6626 - DNA, 20 bp, Artificial Sequence
  Description of Artificial Sequence: Synthetic oligonucleotide
  Target: ATXN2; (+) strand; PAM type: NNAGAAW; PAM sequence: GAAGAAA
gaaccagaactaagggtgaa

SEQ ID NO: 6627 - DNA, 20 bp, Artificial Sequence
  Description of Artificial Sequence: Synthetic oligonucleotide
  Target: ATXN2; (+) strand; PAM type: NNAGAAW; PAM sequence: TAAGAAT
ataatccgtcagtttgacgg

SEQ ID NO: 6628 - DNA, 20 bp, Artificial Sequence
  Description of Artificial Sequence: Synthetic oligonucleotide
  Target: ATXN2; (+) strand; PAM type: NNAGAAW; PAM sequence: CAAGAAT
ttttttagcagtaatagcag

SEQ ID NO: 6629 - DNA, 20 bp, Artificial Sequence
  Description of Artificial Sequence: Synthetic oligonucleotide
  Target: ATXN2; (+) strand; PAM type: NNAGAAW; PAM sequence: CAAGAAA
agcattcctattggatgtta

SEQ ID NO: 6630 - DNA, 20 bp, Artificial Sequence
  Description of Artificial Sequence: Synthetic oligonucleotide
  Target: ATXN2; (+) strand; PAM type: NNAGAAW; PAM sequence: AAAGAAA
gtggtgggcttgtactgtaa

SEQ ID NO: 6631 - DNA, 20 bp, Artificial Sequence
  Description of Artificial Sequence: Synthetic oligonucleotide
  Target: ATXN2; (+) strand; PAM type: NNAGAAW; PAM sequence: ACAGAAA
aaagaaaagcgaacattgaa

SEQ ID NO: 6632 - DNA, 20 bp, Artificial Sequence
  Description of Artificial Sequence: Synthetic oligonucleotide
  Target: ATXN2; (+) strand; PAM type: NNAGAAW; PAM sequence: GTAGAAA
ggggagggttgggtgggtgg

SEQ ID NO: 6633 - DNA, 20 bp, Artificial Sequence
  Description of Artificial Sequence: Synthetic oligonucleotide
  Target: ATXN2; (+) strand; PAM type: NNAGAAW; PAM sequence: GTAGAAA
ccagaagacttgttcatggg

SEQ ID NO: 6634 - DNA, 20 bp, Artificial Sequence
  Description of Artificial Sequence: Synthetic oligonucleotide
  Target: ATXN2; (+) strand; PAM type: NNAGAAW; PAM sequence: TCAGAAT
gccaagcaccagtattgctt

SEQ ID NO: 6635 - DNA, 20 bp, Artificial Sequence
  Description of Artificial Sequence: Synthetic oligonucleotide
  Target: ATXN2; (+) strand; PAM type: NNAGAAW; PAM sequence: GCAGAAT
ctgccattccacctgtgcga

SEQ ID NO: 6636 - DNA, 20 bp, Artificial Sequence
  Description of Artificial Sequence: Synthetic oligonucleotide
  Target: ATXN2; (+) strand; PAM type: NNAGAAW; PAM sequence: TCAGAAT
atacaagattcaatgatgct

SEQ ID NO: 6637 - DNA, 20 bp, Artificial Sequence
  Description of Artificial Sequence: Synthetic oligonucleotide
  Target: ATXN2; (+) strand; PAM type: NNAGAAW; PAM sequence: AAAGAAA
gtgcttccagggctgctctt

SEQ ID NO: 6638 - DNA, 20 bp, Artificial Sequence
  Description of Artificial Sequence: Synthetic oligonucleotide
  Target: ATXN2; (+) strand; PAM type: NNAGAAW; PAM sequence: ACAGAAA
atagacatagcaaagcagac

SEQ ID NO: 6639 - DNA, 20 bp, Artificial Sequence
  Description of Artificial Sequence: Synthetic oligonucleotide
  Target: ATXN2; (+) strand; PAM type: NNAGAAW; PAM sequence: ACAGAAA
tcacattctacttggccttc

SEQ ID NO: 6640 - DNA, 20 bp, Artificial Sequence
  Description of Artificial Sequence: Synthetic oligonucleotide
  Target: ATXN2; (+) strand; PAM type: NNAGAAW; PAM sequence: AAAGAAT
tggtgctgcaaagcgacagg

SEQ ID NO: 6641 - DNA, 20 bp, Artificial Sequence
  Description of Artificial Sequence: Synthetic oligonucleotide
  Target: ATXN2; (+) strand; PAM type: NNAGAAW; PAM sequence: GGAGAAT
gagggtcactggaaagtaca

SEQ ID NO: 6642 - DNA, 20 bp, Artificial Sequence
  Description of Artificial Sequence: Synthetic oligonucleotide
  Target: ATXN2; (+) strand; PAM type: NNAGAAW; PAM sequence: TTAGAAA
cctgattctcagtctggcag

SEQ ID NO: 6643 - DNA, 20 bp, Artificial Sequence
  Description of Artificial Sequence: Synthetic oligonucleotide
  Target: ATXN2; (+) strand; PAM type: NNAGAAW; PAM sequence: TTAGAAA
ataacctcatcacataaacc

SEQ ID NO: 6644 - DNA, 20 bp, Artificial Sequence
  Description of Artificial Sequence: Synthetic oligonucleotide
  Target: ATXN2; (+) strand; PAM type: NNAGAAW; PAM sequence: GAAGAAA
cgatgcgatacctggcacct

SEQ ID NO: 6645 - DNA, 20 bp, Artificial Sequence
  Description of Artificial Sequence: Synthetic oligonucleotide
  Target: ATXN2; (+) strand; PAM type: NNAGAAW; PAM sequence: AAAGAAA
agcccgtggaaactaaagtg

SEQ ID NO: 6646 - DNA, 20 bp, Artificial Sequence
  Description of Artificial Sequence: Synthetic oligonucleotide
  Target: ATXN2; (+) strand; PAM type: NNAGAAW; PAM sequence: GCAGAAA
aaggcaacttgaaggcatag

SEQ ID NO: 6647 - DNA, 20 bp, Artificial Sequence
  Description of Artificial Sequence: Synthetic oligonucleotide
  Target: ATXN2; (+) strand; PAM type: NNAGAAW; PAM sequence: ATAGAAA
ctttgctttatgaaataaat

SEQ ID NO: 6648 - DNA, 20 bp, Artificial Sequence
  Description of Artificial Sequence: Synthetic oligonucleotide
  Target: ATXN2; (+) strand; PAM type: NNAGAAW; PAM sequence: AAAGAAA
tgagtgccccagccctttgg

SEQ ID NO: 6649 - DNA, 20 bp, Artificial Sequence
  Description of Artificial Sequence: Synthetic oligonucleotide
  Target: ATXN2; (+) strand; PAM type: NNAGAAW; PAM sequence: TGAGAAT
gtgcttcaaaaacagtaagt

SEQ ID NO: 6650 - DNA, 20 bp, Artificial Sequence
  Description of Artificial Sequence: Synthetic oligonucleotide
  Target: ATXN2; (+) strand; PAM type: NNAGAAW; PAM sequence: TGAGAAT
acctccacgaggcaatgagc

SEQ ID NO: 6651 - DNA, 20 bp, Artificial Sequence
  Description of Artificial Sequence: Synthetic oligonucleotide
  Target: ATXN2; (+) strand; PAM type: NNAGAAW; PAM sequence: TGAGAAA
tatagttcccagccctctct

SEQ ID NO: 6652 - DNA, 20 bp, Artificial Sequence
  Description of Artificial Sequence: Synthetic oligonucleotide
  Target: ATXN2; (+) strand; PAM type: NNAGAAW; PAM sequence: ACAGAAA
tcaagataataagcccatac

SEQ ID NO: 6653 - DNA, 20 bp, Artificial Sequence
  Description of Artificial Sequence: Synthetic oligonucleotide
  Target: ATXN2; (+) strand; PAM type: NNAGAAW; PAM sequence: CCAGAAT
actgtaggaattaacatatg

SEQ ID NO: 6654 - DNA, 20 bp, Artificial Sequence
  Description of Artificial Sequence: Synthetic oligonucleotide
  Target: ATXN2; (+) strand; PAM type: NNAGAAW; PAM sequence: CAAGAAA
catatgccagaatattttaa

SEQ ID NO: 6655 - DNA, 20 bp, Artificial Sequence
  Description of Artificial Sequence: Synthetic oligonucleotide
  Target: ATXN2; (+) strand; PAM type: NNAGAAW; PAM sequence: CAAGAAA
tttttgtaactttatttatt

SEQ ID NO: 6656 - DNA, 20 bp, Artificial Sequence
  Description of Artificial Sequence: Synthetic oligonucleotide
  Target: ATXN2; (+) strand; PAM type: NNAGAAW; PAM sequence: TAAGAAT
ataccttctaagcaaagtat

SEQ ID NO: 6657 - DNA, 20 bp, Artificial Sequence
  Description of Artificial Sequence: Synthetic oligonucleotide
  Target: ATXN2; (+) strand; PAM type: NNAGAAW; PAM sequence: ATAGAAA
attaaaaagtaacaataaat

SEQ ID NO: 6658 - DNA, 20 bp, Artificial Sequence
  Description of Artificial Sequence: Synthetic oligonucleotide
  Target: ATXN2; (+) strand; PAM type: NNAGAAW; PAM sequence: AGAGAAA
aaaatcttaaaatcatttga

SEQ ID NO: 6659 - DNA, 20 bp, Artificial Sequence
  Description of Artificial Sequence: Synthetic oligonucleotide
  Target: ATXN2; (+) strand; PAM type: NNAGAAW; PAM sequence: TTAGAAA
caaaatttaaaaagagttaa

SEQ ID NO: 6660 - DNA, 20 bp, Artificial Sequence
  Description of Artificial Sequence: Synthetic oligonucleotide
  Target: ATXN2; (+) strand; PAM type: NNAGAAW; PAM sequence: GGAGAAA
cctccttgaatttgaaattg

SEQ ID NO: 6661 - DNA, 20 bp, Artificial Sequence
  Description of Artificial Sequence: Synthetic oligonucleotide
  Target: ATXN2; (+) strand; PAM type: NNAGAAW; PAM sequence: GGAGAAT
ctactagggagagtggggaa

SEQ ID NO: 6662 - DNA, 20 bp, Artificial Sequence
  Description of Artificial Sequence: Synthetic oligonucleotide
  Target: ATXN2; (+) strand; PAM type: NNAGAAW; PAM sequence: GGAGAAA
taaataataataataaattg

SEQ ID NO: 6663 - DNA, 20 bp, Artificial Sequence
  Description of Artificial Sequence: Synthetic oligonucleotide
  Target: ATXN2; (+) strand; PAM type: NNAGAAW; PAM sequence: GAAGAAA
agtgacacaaagcagggtag

SEQ ID NO: 6664 - DNA, 20 bp, Artificial Sequence
  Description of Artificial Sequence: Synthetic oligonucleotide
  Target: ATXN2; (+) strand; PAM type: NNAGAAW; PAM sequence: AGAGAAT
gctactctggaagctgaggc

SEQ ID NO: 6665 - DNA, 20 bp, Artificial Sequence
  Description of Artificial Sequence: Synthetic oligonucleotide
  Target: ATXN2; (+) strand; PAM type: NNAGAAW; PAM sequence: AAAGAAA
cagagtgagactccatctca

SEQ ID NO: 6666 - DNA, 20 bp, Artificial Sequence
  Description of Artificial Sequence: Synthetic oligonucleotide
  Target: ATXN2; (+) strand; PAM type: NNAGAAW; PAM sequence: GGAGAAT
gtaaagaaggaaaaaacaca

SEQ ID NO: 6667 - DNA, 20 bp, Artificial Sequence
  Description of Artificial Sequence: Synthetic oligonucleotide
  Target: ATXN2; (+) strand; PAM type: NNAGAAW; PAM sequence: ACAGAAA
ctcactgaagcaaattaagt

SEQ ID NO: 6668 - DNA, 20 bp, Artificial Sequence
  Description of Artificial Sequence: Synthetic oligonucleotide
  Target: ATXN2; (+) strand; PAM type: NNAGAAW; PAM sequence: TCAGAAA
ttgtaaatctgatgttaaat

SEQ ID NO: 6669 - DNA, 20 bp, Artificial Sequence
  Description of Artificial Sequence: Synthetic oligonucleotide
  Target: ATXN2; (+) strand; PAM type: NNAGAAW; PAM sequence: GAAGAAA
accttaaaagttcatttcca

SEQ ID NO: 6670 - DNA, 20 bp, Artificial Sequence
  Description of Artificial Sequence: Synthetic oligonucleotide
  Target: ATXN2; (+) strand; PAM type: NNAGAAW; PAM sequence: ACAGAAT
tgaatattttattttttgag

SEQ ID NO: 6671 - DNA, 20 bp, Artificial Sequence
  Description of Artificial Sequence: Synthetic oligonucleotide
  Target: ATXN2; (+) strand; PAM type: NNAGAAW; PAM sequence: TCAGAAT
taggcataaatttcatctta

SEQ ID NO: 6672 - DNA, 20 bp, Artificial Sequence
  Description of Artificial Sequence: Synthetic oligonucleotide
  Target: ATXN2; (+) strand; PAM type: NNAGAAW; PAM sequence: GTAGAAA
aaacccaactcactggcaaa

SEQ ID NO: 6673 - DNA, 20 bp, Artificial Sequence
  Description of Artificial Sequence: Synthetic oligonucleotide
  Target: ATXN2; (+) strand; PAM type: NNAGAAW; PAM sequence: ATAGAAA
ggacatgctgaatttgggaa

SEQ ID NO: 6674 - DNA, 20 bp, Artificial Sequence
  Description of Artificial Sequence: Synthetic oligonucleotide
  Target: ATXN2; (+) strand; PAM type: NNAGAAW; PAM sequence: ACAGAAT
caagcactttaaacactgct

SEQ ID NO: 6675 - DNA, 20 bp, Artificial Sequence
  Description of Artificial Sequence: Synthetic oligonucleotide
  Target: ATXN2; (+) strand; PAM type: NNAGAAW; PAM sequence: AAAGAAA
aacactgctacagaatttta

SEQ ID NO: 6676 - DNA, 20 bp, Artificial Sequence
  Description of Artificial Sequence: Synthetic oligonucleotide
  Target: ATXN2; (+) strand; PAM type: NNAGAAW; PAM sequence: CAAGAAT
ccaaaaatttaggatcatag

SEQ ID NO: 6677 - DNA, 20 bp, Artificial Sequence
  Description of Artificial Sequence: Synthetic oligonucleotide
  Target: ATXN2; (+) strand; PAM type: NNAGAAW; PAM sequence: GCAGAAA
cacctactcgggaggctgag

SEQ ID NO: 6678 - DNA, 20 bp, Artificial Sequence
  Description of Artificial Sequence: Synthetic oligonucleotide
  Target: ATXN2; (+) strand; PAM type: NNAGAAW; PAM sequence: TCAGAAT
tgagatcgcaccgctgcact

SEQ ID NO: 6679 - DNA, 20 bp, Artificial Sequence
  Description of Artificial Sequence: Synthetic oligonucleotide
  Target: ATXN2; (+) strand; PAM type: NNAGAAW; PAM sequence: GGAGAAT
ctactcgggaggctgaggta

SEQ ID NO: 6680 - DNA, 20 bp, Artificial Sequence
  Description of Artificial Sequence: Synthetic oligonucleotide
  Target: ATXN2; (+) strand; PAM type: NNAGAAW; PAM sequence: CTAGAAA
aaaagccctttctaagatag

SEQ ID NO: 6681 - DNA, 20 bp, Artificial Sequence
  Description of Artificial Sequence: Synthetic oligonucleotide
  Target: ATXN2; (+) strand; PAM type: NNAGAAW; PAM sequence: TTAGAAT
aggtcaaggtcaatactttt

SEQ ID NO: 6682 - DNA, 20 bp, Artificial Sequence
  Description of Artificial Sequence: Synthetic oligonucleotide
  Target: ATXN2; (+) strand; PAM type: NNAGAAW; PAM sequence: TGAGAAA
tggctataacaattaatgaa

SEQ ID NO: 6683 - DNA, 20 bp, Artificial Sequence
  Description of Artificial Sequence: Synthetic oligonucleotide
  Target: ATXN2; (+) strand; PAM type: NNAGAAW; PAM sequence: AAAGAAA
ctagatatgatgtagcttaa

SEQ ID NO: 6684 - DNA, 20 bp, Artificial Sequence
  Description of Artificial Sequence: Synthetic oligonucleotide
  Target: ATXN2; (+) strand; PAM type: NNAGAAW; PAM sequence: TGAGAAA
ctcaaagtatttggttcctt

SEQ ID NO: 6685 - DNA, 20 bp, Artificial Sequence
  Description of Artificial Sequence: Synthetic oligonucleotide
  Target: ATXN2; (+) strand; PAM type: NNAGAAW; PAM sequence: TAAGAAT
tgtaagtttgttgtagttta

SEQ ID NO: 6686 - DNA, 20 bp, Artificial Sequence
  Description of Artificial Sequence: Synthetic oligonucleotide
  Target: ATXN2; (+) strand; PAM type: NNAGAAW; PAM sequence: GGAGAAA
gcagtgaatgaacacaatga

SEQ ID NO: 6687 - DNA, 20 bp, Artificial Sequence
  Description of Artificial Sequence: Synthetic oligonucleotide
  Target: ATXN2; (+) strand; PAM type: NNAGAAW; PAM sequence: CCAGAAA
ctgattccaaggggagtatg

SEQ ID NO: 6688 - DNA, 20 bp, Artificial Sequence
  Description of Artificial Sequence: Synthetic oligonucleotide
  Target: ATXN2; (+) strand; PAM type: NNAGAAW; PAM sequence: CCAGAAA
gttaaatcatgatgtattca

SEQ ID NO: 6689 - DNA, 20 bp, Artificial Sequence
  Description of Artificial Sequence: Synthetic oligonucleotide
  Target: ATXN2; (+) strand; PAM type: NNAGAAW; PAM sequence: GAAGAAA
tggcagacaagaacctccag

SEQ ID NO: 6690 - DNA, 20 bp, Artificial Sequence
  Description of Artificial Sequence: Synthetic oligonucleotide
  Target: ATXN2; (+) strand; PAM type: NNAGAAW; PAM sequence: CCAGAAA
tgtctcaagaagaaggtttg

SEQ ID NO: 6691 - DNA, 20 bp, Artificial Sequence
  Description of Artificial Sequence: Synthetic oligonucleotide
  Target: ATXN2; (+) strand; PAM type: NNAGAAW; PAM sequence: TCAGAAA
aaacgacactacggtagttc

SEQ ID NO: 6692 - DNA, 20 bp, Artificial Sequence
  Description of Artificial Sequence: Synthetic oligonucleotide
  Target: ATXN2; (+) strand; PAM type: NNAGAAW; PAM sequence: GTAGAAA
ccattaaaatacagcatgat

SEQ ID NO: 6693 - DNA, 20 bp, Artificial Sequence
  Description of Artificial Sequence: Synthetic oligonucleotide
  Target: ATXN2; (+) strand; PAM type: NNAGAAW; PAM sequence: GGAGAAA
cataatattgatgaggaaga

SEQ ID NO: 6694 - DNA, 20 bp, Artificial Sequence
  Description of Artificial Sequence: Synthetic oligonucleotide
  Target: ATXN2; (+) strand; PAM type: NNAGAAW; PAM sequence: GTAGAAA
tctgaagaccaggtacagaa

SEQ ID NO: 6695 - DNA, 20 bp, Artificial Sequence
  Description of Artificial Sequence: Synthetic oligonucleotide
  Target: ATXN2; (+) strand; PAM type: NNAGAAW; PAM sequence: AAAGAAA
agttataaagcaagtcaggc

SEQ ID NO: 6696 - DNA, 20 bp, Artificial Sequence
  Description of Artificial Sequence: Synthetic oligonucleotide
  Target: ATXN2; (+) strand; PAM type: NNAGAAW; PAM sequence: TCAGAAA
ttcttagatagagtatgttt

SEQ ID NO: 6697 - DNA, 20 bp, Artificial Sequence
  Description of Artificial Sequence: Synthetic oligonucleotide
  Target: ATXN2; (+) strand; PAM type: NNAGAAW; PAM sequence: AAAGAAA
gctgtgttcaaacaaaaaat

SEQ ID NO: 6698 - DNA, 20 bp, Artificial Sequence
  Description of Artificial Sequence: Synthetic oligonucleotide
  Target: ATXN2; (+) strand; PAM type: NNAGAAW; PAM sequence: CCAGAAA
actccatggtttccagattt

SEQ ID NO: 6699 - DNA, 20 bp, Artificial Sequence
  Description of Artificial Sequence: Synthetic oligonucleotide
  Target: ATXN2; (+) strand; PAM type: NNAGAAW; PAM sequence: GCAGAAA
gttggggcatatttggtact

SEQ ID NO: 6700 - DNA, 20 bp, Artificial Sequence
  Description of Artificial Sequence: Synthetic oligonucleotide
  Target: ATXN2; (+) strand; PAM type: NNAGAAW; PAM sequence: TGAGAAA
gacgggcactgcattcattt

SEQ ID NO: 6701 - DNA, 20 bp, Artificial Sequence
  Description of Artificial Sequence: Synthetic oligonucleotide
  Target: ATXN2; (+) strand; PAM type: NNAGAAW; PAM sequence: TAAGAAT
cgccctgttacaactctagt

SEQ ID NO: 6702 - DNA, 20 bp, Artificial Sequence
  Description of Artificial Sequence: Synthetic oligonucleotide
  Target: ATXN2; (+) strand; PAM type: NNAGAAW; PAM sequence: AAAGAAT
tacaactaggtataaggcac

SEQ ID NO: 6703 - DNA, 20 bp, Artificial Sequence
  Description of Artificial Sequence: Synthetic oligonucleotide
  Target: ATXN2; (+) strand; PAM type: NNAGAAW; PAM sequence: GAAGAAA
gagggtaggggacaggaggg

SEQ ID NO: 6704 - DNA, 20 bp, Artificial Sequence
  Description of Artificial Sequence: Synthetic oligonucleotide
  Target: ATXN2; (+) strand; PAM type: NNAGAAW; PAM sequence: AAAGAAA
taggggacaggaggggaaga

SEQ ID NO: 6705 - DNA, 20 bp, Artificial Sequence
  Description of Artificial Sequence: Synthetic oligonucleotide
  Target: ATXN2; (+) strand; PAM type: NNAGAAW; PAM sequence: ACAGAAA
ctggttacctttggaggata

SEQ ID NO: 6706 - DNA, 20 bp, Artificial Sequence
  Description of Artificial Sequence: Synthetic oligonucleotide
  Target: ATXN2; (+) strand; PAM type: NNAGAAW; PAM sequence: TAAGAAA
acattttaaattacttttcc

SEQ ID NO: 6707 - DNA, 20 bp, Artificial Sequence
  Description of Artificial Sequence: Synthetic oligonucleotide
  Target: ATXN2; (+) strand; PAM type: NNAGAAW; PAM sequence: ATAGAAA
atatgggaaagtttttcttt

SEQ ID NO: 6708 - DNA, 20 bp, Artificial Sequence
  Description of Artificial Sequence: Synthetic oligonucleotide
  Target: ATXN2; (+) strand; PAM type: NNAGAAW; PAM sequence: AAAGAAT
ttgaagaagggatgaaagga

SEQ ID NO: 6709 - DNA, 20 bp, Artificial Sequence
  Description of Artificial Sequence: Synthetic oligonucleotide
  Target: ATXN2; (+) strand; PAM type: NNAGAAW; PAM sequence: GTAGAAA
tagcactttaggaggctgag

SEQ ID NO: 6710 - DNA, 20 bp, Artificial Sequence
  Description of Artificial Sequence: Synthetic oligonucleotide
  Target: ATXN2; (+) strand; PAM type: NNAGAAW; PAM sequence: ATAGAAA
ttaggactagcctgggcaag

SEQ ID NO: 6711 - DNA, 20 bp, Artificial Sequence
  Description of Artificial Sequence: Synthetic oligonucleotide
  Target: ATXN2; (+) strand; PAM type: NNAGAAW; PAM sequence: GAAGAAA
acaaacaaaaaaacaaagaa

SEQ ID NO: 6712 - DNA, 20 bp, Artificial Sequence
  Description of Artificial Sequence: Synthetic oligonucleotide
  Target: ATXN2; (+) strand; PAM type: NNAGAAW; PAM sequence: CAAGAAA
aaagaagaagaaagacaaga

SEQ ID NO: 6713 - DNA, 20 bp, Artificial Sequence
  Description of Artificial Sequence: Synthetic oligonucleotide
  Target: ATXN2; (+) strand; PAM type: NNAGAAW; PAM sequence: AAAGAAA
agaagaaagacaagacaaga

SEQ ID NO: 6714 - DNA, 20 bp, Artificial Sequence
  Description of Artificial Sequence: Synthetic oligonucleotide
  Target: ATXN2; (+) strand; PAM type: NNAGAAW; PAM sequence: CTAGAAT
tggataaactgatgcaatgt

SEQ ID NO: 6715 - DNA, 20 bp, Artificial Sequence
  Description of Artificial Sequence: Synthetic oligonucleotide
  Target: ATXN2; (+) strand; PAM type: NNAGAAW; PAM sequence: TCAGAAT
tgcaatgtctagaatttgct

SEQ ID NO: 6716 - DNA, 20 bp, Artificial Sequence
  Description of Artificial Sequence: Synthetic oligonucleotide
  Target: ATXN2; (+) strand; PAM type: NNAGAAW; PAM sequence: GGAGAAT
ctactcaggaggctgaggca

SEQ ID NO: 6717 - DNA, 20 bp, Artificial Sequence
  Description of Artificial Sequence: Synthetic oligonucleotide
  Target: ATXN2; (+) strand; PAM type: NNAGAAW; PAM sequence: GGAGAAT
ctacttgggaggctgaggca

SEQ ID NO: 6718 - DNA, 20 bp, Artificial Sequence
  Description of Artificial Sequence: Synthetic oligonucleotide
  Target: ATXN2; (+) strand; PAM type: NNAGAAW; PAM sequence: CTAGAAT
tgcctcagtctcccaagtag

SEQ ID NO: 6719 - DNA, 20 bp, Artificial Sequence
  Description of Artificial Sequence: Synthetic oligonucleotide
  Target: ATXN2; (+) strand; PAM type: NNAGAAW; PAM sequence: ACAGAAA
gagttcatatggaaaaataa

SEQ ID NO: 6720 - DNA, 20 bp, Artificial Sequence
  Description of Artificial Sequence: Synthetic oligonucleotide
  Target: ATXN2; (+) strand; PAM type: NNAGAAW; PAM sequence: CCAGAAA
agtgaagcagagtgaaaaat

SEQ ID NO: 6721 - DNA, 20 bp, Artificial Sequence
  Description of Artificial Sequence: Synthetic oligonucleotide
  Target: ATXN2; (+) strand; PAM type: NNAGAAW; PAM sequence: AAAGAAA
caacaaccattcatgattaa

SEQ ID NO: 6722 - DNA, 20 bp, Artificial Sequence
  Description of Artificial Sequence: Synthetic oligonucleotide
  Target: ATXN2; (+) strand; PAM type: NNAGAAW; PAM sequence: CCAGAAA
gtttaagtcttaaagggctg

SEQ ID NO: 6723 - DNA, 20 bp, Artificial Sequence
  Description of Artificial Sequence: Synthetic oligonucleotide
  Target: ATXN2; (+) strand; PAM type: NNAGAAW; PAM sequence: TAAGAAA
gaaatattaagggataaatt

SEQ ID NO: 6724 - DNA, 20 bp, Artificial Sequence
  Description of Artificial Sequence: Synthetic oligonucleotide
  Target: ATXN2; (+) strand; PAM type: NNAGAAW; PAM sequence: AAAGAAA
agcaggcacaaaactgatac

SEQ ID NO: 6725 - DNA, 20 bp, Artificial Sequence
  Description of Artificial Sequence: Synthetic oligonucleotide
  Target: ATXN2; (+) strand; PAM type: NNAGAAW; PAM sequence: CTAGAAA
caaaactgatacaaagaaaa

SEQ ID NO: 6726 - DNA, 20 bp, Artificial Sequence
  Description of Artificial Sequence: Synthetic oligonucleotide
  Target: ATXN2; (+) strand; PAM type: NNAGAAW; PAM sequence: GCAGAAT
tatttgcaaattcaaagaac

SEQ ID NO: 6727 - DNA, 20 bp, Artificial Sequence
  Description of Artificial Sequence: Synthetic oligonucleotide
  Target: ATXN2; (+) strand; PAM type: NNAGAAW; PAM sequence: CGAGAAT
cagaataagagtaattttga

SEQ ID NO: 6728 - DNA, 20 bp, Artificial Sequence
  Description of Artificial Sequence: Synthetic oligonucleotide
  Target: ATXN2; (+) strand; PAM type: NNAGAAW; PAM sequence: AGAGAAT
acaaagtaacagcaataaag

SEQ ID NO: 6729 - DNA, 20 bp, Artificial Sequence
  Description of Artificial Sequence: Synthetic oligonucleotide
  Target: ATXN2; (+) strand; PAM type: NNAGAAW; PAM sequence: GCAGAAT
tagctactcgagaggctgag

SEQ ID NO: 6730 - DNA, 20 bp, Artificial Sequence
  Description of Artificial Sequence: Synthetic oligonucleotide
  Target: ATXN2; (+) strand; PAM type: NNAGAAW; PAM sequence: ACAGAAA
tcgagactcttgtttcaaga

SEQ ID NO: 6731 - DNA, 20 bp, Artificial Sequence
  Description of Artificial Sequence: Synthetic oligonucleotide
  Target: ATXN2; (+) strand; PAM type: NNAGAAW; PAM sequence: AGAGAAA
ggaaaacagaggctggtgcc

SEQ ID NO: 6732 - DNA, 20 bp, Artificial Sequence
  Description of Artificial Sequence: Synthetic oligonucleotide
  Target: ATXN2; (+) strand; PAM type: NNAGAAW; PAM sequence: GGAGAAA
accgagtaaatatttatggt

SEQ ID NO: 6733 - DNA, 20 bp, Artificial Sequence
  Description of Artificial Sequence: Synthetic oligonucleotide
  Target: ATXN2; (+) strand; PAM type: NNAGAAW; PAM sequence: AGAGAAA
acaaaaaagcatgaacctta

SEQ ID NO: 6734 - DNA, 20 bp, Artificial Sequence
  Description of Artificial Sequence: Synthetic oligonucleotide
  Target: ATXN2; (+) strand; PAM type: NNAGAAW; PAM sequence: GGAGAAA
tcaaaaaaaaccgcagactg

SEQ ID NO: 6735 - DNA, 20 bp, Artificial Sequence
  Description of Artificial Sequence: Synthetic oligonucleotide
  Target: ATXN2; (+) strand; PAM type: NNAGAAW; PAM sequence: TGAGAAA
agaaaatattcacaatattc

SEQ ID NO: 6736 - DNA, 20 bp, Artificial Sequence
  Description of Artificial Sequence: Synthetic oligonucleotide
  Target: ATXN2; (+) strand; PAM type: NNAGAAW; PAM sequence: CCAGAAT
ttctgagaaaggacttgtaa

SEQ ID NO: 6737 - DNA, 20 bp, Artificial Sequence
  Description of Artificial Sequence: Synthetic oligonucleotide
  Target: ATXN2; (+) strand; PAM type: NNAGAAW; PAM sequence: TAAGAAA
tagtaactttattttcacag

SEQ ID NO: 6738 - DNA, 20 bp, Artificial Sequence
  Description of Artificial Sequence: Synthetic oligonucleotide
  Target: ATXN2; (+) strand; PAM type: NNAGAAW; PAM sequence: AAAGAAA
actttattttcacagtaaga

SEQ ID NO: 6739 - DNA, 20 bp, Artificial Sequence
  Description of Artificial Sequence: Synthetic oligonucleotide
  Target: ATXN2; (+) strand; PAM type: NNAGAAW; PAM sequence: GCAGAAA
gcgtgagccagtgcacccag

SEQ ID NO: 6740 - DNA, 20 bp, Artificial Sequence
  Description of Artificial Sequence: Synthetic oligonucleotide
  Target: ATXN2; (+) strand; PAM type: NNAGAAW; PAM sequence: AAAGAAA
aggcagaaacattgagacaa

SEQ ID NO: 6741 - DNA, 20 bp, Artificial Sequence
  Description of Artificial Sequence: Synthetic oligonucleotide
  Target: ATXN2; (+) strand; PAM type: NNAGAAW; PAM sequence: TAAGAAT
ctacttgggaggctaaggcg

SEQ ID NO: 6742 - DNA, 20 bp, Artificial Sequence
  Description of Artificial Sequence: Synthetic oligonucleotide
  Target: ATXN2; (+) strand; PAM type: NNAGAAW; PAM sequence: AGAGAAA
ctcctggatcagtcatcatc

SEQ ID NO: 6743 - DNA, 20 bp, Artificial Sequence
  Description of Artificial Sequence: Synthetic oligonucleotide
  Target: ATXN2; (+) strand; PAM type: NNAGAAW; PAM sequence: GGAGAAT
ctacttgggaggctgaggcg

SEQ ID NO: 6744 - DNA, 20 bp, Artificial Sequence
  Description of Artificial Sequence: Synthetic oligonucleotide
  Target: ATXN2; (+) strand; PAM type: NNAGAAW; PAM sequence: AAAGAAA
caattctaggtatttaacta

SEQ ID NO: 6745 - DNA, 20 bp, Artificial Sequence
  Description of Artificial Sequence: Synthetic oligonucleotide
  Target: ATXN2; (+) strand; PAM type: NNAGAAW; PAM sequence: AAAGAAA
aaagatttttttacgtaaaa

SEQ ID NO: 6746 - DNA, 20 bp, Artificial Sequence
  Description of Artificial Sequence: Synthetic oligonucleotide
  Target: ATXN2; (+) strand; PAM type: NNAGAAW; PAM sequence: AAAGAAA
aaacctaatcaaaaaaaaaa

SEQ ID NO: 6747 - DNA, 20 bp, Artificial Sequence
  Description of Artificial Sequence: Synthetic oligonucleotide
  Target: ATXN2; (+) strand; PAM type: NNAGAAW; PAM sequence: AAAGAAA
aatcaaaaaaaaaaaaagaa

SEQ ID NO: 6748 - DNA, 20 bp, Artificial Sequence
  Description of Artificial Sequence: Synthetic oligonucleotide
  Target: ATXN2; (+) strand; PAM type: NNAGAAW; PAM sequence: AAAGAAT
caaacaaacaatttaagagg

SEQ ID NO: 6749 - DNA, 20 bp, Artificial Sequence
  Description of Artificial Sequence: Synthetic oligonucleotide
  Target: ATXN2; (+) strand; PAM type: NNAGAAW; PAM sequence: AAAGAAA
catcaggagcaacagcaaca

SEQ ID NO: 6750 - DNA, 20 bp, Artificial Sequence
  Description of Artificial Sequence: Synthetic oligonucleotide
  Target: ATXN2; (+) strand; PAM type: NNAGAAW; PAM sequence: GGAGAAT
ctatctgggagggtgaggca

SEQ ID NO: 6751 - DNA, 20 bp, Artificial Sequence
  Description of Artificial Sequence: Synthetic oligonucleotide
  Target: ATXN2; (+) strand; PAM type: NNAGAAW; PAM sequence: CTAGAAT
acaatgacacttcataacca

SEQ ID NO: 6752 - DNA, 20 bp, Artificial Sequence
  Description of Artificial Sequence: Synthetic oligonucleotide
  Target: ATXN2; (+) strand; PAM type: NNAGAAW; PAM sequence: GGAGAAA
tcggttatttatgaggatgt

SEQ ID NO: 6753 - DNA, 20 bp, Artificial Sequence
  Description of Artificial Sequence: Synthetic oligonucleotide
  Target: ATXN2; (+) strand; PAM type: NNAGAAW; PAM sequence: GTAGAAA
ggaacacttgtacattactg

SEQ ID NO: 6754 - DNA, 20 bp, Artificial Sequence
  Description of Artificial Sequence: Synthetic oligonucleotide
  Target: ATXN2; (+) strand; PAM type: NNAGAAW; PAM sequence: GGAGAAA
atcacagcatttctacttta

SEQ ID NO: 6755 - DNA, 20 bp, Artificial Sequence
  Description of Artificial Sequence: Synthetic oligonucleotide
  Target: ATXN2; (+) strand; PAM type: NNAGAAW; PAM sequence: CCAGAAA
cacaaaagcattactcattg

SEQ ID NO: 6756 - DNA, 20 bp, Artificial Sequence
  Description of Artificial Sequence: Synthetic oligonucleotide
  Target: ATXN2; (+) strand; PAM type: NNAGAAW; PAM sequence: TTAGAAT
aaagacagtacctcctgaag

SEQ ID NO: 6757 - DNA, 20 bp, Artificial Sequence
  Description of Artificial Sequence: Synthetic oligonucleotide
  Target: ATXN2; (+) strand; PAM type: NNAGAAW; PAM sequence: TCAGAAT
aaaaaaaacccactttcttc

SEQ ID NO: 6758 - DNA, 20 bp, Artificial Sequence
  Description of Artificial Sequence: Synthetic oligonucleotide
  Target: ATXN2; (+) strand; PAM type: NNAGAAW; PAM sequence: TGAGAAA
aaaaaaaaaaaatagcatac

SEQ ID NO: 6759 - DNA, 20 bp, Artificial Sequence
  Description of Artificial Sequence: Synthetic oligonucleotide
  Target: ATXN2; (+) strand; PAM type: NNAGAAW; PAM sequence: GGAGAAA
atcacaattaggtcaaacat

SEQ ID NO: 6760 - DNA, 20 bp, Artificial Sequence
  Description of Artificial Sequence: Synthetic oligonucleotide
  Target: ATXN2; (+) strand; PAM type: NNAGAAW; PAM sequence: TCAGAAA
ggaaaaatgaaaactttatg

SEQ ID NO: 6761 - DNA, 20 bp, Artificial Sequence
  Description of Artificial Sequence: Synthetic oligonucleotide
  Target: ATXN2; (+) strand; PAM type: NNAGAAW; PAM sequence: TGAGAAA
gaaaggcaattattgggcac

SEQ ID NO: 6762 - DNA, 20 bp, Artificial Sequence
  Description of Artificial Sequence: Synthetic oligonucleotide
  Target: ATXN2; (+) strand; PAM type: NNAGAAW; PAM sequence: TAAGAAA
ctggccaaaagatttccttt

SEQ ID NO: 6763 - DNA, 20 bp, Artificial Sequence
  Description of Artificial Sequence: Synthetic oligonucleotide
  Target: ATXN2; (+) strand; PAM type: NNAGAAW; PAM sequence: ACAGAAT
ggctctttaaccacacaagc

SEQ ID NO: 6764 - DNA, 20 bp, Artificial Sequence
  Description of Artificial Sequence: Synthetic oligonucleotide
  Target: ATXN2; (+) strand; PAM type: NNAGAAW; PAM sequence: GCAGAAA
gacaactccctaattttaat

SEQ ID NO: 6765 - DNA, 20 bp, Artificial Sequence
  Description of Artificial Sequence: Synthetic oligonucleotide
  Target: ATXN2; (+) strand; PAM type: NNAGAAW; PAM sequence: AAAGAAA
ttagttgcccctctgcttca

SEQ ID NO: 6766 - DNA, 20 bp, Artificial Sequence
  Description of Artificial Sequence: Synthetic oligonucleotide
  Target: ATXN2; (+) strand; PAM type: NNAGAAW; PAM sequence: AGAGAAT
gtattgggtataaaggcttg

SEQ ID NO: 6767 - DNA, 20 bp, Artificial Sequence
  Description of Artificial Sequence: Synthetic oligonucleotide
  Target: ATXN2; (+) strand; PAM type: NNAGAAW; PAM sequence: ACAGAAA
aaatctaaaccatctttttc

SEQ ID NO: 6768 - DNA, 20 bp, Artificial Sequence
  Description of Artificial Sequence: Synthetic oligonucleotide
  Target: ATXN2; (+) strand; PAM type: NNAGAAW; PAM sequence: AAAGAAA
taaattttcacatttcaata

SEQ ID NO: 6769 - DNA, 20 bp, Artificial Sequence
  Description of Artificial Sequence: Synthetic oligonucleotide
  Target: ATXN2; (+) strand; PAM type: NNAGAAW; PAM sequence: TAAGAAA
aaaacagtggcagctatttt

SEQ ID NO: 6770 - DNA, 20 bp, Artificial Sequence
  Description of Artificial Sequence: Synthetic oligonucleotide
  Target: ATXN2; (+) strand; PAM type: NNAGAAW; PAM sequence: AGAGAAA
ccatcgtcaaattctgggtc

SEQ ID NO: 6771 - DNA, 20 bp, Artificial Sequence
  Description of Artificial Sequence: Synthetic oligonucleotide
  Target: ATXN2; (+) strand; PAM type: NNAGAAW; PAM sequence: AAAGAAA
cattaatggccatgtaaaaa

SEQ ID NO: 6772 - DNA, 20 bp, Artificial Sequence
  Description of Artificial Sequence: Synthetic oligonucleotide
  Target: ATXN2; (+) strand; PAM type: NNAGAAW; PAM sequence: AAAGAAA
ttttgggactagataacctc

SEQ ID NO: 6773 - DNA, 20 bp, Artificial Sequence
  Description of Artificial Sequence: Synthetic oligonucleotide
  Target: ATXN2; (+) strand; PAM type: NNAGAAW; PAM sequence: AAAGAAT
tgcccattccttaatccctt

SEQ ID NO: 6774 - DNA, 20 bp, Artificial Sequence
  Description of Artificial Sequence: Synthetic oligonucleotide
  Target: ATXN2; (+) strand; PAM type: NNAGAAW; PAM sequence: CAAGAAT
aaaaaaaaattgcctcaaat

SEQ ID NO: 6775 - DNA, 20 bp, Artificial Sequence
  Description of Artificial Sequence: Synthetic oligonucleotide
  Target: ATXN2; (+) strand; PAM type: NNAGAAW; PAM sequence: GCAGAAT
ttaattaatatactgaatgt

SEQ ID NO: 6776 - DNA, 20 bp, Artificial Sequence
  Description of Artificial Sequence: Synthetic oligonucleotide
  Target: ATXN2; (+) strand; PAM type: NNAGAAW; PAM sequence: ACAGAAA
ttttcaactcctgttcattt

SEQ ID NO: 6777 - DNA, 20 bp, Artificial Sequence
  Description of Artificial Sequence: Synthetic oligonucleotide
  Target: ATXN2; (+) strand; PAM type: NNAGAAW; PAM sequence: AAAGAAT
tgctgctgctattttcaatg

SEQ ID NO: 6778 - DNA, 20 bp, Artificial Sequence
  Description of Artificial Sequence: Synthetic oligonucleotide
  Target: ATXN2; (+) strand; PAM type: NNAGAAW; PAM sequence: TCAGAAA
tactgagtgcttaccacatg

SEQ ID NO: 6779 - DNA, 20 bp, Artificial Sequence
  Description of Artificial Sequence: Synthetic oligonucleotide
  Target: ATXN2; (+) strand; PAM type: NNAGAAW; PAM sequence: TGAGAAA
cagaaattgtgcctgctggg

SEQ ID NO: 6780 - DNA, 20 bp, Artificial Sequence
  Description of Artificial Sequence: Synthetic oligonucleotide
  Target: ATXN2; (+) strand; PAM type: NNAGAAW; PAM sequence: ATAGAAA
agtaaatgctaagagagtct

SEQ ID NO: 6781 - DNA, 20 bp, Artificial Sequence
  Description of Artificial Sequence: Synthetic oligonucleotide
  Target: ATXN2; (+) strand; PAM type: NNAGAAW; PAM sequence: AAAGAAA
tagaaaaagcaacctataaa

SEQ ID NO: 6782 - DNA, 20 bp, Artificial Sequence
  Description of Artificial Sequence: Synthetic oligonucleotide
  Target: ATXN2; (+) strand; PAM type: NNAGAAW; PAM sequence: GGAGAAT
tttaggaaaggtgttgggat

SEQ ID NO: 6783 - DNA, 20 bp, Artificial Sequence
  Description of Artificial Sequence: Synthetic oligonucleotide
  Target: ATXN2; (+) strand; PAM type: NNAGAAW; PAM sequence: AAAGAAA
aagagtatgtttaaaaatcc

SEQ ID NO: 6784 - DNA, 20 bp, Artificial Sequence
  Description of Artificial Sequence: Synthetic oligonucleotide
  Target: ATXN2; (+) strand; PAM type: NNAGAAW; PAM sequence: GGAGAAT
ctactcgggaggctgaggta

SEQ ID NO: 6785 - DNA, 20 bp, Artificial Sequence
  Description of Artificial Sequence: Synthetic oligonucleotide
  Target: ATXN2; (+) strand; PAM type: NNAGAAW; PAM sequence: AAAGAAA
aataacaaaaataaagaagt

SEQ ID NO: 6786 - DNA, 20 bp, Artificial Sequence
  Description of Artificial Sequence: Synthetic oligonucleotide
  Target: ATXN2; (+) strand; PAM type: NNAGAAW; PAM sequence: TCAGAAA
gacacacatgtacaagtgag

SEQ ID NO: 6787 - DNA, 20 bp, Artificial Sequence
  Description of Artificial Sequence: Synthetic oligonucleotide
  Target: ATXN2; (+) strand; PAM type: NNAGAAW; PAM sequence: TGAGAAT
ctacttgggaggctgacata

SEQ ID NO: 6788 - DNA, 20 bp, Artificial Sequence
  Description of Artificial Sequence: Synthetic oligonucleotide
  Target: ATXN2; (+) strand; PAM type: NNAGAAW; PAM sequence: TCAGAAA
gtactgggcagatttatagt

SEQ ID NO: 6789 - DNA, 20 bp, Artificial Sequence
  Description of Artificial Sequence: Synthetic oligonucleotide
  Target: ATXN2; (+) strand; PAM type: NNAGAAW; PAM sequence: TCAGAAT
aggtcattaagtaggtgaat

SEQ ID NO: 6790 - DNA, 20 bp, Artificial Sequence
  Description of Artificial Sequence: Synthetic oligonucleotide
  Target: ATXN2; (+) strand; PAM type: NNAGAAW; PAM sequence: CAAGAAA
aaattgaacaactatccaca

SEQ ID NO: 6791 - DNA, 20 bp, Artificial Sequence
  Description of Artificial Sequence: Synthetic oligonucleotide
  Target: ATXN2; (+) strand; PAM type: NNAGAAW; PAM sequence: GGAGAAA
cccacaatgcagtgtggggt

SEQ ID NO: 6792 - DNA, 20 bp, Artificial Sequence
  Description of Artificial Sequence: Synthetic oligonucleotide
  Target: ATXN2; (+) strand; PAM type: NNAGAAW; PAM sequence: AAAGAAT
caatgcagtgtggggtggag

SEQ ID NO: 6793 - DNA, 20 bp, Artificial Sequence
  Description of Artificial Sequence: Synthetic oligonucleotide
  Target: ATXN2; (+) strand; PAM type: NNAGAAW; PAM sequence: AGAGAAA
tgtgtgctcgggggagagag

SEQ ID NO: 6794 - DNA, 20 bp, Artificial Sequence
  Description of Artificial Sequence: Synthetic oligonucleotide
  Target: ATXN2; (+) strand; PAM type: NNAGAAW; PAM sequence: ACAGAAT
acagtggaaagcagcatagg

SEQ ID NO: 6795 - DNA, 20 bp, Artificial Sequence
  Description of Artificial Sequence: Synthetic oligonucleotide
  Target: ATXN2; (+) strand; PAM type: NNAGAAW; PAM sequence: TTAGAAT
ggaattgtccatcccagtga

SEQ ID NO: 6796 - DNA, 20 bp, Artificial Sequence
  Description of Artificial Sequence: Synthetic oligonucleotide
  Target: ATXN2; (+) strand; PAM type: NNAGAAW; PAM sequence: GGAGAAA
aagaccagcctgaccaacat

SEQ ID NO: 6797 - DNA, 20 bp, Artificial Sequence
  Description of Artificial Sequence: Synthetic oligonucleotide
  Target: ATXN2; (+) strand; PAM type: NNAGAAW; PAM sequence: GGAGAAT
ctactcaggaggctgaggta

SEQ ID NO: 6798 - DNA, 20 bp, Artificial Sequence
  Description of Artificial Sequence: Synthetic oligonucleotide
  Target: ATXN2; (+) strand; PAM type: NNAGAAW; PAM sequence: AAAGAAT
aactctgccaaaaaaaacca

SEQ ID NO: 6799 - DNA, 20 bp, Artificial Sequence
  Description of Artificial Sequence: Synthetic oligonucleotide
  Target: ATXN2; (+) strand; PAM type: NNAGAAW; PAM sequence: CCAGAAA
taaattaacatcagtggtgg

SEQ ID NO: 6800 - DNA, 20 bp, Artificial Sequence
  Description of Artificial Sequence: Synthetic oligonucleotide
  Target: ATXN2; (+) strand; PAM type: NNAGAAW; PAM sequence: GGAGAAA
aagagagactccatttgttt

SEQ ID NO: 6801 - DNA, 20 bp, Artificial Sequence
  Description of Artificial Sequence: Synthetic oligonucleotide
  Target: ATXN2; (+) strand; PAM type: NNAGAAW; PAM sequence: GAAGAAT
tacttgaaaaaccttctcaa

SEQ ID NO: 6802 - DNA, 20 bp, Artificial Sequence
  Description of Artificial Sequence: Synthetic oligonucleotide
  Target: ATXN2; (+) strand; PAM type: NNAGAAW; PAM sequence: GGAGAAT
ctactcaggaggctgaggca

SEQ ID NO: 6803 - DNA, 20 bp, Artificial Sequence
  Description of Artificial Sequence: Synthetic oligonucleotide
  Target: ATXN2; (+) strand; PAM type: NNAGAAW; PAM sequence: ACAGAAA
agcgagactctgtctcaaaa

SEQ ID NO: 6804 - DNA, 20 bp, Artificial Sequence
  Description of Artificial Sequence: Synthetic oligonucleotide
  Target: ATXN2; (+) strand; PAM type: NNAGAAW; PAM sequence: AAAGAAT
caaaaacagaaaaaaaaaaa

SEQ ID NO: 6805 - DNA, 20 bp, Artificial Sequence
  Description of Artificial Sequence: Synthetic oligonucleotide
  Target: ATXN2; (+) strand; PAM type: NNAGAAW; PAM sequence: ACAGAAT
acaaaaccagactacaaaga

SEQ ID NO: 6806 - DNA, 20 bp, Artificial Sequence
  Description of Artificial Sequence: Synthetic oligonucleotide
  Target: ATXN2; (+) strand; PAM type: NNAGAAW; PAM sequence: TGAGAAA
ccacaagcatcaaggccatc

SEQ ID NO: 6807 - DNA, 20 bp, Artificial Sequence
  Description of Artificial Sequence: Synthetic oligonucleotide
  Target: ATXN2; (+) strand; PAM type: NNAGAAW; PAM sequence: ACAGAAT
agagatatgtgaactttcag

SEQ ID NO: 6808 - DNA, 20 bp, Artificial Sequence
  Description of Artificial Sequence: Synthetic oligonucleotide
  Target: ATXN2; (+) strand; PAM type: NNAGAAW; PAM sequence: TGAGAAA
agaattcaagctgaatgctt

SEQ ID NO: 6809 - DNA, 20 bp, Artificial Sequence
  Description of Artificial Sequence: Synthetic oligonucleotide
  Target: ATXN2; (+) strand; PAM type: NNAGAAW; PAM sequence: TCAGAAT
agataatacagagaacaaat

SEQ ID NO: 6810 - DNA, 20 bp, Artificial Sequence
  Description of Artificial Sequence: Synthetic oligonucleotide
  Target: ATXN2; (+) strand; PAM type: NNAGAAW; PAM sequence: AAAGAAT
actgcaataattattagtaa

SEQ ID NO: 6811 - DNA, 20 bp, Artificial Sequence
  Description of Artificial Sequence: Synthetic oligonucleotide
  Target: ATXN2; (+) strand; PAM type: NNAGAAW; PAM sequence: GCAGAAA
ttattagtaaaaagaatcaa

SEQ ID NO: 6812 - DNA, 20 bp, Artificial Sequence
  Description of Artificial Sequence: Synthetic oligonucleotide
  Target: ATXN2; (+) strand; PAM type: NNAGAAW; PAM sequence: GCAGAAA
aatgcatcagtctctcaata

SEQ ID NO: 6813 - DNA, 20 bp, Artificial Sequence
  Description of Artificial Sequence: Synthetic oligonucleotide
  Target: ATXN2; (+) strand; PAM type: NNAGAAW; PAM sequence: GCAGAAA
tagcagaaatgtatcaagca

SEQ ID NO: 6814 - DNA, 20 bp, Artificial Sequence
  Description of Artificial Sequence: Synthetic oligonucleotide
  Target: ATXN2; (+) strand; PAM type: NNAGAAW; PAM sequence: GAAGAAT
ctacttgggaggctgaggca

SEQ ID NO: 6815 - DNA, 20 bp, Artificial Sequence
  Description of Artificial Sequence: Synthetic oligonucleotide
  Target: ATXN2; (+) strand; PAM type: NNAGAAW; PAM sequence: CAAGAAA
aaaaaaagttcttcaatctg

SEQ ID NO: 6816 - DNA, 20 bp, Artificial Sequence
  Description of Artificial Sequence: Synthetic oligonucleotide
  Target: ATXN2; (+) strand; PAM type: NNAGAAW; PAM sequence: ACAGAAA
aactcactggtaacaagtac

SEQ ID NO: 6817 - DNA, 20 bp, Artificial Sequence
  Description of Artificial Sequence: Synthetic oligonucleotide
  Target: ATXN2; (+) strand; PAM type: NNAGAAW; PAM sequence: ACAGAAT
taacaagtacacagaaaaat

SEQ ID NO: 6818 - DNA, 20 bp, Artificial Sequence
  Description of Artificial Sequence: Synthetic oligonucleotide
  Target: ATXN2; (+) strand; PAM type: NNAGAAW; PAM sequence: GAAGAAT
actactcatattttgagcag

SEQ ID NO: 6819 - DNA, 20 bp, Artificial Sequence
  Description of Artificial Sequence: Synthetic oligonucleotide
  Target: ATXN2; (+) strand; PAM type: NNAGAAW; PAM sequence: AGAGAAA
ggaaattaaaacataccacc

SEQ ID NO: 6820 - DNA, 20 bp, Artificial Sequence
  Description of Artificial Sequence: Synthetic oligonucleotide
  Target: ATXN2; (+) strand; PAM type: NNAGAAW; PAM sequence: GGAGAAT
ctacttgggaggctgaggca

SEQ ID NO: 6821 - DNA, 20 bp, Artificial Sequence
  Description of Artificial Sequence: Synthetic oligonucleotide
  Target: ATXN2; (+) strand; PAM type: NNAGAAW; PAM sequence: CAAGAAA
aaccaaagatccattgccta

SEQ ID NO: 6822 - DNA, 20 bp, Artificial Sequence
  Description of Artificial Sequence: Synthetic oligonucleotide
  Target: ATXN2; (+) strand; PAM type: NNAGAAW; PAM sequence: CCAGAAA
atattccatgcaaatggaaa

SEQ ID NO: 6823 - DNA, 20 bp, Artificial Sequence
  Description of Artificial Sequence: Synthetic oligonucleotide
  Target: ATXN2; (+) strand; PAM type: NNAGAAW; PAM sequence: AGAGAAA
aaacattattagagcaaaaa

SEQ ID NO: 6824 - DNA, 20 bp, Artificial Sequence
  Description of Artificial Sequence: Synthetic oligonucleotide
  Target: ATXN2; (+) strand; PAM type: NNAGAAW; PAM sequence: ACAGAAA
gcaatggacagatcattcag

SEQ ID NO: 6825 - DNA, 20 bp, Artificial Sequence
  Description of Artificial Sequence: Synthetic oligonucleotide
  Target: ATXN2; (+) strand; PAM type: NNAGAAW; PAM sequence: AAAGAAA
cattcagacagaaaatcaac

SEQ ID NO: 6826 - DNA, 20 bp, Artificial Sequence
  Description of Artificial Sequence: Synthetic oligonucleotide
  Target: ATXN2; (+) strand; PAM type: NNAGAAW; PAM sequence: ATAGAAT
gaacattgtgtccaacagct

SEQ ID NO: 6827 - DNA, 20 bp, Artificial Sequence
  Description of Artificial Sequence: Synthetic oligonucleotide
  Target: ATXN2; (+) strand; PAM type: NNAGAAW; PAM sequence: GAAGAAT
ctactcaggaggctgaggca

SEQ ID NO: 6828 - DNA, 20 bp, Artificial Sequence
  Description of Artificial Sequence: Synthetic oligonucleotide
  Target: ATXN2; (+) strand; PAM type: NNAGAAW; PAM sequence: GAAGAAA
tgaatgaccagtgggtccat

SEQ ID NO: 6829 - DNA, 20 bp, Artificial Sequence
  Description of Artificial Sequence: Synthetic oligonucleotide
  Target: ATXN2; (+) strand; PAM type: NNAGAAW; PAM sequence: GAAGAAA
tgggtccatgaagaaattaa

SEQ ID NO: 6830 - DNA, 20 bp, Artificial Sequence
  Description of Artificial Sequence: Synthetic oligonucleotide
  Target: ATXN2; (+) strand; PAM type: NNAGAAW; PAM sequence: CTAGAAA
tgccaatacatcctaaagaa

SEQ ID NO: 6831 - DNA, 20 bp, Artificial Sequence
  Description of Artificial Sequence: Synthetic oligonucleotide
  Target: ATXN2; (+) strand; PAM type: NNAGAAW; PAM sequence: GAAGAAA
gacaaaacctaaaatcagta

SEQ ID NO: 6832 - DNA, 20 bp, Artificial Sequence
  Description of Artificial Sequence: Synthetic oligonucleotide
  Target: ATXN2; (+) strand; PAM type: NNAGAAW; PAM sequence: GCAGAAA
aagaaataaaaaaaatcaaa

SEQ ID NO: 6833 - DNA, 20 bp, Artificial Sequence
  Description of Artificial Sequence: Synthetic oligonucleotide
  Target: ATXN2; (+) strand; PAM type: NNAGAAW; PAM sequence: GAAGAAA
gaaataaataaaattgaaat

SEQ ID NO: 6834 - DNA, 20 bp, Artificial Sequence
  Description of Artificial Sequence: Synthetic oligonucleotide
  Target: ATXN2; (+) strand; PAM type: NNAGAAW; PAM sequence: TCAGAAA
tgacaaacctttagccagac

SEQ ID NO: 6835 - DNA, 20 bp, Artificial Sequence
  Description of Artificial Sequence: Synthetic oligonucleotide
  Target: ATXN2; (+) strand; PAM type: NNAGAAW; PAM sequence: AGAGAAA
tagccagactcagaaaaaaa

SEQ ID NO: 6836 - DNA, 20 bp, Artificial Sequence
  Description of Artificial Sequence: Synthetic oligonucleotide
  Target: ATXN2; (+) strand; PAM type: NNAGAAW; PAM sequence: GAAGAAA
ctgatacattggaaaacctt

SEQ ID NO: 6837 - DNA, 20 bp, Artificial Sequence
  Description of Artificial Sequence: Synthetic oligonucleotide
  Target: ATXN2; (+) strand; PAM type: NNAGAAW; PAM sequence: AAAGAAA
acctaccaagactgaaccac

SEQ ID NO: 6838 - DNA, 20 bp, Artificial Sequence
  Description of Artificial Sequence: Synthetic oligonucleotide
  Target: ATXN2; (+) strand; PAM type: NNAGAAW; PAM sequence: TAAGAAA
aagtaacgagatcaaagcta

SEQ ID NO: 6839 - DNA, 20 bp, Artificial Sequence
  Description of Artificial Sequence: Synthetic oligonucleotide
  Target: ATXN2; (+) strand; PAM type: NNAGAAW; PAM sequence: AAAGAAA
ataagaaatagtctcccagc

SEQ ID NO: 6840 - DNA, 20 bp, Artificial Sequence
  Description of Artificial Sequence: Synthetic oligonucleotide
  Target: ATXN2; (+) strand; PAM type: NNAGAAW; PAM sequence: ACAGAAT
aataaacatggtacatctta

SEQ ID NO: 6841 - DNA, 20 bp, Artificial Sequence
  Description of Artificial Sequence: Synthetic oligonucleotide
  Target: ATXN2; (+) strand; PAM type: NNAGAAW; PAM sequence: ACAGAAA
ctaattggagcaatcagaca

SEQ ID NO: 6842 - DNA, 20 bp, Artificial Sequence
  Description of Artificial Sequence: Synthetic oligonucleotide
  Target: ATXN2; (+) strand; PAM type: NNAGAAW; PAM sequence: AAAGAAA
ttggagcaatcagacaacag

SEQ ID NO: 6843 - DNA, 20 bp, Artificial Sequence
  Description of Artificial Sequence: Synthetic oligonucleotide
  Target: ATXN2; (+) strand; PAM type: NNAGAAW; PAM sequence: AAAGAAA
ggaaaaacctagactccaaa

SEQ ID NO: 6844 - DNA, 20 bp, Artificial Sequence
  Description of Artificial Sequence: Synthetic oligonucleotide
  Target: ATXN2; (+) strand; PAM type: NNAGAAW; PAM sequence: ACAGAAA
aaaacactgaaattgatgac

SEQ ID NO: 6845 - DNA, 20 bp, Artificial Sequence
  Description of Artificial Sequence: Synthetic oligonucleotide
  Target: ATXN2; (+) strand; PAM type: NNAGAAW; PAM sequence: GAAGAAT
gattccatgtttatggatta

SEQ ID NO: 6846 - DNA, 20 bp, Artificial Sequence
  Description of Artificial Sequence: Synthetic oligonucleotide
  Target: ATXN2; (+) strand; PAM type: NNAGAAW; PAM sequence: TCAGAAA
aatgaaacagaacagagaac

SEQ ID NO: 6847 - DNA, 20 bp, Artificial Sequence
  Description of Artificial Sequence: Synthetic oligonucleotide
  Target: ATXN2; (+) strand; PAM type: NNAGAAW; PAM sequence: GAAGAAT
aaactggatatccatatgca

SEQ ID NO: 6848 - DNA, 20 bp, Artificial Sequence
  Description of Artificial Sequence: Synthetic oligonucleotide
  Target: ATXN2; (+) strand; PAM type: NNAGAAW; PAM sequence: AAAGAAA
ctcaaactatgaaactacta

SEQ ID NO: 6849 - DNA, 20 bp, Artificial Sequence
  Description of Artificial Sequence: Synthetic oligonucleotide
  Target: ATXN2; (+) strand; PAM type: NNAGAAW; PAM sequence: ACAGAAT
acaaagtgaagagacagccc

SEQ ID NO: 6850 - DNA, 20 bp, Artificial Sequence
  Description of Artificial Sequence: Synthetic oligonucleotide
  Target: ATXN2; (+) strand; PAM type: NNAGAAW; PAM sequence: GGAGAAA
aagagacagcccacagaatg

SEQ ID NO: 6851 - DNA, 20 bp, Artificial Sequence
  Description of Artificial Sequence: Synthetic oligonucleotide
  Target: ATXN2; (+) strand; PAM type: NNAGAAW; PAM sequence: CCAGAAT
atctgacaagggatcaataa

SEQ ID NO: 6852 - DNA, 20 bp, Artificial Sequence
  Description of Artificial Sequence: Synthetic oligonucleotide
  Target: ATXN2; (+) strand; PAM type: NNAGAAW; PAM sequence: GGAGAAA
aagaccagcctgggcaacaa

SEQ ID NO: 6853 - DNA, 20 bp, Artificial Sequence
  Description of Artificial Sequence: Synthetic oligonucleotide
  Target: ATXN2; (+) strand; PAM type: NNAGAAW; PAM sequence: GGAGAAT
agacatggtggcaggaggca

SEQ ID NO: 6854 - DNA, 20 bp, Artificial Sequence
  Description of Artificial Sequence: Synthetic oligonucleotide
  Target: ATXN2; (+) strand; PAM type: NNAGAAW; PAM sequence: CCAGAAA
gtattcaatactactgatca

SEQ ID NO: 6855 - DNA, 20 bp, Artificial Sequence
  Description of Artificial Sequence: Synthetic oligonucleotide
  Target: ATXN2; (+) strand; PAM type: NNAGAAW; PAM sequence: TCAGAAA
ttgcactgctaggtatatac

SEQ ID NO: 6856 - DNA, 20 bp, Artificial Sequence
  Description of Artificial Sequence: Synthetic oligonucleotide
  Target: ATXN2; (+) strand; PAM type: NNAGAAW; PAM sequence: GGAGAAA
gtgtccactgacagacaaat

SEQ ID NO: 6857 - DNA, 20 bp, Artificial Sequence
  Description of Artificial Sequence: Synthetic oligonucleotide
  Target: ATXN2; (+) strand; PAM type: NNAGAAW; PAM sequence: AAAGAAA
ccactgacagacaaatggag

SEQ ID NO: 6858 - DNA, 20 bp, Artificial Sequence
  Description of Artificial Sequence: Synthetic oligonucleotide
  Target: ATXN2; (+) strand; PAM type: NNAGAAW; PAM sequence: AAAGAAT
gattaccattcagccataaa

SEQ ID NO: 6859 - DNA, 20 bp, Artificial Sequence
  Description of Artificial Sequence: Synthetic oligonucleotide
  Target: ATXN2; (+) strand; PAM type: NNAGAAW; PAM sequence: ACAGAAA
ttaagtaaaataagccaggg

SEQ ID NO: 6860 - DNA, 20 bp, Artificial Sequence
  Description of Artificial Sequence: Synthetic oligonucleotide
  Target: ATXN2; (+) strand; PAM type: NNAGAAW; PAM sequence: GCAGAAT
caattgaacacatggagata

SEQ ID NO: 6861 - DNA, 20 bp, Artificial Sequence
  Description of Artificial Sequence: Synthetic oligonucleotide
  Target: ATXN2; (+) strand; PAM type: NNAGAAW; PAM sequence: AAAGAAA
atgaggtgattagtgggtgc

SEQ ID NO: 6862 - DNA, 20 bp, Artificial Sequence
  Description of Artificial Sequence: Synthetic oligonucleotide
  Target: ATXN2; (+) strand; PAM type: NNAGAAW; PAM sequence: TTAGAAA
ttagtgggtgcaaagaaaat

SEQ ID NO: 6863 - DNA, 20 bp, Artificial Sequence
  Description of Artificial Sequence: Synthetic oligonucleotide
  Target: ATXN2; (+) strand; PAM type: NNAGAAW; PAM sequence: GCAGAAA
agaactctgcaggaccggag

SEQ ID NO: 6864 - DNA, 20 bp, Artificial Sequence
  Description of Artificial Sequence: Synthetic oligonucleotide
  Target: ATXN2; (+) strand; PAM type: NNAGAAW; PAM sequence: GGAGAAT
ctagtcaggaggctgaggca

SEQ ID NO: 6865 - DNA, 20 bp, Artificial Sequence
  Description of Artificial Sequence: Synthetic oligonucleotide
  Target: ATXN2; (+) strand; PAM type: NNAGAAW; PAM sequence: AAAGAAT
taaaatttaaaaagttaaat

SEQ ID NO: 6866 - DNA, 20 bp, Artificial Sequence
  Description of Artificial Sequence: Synthetic oligonucleotide
  Target: ATXN2; (+) strand; PAM type: NNAGAAW; PAM sequence: TTAGAAT
gcattaatttgttgtacttt

SEQ ID NO: 6867 - DNA, 20 bp, Artificial Sequence
  Description of Artificial Sequence: Synthetic oligonucleotide
  Target: ATXN2; (+) strand; PAM type: NNAGAAW; PAM sequence: AAAGAAA
aattgcaacgttcattacac

SEQ ID NO: 6868 - DNA, 20 bp, Artificial Sequence
  Description of Artificial Sequence: Synthetic oligonucleotide
  Target: ATXN2; (+) strand; PAM type: NNAGAAW; PAM sequence: CCAGAAA
gaggtttttaagtttgcaga

SEQ ID NO: 6869 - DNA, 20 bp, Artificial Sequence
  Description of Artificial Sequence: Synthetic oligonucleotide
  Target: ATXN2; (+) strand; PAM type: NNAGAAW; PAM sequence: AAAGAAA
ttaagatggcatcctctaca

SEQ ID NO: 6870 - DNA, 20 bp, Artificial Sequence
  Description of Artificial Sequence: Synthetic oligonucleotide
  Target: ATXN2; (+) strand; PAM type: NNAGAAW; PAM sequence: AAAGAAA
gatggcatcctctacaaaag

SEQ ID NO: 6871 - DNA, 20 bp, Artificial Sequence
  Description of Artificial Sequence: Synthetic oligonucleotide
  Target: ATXN2; (+) strand; PAM type: NNAGAAW; PAM sequence: TGAGAAA
taagccacagccccaggtgg

SEQ ID NO: 6872 - DNA, 20 bp, Artificial Sequence
  Description of Artificial Sequence: Synthetic oligonucleotide
  Target: ATXN2; (+) strand; PAM type: NNAGAAW; PAM sequence: AGAGAAA
ggtggtgagaaacaagctaa

SEQ ID NO: 6873 - DNA, 20 bp, Artificial Sequence
  Description of Artificial Sequence: Synthetic oligonucleotide
  Target: ATXN2; (+) strand; PAM type: NNAGAAW; PAM sequence: GTAGAAA
gctaatgtgtgtattttttt

SEQ ID NO: 6874 - DNA, 20 bp, Artificial Sequence
  Description of Artificial Sequence: Synthetic oligonucleotide
  Target: ATXN2; (+) strand; PAM type: NNAGAAW; PAM sequence: GCAGAAA
ggagtgagccatcatgccca

SEQ ID NO: 6875 - DNA, 20 bp, Artificial Sequence
  Description of Artificial Sequence: Synthetic oligonucleotide
  Target: ATXN2; (+) strand; PAM type: NNAGAAW; PAM sequence: TAAGAAT
ggtcatctatattttgctag

SEQ ID NO: 6876 - DNA, 20 bp, Artificial Sequence
  Description of Artificial Sequence: Synthetic oligonucleotide
  Target: ATXN2; (+) strand; PAM type: NNAGAAW; PAM sequence: AGAGAAT
gaaatacgcaataaaacata

SEQ ID NO: 6877 - DNA, 20 bp, Artificial Sequence
  Description of Artificial Sequence: Synthetic oligonucleotide
  Target: ATXN2; (+) strand; PAM type: NNAGAAW; PAM sequence: TTAGAAA
atattatctgaagagaacaa

SEQ ID NO: 6878 - DNA, 20 bp, Artificial Sequence
  Description of Artificial Sequence: Synthetic oligonucleotide
  Target: ATXN2; (+) strand; PAM type: NNAGAAW; PAM sequence: ACAGAAA
tcaagcattaatgaaggttt

SEQ ID NO: 6879 - DNA, 20 bp, Artificial Sequence
  Description of Artificial Sequence: Synthetic oligonucleotide
  Target: ATXN2; (+) strand; PAM type: NNAGAAW; PAM sequence: AAAGAAT
tgaagataattcaatggagg

SEQ ID NO: 6880 - DNA, 20 bp, Artificial Sequence
  Description of Artificial Sequence: Synthetic oligonucleotide
  Target: ATXN2; (+) strand; PAM type: NNAGAAW; PAM sequence: CAAGAAT
tgagagccactgtgcctggc

SEQ ID NO: 6881 - DNA, 20 bp, Artificial Sequence
  Description of Artificial Sequence: Synthetic oligonucleotide
  Target: ATXN2; (+) strand; PAM type: NNAGAAW; PAM sequence: GAAGAAT
acaactaatacctacatacg

SEQ ID NO: 6882 - DNA, 20 bp, Artificial Sequence
  Description of Artificial Sequence: Synthetic oligonucleotide
  Target: ATXN2; (+) strand; PAM type: NNAGAAW; PAM sequence: TTAGAAA
agtgtatggttatgtgtcaa

SEQ ID NO: 6883 - DNA, 20 bp, Artificial Sequence
  Description of Artificial Sequence: Synthetic oligonucleotide
  Target: ATXN2; (+) strand; PAM type: NNAGAAW; PAM sequence: AAAGAAT
tagaaataaaaaattaatat

SEQ ID NO: 6884 - DNA, 20 bp, Artificial Sequence
  Description of Artificial Sequence: Synthetic oligonucleotide
  Target: ATXN2; (+) strand; PAM type: NNAGAAW; PAM sequence: CAAGAAA
gagggctcttggatcttgca

SEQ ID NO: 6885 - DNA, 20 bp, Artificial Sequence
  Description of Artificial Sequence: Synthetic oligonucleotide
  Target: ATXN2; (+) strand; PAM type: NNAGAAW; PAM sequence: AAAGAAT
gctcttggatcttgcacaag

SEQ ID NO: 6886 - DNA, 20 bp, Artificial Sequence
  Description of Artificial Sequence: Synthetic oligonucleotide
  Target: ATXN2; (+) strand; PAM type: NNAGAAW; PAM sequence: AAAGAAA
aagagcgagattctgtgtca

SEQ ID NO: 6887 - DNA, 20 bp, Artificial Sequence
  Description of Artificial Sequence: Synthetic oligonucleotide
  Target: ATXN2; (+) strand; PAM type: NNAGAAW; PAM sequence: GGAGAAA
aaaagacaaccaacagaaca

SEQ ID NO: 6888 - DNA, 20 bp, Artificial Sequence
  Description of Artificial Sequence: Synthetic oligonucleotide
  Target: ATXN2; (+) strand; PAM type: NNAGAAW; PAM sequence: GGAGAAA
ataagtgttagcaaggatgt

SEQ ID NO: 6889 - DNA, 20 bp, Artificial Sequence
  Description of Artificial Sequence: Synthetic oligonucleotide
  Target: ATXN2; (+) strand; PAM type: NNAGAAW; PAM sequence: ACAGAAA
gttagcaaggatgtggagaa

SEQ ID NO: 6890 - DNA, 20 bp, Artificial Sequence
  Description of Artificial Sequence: Synthetic oligonucleotide
  Target: ATXN2; (+) strand; PAM type: NNAGAAW; PAM sequence: AAAGAAA
aactcctaggtaggtacaca

SEQ ID NO: 6891 - DNA, 20 bp, Artificial Sequence
  Description of Artificial Sequence: Synthetic oligonucleotide
  Target: ATXN2; (+) strand; PAM type: NNAGAAW; PAM sequence: CGAGAAA
aaagaaatgaaaagatagga

SEQ ID NO: 6892 - DNA, 20 bp, Artificial Sequence
  Description of Artificial Sequence: Synthetic oligonucleotide
  Target: ATXN2; (+) strand; PAM type: NNAGAAW; PAM sequence: TCAGAAT
catgtttgtggcagtgttat

SEQ ID NO: 6893 - DNA, 20 bp, Artificial Sequence
  Description of Artificial Sequence: Synthetic oligonucleotide
  Target: ATXN2; (+) strand; PAM type: NNAGAAW; PAM sequence: AAAGAAA
ggaatattagtcagtcacaa

SEQ ID NO: 6894 - DNA, 20 bp, Artificial Sequence
  Description of Artificial Sequence: Synthetic oligonucleotide
  Target: ATXN2; (+) strand; PAM type: NNAGAAW; PAM sequence: ACAGAAA
aaataagcccatccatagag

SEQ ID NO: 6895 - DNA, 20 bp, Artificial Sequence
  Description of Artificial Sequence: Synthetic oligonucleotide
  Target: ATXN2; (+) strand; PAM type: NNAGAAW; PAM sequence: GTAGAAA
gctaattcacatgcttcaaa

SEQ ID NO: 6896 - DNA, 20 bp, Artificial Sequence
  Description of Artificial Sequence: Synthetic oligonucleotide
  Target: ATXN2; (+) strand; PAM type: NNAGAAW; PAM sequence: GAAGAAT
gaggaaaaaattcaaatggg

SEQ ID NO: 6897 - DNA, 20 bp, Artificial Sequence
  Description of Artificial Sequence: Synthetic oligonucleotide
  Target: ATXN2; (+) strand; PAM type: NNAGAAW; PAM sequence: ATAGAAA
gacaatggcggctttgtgga

SEQ ID NO: 6898 - DNA, 20 bp, Artificial Sequence
  Description of Artificial Sequence: Synthetic oligonucleotide
  Target: ATXN2; (+) strand; PAM type: NNAGAAW; PAM sequence: TGAGAAA
gggaaaggtggggaaaagat

SEQ ID NO: 6899 - DNA, 20 bp, Artificial Sequence
  Description of Artificial Sequence: Synthetic oligonucleotide
  Target: ATXN2; (+) strand; PAM type: NNAGAAW; PAM sequence: GGAGAAA
cggatggttgctgcgtctgt

SEQ ID NO: 6900 - DNA, 20 bp, Artificial Sequence
  Description of Artificial Sequence: Synthetic oligonucleotide
  Target: ATXN2; (+) strand; PAM type: NNAGAAW; PAM sequence: TAAGAAA
cttttcattttgttctgtac

SEQ ID NO: 6901 - DNA, 20 bp, Artificial Sequence
  Description of Artificial Sequence: Synthetic oligonucleotide
  Target: ATXN2; (+) strand; PAM type: NNAGAAW; PAM sequence: CGAGAAA
ccctgccaaatccccctctg

SEQ ID NO: 6902 - DNA, 20 bp, Artificial Sequence
  Description of Artificial Sequence: Synthetic oligonucleotide
  Target: ATXN2; (+) strand; PAM type: NNAGAAW; PAM sequence: CAAGAAT
ccccctctgcgagaaacacc

SEQ ID NO: 6903 - DNA, 20 bp, Artificial Sequence
  Description of Artificial Sequence: Synthetic oligonucleotide
  Target: ATXN2; (+) strand; PAM type: NNAGAAW; PAM sequence: ACAGAAA
gtataaatataaagaactgc

SEQ ID NO: 6904 - DNA, 20 bp, Artificial Sequence
  Description of Artificial Sequence: Synthetic oligonucleotide
  Target: ATXN2; (+) strand; PAM type: NNAGAAW; PAM sequence: AAAGAAA
aatataaagaactgcacaga

SEQ ID NO: 6905 - DNA, 20 bp, Artificial Sequence
  Description of Artificial Sequence: Synthetic oligonucleotide
  Target: ATXN2; (+) strand; PAM type: NNAGAAW; PAM sequence: TTAGAAT
ataagaggagtttaactgtg

SEQ ID NO: 6906 - DNA, 20 bp, Artificial Sequence
  Description of Artificial Sequence: Synthetic oligonucleotide
  Target: ATXN2; (+) strand; PAM type: NNAGAAW; PAM sequence: CAAGAAT
tttgaatgttaccaataagt

SEQ ID NO: 6907 - DNA, 20 bp, Artificial Sequence
  Description of Artificial Sequence: Synthetic oligonucleotide
  Target: ATXN2; (+) strand; PAM type: NNAGAAW; PAM sequence: TTAGAAA
aatgaagctattgttaacat

SEQ ID NO: 6908 - DNA, 20 bp, Artificial Sequence
  Description of Artificial Sequence: Synthetic oligonucleotide
  Target: ATXN2; (+) strand; PAM type: NNAGAAW; PAM sequence: AAAGAAT
cctatagtaaataacatgca

SEQ ID NO: 6909 - DNA, 20 bp, Artificial Sequence
  Description of Artificial Sequence: Synthetic oligonucleotide
  Target: ATXN2; (+) strand; PAM type: NNAGAAW; PAM sequence: AGAGAAA
agtaaagcctgtgctaagac

SEQ ID NO: 6910 - DNA, 20 bp, Artificial Sequence
  Description of Artificial Sequence: Synthetic oligonucleotide
  Target: ATXN2; (+) strand; PAM type: NNAGAAW; PAM sequence: ACAGAAA
taagacagagaaataatgtt

SEQ ID NO: 6911 - DNA, 20 bp, Artificial Sequence
  Description of Artificial Sequence: Synthetic oligonucleotide
  Target: ATXN2; (+) strand; PAM type: NNAGAAW; PAM sequence: TCAGAAA
catcaatctgttttctatgt

SEQ ID NO: 6912 - DNA, 20 bp, Artificial Sequence
  Description of Artificial Sequence: Synthetic oligonucleotide
  Target: ATXN2; (+) strand; PAM type: NNAGAAW; PAM sequence: ATAGAAA
attctttttagtatgagatg

SEQ ID NO: 6913 - DNA, 20 bp, Artificial Sequence
  Description of Artificial Sequence: Synthetic oligonucleotide
  Target: ATXN2; (+) strand; PAM type: NNAGAAW; PAM sequence: TTAGAAT
ttagtatgagatgatagaaa

SEQ ID NO: 6914 - DNA, 20 bp, Artificial Sequence
  Description of Artificial Sequence: Synthetic oligonucleotide
  Target: ATXN2; (+) strand; PAM type: NNAGAAW; PAM sequence: TCAGAAA
aattagaataagatataaga

SEQ ID NO: 6915 - DNA, 20 bp, Artificial Sequence
  Description of Artificial Sequence: Synthetic oligonucleotide
  Target: ATXN2; (+) strand; PAM type: NNAGAAW; PAM sequence: GAAGAAA
tttatctatcacaatagtaa

SEQ ID NO: 6916 - DNA, 20 bp, Artificial Sequence
  Description of Artificial Sequence: Synthetic oligonucleotide
  Target: ATXN2; (+) strand; PAM type: NNAGAAW; PAM sequence: CTAGAAA
ttgaagcctggaatctttag

SEQ ID NO: 6917 - DNA, 20 bp, Artificial Sequence
  Description of Artificial Sequence: Synthetic oligonucleotide
  Target: ATXN2; (+) strand; PAM type: NNAGAAW; PAM sequence: TTAGAAA
ttaaaaaaaattcagataag

SEQ ID NO: 6918 - DNA, 20 bp, Artificial Sequence
  Description of Artificial Sequence: Synthetic oligonucleotide
  Target: ATXN2; (+) strand; PAM type: NNAGAAW; PAM sequence: CAAGAAA
gataagttagaaaagcaaaa

SEQ ID NO: 6919 - DNA, 20 bp, Artificial Sequence
  Description of Artificial Sequence: Synthetic oligonucleotide
  Target: ATXN2; (+) strand; PAM type: NNAGAAW; PAM sequence: CTAGAAT
tgtctatgaataaaaataac

SEQ ID NO: 6920 - DNA, 20 bp, Artificial Sequence
  Description of Artificial Sequence: Synthetic oligonucleotide
  Target: ATXN2; (+) strand; PAM type: NNAGAAW; PAM sequence: GAAGAAA
aggggataatcttggaacta

SEQ ID NO: 6921 - DNA, 20 bp, Artificial Sequence
  Description of Artificial Sequence: Synthetic oligonucleotide
  Target: ATXN2; (+) strand; PAM type: NNAGAAW; PAM sequence: AGAGAAA
gagctcagattcaaaggttt

SEQ ID NO: 6922 - DNA, 20 bp, Artificial Sequence
  Description of Artificial Sequence: Synthetic oligonucleotide
  Target: ATXN2; (+) strand; PAM type: NNAGAAW; PAM sequence: GAAGAAA
tttaagtcacaagggtcacg

SEQ ID NO: 6923 - DNA, 20 bp, Artificial Sequence
  Description of Artificial Sequence: Synthetic oligonucleotide
  Target: ATXN2; (+) strand; PAM type: NNAGAAW; PAM sequence: AGAGAAA
catttttccaattagtaaaa

SEQ ID NO: 6924 - DNA, 20 bp, Artificial Sequence
  Description of Artificial Sequence: Synthetic oligonucleotide
  Target: ATXN2; (+) strand; PAM type: NNAGAAW; PAM sequence: ACAGAAT
taagtaatgtcaaaagatta

SEQ ID NO: 6925 - DNA, 20 bp, Artificial Sequence
  Description of Artificial Sequence: Synthetic oligonucleotide
  Target: ATXN2; (+) strand; PAM type: NNAGAAW; PAM sequence: GAAGAAA
taagataattgaagaccaag

SEQ ID NO: 6926 - DNA, 20 bp, Artificial Sequence
  Description of Artificial Sequence: Synthetic oligonucleotide
  Target: ATXN2; (+) strand; PAM type: NNAGAAW; PAM sequence: GCAGAAA
tgtgcatcacatgaagctga

SEQ ID NO: 6927 - DNA, 20 bp, Artificial Sequence
  Description of Artificial Sequence: Synthetic oligonucleotide
  Target: ATXN2; (+) strand; PAM type: NNAGAAW; PAM sequence: AGAGAAA
ggttctctggactgattaaa

SEQ ID NO: 6928 - DNA, 20 bp, Artificial Sequence
  Description of Artificial Sequence: Synthetic oligonucleotide
  Target: ATXN2; (+) strand; PAM type: NNAGAAW; PAM sequence: ATAGAAA
tagtgccatatacagatgct

SEQ ID NO: 6929 - DNA, 20 bp, Artificial Sequence
  Description of Artificial Sequence: Synthetic oligonucleotide
  Target: ATXN2; (+) strand; PAM type: NNAGAAW; PAM sequence: ATAGAAT
taagccaaaaataaatgttt

SEQ ID NO: 6930 - DNA, 20 bp, Artificial Sequence
  Description of Artificial Sequence: Synthetic oligonucleotide
  Target: ATXN2; (+) strand; PAM type: NNAGAAW; PAM sequence: CAAGAAT
atcccataatgtagactagg

SEQ ID NO: 6931 - DNA, 20 bp, Artificial Sequence
  Description of Artificial Sequence: Synthetic oligonucleotide
  Target: ATXN2; (+) strand; PAM type: NNAGAAW; PAM sequence: TCAGAAT
ctcactgcgaaatctcaact

SEQ ID NO: 6932 - DNA, 20 bp, Artificial Sequence
  Description of Artificial Sequence: Synthetic oligonucleotide
  Target: ATXN2; (+) strand; PAM type: NNAGAAW; PAM sequence: CCAGAAT
tgatgaataagtggtagagc

SEQ ID NO: 6933 - DNA, 20 bp, Artificial Sequence
  Description of Artificial Sequence: Synthetic oligonucleotide
  Target: ATXN2; (+) strand; PAM type: NNAGAAW; PAM sequence: GCAGAAA
tggatatggaacccctccca

SEQ ID NO: 6934 - DNA, 20 bp, Artificial Sequence
  Description of Artificial Sequence: Synthetic oligonucleotide
  Target: ATXN2; (+) strand; PAM type: NNAGAAW; PAM sequence: GAAGAAA
acatccttggaggccctaag

SEQ ID NO: 6935 - DNA, 20 bp, Artificial Sequence
  Description of Artificial Sequence: Synthetic oligonucleotide
  Target: ATXN2; (+) strand; PAM type: NNAGAAW; PAM sequence: ATAGAAA
cagtttttccttggttaaaa

SEQ ID NO: 6936 - DNA, 20 bp, Artificial Sequence
  Description of Artificial Sequence: Synthetic oligonucleotide
  Target: ATXN2; (+) strand; PAM type: NNAGAAW; PAM sequence: TCAGAAT
ttttggccatactaattctt

SEQ ID NO: 6937 - DNA, 20 bp, Artificial Sequence
  Description of Artificial Sequence: Synthetic oligonucleotide
  Target: ATXN2; (+) strand; PAM type: NNAGAAW; PAM sequence: AAAGAAA
tattatttccctttattttt

SEQ ID NO: 6938 - DNA, 20 bp, Artificial Sequence
  Description of Artificial Sequence: Synthetic oligonucleotide
  Target: ATXN2; (+) strand; PAM type: NNAGAAW; PAM sequence: TAAGAAA
gggagggatgaagttggtgg

SEQ ID NO: 6939 - DNA, 20 bp, Artificial Sequence
  Description of Artificial Sequence: Synthetic oligonucleotide
  Target: ATXN2; (+) strand; PAM type: NNAGAAW; PAM sequence: AAAGAAA
ttcaactatgtcttatttgt

SEQ ID NO: 6940 - DNA, 20 bp, Artificial Sequence
  Description of Artificial Sequence: Synthetic oligonucleotide
  Target: ATXN2; (+) strand; PAM type: NNAGAAW; PAM sequence: CTAGAAA
atttgtaaagaaatatgtta

SEQ ID NO: 6941 - DNA, 20 bp, Artificial Sequence
  Description of Artificial Sequence: Synthetic oligonucleotide
  Target: ATXN2; (+) strand; PAM type: NNAGAAW; PAM sequence: TTAGAAA
tttctacattacttctaaaa

SEQ ID NO: 6942 - DNA, 20 bp, Artificial Sequence
  Description of Artificial Sequence: Synthetic oligonucleotide
  Target: ATXN2; (+) strand; PAM type: NNAGAAW; PAM sequence: GGAGAAA
caaaataactgacatttggg

SEQ ID NO: 6943 - DNA, 20 bp, Artificial Sequence
  Description of Artificial Sequence: Synthetic oligonucleotide
  Target: ATXN2; (+) strand; PAM type: NNAGAAW; PAM sequence: ACAGAAT
tctatcaggtaaaagagtgg

SEQ ID NO: 6944 - DNA, 20 bp, Artificial Sequence
  Description of Artificial Sequence: Synthetic oligonucleotide
  Target: ATXN2; (+) strand; PAM type: NNAGAAW; PAM sequence: ATAGAAT
caaattaatatatgttgcca

SEQ ID NO: 6945 - DNA, 20 bp, Artificial Sequence
  Description of Artificial Sequence: Synthetic oligonucleotide
  Target: ATXN2; (+) strand; PAM type: NNAGAAW; PAM sequence: GAAGAAT
aaacacgaacatgatcttta

SEQ ID NO: 6946 - DNA, 20 bp, Artificial Sequence
  Description of Artificial Sequence: Synthetic oligonucleotide
  Target: ATXN2; (+) strand; PAM type: NNAGAAW; PAM sequence: ACAGAAA
attcaacatctctgaatgac

SEQ ID NO: 6947 - DNA, 20 bp, Artificial Sequence
  Description of Artificial Sequence: Synthetic oligonucleotide
  Target: ATXN2; (+) strand; PAM type: NNAGAAW; PAM sequence: CAAGAAA
cttactcaaatgatggacta

SEQ ID NO: 6948 - DNA, 20 bp, Artificial Sequence
  Description of Artificial Sequence: Synthetic oligonucleotide
  Target: ATXN2; (+) strand; PAM type: NNAGAAW; PAM sequence: ACAGAAT
ggactacaagaaaaatatca

SEQ ID NO: 6949 - DNA, 20 bp, Artificial Sequence
  Description of Artificial Sequence: Synthetic oligonucleotide
  Target: ATXN2; (+) strand; PAM type: NNAGAAW; PAM sequence: GGAGAAA
cagttttctccagggaagca

SEQ ID NO: 6950 - DNA, 20 bp, Artificial Sequence
  Description of Artificial Sequence: Synthetic oligonucleotide
  Target: ATXN2; (+) strand; PAM type: NNAGAAW; PAM sequence: TCAGAAA
tatcaaaaggacattatgat

SEQ ID NO: 6951 - DNA, 20 bp, Artificial Sequence
  Description of Artificial Sequence: Synthetic oligonucleotide
  Target: ATXN2; (+) strand; PAM type: NNAGAAW; PAM sequence: TTAGAAT
atatatgggtggcatttaaa

SEQ ID NO: 6952 - DNA, 20 bp, Artificial Sequence
  Description of Artificial Sequence: Synthetic oligonucleotide
  Target: ATXN2; (+) strand; PAM type: NNAGAAW; PAM sequence: TAAGAAT
atttagcgccaaatactgaa

SEQ ID NO: 6953 - DNA, 20 bp, Artificial Sequence
  Description of Artificial Sequence: Synthetic oligonucleotide
  Target: ATXN2; (+) strand; PAM type: NNAGAAW; PAM sequence: AAAGAAA
tattcttatttttgacgagg

SEQ ID NO: 6954 - DNA, 20 bp, Artificial Sequence
  Description of Artificial Sequence: Synthetic oligonucleotide
  Target: ATXN2; (+) strand; PAM type: NNAGAAW; PAM sequence: TTAGAAT
aaaaaattactcagttaaat

SEQ ID NO: 6955 - DNA, 20 bp, Artificial Sequence
  Description of Artificial Sequence: Synthetic oligonucleotide
  Target: ATXN2; (+) strand; PAM type: NNAGAAW; PAM sequence: CCAGAAA
ctgtcgctctcaaaaaagac

SEQ ID NO: 6956 - DNA, 20 bp, Artificial Sequence
  Description of Artificial Sequence: Synthetic oligonucleotide
  Target: ATXN2; (+) strand; PAM type: NNAGAAW; PAM sequence: GAAGAAA
acctaagttcaagactggct

SEQ ID NO: 6957 - DNA, 20 bp, Artificial Sequence
  Description of Artificial Sequence: Synthetic oligonucleotide
  Target: ATXN2; (+) strand; PAM type: NNAGAAW; PAM sequence: ATAGAAA
ctctaatgaacaaaaggtta

SEQ ID NO: 6958 - DNA, 20 bp, Artificial Sequence
  Description of Artificial Sequence: Synthetic oligonucleotide
  Target: ATXN2; (+) strand; PAM type: NNAGAAW; PAM sequence: ACAGAAA
taataaactaaagttaaaac

SEQ ID NO: 6959 - DNA, 20 bp, Artificial Sequence
  Description of Artificial Sequence: Synthetic oligonucleotide
  Target: ATXN2; (+) strand; PAM type: NNAGAAW; PAM sequence: AAAGAAA
tgaaggaaagtataaaaact

SEQ ID NO: 6960 - DNA, 20 bp, Artificial Sequence
  Description of Artificial Sequence: Synthetic oligonucleotide
  Target: ATXN2; (+) strand; PAM type: NNAGAAW; PAM sequence: ACAGAAA
aaaatgagggaaaaaagtaa

SEQ ID NO: 6961 - DNA, 20 bp, Artificial Sequence
  Description of Artificial Sequence: Synthetic oligonucleotide
  Target: ATXN2; (+) strand; PAM type: NNAGAAW; PAM sequence: TTAGAAA
gcagtagctattatatccaa

SEQ ID NO: 6962 - DNA, 20 bp, Artificial Sequence
  Description of Artificial Sequence: Synthetic oligonucleotide
  Target: ATXN2; (+) strand; PAM type: NNAGAAW; PAM sequence: GTAGAAA
attaagcaagtcccatttaa

SEQ ID NO: 6963 - DNA, 20 bp, Artificial Sequence
  Description of Artificial Sequence: Synthetic oligonucleotide
  Target: ATXN2; (+) strand; PAM type: NNAGAAW; PAM sequence: CTAGAAA
aaagtcttgacctcattaaa

SEQ ID NO: 6964 - DNA, 20 bp, Artificial Sequence
  Description of Artificial Sequence: Synthetic oligonucleotide
  Target: ATXN2; (+) strand; PAM type: NNAGAAW; PAM sequence: AAAGAAA
aaaatctttcctcagtgagc

SEQ ID NO: 6965 - DNA, 20 bp, Artificial Sequence
  Description of Artificial Sequence: Synthetic oligonucleotide
  Target: ATXN2; (+) strand; PAM type: NNAGAAW; PAM sequence: GGAGAAA
tccatttggagaggaattct

SEQ ID NO: 6966 - DNA, 20 bp, Artificial Sequence
  Description of Artificial Sequence: Synthetic oligonucleotide
  Target: ATXN2; (+) strand; PAM type: NNAGAAW; PAM sequence: ATAGAAA
tttcttgaagtaagcataat

SEQ ID NO: 6967 - DNA, 20 bp, Artificial Sequence
  Description of Artificial Sequence: Synthetic oligonucleotide
  Target: ATXN2; (+) strand; PAM type: NNAGAAW; PAM sequence: TTAGAAT
accacagtgttgcacatagg

SEQ ID NO: 6968 - DNA, 20 bp, Artificial Sequence
  Description of Artificial Sequence: Synthetic oligonucleotide
  Target: ATXN2; (+) strand; PAM type: NNAGAAW; PAM sequence: TTAGAAA
attttaagtattttaagtat

SEQ ID NO: 6969 - DNA, 20 bp, Artificial Sequence
  Description of Artificial Sequence: Synthetic oligonucleotide
  Target: ATXN2; (+) strand; PAM type: NNAGAAW; PAM sequence: CCAGAAT
taactactctttggtctgaa

SEQ ID NO: 6970 - DNA, 20 bp, Artificial Sequence
  Description of Artificial Sequence: Synthetic oligonucleotide
  Target: ATXN2; (+) strand; PAM type: NNAGAAW; PAM sequence: AAAGAAA
ggcactctgaaacatgagga

SEQ ID NO: 6971 - DNA, 20 bp, Artificial Sequence
  Description of Artificial Sequence: Synthetic oligonucleotide
  Target: ATXN2; (+) strand; PAM type: NNAGAAW; PAM sequence: TAAGAAA
tatctgtcataatcaactac

SEQ ID NO: 6972 - DNA, 20 bp, Artificial Sequence
  Description of Artificial Sequence: Synthetic oligonucleotide
  Target: ATXN2; (+) strand; PAM type: NNAGAAW; PAM sequence: TTAGAAT
ctactaagaaagtttagagt

SEQ ID NO: 6973 - DNA, 20 bp, Artificial Sequence
  Description of Artificial Sequence: Synthetic oligonucleotide
  Target: ATXN2; (+) strand; PAM type: NNAGAAW; PAM sequence: ACAGAAA
agtttagaatactggtaaaa

SEQ ID NO: 6974 - DNA, 20 bp, Artificial Sequence
  Description of Artificial Sequence: Synthetic oligonucleotide
  Target: ATXN2; (+) strand; PAM type: NNAGAAW; PAM sequence: ACAGAAA
accccgtctctactaaaaat

SEQ ID NO: 6975 - DNA, 20 bp, Artificial Sequence
  Description of Artificial Sequence: Synthetic oligonucleotide
  Target: ATXN2; (+) strand; PAM type: NNAGAAW; PAM sequence: GGAGAAT
ctactcgggaggctgaggca

SEQ ID NO: 6976 - DNA, 20 bp, Artificial Sequence
  Description of Artificial Sequence: Synthetic oligonucleotide
  Target: ATXN2; (+) strand; PAM type: NNAGAAW; PAM sequence: AAAGAAA
cacagcgagattccctctca

SEQ ID NO: 6977 - DNA, 20 bp, Artificial Sequence
  Description of Artificial Sequence: Synthetic oligonucleotide
  Target: ATXN2; (+) strand; PAM type: NNAGAAW; PAM sequence: AGAGAAA
atttatcacagttggtaata

SEQ ID NO: 6978 - DNA, 20 bp, Artificial Sequence
  Description of Artificial Sequence: Synthetic oligonucleotide
  Target: ATXN2; (+) strand; PAM type: NNAGAAW; PAM sequence: GAAGAAA
ggatcccatccattagacta

SEQ ID NO: 6979 - DNA, 20 bp, Artificial Sequence
  Description of Artificial Sequence: Synthetic oligonucleotide
  Target: ATXN2; (+) strand; PAM type: NNAGAAW; PAM sequence: TTAGAAA
acttgagcaaaattagcaaa

SEQ ID NO: 6980 - DNA, 20 bp, Artificial Sequence
  Description of Artificial Sequence: Synthetic oligonucleotide
  Target: ATXN2; (+) strand; PAM type: NNAGAAW; PAM sequence: TTAGAAA
aaaatttccttaaaaatgtt

SEQ ID NO: 6981 - DNA, 20 bp, Artificial Sequence
  Description of Artificial Sequence: Synthetic oligonucleotide
  Target: ATXN2; (+) strand; PAM type: NNAGAAW; PAM sequence: GGAGAAA
aaaaatacttccaatgtttg

SEQ ID NO: 6982 - DNA, 20 bp, Artificial Sequence
  Description of Artificial Sequence: Synthetic oligonucleotide
  Target: ATXN2; (+) strand; PAM type: NNAGAAW; PAM sequence: TTAGAAA
aaagtcacaagaactgggct

SEQ ID NO: 6983 - DNA, 20 bp, Artificial Sequence
  Description of Artificial Sequence: Synthetic oligonucleotide
  Target: ATXN2; (+) strand; PAM type: NNAGAAW; PAM sequence: TAAGAAA
ccaggggcaagcaagtttat

SEQ ID NO: 6984 - DNA, 20 bp, Artificial Sequence
  Description of Artificial Sequence: Synthetic oligonucleotide
  Target: ATXN2; (+) strand; PAM type: NNAGAAW; PAM sequence: AAAGAAT
gtttattaagaaagtaaata

SEQ ID NO: 6985 - DNA, 20 bp, Artificial Sequence
  Description of Artificial Sequence: Synthetic oligonucleotide
  Target: ATXN2; (+) strand; PAM type: NNAGAAW; PAM sequence: AAAGAAT
aggctgcattctttaacgta

SEQ ID NO: 6986 - DNA, 20 bp, Artificial Sequence
  Description of Artificial Sequence: Synthetic oligonucleotide
  Target: ATXN2; (+) strand; PAM type: NNAGAAW; PAM sequence: GAAGAAT
aaaggttgtaatccatccca

SEQ ID NO: 6987 - DNA, 20 bp, Artificial Sequence
  Description of Artificial Sequence: Synthetic oligonucleotide
  Target: ATXN2; (+) strand; PAM type: NNAGAAW; PAM sequence: GGAGAAT
ctacttgggaggctagggca

SEQ ID NO: 6988 - DNA, 20 bp, Artificial Sequence
  Description of Artificial Sequence: Synthetic oligonucleotide
  Target: ATXN2; (+) strand; PAM type: NNAGAAW; PAM sequence: AAAGAAA
cagagcgagactccatctta

SEQ ID NO: 6989 - DNA, 20 bp, Artificial Sequence
  Description of Artificial Sequence: Synthetic oligonucleotide
  Target: ATXN2; (+) strand; PAM type: NNAGAAW; PAM sequence: GGAGAAT
ctactcagaaggctgaagca

SEQ ID NO: 6990 - DNA, 20 bp, Artificial Sequence
  Description of Artificial Sequence: Synthetic oligonucleotide
  Target: ATXN2; (+) strand; PAM type: NNAGAAW; PAM sequence: TAAGAAT
ttcagacatcttctaggcaa

SEQ ID NO: 6991 - DNA, 20 bp, Artificial Sequence
  Description of Artificial Sequence: Synthetic oligonucleotide
  Target: ATXN2; (+) strand; PAM type: NNAGAAW; PAM sequence: GGAGAAT
ctactcaggaggctgaggca

SEQ ID NO: 6992 - DNA, 20 bp, Artificial Sequence
  Description of Artificial Sequence: Synthetic oligonucleotide
  Target: ATXN2; (+) strand; PAM type: NNAGAAW; PAM sequence: AAAGAAA
agcaagactctgtctcaaaa

SEQ ID NO: 6993 - DNA, 20 bp, Artificial Sequence
  Description of Artificial Sequence: Synthetic oligonucleotide
  Target: ATXN2; (+) strand; PAM type: NNAGAAW; PAM sequence: TTAGAAA
atgtttccaatttttcacta

SEQ ID NO: 6994 - DNA, 20 bp, Artificial Sequence
  Description of Artificial Sequence: Synthetic oligonucleotide
  Target: ATXN2; (+) strand; PAM type: NNAGAAW; PAM sequence: GTAGAAT
ctgcttggaaagctgaggca

SEQ ID NO: 6995 - DNA, 20 bp, Artificial Sequence
  Description of Artificial Sequence: Synthetic oligonucleotide
  Target: ATXN2; (+) strand; PAM type: NNAGAAW; PAM sequence: AAAGAAA
aaacaacagcaacaacaaca

SEQ ID NO: 6996 - DNA, 20 bp, Artificial Sequence
  Description of Artificial Sequence: Synthetic oligonucleotide
  Target: ATXN2; (+) strand; PAM type: NNAGAAW; PAM sequence: GCAGAAA
catggtaaaaccctgtctct

SEQ ID NO: 6997 - DNA, 20 bp, Artificial Sequence
  Description of Artificial Sequence: Synthetic oligonucleotide
  Target: ATXN2; (+) strand; PAM type: NNAGAAW; PAM sequence: AAAGAAA
aaaaccctgtctctgcagaa

SEQ ID NO: 6998 - DNA, 20 bp, Artificial Sequence
  Description of Artificial Sequence: Synthetic oligonucleotide
  Target: ATXN2; (+) strand; PAM type: NNAGAAW; PAM sequence: CCAGAAA
ttagcattgccagattctct

SEQ ID NO: 6999 - DNA, 20 bp, Artificial Sequence
  Description of Artificial Sequence: Synthetic oligonucleotide
  Target: ATXN2; (+) strand; PAM type: NNAGAAW; PAM sequence: TGAGAAT
atatatgatttgttaaagtt

SEQ ID NO: 7000 - DNA, 20 bp, Artificial Sequence
  Description of Artificial Sequence: Synthetic oligonucleotide
  Target: ATXN2; (+) strand; PAM type: NNAGAAW; PAM sequence: AGAGAAA
gtacagataatgcattaaag

SEQ ID NO: 7001 - DNA, 20 bp, Artificial Sequence
  Description of Artificial Sequence: Synthetic oligonucleotide
  Target: ATXN2; (+) strand; PAM type: NNAGAAW; PAM sequence: TTAGAAA
agtatgtgacaagaggcgtt

SEQ ID NO: 7002 - DNA, 20 bp, Artificial Sequence
  Description of Artificial Sequence: Synthetic oligonucleotide
  Target: ATXN2; (+) strand; PAM type: NNAGAAW; PAM sequence: AAAGAAT
caagaggcgttttagaaata

SEQ ID NO: 7003 - DNA, 20 bp, Artificial Sequence
  Description of Artificial Sequence: Synthetic oligonucleotide
  Target: ATXN2; (+) strand; PAM type: NNAGAAW; PAM sequence: GGAGAAT
tagaaataaaagaattttgt

SEQ ID NO: 7004 - DNA, 20 bp, Artificial Sequence
  Description of Artificial Sequence: Synthetic oligonucleotide
  Target: ATXN2; (+) strand; PAM type: NNAGAAW; PAM sequence: CAAGAAA
gaataatccaaatttaagac

SEQ ID NO: 7005 - DNA, 20 bp, Artificial Sequence
  Description of Artificial Sequence: Synthetic oligonucleotide
  Target: ATXN2; (+) strand; PAM type: NNAGAAW; PAM sequence: GGAGAAA
ttttctttatatattgcttg

SEQ ID NO: 7006 - DNA, 20 bp, Artificial Sequence
  Description of Artificial Sequence: Synthetic oligonucleotide
  Target: ATXN2; (+) strand; PAM type: NNAGAAW; PAM sequence: AAAGAAT
gagtcagtaaaagcatctgc

SEQ ID NO: 7007 - DNA, 20 bp, Artificial Sequence
  Description of Artificial Sequence: Synthetic oligonucleotide
  Target: ATXN2; (+) strand; PAM type: NNAGAAW; PAM sequence: ACAGAAA
attgtttaacttaaaatcta

SEQ ID NO: 7008 - DNA, 20 bp, Artificial Sequence
  Description of Artificial Sequence: Synthetic oligonucleotide
  Target: ATXN2; (+) strand; PAM type: NNAGAAW; PAM sequence: CAAGAAA
ctgcatgtctcagaagtgac

SEQ ID NO: 7009 - DNA, 20 bp, Artificial Sequence
  Description of Artificial Sequence: Synthetic oligonucleotide
  Target: ATXN2; (+) strand; PAM type: NNAGAAW; PAM sequence: GGAGAAT
ctactcgggaggctgaggaa

SEQ ID NO: 7010 - DNA, 20 bp, Artificial Sequence
  Description of Artificial Sequence: Synthetic oligonucleotide
  Target: ATXN2; (+) strand; PAM type: NNAGAAW; PAM sequence: AAAGAAA
agaccctgtctcaaaaaaaa

SEQ ID NO: 7011 - DNA, 20 bp, Artificial Sequence
  Description of Artificial Sequence: Synthetic oligonucleotide
  Target: ATXN2; (+) strand; PAM type: NNAGAAW; PAM sequence: AAAGAAA
tgtctcaaaaaaaaaaagaa

SEQ ID NO: 7012 - DNA, 20 bp, Artificial Sequence
  Description of Artificial Sequence: Synthetic oligonucleotide
  Target: ATXN2; (+) strand; PAM type: NNAGAAW; PAM sequence: TCAGAAA
gccctacagtattacctgtc

SEQ ID NO: 7013 - DNA, 20 bp, Artificial Sequence
  Description of Artificial Sequence: Synthetic oligonucleotide
  Target: ATXN2; (+) strand; PAM type: NNAGAAW; PAM sequence: TAAGAAA
tgggcaaagtgatgccaaaa

SEQ ID NO: 7014 - DNA, 20 bp, Artificial Sequence
  Description of Artificial Sequence: Synthetic oligonucleotide
  Target: ATXN2; (+) strand; PAM type: NNAGAAW; PAM sequence: CTAGAAA
ggggtggaatggagcattca

SEQ ID NO: 7015 - DNA, 20 bp, Artificial Sequence
  Description of Artificial Sequence: Synthetic oligonucleotide
  Target: ATXN2; (+) strand; PAM type: NNAGAAW; PAM sequence: CTAGAAA
gctgaaagctactgatggca

SEQ ID NO: 7016 - DNA, 20 bp, Artificial Sequence
  Description of Artificial Sequence: Synthetic oligonucleotide
  Target: ATXN2; (+) strand; PAM type: NNAGAAW; PAM sequence: CAAGAAT
aatttagccatgtgtatttt

SEQ ID NO: 7017 - DNA, 20 bp, Artificial Sequence
  Description of Artificial Sequence: Synthetic oligonucleotide
  Target: ATXN2; (+) strand; PAM type: NNAGAAW; PAM sequence: CAAGAAA
ttcaagaatgtaaaatgttc

SEQ ID NO: 7018 - DNA, 20 bp, Artificial Sequence
  Description of Artificial Sequence: Synthetic oligonucleotide
  Target: ATXN2; (+) strand; PAM type: NNAGAAW; PAM sequence: CAAGAAA
aaaacaatactcttttgatt

SEQ ID NO: 7019 - DNA, 20 bp, Artificial Sequence
  Description of Artificial Sequence: Synthetic oligonucleotide
  Target: ATXN2; (+) strand; PAM type: NNAGAAW; PAM sequence: TTAGAAA
gtgtgtgtgtgtgaaaatat

SEQ ID NO: 7020 - DNA, 20 bp, Artificial Sequence
  Description of Artificial Sequence: Synthetic oligonucleotide
  Target: ATXN2; (+) strand; PAM type: NNAGAAW; PAM sequence: CCAGAAT
cccaggctttattccactga

SEQ ID NO: 7021 - DNA, 20 bp, Artificial Sequence
  Description of Artificial Sequence: Synthetic oligonucleotide
  Target: ATXN2; (+) strand; PAM type: NNAGAAW; PAM sequence: ACAGAAA
agcagtctgtcgctttcgag

SEQ ID NO: 7022 - DNA, 20 bp, Artificial Sequence
  Description of Artificial Sequence: Synthetic oligonucleotide
  Target: ATXN2; (+) strand; PAM type: NNAGAAW; PAM sequence: AAAGAAT
acacagaagtgtgattctat

SEQ ID NO: 7023 - DNA, 20 bp, Artificial Sequence
  Description of Artificial Sequence: Synthetic oligonucleotide
  Target: ATXN2; (+) strand; PAM type: NNAGAAW; PAM sequence: TGAGAAA
aggctatatcatcaggatgc

SEQ ID NO: 7024 - DNA, 20 bp, Artificial Sequence
  Description of Artificial Sequence: Synthetic oligonucleotide
  Target: ATXN2; (+) strand; PAM type: NNAGAAW; PAM sequence: CTAGAAA
ggccaacattgcatcattag

SEQ ID NO: 7025 - DNA, 20 bp, Artificial Sequence
  Description of Artificial Sequence: Synthetic oligonucleotide
  Target: ATXN2; (+) strand; PAM type: NNAGAAW; PAM sequence: TGAGAAA
aaccaggattcctgcaaagt

SEQ ID NO: 7026 - DNA, 20 bp, Artificial Sequence
  Description of Artificial Sequence: Synthetic oligonucleotide
  Target: ATXN2; (+) strand; PAM type: NNAGAAW; PAM sequence: AAAGAAT
ttttaccaatgccataagtc

SEQ ID NO: 7027 - DNA, 20 bp, Artificial Sequence
  Description of Artificial Sequence: Synthetic oligonucleotide
  Target: ATXN2; (+) strand; PAM type: NNAGAAW; PAM sequence: TGAGAAA
ttttccatcatcccctatgg

SEQ ID NO: 7028 - DNA, 20 bp, Artificial Sequence
  Description of Artificial Sequence: Synthetic oligonucleotide
  Target: ATXN2; (+) strand; PAM type: NNAGAAW; PAM sequence: CAAGAAT
agcattgtaacaacaagatg

SEQ ID NO: 7029 - DNA, 20 bp, Artificial Sequence
  Description of Artificial Sequence: Synthetic oligonucleotide
  Target: ATXN2; (+) strand; PAM type: NNAGAAW; PAM sequence: TTAGAAA
gcaagaatacaacgtgacta

SEQ ID NO: 7030 - DNA, 20 bp, Artificial Sequence
  Description of Artificial Sequence: Synthetic oligonucleotide
  Target: ATXN2; (+) strand; PAM type: NNAGAAW; PAM sequence: AGAGAAA
tgaaggaactacaggtatag

SEQ ID NO: 7031 - DNA, 20 bp, Artificial Sequence
  Description of Artificial Sequence: Synthetic oligonucleotide
  Target: ATXN2; (+) strand; PAM type: NNAGAAW; PAM sequence: AAAGAAT
aaaccatcagatgagatgat

SEQ ID NO: 7032 - DNA, 20 bp, Artificial Sequence
  Description of Artificial Sequence: Synthetic oligonucleotide
  Target: ATXN2; (+) strand; PAM type: NNAGAAW; PAM sequence: GAAGAAA
actagcaggcgatgttggag

SEQ ID NO: 7033 - DNA, 20 bp, Artificial Sequence
  Description of Artificial Sequence: Synthetic oligonucleotide
  Target: ATXN2; (+) strand; PAM type: NNAGAAW; PAM sequence: GCAGAAA
accttctcttctgattctgg

SEQ ID NO: 7034 - DNA, 20 bp, Artificial Sequence
  Description of Artificial Sequence: Synthetic oligonucleotide
  Target: ATXN2; (+) strand; PAM type: NNAGAAW; PAM sequence: AAAGAAA
tgccacctgctggtggtcat

SEQ ID NO: 7035 - DNA, 20 bp, Artificial Sequence
  Description of Artificial Sequence: Synthetic oligonucleotide
  Target: ATXN2; (+) strand; PAM type: NNAGAAW; PAM sequence: CCAGAAT
tctgagcattttttaaaggg

SEQ ID NO: 7036 - DNA, 20 bp, Artificial Sequence
  Description of Artificial Sequence: Synthetic oligonucleotide
  Target: ATXN2; (+) strand; PAM type: NNAGAAW; PAM sequence: TTAGAAA
taaaatggtagtgttaaaca

SEQ ID NO: 7037 - DNA, 20 bp, Artificial Sequence
  Description of Artificial Sequence: Synthetic oligonucleotide
  Target: ATXN2; (+) strand; PAM type: NNAGAAW; PAM sequence: ACAGAAA
ctgggtgtaagagactagtt

SEQ ID NO: 7038 - DNA, 20 bp, Artificial Sequence
  Description of Artificial Sequence: Synthetic oligonucleotide
  Target: ATXN2; (+) strand; PAM type: NNAGAAW; PAM sequence: TTAGAAT
acagaaatgaagcaaatctt

SEQ ID NO: 7039 - DNA, 20 bp, Artificial Sequence
  Description of Artificial Sequence: Synthetic oligonucleotide
  Target: ATXN2; (+) strand; PAM type: NNAGAAW; PAM sequence: GAAGAAA
ctaggccttcaagaacacaa

SEQ ID NO: 7040 - DNA, 20 bp, Artificial Sequence
  Description of Artificial Sequence: Synthetic oligonucleotide
  Target: ATXN2; (+) strand; PAM type: NNAGAAW; PAM sequence: TAAGAAA
tcaagaacacaagaagaaaa

SEQ ID NO: 7041 - DNA, 20 bp, Artificial Sequence
  Description of Artificial Sequence: Synthetic oligonucleotide
  Target: ATXN2; (+) strand; PAM type: NNAGAAW; PAM sequence: GGAGAAT
ctactcgggaggctgaggca

SEQ ID NO: 7042 - DNA, 20 bp, Artificial Sequence
  Description of Artificial Sequence: Synthetic oligonucleotide
  Target: ATXN2; (+) strand; PAM type: NNAGAAW; PAM sequence: GGAGAAA
gagaccagcctgaccaacat

SEQ ID NO: 7043 - DNA, 20 bp, Artificial Sequence
  Description of Artificial Sequence: Synthetic oligonucleotide
  Target: ATXN2; (+) strand; PAM type: NNAGAAW; PAM sequence: GGAGAAT
ctgctcgggaggctgaagca

SEQ ID NO: 7044 - DNA, 20 bp, Artificial Sequence
  Description of Artificial Sequence: Synthetic oligonucleotide
  Target: ATXN2; (+) strand; PAM type: NNAGAAW; PAM sequence: GAAGAAT
atattaaagactataatact

SEQ ID NO: 7045 - DNA, 20 bp, Artificial Sequence
  Description of Artificial Sequence: Synthetic oligonucleotide
  Target: ATXN2; (+) strand; PAM type: NNAGAAW; PAM sequence: AAAGAAA
ataatactgaagaataacac

SEQ ID NO: 7046 - DNA, 20 bp, Artificial Sequence
  Description of Artificial Sequence: Synthetic oligonucleotide
  Target: ATXN2; (+) strand; PAM type: NNAGAAW; PAM sequence: TAAGAAA
acaaagaaacaagttgggga

SEQ ID NO: 7047 - DNA, 20 bp, Artificial Sequence
  Description of Artificial Sequence: Synthetic oligonucleotide
  Target: ATXN2; (+) strand; PAM type: NNAGAAW; PAM sequence: CTAGAAT
gtggagccacgctcctcagg

SEQ ID NO: 7048 - DNA, 20 bp, Artificial Sequence
  Description of Artificial Sequence: Synthetic oligonucleotide
  Target: ATXN2; (+) strand; PAM type: NNAGAAW; PAM sequence: TCAGAAT
ggaagcctatgaaaccgtat

SEQ ID NO: 7049 - DNA, 20 bp, Artificial Sequence
  Description of Artificial Sequence: Synthetic oligonucleotide
  Target: ATXN2; (+) strand; PAM type: NNAGAAW; PAM sequence: GGAGAAT
ctactcaggaggctgaggca

SEQ ID NO: 7050 - DNA, 20 bp, Artificial Sequence
  Description of Artificial Sequence: Synthetic oligonucleotide
  Target: ATXN2; (+) strand; PAM type: NNAGAAW; PAM sequence: TGAGAAT
aattctctccacaaattctt

SEQ ID NO: 7051 - DNA, 20 bp, Artificial Sequence
  Description of Artificial Sequence: Synthetic oligonucleotide
  Target: ATXN2; (+) strand; PAM type: NNAGAAW; PAM sequence: GAAGAAT
gagaatccacagatccaggt

SEQ ID NO: 7052 - DNA, 20 bp, Artificial Sequence
  Description of Artificial Sequence: Synthetic oligonucleotide
  Target: ATXN2; (+) strand; PAM type: NNAGAAW; PAM sequence: GAAGAAA
ctctttgtactgacaagcag

SEQ ID NO: 7053 - DNA, 20 bp, Artificial Sequence
  Description of Artificial Sequence: Synthetic oligonucleotide
  Target: ATXN2; (+) strand; PAM type: NNAGAAW; PAM sequence: GCAGAAA
aaggagtggtcatcaaggct

SEQ ID NO: 7054 - DNA, 20 bp, Artificial Sequence
  Description of Artificial Sequence: Synthetic oligonucleotide
  Target: ATXN2; (+) strand; PAM type: NNAGAAW; PAM sequence: AGAGAAT
gaacactgtgaggggcaaga

SEQ ID NO: 7055 - DNA, 20 bp, Artificial Sequence
  Description of Artificial Sequence: Synthetic oligonucleotide
  Target: ATXN2; (+) strand; PAM type: NNAGAAW; PAM sequence: AAAGAAT
cttaggaggctatgtttcct

SEQ ID NO: 7056 - DNA, 20 bp, Artificial Sequence
  Description of Artificial Sequence: Synthetic oligonucleotide
  Target: ATXN2; (+) strand; PAM type: NNAGAAW; PAM sequence: CAAGAAA
tactgcttaaggaataatga

SEQ ID NO: 7057 - DNA, 20 bp, Artificial Sequence
  Description of Artificial Sequence: Synthetic oligonucleotide
  Target: ATXN2; (+) strand; PAM type: NNAGAAW; PAM sequence: TAAGAAA
cagtgtcccagccacaaaac

SEQ ID NO: 7058 - DNA, 20 bp, Artificial Sequence
  Description of Artificial Sequence: Synthetic oligonucleotide
  Target: ATXN2; (+) strand; PAM type: NNAGAAW; PAM sequence: AGAGAAA
tatggtatcatgcctatgta

SEQ ID NO: 7059 - DNA, 20 bp, Artificial Sequence
  Description of Artificial Sequence: Synthetic oligonucleotide
  Target: ATXN2; (+) strand; PAM type: NNAGAAW; PAM sequence: GGAGAAT
gtactcgggaggctgaggtg

SEQ ID NO: 7060 - DNA, 20 bp, Artificial Sequence
  Description of Artificial Sequence: Synthetic oligonucleotide
  Target: ATXN2; (+) strand; PAM type: NNAGAAW; PAM sequence: CCAGAAA
ataaatttgttttctgaact

SEQ ID NO: 7061 - DNA, 20 bp, Artificial Sequence
  Description of Artificial Sequence: Synthetic oligonucleotide
  Target: ATXN2; (+) strand; PAM type: NNAGAAW; PAM sequence: AGAGAAA
aaagtttaatgcattgggag

SEQ ID NO: 7062 - DNA, 20 bp, Artificial Sequence
  Description of Artificial Sequence: Synthetic oligonucleotide
  Target: ATXN2; (+) strand; PAM type: NNAGAAW; PAM sequence: AAAGAAA
actgacctattctatactaa

SEQ ID NO: 7063 - DNA, 20 bp, Artificial Sequence
  Description of Artificial Sequence: Synthetic oligonucleotide
  Target: ATXN2; (+) strand; PAM type: NNAGAAW; PAM sequence: GGAGAAT
cttctcgggaggctcaggca

SEQ ID NO: 7064 - DNA, 20 bp, Artificial Sequence
  Description of Artificial Sequence: Synthetic oligonucleotide
  Target: ATXN2; (+) strand; PAM type: NNAGAAW; PAM sequence: GGAGAAT
ctacttgggaggctgaggca

SEQ ID NO: 7065 - DNA, 20 bp, Artificial Sequence
  Description of Artificial Sequence: Synthetic oligonucleotide
  Target: ATXN2; (+) strand; PAM type: NNAGAAW; PAM sequence: TAAGAAT
gatctaataaaagcaatgtc

SEQ ID NO: 7066 - DNA, 20 bp, Artificial Sequence
  Description of Artificial Sequence: Synthetic oligonucleotide
  Target: ATXN2; (+) strand; PAM type: NNAGAAW; PAM sequence: TGAGAAA
tgcccaagattgactgaaaa

SEQ ID NO: 7067 - DNA, 20 bp, Artificial Sequence
  Description of Artificial Sequence: Synthetic oligonucleotide
  Target: ATXN2; (+) strand; PAM type: NNAGAAW; PAM sequence: GAAGAAA
taacaatatttgccttggtg

SEQ ID NO: 7068 - DNA, 20 bp, Artificial Sequence
  Description of Artificial Sequence: Synthetic oligonucleotide
  Target: ATXN2; (+) strand; PAM type: NNAGAAW; PAM sequence: ACAGAAA
tttttaaagtaaagttgtaa

SEQ ID NO: 7069 - DNA, 20 bp, Artificial Sequence
  Description of Artificial Sequence: Synthetic oligonucleotide
  Target: ATXN2; (+) strand; PAM type: NNAGAAW; PAM sequence: TAAGAAA
tggtgaggatgtgaaaaaca

SEQ ID NO: 7070 - DNA, 20 bp, Artificial Sequence
  Description of Artificial Sequence: Synthetic oligonucleotide
  Target: ATXN2; (+) strand; PAM type: NNAGAAW; PAM sequence: AAAGAAA
ctattttcaaaaaataataa

SEQ ID NO: 7071 - DNA, 20 bp, Artificial Sequence
  Description of Artificial Sequence: Synthetic oligonucleotide
  Target: ATXN2; (+) strand; PAM type: NNAGAAW; PAM sequence: TGAGAAT
tgcatacacacacaccccca

SEQ ID NO: 7072 - DNA, 20 bp, Artificial Sequence
  Description of Artificial Sequence: Synthetic oligonucleotide
  Target: ATXN2; (+) strand; PAM type: NNAGAAW; PAM sequence: AAAGAAA
atggaatatttggccatgaa

SEQ ID NO: 7073 - DNA, 20 bp, Artificial Sequence
  Description of Artificial Sequence: Synthetic oligonucleotide
  Target: ATXN2; (+) strand; PAM type: NNAGAAW; PAM sequence: GAAGAAA
ctaatacatgctacagcatg

SEQ ID NO: 7074 - DNA, 20 bp, Artificial Sequence
  Description of Artificial Sequence: Synthetic oligonucleotide
  Target: ATXN2; (+) strand; PAM type: NNAGAAW; PAM sequence: GGAGAAT
ctactcaagaggctgaggca

SEQ ID NO: 7075 - DNA, 20 bp, Artificial Sequence
  Description of Artificial Sequence: Synthetic oligonucleotide
  Target: ATXN2; (+) strand; PAM type: NNAGAAW; PAM sequence: AAAGAAA
gactctgtttcaaaaaaaaa

SEQ ID NO: 7076 - DNA, 20 bp, Artificial Sequence
  Description of Artificial Sequence: Synthetic oligonucleotide
  Target: ATXN2; (+) strand; PAM type: NNAGAAW; PAM sequence: CCAGAAT
attccattaatacgcaatgt

SEQ ID NO: 7077 - DNA, 20 bp, Artificial Sequence
  Description of Artificial Sequence: Synthetic oligonucleotide
  Target: ATXN2; (+) strand; PAM type: NNAGAAW; PAM sequence: GAAGAAA
tgagaccctgtctcaaaata

SEQ ID NO: 7078 - DNA, 20 bp, Artificial Sequence
  Description of Artificial Sequence: Synthetic oligonucleotide
  Target: ATXN2; (+) strand; PAM type: NNAGAAW; PAM sequence: ATAGAAA
ctacgataaagtgagataaa

SEQ ID NO: 7079 - DNA, 20 bp, Artificial Sequence
  Description of Artificial Sequence: Synthetic oligonucleotide
  Target: ATXN2; (+) strand; PAM type: NNAGAAW; PAM sequence: AGAGAAA
aaatagaaaaaaaatcccta

SEQ ID NO: 7080 - DNA, 20 bp, Artificial Sequence
  Description of Artificial Sequence: Synthetic oligonucleotide
  Target: ATXN2; (+) strand; PAM type: NNAGAAW; PAM sequence: GTAGAAA
ctactttttgtatttttttt

SEQ ID NO: 7081 - DNA, 20 bp, Artificial Sequence
  Description of Artificial Sequence: Synthetic oligonucleotide
  Target: ATXN2; (+) strand; PAM type: NNAGAAW; PAM sequence: TTAGAAA
aaatttgaactgaaaattgt

SEQ ID NO: 7082 - DNA, 20 bp, Artificial Sequence
  Description of Artificial Sequence: Synthetic oligonucleotide
  Target: ATXN2; (+) strand; PAM type: NNAGAAW; PAM sequence: ACAGAAT
agatcaatagcccatgctct

SEQ ID NO: 7083 - DNA, 20 bp, Artificial Sequence
  Description of Artificial Sequence: Synthetic oligonucleotide
  Target: ATXN2; (+) strand; PAM type: NNAGAAW; PAM sequence: CAAGAAA
tggtgcaaaactaacaagaa

SEQ ID NO: 7084 - DNA, 20 bp, Artificial Sequence
  Description of Artificial Sequence: Synthetic oligonucleotide
  Target: ATXN2; (+) strand; PAM type: NNAGAAW; PAM sequence: TTAGAAA
taaaaagatcaaaagaagtt

SEQ ID NO: 7085 - DNA, 20 bp, Artificial Sequence
  Description of Artificial Sequence: Synthetic oligonucleotide
  Target: ATXN2; (+) strand; PAM type: NNAGAAW; PAM sequence: AAAGAAA
gaggaaaagctagctacctg

SEQ ID NO: 7086 - DNA, 20 bp, Artificial Sequence
  Description of Artificial Sequence: Synthetic oligonucleotide
  Target: ATXN2; (+) strand; PAM type: NNAGAAW; PAM sequence: AAAGAAA
ggacctcgtctctacttaaa

SEQ ID NO: 7087 - DNA, 20 bp, Artificial Sequence
  Description of Artificial Sequence: Synthetic oligonucleotide
  Target: ATXN2; (+) strand; PAM type: NNAGAAW; PAM sequence: AGAGAAA
aaagagagtgaaagagacag

SEQ ID NO: 7088 - DNA, 20 bp, Artificial Sequence
  Description of Artificial Sequence: Synthetic oligonucleotide
  Target: ATXN2; (+) strand; PAM type: NNAGAAW; PAM sequence: AGAGAAA
tgaaagagacagagagaaag

SEQ ID NO: 7089 - DNA, 20 bp, Artificial Sequence
  Description of Artificial Sequence: Synthetic oligonucleotide
  Target: ATXN2; (+) strand; PAM type: NNAGAAW; PAM sequence: GGAGAAA
agagagaaagagagaaataa

SEQ ID NO: 7090 - DNA, 20 bp, Artificial Sequence
  Description of Artificial Sequence: Synthetic oligonucleotide
  Target: ATXN2; (+) strand; PAM type: NNAGAAW; PAM sequence: AGAGAAA
attttcagctcagaagttaa

SEQ ID NO: 7091 - DNA, 20 bp, Artificial Sequence
  Description of Artificial Sequence: Synthetic oligonucleotide
  Target: ATXN2; (+) strand; PAM type: NNAGAAW; PAM sequence: AAAGAAA
tcagctcagaagttaaagag

SEQ ID NO: 7092 - DNA, 20 bp, Artificial Sequence
  Description of Artificial Sequence: Synthetic oligonucleotide
  Target: ATXN2; (+) strand; PAM type: NNAGAAW; PAM sequence: GGAGAAA
ctacccgggaggctgaggca

SEQ ID NO: 7093 - DNA, 20 bp, Artificial Sequence
  Description of Artificial Sequence: Synthetic oligonucleotide
  Target: ATXN2; (+) strand; PAM type: NNAGAAW; PAM sequence: AAAGAAA
aataaaaaataaaaataaaa

SEQ ID NO: 7094 - DNA, 20 bp, Artificial Sequence
  Description of Artificial Sequence: Synthetic oligonucleotide
  Target: ATXN2; (+) strand; PAM type: NNAGAAW; PAM sequence: GAAGAAA
aaaaataaaaaaagaaaaaa

SEQ ID NO: 7095 - DNA, 20 bp, Artificial Sequence
  Description of Artificial Sequence: Synthetic oligonucleotide
  Target: ATXN2; (+) strand; PAM type: NNAGAAW; PAM sequence: TCAGAAA
ctaagacaaaaaaagtaaat

SEQ ID NO: 7096 - DNA, 20 bp, Artificial Sequence
  Description of Artificial Sequence: Synthetic oligonucleotide
  Target: ATXN2; (+) strand; PAM type: NNAGAAW; PAM sequence: CAAGAAT
aaagtaaattcagaaatgtt

SEQ ID NO: 7097 - DNA, 20 bp, Artificial Sequence
  Description of Artificial Sequence: Synthetic oligonucleotide
  Target: ATXN2; (+) strand; PAM type: NNAGAAW; PAM sequence: ACAGAAT
aaatgttcaagaatcaaaaa

SEQ ID NO: 7098 - DNA, 20 bp, Artificial Sequence
  Description of Artificial Sequence: Synthetic oligonucleotide
  Target: ATXN2; (+) strand; PAM type: NNAGAAW; PAM sequence: GAAGAAT
gaaatgccaatactattagt

SEQ ID NO: 7099 - DNA, 20 bp, Artificial Sequence
  Description of Artificial Sequence: Synthetic oligonucleotide
  Target: ATXN2; (+) strand; PAM type: NNAGAAW; PAM sequence: TCAGAAT
caaacctatggcaaaagtgt

SEQ ID NO: 7100 - DNA, 20 bp, Artificial Sequence
  Description of Artificial Sequence: Synthetic oligonucleotide
  Target: ATXN2; (+) strand; PAM type: NNAGAAW; PAM sequence: ATAGAAA
ttctttcccaggagtatgaa

SEQ ID NO: 7101 - DNA, 20 bp, Artificial Sequence
  Description of Artificial Sequence: Synthetic oligonucleotide
  Target: ATXN2; (+) strand; PAM type: NNAGAAW; PAM sequence: ATAGAAA
tgaaatagaaatagaacaaa

SEQ ID NO: 7102 - DNA, 20 bp, Artificial Sequence
  Description of Artificial Sequence: Synthetic oligonucleotide
  Target: ATXN2; (+) strand; PAM type: NNAGAAW; PAM sequence: AGAGAAA
cattgaaaccatccaagaca

SEQ ID NO: 7103 - DNA, 20 bp, Artificial Sequence
  Description of Artificial Sequence: Synthetic oligonucleotide
  Target: ATXN2; (+) strand; PAM type: NNAGAAW; PAM sequence: TAAGAAT
tctttacctaatagagagtt

SEQ ID NO: 7104 - DNA, 20 bp, Artificial Sequence
  Description of Artificial Sequence: Synthetic oligonucleotide
  Target: ATXN2; (+) strand; PAM type: NNAGAAW; PAM sequence: CCAGAAT
tctaatttgtccccaatgtc

SEQ ID NO: 7105 - DNA, 20 bp, Artificial Sequence
  Description of Artificial Sequence: Synthetic oligonucleotide
  Target: ATXN2; (+) strand; PAM type: NNAGAAW; PAM sequence: CCAGAAT
ctgaataatccacctttcct

SEQ ID NO: 7106 - DNA, 20 bp, Artificial Sequence
  Description of Artificial Sequence: Synthetic oligonucleotide
  Target: ATXN2; (+) strand; PAM type: NNAGAAW; PAM sequence: TTAGAAT
tacacataatctaataagct

SEQ ID NO: 7107 - DNA, 20 bp, Artificial Sequence
  Description of Artificial Sequence: Synthetic oligonucleotide
  Target: ATXN2; (+) strand; PAM type: NNAGAAW; PAM sequence: AGAGAAT
tttggcaaacatgatagggt

SEQ ID NO: 7108 - DNA, 20 bp, Artificial Sequence
  Description of Artificial Sequence: Synthetic oligonucleotide
  Target: ATXN2; (+) strand; PAM type: NNAGAAW; PAM sequence: CCAGAAT
tctccagttactgcttggcc

SEQ ID NO: 7109 - DNA, 20 bp, Artificial Sequence
  Description of Artificial Sequence: Synthetic oligonucleotide
  Target: ATXN2; (+) strand; PAM type: NNAGAAW; PAM sequence: CCAGAAT
tatgagaacacaacagcaca

SEQ ID NO: 7110 - DNA, 20 bp, Artificial Sequence
  Description of Artificial Sequence: Synthetic oligonucleotide
  Target: ATXN2; (+) strand; PAM type: NNAGAAW; PAM sequence: GTAGAAT
acaccagaataaaacaatct

SEQ ID NO: 7111 - DNA, 20 bp, Artificial Sequence
  Description of Artificial Sequence: Synthetic oligonucleotide
  Target: ATXN2; (+) strand; PAM type: NNAGAAW; PAM sequence: TTAGAAT
atctctaactctaaaaatgc

SEQ ID NO: 7112 - DNA, 20 bp, Artificial Sequence
  Description of Artificial Sequence: Synthetic oligonucleotide
  Target: ATXN2; (+) strand; PAM type: NNAGAAW; PAM sequence: GAAGAAA
atggcgtatatgaactccct

SEQ ID NO: 7113 - DNA, 20 bp, Artificial Sequence
  Description of Artificial Sequence: Synthetic oligonucleotide
  Target: ATXN2; (+) strand; PAM type: NNAGAAW; PAM sequence: AAAGAAA
tgaccctgtttctttaaaaa

SEQ ID NO: 7114 - DNA, 20 bp, Artificial Sequence
  Description of Artificial Sequence: Synthetic oligonucleotide
  Target: ATXN2; (+) strand; PAM type: NNAGAAW; PAM sequence: AAAGAAT
agaaaaaaaattaattttta

SEQ ID NO: 7115 - DNA, 20 bp, Artificial Sequence
  Description of Artificial Sequence: Synthetic oligonucleotide
  Target: ATXN2; (+) strand; PAM type: NNAGAAW; PAM sequence: TGAGAAT
caaagcactatactagacca

SEQ ID NO: 7116 - DNA, 20 bp, Artificial Sequence
  Description of Artificial Sequence: Synthetic oligonucleotide
  Target: ATXN2; (+) strand; PAM type: NNAGAAW; PAM sequence: AAAGAAA
atgtggcaagagcagcaggc

SEQ ID NO: 7117 - DNA, 20 bp, Artificial Sequence
  Description of Artificial Sequence: Synthetic oligonucleotide
  Target: ATXN2; (+) strand; PAM type: NNAGAAW; PAM sequence: ACAGAAA
attcaagtgcagcaataaag

SEQ ID NO: 7118 - DNA, 20 bp, Artificial Sequence
  Description of Artificial Sequence: Synthetic oligonucleotide
  Target: ATXN2; (+) strand; PAM type: NNAGAAW; PAM sequence: GAAGAAT
cttaggcaggataatggcta

SEQ ID NO: 7119 - DNA, 20 bp, Artificial Sequence
  Description of Artificial Sequence: Synthetic oligonucleotide
  Target: ATXN2; (+) strand; PAM type: NNAGAAW; PAM sequence: AAAGAAT
ctagaagaattcaggattaa

SEQ ID NO: 7120 - DNA, 20 bp, Artificial Sequence
  Description of Artificial Sequence: Synthetic oligonucleotide
  Target: ATXN2; (+) strand; PAM type: NNAGAAW; PAM sequence: GGAGAAT
ctactcgggaggctgaggca

SEQ ID NO: 7121 - DNA, 20 bp, Artificial Sequence
  Description of Artificial Sequence: Synthetic oligonucleotide
  Target: ATXN2; (+) strand; PAM type: NNAGAAW; PAM sequence: AAAGAAT
caaaaacaaaacaaaacaaa

SEQ ID NO: 7122 - DNA, 20 bp, Artificial Sequence
  Description of Artificial Sequence: Synthetic oligonucleotide
  Target: ATXN2; (+) strand; PAM type: NNAGAAW; PAM sequence: CTAGAAA
atgctaaagggaaagattaa

SEQ ID NO: 7123 - DNA, 20 bp, Artificial Sequence
  Description of Artificial Sequence: Synthetic oligonucleotide
  Target: ATXN2; (+) strand; PAM type: NNAGAAW; PAM sequence: CCAGAAA
aaaggcagatgttgaagagc

SEQ ID NO: 7124 - DNA, 20 bp, Artificial Sequence
  Description of Artificial Sequence: Synthetic oligonucleotide
  Target: ATXN2; (+) strand; PAM type: NNAGAAW; PAM sequence: GGAGAAA
gaagtggtataaaagagcaa

SEQ ID NO: 7125 - DNA, 20 bp, Artificial Sequence
  Description of Artificial Sequence: Synthetic oligonucleotide
  Target: ATXN2; (+) strand; PAM type: NNAGAAW; PAM sequence: AAAGAAA
ccgagactccatctaaaaaa

SEQ ID NO: 7126 - DNA, 20 bp, Artificial Sequence
  Description of Artificial Sequence: Synthetic oligonucleotide
  Target: ATXN2; (+) strand; PAM type: NNAGAAW; PAM sequence: AAAGAAA
ctccatctaaaaaaaaagaa

SEQ ID NO: 7127 - DNA, 20 bp, Artificial Sequence
  Description of Artificial Sequence: Synthetic oligonucleotide
  Target: ATXN2; (+) strand; PAM type: NNAGAAW; PAM sequence: AAAGAAT
gatttttcactaaatgtgac

SEQ ID NO: 7128 - DNA, 20 bp, Artificial Sequence
  Description of Artificial Sequence: Synthetic oligonucleotide
  Target: ATXN2; (+) strand; PAM type: NNAGAAW; PAM sequence: TTAGAAT
attcttcagactaaatccaa

SEQ ID NO: 7129 - DNA, 20 bp, Artificial Sequence
  Description of Artificial Sequence: Synthetic oligonucleotide
  Target: ATXN2; (+) strand; PAM type: NNAGAAW; PAM sequence: TAAGAAT
ccaattagaatggtcatgaa

SEQ ID NO: 7130 - DNA, 20 bp, Artificial Sequence
  Description of Artificial Sequence: Synthetic oligonucleotide
  Target: ATXN2; (+) strand; PAM type: NNAGAAW; PAM sequence: TTAGAAT
tcgcaggatattatacagta

SEQ ID NO: 7131 - DNA, 20 bp, Artificial Sequence
  Description of Artificial Sequence: Synthetic oligonucleotide
  Target: ATXN2; (+) strand; PAM type: NNAGAAW; PAM sequence: TGAGAAT
ctgacccctatcatctaggc

SEQ ID NO: 7132 - DNA, 20 bp, Artificial Sequence
  Description of Artificial Sequence: Synthetic oligonucleotide
  Target: ATXN2; (+) strand; PAM type: NNAGAAW; PAM sequence: AAAGAAA
atctaggctgagaatactgc

SEQ ID NO: 7133 - DNA, 20 bp, Artificial Sequence
  Description of Artificial Sequence: Synthetic oligonucleotide
  Target: ATXN2; (+) strand; PAM type: NNAGAAW; PAM sequence: GCAGAAA
ataatggcgcaacaggaaga

SEQ ID NO: 7134 - DNA, 20 bp, Artificial Sequence
  Description of Artificial Sequence: Synthetic oligonucleotide
  Target: ATXN2; (+) strand; PAM type: NNAGAAW; PAM sequence: AAAGAAA
tggcgcaacaggaagagcag

SEQ ID NO: 7135 - DNA, 20 bp, Artificial Sequence
  Description of Artificial Sequence: Synthetic oligonucleotide
  Target: ATXN2; (+) strand; PAM type: NNAGAAW; PAM sequence: GGAGAAA
aaatgaaggaaaaaaataga

SEQ ID NO: 7136 - DNA, 20 bp, Artificial Sequence
  Description of Artificial Sequence: Synthetic oligonucleotide
  Target: ATXN2; (+) strand; PAM type: NNAGAAW; PAM sequence: GAAGAAT
ctcctcgggaggcttaggca

SEQ ID NO: 7137 - DNA, 20 bp, Artificial Sequence
  Description of Artificial Sequence: Synthetic oligonucleotide
  Target: ATXN2; (+) strand; PAM type: NNAGAAW; PAM sequence: GGAGAAA
aagaccagcctgaccaacgt

SEQ ID NO: 7138 - DNA, 20 bp, Artificial Sequence
  Description of Artificial Sequence: Synthetic oligonucleotide
  Target: ATXN2; (+) strand; PAM type: NNAGAAW; PAM sequence: GGAGAAT
ctactcgggaggctgagata

SEQ ID NO: 7139 - DNA, 20 bp, Artificial Sequence
  Description of Artificial Sequence: Synthetic oligonucleotide
  Target: ATXN2; (+) strand; PAM type: NNAGAAW; PAM sequence: AAAGAAA
tccgtcccaaggaaaacaaa

SEQ ID NO: 7140 - DNA, 20 bp, Artificial Sequence
  Description of Artificial Sequence: Synthetic oligonucleotide
  Target: ATXN2; (+) strand; PAM type: NNAGAAW; PAM sequence: TGAGAAT
agtctgcatcttatattgct

SEQ ID NO: 7141 - DNA, 20 bp, Artificial Sequence
  Description of Artificial Sequence: Synthetic oligonucleotide
  Target: ATXN2; (+) strand; PAM type: NNAGAAW; PAM sequence: GGAGAAA
ttacttttagctttatttgt

SEQ ID NO: 7142 - DNA, 20 bp, Artificial Sequence
  Description of Artificial Sequence: Synthetic oligonucleotide
  Target: ATXN2; (+) strand; PAM type: NNAGAAW; PAM sequence: GTAGAAA
tgttaagaacatgagttaga

SEQ ID NO: 7143 - DNA, 20 bp, Artificial Sequence
  Description of Artificial Sequence: Synthetic oligonucleotide
  Target: ATXN2; (+) strand; PAM type: NNAGAAW; PAM sequence: ACAGAAA
ggataatagctgtatctact

SEQ ID NO: 7144 - DNA, 20 bp, Artificial Sequence
  Description of Artificial Sequence: Synthetic oligonucleotide
  Target: ATXN2; (+) strand; PAM type: NNAGAAW; PAM sequence: ATAGAAT
gttagcacagagtctggcac

SEQ ID NO: 7145 - DNA, 20 bp, Artificial Sequence
  Description of Artificial Sequence: Synthetic oligonucleotide
  Target: ATXN2; (+) strand; PAM type: NNAGAAW; PAM sequence: AGAGAAT
atttgacagactattacaga

SEQ ID NO: 7146 - DNA, 20 bp, Artificial Sequence
  Description of Artificial Sequence: Synthetic oligonucleotide
  Target: ATXN2; (+) strand; PAM type: NNAGAAW; PAM sequence: TCAGAAA
cagaagagaattataaaagc

SEQ ID NO: 7147 - DNA, 20 bp, Artificial Sequence
  Description of Artificial Sequence: Synthetic oligonucleotide
  Target: ATXN2; (+) strand; PAM type: NNAGAAW; PAM sequence: ACAGAAA
aggcagttgccaattctgag

SEQ ID NO: 7148 - DNA, 20 bp, Artificial Sequence
  Description of Artificial Sequence: Synthetic oligonucleotide
  Target: ATXN2; (+) strand; PAM type: NNAGAAW; PAM sequence: CAAGAAA
acagaaaggggactgtgagg

SEQ ID NO: 7149 - DNA, 20 bp, Artificial Sequence
  Description of Artificial Sequence: Synthetic oligonucleotide
  Target: ATXN2; (+) strand; PAM type: NNAGAAW; PAM sequence: CTAGAAA
agtgagccaccgcacctggc

SEQ ID NO: 7150 - DNA, 20 bp, Artificial Sequence
  Description of Artificial Sequence: Synthetic oligonucleotide
  Target: ATXN2; (+) strand; PAM type: NNAGAAW; PAM sequence: TAAGAAT
tggtgaaacccagtctgtac

SEQ ID NO: 7151 - DNA, 20 bp, Artificial Sequence
  Description of Artificial Sequence: Synthetic oligonucleotide
  Target: ATXN2; (+) strand; PAM type: NNAGAAW; PAM sequence: GGAGAAT
ctactcgggaggctgaggca

SEQ ID NO: 7152 - DNA, 20 bp, Artificial Sequence
  Description of Artificial Sequence: Synthetic oligonucleotide
  Target: ATXN2; (+) strand; PAM type: NNAGAAW; PAM sequence: AGAGAAT
ctactcgggaggctgaggca

SEQ ID NO: 7153 - DNA, 20 bp, Artificial Sequence
  Description of Artificial Sequence: Synthetic oligonucleotide
  Target: ATXN2; (+) strand; PAM type: NNAGAAW; PAM sequence: AGAGAAA
aaaaaaaaaaaaaaaaagag

SEQ ID NO: 7154 - DNA, 20 bp, Artificial Sequence
  Description of Artificial Sequence: Synthetic oligonucleotide
  Target: ATXN2; (+) strand; PAM type: NNAGAAW; PAM sequence: AAAGAAA
aaaaaaaaaaaagagagaga

SEQ ID NO: 7155 - DNA, 20 bp, Artificial Sequence
  Description of Artificial Sequence: Synthetic oligonucleotide
  Target: ATXN2; (+) strand; PAM type: NNAGAAW; PAM sequence: CAAGAAA
ccaatagtggatgtcctcat

SEQ ID NO: 7156 - DNA, 20 bp, Artificial Sequence
  Description of Artificial Sequence: Synthetic oligonucleotide
  Target: ATXN2; (+) strand; PAM type: NNAGAAW; PAM sequence: TGAGAAA
tataatgaactaaaattatc

SEQ ID NO: 7157 - DNA, 20 bp, Artificial Sequence
  Description of Artificial Sequence: Synthetic oligonucleotide
  Target: ATXN2; (+) strand; PAM type: NNAGAAW; PAM sequence: AAAGAAT
atcagcatatcaagacagtt

SEQ ID NO: 7158 - DNA, 20 bp, Artificial Sequence
  Description of Artificial Sequence: Synthetic oligonucleotide
  Target: ATXN2; (+) strand; PAM type: NNAGAAW; PAM sequence: AGAGAAA
gcctctgaaaaagcaagcaa

SEQ ID NO: 7159 - DNA, 20 bp, Artificial Sequence
  Description of Artificial Sequence: Synthetic oligonucleotide
  Target: ATXN2; (+) strand; PAM type: NNAGAAW; PAM sequence: AGAGAAA
gagaaagactcctaagtcta

SEQ ID NO: 7160 - DNA, 20 bp, Artificial Sequence
  Description of Artificial Sequence: Synthetic oligonucleotide
  Target: ATXN2; (+) strand; PAM type: NNAGAAW; PAM sequence: AAAGAAT
aagactcctaagtctaagag

SEQ ID NO: 7161 - DNA, 20 bp, Artificial Sequence
  Description of Artificial Sequence: Synthetic oligonucleotide
  Target: ATXN2; (+) strand; PAM type: NNAGAAW; PAM sequence: GAAGAAT
tatttccaagtaacagtgta

SEQ ID NO: 7162 - DNA, 20 bp, Artificial Sequence
  Description of Artificial Sequence: Synthetic oligonucleotide
  Target: ATXN2; (+) strand; PAM type: NNAGAAW; PAM sequence: ACAGAAT
gtactgaactacaatttaca

SEQ ID NO: 7163 - DNA, 20 bp, Artificial Sequence
  Description of Artificial Sequence: Synthetic oligonucleotide
  Target: ATXN2; (+) strand; PAM type: NNAGAAW; PAM sequence: ACAGAAT
acagaattacgtatttcact

SEQ ID NO: 7164 - DNA, 20 bp, Artificial Sequence
  Description of Artificial Sequence: Synthetic oligonucleotide
  Target: ATXN2; (+) strand; PAM type: NNAGAAW; PAM sequence: AAAGAAT
ttggcatatacaaataaata

SEQ ID NO: 7165 - DNA, 20 bp, Artificial Sequence
  Description of Artificial Sequence: Synthetic oligonucleotide
  Target: ATXN2; (+) strand; PAM type: NNAGAAW; PAM sequence: GGAGAAT
ctactcaggaggctgaggca

SEQ ID NO: 7166 - DNA, 20 bp, Artificial Sequence
  Description of Artificial Sequence: Synthetic oligonucleotide
  Target: ATXN2; (+) strand; PAM type: NNAGAAW; PAM sequence: AAAGAAT
cgtctcaaaaaaaaaaaaaa

SEQ ID NO: 7167 - DNA, 20 bp, Artificial Sequence
  Description of Artificial Sequence: Synthetic oligonucleotide
  Target: ATXN2; (+) strand; PAM type: NNAGAAW; PAM sequence: CAAGAAA
gcattgtaggccaaatggga

SEQ ID NO: 7168 - DNA, 20 bp, Artificial Sequence
  Description of Artificial Sequence: Synthetic oligonucleotide
  Target: ATXN2; (+) strand; PAM type: NNAGAAW; PAM sequence: GTAGAAA
gcattcttgaccacaaaact

SEQ ID NO: 7169 - DNA, 20 bp, Artificial Sequence
  Description of Artificial Sequence: Synthetic oligonucleotide
  Target: ATXN2; (+) strand; PAM type: NNAGAAW; PAM sequence: CTAGAAA
attaccttacttgggctatt

SEQ ID NO: 7170 - DNA, 20 bp, Artificial Sequence
  Description of Artificial Sequence: Synthetic oligonucleotide
  Target: ATXN2; (+) strand; PAM type: NNAGAAW; PAM sequence: AGAGAAT
ctttgacaaaaataatctca

SEQ ID NO: 7171 - DNA, 20 bp, Artificial Sequence
  Description of Artificial Sequence: Synthetic oligonucleotide
  Target: ATXN2; (+) strand; PAM type: NNAGAAW; PAM sequence: TAAGAAA
gaaaatgttcttttactttg

SEQ ID NO: 7172 - DNA, 20 bp, Artificial Sequence
  Description of Artificial Sequence: Synthetic oligonucleotide
  Target: ATXN2; (+) strand; PAM type: NNAGAAW; PAM sequence: AAAGAAA
gttcttttactttgtaagaa

SEQ ID NO: 7173 - DNA, 20 bp, Artificial Sequence
  Description of Artificial Sequence: Synthetic oligonucleotide
  Target: ATXN2; (+) strand; PAM type: NNAGAAW; PAM sequence: AAAGAAA
aaacatataatttatttatc

SEQ ID NO: 7174 - DNA, 20 bp, Artificial Sequence
  Description of Artificial Sequence: Synthetic oligonucleotide
  Target: ATXN2; (+) strand; PAM type: NNAGAAW; PAM sequence: CAAGAAT
tacacacacagcagggttaa

SEQ ID NO: 7175 - DNA, 20 bp, Artificial Sequence
  Description of Artificial Sequence: Synthetic oligonucleotide
  Target: ATXN2; (+) strand; PAM type: NNAGAAW; PAM sequence: CAAGAAA
tattgttttaggaataatga

SEQ ID NO: 7176 - DNA, 20 bp, Artificial Sequence
  Description of Artificial Sequence: Synthetic oligonucleotide
  Target: ATXN2; (+) strand; PAM type: NNAGAAW; PAM sequence: AAAGAAA
tatttgcatagattccatca

SEQ ID NO: 7177 - DNA, 20 bp, Artificial Sequence
  Description of Artificial Sequence: Synthetic oligonucleotide
  Target: ATXN2; (+) strand; PAM type: NNAGAAW; PAM sequence: TTAGAAA
attaaaaaaaaaaaaaacta

SEQ ID NO: 7178 - DNA, 20 bp, Artificial Sequence
  Description of Artificial Sequence: Synthetic oligonucleotide
  Target: ATXN2; (+) strand; PAM type: NNAGAAW; PAM sequence: ACAGAAA
gtatgcaattgttaaaactc

SEQ ID NO: 7179 - DNA, 20 bp, Artificial Sequence
  Description of Artificial Sequence: Synthetic oligonucleotide
  Target: ATXN2; (+) strand; PAM type: NNAGAAW; PAM sequence: CCAGAAA
taacattccaaaatttaaga

SEQ ID NO: 7180 - DNA, 20 bp, Artificial Sequence
  Description of Artificial Sequence: Synthetic oligonucleotide
  Target: ATXN2; (+) strand; PAM type: NNAGAAW; PAM sequence: GGAGAAA
tttaagaccagaaagccaaa

SEQ ID NO: 7181 - DNA, 20 bp, Artificial Sequence
  Description of Artificial Sequence: Synthetic oligonucleotide
  Target: ATXN2; (+) strand; PAM type: NNAGAAW; PAM sequence: GCAGAAA
aaaggagaaaaatgaaagca

SEQ ID NO: 7182 - DNA, 20 bp, Artificial Sequence
  Description of Artificial Sequence: Synthetic oligonucleotide
  Target: ATXN2; (+) strand; PAM type: NNAGAAW; PAM sequence: TTAGAAA
ttagatttgcacttagtcat

SEQ ID NO: 7183 - DNA, 20 bp, Artificial Sequence
  Description of Artificial Sequence: Synthetic oligonucleotide
  Target: ATXN2; (+) strand; PAM type: NNAGAAW; PAM sequence: TAAGAAT
gtatatctttattagcagtg

SEQ ID NO: 7184 - DNA, 20 bp, Artificial Sequence
  Description of Artificial Sequence: Synthetic oligonucleotide
  Target: ATXN2; (+) strand; PAM type: NNAGAAW; PAM sequence: CTAGAAA
gggtcatagaaggaagcaaa

SEQ ID NO: 7185 - DNA, 20 bp, Artificial Sequence
  Description of Artificial Sequence: Synthetic oligonucleotide
  Target: ATXN2; (+) strand; PAM type: NNAGAAW; PAM sequence: GAAGAAA
taaagtaaaatagcctactg

SEQ ID NO: 7186 - DNA, 20 bp, Artificial Sequence
  Description of Artificial Sequence: Synthetic oligonucleotide
  Target: ATXN2; (+) strand; PAM type: NNAGAAW; PAM sequence: AAAGAAA
atatttctcccccatctata

SEQ ID NO: 7187 - DNA, 20 bp, Artificial Sequence
  Description of Artificial Sequence: Synthetic oligonucleotide
  Target: ATXN2; (+) strand; PAM type: NNAGAAW; PAM sequence: TAAGAAT
cagtgaaaccccatctctac

SEQ ID NO: 7188 - DNA, 20 bp, Artificial Sequence
  Description of Artificial Sequence: Synthetic oligonucleotide
  Target: ATXN2; (+) strand; PAM type: NNAGAAW; PAM sequence: GAAGAAT
ctactagggaggctgaggca

SEQ ID NO: 7189 - DNA, 20 bp, Artificial Sequence
  Description of Artificial Sequence: Synthetic oligonucleotide
  Target: ATXN2; (+) strand; PAM type: NNAGAAW; PAM sequence: AAAGAAA
actctgtctcaaaaaaaaaa

SEQ ID NO: 7190 - DNA, 20 bp, Artificial Sequence
  Description of Artificial Sequence: Synthetic oligonucleotide
  Target: ATXN2; (+) strand; PAM type: NNAGAAW; PAM sequence: AAAGAAA
tgtctcaaaaaaaaaaaaag

SEQ ID NO: 7191 - DNA, 20 bp, Artificial Sequence
  Description of Artificial Sequence: Synthetic oligonucleotide
  Target: ATXN2; (+) strand; PAM type: NNAGAAW; PAM sequence: GCAGAAA
caggtcatatgattacaact

SEQ ID NO: 7192 - DNA, 20 bp, Artificial Sequence
  Description of Artificial Sequence: Synthetic oligonucleotide
  Target: ATXN2; (+) strand; PAM type: NNAGAAW; PAM sequence: TCAGAAA
ttccttgccaactctctccc

SEQ ID NO: 7193 - DNA, 20 bp, Artificial Sequence
  Description of Artificial Sequence: Synthetic oligonucleotide
  Target: ATXN2; (+) strand; PAM type: NNAGAAW; PAM sequence: ATAGAAT
attctattttcaagtgaatt

SEQ ID NO: 7194 - DNA, 20 bp, Artificial Sequence
  Description of Artificial Sequence: Synthetic oligonucleotide
  Target: ATXN2; (+) strand; PAM type: NNAGAAW; PAM sequence: TTAGAAT
actgaaaaagattaggcccc

SEQ ID NO: 7195 - DNA, 20 bp, Artificial Sequence
  Description of Artificial Sequence: Synthetic oligonucleotide
  Target: ATXN2; (+) strand; PAM type: NNAGAAW; PAM sequence: CCAGAAA
tcctcactttcttctctcat

SEQ ID NO: 7196 - DNA, 20 bp, Artificial Sequence
  Description of Artificial Sequence: Synthetic oligonucleotide
  Target: ATXN2; (+) strand; PAM type: NNAGAAW; PAM sequence: GCAGAAA
aaaaaacagtacagtaaagt

SEQ ID NO: 7197 - DNA, 20 bp, Artificial Sequence
  Description of Artificial Sequence: Synthetic oligonucleotide
  Target: ATXN2; (+) strand; PAM type: NNAGAAW; PAM sequence: AAAGAAA
aatgccagtcaaattaatat

SEQ ID NO: 7198 - DNA, 20 bp, Artificial Sequence
  Description of Artificial Sequence: Synthetic oligonucleotide
  Target: ATXN2; (+) strand; PAM type: NNAGAAW; PAM sequence: GGAGAAA
aaataataataatacagaag

SEQ ID NO: 7199 - DNA, 20 bp, Artificial Sequence
  Description of Artificial Sequence: Synthetic oligonucleotide
  Target: ATXN2; (+) strand; PAM type: NNAGAAW; PAM sequence: CAAGAAT
gaatggggttgtaaatcaaa

SEQ ID NO: 7200 - DNA, 20 bp, Artificial Sequence
  Description of Artificial Sequence: Synthetic oligonucleotide
  Target: ATXN2; (+) strand; PAM type: NNAGAAW; PAM sequence: CGAGAAA
tttacagatctaccagttta

SEQ ID NO: 7201 - DNA, 20 bp, Artificial Sequence
  Description of Artificial Sequence: Synthetic oligonucleotide
  Target: ATXN2; (+) strand; PAM type: NNAGAAW; PAM sequence: GAAGAAT
ttacgagaaacattaagatg

SEQ ID NO: 7202 - DNA, 20 bp, Artificial Sequence
  Description of Artificial Sequence: Synthetic oligonucleotide
  Target: ATXN2; (+) strand; PAM type: NNAGAAW; PAM sequence: CCAGAAT
aggttcctcacagtttaaat

SEQ ID NO: 7203 - DNA, 20 bp, Artificial Sequence
  Description of Artificial Sequence: Synthetic oligonucleotide
  Target: ATXN2; (+) strand; PAM type: NNAGAAW; PAM sequence: ATAGAAA
aaaccccgtttctactaaaa

SEQ ID NO: 7204 - DNA, 20 bp, Artificial Sequence
  Description of Artificial Sequence: Synthetic oligonucleotide
  Target: ATXN2; (+) strand; PAM type: NNAGAAW; PAM sequence: AGAGAAT
tatttggggaggctgagacc

SEQ ID NO: 7205 - DNA, 20 bp, Artificial Sequence
  Description of Artificial Sequence: Synthetic oligonucleotide
  Target: ATXN2; (+) strand; PAM type: NNAGAAW; PAM sequence: GGAGAAA
ttatattgcaccataattta

SEQ ID NO: 7206 - DNA, 20 bp, Artificial Sequence
  Description of Artificial Sequence: Synthetic oligonucleotide
  Target: ATXN2; (+) strand; PAM type: NNAGAAW; PAM sequence: AAAGAAA
aaaactcacaatctcttccc

SEQ ID NO: 7207 - DNA, 20 bp, Artificial Sequence
  Description of Artificial Sequence: Synthetic oligonucleotide
  Target: ATXN2; (+) strand; PAM type: NNAGAAW; PAM sequence: GGAGAAT
ttcaaaggcacttggtagga

SEQ ID NO: 7208 - DNA, 20 bp, Artificial Sequence
  Description of Artificial Sequence: Synthetic oligonucleotide
  Target: ATXN2; (+) strand; PAM type: NNAGAAW; PAM sequence: TCAGAAA
acaaatttcaaacactgatc

SEQ ID NO: 7209 - DNA, 20 bp, Artificial Sequence
  Description of Artificial Sequence: Synthetic oligonucleotide
  Target: ATXN2; (+) strand; PAM type: NNAGAAW; PAM sequence: CTAGAAA
tattaggtattataagtaat

SEQ ID NO: 7210 - DNA, 20 bp, Artificial Sequence
  Description of Artificial Sequence: Synthetic oligonucleotide
  Target: ATXN2; (+) strand; PAM type: NNAGAAW; PAM sequence: CAAGAAA
gaccaatcccccaaggacac

SEQ ID NO: 7211 - DNA, 20 bp, Artificial Sequence
  Description of Artificial Sequence: Synthetic oligonucleotide
  Target: ATXN2; (+) strand; PAM type: NNAGAAW; PAM sequence: CAAGAAA
gcatacccaaggctgcatcc

SEQ ID NO: 7212 - DNA, 20 bp, Artificial Sequence
  Description of Artificial Sequence: Synthetic oligonucleotide
  Target: ATXN2; (+) strand; PAM type: NNAGAAW; PAM sequence: ATAGAAA
actggaaaaagaagtaggca

SEQ ID NO: 7213 - DNA, 20 bp, Artificial Sequence
  Description of Artificial Sequence: Synthetic oligonucleotide
  Target: ATXN2; (+) strand; PAM type: NNAGAAW; PAM sequence: TAAGAAT
taaccagatgtctgacttaa

SEQ ID NO: 7214 - DNA, 20 bp, Artificial Sequence
  Description of Artificial Sequence: Synthetic oligonucleotide
  Target: ATXN2; (+) strand; PAM type: NNAGAAW; PAM sequence: AAAGAAA
ataaacatgttttaagaacg

SEQ ID NO: 7215 - DNA, 20 bp, Artificial Sequence
  Description of Artificial Sequence: Synthetic oligonucleotide
  Target: ATXN2; (+) strand; PAM type: NNAGAAW; PAM sequence: AAAGAAA
caagagcaaacctccgtctc

SEQ ID NO: 7216 - DNA, 20 bp, Artificial Sequence
  Description of Artificial Sequence: Synthetic oligonucleotide
  Target: ATXN2; (+) strand; PAM type: NNAGAAW; PAM sequence: CAAGAAT
ctacttgggaggctgaggca

SEQ ID NO: 7217 - DNA, 20 bp, Artificial Sequence
  Description of Artificial Sequence: Synthetic oligonucleotide
  Target: ATXN2; (+) strand; PAM type: NNAGAAW; PAM sequence: AAAGAAA
actccaccttaaaaaaaaaa

SEQ ID NO: 7218 - DNA, 20 bp, Artificial Sequence
  Description of Artificial Sequence: Synthetic oligonucleotide
  Target: ATXN2; (+) strand; PAM type: NNAGAAW; PAM sequence: AGAGAAA
gcaggactctatctcttaaa

SEQ ID NO: 7219 - DNA, 20 bp, Artificial Sequence
  Description of Artificial Sequence: Synthetic oligonucleotide
  Target: ATXN2; (+) strand; PAM type: NNAGAAW; PAM sequence: ACAGAAT
aaaaaaaaaaaaaaatgtag

SEQ ID NO: 7220 - DNA, 20 bp, Artificial Sequence
  Description of Artificial Sequence: Synthetic oligonucleotide
  Target: ATXN2; (+) strand; PAM type: NNAGAAW; PAM sequence: GAAGAAA
aaaatgtagacagaatgatg

SEQ ID NO: 7221 - DNA, 20 bp, Artificial Sequence
  Description of Artificial Sequence: Synthetic oligonucleotide
  Target: ATXN2; (+) strand; PAM type: NNAGAAW; PAM sequence: GTAGAAA
gctaaatatagtaagggaaa

SEQ ID NO: 7222 - DNA, 20 bp, Artificial Sequence
  Description of Artificial Sequence: Synthetic oligonucleotide
  Target: ATXN2; (+) strand; PAM type: NNAGAAW; PAM sequence: GAAGAAA
gtgaaaaataactttatagt

SEQ ID NO: 7223 - DNA, 20 bp, Artificial Sequence
  Description of Artificial Sequence: Synthetic oligonucleotide
  Target: ATXN2; (+) strand; PAM type: NNAGAAW; PAM sequence: TGAGAAA
cactttctgatatcatgcaa

SEQ ID NO: 7224 - DNA, 20 bp, Artificial Sequence
  Description of Artificial Sequence: Synthetic oligonucleotide
  Target: ATXN2; (+) strand; PAM type: NNAGAAW; PAM sequence: AAAGAAA
agtgtcaagtcataaaagac

SEQ ID NO: 7225 - DNA, 20 bp, Artificial Sequence
  Description of Artificial Sequence: Synthetic oligonucleotide
  Target: ATXN2; (+) strand; PAM type: NNAGAAW; PAM sequence: GTAGAAT
cgtatattccacatatatat

SEQ ID NO: 7226 - DNA, 20 bp, Artificial Sequence
  Description of Artificial Sequence: Synthetic oligonucleotide
  Target: ATXN2; (+) strand; PAM type: NNAGAAW; PAM sequence: GTAGAAT
atatatgtgtatatatatat

SEQ ID NO: 7227 - DNA, 20 bp, Artificial Sequence
  Description of Artificial Sequence: Synthetic oligonucleotide
  Target: ATXN2; (+) strand; PAM type: NNAGAAW; PAM sequence: CCAGAAA
acatatttactggttcttga

SEQ ID NO: 7228 - DNA, 20 bp, Artificial Sequence
  Description of Artificial Sequence: Synthetic oligonucleotide
  Target: ATXN2; (+) strand; PAM type: NNAGAAW; PAM sequence: ACAGAAT
ggacattagaaggtctataa

SEQ ID NO: 7229 - DNA, 20 bp, Artificial Sequence
  Description of Artificial Sequence: Synthetic oligonucleotide
  Target: ATXN2; (+) strand; PAM type: NNAGAAW; PAM sequence: ATAGAAT
aactgtactgtggttttgaa

SEQ ID NO: 7230 - DNA, 20 bp, Artificial Sequence
  Description of Artificial Sequence: Synthetic oligonucleotide
  Target: ATXN2; (+) strand; PAM type: NNAGAAW; PAM sequence: TAAGAAT
catgtctctcatatgtttaa

SEQ ID NO: 7231 - DNA, 20 bp, Artificial Sequence
  Description of Artificial Sequence: Synthetic oligonucleotide
  Target: ATXN2; (+) strand; PAM type: NNAGAAW; PAM sequence: AGAGAAA
acatatacaattaccaatac

SEQ ID NO: 7232 - DNA, 20 bp, Artificial Sequence
  Description of Artificial Sequence: Synthetic oligonucleotide
  Target: ATXN2; (+) strand; PAM type: NNAGAAW; PAM sequence: GAAGAAT
aatatggtaaaatgttactt

SEQ ID NO: 7233 - DNA, 20 bp, Artificial Sequence
  Description of Artificial Sequence: Synthetic oligonucleotide
  Target: ATXN2; (+) strand; PAM type: NNAGAAW; PAM sequence: GGAGAAT
gaatacaggtgagatatata

SEQ ID NO: 7234 - DNA, 20 bp, Artificial Sequence
  Description of Artificial Sequence: Synthetic oligonucleotide
  Target: ATXN2; (+) strand; PAM type: NNAGAAW; PAM sequence: TCAGAAA
atattatgcttctgtgaaaa

SEQ ID NO: 7235 - DNA, 20 bp, Artificial Sequence
  Description of Artificial Sequence: Synthetic oligonucleotide
  Target: ATXN2; (+) strand; PAM type: NNAGAAW; PAM sequence: AAAGAAA
caaaggcacattgtgtggcc

SEQ ID NO: 7236 - DNA, 20 bp, Artificial Sequence
  Description of Artificial Sequence: Synthetic oligonucleotide
  Target: ATXN2; (+) strand; PAM type: NNAGAAW; PAM sequence: AAAGAAA
cagcccaatcagaacaaggg

SEQ ID NO: 7237 - DNA, 20 bp, Artificial Sequence
  Description of Artificial Sequence: Synthetic oligonucleotide
  Target: ATXN2; (+) strand; PAM type: NNAGAAW; PAM sequence: AAAGAAA
agaacaagggaaagaaaaaa

SEQ ID NO: 7238 - DNA, 20 bp, Artificial Sequence
  Description of Artificial Sequence: Synthetic oligonucleotide
  Target: ATXN2; (+) strand; PAM type: NNAGAAW; PAM sequence: TAAGAAT
ttttggtctggcttctgggc

SEQ ID NO: 7239 - DNA, 20 bp, Artificial Sequence
  Description of Artificial Sequence: Synthetic oligonucleotide
  Target: ATXN2; (+) strand; PAM type: NNAGAAW; PAM sequence: GAAGAAA
agtttgcccatcctcacact

SEQ ID NO: 7240 - DNA, 20 bp, Artificial Sequence
  Description of Artificial Sequence: Synthetic oligonucleotide
  Target: ATXN2; (+) strand; PAM type: NNAGAAW; PAM sequence: TAAGAAA
catgaagttttatgtacata

SEQ ID NO: 7241 - DNA, 20 bp, Artificial Sequence
  Description of Artificial Sequence: Synthetic oligonucleotide
  Target: ATXN2; (+) strand; PAM type: NNAGAAW; PAM sequence: AAAGAAA
ttacaataattgtaaataat

SEQ ID NO: 7242 - DNA, 20 bp, Artificial Sequence
  Description of Artificial Sequence: Synthetic oligonucleotide
  Target: ATXN2; (+) strand; PAM type: NNAGAAW; PAM sequence: CGAGAAT
ctactcagtaagctgaggca

SEQ ID NO: 7243 - DNA, 20 bp, Artificial Sequence
  Description of Artificial Sequence: Synthetic oligonucleotide
  Target: ATXN2; (+) strand; PAM type: NNAGAAW; PAM sequence: CAAGAAT
tgttttcataactgctaaca

SEQ ID NO: 7244 - DNA, 20 bp, Artificial Sequence
  Description of Artificial Sequence: Synthetic oligonucleotide
  Target: ATXN2; (+) strand; PAM type: NNAGAAW; PAM sequence: TAAGAAA
gacgtttaagccattttatt

SEQ ID NO: 7245 - DNA, 20 bp, Artificial Sequence
  Description of Artificial Sequence: Synthetic oligonucleotide
  Target: ATXN2; (+) strand; PAM type: NNAGAAW; PAM sequence: GGAGAAA
aagaccagcctgaccaacat

SEQ ID NO: 7246 - DNA, 20 bp, Artificial Sequence
  Description of Artificial Sequence: Synthetic oligonucleotide
  Target: ATXN2; (+) strand; PAM type: NNAGAAW; PAM sequence: GGAGAAT
ctactcaggaggctgaggca

SEQ ID NO: 7247 - DNA, 20 bp, Artificial Sequence
  Description of Artificial Sequence: Synthetic oligonucleotide
  Target: ATXN2; (+) strand; PAM type: NNAGAAW; PAM sequence: AAAGAAA
aaaaactccatctcaaaaaa

SEQ ID NO: 7248 - DNA, 20 bp, Artificial Sequence
  Description of Artificial Sequence: Synthetic oligonucleotide
  Target: ATXN2; (+) strand; PAM type: NNAGAAW; PAM sequence: AAAGAAA
aaaaaaaaagaaaaaaaaaa

SEQ ID NO: 7249 - DNA, 20 bp, Artificial Sequence
  Description of Artificial Sequence: Synthetic oligonucleotide
  Target: ATXN2; (+) strand; PAM type: NNAGAAW; PAM sequence: TGAGAAT
ttcaccattctagatgccac

SEQ ID NO: 7250 - DNA, 20 bp, Artificial Sequence
  Description of Artificial Sequence: Synthetic oligonucleotide
  Target: ATXN2; (+) strand; PAM type: NNAGAAW; PAM sequence: GTAGAAA
cgctaatttttgtattttta

SEQ ID NO: 7251 - DNA, 20 bp, Artificial Sequence
  Description of Artificial Sequence: Synthetic oligonucleotide
  Target: ATXN2; (+) strand; PAM type: NNAGAAW; PAM sequence: AAAGAAA
gttgcttctcatggataagc

SEQ ID NO: 7252 - DNA, 20 bp, Artificial Sequence
  Description of Artificial Sequence: Synthetic oligonucleotide
  Target: ATXN2; (+) strand; PAM type: NNAGAAW; PAM sequence: CCAGAAA
aacaaaagattatgaatatt

SEQ ID NO: 7253 - DNA, 20 bp, Artificial Sequence
  Description of Artificial Sequence: Synthetic oligonucleotide
  Target: ATXN2; (+) strand; PAM type: NNAGAAW; PAM sequence: GGAGAAT
atactcaggaggctgaggca

SEQ ID NO: 7254 - DNA, 20 bp, Artificial Sequence
  Description of Artificial Sequence: Synthetic oligonucleotide
  Target: ATXN2; (+) strand; PAM type: NNAGAAW; PAM sequence: AGAGAAT
ctactcatgaggctgacaca

SEQ ID NO: 7255 - DNA, 20 bp, Artificial Sequence
  Description of Artificial Sequence: Synthetic oligonucleotide
  Target: ATXN2; (+) strand; PAM type: NNAGAAW; PAM sequence: TAAGAAT
ctgaaaaacattaaataatc

SEQ ID NO: 7256 - DNA, 20 bp, Artificial Sequence
  Description of Artificial Sequence: Synthetic oligonucleotide
  Target: ATXN2; (+) strand; PAM type: NNAGAAW; PAM sequence: GGAGAAT
ctactcaggaggctgaggca

SEQ ID NO: 7257 - DNA, 20 bp, Artificial Sequence
  Description of Artificial Sequence: Synthetic oligonucleotide
  Target: ATXN2; (+) strand; PAM type: NNAGAAW; PAM sequence: GGAGAAA
aaaacaaaaaaaaaaactgg

SEQ ID NO: 7258 - DNA, 20 bp, Artificial Sequence
  Description of Artificial Sequence: Synthetic oligonucleotide
  Target: ATXN2; (+) strand; PAM type: NNAGAAW; PAM sequence: CTAGAAT
tatttcattgatccaggttt

SEQ ID NO: 7259 - DNA, 20 bp, Artificial Sequence
  Description of Artificial Sequence: Synthetic oligonucleotide
  Target: ATXN2; (+) strand; PAM type: NNAGAAW; PAM sequence: TAAGAAT
acccccttccagtaaaactg

SEQ ID NO: 7260 - DNA, 20 bp, Artificial Sequence
  Description of Artificial Sequence: Synthetic oligonucleotide
  Target: ATXN2; (+) strand; PAM type: NNAGAAW; PAM sequence: CTAGAAA
gttagacaattaactaaaat

SEQ ID NO: 7261 - DNA, 20 bp, Artificial Sequence
  Description of Artificial Sequence: Synthetic oligonucleotide
  Target: ATXN2; (+) strand; PAM type: NNAGAAW; PAM sequence: TTAGAAA
tgttgttgtttacattatta

SEQ ID NO: 7262 - DNA, 20 bp, Artificial Sequence
  Description of Artificial Sequence: Synthetic oligonucleotide
  Target: ATXN2; (+) strand; PAM type: NNAGAAW; PAM sequence: AAAGAAA
atgaaaatagtaccttctca

SEQ ID NO: 7263 - DNA, 20 bp, Artificial Sequence
  Description of Artificial Sequence: Synthetic oligonucleotide
  Target: ATXN2; (+) strand; PAM type: NNAGAAW; PAM sequence: GGAGAAA
gcatacactagagtagtaaa

SEQ ID NO: 7264 - DNA, 20 bp, Artificial Sequence
  Description of Artificial Sequence: Synthetic oligonucleotide
  Target: ATXN2; (+) strand; PAM type: NNAGAAW; PAM sequence: ACAGAAA
catggcgaaatctcgtctct

SEQ ID NO: 7265 - DNA, 20 bp, Artificial Sequence
  Description of Artificial Sequence: Synthetic oligonucleotide
  Target: ATXN2; (+) strand; PAM type: NNAGAAW; PAM sequence: AGAGAAA
tttaccccttgagtccctct

SEQ ID NO: 7266 - DNA, 20 bp, Artificial Sequence
  Description of Artificial Sequence: Synthetic oligonucleotide
  Target: ATXN2; (+) strand; PAM type: NNAGAAW; PAM sequence: GTAGAAA
aaaaaatccaaacaactcag

SEQ ID NO: 7267 - DNA, 20 bp, Artificial Sequence
  Description of Artificial Sequence: Synthetic oligonucleotide
  Target: ATXN2; (+) strand; PAM type: NNAGAAW; PAM sequence: CAAGAAT
atcacctctgacttatgcac

SEQ ID NO: 7268 - DNA, 20 bp, Artificial Sequence
  Description of Artificial Sequence: Synthetic oligonucleotide
  Target: ATXN2; (+) strand; PAM type: NNAGAAW; PAM sequence: GAAGAAA
tccatcccctttttacaggg

SEQ ID NO: 7269 - DNA, 20 bp, Artificial Sequence
  Description of Artificial Sequence: Synthetic oligonucleotide
  Target: ATXN2; (+) strand; PAM type: NNAGAAW; PAM sequence: AAAGAAA
ataggaatactgacctgtaa

SEQ ID NO: 7270 - DNA, 20 bp, Artificial Sequence
  Description of Artificial Sequence: Synthetic oligonucleotide
  Target: ATXN2; (+) strand; PAM type: NNAGAAW; PAM sequence: TAAGAAA
tatagtaagctactactgaa

SEQ ID NO: 7271 - DNA, 20 bp, Artificial Sequence
  Description of Artificial Sequence: Synthetic oligonucleotide
  Target: ATXN2; (+) strand; PAM type: NNAGAAW; PAM sequence: TTAGAAT
ctacaggaagtttttaatta

SEQ ID NO: 7272 - DNA, 20 bp, Artificial Sequence
  Description of Artificial Sequence: Synthetic oligonucleotide
  Target: ATXN2; (+) strand; PAM type: NNAGAAW; PAM sequence: TCAGAAA
agagttaatgggaaacatga

SEQ ID NO: 7273 - DNA, 20 bp, Artificial Sequence
  Description of Artificial Sequence: Synthetic oligonucleotide
  Target: ATXN2; (+) strand; PAM type: NNAGAAW; PAM sequence: TCAGAAT
attttcacatggcttaaagc

SEQ ID NO: 7274 - DNA, 20 bp, Artificial Sequence
  Description of Artificial Sequence: Synthetic oligonucleotide
  Target: ATXN2; (+) strand; PAM type: NNAGAAW; PAM sequence: GGAGAAT
ttactcgggaagctgagaca

SEQ ID NO: 7275 - DNA, 20 bp, Artificial Sequence
  Description of Artificial Sequence: Synthetic oligonucleotide
  Target: ATXN2; (+) strand; PAM type: NNAGAAW; PAM sequence: AAAGAAA
aaggggcttttaaaatatgt

SEQ ID NO: 7276 - DNA, 20 bp, Artificial Sequence
  Description of Artificial Sequence: Synthetic oligonucleotide
  Target: ATXN2; (+) strand; PAM type: NNAGAAW; PAM sequence: AAAGAAA
cccccatctctactaaatac

SEQ ID NO: 7277 - DNA, 20 bp, Artificial Sequence
  Description of Artificial Sequence: Synthetic oligonucleotide
  Target: ATXN2; (+) strand; PAM type: NNAGAAW; PAM sequence: GGAGAAT
ctacttgagaggctgaggca

SEQ ID NO: 7278 - DNA, 20 bp, Artificial Sequence
  Description of Artificial Sequence: Synthetic oligonucleotide
  Target: ATXN2; (+) strand; PAM type: NNAGAAW; PAM sequence: ATAGAAA
gacaggccttggattaggtc

SEQ ID NO: 7279 - DNA, 20 bp, Artificial Sequence
  Description of Artificial Sequence: Synthetic oligonucleotide
  Target: ATXN2; (+) strand; PAM type: NNAGAAW; PAM sequence: TAAGAAT
aattaatgtatcgcagtaat

SEQ ID NO: 7280 - DNA, 20 bp, Artificial Sequence
  Description of Artificial Sequence: Synthetic oligonucleotide
  Target: ATXN2; (+) strand; PAM type: NNAGAAW; PAM sequence: CAAGAAT
caaataaataacagcatagc

SEQ ID NO: 7281 - DNA, 20 bp, Artificial Sequence
  Description of Artificial Sequence: Synthetic oligonucleotide
  Target: ATXN2; (+) strand; PAM type: NNAGAAW; PAM sequence: GCAGAAA
atctgccaaaatagggagct

SEQ ID NO: 7282 - DNA, 20 bp, Artificial Sequence
  Description of Artificial Sequence: Synthetic oligonucleotide
  Target: ATXN2; (+) strand; PAM type: NNAGAAW; PAM sequence: GAAGAAA
ggactaaagcatggttgatt

SEQ ID NO: 7283 - DNA, 20 bp, Artificial Sequence
  Description of Artificial Sequence: Synthetic oligonucleotide
  Target: ATXN2; (+) strand; PAM type: NNAGAAW; PAM sequence: CCAGAAA
ctttcttttttttttttttt

SEQ ID NO: 7284 - DNA, 20 bp, Artificial Sequence
  Description of Artificial Sequence: Synthetic oligonucleotide
  Target: ATXN2; (+) strand; PAM type: NNAGAAW; PAM sequence: TCAGAAA
ggccactactaccacttggc

SEQ ID NO: 7285 - DNA, 20 bp, Artificial Sequence
  Description of Artificial Sequence: Synthetic oligonucleotide
  Target: ATXN2; (+) strand; PAM type: NNAGAAW; PAM sequence: ATAGAAA
tattttctgaaatgttttat

SEQ ID NO: 7286 - DNA, 20 bp, Artificial Sequence
  Description of Artificial Sequence: Synthetic oligonucleotide
  Target: ATXN2; (+) strand; PAM type: NNAGAAW; PAM sequence: GGAGAAT
ctactcgggaggtggaggca

SEQ ID NO: 7287 - DNA, 20 bp, Artificial Sequence
  Description of Artificial Sequence: Synthetic oligonucleotide
  Target: ATXN2; (+) strand; PAM type: NNAGAAW; PAM sequence: CTAGAAT
tcccttggcttcccaaagtg

SEQ ID NO: 7288 - DNA, 20 bp, Artificial Sequence
  Description of Artificial Sequence: Synthetic oligonucleotide
  Target: ATXN2; (+) strand; PAM type: NNAGAAW; PAM sequence: AAAGAAA
ctcaagttcctggttgatta

SEQ ID NO: 7289 - DNA, 20 bp, Artificial Sequence
  Description of Artificial Sequence: Synthetic oligonucleotide
  Target: ATXN2; (+) strand; PAM type: NNAGAAW; PAM sequence: GGAGAAT
atgagattatgtatgccctg

SEQ ID NO: 7290 - DNA, 20 bp, Artificial Sequence
  Description of Artificial Sequence: Synthetic oligonucleotide
  Target: ATXN2; (+) strand; PAM type: NNAGAAW; PAM sequence: TCAGAAA
atcaatttttcaagctgagg

SEQ ID NO: 7291 - DNA, 20 bp, Artificial Sequence
  Description of Artificial Sequence: Synthetic oligonucleotide
  Target: ATXN2; (+) strand; PAM type: NNAGAAW; PAM sequence: GGAGAAT
ctacttgggaggctaagaca

SEQ ID NO: 7292 - DNA, 20 bp, Artificial Sequence
  Description of Artificial Sequence: Synthetic oligonucleotide
  Target: ATXN2; (+) strand; PAM type: NNAGAAW; PAM sequence: TGAGAAT
gtcgaggtaggcggatcact

SEQ ID NO: 7293 - DNA, 20 bp, Artificial Sequence
  Description of Artificial Sequence: Synthetic oligonucleotide
  Target: ATXN2; (+) strand; PAM type: NNAGAAW; PAM sequence: GGAGAAT
ctacttgggaggctgaggca

SEQ ID NO: 7294 - DNA, 20 bp, Artificial Sequence
  Description of Artificial Sequence: Synthetic oligonucleotide
  Target: ATXN2; (+) strand; PAM type: NNAGAAW; PAM sequence: AAAGAAA
gttaaggtaaatttactctt

SEQ ID NO: 7295 - DNA, 20 bp, Artificial Sequence
  Description of Artificial Sequence: Synthetic oligonucleotide
  Target: ATXN2; (+) strand; PAM type: NNAGAAW; PAM sequence: GCAGAAA
ccacagtgaactttctgtct

SEQ ID NO: 7296 - DNA, 20 bp, Artificial Sequence
  Description of Artificial Sequence: Synthetic oligonucleotide
  Target: ATXN2; (+) strand; PAM type: NNAGAAW; PAM sequence: GGAGAAT
ctattcaggaggttgaggca

SEQ ID NO: 7297 - DNA, 20 bp, Artificial Sequence
  Description of Artificial Sequence: Synthetic oligonucleotide
  Target: ATXN2; (+) strand; PAM type: NNAGAAW; PAM sequence: TAAGAAA
ctccatctcaaaaaacaaaa

SEQ ID NO: 7298 - DNA, 20 bp, Artificial Sequence
  Description of Artificial Sequence: Synthetic oligonucleotide
  Target: ATXN2; (+) strand; PAM type: NNAGAAW; PAM sequence: AAAGAAA
aaattcatacactgctaggg

SEQ ID NO: 7299 - DNA, 20 bp, Artificial Sequence
  Description of Artificial Sequence: Synthetic oligonucleotide
  Target: ATXN2; (+) strand; PAM type: NNAGAAW; PAM sequence: AGAGAAA
atttctatgcattccaacca

SEQ ID NO: 7300 - DNA, 20 bp, Artificial Sequence
  Description of Artificial Sequence: Synthetic oligonucleotide
  Target: ATXN2; (+) strand; PAM type: NNAGAAW; PAM sequence: GCAGAAA
agactactactcaacaataa

SEQ ID NO: 7301 - DNA, 20 bp, Artificial Sequence
  Description of Artificial Sequence: Synthetic oligonucleotide
  Target: ATXN2; (+) strand; PAM type: NNAGAAW; PAM sequence: AAAGAAA
tactactcaacaataagcag

SEQ ID NO: 7302 - DNA, 20 bp, Artificial Sequence
  Description of Artificial Sequence: Synthetic oligonucleotide
  Target: ATXN2; (+) strand; PAM type: NNAGAAW; PAM sequence: ACAGAAA
accaatgctcctctctgcag

SEQ ID NO: 7303 - DNA, 20 bp, Artificial Sequence
  Description of Artificial Sequence: Synthetic oligonucleotide
  Target: ATXN2; (+) strand; PAM type: NNAGAAW; PAM sequence: GAAGAAA
tgtggttaggagttaaatgg

SEQ ID NO: 7304 - DNA, 20 bp, Artificial Sequence
  Description of Artificial Sequence: Synthetic oligonucleotide
  Target: ATXN2; (+) strand; PAM type: NNAGAAW; PAM sequence: TAAGAAA
tatctccgaaaaattaaaaa

SEQ ID NO: 7305 - DNA, 20 bp, Artificial Sequence
  Description of Artificial Sequence: Synthetic oligonucleotide
  Target: ATXN2; (+) strand; PAM type: NNAGAAW; PAM sequence: CAAGAAT
atgggatgattgcttgagcc

SEQ ID NO: 7306 - DNA, 20 bp, Artificial Sequence
  Description of Artificial Sequence: Synthetic oligonucleotide
  Target: ATXN2; (+) strand; PAM type: NNAGAAW; PAM sequence: AAAGAAA
aggaagattctgtctccaaa

SEQ ID NO: 7307 - DNA, 20 bp, Artificial Sequence
  Description of Artificial Sequence: Synthetic oligonucleotide
  Target: ATXN2; (+) strand; PAM type: NNAGAAW; PAM sequence: GCAGAAT
tagtcccagctactaaggag

SEQ ID NO: 7308 - DNA, 20 bp, Artificial Sequence
  Description of Artificial Sequence: Synthetic oligonucleotide
  Target: ATXN2; (+) strand; PAM type: NNAGAAW; PAM sequence: AGAGAAA
gaggaagggttgggagagac

SEQ ID NO: 7309 - DNA, 20 bp, Artificial Sequence
  Description of Artificial Sequence: Synthetic oligonucleotide
  Target: ATXN2; (+) strand; PAM type: NNAGAAW; PAM sequence: AAAGAAA
aagggttgggagagacagag

SEQ ID NO: 7310 - DNA, 20 bp, Artificial Sequence
  Description of Artificial Sequence: Synthetic oligonucleotide
  Target: ATXN2; (+) strand; PAM type: NNAGAAW; PAM sequence: AAAGAAA
tgggagagacagagaaagaa

SEQ ID NO: 7311 - DNA, 20 bp, Artificial Sequence
  Description of Artificial Sequence: Synthetic oligonucleotide
  Target: ATXN2; (+) strand; PAM type: NNAGAAW; PAM sequence: AGAGAAA
gaaaggaaaaaataaaaagg

SEQ ID NO: 7312 - DNA, 20 bp, Artificial Sequence
  Description of Artificial Sequence: Synthetic oligonucleotide
  Target: ATXN2; (+) strand; PAM type: NNAGAAW; PAM sequence: AGAGAAA
aaaaaggagaggagggatga

SEQ ID NO: 7313 - DNA, 20 bp, Artificial Sequence
  Description of Artificial Sequence: Synthetic oligonucleotide
  Target: ATXN2; (+) strand; PAM type: NNAGAAW; PAM sequence: AAAGAAA
aggagaggagggatgaagag

SEQ ID NO: 7314 - DNA, 20 bp, Artificial Sequence
  Description of Artificial Sequence: Synthetic oligonucleotide
  Target: ATXN2; (+) strand; PAM type: NNAGAAW; PAM sequence: AAAGAAA
agagaaagaaaggaaacgac

SEQ ID NO: 7315 - DNA, 20 bp, Artificial Sequence
  Description of Artificial Sequence: Synthetic oligonucleotide
  Target: ATXN2; (+) strand; PAM type: NNAGAAW; PAM sequence: AAAGAAA
tctcaaaaaaaaaaaaaaaa

SEQ ID NO: 7316 - DNA, 20 bp, Artificial Sequence
  Description of Artificial Sequence: Synthetic oligonucleotide
  Target: ATXN2; (+) strand; PAM type: NNAGAAW; PAM sequence: TTAGAAA
aaaaaaaaaaaagaaatgta

SEQ ID NO: 7317 - DNA, 20 bp, Artificial Sequence
  Description of Artificial Sequence: Synthetic oligonucleotide
  Target: ATXN2; (+) strand; PAM type: NNAGAAW; PAM sequence: ATAGAAT
ctcaatttcttcacccgtaa

SEQ ID NO: 7318 - DNA, 20 bp, Artificial Sequence
  Description of Artificial Sequence: Synthetic oligonucleotide
  Target: ATXN2; (+) strand; PAM type: NNAGAAW; PAM sequence: AGAGAAA
actaaaaaaccaccagagcc

SEQ ID NO: 7319 - DNA, 20 bp, Artificial Sequence
  Description of Artificial Sequence: Synthetic oligonucleotide
  Target: ATXN2; (+) strand; PAM type: NNAGAAW; PAM sequence: GAAGAAT
gtgccaagaacagaacataa

SEQ ID NO: 7320 - DNA, 20 bp, Artificial Sequence
  Description of Artificial Sequence: Synthetic oligonucleotide
  Target: ATXN2; (+) strand; PAM type: NNAGAAW; PAM sequence: GCAGAAA
ggaggtggaggttagagtga

SEQ ID NO: 7321 - DNA, 20 bp, Artificial Sequence
  Description of Artificial Sequence: Synthetic oligonucleotide
  Target: ATXN2; (+) strand; PAM type: NNAGAAW; PAM sequence: ACAGAAA
caaaaaataaatacataaaa

SEQ ID NO: 7322 - DNA, 20 bp, Artificial Sequence
  Description of Artificial Sequence: Synthetic oligonucleotide
  Target: ATXN2; (+) strand; PAM type: NNAGAAW; PAM sequence: CAAGAAA
gcagttaagtgccaaccatt

SEQ ID NO: 7323 - DNA, 20 bp, Artificial Sequence
  Description of Artificial Sequence: Synthetic oligonucleotide
  Target: ATXN2; (+) strand; PAM type: NNAGAAW; PAM sequence: GGAGAAT
ctattcaggaggctgaggca

SEQ ID NO: 7324 - DNA, 20 bp, Artificial Sequence
  Description of Artificial Sequence: Synthetic oligonucleotide
  Target: ATXN2; (+) strand; PAM type: NNAGAAW; PAM sequence: GGAGAAA
aagaccagcctgaccaacat

SEQ ID NO: 7325 - DNA, 20 bp, Artificial Sequence
  Description of Artificial Sequence: Synthetic oligonucleotide
  Target: ATXN2; (+) strand; PAM type: NNAGAAW; PAM sequence: GGAGAAT
ctactcaggaggctgaggta

SEQ ID NO: 7326 - DNA, 20 bp, Artificial Sequence
  Description of Artificial Sequence: Synthetic oligonucleotide
  Target: ATXN2; (+) strand; PAM type: NNAGAAW; PAM sequence: CCAGAAT
aaaaaaaaaaaaaaaacctc

SEQ ID NO: 7327 - DNA, 20 bp, Artificial Sequence
  Description of Artificial Sequence: Synthetic oligonucleotide
  Target: ATXN2; (+) strand; PAM type: NNAGAAW; PAM sequence: CCAGAAT
atggggtttcaccctgttgg

SEQ ID NO: 7328 - DNA, 20 bp, Artificial Sequence
  Description of Artificial Sequence: Synthetic oligonucleotide
  Target: ATXN2; (+) strand; PAM type: NNAGAAW; PAM sequence: TCAGAAA
acttgctgccaatatgtaca

SEQ ID NO: 7329 - DNA, 20 bp, Artificial Sequence
  Description of Artificial Sequence: Synthetic oligonucleotide
  Target: ATXN2; (+) strand; PAM type: NNAGAAW; PAM sequence: AAAGAAA
ctgccaatatgtacatcaga

SEQ ID NO: 7330 - DNA, 20 bp, Artificial Sequence
  Description of Artificial Sequence: Synthetic oligonucleotide
  Target: ATXN2; (+) strand; PAM type: NNAGAAW; PAM sequence: ATAGAAT
acatcagaaaagaaagctag

SEQ ID NO: 7331 - DNA, 20 bp, Artificial Sequence
  Description of Artificial Sequence: Synthetic oligonucleotide
  Target: ATXN2; (+) strand; PAM type: NNAGAAW; PAM sequence: AAAGAAA
gcaaatgtttataaacccga

SEQ ID NO: 7332 - DNA, 20 bp, Artificial Sequence
  Description of Artificial Sequence: Synthetic oligonucleotide
  Target: ATXN2; (+) strand; PAM type: NNAGAAW; PAM sequence: TTAGAAA
ataatcaagattaattccac

SEQ ID NO: 7333 - DNA, 20 bp, Artificial Sequence
  Description of Artificial Sequence: Synthetic oligonucleotide
  Target: ATXN2; (+) strand; PAM type: NNAGAAW; PAM sequence: TAAGAAT
attccacttagaaaaattat

SEQ ID NO: 7334 - DNA, 20 bp, Artificial Sequence
  Description of Artificial Sequence: Synthetic oligonucleotide
  Target: ATXN2; (+) strand; PAM type: NNAGAAW; PAM sequence: ATAGAAT
agttttacaaagacttcatt

SEQ ID NO: 7335 - DNA, 20 bp, Artificial Sequence
  Description of Artificial Sequence: Synthetic oligonucleotide
  Target: ATXN2; (+) strand; PAM type: NNAGAAW; PAM sequence: TAAGAAT
aaaattacaagcaatctatg

SEQ ID NO: 7336 - DNA, 20 bp, Artificial Sequence
  Description of Artificial Sequence: Synthetic oligonucleotide
  Target: ATXN2; (+) strand; PAM type: NNAGAAW; PAM sequence: TGAGAAT
taagaatctttaaatgttaa

SEQ ID NO: 7337 - DNA, 20 bp, Artificial Sequence
  Description of Artificial Sequence: Synthetic oligonucleotide
  Target: ATXN2; (+) strand; PAM type: NNAGAAW; PAM sequence: GCAGAAA
cagctactcaggaggctgag

SEQ ID NO: 7338 - DNA, 20 bp, Artificial Sequence
  Description of Artificial Sequence: Synthetic oligonucleotide
  Target: ATXN2; (+) strand; PAM type: NNAGAAW; PAM sequence: AAAGAAA
gagactccgtctcggaaaaa

SEQ ID NO: 7339 - DNA, 20 bp, Artificial Sequence
  Description of Artificial Sequence: Synthetic oligonucleotide
  Target: ATXN2; (+) strand; PAM type: NNAGAAW; PAM sequence: GGAGAAT
ctactcgggaggctgaggca

SEQ ID NO: 7340 - DNA, 20 bp, Artificial Sequence
  Description of Artificial Sequence: Synthetic oligonucleotide
  Target: ATXN2; (+) strand; PAM type: NNAGAAW; PAM sequence: TGAGAAT
ctactcgggaggctgaggca

SEQ ID NO: 7341 - DNA, 20 bp, Artificial Sequence
  Description of Artificial Sequence: Synthetic oligonucleotide
  Target: ATXN2; (+) strand; PAM type: NNAGAAW; PAM sequence: GGAGAAT
ctactcaggaggctgaggca

SEQ ID NO: 7342 - DNA, 20 bp, Artificial Sequence
  Description of Artificial Sequence: Synthetic oligonucleotide
  Target: ATXN2; (+) strand; PAM type: NNAGAAW; PAM sequence: AAAGAAA
gaaccacatacattaaaaac

SEQ ID NO: 7343 - DNA, 20 bp, Artificial Sequence
  Description of Artificial Sequence: Synthetic oligonucleotide
  Target: ATXN2; (+) strand; PAM type: NNAGAAW; PAM sequence: AAAGAAA
acatacattaaaaacaaaga

SEQ ID NO: 7344 - DNA, 20 bp, Artificial Sequence
  Description of Artificial Sequence: Synthetic oligonucleotide
  Target: ATXN2; (+) strand; PAM type: NNAGAAW; PAM sequence: GGAGAAT
ctacatgggaggctaaggca

SEQ ID NO: 7345 - DNA, 20 bp, Artificial Sequence
  Description of Artificial Sequence: Synthetic oligonucleotide
  Target: ATXN2; (+) strand; PAM type: NNAGAAW; PAM sequence: TGAGAAT
tgtaggttgtatgctcttta

SEQ ID NO: 7346 - DNA, 20 bp, Artificial Sequence
  Description of Artificial Sequence: Synthetic oligonucleotide
  Target: ATXN2; (+) strand; PAM type: NNAGAAW; PAM sequence: GGAGAAA
ctactcaggaggctaagaca

SEQ ID NO: 7347 - DNA, 20 bp, Artificial Sequence
  Description of Artificial Sequence: Synthetic oligonucleotide
  Target: ATXN2; (+) strand; PAM type: NNAGAAW; PAM sequence: GGAGAAT
ctactcagaaggctgaggca

SEQ ID NO: 7348 - DNA, 20 bp, Artificial Sequence
  Description of Artificial Sequence: Synthetic oligonucleotide
  Target: ATXN2; (+) strand; PAM type: NNAGAAW; PAM sequence: GGAGAAT
tattcgggagggctaaggca

SEQ ID NO: 7349 - DNA, 20 bp, Artificial Sequence
  Description of Artificial Sequence: Synthetic oligonucleotide
  Target: ATXN2; (+) strand; PAM type: NNAGAAW; PAM sequence: GGAGAAT
ctactcaggaggctgaggca

SEQ ID NO: 7350 - DNA, 20 bp, Artificial Sequence
  Description of Artificial Sequence: Synthetic oligonucleotide
  Target: ATXN2; (+) strand; PAM type: NNAGAAW; PAM sequence: ACAGAAA
aaatactatcactagtcaaa

SEQ ID NO: 7351 - DNA, 20 bp, Artificial Sequence
  Description of Artificial Sequence: Synthetic oligonucleotide
  Target: ATXN2; (+) strand; PAM type: NNAGAAW; PAM sequence: TCAGAAT
gatcccatgttttcactgtt

SEQ ID NO: 7352 - DNA, 20 bp, Artificial Sequence
  Description of Artificial Sequence: Synthetic oligonucleotide
  Target: ATXN2; (+) strand; PAM type: NNAGAAW; PAM sequence: AAAGAAA
tttttctcttaaaaaaaaaa

SEQ ID NO: 7353 - DNA, 20 bp, Artificial Sequence
  Description of Artificial Sequence: Synthetic oligonucleotide
  Target: ATXN2; (+) strand; PAM type: NNAGAAW; PAM sequence: AAAGAAA
tcttaaaaaaaaaaaaagaa

SEQ ID NO: 7354 - DNA, 20 bp, Artificial Sequence
  Description of Artificial Sequence: Synthetic oligonucleotide
  Target: ATXN2; (+) strand; PAM type: NNAGAAW; PAM sequence: AAAGAAA
aaaaaaaaaaagaaaaagaa

SEQ ID NO: 7355 - DNA, 20 bp, Artificial Sequence
  Description of Artificial Sequence: Synthetic oligonucleotide
  Target: ATXN2; (+) strand; PAM type: NNAGAAW; PAM sequence: AAAGAAA
aggtaaaatacgtaagccca

SEQ ID NO: 7356 - DNA, 20 bp, Artificial Sequence
  Description of Artificial Sequence: Synthetic oligonucleotide
  Target: ATXN2; (+) strand; PAM type: NNAGAAW; PAM sequence: AAAGAAT
ttagtatcaatgtgcacata

SEQ ID NO: 7357 - DNA, 20 bp, Artificial Sequence
  Description of Artificial Sequence: Synthetic oligonucleotide
  Target: ATXN2; (+) strand; PAM type: NNAGAAW; PAM sequence: TTAGAAT
tcattgtctgcctagtcaca

SEQ ID NO: 7358 - DNA, 20 bp, Artificial Sequence
  Description of Artificial Sequence: Synthetic oligonucleotide
  Target: ATXN2; (+) strand; PAM type: NNAGAAW; PAM sequence: AGAGAAA
ttttaagttgcaatgcctca

SEQ ID NO: 7359 - DNA, 20 bp, Artificial Sequence
  Description of Artificial Sequence: Synthetic oligonucleotide
  Target: ATXN2; (+) strand; PAM type: NNAGAAW; PAM sequence: AAAGAAA
tactaagctgaaaatcacta

SEQ ID NO: 7360 - DNA, 20 bp, Artificial Sequence
  Description of Artificial Sequence: Synthetic oligonucleotide
  Target: ATXN2; (+) strand; PAM type: NNAGAAW; PAM sequence: AAAGAAA
aaaaaacactttcagatgaa

SEQ ID NO: 7361 - DNA, 20 bp, Artificial Sequence
  Description of Artificial Sequence: Synthetic oligonucleotide
  Target: ATXN2; (+) strand; PAM type: NNAGAAW; PAM sequence: AAAGAAA
cacaatatttgacaaactac

SEQ ID NO: 7362 - DNA, 20 bp, Artificial Sequence
  Description of Artificial Sequence: Synthetic oligonucleotide
  Target: ATXN2; (+) strand; PAM type: NNAGAAW; PAM sequence: AAAGAAT
ggaagtaatacaagtcttct

SEQ ID NO: 7363 - DNA, 20 bp, Artificial Sequence
  Description of Artificial Sequence: Synthetic oligonucleotide
  Target: ATXN2; (+) strand; PAM type: NNAGAAW; PAM sequence: ATAGAAT
tggaaacccaattcccaaca

SEQ ID NO: 7364 - DNA, 20 bp, Artificial Sequence
  Description of Artificial Sequence: Synthetic oligonucleotide
  Target: ATXN2; (+) strand; PAM type: NNAGAAW; PAM sequence: GGAGAAT
ctactcaagaggctgaggtg

SEQ ID NO: 7365 - DNA, 20 bp, Artificial Sequence
  Description of Artificial Sequence: Synthetic oligonucleotide
  Target: ATXN2; (+) strand; PAM type: NNAGAAW; PAM sequence: TAAGAAT
gaaaaggtaaaaagcaaaaa

SEQ ID NO: 7366 - DNA, 20 bp, Artificial Sequence
  Description of Artificial Sequence: Synthetic oligonucleotide
  Target: ATXN2; (+) strand; PAM type: NNAGAAW; PAM sequence: GGAGAAT
ctactggggaggctgaggct

SEQ ID NO: 7367 - DNA, 20 bp, Artificial Sequence
  Description of Artificial Sequence: Synthetic oligonucleotide
  Target: ATXN2; (+) strand; PAM type: NNAGAAW; PAM sequence: CAAGAAT
aagtacattaacgatctgtt

SEQ ID NO: 7368 - DNA, 20 bp, Artificial Sequence
  Description of Artificial Sequence: Synthetic oligonucleotide
  Target: ATXN2; (+) strand; PAM type: NNAGAAW; PAM sequence: TCAGAAA
aacaaaatttcacctattca

SEQ ID NO: 7369 - DNA, 20 bp, Artificial Sequence
  Description of Artificial Sequence: Synthetic oligonucleotide
  Target: ATXN2; (+) strand; PAM type: NNAGAAW; PAM sequence: AAAGAAT
aaatttcacctattcatcag

SEQ ID NO: 7370 - DNA, 20 bp, Artificial Sequence
  Description of Artificial Sequence: Synthetic oligonucleotide
  Target: ATXN2; (+) strand; PAM type: NNAGAAW; PAM sequence: ACAGAAA
ttgttgtaaagcctcaagga

SEQ ID NO: 7371 - DNA, 20 bp, Artificial Sequence
  Description of Artificial Sequence: Synthetic oligonucleotide
  Target: ATXN2; (+) strand; PAM type: NNAGAAW; PAM sequence: TAAGAAA
ccaaatctcttcctaatacc

SEQ ID NO: 7372 - DNA, 20 bp, Artificial Sequence
  Description of Artificial Sequence: Synthetic oligonucleotide
  Target: ATXN2; (+) strand; PAM type: NNAGAAW; PAM sequence: ACAGAAT
taatacctaagaaagtaaaa

SEQ ID NO: 7373 - DNA, 20 bp, Artificial Sequence
  Description of Artificial Sequence: Synthetic oligonucleotide
  Target: ATXN2; (+) strand; PAM type: NNAGAAW; PAM sequence: GCAGAAT
ttccgccccctttgaaggca

SEQ ID NO: 7374 - DNA, 20 bp, Artificial Sequence
  Description of Artificial Sequence: Synthetic oligonucleotide
  Target: ATXN2; (+) strand; PAM type: NNAGAAW; PAM sequence: AAAGAAA
tgctgaaaatgtgttttcaa

SEQ ID NO: 7375 - DNA, 20 bp, Artificial Sequence
  Description of Artificial Sequence: Synthetic oligonucleotide
  Target: ATXN2; (+) strand; PAM type: NNAGAAW; PAM sequence: CCAGAAA
ttgcccccacctgatgcaac

SEQ ID NO: 7376 - DNA, 20 bp, Artificial Sequence
  Description of Artificial Sequence: Synthetic oligonucleotide
  Target: ATXN2; (+) strand; PAM type: NNAGAAW; PAM sequence: GGAGAAT
gactgcgagtgccttggggc

SEQ ID NO: 7377 - DNA, 20 bp, Artificial Sequence
  Description of Artificial Sequence: Synthetic oligonucleotide
  Target: ATXN2; (+) strand; PAM type: NNAGAAW; PAM sequence: CCAGAAA
accccagccgcgcacagtca

SEQ ID NO: 7378 - DNA, 20 bp, Artificial Sequence
  Description of Artificial Sequence: Synthetic oligonucleotide
  Target: ATXN2; (+) strand; PAM type: NNAGAAW; PAM sequence: GTAGAAA
tgcagttaaactggaagcaa

SEQ ID NO: 7379 - DNA, 20 bp, Artificial Sequence
  Description of Artificial Sequence: Synthetic oligonucleotide
  Target: ATXN2; (+) strand; PAM type: NNAGAAW; PAM sequence: GAAGAAA
gacttcaggaaataataggg

SEQ ID NO: 7380 - DNA, 20 bp, Artificial Sequence
  Description of Artificial Sequence: Synthetic oligonucleotide
  Target: ATXN2; (+) strand; PAM type: NNAGAAW; PAM sequence: GGAGAAT
gtaaagacttagataaacgt

SEQ ID NO: 7381 - DNA, 20 bp, Artificial Sequence
  Description of Artificial Sequence: Synthetic oligonucleotide
  Target: ATXN2; (+) strand; PAM type: NNAGAAW; PAM sequence: GGAGAAT
ctactcgggaggctgataca

SEQ ID NO: 7382 - DNA, 20 bp, Artificial Sequence
  Description of Artificial Sequence: Synthetic oligonucleotide
  Target: ATXN2; (+) strand; PAM type: NNAGAAW; PAM sequence: GGAGAAA
catgggcatgaggatcctgg

SEQ ID NO: 7383 - DNA, 20 bp, Artificial Sequence
  Description of Artificial Sequence: Synthetic oligonucleotide
  Target: ATXN2; (+) strand; PAM type: NNAGAAW; PAM sequence: ATAGAAA
cccgttatattctttcttta

SEQ ID NO: 7384 - DNA, 20 bp, Artificial Sequence
  Description of Artificial Sequence: Synthetic oligonucleotide
  Target: ATXN2; (+) strand; PAM type: NNAGAAW; PAM sequence: GGAGAAT
ctacgcaggatgctgaggca

SEQ ID NO: 7385 - DNA, 20 bp, Artificial Sequence
  Description of Artificial Sequence: Synthetic oligonucleotide
  Target: ATXN2; (+) strand; PAM type: NNAGAAW; PAM sequence: CCAGAAT
ctctgattggaatcaaggtc

SEQ ID NO: 7386 - DNA, 20 bp, Artificial Sequence
  Description of Artificial Sequence: Synthetic oligonucleotide
  Target: ATXN2; (+) strand; PAM type: NNAGAAW; PAM sequence: GGAGAAT
ctacttgggaggctgaggca

SEQ ID NO: 7387 - DNA, 20 bp, Artificial Sequence
  Description of Artificial Sequence: Synthetic oligonucleotide
  Target: ATXN2; (+) strand; PAM type: NNAGAAW; PAM sequence: TGAGAAA
aggcctgaagctgacatagc

SEQ ID NO: 7388 - DNA, 20 bp, Artificial Sequence
  Description of Artificial Sequence: Synthetic oligonucleotide
  Target: ATXN2; (+) strand; PAM type: NNAGAAW; PAM sequence: GTAGAAT
tgtccagatttttcacataa

SEQ ID NO: 7389 - DNA, 20 bp, Artificial Sequence
  Description of Artificial Sequence: Synthetic oligonucleotide
  Target: ATXN2; (+) strand; PAM type: NNAGAAW; PAM sequence: GGAGAAT
ctacttgggaggctgaggca

SEQ ID NO: 7390 - DNA, 20 bp, Artificial Sequence
  Description of Artificial Sequence: Synthetic oligonucleotide
  Target: ATXN2; (+) strand; PAM type: NNAGAAW; PAM sequence: GAAGAAA
acacacacacacacaaagaa

SEQ ID NO: 7391 - DNA, 20 bp, Artificial Sequence
  Description of Artificial Sequence: Synthetic oligonucleotide
  Target: ATXN2; (+) strand; PAM type: NNAGAAW; PAM sequence: AAAGAAA
acacacacacaaagaagaag

SEQ ID NO: 7392 - DNA, 20 bp, Artificial Sequence
  Description of Artificial Sequence: Synthetic oligonucleotide
  Target: ATXN2; (+) strand; PAM type: NNAGAAW; PAM sequence: GGAGAAT
ctacttgggaggctgaggca

SEQ ID NO: 7393 - DNA, 20 bp, Artificial Sequence
  Description of Artificial Sequence: Synthetic oligonucleotide
  Target: ATXN2; (+) strand; PAM type: NNAGAAW; PAM sequence: AAAGAAA
gcgagactctgtctcaaaaa

SEQ ID NO: 7394 - DNA, 20 bp, Artificial Sequence
  Description of Artificial Sequence: Synthetic oligonucleotide
  Target: ATXN2; (+) strand; PAM type: NNAGAAW; PAM sequence: GGAGAAT
ctactcgggaggctgaggca

SEQ ID NO: 7395 - DNA, 20 bp, Artificial Sequence
  Description of Artificial Sequence: Synthetic oligonucleotide
  Target: ATXN2; (-) strand; PAM type: NNGRRT; PAM sequence: CTGGGT
ccttatgtcctgggctgagt

SEQ ID NO: 7396 - DNA, 20 bp, Artificial Sequence
  Description of Artificial Sequence: Synthetic oligonucleotide
  Target: ATXN2; (-) strand; PAM type: NNGRRT; PAM sequence: CTGAGT
gggctaccttatgtcctggg

SEQ ID NO: 7397 - DNA, 20 bp, Artificial Sequence
  Description of Artificial Sequence: Synthetic oligonucleotide
  Target: ATXN2; (-) strand; PAM type: NNGRRT; PAM sequence: ATGGGT
agaagcacctgttagataag

SEQ ID NO: 7398 - DNA, 20 bp, Artificial Sequence
  Description of Artificial Sequence: Synthetic oligonucleotide
  Target: ATXN2; (-) strand; PAM type: NNGRRT; PAM sequence: CCGGGT
atggtccgtcttctggcagg

SEQ ID NO: 7399 - DNA, 20 bp, Artificial Sequence
  Description of Artificial Sequence: Synthetic oligonucleotide
  Target: ATXN2; (-) strand; PAM type: NNGRRT; PAM sequence: AGGGGT
ggagatggggccgtggaacc

SEQ ID NO: 7400 - DNA, 20 bp, Artificial Sequence
  Description of Artificial Sequence: Synthetic oligonucleotide
  Target: ATXN2; (-) strand; PAM type: NNGRRT; PAM sequence: AGGGGT
gaccctgaactccagtggag

SEQ ID NO: 7401 - DNA, 20 bp, Artificial Sequence
  Description of Artificial Sequence: Synthetic oligonucleotide
  Target: ATXN2; (-) strand; PAM type: NNGRRT; PAM sequence: GAGGAT
gcgcaggtgctgtgggagga

SEQ ID NO: 7402 - DNA, 20 bp, Artificial Sequence
  Description of Artificial Sequence: Synthetic oligonucleotide
  Target: ATXN2; (-) strand; PAM type: NNGRRT; PAM sequence: TGGGAT
caggcggcgccgcactcgag

SEQ ID NO: 7403 - DNA, 20 bp, Artificial Sequence
  Description of Artificial Sequence: Synthetic oligonucleotide
  Target: ATXN2; (-) strand; PAM type: NNGRRT; PAM sequence: TCGAGT
catcacaggcggcgccgcac

SEQ ID NO: 7404 - DNA, 20 bp, Artificial Sequence
  Description of Artificial Sequence: Synthetic oligonucleotide
  Target: ATXN2; (-) strand; PAM type: NNGRRT; PAM sequence: TAGGGT
cccccttcagcaaagggcag

SEQ ID NO: 7405 - DNA, 20 bp, Artificial Sequence
  Description of Artificial Sequence: Synthetic oligonucleotide
  Target: ATXN2; (-) strand; PAM type: NNGRRT; PAM sequence: CTGGGT
agaacaagatacctgtaccc

SEQ ID NO: 7406 - DNA, 20 bp, Artificial Sequence
  Description of Artificial Sequence: Synthetic oligonucleotide
  Target: ATXN2; (-) strand; PAM type: NNGRRT; PAM sequence: CTGAAT
accccagtgaggaagggact

SEQ ID NO: 7407 - DNA, 20 bp, Artificial Sequence
  Description of Artificial Sequence: Synthetic oligonucleotide
  Target: ATXN2; (-) strand; PAM type: NNGRRT; PAM sequence: GAGGAT
ggaagatctgctcggggggt

SEQ ID NO: 7408 - DNA, 20 bp, Artificial Sequence
  Description of Artificial Sequence: Synthetic oligonucleotide
  Target: ATXN2; (-) strand; PAM type: NNGRRT; PAM sequence: GGGGGT
ccaggtggaagatctgctcg

SEQ ID NO: 7409 - DNA, 20 bp, Artificial Sequence
  Description of Artificial Sequence: Synthetic oligonucleotide
  Target: ATXN2; (-) strand; PAM type: NNGRRT; PAM sequence: CCGAGT
ggatgagtccatttcgtagt

SEQ ID NO: 7410 - DNA, 20 bp, Artificial Sequence
  Description of Artificial Sequence: Synthetic oligonucleotide
  Target: ATXN2; (-) strand; PAM type: NNGRRT; PAM sequence: ATGAGT
ccgcaggtggctccgggagg

SEQ ID NO: 7411 - DNA, 20 bp, Artificial Sequence
  Description of Artificial Sequence: Synthetic oligonucleotide
  Target: ATXN2; (-) strand; PAM type: NNGRRT; PAM sequence: GAGGAT
tggcccgcaggtggctccgg

SEQ ID NO: 7412 - DNA, 20 bp, Artificial Sequence
  Description of Artificial Sequence: Synthetic oligonucleotide
  Target: ATXN2; (-) strand; PAM type: NNGRRT; PAM sequence: TGGAAT
caagggcagctgttgaggcc

SEQ ID NO: 7413 - DNA, 20 bp, Artificial Sequence
  Description of Artificial Sequence: Synthetic oligonucleotide
  Target: ATXN2; (-) strand; PAM type: NNGRRT; PAM sequence: AAGGGT
cccttcaacaggcctaatag

SEQ ID NO: 7414 - DNA, 20 bp, Artificial Sequence
  Description of Artificial Sequence: Synthetic oligonucleotide
  Target: ATXN2; (-) strand; PAM type: NNGRRT; PAM sequence: GTGGAT
aacaataaggagaaagccag

SEQ ID NO: 7415 - DNA, 20 bp, Artificial Sequence
  Description of Artificial Sequence: Synthetic oligonucleotide
  Target: ATXN2; (-) strand; PAM type: NNGRRT; PAM sequence: AAGAGT
tcaccccaactcctttctct

SEQ ID NO: 7416 - DNA, 20 bp, Artificial Sequence
  Description of Artificial Sequence: Synthetic oligonucleotide
  Target: ATXN2; (-) strand; PAM type: NNGRRT; PAM sequence: CAGGAT
cctaaagctgagagtagaag

SEQ ID NO: 7417 - DNA, 20 bp, Artificial Sequence
  Description of Artificial Sequence: Synthetic oligonucleotide
  Target: ATXN2; (-) strand; PAM type: NNGRRT; PAM sequence: GAGAGT
agagcttttgtcctaaagct

SEQ ID NO: 7418 - DNA, 20 bp, Artificial Sequence
  Description of Artificial Sequence: Synthetic oligonucleotide
  Target: ATXN2; (-) strand; PAM type: NNGRRT; PAM sequence: CTGAAT
gcagtggttaagttttgaac

SEQ ID NO: 7419 - DNA, 20 bp, Artificial Sequence
  Description of Artificial Sequence: Synthetic oligonucleotide
  Target: ATXN2; (-) strand; PAM type: NNGRRT; PAM sequence: ATGGGT
tttctgactacaaaaatagc

SEQ ID NO: 7420 - DNA, 20 bp, Artificial Sequence
  Description of Artificial Sequence: Synthetic oligonucleotide
  Target: ATXN2; (-) strand; PAM type: NNGRRT; PAM sequence: TAGGGT
ggctcagactgtaaattagg

SEQ ID NO: 7421 - DNA, 20 bp, Artificial Sequence
  Description of Artificial Sequence: Synthetic oligonucleotide
  Target: ATXN2; (-) strand; PAM type: NNGRRT; PAM sequence: GAGGAT
cagtggcaggtgactgtccc

SEQ ID NO: 7422 - DNA, 20 bp, Artificial Sequence
  Description of Artificial Sequence: Synthetic oligonucleotide
  Target: ATXN2; (-) strand; PAM type: NNGRRT; PAM sequence: AAGGGT
aattgcctgaatttccctga

SEQ ID NO: 7423 - DNA, 20 bp, Artificial Sequence
  Description of Artificial Sequence: Synthetic oligonucleotide
  Target: ATXN2; (-) strand; PAM type: NNGRRT; PAM sequence: CTGAAT
cctcctatttcagtaattgc

SEQ ID NO: 7424 - DNA, 20 bp, Artificial Sequence
  Description of Artificial Sequence: Synthetic oligonucleotide
  Target: ATXN2; (-) strand; PAM type: NNGRRT; PAM sequence: CAGGAT
gttttttattcgtaaggcac

SEQ ID NO: 7425 - DNA, 20 bp, Artificial Sequence
  Description of Artificial Sequence: Synthetic oligonucleotide
  Target: ATXN2; (-) strand; PAM type: NNGRRT; PAM sequence: CAGAAT
actgtaaagctgctgtaaac

SEQ ID NO: 7426 - DNA, 20 bp, Artificial Sequence
  Description of Artificial Sequence: Synthetic oligonucleotide
  Target: ATXN2; (-) strand; PAM type: NNGRRT; PAM sequence: AGGAGT
ggatttactagaaagggcct

SEQ ID NO: 7427 - DNA, 20 bp, Artificial Sequence
  Description of Artificial Sequence: Synthetic oligonucleotide
  Target: ATXN2; (-) strand; PAM type: NNGRRT; PAM sequence: AAGGAT
ccaagccagccttgttgctg

SEQ ID NO: 7428 - DNA, 20 bp, Artificial Sequence
  Description of Artificial Sequence: Synthetic oligonucleotide
  Target: ATXN2; (-) strand; PAM type: NNGRRT; PAM sequence: TGGGAT
aggagcctaaaacccacttg

SEQ ID NO: 7429 - DNA, 20 bp, Artificial Sequence
  Description of Artificial Sequence: Synthetic oligonucleotide
  Target: ATXN2; (-) strand; PAM type: NNGRRT; PAM sequence: AGGAGT
cactgattgtgggctattaa

SEQ ID NO: 7430 - DNA, 20 bp, Artificial Sequence
  Description of Artificial Sequence: Synthetic oligonucleotide
  Target: ATXN2; (-) strand; PAM type: NNGRRT; PAM sequence: CTGGAT
gatttgacttcaggacctcc

SEQ ID NO: 7431 - DNA, 20 bp, Artificial Sequence
  Description of Artificial Sequence: Synthetic oligonucleotide
  Target: ATXN2; (-) strand; PAM type: NNGRRT; PAM sequence: ATGAAT
ctgggaggagccagccccct

SEQ ID NO: 7432 - DNA, 20 bp, Artificial Sequence
  Description of Artificial Sequence: Synthetic oligonucleotide
  Target: ATXN2; (-) strand; PAM type: NNGRRT; PAM sequence: CTGAAT
ctgtgagcctgggggttgta

SEQ ID NO: 7433 - DNA, 20 bp, Artificial Sequence
  Description of Artificial Sequence: Synthetic oligonucleotide
  Target: ATXN2; (-) strand; PAM type: NNGRRT; PAM sequence: GGGGGT
gaagccactgctgtgagcct

SEQ ID NO: 7434 - DNA, 20 bp, Artificial Sequence
  Description of Artificial Sequence: Synthetic oligonucleotide
  Target: ATXN2; (-) strand; PAM type: NNGRRT; PAM sequence: ATGAGT
cctcccaggcagtcagtcct

SEQ ID NO: 7435 - DNA, 20 bp, Artificial Sequence
  Description of Artificial Sequence: Synthetic oligonucleotide
  Target: ATXN2; (-) strand; PAM type: NNGRRT; PAM sequence: AGGGGT
aaaaaaaaagaaaagtgcat

SEQ ID NO: 7436 - DNA, 20 bp, Artificial Sequence
  Description of Artificial Sequence: Synthetic oligonucleotide
  Target: ATXN2; (-) strand; PAM type: NNGRRT; PAM sequence: CAGAAT
agctacttgagaggtcgagg

SEQ ID NO: 7437 - DNA, 20 bp, Artificial Sequence
  Description of Artificial Sequence: Synthetic oligonucleotide
  Target: ATXN2; (-) strand; PAM type: NNGRRT; PAM sequence: GTGGAT
actttgggaggccaaggcgg

SEQ ID NO: 7438 - DNA, 20 bp, Artificial Sequence
  Description of Artificial Sequence: Synthetic oligonucleotide
  Target: ATXN2; (-) strand; PAM type: NNGRRT; PAM sequence: GCGGGT
cagcactttgggaggccaag

SEQ ID NO: 7439 - DNA, 20 bp, Artificial Sequence
  Description of Artificial Sequence: Synthetic oligonucleotide
  Target: ATXN2; (-) strand; PAM type: NNGRRT; PAM sequence: AAGAGT
tagggtccatgaaatcaccc

SEQ ID NO: 7440 - DNA, 20 bp, Artificial Sequence
  Description of Artificial Sequence: Synthetic oligonucleotide
  Target: ATXN2; (-) strand; PAM type: NNGRRT; PAM sequence: TAGGGT
gatcagtgtcaggtctgctt

SEQ ID NO: 7441 - DNA, 20 bp, Artificial Sequence
  Description of Artificial Sequence: Synthetic oligonucleotide
  Target: ATXN2; (-) strand; PAM type: NNGRRT; PAM sequence: CTGGAT
cttaaaaatggactgcaaat

SEQ ID NO: 7442 - DNA, 20 bp, Artificial Sequence
  Description of Artificial Sequence: Synthetic oligonucleotide
  Target: ATXN2; (-) strand; PAM type: NNGRRT; PAM sequence: CTGGGT
ttaatttggttcattatcta

SEQ ID NO: 7443 - DNA, 20 bp, Artificial Sequence
  Description of Artificial Sequence: Synthetic oligonucleotide
  Target: ATXN2; (-) strand; PAM type: NNGRRT; PAM sequence: ATGAGT
tgtagagaggctgctaagaa

SEQ ID NO: 7444 - DNA, 20 bp, Artificial Sequence
  Description of Artificial Sequence: Synthetic oligonucleotide
  Target: ATXN2; (-) strand; PAM type: NNGRRT; PAM sequence: CAGAAT
tgccttccaaatctctgcca

SEQ ID NO: 7445 - DNA, 20 bp, Artificial Sequence
  Description of Artificial Sequence: Synthetic oligonucleotide
  Target: ATXN2; (-) strand; PAM type: NNGRRT; PAM sequence: GTGGGT
ggacgggaagcagtctggag

SEQ ID NO: 7446 - DNA, 20 bp, Artificial Sequence
  Description of Artificial Sequence: Synthetic oligonucleotide
  Target: ATXN2; (-) strand; PAM type: NNGRRT; PAM sequence: GGGAGT
tcacttcttcctagagccat

SEQ ID NO: 7447 - DNA, 20 bp, Artificial Sequence
  Description of Artificial Sequence: Synthetic oligonucleotide
  Target: ATXN2; (-) strand; PAM type: NNGRRT; PAM sequence: TGGGGT
ggtgggctagctgcagccag

SEQ ID NO: 7448 - DNA, 20 bp, Artificial Sequence
  Description of Artificial Sequence: Synthetic oligonucleotide
  Target: ATXN2; (-) strand; PAM type: NNGRRT; PAM sequence: TGGGAT
caggactggaaggagagtgg

SEQ ID NO: 7449 - DNA, 20 bp, Artificial Sequence
  Description of Artificial Sequence: Synthetic oligonucleotide
  Target: ATXN2; (-) strand; PAM type: NNGRRT; PAM sequence: GAGAGT
ggcctggtcaggactggaag

SEQ ID NO: 7450 - DNA, 20 bp, Artificial Sequence
  Description of Artificial Sequence: Synthetic oligonucleotide
  Target: ATXN2; (-) strand; PAM type: NNGRRT; PAM sequence: AGGGAT
ctgtaattagagctaactgg

SEQ ID NO: 7451 - DNA, 20 bp, Artificial Sequence
  Description of Artificial Sequence: Synthetic oligonucleotide
  Target: ATXN2; (-) strand; PAM type: NNGRRT; PAM sequence: TGGGGT
gagctgtcaagctgtactgg

SEQ ID NO: 7452 - DNA, 20 bp, Artificial Sequence
  Description of Artificial Sequence: Synthetic oligonucleotide
  Target: ATXN2; (-) strand; PAM type: NNGRRT; PAM sequence: AGGGAT
tcaataagtcagatgaagga

SEQ ID NO: 7453 - DNA, 20 bp, Artificial Sequence
  Description of Artificial Sequence: Synthetic oligonucleotide
  Target: ATXN2; (-) strand; PAM type: NNGRRT; PAM sequence: ATGGAT
tttataccagataaagccat

SEQ ID NO: 7454 - DNA, 20 bp, Artificial Sequence
  Description of Artificial Sequence: Synthetic oligonucleotide
  Target: ATXN2; (-) strand; PAM type: NNGRRT; PAM sequence: AAGAGT
atctcaggcaaccctcaggg

SEQ ID NO: 7455 - DNA, 20 bp, Artificial Sequence
  Description of Artificial Sequence: Synthetic oligonucleotide
  Target: ATXN2; (-) strand; PAM type: NNGRRT; PAM sequence: AGGAAT
gtcctgaatagaaagcatga

SEQ ID NO: 7456 - DNA, 20 bp, Artificial Sequence
  Description of Artificial Sequence: Synthetic oligonucleotide
  Target: ATXN2; (-) strand; PAM type: NNGRRT; PAM sequence: CTGAAT
ttgcagtaagggacttagtc

SEQ ID NO: 7457 - DNA, 20 bp, Artificial Sequence
  Description of Artificial Sequence: Synthetic oligonucleotide
  Target: ATXN2; (-) strand; PAM type: NNGRRT; PAM sequence: CAGGAT
ctgtatattctaaccaaaca

SEQ ID NO: 7458 - DNA, 20 bp, Artificial Sequence
  Description of Artificial Sequence: Synthetic oligonucleotide
  Target: ATXN2; (-) strand; PAM type: NNGRRT; PAM sequence: ATGAAT
tctgcctataatgatacaag

SEQ ID NO: 7459 - DNA, 20 bp, Artificial Sequence
  Description of Artificial Sequence: Synthetic oligonucleotide
  Target: ATXN2; (-) strand; PAM type: NNGRRT; PAM sequence: AAGAAT
tagcaaaatttgcattattc

SEQ ID NO: 7460 - DNA, 20 bp, Artificial Sequence
  Description of Artificial Sequence: Synthetic oligonucleotide
  Target: ATXN2; (-) strand; PAM type: NNGRRT; PAM sequence: AAGGAT
agcgagtatttgggcagggc

SEQ ID NO: 7461 - DNA, 20 bp, Artificial Sequence
  Description of Artificial Sequence: Synthetic oligonucleotide
  Target: ATXN2; (-) strand; PAM type: NNGRRT; PAM sequence: GCGAGT
cggggaggacaaagggaaga

SEQ ID NO: 7462 - DNA, 20 bp, Artificial Sequence
  Description of Artificial Sequence: Synthetic oligonucleotide
  Target: ATXN2; (-) strand; PAM type: NNGRRT; PAM sequence: ATGGAT
gtacaaagctgcttattgac

SEQ ID NO: 7463 - DNA, 20 bp, Artificial Sequence
  Description of Artificial Sequence: Synthetic oligonucleotide
  Target: ATXN2; (-) strand; PAM type: NNGRRT; PAM sequence: ATGAGT
ttaatatctcctgaaccaaa

SEQ ID NO: 7464 - DNA, 20 bp, Artificial Sequence
  Description of Artificial Sequence: Synthetic oligonucleotide
  Target: ATXN2; (-) strand; PAM type: NNGRRT; PAM sequence: CAGAGT
tcaggaggaggaaggttggc

SEQ ID NO: 7465 - DNA, 20 bp, Artificial Sequence
  Description of Artificial Sequence: Synthetic oligonucleotide
  Target: ATXN2; (-) strand; PAM type: NNGRRT; PAM sequence: GTGGAT
agactgagctattctctttg

SEQ ID NO: 7466 - DNA, 20 bp, Artificial Sequence
  Description of Artificial Sequence: Synthetic oligonucleotide
  Target: ATXN2; (-) strand; PAM type: NNGRRT; PAM sequence: TTGAAT
aggtgtgctaagggtgcatt

SEQ ID NO: 7467 - DNA, 20 bp, Artificial Sequence
  Description of Artificial Sequence: Synthetic oligonucleotide
  Target: ATXN2; (-) strand; PAM type: NNGRRT; PAM sequence: AAGGGT
aatatcaaagcaggtgtgct

SEQ ID NO: 7468 - DNA, 20 bp, Artificial Sequence
  Description of Artificial Sequence: Synthetic oligonucleotide
  Target: ATXN2; (-) strand; PAM type: NNGRRT; PAM sequence: TAGGAT
ctgtataagctacttctttg

SEQ ID NO: 7469 - DNA, 20 bp, Artificial Sequence
  Description of Artificial Sequence: Synthetic oligonucleotide
  Target: ATXN2; (-) strand; PAM type: NNGRRT; PAM sequence: ACGGAT
aaattcttaccgtcaaactg

SEQ ID NO: 7470 - DNA, 20 bp, Artificial Sequence
  Description of Artificial Sequence: Synthetic oligonucleotide
  Target: ATXN2; (-) strand; PAM type: NNGRRT; PAM sequence: AAGAGT
cagctagcaaaagaagtaac

SEQ ID NO: 7471 - DNA, 20 bp, Artificial Sequence
  Description of Artificial Sequence: Synthetic oligonucleotide
  Target: ATXN2; (-) strand; PAM type: NNGRRT; PAM sequence: CAGAGT
cataattccatatgctgttt

SEQ ID NO: 7472 - DNA, 20 bp, Artificial Sequence
  Description of Artificial Sequence: Synthetic oligonucleotide
  Target: ATXN2; (-) strand; PAM type: NNGRRT; PAM sequence: CCGAGT
tgcagtggaagatacttgga

SEQ ID NO: 7473 - DNA, 20 bp, Artificial Sequence
  Description of Artificial Sequence: Synthetic oligonucleotide
  Target: ATXN2; (-) strand; PAM type: NNGRRT; PAM sequence: AGGAAT
gatttcttgtaacatccaat

SEQ ID NO: 7474 - DNA, 20 bp, Artificial Sequence
  Description of Artificial Sequence: Synthetic oligonucleotide
  Target: ATXN2; (-) strand; PAM type: NNGRRT; PAM sequence: TAGAAT
caactggaagcacagaaaac

SEQ ID NO: 7475 - DNA, 20 bp, Artificial Sequence
  Description of Artificial Sequence: Synthetic oligonucleotide
  Target: ATXN2; (-) strand; PAM type: NNGRRT; PAM sequence: GAGGAT
gagttttgttcagctagcac

SEQ ID NO: 7476 - DNA, 20 bp, Artificial Sequence
  Description of Artificial Sequence: Synthetic oligonucleotide
  Target: ATXN2; (-) strand; PAM type: NNGRRT; PAM sequence: TTGAGT
ggggaaaagcgaattcaatt

SEQ ID NO: 7477 - DNA, 20 bp, Artificial Sequence
  Description of Artificial Sequence: Synthetic oligonucleotide
  Target: ATXN2; (-) strand; PAM type: NNGRRT; PAM sequence: GCGAAT
tgcagatgggagggggaaaa

SEQ ID NO: 7478 - DNA, 20 bp, Artificial Sequence
  Description of Artificial Sequence: Synthetic oligonucleotide
  Target: ATXN2; (-) strand; PAM type: NNGRRT; PAM sequence: GGGAGT
accccatgaacaagtcttct

SEQ ID NO: 7479 - DNA, 20 bp, Artificial Sequence
  Description of Artificial Sequence: Synthetic oligonucleotide
  Target: ATXN2; (-) strand; PAM type: NNGRRT; PAM sequence: GGGGGT
gcttggctaatatttgggga

SEQ ID NO: 7480 - DNA, 20 bp, Artificial Sequence
  Description of Artificial Sequence: Synthetic oligonucleotide
  Target: ATXN2; (-) strand; PAM type: NNGRRT; PAM sequence: TTGAGT
gcgctgtggatggactggct

SEQ ID NO: 7481 - DNA, 20 bp, Artificial Sequence
  Description of Artificial Sequence: Synthetic oligonucleotide
  Target: ATXN2; (-) strand; PAM type: NNGRRT; PAM sequence: GTGGAT
gatactgctgagaaagcgct

SEQ ID NO: 7482 - DNA, 20 bp, Artificial Sequence
  Description of Artificial Sequence: Synthetic oligonucleotide
  Target: ATXN2; (-) strand; PAM type: NNGRRT; PAM sequence: CAGAGT
gtggggggttattaccatgg

SEQ ID NO: 7483 - DNA, 20 bp, Artificial Sequence
  Description of Artificial Sequence: Synthetic oligonucleotide
  Target: ATXN2; (-) strand; PAM type: NNGRRT; PAM sequence: GGGGGT
tcccaaaagtctgacatgtg

SEQ ID NO: 7484 - DNA, 20 bp, Artificial Sequence
  Description of Artificial Sequence: Synthetic oligonucleotide
  Target: ATXN2; (-) strand; PAM type: NNGRRT; PAM sequence: CTGAGT
acagggcagtgttttccttc

SEQ ID NO: 7485 - DNA, 20 bp, Artificial Sequence
  Description of Artificial Sequence: Synthetic oligonucleotide
  Target: ATXN2; (-) strand; PAM type: NNGRRT; PAM sequence: CAGGAT
gtgtgtgttctgatggtata

SEQ ID NO: 7486 - DNA, 20 bp, Artificial Sequence
  Description of Artificial Sequence: Synthetic oligonucleotide
  Target: ATXN2; (-) strand; PAM type: NNGRRT; PAM sequence: CCGAGT
gggcctgaggcttccgggag

SEQ ID NO: 7487 - DNA, 20 bp, Artificial Sequence
  Description of Artificial Sequence: Synthetic oligonucleotide
  Target: ATXN2; (-) strand; PAM type: NNGRRT; PAM sequence: AGGAGT
agaactagcaagacccgtcc

SEQ ID NO: 7488 - DNA, 20 bp, Artificial Sequence
  Description of Artificial Sequence: Synthetic oligonucleotide
  Target: ATXN2; (-) strand; PAM type: NNGRRT; PAM sequence: TGGAAT
aagcattctgctcgcacagg

SEQ ID NO: 7489 - DNA, 20 bp, Artificial Sequence
  Description of Artificial Sequence: Synthetic oligonucleotide
  Target: ATXN2; (-) strand; PAM type: NNGRRT; PAM sequence: AGGAAT
tttcaggctcatgtacagtc

SEQ ID NO: 7490 - DNA, 20 bp, Artificial Sequence
  Description of Artificial Sequence: Synthetic oligonucleotide
  Target: ATXN2; (-) strand; PAM type: NNGRRT; PAM sequence: GAGAGT
gcccaccgttgccctttcct

SEQ ID NO: 7491 - DNA, 20 bp, Artificial Sequence
  Description of Artificial Sequence: Synthetic oligonucleotide
  Target: ATXN2; (-) strand; PAM type: NNGRRT; PAM sequence: CAGGAT
tgcctgctccctgacccttg

SEQ ID NO: 7492 - DNA, 20 bp, Artificial Sequence
  Description of Artificial Sequence: Synthetic oligonucleotide
  Target: ATXN2; (-) strand; PAM type: NNGRRT; PAM sequence: AAGGGT
atacaatgatcagaaatgtc

SEQ ID NO: 7493 - DNA, 20 bp, Artificial Sequence
  Description of Artificial Sequence: Synthetic oligonucleotide
  Target: ATXN2; (-) strand; PAM type: NNGRRT; PAM sequence: TAGAAT
tgaagatcttaccccataca

SEQ ID NO: 7494 - DNA, 20 bp, Artificial Sequence
  Description of Artificial Sequence: Synthetic oligonucleotide
  Target: ATXN2; (-) strand; PAM type: NNGRRT; PAM sequence: TTGGAT
ttaagttgagaaagctgccc

SEQ ID NO: 7495 - DNA, 20 bp, Artificial Sequence
  Description of Artificial Sequence: Synthetic oligonucleotide
  Target: ATXN2; (-) strand; PAM type: NNGRRT; PAM sequence: TTGAAT
agcctgattctgaagcatca

SEQ ID NO: 7496 - DNA, 20 bp, Artificial Sequence
  Description of Artificial Sequence: Synthetic oligonucleotide
  Target: ATXN2; (-) strand; PAM type: NNGRRT; PAM sequence: AGGGAT
aatctgttttcctatttgaa

SEQ ID NO: 7497 - DNA, 20 bp, Artificial Sequence
  Description of Artificial Sequence: Synthetic oligonucleotide
  Target: ATXN2; (-) strand; PAM type: NNGRRT; PAM sequence: AAGAGT
tgagagagtcacgggggcct

SEQ ID NO: 7498 - DNA, 20 bp, Artificial Sequence
  Description of Artificial Sequence: Synthetic oligonucleotide
  Target: ATXN2; (-) strand; PAM type: NNGRRT; PAM sequence: GAGAGT
ctccatcagcatatctctga

SEQ ID NO: 7499 - DNA, 20 bp, Artificial Sequence
  Description of Artificial Sequence: Synthetic oligonucleotide
  Target: ATXN2; (-) strand; PAM type: NNGRRT; PAM sequence: GTGAGT
atcacctttccaacttgaca

SEQ ID NO: 7500 - DNA, 20 bp, Artificial Sequence
  Description of Artificial Sequence: Synthetic oligonucleotide
  Target: ATXN2; (-) strand; PAM type: NNGRRT; PAM sequence: TGGAAT
ctgccaaccccctgcagagc

SEQ ID NO: 7501 - DNA, 20 bp, Artificial Sequence
  Description of Artificial Sequence: Synthetic oligonucleotide
  Target: ATXN2; (-) strand; PAM type: NNGRRT; PAM sequence: GAGAGT
atgtgcccgtttgaatatgt

SEQ ID NO: 7502 - DNA, 20 bp, Artificial Sequence
  Description of Artificial Sequence: Synthetic oligonucleotide
  Target: ATXN2; (-) strand; PAM type: NNGRRT; PAM sequence: TTGAAT
caaatttgccatgtgcccgt

SEQ ID NO: 7503 - DNA, 20 bp, Artificial Sequence
  Description of Artificial Sequence: Synthetic oligonucleotide
  Target: ATXN2; (-) strand; PAM type: NNGRRT; PAM sequence: AGGGAT
tgtgaacttacatgtaagtc

SEQ ID NO: 7504 - DNA, 20 bp, Artificial Sequence
  Description of Artificial Sequence: Synthetic oligonucleotide
  Target: ATXN2; (-) strand; PAM type: NNGRRT; PAM sequence: TGGGGT
ggagtcagcttcataagagc

SEQ ID NO: 7505 - DNA, 20 bp, Artificial Sequence
  Description of Artificial Sequence: Synthetic oligonucleotide
  Target: ATXN2; (-) strand; PAM type: NNGRRT; PAM sequence: TGGAGT
tgtgggccagcgtggtttgg

SEQ ID NO: 7506 - DNA, 20 bp, Artificial Sequence
  Description of Artificial Sequence: Synthetic oligonucleotide
  Target: ATXN2; (-) strand; PAM type: NNGRRT; PAM sequence: TAGAGT
tcagaaggctaccttgtaag

SEQ ID NO: 7507 - DNA, 20 bp, Artificial Sequence
  Description of Artificial Sequence: Synthetic oligonucleotide
  Target: ATXN2; (-) strand; PAM type: NNGRRT; PAM sequence: TTGGAT
gggctagagatgcgactcag

SEQ ID NO: 7508 - DNA, 20 bp, Artificial Sequence
  Description of Artificial Sequence: Synthetic oligonucleotide
  Target: ATXN2; (-) strand; PAM type: NNGRRT; PAM sequence: ATGAAT
tctaagtgagacctgccaca

SEQ ID NO: 7509 - DNA, 20 bp, Artificial Sequence
  Description of Artificial Sequence: Synthetic oligonucleotide
  Target: ATXN2; (-) strand; PAM type: NNGRRT; PAM sequence: GCGGGT
tcataacagaactctctgag

SEQ ID NO: 7510 - DNA, 20 bp, Artificial Sequence
  Description of Artificial Sequence: Synthetic oligonucleotide
  Target: ATXN2; (-) strand; PAM type: NNGRRT; PAM sequence: GTGAAT
cctccctggggctgttacgg

SEQ ID NO: 7511 - DNA, 20 bp, Artificial Sequence
  Description of Artificial Sequence: Synthetic oligonucleotide
  Target: ATXN2; (-) strand; PAM type: NNGRRT; PAM sequence: ACGGGT
aggccctccctggggctgtt

SEQ ID NO: 7512 - DNA, 20 bp, Artificial Sequence
  Description of Artificial Sequence: Synthetic oligonucleotide
  Target: ATXN2; (-) strand; PAM type: NNGRRT; PAM sequence: GGGGAT
tccctgcactccagggccca

SEQ ID NO: 7513 - DNA, 20 bp, Artificial Sequence
  Description of Artificial Sequence: Synthetic oligonucleotide
  Target: ATXN2; (-) strand; PAM type: NNGRRT; PAM sequence: ATGAGT
tcaacttgattgttactcac

SEQ ID NO: 7514 - DNA, 20 bp, Artificial Sequence
  Description of Artificial Sequence: Synthetic oligonucleotide
  Target: ATXN2; (-) strand; PAM type: NNGRRT; PAM sequence: CAGAGT
ggcagggatgatggccttca

SEQ ID NO: 7515 - DNA, 20 bp, Artificial Sequence
  Description of Artificial Sequence: Synthetic oligonucleotide
  Target: ATXN2; (-) strand; PAM type: NNGRRT; PAM sequence: AGGGAT
acttaccttggaagccaggc

SEQ ID NO: 7516 - DNA, 20 bp, Artificial Sequence
  Description of Artificial Sequence: Synthetic oligonucleotide
  Target: ATXN2; (-) strand; PAM type: NNGRRT; PAM sequence: TGGAAT
cttaaaaatatctttgactc

SEQ ID NO: 7517 - DNA, 20 bp, Artificial Sequence
  Description of Artificial Sequence: Synthetic oligonucleotide
  Target: ATXN2; (-) strand; PAM type: NNGRRT; PAM sequence: TGGGAT
atgtttgtgtggttttgtca

SEQ ID NO: 7518 - DNA, 20 bp, Artificial Sequence
  Description of Artificial Sequence: Synthetic oligonucleotide
  Target: ATXN2; (-) strand; PAM type: NNGRRT; PAM sequence: GGGAAT
tacacgtgatctggccctaa

SEQ ID NO: 7519 - DNA, 20 bp, Artificial Sequence
  Description of Artificial Sequence: Synthetic oligonucleotide
  Target: ATXN2; (-) strand; PAM type: NNGRRT; PAM sequence: TAGAAT
aactttctgtgaaggccaag

SEQ ID NO: 7520 - DNA, 20 bp, Artificial Sequence
  Description of Artificial Sequence: Synthetic oligonucleotide
  Target: ATXN2; (-) strand; PAM type: NNGRRT; PAM sequence: CAGAAT
cctccaacacgcagtcgcca

SEQ ID NO: 7521 - DNA, 20 bp, Artificial Sequence
  Description of Artificial Sequence: Synthetic oligonucleotide
  Target: ATXN2; (-) strand; PAM type: NNGRRT; PAM sequence: GTGGGT
agtgtgcaaagcttagcttt

SEQ ID NO: 7522 - DNA, 20 bp, Artificial Sequence
  Description of Artificial Sequence: Synthetic oligonucleotide
  Target: ATXN2; (-) strand; PAM type: NNGRRT; PAM sequence: AGGAGT
caggcttctgtaccctagaa

SEQ ID NO: 7523 - DNA, 20 bp, Artificial Sequence
  Description of Artificial Sequence: Synthetic oligonucleotide
  Target: ATXN2; (-) strand; PAM type: NNGRRT; PAM sequence: GAGAAT
aagtttctaactgccagact

SEQ ID NO: 7524 - DNA, 20 bp, Artificial Sequence
  Description of Artificial Sequence: Synthetic oligonucleotide
  Target: ATXN2; (-) strand; PAM type: NNGRRT; PAM sequence: TTGAAT
gttattttcctatgagcttc

SEQ ID NO: 7525 - DNA, 20 bp, Artificial Sequence
  Description of Artificial Sequence: Synthetic oligonucleotide
  Target: ATXN2; (-) strand; PAM type: NNGRRT; PAM sequence: TTGGAT
acatgttgataataaggtga

SEQ ID NO: 7526 - DNA, 20 bp, Artificial Sequence
  Description of Artificial Sequence: Synthetic oligonucleotide
  Target: ATXN2; (-) strand; PAM type: NNGRRT; PAM sequence: GAGAAT
ttctcgggaggctgaggaag

SEQ ID NO: 7527 - DNA, 20 bp, Artificial Sequence
  Description of Artificial Sequence: Synthetic oligonucleotide
  Target: ATXN2; (-) strand; PAM type: NNGRRT; PAM sequence: GTGGAT
actttgggaggccgaggcgg

SEQ ID NO: 7528 - DNA, 20 bp, Artificial Sequence
  Description of Artificial Sequence: Synthetic oligonucleotide
  Target: ATXN2; (-) strand; PAM type: NNGRRT; PAM sequence: GCGGGT
caccactttgggaggccgag

SEQ ID NO: 7529 - DNA, 20 bp, Artificial Sequence
  Description of Artificial Sequence: Synthetic oligonucleotide
  Target: ATXN2; (-) strand; PAM type: NNGRRT; PAM sequence: AAGAAT
gcccctggggtggtggtttt

SEQ ID NO: 7530 - DNA, 20 bp, Artificial Sequence
  Description of Artificial Sequence: Synthetic oligonucleotide
  Target: ATXN2; (-) strand; PAM type: NNGRRT; PAM sequence: TGGGGT
gatggatacagctgtgcccc

SEQ ID NO: 7531 - DNA, 20 bp, Artificial Sequence
  Description of Artificial Sequence: Synthetic oligonucleotide
  Target: ATXN2; (-) strand; PAM type: NNGRRT; PAM sequence: ATGGAT
gcatgtccaccctcgtgaag

SEQ ID NO: 7532 - DNA, 20 bp, Artificial Sequence
  Description of Artificial Sequence: Synthetic oligonucleotide
  Target: ATXN2; (-) strand; PAM type: NNGRRT; PAM sequence: CTGAGT
tggcttctttatcctagtat

SEQ ID NO: 7533 - DNA, 20 bp, Artificial Sequence
  Description of Artificial Sequence: Synthetic oligonucleotide
  Target: ATXN2; (-) strand; PAM type: NNGRRT; PAM sequence: TGGAGT
gggcaactcagaggtctgca

SEQ ID NO: 7534 - DNA, 20 bp, Artificial Sequence
  Description of Artificial Sequence: Synthetic oligonucleotide
  Target: ATXN2; (-) strand; PAM type: NNGRRT; PAM sequence: GTGAGT
ctatagaaattggtagtggc

SEQ ID NO: 7535 - DNA, 20 bp, Artificial Sequence
  Description of Artificial Sequence: Synthetic oligonucleotide
  Target: ATXN2; (-) strand; PAM type: NNGRRT; PAM sequence: TGGAGT
aagacaatggatggtttaaa

SEQ ID NO: 7536 - DNA, 20 bp, Artificial Sequence
  Description of Artificial Sequence: Synthetic oligonucleotide
  Target: ATXN2; (-) strand; PAM type: NNGRRT; PAM sequence: ATGGAT
acacttattttttcaagaca

SEQ ID NO: 7537 - DNA, 20 bp, Artificial Sequence
  Description of Artificial Sequence: Synthetic oligonucleotide
  Target: ATXN2; (-) strand; PAM type: NNGRRT; PAM sequence: AAGAGT
gggaaaacctagtgaccgtt

SEQ ID NO: 7538 - DNA, 20 bp, Artificial Sequence
  Description of Artificial Sequence: Synthetic oligonucleotide
  Target: ATXN2; (-) strand; PAM type: NNGRRT; PAM sequence: TTGAGT
tgcacctaaaatgcacttgt

SEQ ID NO: 7539 - DNA, 20 bp, Artificial Sequence
  Description of Artificial Sequence: Synthetic oligonucleotide
  Target: ATXN2; (-) strand; PAM type: NNGRRT; PAM sequence: AAGAGT
ctgatgatggccttgagcta

SEQ ID NO: 7540 - DNA, 20 bp, Artificial Sequence
  Description of Artificial Sequence: Synthetic oligonucleotide
  Target: ATXN2; (-) strand; PAM type: NNGRRT; PAM sequence: CTGAGT
ttagggcttgggaaagtaaa

SEQ ID NO: 7541 - DNA, 20 bp, Artificial Sequence
  Description of Artificial Sequence: Synthetic oligonucleotide
  Target: ATXN2; (-) strand; PAM type: NNGRRT; PAM sequence: GGGAGT
aagggctggggcactcagaa

SEQ ID NO: 7542 - DNA, 20 bp, Artificial Sequence
  Description of Artificial Sequence: Synthetic oligonucleotide
  Target: ATXN2; (-) strand; PAM type: NNGRRT; PAM sequence: GTGAGT
cagtgagcctgggcaacaga

SEQ ID NO: 7543 - DNA, 20 bp, Artificial Sequence
  Description of Artificial Sequence: Synthetic oligonucleotide
  Target: ATXN2; (-) strand; PAM type: NNGRRT; PAM sequence: CAGAGT
gttgcagtgagcctgggcaa

SEQ ID NO: 7544 - DNA, 20 bp, Artificial Sequence
  Description of Artificial Sequence: Synthetic oligonucleotide
  Target: ATXN2; (-) strand; PAM type: NNGRRT; PAM sequence: GAGAAT
tactcgggaggctgaggcag

SEQ ID NO: 7545 - DNA, 20 bp, Artificial Sequence
  Description of Artificial Sequence: Synthetic oligonucleotide
  Target: ATXN2; (-) strand; PAM type: NNGRRT; PAM sequence: AGGAGT
tgggcggatcatttgaggtc

SEQ ID NO: 7546 - DNA, 20 bp, Artificial Sequence
  Description of Artificial Sequence: Synthetic oligonucleotide
  Target: ATXN2; (-) strand; PAM type: NNGRRT; PAM sequence: GCGGAT
actttgggaggctgaagtgg

SEQ ID NO: 7547 - DNA, 20 bp, Artificial Sequence
  Description of Artificial Sequence: Synthetic oligonucleotide
  Target: ATXN2; (-) strand; PAM type: NNGRRT; PAM sequence: TAGAGT
ggctgggaactataccttgc

SEQ ID NO: 7548 - DNA, 20 bp, Artificial Sequence
  Description of Artificial Sequence: Synthetic oligonucleotide
  Target: ATXN2; (-) strand; PAM type: NNGRRT; PAM sequence: TAGGAT
cttattatcttgagggattt

SEQ ID NO: 7549 - DNA, 20 bp, Artificial Sequence
  Description of Artificial Sequence: Synthetic oligonucleotide
  Target: ATXN2; (-) strand; PAM type: NNGRRT; PAM sequence: AGGGAT
tgtatgggcttattatcttg

SEQ ID NO: 7550 - DNA, 20 bp, Artificial Sequence
  Description of Artificial Sequence: Synthetic oligonucleotide
  Target: ATXN2; (-) strand; PAM type: NNGRRT; PAM sequence: TGGAAT
aagaatgtggggaactattt

SEQ ID NO: 7551 - DNA, 20 bp, Artificial Sequence
  Description of Artificial Sequence: Synthetic oligonucleotide
  Target: ATXN2; (-) strand; PAM type: NNGRRT; PAM sequence: AAGAAT
gtttgctaacacgttatatg

SEQ ID NO: 7552 - DNA, 20 bp, Artificial Sequence
  Description of Artificial Sequence: Synthetic oligonucleotide
  Target: ATXN2; (-) strand; PAM type: NNGRRT; PAM sequence: TAGGGT
gcctaccagactgctggaac

SEQ ID NO: 7553 - DNA, 20 bp, Artificial Sequence
  Description of Artificial Sequence: Synthetic oligonucleotide
  Target: ATXN2; (-) strand; PAM type: NNGRRT; PAM sequence: TGGAAT
ccctctgcacaccatttacg

SEQ ID NO: 7554 - DNA, 20 bp, Artificial Sequence
  Description of Artificial Sequence: Synthetic oligonucleotide
  Target: ATXN2; (-) strand; PAM type: NNGRRT; PAM sequence: TAGGAT
gcccttagccctacaacacc

SEQ ID NO: 7555 - DNA, 20 bp, Artificial Sequence
  Description of Artificial Sequence: Synthetic oligonucleotide
  Target: ATXN2; (-) strand; PAM type: NNGRRT; PAM sequence: GAGAGT
agacgtaactgttagggctg

SEQ ID NO: 7556 - DNA, 20 bp, Artificial Sequence
  Description of Artificial Sequence: Synthetic oligonucleotide
  Target: ATXN2; (-) strand; PAM type: NNGRRT; PAM sequence: GTGGAT
tgccagctgtggcattggca

SEQ ID NO: 7557 - DNA, 20 bp, Artificial Sequence
  Description of Artificial Sequence: Synthetic oligonucleotide
  Target: ATXN2; (-) strand; PAM type: NNGRRT; PAM sequence: AGGAAT
ccagtctaaactggatatga

SEQ ID NO: 7558 - DNA, 20 bp, Artificial Sequence
  Description of Artificial Sequence: Synthetic oligonucleotide
  Target: ATXN2; (-) strand; PAM type: NNGRRT; PAM sequence: CTGGAT
gctgctgtatccagtctaaa

SEQ ID NO: 7559 - DNA, 20 bp, Artificial Sequence
  Description of Artificial Sequence: Synthetic oligonucleotide
  Target: ATXN2; (-) strand; PAM type: NNGRRT; PAM sequence: ATGAGT
aggagctggaagtaaactta

SEQ ID NO: 7560 - DNA, 20 bp, Artificial Sequence
  Description of Artificial Sequence: Synthetic oligonucleotide
  Target: ATXN2; (-) strand; PAM type: NNGRRT; PAM sequence: GAGAAT
tactcggcaggctgaggcag

SEQ ID NO: 7561 - DNA, 20 bp, Artificial Sequence
  Description of Artificial Sequence: Synthetic oligonucleotide
  Target: ATXN2; (-) strand; PAM type: NNGRRT; PAM sequence: ATGGAT
actttgggaggccgaggcgg

SEQ ID NO: 7562 - DNA, 20 bp, Artificial Sequence
  Description of Artificial Sequence: Synthetic oligonucleotide
  Target: ATXN2; (-) strand; PAM type: NNGRRT; PAM sequence: GCGGAT
cagcactttgggaggccgag

SEQ ID NO: 7563 - DNA, 20 bp, Artificial Sequence
  Description of Artificial Sequence: Synthetic oligonucleotide
  Target: ATXN2; (-) strand; PAM type: NNGRRT; PAM sequence: CTGGGT
cagcctgggtgacagcaaga

SEQ ID NO: 7564 - DNA, 20 bp, Artificial Sequence
  Description of Artificial Sequence: Synthetic oligonucleotide
  Target: ATXN2; (-) strand; PAM type: NNGRRT; PAM sequence: CTGGGT
tcgctccactgcactccagc

SEQ ID NO: 7565 - DNA, 20 bp, Artificial Sequence
  Description of Artificial Sequence: Synthetic oligonucleotide
  Target: ATXN2; (-) strand; PAM type: NNGRRT; PAM sequence: AGGAGT
agctactcagaggctgaagc

SEQ ID NO: 7566 - DNA, 20 bp, Artificial Sequence
  Description of Artificial Sequence: Synthetic oligonucleotide
  Target: ATXN2; (-) strand; PAM type: NNGRRT; PAM sequence: AGGAGT
tggacggatcacttgaggcc

SEQ ID NO: 7567 - DNA, 20 bp, Artificial Sequence
  Description of Artificial Sequence: Synthetic oligonucleotide
  Target: ATXN2; (-) strand; PAM type: NNGRRT; PAM sequence: ACGGAT
actttgggaggccgagatgg

SEQ ID NO: 7568 - DNA, 20 bp, Artificial Sequence
  Description of Artificial Sequence: Synthetic oligonucleotide
  Target: ATXN2; (-) strand; PAM type: NNGRRT; PAM sequence: CCGGGT
ttcaaaaataaatttttagg

SEQ ID NO: 7569 - DNA, 20 bp, Artificial Sequence
  Description of Artificial Sequence: Synthetic oligonucleotide
  Target: ATXN2; (-) strand; PAM type: NNGRRT; PAM sequence: GAGAAT
tactcaggaggctgacacag

SEQ ID NO: 7570 - DNA, 20 bp, Artificial Sequence
  Description of Artificial Sequence: Synthetic oligonucleotide
  Target: ATXN2; (-) strand; PAM type: NNGRRT; PAM sequence: AGGAGT
caagtggatcacctgaggtc

SEQ ID NO: 7571 - DNA, 20 bp, Artificial Sequence
  Description of Artificial Sequence: Synthetic oligonucleotide
  Target: ATXN2; (-) strand; PAM type: NNGRRT; PAM sequence: GTGGAT
actttgggaggccaagacaa

SEQ ID NO: 7572 - DNA, 20 bp, Artificial Sequence
  Description of Artificial Sequence: Synthetic oligonucleotide
  Target: ATXN2; (-) strand; PAM type: NNGRRT; PAM sequence: AGGGGT
taagaggctggggtggcggt

SEQ ID NO: 7573 - DNA, 20 bp, Artificial Sequence
  Description of Artificial Sequence: Synthetic oligonucleotide
  Target: ATXN2; (-) strand; PAM type: NNGRRT; PAM sequence: TGGGGT
aaatgacatttttaagaggc

SEQ ID NO: 7574 - DNA, 20 bp, Artificial Sequence
  Description of Artificial Sequence: Synthetic oligonucleotide
  Target: ATXN2; (-) strand; PAM type: NNGRRT; PAM sequence: GGGAAT
atgaacagaatttgggattt

SEQ ID NO: 7575 - DNA, 20 bp, Artificial Sequence
  Description of Artificial Sequence: Synthetic oligonucleotide
  Target: ATXN2; (-) strand; PAM type: NNGRRT; PAM sequence: TGGGAT
gaacctccatgaacagaatt

SEQ ID NO: 7576 - DNA, 20 bp, Artificial Sequence
  Description of Artificial Sequence: Synthetic oligonucleotide
  Target: ATXN2; (-) strand; PAM type: NNGRRT; PAM sequence: CAGAAT
tctttatgaacctccatgaa

SEQ ID NO: 7577 - DNA, 20 bp, Artificial Sequence
  Description of Artificial Sequence: Synthetic oligonucleotide
  Target: ATXN2; (-) strand; PAM type: NNGRRT; PAM sequence: TTGAAT
actttttagtacaaaatttc

SEQ ID NO: 7578 - DNA, 20 bp, Artificial Sequence
  Description of Artificial Sequence: Synthetic oligonucleotide
  Target: ATXN2; (-) strand; PAM type: NNGRRT; PAM sequence: ATGAAT
tttttacatttttccagttg

SEQ ID NO: 7579 - DNA, 20 bp, Artificial Sequence
  Description of Artificial Sequence: Synthetic oligonucleotide
  Target: ATXN2; (-) strand; PAM type: NNGRRT; PAM sequence: TTGGGT
cctatgtacattcactcagc

SEQ ID NO: 7580 - DNA, 20 bp, Artificial Sequence
  Description of Artificial Sequence: Synthetic oligonucleotide
  Target: ATXN2; (-) strand; PAM type: NNGRRT; PAM sequence: AAGGAT
taccggtatttaggtaggga

SEQ ID NO: 7581 - DNA, 20 bp, Artificial Sequence
  Description of Artificial Sequence: Synthetic oligonucleotide
  Target: ATXN2; (-) strand; PAM type: NNGRRT; PAM sequence: AAGAAT
atttcaaattcaaggaggaa

SEQ ID NO: 7582 - DNA, 20 bp, Artificial Sequence
  Description of Artificial Sequence: Synthetic oligonucleotide
  Target: ATXN2; (-) strand; PAM type: NNGRRT; PAM sequence: TGGGAT
gcctcggcctcccaaaatgc

SEQ ID NO: 7583 - DNA, 20 bp, Artificial Sequence
  Description of Artificial Sequence: Synthetic oligonucleotide
  Target: ATXN2; (-) strand; PAM type: NNGRRT; PAM sequence: CAGGGT
ttttgtatttttagtagaga

SEQ ID NO: 7584 - DNA, 20 bp, Artificial Sequence
  Description of Artificial Sequence: Synthetic oligonucleotide
  Target: ATXN2; (-) strand; PAM type: NNGRRT; PAM sequence: CCGGGT
ttcactgcaacctccacctc

SEQ ID NO: 7585 - DNA, 20 bp, Artificial Sequence
  Description of Artificial Sequence: Synthetic oligonucleotide
  Target: ATXN2; (-) strand; PAM type: NNGRRT; PAM sequence: TGGAGT
ttcgctcttgttgcccaagc

SEQ ID NO: 7586 - DNA, 20 bp, Artificial Sequence
  Description of Artificial Sequence: Synthetic oligonucleotide
  Target: ATXN2; (-) strand; PAM type: NNGRRT; PAM sequence: CGGAGT
gtttattttattttttgaga

SEQ ID NO: 7587 - DNA, 20 bp, Artificial Sequence
  Description of Artificial Sequence: Synthetic oligonucleotide
  Target: ATXN2; (-) strand; PAM type: NNGRRT; PAM sequence: CAGGGT
ttttgtatttttagtagaga

SEQ ID NO: 7588 - DNA, 20 bp, Artificial Sequence
  Description of Artificial Sequence: Synthetic oligonucleotide
  Target: ATXN2; (-) strand; PAM type: NNGRRT; PAM sequence: TGGGAT
gcctcagcttccagagtagc

SEQ ID NO: 7589 - DNA, 20 bp, Artificial Sequence
  Description of Artificial Sequence: Synthetic oligonucleotide
  Target: ATXN2; (-) strand; PAM type: NNGRRT; PAM sequence: CAGAGT
caattctctgcctcagcttc

SEQ ID NO: 7590 - DNA, 20 bp, Artificial Sequence
  Description of Artificial Sequence: Synthetic oligonucleotide
  Target: ATXN2; (-) strand; PAM type: NNGRRT; PAM sequence: TGGAGT
tctcactctgtcgtccaggc

SEQ ID NO: 7591 - DNA, 20 bp, Artificial Sequence
  Description of Artificial Sequence: Synthetic oligonucleotide
  Target: ATXN2; (-) strand; PAM type: NNGRRT; PAM sequence: TGGAGT
tttttttttttcttttgaga

SEQ ID NO: 7592 - DNA, 20 bp, Artificial Sequence
  Description of Artificial Sequence: Synthetic oligonucleotide
  Target: ATXN2; (-) strand; PAM type: NNGRRT; PAM sequence: GTGGGT
aaagcagtgaaataatatgt

SEQ ID NO: 7593 - DNA, 20 bp, Artificial Sequence
  Description of Artificial Sequence: Synthetic oligonucleotide
  Target: ATXN2; (-) strand; PAM type: NNGRRT; PAM sequence: CAGAAT
acctctctgggatctttagc

SEQ ID NO: 7594 - DNA, 20 bp, Artificial Sequence
  Description of Artificial Sequence: Synthetic oligonucleotide
  Target: ATXN2; (-) strand; PAM type: NNGRRT; PAM sequence: TGGGAT
aactttatttttaacctctc

SEQ ID NO: 7595 - DNA, 20 bp, Artificial Sequence
  Description of Artificial Sequence: Synthetic oligonucleotide
  Target: ATXN2; (-) strand; PAM type: NNGRRT; PAM sequence: ATGAAT
tataaatagaagtttaactg

SEQ ID NO: 7596 - DNA, 20 bp, Artificial Sequence
  Description of Artificial Sequence: Synthetic oligonucleotide
  Target: ATXN2; (-) strand; PAM type: NNGRRT; PAM sequence: CTGAGT
aatatttatgtcaaggaaca

SEQ ID NO: 7597 - DNA, 20 bp, Artificial Sequence
  Description of Artificial Sequence: Synthetic oligonucleotide
  Target: ATXN2; (-) strand; PAM type: NNGRRT; PAM sequence: TAGAAT
tttttgactgatcatatgtt

SEQ ID NO: 7598 - DNA, 20 bp, Artificial Sequence
  Description of Artificial Sequence: Synthetic oligonucleotide
  Target: ATXN2; (-) strand; PAM type: NNGRRT; PAM sequence: AAGGAT
ggaatgtggttagtgttatt

SEQ ID NO: 7599 - DNA, 20 bp, Artificial Sequence
  Description of Artificial Sequence: Synthetic oligonucleotide
  Target: ATXN2; (-) strand; PAM type: NNGRRT; PAM sequence: TGGAAT
acagctgaggaaactagttc

SEQ ID NO: 7600 - DNA, 20 bp, Artificial Sequence
  Description of Artificial Sequence: Synthetic oligonucleotide
  Target: ATXN2; (-) strand; PAM type: NNGRRT; PAM sequence: CTGAAT
tttccttcacttcccttttt

SEQ ID NO: 7601 - DNA, 20 bp, Artificial Sequence
  Description of Artificial Sequence: Synthetic oligonucleotide
  Target: ATXN2; (-) strand; PAM type: NNGRRT; PAM sequence: TAGAGT
gttgccttttattccccttt

SEQ ID NO: 7602 - DNA, 20 bp, Artificial Sequence
  Description of Artificial Sequence: Synthetic oligonucleotide
  Target: ATXN2; (-) strand; PAM type: NNGRRT; PAM sequence: GGGAGT
tagcacaacttcccctaaaa

SEQ ID NO: 7603 - DNA, 20 bp, Artificial Sequence
  Description of Artificial Sequence: Synthetic oligonucleotide
  Target: ATXN2; (-) strand; PAM type: NNGRRT; PAM sequence: AGGAGT
ttaatagatgctctttaaaa

SEQ ID NO: 7604 - DNA, 20 bp, Artificial Sequence
  Description of Artificial Sequence: Synthetic oligonucleotide
  Target: ATXN2; (-) strand; PAM type: NNGRRT; PAM sequence: TGGGGT
aggcacattttgagttattt

SEQ ID NO: 7605 - DNA, 20 bp, Artificial Sequence
  Description of Artificial Sequence: Synthetic oligonucleotide
  Target: ATXN2; (-) strand; PAM type: NNGRRT; PAM sequence: TTGAGT
aattttatgttaggcacatt

SEQ ID NO: 7606 - DNA, 20 bp, Artificial Sequence
  Description of Artificial Sequence: Synthetic oligonucleotide
  Target: ATXN2; (-) strand; PAM type: NNGRRT; PAM sequence: AAGGAT
gttgtgttctagaggatatt

SEQ ID NO: 7607 - DNA, 20 bp, Artificial Sequence
  Description of Artificial Sequence: Synthetic oligonucleotide
  Target: ATXN2; (-) strand; PAM type: NNGRRT; PAM sequence: GAGGAT
gtatgaaatgttgtgttcta

SEQ ID NO: 7608 - DNA, 20 bp, Artificial Sequence
  Description of Artificial Sequence: Synthetic oligonucleotide
  Target: ATXN2; (-) strand; PAM type: NNGRRT; PAM sequence: AGGAGT
actttggtatttaaatagga

SEQ ID NO: 7609 - DNA, 20 bp, Artificial Sequence
  Description of Artificial Sequence: Synthetic oligonucleotide
  Target: ATXN2; (-) strand; PAM type: NNGRRT; PAM sequence: AAGAGT
tacttgggaggcggaggcac

SEQ ID NO: 7610 - DNA, 20 bp, Artificial Sequence
  Description of Artificial Sequence: Synthetic oligonucleotide
  Target: ATXN2; (-) strand; PAM type: NNGRRT; PAM sequence: AGGAGT
tgggtggattgcttgaggcc

SEQ ID NO: 7611 - DNA, 20 bp, Artificial Sequence
  Description of Artificial Sequence: Synthetic oligonucleotide
  Target: ATXN2; (-) strand; PAM type: NNGRRT; PAM sequence: GTGGAT
actttgggaggccgaggtgg

SEQ ID NO: 7612 - DNA, 20 bp, Artificial Sequence
  Description of Artificial Sequence: Synthetic oligonucleotide
  Target: ATXN2; (-) strand; PAM type: NNGRRT; PAM sequence: GTGGGT
cagtactttgggaggccgag

SEQ ID NO: 7613 - DNA, 20 bp, Artificial Sequence
  Description of Artificial Sequence: Synthetic oligonucleotide
  Target: ATXN2; (-) strand; PAM type: NNGRRT; PAM sequence: CAGGAT
tattcaggaagcagacccct

SEQ ID NO: 7614 - DNA, 20 bp, Artificial Sequence
  Description of Artificial Sequence: Synthetic oligonucleotide
  Target: ATXN2; (-) strand; PAM type: NNGRRT; PAM sequence: CTGGGT
tcgtgccactccactccagc

SEQ ID NO: 7615 - DNA, 20 bp, Artificial Sequence
  Description of Artificial Sequence: Synthetic oligonucleotide
  Target: ATXN2; (-) strand; PAM type: NNGRRT; PAM sequence: GAGAAT
tactagggaggctgagacag

SEQ ID NO: 7616 - DNA, 20 bp, Artificial Sequence
  Description of Artificial Sequence: Synthetic oligonucleotide
  Target: ATXN2; (-) strand; PAM type: NNGRRT; PAM sequence: GTGGAT
gctttgggaggctgaggcgg

SEQ ID NO: 7617 - DNA, 20 bp, Artificial Sequence
  Description of Artificial Sequence: Synthetic oligonucleotide
  Target: ATXN2; (-) strand; PAM type: NNGRRT; PAM sequence: GCGGGT
cagtgctttgggaggctgag

SEQ ID NO: 7618 - DNA, 20 bp, Artificial Sequence
  Description of Artificial Sequence: Synthetic oligonucleotide
  Target: ATXN2; (-) strand; PAM type: NNGRRT; PAM sequence: TAGGAT
taccaggatttttaattgaa

SEQ ID NO: 7619 - DNA, 20 bp, Artificial Sequence
  Description of Artificial Sequence: Synthetic oligonucleotide
  Target: ATXN2; (-) strand; PAM type: NNGRRT; PAM sequence: TTGAAT
atgcctaccaggatttttaa

SEQ ID NO: 7620 - DNA, 20 bp, Artificial Sequence
  Description of Artificial Sequence: Synthetic oligonucleotide
  Target: ATXN2; (-) strand; PAM type: NNGRRT; PAM sequence: CAGGAT
aagatgaaatttatgcctac

SEQ ID NO: 7621 - DNA, 20 bp, Artificial Sequence
  Description of Artificial Sequence: Synthetic oligonucleotide
  Target: ATXN2; (-) strand; PAM type: NNGRRT; PAM sequence: TGGAGT
aggctggagttaatgaaaaa

SEQ ID NO: 7622 - DNA, 20 bp, Artificial Sequence
  Description of Artificial Sequence: Synthetic oligonucleotide
  Target: ATXN2; (-) strand; PAM type: NNGRRT; PAM sequence: TGGAGT
aatacccaatttaagaaggc

SEQ ID NO: 7623 - DNA, 20 bp, Artificial Sequence
  Description of Artificial Sequence: Synthetic oligonucleotide
  Target: ATXN2; (-) strand; PAM type: NNGRRT; PAM sequence: GGGAGT
ttttaaaggatacatgttaa

SEQ ID NO: 7624 - DNA, 20 bp, Artificial Sequence
  Description of Artificial Sequence: Synthetic oligonucleotide
  Target: ATXN2; (-) strand; PAM type: NNGRRT; PAM sequence: AAGGAT
gtacagtaaaacacttttta

SEQ ID NO: 7625 - DNA, 20 bp, Artificial Sequence
  Description of Artificial Sequence: Synthetic oligonucleotide
  Target: ATXN2; (-) strand; PAM type: NNGRRT; PAM sequence: TTGGGT
ctttctactttgccagtgag

SEQ ID NO: 7626 - DNA, 20 bp, Artificial Sequence
  Description of Artificial Sequence: Synthetic oligonucleotide
  Target: ATXN2; (-) strand; PAM type: NNGRRT; PAM sequence: GTGAGT
cccttctttctactttgcca

SEQ ID NO: 7627 - DNA, 20 bp, Artificial Sequence
  Description of Artificial Sequence: Synthetic oligonucleotide
  Target: ATXN2; (-) strand; PAM type: NNGRRT; PAM sequence: ATGAAT
cttatgaaaatgaattatgc

SEQ ID NO: 7628 - DNA, 20 bp, Artificial Sequence
  Description of Artificial Sequence: Synthetic oligonucleotide
  Target: ATXN2; (-) strand; PAM type: NNGRRT; PAM sequence: ATGAAT
gcttgtcatctcttatgaaa

SEQ ID NO: 7629 - DNA, 20 bp, Artificial Sequence
  Description of Artificial Sequence: Synthetic oligonucleotide
  Target: ATXN2; (-) strand; PAM type: NNGRRT; PAM sequence: TAGAAT
tttatatcaaggttgttcag

SEQ ID NO: 7630 - DNA, 20 bp, Artificial Sequence
  Description of Artificial Sequence: Synthetic oligonucleotide
  Target: ATXN2; (-) strand; PAM type: NNGRRT; PAM sequence: TTGAAT
tttgcaaaattgtgtgtcta

SEQ ID NO: 7631 - DNA, 20 bp, Artificial Sequence
  Description of Artificial Sequence: Synthetic oligonucleotide
  Target: ATXN2; (-) strand; PAM type: NNGRRT; PAM sequence: CAGGAT
tccattactagataatcttt

SEQ ID NO: 7632 - DNA, 20 bp, Artificial Sequence
  Description of Artificial Sequence: Synthetic oligonucleotide
  Target: ATXN2; (-) strand; PAM type: NNGRRT; PAM sequence: TTGGAT
cttgctatgatcctaaattt

SEQ ID NO: 7633 - DNA, 20 bp, Artificial Sequence
  Description of Artificial Sequence: Synthetic oligonucleotide
  Target: ATXN2; (-) strand; PAM type: NNGRRT; PAM sequence: CAGAAT
ccattaggaagaattagatc

SEQ ID NO: 7634 - DNA, 20 bp, Artificial Sequence
  Description of Artificial Sequence: Synthetic oligonucleotide
  Target: ATXN2; (-) strand; PAM type: NNGRRT; PAM sequence: AAGAAT
gactaactagagccattagg

SEQ ID NO: 7635 - DNA, 20 bp, Artificial Sequence
  Description of Artificial Sequence: Synthetic oligonucleotide
  Target: ATXN2; (-) strand; PAM type: NNGRRT; PAM sequence: TGGGAT
gcctaggcctcccaaagtgc

SEQ ID NO: 7636 - DNA, 20 bp, Artificial Sequence
  Description of Artificial Sequence: Synthetic oligonucleotide
  Target: ATXN2; (-) strand; PAM type: NNGRRT; PAM sequence: CGGGGT
ttttgtatttttagtagaga

SEQ ID NO: 7637 - DNA, 20 bp, Artificial Sequence
  Description of Artificial Sequence: Synthetic oligonucleotide
  Target: ATXN2; (-) strand; PAM type: NNGRRT; PAM sequence: CCGAGT
ggtttttctgcctcagcctc

SEQ ID NO: 7638 - DNA, 20 bp, Artificial Sequence
  Description of Artificial Sequence: Synthetic oligonucleotide
  Target: ATXN2; (-) strand; PAM type: NNGRRT; PAM sequence: TGGGAT
acctcagcctcccaaagtgc

SEQ ID NO: 7639 - DNA, 20 bp, Artificial Sequence
  Description of Artificial Sequence: Synthetic oligonucleotide
  Target: ATXN2; (-) strand; PAM type: NNGRRT; PAM sequence: TTGAAT
ccatgttggtcaggctggtc

SEQ ID NO: 7640 - DNA, 20 bp, Artificial Sequence
  Description of Artificial Sequence: Synthetic oligonucleotide
  Target: ATXN2; (-) strand; PAM type: NNGRRT; PAM sequence: CAGGGT
ttttgtgtttttagtagaga

SEQ ID NO: 7641 - DNA, 20 bp, Artificial Sequence
  Description of Artificial Sequence: Synthetic oligonucleotide
  Target: ATXN2; (-) strand; PAM type: NNGRRT; PAM sequence: CTGAGT
agttctcctgcctcagcctc

SEQ ID NO: 7642 - DNA, 20 bp, Artificial Sequence
  Description of Artificial Sequence: Synthetic oligonucleotide
  Target: ATXN2; (-) strand; PAM type: NNGRRT; PAM sequence: CTGGGT
ctccctgcaaactccgcctc

SEQ ID NO: 7643 - DNA, 20 bp, Artificial Sequence
  Description of Artificial Sequence: Synthetic oligonucleotide
  Target: ATXN2; (-) strand; PAM type: NNGRRT; PAM sequence: TGGAGT
tctccctctgccacccaggc

SEQ ID NO: 7644 - DNA, 20 bp, Artificial Sequence
  Description of Artificial Sequence: Synthetic oligonucleotide
  Target: ATXN2; (-) strand; PAM type: NNGRRT; PAM sequence: AGGAGT
tttttttttaatttttgaga

SEQ ID NO: 7645 - DNA, 20 bp, Artificial Sequence
  Description of Artificial Sequence: Synthetic oligonucleotide
  Target: ATXN2; (-) strand; PAM type: NNGRRT; PAM sequence: TGGGAT
gcctcagcctcccaaagtgc

SEQ ID NO: 7646 - DNA, 20 bp, Artificial Sequence
  Description of Artificial Sequence: Synthetic oligonucleotide
  Target: ATXN2; (-) strand; PAM type: NNGRRT; PAM sequence: CAGGAT
tggggtttcactgtgttagc

SEQ ID NO: 7647 - DNA, 20 bp, Artificial Sequence
  Description of Artificial Sequence: Synthetic oligonucleotide
  Target: ATXN2; (-) strand; PAM type: NNGRRT; PAM sequence: TGGGGT
tgtattttgtttagtagaga

SEQ ID NO: 7648 - DNA, 20 bp, Artificial Sequence
  Description of Artificial Sequence: Synthetic oligonucleotide
  Target: ATXN2; (-) strand; PAM type: NNGRRT; PAM sequence: CCGAGT
cattctcctacctcagcctc

SEQ ID NO: 7649 - DNA, 20 bp, Artificial Sequence
  Description of Artificial Sequence: Synthetic oligonucleotide
  Target: ATXN2; (-) strand; PAM type: NNGRRT; PAM sequence: TGGAGT
tctctccctgtcgcccaggc

SEQ ID NO: 7650 - DNA, 20 bp, Artificial Sequence
  Description of Artificial Sequence: Synthetic oligonucleotide
  Target: ATXN2; (-) strand; PAM type: NNGRRT; PAM sequence: TGGAGT
tgatgtctctttttttgaga

SEQ ID NO: 7651 - DNA, 20 bp, Artificial Sequence
  Description of Artificial Sequence: Synthetic oligonucleotide
  Target: ATXN2; (-) strand; PAM type: NNGRRT; PAM sequence: TAGGAT
tgaacagttaaatgataaaa

SEQ ID NO: 7652 - DNA, 20 bp, Artificial Sequence
  Description of Artificial Sequence: Synthetic oligonucleotide
  Target: ATXN2; (-) strand; PAM type: NNGRRT; PAM sequence: ATGAAT
aggaaccaaatactttgagt

SEQ ID NO: 7653 - DNA, 20 bp, Artificial Sequence
  Description of Artificial Sequence: Synthetic oligonucleotide
  Target: ATXN2; (-) strand; PAM type: NNGRRT; PAM sequence: TTGAGT
tctcaaaggaaccaaatact

SEQ ID NO: 7654 - DNA, 20 bp, Artificial Sequence
  Description of Artificial Sequence: Synthetic oligonucleotide
  Target: ATXN2; (-) strand; PAM type: NNGRRT; PAM sequence: TTGAAT
ttaaatctgcagtgatttat

SEQ ID NO: 7655 - DNA, 20 bp, Artificial Sequence
  Description of Artificial Sequence: Synthetic oligonucleotide
  Target: ATXN2; (-) strand; PAM type: NNGRRT; PAM sequence: AAGAAT
aaaaaaaagaaaacataaga

SEQ ID NO: 7656 - DNA, 20 bp, Artificial Sequence
  Description of Artificial Sequence: Synthetic oligonucleotide
  Target: ATXN2; (-) strand; PAM type: NNGRRT; PAM sequence: CTGGGT
tggcaccactgtaatccagc

SEQ ID NO: 7657 - DNA, 20 bp, Artificial Sequence
  Description of Artificial Sequence: Synthetic oligonucleotide
  Target: ATXN2; (-) strand; PAM type: NNGRRT; PAM sequence: TTGAGT
agctgagatgggaggatcac

SEQ ID NO: 7658 - DNA, 20 bp, Artificial Sequence
  Description of Artificial Sequence: Synthetic oligonucleotide
  Target: ATXN2; (-) strand; PAM type: NNGRRT; PAM sequence: GAGGAT
tacacaggaagctgagatgg

SEQ ID NO: 7659 - DNA, 20 bp, Artificial Sequence
  Description of Artificial Sequence: Synthetic oligonucleotide
  Target: ATXN2; (-) strand; PAM type: NNGRRT; PAM sequence: GAGGAT
aacttggggaggctgaagtg

SEQ ID NO: 7660 - DNA, 20 bp, Artificial Sequence
  Description of Artificial Sequence: Synthetic oligonucleotide
  Target: ATXN2; (-) strand; PAM type: NNGRRT; PAM sequence: TGGAAT
atctaatgtccagtgaaatc

SEQ ID NO: 7661 - DNA, 20 bp, Artificial Sequence
  Description of Artificial Sequence: Synthetic oligonucleotide
  Target: ATXN2; (-) strand; PAM type: NNGRRT; PAM sequence: TAGGGT
attggttttgaaacagccta

SEQ ID NO: 7662 - DNA, 20 bp, Artificial Sequence
  Description of Artificial Sequence: Synthetic oligonucleotide
  Target: ATXN2; (-) strand; PAM type: NNGRRT; PAM sequence: ATGAAT
catctggcttcatcttttgg

SEQ ID NO: 7663 - DNA, 20 bp, Artificial Sequence
  Description of Artificial Sequence: Synthetic oligonucleotide
  Target: ATXN2; (-) strand; PAM type: NNGRRT; PAM sequence: TTGGAT
ccaacatctggcttcatctt

SEQ ID NO: 7664 - DNA, 20 bp, Artificial Sequence
  Description of Artificial Sequence: Synthetic oligonucleotide
  Target: ATXN2; (-) strand; PAM type: NNGRRT; PAM sequence: CCGAAT
aataatactgtaatgttgag

SEQ ID NO: 7665 - DNA, 20 bp, Artificial Sequence
  Description of Artificial Sequence: Synthetic oligonucleotide
  Target: ATXN2; (-) strand; PAM type: NNGRRT; PAM sequence: GAGAGT
taaaatttccattgcatttg

SEQ ID NO: 7666 - DNA, 20 bp, Artificial Sequence
  Description of Artificial Sequence: Synthetic oligonucleotide
  Target: ATXN2; (-) strand; PAM type: NNGRRT; PAM sequence: TGGAAT
attttctggcatactcccct

SEQ ID NO: 7667 - DNA, 20 bp, Artificial Sequence
  Description of Artificial Sequence: Synthetic oligonucleotide
  Target: ATXN2; (-) strand; PAM type: NNGRRT; PAM sequence: GTGAAT
tgattgtttatacatttctg

SEQ ID NO: 7668 - DNA, 20 bp, Artificial Sequence
  Description of Artificial Sequence: Synthetic oligonucleotide
  Target: ATXN2; (-) strand; PAM type: NNGRRT; PAM sequence: CTGAAT
tttagttgtcttaacgggga

SEQ ID NO: 7669 - DNA, 20 bp, Artificial Sequence
  Description of Artificial Sequence: Synthetic oligonucleotide
  Target: ATXN2; (-) strand; PAM type: NNGRRT; PAM sequence: GTGGAT
atcactttcaattttgtatt

SEQ ID NO: 7670 - DNA, 20 bp, Artificial Sequence
  Description of Artificial Sequence: Synthetic oligonucleotide
  Target: ATXN2; (-) strand; PAM type: NNGRRT; PAM sequence: AGGAAT
cacaaaggctcactgctgat

SEQ ID NO: 7671 - DNA, 20 bp, Artificial Sequence
  Description of Artificial Sequence: Synthetic oligonucleotide
  Target: ATXN2; (-) strand; PAM type: NNGRRT; PAM sequence: GAGAAT
ttaacattccgtaggttaat

SEQ ID NO: 7672 - DNA, 20 bp, Artificial Sequence
  Description of Artificial Sequence: Synthetic oligonucleotide
  Target: ATXN2; (-) strand; PAM type: NNGRRT; PAM sequence: AAGAAT
taccacctctgtcctttttg

SEQ ID NO: 7673 - DNA, 20 bp, Artificial Sequence
  Description of Artificial Sequence: Synthetic oligonucleotide
  Target: ATXN2; (-) strand; PAM type: NNGRRT; PAM sequence: AAGAAT
caaaaaaaaaaaaaaaaaaa

SEQ ID NO: 7674 - DNA, 20 bp, Artificial Sequence
  Description of Artificial Sequence: Synthetic oligonucleotide
  Target: ATXN2; (-) strand; PAM type: NNGRRT; PAM sequence: CAGAGT
ctacactctagcctgagcga

SEQ ID NO: 7675 - DNA, 20 bp, Artificial Sequence
  Description of Artificial Sequence: Synthetic oligonucleotide
  Target: ATXN2; (-) strand; PAM type: NNGRRT; PAM sequence: CAGAAT
tacttcggaggctgaggcaa

SEQ ID NO: 7676 - DNA, 20 bp, Artificial Sequence
  Description of Artificial Sequence: Synthetic oligonucleotide
  Target: ATXN2; (-) strand; PAM type: NNGRRT; PAM sequence: CCGGGT
ctaaaaatccaaaaaattgg

SEQ ID NO: 7677 - DNA, 20 bp, Artificial Sequence
  Description of Artificial Sequence: Synthetic oligonucleotide
  Target: ATXN2; (-) strand; PAM type: NNGRRT; PAM sequence: GCGGAT
actttgggaggccaaggctg

SEQ ID NO: 7678 - DNA, 20 bp, Artificial Sequence
  Description of Artificial Sequence: Synthetic oligonucleotide
  Target: ATXN2; (-) strand; PAM type: NNGRRT; PAM sequence: AAGAAT
taggcaaaattgagttattt

SEQ ID NO: 7679 - DNA, 20 bp, Artificial Sequence
  Description of Artificial Sequence: Synthetic oligonucleotide
  Target: ATXN2; (-) strand; PAM type: NNGRRT; PAM sequence: TTGAGT
acgagtatgtttaggcaaaa

SEQ ID NO: 7680 - DNA, 20 bp, Artificial Sequence
  Description of Artificial Sequence: Synthetic oligonucleotide
  Target: ATXN2; (-) strand; PAM type: NNGRRT; PAM sequence: ACGAGT
tttaagtttagatgtcctga

SEQ ID NO: 7681 - DNA, 20 bp, Artificial Sequence
  Description of Artificial Sequence: Synthetic oligonucleotide
  Target: ATXN2; (-) strand; PAM type: NNGRRT; PAM sequence: AAGAAT
tttgaactttttgaaatact

SEQ ID NO: 7682 - DNA, 20 bp, Artificial Sequence
  Description of Artificial Sequence: Synthetic oligonucleotide
  Target: ATXN2; (-) strand; PAM type: NNGRRT; PAM sequence: GAGAAT
gttgaaaagtgtactgctat

SEQ ID NO: 7683 - DNA, 20 bp, Artificial Sequence
  Description of Artificial Sequence: Synthetic oligonucleotide
  Target: ATXN2; (-) strand; PAM type: NNGRRT; PAM sequence: GGGGAT
gtttttggttgtttggagta

SEQ ID NO: 7684 - DNA, 20 bp, Artificial Sequence
  Description of Artificial Sequence: Synthetic oligonucleotide
  Target: ATXN2; (-) strand; PAM type: NNGRRT; PAM sequence: TGGAGT
tatttgcgtttttggttgtt

SEQ ID NO: 7685 - DNA, 20 bp, Artificial Sequence
  Description of Artificial Sequence: Synthetic oligonucleotide
  Target: ATXN2; (-) strand; PAM type: NNGRRT; PAM sequence: CTGAAT
tttcattaagatgttttgtt

SEQ ID NO: 7686 - DNA, 20 bp, Artificial Sequence
  Description of Artificial Sequence: Synthetic oligonucleotide
  Target: ATXN2; (-) strand; PAM type: NNGRRT; PAM sequence: CAGAAT
ggattgcttcaaatgttttt

SEQ ID NO: 7687 - DNA, 20 bp, Artificial Sequence
  Description of Artificial Sequence: Synthetic oligonucleotide
  Target: ATXN2; (-) strand; PAM type: NNGRRT; PAM sequence: ATGGAT
tatcttatgatacagaatta

SEQ ID NO: 7688 - DNA, 20 bp, Artificial Sequence
  Description of Artificial Sequence: Synthetic oligonucleotide
  Target: ATXN2; (-) strand; PAM type: NNGRRT; PAM sequence: CAGAAT
catttgtatatcttatgata

SEQ ID NO: 7689 - DNA, 20 bp, Artificial Sequence
  Description of Artificial Sequence: Synthetic oligonucleotide
  Target: ATXN2; (-) strand; PAM type: NNGRRT; PAM sequence: GAGAAT
actaagcagtatttatatgt

SEQ ID NO: 7690 - DNA, 20 bp, Artificial Sequence
  Description of Artificial Sequence: Synthetic oligonucleotide
  Target: ATXN2; (-) strand; PAM type: NNGRRT; PAM sequence: CAGAAT
ttaaatataaccaatgtgaa

SEQ ID NO: 7691 - DNA, 20 bp, Artificial Sequence
  Description of Artificial Sequence: Synthetic oligonucleotide
  Target: ATXN2; (-) strand; PAM type: NNGRRT; PAM sequence: ATGAGT
atattagatatattttagac

SEQ ID NO: 7692 - DNA, 20 bp, Artificial Sequence
  Description of Artificial Sequence: Synthetic oligonucleotide
  Target: ATXN2; (-) strand; PAM type: NNGRRT; PAM sequence: TTGAAT
atcatgctgtattttaatgg

SEQ ID NO: 7693 - DNA, 20 bp, Artificial Sequence
  Description of Artificial Sequence: Synthetic oligonucleotide
  Target: ATXN2; (-) strand; PAM type: NNGRRT; PAM sequence: GAGGGT
tttgcttcactacttgatct

SEQ ID NO: 7694 - DNA, 20 bp, Artificial Sequence
  Description of Artificial Sequence: Synthetic oligonucleotide
  Target: ATXN2; (-) strand; PAM type: NNGRRT; PAM sequence: GAGAAT
atcctgcctacgacatgcaa

SEQ ID NO: 7695 - DNA, 20 bp, Artificial Sequence
  Description of Artificial Sequence: Synthetic oligonucleotide
  Target: ATXN2; (-) strand; PAM type: NNGRRT; PAM sequence: AAGAAT
cttttatgacattgagggtc

SEQ ID NO: 7696 - DNA, 20 bp, Artificial Sequence
  Description of Artificial Sequence: Synthetic oligonucleotide
  Target: ATXN2; (-) strand; PAM type: NNGRRT; PAM sequence: GAGGGT
acctgaccttttatgacatt

SEQ ID NO: 7697 - DNA, 20 bp, Artificial Sequence
  Description of Artificial Sequence: Synthetic oligonucleotide
  Target: ATXN2; (-) strand; PAM type: NNGRRT; PAM sequence: AAGAAT
tctgaaaacatactctatct

SEQ ID NO: 7698 - DNA, 20 bp, Artificial Sequence
  Description of Artificial Sequence: Synthetic oligonucleotide
  Target: ATXN2; (-) strand; PAM type: NNGRRT; PAM sequence: TAGAAT
cctgtaatacagggtaatgc

SEQ ID NO: 7699 - DNA, 20 bp, Artificial Sequence
  Description of Artificial Sequence: Synthetic oligonucleotide
  Target: ATXN2; (-) strand; PAM type: NNGRRT; PAM sequence: CAGGGT
atgtctatagtcctgtaata

SEQ ID NO: 7700 - DNA, 20 bp, Artificial Sequence
  Description of Artificial Sequence: Synthetic oligonucleotide
  Target: ATXN2; (-) strand; PAM type: NNGRRT; PAM sequence: TGGAGT
ttctggaaatctggaaacca

SEQ ID NO: 7701 - DNA, 20 bp, Artificial Sequence
  Description of Artificial Sequence: Synthetic oligonucleotide
  Target: ATXN2; (-) strand; PAM type: NNGRRT; PAM sequence: GAGAGT
gaaacagccaagaaagattt

SEQ ID NO: 7702 - DNA, 20 bp, Artificial Sequence
  Description of Artificial Sequence: Synthetic oligonucleotide
  Target: ATXN2; (-) strand; PAM type: NNGRRT; PAM sequence: TAGGGT
tttttgcttttgtgtgatgg

SEQ ID NO: 7703 - DNA, 20 bp, Artificial Sequence
  Description of Artificial Sequence: Synthetic oligonucleotide
  Target: ATXN2; (-) strand; PAM type: NNGRRT; PAM sequence: AGGGAT
aaaaacttttaatatggtaa

SEQ ID NO: 7704 - DNA, 20 bp, Artificial Sequence
  Description of Artificial Sequence: Synthetic oligonucleotide
  Target: ATXN2; (-) strand; PAM type: NNGRRT; PAM sequence: CAGAGT
agcggcaagaccagcatcat

SEQ ID NO: 7705 - DNA, 20 bp, Artificial Sequence
  Description of Artificial Sequence: Synthetic oligonucleotide
  Target: ATXN2; (-) strand; PAM type: NNGRRT; PAM sequence: CAGGGT
tggcatcagagacgcagatt

SEQ ID NO: 7706 - DNA, 20 bp, Artificial Sequence
  Description of Artificial Sequence: Synthetic oligonucleotide
  Target: ATXN2; (-) strand; PAM type: NNGRRT; PAM sequence: GGGAGT
taacccagagtggcagaagt

SEQ ID NO: 7707 - DNA, 20 bp, Artificial Sequence
  Description of Artificial Sequence: Synthetic oligonucleotide
  Target: ATXN2; (-) strand; PAM type: NNGRRT; PAM sequence: CAGAGT
tgcatgataggaaaataacc

SEQ ID NO: 7708 - DNA, 20 bp, Artificial Sequence
  Description of Artificial Sequence: Synthetic oligonucleotide
  Target: ATXN2; (-) strand; PAM type: NNGRRT; PAM sequence: TGGGAT
tgaagcagaattatcccagc

SEQ ID NO: 7709 - DNA, 20 bp, Artificial Sequence
  Description of Artificial Sequence: Synthetic oligonucleotide
  Target: ATXN2; (-) strand; PAM type: NNGRRT; PAM sequence: CAGAAT
ctgacacctgaaggatgaag

SEQ ID NO: 7710 - DNA, 20 bp, Artificial Sequence
  Description of Artificial Sequence: Synthetic oligonucleotide
  Target: ATXN2; (-) strand; PAM type: NNGRRT; PAM sequence: AAGGAT
tgctttcaagctgacacctg

SEQ ID NO: 7711 - DNA, 20 bp, Artificial Sequence
  Description of Artificial Sequence: Synthetic oligonucleotide
  Target: ATXN2; (-) strand; PAM type: NNGRRT; PAM sequence: GAGAGT
aagcgatttcataatgctgt

SEQ ID NO: 7712 - DNA, 20 bp, Artificial Sequence
  Description of Artificial Sequence: Synthetic oligonucleotide
  Target: ATXN2; (-) strand; PAM type: NNGRRT; PAM sequence: ATGAAT
atgcctttgtttttctcaaa

SEQ ID NO: 7713 - DNA, 20 bp, Artificial Sequence
  Description of Artificial Sequence: Synthetic oligonucleotide
  Target: ATXN2; (-) strand; PAM type: NNGRRT; PAM sequence: TTGGAT
aggaagatagaaagttagtg

SEQ ID NO: 7714 - DNA, 20 bp, Artificial Sequence
  Description of Artificial Sequence: Synthetic oligonucleotide
  Target: ATXN2; (-) strand; PAM type: NNGRRT; PAM sequence: AAGGAT
gaaagaatgggaagtgttac

SEQ ID NO: 7715 - DNA, 20 bp, Artificial Sequence
  Description of Artificial Sequence: Synthetic oligonucleotide
  Target: ATXN2; (-) strand; PAM type: NNGRRT; PAM sequence: AAGAAT
gtgttatactgggtttgaga

SEQ ID NO: 7716 - DNA, 20 bp, Artificial Sequence
  Description of Artificial Sequence: Synthetic oligonucleotide
  Target: ATXN2; (-) strand; PAM type: NNGRRT; PAM sequence: CTGGGT
ctacatggtgctgtgttata

SEQ ID NO: 7717 - DNA, 20 bp, Artificial Sequence
  Description of Artificial Sequence: Synthetic oligonucleotide
  Target: ATXN2; (-) strand; PAM type: NNGRRT; PAM sequence: GTGGAT
cttacatgcagaccacctgt

SEQ ID NO: 7718 - DNA, 20 bp, Artificial Sequence
  Description of Artificial Sequence: Synthetic oligonucleotide
  Target: ATXN2; (-) strand; PAM type: NNGRRT; PAM sequence: TAGAGT
agttgagctgaattcttaac

SEQ ID NO: 7719 - DNA, 20 bp, Artificial Sequence
  Description of Artificial Sequence: Synthetic oligonucleotide
  Target: ATXN2; (-) strand; PAM type: NNGRRT; PAM sequence: CTGAAT
catgggagatgacagttgag

SEQ ID NO: 7720 - DNA, 20 bp, Artificial Sequence
  Description of Artificial Sequence: Synthetic oligonucleotide
  Target: ATXN2; (-) strand; PAM type: NNGRRT; PAM sequence: TAGGAT
ttaattatataatcagttct

SEQ ID NO: 7721 - DNA, 20 bp, Artificial Sequence
  Description of Artificial Sequence: Synthetic oligonucleotide
  Target: ATXN2; (-) strand; PAM type: NNGRRT; PAM sequence: GTGAAT
ccaaatttcagcaacagtta

SEQ ID NO: 7722 - DNA, 20 bp, Artificial Sequence
  Description of Artificial Sequence: Synthetic oligonucleotide
  Target: ATXN2; (-) strand; PAM type: NNGRRT; PAM sequence: GTGAAT
taagtaacaaagtaataata

SEQ ID NO: 7723 - DNA, 20 bp, Artificial Sequence
  Description of Artificial Sequence: Synthetic oligonucleotide
  Target: ATXN2; (-) strand; PAM type: NNGRRT; PAM sequence: GAGAAT
tggggatcatgttttaacat

SEQ ID NO: 7724 - DNA, 20 bp, Artificial Sequence
  Description of Artificial Sequence: Synthetic oligonucleotide
  Target: ATXN2; (-) strand; PAM type: NNGRRT; PAM sequence: GGGGAT
tgagccactgcgcctggcct

SEQ ID NO: 7725 - DNA, 20 bp, Artificial Sequence
  Description of Artificial Sequence: Synthetic oligonucleotide
  Target: ATXN2; (-) strand; PAM type: NNGRRT; PAM sequence: AGGGAT
gccctggcctcctaaagtgt

SEQ ID NO: 7726 - DNA, 20 bp, Artificial Sequence
  Description of Artificial Sequence: Synthetic oligonucleotide
  Target: ATXN2; (-) strand; PAM type: NNGRRT; PAM sequence: CAGGGT
cagtgtctccccatgttgcc

SEQ ID NO: 7727 - DNA, 20 bp, Artificial Sequence
  Description of Artificial Sequence: Synthetic oligonucleotide
  Target: ATXN2; (-) strand; PAM type: NNGRRT; PAM sequence: CTGAGT
gttcctcccacctcagcctc

SEQ ID NO: 7728 - DNA, 20 bp, Artificial Sequence
  Description of Artificial Sequence: Synthetic oligonucleotide
  Target: ATXN2; (-) strand; PAM type: NNGRRT; PAM sequence: TGGAGT
tctcacttcttcgccgaggc

SEQ ID NO: 7729 - DNA, 20 bp, Artificial Sequence
  Description of Artificial Sequence: Synthetic oligonucleotide
  Target: ATXN2; (-) strand; PAM type: NNGRRT; PAM sequence: CAGGGT
taccctccccttttttgaga

SEQ ID NO: 7730 - DNA, 20 bp, Artificial Sequence
  Description of Artificial Sequence: Synthetic oligonucleotide
  Target: ATXN2; (-) strand; PAM type: NNGRRT; PAM sequence: CAGAGT
agcatttttcaaataacagg

SEQ ID NO: 7731 - DNA, 20 bp, Artificial Sequence
  Description of Artificial Sequence: Synthetic oligonucleotide
  Target: ATXN2; (-) strand; PAM type: NNGRRT; PAM sequence: TTGGAT
aattccaatcctttgaggta

SEQ ID NO: 7732 - DNA, 20 bp, Artificial Sequence
  Description of Artificial Sequence: Synthetic oligonucleotide
  Target: ATXN2; (-) strand; PAM type: NNGRRT; PAM sequence: GTGAGT
cccaggaggcagagagtgca

SEQ ID NO: 7733 - DNA, 20 bp, Artificial Sequence
  Description of Artificial Sequence: Synthetic oligonucleotide
  Target: ATXN2; (-) strand; PAM type: NNGRRT; PAM sequence: GAGAGT
tcgcttgaacccaggaggca

SEQ ID NO: 7734 - DNA, 20 bp, Artificial Sequence
  Description of Artificial Sequence: Synthetic oligonucleotide
  Target: ATXN2; (-) strand; PAM type: NNGRRT; PAM sequence: GAGAAT
tactctggaggctgaggtag

SEQ ID NO: 7735 - DNA, 20 bp, Artificial Sequence
  Description of Artificial Sequence: Synthetic oligonucleotide
  Target: ATXN2; (-) strand; PAM type: NNGRRT; PAM sequence: CTGGGT
tattttaaaaaaagtattag

SEQ ID NO: 7736 - DNA, 20 bp, Artificial Sequence
  Description of Artificial Sequence: Synthetic oligonucleotide
  Target: ATXN2; (-) strand; PAM type: NNGRRT; PAM sequence: TGGAGT
tgggcagatcacctgaggtc

SEQ ID NO: 7737 - DNA, 20 bp, Artificial Sequence
  Description of Artificial Sequence: Synthetic oligonucleotide
  Target: ATXN2; (-) strand; PAM type: NNGRRT; PAM sequence: CTGGAT
atattaaagtttatccttgg

SEQ ID NO: 7738 - DNA, 20 bp, Artificial Sequence
  Description of Artificial Sequence: Synthetic oligonucleotide
  Target: ATXN2; (-) strand; PAM type: NNGRRT; PAM sequence: TTGAGT
tgattgatgtcttcatgatg

SEQ ID NO: 7739 - DNA, 20 bp, Artificial Sequence
  Description of Artificial Sequence: Synthetic oligonucleotide
  Target: ATXN2; (-) strand; PAM type: NNGRRT; PAM sequence: CAGAAT
catgagccaccatggcaggc

SEQ ID NO: 7740 - DNA, 20 bp, Artificial Sequence
  Description of Artificial Sequence: Synthetic oligonucleotide
  Target: ATXN2; (-) strand; PAM type: NNGRRT; PAM sequence: CAGGGT
ttttgtatattttgcagaga

SEQ ID NO: 7741 - DNA, 20 bp, Artificial Sequence
  Description of Artificial Sequence: Synthetic oligonucleotide
  Target: ATXN2; (-) strand; PAM type: NNGRRT; PAM sequence: TGGGAT
ttacctaggctggagtgcag

SEQ ID NO: 7742 - DNA, 20 bp, Artificial Sequence
  Description of Artificial Sequence: Synthetic oligonucleotide
  Target: ATXN2; (-) strand; PAM type: NNGRRT; PAM sequence: TGGAGT
tctggctctgttacctaggc

SEQ ID NO: 7743 - DNA, 20 bp, Artificial Sequence
  Description of Artificial Sequence: Synthetic oligonucleotide
  Target: ATXN2; (-) strand; PAM type: NNGRRT; PAM sequence: TGGAAT
ttactatcagtataaacttc

SEQ ID NO: 7744 - DNA, 20 bp, Artificial Sequence
  Description of Artificial Sequence: Synthetic oligonucleotide
  Target: ATXN2; (-) strand; PAM type: NNGRRT; PAM sequence: ATGAGT
ttaaggcagtcttcaaaata

SEQ ID NO: 7745 - DNA, 20 bp, Artificial Sequence
  Description of Artificial Sequence: Synthetic oligonucleotide
  Target: ATXN2; (-) strand; PAM type: NNGRRT; PAM sequence: TGGAAT
tcccttcttcaattattgcc

SEQ ID NO: 7746 - DNA, 20 bp, Artificial Sequence
  Description of Artificial Sequence: Synthetic oligonucleotide
  Target: ATXN2; (-) strand; PAM type: NNGRRT; PAM sequence: AGGGGT
ccaagatcagttatttcctt

SEQ ID NO: 7747 - DNA, 20 bp, Artificial Sequence
  Description of Artificial Sequence: Synthetic oligonucleotide
  Target: ATXN2; (-) strand; PAM type: NNGRRT; PAM sequence: GTGAGT
tttcctgataggagtagtca

SEQ ID NO: 7748 - DNA, 20 bp, Artificial Sequence
  Description of Artificial Sequence: Synthetic oligonucleotide
  Target: ATXN2; (-) strand; PAM type: NNGRRT; PAM sequence: AGGAGT
taatcagtctttttcctgat

SEQ ID NO: 7749 - DNA, 20 bp, Artificial Sequence
  Description of Artificial Sequence: Synthetic oligonucleotide
  Target: ATXN2; (-) strand; PAM type: NNGRRT; PAM sequence: AGGAGT
agatgtgtgtactttcagtg

SEQ ID NO: 7750 - DNA, 20 bp, Artificial Sequence
  Description of Artificial Sequence: Synthetic oligonucleotide
  Target: ATXN2; (-) strand; PAM type: NNGRRT; PAM sequence: TTGGGT
ataatgaaggcttgatcaga

SEQ ID NO: 7751 - DNA, 20 bp, Artificial Sequence
  Description of Artificial Sequence: Synthetic oligonucleotide
  Target: ATXN2; (-) strand; PAM type: NNGRRT; PAM sequence: CTGAAT
ttgtatttttttcccacgat

SEQ ID NO: 7752 - DNA, 20 bp, Artificial Sequence
  Description of Artificial Sequence: Synthetic oligonucleotide
  Target: ATXN2; (-) strand; PAM type: NNGRRT; PAM sequence: CAGGAT
tgccttgactcccaaggtgc

SEQ ID NO: 7753 - DNA, 20 bp, Artificial Sequence
  Description of Artificial Sequence: Synthetic oligonucleotide
  Target: ATXN2; (-) strand; PAM type: NNGRRT; PAM sequence: TCGAAT
ttttttgtagagacagggtt

SEQ ID NO: 7754 - DNA, 20 bp, Artificial Sequence
  Description of Artificial Sequence: Synthetic oligonucleotide
  Target: ATXN2; (-) strand; PAM type: NNGRRT; PAM sequence: CAGGGT
ttttgtattttttgtagaga

SEQ ID NO: 7755 - DNA, 20 bp, Artificial Sequence
  Description of Artificial Sequence: Synthetic oligonucleotide
  Target: ATXN2; (-) strand; PAM type: NNGRRT; PAM sequence: TGGAGT
tctaactctgtcacccaagc

SEQ ID NO: 7756 - DNA, 20 bp, Artificial Sequence
  Description of Artificial Sequence: Synthetic oligonucleotide
  Target: ATXN2; (-) strand; PAM type: NNGRRT; PAM sequence: CTGGAT
ggccagcactttaggaggtg

SEQ ID NO: 7757 - DNA, 20 bp, Artificial Sequence
  Description of Artificial Sequence: Synthetic oligonucleotide
  Target: ATXN2; (-) strand; PAM type: NNGRRT; PAM sequence: TAGGAT
acctcagcctcctaaagtgc

SEQ ID NO: 7758 - DNA, 20 bp, Artificial Sequence
  Description of Artificial Sequence: Synthetic oligonucleotide
  Target: ATXN2; (-) strand; PAM type: NNGRRT; PAM sequence: CAGAGT
ttttttgtttttttttgaga

SEQ ID NO: 7759 - DNA, 20 bp, Artificial Sequence
  Description of Artificial Sequence: Synthetic oligonucleotide
  Target: ATXN2; (-) strand; PAM type: NNGRRT; PAM sequence: AAGGAT
gctgcgaattcctggtctca

SEQ ID NO: 7760 - DNA, 20 bp, Artificial Sequence
  Description of Artificial Sequence: Synthetic oligonucleotide
  Target: ATXN2; (-) strand; PAM type: NNGRRT; PAM sequence: GCGAAT
aatcatagctcactgctgct

SEQ ID NO: 7761 - DNA, 20 bp, Artificial Sequence
  Description of Artificial Sequence: Synthetic oligonucleotide
  Target: ATXN2; (-) strand; PAM type: NNGRRT; PAM sequence: TGGAGT
ctggctttgttgcccaggct

SEQ ID NO: 7762 - DNA, 20 bp, Artificial Sequence
  Description of Artificial Sequence: Synthetic oligonucleotide
  Target: ATXN2; (-) strand; PAM type: NNGRRT; PAM sequence: TGGGGT
tttgttttttgtttttgaga

SEQ ID NO: 7763 - DNA, 20 bp, Artificial Sequence
  Description of Artificial Sequence: Synthetic oligonucleotide
  Target: ATXN2; (-) strand; PAM type: NNGRRT; PAM sequence: CTGGAT
tcttaaaagctttgagtcca

SEQ ID NO: 7764 - DNA, 20 bp, Artificial Sequence
  Description of Artificial Sequence: Synthetic oligonucleotide
  Target: ATXN2; (-) strand; PAM type: NNGRRT; PAM sequence: TTGAGT
cccattgtctcttaaaagct

SEQ ID NO: 7765 - DNA, 20 bp, Artificial Sequence
  Description of Artificial Sequence: Synthetic oligonucleotide
  Target: ATXN2; (-) strand; PAM type: NNGRRT; PAM sequence: ACGAAT
ccttgcggtaactttttatt

SEQ ID NO: 7766 - DNA, 20 bp, Artificial Sequence
  Description of Artificial Sequence: Synthetic oligonucleotide
  Target: ATXN2; (-) strand; PAM type: NNGRRT; PAM sequence: TGGGAT
gcctcggcctcccaaagtgc

SEQ ID NO: 7767 - DNA, 20 bp, Artificial Sequence
  Description of Artificial Sequence: Synthetic oligonucleotide
  Target: ATXN2; (-) strand; PAM type: NNGRRT; PAM sequence: TGGGGT
ccttgtatttttaatagaga

SEQ ID NO: 7768 - DNA, 20 bp, Artificial Sequence
  Description of Artificial Sequence: Synthetic oligonucleotide
  Target: ATXN2; (-) strand; PAM type: NNGRRT; PAM sequence: TGGGAT
gcctcggcctcccaaagtgc

SEQ ID NO: 7769 - DNA, 20 bp, Artificial Sequence
  Description of Artificial Sequence: Synthetic oligonucleotide
  Target: ATXN2; (-) strand; PAM type: NNGRRT; PAM sequence: CAGGAT
cagggtttcaccgtgttagc

SEQ ID NO: 7770 - DNA, 20 bp, Artificial Sequence
  Description of Artificial Sequence: Synthetic oligonucleotide
  Target: ATXN2; (-) strand; PAM type: NNGRRT; PAM sequence: CAGGGT
ttttgtatttttagtagaga

SEQ ID NO: 7771 - DNA, 20 bp, Artificial Sequence
  Description of Artificial Sequence: Synthetic oligonucleotide
  Target: ATXN2; (-) strand; PAM type: NNGRRT; PAM sequence: CTGAGT
cattctcctgcctcagcctc

SEQ ID NO: 7772 - DNA, 20 bp, Artificial Sequence
  Description of Artificial Sequence: Synthetic oligonucleotide
  Target: ATXN2; (-) strand; PAM type: NNGRRT; PAM sequence: TTGGGT
ctcactgcaagctccgcctc

SEQ ID NO: 7773 - DNA, 20 bp, Artificial Sequence
  Description of Artificial Sequence: Synthetic oligonucleotide
  Target: ATXN2; (-) strand; PAM type: NNGRRT; PAM sequence: TGGAGT
tctcgctctgttgcccaggc

SEQ ID NO: 7774 - DNA, 20 bp, Artificial Sequence
  Description of Artificial Sequence: Synthetic oligonucleotide
  Target: ATXN2; (-) strand; PAM type: NNGRRT; PAM sequence: CAGAGT
ccagccttttttttttgaga

SEQ ID NO: 7775 - DNA, 20 bp, Artificial Sequence
  Description of Artificial Sequence: Synthetic oligonucleotide
  Target: ATXN2; (-) strand; PAM type: NNGRRT; PAM sequence: TGGGGT
ctcactgcaacctccccctc

SEQ ID NO: 7776 - DNA, 20 bp, Artificial Sequence
  Description of Artificial Sequence: Synthetic oligonucleotide
  Target: ATXN2; (-) strand; PAM type: NNGRRT; PAM sequence: TGGAGT
cttggctctgtcacctaggc

SEQ ID NO: 7777 - DNA, 20 bp, Artificial Sequence
  Description of Artificial Sequence: Synthetic oligonucleotide
  Target: ATXN2; (-) strand; PAM type: NNGRRT; PAM sequence: TGGAAT
ttttttttttttttttgaga

SEQ ID NO: 7778 - DNA, 20 bp, Artificial Sequence
  Description of Artificial Sequence: Synthetic oligonucleotide
  Target: ATXN2; (-) strand; PAM type: NNGRRT; PAM sequence: TTGGAT
gtccaagtcaggcttgcaat

SEQ ID NO: 7779 - DNA, 20 bp, Artificial Sequence
  Description of Artificial Sequence: Synthetic oligonucleotide
  Target: ATXN2; (-) strand; PAM type: NNGRRT; PAM sequence: TAGGGT
ttacaataatttgttccaat

SEQ ID NO: 7780 - DNA, 20 bp, Artificial Sequence
  Description of Artificial Sequence: Synthetic oligonucleotide
  Target: ATXN2; (-) strand; PAM type: NNGRRT; PAM sequence: CTGGGT
ttgcgcacctgtactccagc

SEQ ID NO: 7781 - DNA, 20 bp, Artificial Sequence
  Description of Artificial Sequence: Synthetic oligonucleotide
  Target: ATXN2; (-) strand; PAM type: NNGRRT; PAM sequence: TTGAGT
ccaggaggcggaagttgtag

SEQ ID NO: 7782 - DNA, 20 bp, Artificial Sequence
  Description of Artificial Sequence: Synthetic oligonucleotide
  Target: ATXN2; (-) strand; PAM type: NNGRRT; PAM sequence: AAGAAT
tacttgggagactgaggcag

SEQ ID NO: 7783 - DNA, 20 bp, Artificial Sequence
  Description of Artificial Sequence: Synthetic oligonucleotide
  Target: ATXN2; (-) strand; PAM type: NNGRRT; PAM sequence: TTGAAT
attttttttttcagattacc

SEQ ID NO: 7784 - DNA, 20 bp, Artificial Sequence
  Description of Artificial Sequence: Synthetic oligonucleotide
  Target: ATXN2; (-) strand; PAM type: NNGRRT; PAM sequence: CTGGAT
ttttgtggttgaatttgttt

SEQ ID NO: 7785 - DNA, 20 bp, Artificial Sequence
  Description of Artificial Sequence: Synthetic oligonucleotide
  Target: ATXN2; (-) strand; PAM type: NNGRRT; PAM sequence: TTGAAT
taacaagtgtctttttgtgg

SEQ ID NO: 7786 - DNA, 20 bp, Artificial Sequence
  Description of Artificial Sequence: Synthetic oligonucleotide
  Target: ATXN2; (-) strand; PAM type: NNGRRT; PAM sequence: ATGGAT
gtgtgtatgcgtgcgcatag

SEQ ID NO: 7787 - DNA, 20 bp, Artificial Sequence
  Description of Artificial Sequence: Synthetic oligonucleotide
  Target: ATXN2; (-) strand; PAM type: NNGRRT; PAM sequence: CTGGGT
ttgtaccactgtactccagc

SEQ ID NO: 7788 - DNA, 20 bp, Artificial Sequence
  Description of Artificial Sequence: Synthetic oligonucleotide
  Target: ATXN2; (-) strand; PAM type: NNGRRT; PAM sequence: GAGAAT
tacttgagaggctgaggaag

SEQ ID NO: 7789 - DNA, 20 bp, Artificial Sequence
  Description of Artificial Sequence: Synthetic oligonucleotide
  Target: ATXN2; (-) strand; PAM type: NNGRRT; PAM sequence: CTGGGT
caaaacaatttaaaaatttg

SEQ ID NO: 7790 - DNA, 20 bp, Artificial Sequence
  Description of Artificial Sequence: Synthetic oligonucleotide
  Target: ATXN2; (-) strand; PAM type: NNGRRT; PAM sequence: CTGGGT
gccaggagttcaagaccaac

SEQ ID NO: 7791 - DNA, 20 bp, Artificial Sequence
  Description of Artificial Sequence: Synthetic oligonucleotide
  Target: ATXN2; (-) strand; PAM type: NNGRRT; PAM sequence: AGGAGT
caggaggatcgcttgaggcc

SEQ ID NO: 7792 - DNA, 20 bp, Artificial Sequence
  Description of Artificial Sequence: Synthetic oligonucleotide
  Target: ATXN2; (-) strand; PAM type: NNGRRT; PAM sequence: GAGGAT
gctttgggaggccaaggcag

SEQ ID NO: 7793 - DNA, 20 bp, Artificial Sequence
  Description of Artificial Sequence: Synthetic oligonucleotide
  Target: ATXN2; (-) strand; PAM type: NNGRRT; PAM sequence: TTGGAT
tttttaatcatgaatggttg

SEQ ID NO: 7794 - DNA, 20 bp, Artificial Sequence
  Description of Artificial Sequence: Synthetic oligonucleotide
  Target: ATXN2; (-) strand; PAM type: NNGRRT; PAM sequence: ATGAAT
ggtttgttttctttttaatc

SEQ ID NO: 7795 - DNA, 20 bp, Artificial Sequence
  Description of Artificial Sequence: Synthetic oligonucleotide
  Target: ATXN2; (-) strand; PAM type: NNGRRT; PAM sequence: GTGGGT
tcagttcctaatttgcagag

SEQ ID NO: 7796 - DNA, 20 bp, Artificial Sequence
  Description of Artificial Sequence: Synthetic oligonucleotide
  Target: ATXN2; (-) strand; PAM type: NNGRRT; PAM sequence: AGGGGT
tttgccatgctcccattttt

SEQ ID NO: 7797 - DNA, 20 bp, Artificial Sequence
  Description of Artificial Sequence: Synthetic oligonucleotide
  Target: ATXN2; (-) strand; PAM type: NNGRRT; PAM sequence: TTGGGT
taatcaccatgttggtgttt

SEQ ID NO: 7798 - DNA, 20 bp, Artificial Sequence
  Description of Artificial Sequence: Synthetic oligonucleotide
  Target: ATXN2; (-) strand; PAM type: NNGRRT; PAM sequence: TTGAAT
aatagagatgcacttgattt

SEQ ID NO: 7799 - DNA, 20 bp, Artificial Sequence
  Description of Artificial Sequence: Synthetic oligonucleotide
  Target: ATXN2; (-) strand; PAM type: NNGRRT; PAM sequence: GTGAGT
ttcatctgttttgtgctgtt

SEQ ID NO: 7800 - DNA, 20 bp, Artificial Sequence
  Description of Artificial Sequence: Synthetic oligonucleotide
  Target: ATXN2; (-) strand; PAM type: NNGRRT; PAM sequence: TGGAAT
ggagaaatatcttaacaata

SEQ ID NO: 7801 - DNA, 20 bp, Artificial Sequence
  Description of Artificial Sequence: Synthetic oligonucleotide
  Target: ATXN2; (-) strand; PAM type: NNGRRT; PAM sequence: CTGAAT
aatcagcttgggattgtgca

SEQ ID NO: 7802 - DNA, 20 bp, Artificial Sequence
  Description of Artificial Sequence: Synthetic oligonucleotide
  Target: ATXN2; (-) strand; PAM type: NNGRRT; PAM sequence: TGGGAT
aataaattttagaatcagct

SEQ ID NO: 7803 - DNA, 20 bp, Artificial Sequence
  Description of Artificial Sequence: Synthetic oligonucleotide
  Target: ATXN2; (-) strand; PAM type: NNGRRT; PAM sequence: TAGAAT
ttgaatttgcaaataaattt

SEQ ID NO: 7804 - DNA, 20 bp, Artificial Sequence
  Description of Artificial Sequence: Synthetic oligonucleotide
  Target: ATXN2; (-) strand; PAM type: NNGRRT; PAM sequence: TTGAAT
ttactcttattctgcgttct

SEQ ID NO: 7805 - DNA, 20 bp, Artificial Sequence
  Description of Artificial Sequence: Synthetic oligonucleotide
  Target: ATXN2; (-) strand; PAM type: NNGRRT; PAM sequence: ATGAGT
taaccaacctttaagttcat

SEQ ID NO: 7806 - DNA, 20 bp, Artificial Sequence
  Description of Artificial Sequence: Synthetic oligonucleotide
  Target: ATXN2; (-) strand; PAM type: NNGRRT; PAM sequence: TTGAAT
gcccagccatagtagcttta

SEQ ID NO: 7807 - DNA, 20 bp, Artificial Sequence
  Description of Artificial Sequence: Synthetic oligonucleotide
  Target: ATXN2; (-) strand; PAM type: NNGRRT; PAM sequence: TGGGAT
atctcagcctcccaaagttc

SEQ ID NO: 7808 - DNA, 20 bp, Artificial Sequence
  Description of Artificial Sequence: Synthetic oligonucleotide
  Target: ATXN2; (-) strand; PAM type: NNGRRT; PAM sequence: CAGGGT
ttttttttttttagtagaga

SEQ ID NO: 7809 - DNA, 20 bp, Artificial Sequence
  Description of Artificial Sequence: Synthetic oligonucleotide
  Target: ATXN2; (-) strand; PAM type: NNGRRT; PAM sequence: TAGGAT
gcctcagcctctcgagtagc

SEQ ID NO: 7810 - DNA, 20 bp, Artificial Sequence
  Description of Artificial Sequence: Synthetic oligonucleotide
  Target: ATXN2; (-) strand; PAM type: NNGRRT; PAM sequence: TCGAGT
agcgattctgcctcagcctc

SEQ ID NO: 7811 - DNA, 20 bp, Artificial Sequence
  Description of Artificial Sequence: Synthetic oligonucleotide
  Target: ATXN2; (-) strand; PAM type: NNGRRT; PAM sequence: CAGGGT
tcactgcaacctccacttcc

SEQ ID NO: 7812 - DNA, 20 bp, Artificial Sequence
  Description of Artificial Sequence: Synthetic oligonucleotide
  Target: ATXN2; (-) strand; PAM type: NNGRRT; PAM sequence: TGGAGT
ctcgatcttgttacccaggc

SEQ ID NO: 7813 - DNA, 20 bp, Artificial Sequence
  Description of Artificial Sequence: Synthetic oligonucleotide
  Target: ATXN2; (-) strand; PAM type: NNGRRT; PAM sequence: AAGAGT
tttttttctgttcttgaaac

SEQ ID NO: 7814 - DNA, 20 bp, Artificial Sequence
  Description of Artificial Sequence: Synthetic oligonucleotide
  Target: ATXN2; (-) strand; PAM type: NNGRRT; PAM sequence: TAGGGT
atttcaggttaggttttgtg

SEQ ID NO: 7815 - DNA, 20 bp, Artificial Sequence
  Description of Artificial Sequence: Synthetic oligonucleotide
  Target: ATXN2; (-) strand; PAM type: NNGRRT; PAM sequence: ATGAAT
tcttttacgtaccctaggtt

SEQ ID NO: 7816 - DNA, 20 bp, Artificial Sequence
  Description of Artificial Sequence: Synthetic oligonucleotide
  Target: ATXN2; (-) strand; PAM type: NNGRRT; PAM sequence: GTGAAT
aagtcctttctcagaatatt

SEQ ID NO: 7817 - DNA, 20 bp, Artificial Sequence
  Description of Artificial Sequence: Synthetic oligonucleotide
  Target: ATXN2; (-) strand; PAM type: NNGRRT; PAM sequence: CAGAAT
tctggttacaagtcctttct

SEQ ID NO: 7818 - DNA, 20 bp, Artificial Sequence
  Description of Artificial Sequence: Synthetic oligonucleotide
  Target: ATXN2; (-) strand; PAM type: NNGRRT; PAM sequence: AGGGGT
gggggtttggagggcgatgg

SEQ ID NO: 7819 - DNA, 20 bp, Artificial Sequence
  Description of Artificial Sequence: Synthetic oligonucleotide
  Target: ATXN2; (-) strand; PAM type: NNGRRT; PAM sequence: GGGGGT
aatcgcttgagcgaggttgc

SEQ ID NO: 7820 - DNA, 20 bp, Artificial Sequence
  Description of Artificial Sequence: Synthetic oligonucleotide
  Target: ATXN2; (-) strand; PAM type: NNGRRT; PAM sequence: ATGGAT
actttgggaggccaacctgg

SEQ ID NO: 7821 - DNA, 20 bp, Artificial Sequence
  Description of Artificial Sequence: Synthetic oligonucleotide
  Target: ATXN2; (-) strand; PAM type: NNGRRT; PAM sequence: CTGGAT
cagcactttgggaggccaac

SEQ ID NO: 7822 - DNA, 20 bp, Artificial Sequence
  Description of Artificial Sequence: Synthetic oligonucleotide
  Target: ATXN2; (-) strand; PAM type: NNGRRT; PAM sequence: CTGGGT
ttttgtctcaatgtttctgc

SEQ ID NO: 7823 - DNA, 20 bp, Artificial Sequence
  Description of Artificial Sequence: Synthetic oligonucleotide
  Target: ATXN2; (-) strand; PAM type: NNGRRT; PAM sequence: TGGGGT
ttttgtatttttagtgtagg

SEQ ID NO: 7824 - DNA, 20 bp, Artificial Sequence
  Description of Artificial Sequence: Synthetic oligonucleotide
  Target: ATXN2; (-) strand; PAM type: NNGRRT; PAM sequence: TGGGAT
gccttagcctcccaagtagc

SEQ ID NO: 7825 - DNA, 20 bp, Artificial Sequence
  Description of Artificial Sequence: Synthetic oligonucleotide
  Target: ATXN2; (-) strand; PAM type: NNGRRT; PAM sequence: TGGAAT
ttatttatttatttatttga

SEQ ID NO: 7826 - DNA, 20 bp, Artificial Sequence
  Description of Artificial Sequence: Synthetic oligonucleotide
  Target: ATXN2; (-) strand; PAM type: NNGRRT; PAM sequence: ATGGGT
ttttaatttcaacaggtcta

SEQ ID NO: 7827 - DNA, 20 bp, Artificial Sequence
  Description of Artificial Sequence: Synthetic oligonucleotide
  Target: ATXN2; (-) strand; PAM type: NNGRRT; PAM sequence: TGGGAT
gccccagcctcccaaagtgt

SEQ ID NO: 7828 - DNA, 20 bp, Artificial Sequence
  Description of Artificial Sequence: Synthetic oligonucleotide
  Target: ATXN2; (-) strand; PAM type: NNGRRT; PAM sequence: CGGGGT
ttttgtatttttagtagaga

SEQ ID NO: 7829 - DNA, 20 bp, Artificial Sequence
  Description of Artificial Sequence: Synthetic oligonucleotide
  Target: ATXN2; (-) strand; PAM type: NNGRRT; PAM sequence: TGGGAT
gcctcagcctcccaagtagc

SEQ ID NO: 7830 - DNA, 20 bp, Artificial Sequence
  Description of Artificial Sequence: Synthetic oligonucleotide
  Target: ATXN2; (-) strand; PAM type: NNGRRT; PAM sequence: CCGGGT
ctcatggcaacctccctgtc

SEQ ID NO: 7831 - DNA, 20 bp, Artificial Sequence
  Description of Artificial Sequence: Synthetic oligonucleotide
  Target: ATXN2; (-) strand; PAM type: NNGRRT; PAM sequence: TGGAGT
tctcactctgttgcccaggc

SEQ ID NO: 7832 - DNA, 20 bp, Artificial Sequence
  Description of Artificial Sequence: Synthetic oligonucleotide
  Target: ATXN2; (-) strand; PAM type: NNGRRT; PAM sequence: TGGAAT
tttagttaaatacctagaat

SEQ ID NO: 7833 - DNA, 20 bp, Artificial Sequence
  Description of Artificial Sequence: Synthetic oligonucleotide
  Target: ATXN2; (-) strand; PAM type: NNGRRT; PAM sequence: TAGAAT
atttcttttagttaaatacc

SEQ ID NO: 7834 - DNA, 20 bp, Artificial Sequence
  Description of Artificial Sequence: Synthetic oligonucleotide
  Target: ATXN2; (-) strand; PAM type: NNGRRT; PAM sequence: ATGAAT
attgccagcttttggctatt

SEQ ID NO: 7835 - DNA, 20 bp, Artificial Sequence
  Description of Artificial Sequence: Synthetic oligonucleotide
  Target: ATXN2; (-) strand; PAM type: NNGRRT; PAM sequence: TTGAGT
cattactagtcgatgggcat

SEQ ID NO: 7836 - DNA, 20 bp, Artificial Sequence
  Description of Artificial Sequence: Synthetic oligonucleotide
  Target: ATXN2; (-) strand; PAM type: NNGRRT; PAM sequence: CTGGGT
cagcttattcctttttattg

SEQ ID NO: 7837 - DNA, 20 bp, Artificial Sequence
  Description of Artificial Sequence: Synthetic oligonucleotide
  Target: ATXN2; (-) strand; PAM type: NNGRRT; PAM sequence: GTGAGT
aaagtgctgggattacaggt

SEQ ID NO: 7838 - DNA, 20 bp, Artificial Sequence
  Description of Artificial Sequence: Synthetic oligonucleotide
  Target: ATXN2; (-) strand; PAM type: NNGRRT; PAM sequence: TGGGAT
gccttggcctcccaaagtgc

SEQ ID NO: 7839 - DNA, 20 bp, Artificial Sequence
  Description of Artificial Sequence: Synthetic oligonucleotide
  Target: ATXN2; (-) strand; PAM type: NNGRRT; PAM sequence: CGGGAT
ttttttttttttagcagaga

SEQ ID NO: 7840 - DNA, 20 bp, Artificial Sequence
  Description of Artificial Sequence: Synthetic oligonucleotide
  Target: ATXN2; (-) strand; PAM type: NNGRRT; PAM sequence: TGGGAT
gcctcagcctcccaagtagc

SEQ ID NO: 7841 - DNA, 20 bp, Artificial Sequence
  Description of Artificial Sequence: Synthetic oligonucleotide
  Target: ATXN2; (-) strand; PAM type: NNGRRT; PAM sequence: CAGAAT
tggagtcttgttctgtgtcc

SEQ ID NO: 7842 - DNA, 20 bp, Artificial Sequence
  Description of Artificial Sequence: Synthetic oligonucleotide
  Target: ATXN2; (-) strand; PAM type: NNGRRT; PAM sequence: TGGAGT
ttgtttgtttgtttttgaga

SEQ ID NO: 7843 - DNA, 20 bp, Artificial Sequence
  Description of Artificial Sequence: Synthetic oligonucleotide
  Target: ATXN2; (-) strand; PAM type: NNGRRT; PAM sequence: TTGAAT
gtcctaaacagtgtagtaat

SEQ ID NO: 7844 - DNA, 20 bp, Artificial Sequence
  Description of Artificial Sequence: Synthetic oligonucleotide
  Target: ATXN2; (-) strand; PAM type: NNGRRT; PAM sequence: ATGAAT
ataatgttttaagaaagttt

SEQ ID NO: 7845 - DNA, 20 bp, Artificial Sequence
  Description of Artificial Sequence: Synthetic oligonucleotide
  Target: ATXN2; (-) strand; PAM type: NNGRRT; PAM sequence: AAGAAT
tccctgggtcatattggaag

SEQ ID NO: 7846 - DNA, 20 bp, Artificial Sequence
  Description of Artificial Sequence: Synthetic oligonucleotide
  Target: ATXN2; (-) strand; PAM type: NNGRRT; PAM sequence: CTGGGT
tgttcaatcttttggcttcc

SEQ ID NO: 7847 - DNA, 20 bp, Artificial Sequence
  Description of Artificial Sequence: Synthetic oligonucleotide
  Target: ATXN2; (-) strand; PAM type: NNGRRT; PAM sequence: TGGAAT
ttttttttttttttaataaa

SEQ ID NO: 7848 - DNA, 20 bp, Artificial Sequence
  Description of Artificial Sequence: Synthetic oligonucleotide
  Target: ATXN2; (-) strand; PAM type: NNGRRT; PAM sequence: TAGGAT
acctcagcctcccagagtgc

SEQ ID NO: 7849 - DNA, 20 bp, Artificial Sequence
  Description of Artificial Sequence: Synthetic oligonucleotide
  Target: ATXN2; (-) strand; PAM type: NNGRRT; PAM sequence: CAGAGT
ttgagctcacctcagcctcc

SEQ ID NO: 7850 - DNA, 20 bp, Artificial Sequence
  Description of Artificial Sequence: Synthetic oligonucleotide
  Target: ATXN2; (-) strand; PAM type: NNGRRT; PAM sequence: ATGAGT
ctttttatgtttacatttta

SEQ ID NO: 7851 - DNA, 20 bp, Artificial Sequence
  Description of Artificial Sequence: Synthetic oligonucleotide
  Target: ATXN2; (-) strand; PAM type: NNGRRT; PAM sequence: GTGAAT
tttatcttaaagtataaaat

SEQ ID NO: 7852 - DNA, 20 bp, Artificial Sequence
  Description of Artificial Sequence: Synthetic oligonucleotide
  Target: ATXN2; (-) strand; PAM type: NNGRRT; PAM sequence: TAGAAT
ccattatgcctggctaattt

SEQ ID NO: 7853 - DNA, 20 bp, Artificial Sequence
  Description of Artificial Sequence: Synthetic oligonucleotide
  Target: ATXN2; (-) strand; PAM type: NNGRRT; PAM sequence: AGGAGT
tgggaggatcacttgagctc

SEQ ID NO: 7854 - DNA, 20 bp, Artificial Sequence
  Description of Artificial Sequence: Synthetic oligonucleotide
  Target: ATXN2; (-) strand; PAM type: NNGRRT; PAM sequence: GAGGAT
aggctgagaggctgaggtgg

SEQ ID NO: 7855 - DNA, 20 bp, Artificial Sequence
  Description of Artificial Sequence: Synthetic oligonucleotide
  Target: ATXN2; (-) strand; PAM type: NNGRRT; PAM sequence: CGGGGT
ttttgtatttttagtagaga

SEQ ID NO: 7856 - DNA, 20 bp, Artificial Sequence
  Description of Artificial Sequence: Synthetic oligonucleotide
  Target: ATXN2; (-) strand; PAM type: NNGRRT; PAM sequence: AGGGGT
tcctgagtagctggaattac

SEQ ID NO: 7857 - DNA, 20 bp, Artificial Sequence
  Description of Artificial Sequence: Synthetic oligonucleotide
  Target: ATXN2; (-) strand; PAM type: NNGRRT; PAM sequence: TGGAAT
gcctcagcctcctgagtagc

SEQ ID NO: 7858 - DNA, 20 bp, Artificial Sequence
  Description of Artificial Sequence: Synthetic oligonucleotide
  Target: ATXN2; (-) strand; PAM type: NNGRRT; PAM sequence: CTGAGT
gattcccctgcctcagcctc

SEQ ID NO: 7859 - DNA, 20 bp, Artificial Sequence
  Description of Artificial Sequence: Synthetic oligonucleotide
  Target: ATXN2; (-) strand; PAM type: NNGRRT; PAM sequence: TGGAGT
gagatggagtgtcgctctga

SEQ ID NO: 7860 - DNA, 20 bp, Artificial Sequence
  Description of Artificial Sequence: Synthetic oligonucleotide
  Target: ATXN2; (-) strand; PAM type: NNGRRT; PAM sequence: TGGAGT
ttgtttatttatttttgaga

SEQ ID NO: 7861 - DNA, 20 bp, Artificial Sequence
  Description of Artificial Sequence: Synthetic oligonucleotide
  Target: ATXN2; (-) strand; PAM type: NNGRRT; PAM sequence: GTGGAT
ccaggtttttccttttgctt

SEQ ID NO: 7862 - DNA, 20 bp, Artificial Sequence
  Description of Artificial Sequence: Synthetic oligonucleotide
  Target: ATXN2; (-) strand; PAM type: NNGRRT; PAM sequence: GAGAGT
ttaatttttgtgtatgagat

SEQ ID NO: 7863 - DNA, 20 bp, Artificial Sequence
  Description of Artificial Sequence: Synthetic oligonucleotide
  Target: ATXN2; (-) strand; PAM type: NNGRRT; PAM sequence: TTGAGT
atttaagtctacaatctctt

SEQ ID NO: 7864 - DNA, 20 bp, Artificial Sequence
  Description of Artificial Sequence: Synthetic oligonucleotide
  Target: ATXN2; (-) strand; PAM type: NNGRRT; PAM sequence: TGGAAT
ttttgtatttttagtagaga

SEQ ID NO: 7865 - DNA, 20 bp, Artificial Sequence
  Description of Artificial Sequence: Synthetic oligonucleotide
  Target: ATXN2; (-) strand; PAM type: NNGRRT; PAM sequence: TGGGGT
gcgtcagcctccagagtagc

SEQ ID NO: 7866 - DNA, 20 bp, Artificial Sequence
  Description of Artificial Sequence: Synthetic oligonucleotide
  Target: ATXN2; (-) strand; PAM type: NNGRRT; PAM sequence: CAGAGT
gatccccctgcgtcagcctc

SEQ ID NO: 7867 - DNA, 20 bp, Artificial Sequence
  Description of Artificial Sequence: Synthetic oligonucleotide
  Target: ATXN2; (-) strand; PAM type: NNGRRT; PAM sequence: TCGAAT
ccgtgcttcccaggctggtc

SEQ ID NO: 7868 - DNA, 20 bp, Artificial Sequence
  Description of Artificial Sequence: Synthetic oligonucleotide
  Target: ATXN2; (-) strand; PAM type: NNGRRT; PAM sequence: CTGGGT
ctcactgcagccttcgcttc

SEQ ID NO: 7869 - DNA, 20 bp, Artificial Sequence
  Description of Artificial Sequence: Synthetic oligonucleotide
  Target: ATXN2; (-) strand; PAM type: NNGRRT; PAM sequence: TTGGGT
ataaccgatatgtctttggt

SEQ ID NO: 7870 - DNA, 20 bp, Artificial Sequence
  Description of Artificial Sequence: Synthetic oligonucleotide
  Target: ATXN2; (-) strand; PAM type: NNGRRT; PAM sequence: GTGAGT
accccagcctgagtgaaaga

SEQ ID NO: 7871 - DNA, 20 bp, Artificial Sequence
  Description of Artificial Sequence: Synthetic oligonucleotide
  Target: ATXN2; (-) strand; PAM type: NNGRRT; PAM sequence: AAGAGT
ctgcaccccagcctgagtga

SEQ ID NO: 7872 - DNA, 20 bp, Artificial Sequence
  Description of Artificial Sequence: Synthetic oligonucleotide
  Target: ATXN2; (-) strand; PAM type: NNGRRT; PAM sequence: CTGAGT
tcacaccactgcaccccagc

SEQ ID NO: 7873 - DNA, 20 bp, Artificial Sequence
  Description of Artificial Sequence: Synthetic oligonucleotide
  Target: ATXN2; (-) strand; PAM type: NNGRRT; PAM sequence: CAGAAT
ggaggctgaggcaggagcat

SEQ ID NO: 7874 - DNA, 20 bp, Artificial Sequence
  Description of Artificial Sequence: Synthetic oligonucleotide
  Target: ATXN2; (-) strand; PAM type: NNGRRT; PAM sequence: AGGAGT
tgggcagatgacttgaggtc

SEQ ID NO: 7875 - DNA, 20 bp, Artificial Sequence
  Description of Artificial Sequence: Synthetic oligonucleotide
  Target: ATXN2; (-) strand; PAM type: NNGRRT; PAM sequence: GTGGAT
tggcaatgagtaatgctttt

SEQ ID NO: 7876 - DNA, 20 bp, Artificial Sequence
  Description of Artificial Sequence: Synthetic oligonucleotide
  Target: ATXN2; (-) strand; PAM type: NNGRRT; PAM sequence: ATGAGT
attatttcctttttctggca

SEQ ID NO: 7877 - DNA, 20 bp, Artificial Sequence
  Description of Artificial Sequence: Synthetic oligonucleotide
  Target: ATXN2; (-) strand; PAM type: NNGRRT; PAM sequence: TTGGAT
tatcatcagttgatgaacat

SEQ ID NO: 7878 - DNA, 20 bp, Artificial Sequence
  Description of Artificial Sequence: Synthetic oligonucleotide
  Target: ATXN2; (-) strand; PAM type: NNGRRT; PAM sequence: CTGAAT
tgtgagccactgctcctggc

SEQ ID NO: 7879 - DNA, 20 bp, Artificial Sequence
  Description of Artificial Sequence: Synthetic oligonucleotide
  Target: ATXN2; (-) strand; PAM type: NNGRRT; PAM sequence: TGGGAT
ccctcggcctcccaaagtgc

SEQ ID NO: 7880 - DNA, 20 bp, Artificial Sequence
  Description of Artificial Sequence: Synthetic oligonucleotide
  Target: ATXN2; (-) strand; PAM type: NNGRRT; PAM sequence: CTGGGT
tggtgccactgcactccagc

SEQ ID NO: 7881 - DNA, 20 bp, Artificial Sequence
  Description of Artificial Sequence: Synthetic oligonucleotide
  Target: ATXN2; (-) strand; PAM type: NNGRRT; PAM sequence: GAGAAT
tactcgggaggctgaggcag

SEQ ID NO: 7882 - DNA, 20 bp, Artificial Sequence
  Description of Artificial Sequence: Synthetic oligonucleotide
  Target: ATXN2; (-) strand; PAM type: NNGRRT; PAM sequence: CAGAGT
tttaatagaaatgatatact

SEQ ID NO: 7883 - DNA, 20 bp, Artificial Sequence
  Description of Artificial Sequence: Synthetic oligonucleotide
  Target: ATXN2; (-) strand; PAM type: NNGRRT; PAM sequence: GAGAGT
acagtttggctatctgatgg

SEQ ID NO: 7884 - DNA, 20 bp, Artificial Sequence
  Description of Artificial Sequence: Synthetic oligonucleotide
  Target: ATXN2; (-) strand; PAM type: NNGRRT; PAM sequence: GTGGGT
ttagaaattctgagaagaaa

SEQ ID NO: 7885 - DNA, 20 bp, Artificial Sequence
  Description of Artificial Sequence: Synthetic oligonucleotide
  Target: ATXN2; (-) strand; PAM type: NNGRRT; PAM sequence: TAGAGT
gaaataatgtaatcaaatta

SEQ ID NO: 7886 - DNA, 20 bp, Artificial Sequence
  Description of Artificial Sequence: Synthetic oligonucleotide
  Target: ATXN2; (-) strand; PAM type: NNGRRT; PAM sequence: ATGGGT
tttttgtattttttgtagag

SEQ ID NO: 7887 - DNA, 20 bp, Artificial Sequence
  Description of Artificial Sequence: Synthetic oligonucleotide
  Target: ATXN2; (-) strand; PAM type: NNGRRT; PAM sequence: CTGGAT
gatcctcccttctcagtccc

SEQ ID NO: 7888 - DNA, 20 bp, Artificial Sequence
  Description of Artificial Sequence: Synthetic oligonucleotide
  Target: ATXN2; (-) strand; PAM type: NNGRRT; PAM sequence: CAGGGT
gtgtgtgtatgtgtttgata

SEQ ID NO: 7889 - DNA, 20 bp, Artificial Sequence
  Description of Artificial Sequence: Synthetic oligonucleotide
  Target: ATXN2; (-) strand; PAM type: NNGRRT; PAM sequence: TTGGGT
gatttcctcaatgtgttttt

SEQ ID NO: 7890 - DNA, 20 bp, Artificial Sequence
  Description of Artificial Sequence: Synthetic oligonucleotide
  Target: ATXN2; (-) strand; PAM type: NNGRRT; PAM sequence: CTGAAT
acataaagttttcatttttc

SEQ ID NO: 7891 - DNA, 20 bp, Artificial Sequence
  Description of Artificial Sequence: Synthetic oligonucleotide
  Target: ATXN2; (-) strand; PAM type: NNGRRT; PAM sequence: TAGAAT
agttgagaaactatagaaag

SEQ ID NO: 7892 - DNA, 20 bp, Artificial Sequence
  Description of Artificial Sequence: Synthetic oligonucleotide
  Target: ATXN2; (-) strand; PAM type: NNGRRT; PAM sequence: TAGAGT
tttttgccaaccagttaatt

SEQ ID NO: 7893 - DNA, 20 bp, Artificial Sequence
  Description of Artificial Sequence: Synthetic oligonucleotide
  Target: ATXN2; (-) strand; PAM type: NNGRRT; PAM sequence: AAGGGT
tttaatgttggaaaatgcta

SEQ ID NO: 7894 - DNA, 20 bp, Artificial Sequence
  Description of Artificial Sequence: Synthetic oligonucleotide
  Target: ATXN2; (-) strand; PAM type: NNGRRT; PAM sequence: AAGAGT
caaaaaaaaaaaaaaaaaaa

SEQ ID NO: 7895 - DNA, 20 bp, Artificial Sequence
  Description of Artificial Sequence: Synthetic oligonucleotide
  Target: ATXN2; (-) strand; PAM type: NNGRRT; PAM sequence: CTGGGT
ctgggcatggtggtgcgtgc

SEQ ID NO: 7896 - DNA, 20 bp, Artificial Sequence
  Description of Artificial Sequence: Synthetic oligonucleotide
  Target: ATXN2; (-) strand; PAM type: NNGRRT; PAM sequence: AGGAGT
tgggcagatcacttgaggtc

SEQ ID NO: 7897 - DNA, 20 bp, Artificial Sequence
  Description of Artificial Sequence: Synthetic oligonucleotide
  Target: ATXN2; (-) strand; PAM type: NNGRRT; PAM sequence: GGGAGT
atgtttctgcattaaaatta

SEQ ID NO: 7898 - DNA, 20 bp, Artificial Sequence
  Description of Artificial Sequence: Synthetic oligonucleotide
  Target: ATXN2; (-) strand; PAM type: NNGRRT; PAM sequence: ATGGAT
gcctcaaaaagaaaaataag

SEQ ID NO: 7899 - DNA, 20 bp, Artificial Sequence
  Description of Artificial Sequence: Synthetic oligonucleotide
  Target: ATXN2; (-) strand; PAM type: NNGRRT; PAM sequence: TTGGGT
ctgcaccactgggctccagc

SEQ ID NO: 7900 - DNA, 20 bp, Artificial Sequence
  Description of Artificial Sequence: Synthetic oligonucleotide
  Target: ATXN2; (-) strand; PAM type: NNGRRT; PAM sequence: GAGGAT
tacttgggagactgaggtgg

SEQ ID NO: 7901 - DNA, 20 bp, Artificial Sequence
  Description of Artificial Sequence: Synthetic oligonucleotide
  Target: ATXN2; (-) strand; PAM type: NNGRRT; PAM sequence: GGGAGT
ggtgggcagatcacatgacc

SEQ ID NO: 7902 - DNA, 20 bp, Artificial Sequence
  Description of Artificial Sequence: Synthetic oligonucleotide
  Target: ATXN2; (-) strand; PAM type: NNGRRT; PAM sequence: AAGGAT
caatgttaagatcctattag

SEQ ID NO: 7903 - DNA, 20 bp, Artificial Sequence
  Description of Artificial Sequence: Synthetic oligonucleotide
  Target: ATXN2; (-) strand; PAM type: NNGRRT; PAM sequence: CAGAAT
tacagttatttccccaaagc

SEQ ID NO: 7904 - DNA, 20 bp, Artificial Sequence
  Description of Artificial Sequence: Synthetic oligonucleotide
  Target: ATXN2; (-) strand; PAM type: NNGRRT; PAM sequence: GAGGGT
ctgaacttaaatttgaagaa

SEQ ID NO: 7905 - DNA, 20 bp, Artificial Sequence
  Description of Artificial Sequence: Synthetic oligonucleotide
  Target: ATXN2; (-) strand; PAM type: NNGRRT; PAM sequence: ATGAGT
ctggaggatgacttgaaccc

SEQ ID NO: 7906 - DNA, 20 bp, Artificial Sequence
  Description of Artificial Sequence: Synthetic oligonucleotide
  Target: ATXN2; (-) strand; PAM type: NNGRRT; PAM sequence: GAGGAT
catgcctgatatcccagctg

SEQ ID NO: 7907 - DNA, 20 bp, Artificial Sequence
  Description of Artificial Sequence: Synthetic oligonucleotide
  Target: ATXN2; (-) strand; PAM type: NNGRRT; PAM sequence: CAGAGT
ctgcacttcagcctgggcaa

SEQ ID NO: 7908 - DNA, 20 bp, Artificial Sequence
  Description of Artificial Sequence: Synthetic oligonucleotide
  Target: ATXN2; (-) strand; PAM type: NNGRRT; PAM sequence: AGGGGT
attgcttgaacccgggaggc

SEQ ID NO: 7909 - DNA, 20 bp, Artificial Sequence
  Description of Artificial Sequence: Synthetic oligonucleotide
  Target: ATXN2; (-) strand; PAM type: NNGRRT; PAM sequence: GAGAAT
actaggtggggctgaggcag

SEQ ID NO: 7910 - DNA, 20 bp, Artificial Sequence
  Description of Artificial Sequence: Synthetic oligonucleotide
  Target: ATXN2; (-) strand; PAM type: NNGRRT; PAM sequence: GTGGGT
cagcactttgggaggccgag

SEQ ID NO: 7911 - DNA, 20 bp, Artificial Sequence
  Description of Artificial Sequence: Synthetic oligonucleotide
  Target: ATXN2; (-) strand; PAM type: NNGRRT; PAM sequence: CAGAGT
ctgccctccagcctgggcga

SEQ ID NO: 7912 - DNA, 20 bp, Artificial Sequence
  Description of Artificial Sequence: Synthetic oligonucleotide
  Target: ATXN2; (-) strand; PAM type: NNGRRT; PAM sequence: GAGGAT
tgtttgggggactgaggcga

SEQ ID NO: 7913 - DNA, 20 bp, Artificial Sequence
  Description of Artificial Sequence: Synthetic oligonucleotide
  Target: ATXN2; (-) strand; PAM type: NNGRRT; PAM sequence: GAGGAT
actttgggaggccaaggcag

SEQ ID NO: 7914 - DNA, 20 bp, Artificial Sequence
  Description of Artificial Sequence: Synthetic oligonucleotide
  Target: ATXN2; (-) strand; PAM type: NNGRRT; PAM sequence: AAGAGT
tatatagtatcctcttcaaa

SEQ ID NO: 7915 - DNA, 20 bp, Artificial Sequence
  Description of Artificial Sequence: Synthetic oligonucleotide
  Target: ATXN2; (-) strand; PAM type: NNGRRT; PAM sequence: ATGGAT
aacattacatagatattcac

SEQ ID NO: 7916 - DNA, 20 bp, Artificial Sequence
  Description of Artificial Sequence: Synthetic oligonucleotide
  Target: ATXN2; (-) strand; PAM type: NNGRRT; PAM sequence: ATGAAT
attgagtaactaagtttata

SEQ ID NO: 7917 - DNA, 20 bp, Artificial Sequence
  Description of Artificial Sequence: Synthetic oligonucleotide
  Target: ATXN2; (-) strand; PAM type: NNGRRT; PAM sequence: TTGAGT
tagtttgcatgctgcatgaa

SEQ ID NO: 7918 - DNA, 20 bp, Artificial Sequence
  Description of Artificial Sequence: Synthetic oligonucleotide
  Target: ATXN2; (-) strand; PAM type: NNGRRT; PAM sequence: ATGAAT
gcttgtagtttgcatgctgc

SEQ ID NO: 7919 - DNA, 20 bp, Artificial Sequence
  Description of Artificial Sequence: Synthetic oligonucleotide
  Target: ATXN2; (-) strand; PAM type: NNGRRT; PAM sequence: GAGAAT
catatagagcaggtaaaggt

SEQ ID NO: 7920 - DNA, 20 bp, Artificial Sequence
  Description of Artificial Sequence: Synthetic oligonucleotide
  Target: ATXN2; (-) strand; PAM type: NNGRRT; PAM sequence: GTGAAT
tacctatgacgcccatgcca

SEQ ID NO: 7921 - DNA, 20 bp, Artificial Sequence
  Description of Artificial Sequence: Synthetic oligonucleotide
  Target: ATXN2; (-) strand; PAM type: NNGRRT; PAM sequence: CAGAAT
caatataaaactaagagtga

SEQ ID NO: 7922 - DNA, 20 bp, Artificial Sequence
  Description of Artificial Sequence: Synthetic oligonucleotide
  Target: ATXN2; (-) strand; PAM type: NNGRRT; PAM sequence: AAGAGT
ctctctagcaatataaaact

SEQ ID NO: 7923 - DNA, 20 bp, Artificial Sequence
  Description of Artificial Sequence: Synthetic oligonucleotide
  Target: ATXN2; (-) strand; PAM type: NNGRRT; PAM sequence: GAGAAT
taattttttaatgactaatg

SEQ ID NO: 7924 - DNA, 20 bp, Artificial Sequence
  Description of Artificial Sequence: Synthetic oligonucleotide
  Target: ATXN2; (-) strand; PAM type: NNGRRT; PAM sequence: GTGGGT
ggggtttgttccttttagct

SEQ ID NO: 7925 - DNA, 20 bp, Artificial Sequence
  Description of Artificial Sequence: Synthetic oligonucleotide
  Target: ATXN2; (-) strand; PAM type: NNGRRT; PAM sequence: TGGGGT
ggtttagatttactgtagtt

SEQ ID NO: 7926 - DNA, 20 bp, Artificial Sequence
  Description of Artificial Sequence: Synthetic oligonucleotide
  Target: ATXN2; (-) strand; PAM type: NNGRRT; PAM sequence: GAGAAT
aagtatgaggacctaaatct

SEQ ID NO: 7927 - DNA, 20 bp, Artificial Sequence
  Description of Artificial Sequence: Synthetic oligonucleotide
  Target: ATXN2; (-) strand; PAM type: NNGRRT; PAM sequence: GAGGGT
ctttaggttttcagtgactt

SEQ ID NO: 7928 - DNA, 20 bp, Artificial Sequence
  Description of Artificial Sequence: Synthetic oligonucleotide
  Target: ATXN2; (-) strand; PAM type: NNGRRT; PAM sequence: TAGAAT
ccaggcgtgcaagtaagtca

SEQ ID NO: 7929 - DNA, 20 bp, Artificial Sequence
  Description of Artificial Sequence: Synthetic oligonucleotide
  Target: ATXN2; (-) strand; PAM type: NNGRRT; PAM sequence: GTGGGT
cacaacctagcccatctatg

SEQ ID NO: 7930 - DNA, 20 bp, Artificial Sequence
  Description of Artificial Sequence: Synthetic oligonucleotide
  Target: ATXN2; (-) strand; PAM type: NNGRRT; PAM sequence: TTGAAT
catctgttaccttgagataa

SEQ ID NO: 7931 - DNA, 20 bp, Artificial Sequence
  Description of Artificial Sequence: Synthetic oligonucleotide
  Target: ATXN2; (-) strand; PAM type: NNGRRT; PAM sequence: CAGGGT
ccaagactttggtatcttca

SEQ ID NO: 7932 - DNA, 20 bp, Artificial Sequence
  Description of Artificial Sequence: Synthetic oligonucleotide
  Target: ATXN2; (-) strand; PAM type: NNGRRT; PAM sequence: GCGAAT
aggatatgcataggttgtat

SEQ ID NO: 7933 - DNA, 20 bp, Artificial Sequence
  Description of Artificial Sequence: Synthetic oligonucleotide
  Target: ATXN2; (-) strand; PAM type: NNGRRT; PAM sequence: GAGGAT
agatgatgtaaagtatatag

SEQ ID NO: 7934 - DNA, 20 bp, Artificial Sequence
  Description of Artificial Sequence: Synthetic oligonucleotide
  Target: ATXN2; (-) strand; PAM type: NNGRRT; PAM sequence: TAGGAT
ccatggatcaaaaacatagt

SEQ ID NO: 7935 - DNA, 20 bp, Artificial Sequence
  Description of Artificial Sequence: Synthetic oligonucleotide
  Target: ATXN2; (-) strand; PAM type: NNGRRT; PAM sequence: ATGGAT
atcactggattcaaccaacc

SEQ ID NO: 7936 - DNA, 20 bp, Artificial Sequence
  Description of Artificial Sequence: Synthetic oligonucleotide
  Target: ATXN2; (-) strand; PAM type: NNGRRT; PAM sequence: CTGGAT
cacctgagggttttgcatca

SEQ ID NO: 7937 - DNA, 20 bp, Artificial Sequence
  Description of Artificial Sequence: Synthetic oligonucleotide
  Target: ATXN2; (-) strand; PAM type: NNGRRT; PAM sequence: GAGGGT
tagatacgtcctctgcacct

SEQ ID NO: 7938 - DNA, 20 bp, Artificial Sequence
  Description of Artificial Sequence: Synthetic oligonucleotide
  Target: ATXN2; (-) strand; PAM type: NNGRRT; PAM sequence: CAGAAT
atctttgaatttctctgacc

SEQ ID NO: 7939 - DNA, 20 bp, Artificial Sequence
  Description of Artificial Sequence: Synthetic oligonucleotide
  Target: ATXN2; (-) strand; PAM type: NNGRRT; PAM sequence: TTGAAT
atgtgatcttgggcaaatct

SEQ ID NO: 7940 - DNA, 20 bp, Artificial Sequence
  Description of Artificial Sequence: Synthetic oligonucleotide
  Target: ATXN2; (-) strand; PAM type: NNGRRT; PAM sequence: ATGAAT
ttttttttacatggccatta

SEQ ID NO: 7941 - DNA, 20 bp, Artificial Sequence
  Description of Artificial Sequence: Synthetic oligonucleotide
  Target: ATXN2; (-) strand; PAM type: NNGRRT; PAM sequence: CTGAAT
ccttcttccatacctgccat

SEQ ID NO: 7942 - DNA, 20 bp, Artificial Sequence
  Description of Artificial Sequence: Synthetic oligonucleotide
  Target: ATXN2; (-) strand; PAM type: NNGRRT; PAM sequence: AGGAGT
aacattgaatcccaatgcaa

SEQ ID NO: 7943 - DNA, 20 bp, Artificial Sequence
  Description of Artificial Sequence: Synthetic oligonucleotide
  Target: ATXN2; (-) strand; PAM type: NNGRRT; PAM sequence: TTGAAT
ggcaagttaggaaatcaaca

SEQ ID NO: 7944 - DNA, 20 bp, Artificial Sequence
  Description of Artificial Sequence: Synthetic oligonucleotide
  Target: ATXN2; (-) strand; PAM type: NNGRRT; PAM sequence: AGGAAT
ctgtattctttaagggatta

SEQ ID NO: 7945 - DNA, 20 bp, Artificial Sequence
  Description of Artificial Sequence: Synthetic oligonucleotide
  Target: ATXN2; (-) strand; PAM type: NNGRRT; PAM sequence: AGGGAT
ttttatggctgtattcttta

SEQ ID NO: 7946 - DNA, 20 bp, Artificial Sequence
  Description of Artificial Sequence: Synthetic oligonucleotide
  Target: ATXN2; (-) strand; PAM type: NNGRRT; PAM sequence: CAGAGT
ctgcactccaacctgagcaa

SEQ ID NO: 7947 - DNA, 20 bp, Artificial Sequence
  Description of Artificial Sequence: Synthetic oligonucleotide
  Target: ATXN2; (-) strand; PAM type: NNGRRT; PAM sequence: GAGAAT
taatcaggaggctaaggcaa

SEQ ID NO: 7948 - DNA, 20 bp, Artificial Sequence
  Description of Artificial Sequence: Synthetic oligonucleotide
  Target: ATXN2; (-) strand; PAM type: NNGRRT; PAM sequence: CTGAGT
aatcccagcactttgggagg

SEQ ID NO: 7949 - DNA, 20 bp, Artificial Sequence
  Description of Artificial Sequence: Synthetic oligonucleotide
  Target: ATXN2; (-) strand; PAM type: NNGRRT; PAM sequence: AAGGAT
ttatgttaagaattgctttt

SEQ ID NO: 7950 - DNA, 20 bp, Artificial Sequence
  Description of Artificial Sequence: Synthetic oligonucleotide
  Target: ATXN2; (-) strand; PAM type: NNGRRT; PAM sequence: AAGAAT
taaaaggatactgttatgtt

SEQ ID NO: 7951 - DNA, 20 bp, Artificial Sequence
  Description of Artificial Sequence: Synthetic oligonucleotide
  Target: ATXN2; (-) strand; PAM type: NNGRRT; PAM sequence: AAGGAT
ataaataaataaataaataa

SEQ ID NO: 7952 - DNA, 20 bp, Artificial Sequence
  Description of Artificial Sequence: Synthetic oligonucleotide
  Target: ATXN2; (-) strand; PAM type: NNGRRT; PAM sequence: CTGGGT
tcatgccactgcactccagc

SEQ ID NO: 7953 - DNA, 20 bp, Artificial Sequence
  Description of Artificial Sequence: Synthetic oligonucleotide
  Target: ATXN2; (-) strand; PAM type: NNGRRT; PAM sequence: GAGAAT
tactcgggaggctgaggcag

SEQ ID NO: 7954 - DNA, 20 bp, Artificial Sequence
  Description of Artificial Sequence: Synthetic oligonucleotide
  Target: ATXN2; (-) strand; PAM type: NNGRRT; PAM sequence: AGGAGT
caggtagattacttgaggtt

SEQ ID NO: 7955 - DNA, 20 bp, Artificial Sequence
  Description of Artificial Sequence: Synthetic oligonucleotide
  Target: ATXN2; (-) strand; PAM type: NNGRRT; PAM sequence: TAGAAT
acataagaattactgcatgc

SEQ ID NO: 7956 - DNA, 20 bp, Artificial Sequence
  Description of Artificial Sequence: Synthetic oligonucleotide
  Target: ATXN2; (-) strand; PAM type: NNGRRT; PAM sequence: AAGAAT
tgtaaaatatcttctcacat

SEQ ID NO: 7957 - DNA, 20 bp, Artificial Sequence
  Description of Artificial Sequence: Synthetic oligonucleotide
  Target: ATXN2; (-) strand; PAM type: NNGRRT; PAM sequence: TGGAAT
tccagttaaagctgaagttt

SEQ ID NO: 7958 - DNA, 20 bp, Artificial Sequence
  Description of Artificial Sequence: Synthetic oligonucleotide
  Target: ATXN2; (-) strand; PAM type: NNGRRT; PAM sequence: TTGGGT
actaccattgacttaggtgt

SEQ ID NO: 7959 - DNA, 20 bp, Artificial Sequence
  Description of Artificial Sequence: Synthetic oligonucleotide
  Target: ATXN2; (-) strand; PAM type: NNGRRT; PAM sequence: TGGAAT
aagcatgcggtgcttctact

SEQ ID NO: 7960 - DNA, 20 bp, Artificial Sequence
  Description of Artificial Sequence: Synthetic oligonucleotide
  Target: ATXN2; (-) strand; PAM type: NNGRRT; PAM sequence: CTGGAT
attcaggggacctatcttta

SEQ ID NO: 7961 - DNA, 20 bp, Artificial Sequence
  Description of Artificial Sequence: Synthetic oligonucleotide
  Target: ATXN2; (-) strand; PAM type: NNGRRT; PAM sequence: AGGAGT
aagtttttctgtaaatgaac

SEQ ID NO: 7962 - DNA, 20 bp, Artificial Sequence
  Description of Artificial Sequence: Synthetic oligonucleotide
  Target: ATXN2; (-) strand; PAM type: NNGRRT; PAM sequence: AAGAAT
tttaggtccttccaactgtg

SEQ ID NO: 7963 - DNA, 20 bp, Artificial Sequence
  Description of Artificial Sequence: Synthetic oligonucleotide
  Target: ATXN2; (-) strand; PAM type: NNGRRT; PAM sequence: GTGAGT
gagaagaaagacgcagctga

SEQ ID NO: 7964 - DNA, 20 bp, Artificial Sequence
  Description of Artificial Sequence: Synthetic oligonucleotide
  Target: ATXN2; (-) strand; PAM type: NNGRRT; PAM sequence: CTGAGT
ggaagagaagaaagacgcag

SEQ ID NO: 7965 - DNA, 20 bp, Artificial Sequence
  Description of Artificial Sequence: Synthetic oligonucleotide
  Target: ATXN2; (-) strand; PAM type: NNGRRT; PAM sequence: AGGGGT
ggacctgaggtcacttccca

SEQ ID NO: 7966 - DNA, 20 bp, Artificial Sequence
  Description of Artificial Sequence: Synthetic oligonucleotide
  Target: ATXN2; (-) strand; PAM type: NNGRRT; PAM sequence: CCGAAT
gtaccagtggcagcagcaag

SEQ ID NO: 7967 - DNA, 20 bp, Artificial Sequence
  Description of Artificial Sequence: Synthetic oligonucleotide
  Target: ATXN2; (-) strand; PAM type: NNGRRT; PAM sequence: AAGGAT
acaaaattgaaccaagtgct

SEQ ID NO: 7968 - DNA, 20 bp, Artificial Sequence
  Description of Artificial Sequence: Synthetic oligonucleotide
  Target: ATXN2; (-) strand; PAM type: NNGRRT; PAM sequence: ATGGAT
caagttctacttctgaatct

SEQ ID NO: 7969 - DNA, 20 bp, Artificial Sequence
  Description of Artificial Sequence: Synthetic oligonucleotide
  Target: ATXN2; (-) strand; PAM type: NNGRRT; PAM sequence: CTGAAT
gttacagccaagttctactt

SEQ ID NO: 7970 - DNA, 20 bp, Artificial Sequence
  Description of Artificial Sequence: Synthetic oligonucleotide
  Target: ATXN2; (-) strand; PAM type: NNGRRT; PAM sequence: TTGAGT
aactttagaggctaggacat

SEQ ID NO: 7971 - DNA, 20 bp, Artificial Sequence
  Description of Artificial Sequence: Synthetic oligonucleotide
  Target: ATXN2; (-) strand; PAM type: NNGRRT; PAM sequence: GAGGAT
tatttaaatgacaagtataa

SEQ ID NO: 7972 - DNA, 20 bp, Artificial Sequence
  Description of Artificial Sequence: Synthetic oligonucleotide
  Target: ATXN2; (-) strand; PAM type: NNGRRT; PAM sequence: TTGGAT
agccagcttctcccttttct

SEQ ID NO: 7973 - DNA, 20 bp, Artificial Sequence
  Description of Artificial Sequence: Synthetic oligonucleotide
  Target: ATXN2; (-) strand; PAM type: NNGRRT; PAM sequence: TGGGAT
gccttggcctcccaaagtgc

SEQ ID NO: 7974 - DNA, 20 bp, Artificial Sequence
  Description of Artificial Sequence: Synthetic oligonucleotide
  Target: ATXN2; (-) strand; PAM type: NNGRRT; PAM sequence: TGGGGT
ttttgtatttttagtagaga

SEQ ID NO: 7975 - DNA, 20 bp, Artificial Sequence
  Description of Artificial Sequence: Synthetic oligonucleotide
  Target: ATXN2; (-) strand; PAM type: NNGRRT; PAM sequence: CCGAGT
cattctcctacctcagcctc

SEQ ID NO: 7976 - DNA, 20 bp, Artificial Sequence
  Description of Artificial Sequence: Synthetic oligonucleotide
  Target: ATXN2; (-) strand; PAM type: NNGRRT; PAM sequence: TGGAGT
tctcgctctgtcacccaggc

SEQ ID NO: 7977 - DNA, 20 bp, Artificial Sequence
  Description of Artificial Sequence: Synthetic oligonucleotide
  Target: ATXN2; (-) strand; PAM type: NNGRRT; PAM sequence: CGGAGT
ctttttttttttttttgaga

SEQ ID NO: 7978 - DNA, 20 bp, Artificial Sequence
  Description of Artificial Sequence: Synthetic oligonucleotide
  Target: ATXN2; (-) strand; PAM type: NNGRRT; PAM sequence: TGGAAT
gtctcagcctcccaaagggc

SEQ ID NO: 7979 - DNA, 20 bp, Artificial Sequence
  Description of Artificial Sequence: Synthetic oligonucleotide
  Target: ATXN2; (-) strand; PAM type: NNGRRT; PAM sequence: CAGGGT
ttattattttttaaatgaga

SEQ ID NO: 7980 - DNA, 20 bp, Artificial Sequence
  Description of Artificial Sequence: Synthetic oligonucleotide
  Target: ATXN2; (-) strand; PAM type: NNGRRT; PAM sequence: ACGAGT
ttattgtcatattccttttg

SEQ ID NO: 7981 - DNA, 20 bp, Artificial Sequence
  Description of Artificial Sequence: Synthetic oligonucleotide
  Target: ATXN2; (-) strand; PAM type: NNGRRT; PAM sequence: TAGGAT
gccttggcttcccaaagtgc

SEQ ID NO: 7982 - DNA, 20 bp, Artificial Sequence
  Description of Artificial Sequence: Synthetic oligonucleotide
  Target: ATXN2; (-) strand; PAM type: NNGRRT; PAM sequence: CGGAGT
ttttttatctttagtagaga

SEQ ID NO: 7983 - DNA, 20 bp, Artificial Sequence
  Description of Artificial Sequence: Synthetic oligonucleotide
  Target: ATXN2; (-) strand; PAM type: NNGRRT; PAM sequence: TGGGAT
atgtcagcctcccaagtagc

SEQ ID NO: 7984 - DNA, 20 bp, Artificial Sequence
  Description of Artificial Sequence: Synthetic oligonucleotide
  Target: ATXN2; (-) strand; PAM type: NNGRRT; PAM sequence: CTGGGT
ctcactgcaacctccgcctc

SEQ ID NO: 7985 - DNA, 20 bp, Artificial Sequence
  Description of Artificial Sequence: Synthetic oligonucleotide
  Target: ATXN2; (-) strand; PAM type: NNGRRT; PAM sequence: TGGAGT
tcttgctctgtcacccaggc

SEQ ID NO: 7986 - DNA, 20 bp, Artificial Sequence
  Description of Artificial Sequence: Synthetic oligonucleotide
  Target: ATXN2; (-) strand; PAM type: NNGRRT; PAM sequence: TGGAGT
ttttttttttaatttttaga

SEQ ID NO: 7987 - DNA, 20 bp, Artificial Sequence
  Description of Artificial Sequence: Synthetic oligonucleotide
  Target: ATXN2; (-) strand; PAM type: NNGRRT; PAM sequence: GAGAAT
atagactgcccatttgccct

SEQ ID NO: 7988 - DNA, 20 bp, Artificial Sequence
  Description of Artificial Sequence: Synthetic oligonucleotide
  Target: ATXN2; (-) strand; PAM type: NNGRRT; PAM sequence: CTGAAT
atgtacagtcaggtctcatt

SEQ ID NO: 7989 - DNA, 20 bp, Artificial Sequence
  Description of Artificial Sequence: Synthetic oligonucleotide
  Target: ATXN2; (-) strand; PAM type: NNGRRT; PAM sequence: TAGAAT
cctttttttacttaggggtt

SEQ ID NO: 7990 - DNA, 20 bp, Artificial Sequence
  Description of Artificial Sequence: Synthetic oligonucleotide
  Target: ATXN2; (-) strand; PAM type: NNGRRT; PAM sequence: AGGGGT
gccatctcctttttttactt

SEQ ID NO: 7991 - DNA, 20 bp, Artificial Sequence
  Description of Artificial Sequence: Synthetic oligonucleotide
  Target: ATXN2; (-) strand; PAM type: NNGRRT; PAM sequence: GGGGAT
tcaatttggtgctccttgtt

SEQ ID NO: 7992 - DNA, 20 bp, Artificial Sequence
  Description of Artificial Sequence: Synthetic oligonucleotide
  Target: ATXN2; (-) strand; PAM type: NNGRRT; PAM sequence: GTGGAT
ttatgaaggtgctttcttgt

SEQ ID NO: 7993 - DNA, 20 bp, Artificial Sequence
  Description of Artificial Sequence: Synthetic oligonucleotide
  Target: ATXN2; (-) strand; PAM type: NNGRRT; PAM sequence: CTGGGT
tccttgataggatgtcaaaa

SEQ ID NO: 7994 - DNA, 20 bp, Artificial Sequence
  Description of Artificial Sequence: Synthetic oligonucleotide
  Target: ATXN2; (-) strand; PAM type: NNGRRT; PAM sequence: TAGGAT
tttggtgtctttttccttga

SEQ ID NO: 7995 - DNA, 20 bp, Artificial Sequence
  Description of Artificial Sequence: Synthetic oligonucleotide
  Target: ATXN2; (-) strand; PAM type: NNGRRT; PAM sequence: AGGGGT
ctgcattgtgggggaatgtc

SEQ ID NO: 7996 - DNA, 20 bp, Artificial Sequence
  Description of Artificial Sequence: Synthetic oligonucleotide
  Target: ATXN2; (-) strand; PAM type: NNGRRT; PAM sequence: GGGAAT
caccccacactgcattgtgg

SEQ ID NO: 7997 - DNA, 20 bp, Artificial Sequence
  Description of Artificial Sequence: Synthetic oligonucleotide
  Target: ATXN2; (-) strand; PAM type: NNGRRT; PAM sequence: CTGAGT
tccactgtgacagggcagca

SEQ ID NO: 7998 - DNA, 20 bp, Artificial Sequence
  Description of Artificial Sequence: Synthetic oligonucleotide
  Target: ATXN2; (-) strand; PAM type: NNGRRT; PAM sequence: CTGAAT
actccctctgtgggtgctgg

SEQ ID NO: 7999 - DNA, 20 bp, Artificial Sequence
  Description of Artificial Sequence: Synthetic oligonucleotide
  Target: ATXN2; (-) strand; PAM type: NNGRRT; PAM sequence: GTGGGT
ctagtctaaatactccctct

SEQ ID NO: 8000 - DNA, 20 bp, Artificial Sequence
  Description of Artificial Sequence: Synthetic oligonucleotide
  Target: ATXN2; (-) strand; PAM type: NNGRRT; PAM sequence: TGGGAT
gaaattcagattctaatcac

SEQ ID NO: 8001 - DNA, 20 bp, Artificial Sequence
  Description of Artificial Sequence: Synthetic oligonucleotide
  Target: ATXN2; (-) strand; PAM type: NNGRRT; PAM sequence: TGGGAT
gcctcggcctcccaaagtgc

SEQ ID NO: 8002 - DNA, 20 bp, Artificial Sequence
  Description of Artificial Sequence: Synthetic oligonucleotide
  Target: ATXN2; (-) strand; PAM type: NNGRRT; PAM sequence: TGGGAT
acctcagcctcctgagtagc

SEQ ID NO: 8003 - DNA, 20 bp, Artificial Sequence
  Description of Artificial Sequence: Synthetic oligonucleotide
  Target: ATXN2; (-) strand; PAM type: NNGRRT; PAM sequence: CTGAGT
aattctcctacctcagcctc

SEQ ID NO: 8004 - DNA, 20 bp, Artificial Sequence
  Description of Artificial Sequence: Synthetic oligonucleotide
  Target: ATXN2; (-) strand; PAM type: NNGRRT; PAM sequence: CCGGGT
ctcaccacaacctccgcctc

SEQ ID NO: 8005 - DNA, 20 bp, Artificial Sequence
  Description of Artificial Sequence: Synthetic oligonucleotide
  Target: ATXN2; (-) strand; PAM type: NNGRRT; PAM sequence: TGGAGT
ttcgctcttattgcccaggc

SEQ ID NO: 8006 - DNA, 20 bp, Artificial Sequence
  Description of Artificial Sequence: Synthetic oligonucleotide
  Target: ATXN2; (-) strand; PAM type: NNGRRT; PAM sequence: CAGAGT
attcttttggttttttttgg

SEQ ID NO: 8007 - DNA, 20 bp, Artificial Sequence
  Description of Artificial Sequence: Synthetic oligonucleotide
  Target: ATXN2; (-) strand; PAM type: NNGRRT; PAM sequence: AGGAAT
cacagtaccatgacttgtcc

SEQ ID NO: 8008 - DNA, 20 bp, Artificial Sequence
  Description of Artificial Sequence: Synthetic oligonucleotide
  Target: ATXN2; (-) strand; PAM type: NNGRRT; PAM sequence: GTGGGT
ccaccctagctggtgtctca

SEQ ID NO: 8009 - DNA, 20 bp, Artificial Sequence
  Description of Artificial Sequence: Synthetic oligonucleotide
  Target: ATXN2; (-) strand; PAM type: NNGRRT; PAM sequence: TGGAGT
gagctgtgagctgtggtacc

SEQ ID NO: 8010 - DNA, 20 bp, Artificial Sequence
  Description of Artificial Sequence: Synthetic oligonucleotide
  Target: ATXN2; (-) strand; PAM type: NNGRRT; PAM sequence: TAGAAT
gtcatctgggagctatggcc

SEQ ID NO: 8011 - DNA, 20 bp, Artificial Sequence
  Description of Artificial Sequence: Synthetic oligonucleotide
  Target: ATXN2; (-) strand; PAM type: NNGRRT; PAM sequence: CAGAAT
caatgggttcccttctggtc

SEQ ID NO: 8012 - DNA, 20 bp, Artificial Sequence
  Description of Artificial Sequence: Synthetic oligonucleotide
  Target: ATXN2; (-) strand; PAM type: NNGRRT; PAM sequence: ATGGGT
aggtatttcccttcaaggca

SEQ ID NO: 8013 - DNA, 20 bp, Artificial Sequence
  Description of Artificial Sequence: Synthetic oligonucleotide
  Target: ATXN2; (-) strand; PAM type: NNGRRT; PAM sequence: GTGAAT
ggctctttagtcagctggtg

SEQ ID NO: 8014 - DNA, 20 bp, Artificial Sequence
  Description of Artificial Sequence: Synthetic oligonucleotide
  Target: ATXN2; (-) strand; PAM type: NNGRRT; PAM sequence: CGGGGT
acaccacagctgtgaatgtg

SEQ ID NO: 8015 - DNA, 20 bp, Artificial Sequence
  Description of Artificial Sequence: Synthetic oligonucleotide
  Target: ATXN2; (-) strand; PAM type: NNGRRT; PAM sequence: GTGAAT
tccccatggacaccacagct

SEQ ID NO: 8016 - DNA, 20 bp, Artificial Sequence
  Description of Artificial Sequence: Synthetic oligonucleotide
  Target: ATXN2; (-) strand; PAM type: NNGRRT; PAM sequence: GTGGGT
tcttctctcacctcaagcag

SEQ ID NO: 8017 - DNA, 20 bp, Artificial Sequence
  Description of Artificial Sequence: Synthetic oligonucleotide
  Target: ATXN2; (-) strand; PAM type: NNGRRT; PAM sequence: AGGAAT
ggcctgggatcgggagcttt

SEQ ID NO: 8018 - DNA, 20 bp, Artificial Sequence
  Description of Artificial Sequence: Synthetic oligonucleotide
  Target: ATXN2; (-) strand; PAM type: NNGRRT; PAM sequence: TGGGAT
gctgcccaggagccagggcc

SEQ ID NO: 8019 - DNA, 20 bp, Artificial Sequence
  Description of Artificial Sequence: Synthetic oligonucleotide
  Target: ATXN2; (-) strand; PAM type: NNGRRT; PAM sequence: CAGGGT
cagcaggttcccttctggcc

SEQ ID NO: 8020 - DNA, 20 bp, Artificial Sequence
  Description of Artificial Sequence: Synthetic oligonucleotide
  Target: ATXN2; (-) strand; PAM type: NNGRRT; PAM sequence: CTGGGT
ggtgaagaatcctgcaagaa

SEQ ID NO: 8021 - DNA, 20 bp, Artificial Sequence
  Description of Artificial Sequence: Synthetic oligonucleotide
  Target: ATXN2; (-) strand; PAM type: NNGRRT; PAM sequence: AAGAAT
ggtgctttagtcagtaggtg

SEQ ID NO: 8022 - DNA, 20 bp, Artificial Sequence
  Description of Artificial Sequence: Synthetic oligonucleotide
  Target: ATXN2; (-) strand; PAM type: NNGRRT; PAM sequence: AAGGGT
ctgatgttaatttaaggccc

SEQ ID NO: 8023 - DNA, 20 bp, Artificial Sequence
  Description of Artificial Sequence: Synthetic oligonucleotide
  Target: ATXN2; (-) strand; PAM type: NNGRRT; PAM sequence: AAGGGT
gagctgcttggagtttgggg

SEQ ID NO: 8024 - DNA, 20 bp, Artificial Sequence
  Description of Artificial Sequence: Synthetic oligonucleotide
  Target: ATXN2; (-) strand; PAM type: NNGRRT; PAM sequence: TGGAGT
tctctttgtgctgagctgct

SEQ ID NO: 8025 - DNA, 20 bp, Artificial Sequence
  Description of Artificial Sequence: Synthetic oligonucleotide
  Target: ATXN2; (-) strand; PAM type: NNGRRT; PAM sequence: TGGAGT
cttacatttctccaaacaaa

SEQ ID NO: 8026 - DNA, 20 bp, Artificial Sequence
  Description of Artificial Sequence: Synthetic oligonucleotide
  Target: ATXN2; (-) strand; PAM type: NNGRRT; PAM sequence: GAGAAT
tagtcttggggaagatctgg

SEQ ID NO: 8027 - DNA, 20 bp, Artificial Sequence
  Description of Artificial Sequence: Synthetic oligonucleotide
  Target: ATXN2; (-) strand; PAM type: NNGRRT; PAM sequence: GGGAAT
aggtttttcaagtattcaaa

SEQ ID NO: 8028 - DNA, 20 bp, Artificial Sequence
  Description of Artificial Sequence: Synthetic oligonucleotide
  Target: ATXN2; (-) strand; PAM type: NNGRRT; PAM sequence: TGGGAT
gccttggcctctcagagtgt

SEQ ID NO: 8029 - DNA, 20 bp, Artificial Sequence
  Description of Artificial Sequence: Synthetic oligonucleotide
  Target: ATXN2; (-) strand; PAM type: NNGRRT; PAM sequence: CAGAGT
atctgtccgccttggcctct

SEQ ID NO: 8030 - DNA, 20 bp, Artificial Sequence
  Description of Artificial Sequence: Synthetic oligonucleotide
  Target: ATXN2; (-) strand; PAM type: NNGRRT; PAM sequence: TGGGAT
gcctcagcctcctgagtagc

SEQ ID NO: 8031 - DNA, 20 bp, Artificial Sequence
  Description of Artificial Sequence: Synthetic oligonucleotide
  Target: ATXN2; (-) strand; PAM type: NNGRRT; PAM sequence: CTGAGT
aattctcctgcctcagcctc

SEQ ID NO: 8032 - DNA, 20 bp, Artificial Sequence
  Description of Artificial Sequence: Synthetic oligonucleotide
  Target: ATXN2; (-) strand; PAM type: NNGRRT; PAM sequence: CCGGAT
ctcaccgcaacctccgtctc

SEQ ID NO: 8033 - DNA, 20 bp, Artificial Sequence
  Description of Artificial Sequence: Synthetic oligonucleotide
  Target: ATXN2; (-) strand; PAM type: NNGRRT; PAM sequence: TGGAGT
tctcgctctgtcgcccaggc

SEQ ID NO: 8034 - DNA, 20 bp, Artificial Sequence
  Description of Artificial Sequence: Synthetic oligonucleotide
  Target: ATXN2; (-) strand; PAM type: NNGRRT; PAM sequence: CAGAGT
ttttttttctgtttttgaga

SEQ ID NO: 8035 - DNA, 20 bp, Artificial Sequence
  Description of Artificial Sequence: Synthetic oligonucleotide
  Target: ATXN2; (-) strand; PAM type: NNGRRT; PAM sequence: TTGGGT
agtgtctgggcattgaagag

SEQ ID NO: 8036 - DNA, 20 bp, Artificial Sequence
  Description of Artificial Sequence: Synthetic oligonucleotide
  Target: ATXN2; (-) strand; PAM type: NNGRRT; PAM sequence: AAGAGT
tcatcagtgtctgggcattg

SEQ ID NO: 8037 - DNA, 20 bp, Artificial Sequence
  Description of Artificial Sequence: Synthetic oligonucleotide
  Target: ATXN2; (-) strand; PAM type: NNGRRT; PAM sequence: GTGGAT
ctcagatggccttgatgctt

SEQ ID NO: 8038 - DNA, 20 bp, Artificial Sequence
  Description of Artificial Sequence: Synthetic oligonucleotide
  Target: ATXN2; (-) strand; PAM type: NNGRRT; PAM sequence: GGGAAT
tcacatatctcttatcactt

SEQ ID NO: 8039 - DNA, 20 bp, Artificial Sequence
  Description of Artificial Sequence: Synthetic oligonucleotide
  Target: ATXN2; (-) strand; PAM type: NNGRRT; PAM sequence: TTGAAT
actttctcaaagcattcagc

SEQ ID NO: 8040 - DNA, 20 bp, Artificial Sequence
  Description of Artificial Sequence: Synthetic oligonucleotide
  Target: ATXN2; (-) strand; PAM type: NNGRRT; PAM sequence: TTGGAT
aatttgttctctgtattatc

SEQ ID NO: 8041 - DNA, 20 bp, Artificial Sequence
  Description of Artificial Sequence: Synthetic oligonucleotide
  Target: ATXN2; (-) strand; PAM type: NNGRRT; PAM sequence: CTGAAT
ttttttaaatttataggatt

SEQ ID NO: 8042 - DNA, 20 bp, Artificial Sequence
  Description of Artificial Sequence: Synthetic oligonucleotide
  Target: ATXN2; (-) strand; PAM type: NNGRRT; PAM sequence: TAGGAT
cagtctcttttttaaattta

SEQ ID NO: 8043 - DNA, 20 bp, Artificial Sequence
  Description of Artificial Sequence: Synthetic oligonucleotide
  Target: ATXN2; (-) strand; PAM type: NNGRRT; PAM sequence: TGGGAT
tcaattgaatttttccactt

SEQ ID NO: 8044 - DNA, 20 bp, Artificial Sequence
  Description of Artificial Sequence: Synthetic oligonucleotide
  Target: ATXN2; (-) strand; PAM type: NNGRRT; PAM sequence: TTGAAT
tgcatttttcagtttgtcaa

SEQ ID NO: 8045 - DNA, 20 bp, Artificial Sequence
  Description of Artificial Sequence: Synthetic oligonucleotide
  Target: ATXN2; (-) strand; PAM type: NNGRRT; PAM sequence: CTGAAT
gttgtttattttcaaatagc

SEQ ID NO: 8046 - DNA, 20 bp, Artificial Sequence
  Description of Artificial Sequence: Synthetic oligonucleotide
  Target: ATXN2; (-) strand; PAM type: NNGRRT; PAM sequence: GTGAGT
aaagtgctaggattataagc

SEQ ID NO: 8047 - DNA, 20 bp, Artificial Sequence
  Description of Artificial Sequence: Synthetic oligonucleotide
  Target: ATXN2; (-) strand; PAM type: NNGRRT; PAM sequence: TAGGAT
gccttggcatcctaaagtgc

SEQ ID NO: 8048 - DNA, 20 bp, Artificial Sequence
  Description of Artificial Sequence: Synthetic oligonucleotide
  Target: ATXN2; (-) strand; PAM type: NNGRRT; PAM sequence: CAGGGT
tggtcttgagctcctgacct

SEQ ID NO: 8049 - DNA, 20 bp, Artificial Sequence
  Description of Artificial Sequence: Synthetic oligonucleotide
  Target: ATXN2; (-) strand; PAM type: NNGRRT; PAM sequence: CGGGGT
ttttgtatttttagtaaaga

SEQ ID NO: 8050 - DNA, 20 bp, Artificial Sequence
  Description of Artificial Sequence: Synthetic oligonucleotide
  Target: ATXN2; (-) strand; PAM type: NNGRRT; PAM sequence: TGGGAT
gcctcagcctcccaagtagc

SEQ ID NO: 8051 - DNA, 20 bp, Artificial Sequence
  Description of Artificial Sequence: Synthetic oligonucleotide
  Target: ATXN2; (-) strand; PAM type: NNGRRT; PAM sequence: TGGAGT
gtcatgctctgttaccagcc

SEQ ID NO: 8052 - DNA, 20 bp, Artificial Sequence
  Description of Artificial Sequence: Synthetic oligonucleotide
  Target: ATXN2; (-) strand; PAM type: NNGRRT; PAM sequence: CAGAGT
ttttttttttttttttgaga

SEQ ID NO: 8053 - DNA, 20 bp, Artificial Sequence
  Description of Artificial Sequence: Synthetic oligonucleotide
  Target: ATXN2; (-) strand; PAM type: NNGRRT; PAM sequence: GTGAGT
tttctgtgtacttgttacca

SEQ ID NO: 8054 - DNA, 20 bp, Artificial Sequence
  Description of Artificial Sequence: Synthetic oligonucleotide
  Target: ATXN2; (-) strand; PAM type: NNGRRT; PAM sequence: ATGAGT
ttattcttcctgctcaaaat

SEQ ID NO: 8055 - DNA, 20 bp, Artificial Sequence
  Description of Artificial Sequence: Synthetic oligonucleotide
  Target: ATXN2; (-) strand; PAM type: NNGRRT; PAM sequence: GAGAAT
tactcaggaggctgaggcag

SEQ ID NO: 8056 - DNA, 20 bp, Artificial Sequence
  Description of Artificial Sequence: Synthetic oligonucleotide
  Target: ATXN2; (-) strand; PAM type: NNGRRT; PAM sequence: AGGAGT
gtggggcgaatcacaaggtt

SEQ ID NO: 8057 - DNA, 20 bp, Artificial Sequence
  Description of Artificial Sequence: Synthetic oligonucleotide
  Target: ATXN2; (-) strand; PAM type: NNGRRT; PAM sequence: GCGAAT
ctttggaaggcaaaggtggg

SEQ ID NO: 8058 - DNA, 20 bp, Artificial Sequence
  Description of Artificial Sequence: Synthetic oligonucleotide
  Target: ATXN2; (-) strand; PAM type: NNGRRT; PAM sequence: CAGAGT
ctgcactccagtctgggcaa

SEQ ID NO: 8059 - DNA, 20 bp, Artificial Sequence
  Description of Artificial Sequence: Synthetic oligonucleotide
  Target: ATXN2; (-) strand; PAM type: NNGRRT; PAM sequence: GAGAGT
ggcccaggttgcagtgagcc

SEQ ID NO: 8060 - DNA, 20 bp, Artificial Sequence
  Description of Artificial Sequence: Synthetic oligonucleotide
  Target: ATXN2; (-) strand; PAM type: NNGRRT; PAM sequence: GAGAAT
ctactcggaggctgaggcag

SEQ ID NO: 8061 - DNA, 20 bp, Artificial Sequence
  Description of Artificial Sequence: Synthetic oligonucleotide
  Target: ATXN2; (-) strand; PAM type: NNGRRT; PAM sequence: GCGGGT
aaaattagccggacatggtg

SEQ ID NO: 8062 - DNA, 20 bp, Artificial Sequence
  Description of Artificial Sequence: Synthetic oligonucleotide
  Target: ATXN2; (-) strand; PAM type: NNGRRT; PAM sequence: AGGAGT
tgggcggatcacctaaggtc

SEQ ID NO: 8063 - DNA, 20 bp, Artificial Sequence
  Description of Artificial Sequence: Synthetic oligonucleotide
  Target: ATXN2; (-) strand; PAM type: NNGRRT; PAM sequence: GCGGAT
actttgggaggctgaggtgg

SEQ ID NO: 8064 - DNA, 20 bp, Artificial Sequence
  Description of Artificial Sequence: Synthetic oligonucleotide
  Target: ATXN2; (-) strand; PAM type: NNGRRT; PAM sequence: AAGGGT
aaaaaaaaaagagatcacat

SEQ ID NO: 8065 - DNA, 20 bp, Artificial Sequence
  Description of Artificial Sequence: Synthetic oligonucleotide
  Target: ATXN2; (-) strand; PAM type: NNGRRT; PAM sequence: CAGAGT
ctgcaccccagcctgggcga

SEQ ID NO: 8066 - DNA, 20 bp, Artificial Sequence
  Description of Artificial Sequence: Synthetic oligonucleotide
  Target: ATXN2; (-) strand; PAM type: NNGRRT; PAM sequence: GTGAGT
cccaggaggcagaggttgca

SEQ ID NO: 8067 - DNA, 20 bp, Artificial Sequence
  Description of Artificial Sequence: Synthetic oligonucleotide
  Target: ATXN2; (-) strand; PAM type: NNGRRT; PAM sequence: GAGAAT
tactcaggaggctgaggcag

SEQ ID NO: 8068 - DNA, 20 bp, Artificial Sequence
  Description of Artificial Sequence: Synthetic oligonucleotide
  Target: ATXN2; (-) strand; PAM type: NNGRRT; PAM sequence: GTGGAT
actttgggaggccgaggtgg

SEQ ID NO: 8069 - DNA, 20 bp, Artificial Sequence
  Description of Artificial Sequence: Synthetic oligonucleotide
  Target: ATXN2; (-) strand; PAM type: NNGRRT; PAM sequence: GTGGGT
cagcactttgggaggccgag

SEQ ID NO: 8070 - DNA, 20 bp, Artificial Sequence
  Description of Artificial Sequence: Synthetic oligonucleotide
  Target: ATXN2; (-) strand; PAM type: NNGRRT; PAM sequence: CTGGGT
atttaagatcaccatgacag

SEQ ID NO: 8071 - DNA, 20 bp, Artificial Sequence
  Description of Artificial Sequence: Synthetic oligonucleotide
  Target: ATXN2; (-) strand; PAM type: NNGRRT; PAM sequence: GAGAGT
cactctgtatcttttgattg

SEQ ID NO: 8072 - DNA, 20 bp, Artificial Sequence
  Description of Artificial Sequence: Synthetic oligonucleotide
  Target: ATXN2; (-) strand; PAM type: NNGRRT; PAM sequence: TGGGAT
gccttggcctcccaaagtcc

SEQ ID NO: 8073 - DNA, 20 bp, Artificial Sequence
  Description of Artificial Sequence: Synthetic oligonucleotide
  Target: ATXN2; (-) strand; PAM type: NNGRRT; PAM sequence: TGGGGT
ttttgtattttcagtagaga

SEQ ID NO: 8074 - DNA, 20 bp, Artificial Sequence
  Description of Artificial Sequence: Synthetic oligonucleotide
  Target: ATXN2; (-) strand; PAM type: NNGRRT; PAM sequence: TGGGAT
gcctcagcctcccaagtagc

SEQ ID NO: 8075 - DNA, 20 bp, Artificial Sequence
  Description of Artificial Sequence: Synthetic oligonucleotide
  Target: ATXN2; (-) strand; PAM type: NNGRRT; PAM sequence: CTGAGT
ctcactgcaacctccgcctc

SEQ ID NO: 8076 - DNA, 20 bp, Artificial Sequence
  Description of Artificial Sequence: Synthetic oligonucleotide
  Target: ATXN2; (-) strand; PAM type: NNGRRT; PAM sequence: CAGAGT
ttttttttttttttttgaga

SEQ ID NO: 8077 - DNA, 20 bp, Artificial Sequence
  Description of Artificial Sequence: Synthetic oligonucleotide
  Target: ATXN2; (-) strand; PAM type: NNGRRT; PAM sequence: ATGGAT
aagtgtgtttcttgtaggca

SEQ ID NO: 8078 - DNA, 20 bp, Artificial Sequence
  Description of Artificial Sequence: Synthetic oligonucleotide
  Target: ATXN2; (-) strand; PAM type: NNGRRT; PAM sequence: TGGAAT
ttttctggtttccatttgca

SEQ ID NO: 8079 - DNA, 20 bp, Artificial Sequence
  Description of Artificial Sequence: Synthetic oligonucleotide
  Target: ATXN2; (-) strand; PAM type: NNGRRT; PAM sequence: CCGAAT
atacttgttataacctcttg

SEQ ID NO: 8080 - DNA, 20 bp, Artificial Sequence
  Description of Artificial Sequence: Synthetic oligonucleotide
  Target: ATXN2; (-) strand; PAM type: NNGRRT; PAM sequence: CTGGAT
ataatgtttgctttatatat

SEQ ID NO: 8081 - DNA, 20 bp, Artificial Sequence
  Description of Artificial Sequence: Synthetic oligonucleotide
  Target: ATXN2; (-) strand; PAM type: NNGRRT; PAM sequence: TGGGGT
gatctgtccattgctgagag

SEQ ID NO: 8082 - DNA, 20 bp, Artificial Sequence
  Description of Artificial Sequence: Synthetic oligonucleotide
  Target: ATXN2; (-) strand; PAM type: NNGRRT; PAM sequence: GAGAGT
tgaatgatctgtccattgct

SEQ ID NO: 8083 - DNA, 20 bp, Artificial Sequence
  Description of Artificial Sequence: Synthetic oligonucleotide
  Target: ATXN2; (-) strand; PAM type: NNGRRT; PAM sequence: CTGAAT
tttctttgttgattttctgt

SEQ ID NO: 8084 - DNA, 20 bp, Artificial Sequence
  Description of Artificial Sequence: Synthetic oligonucleotide
  Target: ATXN2; (-) strand; PAM type: NNGRRT; PAM sequence: AAGAAT
gcaatccatatgttgaggag

SEQ ID NO: 8085 - DNA, 20 bp, Artificial Sequence
  Description of Artificial Sequence: Synthetic oligonucleotide
  Target: ATXN2; (-) strand; PAM type: NNGRRT; PAM sequence: TAGGGT
acttgttttgtggcttaaca

SEQ ID NO: 8086 - DNA, 20 bp, Artificial Sequence
  Description of Artificial Sequence: Synthetic oligonucleotide
  Target: ATXN2; (-) strand; PAM type: NNGRRT; PAM sequence: TGGGAT
atttcggcctcccaaggtgc

SEQ ID NO: 8087 - DNA, 20 bp, Artificial Sequence
  Description of Artificial Sequence: Synthetic oligonucleotide
  Target: ATXN2; (-) strand; PAM type: NNGRRT; PAM sequence: CAGGGT
tggggctttgcgatgtgtcc

SEQ ID NO: 8088 - DNA, 20 bp, Artificial Sequence
  Description of Artificial Sequence: Synthetic oligonucleotide
  Target: ATXN2; (-) strand; PAM type: NNGRRT; PAM sequence: TTGGAT
gtcacatatggctgatattt

SEQ ID NO: 8089 - DNA, 20 bp, Artificial Sequence
  Description of Artificial Sequence: Synthetic oligonucleotide
  Target: ATXN2; (-) strand; PAM type: NNGRRT; PAM sequence: TGGAGT
tctcactctgttacccaggc

SEQ ID NO: 8090 - DNA, 20 bp, Artificial Sequence
  Description of Artificial Sequence: Synthetic oligonucleotide
  Target: ATXN2; (-) strand; PAM type: NNGRRT; PAM sequence: CAGAGT
gtttgtttgtttgtttgtaa

SEQ ID NO: 8091 - DNA, 20 bp, Artificial Sequence
  Description of Artificial Sequence: Synthetic oligonucleotide
  Target: ATXN2; (-) strand; PAM type: NNGRRT; PAM sequence: TTGAAT
ttgatatgattttaactttt

SEQ ID NO: 8092 - DNA, 20 bp, Artificial Sequence
  Description of Artificial Sequence: Synthetic oligonucleotide
  Target: ATXN2; (-) strand; PAM type: NNGRRT; PAM sequence: TGGAAT
accttggcctcctaaagtgc

SEQ ID NO: 8093 - DNA, 20 bp, Artificial Sequence
  Description of Artificial Sequence: Synthetic oligonucleotide
  Target: ATXN2; (-) strand; PAM type: NNGRRT; PAM sequence: GGGGGT
ttttgtatttttagtagaga

SEQ ID NO: 8094 - DNA, 20 bp, Artificial Sequence
  Description of Artificial Sequence: Synthetic oligonucleotide
  Target: ATXN2; (-) strand; PAM type: NNGRRT; PAM sequence: TGGGAT
gcctcagcctcctgagtagc

SEQ ID NO: 8095 - DNA, 20 bp, Artificial Sequence
  Description of Artificial Sequence: Synthetic oligonucleotide
  Target: ATXN2; (-) strand; PAM type: NNGRRT; PAM sequence: CTGAGT
gattcttctgcctcagcctc

SEQ ID NO: 8096 - DNA, 20 bp, Artificial Sequence
  Description of Artificial Sequence: Synthetic oligonucleotide
  Target: ATXN2; (-) strand; PAM type: NNGRRT; PAM sequence: TGGAGT
tctcgctctgtcacccatgc

SEQ ID NO: 8097 - DNA, 20 bp, Artificial Sequence
  Description of Artificial Sequence: Synthetic oligonucleotide
  Target: ATXN2; (-) strand; PAM type: NNGRRT; PAM sequence: TGGAGT
ttatttttgtttttttgaga

SEQ ID NO: 8098 - DNA, 20 bp, Artificial Sequence
  Description of Artificial Sequence: Synthetic oligonucleotide
  Target: ATXN2; (-) strand; PAM type: NNGRRT; PAM sequence: AGGAAT
ttccattttcatttgtttca

SEQ ID NO: 8099 - DNA, 20 bp, Artificial Sequence
  Description of Artificial Sequence: Synthetic oligonucleotide
  Target: ATXN2; (-) strand; PAM type: NNGRRT; PAM sequence: TAGGAT
tccttgcttttctagttctt

SEQ ID NO: 8100 - DNA, 20 bp, Artificial Sequence
  Description of Artificial Sequence: Synthetic oligonucleotide
  Target: ATXN2; (-) strand; PAM type: NNGRRT; PAM sequence: CTGAGT
ttgggttttctctttttttt

SEQ ID NO: 8101 - DNA, 20 bp, Artificial Sequence
  Description of Artificial Sequence: Synthetic oligonucleotide
  Target: ATXN2; (-) strand; PAM type: NNGRRT; PAM sequence: TTGGGT
ttcatctctcattttattat

SEQ ID NO: 8102 - DNA, 20 bp, Artificial Sequence
  Description of Artificial Sequence: Synthetic oligonucleotide
  Target: ATXN2; (-) strand; PAM type: NNGRRT; PAM sequence: TTGAAT
tagtagtctctaatgatcct

SEQ ID NO: 8103 - DNA, 20 bp, Artificial Sequence
  Description of Artificial Sequence: Synthetic oligonucleotide
  Target: ATXN2; (-) strand; PAM type: NNGRRT; PAM sequence: AGGAAT
ttggtaggttgtatgtgtct

SEQ ID NO: 8104 - DNA, 20 bp, Artificial Sequence
  Description of Artificial Sequence: Synthetic oligonucleotide
  Target: ATXN2; (-) strand; PAM type: NNGRRT; PAM sequence: TTGGAT
cttgttattgtatttgggtt

SEQ ID NO: 8105 - DNA, 20 bp, Artificial Sequence
  Description of Artificial Sequence: Synthetic oligonucleotide
  Target: ATXN2; (-) strand; PAM type: NNGRRT; PAM sequence: TTGGGT
ctcgttacttgttattgtat

SEQ ID NO: 8106 - DNA, 20 bp, Artificial Sequence
  Description of Artificial Sequence: Synthetic oligonucleotide
  Target: ATXN2; (-) strand; PAM type: NNGRRT; PAM sequence: TAGAAT
gttcttctttaaaggtttag

SEQ ID NO: 8107 - DNA, 20 bp, Artificial Sequence
  Description of Artificial Sequence: Synthetic oligonucleotide
  Target: ATXN2; (-) strand; PAM type: NNGRRT; PAM sequence: TAGGAT
ttgtgttggaatagtttgag

SEQ ID NO: 8108 - DNA, 20 bp, Artificial Sequence
  Description of Artificial Sequence: Synthetic oligonucleotide
  Target: ATXN2; (-) strand; PAM type: NNGRRT; PAM sequence: TTGAGT
ctgtattgtgttggaatagt

SEQ ID NO: 8109 - DNA, 20 bp, Artificial Sequence
  Description of Artificial Sequence: Synthetic oligonucleotide
  Target: ATXN2; (-) strand; PAM type: NNGRRT; PAM sequence: TGGAAT
tccctcttcctgtattgtgt

SEQ ID NO: 8110 - DNA, 20 bp, Artificial Sequence
  Description of Artificial Sequence: Synthetic oligonucleotide
  Target: ATXN2; (-) strand; PAM type: NNGRRT; PAM sequence: ATGAGT
ggtaatagtggccttgtaga

SEQ ID NO: 8111 - DNA, 20 bp, Artificial Sequence
  Description of Artificial Sequence: Synthetic oligonucleotide
  Target: ATXN2; (-) strand; PAM type: NNGRRT; PAM sequence: TAGAAT
atagggtaatagtggccttg

SEQ ID NO: 8112 - DNA, 20 bp, Artificial Sequence
  Description of Artificial Sequence: Synthetic oligonucleotide
  Target: ATXN2; (-) strand; PAM type: NNGRRT; PAM sequence: TAGGGT
atgtgtcctttggttttgta

SEQ ID NO: 8113 - DNA, 20 bp, Artificial Sequence
  Description of Artificial Sequence: Synthetic oligonucleotide
  Target: ATXN2; (-) strand; PAM type: NNGRRT; PAM sequence: GAGGAT
cggtttgctagtattatatt

SEQ ID NO: 8114 - DNA, 20 bp, Artificial Sequence
  Description of Artificial Sequence: Synthetic oligonucleotide
  Target: ATXN2; (-) strand; PAM type: NNGRRT; PAM sequence: CTGAAT
atgatctttttaatgtgtta

SEQ ID NO: 8115 - DNA, 20 bp, Artificial Sequence
  Description of Artificial Sequence: Synthetic oligonucleotide
  Target: ATXN2; (-) strand; PAM type: NNGRRT; PAM sequence: ATGAAT
atgaatcccacttagtcatg

SEQ ID NO: 8116 - DNA, 20 bp, Artificial Sequence
  Description of Artificial Sequence: Synthetic oligonucleotide
  Target: ATXN2; (-) strand; PAM type: NNGRRT; PAM sequence: ATGAAT
accatccttgcatccctggg

SEQ ID NO: 8117 - DNA, 20 bp, Artificial Sequence
  Description of Artificial Sequence: Synthetic oligonucleotide
  Target: ATXN2; (-) strand; PAM type: NNGRRT; PAM sequence: TGGGAT
tcgaaccatccttgcatccc

SEQ ID NO: 8118 - DNA, 20 bp, Artificial Sequence
  Description of Artificial Sequence: Synthetic oligonucleotide
  Target: ATXN2; (-) strand; PAM type: NNGRRT; PAM sequence: GGGGAT
gccaagggttttaatcataa

SEQ ID NO: 8119 - DNA, 20 bp, Artificial Sequence
  Description of Artificial Sequence: Synthetic oligonucleotide
  Target: ATXN2; (-) strand; PAM type: NNGRRT; PAM sequence: AAGGGT
gtgagccaccacgcccggcc

SEQ ID NO: 8120 - DNA, 20 bp, Artificial Sequence
  Description of Artificial Sequence: Synthetic oligonucleotide
  Target: ATXN2; (-) strand; PAM type: NNGRRT; PAM sequence: TGGGAT
gtctcagcctcccaaagtgc

SEQ ID NO: 8121 - DNA, 20 bp, Artificial Sequence
  Description of Artificial Sequence: Synthetic oligonucleotide
  Target: ATXN2; (-) strand; PAM type: NNGRRT; PAM sequence: CAGGAT
cggggtttcaccgtgttagc

SEQ ID NO: 8122 - DNA, 20 bp, Artificial Sequence
  Description of Artificial Sequence: Synthetic oligonucleotide
  Target: ATXN2; (-) strand; PAM type: NNGRRT; PAM sequence: CGGGGT
ttttgtatttttagtagaga

SEQ ID NO: 8123 - DNA, 20 bp, Artificial Sequence
  Description of Artificial Sequence: Synthetic oligonucleotide
  Target: ATXN2; (-) strand; PAM type: NNGRRT; PAM sequence: CCGAGT
cgttctcctgcctcagcctc

SEQ ID NO: 8124 - DNA, 20 bp, Artificial Sequence
  Description of Artificial Sequence: Synthetic oligonucleotide
  Target: ATXN2; (-) strand; PAM type: NNGRRT; PAM sequence: CTGGGT
ctcactgcaagctccacctc

SEQ ID NO: 8125 - DNA, 20 bp, Artificial Sequence
  Description of Artificial Sequence: Synthetic oligonucleotide
  Target: ATXN2; (-) strand; PAM type: NNGRRT; PAM sequence: TGGAGT
tctcactctgtcacccaggc

SEQ ID NO: 8126 - DNA, 20 bp, Artificial Sequence
  Description of Artificial Sequence: Synthetic oligonucleotide
  Target: ATXN2; (-) strand; PAM type: NNGRRT; PAM sequence: TGGAGT
ttgtttgtttgtttttgaga

SEQ ID NO: 8127 - DNA, 20 bp, Artificial Sequence
  Description of Artificial Sequence: Synthetic oligonucleotide
  Target: ATXN2; (-) strand; PAM type: NNGRRT; PAM sequence: TGGGGT
tccttctatacccagttctt

SEQ ID NO: 8128 - DNA, 20 bp, Artificial Sequence
  Description of Artificial Sequence: Synthetic oligonucleotide
  Target: ATXN2; (-) strand; PAM type: NNGRRT; PAM sequence: ATGGGT
ttttcagtatggtactagtt

SEQ ID NO: 8129 - DNA, 20 bp, Artificial Sequence
  Description of Artificial Sequence: Synthetic oligonucleotide
  Target: ATXN2; (-) strand; PAM type: NNGRRT; PAM sequence: TTGAAT
taggacttccgagtattatg

SEQ ID NO: 8130 - DNA, 20 bp, Artificial Sequence
  Description of Artificial Sequence: Synthetic oligonucleotide
  Target: ATXN2; (-) strand; PAM type: NNGRRT; PAM sequence: CCGAGT
gattgctccaattaggactt

SEQ ID NO: 8131 - DNA, 20 bp, Artificial Sequence
  Description of Artificial Sequence: Synthetic oligonucleotide
  Target: ATXN2; (-) strand; PAM type: NNGRRT; PAM sequence: GTGGAT
ttgacttcttccattccagt

SEQ ID NO: 8132 - DNA, 20 bp, Artificial Sequence
  Description of Artificial Sequence: Synthetic oligonucleotide
  Target: ATXN2; (-) strand; PAM type: NNGRRT; PAM sequence: AAGGAT
agatcatattatctgcaaac

SEQ ID NO: 8133 - DNA, 20 bp, Artificial Sequence
  Description of Artificial Sequence: Synthetic oligonucleotide
  Target: ATXN2; (-) strand; PAM type: NNGRRT; PAM sequence: TGGAGT
tctaataggtttttcttttt

SEQ ID NO: 8134 - DNA, 20 bp, Artificial Sequence
  Description of Artificial Sequence: Synthetic oligonucleotide
  Target: ATXN2; (-) strand; PAM type: NNGRRT; PAM sequence: CTGAAT
ttttgtatcctgcaatttta

SEQ ID NO: 8135 - DNA, 20 bp, Artificial Sequence
  Description of Artificial Sequence: Synthetic oligonucleotide
  Target: ATXN2; (-) strand; PAM type: NNGRRT; PAM sequence: TGGGAT
atatttgtagctattgtaaa

SEQ ID NO: 8136 - DNA, 20 bp, Artificial Sequence
  Description of Artificial Sequence: Synthetic oligonucleotide
  Target: ATXN2; (-) strand; PAM type: NNGRRT; PAM sequence: TGGAAT
attcttctaatccataaaca

SEQ ID NO: 8137 - DNA, 20 bp, Artificial Sequence
  Description of Artificial Sequence: Synthetic oligonucleotide
  Target: ATXN2; (-) strand; PAM type: NNGRRT; PAM sequence: TTGAGT
cactgaatctgtagattgct

SEQ ID NO: 8138 - DNA, 20 bp, Artificial Sequence
  Description of Artificial Sequence: Synthetic oligonucleotide
  Target: ATXN2; (-) strand; PAM type: NNGRRT; PAM sequence: CTGAAT
gtattttgatagggattgca

SEQ ID NO: 8139 - DNA, 20 bp, Artificial Sequence
  Description of Artificial Sequence: Synthetic oligonucleotide
  Target: ATXN2; (-) strand; PAM type: NNGRRT; PAM sequence: AGGGAT
aatgtcattggtattttgat

SEQ ID NO: 8140 - DNA, 20 bp, Artificial Sequence
  Description of Artificial Sequence: Synthetic oligonucleotide
  Target: ATXN2; (-) strand; PAM type: NNGRRT; PAM sequence: AGGAAT
tatttttgtctacttctgtg

SEQ ID NO: 8141 - DNA, 20 bp, Artificial Sequence
  Description of Artificial Sequence: Synthetic oligonucleotide
  Target: ATXN2; (-) strand; PAM type: NNGRRT; PAM sequence: TAGAAT
ttgtggttccctacaaattt

SEQ ID NO: 8142 - DNA, 20 bp, Artificial Sequence
  Description of Artificial Sequence: Synthetic oligonucleotide
  Target: ATXN2; (-) strand; PAM type: NNGRRT; PAM sequence: CTGAGT
ttagacgtatggattcattt

SEQ ID NO: 8143 - DNA, 20 bp, Artificial Sequence
  Description of Artificial Sequence: Synthetic oligonucleotide
  Target: ATXN2; (-) strand; PAM type: NNGRRT; PAM sequence: ATGGAT
aaatgagttcacttagacgt

SEQ ID NO: 8144 - DNA, 20 bp, Artificial Sequence
  Description of Artificial Sequence: Synthetic oligonucleotide
  Target: ATXN2; (-) strand; PAM type: NNGRRT; PAM sequence: ATGAGT
tcatggcttctttgtggaaa

SEQ ID NO: 8145 - DNA, 20 bp, Artificial Sequence
  Description of Artificial Sequence: Synthetic oligonucleotide
  Target: ATXN2; (-) strand; PAM type: NNGRRT; PAM sequence: ATGGAT
ctggtttcattcttctgcat

SEQ ID NO: 8146 - DNA, 20 bp, Artificial Sequence
  Description of Artificial Sequence: Synthetic oligonucleotide
  Target: ATXN2; (-) strand; PAM type: NNGRRT; PAM sequence: AGGGGT
tttttaatatggtgggacac

SEQ ID NO: 8147 - DNA, 20 bp, Artificial Sequence
  Description of Artificial Sequence: Synthetic oligonucleotide
  Target: ATXN2; (-) strand; PAM type: NNGRRT; PAM sequence: GGGAGT
ttgcccagagtaatgtccct

SEQ ID NO: 8148 - DNA, 20 bp, Artificial Sequence
  Description of Artificial Sequence: Synthetic oligonucleotide
  Target: ATXN2; (-) strand; PAM type: NNGRRT; PAM sequence: CAGAGT
ttactcaagaaatctttgcc

SEQ ID NO: 8149 - DNA, 20 bp, Artificial Sequence
  Description of Artificial Sequence: Synthetic oligonucleotide
  Target: ATXN2; (-) strand; PAM type: NNGRRT; PAM sequence: TGGGGT
gctttggttgcctgtacttt

SEQ ID NO: 8150 - DNA, 20 bp, Artificial Sequence
  Description of Artificial Sequence: Synthetic oligonucleotide
  Target: ATXN2; (-) strand; PAM type: NNGRRT; PAM sequence: ATGAGT
ggttattgatcccttgtcag

SEQ ID NO: 8151 - DNA, 20 bp, Artificial Sequence
  Description of Artificial Sequence: Synthetic oligonucleotide
  Target: ATXN2; (-) strand; PAM type: NNGRRT; PAM sequence: TTGAGT
aattttccctatggagttgc

SEQ ID NO: 8152 - DNA, 20 bp, Artificial Sequence
  Description of Artificial Sequence: Synthetic oligonucleotide
  Target: ATXN2; (-) strand; PAM type: NNGRRT; PAM sequence: TGGAGT
agttactaaaattttcccta

SEQ ID NO: 8153 - DNA, 20 bp, Artificial Sequence
  Description of Artificial Sequence: Synthetic oligonucleotide
  Target: ATXN2; (-) strand; PAM type: NNGRRT; PAM sequence: TTGAGT
gatcttttgcccatttttaa

SEQ ID NO: 8154 - DNA, 20 bp, Artificial Sequence
  Description of Artificial Sequence: Synthetic oligonucleotide
  Target: ATXN2; (-) strand; PAM type: NNGRRT; PAM sequence: TAGGAT
gcctcagcctcccaaagtgc

SEQ ID NO: 8155 - DNA, 20 bp, Artificial Sequence
  Description of Artificial Sequence: Synthetic oligonucleotide
  Target: ATXN2; (-) strand; PAM type: NNGRRT; PAM sequence: CGGGAT
ttttgtatttttagtagaga

SEQ ID NO: 8156 - DNA, 20 bp, Artificial Sequence
  Description of Artificial Sequence: Synthetic oligonucleotide
  Target: ATXN2; (-) strand; PAM type: NNGRRT; PAM sequence: CCGGAT
ctcactgcgccctacacctc

SEQ ID NO: 8157 - DNA, 20 bp, Artificial Sequence
  Description of Artificial Sequence: Synthetic oligonucleotide
  Target: ATXN2; (-) strand; PAM type: NNGRRT; PAM sequence: CAGAGT
gttttgttttgtttttgaga

SEQ ID NO: 8158 - DNA, 20 bp, Artificial Sequence
  Description of Artificial Sequence: Synthetic oligonucleotide
  Target: ATXN2; (-) strand; PAM type: NNGRRT; PAM sequence: TTGAAT
ttttctggtgatcagtagta

SEQ ID NO: 8159 - DNA, 20 bp, Artificial Sequence
  Description of Artificial Sequence: Synthetic oligonucleotide
  Target: ATXN2; (-) strand; PAM type: NNGRRT; PAM sequence: TGGGGT
tggataaaagccattttaac

SEQ ID NO: 8160 - DNA, 20 bp, Artificial Sequence
  Description of Artificial Sequence: Synthetic oligonucleotide
  Target: ATXN2; (-) strand; PAM type: NNGRRT; PAM sequence: TTGGAT
catttgttattgcctgtctt

SEQ ID NO: 8161 - DNA, 20 bp, Artificial Sequence
  Description of Artificial Sequence: Synthetic oligonucleotide
  Target: ATXN2; (-) strand; PAM type: NNGRRT; PAM sequence: AGGAAT
gctctatttttagttttttg

SEQ ID NO: 8162 - DNA, 20 bp, Artificial Sequence
  Description of Artificial Sequence: Synthetic oligonucleotide
  Target: ATXN2; (-) strand; PAM type: NNGRRT; PAM sequence: CTGGAT
tatacctagcagtgcaattg

SEQ ID NO: 8163 - DNA, 20 bp, Artificial Sequence
  Description of Artificial Sequence: Synthetic oligonucleotide
  Target: ATXN2; (-) strand; PAM type: NNGRRT; PAM sequence: CTGAGT
tcaataaactgatttccttt

SEQ ID NO: 8164 - DNA, 20 bp, Artificial Sequence
  Description of Artificial Sequence: Synthetic oligonucleotide
  Target: ATXN2; (-) strand; PAM type: NNGRRT; PAM sequence: GGGAGT
tatagtgccgtagtaaacat

SEQ ID NO: 8165 - DNA, 20 bp, Artificial Sequence
  Description of Artificial Sequence: Synthetic oligonucleotide
  Target: ATXN2; (-) strand; PAM type: NNGRRT; PAM sequence: CTGAAT
gatctcattcttttttatgg

SEQ ID NO: 8166 - DNA, 20 bp, Artificial Sequence
  Description of Artificial Sequence: Synthetic oligonucleotide
  Target: ATXN2; (-) strand; PAM type: NNGRRT; PAM sequence: CAGGAT
atctacattgctgcaaatga

SEQ ID NO: 8167 - DNA, 20 bp, Artificial Sequence
  Description of Artificial Sequence: Synthetic oligonucleotide
  Target: ATXN2; (-) strand; PAM type: NNGRRT; PAM sequence: AAGAAT
tttagtgcctgcaaacgagt

SEQ ID NO: 8168 - DNA, 20 bp, Artificial Sequence
  Description of Artificial Sequence: Synthetic oligonucleotide
  Target: ATXN2; (-) strand; PAM type: NNGRRT; PAM sequence: ACGAGT
tttatttttagtgcctgcaa

SEQ ID NO: 8169 - DNA, 20 bp, Artificial Sequence
  Description of Artificial Sequence: Synthetic oligonucleotide
  Target: ATXN2; (-) strand; PAM type: NNGRRT; PAM sequence: CAGAGT
catttctgcctccggtcctg

SEQ ID NO: 8170 - DNA, 20 bp, Artificial Sequence
  Description of Artificial Sequence: Synthetic oligonucleotide
  Target: ATXN2; (-) strand; PAM type: NNGRRT; PAM sequence: TGGGGT
gccacagcctcccaaagtgc

SEQ ID NO: 8171 - DNA, 20 bp, Artificial Sequence
  Description of Artificial Sequence: Synthetic oligonucleotide
  Target: ATXN2; (-) strand; PAM type: NNGRRT; PAM sequence: TGGGAT
cggggtttcactatgttggc

SEQ ID NO: 8172 - DNA, 20 bp, Artificial Sequence
  Description of Artificial Sequence: Synthetic oligonucleotide
  Target: ATXN2; (-) strand; PAM type: NNGRRT; PAM sequence: CGGGGT
ttttgtatttttagtagaga

SEQ ID NO: 8173 - DNA, 20 bp, Artificial Sequence
  Description of Artificial Sequence: Synthetic oligonucleotide
  Target: ATXN2; (-) strand; PAM type: NNGRRT; PAM sequence: CAGGGT
ctcactgcaacctccgcctc

SEQ ID NO: 8174 - DNA, 20 bp, Artificial Sequence
  Description of Artificial Sequence: Synthetic oligonucleotide
  Target: ATXN2; (-) strand; PAM type: NNGRRT; PAM sequence: TGGAGT
gtctcactctgtcgccaggc

SEQ ID NO: 8175 - DNA, 20 bp, Artificial Sequence
  Description of Artificial Sequence: Synthetic oligonucleotide
  Target: ATXN2; (-) strand; PAM type: NNGRRT; PAM sequence: CGGAGT
tttatttatttatttttaga

SEQ ID NO: 8176 - DNA, 20 bp, Artificial Sequence
  Description of Artificial Sequence: Synthetic oligonucleotide
  Target: ATXN2; (-) strand; PAM type: NNGRRT; PAM sequence: TGGGGT
aataatcacattagggtaaa

SEQ ID NO: 8177 - DNA, 20 bp, Artificial Sequence
  Description of Artificial Sequence: Synthetic oligonucleotide
  Target: ATXN2; (-) strand; PAM type: NNGRRT; PAM sequence: TAGGGT
ataatgtgtaataatcacat

SEQ ID NO: 8178 - DNA, 20 bp, Artificial Sequence
  Description of Artificial Sequence: Synthetic oligonucleotide
  Target: ATXN2; (-) strand; PAM type: NNGRRT; PAM sequence: TAGGGT
catagtagacgtattattca

SEQ ID NO: 8179 - DNA, 20 bp, Artificial Sequence
  Description of Artificial Sequence: Synthetic oligonucleotide
  Target: ATXN2; (-) strand; PAM type: NNGRRT; PAM sequence: ATGGGT
ttaaaggtttttattttttt

SEQ ID NO: 8180 - DNA, 20 bp, Artificial Sequence
  Description of Artificial Sequence: Synthetic oligonucleotide
  Target: ATXN2; (-) strand; PAM type: NNGRRT; PAM sequence: GAGGAT
cctgttttctttcttttgta

SEQ ID NO: 8181 - DNA, 20 bp, Artificial Sequence
  Description of Artificial Sequence: Synthetic oligonucleotide
  Target: ATXN2; (-) strand; PAM type: NNGRRT; PAM sequence: CAGAGT
cagtaaagcttgcgatgcgc

SEQ ID NO: 8182 - DNA, 20 bp, Artificial Sequence
  Description of Artificial Sequence: Synthetic oligonucleotide
  Target: ATXN2; (-) strand; PAM type: NNGRRT; PAM sequence: GTGGAT
atatatagttggtctgttat

SEQ ID NO: 8183 - DNA, 20 bp, Artificial Sequence
  Description of Artificial Sequence: Synthetic oligonucleotide
  Target: ATXN2; (-) strand; PAM type: NNGRRT; PAM sequence: CGGAGT
ctgcgctccagtctgggcaa

SEQ ID NO: 8184 - DNA, 20 bp, Artificial Sequence
  Description of Artificial Sequence: Synthetic oligonucleotide
  Target: ATXN2; (-) strand; PAM type: NNGRRT; PAM sequence: GAGAAT
tactcaggaggctgaggtgg

SEQ ID NO: 8185 - DNA, 20 bp, Artificial Sequence
  Description of Artificial Sequence: Synthetic oligonucleotide
  Target: ATXN2; (-) strand; PAM type: NNGRRT; PAM sequence: CTGGGT
ctcaggcattaaagaccaac

SEQ ID NO: 8186 - DNA, 20 bp, Artificial Sequence
  Description of Artificial Sequence: Synthetic oligonucleotide
  Target: ATXN2; (-) strand; PAM type: NNGRRT; PAM sequence: GTGGAT
actttgggaggctgagacag

SEQ ID NO: 8187 - DNA, 20 bp, Artificial Sequence
  Description of Artificial Sequence: Synthetic oligonucleotide
  Target: ATXN2; (-) strand; PAM type: NNGRRT; PAM sequence: CTGAAT
acaggtacagtggctcatgc

SEQ ID NO: 8188 - DNA, 20 bp, Artificial Sequence
  Description of Artificial Sequence: Synthetic oligonucleotide
  Target: ATXN2; (-) strand; PAM type: NNGRRT; PAM sequence: ATGAAT
agggctgttgtgaagactaa

SEQ ID NO: 8189 - DNA, 20 bp, Artificial Sequence
  Description of Artificial Sequence: Synthetic oligonucleotide
  Target: ATXN2; (-) strand; PAM type: NNGRRT; PAM sequence: CAGAGT
aacaatatattccaatacag

SEQ ID NO: 8190 - DNA, 20 bp, Artificial Sequence
  Description of Artificial Sequence: Synthetic oligonucleotide
  Target: ATXN2; (-) strand; PAM type: NNGRRT; PAM sequence: CAGAGT
agtgcagagaggaaatacag

SEQ ID NO: 8191 - DNA, 20 bp, Artificial Sequence
  Description of Artificial Sequence: Synthetic oligonucleotide
  Target: ATXN2; (-) strand; PAM type: NNGRRT; PAM sequence: ATGAGT
cccgggaggcggtggttgcc

SEQ ID NO: 8192 - DNA, 20 bp, Artificial Sequence
  Description of Artificial Sequence: Synthetic oligonucleotide
  Target: ATXN2; (-) strand; PAM type: NNGRRT; PAM sequence: AGGAGT
tggatggatcagctgaggtc

SEQ ID NO: 8193 - DNA, 20 bp, Artificial Sequence
  Description of Artificial Sequence: Synthetic oligonucleotide
  Target: ATXN2; (-) strand; PAM type: NNGRRT; PAM sequence: ATGGAT
actttgggaggctgaggtgg

SEQ ID NO: 8194 - DNA, 20 bp, Artificial Sequence
  Description of Artificial Sequence: Synthetic oligonucleotide
  Target: ATXN2; (-) strand; PAM type: NNGRRT; PAM sequence: GTGGAT
cagcactttgggaggctgag

SEQ ID NO: 8195 - DNA, 20 bp, Artificial Sequence
  Description of Artificial Sequence: Synthetic oligonucleotide
  Target: ATXN2; (-) strand; PAM type: NNGRRT; PAM sequence: AAGAAT
catttcatgtggagtcacat

SEQ ID NO: 8196 - DNA, 20 bp, Artificial Sequence
  Description of Artificial Sequence: Synthetic oligonucleotide
  Target: ATXN2; (-) strand; PAM type: NNGRRT; PAM sequence: TGGAGT
tgtcattgtaccatttcatg

SEQ ID NO: 8197 - DNA, 20 bp, Artificial Sequence
  Description of Artificial Sequence: Synthetic oligonucleotide
  Target: ATXN2; (-) strand; PAM type: NNGRRT; PAM sequence: CAGAGT
atagatgacccagtattgta

SEQ ID NO: 8198 - DNA, 20 bp, Artificial Sequence
  Description of Artificial Sequence: Synthetic oligonucleotide
  Target: ATXN2; (-) strand; PAM type: NNGRRT; PAM sequence: ATGGGT
tctacttcccccaagccaaa

SEQ ID NO: 8199 - DNA, 20 bp, Artificial Sequence
  Description of Artificial Sequence: Synthetic oligonucleotide
  Target: ATXN2; (-) strand; PAM type: NNGRRT; PAM sequence: TTGAAT
agaggtaaatggacctaggt

SEQ ID NO: 8200 - DNA, 20 bp, Artificial Sequence
  Description of Artificial Sequence: Synthetic oligonucleotide
  Target: ATXN2; (-) strand; PAM type: NNGRRT; PAM sequence: GTGGGT
atctgttttgggttaataat

SEQ ID NO: 8201 - DNA, 20 bp, Artificial Sequence
  Description of Artificial Sequence: Synthetic oligonucleotide
  Target: ATXN2; (-) strand; PAM type: NNGRRT; PAM sequence: TTGGGT
tgctagtaatttgatctgtt

SEQ ID NO: 8202 - DNA, 20 bp, Artificial Sequence
  Description of Artificial Sequence: Synthetic oligonucleotide
  Target: ATXN2; (-) strand; PAM type: NNGRRT; PAM sequence: AAGAAT
gctgatagctttatttgtgt

SEQ ID NO: 8203 - DNA, 20 bp, Artificial Sequence
  Description of Artificial Sequence: Synthetic oligonucleotide
  Target: ATXN2; (-) strand; PAM type: NNGRRT; PAM sequence: CAGAGT
cttcccttttgagccatatg

SEQ ID NO: 8204 - DNA, 20 bp, Artificial Sequence
  Description of Artificial Sequence: Synthetic oligonucleotide
  Target: ATXN2; (-) strand; PAM type: NNGRRT; PAM sequence: TTGAAT
tttaagcttctagcagtgct

SEQ ID NO: 8205 - DNA, 20 bp, Artificial Sequence
  Description of Artificial Sequence: Synthetic oligonucleotide
  Target: ATXN2; (-) strand; PAM type: NNGRRT; PAM sequence: AAGAGT
ttttaattaaaaaaaaataa

SEQ ID NO: 8206 - DNA, 20 bp, Artificial Sequence
  Description of Artificial Sequence: Synthetic oligonucleotide
  Target: ATXN2; (-) strand; PAM type: NNGRRT; PAM sequence: GAGAGT
ctgtctcaaagaaaaaaaaa

SEQ ID NO: 8207 - DNA, 20 bp, Artificial Sequence
  Description of Artificial Sequence: Synthetic oligonucleotide
  Target: ATXN2; (-) strand; PAM type: NNGRRT; PAM sequence: GAGAAT
gcatcagtgggcgacagagc

SEQ ID NO: 8208 - DNA, 20 bp, Artificial Sequence
  Description of Artificial Sequence: Synthetic oligonucleotide
  Target: ATXN2; (-) strand; PAM type: NNGRRT; PAM sequence: TTGAAT
ggctgaggcaggagaatcac

SEQ ID NO: 8209 - DNA, 20 bp, Artificial Sequence
  Description of Artificial Sequence: Synthetic oligonucleotide
  Target: ATXN2; (-) strand; PAM type: NNGRRT; PAM sequence: GAGAAT
tactcaggaggctgaggcag

SEQ ID NO: 8210 - DNA, 20 bp, Artificial Sequence
  Description of Artificial Sequence: Synthetic oligonucleotide
  Target: ATXN2; (-) strand; PAM type: NNGRRT; PAM sequence: CTGGAT
gtcaggagtttgagaccagc

SEQ ID NO: 8211 - DNA, 20 bp, Artificial Sequence
  Description of Artificial Sequence: Synthetic oligonucleotide
  Target: ATXN2; (-) strand; PAM type: NNGRRT; PAM sequence: AGGAGT
cgggtggatcacttgaggtc

SEQ ID NO: 8212 - DNA, 20 bp, Artificial Sequence
  Description of Artificial Sequence: Synthetic oligonucleotide
  Target: ATXN2; (-) strand; PAM type: NNGRRT; PAM sequence: GTGGAT
actttgggaggctgaggcgg

SEQ ID NO: 8213 - DNA, 20 bp, Artificial Sequence
  Description of Artificial Sequence: Synthetic oligonucleotide
  Target: ATXN2; (-) strand; PAM type: NNGRRT; PAM sequence: GCGGGT
taacactttgggaggctgag

SEQ ID NO: 8214 - DNA, 20 bp, Artificial Sequence
  Description of Artificial Sequence: Synthetic oligonucleotide
  Target: ATXN2; (-) strand; PAM type: NNGRRT; PAM sequence: GAGAGT
agaagtggtttttaaaaaat

SEQ ID NO: 8215 - DNA, 20 bp, Artificial Sequence
  Description of Artificial Sequence: Synthetic oligonucleotide
  Target: ATXN2; (-) strand; PAM type: NNGRRT; PAM sequence: CTGAAT
gtcttactacttttaggtgc

SEQ ID NO: 8216 - DNA, 20 bp, Artificial Sequence
  Description of Artificial Sequence: Synthetic oligonucleotide
  Target: ATXN2; (-) strand; PAM type: NNGRRT; PAM sequence: AGGAGT
ataaaaagtcttatctcttt

SEQ ID NO: 8217 - DNA, 20 bp, Artificial Sequence
  Description of Artificial Sequence: Synthetic oligonucleotide
  Target: ATXN2; (-) strand; PAM type: NNGRRT; PAM sequence: TAGAGT
cagtaccatactgtcttgat

SEQ ID NO: 8218 - DNA, 20 bp, Artificial Sequence
  Description of Artificial Sequence: Synthetic oligonucleotide
  Target: ATXN2; (-) strand; PAM type: NNGRRT; PAM sequence: CTGAAT
ggactctgaattgtcctcca

SEQ ID NO: 8219 - DNA, 20 bp, Artificial Sequence
  Description of Artificial Sequence: Synthetic oligonucleotide
  Target: ATXN2; (-) strand; PAM type: NNGRRT; PAM sequence: CTGAAT
tgaaagtttattactggact

SEQ ID NO: 8220 - DNA, 20 bp, Artificial Sequence
  Description of Artificial Sequence: Synthetic oligonucleotide
  Target: ATXN2; (-) strand; PAM type: NNGRRT; PAM sequence: TTGAAT
aaagactattctttcctcca

SEQ ID NO: 8221 - DNA, 20 bp, Artificial Sequence
  Description of Artificial Sequence: Synthetic oligonucleotide
  Target: ATXN2; (-) strand; PAM type: NNGRRT; PAM sequence: CAGAGT
atgcactccagtgtgggcga

SEQ ID NO: 8222 - DNA, 20 bp, Artificial Sequence
  Description of Artificial Sequence: Synthetic oligonucleotide
  Target: ATXN2; (-) strand; PAM type: NNGRRT; PAM sequence: CTGGGT
actaaaaatacaaaaattac

SEQ ID NO: 8223 - DNA, 20 bp, Artificial Sequence
  Description of Artificial Sequence: Synthetic oligonucleotide
  Target: ATXN2; (-) strand; PAM type: NNGRRT; PAM sequence: AGGAGT
caggcagatcacatgaggtc

SEQ ID NO: 8224 - DNA, 20 bp, Artificial Sequence
  Description of Artificial Sequence: Synthetic oligonucleotide
  Target: ATXN2; (-) strand; PAM type: NNGRRT; PAM sequence: GGGAGT
gcctgtaatcccagcacttt

SEQ ID NO: 8225 - DNA, 20 bp, Artificial Sequence
  Description of Artificial Sequence: Synthetic oligonucleotide
  Target: ATXN2; (-) strand; PAM type: NNGRRT; PAM sequence: TGGGGT
ttatttaatatagcataagg

SEQ ID NO: 8226 - DNA, 20 bp, Artificial Sequence
  Description of Artificial Sequence: Synthetic oligonucleotide
  Target: ATXN2; (-) strand; PAM type: NNGRRT; PAM sequence: GAGAGT
aaaattaaaaaaggtcatag

SEQ ID NO: 8227 - DNA, 20 bp, Artificial Sequence
  Description of Artificial Sequence: Synthetic oligonucleotide
  Target: ATXN2; (-) strand; PAM type: NNGRRT; PAM sequence: GAGAAT
ctttcctataacaatattat

SEQ ID NO: 8228 - DNA, 20 bp, Artificial Sequence
  Description of Artificial Sequence: Synthetic oligonucleotide
  Target: ATXN2; (-) strand; PAM type: NNGRRT; PAM sequence: CTGGAT
caagagccctctctgggggt

SEQ ID NO: 8229 - DNA, 20 bp, Artificial Sequence
  Description of Artificial Sequence: Synthetic oligonucleotide
  Target: ATXN2; (-) strand; PAM type: NNGRRT; PAM sequence: GGGGGT
aagatccaagagccctctct

SEQ ID NO: 8230 - DNA, 20 bp, Artificial Sequence
  Description of Artificial Sequence: Synthetic oligonucleotide
  Target: ATXN2; (-) strand; PAM type: NNGRRT; PAM sequence: CTGAAT
ccttgcactgcggactcgcc

SEQ ID NO: 8231 - DNA, 20 bp, Artificial Sequence
  Description of Artificial Sequence: Synthetic oligonucleotide
  Target: ATXN2; (-) strand; PAM type: NNGRRT; PAM sequence: CAGAAT
tttgtatttttttgtagaga

SEQ ID NO: 8232 - DNA, 20 bp, Artificial Sequence
  Description of Artificial Sequence: Synthetic oligonucleotide
  Target: ATXN2; (-) strand; PAM type: NNGRRT; PAM sequence: ATGAGT
cctcagcctcctgggctcaa

SEQ ID NO: 8233 - DNA, 20 bp, Artificial Sequence
  Description of Artificial Sequence: Synthetic oligonucleotide
  Target: ATXN2; (-) strand; PAM type: NNGRRT; PAM sequence: CAGAAT
actttttttttcttttgaca

SEQ ID NO: 8234 - DNA, 20 bp, Artificial Sequence
  Description of Artificial Sequence: Synthetic oligonucleotide
  Target: ATXN2; (-) strand; PAM type: NNGRRT; PAM sequence: AAGAAT
ttactcttctgggttttttt

SEQ ID NO: 8235 - DNA, 20 bp, Artificial Sequence
  Description of Artificial Sequence: Synthetic oligonucleotide
  Target: ATXN2; (-) strand; PAM type: NNGRRT; PAM sequence: CTGGGT
cattaaggtttattactctt

SEQ ID NO: 8236 - DNA, 20 bp, Artificial Sequence
  Description of Artificial Sequence: Synthetic oligonucleotide
  Target: ATXN2; (-) strand; PAM type: NNGRRT; PAM sequence: GGGAGT
tctttttattattgggttgt

SEQ ID NO: 8237 - DNA, 20 bp, Artificial Sequence
  Description of Artificial Sequence: Synthetic oligonucleotide
  Target: ATXN2; (-) strand; PAM type: NNGRRT; PAM sequence: TTGGGT
attgagttgtctttttatta

SEQ ID NO: 8238 - DNA, 20 bp, Artificial Sequence
  Description of Artificial Sequence: Synthetic oligonucleotide
  Target: ATXN2; (-) strand; PAM type: NNGRRT; PAM sequence: TTGAGT
atctttacccattttaaaaa

SEQ ID NO: 8239 - DNA, 20 bp, Artificial Sequence
  Description of Artificial Sequence: Synthetic oligonucleotide
  Target: ATXN2; (-) strand; PAM type: NNGRRT; PAM sequence: TTGGAT
tggccatttatatatcttct

SEQ ID NO: 8240 - DNA, 20 bp, Artificial Sequence
  Description of Artificial Sequence: Synthetic oligonucleotide
  Target: ATXN2; (-) strand; PAM type: NNGRRT; PAM sequence: GTGGGT
ttttgattatagtcatcctt

SEQ ID NO: 8241 - DNA, 20 bp, Artificial Sequence
  Description of Artificial Sequence: Synthetic oligonucleotide
  Target: ATXN2; (-) strand; PAM type: NNGRRT; PAM sequence: GAGGGT
cattcccaccagcagggtat

SEQ ID NO: 8242 - DNA, 20 bp, Artificial Sequence
  Description of Artificial Sequence: Synthetic oligonucleotide
  Target: ATXN2; (-) strand; PAM type: NNGRRT; PAM sequence: CAGGGT
ctattttacattcccaccag

SEQ ID NO: 8243 - DNA, 20 bp, Artificial Sequence
  Description of Artificial Sequence: Synthetic oligonucleotide
  Target: ATXN2; (-) strand; PAM type: NNGRRT; PAM sequence: CTGGGT
cctacctaggagttgaattg

SEQ ID NO: 8244 - DNA, 20 bp, Artificial Sequence
  Description of Artificial Sequence: Synthetic oligonucleotide
  Target: ATXN2; (-) strand; PAM type: NNGRRT; PAM sequence: TTGAAT
tttgtgtacctacctaggag

SEQ ID NO: 8245 - DNA, 20 bp, Artificial Sequence
  Description of Artificial Sequence: Synthetic oligonucleotide
  Target: ATXN2; (-) strand; PAM type: NNGRRT; PAM sequence: AGGAGT
tttcttttgtgtacctacct

SEQ ID NO: 8246 - DNA, 20 bp, Artificial Sequence
  Description of Artificial Sequence: Synthetic oligonucleotide
  Target: ATXN2; (-) strand; PAM type: NNGRRT; PAM sequence: ATGAGT
tgaataacactgccacaaac

SEQ ID NO: 8247 - DNA, 20 bp, Artificial Sequence
  Description of Artificial Sequence: Synthetic oligonucleotide
  Target: ATXN2; (-) strand; PAM type: NNGRRT; PAM sequence: CTGAAT
gttctcactgtttgactatt

SEQ ID NO: 8248 - DNA, 20 bp, Artificial Sequence
  Description of Artificial Sequence: Synthetic oligonucleotide
  Target: ATXN2; (-) strand; PAM type: NNGRRT; PAM sequence: GTGGAT
actgactaatattccttgat

SEQ ID NO: 8249 - DNA, 20 bp, Artificial Sequence
  Description of Artificial Sequence: Synthetic oligonucleotide
  Target: ATXN2; (-) strand; PAM type: NNGRRT; PAM sequence: CAGAGT
tatgactggcttctttcact

SEQ ID NO: 8250 - DNA, 20 bp, Artificial Sequence
  Description of Artificial Sequence: Synthetic oligonucleotide
  Target: ATXN2; (-) strand; PAM type: NNGRRT; PAM sequence: TGGAAT
caaattccatttcatacaaa

SEQ ID NO: 8251 - DNA, 20 bp, Artificial Sequence
  Description of Artificial Sequence: Synthetic oligonucleotide
  Target: ATXN2; (-) strand; PAM type: NNGRRT; PAM sequence: ATGGAT
ttaatctactttctgtctct

SEQ ID NO: 8252 - DNA, 20 bp, Artificial Sequence
  Description of Artificial Sequence: Synthetic oligonucleotide
  Target: ATXN2; (-) strand; PAM type: NNGRRT; PAM sequence: GTGAAT
acatttctactttgaagcat

SEQ ID NO: 8253 - DNA, 20 bp, Artificial Sequence
  Description of Artificial Sequence: Synthetic oligonucleotide
  Target: ATXN2; (-) strand; PAM type: NNGRRT; PAM sequence: TTGAAT
cctcttatactacacttgga

SEQ ID NO: 8254 - DNA, 20 bp, Artificial Sequence
  Description of Artificial Sequence: Synthetic oligonucleotide
  Target: ATXN2; (-) strand; PAM type: NNGRRT; PAM sequence: TTGGAT
agtctcctcttatactacac

SEQ ID NO: 8255 - DNA, 20 bp, Artificial Sequence
  Description of Artificial Sequence: Synthetic oligonucleotide
  Target: ATXN2; (-) strand; PAM type: NNGRRT; PAM sequence: TTGAAT
ctgtaggtattcttccccat

SEQ ID NO: 8256 - DNA, 20 bp, Artificial Sequence
  Description of Artificial Sequence: Synthetic oligonucleotide
  Target: ATXN2; (-) strand; PAM type: NNGRRT; PAM sequence: GAGAAT
cactaggcaggctgaggcag

SEQ ID NO: 8257 - DNA, 20 bp, Artificial Sequence
  Description of Artificial Sequence: Synthetic oligonucleotide
  Target: ATXN2; (-) strand; PAM type: NNGRRT; PAM sequence: CTGAGT
agcctgggcaccattgagca

SEQ ID NO: 8258 - DNA, 20 bp, Artificial Sequence
  Description of Artificial Sequence: Synthetic oligonucleotide
  Target: ATXN2; (-) strand; PAM type: NNGRRT; PAM sequence: CGGGGT
gacgctcctcacttcccaga

SEQ ID NO: 8259 - DNA, 20 bp, Artificial Sequence
  Description of Artificial Sequence: Synthetic oligonucleotide
  Target: ATXN2; (-) strand; PAM type: NNGRRT; PAM sequence: ATGGGT
ggctcctcacatcccagacg

SEQ ID NO: 8260 - DNA, 20 bp, Artificial Sequence
  Description of Artificial Sequence: Synthetic oligonucleotide
  Target: ATXN2; (-) strand; PAM type: NNGRRT; PAM sequence: CGGGAT
gacgctcctcacttcctaga

SEQ ID NO: 8261 - DNA, 20 bp, Artificial Sequence
  Description of Artificial Sequence: Synthetic oligonucleotide
  Target: ATXN2; (-) strand; PAM type: NNGRRT; PAM sequence: ACGGGT
cgctccccacatctcagacg

SEQ ID NO: 8262 - DNA, 20 bp, Artificial Sequence
  Description of Artificial Sequence: Synthetic oligonucleotide
  Target: ATXN2; (-) strand; PAM type: NNGRRT; PAM sequence: CGGGGT
gacgctcctcacctcccaga

SEQ ID NO: 8263 - DNA, 20 bp, Artificial Sequence
  Description of Artificial Sequence: Synthetic oligonucleotide
  Target: ATXN2; (-) strand; PAM type: NNGRRT; PAM sequence: CGGGGT
gatgctcctcacttcccaga

SEQ ID NO: 8264 - DNA, 20 bp, Artificial Sequence
  Description of Artificial Sequence: Synthetic oligonucleotide
  Target: ATXN2; (-) strand; PAM type: NNGRRT; PAM sequence: CCGGGT
cctcccggacgggttggctg

SEQ ID NO: 8265 - DNA, 20 bp, Artificial Sequence
  Description of Artificial Sequence: Synthetic oligonucleotide
  Target: ATXN2; (-) strand; PAM type: NNGRRT; PAM sequence: ACGGGT
gacccccacctccctcccgg

SEQ ID NO: 8266 - DNA, 20 bp, Artificial Sequence
  Description of Artificial Sequence: Synthetic oligonucleotide
  Target: ATXN2; (-) strand; PAM type: NNGRRT; PAM sequence: CCGGAT
gctgaccccccacctccctc

SEQ ID NO: 8267 - DNA, 20 bp, Artificial Sequence
  Description of Artificial Sequence: Synthetic oligonucleotide
  Target: ATXN2; (-) strand; PAM type: NNGRRT; PAM sequence: CGGGGT
tgttgggtacacctcccaga

SEQ ID NO: 8268 - DNA, 20 bp, Artificial Sequence
  Description of Artificial Sequence: Synthetic oligonucleotide
  Target: ATXN2; (-) strand; PAM type: NNGRRT; PAM sequence: TTGGGT
ggcccgttctcaataagctg

SEQ ID NO: 8269 - DNA, 20 bp, Artificial Sequence
  Description of Artificial Sequence: Synthetic oligonucleotide
  Target: ATXN2; (-) strand; PAM type: NNGRRT; PAM sequence: AAGAAT
tcaacaggatcccaaggcag

SEQ ID NO: 8270 - DNA, 20 bp, Artificial Sequence
  Description of Artificial Sequence: Synthetic oligonucleotide
  Target: ATXN2; (-) strand; PAM type: NNGRRT; PAM sequence: CAGGAT
ggggtaaggtcatagatcaa

SEQ ID NO: 8271 - DNA, 20 bp, Artificial Sequence
  Description of Artificial Sequence: Synthetic oligonucleotide
  Target: ATXN2; (-) strand; PAM type: NNGRRT; PAM sequence: GGGGGT
gtttcagagagcacagggtt

SEQ ID NO: 8272 - DNA, 20 bp, Artificial Sequence
  Description of Artificial Sequence: Synthetic oligonucleotide
  Target: ATXN2; (-) strand; PAM type: NNGRRT; PAM sequence: CAGGGT
agcacatgtttcagagagca

SEQ ID NO: 8273 - DNA, 20 bp, Artificial Sequence
  Description of Artificial Sequence: Synthetic oligonucleotide
  Target: ATXN2; (-) strand; PAM type: NNGRRT; PAM sequence: CTGAGT
cgcccttaatccatttaacc

SEQ ID NO: 8274 - DNA, 20 bp, Artificial Sequence
  Description of Artificial Sequence: Synthetic oligonucleotide
  Target: ATXN2; (-) strand; PAM type: NNGRRT; PAM sequence: GGGAGT
tccctgggtacttgagatta

SEQ ID NO: 8275 - DNA, 20 bp, Artificial Sequence
  Description of Artificial Sequence: Synthetic oligonucleotide
  Target: ATXN2; (-) strand; PAM type: NNGRRT; PAM sequence: CTGGGT
cttccgcagtgtttgtgtcc

SEQ ID NO: 8276 - DNA, 20 bp, Artificial Sequence
  Description of Artificial Sequence: Synthetic oligonucleotide
  Target: ATXN2; (-) strand; PAM type: NNGRRT; PAM sequence: CAGGGT
tctcgcagagggggatttgg

SEQ ID NO: 8277 - DNA, 20 bp, Artificial Sequence
  Description of Artificial Sequence: Synthetic oligonucleotide
  Target: ATXN2; (-) strand; PAM type: NNGRRT; PAM sequence: GGGGAT
cttgggtgtttctcgcagag

SEQ ID NO: 8278 - DNA, 20 bp, Artificial Sequence
  Description of Artificial Sequence: Synthetic oligonucleotide
  Target: ATXN2; (-) strand; PAM type: NNGRRT; PAM sequence: TTGGGT
ttttttttaattgatcattc

SEQ ID NO: 8279 - DNA, 20 bp, Artificial Sequence
  Description of Artificial Sequence: Synthetic oligonucleotide
  Target: ATXN2; (-) strand; PAM type: NNGRRT; PAM sequence: ATGAAT
tctttatatttatactgcat

SEQ ID NO: 8280 - DNA, 20 bp, Artificial Sequence
  Description of Artificial Sequence: Synthetic oligonucleotide
  Target: ATXN2; (-) strand; PAM type: NNGRRT; PAM sequence: AAGGGT
ccctgtttccttccaaaagg

SEQ ID NO: 8281 - DNA, 20 bp, Artificial Sequence
  Description of Artificial Sequence: Synthetic oligonucleotide
  Target: ATXN2; (-) strand; PAM type: NNGRRT; PAM sequence: TTGAAT
tacaaatgatacaaagaata

SEQ ID NO: 8282 - DNA, 20 bp, Artificial Sequence
  Description of Artificial Sequence: Synthetic oligonucleotide
  Target: ATXN2; (-) strand; PAM type: NNGRRT; PAM sequence: AAGAAT
taacacatacaaatgataca

SEQ ID NO: 8283 - DNA, 20 bp, Artificial Sequence
  Description of Artificial Sequence: Synthetic oligonucleotide
  Target: ATXN2; (-) strand; PAM type: NNGRRT; PAM sequence: CAGGAT
agctacttggcaggctgagg

SEQ ID NO: 8284 - DNA, 20 bp, Artificial Sequence
  Description of Artificial Sequence: Synthetic oligonucleotide
  Target: ATXN2; (-) strand; PAM type: NNGRRT; PAM sequence: AGGAGT
tgggcagatcacctaaggtc

SEQ ID NO: 8285 - DNA, 20 bp, Artificial Sequence
  Description of Artificial Sequence: Synthetic oligonucleotide
  Target: ATXN2; (-) strand; PAM type: NNGRRT; PAM sequence: ATGAGT
aaaagtagctgaattaaagg

SEQ ID NO: 8286 - DNA, 20 bp, Artificial Sequence
  Description of Artificial Sequence: Synthetic oligonucleotide
  Target: ATXN2; (-) strand; PAM type: NNGRRT; PAM sequence: AAGGAT
taaaaaaagtagctgaatta

SEQ ID NO: 8287 - DNA, 20 bp, Artificial Sequence
  Description of Artificial Sequence: Synthetic oligonucleotide
  Target: ATXN2; (-) strand; PAM type: NNGRRT; PAM sequence: CTGAAT
cagccttttaaaaaaagtag

SEQ ID NO: 8288 - DNA, 20 bp, Artificial Sequence
  Description of Artificial Sequence: Synthetic oligonucleotide
  Target: ATXN2; (-) strand; PAM type: NNGRRT; PAM sequence: GAGAGT
acaatatgtaggtatcaaat

SEQ ID NO: 8289 - DNA, 20 bp, Artificial Sequence
  Description of Artificial Sequence: Synthetic oligonucleotide
  Target: ATXN2; (-) strand; PAM type: NNGRRT; PAM sequence: TGGGAT
gtctttgcctatcctttaag

SEQ ID NO: 8290 - DNA, 20 bp, Artificial Sequence
  Description of Artificial Sequence: Synthetic oligonucleotide
  Target: ATXN2; (-) strand; PAM type: NNGRRT; PAM sequence: TTGAGT
tattgtactaactgatgaat

SEQ ID NO: 8291 - DNA, 20 bp, Artificial Sequence
  Description of Artificial Sequence: Synthetic oligonucleotide
  Target: ATXN2; (-) strand; PAM type: NNGRRT; PAM sequence: ATGAAT
ggtaagtattgtactaactg

SEQ ID NO: 8292 - DNA, 20 bp, Artificial Sequence
  Description of Artificial Sequence: Synthetic oligonucleotide
  Target: ATXN2; (-) strand; PAM type: NNGRRT; PAM sequence: TAGGGT
aagaaatttaagaatgattt

SEQ ID NO: 8293 - DNA, 20 bp, Artificial Sequence
  Description of Artificial Sequence: Synthetic oligonucleotide
  Target: ATXN2; (-) strand; PAM type: NNGRRT; PAM sequence: AAGAAT
ttgatgatttaaagaaattt

SEQ ID NO: 8294 - DNA, 20 bp, Artificial Sequence
  Description of Artificial Sequence: Synthetic oligonucleotide
  Target: ATXN2; (-) strand; PAM type: NNGRRT; PAM sequence: AAGAAT
ttctatcatctcatactaaa

SEQ ID NO: 8295 - DNA, 20 bp, Artificial Sequence
  Description of Artificial Sequence: Synthetic oligonucleotide
  Target: ATXN2; (-) strand; PAM type: NNGRRT; PAM sequence: CAGAAT
tgtctaatttcatgcccata

SEQ ID NO: 8296 - DNA, 20 bp, Artificial Sequence
  Description of Artificial Sequence: Synthetic oligonucleotide
  Target: ATXN2; (-) strand; PAM type: NNGRRT; PAM sequence: AGGAAT
gagtcattaagcttaactgt

SEQ ID NO: 8297 - DNA, 20 bp, Artificial Sequence
  Description of Artificial Sequence: Synthetic oligonucleotide
  Target: ATXN2; (-) strand; PAM type: NNGRRT; PAM sequence: AAGAGT
aaaacaaaggttagagttta

SEQ ID NO: 8298 - DNA, 20 bp, Artificial Sequence
  Description of Artificial Sequence: Synthetic oligonucleotide
  Target: ATXN2; (-) strand; PAM type: NNGRRT; PAM sequence: TAGAGT
caaaagctgaaaacaaaggt

SEQ ID NO: 8299 - DNA, 20 bp, Artificial Sequence
  Description of Artificial Sequence: Synthetic oligonucleotide
  Target: ATXN2; (-) strand; PAM type: NNGRRT; PAM sequence: GGGAAT
agaggcagaactctcctgca

SEQ ID NO: 8300 - DNA, 20 bp, Artificial Sequence
  Description of Artificial Sequence: Synthetic oligonucleotide
  Target: ATXN2; (-) strand; PAM type: NNGRRT; PAM sequence: CTGAAT
gttttgcttttctaacttat

SEQ ID NO: 8301 - DNA, 20 bp, Artificial Sequence
  Description of Artificial Sequence: Synthetic oligonucleotide
  Target: ATXN2; (-) strand; PAM type: NNGRRT; PAM sequence: CTGGGT
tgttacaaaggttaacattc

SEQ ID NO: 8302 - DNA, 20 bp, Artificial Sequence
  Description of Artificial Sequence: Synthetic oligonucleotide
  Target: ATXN2; (-) strand; PAM type: NNGRRT; PAM sequence: GAGGGT
agctgtgaaattgaatgtta

SEQ ID NO: 8303 - DNA, 20 bp, Artificial Sequence
  Description of Artificial Sequence: Synthetic oligonucleotide
  Target: ATXN2; (-) strand; PAM type: NNGRRT; PAM sequence: TTGAAT
ccataatctcagctgtgaaa

SEQ ID NO: 8304 - DNA, 20 bp, Artificial Sequence
  Description of Artificial Sequence: Synthetic oligonucleotide
  Target: ATXN2; (-) strand; PAM type: NNGRRT; PAM sequence: CTGGAT
gggtatgtaacaaagggctt

SEQ ID NO: 8305 - DNA, 20 bp, Artificial Sequence
  Description of Artificial Sequence: Synthetic oligonucleotide
  Target: ATXN2; (-) strand; PAM type: NNGRRT; PAM sequence: GAGGGT
gagctgttaccccttctagt

SEQ ID NO: 8306 - DNA, 20 bp, Artificial Sequence
  Description of Artificial Sequence: Synthetic oligonucleotide
  Target: ATXN2; (-) strand; PAM type: NNGRRT; PAM sequence: GAGAAT
taggaagtaacatttgaact

SEQ ID NO: 8307 - DNA, 20 bp, Artificial Sequence
  Description of Artificial Sequence: Synthetic oligonucleotide
  Target: ATXN2; (-) strand; PAM type: NNGRRT; PAM sequence: AAGGGT
aagaaaacagtaatgggata

SEQ ID NO: 8308 - DNA, 20 bp, Artificial Sequence
  Description of Artificial Sequence: Synthetic oligonucleotide
  Target: ATXN2; (-) strand; PAM type: NNGRRT; PAM sequence: TGGGAT
tttggaaaagaaaacagtaa

SEQ ID NO: 8309 - DNA, 20 bp, Artificial Sequence
  Description of Artificial Sequence: Synthetic oligonucleotide
  Target: ATXN2; (-) strand; PAM type: NNGRRT; PAM sequence: GAGAAT
tactccagaggctgaggcag

SEQ ID NO: 8310 - DNA, 20 bp, Artificial Sequence
  Description of Artificial Sequence: Synthetic oligonucleotide
  Target: ATXN2; (-) strand; PAM type: NNGRRT; PAM sequence: GCGAGT
aaaattagctggttgtggtg

SEQ ID NO: 8311 - DNA, 20 bp, Artificial Sequence
  Description of Artificial Sequence: Synthetic oligonucleotide
  Target: ATXN2; (-) strand; PAM type: NNGRRT; PAM sequence: AGGAGT
taggcagatcacctgaggtc

SEQ ID NO: 8312 - DNA, 20 bp, Artificial Sequence
  Description of Artificial Sequence: Synthetic oligonucleotide
  Target: ATXN2; (-) strand; PAM type: NNGRRT; PAM sequence: AAGAAT
tggaccttgatgttgctata

SEQ ID NO: 8313 - DNA, 20 bp, Artificial Sequence
  Description of Artificial Sequence: Synthetic oligonucleotide
  Target: ATXN2; (-) strand; PAM type: NNGRRT; PAM sequence: TTGGGT
atcttccccttttgactaac

SEQ ID NO: 8314 - DNA, 20 bp, Artificial Sequence
  Description of Artificial Sequence: Synthetic oligonucleotide
  Target: ATXN2; (-) strand; PAM type: NNGRRT; PAM sequence: TGGGAT
atatatacttggaagtcata

SEQ ID NO: 8315 - DNA, 20 bp, Artificial Sequence
  Description of Artificial Sequence: Synthetic oligonucleotide
  Target: ATXN2; (-) strand; PAM type: NNGRRT; PAM sequence: TTGAAT
gaaccattttctctaaacct

SEQ ID NO: 8316 - DNA, 20 bp, Artificial Sequence
  Description of Artificial Sequence: Synthetic oligonucleotide
  Target: ATXN2; (-) strand; PAM type: NNGRRT; PAM sequence: TTGAAT
aattggaaaaatggcagttg

SEQ ID NO: 8317 - DNA, 20 bp, Artificial Sequence
  Description of Artificial Sequence: Synthetic oligonucleotide
  Target: ATXN2; (-) strand; PAM type: NNGRRT; PAM sequence: CAGAAT
catagttttggagatacact

SEQ ID NO: 8318 - DNA, 20 bp, Artificial Sequence
  Description of Artificial Sequence: Synthetic oligonucleotide
  Target: ATXN2; (-) strand; PAM type: NNGRRT; PAM sequence: GAGAGT
aataacatgattagaagtga

SEQ ID NO: 8319 - DNA, 20 bp, Artificial Sequence
  Description of Artificial Sequence: Synthetic oligonucleotide
  Target: ATXN2; (-) strand; PAM type: NNGRRT; PAM sequence: GAGAAT
atggtctggaaataaatttt

SEQ ID NO: 8320 - DNA, 20 bp, Artificial Sequence
  Description of Artificial Sequence: Synthetic oligonucleotide
  Target: ATXN2; (-) strand; PAM type: NNGRRT; PAM sequence: TAGAGT
ctgcactccagcctgggcta

SEQ ID NO: 8321 - DNA, 20 bp, Artificial Sequence
  Description of Artificial Sequence: Synthetic oligonucleotide
  Target: ATXN2; (-) strand; PAM type: NNGRRT; PAM sequence: GAGAAT
tgctcaggaggctgaggcag

SEQ ID NO: 8322 - DNA, 20 bp, Artificial Sequence
  Description of Artificial Sequence: Synthetic oligonucleotide
  Target: ATXN2; (-) strand; PAM type: NNGRRT; PAM sequence: AGGAGT
ggcgggtggatcacgaggtc

SEQ ID NO: 8323 - DNA, 20 bp, Artificial Sequence
  Description of Artificial Sequence: Synthetic oligonucleotide
  Target: ATXN2; (-) strand; PAM type: NNGRRT; PAM sequence: GTGGAT
acttggggaggctgaggcgg

SEQ ID NO: 8324 - DNA, 20 bp, Artificial Sequence
  Description of Artificial Sequence: Synthetic oligonucleotide
  Target: ATXN2; (-) strand; PAM type: NNGRRT; PAM sequence: GCGGGT
cagcacttggggaggctgag

SEQ ID NO: 8325 - DNA, 20 bp, Artificial Sequence
  Description of Artificial Sequence: Synthetic oligonucleotide
  Target: ATXN2; (-) strand; PAM type: NNGRRT; PAM sequence: CTGGGT
tcacaccattgcactccagt

SEQ ID NO: 8326 - DNA, 20 bp, Artificial Sequence
  Description of Artificial Sequence: Synthetic oligonucleotide
  Target: ATXN2; (-) strand; PAM type: NNGRRT; PAM sequence: GAGAAT
tatttgagaggctgaggcag

SEQ ID NO: 8327 - DNA, 20 bp, Artificial Sequence
  Description of Artificial Sequence: Synthetic oligonucleotide
  Target: ATXN2; (-) strand; PAM type: NNGRRT; PAM sequence: CTGAGT
tactaaaaatacaaaattag

SEQ ID NO: 8328 - DNA, 20 bp, Artificial Sequence
  Description of Artificial Sequence: Synthetic oligonucleotide
  Target: ATXN2; (-) strand; PAM type: NNGRRT; PAM sequence: AGGAGT
tgggtggatcacttgaggtc

SEQ ID NO: 8329 - DNA, 20 bp, Artificial Sequence
  Description of Artificial Sequence: Synthetic oligonucleotide
  Target: ATXN2; (-) strand; PAM type: NNGRRT; PAM sequence: GTGGAT
actttgggaggctgaggtgg

SEQ ID NO: 8330 - DNA, 20 bp, Artificial Sequence
  Description of Artificial Sequence: Synthetic oligonucleotide
  Target: ATXN2; (-) strand; PAM type: NNGRRT; PAM sequence: GTGGGT
cagcactttgggaggctgag

SEQ ID NO: 8331 - DNA, 20 bp, Artificial Sequence
  Description of Artificial Sequence: Synthetic oligonucleotide
  Target: ATXN2; (-) strand; PAM type: NNGRRT; PAM sequence: AAGAAT
gtggtaagcaagagcttaca

SEQ ID NO: 8332 - DNA, 20 bp, Artificial Sequence
  Description of Artificial Sequence: Synthetic oligonucleotide
  Target: ATXN2; (-) strand; PAM type: NNGRRT; PAM sequence: GAGAAT
tacttgggaggctgaggcag

SEQ ID NO: 8333 - DNA, 20 bp, Artificial Sequence
  Description of Artificial Sequence: Synthetic oligonucleotide
  Target: ATXN2; (-) strand; PAM type: NNGRRT; PAM sequence: GCGGGT
aaaattagccgggcatggtg

SEQ ID NO: 8334 - DNA, 20 bp, Artificial Sequence
  Description of Artificial Sequence: Synthetic oligonucleotide
  Target: ATXN2; (-) strand; PAM type: NNGRRT; PAM sequence: GCGGAT
actttgggaggctgaggtgg

SEQ ID NO: 8335 - DNA, 20 bp, Artificial Sequence
  Description of Artificial Sequence: Synthetic oligonucleotide
  Target: ATXN2; (-) strand; PAM type: NNGRRT; PAM sequence: CTGGGT
ataaaagtataaaaattagg

SEQ ID NO: 8336 - DNA, 20 bp, Artificial Sequence
  Description of Artificial Sequence: Synthetic oligonucleotide
  Target: ATXN2; (-) strand; PAM type: NNGRRT; PAM sequence: AGGAAT
ttttatttgtgattagcata

SEQ ID NO: 8337 - DNA, 20 bp, Artificial Sequence
  Description of Artificial Sequence: Synthetic oligonucleotide
  Target: ATXN2; (-) strand; PAM type: NNGRRT; PAM sequence: AAGGGT
aggaatatcaaatacaaata

SEQ ID NO: 8338 - DNA, 20 bp, Artificial Sequence
  Description of Artificial Sequence: Synthetic oligonucleotide
  Target: ATXN2; (-) strand; PAM type: NNGRRT; PAM sequence: AGGAAT
ccaactatatttccataata

SEQ ID NO: 8339 - DNA, 20 bp, Artificial Sequence
  Description of Artificial Sequence: Synthetic oligonucleotide
  Target: ATXN2; (-) strand; PAM type: NNGRRT; PAM sequence: TGGGAT
ttcttgcctagtctacatta

SEQ ID NO: 8340 - DNA, 20 bp, Artificial Sequence
  Description of Artificial Sequence: Synthetic oligonucleotide
  Target: ATXN2; (-) strand; PAM type: NNGRRT; PAM sequence: GTGAGT
tctgaagttgagatttcgca

SEQ ID NO: 8341 - DNA, 20 bp, Artificial Sequence
  Description of Artificial Sequence: Synthetic oligonucleotide
  Target: ATXN2; (-) strand; PAM type: NNGRRT; PAM sequence: AGGAAT
ttaaaaatagtagaatcacc

SEQ ID NO: 8342 - DNA, 20 bp, Artificial Sequence
  Description of Artificial Sequence: Synthetic oligonucleotide
  Target: ATXN2; (-) strand; PAM type: NNGRRT; PAM sequence: TAGAAT
tatgtatatgttaaaaatag

SEQ ID NO: 8343 - DNA, 20 bp, Artificial Sequence
  Description of Artificial Sequence: Synthetic oligonucleotide
  Target: ATXN2; (-) strand; PAM type: NNGRRT; PAM sequence: GGGGGT
cgtggtcatcagtggtcagt

SEQ ID NO: 8344 - DNA, 20 bp, Artificial Sequence
  Description of Artificial Sequence: Synthetic oligonucleotide
  Target: ATXN2; (-) strand; PAM type: NNGRRT; PAM sequence: TAGAAT
gggttccatatccagtggcc

SEQ ID NO: 8345 - DNA, 20 bp, Artificial Sequence
  Description of Artificial Sequence: Synthetic oligonucleotide
  Target: ATXN2; (-) strand; PAM type: NNGRRT; PAM sequence: AGGGGT
atcacagagtttctgctggg

SEQ ID NO: 8346 - DNA, 20 bp, Artificial Sequence
  Description of Artificial Sequence: Synthetic oligonucleotide
  Target: ATXN2; (-) strand; PAM type: NNGRRT; PAM sequence: CAGAGT
cagcgacatcctcgaaatca

SEQ ID NO: 8347 - DNA, 20 bp, Artificial Sequence
  Description of Artificial Sequence: Synthetic oligonucleotide
  Target: ATXN2; (-) strand; PAM type: NNGRRT; PAM sequence: AAGGAT
gtttcttccttagggcctcc

SEQ ID NO: 8348 - DNA, 20 bp, Artificial Sequence
  Description of Artificial Sequence: Synthetic oligonucleotide
  Target: ATXN2; (-) strand; PAM type: NNGRRT; PAM sequence: TGGAAT
agtagtactgatgaatatca

SEQ ID NO: 8349 - DNA, 20 bp, Artificial Sequence
  Description of Artificial Sequence: Synthetic oligonucleotide
  Target: ATXN2; (-) strand; PAM type: NNGRRT; PAM sequence: ATGAAT
ttagcagaaaagtagtactg

SEQ ID NO: 8350 - DNA, 20 bp, Artificial Sequence
  Description of Artificial Sequence: Synthetic oligonucleotide
  Target: ATXN2; (-) strand; PAM type: NNGRRT; PAM sequence: ATGGGT
gtgtgtgcatgtgtgtgtga

SEQ ID NO: 8351 - DNA, 20 bp, Artificial Sequence
  Description of Artificial Sequence: Synthetic oligonucleotide
  Target: ATXN2; (-) strand; PAM type: NNGRRT; PAM sequence: GTGAAT
gagtgtgtgtgcatgtgtgt

SEQ ID NO: 8352 - DNA, 20 bp, Artificial Sequence
  Description of Artificial Sequence: Synthetic oligonucleotide
  Target: ATXN2; (-) strand; PAM type: NNGRRT; PAM sequence: GTGAGT
aaggaaaaactgtagagtga

SEQ ID NO: 8353 - DNA, 20 bp, Artificial Sequence
  Description of Artificial Sequence: Synthetic oligonucleotide
  Target: ATXN2; (-) strand; PAM type: NNGRRT; PAM sequence: GTGAGT
aaccaaggaaaaactgtaga

SEQ ID NO: 8354 - DNA, 20 bp, Artificial Sequence
  Description of Artificial Sequence: Synthetic oligonucleotide
  Target: ATXN2; (-) strand; PAM type: NNGRRT; PAM sequence: TAGAGT
ttttaaccaaggaaaaactg

SEQ ID NO: 8355 - DNA, 20 bp, Artificial Sequence
  Description of Artificial Sequence: Synthetic oligonucleotide
  Target: ATXN2; (-) strand; PAM type: NNGRRT; PAM sequence: AAGAAT
attccacaaaataattctga

SEQ ID NO: 8356 - DNA, 20 bp, Artificial Sequence
  Description of Artificial Sequence: Synthetic oligonucleotide
  Target: ATXN2; (-) strand; PAM type: NNGRRT; PAM sequence: AAGAGT
cagattgctacagttctttt

SEQ ID NO: 8357 - DNA, 20 bp, Artificial Sequence
  Description of Artificial Sequence: Synthetic oligonucleotide
  Target: ATXN2; (-) strand; PAM type: NNGRRT; PAM sequence: TCGGGT
ttagaagtaatgtagaaaat

SEQ ID NO: 8358 - DNA, 20 bp, Artificial Sequence
  Description of Artificial Sequence: Synthetic oligonucleotide
  Target: ATXN2; (-) strand; PAM type: NNGRRT; PAM sequence: AGGGAT
ttagtggtatcggggtgtat

SEQ ID NO: 8359 - DNA, 20 bp, Artificial Sequence
  Description of Artificial Sequence: Synthetic oligonucleotide
  Target: ATXN2; (-) strand; PAM type: NNGRRT; PAM sequence: CGGGGT
tacatatgttttagtggtat

SEQ ID NO: 8360 - DNA, 20 bp, Artificial Sequence
  Description of Artificial Sequence: Synthetic oligonucleotide
  Target: ATXN2; (-) strand; PAM type: NNGRRT; PAM sequence: AAGGGT
aaattttagagaaatttaag

SEQ ID NO: 8361 - DNA, 20 bp, Artificial Sequence
  Description of Artificial Sequence: Synthetic oligonucleotide
  Target: ATXN2; (-) strand; PAM type: NNGRRT; PAM sequence: CCGAGT
ttactgcttactgttttaag

SEQ ID NO: 8362 - DNA, 20 bp, Artificial Sequence
  Description of Artificial Sequence: Synthetic oligonucleotide
  Target: ATXN2; (-) strand; PAM type: NNGRRT; PAM sequence: TAGAAT
aatacaagtcatccctttaa

SEQ ID NO: 8363 - DNA, 20 bp, Artificial Sequence
  Description of Artificial Sequence: Synthetic oligonucleotide
  Target: ATXN2; (-) strand; PAM type: NNGRRT; PAM sequence: TAGAAT
gcatggcagaatcaataatg

SEQ ID NO: 8364 - DNA, 20 bp, Artificial Sequence
  Description of Artificial Sequence: Synthetic oligonucleotide
  Target: ATXN2; (-) strand; PAM type: NNGRRT; PAM sequence: CAGAAT
agtagtcactagtggcatgg

SEQ ID NO: 8365 - DNA, 20 bp, Artificial Sequence
  Description of Artificial Sequence: Synthetic oligonucleotide
  Target: ATXN2; (-) strand; PAM type: NNGRRT; PAM sequence: AAGAGT
gcacagtagactgatttaga

SEQ ID NO: 8366 - DNA, 20 bp, Artificial Sequence
  Description of Artificial Sequence: Synthetic oligonucleotide
  Target: ATXN2; (-) strand; PAM type: NNGRRT; PAM sequence: GAGAGT
agagtttggcagccgggtga

SEQ ID NO: 8367 - DNA, 20 bp, Artificial Sequence
  Description of Artificial Sequence: Synthetic oligonucleotide
  Target: ATXN2; (-) strand; PAM type: NNGRRT; PAM sequence: CCGGGT
agttctaaagagtttggcag

SEQ ID NO: 8368 - DNA, 20 bp, Artificial Sequence
  Description of Artificial Sequence: Synthetic oligonucleotide
  Target: ATXN2; (-) strand; PAM type: NNGRRT; PAM sequence: AAGAGT
tatattaatttgaagttcta

SEQ ID NO: 8369 - DNA, 20 bp, Artificial Sequence
  Description of Artificial Sequence: Synthetic oligonucleotide
  Target: ATXN2; (-) strand; PAM type: NNGRRT; PAM sequence: GTGAGT
cctgggaggcagaggttgca

SEQ ID NO: 8370 - DNA, 20 bp, Artificial Sequence
  Description of Artificial Sequence: Synthetic oligonucleotide
  Target: ATXN2; (-) strand; PAM type: NNGRRT; PAM sequence: GAGAAT
tacttgggaggctgaggcag

SEQ ID NO: 8371 - DNA, 20 bp, Artificial Sequence
  Description of Artificial Sequence: Synthetic oligonucleotide
  Target: ATXN2; (-) strand; PAM type: NNGRRT; PAM sequence: AGGAGT
caggtggatcacttgaggtc

SEQ ID NO: 8372 - DNA, 20 bp, Artificial Sequence
  Description of Artificial Sequence: Synthetic oligonucleotide
  Target: ATXN2; (-) strand; PAM type: NNGRRT; PAM sequence: GTGGAT
actttgggaggctgaggcag

SEQ ID NO: 8373 - DNA, 20 bp, Artificial Sequence
  Description of Artificial Sequence: Synthetic oligonucleotide
  Target: ATXN2; (-) strand; PAM type: NNGRRT; PAM sequence: TTGAAT
ttctgtgtcattcagagatg

SEQ ID NO: 8374 - DNA, 20 bp, Artificial Sequence
  Description of Artificial Sequence: Synthetic oligonucleotide
  Target: ATXN2; (-) strand; PAM type: NNGRRT; PAM sequence: GAGAAT
gtaagcgatgtttatttaat

SEQ ID NO: 8375 - DNA, 20 bp, Artificial Sequence
  Description of Artificial Sequence: Synthetic oligonucleotide
  Target: ATXN2; (-) strand; PAM type: NNGRRT; PAM sequence: TTGAGT
tttttcttgtagtccatcat

SEQ ID NO: 8376 - DNA, 20 bp, Artificial Sequence
  Description of Artificial Sequence: Synthetic oligonucleotide
  Target: ATXN2; (-) strand; PAM type: NNGRRT; PAM sequence: CTGAAT
atgtccttttgatactagtt

SEQ ID NO: 8377 - DNA, 20 bp, Artificial Sequence
  Description of Artificial Sequence: Synthetic oligonucleotide
  Target: ATXN2; (-) strand; PAM type: NNGRRT; PAM sequence: CTGAAT
atatattaaaaacctgtttt

SEQ ID NO: 8378 - DNA, 20 bp, Artificial Sequence
  Description of Artificial Sequence: Synthetic oligonucleotide
  Target: ATXN2; (-) strand; PAM type: NNGRRT; PAM sequence: AGGGAT
cattgccacatatcaaatac

SEQ ID NO: 8379 - DNA, 20 bp, Artificial Sequence
  Description of Artificial Sequence: Synthetic oligonucleotide
  Target: ATXN2; (-) strand; PAM type: NNGRRT; PAM sequence: AAGAAT
tttctttcctcgtcaaaaat

SEQ ID NO: 8380 - DNA, 20 bp, Artificial Sequence
  Description of Artificial Sequence: Synthetic oligonucleotide
  Target: ATXN2; (-) strand; PAM type: NNGRRT; PAM sequence: TTGAAT
gataaaaacgacatatgaat

SEQ ID NO: 8381 - DNA, 20 bp, Artificial Sequence
  Description of Artificial Sequence: Synthetic oligonucleotide
  Target: ATXN2; (-) strand; PAM type: NNGRRT; PAM sequence: ATGAAT
aaaattgataaaaacgacat

SEQ ID NO: 8382 - DNA, 20 bp, Artificial Sequence
  Description of Artificial Sequence: Synthetic oligonucleotide
  Target: ATXN2; (-) strand; PAM type: NNGRRT; PAM sequence: CTGAGT
cagaagaattctaaatttaa

SEQ ID NO: 8383 - DNA, 20 bp, Artificial Sequence
  Description of Artificial Sequence: Synthetic oligonucleotide
  Target: ATXN2; (-) strand; PAM type: NNGRRT; PAM sequence: AAGAAT
gttgatttttagaatgccag

SEQ ID NO: 8384 - DNA, 20 bp, Artificial Sequence
  Description of Artificial Sequence: Synthetic oligonucleotide
  Target: ATXN2; (-) strand; PAM type: NNGRRT; PAM sequence: TAGAAT
agattaaagtagttgatttt

SEQ ID NO: 8385 - DNA, 20 bp, Artificial Sequence
  Description of Artificial Sequence: Synthetic oligonucleotide
  Target: ATXN2; (-) strand; PAM type: NNGRRT; PAM sequence: CTGGGT
ataagcagggatggtgtttt

SEQ ID NO: 8386 - DNA, 20 bp, Artificial Sequence
  Description of Artificial Sequence: Synthetic oligonucleotide
  Target: ATXN2; (-) strand; PAM type: NNGRRT; PAM sequence: AGGGAT
ccttcctattggccataagc

SEQ ID NO: 8387 - DNA, 20 bp, Artificial Sequence
  Description of Artificial Sequence: Synthetic oligonucleotide
  Target: ATXN2; (-) strand; PAM type: NNGRRT; PAM sequence: AAGGGT
atgcttctttacagccccag

SEQ ID NO: 8388 - DNA, 20 bp, Artificial Sequence
  Description of Artificial Sequence: Synthetic oligonucleotide
  Target: ATXN2; (-) strand; PAM type: NNGRRT; PAM sequence: GGGGGT
tcttgaattgttgttaaaaa

SEQ ID NO: 8389 - DNA, 20 bp, Artificial Sequence
  Description of Artificial Sequence: Synthetic oligonucleotide
  Target: ATXN2; (-) strand; PAM type: NNGRRT; PAM sequence: TTGAAT
gtgtgaagctataaactctc

SEQ ID NO: 8390 - DNA, 20 bp, Artificial Sequence
  Description of Artificial Sequence: Synthetic oligonucleotide
  Target: ATXN2; (-) strand; PAM type: NNGRRT; PAM sequence: GTGAGT
tgtctttgtttaactcctat

SEQ ID NO: 8391 - DNA, 20 bp, Artificial Sequence
  Description of Artificial Sequence: Synthetic oligonucleotide
  Target: ATXN2; (-) strand; PAM type: NNGRRT; PAM sequence: AAGGGT
aaatcaaatgactgtcctca

SEQ ID NO: 8392 - DNA, 20 bp, Artificial Sequence
  Description of Artificial Sequence: Synthetic oligonucleotide
  Target: ATXN2; (-) strand; PAM type: NNGRRT; PAM sequence: GTGAAT
taaggaggttaaagtaaaat

SEQ ID NO: 8393 - DNA, 20 bp, Artificial Sequence
  Description of Artificial Sequence: Synthetic oligonucleotide
  Target: ATXN2; (-) strand; PAM type: NNGRRT; PAM sequence: CAGGAT
ctgagaaacagttatagaag

SEQ ID NO: 8394 - DNA, 20 bp, Artificial Sequence
  Description of Artificial Sequence: Synthetic oligonucleotide
  Target: ATXN2; (-) strand; PAM type: NNGRRT; PAM sequence: AGGAAT
aaataatcttactcctgagt

SEQ ID NO: 8395 - DNA, 20 bp, Artificial Sequence
  Description of Artificial Sequence: Synthetic oligonucleotide
  Target: ATXN2; (-) strand; PAM type: NNGRRT; PAM sequence: CTGAGT
tacagtaaataatcttactc

SEQ ID NO: 8396 - DNA, 20 bp, Artificial Sequence
  Description of Artificial Sequence: Synthetic oligonucleotide
  Target: ATXN2; (-) strand; PAM type: NNGRRT; PAM sequence: CAGAGT
tgcttattttcgttatgcct

SEQ ID NO: 8397 - DNA, 20 bp, Artificial Sequence
  Description of Artificial Sequence: Synthetic oligonucleotide
  Target: ATXN2; (-) strand; PAM type: NNGRRT; PAM sequence: TTGGAT
taaggaaccagcatttctaa

SEQ ID NO: 8398 - DNA, 20 bp, Artificial Sequence
  Description of Artificial Sequence: Synthetic oligonucleotide
  Target: ATXN2; (-) strand; PAM type: NNGRRT; PAM sequence: CTGGGT
ataagattccaaactgagtt

SEQ ID NO: 8399 - DNA, 20 bp, Artificial Sequence
  Description of Artificial Sequence: Synthetic oligonucleotide
  Target: ATXN2; (-) strand; PAM type: NNGRRT; PAM sequence: CTGAGT
ttgcttaataagattccaaa

SEQ ID NO: 8400 - DNA, 20 bp, Artificial Sequence
  Description of Artificial Sequence: Synthetic oligonucleotide
  Target: ATXN2; (-) strand; PAM type: NNGRRT; PAM sequence: AAGAGT
acaggagtcacaaactctag

SEQ ID NO: 8401 - DNA, 20 bp, Artificial Sequence
  Description of Artificial Sequence: Synthetic oligonucleotide
  Target: ATXN2; (-) strand; PAM type: NNGRRT; PAM sequence: AGGAGT
tattatcatttgatactcac

SEQ ID NO: 8402 - DNA, 20 bp, Artificial Sequence
  Description of Artificial Sequence: Synthetic oligonucleotide
  Target: ATXN2; (-) strand; PAM type: NNGRRT; PAM sequence: ATGAAT
actttttttttgaaatagca

SEQ ID NO: 8403 - DNA, 20 bp, Artificial Sequence
  Description of Artificial Sequence: Synthetic oligonucleotide
  Target: ATXN2; (-) strand; PAM type: NNGRRT; PAM sequence: CAGAAT
agattttagttgtttataaa

SEQ ID NO: 8404 - DNA, 20 bp, Artificial Sequence
  Description of Artificial Sequence: Synthetic oligonucleotide
  Target: ATXN2; (-) strand; PAM type: NNGRRT; PAM sequence: GGGGGT
tattttcagtacttaatatt

SEQ ID NO: 8405 - DNA, 20 bp, Artificial Sequence
  Description of Artificial Sequence: Synthetic oligonucleotide
  Target: ATXN2; (-) strand; PAM type: NNGRRT; PAM sequence: TTGAGT
tcctctccaaatggacactc

SEQ ID NO: 8406 - DNA, 20 bp, Artificial Sequence
  Description of Artificial Sequence: Synthetic oligonucleotide
  Target: ATXN2; (-) strand; PAM type: NNGRRT; PAM sequence: CAGAAT
ttttcattgagtcttttctc

SEQ ID NO: 8407 - DNA, 20 bp, Artificial Sequence
  Description of Artificial Sequence: Synthetic oligonucleotide
  Target: ATXN2; (-) strand; PAM type: NNGRRT; PAM sequence: TTGAGT
tccaatttcatttgttttca

SEQ ID NO: 8408 - DNA, 20 bp, Artificial Sequence
  Description of Artificial Sequence: Synthetic oligonucleotide
  Target: ATXN2; (-) strand; PAM type: NNGRRT; PAM sequence: AAGAGT
tgttactaactttgtgggaa

SEQ ID NO: 8409 - DNA, 20 bp, Artificial Sequence
  Description of Artificial Sequence: Synthetic oligonucleotide
  Target: ATXN2; (-) strand; PAM type: NNGRRT; PAM sequence: ATGGAT
ggatactgaacaacagttct

SEQ ID NO: 8410 - DNA, 20 bp, Artificial Sequence
  Description of Artificial Sequence: Synthetic oligonucleotide
  Target: ATXN2; (-) strand; PAM type: NNGRRT; PAM sequence: AGGGAT
gtggatcttttccataaatc

SEQ ID NO: 8411 - DNA, 20 bp, Artificial Sequence
  Description of Artificial Sequence: Synthetic oligonucleotide
  Target: ATXN2; (-) strand; PAM type: NNGRRT; PAM sequence: GTGGAT
ttgaatatatcttgtaggtt

SEQ ID NO: 8412 - DNA, 20 bp, Artificial Sequence
  Description of Artificial Sequence: Synthetic oligonucleotide
  Target: ATXN2; (-) strand; PAM type: NNGRRT; PAM sequence: TTGAAT
actctacctctaaatctagg

SEQ ID NO: 8413 - DNA, 20 bp, Artificial Sequence
  Description of Artificial Sequence: Synthetic oligonucleotide
  Target: ATXN2; (-) strand; PAM type: NNGRRT; PAM sequence: CTGAAT
gcaacttaagtaaaagaaac

SEQ ID NO: 8414 - DNA, 20 bp, Artificial Sequence
  Description of Artificial Sequence: Synthetic oligonucleotide
  Target: ATXN2; (-) strand; PAM type: NNGRRT; PAM sequence: GTGGAT
aaacaacccttagtctaagg

SEQ ID NO: 8415 - DNA, 20 bp, Artificial Sequence
  Description of Artificial Sequence: Synthetic oligonucleotide
  Target: ATXN2; (-) strand; PAM type: NNGRRT; PAM sequence: AAGGGT
acaaaaacaacccttagtct

SEQ ID NO: 8416 - DNA, 20 bp, Artificial Sequence
  Description of Artificial Sequence: Synthetic oligonucleotide
  Target: ATXN2; (-) strand; PAM type: NNGRRT; PAM sequence: AAGAGT
ttataatacaagacatgatc

SEQ ID NO: 8417 - DNA, 20 bp, Artificial Sequence
  Description of Artificial Sequence: Synthetic oligonucleotide
  Target: ATXN2; (-) strand; PAM type: NNGRRT; PAM sequence: AAGGAT
atattatgcttacttcaaga

SEQ ID NO: 8418 - DNA, 20 bp, Artificial Sequence
  Description of Artificial Sequence: Synthetic oligonucleotide
  Target: ATXN2; (-) strand; PAM type: NNGRRT; PAM sequence: CTGGAT
ggttctcaattttaaaaaca

SEQ ID NO: 8419 - DNA, 20 bp, Artificial Sequence
  Description of Artificial Sequence: Synthetic oligonucleotide
  Target: ATXN2; (-) strand; PAM type: NNGRRT; PAM sequence: TTGGGT
atataaagaaattggaaact

SEQ ID NO: 8420 - DNA, 20 bp, Artificial Sequence
  Description of Artificial Sequence: Synthetic oligonucleotide
  Target: ATXN2; (-) strand; PAM type: NNGRRT; PAM sequence: GTGGAT
attacttaaaattggctttt

SEQ ID NO: 8421 - DNA, 20 bp, Artificial Sequence
  Description of Artificial Sequence: Synthetic oligonucleotide
  Target: ATXN2; (-) strand; PAM type: NNGRRT; PAM sequence: GTGAGT
atgtgcactttaatgatttg

SEQ ID NO: 8422 - DNA, 20 bp, Artificial Sequence
  Description of Artificial Sequence: Synthetic oligonucleotide
  Target: ATXN2; (-) strand; PAM type: NNGRRT; PAM sequence: ATGAAT
aaatagtttacataactgat

SEQ ID NO: 8423 - DNA, 20 bp, Artificial Sequence
  Description of Artificial Sequence: Synthetic oligonucleotide
  Target: ATXN2; (-) strand; PAM type: NNGRRT; PAM sequence: AAGAGT
ccgaattctggttcagacca

SEQ ID NO: 8424 - DNA, 20 bp, Artificial Sequence
  Description of Artificial Sequence: Synthetic oligonucleotide
  Target: ATXN2; (-) strand; PAM type: NNGRRT; PAM sequence: CCGAAT
ctcacacttcagatttcaac

SEQ ID NO: 8425 - DNA, 20 bp, Artificial Sequence
  Description of Artificial Sequence: Synthetic oligonucleotide
  Target: ATXN2; (-) strand; PAM type: NNGRRT; PAM sequence: CTGGAT
ttcaccgcgtatgggccagc

SEQ ID NO: 8426 - DNA, 20 bp, Artificial Sequence
  Description of Artificial Sequence: Synthetic oligonucleotide
  Target: ATXN2; (-) strand; PAM type: NNGRRT; PAM sequence: CAGAAT
tatcctggggaagtgggaga

SEQ ID NO: 8427 - DNA, 20 bp, Artificial Sequence
  Description of Artificial Sequence: Synthetic oligonucleotide
  Target: ATXN2; (-) strand; PAM type: NNGRRT; PAM sequence: GAGGAT
ttttagaataaaatgattta

SEQ ID NO: 8428 - DNA, 20 bp, Artificial Sequence
  Description of Artificial Sequence: Synthetic oligonucleotide
  Target: ATXN2; (-) strand; PAM type: NNGRRT; PAM sequence: TAGAAT
ttcattggcttggtaccttt

SEQ ID NO: 8429 - DNA, 20 bp, Artificial Sequence
  Description of Artificial Sequence: Synthetic oligonucleotide
  Target: ATXN2; (-) strand; PAM type: NNGRRT; PAM sequence: GGGAGT
atggaagaacaggggcatct

SEQ ID NO: 8430 - DNA, 20 bp, Artificial Sequence
  Description of Artificial Sequence: Synthetic oligonucleotide
  Target: ATXN2; (-) strand; PAM type: NNGRRT; PAM sequence: CAGGGT
acagtccagaggttagaact

SEQ ID NO: 8431 - DNA, 20 bp, Artificial Sequence
  Description of Artificial Sequence: Synthetic oligonucleotide
  Target: ATXN2; (-) strand; PAM type: NNGRRT; PAM sequence: CAGAAT
ttaaactttgtgcttaggag

SEQ ID NO: 8432 - DNA, 20 bp, Artificial Sequence
  Description of Artificial Sequence: Synthetic oligonucleotide
  Target: ATXN2; (-) strand; PAM type: NNGRRT; PAM sequence: GAGAAT
atagagaggtcaagtgggat

SEQ ID NO: 8433 - DNA, 20 bp, Artificial Sequence
  Description of Artificial Sequence: Synthetic oligonucleotide
  Target: ATXN2; (-) strand; PAM type: NNGRRT; PAM sequence: TGGGAT
tcagccatagagaggtcaag

SEQ ID NO: 8434 - DNA, 20 bp, Artificial Sequence
  Description of Artificial Sequence: Synthetic oligonucleotide
  Target: ATXN2; (-) strand; PAM type: NNGRRT; PAM sequence: TGGAAT
tgaagatagaccaagattga

SEQ ID NO: 8435 - DNA, 20 bp, Artificial Sequence
  Description of Artificial Sequence: Synthetic oligonucleotide
  Target: ATXN2; (-) strand; PAM type: NNGRRT; PAM sequence: TTGAAT
tcagcttagagtctggtgat

SEQ ID NO: 8436 - DNA, 20 bp, Artificial Sequence
  Description of Artificial Sequence: Synthetic oligonucleotide
  Target: ATXN2; (-) strand; PAM type: NNGRRT; PAM sequence: TAGAGT
tctcttaaaggcagtcagct

SEQ ID NO: 8437 - DNA, 20 bp, Artificial Sequence
  Description of Artificial Sequence: Synthetic oligonucleotide
  Target: ATXN2; (-) strand; PAM type: NNGRRT; PAM sequence: GTGGGT
ctaattgcatatgtgggctt

SEQ ID NO: 8438 - DNA, 20 bp, Artificial Sequence
  Description of Artificial Sequence: Synthetic oligonucleotide
  Target: ATXN2; (-) strand; PAM type: NNGRRT; PAM sequence: ATGGAT
tttgataactaagtgactta

SEQ ID NO: 8439 - DNA, 20 bp, Artificial Sequence
  Description of Artificial Sequence: Synthetic oligonucleotide
  Target: ATXN2; (-) strand; PAM type: NNGRRT; PAM sequence: AGGGAT
atttggtaaccacctagtta

SEQ ID NO: 8440 - DNA, 20 bp, Artificial Sequence
  Description of Artificial Sequence: Synthetic oligonucleotide
  Target: ATXN2; (-) strand; PAM type: NNGRRT; PAM sequence: GAGAAT
cactgaaatagttcaactgt

SEQ ID NO: 8441 - DNA, 20 bp, Artificial Sequence
  Description of Artificial Sequence: Synthetic oligonucleotide
  Target: ATXN2; (-) strand; PAM type: NNGRRT; PAM sequence: GTGAAT
ccctgttggaaggagatggg

SEQ ID NO: 8442 - DNA, 20 bp, Artificial Sequence
  Description of Artificial Sequence: Synthetic oligonucleotide
  Target: ATXN2; (-) strand; PAM type: NNGRRT; PAM sequence: TGGGGT
agcaccctgttggaaggaga

SEQ ID NO: 8443 - DNA, 20 bp, Artificial Sequence
  Description of Artificial Sequence: Synthetic oligonucleotide
  Target: ATXN2; (-) strand; PAM type: NNGRRT; PAM sequence: CAGGAT
tgttgcatgtgtctggaaca

SEQ ID NO: 8444 - DNA, 20 bp, Artificial Sequence
  Description of Artificial Sequence: Synthetic oligonucleotide
  Target: ATXN2; (-) strand; PAM type: NNGRRT; PAM sequence: AAGAGT
acttagagaagagttgggag

SEQ ID NO: 8445 - DNA, 20 bp, Artificial Sequence
  Description of Artificial Sequence: Synthetic oligonucleotide
  Target: ATXN2; (-) strand; PAM type: NNGRRT; PAM sequence: AAGAGT
agggtctttgacacttagag

SEQ ID NO: 8446 - DNA, 20 bp, Artificial Sequence
  Description of Artificial Sequence: Synthetic oligonucleotide
  Target: ATXN2; (-) strand; PAM type: NNGRRT; PAM sequence: TAGGGT
gacattttgtgataagataa

SEQ ID NO: 8447 - DNA, 20 bp, Artificial Sequence
  Description of Artificial Sequence: Synthetic oligonucleotide
  Target: ATXN2; (-) strand; PAM type: NNGRRT; PAM sequence: TAGAGT
ggaggagctagcataacctg

SEQ ID NO: 8448 - DNA, 20 bp, Artificial Sequence
  Description of Artificial Sequence: Synthetic oligonucleotide
  Target: ATXN2; (-) strand; PAM type: NNGRRT; PAM sequence: CAGAAT
ttcaaagtactaggaacata

SEQ ID NO: 8449 - DNA, 20 bp, Artificial Sequence
  Description of Artificial Sequence: Synthetic oligonucleotide
  Target: ATXN2; (-) strand; PAM type: NNGRRT; PAM sequence: GAGAGT
atcttggaaaatatgctttt

SEQ ID NO: 8450 - DNA, 20 bp, Artificial Sequence
  Description of Artificial Sequence: Synthetic oligonucleotide
  Target: ATXN2; (-) strand; PAM type: NNGRRT; PAM sequence: TAGAAT
gcttaggtagagaatgcaag

SEQ ID NO: 8451 - DNA, 20 bp, Artificial Sequence
  Description of Artificial Sequence: Synthetic oligonucleotide
  Target: ATXN2; (-) strand; PAM type: NNGRRT; PAM sequence: GAGAAT
cctttaatatagcttaggta

SEQ ID NO: 8452 - DNA, 20 bp, Artificial Sequence
  Description of Artificial Sequence: Synthetic oligonucleotide
  Target: ATXN2; (-) strand; PAM type: NNGRRT; PAM sequence: TTGGAT
ggaaatcatgatgcagtatt

SEQ ID NO: 8453 - DNA, 20 bp, Artificial Sequence
  Description of Artificial Sequence: Synthetic oligonucleotide
  Target: ATXN2; (-) strand; PAM type: NNGRRT; PAM sequence: AGGAGT
tggccctggaaaatgatgat

SEQ ID NO: 8454 - DNA, 20 bp, Artificial Sequence
  Description of Artificial Sequence: Synthetic oligonucleotide
  Target: ATXN2; (-) strand; PAM type: NNGRRT; PAM sequence: TCGAGT
tcaagtgcccagtacaaagc

SEQ ID NO: 8455 - DNA, 20 bp, Artificial Sequence
  Description of Artificial Sequence: Synthetic oligonucleotide
  Target: ATXN2; (-) strand; PAM type: NNGRRT; PAM sequence: TTGAGT
aaaccagttagcagaagaaa

SEQ ID NO: 8456 - DNA, 20 bp, Artificial Sequence
  Description of Artificial Sequence: Synthetic oligonucleotide
  Target: ATXN2; (-) strand; PAM type: NNGRRT; PAM sequence: AAGAAT
cttagaaagagataactcag

SEQ ID NO: 8457 - DNA, 20 bp, Artificial Sequence
  Description of Artificial Sequence: Synthetic oligonucleotide
  Target: ATXN2; (-) strand; PAM type: NNGRRT; PAM sequence: CAGAGT
cttttcttttcctcatgttt

SEQ ID NO: 8458 - DNA, 20 bp, Artificial Sequence
  Description of Artificial Sequence: Synthetic oligonucleotide
  Target: ATXN2; (-) strand; PAM type: NNGRRT; PAM sequence: TAGAAT
aaggtaacagaaaaaaaagt

SEQ ID NO: 8459 - DNA, 20 bp, Artificial Sequence
  Description of Artificial Sequence: Synthetic oligonucleotide
  Target: ATXN2; (-) strand; PAM type: NNGRRT; PAM sequence: TGGGAT
gcctcggcctcccaaagtgc

SEQ ID NO: 8460 - DNA, 20 bp, Artificial Sequence
  Description of Artificial Sequence: Synthetic oligonucleotide
  Target: ATXN2; (-) strand; PAM type: NNGRRT; PAM sequence: CAGGAT
cggggtttcaccatgttggc

SEQ ID NO: 8461 - DNA, 20 bp, Artificial Sequence
  Description of Artificial Sequence: Synthetic oligonucleotide
  Target: ATXN2; (-) strand; PAM type: NNGRRT; PAM sequence: CGGGGT
ttctgtatttttagtagaga

SEQ ID NO: 8462 - DNA, 20 bp, Artificial Sequence
  Description of Artificial Sequence: Synthetic oligonucleotide
  Target: ATXN2; (-) strand; PAM type: NNGRRT; PAM sequence: CCGAGT
gattctcctgcctcagcctc

SEQ ID NO: 8463 - DNA, 20 bp, Artificial Sequence
  Description of Artificial Sequence: Synthetic oligonucleotide
  Target: ATXN2; (-) strand; PAM type: NNGRRT; PAM sequence: CCGGGT
ctcactgcaacctctgcatc

SEQ ID NO: 8464 - DNA, 20 bp, Artificial Sequence
  Description of Artificial Sequence: Synthetic oligonucleotide
  Target: ATXN2; (-) strand; PAM type: NNGRRT; PAM sequence: TGGAGT
atctcgctgtgtctccaggc

SEQ ID NO: 8465 - DNA, 20 bp, Artificial Sequence
  Description of Artificial Sequence: Synthetic oligonucleotide
  Target: ATXN2; (-) strand; PAM type: NNGRRT; PAM sequence: GGGAAT
tctttttttttcttttgaga

SEQ ID NO: 8466 - DNA, 20 bp, Artificial Sequence
  Description of Artificial Sequence: Synthetic oligonucleotide
  Target: ATXN2; (-) strand; PAM type: NNGRRT; PAM sequence: GGGAAT
ataaatttccattaaaaaaa

SEQ ID NO: 8467 - DNA, 20 bp, Artificial Sequence
  Description of Artificial Sequence: Synthetic oligonucleotide
  Target: ATXN2; (-) strand; PAM type: NNGRRT; PAM sequence: ATGAAT
tttcatcagcttaatttatg

SEQ ID NO: 8468 - DNA, 20 bp, Artificial Sequence
  Description of Artificial Sequence: Synthetic oligonucleotide
  Target: ATXN2; (-) strand; PAM type: NNGRRT; PAM sequence: TGGGAT
ttttcttctagtctaatgga

SEQ ID NO: 8469 - DNA, 20 bp, Artificial Sequence
  Description of Artificial Sequence: Synthetic oligonucleotide
  Target: ATXN2; (-) strand; PAM type: NNGRRT; PAM sequence: ATGGAT
cttcattttcttctagtcta

SEQ ID NO: 8470 - DNA, 20 bp, Artificial Sequence
  Description of Artificial Sequence: Synthetic oligonucleotide
  Target: ATXN2; (-) strand; PAM type: NNGRRT; PAM sequence: CTGAAT
aatatagatgttggttataa

SEQ ID NO: 8471 - DNA, 20 bp, Artificial Sequence
  Description of Artificial Sequence: Synthetic oligonucleotide
  Target: ATXN2; (-) strand; PAM type: NNGRRT; PAM sequence: TGGAAT
aaagcaccccttgttccatg

SEQ ID NO: 8472 - DNA, 20 bp, Artificial Sequence
  Description of Artificial Sequence: Synthetic oligonucleotide
  Target: ATXN2; (-) strand; PAM type: NNGRRT; PAM sequence: TTGAAT
atagtccgaccttggaatcg

SEQ ID NO: 8473 - DNA, 20 bp, Artificial Sequence
  Description of Artificial Sequence: Synthetic oligonucleotide
  Target: ATXN2; (-) strand; PAM type: NNGRRT; PAM sequence: TGGAAT
ctagtaccatagtccgacct

SEQ ID NO: 8474 - DNA, 20 bp, Artificial Sequence
  Description of Artificial Sequence: Synthetic oligonucleotide
  Target: ATXN2; (-) strand; PAM type: NNGRRT; PAM sequence: CAGAGT
taggttagggtattgagatc

SEQ ID NO: 8475 - DNA, 20 bp, Artificial Sequence
  Description of Artificial Sequence: Synthetic oligonucleotide
  Target: ATXN2; (-) strand; PAM type: NNGRRT; PAM sequence: TAGGGT
cctatgctgaggttataggt

SEQ ID NO: 8476 - DNA, 20 bp, Artificial Sequence
  Description of Artificial Sequence: Synthetic oligonucleotide
  Target: ATXN2; (-) strand; PAM type: NNGRRT; PAM sequence: TGGAGT
atagtttcctcgtagaattg

SEQ ID NO: 8477 - DNA, 20 bp, Artificial Sequence
  Description of Artificial Sequence: Synthetic oligonucleotide
  Target: ATXN2; (-) strand; PAM type: NNGRRT; PAM sequence: TAGAAT
aatttcctatagtttcctcg

SEQ ID NO: 8478 - DNA, 20 bp, Artificial Sequence
  Description of Artificial Sequence: Synthetic oligonucleotide
  Target: ATXN2; (-) strand; PAM type: NNGRRT; PAM sequence: GCGAAT
aagaaggcagcctccctttt

SEQ ID NO: 8479 - DNA, 20 bp, Artificial Sequence
  Description of Artificial Sequence: Synthetic oligonucleotide
  Target: ATXN2; (-) strand; PAM type: NNGRRT; PAM sequence: TAGGAT
cagctgctctgcctatggag

SEQ ID NO: 8480 - DNA, 20 bp, Artificial Sequence
  Description of Artificial Sequence: Synthetic oligonucleotide
  Target: ATXN2; (-) strand; PAM type: NNGRRT; PAM sequence: TGGAGT
agcctcagctgctctgccta

SEQ ID NO: 8481 - DNA, 20 bp, Artificial Sequence
  Description of Artificial Sequence: Synthetic oligonucleotide
  Target: ATXN2; (-) strand; PAM type: NNGRRT; PAM sequence: AAGAAT
tggttgattcttttacgtta

SEQ ID NO: 8482 - DNA, 20 bp, Artificial Sequence
  Description of Artificial Sequence: Synthetic oligonucleotide
  Target: ATXN2; (-) strand; PAM type: NNGRRT; PAM sequence: GAGAAT
aaaaaggagttgaaacatta

SEQ ID NO: 8483 - DNA, 20 bp, Artificial Sequence
  Description of Artificial Sequence: Synthetic oligonucleotide
  Target: ATXN2; (-) strand; PAM type: NNGRRT; PAM sequence: AGGAGT
caccagtaaggctttaaaaa

SEQ ID NO: 8484 - DNA, 20 bp, Artificial Sequence
  Description of Artificial Sequence: Synthetic oligonucleotide
  Target: ATXN2; (-) strand; PAM type: NNGRRT; PAM sequence: ATGGAT
gatgtgttcattcttctggg

SEQ ID NO: 8485 - DNA, 20 bp, Artificial Sequence
  Description of Artificial Sequence: Synthetic oligonucleotide
  Target: ATXN2; (-) strand; PAM type: NNGRRT; PAM sequence: TGGGAT
ggttgatgtgttcattcttc

SEQ ID NO: 8486 - DNA, 20 bp, Artificial Sequence
  Description of Artificial Sequence: Synthetic oligonucleotide
  Target: ATXN2; (-) strand; PAM type: NNGRRT; PAM sequence: TGGAGT
acttacattatagtcttacc

SEQ ID NO: 8487 - DNA, 20 bp, Artificial Sequence
  Description of Artificial Sequence: Synthetic oligonucleotide
  Target: ATXN2; (-) strand; PAM type: NNGRRT; PAM sequence: AGGAAT
ctgcccatgtgtttggcaaa

SEQ ID NO: 8488 - DNA, 20 bp, Artificial Sequence
  Description of Artificial Sequence: Synthetic oligonucleotide
  Target: ATXN2; (-) strand; PAM type: NNGRRT; PAM sequence: CTGGAT
tggaagacatttacttttta

SEQ ID NO: 8489 - DNA, 20 bp, Artificial Sequence
  Description of Artificial Sequence: Synthetic oligonucleotide
  Target: ATXN2; (-) strand; PAM type: NNGRRT; PAM sequence: TGGGAT
tagtagttatttatgcacgc

SEQ ID NO: 8490 - DNA, 20 bp, Artificial Sequence
  Description of Artificial Sequence: Synthetic oligonucleotide
  Target: ATXN2; (-) strand; PAM type: NNGRRT; PAM sequence: TGGGAT
gcctcggcctcccaaagtgc

SEQ ID NO: 8491 - DNA, 20 bp, Artificial Sequence
  Description of Artificial Sequence: Synthetic oligonucleotide
  Target: ATXN2; (-) strand; PAM type: NNGRRT; PAM sequence: CAGGGT
ttttgtatttttagtagaga

SEQ ID NO: 8492 - DNA, 20 bp, Artificial Sequence
  Description of Artificial Sequence: Synthetic oligonucleotide
  Target: ATXN2; (-) strand; PAM type: NNGRRT; PAM sequence: CCGGGT
ctcactgcaagctctgcctc

SEQ ID NO: 8493 - DNA, 20 bp, Artificial Sequence
  Description of Artificial Sequence: Synthetic oligonucleotide
  Target: ATXN2; (-) strand; PAM type: NNGRRT; PAM sequence: TTGAGT
tctcgctctgtcgcccagac

SEQ ID NO: 8494 - DNA, 20 bp, Artificial Sequence
  Description of Artificial Sequence: Synthetic oligonucleotide
  Target: ATXN2; (-) strand; PAM type: NNGRRT; PAM sequence: TGGAGT
tctttttttttcttttaaga

SEQ ID NO: 8495 - DNA, 20 bp, Artificial Sequence
  Description of Artificial Sequence: Synthetic oligonucleotide
  Target: ATXN2; (-) strand; PAM type: NNGRRT; PAM sequence: TGGGAT
accttggcctctcaaagtgc

SEQ ID NO: 8496 - DNA, 20 bp, Artificial Sequence
  Description of Artificial Sequence: Synthetic oligonucleotide
  Target: ATXN2; (-) strand; PAM type: NNGRRT; PAM sequence: CAGGGT
ttttgtatttttagtagaga

SEQ ID NO: 8497 - DNA, 20 bp, Artificial Sequence
  Description of Artificial Sequence: Synthetic oligonucleotide
  Target: ATXN2; (-) strand; PAM type: NNGRRT; PAM sequence: CTGAGT
gattctcctgcttcagcctt

SEQ ID NO: 8498 - DNA, 20 bp, Artificial Sequence
  Description of Artificial Sequence: Synthetic oligonucleotide
  Target: ATXN2; (-) strand; PAM type: NNGRRT; PAM sequence: TGGAGT
tcttgctctgttgtccaggc

SEQ ID NO: 8499 - DNA, 20 bp, Artificial Sequence
  Description of Artificial Sequence: Synthetic oligonucleotide
  Target: ATXN2; (-) strand; PAM type: NNGRRT; PAM sequence: CGGAGT
ccaagaaactctttttgaga

SEQ ID NO: 8500 - DNA, 20 bp, Artificial Sequence
  Description of Artificial Sequence: Synthetic oligonucleotide
  Target: ATXN2; (-) strand; PAM type: NNGRRT; PAM sequence: AGGGGT
ttttgtgtttttagtagaga

SEQ ID NO: 8501 - DNA, 20 bp, Artificial Sequence
  Description of Artificial Sequence: Synthetic oligonucleotide
  Target: ATXN2; (-) strand; PAM type: NNGRRT; PAM sequence: CTGAGT
gattctcctgcctcagcctc

SEQ ID NO: 8502 - DNA, 20 bp, Artificial Sequence
  Description of Artificial Sequence: Synthetic oligonucleotide
  Target: ATXN2; (-) strand; PAM type: NNGRRT; PAM sequence: CCGGGT
cacactgcaacctccgcctc

SEQ ID NO: 8503 - DNA, 20 bp, Artificial Sequence
  Description of Artificial Sequence: Synthetic oligonucleotide
  Target: ATXN2; (-) strand; PAM type: NNGRRT; PAM sequence: CAGAGT
ttttttttctttttttgaga

SEQ ID NO: 8504 - DNA, 20 bp, Artificial Sequence
  Description of Artificial Sequence: Synthetic oligonucleotide
  Target: ATXN2; (-) strand; PAM type: NNGRRT; PAM sequence: TGGGAT
aaaagcacattgcagaacac

SEQ ID NO: 8505 - DNA, 20 bp, Artificial Sequence
  Description of Artificial Sequence: Synthetic oligonucleotide
  Target: ATXN2; (-) strand; PAM type: NNGRRT; PAM sequence: AAGAAT
aacactacatatctcccaaa

SEQ ID NO: 8506 - DNA, 20 bp, Artificial Sequence
  Description of Artificial Sequence: Synthetic oligonucleotide
  Target: ATXN2; (-) strand; PAM type: NNGRRT; PAM sequence: ATGAGT
taagtgtctatcaatatagc

SEQ ID NO: 8507 - DNA, 20 bp, Artificial Sequence
  Description of Artificial Sequence: Synthetic oligonucleotide
  Target: ATXN2; (-) strand; PAM type: NNGRRT; PAM sequence: CGGGGT
ttttgtatttttagtagaga

SEQ ID NO: 8508 - DNA, 20 bp, Artificial Sequence
  Description of Artificial Sequence: Synthetic oligonucleotide
  Target: ATXN2; (-) strand; PAM type: NNGRRT; PAM sequence: CTGGGT
ctccctgtaacctccacctc

SEQ ID NO: 8509 - DNA, 20 bp, Artificial Sequence
  Description of Artificial Sequence: Synthetic oligonucleotide
  Target: ATXN2; (-) strand; PAM type: NNGRRT; PAM sequence: TGGAGT
tctcactctgtcacccagac

SEQ ID NO: 8510 - DNA, 20 bp, Artificial Sequence
  Description of Artificial Sequence: Synthetic oligonucleotide
  Target: ATXN2; (-) strand; PAM type: NNGRRT; PAM sequence: TGGAGT
gttgctgttgttttgagaga

SEQ ID NO: 8511 - DNA, 20 bp, Artificial Sequence
  Description of Artificial Sequence: Synthetic oligonucleotide
  Target: ATXN2; (-) strand; PAM type: NNGRRT; PAM sequence: CAGGAT
tgtgagccatcatgcctgac

SEQ ID NO: 8512 - DNA, 20 bp, Artificial Sequence
  Description of Artificial Sequence: Synthetic oligonucleotide
  Target: ATXN2; (-) strand; PAM type: NNGRRT; PAM sequence: TGGGAT
acctcagcctcccaaagtgc

SEQ ID NO: 8513 - DNA, 20 bp, Artificial Sequence
  Description of Artificial Sequence: Synthetic oligonucleotide
  Target: ATXN2; (-) strand; PAM type: NNGRRT; PAM sequence: CAGGGT
cagggttttaccatgttgcc

SEQ ID NO: 8514 - DNA, 20 bp, Artificial Sequence
  Description of Artificial Sequence: Synthetic oligonucleotide
  Target: ATXN2; (-) strand; PAM type: NNGRRT; PAM sequence: CAGGGT
tttttctttttctgcagaga

SEQ ID NO: 8515 - DNA, 20 bp, Artificial Sequence
  Description of Artificial Sequence: Synthetic oligonucleotide
  Target: ATXN2; (-) strand; PAM type: NNGRRT; PAM sequence: GAGAAT
attgatagagtctttctgga

SEQ ID NO: 8516 - DNA, 20 bp, Artificial Sequence
  Description of Artificial Sequence: Synthetic oligonucleotide
  Target: ATXN2; (-) strand; PAM type: NNGRRT; PAM sequence: TAGAGT
tggtgaggtggataaattga

SEQ ID NO: 8517 - DNA, 20 bp, Artificial Sequence
  Description of Artificial Sequence: Synthetic oligonucleotide
  Target: ATXN2; (-) strand; PAM type: NNGRRT; PAM sequence: GTGGAT
tcttttacactattggtgag

SEQ ID NO: 8518 - DNA, 20 bp, Artificial Sequence
  Description of Artificial Sequence: Synthetic oligonucleotide
  Target: ATXN2; (-) strand; PAM type: NNGRRT; PAM sequence: GAGAAT
aatcttccattgagtagaaa

SEQ ID NO: 8519 - DNA, 20 bp, Artificial Sequence
  Description of Artificial Sequence: Synthetic oligonucleotide
  Target: ATXN2; (-) strand; PAM type: NNGRRT; PAM sequence: TTGAGT
gtagaatgaagaatcttcca

SEQ ID NO: 8520 - DNA, 20 bp, Artificial Sequence
  Description of Artificial Sequence: Synthetic oligonucleotide
  Target: ATXN2; (-) strand; PAM type: NNGRRT; PAM sequence: AAGAAT
accaatatttgagtagaatg

SEQ ID NO: 8521 - DNA, 20 bp, Artificial Sequence
  Description of Artificial Sequence: Synthetic oligonucleotide
  Target: ATXN2; (-) strand; PAM type: NNGRRT; PAM sequence: TAGAAT
ttatggtaccaatatttgag

SEQ ID NO: 8522 - DNA, 20 bp, Artificial Sequence
  Description of Artificial Sequence: Synthetic oligonucleotide
  Target: ATXN2; (-) strand; PAM type: NNGRRT; PAM sequence: TTGAGT
gagtgttatggtaccaatat

SEQ ID NO: 8523 - DNA, 20 bp, Artificial Sequence
  Description of Artificial Sequence: Synthetic oligonucleotide
  Target: ATXN2; (-) strand; PAM type: NNGRRT; PAM sequence: ATGAGT
agcaaagtgtcttgccaaaa

SEQ ID NO: 8524 - DNA, 20 bp, Artificial Sequence
  Description of Artificial Sequence: Synthetic oligonucleotide
  Target: ATXN2; (-) strand; PAM type: NNGRRT; PAM sequence: TAGGAT
cttaataaagactctgtctt

SEQ ID NO: 8525 - DNA, 20 bp, Artificial Sequence
  Description of Artificial Sequence: Synthetic oligonucleotide
  Target: ATXN2; (-) strand; PAM type: NNGRRT; PAM sequence: CTGAAT
cccaggagttggagtccagc

SEQ ID NO: 8526 - DNA, 20 bp, Artificial Sequence
  Description of Artificial Sequence: Synthetic oligonucleotide
  Target: ATXN2; (-) strand; PAM type: NNGRRT; PAM sequence: TGGAGT
gatcacttgagcccaggagt

SEQ ID NO: 8527 - DNA, 20 bp, Artificial Sequence
  Description of Artificial Sequence: Synthetic oligonucleotide
  Target: ATXN2; (-) strand; PAM type: NNGRRT; PAM sequence: AGGAGT
caggaggatcacttgagccc

SEQ ID NO: 8528 - DNA, 20 bp, Artificial Sequence
  Description of Artificial Sequence: Synthetic oligonucleotide
  Target: ATXN2; (-) strand; PAM type: NNGRRT; PAM sequence: GAGGAT
tacttgggaggctgaagcag

SEQ ID NO: 8529 - DNA, 20 bp, Artificial Sequence
  Description of Artificial Sequence: Synthetic oligonucleotide
  Target: ATXN2; (-) strand; PAM type: NNGRRT; PAM sequence: CTGGGT
tctgtacttgaagtgcttag

SEQ ID NO: 8530 - DNA, 20 bp, Artificial Sequence
  Description of Artificial Sequence: Synthetic oligonucleotide
  Target: ATXN2; (-) strand; PAM type: NNGRRT; PAM sequence: TTGGAT
taaatttcttggtcttaaat

SEQ ID NO: 8531 - DNA, 20 bp, Artificial Sequence
  Description of Artificial Sequence: Synthetic oligonucleotide
  Target: ATXN2; (-) strand; PAM type: NNGRRT; PAM sequence: TGGAAT
gataaataattaggttacat

SEQ ID NO: 8532 - DNA, 20 bp, Artificial Sequence
  Description of Artificial Sequence: Synthetic oligonucleotide
  Target: ATXN2; (-) strand; PAM type: NNGRRT; PAM sequence: ATGAAT
gtctgttcttgtggatgctc

SEQ ID NO: 8533 - DNA, 20 bp, Artificial Sequence
  Description of Artificial Sequence: Synthetic oligonucleotide
  Target: ATXN2; (-) strand; PAM type: NNGRRT; PAM sequence: GTGGAT
caggagtactgtctgttctt

SEQ ID NO: 8534 - DNA, 20 bp, Artificial Sequence
  Description of Artificial Sequence: Synthetic oligonucleotide
  Target: ATXN2; (-) strand; PAM type: NNGRRT; PAM sequence: AGGAGT
tttacttgtaggggttaagc

SEQ ID NO: 8535 - DNA, 20 bp, Artificial Sequence
  Description of Artificial Sequence: Synthetic oligonucleotide
  Target: ATXN2; (-) strand; PAM type: NNGRRT; PAM sequence: AGGGGT
atgtttgtcattttacttgt

SEQ ID NO: 8536 - DNA, 20 bp, Artificial Sequence
  Description of Artificial Sequence: Synthetic oligonucleotide
  Target: ATXN2; (-) strand; PAM type: NNGRRT; PAM sequence: GTGAGT
ttgttgttgttgttattgta

SEQ ID NO: 8537 - DNA, 20 bp, Artificial Sequence
  Description of Artificial Sequence: Synthetic oligonucleotide
  Target: ATXN2; (-) strand; PAM type: NNGRRT; PAM sequence: TGGGAT
aagagaaggacctggagccc

SEQ ID NO: 8538 - DNA, 20 bp, Artificial Sequence
  Description of Artificial Sequence: Synthetic oligonucleotide
  Target: ATXN2; (-) strand; PAM type: NNGRRT; PAM sequence: GTGAAT
actctgctatcagtgctaaa

SEQ ID NO: 8539 - DNA, 20 bp, Artificial Sequence
  Description of Artificial Sequence: Synthetic oligonucleotide
  Target: ATXN2; (-) strand; PAM type: NNGRRT; PAM sequence: GTGAGT
tttgttggtaattcacgtgt

SEQ ID NO: 8540 - DNA, 20 bp, Artificial Sequence
  Description of Artificial Sequence: Synthetic oligonucleotide
  Target: ATXN2; (-) strand; PAM type: NNGRRT; PAM sequence: CTGAAT
aacgtgaaagcatactttta

SEQ ID NO: 8541 - DNA, 20 bp, Artificial Sequence
  Description of Artificial Sequence: Synthetic oligonucleotide
  Target: ATXN2; (-) strand; PAM type: NNGRRT; PAM sequence: GAGAAT
tactcgggagactgaggcag

SEQ ID NO: 8542 - DNA, 20 bp, Artificial Sequence
  Description of Artificial Sequence: Synthetic oligonucleotide
  Target: ATXN2; (-) strand; PAM type: NNGRRT; PAM sequence: GGGGGT
gcactttgggaggccaaggt

SEQ ID NO: 8543 - DNA, 20 bp, Artificial Sequence
  Description of Artificial Sequence: Synthetic oligonucleotide
  Target: ATXN2; (-) strand; PAM type: NNGRRT; PAM sequence: ATGAAT
attacctgtaatataattta

SEQ ID NO: 8544 - DNA, 20 bp, Artificial Sequence
  Description of Artificial Sequence: Synthetic oligonucleotide
  Target: ATXN2; (-) strand; PAM type: NNGRRT; PAM sequence: CAGAGT
ttggtcacttctgagacatg

SEQ ID NO: 8545 - DNA, 20 bp, Artificial Sequence
  Description of Artificial Sequence: Synthetic oligonucleotide
  Target: ATXN2; (-) strand; PAM type: NNGRRT; PAM sequence: CAGGAT
gagggtttcaccatgttggc

SEQ ID NO: 8546 - DNA, 20 bp, Artificial Sequence
  Description of Artificial Sequence: Synthetic oligonucleotide
  Target: ATXN2; (-) strand; PAM type: NNGRRT; PAM sequence: GAGGGT
ttttgtatttttagtagaga

SEQ ID NO: 8547 - DNA, 20 bp, Artificial Sequence
  Description of Artificial Sequence: Synthetic oligonucleotide
  Target: ATXN2; (-) strand; PAM type: NNGRRT; PAM sequence: CCGAGT
gattctccttcctcagcctc

SEQ ID NO: 8548 - DNA, 20 bp, Artificial Sequence
  Description of Artificial Sequence: Synthetic oligonucleotide
  Target: ATXN2; (-) strand; PAM type: NNGRRT; PAM sequence: CCGGGT
ttcattgcaacctccacctc

SEQ ID NO: 8549 - DNA, 20 bp, Artificial Sequence
  Description of Artificial Sequence: Synthetic oligonucleotide
  Target: ATXN2; (-) strand; PAM type: NNGRRT; PAM sequence: CAGGGT
ttttctttttttttttgaga

SEQ ID NO: 8550 - DNA, 20 bp, Artificial Sequence
  Description of Artificial Sequence: Synthetic oligonucleotide
  Target: ATXN2; (-) strand; PAM type: NNGRRT; PAM sequence: ATGGAT
aaaaaaaagagatatttttg

SEQ ID NO: 8551 - DNA, 20 bp, Artificial Sequence
  Description of Artificial Sequence: Synthetic oligonucleotide
  Target: ATXN2; (-) strand; PAM type: NNGRRT; PAM sequence: CTGGGT
tggtgtcactgcactccggt

SEQ ID NO: 8552 - DNA, 20 bp, Artificial Sequence
  Description of Artificial Sequence: Synthetic oligonucleotide
  Target: ATXN2; (-) strand; PAM type: NNGRRT; PAM sequence: GTGGAT
gattcccttgaacctggaag

SEQ ID NO: 8553 - DNA, 20 bp, Artificial Sequence
  Description of Artificial Sequence: Synthetic oligonucleotide
  Target: ATXN2; (-) strand; PAM type: NNGRRT; PAM sequence: AGGAGT
tgggtggatcacctgaggtc

SEQ ID NO: 8554 - DNA, 20 bp, Artificial Sequence
  Description of Artificial Sequence: Synthetic oligonucleotide
  Target: ATXN2; (-) strand; PAM type: NNGRRT; PAM sequence: GTGGAT
actttgggaggccaaggtgg

SEQ ID NO: 8555 - DNA, 20 bp, Artificial Sequence
  Description of Artificial Sequence: Synthetic oligonucleotide
  Target: ATXN2; (-) strand; PAM type: NNGRRT; PAM sequence: GTGGGT
cagcactttgggaggccaag

SEQ ID NO: 8556 - DNA, 20 bp, Artificial Sequence
  Description of Artificial Sequence: Synthetic oligonucleotide
  Target: ATXN2; (-) strand; PAM type: NNGRRT; PAM sequence: ATGAAT
attgaccactgtacatagac

SEQ ID NO: 8557 - DNA, 20 bp, Artificial Sequence
  Description of Artificial Sequence: Synthetic oligonucleotide
  Target: ATXN2; (-) strand; PAM type: NNGRRT; PAM sequence: TGGGAT
tactaatggcaagagtttgc

SEQ ID NO: 8558 - DNA, 20 bp, Artificial Sequence
  Description of Artificial Sequence: Synthetic oligonucleotide
  Target: ATXN2; (-) strand; PAM type: NNGRRT; PAM sequence: AAGAGT
tggcttcatttactaatggc

SEQ ID NO: 8559 - DNA, 20 bp, Artificial Sequence
  Description of Artificial Sequence: Synthetic oligonucleotide
  Target: ATXN2; (-) strand; PAM type: NNGRRT; PAM sequence: TAGAAT
ctgggaggggttaaaccact

SEQ ID NO: 8560 - DNA, 20 bp, Artificial Sequence
  Description of Artificial Sequence: Synthetic oligonucleotide
  Target: ATXN2; (-) strand; PAM type: NNGRRT; PAM sequence: AGGGGT
atgaagaagtgggttctggg

SEQ ID NO: 8561 - DNA, 20 bp, Artificial Sequence
  Description of Artificial Sequence: Synthetic oligonucleotide
  Target: ATXN2; (-) strand; PAM type: NNGRRT; PAM sequence: GTGGGT
gagtggttatatatgaagaa

SEQ ID NO: 8562 - DNA, 20 bp, Artificial Sequence
  Description of Artificial Sequence: Synthetic oligonucleotide
  Target: ATXN2; (-) strand; PAM type: NNGRRT; PAM sequence: CAGAGT
gtagggcctgaactttgtag

SEQ ID NO: 8563 - DNA, 20 bp, Artificial Sequence
  Description of Artificial Sequence: Synthetic oligonucleotide
  Target: ATXN2; (-) strand; PAM type: NNGRRT; PAM sequence: GAGAGT
aagagaagaggacacaaagt

SEQ ID NO: 8564 - DNA, 20 bp, Artificial Sequence
  Description of Artificial Sequence: Synthetic oligonucleotide
  Target: ATXN2; (-) strand; PAM type: NNGRRT; PAM sequence: GTGGAT
gcagtatggtcagctaacat

SEQ ID NO: 8565 - DNA, 20 bp, Artificial Sequence
  Description of Artificial Sequence: Synthetic oligonucleotide
  Target: ATXN2; (-) strand; PAM type: NNGRRT; PAM sequence: CTGAGT
cccagtgggcctttatttag

SEQ ID NO: 8566 - DNA, 20 bp, Artificial Sequence
  Description of Artificial Sequence: Synthetic oligonucleotide
  Target: ATXN2; (-) strand; PAM type: NNGRRT; PAM sequence: ATGGGT
ttcgtagtaggtggtaccct

SEQ ID NO: 8567 - DNA, 20 bp, Artificial Sequence
  Description of Artificial Sequence: Synthetic oligonucleotide
  Target: ATXN2; (-) strand; PAM type: NNGRRT; PAM sequence: AGGAGT
tctggaataacctcttttgt

SEQ ID NO: 8568 - DNA, 20 bp, Artificial Sequence
  Description of Artificial Sequence: Synthetic oligonucleotide
  Target: ATXN2; (-) strand; PAM type: NNGRRT; PAM sequence: TGGAAT
tgccaaataaaaaatccatc

SEQ ID NO: 8569 - DNA, 20 bp, Artificial Sequence
  Description of Artificial Sequence: Synthetic oligonucleotide
  Target: ATXN2; (-) strand; PAM type: NNGRRT; PAM sequence: TAGAAT
agtttgggataagaagaggt

SEQ ID NO: 8570 - DNA, 20 bp, Artificial Sequence
  Description of Artificial Sequence: Synthetic oligonucleotide
  Target: ATXN2; (-) strand; PAM type: NNGRRT; PAM sequence: TGGGAT
atacctacccacacctagtt

SEQ ID NO: 8571 - DNA, 20 bp, Artificial Sequence
  Description of Artificial Sequence: Synthetic oligonucleotide
  Target: ATXN2; (-) strand; PAM type: NNGRRT; PAM sequence: GTGGAT
gctggcagctaagcccagag

SEQ ID NO: 8572 - DNA, 20 bp, Artificial Sequence
  Description of Artificial Sequence: Synthetic oligonucleotide
  Target: ATXN2; (-) strand; PAM type: NNGRRT; PAM sequence: GGGAGT
ctcttagaattgctagcaat

SEQ ID NO: 8573 - DNA, 20 bp, Artificial Sequence
  Description of Artificial Sequence: Synthetic oligonucleotide
  Target: ATXN2; (-) strand; PAM type: NNGRRT; PAM sequence: TAGAAT
ctcagcacactcttggctct

SEQ ID NO: 8574 - DNA, 20 bp, Artificial Sequence
  Description of Artificial Sequence: Synthetic oligonucleotide
  Target: ATXN2; (-) strand; PAM type: NNGRRT; PAM sequence: CTGAGT
atgctccattccacccccag

SEQ ID NO: 8575 - DNA, 20 bp, Artificial Sequence
  Description of Artificial Sequence: Synthetic oligonucleotide
  Target: ATXN2; (-) strand; PAM type: NNGRRT; PAM sequence: GTGAAT
ccaaaattcagccatttcta

SEQ ID NO: 8576 - DNA, 20 bp, Artificial Sequence
  Description of Artificial Sequence: Synthetic oligonucleotide
  Target: ATXN2; (-) strand; PAM type: NNGRRT; PAM sequence: TAGAAT
gtaagatagcattagtctct

SEQ ID NO: 8577 - DNA, 20 bp, Artificial Sequence
  Description of Artificial Sequence: Synthetic oligonucleotide
  Target: ATXN2; (-) strand; PAM type: NNGRRT; PAM sequence: CAGGAT
tgtgagaattaaagggattt

SEQ ID NO: 8578 - DNA, 20 bp, Artificial Sequence
  Description of Artificial Sequence: Synthetic oligonucleotide
  Target: ATXN2; (-) strand; PAM type: NNGRRT; PAM sequence: AGGGAT
tctagtgttgtgagaattaa

SEQ ID NO: 8579 - DNA, 20 bp, Artificial Sequence
  Description of Artificial Sequence: Synthetic oligonucleotide
  Target: ATXN2; (-) strand; PAM type: NNGRRT; PAM sequence: GAGAAT
agttttttgtctagtgttgt

SEQ ID NO: 8580 - DNA, 20 bp, Artificial Sequence
  Description of Artificial Sequence: Synthetic oligonucleotide
  Target: ATXN2; (-) strand; PAM type: NNGRRT; PAM sequence: TGGAAT
agaagataatatgactcgtt

SEQ ID NO: 8581 - DNA, 20 bp, Artificial Sequence
  Description of Artificial Sequence: Synthetic oligonucleotide
  Target: ATXN2; (-) strand; PAM type: NNGRRT; PAM sequence: CAGGAT
tagtatgattaagacattaa

SEQ ID NO: 8582 - DNA, 20 bp, Artificial Sequence
  Description of Artificial Sequence: Synthetic oligonucleotide
  Target: ATXN2; (-) strand; PAM type: NNGRRT; PAM sequence: AAGAGT
gctttaatttcttgaatcaa

SEQ ID NO: 8583 - DNA, 20 bp, Artificial Sequence
  Description of Artificial Sequence: Synthetic oligonucleotide
  Target: ATXN2; (-) strand; PAM type: NNGRRT; PAM sequence: TTGAAT
ctgcttcgagctttaatttc

SEQ ID NO: 8584 - DNA, 20 bp, Artificial Sequence
  Description of Artificial Sequence: Synthetic oligonucleotide
  Target: ATXN2; (-) strand; PAM type: NNGRRT; PAM sequence: TGGGAT
agctactttgtgtgtacatt

SEQ ID NO: 8585 - DNA, 20 bp, Artificial Sequence
  Description of Artificial Sequence: Synthetic oligonucleotide
  Target: ATXN2; (-) strand; PAM type: NNGRRT; PAM sequence: TAGAAT
gatccttttagaaatttgtt

SEQ ID NO: 8586 - DNA, 20 bp, Artificial Sequence
  Description of Artificial Sequence: Synthetic oligonucleotide
  Target: ATXN2; (-) strand; PAM type: NNGRRT; PAM sequence: GGGGAT
ttccacactggctcttactt

SEQ ID NO: 8587 - DNA, 20 bp, Artificial Sequence
  Description of Artificial Sequence: Synthetic oligonucleotide
  Target: ATXN2; (-) strand; PAM type: NNGRRT; PAM sequence: CTGGGT
tctggtcagtggaataaagc

SEQ ID NO: 8588 - DNA, 20 bp, Artificial Sequence
  Description of Artificial Sequence: Synthetic oligonucleotide
  Target: ATXN2; (-) strand; PAM type: NNGRRT; PAM sequence: TGGAAT
acaacctaaattctggtcag

SEQ ID NO: 8589 - DNA, 20 bp, Artificial Sequence
  Description of Artificial Sequence: Synthetic oligonucleotide
  Target: ATXN2; (-) strand; PAM type: NNGRRT; PAM sequence: GTGAAT
gacagactgctacataacct

SEQ ID NO: 8590 - DNA, 20 bp, Artificial Sequence
  Description of Artificial Sequence: Synthetic oligonucleotide
  Target: ATXN2; (-) strand; PAM type: NNGRRT; PAM sequence: TAGAAT
ccaaggaatatcattcttta

SEQ ID NO: 8591 - DNA, 20 bp, Artificial Sequence
  Description of Artificial Sequence: Synthetic oligonucleotide
  Target: ATXN2; (-) strand; PAM type: NNGRRT; PAM sequence: AGGAAT
ttggtgaaattttaaaacca

SEQ ID NO: 8592 - DNA, 20 bp, Artificial Sequence
  Description of Artificial Sequence: Synthetic oligonucleotide
  Target: ATXN2; (-) strand; PAM type: NNGRRT; PAM sequence: AGGGAT
gaaatgcattacttatagcc

SEQ ID NO: 8593 - DNA, 20 bp, Artificial Sequence
  Description of Artificial Sequence: Synthetic oligonucleotide
  Target: ATXN2; (-) strand; PAM type: NNGRRT; PAM sequence: ATGGAT
gatattattaatagtgcaga

SEQ ID NO: 8594 - DNA, 20 bp, Artificial Sequence
  Description of Artificial Sequence: Synthetic oligonucleotide
  Target: ATXN2; (-) strand; PAM type: NNGRRT; PAM sequence: CAGAAT
agtggatattattaatagtg

SEQ ID NO: 8595 - DNA, 20 bp, Artificial Sequence
  Description of Artificial Sequence: Synthetic oligonucleotide
  Target: ATXN2; (-) strand; PAM type: NNGRRT; PAM sequence: GTGGAT
acaaatcagaatttacgata

SEQ ID NO: 8596 - DNA, 20 bp, Artificial Sequence
  Description of Artificial Sequence: Synthetic oligonucleotide
  Target: ATXN2; (-) strand; PAM type: NNGRRT; PAM sequence: CAGAAT
gtaaccactgtaaaacaaat

SEQ ID NO: 8597 - DNA, 20 bp, Artificial Sequence
  Description of Artificial Sequence: Synthetic oligonucleotide
  Target: ATXN2; (-) strand; PAM type: NNGRRT; PAM sequence: ATGAGT
ttgcggcactacactccagc

SEQ ID NO: 8598 - DNA, 20 bp, Artificial Sequence
  Description of Artificial Sequence: Synthetic oligonucleotide
  Target: ATXN2; (-) strand; PAM type: NNGRRT; PAM sequence: GAGGAT
gacttgggaggctgaggtgg

SEQ ID NO: 8599 - DNA, 20 bp, Artificial Sequence
  Description of Artificial Sequence: Synthetic oligonucleotide
  Target: ATXN2; (-) strand; PAM type: NNGRRT; PAM sequence: AGGAAT
tgtttttttctcaactttgc

SEQ ID NO: 8600 - DNA, 20 bp, Artificial Sequence
  Description of Artificial Sequence: Synthetic oligonucleotide
  Target: ATXN2; (-) strand; PAM type: NNGRRT; PAM sequence: GGGGAT
tgcttttgtttctcaccata

SEQ ID NO: 8601 - DNA, 20 bp, Artificial Sequence
  Description of Artificial Sequence: Synthetic oligonucleotide
  Target: ATXN2; (-) strand; PAM type: NNGRRT; PAM sequence: TGGGAT
ctgtgggggtagcatggagg

SEQ ID NO: 8602 - DNA, 20 bp, Artificial Sequence
  Description of Artificial Sequence: Synthetic oligonucleotide
  Target: ATXN2; (-) strand; PAM type: NNGRRT; PAM sequence: GGGGGT
tgttgagagcccactgctgt

SEQ ID NO: 8603 - DNA, 20 bp, Artificial Sequence
  Description of Artificial Sequence: Synthetic oligonucleotide
  Target: ATXN2; (-) strand; PAM type: NNGRRT; PAM sequence: CAGAAT
aaaatgactaagtttctgcc

SEQ ID NO: 8604 - DNA, 20 bp, Artificial Sequence
  Description of Artificial Sequence: Synthetic oligonucleotide
  Target: ATXN2; (-) strand; PAM type: NNGRRT; PAM sequence: GGGGAT
tgtttcctgggtatggggct

SEQ ID NO: 8605 - DNA, 20 bp, Artificial Sequence
  Description of Artificial Sequence: Synthetic oligonucleotide
  Target: ATXN2; (-) strand; PAM type: NNGRRT; PAM sequence: CTGGGT
ctgaatatgtactctgtttc

SEQ ID NO: 8606 - DNA, 20 bp, Artificial Sequence
  Description of Artificial Sequence: Synthetic oligonucleotide
  Target: ATXN2; (-) strand; PAM type: NNGRRT; PAM sequence: CTGAAT
aaagaggaaagattgagaag

SEQ ID NO: 8607 - DNA, 20 bp, Artificial Sequence
  Description of Artificial Sequence: Synthetic oligonucleotide
  Target: ATXN2; (-) strand; PAM type: NNGRRT; PAM sequence: TTGAAT
taaaaaatgctcagacaagt

SEQ ID NO: 8608 - DNA, 20 bp, Artificial Sequence
  Description of Artificial Sequence: Synthetic oligonucleotide
  Target: ATXN2; (-) strand; PAM type: NNGRRT; PAM sequence: GAGGGT
acttctctggaagcacattt

SEQ ID NO: 8609 - DNA, 20 bp, Artificial Sequence
  Description of Artificial Sequence: Synthetic oligonucleotide
  Target: ATXN2; (-) strand; PAM type: NNGRRT; PAM sequence: GAGGAT
ttgagaagaaatggttagct

SEQ ID NO: 8610 - DNA, 20 bp, Artificial Sequence
  Description of Artificial Sequence: Synthetic oligonucleotide
  Target: ATXN2; (-) strand; PAM type: NNGRRT; PAM sequence: AGGAAT
gttgaaagtgccgcaggaat

SEQ ID NO: 8611 - DNA, 20 bp, Artificial Sequence
  Description of Artificial Sequence: Synthetic oligonucleotide
  Target: ATXN2; (-) strand; PAM type: NNGRRT; PAM sequence: AGGAAT
aaagttgttgaaagtgccgc

SEQ ID NO: 8612 - DNA, 20 bp, Artificial Sequence
  Description of Artificial Sequence: Synthetic oligonucleotide
  Target: ATXN2; (-) strand; PAM type: NNGRRT; PAM sequence: ATGAGT
tccccacctcgtccagactt

SEQ ID NO: 8613 - DNA, 20 bp, Artificial Sequence
  Description of Artificial Sequence: Synthetic oligonucleotide
  Target: ATXN2; (-) strand; PAM type: NNGRRT; PAM sequence: GTGAAT
gggaattgtatcagtcaaat

SEQ ID NO: 8614 - DNA, 20 bp, Artificial Sequence
  Description of Artificial Sequence: Synthetic oligonucleotide
  Target: ATXN2; (-) strand; PAM type: NNGRRT; PAM sequence: GGGAAT
tagttcctacaggaaatgct

SEQ ID NO: 8615 - DNA, 20 bp, Artificial Sequence
  Description of Artificial Sequence: Synthetic oligonucleotide
  Target: ATXN2; (-) strand; PAM type: NNGRRT; PAM sequence: CAGGAT
tggggtttcaccgtgttaac

SEQ ID NO: 8616 - DNA, 20 bp, Artificial Sequence
  Description of Artificial Sequence: Synthetic oligonucleotide
  Target: ATXN2; (-) strand; PAM type: NNGRRT; PAM sequence: TGGGGT
ttttgtatttttagtagaga

SEQ ID NO: 8617 - DNA, 20 bp, Artificial Sequence
  Description of Artificial Sequence: Synthetic oligonucleotide
  Target: ATXN2; (-) strand; PAM type: NNGRRT; PAM sequence: TGGGAT
gcctcagcctcccgagtagc

SEQ ID NO: 8618 - DNA, 20 bp, Artificial Sequence
  Description of Artificial Sequence: Synthetic oligonucleotide
  Target: ATXN2; (-) strand; PAM type: NNGRRT; PAM sequence: CCGAGT
cattctcctgcctcagcctc

SEQ ID NO: 8619 - DNA, 20 bp, Artificial Sequence
  Description of Artificial Sequence: Synthetic oligonucleotide
  Target: ATXN2; (-) strand; PAM type: NNGRRT; PAM sequence: TGGAGT
tctcgctctgttgtccaggc

SEQ ID NO: 8620 - DNA, 20 bp, Artificial Sequence
  Description of Artificial Sequence: Synthetic oligonucleotide
  Target: ATXN2; (-) strand; PAM type: NNGRRT; PAM sequence: TGGAGT
tgttttttgtttttttgaga

SEQ ID NO: 8621 - DNA, 20 bp, Artificial Sequence
  Description of Artificial Sequence: Synthetic oligonucleotide
  Target: ATXN2; (-) strand; PAM type: NNGRRT; PAM sequence: TGGGAT
gcctcggcctcccaaagtga

SEQ ID NO: 8622 - DNA, 20 bp, Artificial Sequence
  Description of Artificial Sequence: Synthetic oligonucleotide
  Target: ATXN2; (-) strand; PAM type: NNGRRT; PAM sequence: GGGGGT
cagctatatttagtagagat

SEQ ID NO: 8623 - DNA, 20 bp, Artificial Sequence
  Description of Artificial Sequence: Synthetic oligonucleotide
  Target: ATXN2; (-) strand; PAM type: NNGRRT; PAM sequence: TGGGAT
gcttcagcctcccgagcagc

SEQ ID NO: 8624 - DNA, 20 bp, Artificial Sequence
  Description of Artificial Sequence: Synthetic oligonucleotide
  Target: ATXN2; (-) strand; PAM type: NNGRRT; PAM sequence: TGGAGT
ttcgctcttgttacccaggc

SEQ ID NO: 8625 - DNA, 20 bp, Artificial Sequence
  Description of Artificial Sequence: Synthetic oligonucleotide
  Target: ATXN2; (-) strand; PAM type: NNGRRT; PAM sequence: CAGAGT
cctgttgatttaattttaaa

SEQ ID NO: 8626 - DNA, 20 bp, Artificial Sequence
  Description of Artificial Sequence: Synthetic oligonucleotide
  Target: ATXN2; (-) strand; PAM type: NNGRRT; PAM sequence: TGGGAT
gcctcagcctcccaaagtgc

SEQ ID NO: 8627 - DNA, 20 bp, Artificial Sequence
  Description of Artificial Sequence: Synthetic oligonucleotide
  Target: ATXN2; (-) strand; PAM type: NNGRRT; PAM sequence: CAGGAT
cagggtttcaccatgttggc

SEQ ID NO: 8628 - DNA, 20 bp, Artificial Sequence
  Description of Artificial Sequence: Synthetic oligonucleotide
  Target: ATXN2; (-) strand; PAM type: NNGRRT; PAM sequence: CAGGGT
ttttgtatttttagtagaga

SEQ ID NO: 8629 - DNA, 20 bp, Artificial Sequence
  Description of Artificial Sequence: Synthetic oligonucleotide
  Target: ATXN2; (-) strand; PAM type: NNGRRT; PAM sequence: CCGAGT
aattcgcctgcctcagcctc

SEQ ID NO: 8630 - DNA, 20 bp, Artificial Sequence
  Description of Artificial Sequence: Synthetic oligonucleotide
  Target: ATXN2; (-) strand; PAM type: NNGRRT; PAM sequence: TGGAGT
gagtctcgctctcgccaggt

SEQ ID NO: 8631 - DNA, 20 bp, Artificial Sequence
  Description of Artificial Sequence: Synthetic oligonucleotide
  Target: ATXN2; (-) strand; PAM type: NNGRRT; PAM sequence: CGGAGT
tatttatttattttttgaga

SEQ ID NO: 8632 - DNA, 20 bp, Artificial Sequence
  Description of Artificial Sequence: Synthetic oligonucleotide
  Target: ATXN2; (-) strand; PAM type: NNGRRT; PAM sequence: ATGAGT
atacaattcagttagaacag

SEQ ID NO: 8633 - DNA, 20 bp, Artificial Sequence
  Description of Artificial Sequence: Synthetic oligonucleotide
  Target: ATXN2; (-) strand; PAM type: NNGRRT; PAM sequence: AAGAAT
catggattaagaaaaaggct

SEQ ID NO: 8634 - DNA, 20 bp, Artificial Sequence
  Description of Artificial Sequence: Synthetic oligonucleotide
  Target: ATXN2; (-) strand; PAM type: NNGRRT; PAM sequence: ATGGAT
ctaaaatattgaaggggccc

SEQ ID NO: 8635 - DNA, 20 bp, Artificial Sequence
  Description of Artificial Sequence: Synthetic oligonucleotide
  Target: ATXN2; (-) strand; PAM type: NNGRRT; PAM sequence: CTGAAT
tttacgaatttaagtacatt

SEQ ID NO: 8636 - DNA, 20 bp, Artificial Sequence
  Description of Artificial Sequence: Synthetic oligonucleotide
  Target: ATXN2; (-) strand; PAM type: NNGRRT; PAM sequence: ACGAAT
tttgatttcctgtgtatttt

SEQ ID NO: 8637 - DNA, 20 bp, Artificial Sequence
  Description of Artificial Sequence: Synthetic oligonucleotide
  Target: ATXN2; (-) strand; PAM type: NNGRRT; PAM sequence: CTGGAT
aatagttattaaacctgtta

SEQ ID NO: 8638 - DNA, 20 bp, Artificial Sequence
  Description of Artificial Sequence: Synthetic oligonucleotide
  Target: ATXN2; (-) strand; PAM type: NNGRRT; PAM sequence: TGGGAT
acctcagcctcctgagtagc

SEQ ID NO: 8639 - DNA, 20 bp, Artificial Sequence
  Description of Artificial Sequence: Synthetic oligonucleotide
  Target: ATXN2; (-) strand; PAM type: NNGRRT; PAM sequence: CTGAGT
agtcctcccacctcagcctc

SEQ ID NO: 8640 - DNA, 20 bp, Artificial Sequence
  Description of Artificial Sequence: Synthetic oligonucleotide
  Target: ATXN2; (-) strand; PAM type: NNGRRT; PAM sequence: CAGAAT
cctcaaattatttttagaaa

SEQ ID NO: 8641 - DNA, 20 bp, Artificial Sequence
  Description of Artificial Sequence: Synthetic oligonucleotide
  Target: ATXN2; (-) strand; PAM type: NNGRRT; PAM sequence: TGGGAT
tgccttggcttccaaagtgc

SEQ ID NO: 8642 - DNA, 20 bp, Artificial Sequence
  Description of Artificial Sequence: Synthetic oligonucleotide
  Target: ATXN2; (-) strand; PAM type: NNGRRT; PAM sequence: AGGGGT
gtttgtattttcagtagaga

SEQ ID NO: 8643 - DNA, 20 bp, Artificial Sequence
  Description of Artificial Sequence: Synthetic oligonucleotide
  Target: ATXN2; (-) strand; PAM type: NNGRRT; PAM sequence: TGGGAT
gcctcagcctcctgagtagc

SEQ ID NO: 8644 - DNA, 20 bp, Artificial Sequence
  Description of Artificial Sequence: Synthetic oligonucleotide
  Target: ATXN2; (-) strand; PAM type: NNGRRT; PAM sequence: CTGAGT
gattctcctgcctcagcctc

SEQ ID NO: 8645 - DNA, 20 bp, Artificial Sequence
  Description of Artificial Sequence: Synthetic oligonucleotide
  Target: ATXN2; (-) strand; PAM type: NNGRRT; PAM sequence: CTGGGT
cccattgcaacctctgcctc

SEQ ID NO: 8646 - DNA, 20 bp, Artificial Sequence
  Description of Artificial Sequence: Synthetic oligonucleotide
  Target: ATXN2; (-) strand; PAM type: NNGRRT; PAM sequence: CTGAGT
gtctcgctctgtctcccagg

SEQ ID NO: 8647 - DNA, 20 bp, Artificial Sequence
  Description of Artificial Sequence: Synthetic oligonucleotide
  Target: ATXN2; (-) strand; PAM type: NNGRRT; PAM sequence: TGGAGT
atgtatatatatttttgaga

SEQ ID NO: 8648 - DNA, 20 bp, Artificial Sequence
  Description of Artificial Sequence: Synthetic oligonucleotide
  Target: ATXN2; (-) strand; PAM type: NNGRRT; PAM sequence: ATGGGT
atttcatatcgcttgatgtt

SEQ ID NO: 8649 - DNA, 20 bp, Artificial Sequence
  Description of Artificial Sequence: Synthetic oligonucleotide
  Target: ATXN2; (-) strand; PAM type: NNGRRT; PAM sequence: TTGGAT
aattcagggcattgatgacc

SEQ ID NO: 8650 - DNA, 20 bp, Artificial Sequence
  Description of Artificial Sequence: Synthetic oligonucleotide
  Target: ATXN2; (-) strand; PAM type: NNGRRT; PAM sequence: GAGAAT
attctcaaagaatttgtgga

SEQ ID NO: 8651 - DNA, 20 bp, Artificial Sequence
  Description of Artificial Sequence: Synthetic oligonucleotide
  Target: ATXN2; (-) strand; PAM type: NNGRRT; PAM sequence: AAGAAT
cctggatctgtggattctca

SEQ ID NO: 8652 - DNA, 20 bp, Artificial Sequence
  Description of Artificial Sequence: Synthetic oligonucleotide
  Target: ATXN2; (-) strand; PAM type: NNGRRT; PAM sequence: GTGGAT
aggattcttcacctggatct

SEQ ID NO: 8653 - DNA, 20 bp, Artificial Sequence
  Description of Artificial Sequence: Synthetic oligonucleotide
  Target: ATXN2; (-) strand; PAM type: NNGRRT; PAM sequence: CTGGAT
aaagaggcaggattcttcac

SEQ ID NO: 8654 - DNA, 20 bp, Artificial Sequence
  Description of Artificial Sequence: Synthetic oligonucleotide
  Target: ATXN2; (-) strand; PAM type: NNGRRT; PAM sequence: CAGGAT
tgcttgtcagtacaaagagg

SEQ ID NO: 8655 - DNA, 20 bp, Artificial Sequence
  Description of Artificial Sequence: Synthetic oligonucleotide
  Target: ATXN2; (-) strand; PAM type: NNGRRT; PAM sequence: AAGAGT
agctcttgctggagcctcag

SEQ ID NO: 8656 - DNA, 20 bp, Artificial Sequence
  Description of Artificial Sequence: Synthetic oligonucleotide
  Target: ATXN2; (-) strand; PAM type: NNGRRT; PAM sequence: TAGGGT
gggctgattagttaggaatg

SEQ ID NO: 8657 - DNA, 20 bp, Artificial Sequence
  Description of Artificial Sequence: Synthetic oligonucleotide
  Target: ATXN2; (-) strand; PAM type: NNGRRT; PAM sequence: AGGAAT
cactggggggctgattagtt

SEQ ID NO: 8658 - DNA, 20 bp, Artificial Sequence
  Description of Artificial Sequence: Synthetic oligonucleotide
  Target: ATXN2; (-) strand; PAM type: NNGRRT; PAM sequence: CTGGGT
tctactcctaatccagcctg

SEQ ID NO: 8659 - DNA, 20 bp, Artificial Sequence
  Description of Artificial Sequence: Synthetic oligonucleotide
  Target: ATXN2; (-) strand; PAM type: NNGRRT; PAM sequence: CAGAAT
ggaaggaactgcttctcttc

SEQ ID NO: 8660 - DNA, 20 bp, Artificial Sequence
  Description of Artificial Sequence: Synthetic oligonucleotide
  Target: ATXN2; (-) strand; PAM type: NNGRRT; PAM sequence: ATGGAT
ttggaataatttattttcaa

SEQ ID NO: 8661 - DNA, 20 bp, Artificial Sequence
  Description of Artificial Sequence: Synthetic oligonucleotide
  Target: ATXN2; (-) strand; PAM type: NNGRRT; PAM sequence: TGGAAT
aggacaactgtagtgtgtgt

SEQ ID NO: 8662 - DNA, 20 bp, Artificial Sequence
  Description of Artificial Sequence: Synthetic oligonucleotide
  Target: ATXN2; (-) strand; PAM type: NNGRRT; PAM sequence: GGGGGT
cctggattttggtatcccta

SEQ ID NO: 8663 - DNA, 20 bp, Artificial Sequence
  Description of Artificial Sequence: Synthetic oligonucleotide
  Target: ATXN2; (-) strand; PAM type: NNGRRT; PAM sequence: CTGGAT
tatcagggacttaagcatcc

SEQ ID NO: 8664 - DNA, 20 bp, Artificial Sequence
  Description of Artificial Sequence: Synthetic oligonucleotide
  Target: ATXN2; (-) strand; PAM type: NNGRRT; PAM sequence: GAGAGT
cctagaggtttaaagtatgc

SEQ ID NO: 8665 - DNA, 20 bp, Artificial Sequence
  Description of Artificial Sequence: Synthetic oligonucleotide
  Target: ATXN2; (-) strand; PAM type: NNGRRT; PAM sequence: CAGAGT
ctgcactccagcctgcgcaa

SEQ ID NO: 8666 - DNA, 20 bp, Artificial Sequence
  Description of Artificial Sequence: Synthetic oligonucleotide
  Target: ATXN2; (-) strand; PAM type: NNGRRT; PAM sequence: AGGAGT
cagatggatcacctgaggtc

SEQ ID NO: 8667 - DNA, 20 bp, Artificial Sequence
  Description of Artificial Sequence: Synthetic oligonucleotide
  Target: ATXN2; (-) strand; PAM type: NNGRRT; PAM sequence: ATGGAT
acttagggaggctgaggcag

SEQ ID NO: 8668 - DNA, 20 bp, Artificial Sequence
  Description of Artificial Sequence: Synthetic oligonucleotide
  Target: ATXN2; (-) strand; PAM type: NNGRRT; PAM sequence: GTGGGT
atgggaaatacgctggggct

SEQ ID NO: 8669 - DNA, 20 bp, Artificial Sequence
  Description of Artificial Sequence: Synthetic oligonucleotide
  Target: ATXN2; (-) strand; PAM type: NNGRRT; PAM sequence: ATGGAT
agctgtgaattcaaccaacc

SEQ ID NO: 8670 - DNA, 20 bp, Artificial Sequence
  Description of Artificial Sequence: Synthetic oligonucleotide
  Target: ATXN2; (-) strand; PAM type: NNGRRT; PAM sequence: GTGAAT
tatccatgggttacacagct

SEQ ID NO: 8671 - DNA, 20 bp, Artificial Sequence
  Description of Artificial Sequence: Synthetic oligonucleotide
  Target: ATXN2; (-) strand; PAM type: NNGRRT; PAM sequence: ATGGGT
acagtcagccctctctatcc

SEQ ID NO: 8672 - DNA, 20 bp, Artificial Sequence
  Description of Artificial Sequence: Synthetic oligonucleotide
  Target: ATXN2; (-) strand; PAM type: NNGRRT; PAM sequence: GGGAAT
aattttatactcctaaacca

SEQ ID NO: 8673 - DNA, 20 bp, Artificial Sequence
  Description of Artificial Sequence: Synthetic oligonucleotide
  Target: ATXN2; (-) strand; PAM type: NNGRRT; PAM sequence: CAGGAT
ttttatatttttggtagaga

SEQ ID NO: 8674 - DNA, 20 bp, Artificial Sequence
  Description of Artificial Sequence: Synthetic oligonucleotide
  Target: ATXN2; (-) strand; PAM type: NNGRRT; PAM sequence: CCGAGT
gattctcccacctcagcctc

SEQ ID NO: 8675 - DNA, 20 bp, Artificial Sequence
  Description of Artificial Sequence: Synthetic oligonucleotide
  Target: ATXN2; (-) strand; PAM type: NNGRRT; PAM sequence: TGGAGT
tctcactctatcactgaggt

SEQ ID NO: 8676 - DNA, 20 bp, Artificial Sequence
  Description of Artificial Sequence: Synthetic oligonucleotide
  Target: ATXN2; (-) strand; PAM type: NNGRRT; PAM sequence: CGGGGT
atgtatatattttttatata

SEQ ID NO: 8677 - DNA, 20 bp, Artificial Sequence
  Description of Artificial Sequence: Synthetic oligonucleotide
  Target: ATXN2; (-) strand; PAM type: NNGRRT; PAM sequence: TAGAAT
gagttcagaaaacaaattta

SEQ ID NO: 8678 - DNA, 20 bp, Artificial Sequence
  Description of Artificial Sequence: Synthetic oligonucleotide
  Target: ATXN2; (-) strand; PAM type: NNGRRT; PAM sequence: TGGAGT
cccaatgcattaaacttttc

SEQ ID NO: 8679 - DNA, 20 bp, Artificial Sequence
  Description of Artificial Sequence: Synthetic oligonucleotide
  Target: ATXN2; (-) strand; PAM type: NNGRRT; PAM sequence: TAGGGT
ggggtgtcctgaagacatca

SEQ ID NO: 8680 - DNA, 20 bp, Artificial Sequence
  Description of Artificial Sequence: Synthetic oligonucleotide
  Target: ATXN2; (-) strand; PAM type: NNGRRT; PAM sequence: TGGGGT
ctccactttcccttgccttc

SEQ ID NO: 8681 - DNA, 20 bp, Artificial Sequence
  Description of Artificial Sequence: Synthetic oligonucleotide
  Target: ATXN2; (-) strand; PAM type: NNGRRT; PAM sequence: TAGAAT
ttaacattttctttttagta

SEQ ID NO: 8682 - DNA, 20 bp, Artificial Sequence
  Description of Artificial Sequence: Synthetic oligonucleotide
  Target: ATXN2; (-) strand; PAM type: NNGRRT; PAM sequence: GTGAGT
caagtgctgggattacaggt

SEQ ID NO: 8683 - DNA, 20 bp, Artificial Sequence
  Description of Artificial Sequence: Synthetic oligonucleotide
  Target: ATXN2; (-) strand; PAM type: NNGRRT; PAM sequence: TGGGAT
atctcagcctccccaagtgc

SEQ ID NO: 8684 - DNA, 20 bp, Artificial Sequence
  Description of Artificial Sequence: Synthetic oligonucleotide
  Target: ATXN2; (-) strand; PAM type: NNGRRT; PAM sequence: TAGAAT
tctctctctgtcacccctac

SEQ ID NO: 8685 - DNA, 20 bp, Artificial Sequence
  Description of Artificial Sequence: Synthetic oligonucleotide
  Target: ATXN2; (-) strand; PAM type: NNGRRT; PAM sequence: AAGGGT
tatgtatttatttgttgaga

SEQ ID NO: 8686 - DNA, 20 bp, Artificial Sequence
  Description of Artificial Sequence: Synthetic oligonucleotide
  Target: ATXN2; (-) strand; PAM type: NNGRRT; PAM sequence: TAGAGT
aagcccacatctgtcctttt

SEQ ID NO: 8687 - DNA, 20 bp, Artificial Sequence
  Description of Artificial Sequence: Synthetic oligonucleotide
  Target: ATXN2; (-) strand; PAM type: NNGRRT; PAM sequence: TAGAGT
gaagaatctaccttactaac

SEQ ID NO: 8688 - DNA, 20 bp, Artificial Sequence
  Description of Artificial Sequence: Synthetic oligonucleotide
  Target: ATXN2; (-) strand; PAM type: NNGRRT; PAM sequence: AAGAAT
ctggatttaatcccaacgtg

SEQ ID NO: 8689 - DNA, 20 bp, Artificial Sequence
  Description of Artificial Sequence: Synthetic oligonucleotide
  Target: ATXN2; (-) strand; PAM type: NNGRRT; PAM sequence: CTGGAT
tgtgccttcttcttttactc

SEQ ID NO: 8690 - DNA, 20 bp, Artificial Sequence
  Description of Artificial Sequence: Synthetic oligonucleotide
  Target: ATXN2; (-) strand; PAM type: NNGRRT; PAM sequence: TGGGAT
gccttgggctcccaaattgc

SEQ ID NO: 8691 - DNA, 20 bp, Artificial Sequence
  Description of Artificial Sequence: Synthetic oligonucleotide
  Target: ATXN2; (-) strand; PAM type: NNGRRT; PAM sequence: ATGGGT
cttttgtatttttagtagag

SEQ ID NO: 8692 - DNA, 20 bp, Artificial Sequence
  Description of Artificial Sequence: Synthetic oligonucleotide
  Target: ATXN2; (-) strand; PAM type: NNGRRT; PAM sequence: CCGGGT
ctcaccacaacctctgcctc

SEQ ID NO: 8693 - DNA, 20 bp, Artificial Sequence
  Description of Artificial Sequence: Synthetic oligonucleotide
  Target: ATXN2; (-) strand; PAM type: NNGRRT; PAM sequence: TGGAGT
tctcactctgttgcccaggt

SEQ ID NO: 8694 - DNA, 20 bp, Artificial Sequence
  Description of Artificial Sequence: Synthetic oligonucleotide
  Target: ATXN2; (-) strand; PAM type: NNGRRT; PAM sequence: TGGAGT
ttttttgtttgtttttgagt

SEQ ID NO: 8695 - DNA, 20 bp, Artificial Sequence
  Description of Artificial Sequence: Synthetic oligonucleotide
  Target: ATXN2; (-) strand; PAM type: NNGRRT; PAM sequence: TTGAGT
ccttctttttttgtttgttt

SEQ ID NO: 8696 - DNA, 20 bp, Artificial Sequence
  Description of Artificial Sequence: Synthetic oligonucleotide
  Target: ATXN2; (-) strand; PAM type: NNGRRT; PAM sequence: TGGGAT
acctcggcctcccaaagtgc

SEQ ID NO: 8697 - DNA, 20 bp, Artificial Sequence
  Description of Artificial Sequence: Synthetic oligonucleotide
  Target: ATXN2; (-) strand; PAM type: NNGRRT; PAM sequence: CGGGAT
cggggtttcaccgttttagc

SEQ ID NO: 8698 - DNA, 20 bp, Artificial Sequence
  Description of Artificial Sequence: Synthetic oligonucleotide
  Target: ATXN2; (-) strand; PAM type: NNGRRT; PAM sequence: CGGGGT
ttttgtatttttagtagaga

SEQ ID NO: 8699 - DNA, 20 bp, Artificial Sequence
  Description of Artificial Sequence: Synthetic oligonucleotide
  Target: ATXN2; (-) strand; PAM type: NNGRRT; PAM sequence: CTGGGT
ctcactgcaagctccgcctc

SEQ ID NO: 8700 - DNA, 20 bp, Artificial Sequence
  Description of Artificial Sequence: Synthetic oligonucleotide
  Target: ATXN2; (-) strand; PAM type: NNGRRT; PAM sequence: CGGGAT
cccaggctggagtgcagtgg

SEQ ID NO: 8701 - DNA, 20 bp, Artificial Sequence
  Description of Artificial Sequence: Synthetic oligonucleotide
  Target: ATXN2; (-) strand; PAM type: NNGRRT; PAM sequence: TGGAGT
tctcgctctgtcgcccaggc

SEQ ID NO: 8702 - DNA, 20 bp, Artificial Sequence
  Description of Artificial Sequence: Synthetic oligonucleotide
  Target: ATXN2; (-) strand; PAM type: NNGRRT; PAM sequence: CGGAGT
ttttttttttttttttgaga

SEQ ID NO: 8703 - DNA, 20 bp, Artificial Sequence
  Description of Artificial Sequence: Synthetic oligonucleotide
  Target: ATXN2; (-) strand; PAM type: NNGRRT; PAM sequence: TGGGAT
tgttgtttacagaataaagt

SEQ ID NO: 8704 - DNA, 20 bp, Artificial Sequence
  Description of Artificial Sequence: Synthetic oligonucleotide
  Target: ATXN2; (-) strand; PAM type: NNGRRT; PAM sequence: CAGAAT
tcagtggccactgttgttta

SEQ ID NO: 8705 - DNA, 20 bp, Artificial Sequence
  Description of Artificial Sequence: Synthetic oligonucleotide
  Target: ATXN2; (-) strand; PAM type: NNGRRT; PAM sequence: GAGAGT
gattatacccatcctagtgg

SEQ ID NO: 8706 - DNA, 20 bp, Artificial Sequence
  Description of Artificial Sequence: Synthetic oligonucleotide
  Target: ATXN2; (-) strand; PAM type: NNGRRT; PAM sequence: TGGGGT
ttattttttgaaaatagagt

SEQ ID NO: 8707 - DNA, 20 bp, Artificial Sequence
  Description of Artificial Sequence: Synthetic oligonucleotide
  Target: ATXN2; (-) strand; PAM type: NNGRRT; PAM sequence: TAGAGT
tttttattattttttgaaaa

SEQ ID NO: 8708 - DNA, 20 bp, Artificial Sequence
  Description of Artificial Sequence: Synthetic oligonucleotide
  Target: ATXN2; (-) strand; PAM type: NNGRRT; PAM sequence: GGGGGT
cataggttttcaattctcat

SEQ ID NO: 8709 - DNA, 20 bp, Artificial Sequence
  Description of Artificial Sequence: Synthetic oligonucleotide
  Target: ATXN2; (-) strand; PAM type: NNGRRT; PAM sequence: CAGAGT
ctgcactccagcctgggtga

SEQ ID NO: 8710 - DNA, 20 bp, Artificial Sequence
  Description of Artificial Sequence: Synthetic oligonucleotide
  Target: ATXN2; (-) strand; PAM type: NNGRRT; PAM sequence: CTGGGT
tcacgccactgcactccagc

SEQ ID NO: 8711 - DNA, 20 bp, Artificial Sequence
  Description of Artificial Sequence: Synthetic oligonucleotide
  Target: ATXN2; (-) strand; PAM type: NNGRRT; PAM sequence: GAGAAT
ctactagggaggctgaggca

SEQ ID NO: 8712 - DNA, 20 bp, Artificial Sequence
  Description of Artificial Sequence: Synthetic oligonucleotide
  Target: ATXN2; (-) strand; PAM type: NNGRRT; PAM sequence: CTGGGT
actaaaaatacaaaaatgag

SEQ ID NO: 8713 - DNA, 20 bp, Artificial Sequence
  Description of Artificial Sequence: Synthetic oligonucleotide
  Target: ATXN2; (-) strand; PAM type: NNGRRT; PAM sequence: GGGAGT
ctggcagatcatttgaggcc

SEQ ID NO: 8714 - DNA, 20 bp, Artificial Sequence
  Description of Artificial Sequence: Synthetic oligonucleotide
  Target: ATXN2; (-) strand; PAM type: NNGRRT; PAM sequence: CCGGGT
ttttaaagtttttgtgtggg

SEQ ID NO: 8715 - DNA, 20 bp, Artificial Sequence
  Description of Artificial Sequence: Synthetic oligonucleotide
  Target: ATXN2; (-) strand; PAM type: NNGRRT; PAM sequence: TGGGAT
acctcggactcccaaagtgc

SEQ ID NO: 8716 - DNA, 20 bp, Artificial Sequence
  Description of Artificial Sequence: Synthetic oligonucleotide
  Target: ATXN2; (-) strand; PAM type: NNGRRT; PAM sequence: TCGAAT
ccatgttggccaggctggtc

SEQ ID NO: 8717 - DNA, 20 bp, Artificial Sequence
  Description of Artificial Sequence: Synthetic oligonucleotide
  Target: ATXN2; (-) strand; PAM type: NNGRRT; PAM sequence: CGGGGT
ttttatatttttagtaaaga

SEQ ID NO: 8718 - DNA, 20 bp, Artificial Sequence
  Description of Artificial Sequence: Synthetic oligonucleotide
  Target: ATXN2; (-) strand; PAM type: NNGRRT; PAM sequence: TTGAGT
gattctcctgcctcagcctc

SEQ ID NO: 8719 - DNA, 20 bp, Artificial Sequence
  Description of Artificial Sequence: Synthetic oligonucleotide
  Target: ATXN2; (-) strand; PAM type: NNGRRT; PAM sequence: CAGAGT
tttcttttttttttttgaaa

SEQ ID NO: 8720 - DNA, 20 bp, Artificial Sequence
  Description of Artificial Sequence: Synthetic oligonucleotide
  Target: ATXN2; (-) strand; PAM type: NNGRRT; PAM sequence: TGGAAT
ttctggacattgcgtattaa

SEQ ID NO: 8721 - DNA, 20 bp, Artificial Sequence
  Description of Artificial Sequence: Synthetic oligonucleotide
  Target: ATXN2; (-) strand; PAM type: NNGRRT; PAM sequence: TGGGAT
gccccagcctcccaaagtgc

SEQ ID NO: 8722 - DNA, 20 bp, Artificial Sequence
  Description of Artificial Sequence: Synthetic oligonucleotide
  Target: ATXN2; (-) strand; PAM type: NNGRRT; PAM sequence: ATGGGT
ctcaccataacctcaaactc

SEQ ID NO: 8723 - DNA, 20 bp, Artificial Sequence
  Description of Artificial Sequence: Synthetic oligonucleotide
  Target: ATXN2; (-) strand; PAM type: NNGRRT; PAM sequence: TGGAGT
tctcattttgttgtccaggc

SEQ ID NO: 8724 - DNA, 20 bp, Artificial Sequence
  Description of Artificial Sequence: Synthetic oligonucleotide
  Target: ATXN2; (-) strand; PAM type: NNGRRT; PAM sequence: CAGGGT
ttttttcttctattttgaga

SEQ ID NO: 8725 - DNA, 20 bp, Artificial Sequence
  Description of Artificial Sequence: Synthetic oligonucleotide
  Target: ATXN2; (-) strand; PAM type: NNGRRT; PAM sequence: AGGGAT
ataggatatatttttctctt

SEQ ID NO: 8726 - DNA, 20 bp, Artificial Sequence
  Description of Artificial Sequence: Synthetic oligonucleotide
  Target: ATXN2; (-) strand; PAM type: NNGRRT; PAM sequence: TAGGAT
actgctttttattacttaaa

SEQ ID NO: 8727 - DNA, 20 bp, Artificial Sequence
  Description of Artificial Sequence: Synthetic oligonucleotide
  Target: ATXN2; (-) strand; PAM type: NNGRRT; PAM sequence: CAGAAT
caatttgtacctctcacaaa

SEQ ID NO: 8728 - DNA, 20 bp, Artificial Sequence
  Description of Artificial Sequence: Synthetic oligonucleotide
  Target: ATXN2; (-) strand; PAM type: NNGRRT; PAM sequence: AAGAAT
tttcccttgaattttaactg

SEQ ID NO: 8729 - DNA, 20 bp, Artificial Sequence
  Description of Artificial Sequence: Synthetic oligonucleotide
  Target: ATXN2; (-) strand; PAM type: NNGRRT; PAM sequence: TTGAAT
tatcttataaatgttttccc

SEQ ID NO: 8730 - DNA, 20 bp, Artificial Sequence
  Description of Artificial Sequence: Synthetic oligonucleotide
  Target: ATXN2; (-) strand; PAM type: NNGRRT; PAM sequence: GAGGAT
tattcgggtggcagaggtga

SEQ ID NO: 8731 - DNA, 20 bp, Artificial Sequence
  Description of Artificial Sequence: Synthetic oligonucleotide
  Target: ATXN2; (-) strand; PAM type: NNGRRT; PAM sequence: TCGGGT
gtacctgtagtcccagctat

SEQ ID NO: 8732 - DNA, 20 bp, Artificial Sequence
  Description of Artificial Sequence: Synthetic oligonucleotide
  Target: ATXN2; (-) strand; PAM type: NNGRRT; PAM sequence: ATGAAT
actttgggaggccaaggcag

SEQ ID NO: 8733 - DNA, 20 bp, Artificial Sequence
  Description of Artificial Sequence: Synthetic oligonucleotide
  Target: ATXN2; (-) strand; PAM type: NNGRRT; PAM sequence: CTGGGT
taaaaacataaaattactgg

SEQ ID NO: 8734 - DNA, 20 bp, Artificial Sequence
  Description of Artificial Sequence: Synthetic oligonucleotide
  Target: ATXN2; (-) strand; PAM type: NNGRRT; PAM sequence: TTGAGT
gaggaatctgattagtaagt

SEQ ID NO: 8735 - DNA, 20 bp, Artificial Sequence
  Description of Artificial Sequence: Synthetic oligonucleotide
  Target: ATXN2; (-) strand; PAM type: NNGRRT; PAM sequence: AGGAAT
gatcttcactcagctttcag

SEQ ID NO: 8736 - DNA, 20 bp, Artificial Sequence
  Description of Artificial Sequence: Synthetic oligonucleotide
  Target: ATXN2; (-) strand; PAM type: NNGRRT; PAM sequence: TAGAAT
gcaccactcaggctttgctg

SEQ ID NO: 8737 - DNA, 20 bp, Artificial Sequence
  Description of Artificial Sequence: Synthetic oligonucleotide
  Target: ATXN2; (-) strand; PAM type: NNGRRT; PAM sequence: GTGAAT
aatacagcaaacctcatgaa

SEQ ID NO: 8738 - DNA, 20 bp, Artificial Sequence
  Description of Artificial Sequence: Synthetic oligonucleotide
  Target: ATXN2; (-) strand; PAM type: NNGRRT; PAM sequence: TGGAAT
gcaatctagtattacgtacg

SEQ ID NO: 8739 - DNA, 20 bp, Artificial Sequence
  Description of Artificial Sequence: Synthetic oligonucleotide
  Target: ATXN2; (-) strand; PAM type: NNGRRT; PAM sequence: GGGAAT
atctttttaggagatagtgt

SEQ ID NO: 8740 - DNA, 20 bp, Artificial Sequence
  Description of Artificial Sequence: Synthetic oligonucleotide
  Target: ATXN2; (-) strand; PAM type: NNGRRT; PAM sequence: TGGAAT
cataaacagtatctttgtat

SEQ ID NO: 8741 - DNA, 20 bp, Artificial Sequence
  Description of Artificial Sequence: Synthetic oligonucleotide
  Target: ATXN2; (-) strand; PAM type: NNGRRT; PAM sequence: CAGAAT
cctaatggagaaaatgaaaa

SEQ ID NO: 8742 - DNA, 20 bp, Artificial Sequence
  Description of Artificial Sequence: Synthetic oligonucleotide
  Target: ATXN2; (-) strand; PAM type: NNGRRT; PAM sequence: TCGGAT
gcctcagcctcccaaagtgc

SEQ ID NO: 8743 - DNA, 20 bp, Artificial Sequence
  Description of Artificial Sequence: Synthetic oligonucleotide
  Target: ATXN2; (-) strand; PAM type: NNGRRT; PAM sequence: TAGAAT
tgtctctttcactctctttt

SEQ ID NO: 8744 - DNA, 20 bp, Artificial Sequence
  Description of Artificial Sequence: Synthetic oligonucleotide
  Target: ATXN2; (-) strand; PAM type: NNGRRT; PAM sequence: TGGGAT
gcctcggcctcccaaagtgc

SEQ ID NO: 8745 - DNA, 20 bp, Artificial Sequence
  Description of Artificial Sequence: Synthetic oligonucleotide
  Target: ATXN2; (-) strand; PAM type: NNGRRT; PAM sequence: CGGGGT
ttttgtatttttagtagaga

SEQ ID NO: 8746 - DNA, 20 bp, Artificial Sequence
  Description of Artificial Sequence: Synthetic oligonucleotide
  Target: ATXN2; (-) strand; PAM type: NNGRRT; PAM sequence: CCGGGT
ttttctcctgcctcagcctc

SEQ ID NO: 8747 - DNA, 20 bp, Artificial Sequence
  Description of Artificial Sequence: Synthetic oligonucleotide
  Target: ATXN2; (-) strand; PAM type: NNGRRT; PAM sequence: CCGGGT
ctcactgcaagctccgcctc

SEQ ID NO: 8748 - DNA, 20 bp, Artificial Sequence
  Description of Artificial Sequence: Synthetic oligonucleotide
  Target: ATXN2; (-) strand; PAM type: NNGRRT; PAM sequence: TGGAGT
tcttgctctgttgcccaggc

SEQ ID NO: 8749 - DNA, 20 bp, Artificial Sequence
  Description of Artificial Sequence: Synthetic oligonucleotide
  Target: ATXN2; (-) strand; PAM type: NNGRRT; PAM sequence: CAGAGT
tttattttttatttttgaga

SEQ ID NO: 8750 - DNA, 20 bp, Artificial Sequence
  Description of Artificial Sequence: Synthetic oligonucleotide
  Target: ATXN2; (-) strand; PAM type: NNGRRT; PAM sequence: CAGAAT
tttttgtcttagttcttcta

SEQ ID NO: 8751 - DNA, 20 bp, Artificial Sequence
  Description of Artificial Sequence: Synthetic oligonucleotide
  Target: ATXN2; (-) strand; PAM type: NNGRRT; PAM sequence: CTGAAT
tttttgattcttgaacattt

SEQ ID NO: 8752 - DNA, 20 bp, Artificial Sequence
  Description of Artificial Sequence: Synthetic oligonucleotide
  Target: ATXN2; (-) strand; PAM type: NNGRRT; PAM sequence: GAGAAT
aacacttttgccataggttt

SEQ ID NO: 8753 - DNA, 20 bp, Artificial Sequence
  Description of Artificial Sequence: Synthetic oligonucleotide
  Target: ATXN2; (-) strand; PAM type: NNGRRT; PAM sequence: TGGAAT
atttgtacagctgtaagaat

SEQ ID NO: 8754 - DNA, 20 bp, Artificial Sequence
  Description of Artificial Sequence: Synthetic oligonucleotide
  Target: ATXN2; (-) strand; PAM type: NNGRRT; PAM sequence: AAGAAT
aaagatatttgtacagctgt

SEQ ID NO: 8755 - DNA, 20 bp, Artificial Sequence
  Description of Artificial Sequence: Synthetic oligonucleotide
  Target: ATXN2; (-) strand; PAM type: NNGRRT; PAM sequence: CCGAAT
gttttttattagaaaagaat

SEQ ID NO: 8756 - DNA, 20 bp, Artificial Sequence
  Description of Artificial Sequence: Synthetic oligonucleotide
  Target: ATXN2; (-) strand; PAM type: NNGRRT; PAM sequence: AAGAAT
tgttctgttttttattagaa

SEQ ID NO: 8757 - DNA, 20 bp, Artificial Sequence
  Description of Artificial Sequence: Synthetic oligonucleotide
  Target: ATXN2; (-) strand; PAM type: NNGRRT; PAM sequence: AAGAAT
tctatttcatactcctggga

SEQ ID NO: 8758 - DNA, 20 bp, Artificial Sequence
  Description of Artificial Sequence: Synthetic oligonucleotide
  Target: ATXN2; (-) strand; PAM type: NNGRRT; PAM sequence: GTGGAT
aataaagcaagagaaggaat

SEQ ID NO: 8759 - DNA, 20 bp, Artificial Sequence
  Description of Artificial Sequence: Synthetic oligonucleotide
  Target: ATXN2; (-) strand; PAM type: NNGRRT; PAM sequence: AGGAAT
actagtaataaagcaagaga

SEQ ID NO: 8760 - DNA, 20 bp, Artificial Sequence
  Description of Artificial Sequence: Synthetic oligonucleotide
  Target: ATXN2; (-) strand; PAM type: NNGRRT; PAM sequence: TGGAGT
cttgtcttggatggtttcaa

SEQ ID NO: 8761 - DNA, 20 bp, Artificial Sequence
  Description of Artificial Sequence: Synthetic oligonucleotide
  Target: ATXN2; (-) strand; PAM type: NNGRRT; PAM sequence: TTGGAT
tattatttttttctcttgtc

SEQ ID NO: 8762 - DNA, 20 bp, Artificial Sequence
  Description of Artificial Sequence: Synthetic oligonucleotide
  Target: ATXN2; (-) strand; PAM type: NNGRRT; PAM sequence: TAGGGT
tcagtaagactgtttactga

SEQ ID NO: 8763 - DNA, 20 bp, Artificial Sequence
  Description of Artificial Sequence: Synthetic oligonucleotide
  Target: ATXN2; (-) strand; PAM type: NNGRRT; PAM sequence: AAGAAT
cttaaactctctattaggta

SEQ ID NO: 8764 - DNA, 20 bp, Artificial Sequence
  Description of Artificial Sequence: Synthetic oligonucleotide
  Target: ATXN2; (-) strand; PAM type: NNGRRT; PAM sequence: TGGGAT
aaaacacttaacactgctag

SEQ ID NO: 8765 - DNA, 20 bp, Artificial Sequence
  Description of Artificial Sequence: Synthetic oligonucleotide
  Target: ATXN2; (-) strand; PAM type: NNGRRT; PAM sequence: GGGAGT
ctactacttagtggtactga

SEQ ID NO: 8766 - DNA, 20 bp, Artificial Sequence
  Description of Artificial Sequence: Synthetic oligonucleotide
  Target: ATXN2; (-) strand; PAM type: NNGRRT; PAM sequence: CTGAAT
tgattgtctatcagcttgcg

SEQ ID NO: 8767 - DNA, 20 bp, Artificial Sequence
  Description of Artificial Sequence: Synthetic oligonucleotide
  Target: ATXN2; (-) strand; PAM type: NNGRRT; PAM sequence: TGGAAT
gaaattcagttttaaagcag

SEQ ID NO: 8768 - DNA, 20 bp, Artificial Sequence
  Description of Artificial Sequence: Synthetic oligonucleotide
  Target: ATXN2; (-) strand; PAM type: NNGRRT; PAM sequence: GTGAAT
aatagttttaaaaatgacca

SEQ ID NO: 8769 - DNA, 20 bp, Artificial Sequence
  Description of Artificial Sequence: Synthetic oligonucleotide
  Target: ATXN2; (-) strand; PAM type: NNGRRT; PAM sequence: CAGAGT
catcactccagcttgggcga

SEQ ID NO: 8770 - DNA, 20 bp, Artificial Sequence
  Description of Artificial Sequence: Synthetic oligonucleotide
  Target: ATXN2; (-) strand; PAM type: NNGRRT; PAM sequence: TTGAAT
ggctaaggcaggagaattgc

SEQ ID NO: 8771 - DNA, 20 bp, Artificial Sequence
  Description of Artificial Sequence: Synthetic oligonucleotide
  Target: ATXN2; (-) strand; PAM type: NNGRRT; PAM sequence: GAGAAT
tactcaggaggctaaggcag

SEQ ID NO: 8772 - DNA, 20 bp, Artificial Sequence
  Description of Artificial Sequence: Synthetic oligonucleotide
  Target: ATXN2; (-) strand; PAM type: NNGRRT; PAM sequence: AGGAGT
cgggtggatcacttgaggtc

SEQ ID NO: 8773 - DNA, 20 bp, Artificial Sequence
  Description of Artificial Sequence: Synthetic oligonucleotide
  Target: ATXN2; (-) strand; PAM type: NNGRRT; PAM sequence: GTGGAT
actttgggaggccaaagcgg

SEQ ID NO: 8774 - DNA, 20 bp, Artificial Sequence
  Description of Artificial Sequence: Synthetic oligonucleotide
  Target: ATXN2; (-) strand; PAM type: NNGRRT; PAM sequence: GCGGGT
cagcactttgggaggccaaa

SEQ ID NO: 8775 - DNA, 20 bp, Artificial Sequence
  Description of Artificial Sequence: Synthetic oligonucleotide
  Target: ATXN2; (-) strand; PAM type: NNGRRT; PAM sequence: CCGGGT
aaagagattaaagatttagg

SEQ ID NO: 8776 - DNA, 20 bp, Artificial Sequence
  Description of Artificial Sequence: Synthetic oligonucleotide
  Target: ATXN2; (-) strand; PAM type: NNGRRT; PAM sequence: TTGAGT
atctgtgaatttgtttaatt

SEQ ID NO: 8777 - DNA, 20 bp, Artificial Sequence
  Description of Artificial Sequence: Synthetic oligonucleotide
  Target: ATXN2; (-) strand; PAM type: NNGRRT; PAM sequence: GTGAAT
gactacactggagcaaatct

SEQ ID NO: 8778 - DNA, 20 bp, Artificial Sequence
  Description of Artificial Sequence: Synthetic oligonucleotide
  Target: ATXN2; (-) strand; PAM type: NNGRRT; PAM sequence: GTGGAT
actttaattctggaggaaag

SEQ ID NO: 8779 - DNA, 20 bp, Artificial Sequence
  Description of Artificial Sequence: Synthetic oligonucleotide
  Target: ATXN2; (-) strand; PAM type: NNGRRT; PAM sequence: GTGGGT
gcatccaaaactgaatttat

SEQ ID NO: 8780 - DNA, 20 bp, Artificial Sequence
  Description of Artificial Sequence: Synthetic oligonucleotide
  Target: ATXN2; (-) strand; PAM type: NNGRRT; PAM sequence: CTGAAT
tacgtatggagcatccaaaa

SEQ ID NO: 8781 - DNA, 20 bp, Artificial Sequence
  Description of Artificial Sequence: Synthetic oligonucleotide
  Target: ATXN2; (-) strand; PAM type: NNGRRT; PAM sequence: AAGAAT
aaaaaaaaaaaaaaaaaaaa

SEQ ID NO: 8782 - DNA, 20 bp, Artificial Sequence
  Description of Artificial Sequence: Synthetic oligonucleotide
  Target: ATXN2; (-) strand; PAM type: NNGRRT; PAM sequence: AAGAGT
tgcactccagcctgggcaac

SEQ ID NO: 8783 - DNA, 20 bp, Artificial Sequence
  Description of Artificial Sequence: Synthetic oligonucleotide
  Target: ATXN2; (-) strand; PAM type: NNGRRT; PAM sequence: GAGAAT
tactcgggaggctgaggcag

SEQ ID NO: 8784 - DNA, 20 bp, Artificial Sequence
  Description of Artificial Sequence: Synthetic oligonucleotide
  Target: ATXN2; (-) strand; PAM type: NNGRRT; PAM sequence: CTGGGT
attaaaacataacttgtcag

SEQ ID NO: 8785 - DNA, 20 bp, Artificial Sequence
  Description of Artificial Sequence: Synthetic oligonucleotide
  Target: ATXN2; (-) strand; PAM type: NNGRRT; PAM sequence: CAGAAT
acttgccctacaaaatatgt

SEQ ID NO: 8786 - DNA, 20 bp, Artificial Sequence
  Description of Artificial Sequence: Synthetic oligonucleotide
  Target: ATXN2; (-) strand; PAM type: NNGRRT; PAM sequence: AAGAGT
ctttggaaatttttttccac

SEQ ID NO: 8787 - DNA, 20 bp, Artificial Sequence
  Description of Artificial Sequence: Synthetic oligonucleotide
  Target: ATXN2; (-) strand; PAM type: NNGRRT; PAM sequence: CCGGGT
gagctgagattgcactccag

SEQ ID NO: 8788 - DNA, 20 bp, Artificial Sequence
  Description of Artificial Sequence: Synthetic oligonucleotide
  Target: ATXN2; (-) strand; PAM type: NNGRRT; PAM sequence: GAGAAT
tacttgggaagctgaggcag

SEQ ID NO: 8789 - DNA, 20 bp, Artificial Sequence
  Description of Artificial Sequence: Synthetic oligonucleotide
  Target: ATXN2; (-) strand; PAM type: NNGRRT; PAM sequence: GGGAGT
tgggccgatcacttgaggac

SEQ ID NO: 8790 - DNA, 20 bp, Artificial Sequence
  Description of Artificial Sequence: Synthetic oligonucleotide
  Target: ATXN2; (-) strand; PAM type: NNGRRT; PAM sequence: TGGAAT
gaaacatgccatactttgaa

SEQ ID NO: 8791 - DNA, 20 bp, Artificial Sequence
  Description of Artificial Sequence: Synthetic oligonucleotide
  Target: ATXN2; (-) strand; PAM type: NNGRRT; PAM sequence: TTGAAT
aaatggaaacatgccatact

SEQ ID NO: 8792 - DNA, 20 bp, Artificial Sequence
  Description of Artificial Sequence: Synthetic oligonucleotide
  Target: ATXN2; (-) strand; PAM type: NNGRRT; PAM sequence: GGGGAT
caaaaataagcataggacat

SEQ ID NO: 8793 - DNA, 20 bp, Artificial Sequence
  Description of Artificial Sequence: Synthetic oligonucleotide
  Target: ATXN2; (-) strand; PAM type: NNGRRT; PAM sequence: CTGGGT
tggtggtgctgcactccagc

SEQ ID NO: 8794 - DNA, 20 bp, Artificial Sequence
  Description of Artificial Sequence: Synthetic oligonucleotide
  Target: ATXN2; (-) strand; PAM type: NNGRRT; PAM sequence: CGGAGT
aatcgcttgaatccaggaga

SEQ ID NO: 8795 - DNA, 20 bp, Artificial Sequence
  Description of Artificial Sequence: Synthetic oligonucleotide
  Target: ATXN2; (-) strand; PAM type: NNGRRT; PAM sequence: TTGAAT
ggctgaggcaggagaatcgc

SEQ ID NO: 8796 - DNA, 20 bp, Artificial Sequence
  Description of Artificial Sequence: Synthetic oligonucleotide
  Target: ATXN2; (-) strand; PAM type: NNGRRT; PAM sequence: GAGAAT
tacttgggaggctgaggcag

SEQ ID NO: 8797 - DNA, 20 bp, Artificial Sequence
  Description of Artificial Sequence: Synthetic oligonucleotide
  Target: ATXN2; (-) strand; PAM type: NNGRRT; PAM sequence: AGGAGT
gtggcggatcacctgaggta

SEQ ID NO: 8798 - DNA, 20 bp, Artificial Sequence
  Description of Artificial Sequence: Synthetic oligonucleotide
  Target: ATXN2; (-) strand; PAM type: NNGRRT; PAM sequence: GCGGAT
aaacaaaccagccaggcgtg

SEQ ID NO: 8799 - DNA, 20 bp, Artificial Sequence
  Description of Artificial Sequence: Synthetic oligonucleotide
  Target: ATXN2; (-) strand; PAM type: NNGRRT; PAM sequence: CTGGGT
gttatgccacggcactccag

SEQ ID NO: 8800 - DNA, 20 bp, Artificial Sequence
  Description of Artificial Sequence: Synthetic oligonucleotide
  Target: ATXN2; (-) strand; PAM type: NNGRRT; PAM sequence: CCGGGT
acaaaaagtacaaaaattag

SEQ ID NO: 8801 - DNA, 20 bp, Artificial Sequence
  Description of Artificial Sequence: Synthetic oligonucleotide
  Target: ATXN2; (-) strand; PAM type: NNGRRT; PAM sequence: AGGAGT
tgaggcgggaggatgagttc

SEQ ID NO: 8802 - DNA, 20 bp, Artificial Sequence
  Description of Artificial Sequence: Synthetic oligonucleotide
  Target: ATXN2; (-) strand; PAM type: NNGRRT; PAM sequence: ATGAGT
ttggaggctgaggcgggagg

SEQ ID NO: 8803 - DNA, 20 bp, Artificial Sequence
  Description of Artificial Sequence: Synthetic oligonucleotide
  Target: ATXN2; (-) strand; PAM type: NNGRRT; PAM sequence: GAGGAT
acttttggaggctgaggcgg

SEQ ID NO: 8804 - DNA, 20 bp, Artificial Sequence
  Description of Artificial Sequence: Synthetic oligonucleotide
  Target: ATXN2; (-) strand; PAM type: NNGRRT; PAM sequence: CAGAAT
tgattcaagatacatgggag

SEQ ID NO: 8805 - DNA, 20 bp, Artificial Sequence
  Description of Artificial Sequence: Synthetic oligonucleotide
  Target: ATXN2; (-) strand; PAM type: NNGRRT; PAM sequence: AAGAGT
aaatactgtgtggtactagt

SEQ ID NO: 8806 - DNA, 20 bp, Artificial Sequence
  Description of Artificial Sequence: Synthetic oligonucleotide
  Target: ATXN2; (-) strand; PAM type: NNGRRT; PAM sequence: TAGAAT
taaaaacctctagcataaaa

SEQ ID NO: 8807 - DNA, 20 bp, Artificial Sequence
  Description of Artificial Sequence: Synthetic oligonucleotide
  Target: ATXN2; (-) strand; PAM type: NNGRRT; PAM sequence: TAGAGT
gttacatgttttataatttt

SEQ ID NO: 8808 - DNA, 20 bp, Artificial Sequence
  Description of Artificial Sequence: Synthetic oligonucleotide
  Target: ATXN2; (-) strand; PAM type: NNGRRT; PAM sequence: CAGAAT
ctatgtaatggaaagctaaa

SEQ ID NO: 8809 - DNA, 20 bp, Artificial Sequence
  Description of Artificial Sequence: Synthetic oligonucleotide
  Target: ATXN2; (-) strand; PAM type: NNGRRT; PAM sequence: ACGGAT
aaaagaaagaaacaggtgga

SEQ ID NO: 8810 - DNA, 20 bp, Artificial Sequence
  Description of Artificial Sequence: Synthetic oligonucleotide
  Target: ATXN2; (-) strand; PAM type: NNGRRT; PAM sequence: GAGAGT
ctggggccaagcagtaactg

SEQ ID NO: 8811 - DNA, 20 bp, Artificial Sequence
  Description of Artificial Sequence: Synthetic oligonucleotide
  Target: ATXN2; (-) strand; PAM type: NNGRRT; PAM sequence: AGGGAT
acagagtacgagtaacaaac

SEQ ID NO: 8812 - DNA, 20 bp, Artificial Sequence
  Description of Artificial Sequence: Synthetic oligonucleotide
  Target: ATXN2; (-) strand; PAM type: NNGRRT; PAM sequence: ACGAGT
tagtgtatcagtaacagagt

SEQ ID NO: 8813 - DNA, 20 bp, Artificial Sequence
  Description of Artificial Sequence: Synthetic oligonucleotide
  Target: ATXN2; (-) strand; PAM type: NNGRRT; PAM sequence: CAGAGT
tcttgatagtgtatcagtaa

SEQ ID NO: 8814 - DNA, 20 bp, Artificial Sequence
  Description of Artificial Sequence: Synthetic oligonucleotide
  Target: ATXN2; (-) strand; PAM type: NNGRRT; PAM sequence: TGGAGT
ttttagtagttggaagaagt

SEQ ID NO: 8815 - DNA, 20 bp, Artificial Sequence
  Description of Artificial Sequence: Synthetic oligonucleotide
  Target: ATXN2; (-) strand; PAM type: NNGRRT; PAM sequence: AAGAAT
atctcaaaaataaaaaataa

SEQ ID NO: 8816 - DNA, 20 bp, Artificial Sequence
  Description of Artificial Sequence: Synthetic oligonucleotide
  Target: ATXN2; (-) strand; PAM type: NNGRRT; PAM sequence: CTGAGT
tcgtaccactgcactccagc

SEQ ID NO: 8817 - DNA, 20 bp, Artificial Sequence
  Description of Artificial Sequence: Synthetic oligonucleotide
  Target: ATXN2; (-) strand; PAM type: NNGRRT; PAM sequence: GAGAAT
tactcgggaggctgagacag

SEQ ID NO: 8818 - DNA, 20 bp, Artificial Sequence
  Description of Artificial Sequence: Synthetic oligonucleotide
  Target: ATXN2; (-) strand; PAM type: NNGRRT; PAM sequence: TGGAGT
gcatgacattgaatatcaaa

SEQ ID NO: 8819 - DNA, 20 bp, Artificial Sequence
  Description of Artificial Sequence: Synthetic oligonucleotide
  Target: ATXN2; (-) strand; PAM type: NNGRRT; PAM sequence: TTGAAT
gaatgttgtactgcatgaca

SEQ ID NO: 8820 - DNA, 20 bp, Artificial Sequence
  Description of Artificial Sequence: Synthetic oligonucleotide
  Target: ATXN2; (-) strand; PAM type: NNGRRT; PAM sequence: TGGAAT
gtgaataaattcaagaaaaa

SEQ ID NO: 8821 - DNA, 20 bp, Artificial Sequence
  Description of Artificial Sequence: Synthetic oligonucleotide
  Target: ATXN2; (-) strand; PAM type: NNGRRT; PAM sequence: GTGAAT
agttagagatagcaaagcac

SEQ ID NO: 8822 - DNA, 20 bp, Artificial Sequence
  Description of Artificial Sequence: Synthetic oligonucleotide
  Target: ATXN2; (-) strand; PAM type: NNGRRT; PAM sequence: TAGAGT
tactctattctaagcatttt

SEQ ID NO: 8823 - DNA, 20 bp, Artificial Sequence
  Description of Artificial Sequence: Synthetic oligonucleotide
  Target: ATXN2; (-) strand; PAM type: NNGRRT; PAM sequence: GGGAGT
tggtgttcacagtttcttca

SEQ ID NO: 8824 - DNA, 20 bp, Artificial Sequence
  Description of Artificial Sequence: Synthetic oligonucleotide
  Target: ATXN2; (-) strand; PAM type: NNGRRT; PAM sequence: TGGGAT
accttggccttcaaaagtga

SEQ ID NO: 8825 - DNA, 20 bp, Artificial Sequence
  Description of Artificial Sequence: Synthetic oligonucleotide
  Target: ATXN2; (-) strand; PAM type: NNGRRT; PAM sequence: CTGGGT
cccaggctggcctttacctc

SEQ ID NO: 8826 - DNA, 20 bp, Artificial Sequence
  Description of Artificial Sequence: Synthetic oligonucleotide
  Target: ATXN2; (-) strand; PAM type: NNGRRT; PAM sequence: TGGAAT
tcatgctctgtcactcaggc

SEQ ID NO: 8827 - DNA, 20 bp, Artificial Sequence
  Description of Artificial Sequence: Synthetic oligonucleotide
  Target: ATXN2; (-) strand; PAM type: NNGRRT; PAM sequence: CAGGGT
ttttcttttttttaaagaaa

SEQ ID NO: 8828 - DNA, 20 bp, Artificial Sequence
  Description of Artificial Sequence: Synthetic oligonucleotide
  Target: ATXN2; (-) strand; PAM type: NNGRRT; PAM sequence: TTGGGT
gagaaatacaagaatctatt

SEQ ID NO: 8829 - DNA, 20 bp, Artificial Sequence
  Description of Artificial Sequence: Synthetic oligonucleotide
  Target: ATXN2; (-) strand; PAM type: NNGRRT; PAM sequence: AAGAAT
tggacagtacggagaaatac

SEQ ID NO: 8830 - DNA, 20 bp, Artificial Sequence
  Description of Artificial Sequence: Synthetic oligonucleotide
  Target: ATXN2; (-) strand; PAM type: NNGRRT; PAM sequence: TGGGAT
agcagatacttagagagctc

SEQ ID NO: 8831 - DNA, 20 bp, Artificial Sequence
  Description of Artificial Sequence: Synthetic oligonucleotide
  Target: ATXN2; (-) strand; PAM type: NNGRRT; PAM sequence: AAGAAT
tagaagcattattttatgga

SEQ ID NO: 8832 - DNA, 20 bp, Artificial Sequence
  Description of Artificial Sequence: Synthetic oligonucleotide
  Target: ATXN2; (-) strand; PAM type: NNGRRT; PAM sequence: TTGAAT
caggctcaatataaatgtgt

SEQ ID NO: 8833 - DNA, 20 bp, Artificial Sequence
  Description of Artificial Sequence: Synthetic oligonucleotide
  Target: ATXN2; (-) strand; PAM type: NNGRRT; PAM sequence: CAGAAT
atgttggtttcaccctcctt

SEQ ID NO: 8834 - DNA, 20 bp, Artificial Sequence
  Description of Artificial Sequence: Synthetic oligonucleotide
  Target: ATXN2; (-) strand; PAM type: NNGRRT; PAM sequence: TTGAAT
ttctgtctttattgctgcac

SEQ ID NO: 8835 - DNA, 20 bp, Artificial Sequence
  Description of Artificial Sequence: Synthetic oligonucleotide
  Target: ATXN2; (-) strand; PAM type: NNGRRT; PAM sequence: TGGAAT
cctctaactgccaggtcctt

SEQ ID NO: 8836 - DNA, 20 bp, Artificial Sequence
  Description of Artificial Sequence: Synthetic oligonucleotide
  Target: ATXN2; (-) strand; PAM type: NNGRRT; PAM sequence: CTGAAT
caaaaggattctttttaatc

SEQ ID NO: 8837 - DNA, 20 bp, Artificial Sequence
  Description of Artificial Sequence: Synthetic oligonucleotide
  Target: ATXN2; (-) strand; PAM type: NNGRRT; PAM sequence: AAGGAT
agccaccgcactgggcccaa

SEQ ID NO: 8838 - DNA, 20 bp, Artificial Sequence
  Description of Artificial Sequence: Synthetic oligonucleotide
  Target: ATXN2; (-) strand; PAM type: NNGRRT; PAM sequence: TGGGAT
gcctcggcctcccaaagtgc

SEQ ID NO: 8839 - DNA, 20 bp, Artificial Sequence
  Description of Artificial Sequence: Synthetic oligonucleotide
  Target: ATXN2; (-) strand; PAM type: NNGRRT; PAM sequence: TAGGAT
tggggtttcaccgtgttagc

SEQ ID NO: 8840 - DNA, 20 bp, Artificial Sequence
  Description of Artificial Sequence: Synthetic oligonucleotide
  Target: ATXN2; (-) strand; PAM type: NNGRRT; PAM sequence: TGGGGT
ttttgtatttttagtagaga

SEQ ID NO: 8841 - DNA, 20 bp, Artificial Sequence
  Description of Artificial Sequence: Synthetic oligonucleotide
  Target: ATXN2; (-) strand; PAM type: NNGRRT; PAM sequence: CCGAGT
cattctcctgcctcagcctc

SEQ ID NO: 8842 - DNA, 20 bp, Artificial Sequence
  Description of Artificial Sequence: Synthetic oligonucleotide
  Target: ATXN2; (-) strand; PAM type: NNGRRT; PAM sequence: CCGGGT
ctcactgcaagctccgcctc

SEQ ID NO: 8843 - DNA, 20 bp, Artificial Sequence
  Description of Artificial Sequence: Synthetic oligonucleotide
  Target: ATXN2; (-) strand; PAM type: NNGRRT; PAM sequence: TGGAGT
agtctcgctcttgcccaggc

SEQ ID NO: 8844 - DNA, 20 bp, Artificial Sequence
  Description of Artificial Sequence: Synthetic oligonucleotide
  Target: ATXN2; (-) strand; PAM type: NNGRRT; PAM sequence: CAGAGT
ttttgtttttgtttttgaga

SEQ ID NO: 8845 - DNA, 20 bp, Artificial Sequence
  Description of Artificial Sequence: Synthetic oligonucleotide
  Target: ATXN2; (-) strand; PAM type: NNGRRT; PAM sequence: AAGGAT
cacttcctgctcatcctaaa

SEQ ID NO: 8846 - DNA, 20 bp, Artificial Sequence
  Description of Artificial Sequence: Synthetic oligonucleotide
  Target: ATXN2; (-) strand; PAM type: NNGRRT; PAM sequence: TGGGAT
gcctcagcctcccaaagtgc

SEQ ID NO: 8847 - DNA, 20 bp, Artificial Sequence
  Description of Artificial Sequence: Synthetic oligonucleotide
  Target: ATXN2; (-) strand; PAM type: NNGRRT; PAM sequence: TGGGGT
ttttgtatttttagtagaga

SEQ ID NO: 8848 - DNA, 20 bp, Artificial Sequence
  Description of Artificial Sequence: Synthetic oligonucleotide
  Target: ATXN2; (-) strand; PAM type: NNGRRT; PAM sequence: CTGAGT
ctcactgcagcctcagcctc

SEQ ID NO: 8849 - DNA, 20 bp, Artificial Sequence
  Description of Artificial Sequence: Synthetic oligonucleotide
  Target: ATXN2; (-) strand; PAM type: NNGRRT; PAM sequence: TGGAGT
tctttttctttttttttaga

SEQ ID NO: 8850 - DNA, 20 bp, Artificial Sequence
  Description of Artificial Sequence: Synthetic oligonucleotide
  Target: ATXN2; (-) strand; PAM type: NNGRRT; PAM sequence: GAGGAT
tttcctctggttttagtaga

SEQ ID NO: 8851 - DNA, 20 bp, Artificial Sequence
  Description of Artificial Sequence: Synthetic oligonucleotide
  Target: ATXN2; (-) strand; PAM type: NNGRRT; PAM sequence: ATGAGT
tcccaaagtcctgggattac

SEQ ID NO: 8852 - DNA, 20 bp, Artificial Sequence
  Description of Artificial Sequence: Synthetic oligonucleotide
  Target: ATXN2; (-) strand; PAM type: NNGRRT; PAM sequence: TGGGAT
accttggcctcccaaagtcc

SEQ ID NO: 8853 - DNA, 20 bp, Artificial Sequence
  Description of Artificial Sequence: Synthetic oligonucleotide
  Target: ATXN2; (-) strand; PAM type: NNGRRT; PAM sequence: AAGAGT
ggtctcaaactgctgggcct

SEQ ID NO: 8854 - DNA, 20 bp, Artificial Sequence
  Description of Artificial Sequence: Synthetic oligonucleotide
  Target: ATXN2; (-) strand; PAM type: NNGRRT; PAM sequence: TGGGGT
atttatattttttgtagaga

SEQ ID NO: 8855 - DNA, 20 bp, Artificial Sequence
  Description of Artificial Sequence: Synthetic oligonucleotide
  Target: ATXN2; (-) strand; PAM type: NNGRRT; PAM sequence: TGGAGT
tcttgctctgttgcccaggc

SEQ ID NO: 8856 - DNA, 20 bp, Artificial Sequence
  Description of Artificial Sequence: Synthetic oligonucleotide
  Target: ATXN2; (-) strand; PAM type: NNGRRT; PAM sequence: AAGAAT
ttctaattggatttagtctg

SEQ ID NO: 8857 - DNA, 20 bp, Artificial Sequence
  Description of Artificial Sequence: Synthetic oligonucleotide
  Target: ATXN2; (-) strand; PAM type: NNGRRT; PAM sequence: TTGGAT
cttattcatgaccattctaa

SEQ ID NO: 8858 - DNA, 20 bp, Artificial Sequence
  Description of Artificial Sequence: Synthetic oligonucleotide
  Target: ATXN2; (-) strand; PAM type: NNGRRT; PAM sequence: CAGAAT
tactggctttggtgaagtaa

SEQ ID NO: 8859 - DNA, 20 bp, Artificial Sequence
  Description of Artificial Sequence: Synthetic oligonucleotide
  Target: ATXN2; (-) strand; PAM type: NNGRRT; PAM sequence: TTGAGT
tgatggctgtagccatagag

SEQ ID NO: 8860 - DNA, 20 bp, Artificial Sequence
  Description of Artificial Sequence: Synthetic oligonucleotide
  Target: ATXN2; (-) strand; PAM type: NNGRRT; PAM sequence: TAGAGT
tgttttgatggctgtagcca

SEQ ID NO: 8861 - DNA, 20 bp, Artificial Sequence
  Description of Artificial Sequence: Synthetic oligonucleotide
  Target: ATXN2; (-) strand; PAM type: NNGRRT; PAM sequence: AGGGGT
gtattctcagcctagatgat

SEQ ID NO: 8862 - DNA, 20 bp, Artificial Sequence
  Description of Artificial Sequence: Synthetic oligonucleotide
  Target: ATXN2; (-) strand; PAM type: NNGRRT; PAM sequence: TGGAAT
gctctgtattcgtgtatctt

SEQ ID NO: 8863 - DNA, 20 bp, Artificial Sequence
  Description of Artificial Sequence: Synthetic oligonucleotide
  Target: ATXN2; (-) strand; PAM type: NNGRRT; PAM sequence: TTGAAT
agtttgtatttatcctttat

SEQ ID NO: 8864 - DNA, 20 bp, Artificial Sequence
  Description of Artificial Sequence: Synthetic oligonucleotide
  Target: ATXN2; (-) strand; PAM type: NNGRRT; PAM sequence: GTGAGT
acctttacgtcatatgagct

SEQ ID NO: 8865 - DNA, 20 bp, Artificial Sequence
  Description of Artificial Sequence: Synthetic oligonucleotide
  Target: ATXN2; (-) strand; PAM type: NNGRRT; PAM sequence: TTGAAT
aataagtttcctttggtctc

SEQ ID NO: 8866 - DNA, 20 bp, Artificial Sequence
  Description of Artificial Sequence: Synthetic oligonucleotide
  Target: ATXN2; (-) strand; PAM type: NNGRRT; PAM sequence: GTGAAT
tagtgacttcttacggtaca

SEQ ID NO: 8867 - DNA, 20 bp, Artificial Sequence
  Description of Artificial Sequence: Synthetic oligonucleotide
  Target: ATXN2; (-) strand; PAM type: NNGRRT; PAM sequence: ATGAAT
atattcatgcatatatgcaa

SEQ ID NO: 8868 - DNA, 20 bp, Artificial Sequence
  Description of Artificial Sequence: Synthetic oligonucleotide
  Target: ATXN2; (-) strand; PAM type: NNGRRT; PAM sequence: ATGAGT
tgctggggaaaccttttaac

SEQ ID NO: 8869 - DNA, 20 bp, Artificial Sequence
  Description of Artificial Sequence: Synthetic oligonucleotide
  Target: ATXN2; (-) strand; PAM type: NNGRRT; PAM sequence: TAGGAT
accttggcctcccaaagtgc

SEQ ID NO: 8870 - DNA, 20 bp, Artificial Sequence
  Description of Artificial Sequence: Synthetic oligonucleotide
  Target: ATXN2; (-) strand; PAM type: NNGRRT; PAM sequence: CGGGGT
ttttatatttttagtagaga

SEQ ID NO: 8871 - DNA, 20 bp, Artificial Sequence
  Description of Artificial Sequence: Synthetic oligonucleotide
  Target: ATXN2; (-) strand; PAM type: NNGRRT; PAM sequence: TGGGAT
gcctaagcctcccgaggagc

SEQ ID NO: 8872 - DNA, 20 bp, Artificial Sequence
  Description of Artificial Sequence: Synthetic oligonucleotide
  Target: ATXN2; (-) strand; PAM type: NNGRRT; PAM sequence: TGGAGT
tctcgctctgtcacccaggc

SEQ ID NO: 8873 - DNA, 20 bp, Artificial Sequence
  Description of Artificial Sequence: Synthetic oligonucleotide
  Target: ATXN2; (-) strand; PAM type: NNGRRT; PAM sequence: CGGAGT
gggaaacctttattttgagg

SEQ ID NO: 8874 - DNA, 20 bp, Artificial Sequence
  Description of Artificial Sequence: Synthetic oligonucleotide
  Target: ATXN2; (-) strand; PAM type: NNGRRT; PAM sequence: TGGGAT
gcctaggcctcccaaagtgc

SEQ ID NO: 8875 - DNA, 20 bp, Artificial Sequence
  Description of Artificial Sequence: Synthetic oligonucleotide
  Target: ATXN2; (-) strand; PAM type: NNGRRT; PAM sequence: CTGGGT
ctttgtatttttagtagaga

SEQ ID NO: 8876 - DNA, 20 bp, Artificial Sequence
  Description of Artificial Sequence: Synthetic oligonucleotide
  Target: ATXN2; (-) strand; PAM type: NNGRRT; PAM sequence: TGGGAT
atctcagcctcccgagtagc

SEQ ID NO: 8877 - DNA, 20 bp, Artificial Sequence
  Description of Artificial Sequence: Synthetic oligonucleotide
  Target: ATXN2; (-) strand; PAM type: NNGRRT; PAM sequence: CCGAGT
gattctcctatctcagcctc

SEQ ID NO: 8878 - DNA, 20 bp, Artificial Sequence
  Description of Artificial Sequence: Synthetic oligonucleotide
  Target: ATXN2; (-) strand; PAM type: NNGRRT; PAM sequence: CTGGGT
ctcactgcaacctccgcctt

SEQ ID NO: 8879 - DNA, 20 bp, Artificial Sequence
  Description of Artificial Sequence: Synthetic oligonucleotide
  Target: ATXN2; (-) strand; PAM type: NNGRRT; PAM sequence: TGGAGT
tttgctcttgtcgcccaggc

SEQ ID NO: 8880 - DNA, 20 bp, Artificial Sequence
  Description of Artificial Sequence: Synthetic oligonucleotide
  Target: ATXN2; (-) strand; PAM type: NNGRRT; PAM sequence: CGGAGT
cttttttgttttccttggga

SEQ ID NO: 8881 - DNA, 20 bp, Artificial Sequence
  Description of Artificial Sequence: Synthetic oligonucleotide
  Target: ATXN2; (-) strand; PAM type: NNGRRT; PAM sequence: AAGGAT
agtaagttccatggttgtta

SEQ ID NO: 8882 - DNA, 20 bp, Artificial Sequence
  Description of Artificial Sequence: Synthetic oligonucleotide
  Target: ATXN2; (-) strand; PAM type: NNGRRT; PAM sequence: TGGGAT
acctgggcctcccaaattgc

SEQ ID NO: 8883 - DNA, 20 bp, Artificial Sequence
  Description of Artificial Sequence: Synthetic oligonucleotide
  Target: ATXN2; (-) strand; PAM type: NNGRRT; PAM sequence: TGGGGT
ttttgtatttttagtagaga

SEQ ID NO: 8884 - DNA, 20 bp, Artificial Sequence
  Description of Artificial Sequence: Synthetic oligonucleotide
  Target: ATXN2; (-) strand; PAM type: NNGRRT; PAM sequence: CCGGGT
acaggcacgtaccaccacac

SEQ ID NO: 8885 - DNA, 20 bp, Artificial Sequence
  Description of Artificial Sequence: Synthetic oligonucleotide
  Target: ATXN2; (-) strand; PAM type: NNGRRT; PAM sequence: TGGGAT
gcttcagcctccctaataac

SEQ ID NO: 8886 - DNA, 20 bp, Artificial Sequence
  Description of Artificial Sequence: Synthetic oligonucleotide
  Target: ATXN2; (-) strand; PAM type: NNGRRT; PAM sequence: CTGGGT
cgcactgcaacctccacctc

SEQ ID NO: 8887 - DNA, 20 bp, Artificial Sequence
  Description of Artificial Sequence: Synthetic oligonucleotide
  Target: ATXN2; (-) strand; PAM type: NNGRRT; PAM sequence: CTGGGT
gtcttgctctgtcgcccagg

SEQ ID NO: 8888 - DNA, 20 bp, Artificial Sequence
  Description of Artificial Sequence: Synthetic oligonucleotide
  Target: ATXN2; (-) strand; PAM type: NNGRRT; PAM sequence: CAGAGT
tttgtttgtttgttttgaga

SEQ ID NO: 8889 - DNA, 20 bp, Artificial Sequence
  Description of Artificial Sequence: Synthetic oligonucleotide
  Target: ATXN2; (-) strand; PAM type: NNGRRT; PAM sequence: TCGAAT
tttatctcagttgtcataag

SEQ ID NO: 8890 - DNA, 20 bp, Artificial Sequence
  Description of Artificial Sequence: Synthetic oligonucleotide
  Target: ATXN2; (-) strand; PAM type: NNGRRT; PAM sequence: TTGAGT
ttgataatattaactaaaat

SEQ ID NO: 8891 - DNA, 20 bp, Artificial Sequence
  Description of Artificial Sequence: Synthetic oligonucleotide
  Target: ATXN2; (-) strand; PAM type: NNGRRT; PAM sequence: ATGAAT
attgtattttcctaaaagat

SEQ ID NO: 8892 - DNA, 20 bp, Artificial Sequence
  Description of Artificial Sequence: Synthetic oligonucleotide
  Target: ATXN2; (-) strand; PAM type: NNGRRT; PAM sequence: TAGAGT
aatagaagtggatgaatgat

SEQ ID NO: 8893 - DNA, 20 bp, Artificial Sequence
  Description of Artificial Sequence: Synthetic oligonucleotide
  Target: ATXN2; (-) strand; PAM type: NNGRRT; PAM sequence: ATGAAT
gttttttataatagaagtgg

SEQ ID NO: 8894 - DNA, 20 bp, Artificial Sequence
  Description of Artificial Sequence: Synthetic oligonucleotide
  Target: ATXN2; (-) strand; PAM type: NNGRRT; PAM sequence: GTGGAT
gagtgttttttataatagaa

SEQ ID NO: 8895 - DNA, 20 bp, Artificial Sequence
  Description of Artificial Sequence: Synthetic oligonucleotide
  Target: ATXN2; (-) strand; PAM type: NNGRRT; PAM sequence: TAGAGT
ccacatcttgaatggataga

SEQ ID NO: 8896 - DNA, 20 bp, Artificial Sequence
  Description of Artificial Sequence: Synthetic oligonucleotide
  Target: ATXN2; (-) strand; PAM type: NNGRRT; PAM sequence: ATGGAT
agtacttttccacatcttga

SEQ ID NO: 8897 - DNA, 20 bp, Artificial Sequence
  Description of Artificial Sequence: Synthetic oligonucleotide
  Target: ATXN2; (-) strand; PAM type: NNGRRT; PAM sequence: TTGAAT
tgatagtacttttccacatc

SEQ ID NO: 8898 - DNA, 20 bp, Artificial Sequence
  Description of Artificial Sequence: Synthetic oligonucleotide
  Target: ATXN2; (-) strand; PAM type: NNGRRT; PAM sequence: CAGAAT
tcacagtcccctttctgtct

SEQ ID NO: 8899 - DNA, 20 bp, Artificial Sequence
  Description of Artificial Sequence: Synthetic oligonucleotide
  Target: ATXN2; (-) strand; PAM type: NNGRRT; PAM sequence: AAGAAT
cctgggcaacagaataaaaa

SEQ ID NO: 8900 - DNA, 20 bp, Artificial Sequence
  Description of Artificial Sequence: Synthetic oligonucleotide
  Target: ATXN2; (-) strand; PAM type: NNGRRT; PAM sequence: CAGAAT
ctgcactccagcctgggcaa

SEQ ID NO: 8901 - DNA, 20 bp, Artificial Sequence
  Description of Artificial Sequence: Synthetic oligonucleotide
  Target: ATXN2; (-) strand; PAM type: NNGRRT; PAM sequence: AAGAAT
ttggggagaggctgaggcag

SEQ ID NO: 8902 - DNA, 20 bp, Artificial Sequence
  Description of Artificial Sequence: Synthetic oligonucleotide
  Target: ATXN2; (-) strand; PAM type: NNGRRT; PAM sequence: AGGAGT
tgggcagatcatttgaggtc

SEQ ID NO: 8903 - DNA, 20 bp, Artificial Sequence
  Description of Artificial Sequence: Synthetic oligonucleotide
  Target: ATXN2; (-) strand; PAM type: NNGRRT; PAM sequence: GAGAAT
tggctctgttctgtggcctt

SEQ ID NO: 8904 - DNA, 20 bp, Artificial Sequence
  Description of Artificial Sequence: Synthetic oligonucleotide
  Target: ATXN2; (-) strand; PAM type: NNGRRT; PAM sequence: AGGAGT
gtttcatgtgatgagatccc

SEQ ID NO: 8905 - DNA, 20 bp, Artificial Sequence
  Description of Artificial Sequence: Synthetic oligonucleotide
  Target: ATXN2; (-) strand; PAM type: NNGRRT; PAM sequence: ATGGGT
ggacagtcagggtgtgagct

SEQ ID NO: 8906 - DNA, 20 bp, Artificial Sequence
  Description of Artificial Sequence: Synthetic oligonucleotide
  Target: ATXN2; (-) strand; PAM type: NNGRRT; PAM sequence: CAGGGT
tgggtgaggctctggacagt

SEQ ID NO: 8907 - DNA, 20 bp, Artificial Sequence
  Description of Artificial Sequence: Synthetic oligonucleotide
  Target: ATXN2; (-) strand; PAM type: NNGRRT; PAM sequence: CTGGGT
ctggtttaattataattagc

SEQ ID NO: 8908 - DNA, 20 bp, Artificial Sequence
  Description of Artificial Sequence: Synthetic oligonucleotide
  Target: ATXN2; (-) strand; PAM type: NNGRRT; PAM sequence: AGGGAT
ttaaaaatgttctcacttct

SEQ ID NO: 8909 - DNA, 20 bp, Artificial Sequence
  Description of Artificial Sequence: Synthetic oligonucleotide
  Target: ATXN2; (-) strand; PAM type: NNGRRT; PAM sequence: GGGAGT
ggttcacgtttagtcacctg

SEQ ID NO: 8910 - DNA, 20 bp, Artificial Sequence
  Description of Artificial Sequence: Synthetic oligonucleotide
  Target: ATXN2; (-) strand; PAM type: NNGRRT; PAM sequence: CTGGGT
ttaatcaatgcttcttaatg

SEQ ID NO: 8911 - DNA, 20 bp, Artificial Sequence
  Description of Artificial Sequence: Synthetic oligonucleotide
  Target: ATXN2; (-) strand; PAM type: NNGRRT; PAM sequence: CTGGGT
gtttgtattcttagtacaga

SEQ ID NO: 8912 - DNA, 20 bp, Artificial Sequence
  Description of Artificial Sequence: Synthetic oligonucleotide
  Target: ATXN2; (-) strand; PAM type: NNGRRT; PAM sequence: TGGGAT
gcctcagcctcccgagtagc

SEQ ID NO: 8913 - DNA, 20 bp, Artificial Sequence
  Description of Artificial Sequence: Synthetic oligonucleotide
  Target: ATXN2; (-) strand; PAM type: NNGRRT; PAM sequence: CCGAGT
gattctcctgcctcagcctc

SEQ ID NO: 8914 - DNA, 20 bp, Artificial Sequence
  Description of Artificial Sequence: Synthetic oligonucleotide
  Target: ATXN2; (-) strand; PAM type: NNGRRT; PAM sequence: CTGGGT
ctcactgcaacctctgcctc

SEQ ID NO: 8915 - DNA, 20 bp, Artificial Sequence
  Description of Artificial Sequence: Synthetic oligonucleotide
  Target: ATXN2; (-) strand; PAM type: NNGRRT; PAM sequence: TGGAGT
tctcactctatttcccaggc

SEQ ID NO: 8916 - DNA, 20 bp, Artificial Sequence
  Description of Artificial Sequence: Synthetic oligonucleotide
  Target: ATXN2; (-) strand; PAM type: NNGRRT; PAM sequence: TGGAGT
tttttttttttatttcgaga

SEQ ID NO: 8917 - DNA, 20 bp, Artificial Sequence
  Description of Artificial Sequence: Synthetic oligonucleotide
  Target: ATXN2; (-) strand; PAM type: NNGRRT; PAM sequence: TAGAAT
cagtatggagaaaaccattt

SEQ ID NO: 8918 - DNA, 20 bp, Artificial Sequence
  Description of Artificial Sequence: Synthetic oligonucleotide
  Target: ATXN2; (-) strand; PAM type: NNGRRT; PAM sequence: GTGAAT
tcaaaacttacagtggttta

SEQ ID NO: 8919 - DNA, 20 bp, Artificial Sequence
  Description of Artificial Sequence: Synthetic oligonucleotide
  Target: ATXN2; (-) strand; PAM type: NNGRRT; PAM sequence: TGGGAT
gccttggcctcccagagtgc

SEQ ID NO: 8920 - DNA, 20 bp, Artificial Sequence
  Description of Artificial Sequence: Synthetic oligonucleotide
  Target: ATXN2; (-) strand; PAM type: NNGRRT; PAM sequence: CAGAGT
atcctcctgccttggcctcc

SEQ ID NO: 8921 - DNA, 20 bp, Artificial Sequence
  Description of Artificial Sequence: Synthetic oligonucleotide
  Target: ATXN2; (-) strand; PAM type: NNGRRT; PAM sequence: CGGGGT
ttttgtatttttagtagaga

SEQ ID NO: 8922 - DNA, 20 bp, Artificial Sequence
  Description of Artificial Sequence: Synthetic oligonucleotide
  Target: ATXN2; (-) strand; PAM type: NNGRRT; PAM sequence: CCGAGT
gattctcttgcctcagcctc

SEQ ID NO: 8923 - DNA, 20 bp, Artificial Sequence
  Description of Artificial Sequence: Synthetic oligonucleotide
  Target: ATXN2; (-) strand; PAM type: NNGRRT; PAM sequence: CTGGGT
ctcaccgcaacctctgcctc

SEQ ID NO: 8924 - DNA, 20 bp, Artificial Sequence
  Description of Artificial Sequence: Synthetic oligonucleotide
  Target: ATXN2; (-) strand; PAM type: NNGRRT; PAM sequence: TGGAGT
tttcgctctgttgcccaggc

SEQ ID NO: 8925 - DNA, 20 bp, Artificial Sequence
  Description of Artificial Sequence: Synthetic oligonucleotide
  Target: ATXN2; (-) strand; PAM type: NNGRRT; PAM sequence: CGGAGT
tttttttttttttttggaga

SEQ ID NO: 8926 - DNA, 20 bp, Artificial Sequence
  Description of Artificial Sequence: Synthetic oligonucleotide
  Target: ATXN2; (-) strand; PAM type: NNGRRT; PAM sequence: TGGAGT
ttgatgaggacatccactat

SEQ ID NO: 8927 - DNA, 20 bp, Artificial Sequence
  Description of Artificial Sequence: Synthetic oligonucleotide
  Target: ATXN2; (-) strand; PAM type: NNGRRT; PAM sequence: ATGGGT
ctcactctactcataagggg

SEQ ID NO: 8928 - DNA, 20 bp, Artificial Sequence
  Description of Artificial Sequence: Synthetic oligonucleotide
  Target: ATXN2; (-) strand; PAM type: NNGRRT; PAM sequence: GGGGAT
aaatctcactctactcataa

SEQ ID NO: 8929 - DNA, 20 bp, Artificial Sequence
  Description of Artificial Sequence: Synthetic oligonucleotide
  Target: ATXN2; (-) strand; PAM type: NNGRRT; PAM sequence: CAGAGT
aaaggcaagaaaatacagat

SEQ ID NO: 8930 - DNA, 20 bp, Artificial Sequence
  Description of Artificial Sequence: Synthetic oligonucleotide
  Target: ATXN2; (-) strand; PAM type: NNGRRT; PAM sequence: GTGAAT
tatttcccaaatgtggaaga

SEQ ID NO: 8931 - DNA, 20 bp, Artificial Sequence
  Description of Artificial Sequence: Synthetic oligonucleotide
  Target: ATXN2; (-) strand; PAM type: NNGRRT; PAM sequence: AAGAGT
ttgatatttcccaaatgtgg

SEQ ID NO: 8932 - DNA, 20 bp, Artificial Sequence
  Description of Artificial Sequence: Synthetic oligonucleotide
  Target: ATXN2; (-) strand; PAM type: NNGRRT; PAM sequence: ATGAAT
attgtctttttgtttttatg

SEQ ID NO: 8933 - DNA, 20 bp, Artificial Sequence
  Description of Artificial Sequence: Synthetic oligonucleotide
  Target: ATXN2; (-) strand; PAM type: NNGRRT; PAM sequence: TTGGAT
aaaaaaggttccctactcta

SEQ ID NO: 8934 - DNA, 20 bp, Artificial Sequence
  Description of Artificial Sequence: Synthetic oligonucleotide
  Target: ATXN2; (-) strand; PAM type: NNGRRT; PAM sequence: AAGAGT
ttaatacatagcactctgga

SEQ ID NO: 8935 - DNA, 20 bp, Artificial Sequence
  Description of Artificial Sequence: Synthetic oligonucleotide
  Target: ATXN2; (-) strand; PAM type: NNGRRT; PAM sequence: TTGAAT
tttggaagataaaattttag

SEQ ID NO: 8936 - DNA, 20 bp, Artificial Sequence
  Description of Artificial Sequence: Synthetic oligonucleotide
  Target: ATXN2; (-) strand; PAM type: NNGRRT; PAM sequence: TGGAGT
ctttttttagctgctacctt

SEQ ID NO: 8937 - DNA, 20 bp, Artificial Sequence
  Description of Artificial Sequence: Synthetic oligonucleotide
  Target: ATXN2; (-) strand; PAM type: NNGRRT; PAM sequence: TTGAAT
gaaagcacagtgttctgttt

SEQ ID NO: 8938 - DNA, 20 bp, Artificial Sequence
  Description of Artificial Sequence: Synthetic oligonucleotide
  Target: ATXN2; (-) strand; PAM type: NNGRRT; PAM sequence: CTGGGT
tttttcagaggctaacagta

SEQ ID NO: 8939 - DNA, 20 bp, Artificial Sequence
  Description of Artificial Sequence: Synthetic oligonucleotide
  Target: ATXN2; (-) strand; PAM type: NNGRRT; PAM sequence: AGGAGT
ggattctttctcttagactt

SEQ ID NO: 8940 - DNA, 20 bp, Artificial Sequence
  Description of Artificial Sequence: Synthetic oligonucleotide
  Target: ATXN2; (-) strand; PAM type: NNGRRT; PAM sequence: CAGGAT
acttggaaataataatatac

SEQ ID NO: 8941 - DNA, 20 bp, Artificial Sequence
  Description of Artificial Sequence: Synthetic oligonucleotide
  Target: ATXN2; (-) strand; PAM type: NNGRRT; PAM sequence: TGGAAT
gcctcggcctcccaaagtgc

SEQ ID NO: 8942 - DNA, 20 bp, Artificial Sequence
  Description of Artificial Sequence: Synthetic oligonucleotide
  Target: ATXN2; (-) strand; PAM type: NNGRRT; PAM sequence: CAGGAT
cagggtttcaccatgttggc

SEQ ID NO: 8943 - DNA, 20 bp, Artificial Sequence
  Description of Artificial Sequence: Synthetic oligonucleotide
  Target: ATXN2; (-) strand; PAM type: NNGRRT; PAM sequence: CAGGGT
ttttgtattttttgtagaga

SEQ ID NO: 8944 - DNA, 20 bp, Artificial Sequence
  Description of Artificial Sequence: Synthetic oligonucleotide
  Target: ATXN2; (-) strand; PAM type: NNGRRT; PAM sequence: CTGAGT
gattctcctgcctcagcctc

SEQ ID NO: 8945 - DNA, 20 bp, Artificial Sequence
  Description of Artificial Sequence: Synthetic oligonucleotide
  Target: ATXN2; (-) strand; PAM type: NNGRRT; PAM sequence: TGGAGT
gtcttgttctgtcccctggg

SEQ ID NO: 8946 - DNA, 20 bp, Artificial Sequence
  Description of Artificial Sequence: Synthetic oligonucleotide
  Target: ATXN2; (-) strand; PAM type: NNGRRT; PAM sequence: CTGGGT
acggagtcttgttctgtccc

SEQ ID NO: 8947 - DNA, 20 bp, Artificial Sequence
  Description of Artificial Sequence: Synthetic oligonucleotide
  Target: ATXN2; (-) strand; PAM type: NNGRRT; PAM sequence: CGGAGT
ttttttttttttttttgaga

SEQ ID NO: 8948 - DNA, 20 bp, Artificial Sequence
  Description of Artificial Sequence: Synthetic oligonucleotide
  Target: ATXN2; (-) strand; PAM type: NNGRRT; PAM sequence: TTGAGT
tactcatttgcaaggcatta

SEQ ID NO: 8949 - DNA, 20 bp, Artificial Sequence
  Description of Artificial Sequence: Synthetic oligonucleotide
  Target: ATXN2; (-) strand; PAM type: NNGRRT; PAM sequence: GGGAAT
tgtccattgatgaacaaagt

SEQ ID NO: 8950 - DNA, 20 bp, Artificial Sequence
  Description of Artificial Sequence: Synthetic oligonucleotide
  Target: ATXN2; (-) strand; PAM type: NNGRRT; PAM sequence: GAGAAT
agagtatgagacaaggtttt

SEQ ID NO: 8951 - DNA, 20 bp, Artificial Sequence
  Description of Artificial Sequence: Synthetic oligonucleotide
  Target: ATXN2; (-) strand; PAM type: NNGRRT; PAM sequence: CAGAGT
atacgtattttaaaaatatt

SEQ ID NO: 8952 - DNA, 20 bp, Artificial Sequence
  Description of Artificial Sequence: Synthetic oligonucleotide
  Target: ATXN2; (-) strand; PAM type: NNGRRT; PAM sequence: AAGGGT
attgtctaatgaaaatgaaa

SEQ ID NO: 8953 - DNA, 20 bp, Artificial Sequence
  Description of Artificial Sequence: Synthetic oligonucleotide
  Target: ATXN2; (-) strand; PAM type: NNGRRT; PAM sequence: AAGAAT
ttttctacagttttgtggtc

SEQ ID NO: 8954 - DNA, 20 bp, Artificial Sequence
  Description of Artificial Sequence: Synthetic oligonucleotide
  Target: ATXN2; (-) strand; PAM type: NNGRRT; PAM sequence: TAGAGT
aactttagagaaaaattaaa

SEQ ID NO: 8955 - DNA, 20 bp, Artificial Sequence
  Description of Artificial Sequence: Synthetic oligonucleotide
  Target: ATXN2; (-) strand; PAM type: NNGRRT; PAM sequence: GAGAAT
aggtaattttttagaaaaat

SEQ ID NO: 8956 - DNA, 20 bp, Artificial Sequence
  Description of Artificial Sequence: Synthetic oligonucleotide
  Target: ATXN2; (-) strand; PAM type: NNGRRT; PAM sequence: TAGAAT
aaaaagaaatatctactttc

SEQ ID NO: 8957 - DNA, 20 bp, Artificial Sequence
  Description of Artificial Sequence: Synthetic oligonucleotide
  Target: ATXN2; (-) strand; PAM type: NNGRRT; PAM sequence: CTGGGT
ccgcaccactgcactccagc

SEQ ID NO: 8958 - DNA, 20 bp, Artificial Sequence
  Description of Artificial Sequence: Synthetic oligonucleotide
  Target: ATXN2; (-) strand; PAM type: NNGRRT; PAM sequence: CAGAAT
agctactagggaggctgaga

SEQ ID NO: 8959 - DNA, 20 bp, Artificial Sequence
  Description of Artificial Sequence: Synthetic oligonucleotide
  Target: ATXN2; (-) strand; PAM type: NNGRRT; PAM sequence: AGGAGT
cgggtggatcacctgaggtc

SEQ ID NO: 8960 - DNA, 20 bp, Artificial Sequence
  Description of Artificial Sequence: Synthetic oligonucleotide
  Target: ATXN2; (-) strand; PAM type: NNGRRT; PAM sequence: GTGGAT
acttagggaggctgaggcgg

SEQ ID NO: 8961 - DNA, 20 bp, Artificial Sequence
  Description of Artificial Sequence: Synthetic oligonucleotide
  Target: ATXN2; (-) strand; PAM type: NNGRRT; PAM sequence: GCGGGT
tagcacttagggaggctgag

SEQ ID NO: 8962 - DNA, 20 bp, Artificial Sequence
  Description of Artificial Sequence: Synthetic oligonucleotide
  Target: ATXN2; (-) strand; PAM type: NNGRRT; PAM sequence: CTGGGT
tttttaaagaaatatctggg

SEQ ID NO: 8963 - DNA, 20 bp, Artificial Sequence
  Description of Artificial Sequence: Synthetic oligonucleotide
  Target: ATXN2; (-) strand; PAM type: NNGRRT; PAM sequence: GTGGGT
ctccagttatgcaaaaagag

SEQ ID NO: 8964 - DNA, 20 bp, Artificial Sequence
  Description of Artificial Sequence: Synthetic oligonucleotide
  Target: ATXN2; (-) strand; PAM type: NNGRRT; PAM sequence: GAGAGT
cgaaacgtgaagaaataatg

SEQ ID NO: 8965 - DNA, 20 bp, Artificial Sequence
  Description of Artificial Sequence: Synthetic oligonucleotide
  Target: ATXN2; (-) strand; PAM type: NNGRRT; PAM sequence: CAGAAT
tgccgcacatgagaaaagta

SEQ ID NO: 8966 - DNA, 20 bp, Artificial Sequence
  Description of Artificial Sequence: Synthetic oligonucleotide
  Target: ATXN2; (-) strand; PAM type: NNGRRT; PAM sequence: TGGAGT
aattttattttgtaaaggtt

SEQ ID NO: 8967 - DNA, 20 bp, Artificial Sequence
  Description of Artificial Sequence: Synthetic oligonucleotide
  Target: ATXN2; (-) strand; PAM type: NNGRRT; PAM sequence: AAGAAT
actggtaccttgatgagcta

SEQ ID NO: 8968 - DNA, 20 bp, Artificial Sequence
  Description of Artificial Sequence: Synthetic oligonucleotide
  Target: ATXN2; (-) strand; PAM type: NNGRRT; PAM sequence: AAGGGT
tagatcatatgcctgggaaa

SEQ ID NO: 8969 - DNA, 20 bp, Artificial Sequence
  Description of Artificial Sequence: Synthetic oligonucleotide
  Target: ATXN2; (-) strand; PAM type: NNGRRT; PAM sequence: ATGGAT
gaggatttttaaatgatgga

SEQ ID NO: 8970 - DNA, 20 bp, Artificial Sequence
  Description of Artificial Sequence: Synthetic oligonucleotide
  Target: ATXN2; (-) strand; PAM type: NNGRRT; PAM sequence: TGGAAT
atatgaggatttttaaatga

SEQ ID NO: 8971 - DNA, 20 bp, Artificial Sequence
  Description of Artificial Sequence: Synthetic oligonucleotide
  Target: ATXN2; (-) strand; PAM type: NNGRRT; PAM sequence: GAGGAT
aacaaaaaacatttagatat

SEQ ID NO: 8972 - DNA, 20 bp, Artificial Sequence
  Description of Artificial Sequence: Synthetic oligonucleotide
  Target: ATXN2; (-) strand; PAM type: NNGRRT; PAM sequence: AGGGAT
taagcattgtgagctaatag

SEQ ID NO: 8973 - DNA, 20 bp, Artificial Sequence
  Description of Artificial Sequence: Synthetic oligonucleotide
  Target: ATXN2; (-) strand; PAM type: NNGRRT; PAM sequence: TTGAAT
acctagtttttaaagccact

SEQ ID NO: 8974 - DNA, 20 bp, Artificial Sequence
  Description of Artificial Sequence: Synthetic oligonucleotide
  Target: ATXN2; (-) strand; PAM type: NNGRRT; PAM sequence: AGGAGT
aaaaatggaggtatatatga

SEQ ID NO: 8975 - DNA, 20 bp, Artificial Sequence
  Description of Artificial Sequence: Synthetic oligonucleotide
  Target: ATXN2; (-) strand; PAM type: NNGRRT; PAM sequence: CCGGGT
aaaacaaatatccctggtga

SEQ ID NO: 8976 - DNA, 20 bp, Artificial Sequence
  Description of Artificial Sequence: Synthetic oligonucleotide
  Target: ATXN2; (-) strand; PAM type: NNGRRT; PAM sequence: TTGAAT
ttgttagtgaatacctaata

SEQ ID NO: 8977 - DNA, 20 bp, Artificial Sequence
  Description of Artificial Sequence: Synthetic oligonucleotide
  Target: ATXN2; (-) strand; PAM type: NNGRRT; PAM sequence: GTGAAT
atttttttattgttttgtta

SEQ ID NO: 8978 - DNA, 20 bp, Artificial Sequence
  Description of Artificial Sequence: Synthetic oligonucleotide
  Target: ATXN2; (-) strand; PAM type: NNGRRT; PAM sequence: AAGAGT
agagcctcctgaagaatttc

SEQ ID NO: 8979 - DNA, 20 bp, Artificial Sequence
  Description of Artificial Sequence: Synthetic oligonucleotide
  Target: ATXN2; (-) strand; PAM type: NNGRRT; PAM sequence: AAGAAT
actctgagtagagcctcctg

SEQ ID NO: 8980 - DNA, 20 bp, Artificial Sequence
  Description of Artificial Sequence: Synthetic oligonucleotide
  Target: ATXN2; (-) strand; PAM type: NNGRRT; PAM sequence: CTGAGT
taaaattcgtactgcaaact

SEQ ID NO: 8981 - DNA, 20 bp, Artificial Sequence
  Description of Artificial Sequence: Synthetic oligonucleotide
  Target: ATXN2; (-) strand; PAM type: NNGRRT; PAM sequence: TGGGGT
attttgtcacttaaaatagc

SEQ ID NO: 8982 - DNA, 20 bp, Artificial Sequence
  Description of Artificial Sequence: Synthetic oligonucleotide
  Target: ATXN2; (-) strand; PAM type: NNGRRT; PAM sequence: GAGAAT
ggatagtttaaagtatttgg

SEQ ID NO: 8983 - DNA, 20 bp, Artificial Sequence
  Description of Artificial Sequence: Synthetic oligonucleotide
  Target: ATXN2; (-) strand; PAM type: NNGRRT; PAM sequence: AGGGAT
ttaggtattacaagtaattt

SEQ ID NO: 8984 - DNA, 20 bp, Artificial Sequence
  Description of Artificial Sequence: Synthetic oligonucleotide
  Target: ATXN2; (-) strand; PAM type: NNGRRT; PAM sequence: GAGGAT
gacttgggaggctgacgtgg

SEQ ID NO: 8985 - DNA, 20 bp, Artificial Sequence
  Description of Artificial Sequence: Synthetic oligonucleotide
  Target: ATXN2; (-) strand; PAM type: NNGRRT; PAM sequence: GGGAGT
gcctgtaatcccagcacttt

SEQ ID NO: 8986 - DNA, 20 bp, Artificial Sequence
  Description of Artificial Sequence: Synthetic oligonucleotide
  Target: ATXN2; (-) strand; PAM type: NNGRRT; PAM sequence: TTGGAT
attcatggattcagccaacc

SEQ ID NO: 8987 - DNA, 20 bp, Artificial Sequence
  Description of Artificial Sequence: Synthetic oligonucleotide
  Target: ATXN2; (-) strand; PAM type: NNGRRT; PAM sequence: ATGGAT
catctgtgggttccatattc

SEQ ID NO: 8988 - DNA, 20 bp, Artificial Sequence
  Description of Artificial Sequence: Synthetic oligonucleotide
  Target: ATXN2; (-) strand; PAM type: NNGRRT; PAM sequence: GTGGGT
acagttggtcctctgcatct

SEQ ID NO: 8989 - DNA, 20 bp, Artificial Sequence
  Description of Artificial Sequence: Synthetic oligonucleotide
  Target: ATXN2; (-) strand; PAM type: NNGRRT; PAM sequence: CAGGAT
ttgcttagatcatgtttagt

SEQ ID NO: 8990 - DNA, 20 bp, Artificial Sequence
  Description of Artificial Sequence: Synthetic oligonucleotide
  Target: ATXN2; (-) strand; PAM type: NNGRRT; PAM sequence: GTGGAT
taattccatgaagttaaaat

SEQ ID NO: 8991 - DNA, 20 bp, Artificial Sequence
  Description of Artificial Sequence: Synthetic oligonucleotide
  Target: ATXN2; (-) strand; PAM type: NNGRRT; PAM sequence: TAGAAT
gggataaactgccttggggg

SEQ ID NO: 8992 - DNA, 20 bp, Artificial Sequence
  Description of Artificial Sequence: Synthetic oligonucleotide
  Target: ATXN2; (-) strand; PAM type: NNGRRT; PAM sequence: GGGGGT
tattggggataaactgcctt

SEQ ID NO: 8993 - DNA, 20 bp, Artificial Sequence
  Description of Artificial Sequence: Synthetic oligonucleotide
  Target: ATXN2; (-) strand; PAM type: NNGRRT; PAM sequence: GGGGAT
ttgtaagttattagattatt

SEQ ID NO: 8994 - DNA, 20 bp, Artificial Sequence
  Description of Artificial Sequence: Synthetic oligonucleotide
  Target: ATXN2; (-) strand; PAM type: NNGRRT; PAM sequence: GAGGAT
gatggaatctatgcaaatat

SEQ ID NO: 8995 - DNA, 20 bp, Artificial Sequence
  Description of Artificial Sequence: Synthetic oligonucleotide
  Target: ATXN2; (-) strand; PAM type: NNGRRT; PAM sequence: TGGAAT
atattccagatttcttttga

SEQ ID NO: 8996 - DNA, 20 bp, Artificial Sequence
  Description of Artificial Sequence: Synthetic oligonucleotide
  Target: ATXN2; (-) strand; PAM type: NNGRRT; PAM sequence: AGGGAT
aaaatttcatattttgaatt

SEQ ID NO: 8997 - DNA, 20 bp, Artificial Sequence
  Description of Artificial Sequence: Synthetic oligonucleotide
  Target: ATXN2; (-) strand; PAM type: NNGRRT; PAM sequence: TTGAAT
atgctccaaaatttcatatt

SEQ ID NO: 8998 - DNA, 20 bp, Artificial Sequence
  Description of Artificial Sequence: Synthetic oligonucleotide
  Target: ATXN2; (-) strand; PAM type: NNGRRT; PAM sequence: GTGAGT
ccttcttagggtacatttct

SEQ ID NO: 8999 - DNA, 20 bp, Artificial Sequence
  Description of Artificial Sequence: Synthetic oligonucleotide
  Target: ATXN2; (-) strand; PAM type: NNGRRT; PAM sequence: TAGGGT
tatttatacttcacccttct

SEQ ID NO: 9000 - DNA, 20 bp, Artificial Sequence
  Description of Artificial Sequence: Synthetic oligonucleotide
  Target: ATXN2; (-) strand; PAM type: NNGRRT; PAM sequence: CAGGGT
atatgctgggagaacctagt

SEQ ID NO: 9001 - DNA, 20 bp, Artificial Sequence
  Description of Artificial Sequence: Synthetic oligonucleotide
  Target: ATXN2; (-) strand; PAM type: NNGRRT; PAM sequence: TGGAGT
acacgtatatggtagtaata

SEQ ID NO: 9002 - DNA, 20 bp, Artificial Sequence
  Description of Artificial Sequence: Synthetic oligonucleotide
  Target: ATXN2; (-) strand; PAM type: NNGRRT; PAM sequence: AAGAAT
cctttattagattgttttac

SEQ ID NO: 9003 - DNA, 20 bp, Artificial Sequence
  Description of Artificial Sequence: Synthetic oligonucleotide
  Target: ATXN2; (-) strand; PAM type: NNGRRT; PAM sequence: TGGAAT
ggctttctggtcttaaattt

SEQ ID NO: 9004 - DNA, 20 bp, Artificial Sequence
  Description of Artificial Sequence: Synthetic oligonucleotide
  Target: ATXN2; (-) strand; PAM type: NNGRRT; PAM sequence: TTGAAT
agttctttatgctttttatt

SEQ ID NO: 9005 - DNA, 20 bp, Artificial Sequence
  Description of Artificial Sequence: Synthetic oligonucleotide
  Target: ATXN2; (-) strand; PAM type: NNGRRT; PAM sequence: CAGAGT
aacaccaagagtggagtctg

SEQ ID NO: 9006 - DNA, 20 bp, Artificial Sequence
  Description of Artificial Sequence: Synthetic oligonucleotide
  Target: ATXN2; (-) strand; PAM type: NNGRRT; PAM sequence: TGGAGT
gatacgtagaacaccaagag

SEQ ID NO: 9007 - DNA, 20 bp, Artificial Sequence
  Description of Artificial Sequence: Synthetic oligonucleotide
  Target: ATXN2; (-) strand; PAM type: NNGRRT; PAM sequence: AAGAGT
caaaagatacgtagaacacc

SEQ ID NO: 9008 - DNA, 20 bp, Artificial Sequence
  Description of Artificial Sequence: Synthetic oligonucleotide
  Target: ATXN2; (-) strand; PAM type: NNGRRT; PAM sequence: TTGGGT
attataattaaagataagat

SEQ ID NO: 9009 - DNA, 20 bp, Artificial Sequence
  Description of Artificial Sequence: Synthetic oligonucleotide
  Target: ATXN2; (-) strand; PAM type: NNGRRT; PAM sequence: GAGAAT
tggtcttgcccttgacacac

SEQ ID NO: 9010 - DNA, 20 bp, Artificial Sequence
  Description of Artificial Sequence: Synthetic oligonucleotide
  Target: ATXN2; (-) strand; PAM type: NNGRRT; PAM sequence: CTGGGT
taataaagatatacctaaga

SEQ ID NO: 9011 - DNA, 20 bp, Artificial Sequence
  Description of Artificial Sequence: Synthetic oligonucleotide
  Target: ATXN2; (-) strand; PAM type: NNGRRT; PAM sequence: TTGAAT
aggcaaaagattcccttctt

SEQ ID NO: 9012 - DNA, 20 bp, Artificial Sequence
  Description of Artificial Sequence: Synthetic oligonucleotide
  Target: ATXN2; (-) strand; PAM type: NNGRRT; PAM sequence: GTGAGT
aaggactgcctcagtctacg

SEQ ID NO: 9013 - DNA, 20 bp, Artificial Sequence
  Description of Artificial Sequence: Synthetic oligonucleotide
  Target: ATXN2; (-) strand; PAM type: NNGRRT; PAM sequence: TTGAAT
ttttcagcttatttagcctg

SEQ ID NO: 9014 - DNA, 20 bp, Artificial Sequence
  Description of Artificial Sequence: Synthetic oligonucleotide
  Target: ATXN2; (-) strand; PAM type: NNGRRT; PAM sequence: TGGAAT
tagcctctcctttatttgaa

SEQ ID NO: 9015 - DNA, 20 bp, Artificial Sequence
  Description of Artificial Sequence: Synthetic oligonucleotide
  Target: ATXN2; (-) strand; PAM type: NNGRRT; PAM sequence: TTGAAT
acagatagcctctcctttat

SEQ ID NO: 9016 - DNA, 20 bp, Artificial Sequence
  Description of Artificial Sequence: Synthetic oligonucleotide
  Target: ATXN2; (-) strand; PAM type: NNGRRT; PAM sequence: GTGGGT
ttctatgacccctacctgtt

SEQ ID NO: 9017 - DNA, 20 bp, Artificial Sequence
  Description of Artificial Sequence: Synthetic oligonucleotide
  Target: ATXN2; (-) strand; PAM type: NNGRRT; PAM sequence: CTGAGT
ggtgatcctgcctcagcctc

SEQ ID NO: 9018 - DNA, 20 bp, Artificial Sequence
  Description of Artificial Sequence: Synthetic oligonucleotide
  Target: ATXN2; (-) strand; PAM type: NNGRRT; PAM sequence: TGGAAT
tcgcccaggctagactgcag

SEQ ID NO: 9019 - DNA, 20 bp, Artificial Sequence
  Description of Artificial Sequence: Synthetic oligonucleotide
  Target: ATXN2; (-) strand; PAM type: NNGRRT; PAM sequence: CAGAGT
taaagattattatttagaga

SEQ ID NO: 9020 - DNA, 20 bp, Artificial Sequence
  Description of Artificial Sequence: Synthetic oligonucleotide
  Target: ATXN2; (-) strand; PAM type: NNGRRT; PAM sequence: GGGAGT
taacagtgattggttacttt

SEQ ID NO: 9021 - DNA, 20 bp, Artificial Sequence
  Description of Artificial Sequence: Synthetic oligonucleotide
  Target: ATXN2; (-) strand; PAM type: NNGRRT; PAM sequence: CTGAAT
atataatccgtgttttgctt

SEQ ID NO: 9022 - DNA, 20 bp, Artificial Sequence
  Description of Artificial Sequence: Synthetic oligonucleotide
  Target: ATXN2; (-) strand; PAM type: NNGRRT; PAM sequence: AAGAAT
tcatctgtgttggttaaatc

SEQ ID NO: 9023 - DNA, 20 bp, Artificial Sequence
  Description of Artificial Sequence: Synthetic oligonucleotide
  Target: ATXN2; (-) strand; PAM type: NNGRRT; PAM sequence: TGGGAT
acctctgcctcccaaagtgc

SEQ ID NO: 9024 - DNA, 20 bp, Artificial Sequence
  Description of Artificial Sequence: Synthetic oligonucleotide
  Target: ATXN2; (-) strand; PAM type: NNGRRT; PAM sequence: CAGGAT
tggggtttcactgtgttagc

SEQ ID NO: 9025 - DNA, 20 bp, Artificial Sequence
  Description of Artificial Sequence: Synthetic oligonucleotide
  Target: ATXN2; (-) strand; PAM type: NNGRRT; PAM sequence: TGGGGT
ttttttattcttagtagaga

SEQ ID NO: 9026 - DNA, 20 bp, Artificial Sequence
  Description of Artificial Sequence: Synthetic oligonucleotide
  Target: ATXN2; (-) strand; PAM type: NNGRRT; PAM sequence: TGGAGT
tcttgctctgtcaccccggc

SEQ ID NO: 9027 - DNA, 20 bp, Artificial Sequence
  Description of Artificial Sequence: Synthetic oligonucleotide
  Target: ATXN2; (-) strand; PAM type: NNGRRT; PAM sequence: CAGAGT
ttctttttttttttttgaga

SEQ ID NO: 9028 - DNA, 20 bp, Artificial Sequence
  Description of Artificial Sequence: Synthetic oligonucleotide
  Target: ATXN2; (-) strand; PAM type: NNGRRT; PAM sequence: TTGAAT
tatttagaaatgaaagtgct

SEQ ID NO: 9029 - DNA, 20 bp, Artificial Sequence
  Description of Artificial Sequence: Synthetic oligonucleotide
  Target: ATXN2; (-) strand; PAM type: NNGRRT; PAM sequence: GAGAGT
actgcatcttttctgaggga

SEQ ID NO: 9030 - DNA, 20 bp, Artificial Sequence
  Description of Artificial Sequence: Synthetic oligonucleotide
  Target: ATXN2; (-) strand; PAM type: NNGRRT; PAM sequence: TAGAAT
ttctataattcacttgaaaa

SEQ ID NO: 9031 - DNA, 20 bp, Artificial Sequence
  Description of Artificial Sequence: Synthetic oligonucleotide
  Target: ATXN2; (-) strand; PAM type: NNGRRT; PAM sequence: TGGAAT
aggggcctaatctttttcag

SEQ ID NO: 9032 - DNA, 20 bp, Artificial Sequence
  Description of Artificial Sequence: Synthetic oligonucleotide
  Target: ATXN2; (-) strand; PAM type: NNGRRT; PAM sequence: TTGAGT
tgaatgttttgaattttggc

SEQ ID NO: 9033 - DNA, 20 bp, Artificial Sequence
  Description of Artificial Sequence: Synthetic oligonucleotide
  Target: ATXN2; (-) strand; PAM type: NNGRRT; PAM sequence: TTGAAT
tgtgcttttccttgaatgtt

SEQ ID NO: 9034 - DNA, 20 bp, Artificial Sequence
  Description of Artificial Sequence: Synthetic oligonucleotide
  Target: ATXN2; (-) strand; PAM type: NNGRRT; PAM sequence: TTGAAT
gatctgaattgtgcttttcc

SEQ ID NO: 9035 - DNA, 20 bp, Artificial Sequence
  Description of Artificial Sequence: Synthetic oligonucleotide
  Target: ATXN2; (-) strand; PAM type: NNGRRT; PAM sequence: CTGAAT
tgttactagactttttggat

SEQ ID NO: 9036 - DNA, 20 bp, Artificial Sequence
  Description of Artificial Sequence: Synthetic oligonucleotide
  Target: ATXN2; (-) strand; PAM type: NNGRRT; PAM sequence: TTGGAT
cagtcgtgttactagacttt

SEQ ID NO: 9037 - DNA, 20 bp, Artificial Sequence
  Description of Artificial Sequence: Synthetic oligonucleotide
  Target: ATXN2; (-) strand; PAM type: NNGRRT; PAM sequence: AGGGAT
aatgttaagagtactcttct

SEQ ID NO: 9038 - DNA, 20 bp, Artificial Sequence
  Description of Artificial Sequence: Synthetic oligonucleotide
  Target: ATXN2; (-) strand; PAM type: NNGRRT; PAM sequence: AAGAGT
aggactggcctcagaatgtt

SEQ ID NO: 9039 - DNA, 20 bp, Artificial Sequence
  Description of Artificial Sequence: Synthetic oligonucleotide
  Target: ATXN2; (-) strand; PAM type: NNGRRT; PAM sequence: CAGAAT
gaccaagctaggactggcct

SEQ ID NO: 9040 - DNA, 20 bp, Artificial Sequence
  Description of Artificial Sequence: Synthetic oligonucleotide
  Target: ATXN2; (-) strand; PAM type: NNGRRT; PAM sequence: CAGAGT
aagaaagtgaggaaaagtga

SEQ ID NO: 9041 - DNA, 20 bp, Artificial Sequence
  Description of Artificial Sequence: Synthetic oligonucleotide
  Target: ATXN2; (-) strand; PAM type: NNGRRT; PAM sequence: CTGGAT
taattcaagtccattgtttt

SEQ ID NO: 9042 - DNA, 20 bp, Artificial Sequence
  Description of Artificial Sequence: Synthetic oligonucleotide
  Target: ATXN2; (-) strand; PAM type: NNGRRT; PAM sequence: AGGAAT
attagaatgttagaaatgaa

SEQ ID NO: 9043 - DNA, 20 bp, Artificial Sequence
  Description of Artificial Sequence: Synthetic oligonucleotide
  Target: ATXN2; (-) strand; PAM type: NNGRRT; PAM sequence: TAGAAT
gaggcaaacagttacagaat

SEQ ID NO: 9044 - DNA, 20 bp, Artificial Sequence
  Description of Artificial Sequence: Synthetic oligonucleotide
  Target: ATXN2; (-) strand; PAM type: NNGRRT; PAM sequence: CAGAAT
atgtttgaggcaaacagtta

SEQ ID NO: 9045 - DNA, 20 bp, Artificial Sequence
  Description of Artificial Sequence: Synthetic oligonucleotide
  Target: ATXN2; (-) strand; PAM type: NNGRRT; PAM sequence: AGGAAT
agtcatattccttagacttc

SEQ ID NO: 9046 - DNA, 20 bp, Artificial Sequence
  Description of Artificial Sequence: Synthetic oligonucleotide
  Target: ATXN2; (-) strand; PAM type: NNGRRT; PAM sequence: CTGGAT
ccagctctactgctcatgaa

SEQ ID NO: 9047 - DNA, 20 bp, Artificial Sequence
  Description of Artificial Sequence: Synthetic oligonucleotide
  Target: ATXN2; (-) strand; PAM type: NNGRRT; PAM sequence: TGGAAT
aggaatgaaaaacttagacg

SEQ ID NO: 9048 - DNA, 20 bp, Artificial Sequence
  Description of Artificial Sequence: Synthetic oligonucleotide
  Target: ATXN2; (-) strand; PAM type: NNGRRT; PAM sequence: AGGAAT
ccagagaggcagcataacct

SEQ ID NO: 9049 - DNA, 20 bp, Artificial Sequence
  Description of Artificial Sequence: Synthetic oligonucleotide
  Target: ATXN2; (-) strand; PAM type: NNGRRT; PAM sequence: TAGAAT
aaatgatgtttgaaaaagca

SEQ ID NO: 9050 - DNA, 20 bp, Artificial Sequence
  Description of Artificial Sequence: Synthetic oligonucleotide
  Target: ATXN2; (-) strand; PAM type: NNGRRT; PAM sequence: CAGGAT
cttggcatctcagcagccac

SEQ ID NO: 9051 - DNA, 20 bp, Artificial Sequence
  Description of Artificial Sequence: Synthetic oligonucleotide
  Target: ATXN2; (-) strand; PAM type: NNGRRT; PAM sequence: ATGAGT
tagctttgtagggaggccat

SEQ ID NO: 9052 - DNA, 20 bp, Artificial Sequence
  Description of Artificial Sequence: Synthetic oligonucleotide
  Target: ATXN2; (-) strand; PAM type: NNGRRT; PAM sequence: GGGGAT
aacagtgtgacttatttaaa

SEQ ID NO: 9053 - DNA, 20 bp, Artificial Sequence
  Description of Artificial Sequence: Synthetic oligonucleotide
  Target: ATXN2; (-) strand; PAM type: NNGRRT; PAM sequence: TTGAGT
tggttgaatgattcgttctt

SEQ ID NO: 9054 - DNA, 20 bp, Artificial Sequence
  Description of Artificial Sequence: Synthetic oligonucleotide
  Target: ATXN2; (-) strand; PAM type: NNGRRT; PAM sequence: TTGAAT
atatgataatattttcctgg

SEQ ID NO: 9055 - DNA, 20 bp, Artificial Sequence
  Description of Artificial Sequence: Synthetic oligonucleotide
  Target: ATXN2; (-) strand; PAM type: NNGRRT; PAM sequence: TTGGGT
tcgatatgctaacattcctg

SEQ ID NO: 9056 - DNA, 20 bp, Artificial Sequence
  Description of Artificial Sequence: Synthetic oligonucleotide
  Target: ATXN2; (-) strand; PAM type: NNGRRT; PAM sequence: GAGAAT
ttagacttcagtggatttca

SEQ ID NO: 9057 - DNA, 20 bp, Artificial Sequence
  Description of Artificial Sequence: Synthetic oligonucleotide
  Target: ATXN2; (-) strand; PAM type: NNGRRT; PAM sequence: GTGGAT
aaacaagaatttagacttca

SEQ ID NO: 9058 - DNA, 20 bp, Artificial Sequence
  Description of Artificial Sequence: Synthetic oligonucleotide
  Target: ATXN2; (-) strand; PAM type: NNGRRT; PAM sequence: AAGAAT
gaatggatacaaaaagaaac

SEQ ID NO: 9059 - DNA, 20 bp, Artificial Sequence
  Description of Artificial Sequence: Synthetic oligonucleotide
  Target: ATXN2; (-) strand; PAM type: NNGRRT; PAM sequence: ATGGAT
aaaagtaaagcataacttga

SEQ ID NO: 9060 - DNA, 20 bp, Artificial Sequence
  Description of Artificial Sequence: Synthetic oligonucleotide
  Target: ATXN2; (-) strand; PAM type: NNGRRT; PAM sequence: TTGAAT
gattaaaagtaaagcataac

SEQ ID NO: 9061 - DNA, 20 bp, Artificial Sequence
  Description of Artificial Sequence: Synthetic oligonucleotide
  Target: ATXN2; (-) strand; PAM type: NNGRRT; PAM sequence: CTGGAT
actattaaaagcatagagtc

SEQ ID NO: 9062 - DNA, 20 bp, Artificial Sequence
  Description of Artificial Sequence: Synthetic oligonucleotide
  Target: ATXN2; (-) strand; PAM type: NNGRRT; PAM sequence: TAGAGT
tttggcaactattaaaagca

SEQ ID NO: 9063 - DNA, 20 bp, Artificial Sequence
  Description of Artificial Sequence: Synthetic oligonucleotide
  Target: ATXN2; (-) strand; PAM type: NNGRRT; PAM sequence: TTGAAT
actggcattttaagtcacac

SEQ ID NO: 9064 - DNA, 20 bp, Artificial Sequence
  Description of Artificial Sequence: Synthetic oligonucleotide
  Target: ATXN2; (-) strand; PAM type: NNGRRT; PAM sequence: TGGGAT
gcctcagcctcctaaagtgc

SEQ ID NO: 9065 - DNA, 20 bp, Artificial Sequence
  Description of Artificial Sequence: Synthetic oligonucleotide
  Target: ATXN2; (-) strand; PAM type: NNGRRT; PAM sequence: CAGGGT
ttttttattttttgtagaaa

SEQ ID NO: 9066 - DNA, 20 bp, Artificial Sequence
  Description of Artificial Sequence: Synthetic oligonucleotide
  Target: ATXN2; (-) strand; PAM type: NNGRRT; PAM sequence: TGGAGT
ttttgctctgtcaccaatgc

SEQ ID NO: 9067 - DNA, 20 bp, Artificial Sequence
  Description of Artificial Sequence: Synthetic oligonucleotide
  Target: ATXN2; (-) strand; PAM type: NNGRRT; PAM sequence: CAGGGT
tagttaattattttttgaga

SEQ ID NO: 9068 - DNA, 20 bp, Artificial Sequence
  Description of Artificial Sequence: Synthetic oligonucleotide
  Target: ATXN2; (-) strand; PAM type: NNGRRT; PAM sequence: CAGAAT
ggaaattgtgtgaaagtaga

SEQ ID NO: 9069 - DNA, 20 bp, Artificial Sequence
  Description of Artificial Sequence: Synthetic oligonucleotide
  Target: ATXN2; (-) strand; PAM type: NNGRRT; PAM sequence: CTGGAT
tatgttgcatttactgcatt

SEQ ID NO: 9070 - DNA, 20 bp, Artificial Sequence
  Description of Artificial Sequence: Synthetic oligonucleotide
  Target: ATXN2; (-) strand; PAM type: NNGRRT; PAM sequence: CAGAGT
actgcactccagcctggcga

SEQ ID NO: 9071 - DNA, 20 bp, Artificial Sequence
  Description of Artificial Sequence: Synthetic oligonucleotide
  Target: ATXN2; (-) strand; PAM type: NNGRRT; PAM sequence: AAGAAT
ggtgaaaccccgtctctact

SEQ ID NO: 9072 - DNA, 20 bp, Artificial Sequence
  Description of Artificial Sequence: Synthetic oligonucleotide
  Target: ATXN2; (-) strand; PAM type: NNGRRT; PAM sequence: GTGGAT
actttgggaggctgaggtgg

SEQ ID NO: 9073 - DNA, 20 bp, Artificial Sequence
  Description of Artificial Sequence: Synthetic oligonucleotide
  Target: ATXN2; (-) strand; PAM type: NNGRRT; PAM sequence: GTGGGT
cagcactttgggaggctgag

SEQ ID NO: 9074 - DNA, 20 bp, Artificial Sequence
  Description of Artificial Sequence: Synthetic oligonucleotide
  Target: ATXN2; (-) strand; PAM type: NNGRRT; PAM sequence: TGGGAT
acctcggcctcccaaagtgc

SEQ ID NO: 9075 - DNA, 20 bp, Artificial Sequence
  Description of Artificial Sequence: Synthetic oligonucleotide
  Target: ATXN2; (-) strand; PAM type: NNGRRT; PAM sequence: CGGGGT
ttttctatttttagtagaaa

SEQ ID NO: 9076 - DNA, 20 bp, Artificial Sequence
  Description of Artificial Sequence: Synthetic oligonucleotide
  Target: ATXN2; (-) strand; PAM type: NNGRRT; PAM sequence: TGGGAT
tctcagcctccccaaatatc

SEQ ID NO: 9077 - DNA, 20 bp, Artificial Sequence
  Description of Artificial Sequence: Synthetic oligonucleotide
  Target: ATXN2; (-) strand; PAM type: NNGRRT; PAM sequence: CCGGGT
ctcactggaacctccacttc

SEQ ID NO: 9078 - DNA, 20 bp, Artificial Sequence
  Description of Artificial Sequence: Synthetic oligonucleotide
  Target: ATXN2; (-) strand; PAM type: NNGRRT; PAM sequence: TGGAGT
tcttgctctgtcgcccaggc

SEQ ID NO: 9079 - DNA, 20 bp, Artificial Sequence
  Description of Artificial Sequence: Synthetic oligonucleotide
  Target: ATXN2; (-) strand; PAM type: NNGRRT; PAM sequence: GTGAGT
aatttctttgggaagagatt

SEQ ID NO: 9080 - DNA, 20 bp, Artificial Sequence
  Description of Artificial Sequence: Synthetic oligonucleotide
  Target: ATXN2; (-) strand; PAM type: NNGRRT; PAM sequence: AGGAGT
aaatttgttccaatccacag

SEQ ID NO: 9081 - DNA, 20 bp, Artificial Sequence
  Description of Artificial Sequence: Synthetic oligonucleotide
  Target: ATXN2; (-) strand; PAM type: NNGRRT; PAM sequence: AGGGAT
tcaaatttgcgcttctttga

SEQ ID NO: 9082 - DNA, 20 bp, Artificial Sequence
  Description of Artificial Sequence: Synthetic oligonucleotide
  Target: ATXN2; (-) strand; PAM type: NNGRRT; PAM sequence: GAGGAT
aatctcgagtgattgaatct

SEQ ID NO: 9083 - DNA, 20 bp, Artificial Sequence
  Description of Artificial Sequence: Synthetic oligonucleotide
  Target: ATXN2; (-) strand; PAM type: NNGRRT; PAM sequence: TTGAAT
gtgtttttaatctcgagtga

SEQ ID NO: 9084 - DNA, 20 bp, Artificial Sequence
  Description of Artificial Sequence: Synthetic oligonucleotide
  Target: ATXN2; (-) strand; PAM type: NNGRRT; PAM sequence: TCGAGT
atttttaagtgtttttaatc

SEQ ID NO: 9085 - DNA, 20 bp, Artificial Sequence
  Description of Artificial Sequence: Synthetic oligonucleotide
  Target: ATXN2; (-) strand; PAM type: NNGRRT; PAM sequence: ATGGAT
cccgttggatataaaaattt

SEQ ID NO: 9086 - DNA, 20 bp, Artificial Sequence
  Description of Artificial Sequence: Synthetic oligonucleotide
  Target: ATXN2; (-) strand; PAM type: NNGRRT; PAM sequence: TTGGAT
ttggtcccaggacccccccg

SEQ ID NO: 9087 - DNA, 20 bp, Artificial Sequence
  Description of Artificial Sequence: Synthetic oligonucleotide
  Target: ATXN2; (-) strand; PAM type: NNGRRT; PAM sequence: GGGGAT
gtcatttcttggtgtccttg

SEQ ID NO: 9088 - DNA, 20 bp, Artificial Sequence
  Description of Artificial Sequence: Synthetic oligonucleotide
  Target: ATXN2; (-) strand; PAM type: NNGRRT; PAM sequence: TAGAAT
gggtatgcctaccatcactc

SEQ ID NO: 9089 - DNA, 20 bp, Artificial Sequence
  Description of Artificial Sequence: Synthetic oligonucleotide
  Target: ATXN2; (-) strand; PAM type: NNGRRT; PAM sequence: TTGGGT
agttttcttgggatgcagcc

SEQ ID NO: 9090 - DNA, 20 bp, Artificial Sequence
  Description of Artificial Sequence: Synthetic oligonucleotide
  Target: ATXN2; (-) strand; PAM type: NNGRRT; PAM sequence: TGGGAT
acgtctgatgctagttttct

SEQ ID NO: 9091 - DNA, 20 bp, Artificial Sequence
  Description of Artificial Sequence: Synthetic oligonucleotide
  Target: ATXN2; (-) strand; PAM type: NNGRRT; PAM sequence: CTGAAT
cttatttgtctaatgactgg

SEQ ID NO: 9092 - DNA, 20 bp, Artificial Sequence
  Description of Artificial Sequence: Synthetic oligonucleotide
  Target: ATXN2; (-) strand; PAM type: NNGRRT; PAM sequence: GGGGGT
tacctcattagcctatggtt

SEQ ID NO: 9093 - DNA, 20 bp, Artificial Sequence
  Description of Artificial Sequence: Synthetic oligonucleotide
  Target: ATXN2; (-) strand; PAM type: NNGRRT; PAM sequence: CTGGAT
ttttaagtaatgtagtaact

SEQ ID NO: 9094 - DNA, 20 bp, Artificial Sequence
  Description of Artificial Sequence: Synthetic oligonucleotide
  Target: ATXN2; (-) strand; PAM type: NNGRRT; PAM sequence: TGGGGT
ctacttctttttccagtggg

SEQ ID NO: 9095 - DNA, 20 bp, Artificial Sequence
  Description of Artificial Sequence: Synthetic oligonucleotide
  Target: ATXN2; (-) strand; PAM type: NNGRRT; PAM sequence: GTGGGT
attgcctacttctttttcca

SEQ ID NO: 9096 - DNA, 20 bp, Artificial Sequence
  Description of Artificial Sequence: Synthetic oligonucleotide
  Target: ATXN2; (-) strand; PAM type: NNGRRT; PAM sequence: GTGAGT
ggagtgctgggattacaggc

SEQ ID NO: 9097 - DNA, 20 bp, Artificial Sequence
  Description of Artificial Sequence: Synthetic oligonucleotide
  Target: ATXN2; (-) strand; PAM type: NNGRRT; PAM sequence: TGGGAT
gccttggcctcctggagtgc

SEQ ID NO: 9098 - DNA, 20 bp, Artificial Sequence
  Description of Artificial Sequence: Synthetic oligonucleotide
  Target: ATXN2; (-) strand; PAM type: NNGRRT; PAM sequence: TGGAGT
ttcagcccgccttggcctcc

SEQ ID NO: 9099 - DNA, 20 bp, Artificial Sequence
  Description of Artificial Sequence: Synthetic oligonucleotide
  Target: ATXN2; (-) strand; PAM type: NNGRRT; PAM sequence: TGGGGT
ttttgtatttttagtagaga

SEQ ID NO: 9100 - DNA, 20 bp, Artificial Sequence
  Description of Artificial Sequence: Synthetic oligonucleotide
  Target: ATXN2; (-) strand; PAM type: NNGRRT; PAM sequence: CTGAGT
cattgtcctgccttagcctc

SEQ ID NO: 9101 - DNA, 20 bp, Artificial Sequence
  Description of Artificial Sequence: Synthetic oligonucleotide
  Target: ATXN2; (-) strand; PAM type: NNGRRT; PAM sequence: TGGAGT
tctcgctgtattgcccaggc

SEQ ID NO: 9102 - DNA, 20 bp, Artificial Sequence
  Description of Artificial Sequence: Synthetic oligonucleotide
  Target: ATXN2; (-) strand; PAM type: NNGRRT; PAM sequence: CGGAGT
tttattttttttttttgagg

SEQ ID NO: 9103 - DNA, 20 bp, Artificial Sequence
  Description of Artificial Sequence: Synthetic oligonucleotide
  Target: ATXN2; (-) strand; PAM type: NNGRRT; PAM sequence: TGGGAT
gccttggcctcccaaagtgc

SEQ ID NO: 9104 - DNA, 20 bp, Artificial Sequence
  Description of Artificial Sequence: Synthetic oligonucleotide
  Target: ATXN2; (-) strand; PAM type: NNGRRT; PAM sequence: TGGAGT
ttttgtatatctagtagtga

SEQ ID NO: 9105 - DNA, 20 bp, Artificial Sequence
  Description of Artificial Sequence: Synthetic oligonucleotide
  Target: ATXN2; (-) strand; PAM type: NNGRRT; PAM sequence: TGGGAT
gccacctcctcctgaatagt

SEQ ID NO: 9106 - DNA, 20 bp, Artificial Sequence
  Description of Artificial Sequence: Synthetic oligonucleotide
  Target: ATXN2; (-) strand; PAM type: NNGRRT; PAM sequence: CTGAAT
cctccctcagccacctcctc

SEQ ID NO: 9107 - DNA, 20 bp, Artificial Sequence
  Description of Artificial Sequence: Synthetic oligonucleotide
  Target: ATXN2; (-) strand; PAM type: NNGRRT; PAM sequence: CTGGGT
ctcactgcagcctccacctc

SEQ ID NO: 9108 - DNA, 20 bp, Artificial Sequence
  Description of Artificial Sequence: Synthetic oligonucleotide
  Target: ATXN2; (-) strand; PAM type: NNGRRT; PAM sequence: TGGAGT
tttgctcttgttgcccaagc

SEQ ID NO: 9109 - DNA, 20 bp, Artificial Sequence
  Description of Artificial Sequence: Synthetic oligonucleotide
  Target: ATXN2; (-) strand; PAM type: NNGRRT; PAM sequence: GTGAGT
gagccactgtgcccagccaa

SEQ ID NO: 9110 - DNA, 20 bp, Artificial Sequence
  Description of Artificial Sequence: Synthetic oligonucleotide
  Target: ATXN2; (-) strand; PAM type: NNGRRT; PAM sequence: ATGAGT
cctcttgaagtggtgggatt

SEQ ID NO: 9111 - DNA, 20 bp, Artificial Sequence
  Description of Artificial Sequence: Synthetic oligonucleotide
  Target: ATXN2; (-) strand; PAM type: NNGRRT; PAM sequence: TGGGAT
gccttggcctcttgaagtgg

SEQ ID NO: 9112 - DNA, 20 bp, Artificial Sequence
  Description of Artificial Sequence: Synthetic oligonucleotide
  Target: ATXN2; (-) strand; PAM type: NNGRRT; PAM sequence: TGGAGT
ttttatagttttagtagagg

SEQ ID NO: 9113 - DNA, 20 bp, Artificial Sequence
  Description of Artificial Sequence: Synthetic oligonucleotide
  Target: ATXN2; (-) strand; PAM type: NNGRRT; PAM sequence: TGGGAT
gcctcagcctcccaagtagc

SEQ ID NO: 9114 - DNA, 20 bp, Artificial Sequence
  Description of Artificial Sequence: Synthetic oligonucleotide
  Target: ATXN2; (-) strand; PAM type: NNGRRT; PAM sequence: CTGAGT
agtggcatgaactccgcctc

SEQ ID NO: 9115 - DNA, 20 bp, Artificial Sequence
  Description of Artificial Sequence: Synthetic oligonucleotide
  Target: ATXN2; (-) strand; PAM type: NNGRRT; PAM sequence: CGGAGT
tctcaaaaaaaacagaaaga

SEQ ID NO: 9116 - DNA, 20 bp, Artificial Sequence
  Description of Artificial Sequence: Synthetic oligonucleotide
  Target: ATXN2; (-) strand; PAM type: NNGRRT; PAM sequence: GTGAGT
cccaggaggtggaggttgca

SEQ ID NO: 9117 - DNA, 20 bp, Artificial Sequence
  Description of Artificial Sequence: Synthetic oligonucleotide
  Target: ATXN2; (-) strand; PAM type: NNGRRT; PAM sequence: GAGAAT
tactcgggaggctgaggcag

SEQ ID NO: 9118 - DNA, 20 bp, Artificial Sequence
  Description of Artificial Sequence: Synthetic oligonucleotide
  Target: ATXN2; (-) strand; PAM type: NNGRRT; PAM sequence: GTGGAT
actttggaaggccgaggtgg

SEQ ID NO: 9119 - DNA, 20 bp, Artificial Sequence
  Description of Artificial Sequence: Synthetic oligonucleotide
  Target: ATXN2; (-) strand; PAM type: NNGRRT; PAM sequence: GTGGGT
cagcactttggaaggccgag

SEQ ID NO: 9120 - DNA, 20 bp, Artificial Sequence
  Description of Artificial Sequence: Synthetic oligonucleotide
  Target: ATXN2; (-) strand; PAM type: NNGRRT; PAM sequence: TGGAGT
ttctttttttttttttaagg

SEQ ID NO: 9121 - DNA, 20 bp, Artificial Sequence
  Description of Artificial Sequence: Synthetic oligonucleotide
  Target: ATXN2; (-) strand; PAM type: NNGRRT; PAM sequence: CTGGAT
tggtccttctgcctcagcct

SEQ ID NO: 9122 - DNA, 20 bp, Artificial Sequence
  Description of Artificial Sequence: Synthetic oligonucleotide
  Target: ATXN2; (-) strand; PAM type: NNGRRT; PAM sequence: CCGGGT
gctcaggatggtcttgaact

SEQ ID NO: 9123 - DNA, 20 bp, Artificial Sequence
  Description of Artificial Sequence: Synthetic oligonucleotide
  Target: ATXN2; (-) strand; PAM type: NNGRRT; PAM sequence: CAGGAT
tggggtcttgcgaagttgct

SEQ ID NO: 9124 - DNA, 20 bp, Artificial Sequence
  Description of Artificial Sequence: Synthetic oligonucleotide
  Target: ATXN2; (-) strand; PAM type: NNGRRT; PAM sequence: TGGGGT
ttttaaaactattttagaga

SEQ ID NO: 9125 - DNA, 20 bp, Artificial Sequence
  Description of Artificial Sequence: Synthetic oligonucleotide
  Target: ATXN2; (-) strand; PAM type: NNGRRT; PAM sequence: TGGAGT
tcctgctttgtcaccaaggc

SEQ ID NO: 9126 - DNA, 20 bp, Artificial Sequence
  Description of Artificial Sequence: Synthetic oligonucleotide
  Target: ATXN2; (-) strand; PAM type: NNGRRT; PAM sequence: TAGAGT
tctttttctcttttaagaga

SEQ ID NO: 9127 - DNA, 20 bp, Artificial Sequence
  Description of Artificial Sequence: Synthetic oligonucleotide
  Target: ATXN2; (-) strand; PAM type: NNGRRT; PAM sequence: TAGGAT
acctcagcctcccagagtgc

SEQ ID NO: 9128 - DNA, 20 bp, Artificial Sequence
  Description of Artificial Sequence: Synthetic oligonucleotide
  Target: ATXN2; (-) strand; PAM type: NNGRRT; PAM sequence: CAGAGT
atccacccacctcagcctcc

SEQ ID NO: 9129 - DNA, 20 bp, Artificial Sequence
  Description of Artificial Sequence: Synthetic oligonucleotide
  Target: ATXN2; (-) strand; PAM type: NNGRRT; PAM sequence: CAGGAT
ttttgtatgttcagtagaga

SEQ ID NO: 9130 - DNA, 20 bp, Artificial Sequence
  Description of Artificial Sequence: Synthetic oligonucleotide
  Target: ATXN2; (-) strand; PAM type: NNGRRT; PAM sequence: TGGGAT
gcgtcagcctcccgagtagc

SEQ ID NO: 9131 - DNA, 20 bp, Artificial Sequence
  Description of Artificial Sequence: Synthetic oligonucleotide
  Target: ATXN2; (-) strand; PAM type: NNGRRT; PAM sequence: CCGAGT
agttctcctgcgtcagcctc

SEQ ID NO: 9132 - DNA, 20 bp, Artificial Sequence
  Description of Artificial Sequence: Synthetic oligonucleotide
  Target: ATXN2; (-) strand; PAM type: NNGRRT; PAM sequence: CCGGGT
ctcactgcaacctctgcctc

SEQ ID NO: 9133 - DNA, 20 bp, Artificial Sequence
  Description of Artificial Sequence: Synthetic oligonucleotide
  Target: ATXN2; (-) strand; PAM type: NNGRRT; PAM sequence: TGGAGT
ttcgctcttattgcccaggc

SEQ ID NO: 9134 - DNA, 20 bp, Artificial Sequence
  Description of Artificial Sequence: Synthetic oligonucleotide
  Target: ATXN2; (-) strand; PAM type: NNGRRT; PAM sequence: TGGAGT
ttttttttttttttttgaga

SEQ ID NO: 9135 - DNA, 20 bp, Artificial Sequence
  Description of Artificial Sequence: Synthetic oligonucleotide
  Target: ATXN2; (-) strand; PAM type: NNGRRT; PAM sequence: GGGAGT
catttcatcagtatcttgtg

SEQ ID NO: 9136 - DNA, 20 bp, Artificial Sequence
  Description of Artificial Sequence: Synthetic oligonucleotide
  Target: ATXN2; (-) strand; PAM type: NNGRRT; PAM sequence: TAGAGT
gttaactttgatcacttggt

SEQ ID NO: 9137 - DNA, 20 bp, Artificial Sequence
  Description of Artificial Sequence: Synthetic oligonucleotide
  Target: ATXN2; (-) strand; PAM type: NNGRRT; PAM sequence: TGGGGT
gtatatatttatcccattac

SEQ ID NO: 9138 - DNA, 20 bp, Artificial Sequence
  Description of Artificial Sequence: Synthetic oligonucleotide
  Target: ATXN2; (-) strand; PAM type: NNGRRT; PAM sequence: AGGAAT
ttcagatatttatttttggc

SEQ ID NO: 9139 - DNA, 20 bp, Artificial Sequence
  Description of Artificial Sequence: Synthetic oligonucleotide
  Target: ATXN2; (-) strand; PAM type: NNGRRT; PAM sequence: TAGGGT
tttgtagactgtccctcaac

SEQ ID NO: 9140 - DNA, 20 bp, Artificial Sequence
  Description of Artificial Sequence: Synthetic oligonucleotide
  Target: ATXN2; (-) strand; PAM type: NNGRRT; PAM sequence: CAGGAT
cctctgtccaagaaccaatc

SEQ ID NO: 9141 - DNA, 20 bp, Artificial Sequence
  Description of Artificial Sequence: Synthetic oligonucleotide
  Target: ATXN2; (-) strand; PAM type: NNGRRT; PAM sequence: TGGAAT
atatattctacatatatatg

SEQ ID NO: 9142 - DNA, 20 bp, Artificial Sequence
  Description of Artificial Sequence: Synthetic oligonucleotide
  Target: ATXN2; (-) strand; PAM type: NNGRRT; PAM sequence: AAGAAT
aaaattgcaaagatattata

SEQ ID NO: 9143 - DNA, 20 bp, Artificial Sequence
  Description of Artificial Sequence: Synthetic oligonucleotide
  Target: ATXN2; (-) strand; PAM type: NNGRRT; PAM sequence: TAGAGT
gccttggacaatgcattaaa

SEQ ID NO: 9144 - DNA, 20 bp, Artificial Sequence
  Description of Artificial Sequence: Synthetic oligonucleotide
  Target: ATXN2; (-) strand; PAM type: NNGRRT; PAM sequence: TAGGAT
atttgagtttcaaggctgag

SEQ ID NO: 9145 - DNA, 20 bp, Artificial Sequence
  Description of Artificial Sequence: Synthetic oligonucleotide
  Target: ATXN2; (-) strand; PAM type: NNGRRT; PAM sequence: CTGAGT
atggcatttgagtttcaagg

SEQ ID NO: 9146 - DNA, 20 bp, Artificial Sequence
  Description of Artificial Sequence: Synthetic oligonucleotide
  Target: ATXN2; (-) strand; PAM type: NNGRRT; PAM sequence: TTGAGT
acttcctgaaaagatggcat

SEQ ID NO: 9147 - DNA, 20 bp, Artificial Sequence
  Description of Artificial Sequence: Synthetic oligonucleotide
  Target: ATXN2; (-) strand; PAM type: NNGRRT; PAM sequence: GAGAGT
tataatacagatctaaactg

SEQ ID NO: 9148 - DNA, 20 bp, Artificial Sequence
  Description of Artificial Sequence: Synthetic oligonucleotide
  Target: ATXN2; (-) strand; PAM type: NNGRRT; PAM sequence: GTGGGT
tcaggtgatggtcctgagta

SEQ ID NO: 9149 - DNA, 20 bp, Artificial Sequence
  Description of Artificial Sequence: Synthetic oligonucleotide
  Target: ATXN2; (-) strand; PAM type: NNGRRT; PAM sequence: CTGAGT
aatatggtcaggtgatggtc

SEQ ID NO: 9150 - DNA, 20 bp, Artificial Sequence
  Description of Artificial Sequence: Synthetic oligonucleotide
  Target: ATXN2; (-) strand; PAM type: NNGRRT; PAM sequence: ATGGAT
gagttcctgaccaagtgtga

SEQ ID NO: 9151 - DNA, 20 bp, Artificial Sequence
  Description of Artificial Sequence: Synthetic oligonucleotide
  Target: ATXN2; (-) strand; PAM type: NNGRRT; PAM sequence: GTGAAT
ccaagagttcctgaccaagt

SEQ ID NO: 9152 - DNA, 20 bp, Artificial Sequence
  Description of Artificial Sequence: Synthetic oligonucleotide
  Target: ATXN2; (-) strand; PAM type: NNGRRT; PAM sequence: AAGAGT
tgttaggttttcatttgtcc

SEQ ID NO: 9153 - DNA, 20 bp, Artificial Sequence
  Description of Artificial Sequence: Synthetic oligonucleotide
  Target: ATXN2; (-) strand; PAM type: NNGRRT; PAM sequence: GAGGAT
tttttttttttcttcagtgt

SEQ ID NO: 9154 - DNA, 20 bp, Artificial Sequence
  Description of Artificial Sequence: Synthetic oligonucleotide
  Target: ATXN2; (-) strand; PAM type: NNGRRT; PAM sequence: TTGAGT
gatcctctcacctgagcctt

SEQ ID NO: 9155 - DNA, 20 bp, Artificial Sequence
  Description of Artificial Sequence: Synthetic oligonucleotide
  Target: ATXN2; (-) strand; PAM type: NNGRRT; PAM sequence: CAGGGT
atctttcagtttttaaaaga

SEQ ID NO: 9156 - DNA, 20 bp, Artificial Sequence
  Description of Artificial Sequence: Synthetic oligonucleotide
  Target: ATXN2; (-) strand; PAM type: NNGRRT; PAM sequence: CAGAAT
ctggagtgttgcagctctta

SEQ ID NO: 9157 - DNA, 20 bp, Artificial Sequence
  Description of Artificial Sequence: Synthetic oligonucleotide
  Target: ATXN2; (-) strand; PAM type: NNGRRT; PAM sequence: TGGAGT
acaaaagagaaaagaagtac

SEQ ID NO: 9158 - DNA, 20 bp, Artificial Sequence
  Description of Artificial Sequence: Synthetic oligonucleotide
  Target: ATXN2; (-) strand; PAM type: NNGRRT; PAM sequence: TTGAGT
ggctgaggtaggaggatcac

SEQ ID NO: 9159 - DNA, 20 bp, Artificial Sequence
  Description of Artificial Sequence: Synthetic oligonucleotide
  Target: ATXN2; (-) strand; PAM type: NNGRRT; PAM sequence: GAGGAT
actttgggaggctgaggtag

SEQ ID NO: 9160 - DNA, 20 bp, Artificial Sequence
  Description of Artificial Sequence: Synthetic oligonucleotide
  Target: ATXN2; (-) strand; PAM type: NNGRRT; PAM sequence: GAGAAT
atataaagcattacttaaag

SEQ ID NO: 9161 - DNA, 20 bp, Artificial Sequence
  Description of Artificial Sequence: Synthetic oligonucleotide
  Target: ATXN2; (-) strand; PAM type: NNGRRT; PAM sequence: GTGGAT
tacgttttttttttcagtag

SEQ ID NO: 9162 - DNA, 20 bp, Artificial Sequence
  Description of Artificial Sequence: Synthetic oligonucleotide
  Target: ATXN2; (-) strand; PAM type: NNGRRT; PAM sequence: CAGAAT
tgaatttcaataaagcaaag

SEQ ID NO: 9163 - DNA, 20 bp, Artificial Sequence
  Description of Artificial Sequence: Synthetic oligonucleotide
  Target: ATXN2; (-) strand; PAM type: NNGRRT; PAM sequence: GTGAAT
ttgtcaaaaatgcagcatct

SEQ ID NO: 9164 - DNA, 20 bp, Artificial Sequence
  Description of Artificial Sequence: Synthetic oligonucleotide
  Target: ATXN2; (-) strand; PAM type: NNGRRT; PAM sequence: CGGGGT
actaatggacttgcccgact

SEQ ID NO: 9165 - DNA, 20 bp, Artificial Sequence
  Description of Artificial Sequence: Synthetic oligonucleotide
  Target: ATXN2; (-) strand; PAM type: NNGRRT; PAM sequence: GAGAAT
gaaaatattgtgagatttat

SEQ ID NO: 9166 - DNA, 20 bp, Artificial Sequence
  Description of Artificial Sequence: Synthetic oligonucleotide
  Target: ATXN2; (-) strand; PAM type: NNGRRT; PAM sequence: CAGGGT
tgtggtgccttaaaagaaat

SEQ ID NO: 9167 - DNA, 20 bp, Artificial Sequence
  Description of Artificial Sequence: Synthetic oligonucleotide
  Target: ATXN2; (-) strand; PAM type: NNGRRT; PAM sequence: TGGAGT
acaagctgactgctggttcg

SEQ ID NO: 9168 - DNA, 20 bp, Artificial Sequence
  Description of Artificial Sequence: Synthetic oligonucleotide
  Target: ATXN2; (-) strand; PAM type: NNGRRT; PAM sequence: GGGAAT
ttcaatattgttatatctca

SEQ ID NO: 9169 - DNA, 20 bp, Artificial Sequence
  Description of Artificial Sequence: Synthetic oligonucleotide
  Target: ATXN2; (-) strand; PAM type: NNGRRT; PAM sequence: TGGGAT
gccttggcctcccaaagtgc

SEQ ID NO: 9170 - DNA, 20 bp, Artificial Sequence
  Description of Artificial Sequence: Synthetic oligonucleotide
  Target: ATXN2; (-) strand; PAM type: NNGRRT; PAM sequence: TGGGGT
ttttgtatttttagtagaga

SEQ ID NO: 9171 - DNA, 20 bp, Artificial Sequence
  Description of Artificial Sequence: Synthetic oligonucleotide
  Target: ATXN2; (-) strand; PAM type: NNGRRT; PAM sequence: TGGGAT
gcctcagcttactgagtagc

SEQ ID NO: 9172 - DNA, 20 bp, Artificial Sequence
  Description of Artificial Sequence: Synthetic oligonucleotide
  Target: ATXN2; (-) strand; PAM type: NNGRRT; PAM sequence: CTGAGT
aattctcgtgcctcagctta

SEQ ID NO: 9173 - DNA, 20 bp, Artificial Sequence
  Description of Artificial Sequence: Synthetic oligonucleotide
  Target: ATXN2; (-) strand; PAM type: NNGRRT; PAM sequence: TGGAGT
tctcactctgtttcccagcg

SEQ ID NO: 9174 - DNA, 20 bp, Artificial Sequence
  Description of Artificial Sequence: Synthetic oligonucleotide
  Target: ATXN2; (-) strand; PAM type: NNGRRT; PAM sequence: CAGAAT
ttttttttttttttttgaga

SEQ ID NO: 9175 - DNA, 20 bp, Artificial Sequence
  Description of Artificial Sequence: Synthetic oligonucleotide
  Target: ATXN2; (-) strand; PAM type: NNGRRT; PAM sequence: CGGGGT
ttttgtatttttagtagagg

SEQ ID NO: 9176 - DNA, 20 bp, Artificial Sequence
  Description of Artificial Sequence: Synthetic oligonucleotide
  Target: ATXN2; (-) strand; PAM type: NNGRRT; PAM sequence: TGGGAT
gcctcagcctcctgagtagc

SEQ ID NO: 9177 - DNA, 20 bp, Artificial Sequence
  Description of Artificial Sequence: Synthetic oligonucleotide
  Target: ATXN2; (-) strand; PAM type: NNGRRT; PAM sequence: CTGAGT
aattctcctgcctcagcctc

SEQ ID NO: 9178 - DNA, 20 bp, Artificial Sequence
  Description of Artificial Sequence: Synthetic oligonucleotide
  Target: ATXN2; (-) strand; PAM type: NNGRRT; PAM sequence: CCGGGT
ctcaccgcaacctccgcctc

SEQ ID NO: 9179 - DNA, 20 bp, Artificial Sequence
  Description of Artificial Sequence: Synthetic oligonucleotide
  Target: ATXN2; (-) strand; PAM type: NNGRRT; PAM sequence: TGGAGT
tttgctcttgtcacccaggc

SEQ ID NO: 9180 - DNA, 20 bp, Artificial Sequence
  Description of Artificial Sequence: Synthetic oligonucleotide
  Target: ATXN2; (-) strand; PAM type: NNGRRT; PAM sequence: TGGAGT
ttttttctttttttttgaga

SEQ ID NO: 9181 - DNA, 20 bp, Artificial Sequence
  Description of Artificial Sequence: Synthetic oligonucleotide
  Target: ATXN2; (-) strand; PAM type: NNGRRT; PAM sequence: CAGAAT
gaatggcagtagtagcctta

SEQ ID NO: 9182 - DNA, 20 bp, Artificial Sequence
  Description of Artificial Sequence: Synthetic oligonucleotide
  Target: ATXN2; (-) strand; PAM type: NNGRRT; PAM sequence: ATGAAT
tttgccatcagagaatggct

SEQ ID NO: 9183 - DNA, 20 bp, Artificial Sequence
  Description of Artificial Sequence: Synthetic oligonucleotide
  Target: ATXN2; (-) strand; PAM type: NNGRRT; PAM sequence: GAGAAT
ttcaatttattttgccatca

SEQ ID NO: 9184 - DNA, 20 bp, Artificial Sequence
  Description of Artificial Sequence: Synthetic oligonucleotide
  Target: ATXN2; (-) strand; PAM type: NNGRRT; PAM sequence: GTGAAT
tctcagtggcatctagaatg

SEQ ID NO: 9185 - DNA, 20 bp, Artificial Sequence
  Description of Artificial Sequence: Synthetic oligonucleotide
  Target: ATXN2; (-) strand; PAM type: NNGRRT; PAM sequence: TAGAAT
atggcattctcagtggcatc

SEQ ID NO: 9186 - DNA, 20 bp, Artificial Sequence
  Description of Artificial Sequence: Synthetic oligonucleotide
  Target: ATXN2; (-) strand; PAM type: NNGRRT; PAM sequence: ATGGAT
tttaacctcctcccatgctc

SEQ ID NO: 9187 - DNA, 20 bp, Artificial Sequence
  Description of Artificial Sequence: Synthetic oligonucleotide
  Target: ATXN2; (-) strand; PAM type: NNGRRT; PAM sequence: GTGAGT
cctgggaggtggaggttgca

SEQ ID NO: 9188 - DNA, 20 bp, Artificial Sequence
  Description of Artificial Sequence: Synthetic oligonucleotide
  Target: ATXN2; (-) strand; PAM type: NNGRRT; PAM sequence: GAGAAT
tacttgggagactgaggcag

SEQ ID NO: 9189 - DNA, 20 bp, Artificial Sequence
  Description of Artificial Sequence: Synthetic oligonucleotide
  Target: ATXN2; (-) strand; PAM type: NNGRRT; PAM sequence: GGGGAT
ctaaaaatacaaaaattagc

SEQ ID NO: 9190 - DNA, 20 bp, Artificial Sequence
  Description of Artificial Sequence: Synthetic oligonucleotide
  Target: ATXN2; (-) strand; PAM type: NNGRRT; PAM sequence: AGGAGT
agggcggatcacctgaagtc

SEQ ID NO: 9191 - DNA, 20 bp, Artificial Sequence
  Description of Artificial Sequence: Synthetic oligonucleotide
  Target: ATXN2; (-) strand; PAM type: NNGRRT; PAM sequence: GCGGAT
actttgggaggccaaggagg

SEQ ID NO: 9192 - DNA, 20 bp, Artificial Sequence
  Description of Artificial Sequence: Synthetic oligonucleotide
  Target: ATXN2; (-) strand; PAM type: NNGRRT; PAM sequence: ATGAGT
tgaacccctcaaaatcattc

SEQ ID NO: 9193 - DNA, 20 bp, Artificial Sequence
  Description of Artificial Sequence: Synthetic oligonucleotide
  Target: ATXN2; (-) strand; PAM type: NNGRRT; PAM sequence: TGGAAT
caccacgcccggcctgtttc

SEQ ID NO: 9194 - DNA, 20 bp, Artificial Sequence
  Description of Artificial Sequence: Synthetic oligonucleotide
  Target: ATXN2; (-) strand; PAM type: NNGRRT; PAM sequence: TGGGAT
gcctcaacttcgcaaagtgc

SEQ ID NO: 9195 - DNA, 20 bp, Artificial Sequence
  Description of Artificial Sequence: Synthetic oligonucleotide
  Target: ATXN2; (-) strand; PAM type: NNGRRT; PAM sequence: CGGGGT
ttttgtatttttagtagaga

SEQ ID NO: 9196 - DNA, 20 bp, Artificial Sequence
  Description of Artificial Sequence: Synthetic oligonucleotide
  Target: ATXN2; (-) strand; PAM type: NNGRRT; PAM sequence: CTGAGT
gattctcctgcctcagcctc

SEQ ID NO: 9197 - DNA, 20 bp, Artificial Sequence
  Description of Artificial Sequence: Synthetic oligonucleotide
  Target: ATXN2; (-) strand; PAM type: NNGRRT; PAM sequence: CCGGGT
cttactgcaacctctgcctt

SEQ ID NO: 9198 - DNA, 20 bp, Artificial Sequence
  Description of Artificial Sequence: Synthetic oligonucleotide
  Target: ATXN2; (-) strand; PAM type: NNGRRT; PAM sequence: TGGAGT
tctcgctctgtctcccaggc

SEQ ID NO: 9199 - DNA, 20 bp, Artificial Sequence
  Description of Artificial Sequence: Synthetic oligonucleotide
  Target: ATXN2; (-) strand; PAM type: NNGRRT; PAM sequence: TGGGGT
gttcttttttttttttgaaa

SEQ ID NO: 9200 - DNA, 20 bp, Artificial Sequence
  Description of Artificial Sequence: Synthetic oligonucleotide
  Target: ATXN2; (-) strand; PAM type: NNGRRT; PAM sequence: TCGAAT
ccatattggccaggctggtc

SEQ ID NO: 9201 - DNA, 20 bp, Artificial Sequence
  Description of Artificial Sequence: Synthetic oligonucleotide
  Target: ATXN2; (-) strand; PAM type: NNGRRT; PAM sequence: TGGGGT
ttttatatttttagtagaga

SEQ ID NO: 9202 - DNA, 20 bp, Artificial Sequence
  Description of Artificial Sequence: Synthetic oligonucleotide
  Target: ATXN2; (-) strand; PAM type: NNGRRT; PAM sequence: ATGGGT
cctcatgagtagctggggcc

SEQ ID NO: 9203 - DNA, 20 bp, Artificial Sequence
  Description of Artificial Sequence: Synthetic oligonucleotide
  Target: ATXN2; (-) strand; PAM type: NNGRRT; PAM sequence: ATGAGT
gattctcttgtgtcagcctc

SEQ ID NO: 9204 - DNA, 20 bp, Artificial Sequence
  Description of Artificial Sequence: Synthetic oligonucleotide
  Target: ATXN2; (-) strand; PAM type: NNGRRT; PAM sequence: CTGAGT
cccactgcaacctctgcctc

SEQ ID NO: 9205 - DNA, 20 bp, Artificial Sequence
  Description of Artificial Sequence: Synthetic oligonucleotide
  Target: ATXN2; (-) strand; PAM type: NNGRRT; PAM sequence: TGGAGT
agacagtctgttgcccaggc

SEQ ID NO: 9206 - DNA, 20 bp, Artificial Sequence
  Description of Artificial Sequence: Synthetic oligonucleotide
  Target: ATXN2; (-) strand; PAM type: NNGRRT; PAM sequence: GTGAAT
cttgttaattaagtaacaca

SEQ ID NO: 9207 - DNA, 20 bp, Artificial Sequence
  Description of Artificial Sequence: Synthetic oligonucleotide
  Target: ATXN2; (-) strand; PAM type: NNGRRT; PAM sequence: CAGGAT
atttaatgtttttcagttat

SEQ ID NO: 9208 - DNA, 20 bp, Artificial Sequence
  Description of Artificial Sequence: Synthetic oligonucleotide
  Target: ATXN2; (-) strand; PAM type: NNGRRT; PAM sequence: CGGGAT
gcctcagcctcccaaagtgc

SEQ ID NO: 9209 - DNA, 20 bp, Artificial Sequence
  Description of Artificial Sequence: Synthetic oligonucleotide
  Target: ATXN2; (-) strand; PAM type: NNGRRT; PAM sequence: TTGAGT
ccatgttggcaaggctggtc

SEQ ID NO: 9210 - DNA, 20 bp, Artificial Sequence
  Description of Artificial Sequence: Synthetic oligonucleotide
  Target: ATXN2; (-) strand; PAM type: NNGRRT; PAM sequence: GGGGAT
ttttgtatttttatttgaga

SEQ ID NO: 9211 - DNA, 20 bp, Artificial Sequence
  Description of Artificial Sequence: Synthetic oligonucleotide
  Target: ATXN2; (-) strand; PAM type: NNGRRT; PAM sequence: TGGGAT
gcctcagcctcctgagtagc

SEQ ID NO: 9212 - DNA, 20 bp, Artificial Sequence
  Description of Artificial Sequence: Synthetic oligonucleotide
  Target: ATXN2; (-) strand; PAM type: NNGRRT; PAM sequence: CTGAGT
gattctcctgcctcagcctc

SEQ ID NO: 9213 - DNA, 20 bp, Artificial Sequence
  Description of Artificial Sequence: Synthetic oligonucleotide
  Target: ATXN2; (-) strand; PAM type: NNGRRT; PAM sequence: CTGGGT
cttactgcaacctctgcttc

SEQ ID NO: 9214 - DNA, 20 bp, Artificial Sequence
  Description of Artificial Sequence: Synthetic oligonucleotide
  Target: ATXN2; (-) strand; PAM type: NNGRRT; PAM sequence: TGGAGT
tctcactgtgtcactcaggc

SEQ ID NO: 9215 - DNA, 20 bp, Artificial Sequence
  Description of Artificial Sequence: Synthetic oligonucleotide
  Target: ATXN2; (-) strand; PAM type: NNGRRT; PAM sequence: CAGAGT
tttgttttttgtttttgaga

SEQ ID NO: 9216 - DNA, 20 bp, Artificial Sequence
  Description of Artificial Sequence: Synthetic oligonucleotide
  Target: ATXN2; (-) strand; PAM type: NNGRRT; PAM sequence: CAGAAT
gaaaaatggtgatggatgag

SEQ ID NO: 9217 - DNA, 20 bp, Artificial Sequence
  Description of Artificial Sequence: Synthetic oligonucleotide
  Target: ATXN2; (-) strand; PAM type: NNGRRT; PAM sequence: ATGGAT
aggagtgttgaaaaatggtg

SEQ ID NO: 9218 - DNA, 20 bp, Artificial Sequence
  Description of Artificial Sequence: Synthetic oligonucleotide
  Target: ATXN2; (-) strand; PAM type: NNGRRT; PAM sequence: AGGAGT
tactgaaggacatatagagg

SEQ ID NO: 9219 - DNA, 20 bp, Artificial Sequence
  Description of Artificial Sequence: Synthetic oligonucleotide
  Target: ATXN2; (-) strand; PAM type: NNGRRT; PAM sequence: CTGGAT
accagtctgattctagaaac

SEQ ID NO: 9220 - DNA, 20 bp, Artificial Sequence
  Description of Artificial Sequence: Synthetic oligonucleotide
  Target: ATXN2; (-) strand; PAM type: NNGRRT; PAM sequence: GGGGGT
ttcttacagttttactggaa

SEQ ID NO: 9221 - DNA, 20 bp, Artificial Sequence
  Description of Artificial Sequence: Synthetic oligonucleotide
  Target: ATXN2; (-) strand; PAM type: NNGRRT; PAM sequence: GTGAAT
aacaagaaaggggcagccat

SEQ ID NO: 9222 - DNA, 20 bp, Artificial Sequence
  Description of Artificial Sequence: Synthetic oligonucleotide
  Target: ATXN2; (-) strand; PAM type: NNGRRT; PAM sequence: GGGGGT
agttggggagctgctgtaga

SEQ ID NO: 9223 - DNA, 20 bp, Artificial Sequence
  Description of Artificial Sequence: Synthetic oligonucleotide
  Target: ATXN2; (-) strand; PAM type: NNGRRT; PAM sequence: ACGGGT
ttagttacttaagtattaaa

SEQ ID NO: 9224 - DNA, 20 bp, Artificial Sequence
  Description of Artificial Sequence: Synthetic oligonucleotide
  Target: ATXN2; (-) strand; PAM type: NNGRRT; PAM sequence: GTGAGT
gaacaaaatgactcacctaa

SEQ ID NO: 9225 - DNA, 20 bp, Artificial Sequence
  Description of Artificial Sequence: Synthetic oligonucleotide
  Target: ATXN2; (-) strand; PAM type: NNGRRT; PAM sequence: TAGGAT
aaaatattcaatacgtggta

SEQ ID NO: 9226 - DNA, 20 bp, Artificial Sequence
  Description of Artificial Sequence: Synthetic oligonucleotide
  Target: ATXN2; (-) strand; PAM type: NNGRRT; PAM sequence: TTGGGT
aaactctagcttcactgtgt

SEQ ID NO: 9227 - DNA, 20 bp, Artificial Sequence
  Description of Artificial Sequence: Synthetic oligonucleotide
  Target: ATXN2; (-) strand; PAM type: NNGRRT; PAM sequence: TAGAGT
gcagttgttctgtgtgaatt

SEQ ID NO: 9228 - DNA, 20 bp, Artificial Sequence
  Description of Artificial Sequence: Synthetic oligonucleotide
  Target: ATXN2; (-) strand; PAM type: NNGRRT; PAM sequence: GTGAAT
taatctggcagttgttctgt

SEQ ID NO: 9229 - DNA, 20 bp, Artificial Sequence
  Description of Artificial Sequence: Synthetic oligonucleotide
  Target: ATXN2; (-) strand; PAM type: NNGRRT; PAM sequence: CCGGAT
gatcctagatgattatatga

SEQ ID NO: 9230 - DNA, 20 bp, Artificial Sequence
  Description of Artificial Sequence: Synthetic oligonucleotide
  Target: ATXN2; (-) strand; PAM type: NNGRRT; PAM sequence: GTGAAT
atgctgatattagttcttgt

SEQ ID NO: 9231 - DNA, 20 bp, Artificial Sequence
  Description of Artificial Sequence: Synthetic oligonucleotide
  Target: ATXN2; (-) strand; PAM type: NNGRRT; PAM sequence: CGGAAT
gagctgagaagtgatggagc

SEQ ID NO: 9232 - DNA, 20 bp, Artificial Sequence
  Description of Artificial Sequence: Synthetic oligonucleotide
  Target: ATXN2; (-) strand; PAM type: NNGRRT; PAM sequence: CAGGAT
aacacagagagctgaagtca

SEQ ID NO: 9233 - DNA, 20 bp, Artificial Sequence
  Description of Artificial Sequence: Synthetic oligonucleotide
  Target: ATXN2; (-) strand; PAM type: NNGRRT; PAM sequence: TGGAAT
tttaagctatgcgatctgta

SEQ ID NO: 9234 - DNA, 20 bp, Artificial Sequence
  Description of Artificial Sequence: Synthetic oligonucleotide
  Target: ATXN2; (-) strand; PAM type: NNGRRT; PAM sequence: TGGAAT
tttactactctagtgtatgc

SEQ ID NO: 9235 - DNA, 20 bp, Artificial Sequence
  Description of Artificial Sequence: Synthetic oligonucleotide
  Target: ATXN2; (-) strand; PAM type: NNGRRT; PAM sequence: TGGGAT
accttggcctcccagagtgc

SEQ ID NO: 9236 - DNA, 20 bp, Artificial Sequence
  Description of Artificial Sequence: Synthetic oligonucleotide
  Target: ATXN2; (-) strand; PAM type: NNGRRT; PAM sequence: CAGAGT
ctggactcaccttggcctcc

SEQ ID NO: 9237 - DNA, 20 bp, Artificial Sequence
  Description of Artificial Sequence: Synthetic oligonucleotide
  Target: ATXN2; (-) strand; PAM type: NNGRRT; PAM sequence: TGGAGT
tctcgctctgtcactcaggc

SEQ ID NO: 9238 - DNA, 20 bp, Artificial Sequence
  Description of Artificial Sequence: Synthetic oligonucleotide
  Target: ATXN2; (-) strand; PAM type: NNGRRT; PAM sequence: CAGGGT
gtggtggtggtgttttaaga

SEQ ID NO: 9239 - DNA, 20 bp, Artificial Sequence
  Description of Artificial Sequence: Synthetic oligonucleotide
  Target: ATXN2; (-) strand; PAM type: NNGRRT; PAM sequence: AAGAGT
aaggggtaaaacttcatatg

SEQ ID NO: 9240 - DNA, 20 bp, Artificial Sequence
  Description of Artificial Sequence: Synthetic oligonucleotide
  Target: ATXN2; (-) strand; PAM type: NNGRRT; PAM sequence: AGGGGT
tcaaggggtaaaggcactga

SEQ ID NO: 9241 - DNA, 20 bp, Artificial Sequence
  Description of Artificial Sequence: Synthetic oligonucleotide
  Target: ATXN2; (-) strand; PAM type: NNGRRT; PAM sequence: AGGGGT
cctttctctagagggactca

SEQ ID NO: 9242 - DNA, 20 bp, Artificial Sequence
  Description of Artificial Sequence: Synthetic oligonucleotide
  Target: ATXN2; (-) strand; PAM type: NNGRRT; PAM sequence: TTGGAT
gattttttggtgtgtctagg

SEQ ID NO: 9243 - DNA, 20 bp, Artificial Sequence
  Description of Artificial Sequence: Synthetic oligonucleotide
  Target: ATXN2; (-) strand; PAM type: NNGRRT; PAM sequence: TTGGAT
tccttttctacctgagttgt

SEQ ID NO: 9244 - DNA, 20 bp, Artificial Sequence
  Description of Artificial Sequence: Synthetic oligonucleotide
  Target: ATXN2; (-) strand; PAM type: NNGRRT; PAM sequence: CTGAGT
gccctaagatccttttctac

SEQ ID NO: 9245 - DNA, 20 bp, Artificial Sequence
  Description of Artificial Sequence: Synthetic oligonucleotide
  Target: ATXN2; (-) strand; PAM type: NNGRRT; PAM sequence: GGGAAT
tctggagaactcgagaagat

SEQ ID NO: 9246 - DNA, 20 bp, Artificial Sequence
  Description of Artificial Sequence: Synthetic oligonucleotide
  Target: ATXN2; (-) strand; PAM type: NNGRRT; PAM sequence: GGGGGT
gtgatatgaatgccgtggaa

SEQ ID NO: 9247 - DNA, 20 bp, Artificial Sequence
  Description of Artificial Sequence: Synthetic oligonucleotide
  Target: ATXN2; (-) strand; PAM type: NNGRRT; PAM sequence: ATGAAT
gtgcataagtcagaggtgat

SEQ ID NO: 9248 - DNA, 20 bp, Artificial Sequence
  Description of Artificial Sequence: Synthetic oligonucleotide
  Target: ATXN2; (-) strand; PAM type: NNGRRT; PAM sequence: TTGAGT
ggtagatcgttgggagagac

SEQ ID NO: 9249 - DNA, 20 bp, Artificial Sequence
  Description of Artificial Sequence: Synthetic oligonucleotide
  Target: ATXN2; (-) strand; PAM type: NNGRRT; PAM sequence: ACGGGT
aagggataagtttatgagca

SEQ ID NO: 9250 - DNA, 20 bp, Artificial Sequence
  Description of Artificial Sequence: Synthetic oligonucleotide
  Target: ATXN2; (-) strand; PAM type: NNGRRT; PAM sequence: AGGGAT
ttgttttgtggcctccagaa

SEQ ID NO: 9251 - DNA, 20 bp, Artificial Sequence
  Description of Artificial Sequence: Synthetic oligonucleotide
  Target: ATXN2; (-) strand; PAM type: NNGRRT; PAM sequence: GGGAAT
ccactgatagtcttttgaag

SEQ ID NO: 9252 - DNA, 20 bp, Artificial Sequence
  Description of Artificial Sequence: Synthetic oligonucleotide
  Target: ATXN2; (-) strand; PAM type: NNGRRT; PAM sequence: ATGAAT
tttagaaagagaacagctgg

SEQ ID NO: 9253 - DNA, 20 bp, Artificial Sequence
  Description of Artificial Sequence: Synthetic oligonucleotide
  Target: ATXN2; (-) strand; PAM type: NNGRRT; PAM sequence: CTGGAT
cgtatttagaaagagaacag

SEQ ID NO: 9254 - DNA, 20 bp, Artificial Sequence
  Description of Artificial Sequence: Synthetic oligonucleotide
  Target: ATXN2; (-) strand; PAM type: NNGRRT; PAM sequence: AAGAAT
aagtaaggaaacacatttgg

SEQ ID NO: 9255 - DNA, 20 bp, Artificial Sequence
  Description of Artificial Sequence: Synthetic oligonucleotide
  Target: ATXN2; (-) strand; PAM type: NNGRRT; PAM sequence: GGGGGT
agtgtgatagaagaattgga

SEQ ID NO: 9256 - DNA, 20 bp, Artificial Sequence
  Description of Artificial Sequence: Synthetic oligonucleotide
  Target: ATXN2; (-) strand; PAM type: NNGRRT; PAM sequence: AAGAAT
tttggttcacagtgtgatag

SEQ ID NO: 9257 - DNA, 20 bp, Artificial Sequence
  Description of Artificial Sequence: Synthetic oligonucleotide
  Target: ATXN2; (-) strand; PAM type: NNGRRT; PAM sequence: AGGGAT
aagagtttgtgctaaagtac

SEQ ID NO: 9258 - DNA, 20 bp, Artificial Sequence
  Description of Artificial Sequence: Synthetic oligonucleotide
  Target: ATXN2; (-) strand; PAM type: NNGRRT; PAM sequence: AAGAGT
aggaggaagttccaggcggg

SEQ ID NO: 9259 - DNA, 20 bp, Artificial Sequence
  Description of Artificial Sequence: Synthetic oligonucleotide
  Target: ATXN2; (-) strand; PAM type: NNGRRT; PAM sequence: ATGGAT
tcaaaataatgagagttgag

SEQ ID NO: 9260 - DNA, 20 bp, Artificial Sequence
  Description of Artificial Sequence: Synthetic oligonucleotide
  Target: ATXN2; (-) strand; PAM type: NNGRRT; PAM sequence: GAGAGT
aaaaagggcttcaaaataat

SEQ ID NO: 9261 - DNA, 20 bp, Artificial Sequence
  Description of Artificial Sequence: Synthetic oligonucleotide
  Target: ATXN2; (-) strand; PAM type: NNGRRT; PAM sequence: ATGGGT
agcactgggaggggactgcc

SEQ ID NO: 9262 - DNA, 20 bp, Artificial Sequence
  Description of Artificial Sequence: Synthetic oligonucleotide
  Target: ATXN2; (-) strand; PAM type: NNGRRT; PAM sequence: ATGAAT
agactaggacagagacaaag

SEQ ID NO: 9263 - DNA, 20 bp, Artificial Sequence
  Description of Artificial Sequence: Synthetic oligonucleotide
  Target: ATXN2; (-) strand; PAM type: NNGRRT; PAM sequence: ATGAAT
tgggcttggggtagtacagt

SEQ ID NO: 9264 - DNA, 20 bp, Artificial Sequence
  Description of Artificial Sequence: Synthetic oligonucleotide
  Target: ATXN2; (-) strand; PAM type: NNGRRT; PAM sequence: TGGGGT
aaaagtggtattgatgggct

SEQ ID NO: 9265 - DNA, 20 bp, Artificial Sequence
  Description of Artificial Sequence: Synthetic oligonucleotide
  Target: ATXN2; (-) strand; PAM type: NNGRRT; PAM sequence: ATGAAT
aggggatggaagaggattaa

SEQ ID NO: 9266 - DNA, 20 bp, Artificial Sequence
  Description of Artificial Sequence: Synthetic oligonucleotide
  Target: ATXN2; (-) strand; PAM type: NNGRRT; PAM sequence: GAGGAT
cctgtaaaaaggggatggaa

SEQ ID NO: 9267 - DNA, 20 bp, Artificial Sequence
  Description of Artificial Sequence: Synthetic oligonucleotide
  Target: ATXN2; (-) strand; PAM type: NNGRRT; PAM sequence: GGGGAT
agtttcttcccctgtaaaaa

SEQ ID NO: 9268 - DNA, 20 bp, Artificial Sequence
  Description of Artificial Sequence: Synthetic oligonucleotide
  Target: ATXN2; (-) strand; PAM type: NNGRRT; PAM sequence: TGGGAT
cctttcccaaatctgaattt

SEQ ID NO: 9269 - DNA, 20 bp, Artificial Sequence
  Description of Artificial Sequence: Synthetic oligonucleotide
  Target: ATXN2; (-) strand; PAM type: NNGRRT; PAM sequence: CTGAAT
cctaatcccctttcccaaat

SEQ ID NO: 9270 - DNA, 20 bp, Artificial Sequence
  Description of Artificial Sequence: Synthetic oligonucleotide
  Target: ATXN2; (-) strand; PAM type: NNGRRT; PAM sequence: GAGAAT
ttccctcacactgttttgtg

SEQ ID NO: 9271 - DNA, 20 bp, Artificial Sequence
  Description of Artificial Sequence: Synthetic oligonucleotide
  Target: ATXN2; (-) strand; PAM type: NNGRRT; PAM sequence: AAGAAT
agtagcttactataaattac

SEQ ID NO: 9272 - DNA, 20 bp, Artificial Sequence
  Description of Artificial Sequence: Synthetic oligonucleotide
  Target: ATXN2; (-) strand; PAM type: NNGRRT; PAM sequence: TGGGAT
acctctgcctcccaaagtgc

SEQ ID NO: 9273 - DNA, 20 bp, Artificial Sequence
  Description of Artificial Sequence: Synthetic oligonucleotide
  Target: ATXN2; (-) strand; PAM type: NNGRRT; PAM sequence: TGGGGT
ttttgtatttttagtaaaga

SEQ ID NO: 9274 - DNA, 20 bp, Artificial Sequence
  Description of Artificial Sequence: Synthetic oligonucleotide
  Target: ATXN2; (-) strand; PAM type: NNGRRT; PAM sequence: TGGGAT
gtctcagcttcccgagtaac

SEQ ID NO: 9275 - DNA, 20 bp, Artificial Sequence
  Description of Artificial Sequence: Synthetic oligonucleotide
  Target: ATXN2; (-) strand; PAM type: NNGRRT; PAM sequence: CCGAGT
gattctcctgtctcagcttc

SEQ ID NO: 9276 - DNA, 20 bp, Artificial Sequence
  Description of Artificial Sequence: Synthetic oligonucleotide
  Target: ATXN2; (-) strand; PAM type: NNGRRT; PAM sequence: CTGGGT
ctcactgcaacctctgcctc

SEQ ID NO: 9277 - DNA, 20 bp, Artificial Sequence
  Description of Artificial Sequence: Synthetic oligonucleotide
  Target: ATXN2; (-) strand; PAM type: NNGRRT; PAM sequence: TGGAGT
tcttgctgtgttgctcaggc

SEQ ID NO: 9278 - DNA, 20 bp, Artificial Sequence
  Description of Artificial Sequence: Synthetic oligonucleotide
  Target: ATXN2; (-) strand; PAM type: NNGRRT; PAM sequence: CAGAGT
ctttttttttttttttgaga

SEQ ID NO: 9279 - DNA, 20 bp, Artificial Sequence
  Description of Artificial Sequence: Synthetic oligonucleotide
  Target: ATXN2; (-) strand; PAM type: NNGRRT; PAM sequence: TGGGAT
gctgcggcctcccaaagtgc

SEQ ID NO: 9280 - DNA, 20 bp, Artificial Sequence
  Description of Artificial Sequence: Synthetic oligonucleotide
  Target: ATXN2; (-) strand; PAM type: NNGRRT; PAM sequence: GGGGGT
tctttgtatttagtagagat

SEQ ID NO: 9281 - DNA, 20 bp, Artificial Sequence
  Description of Artificial Sequence: Synthetic oligonucleotide
  Target: ATXN2; (-) strand; PAM type: NNGRRT; PAM sequence: TGGGGT
gcctcagcctctcaagtagc

SEQ ID NO: 9282 - DNA, 20 bp, Artificial Sequence
  Description of Artificial Sequence: Synthetic oligonucleotide
  Target: ATXN2; (-) strand; PAM type: NNGRRT; PAM sequence: TGGAGT
tttgctcttgtcacccaggc

SEQ ID NO: 9283 - DNA, 20 bp, Artificial Sequence
  Description of Artificial Sequence: Synthetic oligonucleotide
  Target: ATXN2; (-) strand; PAM type: NNGRRT; PAM sequence: TGGAGT
tttgttttttttttttgaga

SEQ ID NO: 9284 - DNA, 20 bp, Artificial Sequence
  Description of Artificial Sequence: Synthetic oligonucleotide
  Target: ATXN2; (-) strand; PAM type: NNGRRT; PAM sequence: GGGAGT
caccctattcccaagcctga

SEQ ID NO: 9285 - DNA, 20 bp, Artificial Sequence
  Description of Artificial Sequence: Synthetic oligonucleotide
  Target: ATXN2; (-) strand; PAM type: NNGRRT; PAM sequence: TTGGGT
agacttcaactctacttgtg

SEQ ID NO: 9286 - DNA, 20 bp, Artificial Sequence
  Description of Artificial Sequence: Synthetic oligonucleotide
  Target: ATXN2; (-) strand; PAM type: NNGRRT; PAM sequence: ATGGGT
gcgatacattaattttatcc

SEQ ID NO: 9287 - DNA, 20 bp, Artificial Sequence
  Description of Artificial Sequence: Synthetic oligonucleotide
  Target: ATXN2; (-) strand; PAM type: NNGRRT; PAM sequence: GAGAAT
ggaaggaatataatagttga

SEQ ID NO: 9288 - DNA, 20 bp, Artificial Sequence
  Description of Artificial Sequence: Synthetic oligonucleotide
  Target: ATXN2; (-) strand; PAM type: NNGRRT; PAM sequence: AGGAAT
atgttagtcttccagaggga

SEQ ID NO: 9289 - DNA, 20 bp, Artificial Sequence
  Description of Artificial Sequence: Synthetic oligonucleotide
  Target: ATXN2; (-) strand; PAM type: NNGRRT; PAM sequence: TAGAGT
ggatgcttctgtaggaaaat

SEQ ID NO: 9290 - DNA, 20 bp, Artificial Sequence
  Description of Artificial Sequence: Synthetic oligonucleotide
  Target: ATXN2; (-) strand; PAM type: NNGRRT; PAM sequence: TAGGAT
ctgagaacccacacaccact

SEQ ID NO: 9291 - DNA, 20 bp, Artificial Sequence
  Description of Artificial Sequence: Synthetic oligonucleotide
  Target: ATXN2; (-) strand; PAM type: NNGRRT; PAM sequence: GTGAAT
gttgtacgatatcatgggct

SEQ ID NO: 9292 - DNA, 20 bp, Artificial Sequence
  Description of Artificial Sequence: Synthetic oligonucleotide
  Target: ATXN2; (-) strand; PAM type: NNGRRT; PAM sequence: GTGAGT
gtcctggcagttctctatca

SEQ ID NO: 9293 - DNA, 20 bp, Artificial Sequence
  Description of Artificial Sequence: Synthetic oligonucleotide
  Target: ATXN2; (-) strand; PAM type: NNGRRT; PAM sequence: GAGAAT
actcagtaggctgaggcaag

SEQ ID NO: 9294 - DNA, 20 bp, Artificial Sequence
  Description of Artificial Sequence: Synthetic oligonucleotide
  Target: ATXN2; (-) strand; PAM type: NNGRRT; PAM sequence: AGGAAT
cgtgtggatcgcctgaggtc

SEQ ID NO: 9295 - DNA, 20 bp, Artificial Sequence
  Description of Artificial Sequence: Synthetic oligonucleotide
  Target: ATXN2; (-) strand; PAM type: NNGRRT; PAM sequence: GTGGAT
agtttgggaggccgaggcgt

SEQ ID NO: 9296 - DNA, 20 bp, Artificial Sequence
  Description of Artificial Sequence: Synthetic oligonucleotide
  Target: ATXN2; (-) strand; PAM type: NNGRRT; PAM sequence: ATGGAT
gttttacagatgaggaagtg

SEQ ID NO: 9297 - DNA, 20 bp, Artificial Sequence
  Description of Artificial Sequence: Synthetic oligonucleotide
  Target: ATXN2; (-) strand; PAM type: NNGRRT; PAM sequence: AAGAAT
aaaatggtaaggaaatatat

SEQ ID NO: 9298 - DNA, 20 bp, Artificial Sequence
  Description of Artificial Sequence: Synthetic oligonucleotide
  Target: ATXN2; (-) strand; PAM type: NNGRRT; PAM sequence: TTGAAT
aaagtgctgggattgcaggc

SEQ ID NO: 9299 - DNA, 20 bp, Artificial Sequence
  Description of Artificial Sequence: Synthetic oligonucleotide
  Target: ATXN2; (-) strand; PAM type: NNGRRT; PAM sequence: TGGGAT
gcctcagcctcccaaagtgc

SEQ ID NO: 9300 - DNA, 20 bp, Artificial Sequence
  Description of Artificial Sequence: Synthetic oligonucleotide
  Target: ATXN2; (-) strand; PAM type: NNGRRT; PAM sequence: CCGAGT
cattctcctgcctccacctc

SEQ ID NO: 9301 - DNA, 20 bp, Artificial Sequence
  Description of Artificial Sequence: Synthetic oligonucleotide
  Target: ATXN2; (-) strand; PAM type: NNGRRT; PAM sequence: TCGGGT
ctcactacaagctctgcctc

SEQ ID NO: 9302 - DNA, 20 bp, Artificial Sequence
  Description of Artificial Sequence: Synthetic oligonucleotide
  Target: ATXN2; (-) strand; PAM type: NNGRRT; PAM sequence: TGGAGT
tcttgctctgtcgcccaggc

SEQ ID NO: 9303 - DNA, 20 bp, Artificial Sequence
  Description of Artificial Sequence: Synthetic oligonucleotide
  Target: ATXN2; (-) strand; PAM type: NNGRRT; PAM sequence: CAGAGT
tttttttttttttttggaga

SEQ ID NO: 9304 - DNA, 20 bp, Artificial Sequence
  Description of Artificial Sequence: Synthetic oligonucleotide
  Target: ATXN2; (-) strand; PAM type: NNGRRT; PAM sequence: GGGAAT
tgtgacagatacggaattca

SEQ ID NO: 9305 - DNA, 20 bp, Artificial Sequence
  Description of Artificial Sequence: Synthetic oligonucleotide
  Target: ATXN2; (-) strand; PAM type: NNGRRT; PAM sequence: CGGAAT
atttacatttgtgacagata

SEQ ID NO: 9306 - DNA, 20 bp, Artificial Sequence
  Description of Artificial Sequence: Synthetic oligonucleotide
  Target: ATXN2; (-) strand; PAM type: NNGRRT; PAM sequence: AGGAAT
aaaaaaaagaaaagaaaatg

SEQ ID NO: 9307 - DNA, 20 bp, Artificial Sequence
  Description of Artificial Sequence: Synthetic oligonucleotide
  Target: ATXN2; (-) strand; PAM type: NNGRRT; PAM sequence: CAGAGT
ctgtataccatcccaggcga

SEQ ID NO: 9308 - DNA, 20 bp, Artificial Sequence
  Description of Artificial Sequence: Synthetic oligonucleotide
  Target: ATXN2; (-) strand; PAM type: NNGRRT; PAM sequence: AGGAAT
caggagggtcacttaaaccc

SEQ ID NO: 9309 - DNA, 20 bp, Artificial Sequence
  Description of Artificial Sequence: Synthetic oligonucleotide
  Target: ATXN2; (-) strand; PAM type: NNGRRT; PAM sequence: GAGGGT
tacttgggaggctgactcag

SEQ ID NO: 9310 - DNA, 20 bp, Artificial Sequence
  Description of Artificial Sequence: Synthetic oligonucleotide
  Target: ATXN2; (-) strand; PAM type: NNGRRT; PAM sequence: AGGAAT
gaggagggtcgcttgagctc

SEQ ID NO: 9311 - DNA, 20 bp, Artificial Sequence
  Description of Artificial Sequence: Synthetic oligonucleotide
  Target: ATXN2; (-) strand; PAM type: NNGRRT; PAM sequence: GAGGGT
actttgggaagccaagggag

SEQ ID NO: 9312 - DNA, 20 bp, Artificial Sequence
  Description of Artificial Sequence: Synthetic oligonucleotide
  Target: ATXN2; (-) strand; PAM type: NNGRRT; PAM sequence: AGGAAT
gaaaaacggaaaagaaaatg

SEQ ID NO: 9313 - DNA, 20 bp, Artificial Sequence
  Description of Artificial Sequence: Synthetic oligonucleotide
  Target: ATXN2; (-) strand; PAM type: NNGRRT; PAM sequence: CTGGGT
aacttgagtcactagcttct

SEQ ID NO: 9314 - DNA, 20 bp, Artificial Sequence
  Description of Artificial Sequence: Synthetic oligonucleotide
  Target: ATXN2; (-) strand; PAM type: NNGRRT; PAM sequence: TTGAGT
tcttttaatcaaccaggaac

SEQ ID NO: 9315 - DNA, 20 bp, Artificial Sequence
  Description of Artificial Sequence: Synthetic oligonucleotide
  Target: ATXN2; (-) strand; PAM type: NNGRRT; PAM sequence: TTGGAT
tgagttactatcattgtatt

SEQ ID NO: 9316 - DNA, 20 bp, Artificial Sequence
  Description of Artificial Sequence: Synthetic oligonucleotide
  Target: ATXN2; (-) strand; PAM type: NNGRRT; PAM sequence: ATGAGT
tcactcagaaggtggcagag

SEQ ID NO: 9317 - DNA, 20 bp, Artificial Sequence
  Description of Artificial Sequence: Synthetic oligonucleotide
  Target: ATXN2; (-) strand; PAM type: NNGRRT; PAM sequence: GTGAGT
tgagtgaaccggacgctacc

SEQ ID NO: 9318 - DNA, 20 bp, Artificial Sequence
  Description of Artificial Sequence: Synthetic oligonucleotide
  Target: ATXN2; (-) strand; PAM type: NNGRRT; PAM sequence: TTGAGT
aaaaagggagggaaacagga

SEQ ID NO: 9319 - DNA, 20 bp, Artificial Sequence
  Description of Artificial Sequence: Synthetic oligonucleotide
  Target: ATXN2; (-) strand; PAM type: NNGRRT; PAM sequence: CAGGAT
taattaaaaagggagggaaa

SEQ ID NO: 9320 - DNA, 20 bp, Artificial Sequence
  Description of Artificial Sequence: Synthetic oligonucleotide
  Target: ATXN2; (-) strand; PAM type: NNGRRT; PAM sequence: TAGGGT
cctcagcttgaaaaattgat

SEQ ID NO: 9321 - DNA, 20 bp, Artificial Sequence
  Description of Artificial Sequence: Synthetic oligonucleotide
  Target: ATXN2; (-) strand; PAM type: NNGRRT; PAM sequence: AAGGGT
cagcagtctggtatgttgct

SEQ ID NO: 9322 - DNA, 20 bp, Artificial Sequence
  Description of Artificial Sequence: Synthetic oligonucleotide
  Target: ATXN2; (-) strand; PAM type: NNGRRT; PAM sequence: AGGAGT
cgagaggattgcttgagctc

SEQ ID NO: 9323 - DNA, 20 bp, Artificial Sequence
  Description of Artificial Sequence: Synthetic oligonucleotide
  Target: ATXN2; (-) strand; PAM type: NNGRRT; PAM sequence: GAGGAT
ctactacgaggctgaagcga

SEQ ID NO: 9324 - DNA, 20 bp, Artificial Sequence
  Description of Artificial Sequence: Synthetic oligonucleotide
  Target: ATXN2; (-) strand; PAM type: NNGRRT; PAM sequence: GGGGAT
aaaatattttttaattaatg

SEQ ID NO: 9325 - DNA, 20 bp, Artificial Sequence
  Description of Artificial Sequence: Synthetic oligonucleotide
  Target: ATXN2; (-) strand; PAM type: NNGRRT; PAM sequence: AGGAGT
aggctgaaatgggaagggcc

SEQ ID NO: 9326 - DNA, 20 bp, Artificial Sequence
  Description of Artificial Sequence: Synthetic oligonucleotide
  Target: ATXN2; (-) strand; PAM type: NNGRRT; PAM sequence: CTGGGT
acaaaatcagaagaatgggc

SEQ ID NO: 9327 - DNA, 20 bp, Artificial Sequence
  Description of Artificial Sequence: Synthetic oligonucleotide
  Target: ATXN2; (-) strand; PAM type: NNGRRT; PAM sequence: AAGAAT
gaagaggaaaacaaaatcag

SEQ ID NO: 9328 - DNA, 20 bp, Artificial Sequence
  Description of Artificial Sequence: Synthetic oligonucleotide
  Target: ATXN2; (-) strand; PAM type: NNGRRT; PAM sequence: AGGAGT
ctgtctcataaaatcttgaa

SEQ ID NO: 9329 - DNA, 20 bp, Artificial Sequence
  Description of Artificial Sequence: Synthetic oligonucleotide
  Target: ATXN2; (-) strand; PAM type: NNGRRT; PAM sequence: GTGAAT
tgaggcttgggaatacagta

SEQ ID NO: 9330 - DNA, 20 bp, Artificial Sequence
  Description of Artificial Sequence: Synthetic oligonucleotide
  Target: ATXN2; (-) strand; PAM type: NNGRRT; PAM sequence: GGGAAT
acctcctgcttgtgaggctt

SEQ ID NO: 9331 - DNA, 20 bp, Artificial Sequence
  Description of Artificial Sequence: Synthetic oligonucleotide
  Target: ATXN2; (-) strand; PAM type: NNGRRT; PAM sequence: TGGAGT
tcctcccctttttttatttt

SEQ ID NO: 9332 - DNA, 20 bp, Artificial Sequence
  Description of Artificial Sequence: Synthetic oligonucleotide
  Target: ATXN2; (-) strand; PAM type: NNGRRT; PAM sequence: TGGGAT
gccttggcctcccaaagtgc

SEQ ID NO: 9333 - DNA, 20 bp, Artificial Sequence
  Description of Artificial Sequence: Synthetic oligonucleotide
  Target: ATXN2; (-) strand; PAM type: NNGRRT; PAM sequence: CAGGGT
ttttgtatttttagtagaga

SEQ ID NO: 9334 - DNA, 20 bp, Artificial Sequence
  Description of Artificial Sequence: Synthetic oligonucleotide
  Target: ATXN2; (-) strand; PAM type: NNGRRT; PAM sequence: TGGGAT
gtcttagcctcccaagtagc

SEQ ID NO: 9335 - DNA, 20 bp, Artificial Sequence
  Description of Artificial Sequence: Synthetic oligonucleotide
  Target: ATXN2; (-) strand; PAM type: NNGRRT; PAM sequence: TGGAGT
ttgtctcttgtcgcccaggc

SEQ ID NO: 9336 - DNA, 20 bp, Artificial Sequence
  Description of Artificial Sequence: Synthetic oligonucleotide
  Target: ATXN2; (-) strand; PAM type: NNGRRT; PAM sequence: CAGAGT
tatgttatgttattttaaga

SEQ ID NO: 9337 - DNA, 20 bp, Artificial Sequence
  Description of Artificial Sequence: Synthetic oligonucleotide
  Target: ATXN2; (-) strand; PAM type: NNGRRT; PAM sequence: CGGAAT
acctcgaccttccaaagtgg

SEQ ID NO: 9338 - DNA, 20 bp, Artificial Sequence
  Description of Artificial Sequence: Synthetic oligonucleotide
  Target: ATXN2; (-) strand; PAM type: NNGRRT; PAM sequence: TGGGGT
ttttgtatttttagtagaaa

SEQ ID NO: 9339 - DNA, 20 bp, Artificial Sequence
  Description of Artificial Sequence: Synthetic oligonucleotide
  Target: ATXN2; (-) strand; PAM type: NNGRRT; PAM sequence: TGGAGT
tctcactctgttgcccaggt

SEQ ID NO: 9340 - DNA, 20 bp, Artificial Sequence
  Description of Artificial Sequence: Synthetic oligonucleotide
  Target: ATXN2; (-) strand; PAM type: NNGRRT; PAM sequence: TGGAGT
taatttttatttttatgaga

SEQ ID NO: 9341 - DNA, 20 bp, Artificial Sequence
  Description of Artificial Sequence: Synthetic oligonucleotide
  Target: ATXN2; (-) strand; PAM type: NNGRRT; PAM sequence: TTGAAT
aaaataataataataatttg

SEQ ID NO: 9342 - DNA, 20 bp, Artificial Sequence
  Description of Artificial Sequence: Synthetic oligonucleotide
  Target: ATXN2; (-) strand; PAM type: NNGRRT; PAM sequence: CAGAGT
ctgtacttcagcctgggtga

SEQ ID NO: 9343 - DNA, 20 bp, Artificial Sequence
  Description of Artificial Sequence: Synthetic oligonucleotide
  Target: ATXN2; (-) strand; PAM type: NNGRRT; PAM sequence: CTGGGT
tcgtgccactgtacttcagc

SEQ ID NO: 9344 - DNA, 20 bp, Artificial Sequence
  Description of Artificial Sequence: Synthetic oligonucleotide
  Target: ATXN2; (-) strand; PAM type: NNGRRT; PAM sequence: GAGAAT
gactcagaaggctgaggcag

SEQ ID NO: 9345 - DNA, 20 bp, Artificial Sequence
  Description of Artificial Sequence: Synthetic oligonucleotide
  Target: ATXN2; (-) strand; PAM type: NNGRRT; PAM sequence: TGGGAT
gcctcggcctcccaaagttc

SEQ ID NO: 9346 - DNA, 20 bp, Artificial Sequence
  Description of Artificial Sequence: Synthetic oligonucleotide
  Target: ATXN2; (-) strand; PAM type: NNGRRT; PAM sequence: TGGGAT
tggggtttcgccgtgttatc

SEQ ID NO: 9347 - DNA, 20 bp, Artificial Sequence
  Description of Artificial Sequence: Synthetic oligonucleotide
  Target: ATXN2; (-) strand; PAM type: NNGRRT; PAM sequence: TGGGGT
ttttttatttttagtagaga

SEQ ID NO: 9348 - DNA, 20 bp, Artificial Sequence
  Description of Artificial Sequence: Synthetic oligonucleotide
  Target: ATXN2; (-) strand; PAM type: NNGRRT; PAM sequence: TGGAGT
tctcgctctgtcgcccaggc

SEQ ID NO: 9349 - DNA, 20 bp, Artificial Sequence
  Description of Artificial Sequence: Synthetic oligonucleotide
  Target: ATXN2; (-) strand; PAM type: NNGRRT; PAM sequence: CGGAGT
atttatttattttttggaga

SEQ ID NO: 9350 - DNA, 20 bp, Artificial Sequence
  Description of Artificial Sequence: Synthetic oligonucleotide
  Target: ATXN2; (-) strand; PAM type: NNGRRT; PAM sequence: CTGGGT
gtggccaacgtggtgaaacc

SEQ ID NO: 9351 - DNA, 20 bp, Artificial Sequence
  Description of Artificial Sequence: Synthetic oligonucleotide
  Target: ATXN2; (-) strand; PAM type: NNGRRT; PAM sequence: AGGAGT
cgggcagatcacctgaggtc

SEQ ID NO: 9352 - DNA, 20 bp, Artificial Sequence
  Description of Artificial Sequence: Synthetic oligonucleotide
  Target: ATXN2; (-) strand; PAM type: NNGRRT; PAM sequence: GAGAAT
tactcgggaggctgaggcag

SEQ ID NO: 9353 - DNA, 20 bp, Artificial Sequence
  Description of Artificial Sequence: Synthetic oligonucleotide
  Target: ATXN2; (-) strand; PAM type: NNGRRT; PAM sequence: CCGGGT
ctaaaaatactaaaaattaa

SEQ ID NO: 9354 - DNA, 20 bp, Artificial Sequence
  Description of Artificial Sequence: Synthetic oligonucleotide
  Target: ATXN2; (-) strand; PAM type: NNGRRT; PAM sequence: GTGGAT
actttgggaggccgaggcgg

SEQ ID NO: 9355 - DNA, 20 bp, Artificial Sequence
  Description of Artificial Sequence: Synthetic oligonucleotide
  Target: ATXN2; (-) strand; PAM type: NNGRRT; PAM sequence: GCGGGT
cagcactttgggaggccgag

SEQ ID NO: 9356 - DNA, 20 bp, Artificial Sequence
  Description of Artificial Sequence: Synthetic oligonucleotide
  Target: ATXN2; (-) strand; PAM type: NNGRRT; PAM sequence: AAGAGT
ggtcaaaaatatctttcttt

SEQ ID NO: 9357 - DNA, 20 bp, Artificial Sequence
  Description of Artificial Sequence: Synthetic oligonucleotide
  Target: ATXN2; (-) strand; PAM type: NNGRRT; PAM sequence: TGGGAT
accttgacctcccaaagtgc

SEQ ID NO: 9358 - DNA, 20 bp, Artificial Sequence
  Description of Artificial Sequence: Synthetic oligonucleotide
  Target: ATXN2; (-) strand; PAM type: NNGRRT; PAM sequence: AGGAGT
acagaaagttcactgtggtt

SEQ ID NO: 9359 - DNA, 20 bp, Artificial Sequence
  Description of Artificial Sequence: Synthetic oligonucleotide
  Target: ATXN2; (-) strand; PAM type: NNGRRT; PAM sequence: GTGGGT
cttcccacgtagctgggact

SEQ ID NO: 9360 - DNA, 20 bp, Artificial Sequence
  Description of Artificial Sequence: Synthetic oligonucleotide
  Target: ATXN2; (-) strand; PAM type: NNGRRT; PAM sequence: TGGGAT
gccgtggcctcccaaagtgc

SEQ ID NO: 9361 - DNA, 20 bp, Artificial Sequence
  Description of Artificial Sequence: Synthetic oligonucleotide
  Target: ATXN2; (-) strand; PAM type: NNGRRT; PAM sequence: GGGGGT
tttgtatttttagtagagac

SEQ ID NO: 9362 - DNA, 20 bp, Artificial Sequence
  Description of Artificial Sequence: Synthetic oligonucleotide
  Target: ATXN2; (-) strand; PAM type: NNGRRT; PAM sequence: TGGGAT
gcctcaacctcctgaatagc

SEQ ID NO: 9363 - DNA, 20 bp, Artificial Sequence
  Description of Artificial Sequence: Synthetic oligonucleotide
  Target: ATXN2; (-) strand; PAM type: NNGRRT; PAM sequence: CTGAAT
gattctcctgcctcaacctc

SEQ ID NO: 9364 - DNA, 20 bp, Artificial Sequence
  Description of Artificial Sequence: Synthetic oligonucleotide
  Target: ATXN2; (-) strand; PAM type: NNGRRT; PAM sequence: CTGGGT
ctcactgcagtctctgcctt

SEQ ID NO: 9365 - DNA, 20 bp, Artificial Sequence
  Description of Artificial Sequence: Synthetic oligonucleotide
  Target: ATXN2; (-) strand; PAM type: NNGRRT; PAM sequence: TGGAGT
tctcgctctatcgcccaggc

SEQ ID NO: 9366 - DNA, 20 bp, Artificial Sequence
  Description of Artificial Sequence: Synthetic oligonucleotide
  Target: ATXN2; (-) strand; PAM type: NNGRRT; PAM sequence: TGGAGT
tcttattttgttttttgaga

SEQ ID NO: 9367 - DNA, 20 bp, Artificial Sequence
  Description of Artificial Sequence: Synthetic oligonucleotide
  Target: ATXN2; (-) strand; PAM type: NNGRRT; PAM sequence: TAGGAT
gtagacaaacactgaacagt

SEQ ID NO: 9368 - DNA, 20 bp, Artificial Sequence
  Description of Artificial Sequence: Synthetic oligonucleotide
  Target: ATXN2; (-) strand; PAM type: NNGRRT; PAM sequence: GTGAAT
gagtcatttatcagtggtgt

SEQ ID NO: 9369 - DNA, 20 bp, Artificial Sequence
  Description of Artificial Sequence: Synthetic oligonucleotide
  Target: ATXN2; (-) strand; PAM type: NNGRRT; PAM sequence: ATGAGT
aggacaggaagttgcttggg

SEQ ID NO: 9370 - DNA, 20 bp, Artificial Sequence
  Description of Artificial Sequence: Synthetic oligonucleotide
  Target: ATXN2; (-) strand; PAM type: NNGRRT; PAM sequence: TGGGAT
ttgcaggacaggaagttgct

SEQ ID NO: 9371 - DNA, 20 bp, Artificial Sequence
  Description of Artificial Sequence: Synthetic oligonucleotide
  Target: ATXN2; (-) strand; PAM type: NNGRRT; PAM sequence: ATGAAT
atctgaataggtcacttacc

SEQ ID NO: 9372 - DNA, 20 bp, Artificial Sequence
  Description of Artificial Sequence: Synthetic oligonucleotide
  Target: ATXN2; (-) strand; PAM type: NNGRRT; PAM sequence: CTGAAT
aaaagataaaagtggtatat

SEQ ID NO: 9373 - DNA, 20 bp, Artificial Sequence
  Description of Artificial Sequence: Synthetic oligonucleotide
  Target: ATXN2; (-) strand; PAM type: NNGRRT; PAM sequence: GTGAGT
catatctaaacatagaaaag

SEQ ID NO: 9374 - DNA, 20 bp, Artificial Sequence
  Description of Artificial Sequence: Synthetic oligonucleotide
  Target: ATXN2; (-) strand; PAM type: NNGRRT; PAM sequence: GTGAAT
taacataatgttaagtattt

SEQ ID NO: 9375 - DNA, 20 bp, Artificial Sequence
  Description of Artificial Sequence: Synthetic oligonucleotide
  Target: ATXN2; (-) strand; PAM type: NNGRRT; PAM sequence: CAGAGT
tagacacataggctgtcgta

SEQ ID NO: 9376 - DNA, 20 bp, Artificial Sequence
  Description of Artificial Sequence: Synthetic oligonucleotide
  Target: ATXN2; (-) strand; PAM type: NNGRRT; PAM sequence: TAGAGT
atcttatcattgtacaaata

SEQ ID NO: 9377 - DNA, 20 bp, Artificial Sequence
  Description of Artificial Sequence: Synthetic oligonucleotide
  Target: ATXN2; (-) strand; PAM type: NNGRRT; PAM sequence: GGGGAT
tttatgcattgcttaatgat

SEQ ID NO: 9378 - DNA, 20 bp, Artificial Sequence
  Description of Artificial Sequence: Synthetic oligonucleotide
  Target: ATXN2; (-) strand; PAM type: NNGRRT; PAM sequence: TGGGAT
acctcagcctcccaaagtgc

SEQ ID NO: 9379 - DNA, 20 bp, Artificial Sequence
  Description of Artificial Sequence: Synthetic oligonucleotide
  Target: ATXN2; (-) strand; PAM type: NNGRRT; PAM sequence: CTGGGT
agaggtctcactatgttgcc

SEQ ID NO: 9380 - DNA, 20 bp, Artificial Sequence
  Description of Artificial Sequence: Synthetic oligonucleotide
  Target: ATXN2; (-) strand; PAM type: NNGRRT; PAM sequence: TGGAGT
tcttgctctgtcacccaggg

SEQ ID NO: 9381 - DNA, 20 bp, Artificial Sequence
  Description of Artificial Sequence: Synthetic oligonucleotide
  Target: ATXN2; (-) strand; PAM type: NNGRRT; PAM sequence: CAGGGT
cagggtcttgctctgtcacc

SEQ ID NO: 9382 - DNA, 20 bp, Artificial Sequence
  Description of Artificial Sequence: Synthetic oligonucleotide
  Target: ATXN2; (-) strand; PAM type: NNGRRT; PAM sequence: CAGGGT
gtatgaatttttttttgagg

SEQ ID NO: 9383 - DNA, 20 bp, Artificial Sequence
  Description of Artificial Sequence: Synthetic oligonucleotide
  Target: ATXN2; (-) strand; PAM type: NNGRRT; PAM sequence: ATGAAT
ttttctttccctagcagtgt

SEQ ID NO: 9384 - DNA, 20 bp, Artificial Sequence
  Description of Artificial Sequence: Synthetic oligonucleotide
  Target: ATXN2; (-) strand; PAM type: NNGRRT; PAM sequence: GTGAGT
tccagggtacatataatcct

SEQ ID NO: 9385 - DNA, 20 bp, Artificial Sequence
  Description of Artificial Sequence: Synthetic oligonucleotide
  Target: ATXN2; (-) strand; PAM type: NNGRRT; PAM sequence: CAGGGT
gtggcaagtgtttatttttc

SEQ ID NO: 9386 - DNA, 20 bp, Artificial Sequence
  Description of Artificial Sequence: Synthetic oligonucleotide
  Target: ATXN2; (-) strand; PAM type: NNGRRT; PAM sequence: CTGGGT
aatgcatagaaatgagattg

SEQ ID NO: 9387 - DNA, 20 bp, Artificial Sequence
  Description of Artificial Sequence: Synthetic oligonucleotide
  Target: ATXN2; (-) strand; PAM type: NNGRRT; PAM sequence: TGGAAT
atgattttatttctcttggt

SEQ ID NO: 9388 - DNA, 20 bp, Artificial Sequence
  Description of Artificial Sequence: Synthetic oligonucleotide
  Target: ATXN2; (-) strand; PAM type: NNGRRT; PAM sequence: ATGAAT
aataaataaataaagctggt

SEQ ID NO: 9389 - DNA, 20 bp, Artificial Sequence
  Description of Artificial Sequence: Synthetic oligonucleotide
  Target: ATXN2; (-) strand; PAM type: NNGRRT; PAM sequence: AAGAGT
tgcactccagcctgggcatc

SEQ ID NO: 9390 - DNA, 20 bp, Artificial Sequence
  Description of Artificial Sequence: Synthetic oligonucleotide
  Target: ATXN2; (-) strand; PAM type: NNGRRT; PAM sequence: GAGAAT
tactcaggaggctgaggcag

SEQ ID NO: 9391 - DNA, 20 bp, Artificial Sequence
  Description of Artificial Sequence: Synthetic oligonucleotide
  Target: ATXN2; (-) strand; PAM type: NNGRRT; PAM sequence: GGGAGT
caggcggatcacctaaggtt

SEQ ID NO: 9392 - DNA, 20 bp, Artificial Sequence
  Description of Artificial Sequence: Synthetic oligonucleotide
  Target: ATXN2; (-) strand; PAM type: NNGRRT; PAM sequence: GCGGAT
attttggaaggccgaggcag

SEQ ID NO: 9393 - DNA, 20 bp, Artificial Sequence
  Description of Artificial Sequence: Synthetic oligonucleotide
  Target: ATXN2; (-) strand; PAM type: NNGRRT; PAM sequence: CCGGGT
attaaaaataaagctggagg

SEQ ID NO: 9394 - DNA, 20 bp, Artificial Sequence
  Description of Artificial Sequence: Synthetic oligonucleotide
  Target: ATXN2; (-) strand; PAM type: NNGRRT; PAM sequence: TTGAGT
tgttcatctagtggtggaca

SEQ ID NO: 9395 - DNA, 20 bp, Artificial Sequence
  Description of Artificial Sequence: Synthetic oligonucleotide
  Target: ATXN2; (-) strand; PAM type: NNGRRT; PAM sequence: TTGAGT
tagtttctttctgcttattg

SEQ ID NO: 9396 - DNA, 20 bp, Artificial Sequence
  Description of Artificial Sequence: Synthetic oligonucleotide
  Target: ATXN2; (-) strand; PAM type: NNGRRT; PAM sequence: CTGGGT
acacgccactgcactccagc

SEQ ID NO: 9397 - DNA, 20 bp, Artificial Sequence
  Description of Artificial Sequence: Synthetic oligonucleotide
  Target: ATXN2; (-) strand; PAM type: NNGRRT; PAM sequence: GAGAAT
actcgggggggctgagacag

SEQ ID NO: 9398 - DNA, 20 bp, Artificial Sequence
  Description of Artificial Sequence: Synthetic oligonucleotide
  Target: ATXN2; (-) strand; PAM type: NNGRRT; PAM sequence: AGGAGT
tgggtggatcacctgaggtc

SEQ ID NO: 9399 - DNA, 20 bp, Artificial Sequence
  Description of Artificial Sequence: Synthetic oligonucleotide
  Target: ATXN2; (-) strand; PAM type: NNGRRT; PAM sequence: GTGGAT
actttgggaggctgaggtgg

SEQ ID NO: 9400 - DNA, 20 bp, Artificial Sequence
  Description of Artificial Sequence: Synthetic oligonucleotide
  Target: ATXN2; (-) strand; PAM type: NNGRRT; PAM sequence: GTGGGT
cagcactttgggaggctgag

SEQ ID NO: 9401 - DNA, 20 bp, Artificial Sequence
  Description of Artificial Sequence: Synthetic oligonucleotide
  Target: ATXN2; (-) strand; PAM type: NNGRRT; PAM sequence: AGGAGT
tgggaggatcgctggagccc

SEQ ID NO: 9402 - DNA, 20 bp, Artificial Sequence
  Description of Artificial Sequence: Synthetic oligonucleotide
  Target: ATXN2; (-) strand; PAM type: NNGRRT; PAM sequence: GAGGAT
tacttggggagctgaggtgg

SEQ ID NO: 9403 - DNA, 20 bp, Artificial Sequence
  Description of Artificial Sequence: Synthetic oligonucleotide
  Target: ATXN2; (-) strand; PAM type: NNGRRT; PAM sequence: AGGGAT
tggcctcccaaagtgttggg

SEQ ID NO: 9404 - DNA, 20 bp, Artificial Sequence
  Description of Artificial Sequence: Synthetic oligonucleotide
  Target: ATXN2; (-) strand; PAM type: NNGRRT; PAM sequence: TAGGAT
tatttttaatttttcggaga

SEQ ID NO: 9405 - DNA, 20 bp, Artificial Sequence
  Description of Artificial Sequence: Synthetic oligonucleotide
  Target: ATXN2; (-) strand; PAM type: NNGRRT; PAM sequence: CTGAGT
catcatcccacctcagcttg

SEQ ID NO: 9406 - DNA, 20 bp, Artificial Sequence
  Description of Artificial Sequence: Synthetic oligonucleotide
  Target: ATXN2; (-) strand; PAM type: NNGRRT; PAM sequence: TCGAAT
cttactgtaactgtgtaacc

SEQ ID NO: 9407 - DNA, 20 bp, Artificial Sequence
  Description of Artificial Sequence: Synthetic oligonucleotide
  Target: ATXN2; (-) strand; PAM type: NNGRRT; PAM sequence: TGGAGT
tcttcctctgttgctcaggg

SEQ ID NO: 9408 - DNA, 20 bp, Artificial Sequence
  Description of Artificial Sequence: Synthetic oligonucleotide
  Target: ATXN2; (-) strand; PAM type: NNGRRT; PAM sequence: CAGGGT
cagaatcttcctctgttgct

SEQ ID NO: 9409 - DNA, 20 bp, Artificial Sequence
  Description of Artificial Sequence: Synthetic oligonucleotide
  Target: ATXN2; (-) strand; PAM type: NNGRRT; PAM sequence: CAGAAT
ttttttttcttttttggaga

SEQ ID NO: 9410 - DNA, 20 bp, Artificial Sequence
  Description of Artificial Sequence: Synthetic oligonucleotide
  Target: ATXN2; (-) strand; PAM type: NNGRRT; PAM sequence: CAGGGT
ccccttttgttcctaagaga

SEQ ID NO: 9411 - DNA, 20 bp, Artificial Sequence
  Description of Artificial Sequence: Synthetic oligonucleotide
  Target: ATXN2; (-) strand; PAM type: NNGRRT; PAM sequence: TGGGAT
ctgcctcggcctcccagtgc

SEQ ID NO: 9412 - DNA, 20 bp, Artificial Sequence
  Description of Artificial Sequence: Synthetic oligonucleotide
  Target: ATXN2; (-) strand; PAM type: NNGRRT; PAM sequence: TGGGGT
gttttgtattttagtagaga

SEQ ID NO: 9413 - DNA, 20 bp, Artificial Sequence
  Description of Artificial Sequence: Synthetic oligonucleotide
  Target: ATXN2; (-) strand; PAM type: NNGRRT; PAM sequence: CTGGGT
ctccttgcaacctccacctc

SEQ ID NO: 9414 - DNA, 20 bp, Artificial Sequence
  Description of Artificial Sequence: Synthetic oligonucleotide
  Target: ATXN2; (-) strand; PAM type: NNGRRT; PAM sequence: TAGAGT
tctcgctctgttgccgagcc

SEQ ID NO: 9415 - DNA, 20 bp, Artificial Sequence
  Description of Artificial Sequence: Synthetic oligonucleotide
  Target: ATXN2; (-) strand; PAM type: NNGRRT; PAM sequence: TGGAGT
ttttttttttttttttgaga

SEQ ID NO: 9416 - DNA, 20 bp, Artificial Sequence
  Description of Artificial Sequence: Synthetic oligonucleotide
  Target: ATXN2; (-) strand; PAM type: NNGRRT; PAM sequence: TAGAAT
attggctgcataactggcat

SEQ ID NO: 9417 - DNA, 20 bp, Artificial Sequence
  Description of Artificial Sequence: Synthetic oligonucleotide
  Target: ATXN2; (-) strand; PAM type: NNGRRT; PAM sequence: CAGAGT
agaccaagagggttatttac

SEQ ID NO: 9418 - DNA, 20 bp, Artificial Sequence
  Description of Artificial Sequence: Synthetic oligonucleotide
  Target: ATXN2; (-) strand; PAM type: NNGRRT; PAM sequence: GAGGGT
ggtgaagaaattgagaccaa

SEQ ID NO: 9419 - DNA, 20 bp, Artificial Sequence
  Description of Artificial Sequence: Synthetic oligonucleotide
  Target: ATXN2; (-) strand; PAM type: NNGRRT; PAM sequence: ACGGGT
ttttagtactcattctattt

SEQ ID NO: 9420 - DNA, 20 bp, Artificial Sequence
  Description of Artificial Sequence: Synthetic oligonucleotide
  Target: ATXN2; (-) strand; PAM type: NNGRRT; PAM sequence: TTGGAT
ccctccctttccctggtagt

SEQ ID NO: 9421 - DNA, 20 bp, Artificial Sequence
  Description of Artificial Sequence: Synthetic oligonucleotide
  Target: ATXN2; (-) strand; PAM type: NNGRRT; PAM sequence: TGGGGT
accagctgtggtcgggttgc

SEQ ID NO: 9422 - DNA, 20 bp, Artificial Sequence
  Description of Artificial Sequence: Synthetic oligonucleotide
  Target: ATXN2; (-) strand; PAM type: NNGRRT; PAM sequence: TCGGGT
ccagggaagaccagctgtgg

SEQ ID NO: 9423 - DNA, 20 bp, Artificial Sequence
  Description of Artificial Sequence: Synthetic oligonucleotide
  Target: ATXN2; (-) strand; PAM type: NNGRRT; PAM sequence: AGGAGT
gggggatggccgatgttggc

SEQ ID NO: 9424 - DNA, 20 bp, Artificial Sequence
  Description of Artificial Sequence: Synthetic oligonucleotide
  Target: ATXN2; (-) strand; PAM type: NNGRRT; PAM sequence: GGGGAT
cttgagcatctcatagttag

SEQ ID NO: 9425 - DNA, 20 bp, Artificial Sequence
  Description of Artificial Sequence: Synthetic oligonucleotide
  Target: ATXN2; (-) strand; PAM type: NNGRRT; PAM sequence: TGGGGT
acattgggggagcagggttg

SEQ ID NO: 9426 - DNA, 20 bp, Artificial Sequence
  Description of Artificial Sequence: Synthetic oligonucleotide
  Target: ATXN2; (-) strand; PAM type: NNGRRT; PAM sequence: CAGGGT
cacggtggacattgggggag

SEQ ID NO: 9427 - DNA, 20 bp, Artificial Sequence
  Description of Artificial Sequence: Synthetic oligonucleotide
  Target: ATXN2; (-) strand; PAM type: NNGRRT; PAM sequence: GGGGAT
acggagttctcgctgtggat

SEQ ID NO: 9428 - DNA, 20 bp, Artificial Sequence
  Description of Artificial Sequence: Synthetic oligonucleotide
  Target: ATXN2; (-) strand; PAM type: NNGRRT; PAM sequence: GTGGAT
tcgggcacggagttctcgct

SEQ ID NO: 9429 - DNA, 20 bp, Artificial Sequence
  Description of Artificial Sequence: Synthetic oligonucleotide
  Target: ATXN2; (-) strand; PAM type: NNGRRT; PAM sequence: CGGAGT
ccagacgacatggtcgggca

SEQ ID NO: 9430 - DNA, 20 bp, Artificial Sequence
  Description of Artificial Sequence: Synthetic oligonucleotide
  Target: ATXN2; (-) strand; PAM type: NNGRRT; PAM sequence: GTGGGT
aggcagcaggagttcatgaa

SEQ ID NO: 9431 - DNA, 20 bp, Artificial Sequence
  Description of Artificial Sequence: Synthetic oligonucleotide
  Target: ATXN2; (-) strand; PAM type: NNGRRT; PAM sequence: AGGAGT
tgctatgaagcccaggcagc

SEQ ID NO: 9432 - DNA, 20 bp, Artificial Sequence
  Description of Artificial Sequence: Synthetic oligonucleotide
  Target: ATXN2; (-) strand; PAM type: NNGRRT; PAM sequence: CGGAGT
cttcttgtccctagacttca

SEQ ID NO: 9433 - DNA, 20 bp, Artificial Sequence
  Description of Artificial Sequence: Synthetic oligonucleotide
  Target: ATXN2; (-) strand; PAM type: NNGRRT; PAM sequence: CAGAAT
aacactgggatgatgctgag

SEQ ID NO: 9434 - DNA, 20 bp, Artificial Sequence
  Description of Artificial Sequence: Synthetic oligonucleotide
  Target: ATXN2; (-) strand; PAM type: NNGRRT; PAM sequence: TGGGAT
tagacttgaaagatcaacac

SEQ ID NO: 9435 - DNA, 20 bp, Artificial Sequence
  Description of Artificial Sequence: Synthetic oligonucleotide
  Target: ATXN2; (-) strand; PAM type: NNGRRT; PAM sequence: GGGAAT
ggagggtggatggagtacat

SEQ ID NO: 9436 - DNA, 20 bp, Artificial Sequence
  Description of Artificial Sequence: Synthetic oligonucleotide
  Target: ATXN2; (-) strand; PAM type: NNGRRT; PAM sequence: TGGAGT
ggcgaggaatggagggtgga

SEQ ID NO: 9437 - DNA, 20 bp, Artificial Sequence
  Description of Artificial Sequence: Synthetic oligonucleotide
  Target: ATXN2; (-) strand; PAM type: NNGRRT; PAM sequence: GTGGAT
ggcagggcgaggaatggagg

SEQ ID NO: 9438 - DNA, 20 bp, Artificial Sequence
  Description of Artificial Sequence: Synthetic oligonucleotide
  Target: ATXN2; (-) strand; PAM type: NNGRRT; PAM sequence: GAGGGT
tgggggcagggcgaggaatg

SEQ ID NO: 9439 - DNA, 20 bp, Artificial Sequence
  Description of Artificial Sequence: Synthetic oligonucleotide
  Target: ATXN2; (-) strand; PAM type: NNGRRT; PAM sequence: AGGAAT
ttggctctgggggcagggcg

SEQ ID NO: 9440 - DNA, 20 bp, Artificial Sequence
  Description of Artificial Sequence: Synthetic oligonucleotide
  Target: ATXN2; (-) strand; PAM type: NNGRRT; PAM sequence: GAGGAT
gccattgtagaaaagtgtgt

SEQ ID NO: 9441 - DNA, 20 bp, Artificial Sequence
  Description of Artificial Sequence: Synthetic oligonucleotide
  Target: ATXN2; (-) strand; PAM type: NNGRRT; PAM sequence: TTGAAT
ccagaaacacgtgcagttta

SEQ ID NO: 9442 - DNA, 20 bp, Artificial Sequence
  Description of Artificial Sequence: Synthetic oligonucleotide
  Target: ATXN2; (-) strand; PAM type: NNGRRT; PAM sequence: TGGAAT
gagtcaaacgcatttggagt

SEQ ID NO: 9443 - DNA, 20 bp, Artificial Sequence
  Description of Artificial Sequence: Synthetic oligonucleotide
  Target: ATXN2; (-) strand; PAM type: NNGRRT; PAM sequence: TGGAGT
aatgtagagtcaaacgcatt

SEQ ID NO: 9444 - DNA, 20 bp, Artificial Sequence
  Description of Artificial Sequence: Synthetic oligonucleotide
  Target: ATXN2; (-) strand; PAM type: NNGRRT; PAM sequence: TAGAGT
atagtagatgttcaacaatg

SEQ ID NO: 9445 - DNA, 20 bp, Artificial Sequence
  Description of Artificial Sequence: Synthetic oligonucleotide
  Target: ATXN2; (-) strand; PAM type: NNGRRT; PAM sequence: CAGGGT
ttttgtatttttagtagtga

SEQ ID NO: 9446 - DNA, 20 bp, Artificial Sequence
  Description of Artificial Sequence: Synthetic oligonucleotide
  Target: ATXN2; (-) strand; PAM type: NNGRRT; PAM sequence: CTGAGT
agcagttctgcctcagcctc

SEQ ID NO: 9447 - DNA, 20 bp, Artificial Sequence
  Description of Artificial Sequence: Synthetic oligonucleotide
  Target: ATXN2; (-) strand; PAM type: NNGRRT; PAM sequence: CCGAGT
ctcactctaacctccacctc

SEQ ID NO: 9448 - DNA, 20 bp, Artificial Sequence
  Description of Artificial Sequence: Synthetic oligonucleotide
  Target: ATXN2; (-) strand; PAM type: NNGRRT; PAM sequence: CTGAGT
gatcctcccacctcagcctc

SEQ ID NO: 9449 - DNA, 20 bp, Artificial Sequence
  Description of Artificial Sequence: Synthetic oligonucleotide
  Target: ATXN2; (-) strand; PAM type: NNGRRT; PAM sequence: CTGGGT
cttattgcagcctttaactc

SEQ ID NO: 9450 - DNA, 20 bp, Artificial Sequence
  Description of Artificial Sequence: Synthetic oligonucleotide
  Target: ATXN2; (-) strand; PAM type: NNGRRT; PAM sequence: TGGAGT
tcttgctgtattgcccaggt

SEQ ID NO: 9451 - DNA, 20 bp, Artificial Sequence
  Description of Artificial Sequence: Synthetic oligonucleotide
  Target: ATXN2; (-) strand; PAM type: NNGRRT; PAM sequence: TGGGAT
tatgtatttattttttgaga

SEQ ID NO: 9452 - DNA, 20 bp, Artificial Sequence
  Description of Artificial Sequence: Synthetic oligonucleotide
  Target: ATXN2; (-) strand; PAM type: NNGRRT; PAM sequence: GAGAAT
tacttgggaggctgaggcag

SEQ ID NO: 9453 - DNA, 20 bp, Artificial Sequence
  Description of Artificial Sequence: Synthetic oligonucleotide
  Target: ATXN2; (-) strand; PAM type: NNGRRT; PAM sequence: GTGGAT
actttggaaggccgaggcgg

SEQ ID NO: 9454 - DNA, 20 bp, Artificial Sequence
  Description of Artificial Sequence: Synthetic oligonucleotide
  Target: ATXN2; (-) strand; PAM type: NNGRRT; PAM sequence: GCGGGT
cagcactttggaaggccgag

SEQ ID NO: 9455 - DNA, 20 bp, Artificial Sequence
  Description of Artificial Sequence: Synthetic oligonucleotide
  Target: ATXN2; (-) strand; PAM type: NNGRRT; PAM sequence: GGGAAT
tactcgagaggctgaggcag

SEQ ID NO: 9456 - DNA, 20 bp, Artificial Sequence
  Description of Artificial Sequence: Synthetic oligonucleotide
  Target: ATXN2; (-) strand; PAM type: NNGRRT; PAM sequence: GTGGAT
actttgggaggctgaggcgg

SEQ ID NO: 9457 - DNA, 20 bp, Artificial Sequence
  Description of Artificial Sequence: Synthetic oligonucleotide
  Target: ATXN2; (-) strand; PAM type: NNGRRT; PAM sequence: GCGGGT
cagcactttgggaggctgag

SEQ ID NO: 9458 - DNA, 20 bp, Artificial Sequence
  Description of Artificial Sequence: Synthetic oligonucleotide
  Target: ATXN2; (-) strand; PAM type: NNGRRT; PAM sequence: AAGAAT
tatttacctattaaaagaga

SEQ ID NO: 9459 - DNA, 20 bp, Artificial Sequence
  Description of Artificial Sequence: Synthetic oligonucleotide
  Target: ATXN2; (-) strand; PAM type: NNGRRT; PAM sequence: TTGAAT
ttaactgcttggtcacatgt

SEQ ID NO: 9460 - DNA, 20 bp, Artificial Sequence
  Description of Artificial Sequence: Synthetic oligonucleotide
  Target: ATXN2; (-) strand; PAM type: NNGRRT; PAM sequence: TTGAAT
attgattgtatccctatttc

SEQ ID NO: 9461 - DNA, 20 bp, Artificial Sequence
  Description of Artificial Sequence: Synthetic oligonucleotide
  Target: ATXN2; (-) strand; PAM type: NNGRRT; PAM sequence: TGGGAT
acctgggcctcccaacgtgc

SEQ ID NO: 9462 - DNA, 20 bp, Artificial Sequence
  Description of Artificial Sequence: Synthetic oligonucleotide
  Target: ATXN2; (-) strand; PAM type: NNGRRT; PAM sequence: CGGGGT
ttttatatttttagtagaga

SEQ ID NO: 9463 - DNA, 20 bp, Artificial Sequence
  Description of Artificial Sequence: Synthetic oligonucleotide
  Target: ATXN2; (-) strand; PAM type: NNGRRT; PAM sequence: TGGGAT
gcctcagcctcctgaatagt

SEQ ID NO: 9464 - DNA, 20 bp, Artificial Sequence
  Description of Artificial Sequence: Synthetic oligonucleotide
  Target: ATXN2; (-) strand; PAM type: NNGRRT; PAM sequence: CTGAAT
gattctcctgcctcagcctc

SEQ ID NO: 9465 - DNA, 20 bp, Artificial Sequence
  Description of Artificial Sequence: Synthetic oligonucleotide
  Target: ATXN2; (-) strand; PAM type: NNGRRT; PAM sequence: TGGAGT
tcttgctgtgttgcccaggc

SEQ ID NO: 9466 - DNA, 20 bp, Artificial Sequence
  Description of Artificial Sequence: Synthetic oligonucleotide
  Target: ATXN2; (-) strand; PAM type: NNGRRT; PAM sequence: CGGAGT
ttttttttttttttttgagt

SEQ ID NO: 9467 - DNA, 20 bp, Artificial Sequence
  Description of Artificial Sequence: Synthetic oligonucleotide
  Target: ATXN2; (-) strand; PAM type: NNGRRT; PAM sequence: TTGAGT
tttttttttttttttttttt

SEQ ID NO: 9468 - DNA, 20 bp, Artificial Sequence
  Description of Artificial Sequence: Synthetic oligonucleotide
  Target: ATXN2; (-) strand; PAM type: NNGRRT; PAM sequence: TGGAAT
ctggcaactccagtctaagc

SEQ ID NO: 9469 - DNA, 20 bp, Artificial Sequence
  Description of Artificial Sequence: Synthetic oligonucleotide
  Target: ATXN2; (-) strand; PAM type: NNGRRT; PAM sequence: TTGAAT
tacaggacactcagttaaat

SEQ ID NO: 9470 - DNA, 20 bp, Artificial Sequence
  Description of Artificial Sequence: Synthetic oligonucleotide
  Target: ATXN2; (-) strand; PAM type: NNGRRT; PAM sequence: TAGGGT
ttttgaggttatatctaagc

SEQ ID NO: 9471 - DNA, 20 bp, Artificial Sequence
  Description of Artificial Sequence: Synthetic oligonucleotide
  Target: ATXN2; (-) strand; PAM type: NNGRRT; PAM sequence: AAGAGT
acgcagtaaaaggattgaga

SEQ ID NO: 9472 - DNA, 20 bp, Artificial Sequence
  Description of Artificial Sequence: Synthetic oligonucleotide
  Target: ATXN2; (-) strand; PAM type: NNGRRT; PAM sequence: AAGGAT
gagccagagaaacgcagtaa

SEQ ID NO: 9473 - DNA, 20 bp, Artificial Sequence
  Description of Artificial Sequence: Synthetic oligonucleotide
  Target: ATXN2; (-) strand; PAM type: NNGRRT; PAM sequence: AGGGAT
tccagaaatgctgggattac

SEQ ID NO: 9474 - DNA, 20 bp, Artificial Sequence
  Description of Artificial Sequence: Synthetic oligonucleotide
  Target: ATXN2; (-) strand; PAM type: NNGRRT; PAM sequence: TGGGAT
accttggtgtccagaaatgc

SEQ ID NO: 9475 - DNA, 20 bp, Artificial Sequence
  Description of Artificial Sequence: Synthetic oligonucleotide
  Target: ATXN2; (-) strand; PAM type: NNGRRT; PAM sequence: GGGAGT
cctcagcctcctgagtagct

SEQ ID NO: 9476 - DNA, 20 bp, Artificial Sequence
  Description of Artificial Sequence: Synthetic oligonucleotide
  Target: ATXN2; (-) strand; PAM type: NNGRRT; PAM sequence: CTGAGT
gatcctcccacctcagcctc

SEQ ID NO: 9477 - DNA, 20 bp, Artificial Sequence
  Description of Artificial Sequence: Synthetic oligonucleotide
  Target: ATXN2; (-) strand; PAM type: NNGRRT; PAM sequence: TAGAAT
agggtctctgtcaccaaggc

SEQ ID NO: 9478 - DNA, 20 bp, Artificial Sequence
  Description of Artificial Sequence: Synthetic oligonucleotide
  Target: ATXN2; (-) strand; PAM type: NNGRRT; PAM sequence: CAGGGT
ttttttttttttttttgaga

SEQ ID NO: 9479 - DNA, 20 bp, Artificial Sequence
  Description of Artificial Sequence: Synthetic oligonucleotide
  Target: ATXN2; (-) strand; PAM type: NNGRRT; PAM sequence: ATGAAT
ccacgagcagcaacagttca

SEQ ID NO: 9480 - DNA, 20 bp, Artificial Sequence
  Description of Artificial Sequence: Synthetic oligonucleotide
  Target: ATXN2; (-) strand; PAM type: NNGRRT; PAM sequence: TTGAGT
gaattgttttaagctttggt

SEQ ID NO: 9481 - DNA, 20 bp, Artificial Sequence
  Description of Artificial Sequence: Synthetic oligonucleotide
  Target: ATXN2; (-) strand; PAM type: NNGRRT; PAM sequence: AAGAAT
agccactgcacccagctgcc

SEQ ID NO: 9482 - DNA, 20 bp, Artificial Sequence
  Description of Artificial Sequence: Synthetic oligonucleotide
  Target: ATXN2; (-) strand; PAM type: NNGRRT; PAM sequence: TGGGAT
cacctcgactcccaaagtgc

SEQ ID NO: 9483 - DNA, 20 bp, Artificial Sequence
  Description of Artificial Sequence: Synthetic oligonucleotide
  Target: ATXN2; (-) strand; PAM type: NNGRRT; PAM sequence: CAGGAT
tggggtttcaccatgttggc

SEQ ID NO: 9484 - DNA, 20 bp, Artificial Sequence
  Description of Artificial Sequence: Synthetic oligonucleotide
  Target: ATXN2; (-) strand; PAM type: NNGRRT; PAM sequence: TGGGGT
ttttgtatttttagtagaga

SEQ ID NO: 9485 - DNA, 20 bp, Artificial Sequence
  Description of Artificial Sequence: Synthetic oligonucleotide
  Target: ATXN2; (-) strand; PAM type: NNGRRT; PAM sequence: GGGGAT
cctcggcctcccaaagtgct

SEQ ID NO: 9486 - DNA, 20 bp, Artificial Sequence
  Description of Artificial Sequence: Synthetic oligonucleotide
  Target: ATXN2; (-) strand; PAM type: NNGRRT; PAM sequence: TGGGGT
gtatttagttttagtagaga

SEQ ID NO: 9487 - DNA, 20 bp, Artificial Sequence
  Description of Artificial Sequence: Synthetic oligonucleotide
  Target: ATXN2; (-) strand; PAM type: NNGRRT; PAM sequence: TGGGAT
acctcagcctcctgagtagc

SEQ ID NO: 9488 - DNA, 20 bp, Artificial Sequence
  Description of Artificial Sequence: Synthetic oligonucleotide
  Target: ATXN2; (-) strand; PAM type: NNGRRT; PAM sequence: CTGAGT
gattctcctacctcagcctc

SEQ ID NO: 9489 - DNA, 20 bp, Artificial Sequence
  Description of Artificial Sequence: Synthetic oligonucleotide
  Target: ATXN2; (-) strand; PAM type: NNGRRT; PAM sequence: CCGGGT
gcaatggcccgatctgcctc

SEQ ID NO: 9490 - DNA, 20 bp, Artificial Sequence
  Description of Artificial Sequence: Synthetic oligonucleotide
  Target: ATXN2; (-) strand; PAM type: NNGRRT; PAM sequence: TGGAGT
tcgctcttagttgccgaggc

SEQ ID NO: 9491 - DNA, 20 bp, Artificial Sequence
  Description of Artificial Sequence: Synthetic oligonucleotide
  Target: ATXN2; (-) strand; PAM type: NNGRRT; PAM sequence: TGGAGT
tgaaataattgtttttgaga

SEQ ID NO: 9492 - DNA, 20 bp, Artificial Sequence
  Description of Artificial Sequence: Synthetic oligonucleotide
  Target: ATXN2; (-) strand; PAM type: NNGRRT; PAM sequence: TAGGAT
tgaaaaagaataagaagtgt

SEQ ID NO: 9493 - DNA, 20 bp, Artificial Sequence
  Description of Artificial Sequence: Synthetic oligonucleotide
  Target: ATXN2; (-) strand; PAM type: NNGRRT; PAM sequence: AAGAAT
gcatttttagaaaaatgaaa

SEQ ID NO: 9494 - DNA, 20 bp, Artificial Sequence
  Description of Artificial Sequence: Synthetic oligonucleotide
  Target: ATXN2; (-) strand; PAM type: NNGRRT; PAM sequence: GTGGAT
gtagattgtgaaacacatta

SEQ ID NO: 9495 - DNA, 20 bp, Artificial Sequence
  Description of Artificial Sequence: Synthetic oligonucleotide
  Target: ATXN2; (-) strand; PAM type: NNGRRT; PAM sequence: GGGAGT
tgagccaccactcccggcct

SEQ ID NO: 9496 - DNA, 20 bp, Artificial Sequence
  Description of Artificial Sequence: Synthetic oligonucleotide
  Target: ATXN2; (-) strand; PAM type: NNGRRT; PAM sequence: CGGGAT
gcctaggcctcccaaagtgc

SEQ ID NO: 9497 - DNA, 20 bp, Artificial Sequence
  Description of Artificial Sequence: Synthetic oligonucleotide
  Target: ATXN2; (-) strand; PAM type: NNGRRT; PAM sequence: TGGGGT
ttttgtatttttagtagaga

SEQ ID NO: 9498 - DNA, 20 bp, Artificial Sequence
  Description of Artificial Sequence: Synthetic oligonucleotide
  Target: ATXN2; (-) strand; PAM type: NNGRRT; PAM sequence: CCGGAT
acgggtgcccgccaccacac

SEQ ID NO: 9499 - DNA, 20 bp, Artificial Sequence
  Description of Artificial Sequence: Synthetic oligonucleotide
  Target: ATXN2; (-) strand; PAM type: NNGRRT; PAM sequence: ACGGGT
actcctgagtagctgggatt

SEQ ID NO: 9500 - DNA, 20 bp, Artificial Sequence
  Description of Artificial Sequence: Synthetic oligonucleotide
  Target: ATXN2; (-) strand; PAM type: NNGRRT; PAM sequence: TGGGAT
gcctctgactcctgagtagc

SEQ ID NO: 9501 - DNA, 20 bp, Artificial Sequence
  Description of Artificial Sequence: Synthetic oligonucleotide
  Target: ATXN2; (-) strand; PAM type: NNGRRT; PAM sequence: CTGAGT
gattttcctgcctctgactc

SEQ ID NO: 9502 - DNA, 20 bp, Artificial Sequence
  Description of Artificial Sequence: Synthetic oligonucleotide
  Target: ATXN2; (-) strand; PAM type: NNGRRT; PAM sequence: TGGAGT
tcttgttctgttgcccaggc

SEQ ID NO: 9503 - DNA, 20 bp, Artificial Sequence
  Description of Artificial Sequence: Synthetic oligonucleotide
  Target: ATXN2; (-) strand; PAM type: NNGRRT; PAM sequence: TAGAAT
ctggctttttttttttgaca

SEQ ID NO: 9504 - DNA, 20 bp, Artificial Sequence
  Description of Artificial Sequence: Synthetic oligonucleotide
  Target: ATXN2; (-) strand; PAM type: NNGRRT; PAM sequence: CGGGGT
ttttgtatttttagtagaga

SEQ ID NO: 9505 - DNA, 20 bp, Artificial Sequence
  Description of Artificial Sequence: Synthetic oligonucleotide
  Target: ATXN2; (-) strand; PAM type: NNGRRT; PAM sequence: CCGGGT
gtacagatattggtcacaca

SEQ ID NO: 9506 - DNA, 20 bp, Artificial Sequence
  Description of Artificial Sequence: Synthetic oligonucleotide
  Target: ATXN2; (-) strand; PAM type: NNGRRT; PAM sequence: GGGAGT
tgcctgactcctgagtagct

SEQ ID NO: 9507 - DNA, 20 bp, Artificial Sequence
  Description of Artificial Sequence: Synthetic oligonucleotide
  Target: ATXN2; (-) strand; PAM type: NNGRRT; PAM sequence: CTGAGT
gcagttctcctgcctgactc

SEQ ID NO: 9508 - DNA, 20 bp, Artificial Sequence
  Description of Artificial Sequence: Synthetic oligonucleotide
  Target: ATXN2; (-) strand; PAM type: NNGRRT; PAM sequence: TGGAGT
tttgctcttgtcacccaggc

SEQ ID NO: 9509 - DNA, 20 bp, Artificial Sequence
  Description of Artificial Sequence: Synthetic oligonucleotide
  Target: ATXN2; (-) strand; PAM type: NNGRRT; PAM sequence: TGGAGT
ttttttttttttttttgaga

SEQ ID NO: 9510 - DNA, 20 bp, Artificial Sequence
  Description of Artificial Sequence: Synthetic oligonucleotide
  Target: ATXN2; (-) strand; PAM type: NNGRRT; PAM sequence: CTGGAT
ggcaggtggttcacttaagt

SEQ ID NO: 9511 - DNA, 20 bp, Artificial Sequence
  Description of Artificial Sequence: Synthetic oligonucleotide
  Target: ATXN2; (-) strand; PAM type: NNGRRT; PAM sequence: AGGAGT
caggcagattacctgagccc

SEQ ID NO: 9512 - DNA, 20 bp, Artificial Sequence
  Description of Artificial Sequence: Synthetic oligonucleotide
  Target: ATXN2; (-) strand; PAM type: NNGRRT; PAM sequence: CAGAGT
ccccagcctgggccacagag

SEQ ID NO: 9513 - DNA, 20 bp, Artificial Sequence
  Description of Artificial Sequence: Synthetic oligonucleotide
  Target: ATXN2; (-) strand; PAM type: NNGRRT; PAM sequence: GAGAAT
tacttgggaggctgaggcag

SEQ ID NO: 9514 - DNA, 20 bp, Artificial Sequence
  Description of Artificial Sequence: Synthetic oligonucleotide
  Target: ATXN2; (-) strand; PAM type: NNGRRT; PAM sequence: GAGAAT
tactcgggaggctgaggcag

SEQ ID NO: 9515 - DNA, 20 bp, Artificial Sequence
  Description of Artificial Sequence: Synthetic oligonucleotide
  Target: ATXN2; (-) strand; PAM type: NNGRRT; PAM sequence: CAGGGT
attgagaccattctggccaa

SEQ ID NO: 9516 - DNA, 20 bp, Artificial Sequence
  Description of Artificial Sequence: Synthetic oligonucleotide
  Target: ATXN2; (-) strand; PAM type: NNGRRT; PAM sequence: GCGGAT
actttgggaggttgaggagg

SEQ ID NO: 9517 - DNA, 20 bp, Artificial Sequence
  Description of Artificial Sequence: Synthetic oligonucleotide
  Target: ATXN2; (-) strand; PAM type: NNGRRT; PAM sequence: AGGAGT
agggtggatcacttgaggtc

SEQ ID NO: 9518 - DNA, 20 bp, Artificial Sequence
  Description of Artificial Sequence: Synthetic oligonucleotide
  Target: ATXN2; (-) strand; PAM type: NNGRRT; PAM sequence: GTGGAT
actttgggaggccaaggagg

SEQ ID NO: 9519 - DNA, 20 bp, Artificial Sequence
  Description of Artificial Sequence: Synthetic oligonucleotide
  Target: ATXN2; (-) strand; PAM type: NNGRRT; PAM sequence: GAGGGT
cagcactttgggaggccaag

SEQ ID NO: 9520 - DNA, 20 bp, Artificial Sequence
  Description of Artificial Sequence: Synthetic oligonucleotide
  Target: ATXN2; (-) strand; PAM type: NNGRRT; PAM sequence: CTGGGT
tagaaagttgaaagacttag

SEQ ID NO: 9521 - DNA, 20 bp, Artificial Sequence
  Description of Artificial Sequence: Synthetic oligonucleotide
  Target: ATXN2; (-) strand; PAM type: NNGRRT; PAM sequence: GAGAGT
ctgctttagcctctggtctg

SEQ ID NO: 9522 - DNA, 20 bp, Artificial Sequence
  Description of Artificial Sequence: Synthetic oligonucleotide
  Target: ATXN2; (-) strand; PAM type: NNGRRT; PAM sequence: GGGGGT
tttttttttttggtagaaat

SEQ ID NO: 9523 - DNA, 20 bp, Artificial Sequence
  Description of Artificial Sequence: Synthetic oligonucleotide
  Target: ATXN2; (-) strand; PAM type: NNGRRT; PAM sequence: GGGAGT
cttgagcagattttagaaag

SEQ ID NO: 9524 - DNA, 20 bp, Artificial Sequence
  Description of Artificial Sequence: Synthetic oligonucleotide
  Target: ATXN2; (-) strand; PAM type: NNGRRT; PAM sequence: AGGAAT
ctgaaacacatttcgaaatc

SEQ ID NO: 9525 - DNA, 20 bp, Artificial Sequence
  Description of Artificial Sequence: Synthetic oligonucleotide
  Target: ATXN2; (-) strand; PAM type: NNGRRT; PAM sequence: TCGGGT
caagtactgcatttttcttt

SEQ ID NO: 9526 - DNA, 20 bp, Artificial Sequence
  Description of Artificial Sequence: Synthetic oligonucleotide
  Target: ATXN2; (-) strand; PAM type: NNGRRT; PAM sequence: GCGGGT
attttagttttttataaagg

SEQ ID NO: 9527 - DNA, 20 bp, Artificial Sequence
  Description of Artificial Sequence: Synthetic oligonucleotide
  Target: ATXN2; (-) strand; PAM type: NNGRRT; PAM sequence: TGGAAT
ttcttaataatttttctaag

SEQ ID NO: 9528 - DNA, 20 bp, Artificial Sequence
  Description of Artificial Sequence: Synthetic oligonucleotide
  Target: ATXN2; (-) strand; PAM type: NNGRRT; PAM sequence: CAGGGT
ttttgtatattttgtagaga

SEQ ID NO: 9529 - DNA, 20 bp, Artificial Sequence
  Description of Artificial Sequence: Synthetic oligonucleotide
  Target: ATXN2; (-) strand; PAM type: NNGRRT; PAM sequence: CCGAGT
agtcctcctacctcagtctc

SEQ ID NO: 9530 - DNA, 20 bp, Artificial Sequence
  Description of Artificial Sequence: Synthetic oligonucleotide
  Target: ATXN2; (-) strand; PAM type: NNGRRT; PAM sequence: TGGAGT
tcttaccctgttggccaggt

SEQ ID NO: 9531 - DNA, 20 bp, Artificial Sequence
  Description of Artificial Sequence: Synthetic oligonucleotide
  Target: ATXN2; (-) strand; PAM type: NNGRRT; PAM sequence: CTGAGT
aaatttccttttttttgaga

SEQ ID NO: 9532 - DNA, 20 bp, Artificial Sequence
  Description of Artificial Sequence: Synthetic oligonucleotide
  Target: ATXN2; (-) strand; PAM type: NNGRRT; PAM sequence: TAGAAT
tattaactgtatcagaactt

SEQ ID NO: 9533 - DNA, 20 bp, Artificial Sequence
  Description of Artificial Sequence: Synthetic oligonucleotide
  Target: ATXN2; (-) strand; PAM type: NNGRRT; PAM sequence: GGGAAT
ttaatagctaactacatttt

SEQ ID NO: 9534 - DNA, 20 bp, Artificial Sequence
  Description of Artificial Sequence: Synthetic oligonucleotide
  Target: ATXN2; (-) strand; PAM type: NNGRRT; PAM sequence: TCGAGT
ttgatcttgaactcatggcc

SEQ ID NO: 9535 - DNA, 20 bp, Artificial Sequence
  Description of Artificial Sequence: Synthetic oligonucleotide
  Target: ATXN2; (-) strand; PAM type: NNGRRT; PAM sequence: TGGAGT
ttttgtattttcagtagatg

SEQ ID NO: 9536 - DNA, 20 bp, Artificial Sequence
  Description of Artificial Sequence: Synthetic oligonucleotide
  Target: ATXN2; (-) strand; PAM type: NNGRRT; PAM sequence: CCGGGT
ctcactgcaacctctgtctc

SEQ ID NO: 9537 - DNA, 20 bp, Artificial Sequence
  Description of Artificial Sequence: Synthetic oligonucleotide
  Target: ATXN2; (-) strand; PAM type: NNGRRT; PAM sequence: TGGAGT
tctggctctgttgctaaggc

SEQ ID NO: 9538 - DNA, 20 bp, Artificial Sequence
  Description of Artificial Sequence: Synthetic oligonucleotide
  Target: ATXN2; (-) strand; PAM type: NNGRRT; PAM sequence: TAGGAT
ttatttatttatttttgtga

SEQ ID NO: 9539 - DNA, 20 bp, Artificial Sequence
  Description of Artificial Sequence: Synthetic oligonucleotide
  Target: ATXN2; (-) strand; PAM type: NNGRRT; PAM sequence: TGGGGT
tttttgtattttagtagaga

SEQ ID NO: 9540 - DNA, 20 bp, Artificial Sequence
  Description of Artificial Sequence: Synthetic oligonucleotide
  Target: ATXN2; (-) strand; PAM type: NNGRRT; PAM sequence: CTGAGT
gatttttctgcctcagcctc

SEQ ID NO: 9541 - DNA, 20 bp, Artificial Sequence
  Description of Artificial Sequence: Synthetic oligonucleotide
  Target: ATXN2; (-) strand; PAM type: NNGRRT; PAM sequence: TGGAGT
tctcgctctgtcacctaggc

SEQ ID NO: 9542 - DNA, 20 bp, Artificial Sequence
  Description of Artificial Sequence: Synthetic oligonucleotide
  Target: ATXN2; (-) strand; PAM type: NNGRRT; PAM sequence: CGGAGT
tttttcttttttttccgaga

SEQ ID NO: 9543 - DNA, 20 bp, Artificial Sequence
  Description of Artificial Sequence: Synthetic oligonucleotide
  Target: ATXN2; (-) strand; PAM type: NNGRRT; PAM sequence: CTGGGT
ttggtattttttttatgagt

SEQ ID NO: 9544 - DNA, 20 bp, Artificial Sequence
  Description of Artificial Sequence: Synthetic oligonucleotide
  Target: ATXN2; (-) strand; PAM type: NNGRRT; PAM sequence: ATGAGT
cctggtttggtatttttttt

SEQ ID NO: 9545 - DNA, 20 bp, Artificial Sequence
  Description of Artificial Sequence: Synthetic oligonucleotide
  Target: ATXN2; (-) strand; PAM type: NNGRRT; PAM sequence: TGGGAT
gcctcggcttcccaaagtgc

SEQ ID NO: 9546 - DNA, 20 bp, Artificial Sequence
  Description of Artificial Sequence: Synthetic oligonucleotide
  Target: ATXN2; (-) strand; PAM type: NNGRRT; PAM sequence: CAGGAT
tggggtttcactgtgttagc

SEQ ID NO: 9547 - DNA, 20 bp, Artificial Sequence
  Description of Artificial Sequence: Synthetic oligonucleotide
  Target: ATXN2; (-) strand; PAM type: NNGRRT; PAM sequence: TGGGGT
ttatgcattttaagtagaga

SEQ ID NO: 9548 - DNA, 20 bp, Artificial Sequence
  Description of Artificial Sequence: Synthetic oligonucleotide
  Target: ATXN2; (-) strand; PAM type: NNGRRT; PAM sequence: CCGAGT
cattctcctgcctcagcctc

SEQ ID NO: 9549 - DNA, 20 bp, Artificial Sequence
  Description of Artificial Sequence: Synthetic oligonucleotide
  Target: ATXN2; (-) strand; PAM type: NNGRRT; PAM sequence: TAGAGT
tctcgctctgtcgcccaggc

SEQ ID NO: 9550 - DNA, 20 bp, Artificial Sequence
  Description of Artificial Sequence: Synthetic oligonucleotide
  Target: ATXN2; (-) strand; PAM type: NNGRRT; PAM sequence: TGGGAT
gcctcgtcctcccaaagtgc

SEQ ID NO: 9551 - DNA, 20 bp, Artificial Sequence
  Description of Artificial Sequence: Synthetic oligonucleotide
  Target: ATXN2; (-) strand; PAM type: NNGRRT; PAM sequence: TGGGGT
ttttgtatttttagtagaga

SEQ ID NO: 9552 - DNA, 20 bp, Artificial Sequence
  Description of Artificial Sequence: Synthetic oligonucleotide
  Target: ATXN2; (-) strand; PAM type: NNGRRT; PAM sequence: TGGGAT
gcctcagcctcctgagtagc

SEQ ID NO: 9553 - DNA, 20 bp, Artificial Sequence
  Description of Artificial Sequence: Synthetic oligonucleotide
  Target: ATXN2; (-) strand; PAM type: NNGRRT; PAM sequence: CTGAGT
gattgtcctgcctcagcctc

SEQ ID NO: 9554 - DNA, 20 bp, Artificial Sequence
  Description of Artificial Sequence: Synthetic oligonucleotide
  Target: ATXN2; (-) strand; PAM type: NNGRRT; PAM sequence: TGGAAT
tcttaccctgtcacccaggc

SEQ ID NO: 9555 - DNA, 20 bp, Artificial Sequence
  Description of Artificial Sequence: Synthetic oligonucleotide
  Target: ATXN2; (-) strand; PAM type: NNGRRT; PAM sequence: CAGGAT
ttgtttgtgtgtgtgtgttg

SEQ ID NO: 9556 - DNA, 20 bp, Artificial Sequence
  Description of Artificial Sequence: Synthetic oligonucleotide
  Target: ATXN2; (-) strand; PAM type: NNGRRT; PAM sequence: TGGGAT
tccttggcctcccaaggtgc

SEQ ID NO: 9557 - DNA, 20 bp, Artificial Sequence
  Description of Artificial Sequence: Synthetic oligonucleotide
  Target: ATXN2; (-) strand; PAM type: NNGRRT; PAM sequence: TTGAAT
acctgttgcccaggatggcc

SEQ ID NO: 9558 - DNA, 20 bp, Artificial Sequence
  Description of Artificial Sequence: Synthetic oligonucleotide
  Target: ATXN2; (-) strand; PAM type: NNGRRT; PAM sequence: CAGGAT
cagagattttacctgttgcc

SEQ ID NO: 9559 - DNA, 20 bp, Artificial Sequence
  Description of Artificial Sequence: Synthetic oligonucleotide
  Target: ATXN2; (-) strand; PAM type: NNGRRT; PAM sequence: TGGAAT
accttggcctcctgaagtgc

SEQ ID NO: 9560 - DNA, 20 bp, Artificial Sequence
  Description of Artificial Sequence: Synthetic oligonucleotide
  Target: ATXN2; (-) strand; PAM type: NNGRRT; PAM sequence: TGGGGT
ttttgtattattggtagaga

SEQ ID NO: 9561 - DNA, 20 bp, Artificial Sequence
  Description of Artificial Sequence: Synthetic oligonucleotide
  Target: ATXN2; (-) strand; PAM type: NNGRRT; PAM sequence: TGGGAT
gcctcagcctcccgagtagc

SEQ ID NO: 9562 - DNA, 20 bp, Artificial Sequence
  Description of Artificial Sequence: Synthetic oligonucleotide
  Target: ATXN2; (-) strand; PAM type: NNGRRT; PAM sequence: CCGAGT
gattctcatgcctcagcctc

SEQ ID NO: 9563 - DNA, 20 bp, Artificial Sequence
  Description of Artificial Sequence: Synthetic oligonucleotide
  Target: ATXN2; (-) strand; PAM type: NNGRRT; PAM sequence: CAGGAT
cctagggtggggtgcagtgg

SEQ ID NO: 9564 - DNA, 20 bp, Artificial Sequence
  Description of Artificial Sequence: Synthetic oligonucleotide
  Target: ATXN2; (-) strand; PAM type: NNGRRT; PAM sequence: TGGGGT
tttcactctgttgcctaggg

SEQ ID NO: 9565 - DNA, 20 bp, Artificial Sequence
  Description of Artificial Sequence: Synthetic oligonucleotide
  Target: ATXN2; (-) strand; PAM type: NNGRRT; PAM sequence: TAGGGT
ttttgtttcactctgttgcc

SEQ ID NO: 9566 - DNA, 20 bp, Artificial Sequence
  Description of Artificial Sequence: Synthetic oligonucleotide
  Target: ATXN2; (-) strand; PAM type: NNGRRT; PAM sequence: CTGAGT
gatcctcctatctcagcctc

SEQ ID NO: 9567 - DNA, 20 bp, Artificial Sequence
  Description of Artificial Sequence: Synthetic oligonucleotide
  Target: ATXN2; (-) strand; PAM type: NNGRRT; PAM sequence: TCGAGT
catcatggctcattgcaacc

SEQ ID NO: 9568 - DNA, 20 bp, Artificial Sequence
  Description of Artificial Sequence: Synthetic oligonucleotide
  Target: ATXN2; (-) strand; PAM type: NNGRRT; PAM sequence: GGGAGT
tctagctctgtcacccaggc

SEQ ID NO: 9569 - DNA, 20 bp, Artificial Sequence
  Description of Artificial Sequence: Synthetic oligonucleotide
  Target: ATXN2; (-) strand; PAM type: NNGRRT; PAM sequence: TGGGAT
gtcttggcctcccaaagttt

SEQ ID NO: 9570 - DNA, 20 bp, Artificial Sequence
  Description of Artificial Sequence: Synthetic oligonucleotide
  Target: ATXN2; (-) strand; PAM type: NNGRRT; PAM sequence: TGGGGT
gtatttttttttagtagaga

SEQ ID NO: 9571 - DNA, 20 bp, Artificial Sequence
  Description of Artificial Sequence: Synthetic oligonucleotide
  Target: ATXN2; (-) strand; PAM type: NNGRRT; PAM sequence: TGGGAT
gcctcagcctcctgagtagc

SEQ ID NO: 9572 - DNA, 20 bp, Artificial Sequence
  Description of Artificial Sequence: Synthetic oligonucleotide
  Target: ATXN2; (-) strand; PAM type: NNGRRT; PAM sequence: CTGAGT
gattctcctgcctcagcctc

SEQ ID NO: 9573 - DNA, 20 bp, Artificial Sequence
  Description of Artificial Sequence: Synthetic oligonucleotide
  Target: ATXN2; (-) strand; PAM type: NNGRRT; PAM sequence: CAGAGT
gttatttatttattttgaga

SEQ ID NO: 9574 - DNA, 20 bp, Artificial Sequence
  Description of Artificial Sequence: Synthetic oligonucleotide
  Target: ATXN2; (-) strand; PAM type: NNGRRT; PAM sequence: CAGGAT
cacggacagtacttgccctt

SEQ ID NO: 9575 - DNA, 20 bp, Artificial Sequence
  Description of Artificial Sequence: Synthetic oligonucleotide
  Target: ATXN2; (-) strand; PAM type: NNGRRT; PAM sequence: TGGAAT
cccctaacaggcttgtttta

SEQ ID NO: 9576 - DNA, 20 bp, Artificial Sequence
  Description of Artificial Sequence: Synthetic oligonucleotide
  Target: ATXN2; (-) strand; PAM type: NNGRRT; PAM sequence: TGGAAT
ccaacagcctcccaaagtgc

SEQ ID NO: 9577 - DNA, 20 bp, Artificial Sequence
  Description of Artificial Sequence: Synthetic oligonucleotide
  Target: ATXN2; (-) strand; PAM type: NNGRRT; PAM sequence: CAGGAT
cggggtttcaccatgttggc

SEQ ID NO: 9578 - DNA, 20 bp, Artificial Sequence
  Description of Artificial Sequence: Synthetic oligonucleotide
  Target: ATXN2; (-) strand; PAM type: NNGRRT; PAM sequence: CGGGGT
ttttgtatttttagtagaga

SEQ ID NO: 9579 - DNA, 20 bp, Artificial Sequence
  Description of Artificial Sequence: Synthetic oligonucleotide
  Target: ATXN2; (-) strand; PAM type: NNGRRT; PAM sequence: CCGGGT
ctcactgcaacctctgcctc

SEQ ID NO: 9580 - DNA, 20 bp, Artificial Sequence
  Description of Artificial Sequence: Synthetic oligonucleotide
  Target: ATXN2; (-) strand; PAM type: NNGRRT; PAM sequence: TGGAGT
gtctcgctctgtcaccaggc

SEQ ID NO: 9581 - DNA, 20 bp, Artificial Sequence
  Description of Artificial Sequence: Synthetic oligonucleotide
  Target: ATXN2; (-) strand; PAM type: NNGRRT; PAM sequence: TGGAGT
tttttttttttttaattaga

SEQ ID NO: 9582 - DNA, 20 bp, Artificial Sequence
  Description of Artificial Sequence: Synthetic oligonucleotide
  Target: ATXN2; (-) strand; PAM type: NNGRRT; PAM sequence: TAGGGT
ttgctatatgcagttcccag

SEQ ID NO: 9583 - DNA, 20 bp, Artificial Sequence
  Description of Artificial Sequence: Synthetic oligonucleotide
  Target: ATXN2; (-) strand; PAM type: NNGRRT; PAM sequence: GAGAAT
tactccggaggccgaggcaa

SEQ ID NO: 9584 - DNA, 20 bp, Artificial Sequence
  Description of Artificial Sequence: Synthetic oligonucleotide
  Target: ATXN2; (-) strand; PAM type: NNGRRT; PAM sequence: GGGGAT
atggtttttccataggggca

SEQ ID NO: 9585 - DNA, 20 bp, Artificial Sequence
  Description of Artificial Sequence: Synthetic oligonucleotide
  Target: ATXN2; (-) strand; PAM type: NNGRRT; PAM sequence: CAGGGT
atttaaattttttgtagaga

SEQ ID NO: 9586 - DNA, 20 bp, Artificial Sequence
  Description of Artificial Sequence: Synthetic oligonucleotide
  Target: ATXN2; (-) strand; PAM type: NNGRRT; PAM sequence: CTGAGT
atttctcctgtcttagcctc

SEQ ID NO: 9587 - DNA, 20 bp, Artificial Sequence
  Description of Artificial Sequence: Synthetic oligonucleotide
  Target: ATXN2; (-) strand; PAM type: NNGRRT; PAM sequence: TGGAGT
tctccctctgtcacccaggc

SEQ ID NO: 9588 - DNA, 20 bp, Artificial Sequence
  Description of Artificial Sequence: Synthetic oligonucleotide
  Target: ATXN2; (-) strand; PAM type: NNGRRT; PAM sequence: TAGAGT
tctccctttatttatttttt

SEQ ID NO: 9589 - DNA, 20 bp, Artificial Sequence
  Description of Artificial Sequence: Synthetic oligonucleotide
  Target: ATXN2; (-) strand; PAM type: NNGRRT; PAM sequence: TAGGAT
cttgcccaaagcaatatttg

SEQ ID NO: 9590 - DNA, 20 bp, Artificial Sequence
  Description of Artificial Sequence: Synthetic oligonucleotide
  Target: ATXN2; (-) strand; PAM type: NNGRRT; PAM sequence: TGGGAT
gccttggcctcccaaagtgc

SEQ ID NO: 9591 - DNA, 20 bp, Artificial Sequence
  Description of Artificial Sequence: Synthetic oligonucleotide
  Target: ATXN2; (-) strand; PAM type: NNGRRT; PAM sequence: CAGGGT
ttttgtatttttagcagaga

SEQ ID NO: 9592 - DNA, 20 bp, Artificial Sequence
  Description of Artificial Sequence: Synthetic oligonucleotide
  Target: ATXN2; (-) strand; PAM type: NNGRRT; PAM sequence: CTGAGT
gattctcctgcctcagcctt

SEQ ID NO: 9593 - DNA, 20 bp, Artificial Sequence
  Description of Artificial Sequence: Synthetic oligonucleotide
  Target: ATXN2; (-) strand; PAM type: NNGRRT; PAM sequence: CCGGGT
ctcactgcaacctctgtttc

SEQ ID NO: 9594 - DNA, 20 bp, Artificial Sequence
  Description of Artificial Sequence: Synthetic oligonucleotide
  Target: ATXN2; (-) strand; PAM type: NNGRRT; PAM sequence: TGGAGT
agttttgctctttcccaggc

SEQ ID NO: 9595 - DNA, 20 bp, Artificial Sequence
  Description of Artificial Sequence: Synthetic oligonucleotide
  Target: ATXN2; (-) strand; PAM type: NNGRRT; PAM sequence: TGGGAT
gcctcggcctcccaaagtgc

SEQ ID NO: 9596 - DNA, 20 bp, Artificial Sequence
  Description of Artificial Sequence: Synthetic oligonucleotide
  Target: ATXN2; (-) strand; PAM type: NNGRRT; PAM sequence: TGGAGT
ttttgcatttttagtagata

SEQ ID NO: 9597 - DNA, 20 bp, Artificial Sequence
  Description of Artificial Sequence: Synthetic oligonucleotide
  Target: ATXN2; (-) strand; PAM type: NNGRRT; PAM sequence: TGGGAT
ccttagccctcccgaatagc

SEQ ID NO: 9598 - DNA, 20 bp, Artificial Sequence
  Description of Artificial Sequence: Synthetic oligonucleotide
  Target: ATXN2; (-) strand; PAM type: NNGRRT; PAM sequence: CCGAAT
attctcctgccttagccctc

SEQ ID NO: 9599 - DNA, 20 bp, Artificial Sequence
  Description of Artificial Sequence: Synthetic oligonucleotide
  Target: ATXN2; (-) strand; PAM type: NNGRRT; PAM sequence: TGGAGT
agagtctctgtcgcccaggc

SEQ ID NO: 9600 - DNA, 20 bp, Artificial Sequence
  Description of Artificial Sequence: Synthetic oligonucleotide
  Target: ATXN2; (-) strand; PAM type: NNGRRT; PAM sequence: CAGAGT
ttttttgtttgtttttgaga

SEQ ID NO: 9601 - DNA, 20 bp, Artificial Sequence
  Description of Artificial Sequence: Synthetic oligonucleotide
  Target: ATXN2; (-) strand; PAM type: NNGRRT; PAM sequence: AAGGGT
tgatgttactgttaccatct

SEQ ID NO: 9602 - DNA, 20 bp, Artificial Sequence
  Description of Artificial Sequence: Synthetic oligonucleotide
  Target: ATXN2; (-) strand; PAM type: NNGRRT; PAM sequence: CTGGGT
tgtttttttccaaaggatat

SEQ ID NO: 9603 - DNA, 20 bp, Artificial Sequence
  Description of Artificial Sequence: Synthetic oligonucleotide
  Target: ATXN2; (-) strand; PAM type: NNGRRT; PAM sequence: AAGGAT
gttttttttgtttttttcca

SEQ ID NO: 9604 - DNA, 20 bp, Artificial Sequence
  Description of Artificial Sequence: Synthetic oligonucleotide
  Target: ATXN2; (-) strand; PAM type: NNGRRT; PAM sequence: TGGGAT
gcctcagcctcccaaagttc

SEQ ID NO: 9605 - DNA, 20 bp, Artificial Sequence
  Description of Artificial Sequence: Synthetic oligonucleotide
  Target: ATXN2; (-) strand; PAM type: NNGRRT; PAM sequence: TAGAAT
cagggtttcaccatgttggc

SEQ ID NO: 9606 - DNA, 20 bp, Artificial Sequence
  Description of Artificial Sequence: Synthetic oligonucleotide
  Target: ATXN2; (-) strand; PAM type: NNGRRT; PAM sequence: CAGGGT
ttttgtatttttagtagaga

SEQ ID NO: 9607 - DNA, 20 bp, Artificial Sequence
  Description of Artificial Sequence: Synthetic oligonucleotide
  Target: ATXN2; (-) strand; PAM type: NNGRRT; PAM sequence: CTGGGT
tgcctcagcctcctgagtag

SEQ ID NO: 9608 - DNA, 20 bp, Artificial Sequence
  Description of Artificial Sequence: Synthetic oligonucleotide
  Target: ATXN2; (-) strand; PAM type: NNGRRT; PAM sequence: CTGAGT
gattctcctgcctcagcctc

SEQ ID NO: 9609 - DNA, 20 bp, Artificial Sequence
  Description of Artificial Sequence: Synthetic oligonucleotide
  Target: ATXN2; (-) strand; PAM type: NNGRRT; PAM sequence: CCGGGT
cttactgcaacctttgcctc

SEQ ID NO: 9610 - DNA, 20 bp, Artificial Sequence
  Description of Artificial Sequence: Synthetic oligonucleotide
  Target: ATXN2; (-) strand; PAM type: NNGRRT; PAM sequence: TGGAGT
tcttgctctgtcgcccaggc

SEQ ID NO: 9611 - DNA, 20 bp, Artificial Sequence
  Description of Artificial Sequence: Synthetic oligonucleotide
  Target: ATXN2; (-) strand; PAM type: NNGRRT; PAM sequence: CGGAGT
ttttttttttttttttgaga

SEQ ID NO: 9612 - DNA, 20 bp, Artificial Sequence
  Description of Artificial Sequence: Synthetic oligonucleotide
  Target: ATXN2; (-) strand; PAM type: NNGRRT; PAM sequence: TAGAAT
ggttttagaagattgttctc

SEQ ID NO: 9613 - DNA, 20 bp, Artificial Sequence
  Description of Artificial Sequence: Synthetic oligonucleotide
  Target: ATXN2; (-) strand; PAM type: NNGRRT; PAM sequence: ACGAAT
tattgtttttttactttgaa

SEQ ID NO: 9614 - DNA, 20 bp, Artificial Sequence
  Description of Artificial Sequence: Synthetic oligonucleotide
  Target: ATXN2; (-) strand; PAM type: NNGRRT; PAM sequence: GAGGAT
aaacaaacaaacaaaaaaag

SEQ ID NO: 9615 - DNA, 20 bp, Artificial Sequence
  Description of Artificial Sequence: Synthetic oligonucleotide
  Target: ATXN2; (-) strand; PAM type: NNGRRT; PAM sequence: ATGAGT
gcttgatcccggaggttgca

SEQ ID NO: 9616 - DNA, 20 bp, Artificial Sequence
  Description of Artificial Sequence: Synthetic oligonucleotide
  Target: ATXN2; (-) strand; PAM type: NNGRRT; PAM sequence: GAGAAT
ttcttgggaggctgagggaa

SEQ ID NO: 9617 - DNA, 20 bp, Artificial Sequence
  Description of Artificial Sequence: Synthetic oligonucleotide
  Target: ATXN2; (-) strand; PAM type: NNGRRT; PAM sequence: AGGAGT
cgggtggatcacctggggtc

SEQ ID NO: 9618 - DNA, 20 bp, Artificial Sequence
  Description of Artificial Sequence: Synthetic oligonucleotide
  Target: ATXN2; (-) strand; PAM type: NNGRRT; PAM sequence: TGGGGT
gctgaggcgggtggatcacc

SEQ ID NO: 9619 - DNA, 20 bp, Artificial Sequence
  Description of Artificial Sequence: Synthetic oligonucleotide
  Target: ATXN2; (-) strand; PAM type: NNGRRT; PAM sequence: GTGGAT
actttaggaggctgaggcgg

SEQ ID NO: 9620 - DNA, 20 bp, Artificial Sequence
  Description of Artificial Sequence: Synthetic oligonucleotide
  Target: ATXN2; (-) strand; PAM type: NNGRRT; PAM sequence: GCGGGT
cagcactttaggaggctgag

SEQ ID NO: 9621 - DNA, 20 bp, Artificial Sequence
  Description of Artificial Sequence: Synthetic oligonucleotide
  Target: ATXN2; (-) strand; PAM type: NNGRRT; PAM sequence: GAGGAT
ccatatattttgacttaaag

SEQ ID NO: 9622 - DNA, 20 bp, Artificial Sequence
  Description of Artificial Sequence: Synthetic oligonucleotide
  Target: ATXN2; (-) strand; PAM type: NNGRRT; PAM sequence: AGGGAT
atggtttatacttctacata

SEQ ID NO: 9623 - DNA, 20 bp, Artificial Sequence
  Description of Artificial Sequence: Synthetic oligonucleotide
  Target: ATXN2; (-) strand; PAM type: NNGRRT; PAM sequence: TGGGAT
attctgaaacagtgaaaaca

SEQ ID NO: 9624 - DNA, 20 bp, Artificial Sequence
  Description of Artificial Sequence: Synthetic oligonucleotide
  Target: ATXN2; (-) strand; PAM type: NNGRRT; PAM sequence: GAGGGT
caaaaaagttaattgacatt

SEQ ID NO: 9625 - DNA, 20 bp, Artificial Sequence
  Description of Artificial Sequence: Synthetic oligonucleotide
  Target: ATXN2; (-) strand; PAM type: NNGRRT; PAM sequence: TTGGGT
tttgagcaaagatttgaagg

SEQ ID NO: 9626 - DNA, 20 bp, Artificial Sequence
  Description of Artificial Sequence: Synthetic oligonucleotide
  Target: ATXN2; (-) strand; PAM type: NNGRRT; PAM sequence: ATGGAT
ggaatgagttacaattttaa

SEQ ID NO: 9627 - DNA, 20 bp, Artificial Sequence
  Description of Artificial Sequence: Synthetic oligonucleotide
  Target: ATXN2; (-) strand; PAM type: NNGRRT; PAM sequence: ATGAGT
tagggagtgtggggagggga

SEQ ID NO: 9628 - DNA, 20 bp, Artificial Sequence
  Description of Artificial Sequence: Synthetic oligonucleotide
  Target: ATXN2; (-) strand; PAM type: NNGRRT; PAM sequence: GGGAAT
ggtatagggagtgtggggag

SEQ ID NO: 9629 - DNA, 20 bp, Artificial Sequence
  Description of Artificial Sequence: Synthetic oligonucleotide
  Target: ATXN2; (-) strand; PAM type: NNGRRT; PAM sequence: GGGAGT
gaaagcagattaaaggtata

SEQ ID NO: 9630 - DNA, 20 bp, Artificial Sequence
  Description of Artificial Sequence: Synthetic oligonucleotide
  Target: ATXN2; (-) strand; PAM type: NNGRRT; PAM sequence: TGGAAT
ataatagtgtataagagcta

SEQ ID NO: 9631 - DNA, 20 bp, Artificial Sequence
  Description of Artificial Sequence: Synthetic oligonucleotide
  Target: ATXN2; (-) strand; PAM type: NNGRRT; PAM sequence: TGGAGT
aagcaaacatattgtccttt

SEQ ID NO: 9632 - DNA, 20 bp, Artificial Sequence
  Description of Artificial Sequence: Synthetic oligonucleotide
  Target: ATXN2; (-) strand; PAM type: NNGRRT; PAM sequence: GTGAAT
ggggtttttgggatgaatca

SEQ ID NO: 9633 - DNA, 20 bp, Artificial Sequence
  Description of Artificial Sequence: Synthetic oligonucleotide
  Target: ATXN2; (-) strand; PAM type: NNGRRT; PAM sequence: ATGAAT
atgtacatggggtttttggg

SEQ ID NO: 9634 - DNA, 20 bp, Artificial Sequence
  Description of Artificial Sequence: Synthetic oligonucleotide
  Target: ATXN2; (-) strand; PAM type: NNGRRT; PAM sequence: TGGGAT
atctatgtacatggggtttt

SEQ ID NO: 9635 - DNA, 20 bp, Artificial Sequence
  Description of Artificial Sequence: Synthetic oligonucleotide
  Target: ATXN2; (-) strand; PAM type: NNGRRT; PAM sequence: TGGGGT
tattgaagcatctatgtaca

SEQ ID NO: 9636 - DNA, 20 bp, Artificial Sequence
  Description of Artificial Sequence: Synthetic oligonucleotide
  Target: ATXN2; (-) strand; PAM type: NNGRRT; PAM sequence: TTGAAT
aagggcctaaaatatctacg

SEQ ID NO: 9637 - DNA, 20 bp, Artificial Sequence
  Description of Artificial Sequence: Synthetic oligonucleotide
  Target: ATXN2; (-) strand; PAM type: NNGRRT; PAM sequence: CAGAGT
ctgcactccagcctgggaga

SEQ ID NO: 9638 - DNA, 20 bp, Artificial Sequence
  Description of Artificial Sequence: Synthetic oligonucleotide
  Target: ATXN2; (-) strand; PAM type: NNGRRT; PAM sequence: CTGAAT
cttgggatacaggattcagt

SEQ ID NO: 9639 - DNA, 20 bp, Artificial Sequence
  Description of Artificial Sequence: Synthetic oligonucleotide
  Target: ATXN2; (-) strand; PAM type: NNGRRT; PAM sequence: CAGGAT
cattagaattgcttgggata

SEQ ID NO: 9640 - DNA, 20 bp, Artificial Sequence
  Description of Artificial Sequence: Synthetic oligonucleotide
  Target: ATXN2; (-) strand; PAM type: NNGRRT; PAM sequence: TGGGAT
aatatgacattagaattgct

SEQ ID NO: 9641 - DNA, 20 bp, Artificial Sequence
  Description of Artificial Sequence: Synthetic oligonucleotide
  Target: ATXN2; (-) strand; PAM type: NNGRRT; PAM sequence: TAGAAT
aaacctaaataatatgacat

SEQ ID NO: 9642 - DNA, 20 bp, Artificial Sequence
  Description of Artificial Sequence: Synthetic oligonucleotide
  Target: ATXN2; (-) strand; PAM type: NNGRRT; PAM sequence: ATGGAT
tccccattaaaaataaaaat

SEQ ID NO: 9643 - DNA, 20 bp, Artificial Sequence
  Description of Artificial Sequence: Synthetic oligonucleotide
  Target: ATXN2; (-) strand; PAM type: NNGRRT; PAM sequence: GGGAAT
tgtaatttcatggcactatt

SEQ ID NO: 9644 - DNA, 20 bp, Artificial Sequence
  Description of Artificial Sequence: Synthetic oligonucleotide
  Target: ATXN2; (-) strand; PAM type: NNGRRT; PAM sequence: AGGAAT
gatagtactgagtaaagtgc

SEQ ID NO: 9645 - DNA, 20 bp, Artificial Sequence
  Description of Artificial Sequence: Synthetic oligonucleotide
  Target: ATXN2; (-) strand; PAM type: NNGRRT; PAM sequence: CTGAGT
tatctgtcgtgctgatagta

SEQ ID NO: 9646 - DNA, 20 bp, Artificial Sequence
  Description of Artificial Sequence: Synthetic oligonucleotide
  Target: ATXN2; (-) strand; PAM type: NNGRRT; PAM sequence: GAGGGT
ctgtaaccattattattaat

SEQ ID NO: 9647 - DNA, 20 bp, Artificial Sequence
  Description of Artificial Sequence: Synthetic oligonucleotide
  Target: ATXN2; (-) strand; PAM type: NNGRRT; PAM sequence: GAGGAT
gagtttaatttggttcctct

SEQ ID NO: 9648 - DNA, 20 bp, Artificial Sequence
  Description of Artificial Sequence: Synthetic oligonucleotide
  Target: ATXN2; (-) strand; PAM type: NNGRRT; PAM sequence: TTGAGT
agttactggattattgatat

SEQ ID NO: 9649 - DNA, 20 bp, Artificial Sequence
  Description of Artificial Sequence: Synthetic oligonucleotide
  Target: ATXN2; (-) strand; PAM type: NNGRRT; PAM sequence: CTGGAT
ttaagtgcttttgttagtta

SEQ ID NO: 9650 - DNA, 20 bp, Artificial Sequence
  Description of Artificial Sequence: Synthetic oligonucleotide
  Target: ATXN2; (-) strand; PAM type: NNGRRT; PAM sequence: GGGAAT
gtagtttgtcaaatattgtg

SEQ ID NO: 9651 - DNA, 20 bp, Artificial Sequence
  Description of Artificial Sequence: Synthetic oligonucleotide
  Target: ATXN2; (-) strand; PAM type: NNGRRT; PAM sequence: TGGAAT
tcaagaaggttgctcttcca

SEQ ID NO: 9652 - DNA, 20 bp, Artificial Sequence
  Description of Artificial Sequence: Synthetic oligonucleotide
  Target: ATXN2; (-) strand; PAM type: NNGRRT; PAM sequence: CAGGAT
tttactagttcagagggctt

SEQ ID NO: 9653 - DNA, 20 bp, Artificial Sequence
  Description of Artificial Sequence: Synthetic oligonucleotide
  Target: ATXN2; (-) strand; PAM type: NNGRRT; PAM sequence: AAGAGT
tttccttagagaaagttacc

SEQ ID NO: 9654 - DNA, 20 bp, Artificial Sequence
  Description of Artificial Sequence: Synthetic oligonucleotide
  Target: ATXN2; (-) strand; PAM type: NNGRRT; PAM sequence: TTGGGT
aaccattctattgttgggaa

SEQ ID NO: 9655 - DNA, 20 bp, Artificial Sequence
  Description of Artificial Sequence: Synthetic oligonucleotide
  Target: ATXN2; (-) strand; PAM type: NNGRRT; PAM sequence: GGGAAT
tacttaaccattctattgtt

SEQ ID NO: 9656 - DNA, 20 bp, Artificial Sequence
  Description of Artificial Sequence: Synthetic oligonucleotide
  Target: ATXN2; (-) strand; PAM type: NNGRRT; PAM sequence: TGGGAT
gcctcggcctcccaaagtgc

SEQ ID NO: 9657 - DNA, 20 bp, Artificial Sequence
  Description of Artificial Sequence: Synthetic oligonucleotide
  Target: ATXN2; (-) strand; PAM type: NNGRRT; PAM sequence: AGGAAT
tcttgagtagctggggctac

SEQ ID NO: 9658 - DNA, 20 bp, Artificial Sequence
  Description of Artificial Sequence: Synthetic oligonucleotide
  Target: ATXN2; (-) strand; PAM type: NNGRRT; PAM sequence: TTGAGT
gattctcccacctcagcctc

SEQ ID NO: 9659 - DNA, 20 bp, Artificial Sequence
  Description of Artificial Sequence: Synthetic oligonucleotide
  Target: ATXN2; (-) strand; PAM type: NNGRRT; PAM sequence: CTGGGT
ctcactgcagcctctgactc

SEQ ID NO: 9660 - DNA, 20 bp, Artificial Sequence
  Description of Artificial Sequence: Synthetic oligonucleotide
  Target: ATXN2; (-) strand; PAM type: NNGRRT; PAM sequence: CAGAGT
ttttttttttttttttgaga

SEQ ID NO: 9661 - DNA, 20 bp, Artificial Sequence
  Description of Artificial Sequence: Synthetic oligonucleotide
  Target: ATXN2; (-) strand; PAM type: NNGRRT; PAM sequence: AGGAAT
aaagtgccaggattacaggc

SEQ ID NO: 9662 - DNA, 20 bp, Artificial Sequence
  Description of Artificial Sequence: Synthetic oligonucleotide
  Target: ATXN2; (-) strand; PAM type: NNGRRT; PAM sequence: CAGGAT
gcctcggcctcccaaagtgc

SEQ ID NO: 9663 - DNA, 20 bp, Artificial Sequence
  Description of Artificial Sequence: Synthetic oligonucleotide
  Target: ATXN2; (-) strand; PAM type: NNGRRT; PAM sequence: TGGGGT
ttttgtatttttagtagaga

SEQ ID NO: 9664 - DNA, 20 bp, Artificial Sequence
  Description of Artificial Sequence: Synthetic oligonucleotide
  Target: ATXN2; (-) strand; PAM type: NNGRRT; PAM sequence: TGGGAT
gccttggcctcccaaagtgc

SEQ ID NO: 9665 - DNA, 20 bp, Artificial Sequence
  Description of Artificial Sequence: Synthetic oligonucleotide
  Target: ATXN2; (-) strand; PAM type: NNGRRT; PAM sequence: CGGGAT
ttttgtatttttagtgagga

SEQ ID NO: 9666 - DNA, 20 bp, Artificial Sequence
  Description of Artificial Sequence: Synthetic oligonucleotide
  Target: ATXN2; (-) strand; PAM type: NNGRRT; PAM sequence: TGGGAT
gcctcagcctccccagtagc

SEQ ID NO: 9667 - DNA, 20 bp, Artificial Sequence
  Description of Artificial Sequence: Synthetic oligonucleotide
  Target: ATXN2; (-) strand; PAM type: NNGRRT; PAM sequence: CTGGGT
cttactgcagtctctgtctc

SEQ ID NO: 9668 - DNA, 20 bp, Artificial Sequence
  Description of Artificial Sequence: Synthetic oligonucleotide
  Target: ATXN2; (-) strand; PAM type: NNGRRT; PAM sequence: TGGAGT
tctcactctgtcgcccaggc

SEQ ID NO: 9669 - DNA, 20 bp, Artificial Sequence
  Description of Artificial Sequence: Synthetic oligonucleotide
  Target: ATXN2; (-) strand; PAM type: NNGRRT; PAM sequence: TGGAAT
gtgtgtgtgtgtgttttgga

SEQ ID NO: 9670 - DNA, 20 bp, Artificial Sequence
  Description of Artificial Sequence: Synthetic oligonucleotide
  Target: ATXN2; (-) strand; PAM type: NNGRRT; PAM sequence: TTGGAT
tgtgtgtgtgtgtgtgtgtt

SEQ ID NO: 9671 - DNA, 20 bp, Artificial Sequence
  Description of Artificial Sequence: Synthetic oligonucleotide
  Target: ATXN2; (-) strand; PAM type: NNGRRT; PAM sequence: GTGAAT
ttgactttgtgtgtgtgtgt

SEQ ID NO: 9672 - DNA, 20 bp, Artificial Sequence
  Description of Artificial Sequence: Synthetic oligonucleotide
  Target: ATXN2; (-) strand; PAM type: NNGRRT; PAM sequence: AAGGGT
gaaaataagtctctgagagc

SEQ ID NO: 9673 - DNA, 20 bp, Artificial Sequence
  Description of Artificial Sequence: Synthetic oligonucleotide
  Target: ATXN2; (-) strand; PAM type: NNGRRT; PAM sequence: TAGAAT
tgtaaataagtttcagcttc

SEQ ID NO: 9674 - DNA, 20 bp, Artificial Sequence
  Description of Artificial Sequence: Synthetic oligonucleotide
  Target: ATXN2; (-) strand; PAM type: NNGRRT; PAM sequence: TTGAAT
cttgtagaattactttgaat

SEQ ID NO: 9675 - DNA, 20 bp, Artificial Sequence
  Description of Artificial Sequence: Synthetic oligonucleotide
  Target: ATXN2; (-) strand; PAM type: NNGRRT; PAM sequence: TTGAAT
aatgtacttgtagaattact

SEQ ID NO: 9676 - DNA, 20 bp, Artificial Sequence
  Description of Artificial Sequence: Synthetic oligonucleotide
  Target: ATXN2; (-) strand; PAM type: NNGRRT; PAM sequence: TAGAAT
acagatcgttaatgtacttg

SEQ ID NO: 9677 - DNA, 20 bp, Artificial Sequence
  Description of Artificial Sequence: Synthetic oligonucleotide
  Target: ATXN2; (-) strand; PAM type: NNGRRT; PAM sequence: TTGGAT
gtgaaattttgtttactgtg

SEQ ID NO: 9678 - DNA, 20 bp, Artificial Sequence
  Description of Artificial Sequence: Synthetic oligonucleotide
  Target: ATXN2; (-) strand; PAM type: NNGRRT; PAM sequence: ATGAAT
ggcagcccttattctttctg

SEQ ID NO: 9679 - DNA, 20 bp, Artificial Sequence
  Description of Artificial Sequence: Synthetic oligonucleotide
  Target: ATXN2; (-) strand; PAM type: NNGRRT; PAM sequence: TGGAAT
tttgagtgatcaaagatatt

SEQ ID NO: 9680 - DNA, 20 bp, Artificial Sequence
  Description of Artificial Sequence: Synthetic oligonucleotide
  Target: ATXN2; (-) strand; PAM type: NNGRRT; PAM sequence: TTGAGT
agaatttgctcctgagtagt

SEQ ID NO: 9681 - DNA, 20 bp, Artificial Sequence
  Description of Artificial Sequence: Synthetic oligonucleotide
  Target: ATXN2; (-) strand; PAM type: NNGRRT; PAM sequence: CTGAGT
gattataagagaatttgctc

SEQ ID NO: 9682 - DNA, 20 bp, Artificial Sequence
  Description of Artificial Sequence: Synthetic oligonucleotide
  Target: ATXN2; (-) strand; PAM type: NNGRRT; PAM sequence: GAGAAT
gcttaaaaattagattataa

SEQ ID NO: 9683 - DNA, 20 bp, Artificial Sequence
  Description of Artificial Sequence: Synthetic oligonucleotide
  Target: ATXN2; (-) strand; PAM type: NNGRRT; PAM sequence: AAGGAT
aaaatacaacttttatagaa

SEQ ID NO: 9684 - DNA, 20 bp, Artificial Sequence
  Description of Artificial Sequence: Synthetic oligonucleotide
  Target: ATXN2; (-) strand; PAM type: NNGRRT; PAM sequence: TAGGGT
gaagtgatcgtttccccaag

SEQ ID NO: 9685 - DNA, 20 bp, Artificial Sequence
  Description of Artificial Sequence: Synthetic oligonucleotide
  Target: ATXN2; (-) strand; PAM type: NNGRRT; PAM sequence: CTGAGT
ccgcccccccttccccttct

SEQ ID NO: 9686 - DNA, 20 bp, Artificial Sequence
  Description of Artificial Sequence: Synthetic oligonucleotide
  Target: ATXN2; (-) strand; PAM type: NNGRRT; PAM sequence: AGGAAT
gaggaatcagctggttttta

SEQ ID NO: 9687 - DNA, 20 bp, Artificial Sequence
  Description of Artificial Sequence: Synthetic oligonucleotide
  Target: ATXN2; (-) strand; PAM type: NNGRRT; PAM sequence: AGGAAT
agcagaaattccccatcaag

SEQ ID NO: 9688 - DNA, 20 bp, Artificial Sequence
  Description of Artificial Sequence: Synthetic oligonucleotide
  Target: ATXN2; (-) strand; PAM type: NNGRRT; PAM sequence: AAGAAT
ttttcagcaacccatttcca

SEQ ID NO: 9689 - DNA, 20 bp, Artificial Sequence
  Description of Artificial Sequence: Synthetic oligonucleotide
  Target: ATXN2; (-) strand; PAM type: NNGRRT; PAM sequence: CCGAGT
taagaggatttttcattcac

SEQ ID NO: 9690 - DNA, 20 bp, Artificial Sequence
  Description of Artificial Sequence: Synthetic oligonucleotide
  Target: ATXN2; (-) strand; PAM type: NNGRRT; PAM sequence: GAGGAT
ggctttggaaggtggaataa

SEQ ID NO: 9691 - DNA, 20 bp, Artificial Sequence
  Description of Artificial Sequence: Synthetic oligonucleotide
  Target: ATXN2; (-) strand; PAM type: NNGRRT; PAM sequence: TGGAAT
gcatcttgggctttggaagg

SEQ ID NO: 9692 - DNA, 20 bp, Artificial Sequence
  Description of Artificial Sequence: Synthetic oligonucleotide
  Target: ATXN2; (-) strand; PAM type: NNGRRT; PAM sequence: GCGGGT
cctaggccgccggcttgacg

SEQ ID NO: 9693 - DNA, 20 bp, Artificial Sequence
  Description of Artificial Sequence: Synthetic oligonucleotide
  Target: ATXN2; (-) strand; PAM type: NNGRRT; PAM sequence: GGGAGT
tggccggtgtccttaacttc

SEQ ID NO: 9694 - DNA, 20 bp, Artificial Sequence
  Description of Artificial Sequence: Synthetic oligonucleotide
  Target: ATXN2; (-) strand; PAM type: NNGRRT; PAM sequence: GGGGGT
tttgtgcaggagggcctgtt

SEQ ID NO: 9695 - DNA, 20 bp, Artificial Sequence
  Description of Artificial Sequence: Synthetic oligonucleotide
  Target: ATXN2; (-) strand; PAM type: NNGRRT; PAM sequence: GAGGGT
cggctaactgggtttgactc

SEQ ID NO: 9696 - DNA, 20 bp, Artificial Sequence
  Description of Artificial Sequence: Synthetic oligonucleotide
  Target: ATXN2; (-) strand; PAM type: NNGRRT; PAM sequence: CTGGGT
ctcagtgttgtcccggctaa

SEQ ID NO: 9697 - DNA, 20 bp, Artificial Sequence
  Description of Artificial Sequence: Synthetic oligonucleotide
  Target: ATXN2; (-) strand; PAM type: NNGRRT; PAM sequence: CGGGGT
cgtctttttccctcctaagc

SEQ ID NO: 9698 - DNA, 20 bp, Artificial Sequence
  Description of Artificial Sequence: Synthetic oligonucleotide
  Target: ATXN2; (-) strand; PAM type: NNGRRT; PAM sequence: GCGGGT
gggttcctgaaggcagaaag

SEQ ID NO: 9699 - DNA, 20 bp, Artificial Sequence
  Description of Artificial Sequence: Synthetic oligonucleotide
  Target: ATXN2; (-) strand; PAM type: NNGRRT; PAM sequence: TCGGGT
gattgcagcaggggacgtgg

SEQ ID NO: 9700 - DNA, 20 bp, Artificial Sequence
  Description of Artificial Sequence: Synthetic oligonucleotide
  Target: ATXN2; (-) strand; PAM type: NNGRRT; PAM sequence: CGGGGT
caggctggaccctggagatc

SEQ ID NO: 9701 - DNA, 20 bp, Artificial Sequence
  Description of Artificial Sequence: Synthetic oligonucleotide
  Target: ATXN2; (-) strand; PAM type: NNGRRT; PAM sequence: GTGGGT
aaggcgcctgtggaacatcg

SEQ ID NO: 9702 - DNA, 20 bp, Artificial Sequence
  Description of Artificial Sequence: Synthetic oligonucleotide
  Target: ATXN2; (-) strand; PAM type: NNGRRT; PAM sequence: GCGGGT
ccgccagacctctccggcgc

SEQ ID NO: 9703 - DNA, 20 bp, Artificial Sequence
  Description of Artificial Sequence: Synthetic oligonucleotide
  Target: ATXN2; (-) strand; PAM type: NNGRRT; PAM sequence: GGGAGT
cctggggaagggaaggggtg

SEQ ID NO: 9704 - DNA, 20 bp, Artificial Sequence
  Description of Artificial Sequence: Synthetic oligonucleotide
  Target: ATXN2; (-) strand; PAM type: NNGRRT; PAM sequence: AGGGGT
tcccccacctggggaaggga

SEQ ID NO: 9705 - DNA, 20 bp, Artificial Sequence
  Description of Artificial Sequence: Synthetic oligonucleotide
  Target: ATXN2; (-) strand; PAM type: NNGRRT; PAM sequence: CGGGGT
tcctgggaaagatcggagga

SEQ ID NO: 9706 - DNA, 20 bp, Artificial Sequence
  Description of Artificial Sequence: Synthetic oligonucleotide
  Target: ATXN2; (-) strand; PAM type: NNGRRT; PAM sequence: CCGAGT
gggctctctccccgccccct

SEQ ID NO: 9707 - DNA, 20 bp, Artificial Sequence
  Description of Artificial Sequence: Synthetic oligonucleotide
  Target: ATXN2; (-) strand; PAM type: NNGRRT; PAM sequence: CAGGGT
ccgggctcctccggaatcat

SEQ ID NO: 9708 - DNA, 20 bp, Artificial Sequence
  Description of Artificial Sequence: Synthetic oligonucleotide
  Target: ATXN2; (-) strand; PAM type: NNGRRT; PAM sequence: CGGAAT
gggtaggcaccgggctcctc

SEQ ID NO: 9709 - DNA, 20 bp, Artificial Sequence
  Description of Artificial Sequence: Synthetic oligonucleotide
  Target: ATXN2; (-) strand; PAM type: NNGRRT; PAM sequence: AGGGGT
gcgtcccccgtgccggttaa

SEQ ID NO: 9710 - DNA, 20 bp, Artificial Sequence
  Description of Artificial Sequence: Synthetic oligonucleotide
  Target: ATXN2; (-) strand; PAM type: NNGRRT; PAM sequence: AGGGGT
ggtttaggtgtgaacgttgg

SEQ ID NO: 9711 - DNA, 20 bp, Artificial Sequence
  Description of Artificial Sequence: Synthetic oligonucleotide
  Target: ATXN2; (-) strand; PAM type: NNGRRT; PAM sequence: GGGGAT
cgatcctccgcccgcagcgt

SEQ ID NO: 9712 - DNA, 20 bp, Artificial Sequence
  Description of Artificial Sequence: Synthetic oligonucleotide
  Target: ATXN2; (-) strand; PAM type: NNGRRT; PAM sequence: TCGGGT
acgcgtgttgggaggggttc

SEQ ID NO: 9713 - DNA, 20 bp, Artificial Sequence
  Description of Artificial Sequence: Synthetic oligonucleotide
  Target: ATXN2; (-) strand; PAM type: NNGRRT; PAM sequence: AGGGGT
ccctccccacgcgtgttggg

SEQ ID NO: 9714 - DNA, 20 bp, Artificial Sequence
  Description of Artificial Sequence: Synthetic oligonucleotide
  Target: ATXN2; (-) strand; PAM type: NNGRRT; PAM sequence: TGGGAT
tgggcgcagccggggtcctc

SEQ ID NO: 9715 - DNA, 20 bp, Artificial Sequence
  Description of Artificial Sequence: Synthetic oligonucleotide
  Target: ATXN2; (-) strand; PAM type: NNGRRT; PAM sequence: CGGGGT
gctcggccggtgggcgcagc

SEQ ID NO: 9716 - DNA, 20 bp, Artificial Sequence
  Description of Artificial Sequence: Synthetic oligonucleotide
  Target: ATXN2; (-) strand; PAM type: NNGRRT; PAM sequence: CGGGGT
ccgtgacccgccgggctacc

SEQ ID NO: 9717 - DNA, 20 bp, Artificial Sequence
  Description of Artificial Sequence: Synthetic oligonucleotide
  Target: ATXN2; (-) strand; PAM type: NNGRRT; PAM sequence: GTGGGT
gggaggcccggcctgggcag

SEQ ID NO: 9718 - DNA, 20 bp, Artificial Sequence
  Description of Artificial Sequence: Synthetic oligonucleotide
  Target: ATXN2; (-) strand; PAM type: NNGRRT; PAM sequence: CCGGGT
cttcgccgcagccaggtggc

SEQ ID NO: 9719 - DNA, 20 bp, Artificial Sequence
  Description of Artificial Sequence: Synthetic oligonucleotide
  Target: ATXN2; (-) strand; PAM type: NNGRRT; PAM sequence: CCGAGT
tcggagtcccgcggtggcca

SEQ ID NO: 9720 - DNA, 20 bp, Artificial Sequence
  Description of Artificial Sequence: Synthetic oligonucleotide
  Target: ATXN2; (-) strand; PAM type: NNGRRT; PAM sequence: CGGAGT
gctcagcggccgcagctcct

SEQ ID NO: 9721 - DNA, 20 bp, Artificial Sequence
  Description of Artificial Sequence: Synthetic oligonucleotide
  Target: ATXN2; (-) strand; PAM type: NNGRRT; PAM sequence: AAGAGT
gacccctccgacttccggta

SEQ ID NO: 9722 - DNA, 20 bp, Artificial Sequence
  Description of Artificial Sequence: Synthetic oligonucleotide
  Target: ATXN2; (-) strand; PAM type: NNGRRT; PAM sequence: CCGGGT
ccgccttgaggaaggcggat

SEQ ID NO: 9723 - DNA, 20 bp, Artificial Sequence
  Description of Artificial Sequence: Synthetic oligonucleotide
  Target: ATXN2; (-) strand; PAM type: NNGRRT; PAM sequence: GCGGAT
gcagacccgccttgaggaag

SEQ ID NO: 9724 - DNA, 20 bp, Artificial Sequence
  Description of Artificial Sequence: Synthetic oligonucleotide
  Target: ATXN2; (-) strand; PAM type: NNGRRT; PAM sequence: AGGAAT
cgcagaagtgaagatgctga

SEQ ID NO: 9725 - DNA, 20 bp, Artificial Sequence
  Description of Artificial Sequence: Synthetic oligonucleotide
  Target: ATXN2; (-) strand; PAM type: NNGRRT; PAM sequence: CTGGGT
actcgcagtcagtccatttt

SEQ ID NO: 9726 - DNA, 20 bp, Artificial Sequence
  Description of Artificial Sequence: Synthetic oligonucleotide
  Target: ATXN2; (-) strand; PAM type: NNGRRT; PAM sequence: CAGGGT
gctgtgtcccctgaatctgg

SEQ ID NO: 9727 - DNA, 20 bp, Artificial Sequence
  Description of Artificial Sequence: Synthetic oligonucleotide
  Target: ATXN2; (-) strand; PAM type: NNGRRT; PAM sequence: CTGAAT
acggcaggatgctgtgtccc

SEQ ID NO: 9728 - DNA, 20 bp, Artificial Sequence
  Description of Artificial Sequence: Synthetic oligonucleotide
  Target: ATXN2; (-) strand; PAM type: NNGRRT; PAM sequence: CAGGAT
gggggacggcaggaaaacgg

SEQ ID NO: 9729 - DNA, 20 bp, Artificial Sequence
  Description of Artificial Sequence: Synthetic oligonucleotide
  Target: ATXN2; (-) strand; PAM type: NNGRRT; PAM sequence: GAGGGT
cccagatgtgggtggccccg

SEQ ID NO: 9730 - DNA, 20 bp, Artificial Sequence
  Description of Artificial Sequence: Synthetic oligonucleotide
  Target: ATXN2; (-) strand; PAM type: NNGRRT; PAM sequence: GTGGGT
tggggaaaaggtacccagat

SEQ ID NO: 9731 - DNA, 20 bp, Artificial Sequence
  Description of Artificial Sequence: Synthetic oligonucleotide
  Target: ATXN2; (-) strand; PAM type: NNGRRT; PAM sequence: TGGGGT
ttctggtgactgtgcgcggc

SEQ ID NO: 9732 - DNA, 20 bp, Artificial Sequence
  Description of Artificial Sequence: Synthetic oligonucleotide
  Target: ATXN2; (-) strand; PAM type: NNGRRT; PAM sequence: AAGAGT
aatgaaggtcagatacctaa

SEQ ID NO: 9733 - DNA, 20 bp, Artificial Sequence
  Description of Artificial Sequence: Synthetic oligonucleotide
  Target: ATXN2; (-) strand; PAM type: NNGRRT; PAM sequence: ATGAAT
tatatttcctttagaatctc

SEQ ID NO: 9734 - DNA, 20 bp, Artificial Sequence
  Description of Artificial Sequence: Synthetic oligonucleotide
  Target: ATXN2; (-) strand; PAM type: NNGRRT; PAM sequence: TAGAAT
ccaatcccatatatttcctt

SEQ ID NO: 9735 - DNA, 20 bp, Artificial Sequence
  Description of Artificial Sequence: Synthetic oligonucleotide
  Target: ATXN2; (-) strand; PAM type: NNGRRT; PAM sequence: AAGGGT
aagttaaattaaaacttcta

SEQ ID NO: 9736 - DNA, 20 bp, Artificial Sequence
  Description of Artificial Sequence: Synthetic oligonucleotide
  Target: ATXN2; (-) strand; PAM type: NNGRRT; PAM sequence: CTGGGT
aaaagagtctactgtgctgg

SEQ ID NO: 9737 - DNA, 20 bp, Artificial Sequence
  Description of Artificial Sequence: Synthetic oligonucleotide
  Target: ATXN2; (-) strand; PAM type: NNGRRT; PAM sequence: AAGAGT
taactgcaacacattttaaa

SEQ ID NO: 9738 - DNA, 20 bp, Artificial Sequence
  Description of Artificial Sequence: Synthetic oligonucleotide
  Target: ATXN2; (-) strand; PAM type: NNGRRT; PAM sequence: GGGAAT
gacagttctaggacattgag

SEQ ID NO: 9739 - DNA, 20 bp, Artificial Sequence
  Description of Artificial Sequence: Synthetic oligonucleotide
  Target: ATXN2; (-) strand; PAM type: NNGRRT; PAM sequence: CAGAAT
aaactgatttcctacattgg

SEQ ID NO: 9740 - DNA, 20 bp, Artificial Sequence
  Description of Artificial Sequence: Synthetic oligonucleotide
  Target: ATXN2; (-) strand; PAM type: NNGRRT; PAM sequence: AAGGGT
ctaggctaggttaattttta

SEQ ID NO: 9741 - DNA, 20 bp, Artificial Sequence
  Description of Artificial Sequence: Synthetic oligonucleotide
  Target: ATXN2; (-) strand; PAM type: NNGRRT; PAM sequence: CGGGGT
ttttatatttttggtagaga

SEQ ID NO: 9742 - DNA, 20 bp, Artificial Sequence
  Description of Artificial Sequence: Synthetic oligonucleotide
  Target: ATXN2; (-) strand; PAM type: NNGRRT; PAM sequence: TGGGAT
gtatcagcctcccgagtagc

SEQ ID NO: 9743 - DNA, 20 bp, Artificial Sequence
  Description of Artificial Sequence: Synthetic oligonucleotide
  Target: ATXN2; (-) strand; PAM type: NNGRRT; PAM sequence: CCGAGT
aattctcctgtatcagcctc

SEQ ID NO: 9744 - DNA, 20 bp, Artificial Sequence
  Description of Artificial Sequence: Synthetic oligonucleotide
  Target: ATXN2; (-) strand; PAM type: NNGRRT; PAM sequence: CCGGAT
ctgactgcaacctccacctc

SEQ ID NO: 9745 - DNA, 20 bp, Artificial Sequence
  Description of Artificial Sequence: Synthetic oligonucleotide
  Target: ATXN2; (-) strand; PAM type: NNGRRT; PAM sequence: TGGAGT
tctcgctctgtcgcccaggc

SEQ ID NO: 9746 - DNA, 20 bp, Artificial Sequence
  Description of Artificial Sequence: Synthetic oligonucleotide
  Target: ATXN2; (-) strand; PAM type: NNGRRT; PAM sequence: CGGAGT
tatttatttattttttgaga

SEQ ID NO: 9747 - DNA, 20 bp, Artificial Sequence
  Description of Artificial Sequence: Synthetic oligonucleotide
  Target: ATXN2; (-) strand; PAM type: NNGRRT; PAM sequence: CCGGGT
agccctggcctgtaccacag

SEQ ID NO: 9748 - DNA, 20 bp, Artificial Sequence
  Description of Artificial Sequence: Synthetic oligonucleotide
  Target: ATXN2; (-) strand; PAM type: NNGRRT; PAM sequence: TTGGGT
atcctcatgcccatgctcat

SEQ ID NO: 9749 - DNA, 20 bp, Artificial Sequence
  Description of Artificial Sequence: Synthetic oligonucleotide
  Target: ATXN2; (-) strand; PAM type: NNGRRT; PAM sequence: CAGGAT
ccacctggagcgtttctccc

SEQ ID NO: 9750 - DNA, 20 bp, Artificial Sequence
  Description of Artificial Sequence: Synthetic oligonucleotide
  Target: ATXN2; (-) strand; PAM type: NNGRRT; PAM sequence: AAGAAT
gtttgtatttctattaaaga

SEQ ID NO: 9751 - DNA, 20 bp, Artificial Sequence
  Description of Artificial Sequence: Synthetic oligonucleotide
  Target: ATXN2; (-) strand; PAM type: NNGRRT; PAM sequence: TGGGAT
gcctcggcctcccagagtgc

SEQ ID NO: 9752 - DNA, 20 bp, Artificial Sequence
  Description of Artificial Sequence: Synthetic oligonucleotide
  Target: ATXN2; (-) strand; PAM type: NNGRRT; PAM sequence: CAGAGT
atccatccgcctcggcctcc

SEQ ID NO: 9753 - DNA, 20 bp, Artificial Sequence
  Description of Artificial Sequence: Synthetic oligonucleotide
  Target: ATXN2; (-) strand; PAM type: NNGRRT; PAM sequence: TGGGGT
tttcgtatttttagtagcga

SEQ ID NO: 9754 - DNA, 20 bp, Artificial Sequence
  Description of Artificial Sequence: Synthetic oligonucleotide
  Target: ATXN2; (-) strand; PAM type: NNGRRT; PAM sequence: CTGGGT
gtcactgtaacctccgcctc

SEQ ID NO: 9755 - DNA, 20 bp, Artificial Sequence
  Description of Artificial Sequence: Synthetic oligonucleotide
  Target: ATXN2; (-) strand; PAM type: NNGRRT; PAM sequence: TGGAGT
ttcgctcttgttgcccaggc

SEQ ID NO: 9756 - DNA, 20 bp, Artificial Sequence
  Description of Artificial Sequence: Synthetic oligonucleotide
  Target: ATXN2; (-) strand; PAM type: NNGRRT; PAM sequence: TGGGAT
gccactgcctcccaaagtgc

SEQ ID NO: 9757 - DNA, 20 bp, Artificial Sequence
  Description of Artificial Sequence: Synthetic oligonucleotide
  Target: ATXN2; (-) strand; PAM type: NNGRRT; PAM sequence: TGGAGT
tctcgctctgtcgcccaggc

SEQ ID NO: 9758 - DNA, 20 bp, Artificial Sequence
  Description of Artificial Sequence: Synthetic oligonucleotide
  Target: ATXN2; (-) strand; PAM type: NNGRRT; PAM sequence: CGGAGT
ttactattttttttttgaga

SEQ ID NO: 9759 - DNA, 20 bp, Artificial Sequence
  Description of Artificial Sequence: Synthetic oligonucleotide
  Target: ATXN2; (-) strand; PAM type: NNGRRT; PAM sequence: TGGGAT
gccttggccttccaaagtgc

SEQ ID NO: 9760 - DNA, 20 bp, Artificial Sequence
  Description of Artificial Sequence: Synthetic oligonucleotide
  Target: ATXN2; (-) strand; PAM type: NNGRRT; PAM sequence: AAGGAT
gtctcctactccttggttca

SEQ ID NO: 9761 - DNA, 20 bp, Artificial Sequence
  Description of Artificial Sequence: Synthetic oligonucleotide
  Target: ATXN2; (-) strand; PAM type: NNGRRT; PAM sequence: GAGGGT
gaaaaattttttatggagag

SEQ ID NO: 9762 - DNA, 20 bp, Artificial Sequence
  Description of Artificial Sequence: Synthetic oligonucleotide
  Target: ATXN2; (-) strand; PAM type: NNGRRT; PAM sequence: GTGAGT
taagtttttattcaatggta

SEQ ID NO: 9763 - DNA, 20 bp, Artificial Sequence
  Description of Artificial Sequence: Synthetic oligonucleotide
  Target: ATXN2; (-) strand; PAM type: NNGRRT; PAM sequence: GTGAAT
ttaaattgtacacaaaatag

SEQ ID NO: 9764 - DNA, 20 bp, Artificial Sequence
  Description of Artificial Sequence: Synthetic oligonucleotide
  Target: ATXN2; (-) strand; PAM type: NNGRRT; PAM sequence: GAGAAT
atttactgtgtaaatttact

SEQ ID NO: 9765 - DNA, 20 bp, Artificial Sequence
  Description of Artificial Sequence: Synthetic oligonucleotide
  Target: ATXN2; (-) strand; PAM type: NNGRRT; PAM sequence: TGGGGT
accatcgtgaaggatctttt

SEQ ID NO: 9766 - DNA, 20 bp, Artificial Sequence
  Description of Artificial Sequence: Synthetic oligonucleotide
  Target: ATXN2; (-) strand; PAM type: NNGRRT; PAM sequence: AAGGAT
ccaaactgcccaccatcgtg

SEQ ID NO: 9767 - DNA, 20 bp, Artificial Sequence
  Description of Artificial Sequence: Synthetic oligonucleotide
  Target: ATXN2; (-) strand; PAM type: NNGRRT; PAM sequence: AAGGAT
atgagtggttgcctggggct

SEQ ID NO: 9768 - DNA, 20 bp, Artificial Sequence
  Description of Artificial Sequence: Synthetic oligonucleotide
  Target: ATXN2; (-) strand; PAM type: NNGRRT; PAM sequence: ATGAGT
tccatagagagaaaatgtag

SEQ ID NO: 9769 - DNA, 20 bp, Artificial Sequence
  Description of Artificial Sequence: Synthetic oligonucleotide
  Target: ATXN2; (-) strand; PAM type: NNGRRT; PAM sequence: AGGAAT
aatatgacatagcaataata

SEQ ID NO: 9770 - DNA, 20 bp, Artificial Sequence
  Description of Artificial Sequence: Synthetic oligonucleotide
  Target: ATXN2; (-) strand; PAM type: NNGRRT; PAM sequence: TGGAAT
aaatgtggtatgtccataca

SEQ ID NO: 9771 - DNA, 20 bp, Artificial Sequence
  Description of Artificial Sequence: Synthetic oligonucleotide
  Target: ATXN2; (-) strand; PAM type: NNGRRT; PAM sequence: AGGAGT
tcctaaagtgttgggattac

SEQ ID NO: 9772 - DNA, 20 bp, Artificial Sequence
  Description of Artificial Sequence: Synthetic oligonucleotide
  Target: ATXN2; (-) strand; PAM type: NNGRRT; PAM sequence: TGGGAT
atctcggtatcctaaagtgt

SEQ ID NO: 9773 - DNA, 20 bp, Artificial Sequence
  Description of Artificial Sequence: Synthetic oligonucleotide
  Target: ATXN2; (-) strand; PAM type: NNGRRT; PAM sequence: CGGGGT
cccaggctggtttcaaactc

SEQ ID NO: 9774 - DNA, 20 bp, Artificial Sequence
  Description of Artificial Sequence: Synthetic oligonucleotide
  Target: ATXN2; (-) strand; PAM type: NNGRRT; PAM sequence: CAGGGT
tttaaagtttttcatagaga

SEQ ID NO: 9775 - DNA, 20 bp, Artificial Sequence
  Description of Artificial Sequence: Synthetic oligonucleotide
  Target: ATXN2; (-) strand; PAM type: NNGRRT; PAM sequence: TGGGAT
acctcggcctcccaaagtgc

SEQ ID NO: 9776 - DNA, 20 bp, Artificial Sequence
  Description of Artificial Sequence: Synthetic oligonucleotide
  Target: ATXN2; (-) strand; PAM type: NNGRRT; PAM sequence: CGGGAT
ttttgtatttttagtagaga

SEQ ID NO: 9777 - DNA, 20 bp, Artificial Sequence
  Description of Artificial Sequence: Synthetic oligonucleotide
  Target: ATXN2; (-) strand; PAM type: NNGRRT; PAM sequence: CTGGGT
ctcactgtaacctccgcctc

SEQ ID NO: 9778 - DNA, 20 bp, Artificial Sequence
  Description of Artificial Sequence: Synthetic oligonucleotide
  Target: ATXN2; (-) strand; PAM type: NNGRRT; PAM sequence: CAGAGT
tttttttttttttttggaga

SEQ ID NO: 9779 - DNA, 20 bp, Artificial Sequence
  Description of Artificial Sequence: Synthetic oligonucleotide
  Target: ATXN2; (-) strand; PAM type: NNGRRT; PAM sequence: TAGAGT
tcttggtctgttgcccaggc

SEQ ID NO: 9780 - DNA, 20 bp, Artificial Sequence
  Description of Artificial Sequence: Synthetic oligonucleotide
  Target: ATXN2; (-) strand; PAM type: NNGRRT; PAM sequence: CAGGGT
actctattaactgaacgaga

SEQ ID NO: 9781 - DNA, 20 bp, Artificial Sequence
  Description of Artificial Sequence: Synthetic oligonucleotide
  Target: ATXN2; (-) strand; PAM type: NNGRRT; PAM sequence: TGGGAT
acctcagtctcccaaagtgc

SEQ ID NO: 9782 - DNA, 20 bp, Artificial Sequence
  Description of Artificial Sequence: Synthetic oligonucleotide
  Target: ATXN2; (-) strand; PAM type: NNGRRT; PAM sequence: AAGGAT
cagggtttcaccatgttggc

SEQ ID NO: 9783 - DNA, 20 bp, Artificial Sequence
  Description of Artificial Sequence: Synthetic oligonucleotide
  Target: ATXN2; (-) strand; PAM type: NNGRRT; PAM sequence: CAGGGT
ttttgtatttttaatagaga

SEQ ID NO: 9784 - DNA, 20 bp, Artificial Sequence
  Description of Artificial Sequence: Synthetic oligonucleotide
  Target: ATXN2; (-) strand; PAM type: NNGRRT; PAM sequence: TGGGAT
gccttggcctcccaaagtgc

SEQ ID NO: 9785 - DNA, 20 bp, Artificial Sequence
  Description of Artificial Sequence: Synthetic oligonucleotide
  Target: ATXN2; (-) strand; PAM type: NNGRRT; PAM sequence: CAGGAT
cggggtttcactgtgttagc

SEQ ID NO: 9786 - DNA, 20 bp, Artificial Sequence
  Description of Artificial Sequence: Synthetic oligonucleotide
  Target: ATXN2; (-) strand; PAM type: NNGRRT; PAM sequence: CGGGGT
ttttgtatttttagtagaga

SEQ ID NO: 9787 - DNA, 20 bp, Artificial Sequence
  Description of Artificial Sequence: Synthetic oligonucleotide
  Target: ATXN2; (-) strand; PAM type: NNGRRT; PAM sequence: CCGAGT
ctcactgcaagctccgcctc

SEQ ID NO: 9788 - DNA, 20 bp, Artificial Sequence
  Description of Artificial Sequence: Synthetic oligonucleotide
  Target: ATXN2; (-) strand; PAM type: NNGRRT; PAM sequence: TGGAGT
tctcgctctgttgcccaggc

SEQ ID NO: 9789 - DNA, 20 bp, Artificial Sequence
  Description of Artificial Sequence: Synthetic oligonucleotide
  Target: ATXN2; (-) strand; PAM type: NNGRRT; PAM sequence: CAGAGT
gtattttcttttttttgaga

SEQ ID NO: 9790 - DNA, 20 bp, Artificial Sequence
  Description of Artificial Sequence: Synthetic oligonucleotide
  Target: ATXN2; (-) strand; PAM type: NNGRRT; PAM sequence: CCGAGT
gattctcctgcctcagcctc

SEQ ID NO: 9791 - DNA, 20 bp, Artificial Sequence
  Description of Artificial Sequence: Synthetic oligonucleotide
  Target: ATXN2; (-) strand; PAM type: NNGRRT; PAM sequence: TGGAGT
gtgtcactctgtcaccaggc

SEQ ID NO: 9792 - DNA, 20 bp, Artificial Sequence
  Description of Artificial Sequence: Synthetic oligonucleotide
  Target: ATXN2; (-) strand; PAM type: NNGRRT; PAM sequence: TGGAGT
tatatattatttttttgaga

SEQ ID NO: 9793 - DNA, 20 bp, Artificial Sequence
  Description of Artificial Sequence: Synthetic oligonucleotide
  Target: ATXN2; (-) strand; PAM type: NNGRRT; PAM sequence: AAGAAT
gtgtctgaacaccaggaggc

SEQ ID NO: 9794 - DNA, 20 bp, Artificial Sequence
  Description of Artificial Sequence: Synthetic oligonucleotide
  Target: ATXN2; (-) strand; PAM type: NNGRRT; PAM sequence: GAGGAT
tgttttaaaattcaggtggg

SEQ ID NO: 9795 - DNA, 20 bp, Artificial Sequence
  Description of Artificial Sequence: Synthetic oligonucleotide
  Target: ATXN2; (-) strand; PAM type: NNGRRT; PAM sequence: CAGAGT
ctgtactccagcctggttgg

SEQ ID NO: 9796 - DNA, 20 bp, Artificial Sequence
  Description of Artificial Sequence: Synthetic oligonucleotide
  Target: ATXN2; (-) strand; PAM type: NNGRRT; PAM sequence: GAGGAT
tactctgaaggctgagatgg

SEQ ID NO: 9797 - DNA, 20 bp, Artificial Sequence
  Description of Artificial Sequence: Synthetic oligonucleotide
  Target: ATXN2; (-) strand; PAM type: NNGRRT; PAM sequence: CTGGGT
ccaaaactaacaaaaattag

SEQ ID NO: 9798 - DNA, 20 bp, Artificial Sequence
  Description of Artificial Sequence: Synthetic oligonucleotide
  Target: ATXN2; (-) strand; PAM type: NNGRRT; PAM sequence: GAGGAT
tacatggaaggctgagcggg

SEQ ID NO: 9799 - DNA, 20 bp, Artificial Sequence
  Description of Artificial Sequence: Synthetic oligonucleotide
  Target: ATXN2; (-) strand; PAM type: NNGRRT; PAM sequence: GTGAGT
aaaattagctggacatggtg

SEQ ID NO: 9800 - DNA, 20 bp, Artificial Sequence
  Description of Artificial Sequence: Synthetic oligonucleotide
  Target: ATXN2; (-) strand; PAM type: NNGRRT; PAM sequence: AGGAGT
caggcagatcacttgaggtg

SEQ ID NO: 9801 - DNA, 20 bp, Artificial Sequence
  Description of Artificial Sequence: Synthetic oligonucleotide
  Target: ATXN2; (+) strand; PAM type: NNGRRT; PAM sequence: CTGGGT
aatagctaggccattgtctt

SEQ ID NO: 9802 - DNA, 20 bp, Artificial Sequence
  Description of Artificial Sequence: Synthetic oligonucleotide
  Target: ATXN2; (+) strand; PAM type: NNGRRT; PAM sequence: CAGAGT
tggttccacggccccatctc

SEQ ID NO: 9803 - DNA, 20 bp, Artificial Sequence
  Description of Artificial Sequence: Synthetic oligonucleotide
  Target: ATXN2; (+) strand; PAM type: NNGRRT; PAM sequence: TGGAGT
ctgcagggccctgatgctca

SEQ ID NO: 9804 - DNA, 20 bp, Artificial Sequence
  Description of Artificial Sequence: Synthetic oligonucleotide
  Target: ATXN2; (+) strand; PAM type: NNGRRT; PAM sequence: GGGAAT
gcagagcgagacgcggcgtg

SEQ ID NO: 9805 - DNA, 20 bp, Artificial Sequence
  Description of Artificial Sequence: Synthetic oligonucleotide
  Target: ATXN2; (+) strand; PAM type: NNGRRT; PAM sequence: GGGGAT
gtgctcactttcaactttca

SEQ ID NO: 9806 - DNA, 20 bp, Artificial Sequence
  Description of Artificial Sequence: Synthetic oligonucleotide
  Target: ATXN2; (+) strand; PAM type: NNGRRT; PAM sequence: TGGGGT
ttcaggggatagccaaggta

SEQ ID NO: 9807 - DNA, 20 bp, Artificial Sequence
  Description of Artificial Sequence: Synthetic oligonucleotide
  Target: ATXN2; (+) strand; PAM type: NNGRRT; PAM sequence: TGGGGT
gggatagccaaggtatgggg

SEQ ID NO: 9808 - DNA, 20 bp, Artificial Sequence
  Description of Artificial Sequence: Synthetic oligonucleotide
  Target: ATXN2; (+) strand; PAM type: NNGRRT; PAM sequence: TGGGGT
agccaaggtatggggtgggg

SEQ ID NO: 9809 - DNA, 20 bp, Artificial Sequence
  Description of Artificial Sequence: Synthetic oligonucleotide
  Target: ATXN2; (+) strand; PAM type: NNGRRT; PAM sequence: TGGGGT
aggtatggggtggggtgggg

SEQ ID NO: 9810 - DNA, 20 bp, Artificial Sequence
  Description of Artificial Sequence: Synthetic oligonucleotide
  Target: ATXN2; (+) strand; PAM type: NNGRRT; PAM sequence: TGGAGT
accgtgccacccctctccac

SEQ ID NO: 9811 - DNA, 20 bp, Artificial Sequence
  Description of Artificial Sequence: Synthetic oligonucleotide
  Target: ATXN2; (+) strand; PAM type: NNGRRT; PAM sequence: CAGGGT
cacccctctccactggagtt

SEQ ID NO: 9812 - DNA, 20 bp, Artificial Sequence
  Description of Artificial Sequence: Synthetic oligonucleotide
  Target: ATXN2; (+) strand; PAM type: NNGRRT; PAM sequence: TCGAGT
ccagcgctcgcccatcccac

SEQ ID NO: 9813 - DNA, 20 bp, Artificial Sequence
  Description of Artificial Sequence: Synthetic oligonucleotide
  Target: ATXN2; (+) strand; PAM type: NNGRRT; PAM sequence: GGGGGT
ccctactgccctttgctgaa

SEQ ID NO: 9814 - DNA, 20 bp, Artificial Sequence
  Description of Artificial Sequence: Synthetic oligonucleotide
  Target: ATXN2; (+) strand; PAM type: NNGRRT; PAM sequence: CTGGGT
gctgaagggggtggctgaca

SEQ ID NO: 9815 - DNA, 20 bp, Artificial Sequence
  Description of Artificial Sequence: Synthetic oligonucleotide
  Target: ATXN2; (+) strand; PAM type: NNGRRT; PAM sequence: GAGGGT
ggggtggctgacactgggta

SEQ ID NO: 9816 - DNA, 20 bp, Artificial Sequence
  Description of Artificial Sequence: Synthetic oligonucleotide
  Target: ATXN2; (+) strand; PAM type: NNGRRT; PAM sequence: AGGGGT
tagaggcttgctgcagaccc

SEQ ID NO: 9817 - DNA, 20 bp, Artificial Sequence
  Description of Artificial Sequence: Synthetic oligonucleotide
  Target: ATXN2; (+) strand; PAM type: NNGRRT; PAM sequence: TGGGAT
tccctttctcccttcctcac

SEQ ID NO: 9818 - DNA, 20 bp, Artificial Sequence
  Description of Artificial Sequence: Synthetic oligonucleotide
  Target: ATXN2; (+) strand; PAM type: NNGRRT; PAM sequence: CAGAGT
ctcccttcctcactgggatt

SEQ ID NO: 9819 - DNA, 20 bp, Artificial Sequence
  Description of Artificial Sequence: Synthetic oligonucleotide
  Target: ATXN2; (+) strand; PAM type: NNGRRT; PAM sequence: TGGGGT
attcagagtcccttcctcac

SEQ ID NO: 9820 - DNA, 20 bp, Artificial Sequence
  Description of Artificial Sequence: Synthetic oligonucleotide
  Target: ATXN2; (+) strand; PAM type: NNGRRT; PAM sequence: CAGAGT
gtcccttcctcactggggtt

SEQ ID NO: 9821 - DNA, 20 bp, Artificial Sequence
  Description of Artificial Sequence: Synthetic oligonucleotide
  Target: ATXN2; (+) strand; PAM type: NNGRRT; PAM sequence: GAGGGT
gtccccgggggctcagccca

SEQ ID NO: 9822 - DNA, 20 bp, Artificial Sequence
  Description of Artificial Sequence: Synthetic oligonucleotide
  Target: ATXN2; (+) strand; PAM type: NNGRRT; PAM sequence: GTGAAT
agcacctggagcatgagcct

SEQ ID NO: 9823 - DNA, 20 bp, Artificial Sequence
  Description of Artificial Sequence: Synthetic oligonucleotide
  Target: ATXN2; (+) strand; PAM type: NNGRRT; PAM sequence: AGGAAT
acacacctctctgaccagtg

SEQ ID NO: 9824 - DNA, 20 bp, Artificial Sequence
  Description of Artificial Sequence: Synthetic oligonucleotide
  Target: ATXN2; (+) strand; PAM type: NNGRRT; PAM sequence: GTGAAT
acaggcagaagtgtgaactt

SEQ ID NO: 9825 - DNA, 20 bp, Artificial Sequence
  Description of Artificial Sequence: Synthetic oligonucleotide
  Target: ATXN2; (+) strand; PAM type: NNGRRT; PAM sequence: GAGGAT
tacagatgtagttcttgtta

SEQ ID NO: 9826 - DNA, 20 bp, Artificial Sequence
  Description of Artificial Sequence: Synthetic oligonucleotide
  Target: ATXN2; (+) strand; PAM type: NNGRRT; PAM sequence: CGGGGT
ggatgccgctagctcctgcc

SEQ ID NO: 9827 - DNA, 20 bp, Artificial Sequence
  Description of Artificial Sequence: Synthetic oligonucleotide
  Target: ATXN2; (+) strand; PAM type: NNGRRT; PAM sequence: AGGAGT
tccccgttactcttagagaa

SEQ ID NO: 9828 - DNA, 20 bp, Artificial Sequence
  Description of Artificial Sequence: Synthetic oligonucleotide
  Target: ATXN2; (+) strand; PAM type: NNGRRT; PAM sequence: TGGGGT
ttactcttagagaaaggagt

SEQ ID NO: 9829 - DNA, 20 bp, Artificial Sequence
  Description of Artificial Sequence: Synthetic oligonucleotide
  Target: ATXN2; (+) strand; PAM type: NNGRRT; PAM sequence: GCGGAT
ttttcactgacactgtcaca

SEQ ID NO: 9830 - DNA, 20 bp, Artificial Sequence
  Description of Artificial Sequence: Synthetic oligonucleotide
  Target: ATXN2; (+) strand; PAM type: NNGRRT; PAM sequence: GGGGAT
actttctacggggaggaggg

SEQ ID NO: 9831 - DNA, 20 bp, Artificial Sequence
  Description of Artificial Sequence: Synthetic oligonucleotide
  Target: ATXN2; (+) strand; PAM type: NNGRRT; PAM sequence: AAGGAT
acctcagactaatttcttta

SEQ ID NO: 9832 - DNA, 20 bp, Artificial Sequence
  Description of Artificial Sequence: Synthetic oligonucleotide
  Target: ATXN2; (+) strand; PAM type: NNGRRT; PAM sequence: CTGAGT
ctcgggacagtcacctgcca

SEQ ID NO: 9833 - DNA, 20 bp, Artificial Sequence
  Description of Artificial Sequence: Synthetic oligonucleotide
  Target: ATXN2; (+) strand; PAM type: NNGRRT; PAM sequence: GAGGGT
tcaggcaattactgaaatag

SEQ ID NO: 9834 - DNA, 20 bp, Artificial Sequence
  Description of Artificial Sequence: Synthetic oligonucleotide
  Target: ATXN2; (+) strand; PAM type: NNGRRT; PAM sequence: ACGAAT
cagttctatcctggtgcctt

SEQ ID NO: 9835 - DNA, 20 bp, Artificial Sequence
  Description of Artificial Sequence: Synthetic oligonucleotide
  Target: ATXN2; (+) strand; PAM type: NNGRRT; PAM sequence: CTGGAT
ggtgccttacgaataaaaaa

SEQ ID NO: 9836 - DNA, 20 bp, Artificial Sequence
  Description of Artificial Sequence: Synthetic oligonucleotide
  Target: ATXN2; (+) strand; PAM type: NNGRRT; PAM sequence: GTGGGT
cttattaaattatcccacaa

SEQ ID NO: 9837 - DNA, 20 bp, Artificial Sequence
  Description of Artificial Sequence: Synthetic oligonucleotide
  Target: ATXN2; (+) strand; PAM type: NNGRRT; PAM sequence: GGGAAT
tttgagccaaaatggaagct

SEQ ID NO: 9838 - DNA, 20 bp, Artificial Sequence
  Description of Artificial Sequence: Synthetic oligonucleotide
  Target: ATXN2; (+) strand; PAM type: NNGRRT; PAM sequence: CTGGAT
tctagctggctactgcttca

SEQ ID NO: 9839 - DNA, 20 bp, Artificial Sequence
  Description of Artificial Sequence: Synthetic oligonucleotide
  Target: ATXN2; (+) strand; PAM type: NNGRRT; PAM sequence: GAGAAT
ggctactgcttcactggatt

SEQ ID NO: 9840 - DNA, 20 bp, Artificial Sequence
  Description of Artificial Sequence: Synthetic oligonucleotide
  Target: ATXN2; (+) strand; PAM type: NNGRRT; PAM sequence: TGGAGT
agaaacgggggcagtgacag

SEQ ID NO: 9841 - DNA, 20 bp, Artificial Sequence
  Description of Artificial Sequence: Synthetic oligonucleotide
  Target: ATXN2; (+) strand; PAM type: NNGRRT; PAM sequence: TTGGGT
gacagtggagtcagctgctc

SEQ ID NO: 9842 - DNA, 20 bp, Artificial Sequence
  Description of Artificial Sequence: Synthetic oligonucleotide
  Target: ATXN2; (+) strand; PAM type: NNGRRT; PAM sequence: GGGAGT
gcagtggcttctaggaaact

SEQ ID NO: 9843 - DNA, 20 bp, Artificial Sequence
  Description of Artificial Sequence: Synthetic oligonucleotide
  Target: ATXN2; (+) strand; PAM type: NNGRRT; PAM sequence: GAGGGT
taggactgactgcctgggag

SEQ ID NO: 9844 - DNA, 20 bp, Artificial Sequence
  Description of Artificial Sequence: Synthetic oligonucleotide
  Target: ATXN2; (+) strand; PAM type: NNGRRT; PAM sequence: TAGAAT
agaggtcaaatttttgcttc

SEQ ID NO: 9845 - DNA, 20 bp, Artificial Sequence
  Description of Artificial Sequence: Synthetic oligonucleotide
  Target: ATXN2; (+) strand; PAM type: NNGRRT; PAM sequence: TGGGGT
ttttgcttctagaatttcct

SEQ ID NO: 9846 - DNA, 20 bp, Artificial Sequence
  Description of Artificial Sequence: Synthetic oligonucleotide
  Target: ATXN2; (+) strand; PAM type: NNGRRT; PAM sequence: GAGGGT
aatttccttggggtctttca

SEQ ID NO: 9847 - DNA, 20 bp, Artificial Sequence
  Description of Artificial Sequence: Synthetic oligonucleotide
  Target: ATXN2; (+) strand; PAM type: NNGRRT; PAM sequence: TGGAGT
tcttttttttttttttgaga

SEQ ID NO: 9848 - DNA, 20 bp, Artificial Sequence
  Description of Artificial Sequence: Synthetic oligonucleotide
  Target: ATXN2; (+) strand; PAM type: NNGRRT; PAM sequence: TGGAGT
gtttctcttgtcaaccgggc

SEQ ID NO: 9849 - DNA, 20 bp, Artificial Sequence
  Description of Artificial Sequence: Synthetic oligonucleotide
  Target: ATXN2; (+) strand; PAM type: NNGRRT; PAM sequence: TGGGAT
gcctcgacctctcaagtagc

SEQ ID NO: 9850 - DNA, 20 bp, Artificial Sequence
  Description of Artificial Sequence: Synthetic oligonucleotide
  Target: ATXN2; (+) strand; PAM type: NNGRRT; PAM sequence: CAGGGT
ttttgtatttttagtagaga

SEQ ID NO: 9851 - DNA, 20 bp, Artificial Sequence
  Description of Artificial Sequence: Synthetic oligonucleotide
  Target: ATXN2; (+) strand; PAM type: NNGRRT; PAM sequence: TCGAAT
ccatgttggccaggctggtc

SEQ ID NO: 9852 - DNA, 20 bp, Artificial Sequence
  Description of Artificial Sequence: Synthetic oligonucleotide
  Target: ATXN2; (+) strand; PAM type: NNGRRT; PAM sequence: TGGGAT
gccttggcctcccaaagtgc

SEQ ID NO: 9853 - DNA, 20 bp, Artificial Sequence
  Description of Artificial Sequence: Synthetic oligonucleotide
  Target: ATXN2; (+) strand; PAM type: NNGRRT; PAM sequence: TTGGGT
cacttttagtaccaacactc

SEQ ID NO: 9854 - DNA, 20 bp, Artificial Sequence
  Description of Artificial Sequence: Synthetic oligonucleotide
  Target: ATXN2; (+) strand; PAM type: NNGRRT; PAM sequence: ATGAAT
caagcagctttctctggaaa

SEQ ID NO: 9855 - DNA, 20 bp, Artificial Sequence
  Description of Artificial Sequence: Synthetic oligonucleotide
  Target: ATXN2; (+) strand; PAM type: NNGRRT; PAM sequence: AAGAGT
tgctaattagtgtgaaccaa

SEQ ID NO: 9856 - DNA, 20 bp, Artificial Sequence
  Description of Artificial Sequence: Synthetic oligonucleotide
  Target: ATXN2; (+) strand; PAM type: NNGRRT; PAM sequence: AAGAGT
tgtgaaccaaaagagtaagt

SEQ ID NO: 9857 - DNA, 20 bp, Artificial Sequence
  Description of Artificial Sequence: Synthetic oligonucleotide
  Target: ATXN2; (+) strand; PAM type: NNGRRT; PAM sequence: TGGGAT
ccagccagaagttaaacatc

SEQ ID NO: 9858 - DNA, 20 bp, Artificial Sequence
  Description of Artificial Sequence: Synthetic oligonucleotide
  Target: ATXN2; (+) strand; PAM type: NNGRRT; PAM sequence: CAGAAT
cacctttctttatgtgggag

SEQ ID NO: 9859 - DNA, 20 bp, Artificial Sequence
  Description of Artificial Sequence: Synthetic oligonucleotide
  Target: ATXN2; (+) strand; PAM type: NNGRRT; PAM sequence: AGGGGT
ggagcagaatcagctgatga

SEQ ID NO: 9860 - DNA, 20 bp, Artificial Sequence
  Description of Artificial Sequence: Synthetic oligonucleotide
  Target: ATXN2; (+) strand; PAM type: NNGRRT; PAM sequence: AAGAAT
actaacagtcaccagcacca

SEQ ID NO: 9861 - DNA, 20 bp, Artificial Sequence
  Description of Artificial Sequence: Synthetic oligonucleotide
  Target: ATXN2; (+) strand; PAM type: NNGRRT; PAM sequence: TTGAAT
attaagtcaactaacctgcc

SEQ ID NO: 9862 - DNA, 20 bp, Artificial Sequence
  Description of Artificial Sequence: Synthetic oligonucleotide
  Target: ATXN2; (+) strand; PAM type: NNGRRT; PAM sequence: AGGAAT
atttctggaccgtaggaaaa

SEQ ID NO: 9863 - DNA, 20 bp, Artificial Sequence
  Description of Artificial Sequence: Synthetic oligonucleotide
  Target: ATXN2; (+) strand; PAM type: NNGRRT; PAM sequence: GAGGGT
aaggccttggactcttccct

SEQ ID NO: 9864 - DNA, 20 bp, Artificial Sequence
  Description of Artificial Sequence: Synthetic oligonucleotide
  Target: ATXN2; (+) strand; PAM type: NNGRRT; PAM sequence: GCGAGT
cccacaagctagaggaactt

SEQ ID NO: 9865 - DNA, 20 bp, Artificial Sequence
  Description of Artificial Sequence: Synthetic oligonucleotide
  Target: ATXN2; (+) strand; PAM type: NNGRRT; PAM sequence: TAGAAT
tctgacatcctgtgtttggt

SEQ ID NO: 9866 - DNA, 20 bp, Artificial Sequence
  Description of Artificial Sequence: Synthetic oligonucleotide
  Target: ATXN2; (+) strand; PAM type: NNGRRT; PAM sequence: GTGGAT
gcacattgtgataacataaa

SEQ ID NO: 9867 - DNA, 20 bp, Artificial Sequence
  Description of Artificial Sequence: Synthetic oligonucleotide
  Target: ATXN2; (+) strand; PAM type: NNGRRT; PAM sequence: TTGAAT
actgtacaagtaacttattc

SEQ ID NO: 9868 - DNA, 20 bp, Artificial Sequence
  Description of Artificial Sequence: Synthetic oligonucleotide
  Target: ATXN2; (+) strand; PAM type: NNGRRT; PAM sequence: GTGAAT
taatgtacaaattgctatat

SEQ ID NO: 9869 - DNA, 20 bp, Artificial Sequence
  Description of Artificial Sequence: Synthetic oligonucleotide
  Target: ATXN2; (+) strand; PAM type: NNGRRT; PAM sequence: CAGAAT
tatgtgaattaaaaagtttt

SEQ ID NO: 9870 - DNA, 20 bp, Artificial Sequence
  Description of Artificial Sequence: Synthetic oligonucleotide
  Target: ATXN2; (+) strand; PAM type: NNGRRT; PAM sequence: GGGAAT
tgtcctccccgttgcaatct

SEQ ID NO: 9871 - DNA, 20 bp, Artificial Sequence
  Description of Artificial Sequence: Synthetic oligonucleotide
  Target: ATXN2; (+) strand; PAM type: NNGRRT; PAM sequence: ATGAGT
gggaatactaacaaatgctt

SEQ ID NO: 9872 - DNA, 20 bp, Artificial Sequence
  Description of Artificial Sequence: Synthetic oligonucleotide
  Target: ATXN2; (+) strand; PAM type: NNGRRT; PAM sequence: CTGGAT
cttttcagccttcatgccct

SEQ ID NO: 9873 - DNA, 20 bp, Artificial Sequence
  Description of Artificial Sequence: Synthetic oligonucleotide
  Target: ATXN2; (+) strand; PAM type: NNGRRT; PAM sequence: CTGAGT
ttctttattgcaattttttt

SEQ ID NO: 9874 - DNA, 20 bp, Artificial Sequence
  Description of Artificial Sequence: Synthetic oligonucleotide
  Target: ATXN2; (+) strand; PAM type: NNGRRT; PAM sequence: CCGAAT
ctggtaaagtagaaaaatgc

SEQ ID NO: 9875 - DNA, 20 bp, Artificial Sequence
  Description of Artificial Sequence: Synthetic oligonucleotide
  Target: ATXN2; (+) strand; PAM type: NNGRRT; PAM sequence: CAGAAT
gatattaaaaaggaagctta

SEQ ID NO: 9876 - DNA, 20 bp, Artificial Sequence
  Description of Artificial Sequence: Synthetic oligonucleotide
  Target: ATXN2; (+) strand; PAM type: NNGRRT; PAM sequence: GAGGAT
tacagaatcggtgtcagccc

SEQ ID NO: 9877 - DNA, 20 bp, Artificial Sequence
  Description of Artificial Sequence: Synthetic oligonucleotide
  Target: ATXN2; (+) strand; PAM type: NNGRRT; PAM sequence: TGGAAT
tcggtgtcagcccgaggatg

SEQ ID NO: 9878 - DNA, 20 bp, Artificial Sequence
  Description of Artificial Sequence: Synthetic oligonucleotide
  Target: ATXN2; (+) strand; PAM type: NNGRRT; PAM sequence: GAGAAT
cagatctctaatccaccaaa

SEQ ID NO: 9879 - DNA, 20 bp, Artificial Sequence
  Description of Artificial Sequence: Synthetic oligonucleotide
  Target: ATXN2; (+) strand; PAM type: NNGRRT; PAM sequence: AAGGGT
agataccttgaaccagaact

SEQ ID NO: 9880 - DNA, 20 bp, Artificial Sequence
  Description of Artificial Sequence: Synthetic oligonucleotide
  Target: ATXN2; (+) strand; PAM type: NNGRRT; PAM sequence: CGGGAT
atcatttcacagctaccttc

SEQ ID NO: 9881 - DNA, 20 bp, Artificial Sequence
  Description of Artificial Sequence: Synthetic oligonucleotide
  Target: ATXN2; (+) strand; PAM type: NNGRRT; PAM sequence: AAGAAT
taatccgtcagtttgacggt

SEQ ID NO: 9882 - DNA, 20 bp, Artificial Sequence
  Description of Artificial Sequence: Synthetic oligonucleotide
  Target: ATXN2; (+) strand; PAM type: NNGRRT; PAM sequence: AAGAAT
tttttagcagtaatagcagc

SEQ ID NO: 9883 - DNA, 20 bp, Artificial Sequence
  Description of Artificial Sequence: Synthetic oligonucleotide
  Target: ATXN2; (+) strand; PAM type: NNGRRT; PAM sequence: AAGGGT
ctgatgtgttcatgactttc

SEQ ID NO: 9884 - DNA, 20 bp, Artificial Sequence
  Description of Artificial Sequence: Synthetic oligonucleotide
  Target: ATXN2; (+) strand; PAM type: NNGRRT; PAM sequence: TGGGGT
ccagtttcggcaagcagagc

SEQ ID NO: 9885 - DNA, 20 bp, Artificial Sequence
  Description of Artificial Sequence: Synthetic oligonucleotide
  Target: ATXN2; (+) strand; PAM type: NNGRRT; PAM sequence: TGGAAT
cgggactctgaaacagcata

SEQ ID NO: 9886 - DNA, 20 bp, Artificial Sequence
  Description of Artificial Sequence: Synthetic oligonucleotide
  Target: ATXN2; (+) strand; PAM type: NNGRRT; PAM sequence: TGGAAT
tgaaacagcatatggaatta

SEQ ID NO: 9887 - DNA, 20 bp, Artificial Sequence
  Description of Artificial Sequence: Synthetic oligonucleotide
  Target: ATXN2; (+) strand; PAM type: NNGRRT; PAM sequence: TTGGAT
gtgaactgttagcattccta

SEQ ID NO: 9888 - DNA, 20 bp, Artificial Sequence
  Description of Artificial Sequence: Synthetic oligonucleotide
  Target: ATXN2; (+) strand; PAM type: NNGRRT; PAM sequence: GGGAAT
agaagcagtagaagggagga

SEQ ID NO: 9889 - DNA, 20 bp, Artificial Sequence
  Description of Artificial Sequence: Synthetic oligonucleotide
  Target: ATXN2; (+) strand; PAM type: NNGRRT; PAM sequence: TTGAAT
tagctgaacaaaactcaaaa

SEQ ID NO: 9890 - DNA, 20 bp, Artificial Sequence
  Description of Artificial Sequence: Synthetic oligonucleotide
  Target: ATXN2; (+) strand; PAM type: NNGRRT; PAM sequence: GAGGGT
cccatctgcaccaaagtggg

SEQ ID NO: 9891 - DNA, 20 bp, Artificial Sequence
  Description of Artificial Sequence: Synthetic oligonucleotide
  Target: ATXN2; (+) strand; PAM type: NNGRRT; PAM sequence: TTGGGT
ctgcaccaaagtggggaggg

SEQ ID NO: 9892 - DNA, 20 bp, Artificial Sequence
  Description of Artificial Sequence: Synthetic oligonucleotide
  Target: ATXN2; (+) strand; PAM type: NNGRRT; PAM sequence: GTGGGT
accaaagtggggagggttgg

SEQ ID NO: 9893 - DNA, 20 bp, Artificial Sequence
  Description of Artificial Sequence: Synthetic oligonucleotide
  Target: ATXN2; (+) strand; PAM type: NNGRRT; PAM sequence: GTGGGT
aagtggggagggttgggtgg

SEQ ID NO: 9894 - DNA, 20 bp, Artificial Sequence
  Description of Artificial Sequence: Synthetic oligonucleotide
  Target: ATXN2; (+) strand; PAM type: NNGRRT; PAM sequence: TGGGGT
actcccagaagacttgttca

SEQ ID NO: 9895 - DNA, 20 bp, Artificial Sequence
  Description of Artificial Sequence: Synthetic oligonucleotide
  Target: ATXN2; (+) strand; PAM type: NNGRRT; PAM sequence: CAGAAT
ccaagcaccagtattgcttt

SEQ ID NO: 9896 - DNA, 20 bp, Artificial Sequence
  Description of Artificial Sequence: Synthetic oligonucleotide
  Target: ATXN2; (+) strand; PAM type: NNGRRT; PAM sequence: CTGAGT
gtcataacaaggaaggccaa

SEQ ID NO: 9897 - DNA, 20 bp, Artificial Sequence
  Description of Artificial Sequence: Synthetic oligonucleotide
  Target: ATXN2; (+) strand; PAM type: NNGRRT; PAM sequence: ACGGGT
cctcctgtgcacactcctgg

SEQ ID NO: 9898 - DNA, 20 bp, Artificial Sequence
  Description of Artificial Sequence: Synthetic oligonucleotide
  Target: ATXN2; (+) strand; PAM type: NNGRRT; PAM sequence: CAGAAT
tgccattccacctgtgcgag

SEQ ID NO: 9899 - DNA, 20 bp, Artificial Sequence
  Description of Artificial Sequence: Synthetic oligonucleotide
  Target: ATXN2; (+) strand; PAM type: NNGRRT; PAM sequence: TGGGGT
cctgtgcgagcagaatgctt

SEQ ID NO: 9900 - DNA, 20 bp, Artificial Sequence
  Description of Artificial Sequence: Synthetic oligonucleotide
  Target: ATXN2; (+) strand; PAM type: NNGRRT; PAM sequence: AAGGGT
gcacacacacgcctcacctg

SEQ ID NO: 9901 - DNA, 20 bp, Artificial Sequence
  Description of Artificial Sequence: Synthetic oligonucleotide
  Target: ATXN2; (+) strand; PAM type: NNGRRT; PAM sequence: TGGAAT
aaatgcgctgttgtcgagac

SEQ ID NO: 9902 - DNA, 20 bp, Artificial Sequence
  Description of Artificial Sequence: Synthetic oligonucleotide
  Target: ATXN2; (+) strand; PAM type: NNGRRT; PAM sequence: CCGGGT
cgagggcggcctggggaccg

SEQ ID NO: 9903 - DNA, 20 bp, Artificial Sequence
  Description of Artificial Sequence: Synthetic oligonucleotide
  Target: ATXN2; (+) strand; PAM type: NNGRRT; PAM sequence: TTGGAT
catcattggcgcatgggcag

SEQ ID NO: 9904 - DNA, 20 bp, Artificial Sequence
  Description of Artificial Sequence: Synthetic oligonucleotide
  Target: ATXN2; (+) strand; PAM type: NNGRRT; PAM sequence: AAGGGT
cacctttgggcagatcctgc

SEQ ID NO: 9905 - DNA, 20 bp, Artificial Sequence
  Description of Artificial Sequence: Synthetic oligonucleotide
  Target: ATXN2; (+) strand; PAM type: NNGRRT; PAM sequence: CTGGGT
ggagcaggcaacaagtgagc

SEQ ID NO: 9906 - DNA, 20 bp, Artificial Sequence
  Description of Artificial Sequence: Synthetic oligonucleotide
  Target: ATXN2; (+) strand; PAM type: NNGRRT; PAM sequence: TGGGGT
tgatcattgtattctatgta

SEQ ID NO: 9907 - DNA, 20 bp, Artificial Sequence
  Description of Artificial Sequence: Synthetic oligonucleotide
  Target: ATXN2; (+) strand; PAM type: NNGRRT; PAM sequence: CTGGAT
atcttcacaaagattagaca

SEQ ID NO: 9908 - DNA, 20 bp, Artificial Sequence
  Description of Artificial Sequence: Synthetic oligonucleotide
  Target: ATXN2; (+) strand; PAM type: NNGRRT; PAM sequence: CAGAAT
tacaagattcaatgatgctt

SEQ ID NO: 9909 - DNA, 20 bp, Artificial Sequence
  Description of Artificial Sequence: Synthetic oligonucleotide
  Target: ATXN2; (+) strand; PAM type: NNGRRT; PAM sequence: GTGAAT
agactgtcacagtcaagtat

SEQ ID NO: 9910 - DNA, 20 bp, Artificial Sequence
  Description of Artificial Sequence: Synthetic oligonucleotide
  Target: ATXN2; (+) strand; PAM type: NNGRRT; PAM sequence: AGGAGT
gatggagcaggaggaggagg

SEQ ID NO: 9911 - DNA, 20 bp, Artificial Sequence
  Description of Artificial Sequence: Synthetic oligonucleotide
  Target: ATXN2; (+) strand; PAM type: NNGRRT; PAM sequence: TGGAGT
gcaggaggaggaggaggagt

SEQ ID NO: 9912 - DNA, 20 bp, Artificial Sequence
  Description of Artificial Sequence: Synthetic oligonucleotide
  Target: ATXN2; (+) strand; PAM type: NNGRRT; PAM sequence: AGGAGT
atggctccagtgagatggaa

SEQ ID NO: 9913 - DNA, 20 bp, Artificial Sequence
  Description of Artificial Sequence: Synthetic oligonucleotide
  Target: ATXN2; (+) strand; PAM type: NNGRRT; PAM sequence: CTGGAT
attttagtcagcccaaacag

SEQ ID NO: 9914 - DNA, 20 bp, Artificial Sequence
  Description of Artificial Sequence: Synthetic oligonucleotide
  Target: ATXN2; (+) strand; PAM type: NNGRRT; PAM sequence: GGGGGT
agctggattccagctctgca

SEQ ID NO: 9915 - DNA, 20 bp, Artificial Sequence
  Description of Artificial Sequence: Synthetic oligonucleotide
  Target: ATXN2; (+) strand; PAM type: NNGRRT; PAM sequence: TTGGAT
gttctagactacgataagcc

SEQ ID NO: 9916 - DNA, 20 bp, Artificial Sequence
  Description of Artificial Sequence: Synthetic oligonucleotide
  Target: ATXN2; (+) strand; PAM type: NNGRRT; PAM sequence: CAGAGT
ttgccctttcagcacaaaaa

SEQ ID NO: 9917 - DNA, 20 bp, Artificial Sequence
  Description of Artificial Sequence: Synthetic oligonucleotide
  Target: ATXN2; (+) strand; PAM type: NNGRRT; PAM sequence: AGGGAT
caaaaacagagtgaggtttt

SEQ ID NO: 9918 - DNA, 20 bp, Artificial Sequence
  Description of Artificial Sequence: Synthetic oligonucleotide
  Target: ATXN2; (+) strand; PAM type: NNGRRT; PAM sequence: CAGGGT
accacagaacctaaactttg

SEQ ID NO: 9919 - DNA, 20 bp, Artificial Sequence
  Description of Artificial Sequence: Synthetic oligonucleotide
  Target: ATXN2; (+) strand; PAM type: NNGRRT; PAM sequence: CTGAGT
cttctgagagatagatccaa

SEQ ID NO: 9920 - DNA, 20 bp, Artificial Sequence
  Description of Artificial Sequence: Synthetic oligonucleotide
  Target: ATXN2; (+) strand; PAM type: NNGRRT; PAM sequence: TGGAAT
gcgcactatttaacaggaaa

SEQ ID NO: 9921 - DNA, 20 bp, Artificial Sequence
  Description of Artificial Sequence: Synthetic oligonucleotide
  Target: ATXN2; (+) strand; PAM type: NNGRRT; PAM sequence: GAGAGT
tctcacttagacccgcctca

SEQ ID NO: 9922 - DNA, 20 bp, Artificial Sequence
  Description of Artificial Sequence: Synthetic oligonucleotide
  Target: ATXN2; (+) strand; PAM type: NNGRRT; PAM sequence: TGGAGT
taagacaatcccctgggccc

SEQ ID NO: 9923 - DNA, 20 bp, Artificial Sequence
  Description of Artificial Sequence: Synthetic oligonucleotide
  Target: ATXN2; (+) strand; PAM type: NNGRRT; PAM sequence: CTGGGT
ttaaagaaaaatgggaccac

SEQ ID NO: 9924 - DNA, 20 bp, Artificial Sequence
  Description of Artificial Sequence: Synthetic oligonucleotide
  Target: ATXN2; (+) strand; PAM type: NNGRRT; PAM sequence: AAGAGT
gtccaaggccaagccctctc

SEQ ID NO: 9925 - DNA, 20 bp, Artificial Sequence
  Description of Artificial Sequence: Synthetic oligonucleotide
  Target: ATXN2; (+) strand; PAM type: NNGRRT; PAM sequence: ATGGAT
cttatggtcaaagcagatat

SEQ ID NO: 9926 - DNA, 20 bp, Artificial Sequence
  Description of Artificial Sequence: Synthetic oligonucleotide
  Target: ATXN2; (+) strand; PAM type: NNGRRT; PAM sequence: GTGAGT
gagatgtgtctggaactcat

SEQ ID NO: 9927 - DNA, 20 bp, Artificial Sequence
  Description of Artificial Sequence: Synthetic oligonucleotide
  Target: ATXN2; (+) strand; PAM type: NNGRRT; PAM sequence: GGGAAT
cttccaaggtaagtgtgtag

SEQ ID NO: 9928 - DNA, 20 bp, Artificial Sequence
  Description of Artificial Sequence: Synthetic oligonucleotide
  Target: ATXN2; (+) strand; PAM type: NNGRRT; PAM sequence: CTGGGT
acacagaaaggaaagaagga

SEQ ID NO: 9929 - DNA, 20 bp, Artificial Sequence
  Description of Artificial Sequence: Synthetic oligonucleotide
  Target: ATXN2; (+) strand; PAM type: NNGRRT; PAM sequence: CAGAGT
agaaggactgggttgcattc

SEQ ID NO: 9930 - DNA, 20 bp, Artificial Sequence
  Description of Artificial Sequence: Synthetic oligonucleotide
  Target: ATXN2; (+) strand; PAM type: NNGRRT; PAM sequence: CAGGGT
caggcaaatggcatgacaca

SEQ ID NO: 9931 - DNA, 20 bp, Artificial Sequence
  Description of Artificial Sequence: Synthetic oligonucleotide
  Target: ATXN2; (+) strand; PAM type: NNGRRT; PAM sequence: TGGGGT
cctgaggtacgtgggccatg

SEQ ID NO: 9932 - DNA, 20 bp, Artificial Sequence
  Description of Artificial Sequence: Synthetic oligonucleotide
  Target: ATXN2; (+) strand; PAM type: NNGRRT; PAM sequence: GTGGGT
aggtacgtgggccatgtggg

SEQ ID NO: 9933 - DNA, 20 bp, Artificial Sequence
  Description of Artificial Sequence: Synthetic oligonucleotide
  Target: ATXN2; (+) strand; PAM type: NNGRRT; PAM sequence: AAGGAT
atacgccggctgaacgtgag

SEQ ID NO: 9934 - DNA, 20 bp, Artificial Sequence
  Description of Artificial Sequence: Synthetic oligonucleotide
  Target: ATXN2; (+) strand; PAM type: NNGRRT; PAM sequence: ATGGAT
gccggctgaacgtgagaagg

SEQ ID NO: 9935 - DNA, 20 bp, Artificial Sequence
  Description of Artificial Sequence: Synthetic oligonucleotide
  Target: ATXN2; (+) strand; PAM type: NNGRRT; PAM sequence: GAGGGT
tgttggaggcaggtgtcatg

SEQ ID NO: 9936 - DNA, 20 bp, Artificial Sequence
  Description of Artificial Sequence: Synthetic oligonucleotide
  Target: ATXN2; (+) strand; PAM type: NNGRRT; PAM sequence: TGGAGT
gaggcaggtgtcatggaggg

SEQ ID NO: 9937 - DNA, 20 bp, Artificial Sequence
  Description of Artificial Sequence: Synthetic oligonucleotide
  Target: ATXN2; (+) strand; PAM type: NNGRRT; PAM sequence: AAGAAT
ggtgctgcaaagcgacagga

SEQ ID NO: 9938 - DNA, 20 bp, Artificial Sequence
  Description of Artificial Sequence: Synthetic oligonucleotide
  Target: ATXN2; (+) strand; PAM type: NNGRRT; PAM sequence: AGGGAT
tctttaatgaaaagcagcca

SEQ ID NO: 9939 - DNA, 20 bp, Artificial Sequence
  Description of Artificial Sequence: Synthetic oligonucleotide
  Target: ATXN2; (+) strand; PAM type: NNGRRT; PAM sequence: GAGGGT
tgcacacttgggcctatgat

SEQ ID NO: 9940 - DNA, 20 bp, Artificial Sequence
  Description of Artificial Sequence: Synthetic oligonucleotide
  Target: ATXN2; (+) strand; PAM type: NNGRRT; PAM sequence: GAGAAT
agggtcactggaaagtacag

SEQ ID NO: 9941 - DNA, 20 bp, Artificial Sequence
  Description of Artificial Sequence: Synthetic oligonucleotide
  Target: ATXN2; (+) strand; PAM type: NNGRRT; PAM sequence: CAGGGT
ggaaagtacaggagaatgta

SEQ ID NO: 9942 - DNA, 20 bp, Artificial Sequence
  Description of Artificial Sequence: Synthetic oligonucleotide
  Target: ATXN2; (+) strand; PAM type: NNGRRT; PAM sequence: TAGGGT
ccatctggacaactcctttc

SEQ ID NO: 9943 - DNA, 20 bp, Artificial Sequence
  Description of Artificial Sequence: Synthetic oligonucleotide
  Target: ATXN2; (+) strand; PAM type: NNGRRT; PAM sequence: AGGAAT
ttaaaaagtcccaagcaaat

SEQ ID NO: 9944 - DNA, 20 bp, Artificial Sequence
  Description of Artificial Sequence: Synthetic oligonucleotide
  Target: ATXN2; (+) strand; PAM type: NNGRRT; PAM sequence: CAGAGT
aattttttatttttttgaga

SEQ ID NO: 9945 - DNA, 20 bp, Artificial Sequence
  Description of Artificial Sequence: Synthetic oligonucleotide
  Target: ATXN2; (+) strand; PAM type: NNGRRT; PAM sequence: TGGAGT
agtctcgctgttgtccaagc

SEQ ID NO: 9946 - DNA, 20 bp, Artificial Sequence
  Description of Artificial Sequence: Synthetic oligonucleotide
  Target: ATXN2; (+) strand; PAM type: NNGRRT; PAM sequence: CCGGGT
ctcactgcaagctccgcctc

SEQ ID NO: 9947 - DNA, 20 bp, Artificial Sequence
  Description of Artificial Sequence: Synthetic oligonucleotide
  Target: ATXN2; (+) strand; PAM type: NNGRRT; PAM sequence: CGGAGT
ttttgtatttttattagaga

SEQ ID NO: 9948 - DNA, 20 bp, Artificial Sequence
  Description of Artificial Sequence: Synthetic oligonucleotide
  Target: ATXN2; (+) strand; PAM type: NNGRRT; PAM sequence: CAGGAT
cggagtttcacagtgttcgc

SEQ ID NO: 9949 - DNA, 20 bp, Artificial Sequence
  Description of Artificial Sequence: Synthetic oligonucleotide
  Target: ATXN2; (+) strand; PAM type: NNGRRT; PAM sequence: TGGGAT
gcctcggcctcccaaagtgg

SEQ ID NO: 9950 - DNA, 20 bp, Artificial Sequence
  Description of Artificial Sequence: Synthetic oligonucleotide
  Target: ATXN2; (+) strand; PAM type: NNGRRT; PAM sequence: GAGGGT
acagctgtatccatcttcac

SEQ ID NO: 9951 - DNA, 20 bp, Artificial Sequence
  Description of Artificial Sequence: Synthetic oligonucleotide
  Target: ATXN2; (+) strand; PAM type: NNGRRT; PAM sequence: TAGGAT
tgaagaaagcactcagatac

SEQ ID NO: 9952 - DNA, 20 bp, Artificial Sequence
  Description of Artificial Sequence: Synthetic oligonucleotide
  Target: ATXN2; (+) strand; PAM type: NNGRRT; PAM sequence: CTGAGT
aagccactccatgcagacct

SEQ ID NO: 9953 - DNA, 20 bp, Artificial Sequence
  Description of Artificial Sequence: Synthetic oligonucleotide
  Target: ATXN2; (+) strand; PAM type: NNGRRT; PAM sequence: CTGGGT
ttgcccttacctgaacagga

SEQ ID NO: 9954 - DNA, 20 bp, Artificial Sequence
  Description of Artificial Sequence: Synthetic oligonucleotide
  Target: ATXN2; (+) strand; PAM type: NNGRRT; PAM sequence: CAGGAT
tacctgaacaggactgggtg

SEQ ID NO: 9955 - DNA, 20 bp, Artificial Sequence
  Description of Artificial Sequence: Synthetic oligonucleotide
  Target: ATXN2; (+) strand; PAM type: NNGRRT; PAM sequence: GGGGGT
tggctttgctgctgtccagt

SEQ ID NO: 9956 - DNA, 20 bp, Artificial Sequence
  Description of Artificial Sequence: Synthetic oligonucleotide
  Target: ATXN2; (+) strand; PAM type: NNGRRT; PAM sequence: GAGGGT
agtgggggtagctgaaggct

SEQ ID NO: 9957 - DNA, 20 bp, Artificial Sequence
  Description of Artificial Sequence: Synthetic oligonucleotide
  Target: ATXN2; (+) strand; PAM type: NNGRRT; PAM sequence: TGGAGT
gtagctgaaggctgagggtg

SEQ ID NO: 9958 - DNA, 20 bp, Artificial Sequence
  Description of Artificial Sequence: Synthetic oligonucleotide
  Target: ATXN2; (+) strand; PAM type: NNGRRT; PAM sequence: GTGGGT
aggctgagggtgtggagtat

SEQ ID NO: 9959 - DNA, 20 bp, Artificial Sequence
  Description of Artificial Sequence: Synthetic oligonucleotide
  Target: ATXN2; (+) strand; PAM type: NNGRRT; PAM sequence: CAGGGT
gggtgtggagtatgtgggtg

SEQ ID NO: 9960 - DNA, 20 bp, Artificial Sequence
  Description of Artificial Sequence: Synthetic oligonucleotide
  Target: ATXN2; (+) strand; PAM type: NNGRRT; PAM sequence: TAGGGT
atgtgggtgcagggtagcgt

SEQ ID NO: 9961 - DNA, 20 bp, Artificial Sequence
  Description of Artificial Sequence: Synthetic oligonucleotide
  Target: ATXN2; (+) strand; PAM type: NNGRRT; PAM sequence: TTGGGT
tcctgagggcacagactata

SEQ ID NO: 9962 - DNA, 20 bp, Artificial Sequence
  Description of Artificial Sequence: Synthetic oligonucleotide
  Target: ATXN2; (+) strand; PAM type: NNGRRT; PAM sequence: GGGGAT
agactatattgggtgtggtg

SEQ ID NO: 9963 - DNA, 20 bp, Artificial Sequence
  Description of Artificial Sequence: Synthetic oligonucleotide
  Target: ATXN2; (+) strand; PAM type: NNGRRT; PAM sequence: GGGGGT
tattgggtgtggtgggggat

SEQ ID NO: 9964 - DNA, 20 bp, Artificial Sequence
  Description of Artificial Sequence: Synthetic oligonucleotide
  Target: ATXN2; (+) strand; PAM type: NNGRRT; PAM sequence: AGGGAT
gtatggtatgtggcaaggcc

SEQ ID NO: 9965 - DNA, 20 bp, Artificial Sequence
  Description of Artificial Sequence: Synthetic oligonucleotide
  Target: ATXN2; (+) strand; PAM type: NNGRRT; PAM sequence: GAGGAT
tactttcccaagccctaatg

SEQ ID NO: 9966 - DNA, 20 bp, Artificial Sequence
  Description of Artificial Sequence: Synthetic oligonucleotide
  Target: ATXN2; (+) strand; PAM type: NNGRRT; PAM sequence: CTGAGT
atagaaaagtaaactccctt

SEQ ID NO: 9967 - DNA, 20 bp, Artificial Sequence
  Description of Artificial Sequence: Synthetic oligonucleotide
  Target: ATXN2; (+) strand; PAM type: NNGRRT; PAM sequence: GTGAAT
gaactgaaagccagttcttt

SEQ ID NO: 9968 - DNA, 20 bp, Artificial Sequence
  Description of Artificial Sequence: Synthetic oligonucleotide
  Target: ATXN2; (+) strand; PAM type: NNGRRT; PAM sequence: CCGAGT
aattctcctgcctcagcctc

SEQ ID NO: 9969 - DNA, 20 bp, Artificial Sequence
  Description of Artificial Sequence: Synthetic oligonucleotide
  Target: ATXN2; (+) strand; PAM type: NNGRRT; PAM sequence: TGGGGT
ttttgtatttttagtagaga

SEQ ID NO: 9970 - DNA, 20 bp, Artificial Sequence
  Description of Artificial Sequence: Synthetic oligonucleotide
  Target: ATXN2; (+) strand; PAM type: NNGRRT; PAM sequence: TGGGAT
acttcagcctcccaaagtgc

SEQ ID NO: 9971 - DNA, 20 bp, Artificial Sequence
  Description of Artificial Sequence: Synthetic oligonucleotide
  Target: ATXN2; (+) strand; PAM type: NNGRRT; PAM sequence: GAGAAT
tgcttcaaaaacagtaagtt

SEQ ID NO: 9972 - DNA, 20 bp, Artificial Sequence
  Description of Artificial Sequence: Synthetic oligonucleotide
  Target: ATXN2; (+) strand; PAM type: NNGRRT; PAM sequence: CAGAGT
agtaagttgagaatcagaag

SEQ ID NO: 9973 - DNA, 20 bp, Artificial Sequence
  Description of Artificial Sequence: Synthetic oligonucleotide
  Target: ATXN2; (+) strand; PAM type: NNGRRT; PAM sequence: TAGGAT
gttgagaatcagaagcagag

SEQ ID NO: 9974 - DNA, 20 bp, Artificial Sequence
  Description of Artificial Sequence: Synthetic oligonucleotide
  Target: ATXN2; (+) strand; PAM type: NNGRRT; PAM sequence: GAGAAT
cctccacgaggcaatgagct

SEQ ID NO: 9975 - DNA, 20 bp, Artificial Sequence
  Description of Artificial Sequence: Synthetic oligonucleotide
  Target: ATXN2; (+) strand; PAM type: NNGRRT; PAM sequence: CCGAGT
cagtctggtaggcaaggctg

SEQ ID NO: 9976 - DNA, 20 bp, Artificial Sequence
  Description of Artificial Sequence: Synthetic oligonucleotide
  Target: ATXN2; (+) strand; PAM type: NNGRRT; PAM sequence: CTGGGT
agtcaccagcatagacggct

SEQ ID NO: 9977 - DNA, 20 bp, Artificial Sequence
  Description of Artificial Sequence: Synthetic oligonucleotide
  Target: ATXN2; (+) strand; PAM type: NNGRRT; PAM sequence: GAGGGT
ttccacgtaaatggtgtgca

SEQ ID NO: 9978 - DNA, 20 bp, Artificial Sequence
  Description of Artificial Sequence: Synthetic oligonucleotide
  Target: ATXN2; (+) strand; PAM type: NNGRRT; PAM sequence: TAGGAT
gcaaggcaaagagccagttc

SEQ ID NO: 9979 - DNA, 20 bp, Artificial Sequence
  Description of Artificial Sequence: Synthetic oligonucleotide
  Target: ATXN2; (+) strand; PAM type: NNGRRT; PAM sequence: CTGGAT
tccttcatatccagtttaga

SEQ ID NO: 9980 - DNA, 20 bp, Artificial Sequence
  Description of Artificial Sequence: Synthetic oligonucleotide
  Target: ATXN2; (+) strand; PAM type: NNGRRT; PAM sequence: AGGAAT
gggaaaattttccagactgt

SEQ ID NO: 9981 - DNA, 20 bp, Artificial Sequence
  Description of Artificial Sequence: Synthetic oligonucleotide
  Target: ATXN2; (+) strand; PAM type: NNGRRT; PAM sequence: CAGAAT
ctgtaggaattaacatatgc

SEQ ID NO: 9982 - DNA, 20 bp, Artificial Sequence
  Description of Artificial Sequence: Synthetic oligonucleotide
  Target: ATXN2; (+) strand; PAM type: NNGRRT; PAM sequence: CTGAAT
aaactgtggcaacatagtct

SEQ ID NO: 9983 - DNA, 20 bp, Artificial Sequence
  Description of Artificial Sequence: Synthetic oligonucleotide
  Target: ATXN2; (+) strand; PAM type: NNGRRT; PAM sequence: AAGAGT
catagtctctgaatgttttt

SEQ ID NO: 9984 - DNA, 20 bp, Artificial Sequence
  Description of Artificial Sequence: Synthetic oligonucleotide
  Target: ATXN2; (+) strand; PAM type: NNGRRT; PAM sequence: CTGAGT
atttgatgtaaatttcgaac

SEQ ID NO: 9985 - DNA, 20 bp, Artificial Sequence
  Description of Artificial Sequence: Synthetic oligonucleotide
  Target: ATXN2; (+) strand; PAM type: NNGRRT; PAM sequence: CAGAGT
tttatttgtttaatttttga

SEQ ID NO: 9986 - DNA, 20 bp, Artificial Sequence
  Description of Artificial Sequence: Synthetic oligonucleotide
  Target: ATXN2; (+) strand; PAM type: NNGRRT; PAM sequence: TGGAGT
tctcgctctgttgcccaggc

SEQ ID NO: 9987 - DNA, 20 bp, Artificial Sequence
  Description of Artificial Sequence: Synthetic oligonucleotide
  Target: ATXN2; (+) strand; PAM type: NNGRRT; PAM sequence: CCGGGT
ctcactgcaacctccgcctc

SEQ ID NO: 9988 - DNA, 20 bp, Artificial Sequence
  Description of Artificial Sequence: Synthetic oligonucleotide
  Target: ATXN2; (+) strand; PAM type: NNGRRT; PAM sequence: CCGAGT
gattctcctgcctcagcctg

SEQ ID NO: 9989 - DNA, 20 bp, Artificial Sequence
  Description of Artificial Sequence: Synthetic oligonucleotide
  Target: ATXN2; (+) strand; PAM type: NNGRRT; PAM sequence: ACGGGT
tttttgtatttttagtagag

SEQ ID NO: 9990 - DNA, 20 bp, Artificial Sequence
  Description of Artificial Sequence: Synthetic oligonucleotide
  Target: ATXN2; (+) strand; PAM type: NNGRRT; PAM sequence: TGGGAT
gcctcggcctcccaaagtgc

SEQ ID NO: 9991 - DNA, 20 bp, Artificial Sequence
  Description of Artificial Sequence: Synthetic oligonucleotide
  Target: ATXN2; (+) strand; PAM type: NNGRRT; PAM sequence: TGGAGT
agtcttgctgtcacccaggc

SEQ ID NO: 9992 - DNA, 20 bp, Artificial Sequence
  Description of Artificial Sequence: Synthetic oligonucleotide
  Target: ATXN2; (+) strand; PAM type: NNGRRT; PAM sequence: CTGGGT
ctcactgcagcctccgcctc

SEQ ID NO: 9993 - DNA, 20 bp, Artificial Sequence
  Description of Artificial Sequence: Synthetic oligonucleotide
  Target: ATXN2; (+) strand; PAM type: NNGRRT; PAM sequence: CTGAGT
tgatactcctgcttcagcct

SEQ ID NO: 9994 - DNA, 20 bp, Artificial Sequence
  Description of Artificial Sequence: Synthetic oligonucleotide
  Target: ATXN2; (+) strand; PAM type: NNGRRT; PAM sequence: TGGGAT
tgcttcagcctctgagtagc

SEQ ID NO: 9995 - DNA, 20 bp, Artificial Sequence
  Description of Artificial Sequence: Synthetic oligonucleotide
  Target: ATXN2; (+) strand; PAM type: NNGRRT; PAM sequence: CGGGGT
ttttgtatttttagtagaga

SEQ ID NO: 9996 - DNA, 20 bp, Artificial Sequence
  Description of Artificial Sequence: Synthetic oligonucleotide
  Target: ATXN2; (+) strand; PAM type: NNGRRT; PAM sequence: TGGGAT
atctcggcctcccaaagtgt

SEQ ID NO: 9997 - DNA, 20 bp, Artificial Sequence
  Description of Artificial Sequence: Synthetic oligonucleotide
  Target: ATXN2; (+) strand; PAM type: NNGRRT; PAM sequence: TTGAAT
cccggcctaaaaatttattt

SEQ ID NO: 9998 - DNA, 20 bp, Artificial Sequence
  Description of Artificial Sequence: Synthetic oligonucleotide
  Target: ATXN2; (+) strand; PAM type: NNGRRT; PAM sequence: CGGAGT
gttttgttgttgttttgaga

SEQ ID NO: 9999 - DNA, 20 bp, Artificial Sequence
  Description of Artificial Sequence: Synthetic oligonucleotide
  Target: ATXN2; (+) strand; PAM type: NNGRRT; PAM sequence: CAGGGT
cggagtctcgctctgttgcc

SEQ ID NO: 10000 - DNA, 20 bp, Artificial Sequence
  Description of Artificial Sequence: Synthetic oligonucleotide
  Target: ATXN2; (+) strand; PAM type: NNGRRT; PAM sequence: TGGAGT
tctcgctctgttgcccaggg

SEQ ID NO: 10001 - DNA, 20 bp, Artificial Sequence
  Description of Artificial Sequence: Synthetic oligonucleotide
  Target: ATXN2; (+) strand; PAM type: NNGRRT; PAM sequence: CCGGGT
ctcaccgcaacctctgcctc

SEQ ID NO: 10002 - DNA, 20 bp, Artificial Sequence
  Description of Artificial Sequence: Synthetic oligonucleotide
  Target: ATXN2; (+) strand; PAM type: NNGRRT; PAM sequence: CTGAGT
gattctcctgtgtcagcctc

SEQ ID NO: 10003 - DNA, 20 bp, Artificial Sequence
  Description of Artificial Sequence: Synthetic oligonucleotide
  Target: ATXN2; (+) strand; PAM type: NNGRRT; PAM sequence: CAGGGT
ttttgtatttttagtagaga

SEQ ID NO: 10004 - DNA, 20 bp, Artificial Sequence
  Description of Artificial Sequence: Synthetic oligonucleotide
  Target: ATXN2; (+) strand; PAM type: NNGRRT; PAM sequence: CTGGAT
cccagccacaaaatgttcta

SEQ ID NO: 10005 - DNA, 20 bp, Artificial Sequence
  Description of Artificial Sequence: Synthetic oligonucleotide
  Target: ATXN2; (+) strand; PAM type: NNGRRT; PAM sequence: CGGAAT
aggttcataaagatacagta

SEQ ID NO: 10006 - DNA, 20 bp, Artificial Sequence
  Description of Artificial Sequence: Synthetic oligonucleotide
  Target: ATXN2; (+) strand; PAM type: NNGRRT; PAM sequence: AAGAAT
taccttctaagcaaagtatt

SEQ ID NO: 10007 - DNA, 20 bp, Artificial Sequence
  Description of Artificial Sequence: Synthetic oligonucleotide
  Target: ATXN2; (+) strand; PAM type: NNGRRT; PAM sequence: CTGAGT
gcatagcacaaatacccaag

SEQ ID NO: 10008 - DNA, 20 bp, Artificial Sequence
  Description of Artificial Sequence: Synthetic oligonucleotide
  Target: ATXN2; (+) strand; PAM type: NNGRRT; PAM sequence: GTGAAT
agcacaaatacccaagctga

SEQ ID NO: 10009 - DNA, 20 bp, Artificial Sequence
  Description of Artificial Sequence: Synthetic oligonucleotide
  Target: ATXN2; (+) strand; PAM type: NNGRRT; PAM sequence: AAGGAT
caagacgaacaaaaaccaca

SEQ ID NO: 10010 - DNA, 20 bp, Artificial Sequence
  Description of Artificial Sequence: Synthetic oligonucleotide
  Target: ATXN2; (+) strand; PAM type: NNGRRT; PAM sequence: AAGAGT
cgttgtaaacaaaatttaaa

SEQ ID NO: 10011 - DNA, 20 bp, Artificial Sequence
  Description of Artificial Sequence: Synthetic oligonucleotide
  Target: ATXN2; (+) strand; PAM type: NNGRRT; PAM sequence: AGGAAT
ctgaaagaagtaccttaatc

SEQ ID NO: 10012 - DNA, 20 bp, Artificial Sequence
  Description of Artificial Sequence: Synthetic oligonucleotide
  Target: ATXN2; (+) strand; PAM type: NNGRRT; PAM sequence: TTGAAT
atcaggaattcttttcctcc

SEQ ID NO: 10013 - DNA, 20 bp, Artificial Sequence
  Description of Artificial Sequence: Synthetic oligonucleotide
  Target: ATXN2; (+) strand; PAM type: NNGRRT; PAM sequence: GCGGAT
attttgggaggccgaggcgg

SEQ ID NO: 10014 - DNA, 20 bp, Artificial Sequence
  Description of Artificial Sequence: Synthetic oligonucleotide
  Target: ATXN2; (+) strand; PAM type: NNGRRT; PAM sequence: AGGAGT
cgggcggatcacctgaggtt

SEQ ID NO: 10015 - DNA, 20 bp, Artificial Sequence
  Description of Artificial Sequence: Synthetic oligonucleotide
  Target: ATXN2; (+) strand; PAM type: NNGRRT; PAM sequence: GAGAGT
ctgtaatcacagctactagg

SEQ ID NO: 10016 - DNA, 20 bp, Artificial Sequence
  Description of Artificial Sequence: Synthetic oligonucleotide
  Target: ATXN2; (+) strand; PAM type: NNGRRT; PAM sequence: GAGAAT
tactagggagagtggggaag

SEQ ID NO: 10017 - DNA, 20 bp, Artificial Sequence
  Description of Artificial Sequence: Synthetic oligonucleotide
  Target: ATXN2; (+) strand; PAM type: NNGRRT; PAM sequence: CAGGGT
taagtgacagtgacacaaag

SEQ ID NO: 10018 - DNA, 20 bp, Artificial Sequence
  Description of Artificial Sequence: Synthetic oligonucleotide
  Target: ATXN2; (+) strand; PAM type: NNGRRT; PAM sequence: AGGAGT
aggtaggtgatcacgaggtc

SEQ ID NO: 10019 - DNA, 20 bp, Artificial Sequence
  Description of Artificial Sequence: Synthetic oligonucleotide
  Target: ATXN2; (+) strand; PAM type: NNGRRT; PAM sequence: CTGGGT
aaaaatacaaaaaaaattag

SEQ ID NO: 10020 - DNA, 20 bp, Artificial Sequence
  Description of Artificial Sequence: Synthetic oligonucleotide
  Target: ATXN2; (+) strand; PAM type: NNGRRT; PAM sequence: GAGAAT
ctactctggaagctgaggca

SEQ ID NO: 10021 - DNA, 20 bp, Artificial Sequence
  Description of Artificial Sequence: Synthetic oligonucleotide
  Target: ATXN2; (+) strand; PAM type: NNGRRT; PAM sequence: CAGAGT
ctgcactccagcctggacga

SEQ ID NO: 10022 - DNA, 20 bp, Artificial Sequence
  Description of Artificial Sequence: Synthetic oligonucleotide
  Target: ATXN2; (+) strand; PAM type: NNGRRT; PAM sequence: GAGAAT
taaagaaggaaaaaacacag

SEQ ID NO: 10023 - DNA, 20 bp, Artificial Sequence
  Description of Artificial Sequence: Synthetic oligonucleotide
  Target: ATXN2; (+) strand; PAM type: NNGRRT; PAM sequence: GAGAGT
acaggagaatcagggaaaag

SEQ ID NO: 10024 - DNA, 20 bp, Artificial Sequence
  Description of Artificial Sequence: Synthetic oligonucleotide
  Target: ATXN2; (+) strand; PAM type: NNGRRT; PAM sequence: TGGAGT
agaatcagggaaaaggagag

SEQ ID NO: 10025 - DNA, 20 bp, Artificial Sequence
  Description of Artificial Sequence: Synthetic oligonucleotide
  Target: ATXN2; (+) strand; PAM type: NNGRRT; PAM sequence: GTGGGT
agagtggagtgggaagggca

SEQ ID NO: 10026 - DNA, 20 bp, Artificial Sequence
  Description of Artificial Sequence: Synthetic oligonucleotide
  Target: ATXN2; (+) strand; PAM type: NNGRRT; PAM sequence: TTGGAT
taggttttgtcattttgact

SEQ ID NO: 10027 - DNA, 20 bp, Artificial Sequence
  Description of Artificial Sequence: Synthetic oligonucleotide
  Target: ATXN2; (+) strand; PAM type: NNGRRT; PAM sequence: GGGAAT
aaagttgaaaactctaaaag

SEQ ID NO: 10028 - DNA, 20 bp, Artificial Sequence
  Description of Artificial Sequence: Synthetic oligonucleotide
  Target: ATXN2; (+) strand; PAM type: NNGRRT; PAM sequence: GAGGAT
aacagagacagtaagatggt

SEQ ID NO: 10029 - DNA, 20 bp, Artificial Sequence
  Description of Artificial Sequence: Synthetic oligonucleotide
  Target: ATXN2; (+) strand; PAM type: NNGRRT; PAM sequence: TTGAGT
actacatttgagacctcaaa

SEQ ID NO: 10030 - DNA, 20 bp, Artificial Sequence
  Description of Artificial Sequence: Synthetic oligonucleotide
  Target: ATXN2; (+) strand; PAM type: NNGRRT; PAM sequence: AAGGAT
tttttaaagagcatctatta

SEQ ID NO: 10031 - DNA, 20 bp, Artificial Sequence
  Description of Artificial Sequence: Synthetic oligonucleotide
  Target: ATXN2; (+) strand; PAM type: NNGRRT; PAM sequence: TTGGAT
atgtatgtatcagcttattt

SEQ ID NO: 10032 - DNA, 20 bp, Artificial Sequence
  Description of Artificial Sequence: Synthetic oligonucleotide
  Target: ATXN2; (+) strand; PAM type: NNGRRT; PAM sequence: TAGAGT
aatgctaatatggcatttag

SEQ ID NO: 10033 - DNA, 20 bp, Artificial Sequence
  Description of Artificial Sequence: Synthetic oligonucleotide
  Target: ATXN2; (+) strand; PAM type: NNGRRT; PAM sequence: TTGAGT
gcatttagtagagtcagaca

SEQ ID NO: 10034 - DNA, 20 bp, Artificial Sequence
  Description of Artificial Sequence: Synthetic oligonucleotide
  Target: ATXN2; (+) strand; PAM type: NNGRRT; PAM sequence: TTGAAT
aaatgtgcctaacataaaat

SEQ ID NO: 10035 - DNA, 20 bp, Artificial Sequence
  Description of Artificial Sequence: Synthetic oligonucleotide
  Target: ATXN2; (+) strand; PAM type: NNGRRT; PAM sequence: AAGGAT
attaatggcacaaatttcta

SEQ ID NO: 10036 - DNA, 20 bp, Artificial Sequence
  Description of Artificial Sequence: Synthetic oligonucleotide
  Target: ATXN2; (+) strand; PAM type: NNGRRT; PAM sequence: CAGAGT
ttttattttttattttgaga

SEQ ID NO: 10037 - DNA, 20 bp, Artificial Sequence
  Description of Artificial Sequence: Synthetic oligonucleotide
  Target: ATXN2; (+) strand; PAM type: NNGRRT; PAM sequence: CTGAGT
tctctctctgttgcccaggc

SEQ ID NO: 10038 - DNA, 20 bp, Artificial Sequence
  Description of Artificial Sequence: Synthetic oligonucleotide
  Target: ATXN2; (+) strand; PAM type: NNGRRT; PAM sequence: CAGGGT
ctcactgcaacctccacctc

SEQ ID NO: 10039 - DNA, 20 bp, Artificial Sequence
  Description of Artificial Sequence: Synthetic oligonucleotide
  Target: ATXN2; (+) strand; PAM type: NNGRRT; PAM sequence: TAGGGT
ccaccatgctttggtagaga

SEQ ID NO: 10040 - DNA, 20 bp, Artificial Sequence
  Description of Artificial Sequence: Synthetic oligonucleotide
  Target: ATXN2; (+) strand; PAM type: NNGRRT; PAM sequence: TGGGAT
acctcggcctcccaaagtac

SEQ ID NO: 10041 - DNA, 20 bp, Artificial Sequence
  Description of Artificial Sequence: Synthetic oligonucleotide
  Target: ATXN2; (+) strand; PAM type: NNGRRT; PAM sequence: AGGGGT
cttaagctcaagatatcctg

SEQ ID NO: 10042 - DNA, 20 bp, Artificial Sequence
  Description of Artificial Sequence: Synthetic oligonucleotide
  Target: ATXN2; (+) strand; PAM type: NNGRRT; PAM sequence: CTGAAT
tatcctgaggggtctgcttc

SEQ ID NO: 10043 - DNA, 20 bp, Artificial Sequence
  Description of Artificial Sequence: Synthetic oligonucleotide
  Target: ATXN2; (+) strand; PAM type: NNGRRT; PAM sequence: CAGAAT
gaatattttattttttgaga

SEQ ID NO: 10044 - DNA, 20 bp, Artificial Sequence
  Description of Artificial Sequence: Synthetic oligonucleotide
  Target: ATXN2; (+) strand; PAM type: NNGRRT; PAM sequence: TGGAGT
tttcgctctgccacccaggc

SEQ ID NO: 10045 - DNA, 20 bp, Artificial Sequence
  Description of Artificial Sequence: Synthetic oligonucleotide
  Target: ATXN2; (+) strand; PAM type: NNGRRT; PAM sequence: TGGAGT
ctctgccacccaggctggag

SEQ ID NO: 10046 - DNA, 20 bp, Artificial Sequence
  Description of Artificial Sequence: Synthetic oligonucleotide
  Target: ATXN2; (+) strand; PAM type: NNGRRT; PAM sequence: TGGAGT
tttgtattttttagtagaga

SEQ ID NO: 10047 - DNA, 20 bp, Artificial Sequence
  Description of Artificial Sequence: Synthetic oligonucleotide
  Target: ATXN2; (+) strand; PAM type: NNGRRT; PAM sequence: TGGGAT
gcctcagcctcccaaagcac

SEQ ID NO: 10048 - DNA, 20 bp, Artificial Sequence
  Description of Artificial Sequence: Synthetic oligonucleotide
  Target: ATXN2; (+) strand; PAM type: NNGRRT; PAM sequence: CTGAGT
gccaccgtgcctggcccttc

SEQ ID NO: 10049 - DNA, 20 bp, Artificial Sequence
  Description of Artificial Sequence: Synthetic oligonucleotide
  Target: ATXN2; (+) strand; PAM type: NNGRRT; PAM sequence: CAGAAT
aggcataaatttcatcttat

SEQ ID NO: 10050 - DNA, 20 bp, Artificial Sequence
  Description of Artificial Sequence: Synthetic oligonucleotide
  Target: ATXN2; (+) strand; PAM type: NNGRRT; PAM sequence: TGGGGT
tttataccaagcttgtggct

SEQ ID NO: 10051 - DNA, 20 bp, Artificial Sequence
  Description of Artificial Sequence: Synthetic oligonucleotide
  Target: ATXN2; (+) strand; PAM type: NNGRRT; PAM sequence: TTGGGT
atttataccaagcttgtggc

SEQ ID NO: 10052 - DNA, 20 bp, Artificial Sequence
  Description of Artificial Sequence: Synthetic oligonucleotide
  Target: ATXN2; (+) strand; PAM type: NNGRRT; PAM sequence: TTGGGT
ttaactccagccttcttaaa

SEQ ID NO: 10053 - DNA, 20 bp, Artificial Sequence
  Description of Artificial Sequence: Synthetic oligonucleotide
  Target: ATXN2; (+) strand; PAM type: NNGRRT; PAM sequence: CTGAAT
gggtatttccattttaaaaa

SEQ ID NO: 10054 - DNA, 20 bp, Artificial Sequence
  Description of Artificial Sequence: Synthetic oligonucleotide
  Target: ATXN2; (+) strand; PAM type: NNGRRT; PAM sequence: CTGAAT
gtatggtaatttgggacatg

SEQ ID NO: 10055 - DNA, 20 bp, Artificial Sequence
  Description of Artificial Sequence: Synthetic oligonucleotide
  Target: ATXN2; (+) strand; PAM type: NNGRRT; PAM sequence: CAGAAT
aagcactttaaacactgcta

SEQ ID NO: 10056 - DNA, 20 bp, Artificial Sequence
  Description of Artificial Sequence: Synthetic oligonucleotide
  Target: ATXN2; (+) strand; PAM type: NNGRRT; PAM sequence: AGGAAT
ctgacttgcttaaaagtaaa

SEQ ID NO: 10057 - DNA, 20 bp, Artificial Sequence
  Description of Artificial Sequence: Synthetic oligonucleotide
  Target: ATXN2; (+) strand; PAM type: NNGRRT; PAM sequence: ATGGAT
tcctgaaagattatctagta

SEQ ID NO: 10058 - DNA, 20 bp, Artificial Sequence
  Description of Artificial Sequence: Synthetic oligonucleotide
  Target: ATXN2; (+) strand; PAM type: NNGRRT; PAM sequence: TAGGAT
tagtaatggatccaaaaatt

SEQ ID NO: 10059 - DNA, 20 bp, Artificial Sequence
  Description of Artificial Sequence: Synthetic oligonucleotide
  Target: ATXN2; (+) strand; PAM type: NNGRRT; PAM sequence: AAGAAT
caaaaatttaggatcatagc

SEQ ID NO: 10060 - DNA, 20 bp, Artificial Sequence
  Description of Artificial Sequence: Synthetic oligonucleotide
  Target: ATXN2; (+) strand; PAM type: NNGRRT; PAM sequence: ATGAAT
atcatagcaagaatataaac

SEQ ID NO: 10061 - DNA, 20 bp, Artificial Sequence
  Description of Artificial Sequence: Synthetic oligonucleotide
  Target: ATXN2; (+) strand; PAM type: NNGRRT; PAM sequence: AGGGGT
attaaaacatgtctacataa

SEQ ID NO: 10062 - DNA, 20 bp, Artificial Sequence
  Description of Artificial Sequence: Synthetic oligonucleotide
  Target: ATXN2; (+) strand; PAM type: NNGRRT; PAM sequence: TAGGGT
aacatgtctacataaagggg

SEQ ID NO: 10063 - DNA, 20 bp, Artificial Sequence
  Description of Artificial Sequence: Synthetic oligonucleotide
  Target: ATXN2; (+) strand; PAM type: NNGRRT; PAM sequence: TTGAGT
tacataaaggggtagggtat

SEQ ID NO: 10064 - DNA, 20 bp, Artificial Sequence
  Description of Artificial Sequence: Synthetic oligonucleotide
  Target: ATXN2; (+) strand; PAM type: NNGRRT; PAM sequence: AAGGAT
gtgtatttaaatacacctgg

SEQ ID NO: 10065 - DNA, 20 bp, Artificial Sequence
  Description of Artificial Sequence: Synthetic oligonucleotide
  Target: ATXN2; (+) strand; PAM type: NNGRRT; PAM sequence: AGGGAT
aaaaggcagttgtcaggtgg

SEQ ID NO: 10066 - DNA, 20 bp, Artificial Sequence
  Description of Artificial Sequence: Synthetic oligonucleotide
  Target: ATXN2; (+) strand; PAM type: NNGRRT; PAM sequence: ATGGAT
agttgtcaggtggagggatt

SEQ ID NO: 10067 - DNA, 20 bp, Artificial Sequence
  Description of Artificial Sequence: Synthetic oligonucleotide
  Target: ATXN2; (+) strand; PAM type: NNGRRT; PAM sequence: AAGGAT
ctaccaaaaacaaatcaaaa

SEQ ID NO: 10068 - DNA, 20 bp, Artificial Sequence
  Description of Artificial Sequence: Synthetic oligonucleotide
  Target: ATXN2; (+) strand; PAM type: NNGRRT; PAM sequence: CTGGAT
aaacaaatcaaaaaaggatt

SEQ ID NO: 10069 - DNA, 20 bp, Artificial Sequence
  Description of Artificial Sequence: Synthetic oligonucleotide
  Target: ATXN2; (+) strand; PAM type: NNGRRT; PAM sequence: ATGGAT
tcaccataaaacaaaattag

SEQ ID NO: 10070 - DNA, 20 bp, Artificial Sequence
  Description of Artificial Sequence: Synthetic oligonucleotide
  Target: ATXN2; (+) strand; PAM type: NNGRRT; PAM sequence: AAGAGT
aacaaaattagatggattag

SEQ ID NO: 10071 - DNA, 20 bp, Artificial Sequence
  Description of Artificial Sequence: Synthetic oligonucleotide
  Target: ATXN2; (+) strand; PAM type: NNGRRT; PAM sequence: CAGAAT
gagatcgcaccgctgcactt

SEQ ID NO: 10072 - DNA, 20 bp, Artificial Sequence
  Description of Artificial Sequence: Synthetic oligonucleotide
  Target: ATXN2; (+) strand; PAM type: NNGRRT; PAM sequence: ATGGGT
tcgcaccgctgcacttcaga

SEQ ID NO: 10073 - DNA, 20 bp, Artificial Sequence
  Description of Artificial Sequence: Synthetic oligonucleotide
  Target: ATXN2; (+) strand; PAM type: NNGRRT; PAM sequence: CAGAGT
ctgcacttcagaatgggtga

SEQ ID NO: 10074 - DNA, 20 bp, Artificial Sequence
  Description of Artificial Sequence: Synthetic oligonucleotide
  Target: ATXN2; (+) strand; PAM type: NNGRRT; PAM sequence: AAGAGT
aaaaaaaaaaaaaaaaaaaa

SEQ ID NO: 10075 - DNA, 20 bp, Artificial Sequence
  Description of Artificial Sequence: Synthetic oligonucleotide
  Target: ATXN2; (+) strand; PAM type: NNGRRT; PAM sequence: AGGGAT
aattaaagtaacttcttaga

SEQ ID NO: 10076 - DNA, 20 bp, Artificial Sequence
  Description of Artificial Sequence: Synthetic oligonucleotide
  Target: ATXN2; (+) strand; PAM type: NNGRRT; PAM sequence: TGGGGT
aagtaacttcttagaaggga

SEQ ID NO: 10077 - DNA, 20 bp, Artificial Sequence
  Description of Artificial Sequence: Synthetic oligonucleotide
  Target: ATXN2; (+) strand; PAM type: NNGRRT; PAM sequence: GTGGGT
cagcactttgggaggctgag

SEQ ID NO: 10078 - DNA, 20 bp, Artificial Sequence
  Description of Artificial Sequence: Synthetic oligonucleotide
  Target: ATXN2; (+) strand; PAM type: NNGRRT; PAM sequence: GTGGAT
actttgggaggctgaggtgg

SEQ ID NO: 10079 - DNA, 20 bp, Artificial Sequence
  Description of Artificial Sequence: Synthetic oligonucleotide
  Target: ATXN2; (+) strand; PAM type: NNGRRT; PAM sequence: GGGAAT
tgggtggatcacctgaggtc

SEQ ID NO: 10080 - DNA, 20 bp, Artificial Sequence
  Description of Artificial Sequence: Synthetic oligonucleotide
  Target: ATXN2; (+) strand; PAM type: NNGRRT; PAM sequence: CGGAGT
aactgcttgaacccaggagg

SEQ ID NO: 10081 - DNA, 20 bp, Artificial Sequence
  Description of Artificial Sequence: Synthetic oligonucleotide
  Target: ATXN2; (+) strand; PAM type: NNGRRT; PAM sequence: CTGGGT
tcgcgccactgcactccagc

SEQ ID NO: 10082 - DNA, 20 bp, Artificial Sequence
  Description of Artificial Sequence: Synthetic oligonucleotide
  Target: ATXN2; (+) strand; PAM type: NNGRRT; PAM sequence: GCGGAT
actttgggaggctgaggcag

SEQ ID NO: 10083 - DNA, 20 bp, Artificial Sequence
  Description of Artificial Sequence: Synthetic oligonucleotide
  Target: ATXN2; (+) strand; PAM type: NNGRRT; PAM sequence: GAGAAT
tactcgggaggctgaggtag

SEQ ID NO: 10084 - DNA, 20 bp, Artificial Sequence
  Description of Artificial Sequence: Synthetic oligonucleotide
  Target: ATXN2; (+) strand; PAM type: NNGRRT; PAM sequence: TAGAAT
ggtcaaggtcaatacttttt

SEQ ID NO: 10085 - DNA, 20 bp, Artificial Sequence
  Description of Artificial Sequence: Synthetic oligonucleotide
  Target: ATXN2; (+) strand; PAM type: NNGRRT; PAM sequence: CAGGAT
aaaaatttaaaaacaataat

SEQ ID NO: 10086 - DNA, 20 bp, Artificial Sequence
  Description of Artificial Sequence: Synthetic oligonucleotide
  Target: ATXN2; (+) strand; PAM type: NNGRRT; PAM sequence: ATGAAT
ggctatggctataacaatta

SEQ ID NO: 10087 - DNA, 20 bp, Artificial Sequence
  Description of Artificial Sequence: Synthetic oligonucleotide
  Target: ATXN2; (+) strand; PAM type: NNGRRT; PAM sequence: CTGGGT
cataaaattgtcaccaacat

SEQ ID NO: 10088 - DNA, 20 bp, Artificial Sequence
  Description of Artificial Sequence: Synthetic oligonucleotide
  Target: ATXN2; (+) strand; PAM type: NNGRRT; PAM sequence: ATGAGT
atataaattgttcagggaag

SEQ ID NO: 10089 - DNA, 20 bp, Artificial Sequence
  Description of Artificial Sequence: Synthetic oligonucleotide
  Target: ATXN2; (+) strand; PAM type: NNGRRT; PAM sequence: AAGAAT
gtaagtttgttgtagtttat

SEQ ID NO: 10090 - DNA, 20 bp, Artificial Sequence
  Description of Artificial Sequence: Synthetic oligonucleotide
  Target: ATXN2; (+) strand; PAM type: NNGRRT; PAM sequence: CAGGGT
ttcttttttttaaatagaga

SEQ ID NO: 10091 - DNA, 20 bp, Artificial Sequence
  Description of Artificial Sequence: Synthetic oligonucleotide
  Target: ATXN2; (+) strand; PAM type: NNGRRT; PAM sequence: CTGGAT
gtcttgctctgtcacccagg

SEQ ID NO: 10092 - DNA, 20 bp, Artificial Sequence
  Description of Artificial Sequence: Synthetic oligonucleotide
  Target: ATXN2; (+) strand; PAM type: NNGRRT; PAM sequence: TGGGAT
ttttttttttttggtagaga

SEQ ID NO: 10093 - DNA, 20 bp, Artificial Sequence
  Description of Artificial Sequence: Synthetic oligonucleotide
  Target: ATXN2; (+) strand; PAM type: NNGRRT; PAM sequence: TTGGAT
acttcagcctccccaagttc

SEQ ID NO: 10094 - DNA, 20 bp, Artificial Sequence
  Description of Artificial Sequence: Synthetic oligonucleotide
  Target: ATXN2; (+) strand; PAM type: NNGRRT; PAM sequence: TAGGGT
ccagctcctagtgtcctttt

SEQ ID NO: 10095 - DNA, 20 bp, Artificial Sequence
  Description of Artificial Sequence: Synthetic oligonucleotide
  Target: ATXN2; (+) strand; PAM type: NNGRRT; PAM sequence: GGGAAT
agggtcttaagcaccacaaa

SEQ ID NO: 10096 - DNA, 20 bp, Artificial Sequence
  Description of Artificial Sequence: Synthetic oligonucleotide
  Target: ATXN2; (+) strand; PAM type: NNGRRT; PAM sequence: GAGAGT
accacctgtgtaaactgcag

SEQ ID NO: 10097 - DNA, 20 bp, Artificial Sequence
  Description of Artificial Sequence: Synthetic oligonucleotide
  Target: ATXN2; (+) strand; PAM type: NNGRRT; PAM sequence: CTGAGT
ggagagtagttcagatttgg

SEQ ID NO: 10098 - DNA, 20 bp, Artificial Sequence
  Description of Artificial Sequence: Synthetic oligonucleotide
  Target: ATXN2; (+) strand; PAM type: NNGRRT; PAM sequence: TGGGGT
gcccacacataaatggactt

SEQ ID NO: 10099 - DNA, 20 bp, Artificial Sequence
  Description of Artificial Sequence: Synthetic oligonucleotide
  Target: ATXN2; (+) strand; PAM type: NNGRRT; PAM sequence: GTGAAT
gatgaagccagatgttggca

SEQ ID NO: 10100 - DNA, 20 bp, Artificial Sequence
  Description of Artificial Sequence: Synthetic oligonucleotide
  Target: ATXN2; (+) strand; PAM type: NNGRRT; PAM sequence: GGGAGT
gtttcagatctgattccaag

SEQ ID NO: 10101 - DNA, 20 bp, Artificial Sequence
  Description of Artificial Sequence: Synthetic oligonucleotide
  Target: ATXN2; (+) strand; PAM type: NNGRRT; PAM sequence: CGGGGT
actaaagacaagtcaaatga

SEQ ID NO: 10102 - DNA, 20 bp, Artificial Sequence
  Description of Artificial Sequence: Synthetic oligonucleotide
  Target: ATXN2; (+) strand; PAM type: NNGRRT; PAM sequence: ACGGAT
gtatcttttacaattaaatt

SEQ ID NO: 10103 - DNA, 20 bp, Artificial Sequence
  Description of Artificial Sequence: Synthetic oligonucleotide
  Target: ATXN2; (+) strand; PAM type: NNGRRT; PAM sequence: GTGGGT
ccaggaagaaagcataagct

SEQ ID NO: 10104 - DNA, 20 bp, Artificial Sequence
  Description of Artificial Sequence: Synthetic oligonucleotide
  Target: ATXN2; (+) strand; PAM type: NNGRRT; PAM sequence: AAGGAT
tgtgggttacaggtgacagg

SEQ ID NO: 10105 - DNA, 20 bp, Artificial Sequence
  Description of Artificial Sequence: Synthetic oligonucleotide
  Target: ATXN2; (+) strand; PAM type: NNGRRT; PAM sequence: CGGAAT
gtcctattctcattaaccta

SEQ ID NO: 10106 - DNA, 20 bp, Artificial Sequence
  Description of Artificial Sequence: Synthetic oligonucleotide
  Target: ATXN2; (+) strand; PAM type: NNGRRT; PAM sequence: TGGAGT
tttttttttttttttggaga

SEQ ID NO: 10107 - DNA, 20 bp, Artificial Sequence
  Description of Artificial Sequence: Synthetic oligonucleotide
  Target: ATXN2; (+) strand; PAM type: NNGRRT; PAM sequence: TAGAGT
tctcactctgtcgctcaggc

SEQ ID NO: 10108 - DNA, 20 bp, Artificial Sequence
  Description of Artificial Sequence: Synthetic oligonucleotide
  Target: ATXN2; (+) strand; PAM type: NNGRRT; PAM sequence: CCGGGT
ctcactgcaacctctgcctc

SEQ ID NO: 10109 - DNA, 20 bp, Artificial Sequence
  Description of Artificial Sequence: Synthetic oligonucleotide
  Target: ATXN2; (+) strand; PAM type: NNGRRT; PAM sequence: TTGGAT
caccacacccggccaatttt

SEQ ID NO: 10110 - DNA, 20 bp, Artificial Sequence
  Description of Artificial Sequence: Synthetic oligonucleotide
  Target: ATXN2; (+) strand; PAM type: NNGRRT; PAM sequence: TGGGGT
ttttggatttttagtagaga

SEQ ID NO: 10111 - DNA, 20 bp, Artificial Sequence
  Description of Artificial Sequence: Synthetic oligonucleotide
  Target: ATXN2; (+) strand; PAM type: NNGRRT; PAM sequence: TGGGAT
gccttggcctcccaaagtgc

SEQ ID NO: 10112 - DNA, 20 bp, Artificial Sequence
  Description of Artificial Sequence: Synthetic oligonucleotide
  Target: ATXN2; (+) strand; PAM type: NNGRRT; PAM sequence: ATGAAT
gcagtacacttttcaactgt

SEQ ID NO: 10113 - DNA, 20 bp, Artificial Sequence
  Description of Artificial Sequence: Synthetic oligonucleotide
  Target: ATXN2; (+) strand; PAM type: NNGRRT; PAM sequence: ATGGGT
tgtttagtcacaaaacgaag

SEQ ID NO: 10114 - DNA, 20 bp, Artificial Sequence
  Description of Artificial Sequence: Synthetic oligonucleotide
  Target: ATXN2; (+) strand; PAM type: NNGRRT; PAM sequence: CAGGAT
attctcttgcatgtcgtagg

SEQ ID NO: 10115 - DNA, 20 bp, Artificial Sequence
  Description of Artificial Sequence: Synthetic oligonucleotide
  Target: ATXN2; (+) strand; PAM type: NNGRRT; PAM sequence: ATGGGT
aaagcaagtcaggcaaagaa

SEQ ID NO: 10116 - DNA, 20 bp, Artificial Sequence
  Description of Artificial Sequence: Synthetic oligonucleotide
  Target: ATXN2; (+) strand; PAM type: NNGRRT; PAM sequence: TAGAGT
aaggtcaggttattcttaga

SEQ ID NO: 10117 - DNA, 20 bp, Artificial Sequence
  Description of Artificial Sequence: Synthetic oligonucleotide
  Target: ATXN2; (+) strand; PAM type: NNGRRT; PAM sequence: AAGAGT
tttcagaaacttaaattaag

SEQ ID NO: 10118 - DNA, 20 bp, Artificial Sequence
  Description of Artificial Sequence: Synthetic oligonucleotide
  Target: ATXN2; (+) strand; PAM type: NNGRRT; PAM sequence: CTGAGT
gtctgctcatgagccccgta

SEQ ID NO: 10119 - DNA, 20 bp, Artificial Sequence
  Description of Artificial Sequence: Synthetic oligonucleotide
  Target: ATXN2; (+) strand; PAM type: NNGRRT; PAM sequence: GAGGAT
tattacaggactatagacat

SEQ ID NO: 10120 - DNA, 20 bp, Artificial Sequence
  Description of Artificial Sequence: Synthetic oligonucleotide
  Target: ATXN2; (+) strand; PAM type: NNGRRT; PAM sequence: TCGAAT
cttacaatcatcagtaacct

SEQ ID NO: 10121 - DNA, 20 bp, Artificial Sequence
  Description of Artificial Sequence: Synthetic oligonucleotide
  Target: ATXN2; (+) strand; PAM type: NNGRRT; PAM sequence: AAGGGT
accttcgaatatatattgaa

SEQ ID NO: 10122 - DNA, 20 bp, Artificial Sequence
  Description of Artificial Sequence: Synthetic oligonucleotide
  Target: ATXN2; (+) strand; PAM type: NNGRRT; PAM sequence: AAGAGT
ttttatatggtacaaaaatt

SEQ ID NO: 10123 - DNA, 20 bp, Artificial Sequence
  Description of Artificial Sequence: Synthetic oligonucleotide
  Target: ATXN2; (+) strand; PAM type: NNGRRT; PAM sequence: TGGAGT
actgtaggcaacatattgcg

SEQ ID NO: 10124 - DNA, 20 bp, Artificial Sequence
  Description of Artificial Sequence: Synthetic oligonucleotide
  Target: ATXN2; (+) strand; PAM type: NNGRRT; PAM sequence: TGGGGT
tattgcgtggagtaagctgg

SEQ ID NO: 10125 - DNA, 20 bp, Artificial Sequence
  Description of Artificial Sequence: Synthetic oligonucleotide
  Target: ATXN2; (+) strand; PAM type: NNGRRT; PAM sequence: CTGGGT
cggtgggcccgctgctgacg

SEQ ID NO: 10126 - DNA, 20 bp, Artificial Sequence
  Description of Artificial Sequence: Synthetic oligonucleotide
  Target: ATXN2; (+) strand; PAM type: NNGRRT; PAM sequence: CTGAAT
ttcacatggtctaggaggct

SEQ ID NO: 10127 - DNA, 20 bp, Artificial Sequence
  Description of Artificial Sequence: Synthetic oligonucleotide
  Target: ATXN2; (+) strand; PAM type: NNGRRT; PAM sequence: CTGAAT
aggctctgaatgatttgacc

SEQ ID NO: 10128 - DNA, 20 bp, Artificial Sequence
  Description of Artificial Sequence: Synthetic oligonucleotide
  Target: ATXN2; (+) strand; PAM type: NNGRRT; PAM sequence: CTGGGT
ccactcccacttctgccact

SEQ ID NO: 10129 - DNA, 20 bp, Artificial Sequence
  Description of Artificial Sequence: Synthetic oligonucleotide
  Target: ATXN2; (+) strand; PAM type: NNGRRT; PAM sequence: TGGGAT
accagttcccaaatcccagc

SEQ ID NO: 10130 - DNA, 20 bp, Artificial Sequence
  Description of Artificial Sequence: Synthetic oligonucleotide
  Target: ATXN2; (+) strand; PAM type: NNGRRT; PAM sequence: CTGAAT
tcttccttaatttccaacca

SEQ ID NO: 10131 - DNA, 20 bp, Artificial Sequence
  Description of Artificial Sequence: Synthetic oligonucleotide
  Target: ATXN2; (+) strand; PAM type: NNGRRT; PAM sequence: AAGAAT
gccctgttacaactctagtt

SEQ ID NO: 10132 - DNA, 20 bp, Artificial Sequence
  Description of Artificial Sequence: Synthetic oligonucleotide
  Target: ATXN2; (+) strand; PAM type: NNGRRT; PAM sequence: TGGAAT
ccacttcaggaaaataattg

SEQ ID NO: 10133 - DNA, 20 bp, Artificial Sequence
  Description of Artificial Sequence: Synthetic oligonucleotide
  Target: ATXN2; (+) strand; PAM type: NNGRRT; PAM sequence: AAGAAT
acaactaggtataaggcaca

SEQ ID NO: 10134 - DNA, 20 bp, Artificial Sequence
  Description of Artificial Sequence: Synthetic oligonucleotide
  Target: ATXN2; (+) strand; PAM type: NNGRRT; PAM sequence: TTGGAT
acatttttttatattttatc

SEQ ID NO: 10135 - DNA, 20 bp, Artificial Sequence
  Description of Artificial Sequence: Synthetic oligonucleotide
  Target: ATXN2; (+) strand; PAM type: NNGRRT; PAM sequence: ATGAGT
cgagcggactgcttgagctc

SEQ ID NO: 10136 - DNA, 20 bp, Artificial Sequence
  Description of Artificial Sequence: Synthetic oligonucleotide
  Target: ATXN2; (+) strand; PAM type: NNGRRT; PAM sequence: GAGGGT
gaccctgtctcaaaaaaggg

SEQ ID NO: 10137 - DNA, 20 bp, Artificial Sequence
  Description of Artificial Sequence: Synthetic oligonucleotide
  Target: ATXN2; (+) strand; PAM type: NNGRRT; PAM sequence: AAGGAT
tatttttatccaatacctca

SEQ ID NO: 10138 - DNA, 20 bp, Artificial Sequence
  Description of Artificial Sequence: Synthetic oligonucleotide
  Target: ATXN2; (+) strand; PAM type: NNGRRT; PAM sequence: TGGAAT
tatccaatacctcaaaggat

SEQ ID NO: 10139 - DNA, 20 bp, Artificial Sequence
  Description of Artificial Sequence: Synthetic oligonucleotide
  Target: ATXN2; (+) strand; PAM type: NNGRRT; PAM sequence: CAGGGT
attggaatttagtaaaggag

SEQ ID NO: 10140 - DNA, 20 bp, Artificial Sequence
  Description of Artificial Sequence: Synthetic oligonucleotide
  Target: ATXN2; (+) strand; PAM type: NNGRRT; PAM sequence: CTGGGT
atgcaatggaagagaagtcc

SEQ ID NO: 10141 - DNA, 20 bp, Artificial Sequence
  Description of Artificial Sequence: Synthetic oligonucleotide
  Target: ATXN2; (+) strand; PAM type: NNGRRT; PAM sequence: CAGAGT
tttatttattttctttgaga

SEQ ID NO: 10142 - DNA, 20 bp, Artificial Sequence
  Description of Artificial Sequence: Synthetic oligonucleotide
  Target: ATXN2; (+) strand; PAM type: NNGRRT; PAM sequence: TGGAGT
tgtcgctcggttgcccaagc

SEQ ID NO: 10143 - DNA, 20 bp, Artificial Sequence
  Description of Artificial Sequence: Synthetic oligonucleotide
  Target: ATXN2; (+) strand; PAM type: NNGRRT; PAM sequence: CTGGGT
ctcactgcactctctgcctc

SEQ ID NO: 10144 - DNA, 20 bp, Artificial Sequence
  Description of Artificial Sequence: Synthetic oligonucleotide
  Target: ATXN2; (+) strand; PAM type: NNGRRT; PAM sequence: CAGAGT
gattctcctacctcagcctc

SEQ ID NO: 10145 - DNA, 20 bp, Artificial Sequence
  Description of Artificial Sequence: Synthetic oligonucleotide
  Target: ATXN2; (+) strand; PAM type: NNGRRT; PAM sequence: CGGGGT
taaaatatttttagtagaga

SEQ ID NO: 10146 - DNA, 20 bp, Artificial Sequence
  Description of Artificial Sequence: Synthetic oligonucleotide
  Target: ATXN2; (+) strand; PAM type: NNGRRT; PAM sequence: TGGGAT
acctctgcctcccaaagagg

SEQ ID NO: 10147 - DNA, 20 bp, Artificial Sequence
  Description of Artificial Sequence: Synthetic oligonucleotide
  Target: ATXN2; (+) strand; PAM type: NNGRRT; PAM sequence: AAGGAT
gtcagccactgcatccagcc

SEQ ID NO: 10148 - DNA, 20 bp, Artificial Sequence
  Description of Artificial Sequence: Synthetic oligonucleotide
  Target: ATXN2; (+) strand; PAM type: NNGRRT; PAM sequence: AGGAGT
caggcagactgcttgagctc

SEQ ID NO: 10149 - DNA, 20 bp, Artificial Sequence
  Description of Artificial Sequence: Synthetic oligonucleotide
  Target: ATXN2; (+) strand; PAM type: NNGRRT; PAM sequence: GGGGAT
tacttgggaggctgaggtgg

SEQ ID NO: 10150 - DNA, 20 bp, Artificial Sequence
  Description of Artificial Sequence: Synthetic oligonucleotide
  Target: ATXN2; (+) strand; PAM type: NNGRRT; PAM sequence: GAGGAT
cacctcactggttacctttg

SEQ ID NO: 10151 - DNA, 20 bp, Artificial Sequence
  Description of Artificial Sequence: Synthetic oligonucleotide
  Target: ATXN2; (+) strand; PAM type: NNGRRT; PAM sequence: CAGGGT
ttcctaagaaagctatacct

SEQ ID NO: 10152 - DNA, 20 bp, Artificial Sequence
  Description of Artificial Sequence: Synthetic oligonucleotide
  Target: ATXN2; (+) strand; PAM type: NNGRRT; PAM sequence: CTGGAT
acctcagggtaaccaaacag

SEQ ID NO: 10153 - DNA, 20 bp, Artificial Sequence
  Description of Artificial Sequence: Synthetic oligonucleotide
  Target: ATXN2; (+) strand; PAM type: NNGRRT; PAM sequence: AGGGAT
ttccaggcaataattgaaga

SEQ ID NO: 10154 - DNA, 20 bp, Artificial Sequence
  Description of Artificial Sequence: Synthetic oligonucleotide
  Target: ATXN2; (+) strand; PAM type: NNGRRT; PAM sequence: AAGAAT
tgaagaagggatgaaaggaa

SEQ ID NO: 10155 - DNA, 20 bp, Artificial Sequence
  Description of Artificial Sequence: Synthetic oligonucleotide
  Target: ATXN2; (+) strand; PAM type: NNGRRT; PAM sequence: CTGGAT
ctaaagggacatattatctc

SEQ ID NO: 10156 - DNA, 20 bp, Artificial Sequence
  Description of Artificial Sequence: Synthetic oligonucleotide
  Target: ATXN2; (+) strand; PAM type: NNGRRT; PAM sequence: AGGGAT
tctactttaaatatcaacac

SEQ ID NO: 10157 - DNA, 20 bp, Artificial Sequence
  Description of Artificial Sequence: Synthetic oligonucleotide
  Target: ATXN2; (+) strand; PAM type: NNGRRT; PAM sequence: CTGGAT
ggaaaaaaatacaagacaag

SEQ ID NO: 10158 - DNA, 20 bp, Artificial Sequence
  Description of Artificial Sequence: Synthetic oligonucleotide
  Target: ATXN2; (+) strand; PAM type: NNGRRT; PAM sequence: CTGAGT
tgtaattaaaactgtgaggg

SEQ ID NO: 10159 - DNA, 20 bp, Artificial Sequence
  Description of Artificial Sequence: Synthetic oligonucleotide
  Target: ATXN2; (+) strand; PAM type: NNGRRT; PAM sequence: GGGAGT
gcctgtaatcctggcacctt

SEQ ID NO: 10160 - DNA, 20 bp, Artificial Sequence
  Description of Artificial Sequence: Synthetic oligonucleotide
  Target: ATXN2; (+) strand; PAM type: NNGRRT; PAM sequence: AGGAAT
caggcagactgcttgagctc

SEQ ID NO: 10161 - DNA, 20 bp, Artificial Sequence
  Description of Artificial Sequence: Synthetic oligonucleotide
  Target: ATXN2; (+) strand; PAM type: NNGRRT; PAM sequence: TTGGGT
tcatgccactgcactccagc

SEQ ID NO: 10162 - DNA, 20 bp, Artificial Sequence
  Description of Artificial Sequence: Synthetic oligonucleotide
  Target: ATXN2; (+) strand; PAM type: NNGRRT; PAM sequence: CAGAGT
ctgcactccagcttgggtga

SEQ ID NO: 10163 - DNA, 20 bp, Artificial Sequence
  Description of Artificial Sequence: Synthetic oligonucleotide
  Target: ATXN2; (+) strand; PAM type: NNGRRT; PAM sequence: CTGGGT
caaaaaaacctatgacttgg

SEQ ID NO: 10164 - DNA, 20 bp, Artificial Sequence
  Description of Artificial Sequence: Synthetic oligonucleotide
  Target: ATXN2; (+) strand; PAM type: NNGRRT; PAM sequence: TGGAAT
tagaaagataacttaagccc

SEQ ID NO: 10165 - DNA, 20 bp, Artificial Sequence
  Description of Artificial Sequence: Synthetic oligonucleotide
  Target: ATXN2; (+) strand; PAM type: NNGRRT; PAM sequence: GAGGAT
tacttgagaggctgaggagg

SEQ ID NO: 10166 - DNA, 20 bp, Artificial Sequence
  Description of Artificial Sequence: Synthetic oligonucleotide
  Target: ATXN2; (+) strand; PAM type: NNGRRT; PAM sequence: AGGAAT
agggaggatcctttgagacc

SEQ ID NO: 10167 - DNA, 20 bp, Artificial Sequence
  Description of Artificial Sequence: Synthetic oligonucleotide
  Target: ATXN2; (+) strand; PAM type: NNGRRT; PAM sequence: GTGGAT
agatacacactaaaatgttg

SEQ ID NO: 10168 - DNA, 20 bp, Artificial Sequence
  Description of Artificial Sequence: Synthetic oligonucleotide
  Target: ATXN2; (+) strand; PAM type: NNGRRT; PAM sequence: TAGAAT
ggataaactgatgcaatgtc

SEQ ID NO: 10169 - DNA, 20 bp, Artificial Sequence
  Description of Artificial Sequence: Synthetic oligonucleotide
  Target: ATXN2; (+) strand; PAM type: NNGRRT; PAM sequence: CAGAAT
gcaatgtctagaatttgctt

SEQ ID NO: 10170 - DNA, 20 bp, Artificial Sequence
  Description of Artificial Sequence: Synthetic oligonucleotide
  Target: ATXN2; (+) strand; PAM type: NNGRRT; PAM sequence: ATGGGT
ctcaaagcttttaagagaca

SEQ ID NO: 10171 - DNA, 20 bp, Artificial Sequence
  Description of Artificial Sequence: Synthetic oligonucleotide
  Target: ATXN2; (+) strand; PAM type: NNGRRT; PAM sequence: AGGGAT
gcttttaagagacaatgggt

SEQ ID NO: 10172 - DNA, 20 bp, Artificial Sequence
  Description of Artificial Sequence: Synthetic oligonucleotide
  Target: ATXN2; (+) strand; PAM type: NNGRRT; PAM sequence: GCGGGT
cagcactttgggaggccgag

SEQ ID NO: 10173 - DNA, 20 bp, Artificial Sequence
  Description of Artificial Sequence: Synthetic oligonucleotide
  Target: ATXN2; (+) strand; PAM type: NNGRRT; PAM sequence: GTGGAT
actttgggaggccgaggcgg

SEQ ID NO: 10174 - DNA, 20 bp, Artificial Sequence
  Description of Artificial Sequence: Synthetic oligonucleotide
  Target: ATXN2; (+) strand; PAM type: NNGRRT; PAM sequence: AGGAGT
cgggtggatcatttgaggtc

SEQ ID NO: 10175 - DNA, 20 bp, Artificial Sequence
  Description of Artificial Sequence: Synthetic oligonucleotide
  Target: ATXN2; (+) strand; PAM type: NNGRRT; PAM sequence: GCGGAT
actttgggaggccgaggcgg

SEQ ID NO: 10176 - DNA, 20 bp, Artificial Sequence
  Description of Artificial Sequence: Synthetic oligonucleotide
  Target: ATXN2; (+) strand; PAM type: NNGRRT; PAM sequence: CCGGGT
taaaaatacaaaaaaattag

SEQ ID NO: 10177 - DNA, 20 bp, Artificial Sequence
  Description of Artificial Sequence: Synthetic oligonucleotide
  Target: ATXN2; (+) strand; PAM type: NNGRRT; PAM sequence: GCGAAT
ttagccgggtgtggtggcgg

SEQ ID NO: 10178 - DNA, 20 bp, Artificial Sequence
  Description of Artificial Sequence: Synthetic oligonucleotide
  Target: ATXN2; (+) strand; PAM type: NNGRRT; PAM sequence: GAGAAT
tactcaggaggctgaggcag

SEQ ID NO: 10179 - DNA, 20 bp, Artificial Sequence
  Description of Artificial Sequence: Synthetic oligonucleotide
  Target: ATXN2; (+) strand; PAM type: NNGRRT; PAM sequence: GAGAAT
tacttgggaggctgaggcag

SEQ ID NO: 10180 - DNA, 20 bp, Artificial Sequence
  Description of Artificial Sequence: Synthetic oligonucleotide
  Target: ATXN2; (+) strand; PAM type: NNGRRT; PAM sequence: GTGAGT
ccccagagggggaggttgca

SEQ ID NO: 10181 - DNA, 20 bp, Artificial Sequence
  Description of Artificial Sequence: Synthetic oligonucleotide
  Target: ATXN2; (+) strand; PAM type: NNGRRT; PAM sequence: GGGAAT
ttttttttttttttttaaga

SEQ ID NO: 10182 - DNA, 20 bp, Artificial Sequence
  Description of Artificial Sequence: Synthetic oligonucleotide
  Target: ATXN2; (+) strand; PAM type: NNGRRT; PAM sequence: TGGAGT
tcttgctctgtcacccaggc

SEQ ID NO: 10183 - DNA, 20 bp, Artificial Sequence
  Description of Artificial Sequence: Synthetic oligonucleotide
  Target: ATXN2; (+) strand; PAM type: NNGRRT; PAM sequence: CTGGGT
tcaactacaacttccgcctc

SEQ ID NO: 10184 - DNA, 20 bp, Artificial Sequence
  Description of Artificial Sequence: Synthetic oligonucleotide
  Target: ATXN2; (+) strand; PAM type: NNGRRT; PAM sequence: TAGAAT
gcctcagtctcccaagtagc

SEQ ID NO: 10185 - DNA, 20 bp, Artificial Sequence
  Description of Artificial Sequence: Synthetic oligonucleotide
  Target: ATXN2; (+) strand; PAM type: NNGRRT; PAM sequence: TAGAGT
ttttagtagtaagttaatta

SEQ ID NO: 10186 - DNA, 20 bp, Artificial Sequence
  Description of Artificial Sequence: Synthetic oligonucleotide
  Target: ATXN2; (+) strand; PAM type: NNGRRT; PAM sequence: GTGAGT
aaaaaaaatcaatgttggca

SEQ ID NO: 10187 - DNA, 20 bp, Artificial Sequence
  Description of Artificial Sequence: Synthetic oligonucleotide
  Target: ATXN2; (+) strand; PAM type: NNGRRT; PAM sequence: GTGGAT
aaaatcaatgttggcagtga

SEQ ID NO: 10188 - DNA, 20 bp, Artificial Sequence
  Description of Artificial Sequence: Synthetic oligonucleotide
  Target: ATXN2; (+) strand; PAM type: NNGRRT; PAM sequence: CAGAGT
gtcctattagattagtgaag

SEQ ID NO: 10189 - DNA, 20 bp, Artificial Sequence
  Description of Artificial Sequence: Synthetic oligonucleotide
  Target: ATXN2; (+) strand; PAM type: NNGRRT; PAM sequence: TGGAAT
atcagtttgtatgaccataa

SEQ ID NO: 10190 - DNA, 20 bp, Artificial Sequence
  Description of Artificial Sequence: Synthetic oligonucleotide
  Target: ATXN2; (+) strand; PAM type: NNGRRT; PAM sequence: CAGGGT
atacacacacactttaaata

SEQ ID NO: 10191 - DNA, 20 bp, Artificial Sequence
  Description of Artificial Sequence: Synthetic oligonucleotide
  Target: ATXN2; (+) strand; PAM type: NNGRRT; PAM sequence: TGGAGT
tctccttctgtcacccaggc

SEQ ID NO: 10192 - DNA, 20 bp, Artificial Sequence
  Description of Artificial Sequence: Synthetic oligonucleotide
  Target: ATXN2; (+) strand; PAM type: NNGRRT; PAM sequence: TGGGGT
tttaaattgttttgtagata

SEQ ID NO: 10193 - DNA, 20 bp, Artificial Sequence
  Description of Artificial Sequence: Synthetic oligonucleotide
  Target: ATXN2; (+) strand; PAM type: NNGRRT; PAM sequence: GTGGGT
ttaaagggctgccagaaaca

SEQ ID NO: 10194 - DNA, 20 bp, Artificial Sequence
  Description of Artificial Sequence: Synthetic oligonucleotide
  Target: ATXN2; (+) strand; PAM type: NNGRRT; PAM sequence: ACGAAT
aatcaagtgcatctctattt

SEQ ID NO: 10195 - DNA, 20 bp, Artificial Sequence
  Description of Artificial Sequence: Synthetic oligonucleotide
  Target: ATXN2; (+) strand; PAM type: NNGRRT; PAM sequence: AGGGAT
acaaaacagatgaaatatta

SEQ ID NO: 10196 - DNA, 20 bp, Artificial Sequence
  Description of Artificial Sequence: Synthetic oligonucleotide
  Target: ATXN2; (+) strand; PAM type: NNGRRT; PAM sequence: CAGAAT
atttgcaaattcaaagaacg

SEQ ID NO: 10197 - DNA, 20 bp, Artificial Sequence
  Description of Artificial Sequence: Synthetic oligonucleotide
  Target: ATXN2; (+) strand; PAM type: NNGRRT; PAM sequence: AAGAGT
aaattcaaagaacgcagaat

SEQ ID NO: 10198 - DNA, 20 bp, Artificial Sequence
  Description of Artificial Sequence: Synthetic oligonucleotide
  Target: ATXN2; (+) strand; PAM type: NNGRRT; PAM sequence: GAGAAT
agaataagagtaattttgac

SEQ ID NO: 10199 - DNA, 20 bp, Artificial Sequence
  Description of Artificial Sequence: Synthetic oligonucleotide
  Target: ATXN2; (+) strand; PAM type: NNGRRT; PAM sequence: GAGAAT
caaagtaacagcaataaaga

SEQ ID NO: 10200 - DNA, 20 bp, Artificial Sequence
  Description of Artificial Sequence: Synthetic oligonucleotide
  Target: ATXN2; (+) strand; PAM type: NNGRRT; PAM sequence: AAGGAT
aataaagagagaattggcat

SEQ ID NO: 10201 - DNA, 20 bp, Artificial Sequence
  Description of Artificial Sequence: Synthetic oligonucleotide
  Target: ATXN2; (+) strand; PAM type: NNGRRT; PAM sequence: CTGAAT
cacacatacaatacagtcaa

SEQ ID NO: 10202 - DNA, 20 bp, Artificial Sequence
  Description of Artificial Sequence: Synthetic oligonucleotide
  Target: ATXN2; (+) strand; PAM type: NNGRRT; PAM sequence: AGGAGT
tgagcagatcacctgaggtc

SEQ ID NO: 10203 - DNA, 20 bp, Artificial Sequence
  Description of Artificial Sequence: Synthetic oligonucleotide
  Target: ATXN2; (+) strand; PAM type: NNGRRT; PAM sequence: CTGGGT
aaaaaaaaaatacaaattag

SEQ ID NO: 10204 - DNA, 20 bp, Artificial Sequence
  Description of Artificial Sequence: Synthetic oligonucleotide
  Target: ATXN2; (+) strand; PAM type: NNGRRT; PAM sequence: CAGAAT
agctactcgagaggctgagg

SEQ ID NO: 10205 - DNA, 20 bp, Artificial Sequence
  Description of Artificial Sequence: Synthetic oligonucleotide
  Target: ATXN2; (+) strand; PAM type: NNGRRT; PAM sequence: CTGGGT
tcacactactgcactccagc

SEQ ID NO: 10206 - DNA, 20 bp, Artificial Sequence
  Description of Artificial Sequence: Synthetic oligonucleotide
  Target: ATXN2; (+) strand; PAM type: NNGRRT; PAM sequence: CCGAGT
agaggctggtgccagagaaa

SEQ ID NO: 10207 - DNA, 20 bp, Artificial Sequence
  Description of Artificial Sequence: Synthetic oligonucleotide
  Target: ATXN2; (+) strand; PAM type: NNGRRT; PAM sequence: TAGGGT
ccataaaaacattcataacc

SEQ ID NO: 10208 - DNA, 20 bp, Artificial Sequence
  Description of Artificial Sequence: Synthetic oligonucleotide
  Target: ATXN2; (+) strand; PAM type: NNGRRT; PAM sequence: CAGAAT
tctgagaaaggacttgtaac

SEQ ID NO: 10209 - DNA, 20 bp, Artificial Sequence
  Description of Artificial Sequence: Synthetic oligonucleotide
  Target: ATXN2; (+) strand; PAM type: NNGRRT; PAM sequence: CAGGGT
tttttcttttttttgtgaga

SEQ ID NO: 10210 - DNA, 20 bp, Artificial Sequence
  Description of Artificial Sequence: Synthetic oligonucleotide
  Target: ATXN2; (+) strand; PAM type: NNGRRT; PAM sequence: TGGAGT
tctggctctattgcccaggc

SEQ ID NO: 10211 - DNA, 20 bp, Artificial Sequence
  Description of Artificial Sequence: Synthetic oligonucleotide
  Target: ATXN2; (+) strand; PAM type: NNGRRT; PAM sequence: AGGAAT
ccccaagtagctgggaccat

SEQ ID NO: 10212 - DNA, 20 bp, Artificial Sequence
  Description of Artificial Sequence: Synthetic oligonucleotide
  Target: ATXN2; (+) strand; PAM type: NNGRRT; PAM sequence: CAGGGT
cttttttttttttgcaaaga

SEQ ID NO: 10213 - DNA, 20 bp, Artificial Sequence
  Description of Artificial Sequence: Synthetic oligonucleotide
  Target: ATXN2; (+) strand; PAM type: NNGRRT; PAM sequence: TGGAAT
aggttggcctcccaaagtgc

SEQ ID NO: 10214 - DNA, 20 bp, Artificial Sequence
  Description of Artificial Sequence: Synthetic oligonucleotide
  Target: ATXN2; (+) strand; PAM type: NNGRRT; PAM sequence: AGGAGT
caggtagatcacctgaggtc

SEQ ID NO: 10215 - DNA, 20 bp, Artificial Sequence
  Description of Artificial Sequence: Synthetic oligonucleotide
  Target: ATXN2; (+) strand; PAM type: NNGRRT; PAM sequence: AAGAAT
tacttgggaggctaaggcgt

SEQ ID NO: 10216 - DNA, 20 bp, Artificial Sequence
  Description of Artificial Sequence: Synthetic oligonucleotide
  Target: ATXN2; (+) strand; PAM type: NNGRRT; PAM sequence: TAGAGT
ctgcgttccagcctgggcaa

SEQ ID NO: 10217 - DNA, 20 bp, Artificial Sequence
  Description of Artificial Sequence: Synthetic oligonucleotide
  Target: ATXN2; (+) strand; PAM type: NNGRRT; PAM sequence: CTGGAT
acacacatgatgaggtgctc

SEQ ID NO: 10218 - DNA, 20 bp, Artificial Sequence
  Description of Artificial Sequence: Synthetic oligonucleotide
  Target: ATXN2; (+) strand; PAM type: NNGRRT; PAM sequence: AAGGAT
acacaataccaagtgttggc

SEQ ID NO: 10219 - DNA, 20 bp, Artificial Sequence
  Description of Artificial Sequence: Synthetic oligonucleotide
  Target: ATXN2; (+) strand; PAM type: NNGRRT; PAM sequence: TGGAAT
tacacatgtacctgatcagt

SEQ ID NO: 10220 - DNA, 20 bp, Artificial Sequence
  Description of Artificial Sequence: Synthetic oligonucleotide
  Target: ATXN2; (+) strand; PAM type: NNGRRT; PAM sequence: GCGGGT
caacactttgggaggctggg

SEQ ID NO: 10221 - DNA, 20 bp, Artificial Sequence
  Description of Artificial Sequence: Synthetic oligonucleotide
  Target: ATXN2; (+) strand; PAM type: NNGRRT; PAM sequence: GTGGAT
actttgggaggctggggcgg

SEQ ID NO: 10222 - DNA, 20 bp, Artificial Sequence
  Description of Artificial Sequence: Synthetic oligonucleotide
  Target: ATXN2; (+) strand; PAM type: NNGRRT; PAM sequence: AGGAGT
cgggtggatcacttgtggtc

SEQ ID NO: 10223 - DNA, 20 bp, Artificial Sequence
  Description of Artificial Sequence: Synthetic oligonucleotide
  Target: ATXN2; (+) strand; PAM type: NNGRRT; PAM sequence: GAGAAT
tacttgggaggctgaggcgg

SEQ ID NO: 10224 - DNA, 20 bp, Artificial Sequence
  Description of Artificial Sequence: Synthetic oligonucleotide
  Target: ATXN2; (+) strand; PAM type: NNGRRT; PAM sequence: CAGAGT
ctgaactccagcctgggcaa

SEQ ID NO: 10225 - DNA, 20 bp, Artificial Sequence
  Description of Artificial Sequence: Synthetic oligonucleotide
  Target: ATXN2; (+) strand; PAM type: NNGRRT; PAM sequence: ATGGGT
caaatgcccatcgactagta

SEQ ID NO: 10226 - DNA, 20 bp, Artificial Sequence
  Description of Artificial Sequence: Synthetic oligonucleotide
  Target: ATXN2; (+) strand; PAM type: NNGRRT; PAM sequence: AGGAAT
aatgctacccagcaataaaa

SEQ ID NO: 10227 - DNA, 20 bp, Artificial Sequence
  Description of Artificial Sequence: Synthetic oligonucleotide
  Target: ATXN2; (+) strand; PAM type: NNGRRT; PAM sequence: GTGGAT
actttgggaggccaaggcag

SEQ ID NO: 10228 - DNA, 20 bp, Artificial Sequence
  Description of Artificial Sequence: Synthetic oligonucleotide
  Target: ATXN2; (+) strand; PAM type: NNGRRT; PAM sequence: TGGGGT
gccaaggcaggtggatcatt

SEQ ID NO: 10229 - DNA, 20 bp, Artificial Sequence
  Description of Artificial Sequence: Synthetic oligonucleotide
  Target: ATXN2; (+) strand; PAM type: NNGRRT; PAM sequence: AGGAGT
caggtggatcatttggggtc

SEQ ID NO: 10230 - DNA, 20 bp, Artificial Sequence
  Description of Artificial Sequence: Synthetic oligonucleotide
  Target: ATXN2; (+) strand; PAM type: NNGRRT; PAM sequence: TGGAAT
tacttgggaggctgaggcag

SEQ ID NO: 10231 - DNA, 20 bp, Artificial Sequence
  Description of Artificial Sequence: Synthetic oligonucleotide
  Target: ATXN2; (+) strand; PAM type: NNGRRT; PAM sequence: AGGAAT
aaacaaacaaacaaacaaaa

SEQ ID NO: 10232 - DNA, 20 bp, Artificial Sequence
  Description of Artificial Sequence: Synthetic oligonucleotide
  Target: ATXN2; (+) strand; PAM type: NNGRRT; PAM sequence: TTGAAT
acttgcgtcctgggacggct

SEQ ID NO: 10233 - DNA, 20 bp, Artificial Sequence
  Description of Artificial Sequence: Synthetic oligonucleotide
  Target: ATXN2; (+) strand; PAM type: NNGRRT; PAM sequence: AAGAGT
tgggaggctgaggtgagctc

SEQ ID NO: 10234 - DNA, 20 bp, Artificial Sequence
  Description of Artificial Sequence: Synthetic oligonucleotide
  Target: ATXN2; (+) strand; PAM type: NNGRRT; PAM sequence: GAGGAT
aaaagaaaaagaaatctaaa

SEQ ID NO: 10235 - DNA, 20 bp, Artificial Sequence
  Description of Artificial Sequence: Synthetic oligonucleotide
  Target: ATXN2; (+) strand; PAM type: NNGRRT; PAM sequence: TTGGAT
ataaaactggttaaaacatt

SEQ ID NO: 10236 - DNA, 20 bp, Artificial Sequence
  Description of Artificial Sequence: Synthetic oligonucleotide
  Target: ATXN2; (+) strand; PAM type: NNGRRT; PAM sequence: TTGGAT
gtcatttagaacaagataaa

SEQ ID NO: 10237 - DNA, 20 bp, Artificial Sequence
  Description of Artificial Sequence: Synthetic oligonucleotide
  Target: ATXN2; (+) strand; PAM type: NNGRRT; PAM sequence: CAGGGT
acctcagcctctcagcctcc

SEQ ID NO: 10238 - DNA, 20 bp, Artificial Sequence
  Description of Artificial Sequence: Synthetic oligonucleotide
  Target: ATXN2; (+) strand; PAM type: NNGRRT; PAM sequence: AGGAGT
gacaggcagatcacgagatc

SEQ ID NO: 10239 - DNA, 20 bp, Artificial Sequence
  Description of Artificial Sequence: Synthetic oligonucleotide
  Target: ATXN2; (+) strand; PAM type: NNGRRT; PAM sequence: CTGGGT
actaaaaatacaaaaattag

SEQ ID NO: 10240 - DNA, 20 bp, Artificial Sequence
  Description of Artificial Sequence: Synthetic oligonucleotide
  Target: ATXN2; (+) strand; PAM type: NNGRRT; PAM sequence: GGGAAT
tactcaggaggctgaggcag

SEQ ID NO: 10241 - DNA, 20 bp, Artificial Sequence
  Description of Artificial Sequence: Synthetic oligonucleotide
  Target: ATXN2; (+) strand; PAM type: NNGRRT; PAM sequence: TTGAAT
ggctgaggcaggggaatcgc

SEQ ID NO: 10242 - DNA, 20 bp, Artificial Sequence
  Description of Artificial Sequence: Synthetic oligonucleotide
  Target: ATXN2; (+) strand; PAM type: NNGRRT; PAM sequence: AAGAAT
aaacaaacaatttaagagga

SEQ ID NO: 10243 - DNA, 20 bp, Artificial Sequence
  Description of Artificial Sequence: Synthetic oligonucleotide
  Target: ATXN2; (+) strand; PAM type: NNGRRT; PAM sequence: ACGGAT
caacaaatgaggtggggaca

SEQ ID NO: 10244 - DNA, 20 bp, Artificial Sequence
  Description of Artificial Sequence: Synthetic oligonucleotide
  Target: ATXN2; (+) strand; PAM type: NNGRRT; PAM sequence: AGGAGT
agctaaactataaaaatcat

SEQ ID NO: 10245 - DNA, 20 bp, Artificial Sequence
  Description of Artificial Sequence: Synthetic oligonucleotide
  Target: ATXN2; (+) strand; PAM type: NNGRRT; PAM sequence: AGGAGT
gagttttataggcgtttcat

SEQ ID NO: 10246 - DNA, 20 bp, Artificial Sequence
  Description of Artificial Sequence: Synthetic oligonucleotide
  Target: ATXN2; (+) strand; PAM type: NNGRRT; PAM sequence: TTGAGT
aggagtaaatctctgtggcc

SEQ ID NO: 10247 - DNA, 20 bp, Artificial Sequence
  Description of Artificial Sequence: Synthetic oligonucleotide
  Target: ATXN2; (+) strand; PAM type: NNGRRT; PAM sequence: GCGGAT
actttgggaaggtgaggcag

SEQ ID NO: 10248 - DNA, 20 bp, Artificial Sequence
  Description of Artificial Sequence: Synthetic oligonucleotide
  Target: ATXN2; (+) strand; PAM type: NNGRRT; PAM sequence: AGGAGT
caggcggatcatttgaggtc

SEQ ID NO: 10249 - DNA, 20 bp, Artificial Sequence
  Description of Artificial Sequence: Synthetic oligonucleotide
  Target: ATXN2; (+) strand; PAM type: NNGRRT; PAM sequence: GGGGAT
tactctggaggctgacgcag

SEQ ID NO: 10250 - DNA, 20 bp, Artificial Sequence
  Description of Artificial Sequence: Synthetic oligonucleotide
  Target: ATXN2; (+) strand; PAM type: NNGRRT; PAM sequence: AGGAAT
cagggggatcgcttgagctc

SEQ ID NO: 10251 - DNA, 20 bp, Artificial Sequence
  Description of Artificial Sequence: Synthetic oligonucleotide
  Target: ATXN2; (+) strand; PAM type: NNGRRT; PAM sequence: GAGGGT
ctgcagccccagctatctgg

SEQ ID NO: 10252 - DNA, 20 bp, Artificial Sequence
  Description of Artificial Sequence: Synthetic oligonucleotide
  Target: ATXN2; (+) strand; PAM type: NNGRRT; PAM sequence: GAGAAT
tatctgggagggtgaggcag

SEQ ID NO: 10253 - DNA, 20 bp, Artificial Sequence
  Description of Artificial Sequence: Synthetic oligonucleotide
  Target: ATXN2; (+) strand; PAM type: NNGRRT; PAM sequence: TAGAAT
caatgacacttcataaccac

SEQ ID NO: 10254 - DNA, 20 bp, Artificial Sequence
  Description of Artificial Sequence: Synthetic oligonucleotide
  Target: ATXN2; (+) strand; PAM type: NNGRRT; PAM sequence: GAGGAT
aagacatatcggttatttat

SEQ ID NO: 10255 - DNA, 20 bp, Artificial Sequence
  Description of Artificial Sequence: Synthetic oligonucleotide
  Target: ATXN2; (+) strand; PAM type: NNGRRT; PAM sequence: TGGGGT
actcactctttcactcaggc

SEQ ID NO: 10256 - DNA, 20 bp, Artificial Sequence
  Description of Artificial Sequence: Synthetic oligonucleotide
  Target: ATXN2; (+) strand; PAM type: NNGRRT; PAM sequence: CTGAAT
gatgctcctgcctcagcctc

SEQ ID NO: 10257 - DNA, 20 bp, Artificial Sequence
  Description of Artificial Sequence: Synthetic oligonucleotide
  Target: ATXN2; (+) strand; PAM type: NNGRRT; PAM sequence: TGGGAT
gcctcagcctcctgaatagc

SEQ ID NO: 10258 - DNA, 20 bp, Artificial Sequence
  Description of Artificial Sequence: Synthetic oligonucleotide
  Target: ATXN2; (+) strand; PAM type: NNGRRT; PAM sequence: TGGGAT
ttttgtatttttagtagaga

SEQ ID NO: 10259 - DNA, 20 bp, Artificial Sequence
  Description of Artificial Sequence: Synthetic oligonucleotide
  Target: ATXN2; (+) strand; PAM type: NNGRRT; PAM sequence: TGGGAT
acctcagcctcccagactgc

SEQ ID NO: 10260 - DNA, 20 bp, Artificial Sequence
  Description of Artificial Sequence: Synthetic oligonucleotide
  Target: ATXN2; (+) strand; PAM type: NNGRRT; PAM sequence: GTGGAT
actttgggaggccgagggag

SEQ ID NO: 10261 - DNA, 20 bp, Artificial Sequence
  Description of Artificial Sequence: Synthetic oligonucleotide
  Target: ATXN2; (+) strand; PAM type: NNGRRT; PAM sequence: AGGAGT
gaggtggatcacttgaggcc

SEQ ID NO: 10262 - DNA, 20 bp, Artificial Sequence
  Description of Artificial Sequence: Synthetic oligonucleotide
  Target: ATXN2; (+) strand; PAM type: NNGRRT; PAM sequence: CGGAGT
ttttttttttttttttgaga

SEQ ID NO: 10263 - DNA, 20 bp, Artificial Sequence
  Description of Artificial Sequence: Synthetic oligonucleotide
  Target: ATXN2; (+) strand; PAM type: NNGRRT; PAM sequence: TGGAGT
tctcgctctgtcacccaggc

SEQ ID NO: 10264 - DNA, 20 bp, Artificial Sequence
  Description of Artificial Sequence: Synthetic oligonucleotide
  Target: ATXN2; (+) strand; PAM type: NNGRRT; PAM sequence: CCGAGT
cattctcctgcctcagcctc

SEQ ID NO: 10265 - DNA, 20 bp, Artificial Sequence
  Description of Artificial Sequence: Synthetic oligonucleotide
  Target: ATXN2; (+) strand; PAM type: NNGRRT; PAM sequence: CAGGAT
cacggtttcactgtattagc

SEQ ID NO: 10266 - DNA, 20 bp, Artificial Sequence
  Description of Artificial Sequence: Synthetic oligonucleotide
  Target: ATXN2; (+) strand; PAM type: NNGRRT; PAM sequence: CTGGAT
cacctcggcctcccaaagtg

SEQ ID NO: 10267 - DNA, 20 bp, Artificial Sequence
  Description of Artificial Sequence: Synthetic oligonucleotide
  Target: ATXN2; (+) strand; PAM type: NNGRRT; PAM sequence: CTGAGT
tgagccaccgtgcccagact

SEQ ID NO: 10268 - DNA, 20 bp, Artificial Sequence
  Description of Artificial Sequence: Synthetic oligonucleotide
  Target: ATXN2; (+) strand; PAM type: NNGRRT; PAM sequence: TAGAAT
aagacagtacctcctgaagt

SEQ ID NO: 10269 - DNA, 20 bp, Artificial Sequence
  Description of Artificial Sequence: Synthetic oligonucleotide
  Target: ATXN2; (+) strand; PAM type: NNGRRT; PAM sequence: CAGAAT
aaaaaaacccactttcttct

SEQ ID NO: 10270 - DNA, 20 bp, Artificial Sequence
  Description of Artificial Sequence: Synthetic oligonucleotide
  Target: ATXN2; (+) strand; PAM type: NNGRRT; PAM sequence: CAGAGT
tttgattacattatttcagg

SEQ ID NO: 10271 - DNA, 20 bp, Artificial Sequence
  Description of Artificial Sequence: Synthetic oligonucleotide
  Target: ATXN2; (+) strand; PAM type: NNGRRT; PAM sequence: AAGAGT
atactgagaaaacgaaaatt

SEQ ID NO: 10272 - DNA, 20 bp, Artificial Sequence
  Description of Artificial Sequence: Synthetic oligonucleotide
  Target: ATXN2; (+) strand; PAM type: NNGRRT; PAM sequence: AGGAGT
caggcagatcgcttgagccc

SEQ ID NO: 10273 - DNA, 20 bp, Artificial Sequence
  Description of Artificial Sequence: Synthetic oligonucleotide
  Target: ATXN2; (+) strand; PAM type: NNGRRT; PAM sequence: GAGGAT
tatccaggggactgagaagg

SEQ ID NO: 10274 - DNA, 20 bp, Artificial Sequence
  Description of Artificial Sequence: Synthetic oligonucleotide
  Target: ATXN2; (+) strand; PAM type: NNGRRT; PAM sequence: CGGAGT
tttttttttttttttttgga

SEQ ID NO: 10275 - DNA, 20 bp, Artificial Sequence
  Description of Artificial Sequence: Synthetic oligonucleotide
  Target: ATXN2; (+) strand; PAM type: NNGRRT; PAM sequence: ACGGGT
tctttgtatttttagtagag

SEQ ID NO: 10276 - DNA, 20 bp, Artificial Sequence
  Description of Artificial Sequence: Synthetic oligonucleotide
  Target: ATXN2; (+) strand; PAM type: NNGRRT; PAM sequence: CAGGAT
cgggttttcaccatgttggc

SEQ ID NO: 10277 - DNA, 20 bp, Artificial Sequence
  Description of Artificial Sequence: Synthetic oligonucleotide
  Target: ATXN2; (+) strand; PAM type: NNGRRT; PAM sequence: CAGAGT
atctgcccacctcggcttcc

SEQ ID NO: 10278 - DNA, 20 bp, Artificial Sequence
  Description of Artificial Sequence: Synthetic oligonucleotide
  Target: ATXN2; (+) strand; PAM type: NNGRRT; PAM sequence: TGGGAT
atttccttttaagaaaaatg

SEQ ID NO: 10279 - DNA, 20 bp, Artificial Sequence
  Description of Artificial Sequence: Synthetic oligonucleotide
  Target: ATXN2; (+) strand; PAM type: NNGRRT; PAM sequence: CAGAAT
gctctttaaccacacaagca

SEQ ID NO: 10280 - DNA, 20 bp, Artificial Sequence
  Description of Artificial Sequence: Synthetic oligonucleotide
  Target: ATXN2; (+) strand; PAM type: NNGRRT; PAM sequence: CAGGGT
tcttatttttctttttgagg

SEQ ID NO: 10281 - DNA, 20 bp, Artificial Sequence
  Description of Artificial Sequence: Synthetic oligonucleotide
  Target: ATXN2; (+) strand; PAM type: NNGRRT; PAM sequence: TGGAAT
acctcagcctctcaaagtgc

SEQ ID NO: 10282 - DNA, 20 bp, Artificial Sequence
  Description of Artificial Sequence: Synthetic oligonucleotide
  Target: ATXN2; (+) strand; PAM type: NNGRRT; PAM sequence: TAGGAT
tagccgaaacatccttctaa

SEQ ID NO: 10283 - DNA, 20 bp, Artificial Sequence
  Description of Artificial Sequence: Synthetic oligonucleotide
  Target: ATXN2; (+) strand; PAM type: NNGRRT; PAM sequence: TGGAAT
gatttcagatcaaaaagctt

SEQ ID NO: 10284 - DNA, 20 bp, Artificial Sequence
  Description of Artificial Sequence: Synthetic oligonucleotide
  Target: ATXN2; (+) strand; PAM type: NNGRRT; PAM sequence: TAGGGT
ttttttttttttttttgaga

SEQ ID NO: 10285 - DNA, 20 bp, Artificial Sequence
  Description of Artificial Sequence: Synthetic oligonucleotide
  Target: ATXN2; (+) strand; PAM type: NNGRRT; PAM sequence: ATGGGT
cccatgctgctctcgaactc

SEQ ID NO: 10286 - DNA, 20 bp, Artificial Sequence
  Description of Artificial Sequence: Synthetic oligonucleotide
  Target: ATXN2; (+) strand; PAM type: NNGRRT; PAM sequence: TGGGAT
ggttcaagtcatcctccagc

SEQ ID NO: 10287 - DNA, 20 bp, Artificial Sequence
  Description of Artificial Sequence: Synthetic oligonucleotide
  Target: ATXN2; (+) strand; PAM type: NNGRRT; PAM sequence: TGGAGT
tttgtttgtttgttttgaga

SEQ ID NO: 10288 - DNA, 20 bp, Artificial Sequence
  Description of Artificial Sequence: Synthetic oligonucleotide
  Target: ATXN2; (+) strand; PAM type: NNGRRT; PAM sequence: CCGGGT
ctcactgcaacccctgcctc

SEQ ID NO: 10289 - DNA, 20 bp, Artificial Sequence
  Description of Artificial Sequence: Synthetic oligonucleotide
  Target: ATXN2; (+) strand; PAM type: NNGRRT; PAM sequence: TGGGAT
cctcagccccacctagtagc

SEQ ID NO: 10290 - DNA, 20 bp, Artificial Sequence
  Description of Artificial Sequence: Synthetic oligonucleotide
  Target: ATXN2; (+) strand; PAM type: NNGRRT; PAM sequence: TGGGGT
tttttgtattttagtagaga

SEQ ID NO: 10291 - DNA, 20 bp, Artificial Sequence
  Description of Artificial Sequence: Synthetic oligonucleotide
  Target: ATXN2; (+) strand; PAM type: NNGRRT; PAM sequence: TGGGAT
acctcggcctcccaaagtgc

SEQ ID NO: 10292 - DNA, 20 bp, Artificial Sequence
  Description of Artificial Sequence: Synthetic oligonucleotide
  Target: ATXN2; (+) strand; PAM type: NNGRRT; PAM sequence: CGGGGT
gccagtatttatgtttgaga

SEQ ID NO: 10293 - DNA, 20 bp, Artificial Sequence
  Description of Artificial Sequence: Synthetic oligonucleotide
  Target: ATXN2; (+) strand; PAM type: NNGRRT; PAM sequence: TTGAAT
accatgcccagctaattttt

SEQ ID NO: 10294 - DNA, 20 bp, Artificial Sequence
  Description of Artificial Sequence: Synthetic oligonucleotide
  Target: ATXN2; (+) strand; PAM type: NNGRRT; PAM sequence: GAGGAT
ctccaattactctttttgaa

SEQ ID NO: 10295 - DNA, 20 bp, Artificial Sequence
  Description of Artificial Sequence: Synthetic oligonucleotide
  Target: ATXN2; (+) strand; PAM type: NNGRRT; PAM sequence: GTGAAT
tttttcttcataaaatccat

SEQ ID NO: 10296 - DNA, 20 bp, Artificial Sequence
  Description of Artificial Sequence: Synthetic oligonucleotide
  Target: ATXN2; (+) strand; PAM type: NNGRRT; PAM sequence: CAGGAT
aaactacaagcaaacacagg

SEQ ID NO: 10297 - DNA, 20 bp, Artificial Sequence
  Description of Artificial Sequence: Synthetic oligonucleotide
  Target: ATXN2; (+) strand; PAM type: NNGRRT; PAM sequence: TTGGGT
tggcatgggcgtcataggta

SEQ ID NO: 10298 - DNA, 20 bp, Artificial Sequence
  Description of Artificial Sequence: Synthetic oligonucleotide
  Target: ATXN2; (+) strand; PAM type: NNGRRT; PAM sequence: GAGAAT
tattgggtataaaggcttga

SEQ ID NO: 10299 - DNA, 20 bp, Artificial Sequence
  Description of Artificial Sequence: Synthetic oligonucleotide
  Target: ATXN2; (+) strand; PAM type: NNGRRT; PAM sequence: CTGAAT
tcctcatacttaacaacaca

SEQ ID NO: 10300 - DNA, 20 bp, Artificial Sequence
  Description of Artificial Sequence: Synthetic oligonucleotide
  Target: ATXN2; (+) strand; PAM type: NNGRRT; PAM sequence: AAGAGT
ctcaagtcactgaaaaccta

SEQ ID NO: 10301 - DNA, 20 bp, Artificial Sequence
  Description of Artificial Sequence: Synthetic oligonucleotide
  Target: ATXN2; (+) strand; PAM type: NNGRRT; PAM sequence: CTGGAT
cacgcctgggctcactggga

SEQ ID NO: 10302 - DNA, 20 bp, Artificial Sequence
  Description of Artificial Sequence: Synthetic oligonucleotide
  Target: ATXN2; (+) strand; PAM type: NNGRRT; PAM sequence: CTGAGT
tttggtgcaaaacaaacagg

SEQ ID NO: 10303 - DNA, 20 bp, Artificial Sequence
  Description of Artificial Sequence: Synthetic oligonucleotide
  Target: ATXN2; (+) strand; PAM type: NNGRRT; PAM sequence: TGGAGT
caaacaggctgagtataaac

SEQ ID NO: 10304 - DNA, 20 bp, Artificial Sequence
  Description of Artificial Sequence: Synthetic oligonucleotide
  Target: ATXN2; (+) strand; PAM type: NNGRRT; PAM sequence: TGGGGT
gcttgaggccgaggtgaagt

SEQ ID NO: 10305 - DNA, 20 bp, Artificial Sequence
  Description of Artificial Sequence: Synthetic oligonucleotide
  Target: ATXN2; (+) strand; PAM type: NNGRRT; PAM sequence: ACGGAT
actattattgcaatttaaag

SEQ ID NO: 10306 - DNA, 20 bp, Artificial Sequence
  Description of Artificial Sequence: Synthetic oligonucleotide
  Target: ATXN2; (+) strand; PAM type: NNGRRT; PAM sequence: TCGAAT
atatcttcttatgatctcag

SEQ ID NO: 10307 - DNA, 20 bp, Artificial Sequence
  Description of Artificial Sequence: Synthetic oligonucleotide
  Target: ATXN2; (+) strand; PAM type: NNGRRT; PAM sequence: GGGGAT
gtcatctcttagtatctgtg

SEQ ID NO: 10308 - DNA, 20 bp, Artificial Sequence
  Description of Artificial Sequence: Synthetic oligonucleotide
  Target: ATXN2; (+) strand; PAM type: NNGRRT; PAM sequence: TGGAAT
ctgtgaagataccaaagtct

SEQ ID NO: 10309 - DNA, 20 bp, Artificial Sequence
  Description of Artificial Sequence: Synthetic oligonucleotide
  Target: ATXN2; (+) strand; PAM type: NNGRRT; PAM sequence: TGGAAT
aatgctttactgtattgttt

SEQ ID NO: 10310 - DNA, 20 bp, Artificial Sequence
  Description of Artificial Sequence: Synthetic oligonucleotide
  Target: ATXN2; (+) strand; PAM type: NNGRRT; PAM sequence: TTGAAT
tgtttttgatccatggttgg

SEQ ID NO: 10311 - DNA, 20 bp, Artificial Sequence
  Description of Artificial Sequence: Synthetic oligonucleotide
  Target: ATXN2; (+) strand; PAM type: NNGRRT; PAM sequence: CTGGGT
tagccaaccatcgtcaaatt

SEQ ID NO: 10312 - DNA, 20 bp, Artificial Sequence
  Description of Artificial Sequence: Synthetic oligonucleotide
  Target: ATXN2; (+) strand; PAM type: NNGRRT; PAM sequence: GTGGGT
acctacctgagagaaggaac

SEQ ID NO: 10313 - DNA, 20 bp, Artificial Sequence
  Description of Artificial Sequence: Synthetic oligonucleotide
  Target: ATXN2; (+) strand; PAM type: NNGRRT; PAM sequence: TGGGAT
tgggttgaactcctttgcat

SEQ ID NO: 10314 - DNA, 20 bp, Artificial Sequence
  Description of Artificial Sequence: Synthetic oligonucleotide
  Target: ATXN2; (+) strand; PAM type: NNGRRT; PAM sequence: AAGAAT
gcccattccttaatccctta

SEQ ID NO: 10315 - DNA, 20 bp, Artificial Sequence
  Description of Artificial Sequence: Synthetic oligonucleotide
  Target: ATXN2; (+) strand; PAM type: NNGRRT; PAM sequence: CTGAGT
aagaacaattttttaaaaat

SEQ ID NO: 10316 - DNA, 20 bp, Artificial Sequence
  Description of Artificial Sequence: Synthetic oligonucleotide
  Target: ATXN2; (+) strand; PAM type: NNGRRT; PAM sequence: CAGAGT
tactttttttttttccttca

SEQ ID NO: 10317 - DNA, 20 bp, Artificial Sequence
  Description of Artificial Sequence: Synthetic oligonucleotide
  Target: ATXN2; (+) strand; PAM type: NNGRRT; PAM sequence: TGGAGT
tcccactctgttgctcaggt

SEQ ID NO: 10318 - DNA, 20 bp, Artificial Sequence
  Description of Artificial Sequence: Synthetic oligonucleotide
  Target: ATXN2; (+) strand; PAM type: NNGRRT; PAM sequence: CCGAGT
ctcactgcaacctctgcctc

SEQ ID NO: 10319 - DNA, 20 bp, Artificial Sequence
  Description of Artificial Sequence: Synthetic oligonucleotide
  Target: ATXN2; (+) strand; PAM type: NNGRRT; PAM sequence: TGGGAT
gccttagcctcctgattagc

SEQ ID NO: 10320 - DNA, 20 bp, Artificial Sequence
  Description of Artificial Sequence: Synthetic oligonucleotide
  Target: ATXN2; (+) strand; PAM type: NNGRRT; PAM sequence: TGGGGT
atatttatttttagtaaaga

SEQ ID NO: 10321 - DNA, 20 bp, Artificial Sequence
  Description of Artificial Sequence: Synthetic oligonucleotide
  Target: ATXN2; (+) strand; PAM type: NNGRRT; PAM sequence: TGGGAT
gactcagcctcccaaagtgc

SEQ ID NO: 10322 - DNA, 20 bp, Artificial Sequence
  Description of Artificial Sequence: Synthetic oligonucleotide
  Target: ATXN2; (+) strand; PAM type: NNGRRT; PAM sequence: CAGAGT
ttatttatttatttttgaga

SEQ ID NO: 10323 - DNA, 20 bp, Artificial Sequence
  Description of Artificial Sequence: Synthetic oligonucleotide
  Target: ATXN2; (+) strand; PAM type: NNGRRT; PAM sequence: TGGAGT
tctcgctctgtcacccaggc

SEQ ID NO: 10324 - DNA, 20 bp, Artificial Sequence
  Description of Artificial Sequence: Synthetic oligonucleotide
  Target: ATXN2; (+) strand; PAM type: NNGRRT; PAM sequence: CTGGGT
ctcactgcagcctccacctt

SEQ ID NO: 10325 - DNA, 20 bp, Artificial Sequence
  Description of Artificial Sequence: Synthetic oligonucleotide
  Target: ATXN2; (+) strand; PAM type: NNGRRT; PAM sequence: CCGAGT
aattctcctgcctcagcctc

SEQ ID NO: 10326 - DNA, 20 bp, Artificial Sequence
  Description of Artificial Sequence: Synthetic oligonucleotide
  Target: ATXN2; (+) strand; PAM type: NNGRRT; PAM sequence: TGGGAT
gcctcagcctcccgagtagc

SEQ ID NO: 10327 - DNA, 20 bp, Artificial Sequence
  Description of Artificial Sequence: Synthetic oligonucleotide
  Target: ATXN2; (+) strand; PAM type: NNGRRT; PAM sequence: CAGGGT
ttttgtatttttagtacaga

SEQ ID NO: 10328 - DNA, 20 bp, Artificial Sequence
  Description of Artificial Sequence: Synthetic oligonucleotide
  Target: ATXN2; (+) strand; PAM type: NNGRRT; PAM sequence: CAGAGT
atctacctgcttggacctcc

SEQ ID NO: 10329 - DNA, 20 bp, Artificial Sequence
  Description of Artificial Sequence: Synthetic oligonucleotide
  Target: ATXN2; (+) strand; PAM type: NNGRRT; PAM sequence: TGGGAT
gcttggacctcccagagtgc

SEQ ID NO: 10330 - DNA, 20 bp, Artificial Sequence
  Description of Artificial Sequence: Synthetic oligonucleotide
  Target: ATXN2; (+) strand; PAM type: NNGRRT; PAM sequence: AAGAAT
aaaaaaaattgcctcaaatc

SEQ ID NO: 10331 - DNA, 20 bp, Artificial Sequence
  Description of Artificial Sequence: Synthetic oligonucleotide
  Target: ATXN2; (+) strand; PAM type: NNGRRT; PAM sequence: CTGGAT
ttccaaaacttcagctttaa

SEQ ID NO: 10332 - DNA, 20 bp, Artificial Sequence
  Description of Artificial Sequence: Synthetic oligonucleotide
  Target: ATXN2; (+) strand; PAM type: NNGRRT; PAM sequence: CTGAAT
aagtccatttaattaatata

SEQ ID NO: 10333 - DNA, 20 bp, Artificial Sequence
  Description of Artificial Sequence: Synthetic oligonucleotide
  Target: ATXN2; (+) strand; PAM type: NNGRRT; PAM sequence: CAGAAT
taattaatatactgaatgtg

SEQ ID NO: 10334 - DNA, 20 bp, Artificial Sequence
  Description of Artificial Sequence: Synthetic oligonucleotide
  Target: ATXN2; (+) strand; PAM type: NNGRRT; PAM sequence: TTGAAT
agtttctgatgaaaaatatt

SEQ ID NO: 10335 - DNA, 20 bp, Artificial Sequence
  Description of Artificial Sequence: Synthetic oligonucleotide
  Target: ATXN2; (+) strand; PAM type: NNGRRT; PAM sequence: GAGGGT
tttcaacctagcagcacagt

SEQ ID NO: 10336 - DNA, 20 bp, Artificial Sequence
  Description of Artificial Sequence: Synthetic oligonucleotide
  Target: ATXN2; (+) strand; PAM type: NNGRRT; PAM sequence: ATGAGT
cagcacagtgagggtgacta

SEQ ID NO: 10337 - DNA, 20 bp, Artificial Sequence
  Description of Artificial Sequence: Synthetic oligonucleotide
  Target: ATXN2; (+) strand; PAM type: NNGRRT; PAM sequence: TGGAAT
cagtgagggtgactaatgag

SEQ ID NO: 10338 - DNA, 20 bp, Artificial Sequence
  Description of Artificial Sequence: Synthetic oligonucleotide
  Target: ATXN2; (+) strand; PAM type: NNGRRT; PAM sequence: CTGAAT
atccagtaaagataggtccc

SEQ ID NO: 10339 - DNA, 20 bp, Artificial Sequence
  Description of Artificial Sequence: Synthetic oligonucleotide
  Target: ATXN2; (+) strand; PAM type: NNGRRT; PAM sequence: TGGGGT
atgccttgtttttctagccc

SEQ ID NO: 10340 - DNA, 20 bp, Artificial Sequence
  Description of Artificial Sequence: Synthetic oligonucleotide
  Target: ATXN2; (+) strand; PAM type: NNGRRT; PAM sequence: AAGAGT
acaaaaaaggggaagaacag

SEQ ID NO: 10341 - DNA, 20 bp, Artificial Sequence
  Description of Artificial Sequence: Synthetic oligonucleotide
  Target: ATXN2; (+) strand; PAM type: NNGRRT; PAM sequence: CAGGGT
ggaagaacagaagagtagca

SEQ ID NO: 10342 - DNA, 20 bp, Artificial Sequence
  Description of Artificial Sequence: Synthetic oligonucleotide
  Target: ATXN2; (+) strand; PAM type: NNGRRT; PAM sequence: ATGGAT
aaagtagtctaaaagtccag

SEQ ID NO: 10343 - DNA, 20 bp, Artificial Sequence
  Description of Artificial Sequence: Synthetic oligonucleotide
  Target: ATXN2; (+) strand; PAM type: NNGRRT; PAM sequence: TTGAGT
tttaaaaaaaaaaaagttaa

SEQ ID NO: 10344 - DNA, 20 bp, Artificial Sequence
  Description of Artificial Sequence: Synthetic oligonucleotide
  Target: ATXN2; (+) strand; PAM type: NNGRRT; PAM sequence: CAGGAT
aaaaaaagttaattgagtaa

SEQ ID NO: 10345 - DNA, 20 bp, Artificial Sequence
  Description of Artificial Sequence: Synthetic oligonucleotide
  Target: ATXN2; (+) strand; PAM type: NNGRRT; PAM sequence: AAGAAT
gctgctgctattttcaatga

SEQ ID NO: 10346 - DNA, 20 bp, Artificial Sequence
  Description of Artificial Sequence: Synthetic oligonucleotide
  Target: ATXN2; (+) strand; PAM type: NNGRRT; PAM sequence: CTGAAT
aactatacgcatgaaatgtt

SEQ ID NO: 10347 - DNA, 20 bp, Artificial Sequence
  Description of Artificial Sequence: Synthetic oligonucleotide
  Target: ATXN2; (+) strand; PAM type: NNGRRT; PAM sequence: AAGAGT
taaggcttttttcatacttt

SEQ ID NO: 10348 - DNA, 20 bp, Artificial Sequence
  Description of Artificial Sequence: Synthetic oligonucleotide
  Target: ATXN2; (+) strand; PAM type: NNGRRT; PAM sequence: CAGAGT
ttactataaactaacaataa

SEQ ID NO: 10349 - DNA, 20 bp, Artificial Sequence
  Description of Artificial Sequence: Synthetic oligonucleotide
  Target: ATXN2; (+) strand; PAM type: NNGRRT; PAM sequence: CTGAGT
cctctaaagttcaatattta

SEQ ID NO: 10350 - DNA, 20 bp, Artificial Sequence
  Description of Artificial Sequence: Synthetic oligonucleotide
  Target: ATXN2; (+) strand; PAM type: NNGRRT; PAM sequence: CTGGGT
catgtcagaaattgtgcctg

SEQ ID NO: 10351 - DNA, 20 bp, Artificial Sequence
  Description of Artificial Sequence: Synthetic oligonucleotide
  Target: ATXN2; (+) strand; PAM type: NNGRRT; PAM sequence: ATGAGT
atcagacacttcacaataaa

SEQ ID NO: 10352 - DNA, 20 bp, Artificial Sequence
  Description of Artificial Sequence: Synthetic oligonucleotide
  Target: ATXN2; (+) strand; PAM type: NNGRRT; PAM sequence: GAGAGT
ataaaatgagtaaatgctaa

SEQ ID NO: 10353 - DNA, 20 bp, Artificial Sequence
  Description of Artificial Sequence: Synthetic oligonucleotide
  Target: ATXN2; (+) strand; PAM type: NNGRRT; PAM sequence: TGGGAT
aagaagtttaggaaaggtgt

SEQ ID NO: 10354 - DNA, 20 bp, Artificial Sequence
  Description of Artificial Sequence: Synthetic oligonucleotide
  Target: ATXN2; (+) strand; PAM type: NNGRRT; PAM sequence: GAGAAT
ttaggaaaggtgttgggatg

SEQ ID NO: 10355 - DNA, 20 bp, Artificial Sequence
  Description of Artificial Sequence: Synthetic oligonucleotide
  Target: ATXN2; (+) strand; PAM type: NNGRRT; PAM sequence: AAGAGT
agaatagtctaagtaaaagg

SEQ ID NO: 10356 - DNA, 20 bp, Artificial Sequence
  Description of Artificial Sequence: Synthetic oligonucleotide
  Target: ATXN2; (+) strand; PAM type: NNGRRT; PAM sequence: GCGGAT
actttgggaggccaaggcag

SEQ ID NO: 10357 - DNA, 20 bp, Artificial Sequence
  Description of Artificial Sequence: Synthetic oligonucleotide
  Target: ATXN2; (+) strand; PAM type: NNGRRT; PAM sequence: GAGAAT
tactcgggaggctgaggtag

SEQ ID NO: 10358 - DNA, 20 bp, Artificial Sequence
  Description of Artificial Sequence: Synthetic oligonucleotide
  Target: ATXN2; (+) strand; PAM type: NNGRRT; PAM sequence: CTGGGT
tcacgccactgcactccagc

SEQ ID NO: 10359 - DNA, 20 bp, Artificial Sequence
  Description of Artificial Sequence: Synthetic oligonucleotide
  Target: ATXN2; (+) strand; PAM type: NNGRRT; PAM sequence: AGGAGT
caagcagactgcttaagctc

SEQ ID NO: 10360 - DNA, 20 bp, Artificial Sequence
  Description of Artificial Sequence: Synthetic oligonucleotide
  Target: ATXN2; (+) strand; PAM type: NNGRRT; PAM sequence: AAGGGT
aaagcaccaatggctggacc

SEQ ID NO: 10361 - DNA, 20 bp, Artificial Sequence
  Description of Artificial Sequence: Synthetic oligonucleotide
  Target: ATXN2; (+) strand; PAM type: NNGRRT; PAM sequence: GTGAGT
ggtgagacacacatgtacaa

SEQ ID NO: 10362 - DNA, 20 bp, Artificial Sequence
  Description of Artificial Sequence: Synthetic oligonucleotide
  Target: ATXN2; (+) strand; PAM type: NNGRRT; PAM sequence: AGGAAT
aaaatgatagactcgtcaaa

SEQ ID NO: 10363 - DNA, 20 bp, Artificial Sequence
  Description of Artificial Sequence: Synthetic oligonucleotide
  Target: ATXN2; (+) strand; PAM type: NNGRRT; PAM sequence: GTGGAT
actttgggaagccaaggcag

SEQ ID NO: 10364 - DNA, 20 bp, Artificial Sequence
  Description of Artificial Sequence: Synthetic oligonucleotide
  Target: ATXN2; (+) strand; PAM type: NNGRRT; PAM sequence: AGGAGT
caggtggatcacttgaggtc

SEQ ID NO: 10365 - DNA, 20 bp, Artificial Sequence
  Description of Artificial Sequence: Synthetic oligonucleotide
  Target: ATXN2; (+) strand; PAM type: NNGRRT; PAM sequence: GAGAAT
tacttgggaggctgacatat

SEQ ID NO: 10366 - DNA, 20 bp, Artificial Sequence
  Description of Artificial Sequence: Synthetic oligonucleotide
  Target: ATXN2; (+) strand; PAM type: NNGRRT; PAM sequence: CTGGGT
tcacaccactgcactccagc

SEQ ID NO: 10367 - DNA, 20 bp, Artificial Sequence
  Description of Artificial Sequence: Synthetic oligonucleotide
  Target: ATXN2; (+) strand; PAM type: NNGRRT; PAM sequence: CGGAAT
gggcaaatgggcagtctata

SEQ ID NO: 10368 - DNA, 20 bp, Artificial Sequence
  Description of Artificial Sequence: Synthetic oligonucleotide
  Target: ATXN2; (+) strand; PAM type: NNGRRT; PAM sequence: TAGGGT
agtctatacggaattttaag

SEQ ID NO: 10369 - DNA, 20 bp, Artificial Sequence
  Description of Artificial Sequence: Synthetic oligonucleotide
  Target: ATXN2; (+) strand; PAM type: NNGRRT; PAM sequence: TAGAGT
atacggaattttaagtaggg

SEQ ID NO: 10370 - DNA, 20 bp, Artificial Sequence
  Description of Artificial Sequence: Synthetic oligonucleotide
  Target: ATXN2; (+) strand; PAM type: NNGRRT; PAM sequence: TAGGAT
tgaactggagggaggctaat

SEQ ID NO: 10371 - DNA, 20 bp, Artificial Sequence
  Description of Artificial Sequence: Synthetic oligonucleotide
  Target: ATXN2; (+) strand; PAM type: NNGRRT; PAM sequence: GTGAAT
cttggaaggtcattaagtag

SEQ ID NO: 10372 - DNA, 20 bp, Artificial Sequence
  Description of Artificial Sequence: Synthetic oligonucleotide
  Target: ATXN2; (+) strand; PAM type: NNGRRT; PAM sequence: CAGAAT
ggtcattaagtaggtgaatt

SEQ ID NO: 10373 - DNA, 20 bp, Artificial Sequence
  Description of Artificial Sequence: Synthetic oligonucleotide
  Target: ATXN2; (+) strand; PAM type: NNGRRT; PAM sequence: TGGGGT
cattcccccacaatgcagtg

SEQ ID NO: 10374 - DNA, 20 bp, Artificial Sequence
  Description of Artificial Sequence: Synthetic oligonucleotide
  Target: ATXN2; (+) strand; PAM type: NNGRRT; PAM sequence: AAGAAT
aatgcagtgtggggtggaga

SEQ ID NO: 10375 - DNA, 20 bp, Artificial Sequence
  Description of Artificial Sequence: Synthetic oligonucleotide
  Target: ATXN2; (+) strand; PAM type: NNGRRT; PAM sequence: TGGGAT
gagagagagagaaatgactg

SEQ ID NO: 10376 - DNA, 20 bp, Artificial Sequence
  Description of Artificial Sequence: Synthetic oligonucleotide
  Target: ATXN2; (+) strand; PAM type: NNGRRT; PAM sequence: CAGAAT
cagtggaaagcagcatagga

SEQ ID NO: 10377 - DNA, 20 bp, Artificial Sequence
  Description of Artificial Sequence: Synthetic oligonucleotide
  Target: ATXN2; (+) strand; PAM type: NNGRRT; PAM sequence: GGGAGT
attcagccagcacccacaga

SEQ ID NO: 10378 - DNA, 20 bp, Artificial Sequence
  Description of Artificial Sequence: Synthetic oligonucleotide
  Target: ATXN2; (+) strand; PAM type: NNGRRT; PAM sequence: GGGAAT
tagactagccctagtcagag

SEQ ID NO: 10379 - DNA, 20 bp, Artificial Sequence
  Description of Artificial Sequence: Synthetic oligonucleotide
  Target: ATXN2; (+) strand; PAM type: NNGRRT; PAM sequence: TAGAAT
gaattgtccatcccagtgat

SEQ ID NO: 10380 - DNA, 20 bp, Artificial Sequence
  Description of Artificial Sequence: Synthetic oligonucleotide
  Target: ATXN2; (+) strand; PAM type: NNGRRT; PAM sequence: CTGAAT
tccatcccagtgattagaat

SEQ ID NO: 10381 - DNA, 20 bp, Artificial Sequence
  Description of Artificial Sequence: Synthetic oligonucleotide
  Target: ATXN2; (+) strand; PAM type: NNGRRT; PAM sequence: ACGGAT
actttgggaggccgaggcgg

SEQ ID NO: 10382 - DNA, 20 bp, Artificial Sequence
  Description of Artificial Sequence: Synthetic oligonucleotide
  Target: ATXN2; (+) strand; PAM type: NNGRRT; PAM sequence: GGGAGT
cggacggataacctgaggtc

SEQ ID NO: 10383 - DNA, 20 bp, Artificial Sequence
  Description of Artificial Sequence: Synthetic oligonucleotide
  Target: ATXN2; (+) strand; PAM type: NNGRRT; PAM sequence: GAGAAT
tactcaggaggctgaggtag

SEQ ID NO: 10384 - DNA, 20 bp, Artificial Sequence
  Description of Artificial Sequence: Synthetic oligonucleotide
  Target: ATXN2; (+) strand; PAM type: NNGRRT; PAM sequence: AAGAAT
actctgccaaaaaaaaccaa

SEQ ID NO: 10385 - DNA, 20 bp, Artificial Sequence
  Description of Artificial Sequence: Synthetic oligonucleotide
  Target: ATXN2; (+) strand; PAM type: NNGRRT; PAM sequence: GTGGGT
ttttggtaagccccaccacc

SEQ ID NO: 10386 - DNA, 20 bp, Artificial Sequence
  Description of Artificial Sequence: Synthetic oligonucleotide
  Target: ATXN2; (+) strand; PAM type: NNGRRT; PAM sequence: TGGGGT
ccaccgtgggtaaagtcctc

SEQ ID NO: 10387 - DNA, 20 bp, Artificial Sequence
  Description of Artificial Sequence: Synthetic oligonucleotide
  Target: ATXN2; (+) strand; PAM type: NNGRRT; PAM sequence: TGGGGT
gggctcatagtcagtggact

SEQ ID NO: 10388 - DNA, 20 bp, Artificial Sequence
  Description of Artificial Sequence: Synthetic oligonucleotide
  Target: ATXN2; (+) strand; PAM type: NNGRRT; PAM sequence: TAGGGT
tgacccactgagacaccagc

SEQ ID NO: 10389 - DNA, 20 bp, Artificial Sequence
  Description of Artificial Sequence: Synthetic oligonucleotide
  Target: ATXN2; (+) strand; PAM type: NNGRRT; PAM sequence: GGGAGT
acaccagctagggtggccaa

SEQ ID NO: 10390 - DNA, 20 bp, Artificial Sequence
  Description of Artificial Sequence: Synthetic oligonucleotide
  Target: ATXN2; (+) strand; PAM type: NNGRRT; PAM sequence: AAGAGT
acagctctgggaggagaggg

SEQ ID NO: 10391 - DNA, 20 bp, Artificial Sequence
  Description of Artificial Sequence: Synthetic oligonucleotide
  Target: ATXN2; (+) strand; PAM type: NNGRRT; PAM sequence: GTGGAT
ggaggactttgtcttgcaat

SEQ ID NO: 10392 - DNA, 20 bp, Artificial Sequence
  Description of Artificial Sequence: Synthetic oligonucleotide
  Target: ATXN2; (+) strand; PAM type: NNGRRT; PAM sequence: TAGGAT
agggaaatacctagtcctag

SEQ ID NO: 10393 - DNA, 20 bp, Artificial Sequence
  Description of Artificial Sequence: Synthetic oligonucleotide
  Target: ATXN2; (+) strand; PAM type: NNGRRT; PAM sequence: TTGAAT
gactaaagagcccttgtgcc

SEQ ID NO: 10394 - DNA, 20 bp, Artificial Sequence
  Description of Artificial Sequence: Synthetic oligonucleotide
  Target: ATXN2; (+) strand; PAM type: NNGRRT; PAM sequence: AAGAGT
ccacctgcttgaggtgagag

SEQ ID NO: 10395 - DNA, 20 bp, Artificial Sequence
  Description of Artificial Sequence: Synthetic oligonucleotide
  Target: ATXN2; (+) strand; PAM type: NNGRRT; PAM sequence: GTGGGT
aaaaggactttatcttgcaa

SEQ ID NO: 10396 - DNA, 20 bp, Artificial Sequence
  Description of Artificial Sequence: Synthetic oligonucleotide
  Target: ATXN2; (+) strand; PAM type: NNGRRT; PAM sequence: CAGGAT
aagtaaagacccagttcttg

SEQ ID NO: 10397 - DNA, 20 bp, Artificial Sequence
  Description of Artificial Sequence: Synthetic oligonucleotide
  Target: ATXN2; (+) strand; PAM type: NNGRRT; PAM sequence: TTGGGT
gaaaatagctgccacaggcc

SEQ ID NO: 10398 - DNA, 20 bp, Artificial Sequence
  Description of Artificial Sequence: Synthetic oligonucleotide
  Target: ATXN2; (+) strand; PAM type: NNGRRT; PAM sequence: GGGAAT
agagactgcctggtaataca

SEQ ID NO: 10399 - DNA, 20 bp, Artificial Sequence
  Description of Artificial Sequence: Synthetic oligonucleotide
  Target: ATXN2; (+) strand; PAM type: NNGRRT; PAM sequence: CAGAGT
ctaccaaggtgatacctcta

SEQ ID NO: 10400 - DNA, 20 bp, Artificial Sequence
  Description of Artificial Sequence: Synthetic oligonucleotide
  Target: ATXN2; (+) strand; PAM type: NNGRRT; PAM sequence: TGGGGT
agtcacaacattactagtct

SEQ ID NO: 10401 - DNA, 20 bp, Artificial Sequence
  Description of Artificial Sequence: Synthetic oligonucleotide
  Target: ATXN2; (+) strand; PAM type: NNGRRT; PAM sequence: TTGAAT
atgacaacacttaattccct

SEQ ID NO: 10402 - DNA, 20 bp, Artificial Sequence
  Description of Artificial Sequence: Synthetic oligonucleotide
  Target: ATXN2; (+) strand; PAM type: NNGRRT; PAM sequence: AAGAAT
acttgaaaaaccttctcaag

SEQ ID NO: 10403 - DNA, 20 bp, Artificial Sequence
  Description of Artificial Sequence: Synthetic oligonucleotide
  Target: ATXN2; (+) strand; PAM type: NNGRRT; PAM sequence: CCGGAT
cttctcaagaagaatgggag

SEQ ID NO: 10404 - DNA, 20 bp, Artificial Sequence
  Description of Artificial Sequence: Synthetic oligonucleotide
  Target: ATXN2; (+) strand; PAM type: NNGRRT; PAM sequence: AGGAGT
ggcggacagatcacgaggtt

SEQ ID NO: 10405 - DNA, 20 bp, Artificial Sequence
  Description of Artificial Sequence: Synthetic oligonucleotide
  Target: ATXN2; (+) strand; PAM type: NNGRRT; PAM sequence: GAGAAT
tactcaggaggctgaggcag

SEQ ID NO: 10406 - DNA, 20 bp, Artificial Sequence
  Description of Artificial Sequence: Synthetic oligonucleotide
  Target: ATXN2; (+) strand; PAM type: NNGRRT; PAM sequence: TTGAAT
ggctgaggcaggagaattgc

SEQ ID NO: 10407 - DNA, 20 bp, Artificial Sequence
  Description of Artificial Sequence: Synthetic oligonucleotide
  Target: ATXN2; (+) strand; PAM type: NNGRRT; PAM sequence: AAGAAT
aaaaacagaaaaaaaaaaaa

SEQ ID NO: 10408 - DNA, 20 bp, Artificial Sequence
  Description of Artificial Sequence: Synthetic oligonucleotide
  Target: ATXN2; (+) strand; PAM type: NNGRRT; PAM sequence: CAGAAT
caaaaccagactacaaagaa

SEQ ID NO: 10409 - DNA, 20 bp, Artificial Sequence
  Description of Artificial Sequence: Synthetic oligonucleotide
  Target: ATXN2; (+) strand; PAM type: NNGRRT; PAM sequence: CAGAAT
gagatatgtgaactttcaga

SEQ ID NO: 10410 - DNA, 20 bp, Artificial Sequence
  Description of Artificial Sequence: Synthetic oligonucleotide
  Target: ATXN2; (+) strand; PAM type: NNGRRT; PAM sequence: CTGAAT
actttcagacagaattcaag

SEQ ID NO: 10411 - DNA, 20 bp, Artificial Sequence
  Description of Artificial Sequence: Synthetic oligonucleotide
  Target: ATXN2; (+) strand; PAM type: NNGRRT; PAM sequence: CAGAAT
gataatacagagaacaaatt

SEQ ID NO: 10412 - DNA, 20 bp, Artificial Sequence
  Description of Artificial Sequence: Synthetic oligonucleotide
  Target: ATXN2; (+) strand; PAM type: NNGRRT; PAM sequence: AAGAAT
ctgcaataattattagtaaa

SEQ ID NO: 10413 - DNA, 20 bp, Artificial Sequence
  Description of Artificial Sequence: Synthetic oligonucleotide
  Target: ATXN2; (+) strand; PAM type: NNGRRT; PAM sequence: TTGAAT
agcagaaaacattagtgagc

SEQ ID NO: 10414 - DNA, 20 bp, Artificial Sequence
  Description of Artificial Sequence: Synthetic oligonucleotide
  Target: ATXN2; (+) strand; PAM type: NNGRRT; PAM sequence: TAGGAT
cgcttataatcctagcactt

SEQ ID NO: 10415 - DNA, 20 bp, Artificial Sequence
  Description of Artificial Sequence: Synthetic oligonucleotide
  Target: ATXN2; (+) strand; PAM type: NNGRRT; PAM sequence: GCGGAT
actttaggatgccaaggcgg

SEQ ID NO: 10416 - DNA, 20 bp, Artificial Sequence
  Description of Artificial Sequence: Synthetic oligonucleotide
  Target: ATXN2; (+) strand; PAM type: NNGRRT; PAM sequence: AAGAAT
tacttgggaggctgaggcag

SEQ ID NO: 10417 - DNA, 20 bp, Artificial Sequence
  Description of Artificial Sequence: Synthetic oligonucleotide
  Target: ATXN2; (+) strand; PAM type: NNGRRT; PAM sequence: GGGAGT
cagaagaatcgcttgaacct

SEQ ID NO: 10418 - DNA, 20 bp, Artificial Sequence
  Description of Artificial Sequence: Synthetic oligonucleotide
  Target: ATXN2; (+) strand; PAM type: NNGRRT; PAM sequence: AAGGAT
agttcttcaatctgcaagaa

SEQ ID NO: 10419 - DNA, 20 bp, Artificial Sequence
  Description of Artificial Sequence: Synthetic oligonucleotide
  Target: ATXN2; (+) strand; PAM type: NNGRRT; PAM sequence: CAGAAT
aacaagtacacagaaaaata

SEQ ID NO: 10420 - DNA, 20 bp, Artificial Sequence
  Description of Artificial Sequence: Synthetic oligonucleotide
  Target: ATXN2; (+) strand; PAM type: NNGRRT; PAM sequence: AAGAAT
ctactcatattttgagcagg

SEQ ID NO: 10421 - DNA, 20 bp, Artificial Sequence
  Description of Artificial Sequence: Synthetic oligonucleotide
  Target: ATXN2; (+) strand; PAM type: NNGRRT; PAM sequence: CAGAGT
ttttttttttttttgtgaga

SEQ ID NO: 10422 - DNA, 20 bp, Artificial Sequence
  Description of Artificial Sequence: Synthetic oligonucleotide
  Target: ATXN2; (+) strand; PAM type: NNGRRT; PAM sequence: CTGAGT
gattctcctgcctcagcctc

SEQ ID NO: 10423 - DNA, 20 bp, Artificial Sequence
  Description of Artificial Sequence: Synthetic oligonucleotide
  Target: ATXN2; (+) strand; PAM type: NNGRRT; PAM sequence: TAGGAT
gcctcagcctcctgagtagc

SEQ ID NO: 10424 - DNA, 20 bp, Artificial Sequence
  Description of Artificial Sequence: Synthetic oligonucleotide
  Target: ATXN2; (+) strand; PAM type: NNGRRT; PAM sequence: CAGAGT
ttttgtatttttagtagaga

SEQ ID NO: 10425 - DNA, 20 bp, Artificial Sequence
  Description of Artificial Sequence: Synthetic oligonucleotide
  Target: ATXN2; (+) strand; PAM type: NNGRRT; PAM sequence: TGGGAT
acctttgccttccaaagtgc

SEQ ID NO: 10426 - DNA, 20 bp, Artificial Sequence
  Description of Artificial Sequence: Synthetic oligonucleotide
  Target: ATXN2; (+) strand; PAM type: NNGRRT; PAM sequence: CAGGGT
ttaggcgtgagccactaggc

SEQ ID NO: 10427 - DNA, 20 bp, Artificial Sequence
  Description of Artificial Sequence: Synthetic oligonucleotide
  Target: ATXN2; (+) strand; PAM type: NNGRRT; PAM sequence: TGGAGT
tcttactctgttgcccagac

SEQ ID NO: 10428 - DNA, 20 bp, Artificial Sequence
  Description of Artificial Sequence: Synthetic oligonucleotide
  Target: ATXN2; (+) strand; PAM type: NNGRRT; PAM sequence: CTGGGT
ctcactgcaacctgggcctc

SEQ ID NO: 10429 - DNA, 20 bp, Artificial Sequence
  Description of Artificial Sequence: Synthetic oligonucleotide
  Target: ATXN2; (+) strand; PAM type: NNGRRT; PAM sequence: CCGAGT
tgattctcctgcctcagcct

SEQ ID NO: 10430 - DNA, 20 bp, Artificial Sequence
  Description of Artificial Sequence: Synthetic oligonucleotide
  Target: ATXN2; (+) strand; PAM type: NNGRRT; PAM sequence: TGGGAT
tgcctcagcctccgagtagc

SEQ ID NO: 10431 - DNA, 20 bp, Artificial Sequence
  Description of Artificial Sequence: Synthetic oligonucleotide
  Target: ATXN2; (+) strand; PAM type: NNGRRT; PAM sequence: GGGGGT
ttttctatttttagtagaga

SEQ ID NO: 10432 - DNA, 20 bp, Artificial Sequence
  Description of Artificial Sequence: Synthetic oligonucleotide
  Target: ATXN2; (+) strand; PAM type: NNGRRT; PAM sequence: TGGGAT
acctcagcctcccaaagtgc

SEQ ID NO: 10433 - DNA, 20 bp, Artificial Sequence
  Description of Artificial Sequence: Synthetic oligonucleotide
  Target: ATXN2; (+) strand; PAM type: NNGRRT; PAM sequence: TAGAGT
aaaagcgggcagatgaagtg

SEQ ID NO: 10434 - DNA, 20 bp, Artificial Sequence
  Description of Artificial Sequence: Synthetic oligonucleotide
  Target: ATXN2; (+) strand; PAM type: NNGRRT; PAM sequence: ATGGGT
gttgtcattggtttaaaata

SEQ ID NO: 10435 - DNA, 20 bp, Artificial Sequence
  Description of Artificial Sequence: Synthetic oligonucleotide
  Target: ATXN2; (+) strand; PAM type: NNGRRT; PAM sequence: CGGAGT
ttttttttttttttttgaga

SEQ ID NO: 10436 - DNA, 20 bp, Artificial Sequence
  Description of Artificial Sequence: Synthetic oligonucleotide
  Target: ATXN2; (+) strand; PAM type: NNGRRT; PAM sequence: TGGGGT
tctcactctgtcgcccaggc

SEQ ID NO: 10437 - DNA, 20 bp, Artificial Sequence
  Description of Artificial Sequence: Synthetic oligonucleotide
  Target: ATXN2; (+) strand; PAM type: NNGRRT; PAM sequence: CTGGGT
ctcactgcaacctctgcctc

SEQ ID NO: 10438 - DNA, 20 bp, Artificial Sequence
  Description of Artificial Sequence: Synthetic oligonucleotide
  Target: ATXN2; (+) strand; PAM type: NNGRRT; PAM sequence: CTGAGT
aattctcctgcctcagcctc

SEQ ID NO: 10439 - DNA, 20 bp, Artificial Sequence
  Description of Artificial Sequence: Synthetic oligonucleotide
  Target: ATXN2; (+) strand; PAM type: NNGRRT; PAM sequence: TGGGGT
ttttgtatttttagtagaga

SEQ ID NO: 10440 - DNA, 20 bp, Artificial Sequence
  Description of Artificial Sequence: Synthetic oligonucleotide
  Target: ATXN2; (+) strand; PAM type: NNGRRT; PAM sequence: TGGGAT
acctcggcctcccaaagtgc

SEQ ID NO: 10441 - DNA, 20 bp, Artificial Sequence
  Description of Artificial Sequence: Synthetic oligonucleotide
  Target: ATXN2; (+) strand; PAM type: NNGRRT; PAM sequence: GGGAGT
aaaaaagaagggggaaggga

SEQ ID NO: 10442 - DNA, 20 bp, Artificial Sequence
  Description of Artificial Sequence: Synthetic oligonucleotide
  Target: ATXN2; (+) strand; PAM type: NNGRRT; PAM sequence: CTGAAT
ctcactaatcagtaacaaca

SEQ ID NO: 10443 - DNA, 20 bp, Artificial Sequence
  Description of Artificial Sequence: Synthetic oligonucleotide
  Target: ATXN2; (+) strand; PAM type: NNGRRT; PAM sequence: CAGAGT
aactctccaatcaaaagata

SEQ ID NO: 10444 - DNA, 20 bp, Artificial Sequence
  Description of Artificial Sequence: Synthetic oligonucleotide
  Target: ATXN2; (+) strand; PAM type: NNGRRT; PAM sequence: ATGGAT
aaaagatacagagtggctaa

SEQ ID NO: 10445 - DNA, 20 bp, Artificial Sequence
  Description of Artificial Sequence: Synthetic oligonucleotide
  Target: ATXN2; (+) strand; PAM type: NNGRRT; PAM sequence: CTGGGT
aaatggatttaaaaaaaagg

SEQ ID NO: 10446 - DNA, 20 bp, Artificial Sequence
  Description of Artificial Sequence: Synthetic oligonucleotide
  Target: ATXN2; (+) strand; PAM type: NNGRRT; PAM sequence: AGGAGT
caggcaaatcacctgaggtt

SEQ ID NO: 10447 - DNA, 20 bp, Artificial Sequence
  Description of Artificial Sequence: Synthetic oligonucleotide
  Target: ATXN2; (+) strand; PAM type: NNGRRT; PAM sequence: GAGAAT
tacttgggaggctgaggcag

SEQ ID NO: 10448 - DNA, 20 bp, Artificial Sequence
  Description of Artificial Sequence: Synthetic oligonucleotide
  Target: ATXN2; (+) strand; PAM type: NNGRRT; PAM sequence: AGGAGT
aatggaaaccagaaaagaac

SEQ ID NO: 10449 - DNA, 20 bp, Artificial Sequence
  Description of Artificial Sequence: Synthetic oligonucleotide
  Target: ATXN2; (+) strand; PAM type: NNGRRT; PAM sequence: AGGGAT
agattattgtataatgataa

SEQ ID NO: 10450 - DNA, 20 bp, Artificial Sequence
  Description of Artificial Sequence: Synthetic oligonucleotide
  Target: ATXN2; (+) strand; PAM type: NNGRRT; PAM sequence: TAGAAT
aacattgtgtccaacagcta

SEQ ID NO: 10451 - DNA, 20 bp, Artificial Sequence
  Description of Artificial Sequence: Synthetic oligonucleotide
  Target: ATXN2; (+) strand; PAM type: NNGRRT; PAM sequence: ATGGAT
cacattcttctcctcaacat

SEQ ID NO: 10452 - DNA, 20 bp, Artificial Sequence
  Description of Artificial Sequence: Synthetic oligonucleotide
  Target: ATXN2; (+) strand; PAM type: NNGRRT; PAM sequence: GTGGAT
accttgggaggccgaaatag

SEQ ID NO: 10453 - DNA, 20 bp, Artificial Sequence
  Description of Artificial Sequence: Synthetic oligonucleotide
  Target: ATXN2; (+) strand; PAM type: NNGRRT; PAM sequence: AGGAGT
taggtggattgcttgagctc

SEQ ID NO: 10454 - DNA, 20 bp, Artificial Sequence
  Description of Artificial Sequence: Synthetic oligonucleotide
  Target: ATXN2; (+) strand; PAM type: NNGRRT; PAM sequence: GAGGAT
tacttggaaggctaaggtgg

SEQ ID NO: 10455 - DNA, 20 bp, Artificial Sequence
  Description of Artificial Sequence: Synthetic oligonucleotide
  Target: ATXN2; (+) strand; PAM type: NNGRRT; PAM sequence: CTGGGT
atcatgacatgtactccagc

SEQ ID NO: 10456 - DNA, 20 bp, Artificial Sequence
  Description of Artificial Sequence: Synthetic oligonucleotide
  Target: ATXN2; (+) strand; PAM type: NNGRRT; PAM sequence: CAGAGT
atgtactccagcctgggtaa

SEQ ID NO: 10457 - DNA, 20 bp, Artificial Sequence
  Description of Artificial Sequence: Synthetic oligonucleotide
  Target: ATXN2; (+) strand; PAM type: NNGRRT; PAM sequence: GTGGGT
cagcactttaggaggccaag

SEQ ID NO: 10458 - DNA, 20 bp, Artificial Sequence
  Description of Artificial Sequence: Synthetic oligonucleotide
  Target: ATXN2; (+) strand; PAM type: NNGRRT; PAM sequence: GTGGAT
actttaggaggccaaggtgg

SEQ ID NO: 10459 - DNA, 20 bp, Artificial Sequence
  Description of Artificial Sequence: Synthetic oligonucleotide
  Target: ATXN2; (+) strand; PAM type: NNGRRT; PAM sequence: AGGAGT
tgggtggatcatctgaggtc

SEQ ID NO: 10460 - DNA, 20 bp, Artificial Sequence
  Description of Artificial Sequence: Synthetic oligonucleotide
  Target: ATXN2; (+) strand; PAM type: NNGRRT; PAM sequence: AGGAGT
aatacaaaaaaaaattagcc

SEQ ID NO: 10461 - DNA, 20 bp, Artificial Sequence
  Description of Artificial Sequence: Synthetic oligonucleotide
  Target: ATXN2; (+) strand; PAM type: NNGRRT; PAM sequence: AAGAAT
tactcaggaggctgaggcag

SEQ ID NO: 10462 - DNA, 20 bp, Artificial Sequence
  Description of Artificial Sequence: Synthetic oligonucleotide
  Target: ATXN2; (+) strand; PAM type: NNGRRT; PAM sequence: ATGGGT
tcgcgccactacactccagc

SEQ ID NO: 10463 - DNA, 20 bp, Artificial Sequence
  Description of Artificial Sequence: Synthetic oligonucleotide
  Target: ATXN2; (+) strand; PAM type: NNGRRT; PAM sequence: CTGAAT
gaaaattaagcaatatgctc

SEQ ID NO: 10464 - DNA, 20 bp, Artificial Sequence
  Description of Artificial Sequence: Synthetic oligonucleotide
  Target: ATXN2; (+) strand; PAM type: NNGRRT; PAM sequence: GTGGGT
aatatgctcctgaatgacca

SEQ ID NO: 10465 - DNA, 20 bp, Artificial Sequence
  Description of Artificial Sequence: Synthetic oligonucleotide
  Target: ATXN2; (+) strand; PAM type: NNGRRT; PAM sequence: TAGGAT
acacagcttatcaaaaccta

SEQ ID NO: 10466 - DNA, 20 bp, Artificial Sequence
  Description of Artificial Sequence: Synthetic oligonucleotide
  Target: ATXN2; (+) strand; PAM type: NNGRRT; PAM sequence: AGGAAT
acagtaaaagcaacaataag

SEQ ID NO: 10467 - DNA, 20 bp, Artificial Sequence
  Description of Artificial Sequence: Synthetic oligonucleotide
  Target: ATXN2; (+) strand; PAM type: NNGRRT; PAM sequence: AAGGAT
attgttaccaccgaaattca

SEQ ID NO: 10468 - DNA, 20 bp, Artificial Sequence
  Description of Artificial Sequence: Synthetic oligonucleotide
  Target: ATXN2; (+) strand; PAM type: NNGRRT; PAM sequence: ATGGAT
cattggaaaaccttgaagaa

SEQ ID NO: 10469 - DNA, 20 bp, Artificial Sequence
  Description of Artificial Sequence: Synthetic oligonucleotide
  Target: ATXN2; (+) strand; PAM type: NNGRRT; PAM sequence: CTGAAT
tggacctgatggcttcactg

SEQ ID NO: 10470 - DNA, 20 bp, Artificial Sequence
  Description of Artificial Sequence: Synthetic oligonucleotide
  Target: ATXN2; (+) strand; PAM type: NNGRRT; PAM sequence: GGGAAT
tccaacacaatacaggaaga

SEQ ID NO: 10471 - DNA, 20 bp, Artificial Sequence
  Description of Artificial Sequence: Synthetic oligonucleotide
  Target: ATXN2; (+) strand; PAM type: NNGRRT; PAM sequence: CCGAAT
ctcaatataatactagcaaa

SEQ ID NO: 10472 - DNA, 20 bp, Artificial Sequence
  Description of Artificial Sequence: Synthetic oligonucleotide
  Target: ATXN2; (+) strand; PAM type: NNGRRT; PAM sequence: TGGGAT
gatcattcatcatgactaag

SEQ ID NO: 10473 - DNA, 20 bp, Artificial Sequence
  Description of Artificial Sequence: Synthetic oligonucleotide
  Target: ATXN2; (+) strand; PAM type: NNGRRT; PAM sequence: AGGGAT
gactaagtgggattcatccc

SEQ ID NO: 10474 - DNA, 20 bp, Artificial Sequence
  Description of Artificial Sequence: Synthetic oligonucleotide
  Target: ATXN2; (+) strand; PAM type: NNGRRT; PAM sequence: AAGGAT
gggattcatcccagggatgc

SEQ ID NO: 10475 - DNA, 20 bp, Artificial Sequence
  Description of Artificial Sequence: Synthetic oligonucleotide
  Target: ATXN2; (+) strand; PAM type: NNGRRT; PAM sequence: CAGAAT
ataaacatggtacatcttaa

SEQ ID NO: 10476 - DNA, 20 bp, Artificial Sequence
  Description of Artificial Sequence: Synthetic oligonucleotide
  Target: ATXN2; (+) strand; PAM type: NNGRRT; PAM sequence: AGGAGT
gacgggcagatcatgaggtc

SEQ ID NO: 10477 - DNA, 20 bp, Artificial Sequence
  Description of Artificial Sequence: Synthetic oligonucleotide
  Target: ATXN2; (+) strand; PAM type: NNGRRT; PAM sequence: CTGGGT
ttgcgccactgcactccagc

SEQ ID NO: 10478 - DNA, 20 bp, Artificial Sequence
  Description of Artificial Sequence: Synthetic oligonucleotide
  Target: ATXN2; (+) strand; PAM type: NNGRRT; PAM sequence: CAGAGT
ctgcactccagcctgggtga

SEQ ID NO: 10479 - DNA, 20 bp, Artificial Sequence
  Description of Artificial Sequence: Synthetic oligonucleotide
  Target: ATXN2; (+) strand; PAM type: NNGRRT; PAM sequence: CTGGGT
aacaaaaaaaccccaaagaa

SEQ ID NO: 10480 - DNA, 20 bp, Artificial Sequence
  Description of Artificial Sequence: Synthetic oligonucleotide
  Target: ATXN2; (+) strand; PAM type: NNGRRT; PAM sequence: AGGAAT
cccaaagaactgggtataga

SEQ ID NO: 10481 - DNA, 20 bp, Artificial Sequence
  Description of Artificial Sequence: Synthetic oligonucleotide
  Target: ATXN2; (+) strand; PAM type: NNGRRT; PAM sequence: AAGGAT
tctaagatctggaacaagac

SEQ ID NO: 10482 - DNA, 20 bp, Artificial Sequence
  Description of Artificial Sequence: Synthetic oligonucleotide
  Target: ATXN2; (+) strand; PAM type: NNGRRT; PAM sequence: TGGAAT
gaaataaaaagcatccacac

SEQ ID NO: 10483 - DNA, 20 bp, Artificial Sequence
  Description of Artificial Sequence: Synthetic oligonucleotide
  Target: ATXN2; (+) strand; PAM type: NNGRRT; PAM sequence: CAGGAT
aaacaaattcagtaaaattg

SEQ ID NO: 10484 - DNA, 20 bp, Artificial Sequence
  Description of Artificial Sequence: Synthetic oligonucleotide
  Target: ATXN2; (+) strand; PAM type: NNGRRT; PAM sequence: AGGAAT
acaaatataataaaatactt

SEQ ID NO: 10485 - DNA, 20 bp, Artificial Sequence
  Description of Artificial Sequence: Synthetic oligonucleotide
  Target: ATXN2; (+) strand; PAM type: NNGRRT; PAM sequence: ATGAGT
ttaggaataaacttaaccaa

SEQ ID NO: 10486 - DNA, 20 bp, Artificial Sequence
  Description of Artificial Sequence: Synthetic oligonucleotide
  Target: ATXN2; (+) strand; PAM type: NNGRRT; PAM sequence: ATGGAT
tgaaaagagattccatgttt

SEQ ID NO: 10487 - DNA, 20 bp, Artificial Sequence
  Description of Artificial Sequence: Synthetic oligonucleotide
  Target: ATXN2; (+) strand; PAM type: NNGRRT; PAM sequence: AAGAAT
attccatgtttatggattag

SEQ ID NO: 10488 - DNA, 20 bp, Artificial Sequence
  Description of Artificial Sequence: Synthetic oligonucleotide
  Target: ATXN2; (+) strand; PAM type: NNGRRT; PAM sequence: AGGAAT
agcaaaatgaacaaaacggg

SEQ ID NO: 10489 - DNA, 20 bp, Artificial Sequence
  Description of Artificial Sequence: Synthetic oligonucleotide
  Target: ATXN2; (+) strand; PAM type: NNGRRT; PAM sequence: ATGAAT
acagaacagagaactcagaa

SEQ ID NO: 10490 - DNA, 20 bp, Artificial Sequence
  Description of Artificial Sequence: Synthetic oligonucleotide
  Target: ATXN2; (+) strand; PAM type: NNGRRT; PAM sequence: CTGGAT
aataaatggtgctgggaaaa

SEQ ID NO: 10491 - DNA, 20 bp, Artificial Sequence
  Description of Artificial Sequence: Synthetic oligonucleotide
  Target: ATXN2; (+) strand; PAM type: NNGRRT; PAM sequence: AAGAAT
aactggatatccatatgcag

SEQ ID NO: 10492 - DNA, 20 bp, Artificial Sequence
  Description of Artificial Sequence: Synthetic oligonucleotide
  Target: ATXN2; (+) strand; PAM type: NNGRRT; PAM sequence: TTGAGT
ttactctgggcaaagatttc

SEQ ID NO: 10493 - DNA, 20 bp, Artificial Sequence
  Description of Artificial Sequence: Synthetic oligonucleotide
  Target: ATXN2; (+) strand; PAM type: NNGRRT; PAM sequence: TGGGAT
ccaaagcaaagatggacaaa

SEQ ID NO: 10494 - DNA, 20 bp, Artificial Sequence
  Description of Artificial Sequence: Synthetic oligonucleotide
  Target: ATXN2; (+) strand; PAM type: NNGRRT; PAM sequence: CAGAAT
caaagtgaagagacagccca

SEQ ID NO: 10495 - DNA, 20 bp, Artificial Sequence
  Description of Artificial Sequence: Synthetic oligonucleotide
  Target: ATXN2; (+) strand; PAM type: NNGRRT; PAM sequence: AGGGAT
tgcaaactactcatctgaca

SEQ ID NO: 10496 - DNA, 20 bp, Artificial Sequence
  Description of Artificial Sequence: Synthetic oligonucleotide
  Target: ATXN2; (+) strand; PAM type: NNGRRT; PAM sequence: CAGAAT
tctgacaagggatcaataac

SEQ ID NO: 10497 - DNA, 20 bp, Artificial Sequence
  Description of Artificial Sequence: Synthetic oligonucleotide
  Target: ATXN2; (+) strand; PAM type: NNGRRT; PAM sequence: CTGAAT
attaaaaatgggcaaaagat

SEQ ID NO: 10498 - DNA, 20 bp, Artificial Sequence
  Description of Artificial Sequence: Synthetic oligonucleotide
  Target: ATXN2; (+) strand; PAM type: NNGRRT; PAM sequence: AGGAGT
caggtaaatcacctgaggtt

SEQ ID NO: 10499 - DNA, 20 bp, Artificial Sequence
  Description of Artificial Sequence: Synthetic oligonucleotide
  Target: ATXN2; (+) strand; PAM type: NNGRRT; PAM sequence: GAGAAT
gacatggtggcaggaggcag

SEQ ID NO: 10500 - DNA, 20 bp, Artificial Sequence
  Description of Artificial Sequence: Synthetic oligonucleotide
  Target: ATXN2; (+) strand; PAM type: NNGRRT; PAM sequence: TTGAAT
gcaggaggcaggagaattgc

SEQ ID NO: 10501 - DNA, 20 bp, Artificial Sequence
  Description of Artificial Sequence: Synthetic oligonucleotide
  Target: ATXN2; (+) strand; PAM type: NNGRRT; PAM sequence: GAGGAT
attttgggaagccaaggtgg

SEQ ID NO: 10502 - DNA, 20 bp, Artificial Sequence
  Description of Artificial Sequence: Synthetic oligonucleotide
  Target: ATXN2; (+) strand; PAM type: NNGRRT; PAM sequence: AGGAGT
tgggaggattgcttgagccc

SEQ ID NO: 10503 - DNA, 20 bp, Artificial Sequence
  Description of Artificial Sequence: Synthetic oligonucleotide
  Target: ATXN2; (+) strand; PAM type: NNGRRT; PAM sequence: ATGAAT
gcaagacctcatcgttattt

SEQ ID NO: 10504 - DNA, 20 bp, Artificial Sequence
  Description of Artificial Sequence: Synthetic oligonucleotide
  Target: ATXN2; (+) strand; PAM type: NNGRRT; PAM sequence: GTGGAT
taacaaatgctggtaacgat

SEQ ID NO: 10505 - DNA, 20 bp, Artificial Sequence
  Description of Artificial Sequence: Synthetic oligonucleotide
  Target: ATXN2; (+) strand; PAM type: NNGRRT; PAM sequence: AGGAAT
aaaggaaatcagtttattga

SEQ ID NO: 10506 - DNA, 20 bp, Artificial Sequence
  Description of Artificial Sequence: Synthetic oligonucleotide
  Target: ATXN2; (+) strand; PAM type: NNGRRT; PAM sequence: TGGAAT
tatacacaacagccaagatt

SEQ ID NO: 10507 - DNA, 20 bp, Artificial Sequence
  Description of Artificial Sequence: Synthetic oligonucleotide
  Target: ATXN2; (+) strand; PAM type: NNGRRT; PAM sequence: AAGAAT
attaccattcagccataaaa

SEQ ID NO: 10508 - DNA, 20 bp, Artificial Sequence
  Description of Artificial Sequence: Synthetic oligonucleotide
  Target: ATXN2; (+) strand; PAM type: NNGRRT; PAM sequence: CAGAAT
aattgaacacatggagatag

SEQ ID NO: 10509 - DNA, 20 bp, Artificial Sequence
  Description of Artificial Sequence: Synthetic oligonucleotide
  Target: ATXN2; (+) strand; PAM type: NNGRRT; PAM sequence: AAGGGT
aatggttaccagaagttggg

SEQ ID NO: 10510 - DNA, 20 bp, Artificial Sequence
  Description of Artificial Sequence: Synthetic oligonucleotide
  Target: ATXN2; (+) strand; PAM type: NNGRRT; PAM sequence: GTGGGT
gaagggaaatgaggtgatta

SEQ ID NO: 10511 - DNA, 20 bp, Artificial Sequence
  Description of Artificial Sequence: Synthetic oligonucleotide
  Target: ATXN2; (+) strand; PAM type: NNGRRT; PAM sequence: ACGAAT
gcaaagaaaatttagaaaga

SEQ ID NO: 10512 - DNA, 20 bp, Artificial Sequence
  Description of Artificial Sequence: Synthetic oligonucleotide
  Target: ATXN2; (+) strand; PAM type: NNGRRT; PAM sequence: CCGGAT
actttgggaggctgtggcag

SEQ ID NO: 10513 - DNA, 20 bp, Artificial Sequence
  Description of Artificial Sequence: Synthetic oligonucleotide
  Target: ATXN2; (+) strand; PAM type: NNGRRT; PAM sequence: GAGAAT
tagtcaggaggctgaggcag

SEQ ID NO: 10514 - DNA, 20 bp, Artificial Sequence
  Description of Artificial Sequence: Synthetic oligonucleotide
  Target: ATXN2; (+) strand; PAM type: NNGRRT; PAM sequence: GTGAGT
ccctggaggcggaggttgca

SEQ ID NO: 10515 - DNA, 20 bp, Artificial Sequence
  Description of Artificial Sequence: Synthetic oligonucleotide
  Target: ATXN2; (+) strand; PAM type: NNGRRT; PAM sequence: CAGAGT
accgcactccagcctggcga

SEQ ID NO: 10516 - DNA, 20 bp, Artificial Sequence
  Description of Artificial Sequence: Synthetic oligonucleotide
  Target: ATXN2; (+) strand; PAM type: NNGRRT; PAM sequence: AAGAAT
aaaatttaaaaagttaaata

SEQ ID NO: 10517 - DNA, 20 bp, Artificial Sequence
  Description of Artificial Sequence: Synthetic oligonucleotide
  Target: ATXN2; (+) strand; PAM type: NNGRRT; PAM sequence: ATGAAT
tttaaaaagttaaataaaga

SEQ ID NO: 10518 - DNA, 20 bp, Artificial Sequence
  Description of Artificial Sequence: Synthetic oligonucleotide
  Target: ATXN2; (+) strand; PAM type: NNGRRT; PAM sequence: CAGGGT
tctagtatttgacaacaaag

SEQ ID NO: 10519 - DNA, 20 bp, Artificial Sequence
  Description of Artificial Sequence: Synthetic oligonucleotide
  Target: ATXN2; (+) strand; PAM type: NNGRRT; PAM sequence: TAGAAT
cattaatttgttgtactttt

SEQ ID NO: 10520 - DNA, 20 bp, Artificial Sequence
  Description of Artificial Sequence: Synthetic oligonucleotide
  Target: ATXN2; (+) strand; PAM type: NNGRRT; PAM sequence: GGGAGT
gtactttttagaataactga

SEQ ID NO: 10521 - DNA, 20 bp, Artificial Sequence
  Description of Artificial Sequence: Synthetic oligonucleotide
  Target: ATXN2; (+) strand; PAM type: NNGRRT; PAM sequence: ATGAAT
gttcattacacaaagaaatg

SEQ ID NO: 10522 - DNA, 20 bp, Artificial Sequence
  Description of Artificial Sequence: Synthetic oligonucleotide
  Target: ATXN2; (+) strand; PAM type: NNGRRT; PAM sequence: ATGGAT
aatgatgaatgatgatggtg

SEQ ID NO: 10523 - DNA, 20 bp, Artificial Sequence
  Description of Artificial Sequence: Synthetic oligonucleotide
  Target: ATXN2; (+) strand; PAM type: NNGRRT; PAM sequence: ATGAAT
ctaaatatctcacagaccct

SEQ ID NO: 10524 - DNA, 20 bp, Artificial Sequence
  Description of Artificial Sequence: Synthetic oligonucleotide
  Target: ATXN2; (+) strand; PAM type: NNGRRT; PAM sequence: AGGAAT
ctctacaaaagaaagaaaac

SEQ ID NO: 10525 - DNA, 20 bp, Artificial Sequence
  Description of Artificial Sequence: Synthetic oligonucleotide
  Target: ATXN2; (+) strand; PAM type: NNGRRT; PAM sequence: AAGAGT
ctgcattaccaatatagcta

SEQ ID NO: 10526 - DNA, 20 bp, Artificial Sequence
  Description of Artificial Sequence: Synthetic oligonucleotide
  Target: ATXN2; (+) strand; PAM type: NNGRRT; PAM sequence: CAGGGT
tggctaagggcaaatgttga

SEQ ID NO: 10527 - DNA, 20 bp, Artificial Sequence
  Description of Artificial Sequence: Synthetic oligonucleotide
  Target: ATXN2; (+) strand; PAM type: NNGRRT; PAM sequence: CGGAGT
atatatattgccaaggactt

SEQ ID NO: 10528 - DNA, 20 bp, Artificial Sequence
  Description of Artificial Sequence: Synthetic oligonucleotide
  Target: ATXN2; (+) strand; PAM type: NNGRRT; PAM sequence: AAGAGT
cttcggagtttaattatcat

SEQ ID NO: 10529 - DNA, 20 bp, Artificial Sequence
  Description of Artificial Sequence: Synthetic oligonucleotide
  Target: ATXN2; (+) strand; PAM type: NNGRRT; PAM sequence: TTGAGT
tttaattatcataagagttc

SEQ ID NO: 10530 - DNA, 20 bp, Artificial Sequence
  Description of Artificial Sequence: Synthetic oligonucleotide
  Target: ATXN2; (+) strand; PAM type: NNGRRT; PAM sequence: ATGGGT
acacatctgcatttcttact

SEQ ID NO: 10531 - DNA, 20 bp, Artificial Sequence
  Description of Artificial Sequence: Synthetic oligonucleotide
  Target: ATXN2; (+) strand; PAM type: NNGRRT; PAM sequence: CAGGGT
cttttttttttttttccaaa

SEQ ID NO: 10532 - DNA, 20 bp, Artificial Sequence
  Description of Artificial Sequence: Synthetic oligonucleotide
  Target: ATXN2; (+) strand; PAM type: NNGRRT; PAM sequence: CTGAGT
gattctcccacctcagcctc

SEQ ID NO: 10533 - DNA, 20 bp, Artificial Sequence
  Description of Artificial Sequence: Synthetic oligonucleotide
  Target: ATXN2; (+) strand; PAM type: NNGRRT; PAM sequence: CAGGGT
tgtgtatttttttgtagaaa

SEQ ID NO: 10534 - DNA, 20 bp, Artificial Sequence
  Description of Artificial Sequence: Synthetic oligonucleotide
  Target: ATXN2; (+) strand; PAM type: NNGRRT; PAM sequence: CTGAAT
gcaagtccactagttggtat

SEQ ID NO: 10535 - DNA, 20 bp, Artificial Sequence
  Description of Artificial Sequence: Synthetic oligonucleotide
  Target: ATXN2; (+) strand; PAM type: NNGRRT; PAM sequence: TGGAAT
aatatagcactctgctgtat

SEQ ID NO: 10536 - DNA, 20 bp, Artificial Sequence
  Description of Artificial Sequence: Synthetic oligonucleotide
  Target: ATXN2; (+) strand; PAM type: NNGRRT; PAM sequence: TGGAAT
taatgctatattgctatata

SEQ ID NO: 10537 - DNA, 20 bp, Artificial Sequence
  Description of Artificial Sequence: Synthetic oligonucleotide
  Target: ATXN2; (+) strand; PAM type: NNGRRT; PAM sequence: CGGAGT
ttttttcttttttttggaga

SEQ ID NO: 10538 - DNA, 20 bp, Artificial Sequence
  Description of Artificial Sequence: Synthetic oligonucleotide
  Target: ATXN2; (+) strand; PAM type: NNGRRT; PAM sequence: TGGAGT
ttcgctcttattgcccaggc

SEQ ID NO: 10539 - DNA, 20 bp, Artificial Sequence
  Description of Artificial Sequence: Synthetic oligonucleotide
  Target: ATXN2; (+) strand; PAM type: NNGRRT; PAM sequence: CCGGGT
ctcatggcaaccaccgcctc

SEQ ID NO: 10540 - DNA, 20 bp, Artificial Sequence
  Description of Artificial Sequence: Synthetic oligonucleotide
  Target: ATXN2; (+) strand; PAM type: NNGRRT; PAM sequence: GCGAGT
atttctcctgcctcagtctt

SEQ ID NO: 10541 - DNA, 20 bp, Artificial Sequence
  Description of Artificial Sequence: Synthetic oligonucleotide
  Target: ATXN2; (+) strand; PAM type: NNGRRT; PAM sequence: TGGGAT
gcctcagtcttgcgagtagc

SEQ ID NO: 10542 - DNA, 20 bp, Artificial Sequence
  Description of Artificial Sequence: Synthetic oligonucleotide
  Target: ATXN2; (+) strand; PAM type: NNGRRT; PAM sequence: TGGGGT
ttttgtatttttagtagaga

SEQ ID NO: 10543 - DNA, 20 bp, Artificial Sequence
  Description of Artificial Sequence: Synthetic oligonucleotide
  Target: ATXN2; (+) strand; PAM type: NNGRRT; PAM sequence: TGGGAT
acctcagcctcccaaagtgc

SEQ ID NO: 10544 - DNA, 20 bp, Artificial Sequence
  Description of Artificial Sequence: Synthetic oligonucleotide
  Target: ATXN2; (+) strand; PAM type: NNGRRT; PAM sequence: AGGAGT
tcccaaagtgctgggattac

SEQ ID NO: 10545 - DNA, 20 bp, Artificial Sequence
  Description of Artificial Sequence: Synthetic oligonucleotide
  Target: ATXN2; (+) strand; PAM type: NNGRRT; PAM sequence: CTGGGT
tgtacatactctgtacaata

SEQ ID NO: 10546 - DNA, 20 bp, Artificial Sequence
  Description of Artificial Sequence: Synthetic oligonucleotide
  Target: ATXN2; (+) strand; PAM type: NNGRRT; PAM sequence: AAGAAT
gtcatctatattttgctagt

SEQ ID NO: 10547 - DNA, 20 bp, Artificial Sequence
  Description of Artificial Sequence: Synthetic oligonucleotide
  Target: ATXN2; (+) strand; PAM type: NNGRRT; PAM sequence: TTGAAT
ctagtaagaatgaacatgta

SEQ ID NO: 10548 - DNA, 20 bp, Artificial Sequence
  Description of Artificial Sequence: Synthetic oligonucleotide
  Target: ATXN2; (+) strand; PAM type: NNGRRT; PAM sequence: ATGAAT
atgtcatgaagttagctcta

SEQ ID NO: 10549 - DNA, 20 bp, Artificial Sequence
  Description of Artificial Sequence: Synthetic oligonucleotide
  Target: ATXN2; (+) strand; PAM type: NNGRRT; PAM sequence: GTGAGT
ccctcttacttactagccat

SEQ ID NO: 10550 - DNA, 20 bp, Artificial Sequence
  Description of Artificial Sequence: Synthetic oligonucleotide
  Target: ATXN2; (+) strand; PAM type: NNGRRT; PAM sequence: GAGAAT
aaatacgcaataaaacataa

SEQ ID NO: 10551 - DNA, 20 bp, Artificial Sequence
  Description of Artificial Sequence: Synthetic oligonucleotide
  Target: ATXN2; (+) strand; PAM type: NNGRRT; PAM sequence: TCGGAT
tgtcgcccactgatgcaatc

SEQ ID NO: 10552 - DNA, 20 bp, Artificial Sequence
  Description of Artificial Sequence: Synthetic oligonucleotide
  Target: ATXN2; (+) strand; PAM type: NNGRRT; PAM sequence: CTGGAT
atcactgcaacctccacctc

SEQ ID NO: 10553 - DNA, 20 bp, Artificial Sequence
  Description of Artificial Sequence: Synthetic oligonucleotide
  Target: ATXN2; (+) strand; PAM type: NNGRRT; PAM sequence: CTGAGT
gattctcctgcctcagcctc

SEQ ID NO: 10554 - DNA, 20 bp, Artificial Sequence
  Description of Artificial Sequence: Synthetic oligonucleotide
  Target: ATXN2; (+) strand; PAM type: NNGRRT; PAM sequence: TGGGAT
gcctcagcctcctgagtagc

SEQ ID NO: 10555 - DNA, 20 bp, Artificial Sequence
  Description of Artificial Sequence: Synthetic oligonucleotide
  Target: ATXN2; (+) strand; PAM type: NNGRRT; PAM sequence: TAGGGT
ttatatatttttaataaaga

SEQ ID NO: 10556 - DNA, 20 bp, Artificial Sequence
  Description of Artificial Sequence: Synthetic oligonucleotide
  Target: ATXN2; (+) strand; PAM type: NNGRRT; PAM sequence: TAGGAT
gcctcagcctcccaaagtgt

SEQ ID NO: 10557 - DNA, 20 bp, Artificial Sequence
  Description of Artificial Sequence: Synthetic oligonucleotide
  Target: ATXN2; (+) strand; PAM type: NNGRRT; PAM sequence: ATGGAT
tttcttcctggtatgcccct

SEQ ID NO: 10558 - DNA, 20 bp, Artificial Sequence
  Description of Artificial Sequence: Synthetic oligonucleotide
  Target: ATXN2; (+) strand; PAM type: NNGRRT; PAM sequence: AGGAGT
tggtatgcccctatggatca

SEQ ID NO: 10559 - DNA, 20 bp, Artificial Sequence
  Description of Artificial Sequence: Synthetic oligonucleotide
  Target: ATXN2; (+) strand; PAM type: NNGRRT; PAM sequence: TGGAAT
ctttttatgttgctccttct

SEQ ID NO: 10560 - DNA, 20 bp, Artificial Sequence
  Description of Artificial Sequence: Synthetic oligonucleotide
  Target: ATXN2; (+) strand; PAM type: NNGRRT; PAM sequence: AAGGAT
agacagtatggtactgccat

SEQ ID NO: 10561 - DNA, 20 bp, Artificial Sequence
  Description of Artificial Sequence: Synthetic oligonucleotide
  Target: ATXN2; (+) strand; PAM type: NNGRRT; PAM sequence: CAGAGT
agattcagtggaggacaatt

SEQ ID NO: 10562 - DNA, 20 bp, Artificial Sequence
  Description of Artificial Sequence: Synthetic oligonucleotide
  Target: ATXN2; (+) strand; PAM type: NNGRRT; PAM sequence: AAGAAT
gaagataattcaatggagga

SEQ ID NO: 10563 - DNA, 20 bp, Artificial Sequence
  Description of Artificial Sequence: Synthetic oligonucleotide
  Target: ATXN2; (+) strand; PAM type: NNGRRT; PAM sequence: TGGAGT
gaatagtcttttttttgaga

SEQ ID NO: 10564 - DNA, 20 bp, Artificial Sequence
  Description of Artificial Sequence: Synthetic oligonucleotide
  Target: ATXN2; (+) strand; PAM type: NNGRRT; PAM sequence: TGGAGT
tctcactctgtcgcccacac

SEQ ID NO: 10565 - DNA, 20 bp, Artificial Sequence
  Description of Artificial Sequence: Synthetic oligonucleotide
  Target: ATXN2; (+) strand; PAM type: NNGRRT; PAM sequence: CTGGGT
ctcactgcaacctctacctc

SEQ ID NO: 10566 - DNA, 20 bp, Artificial Sequence
  Description of Artificial Sequence: Synthetic oligonucleotide
  Target: ATXN2; (+) strand; PAM type: NNGRRT; PAM sequence: GCGAAT
cctctacctcctgggttcaa

SEQ ID NO: 10567 - DNA, 20 bp, Artificial Sequence
  Description of Artificial Sequence: Synthetic oligonucleotide
  Target: ATXN2; (+) strand; PAM type: NNGRRT; PAM sequence: TGGGAT
gcttgggactcccaaagtgc

SEQ ID NO: 10568 - DNA, 20 bp, Artificial Sequence
  Description of Artificial Sequence: Synthetic oligonucleotide
  Target: ATXN2; (+) strand; PAM type: NNGRRT; PAM sequence: AAGAAT
gagagccactgtgcctggcc

SEQ ID NO: 10569 - DNA, 20 bp, Artificial Sequence
  Description of Artificial Sequence: Synthetic oligonucleotide
  Target: ATXN2; (+) strand; PAM type: NNGRRT; PAM sequence: AAGAAT
caactaatacctacatacgg

SEQ ID NO: 10570 - DNA, 20 bp, Artificial Sequence
  Description of Artificial Sequence: Synthetic oligonucleotide
  Target: ATXN2; (+) strand; PAM type: NNGRRT; PAM sequence: ATGAAT
taatacctacatacggaaga

SEQ ID NO: 10571 - DNA, 20 bp, Artificial Sequence
  Description of Artificial Sequence: Synthetic oligonucleotide
  Target: ATXN2; (+) strand; PAM type: NNGRRT; PAM sequence: AAGAAT
agaaataaaaaattaatata

SEQ ID NO: 10572 - DNA, 20 bp, Artificial Sequence
  Description of Artificial Sequence: Synthetic oligonucleotide
  Target: ATXN2; (+) strand; PAM type: NNGRRT; PAM sequence: ATGAAT
ataaaaaattaatataaaga

SEQ ID NO: 10573 - DNA, 20 bp, Artificial Sequence
  Description of Artificial Sequence: Synthetic oligonucleotide
  Target: ATXN2; (+) strand; PAM type: NNGRRT; PAM sequence: AGGGGT
tcataatattgttataggaa

SEQ ID NO: 10574 - DNA, 20 bp, Artificial Sequence
  Description of Artificial Sequence: Synthetic oligonucleotide
  Target: ATXN2; (+) strand; PAM type: NNGRRT; PAM sequence: TTGGAT
cagacccccagagagggctc

SEQ ID NO: 10575 - DNA, 20 bp, Artificial Sequence
  Description of Artificial Sequence: Synthetic oligonucleotide
  Target: ATXN2; (+) strand; PAM type: NNGRRT; PAM sequence: AAGAAT
ctcttggatcttgcacaaga

SEQ ID NO: 10576 - DNA, 20 bp, Artificial Sequence
  Description of Artificial Sequence: Synthetic oligonucleotide
  Target: ATXN2; (+) strand; PAM type: NNGRRT; PAM sequence: GCGAGT
tgcacaagaaagaattcagg

SEQ ID NO: 10577 - DNA, 20 bp, Artificial Sequence
  Description of Artificial Sequence: Synthetic oligonucleotide
  Target: ATXN2; (+) strand; PAM type: NNGRRT; PAM sequence: TTGAGT
ggctgaggtgggcgtgtcac

SEQ ID NO: 10578 - DNA, 20 bp, Artificial Sequence
  Description of Artificial Sequence: Synthetic oligonucleotide
  Target: ATXN2; (+) strand; PAM type: NNGRRT; PAM sequence: ATGGAT
gaaaaaaaaagttgctccaa

SEQ ID NO: 10579 - DNA, 20 bp, Artificial Sequence
  Description of Artificial Sequence: Synthetic oligonucleotide
  Target: ATXN2; (+) strand; PAM type: NNGRRT; PAM sequence: AAGAGT
taattcttaaaaaaacccag

SEQ ID NO: 10580 - DNA, 20 bp, Artificial Sequence
  Description of Artificial Sequence: Synthetic oligonucleotide
  Target: ATXN2; (+) strand; PAM type: NNGRRT; PAM sequence: AGGGAT
ttaaaaatttttgtgcttca

SEQ ID NO: 10581 - DNA, 20 bp, Artificial Sequence
  Description of Artificial Sequence: Synthetic oligonucleotide
  Target: ATXN2; (+) strand; PAM type: NNGRRT; PAM sequence: ATGGGT
aagacaactcaatttttaaa

SEQ ID NO: 10582 - DNA, 20 bp, Artificial Sequence
  Description of Artificial Sequence: Synthetic oligonucleotide
  Target: ATXN2; (+) strand; PAM type: NNGRRT; PAM sequence: AAGGAT
ggttaacacttcacacccac

SEQ ID NO: 10583 - DNA, 20 bp, Artificial Sequence
  Description of Artificial Sequence: Synthetic oligonucleotide
  Target: ATXN2; (+) strand; PAM type: NNGRRT; PAM sequence: AAGGAT
acaagacaataagtgttagc

SEQ ID NO: 10584 - DNA, 20 bp, Artificial Sequence
  Description of Artificial Sequence: Synthetic oligonucleotide
  Target: ATXN2; (+) strand; PAM type: NNGRRT; PAM sequence: GGGAAT
aaccctcataccctgctggt

SEQ ID NO: 10585 - DNA, 20 bp, Artificial Sequence
  Description of Artificial Sequence: Synthetic oligonucleotide
  Target: ATXN2; (+) strand; PAM type: NNGRRT; PAM sequence: CAGAAT
atgtttgtggcagtgttatt

SEQ ID NO: 10586 - DNA, 20 bp, Artificial Sequence
  Description of Artificial Sequence: Synthetic oligonucleotide
  Target: ATXN2; (+) strand; PAM type: NNGRRT; PAM sequence: ATGGAT
aaatagctacaaactgatta

SEQ ID NO: 10587 - DNA, 20 bp, Artificial Sequence
  Description of Artificial Sequence: Synthetic oligonucleotide
  Target: ATXN2; (+) strand; PAM type: NNGRRT; PAM sequence: AGGAAT
atgtggtattatccacatca

SEQ ID NO: 10588 - DNA, 20 bp, Artificial Sequence
  Description of Artificial Sequence: Synthetic oligonucleotide
  Target: ATXN2; (+) strand; PAM type: NNGRRT; PAM sequence: ATGGAT
gtactgaaacatgctccaac

SEQ ID NO: 10589 - DNA, 20 bp, Artificial Sequence
  Description of Artificial Sequence: Synthetic oligonucleotide
  Target: ATXN2; (+) strand; PAM type: NNGRRT; PAM sequence: CTGAGT
tgaacttttataacactact

SEQ ID NO: 10590 - DNA, 20 bp, Artificial Sequence
  Description of Artificial Sequence: Synthetic oligonucleotide
  Target: ATXN2; (+) strand; PAM type: NNGRRT; PAM sequence: TGGAAT
attattccatttgtatgaaa

SEQ ID NO: 10591 - DNA, 20 bp, Artificial Sequence
  Description of Artificial Sequence: Synthetic oligonucleotide
  Target: ATXN2; (+) strand; PAM type: NNGRRT; PAM sequence: TAGGGT
aaagtagattaacggttgct

SEQ ID NO: 10592 - DNA, 20 bp, Artificial Sequence
  Description of Artificial Sequence: Synthetic oligonucleotide
  Target: ATXN2; (+) strand; PAM type: NNGRRT; PAM sequence: GGGAGT
attaacggttgcttagggtt

SEQ ID NO: 10593 - DNA, 20 bp, Artificial Sequence
  Description of Artificial Sequence: Synthetic oligonucleotide
  Target: ATXN2; (+) strand; PAM type: NNGRRT; PAM sequence: CGGGGT
aacgactgctaaactgggca

SEQ ID NO: 10594 - DNA, 20 bp, Artificial Sequence
  Description of Artificial Sequence: Synthetic oligonucleotide
  Target: ATXN2; (+) strand; PAM type: NNGRRT; PAM sequence: GGGGGT
ctgggcacggggtttctttt

SEQ ID NO: 10595 - DNA, 20 bp, Artificial Sequence
  Description of Artificial Sequence: Synthetic oligonucleotide
  Target: ATXN2; (+) strand; PAM type: NNGRRT; PAM sequence: AAGAGT
cggggtttcttttgggggtg

SEQ ID NO: 10596 - DNA, 20 bp, Artificial Sequence
  Description of Artificial Sequence: Synthetic oligonucleotide
  Target: ATXN2; (+) strand; PAM type: NNGRRT; PAM sequence: GTGAAT
gaagacggttgtacaacatt

SEQ ID NO: 10597 - DNA, 20 bp, Artificial Sequence
  Description of Artificial Sequence: Synthetic oligonucleotide
  Target: ATXN2; (+) strand; PAM type: NNGRRT; PAM sequence: CTGAAT
aagtgtagtataagaggaga

SEQ ID NO: 10598 - DNA, 20 bp, Artificial Sequence
  Description of Artificial Sequence: Synthetic oligonucleotide
  Target: ATXN2; (+) strand; PAM type: NNGRRT; PAM sequence: AAGAAT
aggaaaaaattcaaatgggg

SEQ ID NO: 10599 - DNA, 20 bp, Artificial Sequence
  Description of Artificial Sequence: Synthetic oligonucleotide
  Target: ATXN2; (+) strand; PAM type: NNGRRT; PAM sequence: CGGGGT
tcgtatttttttggtggaga

SEQ ID NO: 10600 - DNA, 20 bp, Artificial Sequence
  Description of Artificial Sequence: Synthetic oligonucleotide
  Target: ATXN2; (+) strand; PAM type: NNGRRT; PAM sequence: GCGAGT
ctggtctccagctcctaacc

SEQ ID NO: 10601 - DNA, 20 bp, Artificial Sequence
  Description of Artificial Sequence: Synthetic oligonucleotide
  Target: ATXN2; (+) strand; PAM type: NNGRRT; PAM sequence: CGGGAT
gcctcggcctcccgaggtgc

SEQ ID NO: 10602 - DNA, 20 bp, Artificial Sequence
  Description of Artificial Sequence: Synthetic oligonucleotide
  Target: ATXN2; (+) strand; PAM type: NNGRRT; PAM sequence: CGGAGT
cgaggtgccgggattgcaga

SEQ ID NO: 10603 - DNA, 20 bp, Artificial Sequence
  Description of Artificial Sequence: Synthetic oligonucleotide
  Target: ATXN2; (+) strand; PAM type: NNGRRT; PAM sequence: TGGAGT
gtgctcaatggtgcccaggc

SEQ ID NO: 10604 - DNA, 20 bp, Artificial Sequence
  Description of Artificial Sequence: Synthetic oligonucleotide
  Target: ATXN2; (+) strand; PAM type: NNGRRT; PAM sequence: TGGGAT
ctgcctggccacccatcgtc

SEQ ID NO: 10605 - DNA, 20 bp, Artificial Sequence
  Description of Artificial Sequence: Synthetic oligonucleotide
  Target: ATXN2; (+) strand; PAM type: NNGRRT; PAM sequence: TGGGAT
ctctgccccgctgccccgtc

SEQ ID NO: 10606 - DNA, 20 bp, Artificial Sequence
  Description of Artificial Sequence: Synthetic oligonucleotide
  Target: ATXN2; (+) strand; PAM type: NNGRRT; PAM sequence: GGGGGT
aacccgtccgggagggaggt

SEQ ID NO: 10607 - DNA, 20 bp, Artificial Sequence
  Description of Artificial Sequence: Synthetic oligonucleotide
  Target: ATXN2; (+) strand; PAM type: NNGRRT; PAM sequence: GGGGGT
ccccatccgggagggaggtg

SEQ ID NO: 10608 - DNA, 20 bp, Artificial Sequence
  Description of Artificial Sequence: Synthetic oligonucleotide
  Target: ATXN2; (+) strand; PAM type: NNGRRT; PAM sequence: TGGAAT
tgatgacaatggcggctttg

SEQ ID NO: 10609 - DNA, 20 bp, Artificial Sequence
  Description of Artificial Sequence: Synthetic oligonucleotide
  Target: ATXN2; (+) strand; PAM type: NNGRRT; PAM sequence: TCGGAT
gtggggaaaagattgagaaa

SEQ ID NO: 10610 - DNA, 20 bp, Artificial Sequence
  Description of Artificial Sequence: Synthetic oligonucleotide
  Target: ATXN2; (+) strand; PAM type: NNGRRT; PAM sequence: TGGGAT
taagaaagattcttctgcct

SEQ ID NO: 10611 - DNA, 20 bp, Artificial Sequence
  Description of Artificial Sequence: Synthetic oligonucleotide
  Target: ATXN2; (+) strand; PAM type: NNGRRT; PAM sequence: CAGGGT
gaaacatgtgctgtgtcact

SEQ ID NO: 10612 - DNA, 20 bp, Artificial Sequence
  Description of Artificial Sequence: Synthetic oligonucleotide
  Target: ATXN2; (+) strand; PAM type: NNGRRT; PAM sequence: ATGGAT
gctgtgtcactcagggttaa

SEQ ID NO: 10613 - DNA, 20 bp, Artificial Sequence
  Description of Artificial Sequence: Synthetic oligonucleotide
  Target: ATXN2; (+) strand; PAM type: NNGRRT; PAM sequence: AAGAGT
ttgaaggcagcatgctcgtt

SEQ ID NO: 10614 - DNA, 20 bp, Artificial Sequence
  Description of Artificial Sequence: Synthetic oligonucleotide
  Target: ATXN2; (+) strand; PAM type: NNGRRT; PAM sequence: CAGGGT
acaaacactgcggaaggccg

SEQ ID NO: 10615 - DNA, 20 bp, Artificial Sequence
  Description of Artificial Sequence: Synthetic oligonucleotide
  Target: ATXN2; (+) strand; PAM type: NNGRRT; PAM sequence: AAGAAT
cccctctgcgagaaacaccc

SEQ ID NO: 10616 - DNA, 20 bp, Artificial Sequence
  Description of Artificial Sequence: Synthetic oligonucleotide
  Target: ATXN2; (+) strand; PAM type: NNGRRT; PAM sequence: AGGAGT
aggaggggcagatacataag

SEQ ID NO: 10617 - DNA, 20 bp, Artificial Sequence
  Description of Artificial Sequence: Synthetic oligonucleotide
  Target: ATXN2; (+) strand; PAM type: NNGRRT; PAM sequence: TAGAAT
taagaggagtttaactgtgt

SEQ ID NO: 10618 - DNA, 20 bp, Artificial Sequence
  Description of Artificial Sequence: Synthetic oligonucleotide
  Target: ATXN2; (+) strand; PAM type: NNGRRT; PAM sequence: CTGGGT
agaatgctttatttactaag

SEQ ID NO: 10619 - DNA, 20 bp, Artificial Sequence
  Description of Artificial Sequence: Synthetic oligonucleotide
  Target: ATXN2; (+) strand; PAM type: NNGRRT; PAM sequence: CAGGAT
tgcagtcttgctctgtcgcc

SEQ ID NO: 10620 - DNA, 20 bp, Artificial Sequence
  Description of Artificial Sequence: Synthetic oligonucleotide
  Target: ATXN2; (+) strand; PAM type: NNGRRT; PAM sequence: TGGAGT
tcttgctctgtcgcccagga

SEQ ID NO: 10621 - DNA, 20 bp, Artificial Sequence
  Description of Artificial Sequence: Synthetic oligonucleotide
  Target: ATXN2; (+) strand; PAM type: NNGRRT; PAM sequence: TGGAGT
ctctgtcgcccaggatggag

SEQ ID NO: 10622 - DNA, 20 bp, Artificial Sequence
  Description of Artificial Sequence: Synthetic oligonucleotide
  Target: ATXN2; (+) strand; PAM type: NNGRRT; PAM sequence: CTGGGT
ctcactgcaacctctgtctc

SEQ ID NO: 10623 - DNA, 20 bp, Artificial Sequence
  Description of Artificial Sequence: Synthetic oligonucleotide
  Target: ATXN2; (+) strand; PAM type: NNGRRT; PAM sequence: TGGGAT
gcctcagcctgccaagtagc

SEQ ID NO: 10624 - DNA, 20 bp, Artificial Sequence
  Description of Artificial Sequence: Synthetic oligonucleotide
  Target: ATXN2; (+) strand; PAM type: NNGRRT; PAM sequence: CAGGGT
ttttctatttttggtcaaga

SEQ ID NO: 10625 - DNA, 20 bp, Artificial Sequence
  Description of Artificial Sequence: Synthetic oligonucleotide
  Target: ATXN2; (+) strand; PAM type: NNGRRT; PAM sequence: TAGGAT
acctcggcctcccaaagtgc

SEQ ID NO: 10626 - DNA, 20 bp, Artificial Sequence
  Description of Artificial Sequence: Synthetic oligonucleotide
  Target: ATXN2; (+) strand; PAM type: NNGRRT; PAM sequence: CTGAAT
aactgttaatagcattaaag

SEQ ID NO: 10627 - DNA, 20 bp, Artificial Sequence
  Description of Artificial Sequence: Synthetic oligonucleotide
  Target: ATXN2; (+) strand; PAM type: NNGRRT; PAM sequence: TTGAAT
atgaaataataagtagtatt

SEQ ID NO: 10628 - DNA, 20 bp, Artificial Sequence
  Description of Artificial Sequence: Synthetic oligonucleotide
  Target: ATXN2; (+) strand; PAM type: NNGRRT; PAM sequence: AAGAAT
ttgaatgttaccaataagtc

SEQ ID NO: 10629 - DNA, 20 bp, Artificial Sequence
  Description of Artificial Sequence: Synthetic oligonucleotide
  Target: ATXN2; (+) strand; PAM type: NNGRRT; PAM sequence: AAGAAT
ctatagtaaataacatgcaa

SEQ ID NO: 10630 - DNA, 20 bp, Artificial Sequence
  Description of Artificial Sequence: Synthetic oligonucleotide
  Target: ATXN2; (+) strand; PAM type: NNGRRT; PAM sequence: CAGAGT
ctccaactacctcagaacac

SEQ ID NO: 10631 - DNA, 20 bp, Artificial Sequence
  Description of Artificial Sequence: Synthetic oligonucleotide
  Target: ATXN2; (+) strand; PAM type: NNGRRT; PAM sequence: AAGGAT
gattttagttatcccactta

SEQ ID NO: 10632 - DNA, 20 bp, Artificial Sequence
  Description of Artificial Sequence: Synthetic oligonucleotide
  Target: ATXN2; (+) strand; PAM type: NNGRRT; PAM sequence: TAGAAT
tagtatgagatgatagaaat

SEQ ID NO: 10633 - DNA, 20 bp, Artificial Sequence
  Description of Artificial Sequence: Synthetic oligonucleotide
  Target: ATXN2; (+) strand; PAM type: NNGRRT; PAM sequence: TTGGAT
aataatttcaaatattaaat

SEQ ID NO: 10634 - DNA, 20 bp, Artificial Sequence
  Description of Artificial Sequence: Synthetic oligonucleotide
  Target: ATXN2; (+) strand; PAM type: NNGRRT; PAM sequence: TGGAAT
caaatattaaatttggattt

SEQ ID NO: 10635 - DNA, 20 bp, Artificial Sequence
  Description of Artificial Sequence: Synthetic oligonucleotide
  Target: ATXN2; (+) strand; PAM type: NNGRRT; PAM sequence: TTGGGT
agaagctaggtgatgtttca

SEQ ID NO: 10636 - DNA, 20 bp, Artificial Sequence
  Description of Artificial Sequence: Synthetic oligonucleotide
  Target: ATXN2; (+) strand; PAM type: NNGRRT; PAM sequence: GAGAGT
attttctttattccctgcag

SEQ ID NO: 10637 - DNA, 20 bp, Artificial Sequence
  Description of Artificial Sequence: Synthetic oligonucleotide
  Target: ATXN2; (+) strand; PAM type: NNGRRT; PAM sequence: TGGAAT
ctgcctctgatcttgaagcc

SEQ ID NO: 10638 - DNA, 20 bp, Artificial Sequence
  Description of Artificial Sequence: Synthetic oligonucleotide
  Target: ATXN2; (+) strand; PAM type: NNGRRT; PAM sequence: AGGAAT
tatgtaggtatttgacaccc

SEQ ID NO: 10639 - DNA, 20 bp, Artificial Sequence
  Description of Artificial Sequence: Synthetic oligonucleotide
  Target: ATXN2; (+) strand; PAM type: NNGRRT; PAM sequence: ATGAAT
tgcactaaaaatacttgtct

SEQ ID NO: 10640 - DNA, 20 bp, Artificial Sequence
  Description of Artificial Sequence: Synthetic oligonucleotide
  Target: ATXN2; (+) strand; PAM type: NNGRRT; PAM sequence: TAGAAT
gtctatgaataaaaataacc

SEQ ID NO: 10641 - DNA, 20 bp, Artificial Sequence
  Description of Artificial Sequence: Synthetic oligonucleotide
  Target: ATXN2; (+) strand; PAM type: NNGRRT; PAM sequence: ATGGAT
tcaatttcacagctgagatt

SEQ ID NO: 10642 - DNA, 20 bp, Artificial Sequence
  Description of Artificial Sequence: Synthetic oligonucleotide
  Target: ATXN2; (+) strand; PAM type: NNGRRT; PAM sequence: AGGGGT
tgttacataccctcactaga

SEQ ID NO: 10643 - DNA, 20 bp, Artificial Sequence
  Description of Artificial Sequence: Synthetic oligonucleotide
  Target: ATXN2; (+) strand; PAM type: NNGRRT; PAM sequence: TGGAAT
gcaggcgtaggagatgcagc

SEQ ID NO: 10644 - DNA, 20 bp, Artificial Sequence
  Description of Artificial Sequence: Synthetic oligonucleotide
  Target: ATXN2; (+) strand; PAM type: NNGRRT; PAM sequence: TGGAAT
ggcatggcaacagcttcagt

SEQ ID NO: 10645 - DNA, 20 bp, Artificial Sequence
  Description of Artificial Sequence: Synthetic oligonucleotide
  Target: ATXN2; (+) strand; PAM type: NNGRRT; PAM sequence: GGGGGT
gaagcaagaactggcccact

SEQ ID NO: 10646 - DNA, 20 bp, Artificial Sequence
  Description of Artificial Sequence: Synthetic oligonucleotide
  Target: ATXN2; (+) strand; PAM type: NNGRRT; PAM sequence: CTGGGT
tactgttctgtctgggagac

SEQ ID NO: 10647 - DNA, 20 bp, Artificial Sequence
  Description of Artificial Sequence: Synthetic oligonucleotide
  Target: ATXN2; (+) strand; PAM type: NNGRRT; PAM sequence: ATGAGT
tgtctgggagacctgggtct

SEQ ID NO: 10648 - DNA, 20 bp, Artificial Sequence
  Description of Artificial Sequence: Synthetic oligonucleotide
  Target: ATXN2; (+) strand; PAM type: NNGRRT; PAM sequence: GGGGAT
acctgggtctatgagtttta

SEQ ID NO: 10649 - DNA, 20 bp, Artificial Sequence
  Description of Artificial Sequence: Synthetic oligonucleotide
  Target: ATXN2; (+) strand; PAM type: NNGRRT; PAM sequence: AGGAAT
gttttcttttccaaaatgtt

SEQ ID NO: 10650 - DNA, 20 bp, Artificial Sequence
  Description of Artificial Sequence: Synthetic oligonucleotide
  Target: ATXN2; (+) strand; PAM type: NNGRRT; PAM sequence: TGGAGT
gattctcctgcctcagcctc

SEQ ID NO: 10651 - DNA, 20 bp, Artificial Sequence
  Description of Artificial Sequence: Synthetic oligonucleotide
  Target: ATXN2; (+) strand; PAM type: NNGRRT; PAM sequence: TGGGAT
gcctcagcctctggagtagc

SEQ ID NO: 10652 - DNA, 20 bp, Artificial Sequence
  Description of Artificial Sequence: Synthetic oligonucleotide
  Target: ATXN2; (+) strand; PAM type: NNGRRT; PAM sequence: CGGGGT
ttttgtatttttagtagaga

SEQ ID NO: 10653 - DNA, 20 bp, Artificial Sequence
  Description of Artificial Sequence: Synthetic oligonucleotide
  Target: ATXN2; (+) strand; PAM type: NNGRRT; PAM sequence: TGGGAT
accttggcctcccaaagtgc

SEQ ID NO: 10654 - DNA, 20 bp, Artificial Sequence
  Description of Artificial Sequence: Synthetic oligonucleotide
  Target: ATXN2; (+) strand; PAM type: NNGRRT; PAM sequence: CAGGGT
aaaggggaagataataaaag

SEQ ID NO: 10655 - DNA, 20 bp, Artificial Sequence
  Description of Artificial Sequence: Synthetic oligonucleotide
  Target: ATXN2; (+) strand; PAM type: NNGRRT; PAM sequence: AAGGGT
tttttttttttttaagtcac

SEQ ID NO: 10656 - DNA, 20 bp, Artificial Sequence
  Description of Artificial Sequence: Synthetic oligonucleotide
  Target: ATXN2; (+) strand; PAM type: NNGRRT; PAM sequence: CTGAGT
agaaaatctataatgctatt

SEQ ID NO: 10657 - DNA, 20 bp, Artificial Sequence
  Description of Artificial Sequence: Synthetic oligonucleotide
  Target: ATXN2; (+) strand; PAM type: NNGRRT; PAM sequence: CAGAAT
aagtaatgtcaaaagattaa

SEQ ID NO: 10658 - DNA, 20 bp, Artificial Sequence
  Description of Artificial Sequence: Synthetic oligonucleotide
  Target: ATXN2; (+) strand; PAM type: NNGRRT; PAM sequence: TGGAGT
ttttttttttttttttgaaa

SEQ ID NO: 10659 - DNA, 20 bp, Artificial Sequence
  Description of Artificial Sequence: Synthetic oligonucleotide
  Target: ATXN2; (+) strand; PAM type: NNGRRT; PAM sequence: TGGAGT
tctcactctatagcccaggc

SEQ ID NO: 10660 - DNA, 20 bp, Artificial Sequence
  Description of Artificial Sequence: Synthetic oligonucleotide
  Target: ATXN2; (+) strand; PAM type: NNGRRT; PAM sequence: CCGGGT
ctcaccgcaacctacacctc

SEQ ID NO: 10661 - DNA, 20 bp, Artificial Sequence
  Description of Artificial Sequence: Synthetic oligonucleotide
  Target: ATXN2; (+) strand; PAM type: NNGRRT; PAM sequence: TGGGAT
gcctcagcctcctgagcagc

SEQ ID NO: 10662 - DNA, 20 bp, Artificial Sequence
  Description of Artificial Sequence: Synthetic oligonucleotide
  Target: ATXN2; (+) strand; PAM type: NNGRRT; PAM sequence: TGGGAT
gcctcagcctccccaagtgc

SEQ ID NO: 10663 - DNA, 20 bp, Artificial Sequence
  Description of Artificial Sequence: Synthetic oligonucleotide
  Target: ATXN2; (+) strand; PAM type: NNGRRT; PAM sequence: AGGAAT
gaagaaaataaaaagtacaa

SEQ ID NO: 10664 - DNA, 20 bp, Artificial Sequence
  Description of Artificial Sequence: Synthetic oligonucleotide
  Target: ATXN2; (+) strand; PAM type: NNGRRT; PAM sequence: TAGGAT
ataaaaagtacaaaggaatt

SEQ ID NO: 10665 - DNA, 20 bp, Artificial Sequence
  Description of Artificial Sequence: Synthetic oligonucleotide
  Target: ATXN2; (+) strand; PAM type: NNGRRT; PAM sequence: ATGAAT
ggaatttaggatacaattac

SEQ ID NO: 10666 - DNA, 20 bp, Artificial Sequence
  Description of Artificial Sequence: Synthetic oligonucleotide
  Target: ATXN2; (+) strand; PAM type: NNGRRT; PAM sequence: CTGAGT
taaaaacagatttaacacag

SEQ ID NO: 10667 - DNA, 20 bp, Artificial Sequence
  Description of Artificial Sequence: Synthetic oligonucleotide
  Target: ATXN2; (+) strand; PAM type: NNGRRT; PAM sequence: TAGAGT
cttttttcttttttttgaga

SEQ ID NO: 10668 - DNA, 20 bp, Artificial Sequence
  Description of Artificial Sequence: Synthetic oligonucleotide
  Target: ATXN2; (+) strand; PAM type: NNGRRT; PAM sequence: TGGAGT
ttcgctcttgtcacccagac

SEQ ID NO: 10669 - DNA, 20 bp, Artificial Sequence
  Description of Artificial Sequence: Synthetic oligonucleotide
  Target: ATXN2; (+) strand; PAM type: NNGRRT; PAM sequence: CTGGGT
ctcactgcaaccttcacctc

SEQ ID NO: 10670 - DNA, 20 bp, Artificial Sequence
  Description of Artificial Sequence: Synthetic oligonucleotide
  Target: ATXN2; (+) strand; PAM type: NNGRRT; PAM sequence: TGGGGT
ttttgtatttttagtagaga

SEQ ID NO: 10671 - DNA, 20 bp, Artificial Sequence
  Description of Artificial Sequence: Synthetic oligonucleotide
  Target: ATXN2; (+) strand; PAM type: NNGRRT; PAM sequence: TGGGAT
acctcagcctcccaaagtgc

SEQ ID NO: 10672 - DNA, 20 bp, Artificial Sequence
  Description of Artificial Sequence: Synthetic oligonucleotide
  Target: ATXN2; (+) strand; PAM type: NNGRRT; PAM sequence: CAGAGT
ttttttttttttttttgaga

SEQ ID NO: 10673 - DNA, 20 bp, Artificial Sequence
  Description of Artificial Sequence: Synthetic oligonucleotide
  Target: ATXN2; (+) strand; PAM type: NNGRRT; PAM sequence: TGGAGT
tcttgctctgttgcccatgc

SEQ ID NO: 10674 - DNA, 20 bp, Artificial Sequence
  Description of Artificial Sequence: Synthetic oligonucleotide
  Target: ATXN2; (+) strand; PAM type: NNGRRT; PAM sequence: CCGAGT
ctaactgcaagctccgcttc

SEQ ID NO: 10675 - DNA, 20 bp, Artificial Sequence
  Description of Artificial Sequence: Synthetic oligonucleotide
  Target: ATXN2; (+) strand; PAM type: NNGRRT; PAM sequence: CGGGGT
ttttgtacttttagtaggga

SEQ ID NO: 10676 - DNA, 20 bp, Artificial Sequence
  Description of Artificial Sequence: Synthetic oligonucleotide
  Target: ATXN2; (+) strand; PAM type: NNGRRT; PAM sequence: CAGGAT
cggggtttcaccgtgttagc

SEQ ID NO: 10677 - DNA, 20 bp, Artificial Sequence
  Description of Artificial Sequence: Synthetic oligonucleotide
  Target: ATXN2; (+) strand; PAM type: NNGRRT; PAM sequence: TGGGAT
acctcagcctcccaaagtgc

SEQ ID NO: 10678 - DNA, 20 bp, Artificial Sequence
  Description of Artificial Sequence: Synthetic oligonucleotide
  Target: ATXN2; (+) strand; PAM type: NNGRRT; PAM sequence: GGGAAT
cttattatggaaatatagtt

SEQ ID NO: 10679 - DNA, 20 bp, Artificial Sequence
  Description of Artificial Sequence: Synthetic oligonucleotide
  Target: ATXN2; (+) strand; PAM type: NNGRRT; PAM sequence: TAGAAT
aagccaaaaataaatgttta

SEQ ID NO: 10680 - DNA, 20 bp, Artificial Sequence
  Description of Artificial Sequence: Synthetic oligonucleotide
  Target: ATXN2; (+) strand; PAM type: NNGRRT; PAM sequence: AGGAAT
tctgtatttatgaaccttat

SEQ ID NO: 10681 - DNA, 20 bp, Artificial Sequence
  Description of Artificial Sequence: Synthetic oligonucleotide
  Target: ATXN2; (+) strand; PAM type: NNGRRT; PAM sequence: AAGAAT
tcccataatgtagactaggc

SEQ ID NO: 10682 - DNA, 20 bp, Artificial Sequence
  Description of Artificial Sequence: Synthetic oligonucleotide
  Target: ATXN2; (+) strand; PAM type: NNGRRT; PAM sequence: CAGAAT
tcactgcgaaatctcaactt

SEQ ID NO: 10683 - DNA, 20 bp, Artificial Sequence
  Description of Artificial Sequence: Synthetic oligonucleotide
  Target: ATXN2; (+) strand; PAM type: NNGRRT; PAM sequence: ATGAGT
tgcgaaatctcaacttcaga

SEQ ID NO: 10684 - DNA, 20 bp, Artificial Sequence
  Description of Artificial Sequence: Synthetic oligonucleotide
  Target: ATXN2; (+) strand; PAM type: NNGRRT; PAM sequence: ATGAAT
ctgacttgctttaatatatg

SEQ ID NO: 10685 - DNA, 20 bp, Artificial Sequence
  Description of Artificial Sequence: Synthetic oligonucleotide
  Target: ATXN2; (+) strand; PAM type: NNGRRT; PAM sequence: CAGAAT
gatgaataagtggtagagcc

SEQ ID NO: 10686 - DNA, 20 bp, Artificial Sequence
  Description of Artificial Sequence: Synthetic oligonucleotide
  Target: ATXN2; (+) strand; PAM type: NNGRRT; PAM sequence: ATGGGT
gtagagcccagaataaaaat

SEQ ID NO: 10687 - DNA, 20 bp, Artificial Sequence
  Description of Artificial Sequence: Synthetic oligonucleotide
  Target: ATXN2; (+) strand; PAM type: NNGRRT; PAM sequence: CAGAGT
catacttacacttcctcaaa

SEQ ID NO: 10688 - DNA, 20 bp, Artificial Sequence
  Description of Artificial Sequence: Synthetic oligonucleotide
  Target: ATXN2; (+) strand; PAM type: NNGRRT; PAM sequence: ATGAGT
atatctagtgtaatgacaaa

SEQ ID NO: 10689 - DNA, 20 bp, Artificial Sequence
  Description of Artificial Sequence: Synthetic oligonucleotide
  Target: ATXN2; (+) strand; PAM type: NNGRRT; PAM sequence: AGGAGT
ggactggtccttgctactgg

SEQ ID NO: 10690 - DNA, 20 bp, Artificial Sequence
  Description of Artificial Sequence: Synthetic oligonucleotide
  Target: ATXN2; (+) strand; PAM type: NNGRRT; PAM sequence: CTGGGT
ctggaggagtagctgcttca

SEQ ID NO: 10691 - DNA, 20 bp, Artificial Sequence
  Description of Artificial Sequence: Synthetic oligonucleotide
  Target: ATXN2; (+) strand; PAM type: NNGRRT; PAM sequence: GTGGGT
aggagtagctgcttcactgg

SEQ ID NO: 10692 - DNA, 20 bp, Artificial Sequence
  Description of Artificial Sequence: Synthetic oligonucleotide
  Target: ATXN2; (+) strand; PAM type: NNGRRT; PAM sequence: TGGGAT
ctgcttcactgggtgggttg

SEQ ID NO: 10693 - DNA, 20 bp, Artificial Sequence
  Description of Artificial Sequence: Synthetic oligonucleotide
  Target: ATXN2; (+) strand; PAM type: NNGRRT; PAM sequence: CTGGAT
gggatacaaattctaggcca

SEQ ID NO: 10694 - DNA, 20 bp, Artificial Sequence
  Description of Artificial Sequence: Synthetic oligonucleotide
  Target: ATXN2; (+) strand; PAM type: NNGRRT; PAM sequence: GAGGAT
agcagaaactctgtgatttc

SEQ ID NO: 10695 - DNA, 20 bp, Artificial Sequence
  Description of Artificial Sequence: Synthetic oligonucleotide
  Target: ATXN2; (+) strand; PAM type: NNGRRT; PAM sequence: CAGAAT
tttggccatactaattcttt

SEQ ID NO: 10696 - DNA, 20 bp, Artificial Sequence
  Description of Artificial Sequence: Synthetic oligonucleotide
  Target: ATXN2; (+) strand; PAM type: NNGRRT; PAM sequence: TGGAAT
attctttcagaattattttg

SEQ ID NO: 10697 - DNA, 20 bp, Artificial Sequence
  Description of Artificial Sequence: Synthetic oligonucleotide
  Target: ATXN2; (+) strand; PAM type: NNGRRT; PAM sequence: AGGGAT
ctttatttttaaagaaaggg

SEQ ID NO: 10698 - DNA, 20 bp, Artificial Sequence
  Description of Artificial Sequence: Synthetic oligonucleotide
  Target: ATXN2; (+) strand; PAM type: NNGRRT; PAM sequence: CCGAAT
atattttacctttccctgac

SEQ ID NO: 10699 - DNA, 20 bp, Artificial Sequence
  Description of Artificial Sequence: Synthetic oligonucleotide
  Target: ATXN2; (+) strand; PAM type: NNGRRT; PAM sequence: AGGGAT
tgagctgaaaattctattaa

SEQ ID NO: 10700 - DNA, 20 bp, Artificial Sequence
  Description of Artificial Sequence: Synthetic oligonucleotide
  Target: ATXN2; (+) strand; PAM type: NNGRRT; PAM sequence: ATGAAT
gggggagaaatcagcactat

SEQ ID NO: 10701 - DNA, 20 bp, Artificial Sequence
  Description of Artificial Sequence: Synthetic oligonucleotide
  Target: ATXN2; (+) strand; PAM type: NNGRRT; PAM sequence: AAGAGT
tagaccaatctatcaggtaa

SEQ ID NO: 10702 - DNA, 20 bp, Artificial Sequence
  Description of Artificial Sequence: Synthetic oligonucleotide
  Target: ATXN2; (+) strand; PAM type: NNGRRT; PAM sequence: CAGAAT
ctatcaggtaaaagagtgga

SEQ ID NO: 10703 - DNA, 20 bp, Artificial Sequence
  Description of Artificial Sequence: Synthetic oligonucleotide
  Target: ATXN2; (+) strand; PAM type: NNGRRT; PAM sequence: TAGAAT
aaattaatatatgttgccaa

SEQ ID NO: 10704 - DNA, 20 bp, Artificial Sequence
  Description of Artificial Sequence: Synthetic oligonucleotide
  Target: ATXN2; (+) strand; PAM type: NNGRRT; PAM sequence: CAGAGT
ttatttttatttttataaga

SEQ ID NO: 10705 - DNA, 20 bp, Artificial Sequence
  Description of Artificial Sequence: Synthetic oligonucleotide
  Target: ATXN2; (+) strand; PAM type: NNGRRT; PAM sequence: TGGAGT
tctgtctctgtcgcccaggc

SEQ ID NO: 10706 - DNA, 20 bp, Artificial Sequence
  Description of Artificial Sequence: Synthetic oligonucleotide
  Target: ATXN2; (+) strand; PAM type: NNGRRT; PAM sequence: CTGGGT
tgcctcagcctcccaagtag

SEQ ID NO: 10707 - DNA, 20 bp, Artificial Sequence
  Description of Artificial Sequence: Synthetic oligonucleotide
  Target: ATXN2; (+) strand; PAM type: NNGRRT; PAM sequence: AGGAAT
caccatgcctggcttccaac

SEQ ID NO: 10708 - DNA, 20 bp, Artificial Sequence
  Description of Artificial Sequence: Synthetic oligonucleotide
  Target: ATXN2; (+) strand; PAM type: NNGRRT; PAM sequence: AAGAAT
aacacgaacatgatctttag

SEQ ID NO: 10709 - DNA, 20 bp, Artificial Sequence
  Description of Artificial Sequence: Synthetic oligonucleotide
  Target: ATXN2; (+) strand; PAM type: NNGRRT; PAM sequence: CTGAAT
aatggaaatattcaacatct

SEQ ID NO: 10710 - DNA, 20 bp, Artificial Sequence
  Description of Artificial Sequence: Synthetic oligonucleotide
  Target: ATXN2; (+) strand; PAM type: NNGRRT; PAM sequence: CAGAAT
gactacaagaaaaatatcaa

SEQ ID NO: 10711 - DNA, 20 bp, Artificial Sequence
  Description of Artificial Sequence: Synthetic oligonucleotide
  Target: ATXN2; (+) strand; PAM type: NNGRRT; PAM sequence: ATGGGT
agaaaacaggtttttaatat

SEQ ID NO: 10712 - DNA, 20 bp, Artificial Sequence
  Description of Artificial Sequence: Synthetic oligonucleotide
  Target: ATXN2; (+) strand; PAM type: NNGRRT; PAM sequence: TAGAAT
tatatgggtggcatttaaat

SEQ ID NO: 10713 - DNA, 20 bp, Artificial Sequence
  Description of Artificial Sequence: Synthetic oligonucleotide
  Target: ATXN2; (+) strand; PAM type: NNGRRT; PAM sequence: ATGGAT
gtatttgatatgtggcaatg

SEQ ID NO: 10714 - DNA, 20 bp, Artificial Sequence
  Description of Artificial Sequence: Synthetic oligonucleotide
  Target: ATXN2; (+) strand; PAM type: NNGRRT; PAM sequence: CTGAAT
gatggatttagcgccaaata

SEQ ID NO: 10715 - DNA, 20 bp, Artificial Sequence
  Description of Artificial Sequence: Synthetic oligonucleotide
  Target: ATXN2; (+) strand; PAM type: NNGRRT; PAM sequence: AAGAAT
tttagcgccaaatactgaat

SEQ ID NO: 10716 - DNA, 20 bp, Artificial Sequence
  Description of Artificial Sequence: Synthetic oligonucleotide
  Target: ATXN2; (+) strand; PAM type: NNGRRT; PAM sequence: TAGAAT
aaaaattactcagttaaatt

SEQ ID NO: 10717 - DNA, 20 bp, Artificial Sequence
  Description of Artificial Sequence: Synthetic oligonucleotide
  Target: ATXN2; (+) strand; PAM type: NNGRRT; PAM sequence: GAGAGT
cctttttaacaacaattcaa

SEQ ID NO: 10718 - DNA, 20 bp, Artificial Sequence
  Description of Artificial Sequence: Synthetic oligonucleotide
  Target: ATXN2; (+) strand; PAM type: NNGRRT; PAM sequence: AGGAGT
ttgtaattataaactcacat

SEQ ID NO: 10719 - DNA, 20 bp, Artificial Sequence
  Description of Artificial Sequence: Synthetic oligonucleotide
  Target: ATXN2; (+) strand; PAM type: NNGRRT; PAM sequence: AGGGGT
agctggagaaccatgagcag

SEQ ID NO: 10720 - DNA, 20 bp, Artificial Sequence
  Description of Artificial Sequence: Synthetic oligonucleotide
  Target: ATXN2; (+) strand; PAM type: NNGRRT; PAM sequence: GGGGGT
catgagcagaggggtgagac

SEQ ID NO: 10721 - DNA, 20 bp, Artificial Sequence
  Description of Artificial Sequence: Synthetic oligonucleotide
  Target: ATXN2; (+) strand; PAM type: NNGRRT; PAM sequence: CTGGAT
cagaggggtgagacgggggt

SEQ ID NO: 10722 - DNA, 20 bp, Artificial Sequence
  Description of Artificial Sequence: Synthetic oligonucleotide
  Target: ATXN2; (+) strand; PAM type: NNGRRT; PAM sequence: AGGGGT
ggcctggagggcggccgtgt

SEQ ID NO: 10723 - DNA, 20 bp, Artificial Sequence
  Description of Artificial Sequence: Synthetic oligonucleotide
  Target: ATXN2; (+) strand; PAM type: NNGRRT; PAM sequence: GAGAGT
ggtggctgcccgaggtggaa

SEQ ID NO: 10724 - DNA, 20 bp, Artificial Sequence
  Description of Artificial Sequence: Synthetic oligonucleotide
  Target: ATXN2; (+) strand; PAM type: NNGRRT; PAM sequence: ATGAAT
ttaagattaagtctgtttaa

SEQ ID NO: 10725 - DNA, 20 bp, Artificial Sequence
  Description of Artificial Sequence: Synthetic oligonucleotide
  Target: ATXN2; (+) strand; PAM type: NNGRRT; PAM sequence: AAGGGT
taaatgaatacacgttccca

SEQ ID NO: 10726 - DNA, 20 bp, Artificial Sequence
  Description of Artificial Sequence: Synthetic oligonucleotide
  Target: ATXN2; (+) strand; PAM type: NNGRRT; PAM sequence: TAGGAT
cacgttcccaaagggttaat

SEQ ID NO: 10727 - DNA, 20 bp, Artificial Sequence
  Description of Artificial Sequence: Synthetic oligonucleotide
  Target: ATXN2; (+) strand; PAM type: NNGRRT; PAM sequence: AGGAAT
ctcagtaactggttgtttaa

SEQ ID NO: 10728 - DNA, 20 bp, Artificial Sequence
  Description of Artificial Sequence: Synthetic oligonucleotide
  Target: ATXN2; (+) strand; PAM type: NNGRRT; PAM sequence: AGGAGT
aatcacaataattcctactc

SEQ ID NO: 10729 - DNA, 20 bp, Artificial Sequence
  Description of Artificial Sequence: Synthetic oligonucleotide
  Target: ATXN2; (+) strand; PAM type: NNGRRT; PAM sequence: TGGAAT
cttgaacccagaactcagtt

SEQ ID NO: 10730 - DNA, 20 bp, Artificial Sequence
  Description of Artificial Sequence: Synthetic oligonucleotide
  Target: ATXN2; (+) strand; PAM type: NNGRRT; PAM sequence: TAGAGT
gaaataaaacattactcttc

SEQ ID NO: 10731 - DNA, 20 bp, Artificial Sequence
  Description of Artificial Sequence: Synthetic oligonucleotide
  Target: ATXN2; (+) strand; PAM type: NNGRRT; PAM sequence: GTGAGT
ttctagagtttgtgactcct

SEQ ID NO: 10732 - DNA, 20 bp, Artificial Sequence
  Description of Artificial Sequence: Synthetic oligonucleotide
  Target: ATXN2; (+) strand; PAM type: NNGRRT; PAM sequence: ATGGAT
caccaaataaatttatactg

SEQ ID NO: 10733 - DNA, 20 bp, Artificial Sequence
  Description of Artificial Sequence: Synthetic oligonucleotide
  Target: ATXN2; (+) strand; PAM type: NNGRRT; PAM sequence: TAGGGT
cagtccaggtctcctctcca

SEQ ID NO: 10734 - DNA, 20 bp, Artificial Sequence
  Description of Artificial Sequence: Synthetic oligonucleotide
  Target: ATXN2; (+) strand; PAM type: NNGRRT; PAM sequence: AAGAGT
attaagtactgaaaatactc

SEQ ID NO: 10735 - DNA, 20 bp, Artificial Sequence
  Description of Artificial Sequence: Synthetic oligonucleotide
  Target: ATXN2; (+) strand; PAM type: NNGRRT; PAM sequence: AGGAAT
tcaagagtgtccatttggag

SEQ ID NO: 10736 - DNA, 20 bp, Artificial Sequence
  Description of Artificial Sequence: Synthetic oligonucleotide
  Target: ATXN2; (+) strand; PAM type: NNGRRT; PAM sequence: TTGAAT
ccaaatttaaatagctaaaa

SEQ ID NO: 10737 - DNA, 20 bp, Artificial Sequence
  Description of Artificial Sequence: Synthetic oligonucleotide
  Target: ATXN2; (+) strand; PAM type: NNGRRT; PAM sequence: TAGAGT
attcaacctagatttagagg

SEQ ID NO: 10738 - DNA, 20 bp, Artificial Sequence
  Description of Artificial Sequence: Synthetic oligonucleotide
  Target: ATXN2; (+) strand; PAM type: NNGRRT; PAM sequence: AAGGGT
gtaacatccacccttagact

SEQ ID NO: 10739 - DNA, 20 bp, Artificial Sequence
  Description of Artificial Sequence: Synthetic oligonucleotide
  Target: ATXN2; (+) strand; PAM type: NNGRRT; PAM sequence: TAGAAT
ccacagtgttgcacataggt

SEQ ID NO: 10740 - DNA, 20 bp, Artificial Sequence
  Description of Artificial Sequence: Synthetic oligonucleotide
  Target: ATXN2; (+) strand; PAM type: NNGRRT; PAM sequence: TTGGGT
tttttggccaagtgattgtc

SEQ ID NO: 10741 - DNA, 20 bp, Artificial Sequence
  Description of Artificial Sequence: Synthetic oligonucleotide
  Target: ATXN2; (+) strand; PAM type: NNGRRT; PAM sequence: ATGAAT
gcactttatcttagtacatc

SEQ ID NO: 10742 - DNA, 20 bp, Artificial Sequence
  Description of Artificial Sequence: Synthetic oligonucleotide
  Target: ATXN2; (+) strand; PAM type: NNGRRT; PAM sequence: CAGAAT
aactactctttggtctgaac

SEQ ID NO: 10743 - DNA, 20 bp, Artificial Sequence
  Description of Artificial Sequence: Synthetic oligonucleotide
  Target: ATXN2; (+) strand; PAM type: NNGRRT; PAM sequence: TCGGGT
tctttggtctgaaccagaat

SEQ ID NO: 10744 - DNA, 20 bp, Artificial Sequence
  Description of Artificial Sequence: Synthetic oligonucleotide
  Target: ATXN2; (+) strand; PAM type: NNGRRT; PAM sequence: GTGGAT
tgaaatctgaagtgtgagaa

SEQ ID NO: 10745 - DNA, 20 bp, Artificial Sequence
  Description of Artificial Sequence: Synthetic oligonucleotide
  Target: ATXN2; (+) strand; PAM type: NNGRRT; PAM sequence: GTGAAT
tccaggctggcccatacgcg

SEQ ID NO: 10746 - DNA, 20 bp, Artificial Sequence
  Description of Artificial Sequence: Synthetic oligonucleotide
  Target: ATXN2; (+) strand; PAM type: NNGRRT; PAM sequence: CAGGAT
aattctgtctcccacttccc

SEQ ID NO: 10747 - DNA, 20 bp, Artificial Sequence
  Description of Artificial Sequence: Synthetic oligonucleotide
  Target: ATXN2; (+) strand; PAM type: NNGRRT; PAM sequence: AGGAAT
tctctatttctttgtccagg

SEQ ID NO: 10748 - DNA, 20 bp, Artificial Sequence
  Description of Artificial Sequence: Synthetic oligonucleotide
  Target: ATXN2; (+) strand; PAM type: NNGRRT; PAM sequence: GGGAAT
taaaagtcatctagacagaa

SEQ ID NO: 10749 - DNA, 20 bp, Artificial Sequence
  Description of Artificial Sequence: Synthetic oligonucleotide
  Target: ATXN2; (+) strand; PAM type: NNGRRT; PAM sequence: CTGAGT
ccctgttcttccatcttacc

SEQ ID NO: 10750 - DNA, 20 bp, Artificial Sequence
  Description of Artificial Sequence: Synthetic oligonucleotide
  Target: ATXN2; (+) strand; PAM type: NNGRRT; PAM sequence: GAGGAT
taagctgactgcctttaaga

SEQ ID NO: 10751 - DNA, 20 bp, Artificial Sequence
  Description of Artificial Sequence: Synthetic oligonucleotide
  Target: ATXN2; (+) strand; PAM type: NNGRRT; PAM sequence: ATGAAT
aggtatttctcaacacgttt

SEQ ID NO: 10752 - DNA, 20 bp, Artificial Sequence
  Description of Artificial Sequence: Synthetic oligonucleotide
  Target: ATXN2; (+) strand; PAM type: NNGRRT; PAM sequence: CGGAGT
tatgcaattagctgcacaaa

SEQ ID NO: 10753 - DNA, 20 bp, Artificial Sequence
  Description of Artificial Sequence: Synthetic oligonucleotide
  Target: ATXN2; (+) strand; PAM type: NNGRRT; PAM sequence: CAGGGT
tcagccagtcctcaatgccc

SEQ ID NO: 10754 - DNA, 20 bp, Artificial Sequence
  Description of Artificial Sequence: Synthetic oligonucleotide
  Target: ATXN2; (+) strand; PAM type: NNGRRT; PAM sequence: CAGGGT
ttcaccccatctccttccaa

SEQ ID NO: 10755 - DNA, 20 bp, Artificial Sequence
  Description of Artificial Sequence: Synthetic oligonucleotide
  Target: ATXN2; (+) strand; PAM type: NNGRRT; PAM sequence: TTGGAT
ttaacaagctcttcaagatc

SEQ ID NO: 10756 - DNA, 20 bp, Artificial Sequence
  Description of Artificial Sequence: Synthetic oligonucleotide
  Target: ATXN2; (+) strand; PAM type: NNGRRT; PAM sequence: TTGAGT
tacaccgtctcacacagacc

SEQ ID NO: 10757 - DNA, 20 bp, Artificial Sequence
  Description of Artificial Sequence: Synthetic oligonucleotide
  Target: ATXN2; (+) strand; PAM type: NNGRRT; PAM sequence: TGGAAT
gctgtgcccctcacgttcac

SEQ ID NO: 10758 - DNA, 20 bp, Artificial Sequence
  Description of Artificial Sequence: Synthetic oligonucleotide
  Target: ATXN2; (+) strand; PAM type: NNGRRT; PAM sequence: CTGAGT
ttcccgttttaaaaattctt

SEQ ID NO: 10759 - DNA, 20 bp, Artificial Sequence
  Description of Artificial Sequence: Synthetic oligonucleotide
  Target: ATXN2; (+) strand; PAM type: NNGRRT; PAM sequence: ATGAGT
atgaggaaaagaaaagcaaa

SEQ ID NO: 10760 - DNA, 20 bp, Artificial Sequence
  Description of Artificial Sequence: Synthetic oligonucleotide
  Target: ATXN2; (+) strand; PAM type: NNGRRT; PAM sequence: TAGAGT
aatcaactactaagaaagtt

SEQ ID NO: 10761 - DNA, 20 bp, Artificial Sequence
  Description of Artificial Sequence: Synthetic oligonucleotide
  Target: ATXN2; (+) strand; PAM type: NNGRRT; PAM sequence: TAGAAT
tactaagaaagtttagagtt

SEQ ID NO: 10762 - DNA, 20 bp, Artificial Sequence
  Description of Artificial Sequence: Synthetic oligonucleotide
  Target: ATXN2; (+) strand; PAM type: NNGRRT; PAM sequence: GTGGAT
actttgggaggccgaggcag

SEQ ID NO: 10763 - DNA, 20 bp, Artificial Sequence
  Description of Artificial Sequence: Synthetic oligonucleotide
  Target: ATXN2; (+) strand; PAM type: NNGRRT; PAM sequence: GAGAAT
tactcgggaggctgaggcag

SEQ ID NO: 10764 - DNA, 20 bp, Artificial Sequence
  Description of Artificial Sequence: Synthetic oligonucleotide
  Target: ATXN2; (+) strand; PAM type: NNGRRT; PAM sequence: CGGGAT
gcaggagaatcgcttgaacc

SEQ ID NO: 10765 - DNA, 20 bp, Artificial Sequence
  Description of Artificial Sequence: Synthetic oligonucleotide
  Target: ATXN2; (+) strand; PAM type: NNGRRT; PAM sequence: CAGGGT
atttgtttagagcataaaaa

SEQ ID NO: 10766 - DNA, 20 bp, Artificial Sequence
  Description of Artificial Sequence: Synthetic oligonucleotide
  Target: ATXN2; (+) strand; PAM type: NNGRRT; PAM sequence: TGGGAT
attatatcgaaacatatcat

SEQ ID NO: 10767 - DNA, 20 bp, Artificial Sequence
  Description of Artificial Sequence: Synthetic oligonucleotide
  Target: ATXN2; (+) strand; PAM type: NNGRRT; PAM sequence: CAGGGT
tcataaaatagccttcagat

SEQ ID NO: 10768 - DNA, 20 bp, Artificial Sequence
  Description of Artificial Sequence: Synthetic oligonucleotide
  Target: ATXN2; (+) strand; PAM type: NNGRRT; PAM sequence: AGGGAT
tattttacttcttttaaaca

SEQ ID NO: 10769 - DNA, 20 bp, Artificial Sequence
  Description of Artificial Sequence: Synthetic oligonucleotide
  Target: ATXN2; (+) strand; PAM type: NNGRRT; PAM sequence: AGGGGT
aagggattccacatggaaca

SEQ ID NO: 10770 - DNA, 20 bp, Artificial Sequence
  Description of Artificial Sequence: Synthetic oligonucleotide
  Target: ATXN2; (+) strand; PAM type: NNGRRT; PAM sequence: GGGAAT
ggcaacctccccttcctcct

SEQ ID NO: 10771 - DNA, 20 bp, Artificial Sequence
  Description of Artificial Sequence: Synthetic oligonucleotide
  Target: ATXN2; (+) strand; PAM type: NNGRRT; PAM sequence: CTGGAT
acacctcagaagtggcaact

SEQ ID NO: 10772 - DNA, 20 bp, Artificial Sequence
  Description of Artificial Sequence: Synthetic oligonucleotide
  Target: ATXN2; (+) strand; PAM type: NNGRRT; PAM sequence: AAGAAT
tttattaagaaagtaaataa

SEQ ID NO: 10773 - DNA, 20 bp, Artificial Sequence
  Description of Artificial Sequence: Synthetic oligonucleotide
  Target: ATXN2; (+) strand; PAM type: NNGRRT; PAM sequence: AAGAAT
ggctgcattctttaacgtaa

SEQ ID NO: 10774 - DNA, 20 bp, Artificial Sequence
  Description of Artificial Sequence: Synthetic oligonucleotide
  Target: ATXN2; (+) strand; PAM type: NNGRRT; PAM sequence: GTGAAT
ggctggaagactatttacca

SEQ ID NO: 10775 - DNA, 20 bp, Artificial Sequence
  Description of Artificial Sequence: Synthetic oligonucleotide
  Target: ATXN2; (+) strand; PAM type: NNGRRT; PAM sequence: CTGGAT
ttaccagtgaatattactgc

SEQ ID NO: 10776 - DNA, 20 bp, Artificial Sequence
  Description of Artificial Sequence: Synthetic oligonucleotide
  Target: ATXN2; (+) strand; PAM type: NNGRRT; PAM sequence: AAGAAT
aaggttgtaatccatcccag

SEQ ID NO: 10777 - DNA, 20 bp, Artificial Sequence
  Description of Artificial Sequence: Synthetic oligonucleotide
  Target: ATXN2; (+) strand; PAM type: NNGRRT; PAM sequence: TTGGGT
tcgaagttcacctattaacc

SEQ ID NO: 10778 - DNA, 20 bp, Artificial Sequence
  Description of Artificial Sequence: Synthetic oligonucleotide
  Target: ATXN2; (+) strand; PAM type: NNGRRT; PAM sequence: AAGAGT
gtgcataaataactactatt

SEQ ID NO: 10779 - DNA, 20 bp, Artificial Sequence
  Description of Artificial Sequence: Synthetic oligonucleotide
  Target: ATXN2; (+) strand; PAM type: NNGRRT; PAM sequence: GAGGAT
actttgggaggccgaggcag

SEQ ID NO: 10780 - DNA, 20 bp, Artificial Sequence
  Description of Artificial Sequence: Synthetic oligonucleotide
  Target: ATXN2; (+) strand; PAM type: NNGRRT; PAM sequence: GAGAAT
tacttgggaggctagggcag

SEQ ID NO: 10781 - DNA, 20 bp, Artificial Sequence
  Description of Artificial Sequence: Synthetic oligonucleotide
  Target: ATXN2; (+) strand; PAM type: NNGRRT; PAM sequence: AAGAGT
tccatcttaaaagaaaaaaa

SEQ ID NO: 10782 - DNA, 20 bp, Artificial Sequence
  Description of Artificial Sequence: Synthetic oligonucleotide
  Target: ATXN2; (+) strand; PAM type: NNGRRT; PAM sequence: GTGGGT
cagcactttgagaggccaag

SEQ ID NO: 10783 - DNA, 20 bp, Artificial Sequence
  Description of Artificial Sequence: Synthetic oligonucleotide
  Target: ATXN2; (+) strand; PAM type: NNGRRT; PAM sequence: GTGGAT
actttgagaggccaaggtgg

SEQ ID NO: 10784 - DNA, 20 bp, Artificial Sequence
  Description of Artificial Sequence: Synthetic oligonucleotide
  Target: ATXN2; (+) strand; PAM type: NNGRRT; PAM sequence: AGGAGT
tgggtggatcacctgagatt

SEQ ID NO: 10785 - DNA, 20 bp, Artificial Sequence
  Description of Artificial Sequence: Synthetic oligonucleotide
  Target: ATXN2; (+) strand; PAM type: NNGRRT; PAM sequence: GAGAAT
tactcagaaggctgaagcag

SEQ ID NO: 10786 - DNA, 20 bp, Artificial Sequence
  Description of Artificial Sequence: Synthetic oligonucleotide
  Target: ATXN2; (+) strand; PAM type: NNGRRT; PAM sequence: AAGAGT
gagcaagactccgtctcaaa

SEQ ID NO: 10787 - DNA, 20 bp, Artificial Sequence
  Description of Artificial Sequence: Synthetic oligonucleotide
  Target: ATXN2; (+) strand; PAM type: NNGRRT; PAM sequence: TTGGGT
tccgtctcaaaaagagtttc

SEQ ID NO: 10788 - DNA, 20 bp, Artificial Sequence
  Description of Artificial Sequence: Synthetic oligonucleotide
  Target: ATXN2; (+) strand; PAM type: NNGRRT; PAM sequence: AAGAAT
tcagacatcttctaggcaat

SEQ ID NO: 10789 - DNA, 20 bp, Artificial Sequence
  Description of Artificial Sequence: Synthetic oligonucleotide
  Target: ATXN2; (+) strand; PAM type: NNGRRT; PAM sequence: GTGGAT
actttgggaggctgaggcag

SEQ ID NO: 10790 - DNA, 20 bp, Artificial Sequence
  Description of Artificial Sequence: Synthetic oligonucleotide
  Target: ATXN2; (+) strand; PAM type: NNGRRT; PAM sequence: ACGAGT
gaggctgaggcaggtggatc

SEQ ID NO: 10791 - DNA, 20 bp, Artificial Sequence
  Description of Artificial Sequence: Synthetic oligonucleotide
  Target: ATXN2; (+) strand; PAM type: NNGRRT; PAM sequence: AGGAGT
ggcaggtggatcacgagttc

SEQ ID NO: 10792 - DNA, 20 bp, Artificial Sequence
  Description of Artificial Sequence: Synthetic oligonucleotide
  Target: ATXN2; (+) strand; PAM type: NNGRRT; PAM sequence: GAGAAT
tactcaggaggctgaggcag

SEQ ID NO: 10793 - DNA, 20 bp, Artificial Sequence
  Description of Artificial Sequence: Synthetic oligonucleotide
  Target: ATXN2; (+) strand; PAM type: NNGRRT; PAM sequence: TAGGAT
aaaagaaaaaaaaaagcaaa

SEQ ID NO: 10794 - DNA, 20 bp, Artificial Sequence
  Description of Artificial Sequence: Synthetic oligonucleotide
  Target: ATXN2; (+) strand; PAM type: NNGRRT; PAM sequence: TTGAAT
ggagatatgtagtgtttcaa

SEQ ID NO: 10795 - DNA, 20 bp, Artificial Sequence
  Description of Artificial Sequence: Synthetic oligonucleotide
  Target: ATXN2; (+) strand; PAM type: NNGRRT; PAM sequence: AGGAGT
tgggcagatcacctgaggtc

SEQ ID NO: 10796 - DNA, 20 bp, Artificial Sequence
  Description of Artificial Sequence: Synthetic oligonucleotide
  Target: ATXN2; (+) strand; PAM type: NNGRRT; PAM sequence: CTGGGT
actaaaaatacaaaaattag

SEQ ID NO: 10797 - DNA, 20 bp, Artificial Sequence
  Description of Artificial Sequence: Synthetic oligonucleotide
  Target: ATXN2; (+) strand; PAM type: NNGRRT; PAM sequence: TAGAAT
tgcttggaaagctgaggcag

SEQ ID NO: 10798 - DNA, 20 bp, Artificial Sequence
  Description of Artificial Sequence: Synthetic oligonucleotide
  Target: ATXN2; (+) strand; PAM type: NNGRRT; PAM sequence: CTGGGT
tcgcaccactgcactccagt

SEQ ID NO: 10799 - DNA, 20 bp, Artificial Sequence
  Description of Artificial Sequence: Synthetic oligonucleotide
  Target: ATXN2; (+) strand; PAM type: NNGRRT; PAM sequence: CAGAGT
ctgcactccagtctgggtga

SEQ ID NO: 10800 - DNA, 20 bp, Artificial Sequence
  Description of Artificial Sequence: Synthetic oligonucleotide
  Target: ATXN2; (+) strand; PAM type: NNGRRT; PAM sequence: GTGGGT
cagcactttgggaggctgag

SEQ ID NO: 10801 - DNA, 20 bp, Artificial Sequence
  Description of Artificial Sequence: Synthetic oligonucleotide
  Target: ATXN2; (+) strand; PAM type: NNGRRT; PAM sequence: GTGGAT
actttgggaggctgaggtgg

SEQ ID NO: 10802 - DNA, 20 bp, Artificial Sequence
  Description of Artificial Sequence: Synthetic oligonucleotide
  Target: ATXN2; (+) strand; PAM type: NNGRRT; PAM sequence: AGGAGT
tgggtggattacctgagctc

SEQ ID NO: 10803 - DNA, 20 bp, Artificial Sequence
  Description of Artificial Sequence: Synthetic oligonucleotide
  Target: ATXN2; (+) strand; PAM type: NNGRRT; PAM sequence: ATGGAT
tataattatttgcatgtctt

SEQ ID NO: 10804 - DNA, 20 bp, Artificial Sequence
  Description of Artificial Sequence: Synthetic oligonucleotide
  Target: ATXN2; (+) strand; PAM type: NNGRRT; PAM sequence: GAGAAT
tatatgatttgttaaagttt

SEQ ID NO: 10805 - DNA, 20 bp, Artificial Sequence
  Description of Artificial Sequence: Synthetic oligonucleotide
  Target: ATXN2; (+) strand; PAM type: NNGRRT; PAM sequence: AAGAGT
ttcaggcttcctgtctgagg

SEQ ID NO: 10806 - DNA, 20 bp, Artificial Sequence
  Description of Artificial Sequence: Synthetic oligonucleotide
  Target: ATXN2; (+) strand; PAM type: NNGRRT; PAM sequence: CAGAGT
tatgctctctatcctaaaga

SEQ ID NO: 10807 - DNA, 20 bp, Artificial Sequence
  Description of Artificial Sequence: Synthetic oligonucleotide
  Target: ATXN2; (+) strand; PAM type: NNGRRT; PAM sequence: AGGGGT
ttatttttatttcttagaga

SEQ ID NO: 10808 - DNA, 20 bp, Artificial Sequence
  Description of Artificial Sequence: Synthetic oligonucleotide
  Target: ATXN2; (+) strand; PAM type: NNGRRT; PAM sequence: AAGAAT
aagaggcgttttagaaataa

SEQ ID NO: 10809 - DNA, 20 bp, Artificial Sequence
  Description of Artificial Sequence: Synthetic oligonucleotide
  Target: ATXN2; (+) strand; PAM type: NNGRRT; PAM sequence: GAGAAT
agaaataaaagaattttgtg

SEQ ID NO: 10810 - DNA, 20 bp, Artificial Sequence
  Description of Artificial Sequence: Synthetic oligonucleotide
  Target: ATXN2; (+) strand; PAM type: NNGRRT; PAM sequence: CTGGGT
ccttaggctaccttatttgg

SEQ ID NO: 10811 - DNA, 20 bp, Artificial Sequence
  Description of Artificial Sequence: Synthetic oligonucleotide
  Target: ATXN2; (+) strand; PAM type: NNGRRT; PAM sequence: CAGGAT
tttaaattacaaccaagtga

SEQ ID NO: 10812 - DNA, 20 bp, Artificial Sequence
  Description of Artificial Sequence: Synthetic oligonucleotide
  Target: ATXN2; (+) strand; PAM type: NNGRRT; PAM sequence: CAGAGT
tgacaggatgtcatactgac

SEQ ID NO: 10813 - DNA, 20 bp, Artificial Sequence
  Description of Artificial Sequence: Synthetic oligonucleotide
  Target: ATXN2; (+) strand; PAM type: NNGRRT; PAM sequence: GTGAGT
cctcaagttcctcattggct

SEQ ID NO: 10814 - DNA, 20 bp, Artificial Sequence
  Description of Artificial Sequence: Synthetic oligonucleotide
  Target: ATXN2; (+) strand; PAM type: NNGRRT; PAM sequence: CAGAGT
attcactttagcactgatag

SEQ ID NO: 10815 - DNA, 20 bp, Artificial Sequence
  Description of Artificial Sequence: Synthetic oligonucleotide
  Target: ATXN2; (+) strand; PAM type: NNGRRT; PAM sequence: AAGAAT
agtcagtaaaagcatctgca

SEQ ID NO: 10816 - DNA, 20 bp, Artificial Sequence
  Description of Artificial Sequence: Synthetic oligonucleotide
  Target: ATXN2; (+) strand; PAM type: NNGRRT; PAM sequence: GTGAAT
aatcagttacactcacacac

SEQ ID NO: 10817 - DNA, 20 bp, Artificial Sequence
  Description of Artificial Sequence: Synthetic oligonucleotide
  Target: ATXN2; (+) strand; PAM type: NNGRRT; PAM sequence: ATGAAT
ttaaaaaacaattacgaaaa

SEQ ID NO: 10818 - DNA, 20 bp, Artificial Sequence
  Description of Artificial Sequence: Synthetic oligonucleotide
  Target: ATXN2; (+) strand; PAM type: NNGRRT; PAM sequence: CGGAAT
aactgctatctaaactgata

SEQ ID NO: 10819 - DNA, 20 bp, Artificial Sequence
  Description of Artificial Sequence: Synthetic oligonucleotide
  Target: ATXN2; (+) strand; PAM type: NNGRRT; PAM sequence: TGGAAT
ttcacgtttaatttagcaaa

SEQ ID NO: 10820 - DNA, 20 bp, Artificial Sequence
  Description of Artificial Sequence: Synthetic oligonucleotide
  Target: ATXN2; (+) strand; PAM type: NNGRRT; PAM sequence: TAGAGT
ttttttttttttttttgaga

SEQ ID NO: 10821 - DNA, 20 bp, Artificial Sequence
  Description of Artificial Sequence: Synthetic oligonucleotide
  Target: ATXN2; (+) strand; PAM type: NNGRRT; PAM sequence: TGGAAT
tctcgttctgttgcccaggc

SEQ ID NO: 10822 - DNA, 20 bp, Artificial Sequence
  Description of Artificial Sequence: Synthetic oligonucleotide
  Target: ATXN2; (+) strand; PAM type: NNGRRT; PAM sequence: CCGGGT
ctcactgcaacctctgcctc

SEQ ID NO: 10823 - DNA, 20 bp, Artificial Sequence
  Description of Artificial Sequence: Synthetic oligonucleotide
  Target: ATXN2; (+) strand; PAM type: NNGRRT; PAM sequence: CCGAGT
gattctcctgcctcagtctc

SEQ ID NO: 10824 - DNA, 20 bp, Artificial Sequence
  Description of Artificial Sequence: Synthetic oligonucleotide
  Target: ATXN2; (+) strand; PAM type: NNGRRT; PAM sequence: CCGGAT
acaggtgtgtaccaccacgc

SEQ ID NO: 10825 - DNA, 20 bp, Artificial Sequence
  Description of Artificial Sequence: Synthetic oligonucleotide
  Target: ATXN2; (+) strand; PAM type: NNGRRT; PAM sequence: CGGGGT
ttttttgtatttttagtaga

SEQ ID NO: 10826 - DNA, 20 bp, Artificial Sequence
  Description of Artificial Sequence: Synthetic oligonucleotide
  Target: ATXN2; (+) strand; PAM type: NNGRRT; PAM sequence: TGGGAT
accttggcctcccaaagtgc

SEQ ID NO: 10827 - DNA, 20 bp, Artificial Sequence
  Description of Artificial Sequence: Synthetic oligonucleotide
  Target: ATXN2; (+) strand; PAM type: NNGRRT; PAM sequence: GTGGAT
actttgggaggcccaggcag

SEQ ID NO: 10828 - DNA, 20 bp, Artificial Sequence
  Description of Artificial Sequence: Synthetic oligonucleotide
  Target: ATXN2; (+) strand; PAM type: NNGRRT; PAM sequence: GAGAAT
tactcgggaggctgaggaag

SEQ ID NO: 10829 - DNA, 20 bp, Artificial Sequence
  Description of Artificial Sequence: Synthetic oligonucleotide
  Target: ATXN2; (+) strand; PAM type: NNGRRT; PAM sequence: ATGAAT
cccgggaggtggaggttgca

SEQ ID NO: 10830 - DNA, 20 bp, Artificial Sequence
  Description of Artificial Sequence: Synthetic oligonucleotide
  Target: ATXN2; (+) strand; PAM type: NNGRRT; PAM sequence: CAGAGT
actgtgctccagcctggcga

SEQ ID NO: 10831 - DNA, 20 bp, Artificial Sequence
  Description of Artificial Sequence: Synthetic oligonucleotide
  Target: ATXN2; (+) strand; PAM type: NNGRRT; PAM sequence: CGGAGT
gcttgctctttcacccagac

SEQ ID NO: 10832 - DNA, 20 bp, Artificial Sequence
  Description of Artificial Sequence: Synthetic oligonucleotide
  Target: ATXN2; (+) strand; PAM type: NNGRRT; PAM sequence: GGGAAT
catccaccttccaggttcaa

SEQ ID NO: 10833 - DNA, 20 bp, Artificial Sequence
  Description of Artificial Sequence: Synthetic oligonucleotide
  Target: ATXN2; (+) strand; PAM type: NNGRRT; PAM sequence: CAGGGT
gtttgtatttttagcagaga

SEQ ID NO: 10834 - DNA, 20 bp, Artificial Sequence
  Description of Artificial Sequence: Synthetic oligonucleotide
  Target: ATXN2; (+) strand; PAM type: NNGRRT; PAM sequence: TGGGAT
accttggcctcccaaagtgc

SEQ ID NO: 10835 - DNA, 20 bp, Artificial Sequence
  Description of Artificial Sequence: Synthetic oligonucleotide
  Target: ATXN2; (+) strand; PAM type: NNGRRT; PAM sequence: ATGGAT
taaaatatctcttttgttta

SEQ ID NO: 10836 - DNA, 20 bp, Artificial Sequence
  Description of Artificial Sequence: Synthetic oligonucleotide
  Target: ATXN2; (+) strand; PAM type: NNGRRT; PAM sequence: CGGAGT
gcactaattagatatacctt

SEQ ID NO: 10837 - DNA, 20 bp, Artificial Sequence
  Description of Artificial Sequence: Synthetic oligonucleotide
  Target: ATXN2; (+) strand; PAM type: NNGRRT; PAM sequence: GTGGAT
gtacttgcagccaaatatat

SEQ ID NO: 10838 - DNA, 20 bp, Artificial Sequence
  Description of Artificial Sequence: Synthetic oligonucleotide
  Target: ATXN2; (+) strand; PAM type: NNGRRT; PAM sequence: AAGAGT
ctcttctactaatgttattg

SEQ ID NO: 10839 - DNA, 20 bp, Artificial Sequence
  Description of Artificial Sequence: Synthetic oligonucleotide
  Target: ATXN2; (+) strand; PAM type: NNGRRT; PAM sequence: GGGAGT
acaggaaattttctctagtt

SEQ ID NO: 10840 - DNA, 20 bp, Artificial Sequence
  Description of Artificial Sequence: Synthetic oligonucleotide
  Target: ATXN2; (+) strand; PAM type: NNGRRT; PAM sequence: TAGGGT
catttaaatgactggaccca

SEQ ID NO: 10841 - DNA, 20 bp, Artificial Sequence
  Description of Artificial Sequence: Synthetic oligonucleotide
  Target: ATXN2; (+) strand; PAM type: NNGRRT; PAM sequence: AGGAGT
gtaccacctactacgaacta

SEQ ID NO: 10842 - DNA, 20 bp, Artificial Sequence
  Description of Artificial Sequence: Synthetic oligonucleotide
  Target: ATXN2; (+) strand; PAM type: NNGRRT; PAM sequence: AGGAAT
ctgctgatctggctctgctg

SEQ ID NO: 10843 - DNA, 20 bp, Artificial Sequence
  Description of Artificial Sequence: Synthetic oligonucleotide
  Target: ATXN2; (+) strand; PAM type: NNGRRT; PAM sequence: ACGAAT
gccactaagaggaggaaggg

SEQ ID NO: 10844 - DNA, 20 bp, Artificial Sequence
  Description of Artificial Sequence: Synthetic oligonucleotide
  Target: ATXN2; (+) strand; PAM type: NNGRRT; PAM sequence: ATGGAT
tacaaaagaggttattccag

SEQ ID NO: 10845 - DNA, 20 bp, Artificial Sequence
  Description of Artificial Sequence: Synthetic oligonucleotide
  Target: ATXN2; (+) strand; PAM type: NNGRRT; PAM sequence: GTGGGT
cttcttatcccaaactaggt

SEQ ID NO: 10846 - DNA, 20 bp, Artificial Sequence
  Description of Artificial Sequence: Synthetic oligonucleotide
  Target: ATXN2; (+) strand; PAM type: NNGRRT; PAM sequence: ATGAGT
caaactaggtgtgggtaggt

SEQ ID NO: 10847 - DNA, 20 bp, Artificial Sequence
  Description of Artificial Sequence: Synthetic oligonucleotide
  Target: ATXN2; (+) strand; PAM type: NNGRRT; PAM sequence: GGGAAT
gtgtgtgtacctgtacatca

SEQ ID NO: 10848 - DNA, 20 bp, Artificial Sequence
  Description of Artificial Sequence: Synthetic oligonucleotide
  Target: ATXN2; (+) strand; PAM type: NNGRRT; PAM sequence: AAGAGT
tgctagcaattctaagagcc

SEQ ID NO: 10849 - DNA, 20 bp, Artificial Sequence
  Description of Artificial Sequence: Synthetic oligonucleotide
  Target: ATXN2; (+) strand; PAM type: NNGRRT; PAM sequence: GGGAGT
aagagccaagagtgtgctga

SEQ ID NO: 10850 - DNA, 20 bp, Artificial Sequence
  Description of Artificial Sequence: Synthetic oligonucleotide
  Target: ATXN2; (+) strand; PAM type: NNGRRT; PAM sequence: GGGGGT
cagagcagcaggactcagct

SEQ ID NO: 10851 - DNA, 20 bp, Artificial Sequence
  Description of Artificial Sequence: Synthetic oligonucleotide
  Target: ATXN2; (+) strand; PAM type: NNGRRT; PAM sequence: TGGAAT
cagcaggactcagctggggg

SEQ ID NO: 10852 - DNA, 20 bp, Artificial Sequence
  Description of Artificial Sequence: Synthetic oligonucleotide
  Target: ATXN2; (+) strand; PAM type: NNGRRT; PAM sequence: CTGAAT
ggagcattcactagaaatgg

SEQ ID NO: 10853 - DNA, 20 bp, Artificial Sequence
  Description of Artificial Sequence: Synthetic oligonucleotide
  Target: ATXN2; (+) strand; PAM type: NNGRRT; PAM sequence: CTGAAT
tgaccttatttgatactaac

SEQ ID NO: 10854 - DNA, 20 bp, Artificial Sequence
  Description of Artificial Sequence: Synthetic oligonucleotide
  Target: ATXN2; (+) strand; PAM type: NNGRRT; PAM sequence: GTGGAT
ctacattatcttaaagttat

SEQ ID NO: 10855 - DNA, 20 bp, Artificial Sequence
  Description of Artificial Sequence: Synthetic oligonucleotide
  Target: ATXN2; (+) strand; PAM type: NNGRRT; PAM sequence: AAGAAT
atttagccatgtgtattttc

SEQ ID NO: 10856 - DNA, 20 bp, Artificial Sequence
  Description of Artificial Sequence: Synthetic oligonucleotide
  Target: ATXN2; (+) strand; PAM type: NNGRRT; PAM sequence: ACGAGT
acactataggaaaattccaa

SEQ ID NO: 10857 - DNA, 20 bp, Artificial Sequence
  Description of Artificial Sequence: Synthetic oligonucleotide
  Target: ATXN2; (+) strand; PAM type: NNGRRT; PAM sequence: ACGGAT
atttttatagaaccatataa

SEQ ID NO: 10858 - DNA, 20 bp, Artificial Sequence
  Description of Artificial Sequence: Synthetic oligonucleotide
  Target: ATXN2; (+) strand; PAM type: NNGRRT; PAM sequence: CAGGGT
aacggatttttttctcacta

SEQ ID NO: 10859 - DNA, 20 bp, Artificial Sequence
  Description of Artificial Sequence: Synthetic oligonucleotide
  Target: ATXN2; (+) strand; PAM type: NNGRRT; PAM sequence: TTGAGT
gtgaaaatatttagaaagtc

SEQ ID NO: 10860 - DNA, 20 bp, Artificial Sequence
  Description of Artificial Sequence: Synthetic oligonucleotide
  Target: ATXN2; (+) strand; PAM type: NNGRRT; PAM sequence: AAGGAT
tattctaaacaaatttctaa

SEQ ID NO: 10861 - DNA, 20 bp, Artificial Sequence
  Description of Artificial Sequence: Synthetic oligonucleotide
  Target: ATXN2; (+) strand; PAM type: NNGRRT; PAM sequence: CAGAAT
ccaggctttattccactgac

SEQ ID NO: 10862 - DNA, 20 bp, Artificial Sequence
  Description of Artificial Sequence: Synthetic oligonucleotide
  Target: ATXN2; (+) strand; PAM type: NNGRRT; PAM sequence: AAGAAT
cacagaagtgtgattctata

SEQ ID NO: 10863 - DNA, 20 bp, Artificial Sequence
  Description of Artificial Sequence: Synthetic oligonucleotide
  Target: ATXN2; (+) strand; PAM type: NNGRRT; PAM sequence: ATGAGT
aaaagtagctctttctaaag

SEQ ID NO: 10864 - DNA, 20 bp, Artificial Sequence
  Description of Artificial Sequence: Synthetic oligonucleotide
  Target: ATXN2; (+) strand; PAM type: NNGRRT; PAM sequence: GAGAGT
ggggaagatgtgcagaagtg

SEQ ID NO: 10865 - DNA, 20 bp, Artificial Sequence
  Description of Artificial Sequence: Synthetic oligonucleotide
  Target: ATXN2; (+) strand; PAM type: NNGRRT; PAM sequence: CAGGAT
acgaaatgaggctatatcat

SEQ ID NO: 10866 - DNA, 20 bp, Artificial Sequence
  Description of Artificial Sequence: Synthetic oligonucleotide
  Target: ATXN2; (+) strand; PAM type: NNGRRT; PAM sequence: CTGGGT
agctagaaaggaagcaagat

SEQ ID NO: 10867 - DNA, 20 bp, Artificial Sequence
  Description of Artificial Sequence: Synthetic oligonucleotide
  Target: ATXN2; (+) strand; PAM type: NNGRRT; PAM sequence: TTGGAT
gttttacagtggttacaagt

SEQ ID NO: 10868 - DNA, 20 bp, Artificial Sequence
  Description of Artificial Sequence: Synthetic oligonucleotide
  Target: ATXN2; (+) strand; PAM type: NNGRRT; PAM sequence: TGGGGT
tgtttttgttttttcagaga

SEQ ID NO: 10869 - DNA, 20 bp, Artificial Sequence
  Description of Artificial Sequence: Synthetic oligonucleotide
  Target: ATXN2; (+) strand; PAM type: NNGRRT; PAM sequence: TGGAGT
ggggtctttgtcactcatgc

SEQ ID NO: 10870 - DNA, 20 bp, Artificial Sequence
  Description of Artificial Sequence: Synthetic oligonucleotide
  Target: ATXN2; (+) strand; PAM type: NNGRRT; PAM sequence: CTGGAT
agccactatgcccagcaagt

SEQ ID NO: 10871 - DNA, 20 bp, Artificial Sequence
  Description of Artificial Sequence: Synthetic oligonucleotide
  Target: ATXN2; (+) strand; PAM type: NNGRRT; PAM sequence: CAGGAT
aaatagtacaatgttgtaac

SEQ ID NO: 10872 - DNA, 20 bp, Artificial Sequence
  Description of Artificial Sequence: Synthetic oligonucleotide
  Target: ATXN2; (+) strand; PAM type: NNGRRT; PAM sequence: GGGAAT
tctaatctacaggcaactgt

SEQ ID NO: 10873 - DNA, 20 bp, Artificial Sequence
  Description of Artificial Sequence: Synthetic oligonucleotide
  Target: ATXN2; (+) strand; PAM type: NNGRRT; PAM sequence: AAGAAT
tttaccaatgccataagtca

SEQ ID NO: 10874 - DNA, 20 bp, Artificial Sequence
  Description of Artificial Sequence: Synthetic oligonucleotide
  Target: ATXN2; (+) strand; PAM type: NNGRRT; PAM sequence: AAGAAT
gcattgtaacaacaagatgc

SEQ ID NO: 10875 - DNA, 20 bp, Artificial Sequence
  Description of Artificial Sequence: Synthetic oligonucleotide
  Target: ATXN2; (+) strand; PAM type: NNGRRT; PAM sequence: AAGAAT
aaccatcagatgagatgata

SEQ ID NO: 10876 - DNA, 20 bp, Artificial Sequence
  Description of Artificial Sequence: Synthetic oligonucleotide
  Target: ATXN2; (+) strand; PAM type: NNGRRT; PAM sequence: CTGGGT
gaccaacgtgtgaacctctt

SEQ ID NO: 10877 - DNA, 20 bp, Artificial Sequence
  Description of Artificial Sequence: Synthetic oligonucleotide
  Target: ATXN2; (+) strand; PAM type: NNGRRT; PAM sequence: CAGAGT
ccagccccatacccaggaaa

SEQ ID NO: 10878 - DNA, 20 bp, Artificial Sequence
  Description of Artificial Sequence: Synthetic oligonucleotide
  Target: ATXN2; (+) strand; PAM type: NNGRRT; PAM sequence: CAGAAT
ctgagcattttttaaagggc

SEQ ID NO: 10879 - DNA, 20 bp, Artificial Sequence
  Description of Artificial Sequence: Synthetic oligonucleotide
  Target: ATXN2; (+) strand; PAM type: NNGRRT; PAM sequence: CTGGAT
aactataaaatgacataaaa

SEQ ID NO: 10880 - DNA, 20 bp, Artificial Sequence
  Description of Artificial Sequence: Synthetic oligonucleotide
  Target: ATXN2; (+) strand; PAM type: NNGRRT; PAM sequence: CTGAGT
ttagtcatttttagcactta

SEQ ID NO: 10881 - DNA, 20 bp, Artificial Sequence
  Description of Artificial Sequence: Synthetic oligonucleotide
  Target: ATXN2; (+) strand; PAM type: NNGRRT; PAM sequence: GGGGAT
ctcataagtctggacgaggt

SEQ ID NO: 10882 - DNA, 20 bp, Artificial Sequence
  Description of Artificial Sequence: Synthetic oligonucleotide
  Target: ATXN2; (+) strand; PAM type: NNGRRT; PAM sequence: CTGGGT
cctgtaggaactaggagctc

SEQ ID NO: 10883 - DNA, 20 bp, Artificial Sequence
  Description of Artificial Sequence: Synthetic oligonucleotide
  Target: ATXN2; (+) strand; PAM type: NNGRRT; PAM sequence: TAGAAT
cagaaatgaagcaaatcttt

SEQ ID NO: 10884 - DNA, 20 bp, Artificial Sequence
  Description of Artificial Sequence: Synthetic oligonucleotide
  Target: ATXN2; (+) strand; PAM type: NNGRRT; PAM sequence: TCGAAT
atgaagcaaatcttttagaa

SEQ ID NO: 10885 - DNA, 20 bp, Artificial Sequence
  Description of Artificial Sequence: Synthetic oligonucleotide
  Target: ATXN2; (+) strand; PAM type: NNGRRT; PAM sequence: ATGAGT
atcttttagaatcgaataca

SEQ ID NO: 10886 - DNA, 20 bp, Artificial Sequence
  Description of Artificial Sequence: Synthetic oligonucleotide
  Target: ATXN2; (+) strand; PAM type: NNGRRT; PAM sequence: TGGAGT
aaaatggttccaacatagac

SEQ ID NO: 10887 - DNA, 20 bp, Artificial Sequence
  Description of Artificial Sequence: Synthetic oligonucleotide
  Target: ATXN2; (+) strand; PAM type: NNGRRT; PAM sequence: GAGAAT
tactcgggaggctgaggcag

SEQ ID NO: 10888 - DNA, 20 bp, Artificial Sequence
  Description of Artificial Sequence: Synthetic oligonucleotide
  Target: ATXN2; (+) strand; PAM type: NNGRRT; PAM sequence: CGGGGT
aacaaaaaaatgtgtatagg

SEQ ID NO: 10889 - DNA, 20 bp, Artificial Sequence
  Description of Artificial Sequence: Synthetic oligonucleotide
  Target: ATXN2; (+) strand; PAM type: NNGRRT; PAM sequence: GCGGAT
actttgggaggccgaggcgg

SEQ ID NO: 10890 - DNA, 20 bp, Artificial Sequence
  Description of Artificial Sequence: Synthetic oligonucleotide
  Target: ATXN2; (+) strand; PAM type: NNGRRT; PAM sequence: CGGAGT
cgggcggatcacctgaggtc

SEQ ID NO: 10891 - DNA, 20 bp, Artificial Sequence
  Description of Artificial Sequence: Synthetic oligonucleotide
  Target: ATXN2; (+) strand; PAM type: NNGRRT; PAM sequence: GAGAAT
tgctcgggaggctgaagcag

SEQ ID NO: 10892 - DNA, 20 bp, Artificial Sequence
  Description of Artificial Sequence: Synthetic oligonucleotide
  Target: ATXN2; (+) strand; PAM type: NNGRRT; PAM sequence: CTGGGT
tcgcaccattgcactccagc

SEQ ID NO: 10893 - DNA, 20 bp, Artificial Sequence
  Description of Artificial Sequence: Synthetic oligonucleotide
  Target: ATXN2; (+) strand; PAM type: NNGRRT; PAM sequence: GCGGGT
cagcactttgggaggctgag

SEQ ID NO: 10894 - DNA, 20 bp, Artificial Sequence
  Description of Artificial Sequence: Synthetic oligonucleotide
  Target: ATXN2; (+) strand; PAM type: NNGRRT; PAM sequence: GTGGAT
actttgggaggctgaggcgg

SEQ ID NO: 10895 - DNA, 20 bp, Artificial Sequence
  Description of Artificial Sequence: Synthetic oligonucleotide
  Target: ATXN2; (+) strand; PAM type: NNGRRT; PAM sequence: GCGAAT
tactcgggaggctgaggcag

SEQ ID NO: 10896 - DNA, 20 bp, Artificial Sequence
  Description of Artificial Sequence: Synthetic oligonucleotide
  Target: ATXN2; (+) strand; PAM type: NNGRRT; PAM sequence: TTGAAT
gcaggcgaattgcttgaacc

SEQ ID NO: 10897 - DNA, 20 bp, Artificial Sequence
  Description of Artificial Sequence: Synthetic oligonucleotide
  Target: ATXN2; (+) strand; PAM type: NNGRRT; PAM sequence: CTGAAT
aatatgtgtataaacatttt

SEQ ID NO: 10898 - DNA, 20 bp, Artificial Sequence
  Description of Artificial Sequence: Synthetic oligonucleotide
  Target: ATXN2; (+) strand; PAM type: NNGRRT; PAM sequence: GGGGGT
ttccccagggaagtgggact

SEQ ID NO: 10899 - DNA, 20 bp, Artificial Sequence
  Description of Artificial Sequence: Synthetic oligonucleotide
  Target: ATXN2; (+) strand; PAM type: NNGRRT; PAM sequence: TTGAAT
gagaggagattatcttttca

SEQ ID NO: 10900 - DNA, 20 bp, Artificial Sequence
  Description of Artificial Sequence: Synthetic oligonucleotide
  Target: ATXN2; (+) strand; PAM type: NNGRRT; PAM sequence: CTGAAT
tgaatactcatctgttctaa

SEQ ID NO: 10901 - DNA, 20 bp, Artificial Sequence
  Description of Artificial Sequence: Synthetic oligonucleotide
  Target: ATXN2; (+) strand; PAM type: NNGRRT; PAM sequence: AAGAAT
tattaaagactataatactg

SEQ ID NO: 10902 - DNA, 20 bp, Artificial Sequence
  Description of Artificial Sequence: Synthetic oligonucleotide
  Target: ATXN2; (+) strand; PAM type: NNGRRT; PAM sequence: GGGGAT
ataacacaaagaaacaagtt

SEQ ID NO: 10903 - DNA, 20 bp, Artificial Sequence
  Description of Artificial Sequence: Synthetic oligonucleotide
  Target: ATXN2; (+) strand; PAM type: NNGRRT; PAM sequence: AAGGGT
tggggataagaaacacagtt

SEQ ID NO: 10904 - DNA, 20 bp, Artificial Sequence
  Description of Artificial Sequence: Synthetic oligonucleotide
  Target: ATXN2; (+) strand; PAM type: NNGRRT; PAM sequence: CAGGAT
aagaaacacagttaagggtg

SEQ ID NO: 10905 - DNA, 20 bp, Artificial Sequence
  Description of Artificial Sequence: Synthetic oligonucleotide
  Target: ATXN2; (+) strand; PAM type: NNGRRT; PAM sequence: TAGAAT
tggagccacgctcctcaggc

SEQ ID NO: 10906 - DNA, 20 bp, Artificial Sequence
  Description of Artificial Sequence: Synthetic oligonucleotide
  Target: ATXN2; (+) strand; PAM type: NNGRRT; PAM sequence: TGGGGT
ccacgctcctcaggctagaa

SEQ ID NO: 10907 - DNA, 20 bp, Artificial Sequence
  Description of Artificial Sequence: Synthetic oligonucleotide
  Target: ATXN2; (+) strand; PAM type: NNGRRT; PAM sequence: AGGGGT
tcctcaggctagaatggggt

SEQ ID NO: 10908 - DNA, 20 bp, Artificial Sequence
  Description of Artificial Sequence: Synthetic oligonucleotide
  Target: ATXN2; (+) strand; PAM type: NNGRRT; PAM sequence: AGGGAT
ctgtggggagcctctagatt

SEQ ID NO: 10909 - DNA, 20 bp, Artificial Sequence
  Description of Artificial Sequence: Synthetic oligonucleotide
  Target: ATXN2; (+) strand; PAM type: NNGRRT; PAM sequence: CAGAAT
gaagcctatgaaaccgtatt

SEQ ID NO: 10910 - DNA, 20 bp, Artificial Sequence
  Description of Artificial Sequence: Synthetic oligonucleotide
  Target: ATXN2; (+) strand; PAM type: NNGRRT; PAM sequence: GCGGAT
cccacaagttcaaggccaga

SEQ ID NO: 10911 - DNA, 20 bp, Artificial Sequence
  Description of Artificial Sequence: Synthetic oligonucleotide
  Target: ATXN2; (+) strand; PAM type: NNGRRT; PAM sequence: CCGGGT
tttctaaaaataatttgagg

SEQ ID NO: 10912 - DNA, 20 bp, Artificial Sequence
  Description of Artificial Sequence: Synthetic oligonucleotide
  Target: ATXN2; (+) strand; PAM type: NNGRRT; PAM sequence: GCGGAT
cactttggaagccaaggcag

SEQ ID NO: 10913 - DNA, 20 bp, Artificial Sequence
  Description of Artificial Sequence: Synthetic oligonucleotide
  Target: ATXN2; (+) strand; PAM type: NNGRRT; PAM sequence: AGGAGT
caggcggatcacttgaggtc

SEQ ID NO: 10914 - DNA, 20 bp, Artificial Sequence
  Description of Artificial Sequence: Synthetic oligonucleotide
  Target: ATXN2; (+) strand; PAM type: NNGRRT; PAM sequence: GAGAAT
tactcaggaggctgaggcag

SEQ ID NO: 10915 - DNA, 20 bp, Artificial Sequence
  Description of Artificial Sequence: Synthetic oligonucleotide
  Target: ATXN2; (+) strand; PAM type: NNGRRT; PAM sequence: CTGAGT
atcaagcgatatgaaattaa

SEQ ID NO: 10916 - DNA, 20 bp, Artificial Sequence
  Description of Artificial Sequence: Synthetic oligonucleotide
  Target: ATXN2; (+) strand; PAM type: NNGRRT; PAM sequence: CTGAAT
catccaaggtcatcaatgcc

SEQ ID NO: 10917 - DNA, 20 bp, Artificial Sequence
  Description of Artificial Sequence: Synthetic oligonucleotide
  Target: ATXN2; (+) strand; PAM type: NNGRRT; PAM sequence: GAGAAT
attctctccacaaattcttt

SEQ ID NO: 10918 - DNA, 20 bp, Artificial Sequence
  Description of Artificial Sequence: Synthetic oligonucleotide
  Target: ATXN2; (+) strand; PAM type: NNGRRT; PAM sequence: AAGAAT
agaatccacagatccaggtg

SEQ ID NO: 10919 - DNA, 20 bp, Artificial Sequence
  Description of Artificial Sequence: Synthetic oligonucleotide
  Target: ATXN2; (+) strand; PAM type: NNGRRT; PAM sequence: ATGAAT
aggaagaaagagcctctgcc

SEQ ID NO: 10920 - DNA, 20 bp, Artificial Sequence
  Description of Artificial Sequence: Synthetic oligonucleotide
  Target: ATXN2; (+) strand; PAM type: NNGRRT; PAM sequence: AGGAGT
caaataggtgagggactgga

SEQ ID NO: 10921 - DNA, 20 bp, Artificial Sequence
  Description of Artificial Sequence: Synthetic oligonucleotide
  Target: ATXN2; (+) strand; PAM type: NNGRRT; PAM sequence: CTGGAT
ctccagccacacccagcagg

SEQ ID NO: 10922 - DNA, 20 bp, Artificial Sequence
  Description of Artificial Sequence: Synthetic oligonucleotide
  Target: ATXN2; (+) strand; PAM type: NNGRRT; PAM sequence: AGGAGT
cacacccagcaggctggatt

SEQ ID NO: 10923 - DNA, 20 bp, Artificial Sequence
  Description of Artificial Sequence: Synthetic oligonucleotide
  Target: ATXN2; (+) strand; PAM type: NNGRRT; PAM sequence: CAGAGT
caggctggattaggagtaga

SEQ ID NO: 10924 - DNA, 20 bp, Artificial Sequence
  Description of Artificial Sequence: Synthetic oligonucleotide
  Target: ATXN2; (+) strand; PAM type: NNGRRT; PAM sequence: GAGAAT
aacactgtgaggggcaagaa

SEQ ID NO: 10925 - DNA, 20 bp, Artificial Sequence
  Description of Artificial Sequence: Synthetic oligonucleotide
  Target: ATXN2; (+) strand; PAM type: NNGRRT; PAM sequence: CAGAGT
gtaaagtttatagctgtggt

SEQ ID NO: 10926 - DNA, 20 bp, Artificial Sequence
  Description of Artificial Sequence: Synthetic oligonucleotide
  Target: ATXN2; (+) strand; PAM type: NNGRRT; PAM sequence: CCGAGT
tggaagagaagcagttcctt

SEQ ID NO: 10927 - DNA, 20 bp, Artificial Sequence
  Description of Artificial Sequence: Synthetic oligonucleotide
  Target: ATXN2; (+) strand; PAM type: NNGRRT; PAM sequence: CAGGAT
tgatgacacagtcatgaaag

SEQ ID NO: 10928 - DNA, 20 bp, Artificial Sequence
  Description of Artificial Sequence: Synthetic oligonucleotide
  Target: ATXN2; (+) strand; PAM type: NNGRRT; PAM sequence: AGGGAT
tacaacgccgtggaggtgaa

SEQ ID NO: 10929 - DNA, 20 bp, Artificial Sequence
  Description of Artificial Sequence: Synthetic oligonucleotide
  Target: ATXN2; (+) strand; PAM type: NNGRRT; PAM sequence: AAGAAT
ttaggaggctatgtttccta

SEQ ID NO: 10930 - DNA, 20 bp, Artificial Sequence
  Description of Artificial Sequence: Synthetic oligonucleotide
  Target: ATXN2; (+) strand; PAM type: NNGRRT; PAM sequence: GGGGAT
gttgtccttcagcatctatg

SEQ ID NO: 10931 - DNA, 20 bp, Artificial Sequence
  Description of Artificial Sequence: Synthetic oligonucleotide
  Target: ATXN2; (+) strand; PAM type: NNGRRT; PAM sequence: AGGGAT
gattggttctaataccccct

SEQ ID NO: 10932 - DNA, 20 bp, Artificial Sequence
  Description of Artificial Sequence: Synthetic oligonucleotide
  Target: ATXN2; (+) strand; PAM type: NNGRRT; PAM sequence: AGGGAT
ccctagggataccaaaatcc

SEQ ID NO: 10933 - DNA, 20 bp, Artificial Sequence
  Description of Artificial Sequence: Synthetic oligonucleotide
  Target: ATXN2; (+) strand; PAM type: NNGRRT; PAM sequence: AGGAAT
aatagttgtggtactgctta

SEQ ID NO: 10934 - DNA, 20 bp, Artificial Sequence
  Description of Artificial Sequence: Synthetic oligonucleotide
  Target: ATXN2; (+) strand; PAM type: NNGRRT; PAM sequence: TGGAGT
tcacactctgttgcgcaggc

SEQ ID NO: 10935 - DNA, 20 bp, Artificial Sequence
  Description of Artificial Sequence: Synthetic oligonucleotide
  Target: ATXN2; (+) strand; PAM type: NNGRRT; PAM sequence: TCGAGT
aaattgcttgtctcaacctc

SEQ ID NO: 10936 - DNA, 20 bp, Artificial Sequence
  Description of Artificial Sequence: Synthetic oligonucleotide
  Target: ATXN2; (+) strand; PAM type: NNGRRT; PAM sequence: TGGGAT
gtctcaacctctcgagtagc

SEQ ID NO: 10937 - DNA, 20 bp, Artificial Sequence
  Description of Artificial Sequence: Synthetic oligonucleotide
  Target: ATXN2; (+) strand; PAM type: NNGRRT; PAM sequence: TAGGGT
ttttgtacttatagtagagc

SEQ ID NO: 10938 - DNA, 20 bp, Artificial Sequence
  Description of Artificial Sequence: Synthetic oligonucleotide
  Target: ATXN2; (+) strand; PAM type: NNGRRT; PAM sequence: TGGAAT
gcctcagcctccctaagtgc

SEQ ID NO: 10939 - DNA, 20 bp, Artificial Sequence
  Description of Artificial Sequence: Synthetic oligonucleotide
  Target: ATXN2; (+) strand; PAM type: NNGRRT; PAM sequence: TTGGAT
cagcgtatttcccatatatt

SEQ ID NO: 10940 - DNA, 20 bp, Artificial Sequence
  Description of Artificial Sequence: Synthetic oligonucleotide
  Target: ATXN2; (+) strand; PAM type: NNGRRT; PAM sequence: TTGAAT
tattttggatccatggttgg

SEQ ID NO: 10941 - DNA, 20 bp, Artificial Sequence
  Description of Artificial Sequence: Synthetic oligonucleotide
  Target: ATXN2; (+) strand; PAM type: NNGRRT; PAM sequence: ATGGAT
aattcacagctgtgtaaccc

SEQ ID NO: 10942 - DNA, 20 bp, Artificial Sequence
  Description of Artificial Sequence: Synthetic oligonucleotide
  Target: ATXN2; (+) strand; PAM type: NNGRRT; PAM sequence: ATGAAT
cccagccacaaaactaagaa

SEQ ID NO: 10943 - DNA, 20 bp, Artificial Sequence
  Description of Artificial Sequence: Synthetic oligonucleotide
  Target: ATXN2; (+) strand; PAM type: NNGRRT; PAM sequence: AGGAGT
aaacagttattccctggttt

SEQ ID NO: 10944 - DNA, 20 bp, Artificial Sequence
  Description of Artificial Sequence: Synthetic oligonucleotide
  Target: ATXN2; (+) strand; PAM type: NNGRRT; PAM sequence: TTGGGT
cctggtttaggagtataaaa

SEQ ID NO: 10945 - DNA, 20 bp, Artificial Sequence
  Description of Artificial Sequence: Synthetic oligonucleotide
  Target: ATXN2; (+) strand; PAM type: NNGRRT; PAM sequence: GTGAGT
ggagtataaaattgggtcta

SEQ ID NO: 10946 - DNA, 20 bp, Artificial Sequence
  Description of Artificial Sequence: Synthetic oligonucleotide
  Target: ATXN2; (+) strand; PAM type: NNGRRT; PAM sequence: AGGAGT
caggtggactgcctgagctc

SEQ ID NO: 10947 - DNA, 20 bp, Artificial Sequence
  Description of Artificial Sequence: Synthetic oligonucleotide
  Target: ATXN2; (+) strand; PAM type: NNGRRT; PAM sequence: GAGAAT
tactcgggaggctgaggtgg

SEQ ID NO: 10948 - DNA, 20 bp, Artificial Sequence
  Description of Artificial Sequence: Synthetic oligonucleotide
  Target: ATXN2; (+) strand; PAM type: NNGRRT; PAM sequence: TAGAGT
ccacactccaacctcagtga

SEQ ID NO: 10949 - DNA, 20 bp, Artificial Sequence
  Description of Artificial Sequence: Synthetic oligonucleotide
  Target: ATXN2; (+) strand; PAM type: NNGRRT; PAM sequence: AGGAAT
acttttcaaaaatcaatcaa

SEQ ID NO: 10950 - DNA, 20 bp, Artificial Sequence
  Description of Artificial Sequence: Synthetic oligonucleotide
  Target: ATXN2; (+) strand; PAM type: NNGRRT; PAM sequence: ATGAGT
ctacatactgcttcgtgaag

SEQ ID NO: 10951 - DNA, 20 bp, Artificial Sequence
  Description of Artificial Sequence: Synthetic oligonucleotide
  Target: ATXN2; (+) strand; PAM type: NNGRRT; PAM sequence: TGGAGT
ccccagaaggcaagggaaag

SEQ ID NO: 10952 - DNA, 20 bp, Artificial Sequence
  Description of Artificial Sequence: Synthetic oligonucleotide
  Target: ATXN2; (+) strand; PAM type: NNGRRT; PAM sequence: AAGAGT
accaaagccttgttttaact

SEQ ID NO: 10953 - DNA, 20 bp, Artificial Sequence
  Description of Artificial Sequence: Synthetic oligonucleotide
  Target: ATXN2; (+) strand; PAM type: NNGRRT; PAM sequence: TGGGAT
gttttaactaagagtcagca

SEQ ID NO: 10954 - DNA, 20 bp, Artificial Sequence
  Description of Artificial Sequence: Synthetic oligonucleotide
  Target: ATXN2; (+) strand; PAM type: NNGRRT; PAM sequence: GAGGAT
acttggggaggctgagatgg

SEQ ID NO: 10955 - DNA, 20 bp, Artificial Sequence
  Description of Artificial Sequence: Synthetic oligonucleotide
  Target: ATXN2; (+) strand; PAM type: NNGRRT; PAM sequence: AGGAGT
tgggaggatcaagtgagccc

SEQ ID NO: 10956 - DNA, 20 bp, Artificial Sequence
  Description of Artificial Sequence: Synthetic oligonucleotide
  Target: ATXN2; (+) strand; PAM type: NNGRRT; PAM sequence: TAGGGT
aaacaaaaaaattagccagg

SEQ ID NO: 10957 - DNA, 20 bp, Artificial Sequence
  Description of Artificial Sequence: Synthetic oligonucleotide
  Target: ATXN2; (+) strand; PAM type: NNGRRT; PAM sequence: AGGGGT
tggcgccactgcattctagt

SEQ ID NO: 10958 - DNA, 20 bp, Artificial Sequence
  Description of Artificial Sequence: Synthetic oligonucleotide
  Target: ATXN2; (+) strand; PAM type: NNGRRT; PAM sequence: TGGGAT
gtaaggtagattcttcacgt

SEQ ID NO: 10959 - DNA, 20 bp, Artificial Sequence
  Description of Artificial Sequence: Synthetic oligonucleotide
  Target: ATXN2; (+) strand; PAM type: NNGRRT; PAM sequence: AGGAGT
ttcacgttgggattaaatcc

SEQ ID NO: 10960 - DNA, 20 bp, Artificial Sequence
  Description of Artificial Sequence: Synthetic oligonucleotide
  Target: ATXN2; (+) strand; PAM type: NNGRRT; PAM sequence: GTGGAT
aatttgggagcccaaggcag

SEQ ID NO: 10961 - DNA, 20 bp, Artificial Sequence
  Description of Artificial Sequence: Synthetic oligonucleotide
  Target: ATXN2; (+) strand; PAM type: NNGRRT; PAM sequence: AGGAGT
ggcaggtggatcacaaggtc

SEQ ID NO: 10962 - DNA, 20 bp, Artificial Sequence
  Description of Artificial Sequence: Synthetic oligonucleotide
  Target: ATXN2; (+) strand; PAM type: NNGRRT; PAM sequence: GAGAAT
ttctcgggaggctcaggcag

SEQ ID NO: 10963 - DNA, 20 bp, Artificial Sequence
  Description of Artificial Sequence: Synthetic oligonucleotide
  Target: ATXN2; (+) strand; PAM type: NNGRRT; PAM sequence: CAGAGT
ctgcactccaacctgggcaa

SEQ ID NO: 10964 - DNA, 20 bp, Artificial Sequence
  Description of Artificial Sequence: Synthetic oligonucleotide
  Target: ATXN2; (+) strand; PAM type: NNGRRT; PAM sequence: GCGGAT
actttgggaggccgaggtgg

SEQ ID NO: 10965 - DNA, 20 bp, Artificial Sequence
  Description of Artificial Sequence: Synthetic oligonucleotide
  Target: ATXN2; (+) strand; PAM type: NNGRRT; PAM sequence: GAGAAT
tacttgggaggctgaggcag

SEQ ID NO: 10966 - DNA, 20 bp, Artificial Sequence
  Description of Artificial Sequence: Synthetic oligonucleotide
  Target: ATXN2; (+) strand; PAM type: NNGRRT; PAM sequence: AGGGAT
gccactgaagattttgagca

SEQ ID NO: 10967 - DNA, 20 bp, Artificial Sequence
  Description of Artificial Sequence: Synthetic oligonucleotide
  Target: ATXN2; (+) strand; PAM type: NNGRRT; PAM sequence: AAGAAT
atctaataaaagcaatgtct

SEQ ID NO: 10968 - DNA, 20 bp, Artificial Sequence
  Description of Artificial Sequence: Synthetic oligonucleotide
  Target: ATXN2; (+) strand; PAM type: NNGRRT; PAM sequence: TAGGAT
actacttcttactctcccac

SEQ ID NO: 10969 - DNA, 20 bp, Artificial Sequence
  Description of Artificial Sequence: Synthetic oligonucleotide
  Target: ATXN2; (+) strand; PAM type: NNGRRT; PAM sequence: ATGGGT
cttcttactctcccactagg

SEQ ID NO: 10970 - DNA, 20 bp, Artificial Sequence
  Description of Artificial Sequence: Synthetic oligonucleotide
  Target: ATXN2; (+) strand; PAM type: NNGRRT; PAM sequence: GAGGAT
agacaataacaaatgctggt

SEQ ID NO: 10971 - DNA, 20 bp, Artificial Sequence
  Description of Artificial Sequence: Synthetic oligonucleotide
  Target: ATXN2; (+) strand; PAM type: NNGRRT; PAM sequence: TAGGAT
gaaacctcagacactgctag

SEQ ID NO: 10972 - DNA, 20 bp, Artificial Sequence
  Description of Artificial Sequence: Synthetic oligonucleotide
  Target: ATXN2; (+) strand; PAM type: NNGRRT; PAM sequence: TAGGAT
ctacgttggaaacagctatg

SEQ ID NO: 10973 - DNA, 20 bp, Artificial Sequence
  Description of Artificial Sequence: Synthetic oligonucleotide
  Target: ATXN2; (+) strand; PAM type: NNGRRT; PAM sequence: ATGAGT
gcaggtatgtgtatgtatgt

SEQ ID NO: 10974 - DNA, 20 bp, Artificial Sequence
  Description of Artificial Sequence: Synthetic oligonucleotide
  Target: ATXN2; (+) strand; PAM type: NNGRRT; PAM sequence: GAGAAT
gcatacacacacacccccat

SEQ ID NO: 10975 - DNA, 20 bp, Artificial Sequence
  Description of Artificial Sequence: Synthetic oligonucleotide
  Target: ATXN2; (+) strand; PAM type: NNGRRT; PAM sequence: TGGAGT
tttcactctgtcacccaggc

SEQ ID NO: 10976 - DNA, 20 bp, Artificial Sequence
  Description of Artificial Sequence: Synthetic oligonucleotide
  Target: ATXN2; (+) strand; PAM type: NNGRRT; PAM sequence: CAGGGT
ttttgtatttttagtagaga

SEQ ID NO: 10977 - DNA, 20 bp, Artificial Sequence
  Description of Artificial Sequence: Synthetic oligonucleotide
  Target: ATXN2; (+) strand; PAM type: NNGRRT; PAM sequence: TGGGAT
gccccagcctcccaaagtgc

SEQ ID NO: 10978 - DNA, 20 bp, Artificial Sequence
  Description of Artificial Sequence: Synthetic oligonucleotide
  Target: ATXN2; (+) strand; PAM type: NNGRRT; PAM sequence: CAGGAT
ttaaaagtcactgttcgcag

SEQ ID NO: 10979 - DNA, 20 bp, Artificial Sequence
  Description of Artificial Sequence: Synthetic oligonucleotide
  Target: ATXN2; (+) strand; PAM type: NNGRRT; PAM sequence: ATGAAT
atgaaaatgtccaccaactg

SEQ ID NO: 10980 - DNA, 20 bp, Artificial Sequence
  Description of Artificial Sequence: Synthetic oligonucleotide
  Target: ATXN2; (+) strand; PAM type: NNGRRT; PAM sequence: TGGAAT
gtacctgtgtaactgtataa

SEQ ID NO: 10981 - DNA, 20 bp, Artificial Sequence
  Description of Artificial Sequence: Synthetic oligonucleotide
  Target: ATXN2; (+) strand; PAM type: NNGRRT; PAM sequence: GGGAGT
ggctgcaatcccagcacttt

SEQ ID NO: 10982 - DNA, 20 bp, Artificial Sequence
  Description of Artificial Sequence: Synthetic oligonucleotide
  Target: ATXN2; (+) strand; PAM type: NNGRRT; PAM sequence: AGGAAT
tgggcagatcacttgaggtc

SEQ ID NO: 10983 - DNA, 20 bp, Artificial Sequence
  Description of Artificial Sequence: Synthetic oligonucleotide
  Target: ATXN2; (+) strand; PAM type: NNGRRT; PAM sequence: GAGAAT
tactcaagaggctgaggcag

SEQ ID NO: 10984 - DNA, 20 bp, Artificial Sequence
  Description of Artificial Sequence: Synthetic oligonucleotide
  Target: ATXN2; (+) strand; PAM type: NNGRRT; PAM sequence: GAGGAT
tcgcttcaacctgggaggca

SEQ ID NO: 10985 - DNA, 20 bp, Artificial Sequence
  Description of Artificial Sequence: Synthetic oligonucleotide
  Target: ATXN2; (+) strand; PAM type: NNGRRT; PAM sequence: CAGAAT
ttccattaatacgcaatgtc

SEQ ID NO: 10986 - DNA, 20 bp, Artificial Sequence
  Description of Artificial Sequence: Synthetic oligonucleotide
  Target: ATXN2; (+) strand; PAM type: NNGRRT; PAM sequence: AGGGGT
caaacagagaggaactgcta

SEQ ID NO: 10987 - DNA, 20 bp, Artificial Sequence
  Description of Artificial Sequence: Synthetic oligonucleotide
  Target: ATXN2; (+) strand; PAM type: NNGRRT; PAM sequence: CAGAGT
agaggaactgctaaggggtt

SEQ ID NO: 10988 - DNA, 20 bp, Artificial Sequence
  Description of Artificial Sequence: Synthetic oligonucleotide
  Target: ATXN2; (+) strand; PAM type: NNGRRT; PAM sequence: CAGGGT
aggggttcagagtttctttt

SEQ ID NO: 10989 - DNA, 20 bp, Artificial Sequence
  Description of Artificial Sequence: Synthetic oligonucleotide
  Target: ATXN2; (+) strand; PAM type: NNGRRT; PAM sequence: GTGAAT
agtgatggttgcacaatgct

SEQ ID NO: 10990 - DNA, 20 bp, Artificial Sequence
  Description of Artificial Sequence: Synthetic oligonucleotide
  Target: ATXN2; (+) strand; PAM type: NNGRRT; PAM sequence: GAGGAT
actttgggaggctggggcag

SEQ ID NO: 10991 - DNA, 20 bp, Artificial Sequence
  Description of Artificial Sequence: Synthetic oligonucleotide
  Target: ATXN2; (+) strand; PAM type: NNGRRT; PAM sequence: CAGAGT
caggaggatcatttgaggcc

SEQ ID NO: 10992 - DNA, 20 bp, Artificial Sequence
  Description of Artificial Sequence: Synthetic oligonucleotide
  Target: ATXN2; (+) strand; PAM type: NNGRRT; PAM sequence: AGGAGT
aataacaacaaaaattagcc

SEQ ID NO: 10993 - DNA, 20 bp, Artificial Sequence
  Description of Artificial Sequence: Synthetic oligonucleotide
  Target: ATXN2; (+) strand; PAM type: NNGRRT; PAM sequence: GTGAAT
agcttaatcaggaggctaag

SEQ ID NO: 10994 - DNA, 20 bp, Artificial Sequence
  Description of Artificial Sequence: Synthetic oligonucleotide
  Target: ATXN2; (+) strand; PAM type: NNGRRT; PAM sequence: ATGAGT
aaggtgaatcacctgaaccc

SEQ ID NO: 10995 - DNA, 20 bp, Artificial Sequence
  Description of Artificial Sequence: Synthetic oligonucleotide
  Target: ATXN2; (+) strand; PAM type: NNGRRT; PAM sequence: ATGAAT
taattttctccctatctcaa

SEQ ID NO: 10996 - DNA, 20 bp, Artificial Sequence
  Description of Artificial Sequence: Synthetic oligonucleotide
  Target: ATXN2; (+) strand; PAM type: NNGRRT; PAM sequence: TTGGAT
ctgtttgtgagaggtacaaa

SEQ ID NO: 10997 - DNA, 20 bp, Artificial Sequence
  Description of Artificial Sequence: Synthetic oligonucleotide
  Target: ATXN2; (+) strand; PAM type: NNGRRT; PAM sequence: CAGGGT
aacctttttttttttgaaac

SEQ ID NO: 10998 - DNA, 20 bp, Artificial Sequence
  Description of Artificial Sequence: Synthetic oligonucleotide
  Target: ATXN2; (+) strand; PAM type: NNGRRT; PAM sequence: CCGAAT
gatcctctcacctctgccac

SEQ ID NO: 10999 - DNA, 20 bp, Artificial Sequence
  Description of Artificial Sequence: Synthetic oligonucleotide
  Target: ATXN2; (+) strand; PAM type: NNGRRT; PAM sequence: CGGGGT
ttgtattttttttgtagaaa

SEQ ID NO: 11000 - DNA, 20 bp, Artificial Sequence
  Description of Artificial Sequence: Synthetic oligonucleotide
  Target: ATXN2; (+) strand; PAM type: NNGRRT; PAM sequence: AGGAAT
tcccaaagtgctgagattac

SEQ ID NO: 11001 - DNA, 20 bp, Artificial Sequence
  Description of Artificial Sequence: Synthetic oligonucleotide
  Target: ATXN2; (+) strand; PAM type: NNGRRT; PAM sequence: CTGAGT
taatcagattcctctgaaag

SEQ ID NO: 11002 - DNA, 20 bp, Artificial Sequence
  Description of Artificial Sequence: Synthetic oligonucleotide
  Target: ATXN2; (+) strand; PAM type: NNGRRT; PAM sequence: CAGAAT
gatcaatagcccatgctcta

SEQ ID NO: 11003 - DNA, 20 bp, Artificial Sequence
  Description of Artificial Sequence: Synthetic oligonucleotide
  Target: ATXN2; (+) strand; PAM type: NNGRRT; PAM sequence: CTGAGT
atcaaattctacagcaaagc

SEQ ID NO: 11004 - DNA, 20 bp, Artificial Sequence
  Description of Artificial Sequence: Synthetic oligonucleotide
  Target: ATXN2; (+) strand; PAM type: NNGRRT; PAM sequence: ATGGGT
ccaatacaaagatactgttt

SEQ ID NO: 11005 - DNA, 20 bp, Artificial Sequence
  Description of Artificial Sequence: Synthetic oligonucleotide
  Target: ATXN2; (+) strand; PAM type: NNGRRT; PAM sequence: CTGGAT
tcattttctccattaggctt

SEQ ID NO: 11006 - DNA, 20 bp, Artificial Sequence
  Description of Artificial Sequence: Synthetic oligonucleotide
  Target: ATXN2; (+) strand; PAM type: NNGRRT; PAM sequence: CAGGAT
tctccattaggcttctggat

SEQ ID NO: 11007 - DNA, 20 bp, Artificial Sequence
  Description of Artificial Sequence: Synthetic oligonucleotide
  Target: ATXN2; (+) strand; PAM type: NNGRRT; PAM sequence: GAGGAT
ctttgggaggctgaggcaaa

SEQ ID NO: 11008 - DNA, 20 bp, Artificial Sequence
  Description of Artificial Sequence: Synthetic oligonucleotide
  Target: ATXN2; (+) strand; PAM type: NNGRRT; PAM sequence: AGGAGT
aaagaggattgcttgggctc

SEQ ID NO: 11009 - DNA, 20 bp, Artificial Sequence
  Description of Artificial Sequence: Synthetic oligonucleotide
  Target: ATXN2; (+) strand; PAM type: NNGRRT; PAM sequence: GAGAGT
aaaaagaaaaattctaaaaa

SEQ ID NO: 11010 - DNA, 20 bp, Artificial Sequence
  Description of Artificial Sequence: Synthetic oligonucleotide
  Target: ATXN2; (+) strand; PAM type: NNGRRT; PAM sequence: CCGGGT
agagaaagaaaaaaagaagg

SEQ ID NO: 11011 - DNA, 20 bp, Artificial Sequence
  Description of Artificial Sequence: Synthetic oligonucleotide
  Target: ATXN2; (+) strand; PAM type: NNGRRT; PAM sequence: GCGGAT
cagcactttgggaggccgag

SEQ ID NO: 11012 - DNA, 20 bp, Artificial Sequence
  Description of Artificial Sequence: Synthetic oligonucleotide
  Target: ATXN2; (+) strand; PAM type: NNGRRT; PAM sequence: ATGGAT
actttgggaggccgaggcgg

SEQ ID NO: 11013 - DNA, 20 bp, Artificial Sequence
  Description of Artificial Sequence: Synthetic oligonucleotide
  Target: ATXN2; (+) strand; PAM type: NNGRRT; PAM sequence: GCGGGT
aaaattagccgggcgctgtg

SEQ ID NO: 11014 - DNA, 20 bp, Artificial Sequence
  Description of Artificial Sequence: Synthetic oligonucleotide
  Target: ATXN2; (+) strand; PAM type: NNGRRT; PAM sequence: AAGAAT
aagtaaattcagaaatgttc

SEQ ID NO: 11015 - DNA, 20 bp, Artificial Sequence
  Description of Artificial Sequence: Synthetic oligonucleotide
  Target: ATXN2; (+) strand; PAM type: NNGRRT; PAM sequence: CAGAAT
aatgttcaagaatcaaaaaa

SEQ ID NO: 11016 - DNA, 20 bp, Artificial Sequence
  Description of Artificial Sequence: Synthetic oligonucleotide
  Target: ATXN2; (+) strand; PAM type: NNGRRT; PAM sequence: AGGAAT
agaatcaaaaaacagaattt

SEQ ID NO: 11017 - DNA, 20 bp, Artificial Sequence
  Description of Artificial Sequence: Synthetic oligonucleotide
  Target: ATXN2; (+) strand; PAM type: NNGRRT; PAM sequence: AAGAAT
aaatgccaatactattagtg

SEQ ID NO: 11018 - DNA, 20 bp, Artificial Sequence
  Description of Artificial Sequence: Synthetic oligonucleotide
  Target: ATXN2; (+) strand; PAM type: NNGRRT; PAM sequence: CAGAAT
aaacctatggcaaaagtgtt

SEQ ID NO: 11019 - DNA, 20 bp, Artificial Sequence
  Description of Artificial Sequence: Synthetic oligonucleotide
  Target: ATXN2; (+) strand; PAM type: NNGRRT; PAM sequence: TCGGAT
atgtaaaacattttatagat

SEQ ID NO: 11020 - DNA, 20 bp, Artificial Sequence
  Description of Artificial Sequence: Synthetic oligonucleotide
  Target: ATXN2; (+) strand; PAM type: NNGRRT; PAM sequence: AGGAGT
cccacttaatattctttccc

SEQ ID NO: 11021 - DNA, 20 bp, Artificial Sequence
  Description of Artificial Sequence: Synthetic oligonucleotide
  Target: ATXN2; (+) strand; PAM type: NNGRRT; PAM sequence: GAGAGT
tacctattctttacctaata

SEQ ID NO: 11022 - DNA, 20 bp, Artificial Sequence
  Description of Artificial Sequence: Synthetic oligonucleotide
  Target: ATXN2; (+) strand; PAM type: NNGRRT; PAM sequence: AAGAAT
ctttacctaatagagagttt

SEQ ID NO: 11023 - DNA, 20 bp, Artificial Sequence
  Description of Artificial Sequence: Synthetic oligonucleotide
  Target: ATXN2; (+) strand; PAM type: NNGRRT; PAM sequence: CTGAAT
catattccactgctttaaaa

SEQ ID NO: 11024 - DNA, 20 bp, Artificial Sequence
  Description of Artificial Sequence: Synthetic oligonucleotide
  Target: ATXN2; (+) strand; PAM type: NNGRRT; PAM sequence: TGGAGT
ttttttttttttttttgaga

SEQ ID NO: 11025 - DNA, 20 bp, Artificial Sequence
  Description of Artificial Sequence: Synthetic oligonucleotide
  Target: ATXN2; (+) strand; PAM type: NNGRRT; PAM sequence: TGGAGT
agtcactctgtcgcccaagc

SEQ ID NO: 11026 - DNA, 20 bp, Artificial Sequence
  Description of Artificial Sequence: Synthetic oligonucleotide
  Target: ATXN2; (+) strand; PAM type: NNGRRT; PAM sequence: CTGAGT
aattctcctgccttagcctc

SEQ ID NO: 11027 - DNA, 20 bp, Artificial Sequence
  Description of Artificial Sequence: Synthetic oligonucleotide
  Target: ATXN2; (+) strand; PAM type: NNGRRT; PAM sequence: TGGGAT
gccttagcctcctgagtagc

SEQ ID NO: 11028 - DNA, 20 bp, Artificial Sequence
  Description of Artificial Sequence: Synthetic oligonucleotide
  Target: ATXN2; (+) strand; PAM type: NNGRRT; PAM sequence: TGGGGT
ttttgtatttttagtagaga

SEQ ID NO: 11029 - DNA, 20 bp, Artificial Sequence
  Description of Artificial Sequence: Synthetic oligonucleotide
  Target: ATXN2; (+) strand; PAM type: NNGRRT; PAM sequence: TGGGAT
gctttggcctcccaaagtgc

SEQ ID NO: 11030 - DNA, 20 bp, Artificial Sequence
  Description of Artificial Sequence: Synthetic oligonucleotide
  Target: ATXN2; (+) strand; PAM type: NNGRRT; PAM sequence: CTGGGT
cagatttgctccagtgtagt

SEQ ID NO: 11031 - DNA, 20 bp, Artificial Sequence
  Description of Artificial Sequence: Synthetic oligonucleotide
  Target: ATXN2; (+) strand; PAM type: NNGRRT; PAM sequence: CAGAAT
ctaatttgtccccaatgtcc

SEQ ID NO: 11032 - DNA, 20 bp, Artificial Sequence
  Description of Artificial Sequence: Synthetic oligonucleotide
  Target: ATXN2; (+) strand; PAM type: NNGRRT; PAM sequence: CTGAAT
caatgtcccagaatcattta

SEQ ID NO: 11033 - DNA, 20 bp, Artificial Sequence
  Description of Artificial Sequence: Synthetic oligonucleotide
  Target: ATXN2; (+) strand; PAM type: NNGRRT; PAM sequence: CAGAAT
tgaataatccacctttcctc

SEQ ID NO: 11034 - DNA, 20 bp, Artificial Sequence
  Description of Artificial Sequence: Synthetic oligonucleotide
  Target: ATXN2; (+) strand; PAM type: NNGRRT; PAM sequence: TTGGAT
atacccacataaattcagtt

SEQ ID NO: 11035 - DNA, 20 bp, Artificial Sequence
  Description of Artificial Sequence: Synthetic oligonucleotide
  Target: ATXN2; (+) strand; PAM type: NNGRRT; PAM sequence: CAGAGT
ttttttttttttttttgaaa

SEQ ID NO: 11036 - DNA, 20 bp, Artificial Sequence
  Description of Artificial Sequence: Synthetic oligonucleotide
  Target: ATXN2; (+) strand; PAM type: NNGRRT; PAM sequence: TGGAGT
tttactcttgttgcccaggc

SEQ ID NO: 11037 - DNA, 20 bp, Artificial Sequence
  Description of Artificial Sequence: Synthetic oligonucleotide
  Target: ATXN2; (+) strand; PAM type: NNGRRT; PAM sequence: CCGAGT
ctcactgcaacctccacctc

SEQ ID NO: 11038 - DNA, 20 bp, Artificial Sequence
  Description of Artificial Sequence: Synthetic oligonucleotide
  Target: ATXN2; (+) strand; PAM type: NNGRRT; PAM sequence: CCGAGT
gattctcctgcctcagcctc

SEQ ID NO: 11039 - DNA, 20 bp, Artificial Sequence
  Description of Artificial Sequence: Synthetic oligonucleotide
  Target: ATXN2; (+) strand; PAM type: NNGRRT; PAM sequence: CGGGGT
ttttgtatttttagtagaga

SEQ ID NO: 11040 - DNA, 20 bp, Artificial Sequence
  Description of Artificial Sequence: Synthetic oligonucleotide
  Target: ATXN2; (+) strand; PAM type: NNGRRT; PAM sequence: TGGAAT
gcctcagcctcccaaagtgc

SEQ ID NO: 11041 - DNA, 20 bp, Artificial Sequence
  Description of Artificial Sequence: Synthetic oligonucleotide
  Target: ATXN2; (+) strand; PAM type: NNGRRT; PAM sequence: TAGAAT
acacataatctaataagctt

SEQ ID NO: 11042 - DNA, 20 bp, Artificial Sequence
  Description of Artificial Sequence: Synthetic oligonucleotide
  Target: ATXN2; (+) strand; PAM type: NNGRRT; PAM sequence: ACGGAT
ttttgtcaatttctacaaaa

SEQ ID NO: 11043 - DNA, 20 bp, Artificial Sequence
  Description of Artificial Sequence: Synthetic oligonucleotide
  Target: ATXN2; (+) strand; PAM type: NNGRRT; PAM sequence: TGGAGT
aaatttttttttttttgaga

SEQ ID NO: 11044 - DNA, 20 bp, Artificial Sequence
  Description of Artificial Sequence: Synthetic oligonucleotide
  Target: ATXN2; (+) strand; PAM type: NNGRRT; PAM sequence: TGGAGT
ttgagatggagtcacccggc

SEQ ID NO: 11045 - DNA, 20 bp, Artificial Sequence
  Description of Artificial Sequence: Synthetic oligonucleotide
  Target: ATXN2; (+) strand; PAM type: NNGRRT; PAM sequence: CGGGGT
ctcactgcaacctccaccta

SEQ ID NO: 11046 - DNA, 20 bp, Artificial Sequence
  Description of Artificial Sequence: Synthetic oligonucleotide
  Target: ATXN2; (+) strand; PAM type: NNGRRT; PAM sequence: TCGAGT
gcaacctccacctacggggt

SEQ ID NO: 11047 - DNA, 20 bp, Artificial Sequence
  Description of Artificial Sequence: Synthetic oligonucleotide
  Target: ATXN2; (+) strand; PAM type: NNGRRT; PAM sequence: CAGGGT
ttttgtatttttagtagaga

SEQ ID NO: 11048 - DNA, 20 bp, Artificial Sequence
  Description of Artificial Sequence: Synthetic oligonucleotide
  Target: ATXN2; (+) strand; PAM type: NNGRRT; PAM sequence: TGGGAT
acctcagccttccaaagtgc

SEQ ID NO: 11049 - DNA, 20 bp, Artificial Sequence
  Description of Artificial Sequence: Synthetic oligonucleotide
  Target: ATXN2; (+) strand; PAM type: NNGRRT; PAM sequence: CTGAAT
gccaacgtgcccggccaaaa

SEQ ID NO: 11050 - DNA, 20 bp, Artificial Sequence
  Description of Artificial Sequence: Synthetic oligonucleotide
  Target: ATXN2; (+) strand; PAM type: NNGRRT; PAM sequence: CAGAGT
gcttatttttgtttttgaga

SEQ ID NO: 11051 - DNA, 20 bp, Artificial Sequence
  Description of Artificial Sequence: Synthetic oligonucleotide
  Target: ATXN2; (+) strand; PAM type: NNGRRT; PAM sequence: TGGAGT
tctggctctgtcacccaggc

SEQ ID NO: 11052 - DNA, 20 bp, Artificial Sequence
  Description of Artificial Sequence: Synthetic oligonucleotide
  Target: ATXN2; (+) strand; PAM type: NNGRRT; PAM sequence: CTGGAT
ctcattgcaaactccgtctc

SEQ ID NO: 11053 - DNA, 20 bp, Artificial Sequence
  Description of Artificial Sequence: Synthetic oligonucleotide
  Target: ATXN2; (+) strand; PAM type: NNGRRT; PAM sequence: TGGGAT
gcctcagcctcccaagtagc

SEQ ID NO: 11054 - DNA, 20 bp, Artificial Sequence
  Description of Artificial Sequence: Synthetic oligonucleotide
  Target: ATXN2; (+) strand; PAM type: NNGRRT; PAM sequence: TGGAGT
ggtcttgcttgtcacccagc

SEQ ID NO: 11055 - DNA, 20 bp, Artificial Sequence
  Description of Artificial Sequence: Synthetic oligonucleotide
  Target: ATXN2; (+) strand; PAM type: NNGRRT; PAM sequence: CTGGGT
cacctcagcccaccaagtag

SEQ ID NO: 11056 - DNA, 20 bp, Artificial Sequence
  Description of Artificial Sequence: Synthetic oligonucleotide
  Target: ATXN2; (+) strand; PAM type: NNGRRT; PAM sequence: AGGAGT
caccaagtagctgggtttac

SEQ ID NO: 11057 - DNA, 20 bp, Artificial Sequence
  Description of Artificial Sequence: Synthetic oligonucleotide
  Target: ATXN2; (+) strand; PAM type: NNGRRT; PAM sequence: TGGGGT
ttttgtactttttgtagaga

SEQ ID NO: 11058 - DNA, 20 bp, Artificial Sequence
  Description of Artificial Sequence: Synthetic oligonucleotide
  Target: ATXN2; (+) strand; PAM type: NNGRRT; PAM sequence: GCGAGT
ggttttgccaagttgccaag

SEQ ID NO: 11059 - DNA, 20 bp, Artificial Sequence
  Description of Artificial Sequence: Synthetic oligonucleotide
  Target: ATXN2; (+) strand; PAM type: NNGRRT; PAM sequence: TTGGAT
acctggcctatttctacact

SEQ ID NO: 11060 - DNA, 20 bp, Artificial Sequence
  Description of Artificial Sequence: Synthetic oligonucleotide
  Target: ATXN2; (+) strand; PAM type: NNGRRT; PAM sequence: TTGAAT
ggattctgctcccatgtatc

SEQ ID NO: 11061 - DNA, 20 bp, Artificial Sequence
  Description of Artificial Sequence: Synthetic oligonucleotide
  Target: ATXN2; (+) strand; PAM type: NNGRRT; PAM sequence: TAGGGT
tctgactttggcaaacatga

SEQ ID NO: 11062 - DNA, 20 bp, Artificial Sequence
  Description of Artificial Sequence: Synthetic oligonucleotide
  Target: ATXN2; (+) strand; PAM type: NNGRRT; PAM sequence: GAGAAT
ttggcaaacatgatagggta

SEQ ID NO: 11063 - DNA, 20 bp, Artificial Sequence
  Description of Artificial Sequence: Synthetic oligonucleotide
  Target: ATXN2; (+) strand; PAM type: NNGRRT; PAM sequence: CAGAAT
ctccagttactgcttggccc

SEQ ID NO: 11064 - DNA, 20 bp, Artificial Sequence
  Description of Artificial Sequence: Synthetic oligonucleotide
  Target: ATXN2; (+) strand; PAM type: NNGRRT; PAM sequence: CAGAAT
atgagaacacaacagcacac

SEQ ID NO: 11065 - DNA, 20 bp, Artificial Sequence
  Description of Artificial Sequence: Synthetic oligonucleotide
  Target: ATXN2; (+) strand; PAM type: NNGRRT; PAM sequence: TAGAAT
caccagaataaaacaatctg

SEQ ID NO: 11066 - DNA, 20 bp, Artificial Sequence
  Description of Artificial Sequence: Synthetic oligonucleotide
  Target: ATXN2; (+) strand; PAM type: NNGRRT; PAM sequence: TGGAGT
tttattttttatttttgaga

SEQ ID NO: 11067 - DNA, 20 bp, Artificial Sequence
  Description of Artificial Sequence: Synthetic oligonucleotide
  Target: ATXN2; (+) strand; PAM type: NNGRRT; PAM sequence: TGGAGT
tctcgctctgtcactcaggc

SEQ ID NO: 11068 - DNA, 20 bp, Artificial Sequence
  Description of Artificial Sequence: Synthetic oligonucleotide
  Target: ATXN2; (+) strand; PAM type: NNGRRT; PAM sequence: CTGGGT
ctcattgcaacctccacctt

SEQ ID NO: 11069 - DNA, 20 bp, Artificial Sequence
  Description of Artificial Sequence: Synthetic oligonucleotide
  Target: ATXN2; (+) strand; PAM type: NNGRRT; PAM sequence: CCGAGT
gattctcctgtctcagcctc

SEQ ID NO: 11070 - DNA, 20 bp, Artificial Sequence
  Description of Artificial Sequence: Synthetic oligonucleotide
  Target: ATXN2; (+) strand; PAM type: NNGRRT; PAM sequence: TGGGAT
gtctcagcctcccgagtagc

SEQ ID NO: 11071 - DNA, 20 bp, Artificial Sequence
  Description of Artificial Sequence: Synthetic oligonucleotide
  Target: ATXN2; (+) strand; PAM type: NNGRRT; PAM sequence: TTGAAT
agtacaacattccatttttc

SEQ ID NO: 11072 - DNA, 20 bp, Artificial Sequence
  Description of Artificial Sequence: Synthetic oligonucleotide
  Target: ATXN2; (+) strand; PAM type: NNGRRT; PAM sequence: TAGAAT
tctctaactctaaaaatgct

SEQ ID NO: 11073 - DNA, 20 bp, Artificial Sequence
  Description of Artificial Sequence: Synthetic oligonucleotide
  Target: ATXN2; (+) strand; PAM type: NNGRRT; PAM sequence: TAGAGT
aactctaaaaatgcttagaa

SEQ ID NO: 11074 - DNA, 20 bp, Artificial Sequence
  Description of Artificial Sequence: Synthetic oligonucleotide
  Target: ATXN2; (+) strand; PAM type: NNGRRT; PAM sequence: GAGGAT
cacttttgaaggccaaggta

SEQ ID NO: 11075 - DNA, 20 bp, Artificial Sequence
  Description of Artificial Sequence: Synthetic oligonucleotide
  Target: ATXN2; (+) strand; PAM type: NNGRRT; PAM sequence: GAGAGT
tacttgggaggctgaggtgg

SEQ ID NO: 11076 - DNA, 20 bp, Artificial Sequence
  Description of Artificial Sequence: Synthetic oligonucleotide
  Target: ATXN2; (+) strand; PAM type: NNGRRT; PAM sequence: CTGAGT
tcacaccactgcattccagc

SEQ ID NO: 11077 - DNA, 20 bp, Artificial Sequence
  Description of Artificial Sequence: Synthetic oligonucleotide
  Target: ATXN2; (+) strand; PAM type: NNGRRT; PAM sequence: AAGAAT
gaaaaaaaattaatttttaa

SEQ ID NO: 11078 - DNA, 20 bp, Artificial Sequence
  Description of Artificial Sequence: Synthetic oligonucleotide
  Target: ATXN2; (+) strand; PAM type: NNGRRT; PAM sequence: TAGGGT
tacatgtgtgtaaatttttc

SEQ ID NO: 11079 - DNA, 20 bp, Artificial Sequence
  Description of Artificial Sequence: Synthetic oligonucleotide
  Target: ATXN2; (+) strand; PAM type: NNGRRT; PAM sequence: GAGGGT
tgtgtaaatttttctagggt

SEQ ID NO: 11080 - DNA, 20 bp, Artificial Sequence
  Description of Artificial Sequence: Synthetic oligonucleotide
  Target: ATXN2; (+) strand; PAM type: NNGRRT; PAM sequence: CTGGAT
cagagctctctaagtatctg

SEQ ID NO: 11081 - DNA, 20 bp, Artificial Sequence
  Description of Artificial Sequence: Synthetic oligonucleotide
  Target: ATXN2; (+) strand; PAM type: NNGRRT; PAM sequence: CTGAAT
tacaaaagtgtattaaggca

SEQ ID NO: 11082 - DNA, 20 bp, Artificial Sequence
  Description of Artificial Sequence: Synthetic oligonucleotide
  Target: ATXN2; (+) strand; PAM type: NNGRRT; PAM sequence: GAGAAT
aaagcactatactagaccat

SEQ ID NO: 11083 - DNA, 20 bp, Artificial Sequence
  Description of Artificial Sequence: Synthetic oligonucleotide
  Target: ATXN2; (+) strand; PAM type: NNGRRT; PAM sequence: AGGGGT
acactggggacacacatcta

SEQ ID NO: 11084 - DNA, 20 bp, Artificial Sequence
  Description of Artificial Sequence: Synthetic oligonucleotide
  Target: ATXN2; (+) strand; PAM type: NNGRRT; PAM sequence: AGGAAT
gtgtgaaggaaaagaagccc

SEQ ID NO: 11085 - DNA, 20 bp, Artificial Sequence
  Description of Artificial Sequence: Synthetic oligonucleotide
  Target: ATXN2; (+) strand; PAM type: NNGRRT; PAM sequence: AGGAAT
gcccaggaatgaggcaggga

SEQ ID NO: 11086 - DNA, 20 bp, Artificial Sequence
  Description of Artificial Sequence: Synthetic oligonucleotide
  Target: ATXN2; (+) strand; PAM type: NNGRRT; PAM sequence: GAGGGT
cagaagaggaaattctgaag

SEQ ID NO: 11087 - DNA, 20 bp, Artificial Sequence
  Description of Artificial Sequence: Synthetic oligonucleotide
  Target: ATXN2; (+) strand; PAM type: NNGRRT; PAM sequence: CAGGAT
aggttaatcgtagccttagg

SEQ ID NO: 11088 - DNA, 20 bp, Artificial Sequence
  Description of Artificial Sequence: Synthetic oligonucleotide
  Target: ATXN2; (+) strand; PAM type: NNGRRT; PAM sequence: AAGAAT
ttaggcaggataatggctag

SEQ ID NO: 11089 - DNA, 20 bp, Artificial Sequence
  Description of Artificial Sequence: Synthetic oligonucleotide
  Target: ATXN2; (+) strand; PAM type: NNGRRT; PAM sequence: CAGGAT
ggataatggctagaagaatt

SEQ ID NO: 11090 - DNA, 20 bp, Artificial Sequence
  Description of Artificial Sequence: Synthetic oligonucleotide
  Target: ATXN2; (+) strand; PAM type: NNGRRT; PAM sequence: AAGAAT
tagaagaattcaggattaaa

SEQ ID NO: 11091 - DNA, 20 bp, Artificial Sequence
  Description of Artificial Sequence: Synthetic oligonucleotide
  Target: ATXN2; (+) strand; PAM type: NNGRRT; PAM sequence: ATGGAT
actttgggaggccgaggcag

SEQ ID NO: 11092 - DNA, 20 bp, Artificial Sequence
  Description of Artificial Sequence: Synthetic oligonucleotide
  Target: ATXN2; (+) strand; PAM type: NNGRRT; PAM sequence: GAGAAT
tactcgggaggctgaggcag

SEQ ID NO: 11093 - DNA, 20 bp, Artificial Sequence
  Description of Artificial Sequence: Synthetic oligonucleotide
  Target: ATXN2; (+) strand; PAM type: NNGRRT; PAM sequence: AAGAAT
aaaaacaaaacaaaacaaaa

SEQ ID NO: 11094 - DNA, 20 bp, Artificial Sequence
  Description of Artificial Sequence: Synthetic oligonucleotide
  Target: ATXN2; (+) strand; PAM type: NNGRRT; PAM sequence: TAGGAT
aaacaaaaaagaatcctttt

SEQ ID NO: 11095 - DNA, 20 bp, Artificial Sequence
  Description of Artificial Sequence: Synthetic oligonucleotide
  Target: ATXN2; (+) strand; PAM type: NNGRRT; PAM sequence: GTGAAT
ctttttaggatgagcaggaa

SEQ ID NO: 11096 - DNA, 20 bp, Artificial Sequence
  Description of Artificial Sequence: Synthetic oligonucleotide
  Target: ATXN2; (+) strand; PAM type: NNGRRT; PAM sequence: AGGAGT
gcaggtgatcacttgaggtc

SEQ ID NO: 11097 - DNA, 20 bp, Artificial Sequence
  Description of Artificial Sequence: Synthetic oligonucleotide
  Target: ATXN2; (+) strand; PAM type: NNGRRT; PAM sequence: CTGGGT
tcacgccactgcacttcagc

SEQ ID NO: 11098 - DNA, 20 bp, Artificial Sequence
  Description of Artificial Sequence: Synthetic oligonucleotide
  Target: ATXN2; (+) strand; PAM type: NNGRRT; PAM sequence: GAGAGT
aaggaggtaagtagaaggga

SEQ ID NO: 11099 - DNA, 20 bp, Artificial Sequence
  Description of Artificial Sequence: Synthetic oligonucleotide
  Target: ATXN2; (+) strand; PAM type: NNGRRT; PAM sequence: CCGGGT
gaggaaaaataataatgagg

SEQ ID NO: 11100 - DNA, 20 bp, Artificial Sequence
  Description of Artificial Sequence: Synthetic oligonucleotide
  Target: ATXN2; (+) strand; PAM type: NNGRRT; PAM sequence: GAGGAT
tatgtaggaggttgaggtga

SEQ ID NO: 11101 - DNA, 20 bp, Artificial Sequence
  Description of Artificial Sequence: Synthetic oligonucleotide
  Target: ATXN2; (+) strand; PAM type: NNGRRT; PAM sequence: AAGAAT
atttttcactaaatgtgaca

SEQ ID NO: 11102 - DNA, 20 bp, Artificial Sequence
  Description of Artificial Sequence: Synthetic oligonucleotide
  Target: ATXN2; (+) strand; PAM type: NNGRRT; PAM sequence: TAGAAT
ttcttcagactaaatccaat

SEQ ID NO: 11103 - DNA, 20 bp, Artificial Sequence
  Description of Artificial Sequence: Synthetic oligonucleotide
  Target: ATXN2; (+) strand; PAM type: NNGRRT; PAM sequence: ATGAAT
taaatccaattagaatggtc

SEQ ID NO: 11104 - DNA, 20 bp, Artificial Sequence
  Description of Artificial Sequence: Synthetic oligonucleotide
  Target: ATXN2; (+) strand; PAM type: NNGRRT; PAM sequence: AAGAAT
caattagaatggtcatgaat

SEQ ID NO: 11105 - DNA, 20 bp, Artificial Sequence
  Description of Artificial Sequence: Synthetic oligonucleotide
  Target: ATXN2; (+) strand; PAM type: NNGRRT; PAM sequence: CAGGAT
atggtcatgaataagaatcg

SEQ ID NO: 11106 - DNA, 20 bp, Artificial Sequence
  Description of Artificial Sequence: Synthetic oligonucleotide
  Target: ATXN2; (+) strand; PAM type: NNGRRT; PAM sequence: TAGAAT
cgcaggatattatacagtat

SEQ ID NO: 11107 - DNA, 20 bp, Artificial Sequence
  Description of Artificial Sequence: Synthetic oligonucleotide
  Target: ATXN2; (+) strand; PAM type: NNGRRT; PAM sequence: GAGAAT
tgacccctatcatctaggct

SEQ ID NO: 11108 - DNA, 20 bp, Artificial Sequence
  Description of Artificial Sequence: Synthetic oligonucleotide
  Target: ATXN2; (+) strand; PAM type: NNGRRT; PAM sequence: TGGAAT
ggaaaaagtatgaggaacaa

SEQ ID NO: 11109 - DNA, 20 bp, Artificial Sequence
  Description of Artificial Sequence: Synthetic oligonucleotide
  Target: ATXN2; (+) strand; PAM type: NNGRRT; PAM sequence: TTGAGT
aaacagaagtaaagccatag

SEQ ID NO: 11110 - DNA, 20 bp, Artificial Sequence
  Description of Artificial Sequence: Synthetic oligonucleotide
  Target: ATXN2; (+) strand; PAM type: NNGRRT; PAM sequence: TGGAGT
aagtaaagccatagttgagt

SEQ ID NO: 11111 - DNA, 20 bp, Artificial Sequence
  Description of Artificial Sequence: Synthetic oligonucleotide
  Target: ATXN2; (+) strand; PAM type: NNGRRT; PAM sequence: ATGAAT
gttggagtaaagaggaaaac

SEQ ID NO: 11112 - DNA, 20 bp, Artificial Sequence
  Description of Artificial Sequence: Synthetic oligonucleotide
  Target: ATXN2; (+) strand; PAM type: NNGRRT; PAM sequence: AGGAAT
aggaaaaaaatagaggagaa

SEQ ID NO: 11113 - DNA, 20 bp, Artificial Sequence
  Description of Artificial Sequence: Synthetic oligonucleotide
  Target: ATXN2; (+) strand; PAM type: NNGRRT; PAM sequence: ATGGAT
aggagaaaggaatactggaa

SEQ ID NO: 11114 - DNA, 20 bp, Artificial Sequence
  Description of Artificial Sequence: Synthetic oligonucleotide
  Target: ATXN2; (+) strand; PAM type: NNGRRT; PAM sequence: ACGAAT
caggacaattccaaagatac

SEQ ID NO: 11115 - DNA, 20 bp, Artificial Sequence
  Description of Artificial Sequence: Synthetic oligonucleotide
  Target: ATXN2; (+) strand; PAM type: NNGRRT; PAM sequence: TGGAAT
aacctcagatctgtctgcac

SEQ ID NO: 11116 - DNA, 20 bp, Artificial Sequence
  Description of Artificial Sequence: Synthetic oligonucleotide
  Target: ATXN2; (+) strand; PAM type: NNGRRT; PAM sequence: AAGGAT
tctgcactggaattcaaata

SEQ ID NO: 11117 - DNA, 20 bp, Artificial Sequence
  Description of Artificial Sequence: Synthetic oligonucleotide
  Target: ATXN2; (+) strand; PAM type: NNGRRT; PAM sequence: ATGAAT
tctgatggtctcttctaatt

SEQ ID NO: 11118 - DNA, 20 bp, Artificial Sequence
  Description of Artificial Sequence: Synthetic oligonucleotide
  Target: ATXN2; (+) strand; PAM type: NNGRRT; PAM sequence: ATGAAT
ttattcatttgcatatatgc

SEQ ID NO: 11119 - DNA, 20 bp, Artificial Sequence
  Description of Artificial Sequence: Synthetic oligonucleotide
  Target: ATXN2; (+) strand; PAM type: NNGRRT; PAM sequence: CCGAGT
ttaaaaggtttccccagcag

SEQ ID NO: 11120 - DNA, 20 bp, Artificial Sequence
  Description of Artificial Sequence: Synthetic oligonucleotide
  Target: ATXN2; (+) strand; PAM type: NNGRRT; PAM sequence: GTGGGT
tagcactttgggaggccaag

SEQ ID NO: 11121 - DNA, 20 bp, Artificial Sequence
  Description of Artificial Sequence: Synthetic oligonucleotide
  Target: ATXN2; (+) strand; PAM type: NNGRRT; PAM sequence: GTGGAT
actttgggaggccaaggtgg

SEQ ID NO: 11122 - DNA, 20 bp, Artificial Sequence
  Description of Artificial Sequence: Synthetic oligonucleotide
  Target: ATXN2; (+) strand; PAM type: NNGRRT; PAM sequence: AGGAAT
ggtgggtggatcatgaggtc

SEQ ID NO: 11123 - DNA, 20 bp, Artificial Sequence
  Description of Artificial Sequence: Synthetic oligonucleotide
  Target: ATXN2; (+) strand; PAM type: NNGRRT; PAM sequence: AAGAAT
tcctcgggaggcttaggcag

SEQ ID NO: 11124 - DNA, 20 bp, Artificial Sequence
  Description of Artificial Sequence: Synthetic oligonucleotide
  Target: ATXN2; (+) strand; PAM type: NNGRRT; PAM sequence: CTGGGT
tcacgccactgcactccagc

SEQ ID NO: 11125 - DNA, 20 bp, Artificial Sequence
  Description of Artificial Sequence: Synthetic oligonucleotide
  Target: ATXN2; (+) strand; PAM type: NNGRRT; PAM sequence: GTGGAT
actttgggaggcctaggcag

SEQ ID NO: 11126 - DNA, 20 bp, Artificial Sequence
  Description of Artificial Sequence: Synthetic oligonucleotide
  Target: ATXN2; (+) strand; PAM type: NNGRRT; PAM sequence: AGGAGT
caggtggatcacctgaggtc

SEQ ID NO: 11127 - DNA, 20 bp, Artificial Sequence
  Description of Artificial Sequence: Synthetic oligonucleotide
  Target: ATXN2; (+) strand; PAM type: NNGRRT; PAM sequence: GAGAAT
tactcgggaggctgagatag

SEQ ID NO: 11128 - DNA, 20 bp, Artificial Sequence
  Description of Artificial Sequence: Synthetic oligonucleotide
  Target: ATXN2; (+) strand; PAM type: NNGRRT; PAM sequence: GAGAAT
gtctgcatcttatattgctt

SEQ ID NO: 11129 - DNA, 20 bp, Artificial Sequence
  Description of Artificial Sequence: Synthetic oligonucleotide
  Target: ATXN2; (+) strand; PAM type: NNGRRT; PAM sequence: GTGGGT
cagcaatttgggaggcccag

SEQ ID NO: 11130 - DNA, 20 bp, Artificial Sequence
  Description of Artificial Sequence: Synthetic oligonucleotide
  Target: ATXN2; (+) strand; PAM type: NNGRRT; PAM sequence: GTGGAT
aatttgggaggcccaggtgg

SEQ ID NO: 11131 - DNA, 20 bp, Artificial Sequence
  Description of Artificial Sequence: Synthetic oligonucleotide
  Target: ATXN2; (+) strand; PAM type: NNGRRT; PAM sequence: CCGGGT
actaaaaatacaaaaattac

SEQ ID NO: 11132 - DNA, 20 bp, Artificial Sequence
  Description of Artificial Sequence: Synthetic oligonucleotide
  Target: ATXN2; (+) strand; PAM type: NNGRRT; PAM sequence: ATGAGT
tgcagtataatgttaagaac

SEQ ID NO: 11133 - DNA, 20 bp, Artificial Sequence
  Description of Artificial Sequence: Synthetic oligonucleotide
  Target: ATXN2; (+) strand; PAM type: NNGRRT; PAM sequence: TAGAGT
ataatgttaagaacatgagt

SEQ ID NO: 11134 - DNA, 20 bp, Artificial Sequence
  Description of Artificial Sequence: Synthetic oligonucleotide
  Target: ATXN2; (+) strand; PAM type: NNGRRT; PAM sequence: GTGGAT
cctgtttcctcatctatgac

SEQ ID NO: 11135 - DNA, 20 bp, Artificial Sequence
  Description of Artificial Sequence: Synthetic oligonucleotide
  Target: ATXN2; (+) strand; PAM type: NNGRRT; PAM sequence: CAGAGT
tgtaggtaaatctgttagca

SEQ ID NO: 11136 - DNA, 20 bp, Artificial Sequence
  Description of Artificial Sequence: Synthetic oligonucleotide
  Target: ATXN2; (+) strand; PAM type: NNGRRT; PAM sequence: TAGAAT
ttagcacagagtctggcaca

SEQ ID NO: 11137 - DNA, 20 bp, Artificial Sequence
  Description of Artificial Sequence: Synthetic oligonucleotide
  Target: ATXN2; (+) strand; PAM type: NNGRRT; PAM sequence: GAGAAT
tttgacagactattacagaa

SEQ ID NO: 11138 - DNA, 20 bp, Artificial Sequence
  Description of Artificial Sequence: Synthetic oligonucleotide
  Target: ATXN2; (+) strand; PAM type: NNGRRT; PAM sequence: TGGAGT
ttttattctgttgcccaggc

SEQ ID NO: 11139 - DNA, 20 bp, Artificial Sequence
  Description of Artificial Sequence: Synthetic oligonucleotide
  Target: ATXN2; (+) strand; PAM type: NNGRRT; PAM sequence: CCGGGT
gatctcgcaatctctgcctc

SEQ ID NO: 11140 - DNA, 20 bp, Artificial Sequence
  Description of Artificial Sequence: Synthetic oligonucleotide
  Target: ATXN2; (+) strand; PAM type: NNGRRT; PAM sequence: TGGGAT
tcagcctctccccaagtagc

SEQ ID NO: 11141 - DNA, 20 bp, Artificial Sequence
  Description of Artificial Sequence: Synthetic oligonucleotide
  Target: ATXN2; (+) strand; PAM type: NNGRRT; PAM sequence: CGGGGT
ttttacttttttagtaaaga

SEQ ID NO: 11142 - DNA, 20 bp, Artificial Sequence
  Description of Artificial Sequence: Synthetic oligonucleotide
  Target: ATXN2; (+) strand; PAM type: NNGRRT; PAM sequence: AGGAGT
gtctcccaaagtgagattac

SEQ ID NO: 11143 - DNA, 20 bp, Artificial Sequence
  Description of Artificial Sequence: Synthetic oligonucleotide
  Target: ATXN2; (+) strand; PAM type: NNGRRT; PAM sequence: TGGGAT
ccacagaacagagccactcc

SEQ ID NO: 11144 - DNA, 20 bp, Artificial Sequence
  Description of Artificial Sequence: Synthetic oligonucleotide
  Target: ATXN2; (+) strand; PAM type: NNGRRT; PAM sequence: CAGGAT
caggctaattataattaaac

SEQ ID NO: 11145 - DNA, 20 bp, Artificial Sequence
  Description of Artificial Sequence: Synthetic oligonucleotide
  Target: ATXN2; (+) strand; PAM type: NNGRRT; PAM sequence: GGGAGT
accataccttcctttacttt

SEQ ID NO: 11146 - DNA, 20 bp, Artificial Sequence
  Description of Artificial Sequence: Synthetic oligonucleotide
  Target: ATXN2; (+) strand; PAM type: NNGRRT; PAM sequence: CTGAGT
tcctttactttgggagtaat

SEQ ID NO: 11147 - DNA, 20 bp, Artificial Sequence
  Description of Artificial Sequence: Synthetic oligonucleotide
  Target: ATXN2; (+) strand; PAM type: NNGRRT; PAM sequence: AAGAAT
ggtgaaacccagtctgtact

SEQ ID NO: 11148 - DNA, 20 bp, Artificial Sequence
  Description of Artificial Sequence: Synthetic oligonucleotide
  Target: ATXN2; (+) strand; PAM type: NNGRRT; PAM sequence: GAGAAT
tactcgggaggctgaggcag

SEQ ID NO: 11149 - DNA, 20 bp, Artificial Sequence
  Description of Artificial Sequence: Synthetic oligonucleotide
  Target: ATXN2; (+) strand; PAM type: NNGRRT; PAM sequence: TAGAGT
ctgcactccagcctgggaaa

SEQ ID NO: 11150 - DNA, 20 bp, Artificial Sequence
  Description of Artificial Sequence: Synthetic oligonucleotide
  Target: ATXN2; (+) strand; PAM type: NNGRRT; PAM sequence: CTGGAT
tagaagagggcaatttctgc

SEQ ID NO: 11151 - DNA, 20 bp, Artificial Sequence
  Description of Artificial Sequence: Synthetic oligonucleotide
  Target: ATXN2; (+) strand; PAM type: NNGRRT; PAM sequence: CAGGAT
acatgacttaatactatttt

SEQ ID NO: 11152 - DNA, 20 bp, Artificial Sequence
  Description of Artificial Sequence: Synthetic oligonucleotide
  Target: ATXN2; (+) strand; PAM type: NNGRRT; PAM sequence: GAGGAT
actctgggaggccaaggcag

SEQ ID NO: 11153 - DNA, 20 bp, Artificial Sequence
  Description of Artificial Sequence: Synthetic oligonucleotide
  Target: ATXN2; (+) strand; PAM type: NNGRRT; PAM sequence: AGGAGT
ggcaggaggatcacaaggtc

SEQ ID NO: 11154 - DNA, 20 bp, Artificial Sequence
  Description of Artificial Sequence: Synthetic oligonucleotide
  Target: ATXN2; (+) strand; PAM type: NNGRRT; PAM sequence: GAGAAT
tactcgggaggctgaggcaa

SEQ ID NO: 11155 - DNA, 20 bp, Artificial Sequence
  Description of Artificial Sequence: Synthetic oligonucleotide
  Target: ATXN2; (+) strand; PAM type: NNGRRT; PAM sequence: GTGGAT
tacctgaaattactccaata

SEQ ID NO: 11156 - DNA, 20 bp, Artificial Sequence
  Description of Artificial Sequence: Synthetic oligonucleotide
  Target: ATXN2; (+) strand; PAM type: NNGRRT; PAM sequence: ATGAGT
caaaatacacccatcccctt

SEQ ID NO: 11157 - DNA, 20 bp, Artificial Sequence
  Description of Artificial Sequence: Synthetic oligonucleotide
  Target: ATXN2; (+) strand; PAM type: NNGRRT; PAM sequence: TAGAGT
tacacccatccccttatgag

SEQ ID NO: 11158 - DNA, 20 bp, Artificial Sequence
  Description of Artificial Sequence: Synthetic oligonucleotide
  Target: ATXN2; (+) strand; PAM type: NNGRRT; PAM sequence: AGGAAT
attaattttgaagaggagca

SEQ ID NO: 11159 - DNA, 20 bp, Artificial Sequence
  Description of Artificial Sequence: Synthetic oligonucleotide
  Target: ATXN2; (+) strand; PAM type: NNGRRT; PAM sequence: TAGAGT
ttaaatgacctggtatccaa

SEQ ID NO: 11160 - DNA, 20 bp, Artificial Sequence
  Description of Artificial Sequence: Synthetic oligonucleotide
  Target: ATXN2; (+) strand; PAM type: NNGRRT; PAM sequence: CAGAGT
gttgtggccaatactctttc

SEQ ID NO: 11161 - DNA, 20 bp, Artificial Sequence
  Description of Artificial Sequence: Synthetic oligonucleotide
  Target: ATXN2; (+) strand; PAM type: NNGRRT; PAM sequence: TTGAAT
ttatcttccaaagtcaattt

SEQ ID NO: 11162 - DNA, 20 bp, Artificial Sequence
  Description of Artificial Sequence: Synthetic oligonucleotide
  Target: ATXN2; (+) strand; PAM type: NNGRRT; PAM sequence: AGGAAT
aatttttgaatttataacag

SEQ ID NO: 11163 - DNA, 20 bp, Artificial Sequence
  Description of Artificial Sequence: Synthetic oligonucleotide
  Target: ATXN2; (+) strand; PAM type: NNGRRT; PAM sequence: TGGGAT
aaaagacttgtttccttgta

SEQ ID NO: 11164 - DNA, 20 bp, Artificial Sequence
  Description of Artificial Sequence: Synthetic oligonucleotide
  Target: ATXN2; (+) strand; PAM type: NNGRRT; PAM sequence: GTGAAT
gcctcttaagacaaaaagtt

SEQ ID NO: 11165 - DNA, 20 bp, Artificial Sequence
  Description of Artificial Sequence: Synthetic oligonucleotide
  Target: ATXN2; (+) strand; PAM type: NNGRRT; PAM sequence: AAGAAT
tcagcatatcaagacagtta

SEQ ID NO: 11166 - DNA, 20 bp, Artificial Sequence
  Description of Artificial Sequence: Synthetic oligonucleotide
  Target: ATXN2; (+) strand; PAM type: NNGRRT; PAM sequence: AAGAAT
agactcctaagtctaagaga

SEQ ID NO: 11167 - DNA, 20 bp, Artificial Sequence
  Description of Artificial Sequence: Synthetic oligonucleotide
  Target: ATXN2; (+) strand; PAM type: NNGRRT; PAM sequence: AAGAAT
atttccaagtaacagtgtag

SEQ ID NO: 11168 - DNA, 20 bp, Artificial Sequence
  Description of Artificial Sequence: Synthetic oligonucleotide
  Target: ATXN2; (+) strand; PAM type: NNGRRT; PAM sequence: TTGAAT
aaacagcttttggtatagat

SEQ ID NO: 11169 - DNA, 20 bp, Artificial Sequence
  Description of Artificial Sequence: Synthetic oligonucleotide
  Target: ATXN2; (+) strand; PAM type: NNGRRT; PAM sequence: CAGAAT
tactgaactacaatttacaa

SEQ ID NO: 11170 - DNA, 20 bp, Artificial Sequence
  Description of Artificial Sequence: Synthetic oligonucleotide
  Target: ATXN2; (+) strand; PAM type: NNGRRT; PAM sequence: CAGAAT
cagaattacgtatttcacta

SEQ ID NO: 11171 - DNA, 20 bp, Artificial Sequence
  Description of Artificial Sequence: Synthetic oligonucleotide
  Target: ATXN2; (+) strand; PAM type: NNGRRT; PAM sequence: AAGAAT
tggcatatacaaataaataa

SEQ ID NO: 11172 - DNA, 20 bp, Artificial Sequence
  Description of Artificial Sequence: Synthetic oligonucleotide
  Target: ATXN2; (+) strand; PAM type: NNGRRT; PAM sequence: CTGGGT
taaaagaattttagaaccgg

SEQ ID NO: 11173 - DNA, 20 bp, Artificial Sequence
  Description of Artificial Sequence: Synthetic oligonucleotide
  Target: ATXN2; (+) strand; PAM type: NNGRRT; PAM sequence: GCGGAT
actttgggaggccgaggcgg

SEQ ID NO: 11174 - DNA, 20 bp, Artificial Sequence
  Description of Artificial Sequence: Synthetic oligonucleotide
  Target: ATXN2; (+) strand; PAM type: NNGRRT; PAM sequence: GAGAAT
tactcaggaggctgaggcag

SEQ ID NO: 11175 - DNA, 20 bp, Artificial Sequence
  Description of Artificial Sequence: Synthetic oligonucleotide
  Target: ATXN2; (+) strand; PAM type: NNGRRT; PAM sequence: AAGAAT
gtctcaaaaaaaaaaaaaaa

SEQ ID NO: 11176 - DNA, 20 bp, Artificial Sequence
  Description of Artificial Sequence: Synthetic oligonucleotide
  Target: ATXN2; (+) strand; PAM type: NNGRRT; PAM sequence: CAGGAT
aagaatttgagaaccaagtt

SEQ ID NO: 11177 - DNA, 20 bp, Artificial Sequence
  Description of Artificial Sequence: Synthetic oligonucleotide
  Target: ATXN2; (+) strand; PAM type: NNGRRT; PAM sequence: ATGAGT
cactcaataatgccttgcaa

SEQ ID NO: 11178 - DNA, 20 bp, Artificial Sequence
  Description of Artificial Sequence: Synthetic oligonucleotide
  Target: ATXN2; (+) strand; PAM type: NNGRRT; PAM sequence: AGGAAT
atgccttgcaaatgagtaac

SEQ ID NO: 11179 - DNA, 20 bp, Artificial Sequence
  Description of Artificial Sequence: Synthetic oligonucleotide
  Target: ATXN2; (+) strand; PAM type: NNGRRT; PAM sequence: CTGAAT
tcaaaaccttgtctcatact

SEQ ID NO: 11180 - DNA, 20 bp, Artificial Sequence
  Description of Artificial Sequence: Synthetic oligonucleotide
  Target: ATXN2; (+) strand; PAM type: NNGRRT; PAM sequence: TTGAAT
atgggacaagaaattttcag

SEQ ID NO: 11181 - DNA, 20 bp, Artificial Sequence
  Description of Artificial Sequence: Synthetic oligonucleotide
  Target: ATXN2; (+) strand; PAM type: NNGRRT; PAM sequence: CGGAGT
ctttctttttttttttgaaa

SEQ ID NO: 11182 - DNA, 20 bp, Artificial Sequence
  Description of Artificial Sequence: Synthetic oligonucleotide
  Target: ATXN2; (+) strand; PAM type: NNGRRT; PAM sequence: TGGAGT
tcttgctctgtcacccaggc

SEQ ID NO: 11183 - DNA, 20 bp, Artificial Sequence
  Description of Artificial Sequence: Synthetic oligonucleotide
  Target: ATXN2; (+) strand; PAM type: NNGRRT; PAM sequence: CTGGGT
ctcactgcaacctctgcctc

SEQ ID NO: 11184 - DNA, 20 bp, Artificial Sequence
  Description of Artificial Sequence: Synthetic oligonucleotide
  Target: ATXN2; (+) strand; PAM type: NNGRRT; PAM sequence: CGGGGT
ttttgtatttttagtagaga

SEQ ID NO: 11185 - DNA, 20 bp, Artificial Sequence
  Description of Artificial Sequence: Synthetic oligonucleotide
  Target: ATXN2; (+) strand; PAM type: NNGRRT; PAM sequence: AGGAAT
tccctaagtgctaagattac

SEQ ID NO: 11186 - DNA, 20 bp, Artificial Sequence
  Description of Artificial Sequence: Synthetic oligonucleotide
  Target: ATXN2; (+) strand; PAM type: NNGRRT; PAM sequence: TTGAAT
atcactgtgaaaatctttgc

SEQ ID NO: 11187 - DNA, 20 bp, Artificial Sequence
  Description of Artificial Sequence: Synthetic oligonucleotide
  Target: ATXN2; (+) strand; PAM type: NNGRRT; PAM sequence: TGGAGT
cccacctctttttgcataac

SEQ ID NO: 11188 - DNA, 20 bp, Artificial Sequence
  Description of Artificial Sequence: Synthetic oligonucleotide
  Target: ATXN2; (+) strand; PAM type: NNGRRT; PAM sequence: CTGGAT
cttcacgtttcggccccgaa

SEQ ID NO: 11189 - DNA, 20 bp, Artificial Sequence
  Description of Artificial Sequence: Synthetic oligonucleotide
  Target: ATXN2; (+) strand; PAM type: NNGRRT; PAM sequence: AGGAAT
tttacaaaataaaatttgtt

SEQ ID NO: 11190 - DNA, 20 bp, Artificial Sequence
  Description of Artificial Sequence: Synthetic oligonucleotide
  Target: ATXN2; (+) strand; PAM type: NNGRRT; PAM sequence: GAGAAT
tttgacaaaaataatctcaa

SEQ ID NO: 11191 - DNA, 20 bp, Artificial Sequence
  Description of Artificial Sequence: Synthetic oligonucleotide
  Target: ATXN2; (+) strand; PAM type: NNGRRT; PAM sequence: AGGGAT
cagtatactacccggtcacc

SEQ ID NO: 11192 - DNA, 20 bp, Artificial Sequence
  Description of Artificial Sequence: Synthetic oligonucleotide
  Target: ATXN2; (+) strand; PAM type: NNGRRT; PAM sequence: CAGAGT
attcttcaggaggctctact

SEQ ID NO: 11193 - DNA, 20 bp, Artificial Sequence
  Description of Artificial Sequence: Synthetic oligonucleotide
  Target: ATXN2; (+) strand; PAM type: NNGRRT; PAM sequence: ACGAAT
ctctactcagagtttgcagt

SEQ ID NO: 11194 - DNA, 20 bp, Artificial Sequence
  Description of Artificial Sequence: Synthetic oligonucleotide
  Target: ATXN2; (+) strand; PAM type: NNGRRT; PAM sequence: CAGGGT
acattattttacacacacag

SEQ ID NO: 11195 - DNA, 20 bp, Artificial Sequence
  Description of Artificial Sequence: Synthetic oligonucleotide
  Target: ATXN2; (+) strand; PAM type: NNGRRT; PAM sequence: AAGAAT
acacacacagcagggttaac

SEQ ID NO: 11196 - DNA, 20 bp, Artificial Sequence
  Description of Artificial Sequence: Synthetic oligonucleotide
  Target: ATXN2; (+) strand; PAM type: NNGRRT; PAM sequence: CCGAAT
tccaggacctccttcagata

SEQ ID NO: 11197 - DNA, 20 bp, Artificial Sequence
  Description of Artificial Sequence: Synthetic oligonucleotide
  Target: ATXN2; (+) strand; PAM type: NNGRRT; PAM sequence: AGGAAT
ttgtcatactgtattgtttt

SEQ ID NO: 11198 - DNA, 20 bp, Artificial Sequence
  Description of Artificial Sequence: Synthetic oligonucleotide
  Target: ATXN2; (+) strand; PAM type: NNGRRT; PAM sequence: AGGGGT
aaaaatttttttttttgaga

SEQ ID NO: 11199 - DNA, 20 bp, Artificial Sequence
  Description of Artificial Sequence: Synthetic oligonucleotide
  Target: ATXN2; (+) strand; PAM type: NNGRRT; PAM sequence: CTGAGT
gtctggcactgttgaccagg

SEQ ID NO: 11200 - DNA, 20 bp, Artificial Sequence
  Description of Artificial Sequence: Synthetic oligonucleotide
  Target: ATXN2; (+) strand; PAM type: NNGRRT; PAM sequence: CGGAGT
ttttttactttttgtagaga

SEQ ID NO: 11201 - DNA, 20 bp, Artificial Sequence
  Description of Artificial Sequence: Synthetic oligonucleotide
  Target: ATXN2; (+) strand; PAM type: NNGRRT; PAM sequence: TGGGAT
acctcaaactcccaaagtgc

SEQ ID NO: 11202 - DNA, 20 bp, Artificial Sequence
  Description of Artificial Sequence: Synthetic oligonucleotide
  Target: ATXN2; (+) strand; PAM type: NNGRRT; PAM sequence: GTGAGT
aaagtgctgggattacaggc

SEQ ID NO: 11203 - DNA, 20 bp, Artificial Sequence
  Description of Artificial Sequence: Synthetic oligonucleotide
  Target: ATXN2; (+) strand; PAM type: NNGRRT; PAM sequence: CTGAAT
tatttttgatccaaggttgg

SEQ ID NO: 11204 - DNA, 20 bp, Artificial Sequence
  Description of Artificial Sequence: Synthetic oligonucleotide
  Target: ATXN2; (+) strand; PAM type: NNGRRT; PAM sequence: ATGAAT
atccaaggttggctgaatcc

SEQ ID NO: 11205 - DNA, 20 bp, Artificial Sequence
  Description of Artificial Sequence: Synthetic oligonucleotide
  Target: ATXN2; (+) strand; PAM type: NNGRRT; PAM sequence: ATGAAT
ggaccaactgtacttttaca

SEQ ID NO: 11206 - DNA, 20 bp, Artificial Sequence
  Description of Artificial Sequence: Synthetic oligonucleotide
  Target: ATXN2; (+) strand; PAM type: NNGRRT; PAM sequence: CTGGAT
ttacaatgaattatattaga

SEQ ID NO: 11207 - DNA, 20 bp, Artificial Sequence
  Description of Artificial Sequence: Synthetic oligonucleotide
  Target: ATXN2; (+) strand; PAM type: NNGRRT; PAM sequence: AGGAGT
attatattagactggataaa

SEQ ID NO: 11208 - DNA, 20 bp, Artificial Sequence
  Description of Artificial Sequence: Synthetic oligonucleotide
  Target: ATXN2; (+) strand; PAM type: NNGRRT; PAM sequence: TGGAAT
ttatccacattttaacttca

SEQ ID NO: 11209 - DNA, 20 bp, Artificial Sequence
  Description of Artificial Sequence: Synthetic oligonucleotide
  Target: ATXN2; (+) strand; PAM type: NNGRRT; PAM sequence: TGGAAT
agattccatcaaaagaaatc

SEQ ID NO: 11210 - DNA, 20 bp, Artificial Sequence
  Description of Artificial Sequence: Synthetic oligonucleotide
  Target: ATXN2; (+) strand; PAM type: NNGRRT; PAM sequence: CTGAAT
ctattagaaattagtacaaa

SEQ ID NO: 11211 - DNA, 20 bp, Artificial Sequence
  Description of Artificial Sequence: Synthetic oligonucleotide
  Target: ATXN2; (+) strand; PAM type: NNGRRT; PAM sequence: GCGGAT
gaccagaagtattttagact

SEQ ID NO: 11212 - DNA, 20 bp, Artificial Sequence
  Description of Artificial Sequence: Synthetic oligonucleotide
  Target: ATXN2; (+) strand; PAM type: NNGRRT; PAM sequence: TCGGAT
ttttagactgcggatttttt

SEQ ID NO: 11213 - DNA, 20 bp, Artificial Sequence
  Description of Artificial Sequence: Synthetic oligonucleotide
  Target: ATXN2; (+) strand; PAM type: NNGRRT; PAM sequence: GGGGAT
tgcggatttttttcggattt

SEQ ID NO: 11214 - DNA, 20 bp, Artificial Sequence
  Description of Artificial Sequence: Synthetic oligonucleotide
  Target: ATXN2; (+) strand; PAM type: NNGRRT; PAM sequence: AGGGAT
attttggagcatttccgatt

SEQ ID NO: 11215 - DNA, 20 bp, Artificial Sequence
  Description of Artificial Sequence: Synthetic oligonucleotide
  Target: ATXN2; (+) strand; PAM type: NNGRRT; PAM sequence: AAGAGT
taaacatgacataaaaaagc

SEQ ID NO: 11216 - DNA, 20 bp, Artificial Sequence
  Description of Artificial Sequence: Synthetic oligonucleotide
  Target: ATXN2; (+) strand; PAM type: NNGRRT; PAM sequence: AAGGAT
ggaggaaggacacaaaccgt

SEQ ID NO: 11217 - DNA, 20 bp, Artificial Sequence
  Description of Artificial Sequence: Synthetic oligonucleotide
  Target: ATXN2; (+) strand; PAM type: NNGRRT; PAM sequence: GAGGGT
atcaatggttggagagagag

SEQ ID NO: 11218 - DNA, 20 bp, Artificial Sequence
  Description of Artificial Sequence: Synthetic oligonucleotide
  Target: ATXN2; (+) strand; PAM type: NNGRRT; PAM sequence: AGGGAT
gttcactgaaaagtgatttg

SEQ ID NO: 11219 - DNA, 20 bp, Artificial Sequence
  Description of Artificial Sequence: Synthetic oligonucleotide
  Target: ATXN2; (+) strand; PAM type: NNGRRT; PAM sequence: AAGGGT
tcacagaaatgtaccctaag

SEQ ID NO: 11220 - DNA, 20 bp, Artificial Sequence
  Description of Artificial Sequence: Synthetic oligonucleotide
  Target: ATXN2; (+) strand; PAM type: NNGRRT; PAM sequence: TGGGGT
aagggtgaagtataaataaa

SEQ ID NO: 11221 - DNA, 20 bp, Artificial Sequence
  Description of Artificial Sequence: Synthetic oligonucleotide
  Target: ATXN2; (+) strand; PAM type: NNGRRT; PAM sequence: CTGAAT
gcaagaccaggtggagataa

SEQ ID NO: 11222 - DNA, 20 bp, Artificial Sequence
  Description of Artificial Sequence: Synthetic oligonucleotide
  Target: ATXN2; (+) strand; PAM type: NNGRRT; PAM sequence: GTGAGT
cctacgctgctctcatgata

SEQ ID NO: 11223 - DNA, 20 bp, Artificial Sequence
  Description of Artificial Sequence: Synthetic oligonucleotide
  Target: ATXN2; (+) strand; PAM type: NNGRRT; PAM sequence: GTGAGT
cgctgctctcatgatagtga

SEQ ID NO: 11224 - DNA, 20 bp, Artificial Sequence
  Description of Artificial Sequence: Synthetic oligonucleotide
  Target: ATXN2; (+) strand; PAM type: NNGRRT; PAM sequence: AAGGAT
tctcctgtcgctatgtgaag

SEQ ID NO: 11225 - DNA, 20 bp, Artificial Sequence
  Description of Artificial Sequence: Synthetic oligonucleotide
  Target: ATXN2; (+) strand; PAM type: NNGRRT; PAM sequence: ATGAGT
cctccccagcaatgcagagc

SEQ ID NO: 11226 - DNA, 20 bp, Artificial Sequence
  Description of Artificial Sequence: Synthetic oligonucleotide
  Target: ATXN2; (+) strand; PAM type: NNGRRT; PAM sequence: AAGAAT
tatatctttattagcagtgt

SEQ ID NO: 11227 - DNA, 20 bp, Artificial Sequence
  Description of Artificial Sequence: Synthetic oligonucleotide
  Target: ATXN2; (+) strand; PAM type: NNGRRT; PAM sequence: CAGAGT
aagtaattgtacattttata

SEQ ID NO: 11228 - DNA, 20 bp, Artificial Sequence
  Description of Artificial Sequence: Synthetic oligonucleotide
  Target: ATXN2; (+) strand; PAM type: NNGRRT; PAM sequence: GGGAAT
tatgacaaaattcaaaagaa

SEQ ID NO: 11229 - DNA, 20 bp, Artificial Sequence
  Description of Artificial Sequence: Synthetic oligonucleotide
  Target: ATXN2; (+) strand; PAM type: NNGRRT; PAM sequence: AAGGAT
attaagtctaaaggctacct

SEQ ID NO: 11230 - DNA, 20 bp, Artificial Sequence
  Description of Artificial Sequence: Synthetic oligonucleotide
  Target: ATXN2; (+) strand; PAM type: NNGRRT; PAM sequence: AGGGGT
cctggagacccacaacaggt

SEQ ID NO: 11231 - DNA, 20 bp, Artificial Sequence
  Description of Artificial Sequence: Synthetic oligonucleotide
  Target: ATXN2; (+) strand; PAM type: NNGRRT; PAM sequence: CAGGAT
agctactcaggaggctgagg

SEQ ID NO: 11232 - DNA, 20 bp, Artificial Sequence
  Description of Artificial Sequence: Synthetic oligonucleotide
  Target: ATXN2; (+) strand; PAM type: NNGRRT; PAM sequence: CAGAGT
ggaggctgaggcaggatcac

SEQ ID NO: 11233 - DNA, 20 bp, Artificial Sequence
  Description of Artificial Sequence: Synthetic oligonucleotide
  Target: ATXN2; (+) strand; PAM type: NNGRRT; PAM sequence: AGGAGT
aggcaggatcaccagagtcc

SEQ ID NO: 11234 - DNA, 20 bp, Artificial Sequence
  Description of Artificial Sequence: Synthetic oligonucleotide
  Target: ATXN2; (+) strand; PAM type: NNGRRT; PAM sequence: ACGGAT
gagctattcagaagcaaaac

SEQ ID NO: 11235 - DNA, 20 bp, Artificial Sequence
  Description of Artificial Sequence: Synthetic oligonucleotide
  Target: ATXN2; (+) strand; PAM type: NNGRRT; PAM sequence: AGGAGT
ggtgggcagatcacaaggtc

SEQ ID NO: 11236 - DNA, 20 bp, Artificial Sequence
  Description of Artificial Sequence: Synthetic oligonucleotide
  Target: ATXN2; (+) strand; PAM type: NNGRRT; PAM sequence: AAGAAT
agtgaaaccccatctctact

SEQ ID NO: 11237 - DNA, 20 bp, Artificial Sequence
  Description of Artificial Sequence: Synthetic oligonucleotide
  Target: ATXN2; (+) strand; PAM type: NNGRRT; PAM sequence: AAGAAT
tactagggaggctgaggcag

SEQ ID NO: 11238 - DNA, 20 bp, Artificial Sequence
  Description of Artificial Sequence: Synthetic oligonucleotide
  Target: ATXN2; (+) strand; PAM type: NNGRRT; PAM sequence: CGGGGT
ccgccccattgtactccagc

SEQ ID NO: 11239 - DNA, 20 bp, Artificial Sequence
  Description of Artificial Sequence: Synthetic oligonucleotide
  Target: ATXN2; (+) strand; PAM type: NNGRRT; PAM sequence: GTGGAT
aataatatgcgtctatatgt

SEQ ID NO: 11240 - DNA, 20 bp, Artificial Sequence
  Description of Artificial Sequence: Synthetic oligonucleotide
  Target: ATXN2; (+) strand; PAM type: NNGRRT; PAM sequence: ATGAAT
aatttggctgtcaagtaaag

SEQ ID NO: 11241 - DNA, 20 bp, Artificial Sequence
  Description of Artificial Sequence: Synthetic oligonucleotide
  Target: ATXN2; (+) strand; PAM type: NNGRRT; PAM sequence: GTGAAT
aagatgaattctattttcaa

SEQ ID NO: 11242 - DNA, 20 bp, Artificial Sequence
  Description of Artificial Sequence: Synthetic oligonucleotide
  Target: ATXN2; (+) strand; PAM type: NNGRRT; PAM sequence: TAGAAT
ttctattttcaagtgaatta

SEQ ID NO: 11243 - DNA, 20 bp, Artificial Sequence
  Description of Artificial Sequence: Synthetic oligonucleotide
  Target: ATXN2; (+) strand; PAM type: NNGRRT; PAM sequence: TAGAAT
ctgaaaaagattaggcccct

SEQ ID NO: 11244 - DNA, 20 bp, Artificial Sequence
  Description of Artificial Sequence: Synthetic oligonucleotide
  Target: ATXN2; (+) strand; PAM type: NNGRRT; PAM sequence: TGGAAT
attagtcatgacaataggac

SEQ ID NO: 11245 - DNA, 20 bp, Artificial Sequence
  Description of Artificial Sequence: Synthetic oligonucleotide
  Target: ATXN2; (+) strand; PAM type: NNGRRT; PAM sequence: AAGAGT
cacgactggtcgatccctag

SEQ ID NO: 11246 - DNA, 20 bp, Artificial Sequence
  Description of Artificial Sequence: Synthetic oligonucleotide
  Target: ATXN2; (+) strand; PAM type: NNGRRT; PAM sequence: TTGAAT
tcatccagaaaacaatggac

SEQ ID NO: 11247 - DNA, 20 bp, Artificial Sequence
  Description of Artificial Sequence: Synthetic oligonucleotide
  Target: ATXN2; (+) strand; PAM type: NNGRRT; PAM sequence: TAGGAT
gacttgaattaaatgacatc

SEQ ID NO: 11248 - DNA, 20 bp, Artificial Sequence
  Description of Artificial Sequence: Synthetic oligonucleotide
  Target: ATXN2; (+) strand; PAM type: NNGRRT; PAM sequence: AGGAAT
agataaattcctgaagtcta

SEQ ID NO: 11249 - DNA, 20 bp, Artificial Sequence
  Description of Artificial Sequence: Synthetic oligonucleotide
  Target: ATXN2; (+) strand; PAM type: NNGRRT; PAM sequence: AGGAAT
ctctctggaactgtatcaca

SEQ ID NO: 11250 - DNA, 20 bp, Artificial Sequence
  Description of Artificial Sequence: Synthetic oligonucleotide
  Target: ATXN2; (+) strand; PAM type: NNGRRT; PAM sequence: TTGAAT
tatgctttttcaaacatcat

SEQ ID NO: 11251 - DNA, 20 bp, Artificial Sequence
  Description of Artificial Sequence: Synthetic oligonucleotide
  Target: ATXN2; (+) strand; PAM type: NNGRRT; PAM sequence: AGGGGT
tttgaatttacagttttggt

SEQ ID NO: 11252 - DNA, 20 bp, Artificial Sequence
  Description of Artificial Sequence: Synthetic oligonucleotide
  Target: ATXN2; (+) strand; PAM type: NNGRRT; PAM sequence: GGGGGT
cagttttggtaggggtgtgg

SEQ ID NO: 11253 - DNA, 20 bp, Artificial Sequence
  Description of Artificial Sequence: Synthetic oligonucleotide
  Target: ATXN2; (+) strand; PAM type: NNGRRT; PAM sequence: TGGAGT
aaaaagtaattgtttgacca

SEQ ID NO: 11254 - DNA, 20 bp, Artificial Sequence
  Description of Artificial Sequence: Synthetic oligonucleotide
  Target: ATXN2; (+) strand; PAM type: NNGRRT; PAM sequence: ACGAAT
catggagtttactcaaaaga

SEQ ID NO: 11255 - DNA, 20 bp, Artificial Sequence
  Description of Artificial Sequence: Synthetic oligonucleotide
  Target: ATXN2; (+) strand; PAM type: NNGRRT; PAM sequence: AGGAAT
gacacggttggacacccaac

SEQ ID NO: 11256 - DNA, 20 bp, Artificial Sequence
  Description of Artificial Sequence: Synthetic oligonucleotide
  Target: ATXN2; (+) strand; PAM type: NNGRRT; PAM sequence: CTGAAT
aatataaagaaatttacatg

SEQ ID NO: 11257 - DNA, 20 bp, Artificial Sequence
  Description of Artificial Sequence: Synthetic oligonucleotide
  Target: ATXN2; (+) strand; PAM type: NNGRRT; PAM sequence: GAGGAT
actttaggaggctgaggcag

SEQ ID NO: 11258 - DNA, 20 bp, Artificial Sequence
  Description of Artificial Sequence: Synthetic oligonucleotide
  Target: ATXN2; (+) strand; PAM type: NNGRRT; PAM sequence: TTGAGT
ggctgaggcaggaggatcac

SEQ ID NO: 11259 - DNA, 20 bp, Artificial Sequence
  Description of Artificial Sequence: Synthetic oligonucleotide
  Target: ATXN2; (+) strand; PAM type: NNGRRT; PAM sequence: CGGAGT
caggaggatcacttgagtgc

SEQ ID NO: 11260 - DNA, 20 bp, Artificial Sequence
  Description of Artificial Sequence: Synthetic oligonucleotide
  Target: ATXN2; (+) strand; PAM type: NNGRRT; PAM sequence: TAGGGT
ctgtggtccccgctacttgg

SEQ ID NO: 11261 - DNA, 20 bp, Artificial Sequence
  Description of Artificial Sequence: Synthetic oligonucleotide
  Target: ATXN2; (+) strand; PAM type: NNGRRT; PAM sequence: GAGGAT
tacttggtagggtgaggtgg

SEQ ID NO: 11262 - DNA, 20 bp, Artificial Sequence
  Description of Artificial Sequence: Synthetic oligonucleotide
  Target: ATXN2; (+) strand; PAM type: NNGRRT; PAM sequence: ATGAAT
taataatacagaagggagaa

SEQ ID NO: 11263 - DNA, 20 bp, Artificial Sequence
  Description of Artificial Sequence: Synthetic oligonucleotide
  Target: ATXN2; (+) strand; PAM type: NNGRRT; PAM sequence: TGGGGT
atacagaagggagaaatgaa

SEQ ID NO: 11264 - DNA, 20 bp, Artificial Sequence
  Description of Artificial Sequence: Synthetic oligonucleotide
  Target: ATXN2; (+) strand; PAM type: NNGRRT; PAM sequence: AAGAAT
aatggggttgtaaatcaaac

SEQ ID NO: 11265 - DNA, 20 bp, Artificial Sequence
  Description of Artificial Sequence: Synthetic oligonucleotide
  Target: ATXN2; (+) strand; PAM type: NNGRRT; PAM sequence: CTGGGT
tgagctgataactattaaag

SEQ ID NO: 11266 - DNA, 20 bp, Artificial Sequence
  Description of Artificial Sequence: Synthetic oligonucleotide
  Target: ATXN2; (+) strand; PAM type: NNGRRT; PAM sequence: AGGGGT
aagctgggtgataggtgtgc

SEQ ID NO: 11267 - DNA, 20 bp, Artificial Sequence
  Description of Artificial Sequence: Synthetic oligonucleotide
  Target: ATXN2; (+) strand; PAM type: NNGRRT; PAM sequence: TAGGAT
ctgcttctgatgtgatacaa

SEQ ID NO: 11268 - DNA, 20 bp, Artificial Sequence
  Description of Artificial Sequence: Synthetic oligonucleotide
  Target: ATXN2; (+) strand; PAM type: NNGRRT; PAM sequence: AAGAAT
tacgagaaacattaagatgg

SEQ ID NO: 11269 - DNA, 20 bp, Artificial Sequence
  Description of Artificial Sequence: Synthetic oligonucleotide
  Target: ATXN2; (+) strand; PAM type: NNGRRT; PAM sequence: CAGAAT
ggttcctcacagtttaaatc

SEQ ID NO: 11270 - DNA, 20 bp, Artificial Sequence
  Description of Artificial Sequence: Synthetic oligonucleotide
  Target: ATXN2; (+) strand; PAM type: NNGRRT; PAM sequence: CAGAGT
gtttttttttttttctgaga

SEQ ID NO: 11271 - DNA, 20 bp, Artificial Sequence
  Description of Artificial Sequence: Synthetic oligonucleotide
  Target: ATXN2; (+) strand; PAM type: NNGRRT; PAM sequence: TGGAGT
gtctcactctgtcgccaggc

SEQ ID NO: 11272 - DNA, 20 bp, Artificial Sequence
  Description of Artificial Sequence: Synthetic oligonucleotide
  Target: ATXN2; (+) strand; PAM type: NNGRRT; PAM sequence: CGGGGT
ttttgtattcttagtagaga

SEQ ID NO: 11273 - DNA, 20 bp, Artificial Sequence
  Description of Artificial Sequence: Synthetic oligonucleotide
  Target: ATXN2; (+) strand; PAM type: NNGRRT; PAM sequence: CAGGAT
cggggtttcaccatgttggc

SEQ ID NO: 11274 - DNA, 20 bp, Artificial Sequence
  Description of Artificial Sequence: Synthetic oligonucleotide
  Target: ATXN2; (+) strand; PAM type: NNGRRT; PAM sequence: TGGGAT
acctcagcctcccaaagtgc

SEQ ID NO: 11275 - DNA, 20 bp, Artificial Sequence
  Description of Artificial Sequence: Synthetic oligonucleotide
  Target: ATXN2; (+) strand; PAM type: NNGRRT; PAM sequence: ATGAAT
acatcataggaggagaactt

SEQ ID NO: 11276 - DNA, 20 bp, Artificial Sequence
  Description of Artificial Sequence: Synthetic oligonucleotide
  Target: ATXN2; (+) strand; PAM type: NNGRRT; PAM sequence: GTGGGT
cagcactttgggaggccgag

SEQ ID NO: 11277 - DNA, 20 bp, Artificial Sequence
  Description of Artificial Sequence: Synthetic oligonucleotide
  Target: ATXN2; (+) strand; PAM type: NNGRRT; PAM sequence: GTGGAT
actttgggaggccgaggtgg

SEQ ID NO: 11278 - DNA, 20 bp, Artificial Sequence
  Description of Artificial Sequence: Synthetic oligonucleotide
  Target: ATXN2; (+) strand; PAM type: NNGRRT; PAM sequence: GAGAAT
atttggggaggctgagacca

SEQ ID NO: 11279 - DNA, 20 bp, Artificial Sequence
  Description of Artificial Sequence: Synthetic oligonucleotide
  Target: ATXN2; (+) strand; PAM type: NNGRRT; PAM sequence: AAGAGT
tcatttgcaacaaggtatga

SEQ ID NO: 11280 - DNA, 20 bp, Artificial Sequence
  Description of Artificial Sequence: Synthetic oligonucleotide
  Target: ATXN2; (+) strand; PAM type: NNGRRT; PAM sequence: GAGAAT
tcaaaggcacttggtaggag

SEQ ID NO: 11281 - DNA, 20 bp, Artificial Sequence
  Description of Artificial Sequence: Synthetic oligonucleotide
  Target: ATXN2; (+) strand; PAM type: NNGRRT; PAM sequence: GTGGAT
agagctgggaggactcctct

SEQ ID NO: 11282 - DNA, 20 bp, Artificial Sequence
  Description of Artificial Sequence: Synthetic oligonucleotide
  Target: ATXN2; (+) strand; PAM type: NNGRRT; PAM sequence: GAGGAT
agaaatgacaaagcatacag

SEQ ID NO: 11283 - DNA, 20 bp, Artificial Sequence
  Description of Artificial Sequence: Synthetic oligonucleotide
  Target: ATXN2; (+) strand; PAM type: NNGRRT; PAM sequence: GGGGGT
taaatttttatatccaacgg

SEQ ID NO: 11284 - DNA, 20 bp, Artificial Sequence
  Description of Artificial Sequence: Synthetic oligonucleotide
  Target: ATXN2; (+) strand; PAM type: NNGRRT; PAM sequence: CTGGGT
taattagtgtagcttaacag

SEQ ID NO: 11285 - DNA, 20 bp, Artificial Sequence
  Description of Artificial Sequence: Synthetic oligonucleotide
  Target: ATXN2; (+) strand; PAM type: NNGRRT; PAM sequence: TAGAGT
tgccaaaatcactgtgattc

SEQ ID NO: 11286 - DNA, 20 bp, Artificial Sequence
  Description of Artificial Sequence: Synthetic oligonucleotide
  Target: ATXN2; (+) strand; PAM type: NNGRRT; PAM sequence: AAGGAT
acactgtacagggagggaag

SEQ ID NO: 11287 - DNA, 20 bp, Artificial Sequence
  Description of Artificial Sequence: Synthetic oligonucleotide
  Target: ATXN2; (+) strand; PAM type: NNGRRT; PAM sequence: CAGAGT
ccataggctaatgaggtatc

SEQ ID NO: 11288 - DNA, 20 bp, Artificial Sequence
  Description of Artificial Sequence: Synthetic oligonucleotide
  Target: ATXN2; (+) strand; PAM type: NNGRRT; PAM sequence: AAGAAT
aaccagatgtctgacttaat

SEQ ID NO: 11289 - DNA, 20 bp, Artificial Sequence
  Description of Artificial Sequence: Synthetic oligonucleotide
  Target: ATXN2; (+) strand; PAM type: NNGRRT; PAM sequence: GTGGAT
actttgggaggccaaggcag

SEQ ID NO: 11290 - DNA, 20 bp, Artificial Sequence
  Description of Artificial Sequence: Synthetic oligonucleotide
  Target: ATXN2; (+) strand; PAM type: NNGRRT; PAM sequence: GCGGGT
caccacttcaagaggccaag

SEQ ID NO: 11291 - DNA, 20 bp, Artificial Sequence
  Description of Artificial Sequence: Synthetic oligonucleotide
  Target: ATXN2; (+) strand; PAM type: NNGRRT; PAM sequence: GTGGAT
acttcaagaggccaaggcgg

SEQ ID NO: 11292 - DNA, 20 bp, Artificial Sequence
  Description of Artificial Sequence: Synthetic oligonucleotide
  Target: ATXN2; (+) strand; PAM type: NNGRRT; PAM sequence: AGGAGT
cgggtggatcacctgaagtc

SEQ ID NO: 11293 - DNA, 20 bp, Artificial Sequence
  Description of Artificial Sequence: Synthetic oligonucleotide
  Target: ATXN2; (+) strand; PAM type: NNGRRT; PAM sequence: AAGAAT
tacttgggaggctgaggcac

SEQ ID NO: 11294 - DNA, 20 bp, Artificial Sequence
  Description of Artificial Sequence: Synthetic oligonucleotide
  Target: ATXN2; (+) strand; PAM type: NNGRRT; PAM sequence: CGGAGT
aattgcttgaactcaggagg

SEQ ID NO: 11295 - DNA, 20 bp, Artificial Sequence
  Description of Artificial Sequence: Synthetic oligonucleotide
  Target: ATXN2; (+) strand; PAM type: NNGRRT; PAM sequence: CTGGGT
tcatgccactgcaatgcagc

SEQ ID NO: 11296 - DNA, 20 bp, Artificial Sequence
  Description of Artificial Sequence: Synthetic oligonucleotide
  Target: ATXN2; (+) strand; PAM type: NNGRRT; PAM sequence: CAGAGT
tctttctgttttttttgaga

SEQ ID NO: 11297 - DNA, 20 bp, Artificial Sequence
  Description of Artificial Sequence: Synthetic oligonucleotide
  Target: ATXN2; (+) strand; PAM type: NNGRRT; PAM sequence: TGGAGT
tctacctctgtcgctcaggc

SEQ ID NO: 11298 - DNA, 20 bp, Artificial Sequence
  Description of Artificial Sequence: Synthetic oligonucleotide
  Target: ATXN2; (+) strand; PAM type: NNGRRT; PAM sequence: CTGGGT
ctcactgcaacctccacctc

SEQ ID NO: 11299 - DNA, 20 bp, Artificial Sequence
  Description of Artificial Sequence: Synthetic oligonucleotide
  Target: ATXN2; (+) strand; PAM type: NNGRRT; PAM sequence: CCGAGT
aattctcctgcctcagcctc

SEQ ID NO: 11300 - DNA, 20 bp, Artificial Sequence
  Description of Artificial Sequence: Synthetic oligonucleotide
  Target: ATXN2; (+) strand; PAM type: NNGRRT; PAM sequence: CAGGGT
ttttgtatttttagtagaga

SEQ ID NO: 11301 - DNA, 20 bp, Artificial Sequence
  Description of Artificial Sequence: Synthetic oligonucleotide
  Target: ATXN2; (+) strand; PAM type: NNGRRT; PAM sequence: CAGGAT
cagggtttcaccatgttagc

SEQ ID NO: 11302 - DNA, 20 bp, Artificial Sequence
  Description of Artificial Sequence: Synthetic oligonucleotide
  Target: ATXN2; (+) strand; PAM type: NNGRRT; PAM sequence: TGGGAT
acctcggccttccaaagtgc

SEQ ID NO: 11303 - DNA, 20 bp, Artificial Sequence
  Description of Artificial Sequence: Synthetic oligonucleotide
  Target: ATXN2; (+) strand; PAM type: NNGRRT; PAM sequence: CGGAGT
cagaaggaccacttaagacc

SEQ ID NO: 11304 - DNA, 20 bp, Artificial Sequence
  Description of Artificial Sequence: Synthetic oligonucleotide
  Target: ATXN2; (+) strand; PAM type: NNGRRT; PAM sequence: AGGAGT
tgggaggttcacttgagccc

SEQ ID NO: 11305 - DNA, 20 bp, Artificial Sequence
  Description of Artificial Sequence: Synthetic oligonucleotide
  Target: ATXN2; (+) strand; PAM type: NNGRRT; PAM sequence: GTGGGT
tagcactctgggaggctgag

SEQ ID NO: 11306 - DNA, 20 bp, Artificial Sequence
  Description of Artificial Sequence: Synthetic oligonucleotide
  Target: ATXN2; (+) strand; PAM type: NNGRRT; PAM sequence: GTGGAT
actctgggaggctgaggtgg

SEQ ID NO: 11307 - DNA, 20 bp, Artificial Sequence
  Description of Artificial Sequence: Synthetic oligonucleotide
  Target: ATXN2; (+) strand; PAM type: NNGRRT; PAM sequence: GGGAGT
tgggtggatcacctgaggtc

SEQ ID NO: 11308 - DNA, 20 bp, Artificial Sequence
  Description of Artificial Sequence: Synthetic oligonucleotide
  Target: ATXN2; (+) strand; PAM type: NNGRRT; PAM sequence: AGGAGT
ctgaacatacaaaattagcc

SEQ ID NO: 11309 - DNA, 20 bp, Artificial Sequence
  Description of Artificial Sequence: Synthetic oligonucleotide
  Target: ATXN2; (+) strand; PAM type: NNGRRT; PAM sequence: CAGAAT
aaaaaaaaaaaaaatgtaga

SEQ ID NO: 11310 - DNA, 20 bp, Artificial Sequence
  Description of Artificial Sequence: Synthetic oligonucleotide
  Target: ATXN2; (+) strand; PAM type: NNGRRT; PAM sequence: CAGAGT
atagtaagggaaagtagaaa

SEQ ID NO: 11311 - DNA, 20 bp, Artificial Sequence
  Description of Artificial Sequence: Synthetic oligonucleotide
  Target: ATXN2; (+) strand; PAM type: NNGRRT; PAM sequence: TGGGAT
aaagttaacaaccccagtaa

SEQ ID NO: 11312 - DNA, 20 bp, Artificial Sequence
  Description of Artificial Sequence: Synthetic oligonucleotide
  Target: ATXN2; (+) strand; PAM type: NNGRRT; PAM sequence: CTGAAT
ttcctgccaaaaataaatat

SEQ ID NO: 11313 - DNA, 20 bp, Artificial Sequence
  Description of Artificial Sequence: Synthetic oligonucleotide
  Target: ATXN2; (+) strand; PAM type: NNGRRT; PAM sequence: TTGGAT
taaaagacaaagaaactgct

SEQ ID NO: 11314 - DNA, 20 bp, Artificial Sequence
  Description of Artificial Sequence: Synthetic oligonucleotide
  Target: ATXN2; (+) strand; PAM type: NNGRRT; PAM sequence: CTGGAT
gataaccgaaggtaacaatc

SEQ ID NO: 11315 - DNA, 20 bp, Artificial Sequence
  Description of Artificial Sequence: Synthetic oligonucleotide
  Target: ATXN2; (+) strand; PAM type: NNGRRT; PAM sequence: GGGAGT
tggattggttcttggacaga

SEQ ID NO: 11316 - DNA, 20 bp, Artificial Sequence
  Description of Artificial Sequence: Synthetic oligonucleotide
  Target: ATXN2; (+) strand; PAM type: NNGRRT; PAM sequence: TAGAAT
gtatattccacatatatatg

SEQ ID NO: 11317 - DNA, 20 bp, Artificial Sequence
  Description of Artificial Sequence: Synthetic oligonucleotide
  Target: ATXN2; (+) strand; PAM type: NNGRRT; PAM sequence: TAGAAT
tatatgtgtatatatatatg

SEQ ID NO: 11318 - DNA, 20 bp, Artificial Sequence
  Description of Artificial Sequence: Synthetic oligonucleotide
  Target: ATXN2; (+) strand; PAM type: NNGRRT; PAM sequence: CAGAAT
gacattagaaggtctataaa

SEQ ID NO: 11319 - DNA, 20 bp, Artificial Sequence
  Description of Artificial Sequence: Synthetic oligonucleotide
  Target: ATXN2; (+) strand; PAM type: NNGRRT; PAM sequence: TAGAAT
actgtactgtggttttgaaa

SEQ ID NO: 11320 - DNA, 20 bp, Artificial Sequence
  Description of Artificial Sequence: Synthetic oligonucleotide
  Target: ATXN2; (+) strand; PAM type: NNGRRT; PAM sequence: AAGAAT
atgtctctcatatgtttaat

SEQ ID NO: 11321 - DNA, 20 bp, Artificial Sequence
  Description of Artificial Sequence: Synthetic oligonucleotide
  Target: ATXN2; (+) strand; PAM type: NNGRRT; PAM sequence: GTGAAT
aatacagagaaaatgttaag

SEQ ID NO: 11322 - DNA, 20 bp, Artificial Sequence
  Description of Artificial Sequence: Synthetic oligonucleotide
  Target: ATXN2; (+) strand; PAM type: NNGRRT; PAM sequence: AAGAAT
atatggtaaaatgttacttg

SEQ ID NO: 11323 - DNA, 20 bp, Artificial Sequence
  Description of Artificial Sequence: Synthetic oligonucleotide
  Target: ATXN2; (+) strand; PAM type: NNGRRT; PAM sequence: GAGAAT
aatacaggtgagatatatag

SEQ ID NO: 11324 - DNA, 20 bp, Artificial Sequence
  Description of Artificial Sequence: Synthetic oligonucleotide
  Target: ATXN2; (+) strand; PAM type: NNGRRT; PAM sequence: GGGGGT
agaaaatgatgcctcttcca

SEQ ID NO: 11325 - DNA, 20 bp, Artificial Sequence
  Description of Artificial Sequence: Synthetic oligonucleotide
  Target: ATXN2; (+) strand; PAM type: NNGRRT; PAM sequence: AGGAAT
accactaccaaaattagcag

SEQ ID NO: 11326 - DNA, 20 bp, Artificial Sequence
  Description of Artificial Sequence: Synthetic oligonucleotide
  Target: ATXN2; (+) strand; PAM type: NNGRRT; PAM sequence: CTGAGT
catgcctcatatgatacaca

SEQ ID NO: 11327 - DNA, 20 bp, Artificial Sequence
  Description of Artificial Sequence: Synthetic oligonucleotide
  Target: ATXN2; (+) strand; PAM type: NNGRRT; PAM sequence: ATGAAT
acacactgagtaaataccta

SEQ ID NO: 11328 - DNA, 20 bp, Artificial Sequence
  Description of Artificial Sequence: Synthetic oligonucleotide
  Target: ATXN2; (+) strand; PAM type: NNGRRT; PAM sequence: AGGGGT
aagctatcaatctttaaatc

SEQ ID NO: 11329 - DNA, 20 bp, Artificial Sequence
  Description of Artificial Sequence: Synthetic oligonucleotide
  Target: ATXN2; (+) strand; PAM type: NNGRRT; PAM sequence: AAGAAT
tttggtctggcttctgggct

SEQ ID NO: 11330 - DNA, 20 bp, Artificial Sequence
  Description of Artificial Sequence: Synthetic oligonucleotide
  Target: ATXN2; (+) strand; PAM type: NNGRRT; PAM sequence: AAGAGT
gaatgatttttatgttcctc

SEQ ID NO: 11331 - DNA, 20 bp, Artificial Sequence
  Description of Artificial Sequence: Synthetic oligonucleotide
  Target: ATXN2; (+) strand; PAM type: NNGRRT; PAM sequence: AGGAAT
caagagttgcttatggtaaa

SEQ ID NO: 11332 - DNA, 20 bp, Artificial Sequence
  Description of Artificial Sequence: Synthetic oligonucleotide
  Target: ATXN2; (+) strand; PAM type: NNGRRT; PAM sequence: AAGGAT
gggaaatggaaaaaaaaaaa

SEQ ID NO: 11333 - DNA, 20 bp, Artificial Sequence
  Description of Artificial Sequence: Synthetic oligonucleotide
  Target: ATXN2; (+) strand; PAM type: NNGRRT; PAM sequence: GAGGAT
tactcaaaaggctcaggtga

SEQ ID NO: 11334 - DNA, 20 bp, Artificial Sequence
  Description of Artificial Sequence: Synthetic oligonucleotide
  Target: ATXN2; (+) strand; PAM type: NNGRRT; PAM sequence: AGGAAT
tgagaggatcgcttgagccc

SEQ ID NO: 11335 - DNA, 20 bp, Artificial Sequence
  Description of Artificial Sequence: Synthetic oligonucleotide
  Target: ATXN2; (+) strand; PAM type: NNGRRT; PAM sequence: ATGAAT
aaagttgtttattattttac

SEQ ID NO: 11336 - DNA, 20 bp, Artificial Sequence
  Description of Artificial Sequence: Synthetic oligonucleotide
  Target: ATXN2; (+) strand; PAM type: NNGRRT; PAM sequence: TGGGGT
tcttttctcttttgtagaga

SEQ ID NO: 11337 - DNA, 20 bp, Artificial Sequence
  Description of Artificial Sequence: Synthetic oligonucleotide
  Target: ATXN2; (+) strand; PAM type: NNGRRT; PAM sequence: TGGGAT
acctcagcctcccaaagtgc

SEQ ID NO: 11338 - DNA, 20 bp, Artificial Sequence
  Description of Artificial Sequence: Synthetic oligonucleotide
  Target: ATXN2; (+) strand; PAM type: NNGRRT; PAM sequence: CTGGAT
agtacttctaaaataaactg

SEQ ID NO: 11339 - DNA, 20 bp, Artificial Sequence
  Description of Artificial Sequence: Synthetic oligonucleotide
  Target: ATXN2; (+) strand; PAM type: NNGRRT; PAM sequence: ATGAAT
atgtacatataagaaatgtc

SEQ ID NO: 11340 - DNA, 20 bp, Artificial Sequence
  Description of Artificial Sequence: Synthetic oligonucleotide
  Target: ATXN2; (+) strand; PAM type: NNGRRT; PAM sequence: CCGAGT
gctgaccgtctgtggaaacc

SEQ ID NO: 11341 - DNA, 20 bp, Artificial Sequence
  Description of Artificial Sequence: Synthetic oligonucleotide
  Target: ATXN2; (+) strand; PAM type: NNGRRT; PAM sequence: GTGGAT
actttgggaggccaaggcag

SEQ ID NO: 11342 - DNA, 20 bp, Artificial Sequence
  Description of Artificial Sequence: Synthetic oligonucleotide
  Target: ATXN2; (+) strand; PAM type: NNGRRT; PAM sequence: AGGAGT
caggtggatcacttgaagcc

SEQ ID NO: 11343 - DNA, 20 bp, Artificial Sequence
  Description of Artificial Sequence: Synthetic oligonucleotide
  Target: ATXN2; (+) strand; PAM type: NNGRRT; PAM sequence: GAGAAT
tactcagtaagctgaggcac

SEQ ID NO: 11344 - DNA, 20 bp, Artificial Sequence
  Description of Artificial Sequence: Synthetic oligonucleotide
  Target: ATXN2; (+) strand; PAM type: NNGRRT; PAM sequence: CAGAGT
cacgagaattgcttgaacct

SEQ ID NO: 11345 - DNA, 20 bp, Artificial Sequence
  Description of Artificial Sequence: Synthetic oligonucleotide
  Target: ATXN2; (+) strand; PAM type: NNGRRT; PAM sequence: TAGGAT
ttgcttgaacctcagagttg

SEQ ID NO: 11346 - DNA, 20 bp, Artificial Sequence
  Description of Artificial Sequence: Synthetic oligonucleotide
  Target: ATXN2; (+) strand; PAM type: NNGRRT; PAM sequence: CAGAGT
ctgcactccacgctgggaaa

SEQ ID NO: 11347 - DNA, 20 bp, Artificial Sequence
  Description of Artificial Sequence: Synthetic oligonucleotide
  Target: ATXN2; (+) strand; PAM type: NNGRRT; PAM sequence: GGGAAT
cattgacaaaaagctatgat

SEQ ID NO: 11348 - DNA, 20 bp, Artificial Sequence
  Description of Artificial Sequence: Synthetic oligonucleotide
  Target: ATXN2; (+) strand; PAM type: NNGRRT; PAM sequence: AAGAAT
gttttcataactgctaacac

SEQ ID NO: 11349 - DNA, 20 bp, Artificial Sequence
  Description of Artificial Sequence: Synthetic oligonucleotide
  Target: ATXN2; (+) strand; PAM type: NNGRRT; PAM sequence: AGGGAT
caagaatcagtccatagccc

SEQ ID NO: 11350 - DNA, 20 bp, Artificial Sequence
  Description of Artificial Sequence: Synthetic oligonucleotide
  Target: ATXN2; (+) strand; PAM type: NNGRRT; PAM sequence: AGGGAT
agtccatagcccagggatca

SEQ ID NO: 11351 - DNA, 20 bp, Artificial Sequence
  Description of Artificial Sequence: Synthetic oligonucleotide
  Target: ATXN2; (+) strand; PAM type: NNGRRT; PAM sequence: GGGAGT
caggcagatcacctgagatc

SEQ ID NO: 11352 - DNA, 20 bp, Artificial Sequence
  Description of Artificial Sequence: Synthetic oligonucleotide
  Target: ATXN2; (+) strand; PAM type: NNGRRT; PAM sequence: GAGAAT
tactcaggaggctgaggcag

SEQ ID NO: 11353 - DNA, 20 bp, Artificial Sequence
  Description of Artificial Sequence: Synthetic oligonucleotide
  Target: ATXN2; (+) strand; PAM type: NNGRRT; PAM sequence: CTGGGT
gcatgccactgcactccagc

SEQ ID NO: 11354 - DNA, 20 bp, Artificial Sequence
  Description of Artificial Sequence: Synthetic oligonucleotide
  Target: ATXN2; (+) strand; PAM type: NNGRRT; PAM sequence: GAGAAT
tcaccattctagatgccact

SEQ ID NO: 11355 - DNA, 20 bp, Artificial Sequence
  Description of Artificial Sequence: Synthetic oligonucleotide
  Target: ATXN2; (+) strand; PAM type: NNGRRT; PAM sequence: AGGAGT
gttaaaacatcaacattaac

SEQ ID NO: 11356 - DNA, 20 bp, Artificial Sequence
  Description of Artificial Sequence: Synthetic oligonucleotide
  Target: ATXN2; (+) strand; PAM type: NNGRRT; PAM sequence: TAGAGT
ctttttttttttttttaaga

SEQ ID NO: 11357 - DNA, 20 bp, Artificial Sequence
  Description of Artificial Sequence: Synthetic oligonucleotide
  Target: ATXN2; (+) strand; PAM type: NNGRRT; PAM sequence: TGGAGT
ttcgctcctgttgcccaggc

SEQ ID NO: 11358 - DNA, 20 bp, Artificial Sequence
  Description of Artificial Sequence: Synthetic oligonucleotide
  Target: ATXN2; (+) strand; PAM type: NNGRRT; PAM sequence: TGGGAT
gcctcagtctcccaagtagc

SEQ ID NO: 11359 - DNA, 20 bp, Artificial Sequence
  Description of Artificial Sequence: Synthetic oligonucleotide
  Target: ATXN2; (+) strand; PAM type: NNGRRT; PAM sequence: CGGGGT
ttttgtatttttagtagaaa

SEQ ID NO: 11360 - DNA, 20 bp, Artificial Sequence
  Description of Artificial Sequence: Synthetic oligonucleotide
  Target: ATXN2; (+) strand; PAM type: NNGRRT; PAM sequence: TGGGAT
tccttggcctcccaaagtac

SEQ ID NO: 11361 - DNA, 20 bp, Artificial Sequence
  Description of Artificial Sequence: Synthetic oligonucleotide
  Target: ATXN2; (+) strand; PAM type: NNGRRT; PAM sequence: ATGAAT
ggaaattgcttctaatactc

SEQ ID NO: 11362 - DNA, 20 bp, Artificial Sequence
  Description of Artificial Sequence: Synthetic oligonucleotide
  Target: ATXN2; (+) strand; PAM type: NNGRRT; PAM sequence: AGGGGT
aatactcatgaatgattttg

SEQ ID NO: 11363 - DNA, 20 bp, Artificial Sequence
  Description of Artificial Sequence: Synthetic oligonucleotide
  Target: ATXN2; (+) strand; PAM type: NNGRRT; PAM sequence: TGGGGT
aagagaactaaaattagaag

SEQ ID NO: 11364 - DNA, 20 bp, Artificial Sequence
  Description of Artificial Sequence: Synthetic oligonucleotide
  Target: ATXN2; (+) strand; PAM type: NNGRRT; PAM sequence: CTGAAT
agtggggtcagaagatgtaa

SEQ ID NO: 11365 - DNA, 20 bp, Artificial Sequence
  Description of Artificial Sequence: Synthetic oligonucleotide
  Target: ATXN2; (+) strand; PAM type: NNGRRT; PAM sequence: TTGAAT
ctgcaatctcatgataaaac

SEQ ID NO: 11366 - DNA, 20 bp, Artificial Sequence
  Description of Artificial Sequence: Synthetic oligonucleotide
  Target: ATXN2; (+) strand; PAM type: NNGRRT; PAM sequence: ATGGAT
tagatgaggtgttgcttctc

SEQ ID NO: 11367 - DNA, 20 bp, Artificial Sequence
  Description of Artificial Sequence: Synthetic oligonucleotide
  Target: ATXN2; (+) strand; PAM type: NNGRRT; PAM sequence: TGGAAT
aagaaagtggtttcttaaga

SEQ ID NO: 11368 - DNA, 20 bp, Artificial Sequence
  Description of Artificial Sequence: Synthetic oligonucleotide
  Target: ATXN2; (+) strand; PAM type: NNGRRT; PAM sequence: ATGAAT
tgaaatgacaacaaaagatt

SEQ ID NO: 11369 - DNA, 20 bp, Artificial Sequence
  Description of Artificial Sequence: Synthetic oligonucleotide
  Target: ATXN2; (+) strand; PAM type: NNGRRT; PAM sequence: AGGAGT
ggcgggcagatcacgaagcc

SEQ ID NO: 11370 - DNA, 20 bp, Artificial Sequence
  Description of Artificial Sequence: Synthetic oligonucleotide
  Target: ATXN2; (+) strand; PAM type: NNGRRT; PAM sequence: GAGAAT
tactcaggaggctgaggcag

SEQ ID NO: 11371 - DNA, 20 bp, Artificial Sequence
  Description of Artificial Sequence: Synthetic oligonucleotide
  Target: ATXN2; (+) strand; PAM type: NNGRRT; PAM sequence: AGGAAT
cgggcagatcacctgaggtc

SEQ ID NO: 11372 - DNA, 20 bp, Artificial Sequence
  Description of Artificial Sequence: Synthetic oligonucleotide
  Target: ATXN2; (+) strand; PAM type: NNGRRT; PAM sequence: CCGGGT
actaaaaatataaaaattag

SEQ ID NO: 11373 - DNA, 20 bp, Artificial Sequence
  Description of Artificial Sequence: Synthetic oligonucleotide
  Target: ATXN2; (+) strand; PAM type: NNGRRT; PAM sequence: GAGAAT
tactcatgaggctgacacaa

SEQ ID NO: 11374 - DNA, 20 bp, Artificial Sequence
  Description of Artificial Sequence: Synthetic oligonucleotide
  Target: ATXN2; (+) strand; PAM type: NNGRRT; PAM sequence: AAGAAT
tgaaaaacattaaataatct

SEQ ID NO: 11375 - DNA, 20 bp, Artificial Sequence
  Description of Artificial Sequence: Synthetic oligonucleotide
  Target: ATXN2; (+) strand; PAM type: NNGRRT; PAM sequence: GTGGAT
actttgggaggctgaggcag

SEQ ID NO: 11376 - DNA, 20 bp, Artificial Sequence
  Description of Artificial Sequence: Synthetic oligonucleotide
  Target: ATXN2; (+) strand; PAM type: NNGRRT; PAM sequence: GAGAAT
tactcaggaggctgaggcag

SEQ ID NO: 11377 - DNA, 20 bp, Artificial Sequence
  Description of Artificial Sequence: Synthetic oligonucleotide
  Target: ATXN2; (+) strand; PAM type: NNGRRT; PAM sequence: CTGAGT
tcacgacaatgcactccagc

SEQ ID NO: 11378 - DNA, 20 bp, Artificial Sequence
  Description of Artificial Sequence: Synthetic oligonucleotide
  Target: ATXN2; (+) strand; PAM type: NNGRRT; PAM sequence: CTGGGT
taatgctatttcaacaagac

SEQ ID NO: 11379 - DNA, 20 bp, Artificial Sequence
  Description of Artificial Sequence: Synthetic oligonucleotide
  Target: ATXN2; (+) strand; PAM type: NNGRRT; PAM sequence: TAGAAT
atttcattgatccaggtttc

SEQ ID NO: 11380 - DNA, 20 bp, Artificial Sequence
  Description of Artificial Sequence: Synthetic oligonucleotide
  Target: ATXN2; (+) strand; PAM type: NNGRRT; PAM sequence: AAGGGT
taactaattttctttggcat

SEQ ID NO: 11381 - DNA, 20 bp, Artificial Sequence
  Description of Artificial Sequence: Synthetic oligonucleotide
  Target: ATXN2; (+) strand; PAM type: NNGRRT; PAM sequence: AAGAAT
cccccttccagtaaaactgt

SEQ ID NO: 11382 - DNA, 20 bp, Artificial Sequence
  Description of Artificial Sequence: Synthetic oligonucleotide
  Target: ATXN2; (+) strand; PAM type: NNGRRT; PAM sequence: GTGAGT
cttaaggttaactcacttag

SEQ ID NO: 11383 - DNA, 20 bp, Artificial Sequence
  Description of Artificial Sequence: Synthetic oligonucleotide
  Target: ATXN2; (+) strand; PAM type: NNGRRT; PAM sequence: TTGAAT
gggaaatcctataccacgta

SEQ ID NO: 11384 - DNA, 20 bp, Artificial Sequence
  Description of Artificial Sequence: Synthetic oligonucleotide
  Target: ATXN2; (+) strand; PAM type: NNGRRT; PAM sequence: TTGAGT
aatattttctccctaaaaag

SEQ ID NO: 11385 - DNA, 20 bp, Artificial Sequence
  Description of Artificial Sequence: Synthetic oligonucleotide
  Target: ATXN2; (+) strand; PAM type: NNGRRT; PAM sequence: GGGGGT
agtcaaatgaggtggcaaga

SEQ ID NO: 11386 - DNA, 20 bp, Artificial Sequence
  Description of Artificial Sequence: Synthetic oligonucleotide
  Target: ATXN2; (+) strand; PAM type: NNGRRT; PAM sequence: TAGAGT
caacccaaacacagtgaagc

SEQ ID NO: 11387 - DNA, 20 bp, Artificial Sequence
  Description of Artificial Sequence: Synthetic oligonucleotide
  Target: ATXN2; (+) strand; PAM type: NNGRRT; PAM sequence: TAGGAT
aatccggtcatataatcatc

SEQ ID NO: 11388 - DNA, 20 bp, Artificial Sequence
  Description of Artificial Sequence: Synthetic oligonucleotide
  Target: ATXN2; (+) strand; PAM type: NNGRRT; PAM sequence: TTGGGT
ctaatatcagcattaattgc

SEQ ID NO: 11389 - DNA, 20 bp, Artificial Sequence
  Description of Artificial Sequence: Synthetic oligonucleotide
  Target: ATXN2; (+) strand; PAM type: NNGRRT; PAM sequence: TAGAGT
cctcatattccagcatacac

SEQ ID NO: 11390 - DNA, 20 bp, Artificial Sequence
  Description of Artificial Sequence: Synthetic oligonucleotide
  Target: ATXN2; (+) strand; PAM type: NNGRRT; PAM sequence: GTGAGT
cagcactctgggaggccaag

SEQ ID NO: 11391 - DNA, 20 bp, Artificial Sequence
  Description of Artificial Sequence: Synthetic oligonucleotide
  Target: ATXN2; (+) strand; PAM type: NNGRRT; PAM sequence: AGGAAT
tgggaggccaaggtgagtcc

SEQ ID NO: 11392 - DNA, 20 bp, Artificial Sequence
  Description of Artificial Sequence: Synthetic oligonucleotide
  Target: ATXN2; (+) strand; PAM type: NNGRRT; PAM sequence: GAGGAT
ttacttgggagctgaggtgg

SEQ ID NO: 11393 - DNA, 20 bp, Artificial Sequence
  Description of Artificial Sequence: Synthetic oligonucleotide
  Target: ATXN2; (+) strand; PAM type: NNGRRT; PAM sequence: CAGGAT
aagtcgaggctgcagtgagc

SEQ ID NO: 11394 - DNA, 20 bp, Artificial Sequence
  Description of Artificial Sequence: Synthetic oligonucleotide
  Target: ATXN2; (+) strand; PAM type: NNGRRT; PAM sequence: CTGAGT
tcatgccactggactccagc

SEQ ID NO: 11395 - DNA, 20 bp, Artificial Sequence
  Description of Artificial Sequence: Synthetic oligonucleotide
  Target: ATXN2; (+) strand; PAM type: NNGRRT; PAM sequence: TTGAGT
cccttcagtgcctttacccc

SEQ ID NO: 11396 - DNA, 20 bp, Artificial Sequence
  Description of Artificial Sequence: Synthetic oligonucleotide
  Target: ATXN2; (+) strand; PAM type: NNGRRT; PAM sequence: AGGGAT
ccttgagtccctctagagaa

SEQ ID NO: 11397 - DNA, 20 bp, Artificial Sequence
  Description of Artificial Sequence: Synthetic oligonucleotide
  Target: ATXN2; (+) strand; PAM type: NNGRRT; PAM sequence: AAGGAT
tccaaacaactcaggtagaa

SEQ ID NO: 11398 - DNA, 20 bp, Artificial Sequence
  Description of Artificial Sequence: Synthetic oligonucleotide
  Target: ATXN2; (+) strand; PAM type: NNGRRT; PAM sequence: TCGAGT
cagtgcccattcccatcttc

SEQ ID NO: 11399 - DNA, 20 bp, Artificial Sequence
  Description of Artificial Sequence: Synthetic oligonucleotide
  Target: ATXN2; (+) strand; PAM type: NNGRRT; PAM sequence: AAGAAT
tcacctctgacttatgcacc

SEQ ID NO: 11400 - DNA, 20 bp, Artificial Sequence
  Description of Artificial Sequence: Synthetic oligonucleotide
  Target: ATXN2; (+) strand; PAM type: NNGRRT; PAM sequence: GGGAGT
agactatcagtggaggagag

SEQ ID NO: 11401 - DNA, 20 bp, Artificial Sequence
  Description of Artificial Sequence: Synthetic oligonucleotide
  Target: ATXN2; (+) strand; PAM type: NNGRRT; PAM sequence: CTGAGT
tttactgataactgctaaag

SEQ ID NO: 11402 - DNA, 20 bp, Artificial Sequence
  Description of Artificial Sequence: Synthetic oligonucleotide
  Target: ATXN2; (+) strand; PAM type: NNGRRT; PAM sequence: CTGGGT
tgcctgccttctctactaca

SEQ ID NO: 11403 - DNA, 20 bp, Artificial Sequence
  Description of Artificial Sequence: Synthetic oligonucleotide
  Target: ATXN2; (+) strand; PAM type: NNGRRT; PAM sequence: ATGAAT
ctgacagcatcaaatgtgta

SEQ ID NO: 11404 - DNA, 20 bp, Artificial Sequence
  Description of Artificial Sequence: Synthetic oligonucleotide
  Target: ATXN2; (+) strand; PAM type: NNGRRT; PAM sequence: ATGAAT
atcaaatgtgtaatgaatta

SEQ ID NO: 11405 - DNA, 20 bp, Artificial Sequence
  Description of Artificial Sequence: Synthetic oligonucleotide
  Target: ATXN2; (+) strand; PAM type: NNGRRT; PAM sequence: AGGGAT
atcacgaagtatgaaggagc

SEQ ID NO: 11406 - DNA, 20 bp, Artificial Sequence
  Description of Artificial Sequence: Synthetic oligonucleotide
  Target: ATXN2; (+) strand; PAM type: NNGRRT; PAM sequence: GCGAAT
aagtatgaaggagcagggat

SEQ ID NO: 11407 - DNA, 20 bp, Artificial Sequence
  Description of Artificial Sequence: Synthetic oligonucleotide
  Target: ATXN2; (+) strand; PAM type: NNGRRT; PAM sequence: GGGGAT
caaaattcagatttgggaaa

SEQ ID NO: 11408 - DNA, 20 bp, Artificial Sequence
  Description of Artificial Sequence: Synthetic oligonucleotide
  Target: ATXN2; (+) strand; PAM type: NNGRRT; PAM sequence: TAGGAT
tcagatttgggaaaggggat

SEQ ID NO: 11409 - DNA, 20 bp, Artificial Sequence
  Description of Artificial Sequence: Synthetic oligonucleotide
  Target: ATXN2; (+) strand; PAM type: NNGRRT; PAM sequence: AGGAAT
aggggattaggatgccaaat

SEQ ID NO: 11410 - DNA, 20 bp, Artificial Sequence
  Description of Artificial Sequence: Synthetic oligonucleotide
  Target: ATXN2; (+) strand; PAM type: NNGRRT; PAM sequence: CTGAAT
taatttatagtaagctacta

SEQ ID NO: 11411 - DNA, 20 bp, Artificial Sequence
  Description of Artificial Sequence: Synthetic oligonucleotide
  Target: ATXN2; (+) strand; PAM type: NNGRRT; PAM sequence: TAGAAT
tacaggaagtttttaattat

SEQ ID NO: 11412 - DNA, 20 bp, Artificial Sequence
  Description of Artificial Sequence: Synthetic oligonucleotide
  Target: ATXN2; (+) strand; PAM type: NNGRRT; PAM sequence: AAGGGT
aaaatttgggctagatctta

SEQ ID NO: 11413 - DNA, 20 bp, Artificial Sequence
  Description of Artificial Sequence: Synthetic oligonucleotide
  Target: ATXN2; (+) strand; PAM type: NNGRRT; PAM sequence: GAGGAT
agatcttaaagggtaagtat

SEQ ID NO: 11414 - DNA, 20 bp, Artificial Sequence
  Description of Artificial Sequence: Synthetic oligonucleotide
  Target: ATXN2; (+) strand; PAM type: NNGRRT; PAM sequence: TCGAAT
aaagggtaagtatgaggatc

SEQ ID NO: 11415 - DNA, 20 bp, Artificial Sequence
  Description of Artificial Sequence: Synthetic oligonucleotide
  Target: ATXN2; (+) strand; PAM type: NNGRRT; PAM sequence: AAGAGT
aaatggaggtcatatttttg

SEQ ID NO: 11416 - DNA, 20 bp, Artificial Sequence
  Description of Artificial Sequence: Synthetic oligonucleotide
  Target: ATXN2; (+) strand; PAM type: NNGRRT; PAM sequence: TGGAGT
acatgatcagaaaggtaaaa

SEQ ID NO: 11417 - DNA, 20 bp, Artificial Sequence
  Description of Artificial Sequence: Synthetic oligonucleotide
  Target: ATXN2; (+) strand; PAM type: NNGRRT; PAM sequence: AGGGGT
aggtaaaatggagttctatt

SEQ ID NO: 11418 - DNA, 20 bp, Artificial Sequence
  Description of Artificial Sequence: Synthetic oligonucleotide
  Target: ATXN2; (+) strand; PAM type: NNGRRT; PAM sequence: CAGAAT
ttttcacatggcttaaagct

SEQ ID NO: 11419 - DNA, 20 bp, Artificial Sequence
  Description of Artificial Sequence: Synthetic oligonucleotide
  Target: ATXN2; (+) strand; PAM type: NNGRRT; PAM sequence: GAGAAT
tactcgggaagctgagacag

SEQ ID NO: 11420 - DNA, 20 bp, Artificial Sequence
  Description of Artificial Sequence: Synthetic oligonucleotide
  Target: ATXN2; (+) strand; PAM type: NNGRRT; PAM sequence: GTGGAT
actttgggaggccgcagcag

SEQ ID NO: 11421 - DNA, 20 bp, Artificial Sequence
  Description of Artificial Sequence: Synthetic oligonucleotide
  Target: ATXN2; (+) strand; PAM type: NNGRRT; PAM sequence: AGGAGT
caggtggatcacctgaggtc

SEQ ID NO: 11422 - DNA, 20 bp, Artificial Sequence
  Description of Artificial Sequence: Synthetic oligonucleotide
  Target: ATXN2; (+) strand; PAM type: NNGRRT; PAM sequence: GAGAAT
tacttgagaggctgaggcag

SEQ ID NO: 11423 - DNA, 20 bp, Artificial Sequence
  Description of Artificial Sequence: Synthetic oligonucleotide
  Target: ATXN2; (+) strand; PAM type: NNGRRT; PAM sequence: CTGGGT
tggcaccattgcactccagc

SEQ ID NO: 11424 - DNA, 20 bp, Artificial Sequence
  Description of Artificial Sequence: Synthetic oligonucleotide
  Target: ATXN2; (+) strand; PAM type: NNGRRT; PAM sequence: TTGGAT
tttacgaagtttgacaggcc

SEQ ID NO: 11425 - DNA, 20 bp, Artificial Sequence
  Description of Artificial Sequence: Synthetic oligonucleotide
  Target: ATXN2; (+) strand; PAM type: NNGRRT; PAM sequence: GGGAAT
aggtagactccctcaggctt

SEQ ID NO: 11426 - DNA, 20 bp, Artificial Sequence
  Description of Artificial Sequence: Synthetic oligonucleotide
  Target: ATXN2; (+) strand; PAM type: NNGRRT; PAM sequence: TAGGGT
gactccctcaggcttgggaa

SEQ ID NO: 11427 - DNA, 20 bp, Artificial Sequence
  Description of Artificial Sequence: Synthetic oligonucleotide
  Target: ATXN2; (+) strand; PAM type: NNGRRT; PAM sequence: AGGGGT
atagggtgatttttaagcag

SEQ ID NO: 11428 - DNA, 20 bp, Artificial Sequence
  Description of Artificial Sequence: Synthetic oligonucleotide
  Target: ATXN2; (+) strand; PAM type: NNGRRT; PAM sequence: TAGAGT
gaggggtaacccaacacaag

SEQ ID NO: 11429 - DNA, 20 bp, Artificial Sequence
  Description of Artificial Sequence: Synthetic oligonucleotide
  Target: ATXN2; (+) strand; PAM type: NNGRRT; PAM sequence: ATGGAT
aggtaggctaggttaaaccc

SEQ ID NO: 11430 - DNA, 20 bp, Artificial Sequence
  Description of Artificial Sequence: Synthetic oligonucleotide
  Target: ATXN2; (+) strand; PAM type: NNGRRT; PAM sequence: AAGAAT
attaatgtatcgcagtaatt

SEQ ID NO: 11431 - DNA, 20 bp, Artificial Sequence
  Description of Artificial Sequence: Synthetic oligonucleotide
  Target: ATXN2; (+) strand; PAM type: NNGRRT; PAM sequence: AAGAAT
aaataaataacagcatagcc

SEQ ID NO: 11432 - DNA, 20 bp, Artificial Sequence
  Description of Artificial Sequence: Synthetic oligonucleotide
  Target: ATXN2; (+) strand; PAM type: NNGRRT; PAM sequence: AGGAAT
tgcctaaagtcacagaggaa

SEQ ID NO: 11433 - DNA, 20 bp, Artificial Sequence
  Description of Artificial Sequence: Synthetic oligonucleotide
  Target: ATXN2; (+) strand; PAM type: NNGRRT; PAM sequence: GTGAGT
gacagggaaagcgtgggcaa

SEQ ID NO: 11434 - DNA, 20 bp, Artificial Sequence
  Description of Artificial Sequence: Synthetic oligonucleotide
  Target: ATXN2; (+) strand; PAM type: NNGRRT; PAM sequence: GTGGGT
agaagcatcctaagtggtgt

SEQ ID NO: 11435 - DNA, 20 bp, Artificial Sequence
  Description of Artificial Sequence: Synthetic oligonucleotide
  Target: ATXN2; (+) strand; PAM type: NNGRRT; PAM sequence: ATGAGT
ctttttagttcaaattaatt

SEQ ID NO: 11436 - DNA, 20 bp, Artificial Sequence
  Description of Artificial Sequence: Synthetic oligonucleotide
  Target: ATXN2; (+) strand; PAM type: NNGRRT; PAM sequence: CCGGAT
tttattgctgacaataatca

SEQ ID NO: 11437 - DNA, 20 bp, Artificial Sequence
  Description of Artificial Sequence: Synthetic oligonucleotide
  Target: ATXN2; (+) strand; PAM type: NNGRRT; PAM sequence: CGGAGT
tatttatttattttttgaga

SEQ ID NO: 11438 - DNA, 20 bp, Artificial Sequence
  Description of Artificial Sequence: Synthetic oligonucleotide
  Target: ATXN2; (+) strand; PAM type: NNGRRT; PAM sequence: TGGAGT
tcttgctttgttgcctacgc

SEQ ID NO: 11439 - DNA, 20 bp, Artificial Sequence
  Description of Artificial Sequence: Synthetic oligonucleotide
  Target: ATXN2; (+) strand; PAM type: NNGRRT; PAM sequence: CTGAGT
attctccttgcctcagccta

SEQ ID NO: 11440 - DNA, 20 bp, Artificial Sequence
  Description of Artificial Sequence: Synthetic oligonucleotide
  Target: ATXN2; (+) strand; PAM type: NNGRRT; PAM sequence: TGGGAT
gcctcagcctactgagtagc

SEQ ID NO: 11441 - DNA, 20 bp, Artificial Sequence
  Description of Artificial Sequence: Synthetic oligonucleotide
  Target: ATXN2; (+) strand; PAM type: NNGRRT; PAM sequence: CGGAGT
ttttgtatttttagtagaga

SEQ ID NO: 11442 - DNA, 20 bp, Artificial Sequence
  Description of Artificial Sequence: Synthetic oligonucleotide
  Target: ATXN2; (+) strand; PAM type: NNGRRT; PAM sequence: TGGGAT
gcctcggcctcccaaactgc

SEQ ID NO: 11443 - DNA, 20 bp, Artificial Sequence
  Description of Artificial Sequence: Synthetic oligonucleotide
  Target: ATXN2; (+) strand; PAM type: NNGRRT; PAM sequence: TTGGGT
tatttccttaccattttaga

SEQ ID NO: 11444 - DNA, 20 bp, Artificial Sequence
  Description of Artificial Sequence: Synthetic oligonucleotide
  Target: ATXN2; (+) strand; PAM type: NNGRRT; PAM sequence: CCGGGT
aaaagtatggagacttccgg

SEQ ID NO: 11445 - DNA, 20 bp, Artificial Sequence
  Description of Artificial Sequence: Synthetic oligonucleotide
  Target: ATXN2; (+) strand; PAM type: NNGRRT; PAM sequence: CGGGAT
aggcagacagatcatgaggt

SEQ ID NO: 11446 - DNA, 20 bp, Artificial Sequence
  Description of Artificial Sequence: Synthetic oligonucleotide
  Target: ATXN2; (+) strand; PAM type: NNGRRT; PAM sequence: GAGAAT
tactcgggaggtggaggcag

SEQ ID NO: 11447 - DNA, 20 bp, Artificial Sequence
  Description of Artificial Sequence: Synthetic oligonucleotide
  Target: ATXN2; (+) strand; PAM type: NNGRRT; PAM sequence: CTGAAT
actatgaacaactaaattcc

SEQ ID NO: 11448 - DNA, 20 bp, Artificial Sequence
  Description of Artificial Sequence: Synthetic oligonucleotide
  Target: ATXN2; (+) strand; PAM type: NNGRRT; PAM sequence: GGGGAT
tttcttttttttggcggtgg

SEQ ID NO: 11449 - DNA, 20 bp, Artificial Sequence
  Description of Artificial Sequence: Synthetic oligonucleotide
  Target: ATXN2; (+) strand; PAM type: NNGRRT; PAM sequence: TAGGGT
tttttttggcggtgggggga

SEQ ID NO: 11450 - DNA, 20 bp, Artificial Sequence
  Description of Artificial Sequence: Synthetic oligonucleotide
  Target: ATXN2; (+) strand; PAM type: NNGRRT; PAM sequence: TGGGAT
tagggtctcactctgtcgcc

SEQ ID NO: 11451 - DNA, 20 bp, Artificial Sequence
  Description of Artificial Sequence: Synthetic oligonucleotide
  Target: ATXN2; (+) strand; PAM type: NNGRRT; PAM sequence: CTGGGT
ctcactgcaacctccaattc

SEQ ID NO: 11452 - DNA, 20 bp, Artificial Sequence
  Description of Artificial Sequence: Synthetic oligonucleotide
  Target: ATXN2; (+) strand; PAM type: NNGRRT; PAM sequence: CTGAGT
cctgggtttaagtgaccctc

SEQ ID NO: 11453 - DNA, 20 bp, Artificial Sequence
  Description of Artificial Sequence: Synthetic oligonucleotide
  Target: ATXN2; (+) strand; PAM type: NNGRRT; PAM sequence: TTGAAT
ctatgttgcctaggctgatc

SEQ ID NO: 11454 - DNA, 20 bp, Artificial Sequence
  Description of Artificial Sequence: Synthetic oligonucleotide
  Target: ATXN2; (+) strand; PAM type: NNGRRT; PAM sequence: TAGAAT
cccttggcttcccaaagtgc

SEQ ID NO: 11455 - DNA, 20 bp, Artificial Sequence
  Description of Artificial Sequence: Synthetic oligonucleotide
  Target: ATXN2; (+) strand; PAM type: NNGRRT; PAM sequence: CTGAGT
taactcatctctgccacctt

SEQ ID NO: 11456 - DNA, 20 bp, Artificial Sequence
  Description of Artificial Sequence: Synthetic oligonucleotide
  Target: ATXN2; (+) strand; PAM type: NNGRRT; PAM sequence: GTGAAT
tcatctctgccaccttctga

SEQ ID NO: 11457 - DNA, 20 bp, Artificial Sequence
  Description of Artificial Sequence: Synthetic oligonucleotide
  Target: ATXN2; (+) strand; PAM type: NNGRRT; PAM sequence: TTGAAT
ctgccaccttctgagtgaat

SEQ ID NO: 11458 - DNA, 20 bp, Artificial Sequence
  Description of Artificial Sequence: Synthetic oligonucleotide
  Target: ATXN2; (+) strand; PAM type: NNGRRT; PAM sequence: ATGGGT
ctctgggccttcatttcctc

SEQ ID NO: 11459 - DNA, 20 bp, Artificial Sequence
  Description of Artificial Sequence: Synthetic oligonucleotide
  Target: ATXN2; (+) strand; PAM type: NNGRRT; PAM sequence: CAGGAT
cctcatgggtaaaatgagga

SEQ ID NO: 11460 - DNA, 20 bp, Artificial Sequence
  Description of Artificial Sequence: Synthetic oligonucleotide
  Target: ATXN2; (+) strand; PAM type: NNGRRT; PAM sequence: GAGAAT
tgagattatgtatgccctgg

SEQ ID NO: 11461 - DNA, 20 bp, Artificial Sequence
  Description of Artificial Sequence: Synthetic oligonucleotide
  Target: ATXN2; (+) strand; PAM type: NNGRRT; PAM sequence: TGGGGT
aaaaatattttttgtagaga

SEQ ID NO: 11462 - DNA, 20 bp, Artificial Sequence
  Description of Artificial Sequence: Synthetic oligonucleotide
  Target: ATXN2; (+) strand; PAM type: NNGRRT; PAM sequence: CAGGGT
atgccatgctttctacatga

SEQ ID NO: 11463 - DNA, 20 bp, Artificial Sequence
  Description of Artificial Sequence: Synthetic oligonucleotide
  Target: ATXN2; (+) strand; PAM type: NNGRRT; PAM sequence: GCGGGT
cagcactttgggaggccaag

SEQ ID NO: 11464 - DNA, 20 bp, Artificial Sequence
  Description of Artificial Sequence: Synthetic oligonucleotide
  Target: ATXN2; (+) strand; PAM type: NNGRRT; PAM sequence: GTGGAT
actttgggaggccaaggcgg

SEQ ID NO: 11465 - DNA, 20 bp, Artificial Sequence
  Description of Artificial Sequence: Synthetic oligonucleotide
  Target: ATXN2; (+) strand; PAM type: NNGRRT; PAM sequence: AGGAGT
ggcgggtggatcatgaggtc

SEQ ID NO: 11466 - DNA, 20 bp, Artificial Sequence
  Description of Artificial Sequence: Synthetic oligonucleotide
  Target: ATXN2; (+) strand; PAM type: NNGRRT; PAM sequence: GAGAAT
tacttgggaggctaagacag

SEQ ID NO: 11467 - DNA, 20 bp, Artificial Sequence
  Description of Artificial Sequence: Synthetic oligonucleotide
  Target: ATXN2; (+) strand; PAM type: NNGRRT; PAM sequence: GCGGAT
actttggaaggtcgaggtag

SEQ ID NO: 11468 - DNA, 20 bp, Artificial Sequence
  Description of Artificial Sequence: Synthetic oligonucleotide
  Target: ATXN2; (+) strand; PAM type: NNGRRT; PAM sequence: GAGAAT
tcgaggtaggcggatcactt

SEQ ID NO: 11469 - DNA, 20 bp, Artificial Sequence
  Description of Artificial Sequence: Synthetic oligonucleotide
  Target: ATXN2; (+) strand; PAM type: NNGRRT; PAM sequence: AGGAGT
taggcggatcacttgagaat

SEQ ID NO: 11470 - DNA, 20 bp, Artificial Sequence
  Description of Artificial Sequence: Synthetic oligonucleotide
  Target: ATXN2; (+) strand; PAM type: NNGRRT; PAM sequence: CTGAAT
agtctcaggtacttgggagg

SEQ ID NO: 11471 - DNA, 20 bp, Artificial Sequence
  Description of Artificial Sequence: Synthetic oligonucleotide
  Target: ATXN2; (+) strand; PAM type: NNGRRT; PAM sequence: CAGAGT
ctgtactccaacctgggcaa

SEQ ID NO: 11472 - DNA, 20 bp, Artificial Sequence
  Description of Artificial Sequence: Synthetic oligonucleotide
  Target: ATXN2; (+) strand; PAM type: NNGRRT; PAM sequence: CCGGGT
ctcactgcaacctctgcctc

SEQ ID NO: 11473 - DNA, 20 bp, Artificial Sequence
  Description of Artificial Sequence: Synthetic oligonucleotide
  Target: ATXN2; (+) strand; PAM type: NNGRRT; PAM sequence: CTGAGT
gattctcctgcctcagcctt

SEQ ID NO: 11474 - DNA, 20 bp, Artificial Sequence
  Description of Artificial Sequence: Synthetic oligonucleotide
  Target: ATXN2; (+) strand; PAM type: NNGRRT; PAM sequence: CAGGGT
ttgtgtatttgtaataaaca

SEQ ID NO: 11475 - DNA, 20 bp, Artificial Sequence
  Description of Artificial Sequence: Synthetic oligonucleotide
  Target: ATXN2; (+) strand; PAM type: NNGRRT; PAM sequence: GCGGAT
actttgggaggccgaggcgg

SEQ ID NO: 11476 - DNA, 20 bp, Artificial Sequence
  Description of Artificial Sequence: Synthetic oligonucleotide
  Target: ATXN2; (+) strand; PAM type: NNGRRT; PAM sequence: AGGAGT
ggcgggcggatcacaaagtc

SEQ ID NO: 11477 - DNA, 20 bp, Artificial Sequence
  Description of Artificial Sequence: Synthetic oligonucleotide
  Target: ATXN2; (+) strand; PAM type: NNGRRT; PAM sequence: GAGAAT
tacttgggaggctgaggcag

SEQ ID NO: 11478 - DNA, 20 bp, Artificial Sequence
  Description of Artificial Sequence: Synthetic oligonucleotide
  Target: ATXN2; (+) strand; PAM type: NNGRRT; PAM sequence: GGGAGT
caggagaatggcatgaacct

SEQ ID NO: 11479 - DNA, 20 bp, Artificial Sequence
  Description of Artificial Sequence: Synthetic oligonucleotide
  Target: ATXN2; (+) strand; PAM type: NNGRRT; PAM sequence: CAGGGT
aataaacaaacaaacaaacc

SEQ ID NO: 11480 - DNA, 20 bp, Artificial Sequence
  Description of Artificial Sequence: Synthetic oligonucleotide
  Target: ATXN2; (+) strand; PAM type: NNGRRT; PAM sequence: TGGGAT
gcctcggcctcccaaagtgc

SEQ ID NO: 11481 - DNA, 20 bp, Artificial Sequence
  Description of Artificial Sequence: Synthetic oligonucleotide
  Target: ATXN2; (+) strand; PAM type: NNGRRT; PAM sequence: CAGAGT
tttatttatttattttgaga

SEQ ID NO: 11482 - DNA, 20 bp, Artificial Sequence
  Description of Artificial Sequence: Synthetic oligonucleotide
  Target: ATXN2; (+) strand; PAM type: NNGRRT; PAM sequence: TGGAGT
tctcgctctgttgcccaggc

SEQ ID NO: 11483 - DNA, 20 bp, Artificial Sequence
  Description of Artificial Sequence: Synthetic oligonucleotide
  Target: ATXN2; (+) strand; PAM type: NNGRRT; PAM sequence: CCGGGT
ctcactgcaagctccgcctc

SEQ ID NO: 11484 - DNA, 20 bp, Artificial Sequence
  Description of Artificial Sequence: Synthetic oligonucleotide
  Target: ATXN2; (+) strand; PAM type: NNGRRT; PAM sequence: CCGAGT
cattctcctgcctcagcctc

SEQ ID NO: 11485 - DNA, 20 bp, Artificial Sequence
  Description of Artificial Sequence: Synthetic oligonucleotide
  Target: ATXN2; (+) strand; PAM type: NNGRRT; PAM sequence: TGGGAT
gcctcagcctcccgagtagc

SEQ ID NO: 11486 - DNA, 20 bp, Artificial Sequence
  Description of Artificial Sequence: Synthetic oligonucleotide
  Target: ATXN2; (+) strand; PAM type: NNGRRT; PAM sequence: CGGGGT
tttagtatttttagtagaga

SEQ ID NO: 11487 - DNA, 20 bp, Artificial Sequence
  Description of Artificial Sequence: Synthetic oligonucleotide
  Target: ATXN2; (+) strand; PAM type: NNGRRT; PAM sequence: CAGGAT
cggggtttcaccgtgttagc

SEQ ID NO: 11488 - DNA, 20 bp, Artificial Sequence
  Description of Artificial Sequence: Synthetic oligonucleotide
  Target: ATXN2; (+) strand; PAM type: NNGRRT; PAM sequence: TGGGAT
gcctcggcctcccaaagtgc

SEQ ID NO: 11489 - DNA, 20 bp, Artificial Sequence
  Description of Artificial Sequence: Synthetic oligonucleotide
  Target: ATXN2; (+) strand; PAM type: NNGRRT; PAM sequence: GAGGAT
tacgtgggaagctgaggtgg

SEQ ID NO: 11490 - DNA, 20 bp, Artificial Sequence
  Description of Artificial Sequence: Synthetic oligonucleotide
  Target: ATXN2; (+) strand; PAM type: NNGRRT; PAM sequence: AGGAGT
tgggaggattgctggagccc

SEQ ID NO: 11491 - DNA, 20 bp, Artificial Sequence
  Description of Artificial Sequence: Synthetic oligonucleotide
  Target: ATXN2; (+) strand; PAM type: NNGRRT; PAM sequence: GCGGGT
cagcactttgggaggccacg

SEQ ID NO: 11492 - DNA, 20 bp, Artificial Sequence
  Description of Artificial Sequence: Synthetic oligonucleotide
  Target: ATXN2; (+) strand; PAM type: NNGRRT; PAM sequence: GTGGAT
actttgggaggccacggcgg

SEQ ID NO: 11493 - DNA, 20 bp, Artificial Sequence
  Description of Artificial Sequence: Synthetic oligonucleotide
  Target: ATXN2; (+) strand; PAM type: NNGRRT; PAM sequence: AGGAGT
cgggtggatcacctgaggtc

SEQ ID NO: 11494 - DNA, 20 bp, Artificial Sequence
  Description of Artificial Sequence: Synthetic oligonucleotide
  Target: ATXN2; (+) strand; PAM type: NNGRRT; PAM sequence: GAGAAT
tattcaggaggttgaggcag

SEQ ID NO: 11495 - DNA, 20 bp, Artificial Sequence
  Description of Artificial Sequence: Synthetic oligonucleotide
  Target: ATXN2; (+) strand; PAM type: NNGRRT; PAM sequence: AAGAGT
gctatacagatttgtagcct

SEQ ID NO: 11496 - DNA, 20 bp, Artificial Sequence
  Description of Artificial Sequence: Synthetic oligonucleotide
  Target: ATXN2; (+) strand; PAM type: NNGRRT; PAM sequence: ATGAAT
ttctcatcaccaaagatggt

SEQ ID NO: 11497 - DNA, 20 bp, Artificial Sequence
  Description of Artificial Sequence: Synthetic oligonucleotide
  Target: ATXN2; (+) strand; PAM type: NNGRRT; PAM sequence: ATGAAT
actttgggaggctgaggtag

SEQ ID NO: 11498 - DNA, 20 bp, Artificial Sequence
  Description of Artificial Sequence: Synthetic oligonucleotide
  Target: ATXN2; (+) strand; PAM type: NNGRRT; PAM sequence: AGGAGT
tagatgaatcacttgagccc

SEQ ID NO: 11499 - DNA, 20 bp, Artificial Sequence
  Description of Artificial Sequence: Synthetic oligonucleotide
  Target: ATXN2; (+) strand; PAM type: NNGRRT; PAM sequence: GAGGAT
cagccaggaggctgaggcag

SEQ ID NO: 11500 - DNA, 20 bp, Artificial Sequence
  Description of Artificial Sequence: Synthetic oligonucleotide
  Target: ATXN2; (+) strand; PAM type: NNGRRT; PAM sequence: CTGGGT
tcgcaccactgcactccacc

SEQ ID NO: 11501 - DNA, 20 bp, Artificial Sequence
  Description of Artificial Sequence: Synthetic oligonucleotide
  Target: ATXN2; (+) strand; PAM type: NNGRRT; PAM sequence: CAGGAT
taaaattaaataaacactca

SEQ ID NO: 11502 - DNA, 20 bp, Artificial Sequence
  Description of Artificial Sequence: Synthetic oligonucleotide
  Target: ATXN2; (+) strand; PAM type: NNGRRT; PAM sequence: CGGAGT
atttatttatttttttgaga

SEQ ID NO: 11503 - DNA, 20 bp, Artificial Sequence
  Description of Artificial Sequence: Synthetic oligonucleotide
  Target: ATXN2; (+) strand; PAM type: NNGRRT; PAM sequence: TGGAGT
ttcactcttgatgcccaggc

SEQ ID NO: 11504 - DNA, 20 bp, Artificial Sequence
  Description of Artificial Sequence: Synthetic oligonucleotide
  Target: ATXN2; (+) strand; PAM type: NNGRRT; PAM sequence: CCGGGT
ctcaccacaacctctgcctc

SEQ ID NO: 11505 - DNA, 20 bp, Artificial Sequence
  Description of Artificial Sequence: Synthetic oligonucleotide
  Target: ATXN2; (+) strand; PAM type: NNGRRT; PAM sequence: CTGAGT
gattctcctgcctcagcctc

SEQ ID NO: 11506 - DNA, 20 bp, Artificial Sequence
  Description of Artificial Sequence: Synthetic oligonucleotide
  Target: ATXN2; (+) strand; PAM type: NNGRRT; PAM sequence: TAGGAT
gcctcagcctcctgagtagc

SEQ ID NO: 11507 - DNA, 20 bp, Artificial Sequence
  Description of Artificial Sequence: Synthetic oligonucleotide
  Target: ATXN2; (+) strand; PAM type: NNGRRT; PAM sequence: TGGGGT
ttttgtatttttagtagaga

SEQ ID NO: 11508 - DNA, 20 bp, Artificial Sequence
  Description of Artificial Sequence: Synthetic oligonucleotide
  Target: ATXN2; (+) strand; PAM type: NNGRRT; PAM sequence: TGGGAT
gcctcggccttccaaaatgc

SEQ ID NO: 11509 - DNA, 20 bp, Artificial Sequence
  Description of Artificial Sequence: Synthetic oligonucleotide
  Target: ATXN2; (+) strand; PAM type: NNGRRT; PAM sequence: AAGAGT
tttttttttttttttgagat

SEQ ID NO: 11510 - DNA, 20 bp, Artificial Sequence
  Description of Artificial Sequence: Synthetic oligonucleotide
  Target: ATXN2; (+) strand; PAM type: NNGRRT; PAM sequence: TGGAGT
tctcactatgtcacccaggc

SEQ ID NO: 11511 - DNA, 20 bp, Artificial Sequence
  Description of Artificial Sequence: Synthetic oligonucleotide
  Target: ATXN2; (+) strand; PAM type: NNGRRT; PAM sequence: CTGGGT
ttcactgcaacctcctcctc

SEQ ID NO: 11512 - DNA, 20 bp, Artificial Sequence
  Description of Artificial Sequence: Synthetic oligonucleotide
  Target: ATXN2; (+) strand; PAM type: NNGRRT; PAM sequence: CCGAGT
attctcctgtctcagccccc

SEQ ID NO: 11513 - DNA, 20 bp, Artificial Sequence
  Description of Artificial Sequence: Synthetic oligonucleotide
  Target: ATXN2; (+) strand; PAM type: NNGRRT; PAM sequence: TGGGAT
tctcagcccccccgagtagc

SEQ ID NO: 11514 - DNA, 20 bp, Artificial Sequence
  Description of Artificial Sequence: Synthetic oligonucleotide
  Target: ATXN2; (+) strand; PAM type: NNGRRT; PAM sequence: CAGGGT
ttttgtacttttagtagaca

SEQ ID NO: 11515 - DNA, 20 bp, Artificial Sequence
  Description of Artificial Sequence: Synthetic oligonucleotide
  Target: ATXN2; (+) strand; PAM type: NNGRRT; PAM sequence: TGGGAT
acctcagcctcccaaagtgc

SEQ ID NO: 11516 - DNA, 20 bp, Artificial Sequence
  Description of Artificial Sequence: Synthetic oligonucleotide
  Target: ATXN2; (+) strand; PAM type: NNGRRT; PAM sequence: ATGGGT
ctccccaagtagctgggact

SEQ ID NO: 11517 - DNA, 20 bp, Artificial Sequence
  Description of Artificial Sequence: Synthetic oligonucleotide
  Target: ATXN2; (+) strand; PAM type: NNGRRT; PAM sequence: AGGAGT
acagaaagttcggtgtggtt

SEQ ID NO: 11518 - DNA, 20 bp, Artificial Sequence
  Description of Artificial Sequence: Synthetic oligonucleotide
  Target: ATXN2; (+) strand; PAM type: NNGRRT; PAM sequence: CTGGGT
aaatgggaagaaagaggagg

SEQ ID NO: 11519 - DNA, 20 bp, Artificial Sequence
  Description of Artificial Sequence: Synthetic oligonucleotide
  Target: ATXN2; (+) strand; PAM type: NNGRRT; PAM sequence: AAGAGT
acactttgggaggccaaggc

SEQ ID NO: 11520 - DNA, 20 bp, Artificial Sequence
  Description of Artificial Sequence: Synthetic oligonucleotide
  Target: ATXN2; (+) strand; PAM type: NNGRRT; PAM sequence: AGGAGT
caagagtttcacttgagccc

SEQ ID NO: 11521 - DNA, 20 bp, Artificial Sequence
  Description of Artificial Sequence: Synthetic oligonucleotide
  Target: ATXN2; (+) strand; PAM type: NNGRRT; PAM sequence: TGGGAT
aggtactcagcaagctgagg

SEQ ID NO: 11522 - DNA, 20 bp, Artificial Sequence
  Description of Artificial Sequence: Synthetic oligonucleotide
  Target: ATXN2; (+) strand; PAM type: NNGRRT; PAM sequence: TGGGAT
agcaagctgaggtgggatga

SEQ ID NO: 11523 - DNA, 20 bp, Artificial Sequence
  Description of Artificial Sequence: Synthetic oligonucleotide
  Target: ATXN2; (+) strand; PAM type: NNGRRT; PAM sequence: AAGAAT
tgggatgattgcttgagccc

SEQ ID NO: 11524 - DNA, 20 bp, Artificial Sequence
  Description of Artificial Sequence: Synthetic oligonucleotide
  Target: ATXN2; (+) strand; PAM type: NNGRRT; PAM sequence: GTGGGT
agatgacaacggaacgggag

SEQ ID NO: 11525 - DNA, 20 bp, Artificial Sequence
  Description of Artificial Sequence: Synthetic oligonucleotide
  Target: ATXN2; (+) strand; PAM type: NNGRRT; PAM sequence: CAGAAT
agtcccagctactaaggagg

SEQ ID NO: 11526 - DNA, 20 bp, Artificial Sequence
  Description of Artificial Sequence: Synthetic oligonucleotide
  Target: ATXN2; (+) strand; PAM type: NNGRRT; PAM sequence: AGGAGT
aggcagaatcatctgggctc

SEQ ID NO: 11527 - DNA, 20 bp, Artificial Sequence
  Description of Artificial Sequence: Synthetic oligonucleotide
  Target: ATXN2; (+) strand; PAM type: NNGRRT; PAM sequence: AAGGGT
gagggagggagggagagagg

SEQ ID NO: 11528 - DNA, 20 bp, Artificial Sequence
  Description of Artificial Sequence: Synthetic oligonucleotide
  Target: ATXN2; (+) strand; PAM type: NNGRRT; PAM sequence: AGGGAT
ggaggggaaaaaaggagagg

SEQ ID NO: 11529 - DNA, 20 bp, Artificial Sequence
  Description of Artificial Sequence: Synthetic oligonucleotide
  Target: ATXN2; (+) strand; PAM type: NNGRRT; PAM sequence: GTGGAT
gcactgggaggccgaggcag

SEQ ID NO: 11530 - DNA, 20 bp, Artificial Sequence
  Description of Artificial Sequence: Synthetic oligonucleotide
  Target: ATXN2; (+) strand; PAM type: NNGRRT; PAM sequence: ATGAGT
caggtggatcacctgaggtc

SEQ ID NO: 11531 - DNA, 20 bp, Artificial Sequence
  Description of Artificial Sequence: Synthetic oligonucleotide
  Target: ATXN2; (+) strand; PAM type: NNGRRT; PAM sequence: AGGAAT
gctacttgggaggctgagac

SEQ ID NO: 11532 - DNA, 20 bp, Artificial Sequence
  Description of Artificial Sequence: Synthetic oligonucleotide
  Target: ATXN2; (+) strand; PAM type: NNGRRT; PAM sequence: TAGAAT
tcaatttcttcacccgtaaa

SEQ ID NO: 11533 - DNA, 20 bp, Artificial Sequence
  Description of Artificial Sequence: Synthetic oligonucleotide
  Target: ATXN2; (+) strand; PAM type: NNGRRT; PAM sequence: ATGAGT
tttcttcacccgtaaataga

SEQ ID NO: 11534 - DNA, 20 bp, Artificial Sequence
  Description of Artificial Sequence: Synthetic oligonucleotide
  Target: ATXN2; (+) strand; PAM type: NNGRRT; PAM sequence: AAGAAT
tgccaagaacagaacataag

SEQ ID NO: 11535 - DNA, 20 bp, Artificial Sequence
  Description of Artificial Sequence: Synthetic oligonucleotide
  Target: ATXN2; (+) strand; PAM type: NNGRRT; PAM sequence: CTGGGT
gaacataagaagaatttagg

SEQ ID NO: 11536 - DNA, 20 bp, Artificial Sequence
  Description of Artificial Sequence: Synthetic oligonucleotide
  Target: ATXN2; (+) strand; PAM type: NNGRRT; PAM sequence: AGGAGT
ctttgggaggccaaggcaag

SEQ ID NO: 11537 - DNA, 20 bp, Artificial Sequence
  Description of Artificial Sequence: Synthetic oligonucleotide
  Target: ATXN2; (+) strand; PAM type: NNGRRT; PAM sequence: CCGGGT
ggcagaagttcaaaaccagc

SEQ ID NO: 11538 - DNA, 20 bp, Artificial Sequence
  Description of Artificial Sequence: Synthetic oligonucleotide
  Target: ATXN2; (+) strand; PAM type: NNGRRT; PAM sequence: AGGAGT
cgggcagatcacttgagctc

SEQ ID NO: 11539 - DNA, 20 bp, Artificial Sequence
  Description of Artificial Sequence: Synthetic oligonucleotide
  Target: ATXN2; (+) strand; PAM type: NNGRRT; PAM sequence: TAGAGT
tgaactcgggaggtggaggt

SEQ ID NO: 11540 - DNA, 20 bp, Artificial Sequence
  Description of Artificial Sequence: Synthetic oligonucleotide
  Target: ATXN2; (+) strand; PAM type: NNGRRT; PAM sequence: CTGGGT
attgcaccacgcactgcagc

SEQ ID NO: 11541 - DNA, 20 bp, Artificial Sequence
  Description of Artificial Sequence: Synthetic oligonucleotide
  Target: ATXN2; (+) strand; PAM type: NNGRRT; PAM sequence: CAGGGT
caaaaaaaaaaaaagaactg

SEQ ID NO: 11542 - DNA, 20 bp, Artificial Sequence
  Description of Artificial Sequence: Synthetic oligonucleotide
  Target: ATXN2; (+) strand; PAM type: NNGRRT; PAM sequence: GAGGAT
tactcaggaggctgaggtgg

SEQ ID NO: 11543 - DNA, 20 bp, Artificial Sequence
  Description of Artificial Sequence: Synthetic oligonucleotide
  Target: ATXN2; (+) strand; PAM type: NNGRRT; PAM sequence: AGGAGT
tgggaggatcacttgaaccc

SEQ ID NO: 11544 - DNA, 20 bp, Artificial Sequence
  Description of Artificial Sequence: Synthetic oligonucleotide
  Target: ATXN2; (+) strand; PAM type: NNGRRT; PAM sequence: CGGAGT
gtttgtttgtttgtttgaga

SEQ ID NO: 11545 - DNA, 20 bp, Artificial Sequence
  Description of Artificial Sequence: Synthetic oligonucleotide
  Target: ATXN2; (+) strand; PAM type: NNGRRT; PAM sequence: TGGAGT
cgctctgtcgcccagcaggc

SEQ ID NO: 11546 - DNA, 20 bp, Artificial Sequence
  Description of Artificial Sequence: Synthetic oligonucleotide
  Target: ATXN2; (+) strand; PAM type: NNGRRT; PAM sequence: CCGGGT
ctcactgcaagctctgcctc

SEQ ID NO: 11547 - DNA, 20 bp, Artificial Sequence
  Description of Artificial Sequence: Synthetic oligonucleotide
  Target: ATXN2; (+) strand; PAM type: NNGRRT; PAM sequence: TGGGAT
gcctcagcctcccaagtagc

SEQ ID NO: 11548 - DNA, 20 bp, Artificial Sequence
  Description of Artificial Sequence: Synthetic oligonucleotide
  Target: ATXN2; (+) strand; PAM type: NNGRRT; PAM sequence: CAGGGT
ttttgtatttttagtagaga

SEQ ID NO: 11549 - DNA, 20 bp, Artificial Sequence
  Description of Artificial Sequence: Synthetic oligonucleotide
  Target: ATXN2; (+) strand; PAM type: NNGRRT; PAM sequence: TGGGAT
gcctcggccttccaaagtgc

SEQ ID NO: 11550 - DNA, 20 bp, Artificial Sequence
  Description of Artificial Sequence: Synthetic oligonucleotide
  Target: ATXN2; (+) strand; PAM type: NNGRRT; PAM sequence: CAGAGT
tttttttttttttttggaga

SEQ ID NO: 11551 - DNA, 20 bp, Artificial Sequence
  Description of Artificial Sequence: Synthetic oligonucleotide
  Target: ATXN2; (+) strand; PAM type: NNGRRT; PAM sequence: TGGAGT
tctcgttctgtcgcccaggc

SEQ ID NO: 11552 - DNA, 20 bp, Artificial Sequence
  Description of Artificial Sequence: Synthetic oligonucleotide
  Target: ATXN2; (+) strand; PAM type: NNGRRT; PAM sequence: CTGGGT
ctcactgcaacctccacctc

SEQ ID NO: 11553 - DNA, 20 bp, Artificial Sequence
  Description of Artificial Sequence: Synthetic oligonucleotide
  Target: ATXN2; (+) strand; PAM type: NNGRRT; PAM sequence: TCGAGT
gattcccctgcctcagcctc

SEQ ID NO: 11554 - DNA, 20 bp, Artificial Sequence
  Description of Artificial Sequence: Synthetic oligonucleotide
  Target: ATXN2; (+) strand; PAM type: NNGRRT; PAM sequence: TGGGAT
gcctcagcctcccaaagtgc

SEQ ID NO: 11555 - DNA, 20 bp, Artificial Sequence
  Description of Artificial Sequence: Synthetic oligonucleotide
  Target: ATXN2; (+) strand; PAM type: NNGRRT; PAM sequence: GAGAGT
taggtaaataaactaagcct

SEQ ID NO: 11556 - DNA, 20 bp, Artificial Sequence
  Description of Artificial Sequence: Synthetic oligonucleotide
  Target: ATXN2; (+) strand; PAM type: NNGRRT; PAM sequence: CTGAGT
taaactaagcctgagagtgg

SEQ ID NO: 11557 - DNA, 20 bp, Artificial Sequence
  Description of Artificial Sequence: Synthetic oligonucleotide
  Target: ATXN2; (+) strand; PAM type: NNGRRT; PAM sequence: AGGGAT
gtgccaaccattcaagaaat

SEQ ID NO: 11558 - DNA, 20 bp, Artificial Sequence
  Description of Artificial Sequence: Synthetic oligonucleotide
  Target: ATXN2; (+) strand; PAM type: NNGRRT; PAM sequence: AAGAGT
agcttaaattttagttactg

SEQ ID NO: 11559 - DNA, 20 bp, Artificial Sequence
  Description of Artificial Sequence: Synthetic oligonucleotide
  Target: ATXN2; (+) strand; PAM type: NNGRRT; PAM sequence: AGGAGT
tgggcggaccacctgaggtc

SEQ ID NO: 11560 - DNA, 20 bp, Artificial Sequence
  Description of Artificial Sequence: Synthetic oligonucleotide
  Target: ATXN2; (+) strand; PAM type: NNGRRT; PAM sequence: GTGGGT
aaaattagctgggcatggtg

SEQ ID NO: 11561 - DNA, 20 bp, Artificial Sequence
  Description of Artificial Sequence: Synthetic oligonucleotide
  Target: ATXN2; (+) strand; PAM type: NNGRRT; PAM sequence: GAGAAT
tattcaggaggctgaggcag

SEQ ID NO: 11562 - DNA, 20 bp, Artificial Sequence
  Description of Artificial Sequence: Synthetic oligonucleotide
  Target: ATXN2; (+) strand; PAM type: NNGRRT; PAM sequence: TGGAGT
accatgattccagcttagac

SEQ ID NO: 11563 - DNA, 20 bp, Artificial Sequence
  Description of Artificial Sequence: Synthetic oligonucleotide
  Target: ATXN2; (+) strand; PAM type: NNGRRT; PAM sequence: CTGAGT
catcaaaaattcaaatttaa

SEQ ID NO: 11564 - DNA, 20 bp, Artificial Sequence
  Description of Artificial Sequence: Synthetic oligonucleotide
  Target: ATXN2; (+) strand; PAM type: NNGRRT; PAM sequence: GTGGGT
cagcatttctggacaccaag

SEQ ID NO: 11565 - DNA, 20 bp, Artificial Sequence
  Description of Artificial Sequence: Synthetic oligonucleotide
  Target: ATXN2; (+) strand; PAM type: NNGRRT; PAM sequence: GTGGAT
atttctggacaccaaggtgg

SEQ ID NO: 11566 - DNA, 20 bp, Artificial Sequence
  Description of Artificial Sequence: Synthetic oligonucleotide
  Target: ATXN2; (+) strand; PAM type: NNGRRT; PAM sequence: CAGAGT
tgggtggatcatctgagctc

SEQ ID NO: 11567 - DNA, 20 bp, Artificial Sequence
  Description of Artificial Sequence: Synthetic oligonucleotide
  Target: ATXN2; (+) strand; PAM type: NNGRRT; PAM sequence: GAGGAT
tactcaggaggctgaggtgg

SEQ ID NO: 11568 - DNA, 20 bp, Artificial Sequence
  Description of Artificial Sequence: Synthetic oligonucleotide
  Target: ATXN2; (+) strand; PAM type: NNGRRT; PAM sequence: CAGAGT
tagtccataggcaatgtgcc

SEQ ID NO: 11569 - DNA, 20 bp, Artificial Sequence
  Description of Artificial Sequence: Synthetic oligonucleotide
  Target: ATXN2; (+) strand; PAM type: NNGRRT; PAM sequence: TTGAAT
agttggccaaaaattacatt

SEQ ID NO: 11570 - DNA, 20 bp, Artificial Sequence
  Description of Artificial Sequence: Synthetic oligonucleotide
  Target: ATXN2; (+) strand; PAM type: NNGRRT; PAM sequence: CTGGGT
cttaaaacaattcttggcag

SEQ ID NO: 11571 - DNA, 20 bp, Artificial Sequence
  Description of Artificial Sequence: Synthetic oligonucleotide
  Target: ATXN2; (+) strand; PAM type: NNGRRT; PAM sequence: GGGAGT
acctgtaatcccagcacttt

SEQ ID NO: 11572 - DNA, 20 bp, Artificial Sequence
  Description of Artificial Sequence: Synthetic oligonucleotide
  Target: ATXN2; (+) strand; PAM type: NNGRRT; PAM sequence: AGGGGT
acaaaaattaggccgggcac

SEQ ID NO: 11573 - DNA, 20 bp, Artificial Sequence
  Description of Artificial Sequence: Synthetic oligonucleotide
  Target: ATXN2; (+) strand; PAM type: NNGRRT; PAM sequence: GTGGAT
actttgggaggccgaggcaa

SEQ ID NO: 11574 - DNA, 20 bp, Artificial Sequence
  Description of Artificial Sequence: Synthetic oligonucleotide
  Target: ATXN2; (+) strand; PAM type: NNGRRT; PAM sequence: AGGAGT
caagtggatcacctgaggtc

SEQ ID NO: 11575 - DNA, 20 bp, Artificial Sequence
  Description of Artificial Sequence: Synthetic oligonucleotide
  Target: ATXN2; (+) strand; PAM type: NNGRRT; PAM sequence: GAGAAT
tactcaggaggctgaggtag

SEQ ID NO: 11576 - DNA, 20 bp, Artificial Sequence
  Description of Artificial Sequence: Synthetic oligonucleotide
  Target: ATXN2; (+) strand; PAM type: NNGRRT; PAM sequence: AGGGGT
atgtgtttcacaatctacta

SEQ ID NO: 11577 - DNA, 20 bp, Artificial Sequence
  Description of Artificial Sequence: Synthetic oligonucleotide
  Target: ATXN2; (+) strand; PAM type: NNGRRT; PAM sequence: ATGAGT
aaatcatttaacctggtgtt

SEQ ID NO: 11578 - DNA, 20 bp, Artificial Sequence
  Description of Artificial Sequence: Synthetic oligonucleotide
  Target: ATXN2; (+) strand; PAM type: NNGRRT; PAM sequence: GGGAGT
acagtcaaaactcccaggcc

SEQ ID NO: 11579 - DNA, 20 bp, Artificial Sequence
  Description of Artificial Sequence: Synthetic oligonucleotide
  Target: ATXN2; (+) strand; PAM type: NNGRRT; PAM sequence: GTGGAT
actttgggaggcctaggcag

SEQ ID NO: 11580 - DNA, 20 bp, Artificial Sequence
  Description of Artificial Sequence: Synthetic oligonucleotide
  Target: ATXN2; (+) strand; PAM type: NNGRRT; PAM sequence: AGGAGT
caggtggatcatctgaggtc

SEQ ID NO: 11581 - DNA, 20 bp, Artificial Sequence
  Description of Artificial Sequence: Synthetic oligonucleotide
  Target: ATXN2; (+) strand; PAM type: NNGRRT; PAM sequence: CCGGGT
actaaaaatacaaaaattat

SEQ ID NO: 11582 - DNA, 20 bp, Artificial Sequence
  Description of Artificial Sequence: Synthetic oligonucleotide
  Target: ATXN2; (+) strand; PAM type: NNGRRT; PAM sequence: AGGAGT
acccgtaatcccagctactc

SEQ ID NO: 11583 - DNA, 20 bp, Artificial Sequence
  Description of Artificial Sequence: Synthetic oligonucleotide
  Target: ATXN2; (+) strand; PAM type: NNGRRT; PAM sequence: GCGGAT
actttgggaggctgaagcag

SEQ ID NO: 11584 - DNA, 20 bp, Artificial Sequence
  Description of Artificial Sequence: Synthetic oligonucleotide
  Target: ATXN2; (+) strand; PAM type: NNGRRT; PAM sequence: AGGAGT
caggcggatcacctgaggtc

SEQ ID NO: 11585 - DNA, 20 bp, Artificial Sequence
  Description of Artificial Sequence: Synthetic oligonucleotide
  Target: ATXN2; (+) strand; PAM type: NNGRRT; PAM sequence: AGGAGT
atctgtactcccagctactc

SEQ ID NO: 11586 - DNA, 20 bp, Artificial Sequence
  Description of Artificial Sequence: Synthetic oligonucleotide
  Target: ATXN2; (+) strand; PAM type: NNGRRT; PAM sequence: CTGGGT
tggcgccattgcactccagc

SEQ ID NO: 11587 - DNA, 20 bp, Artificial Sequence
  Description of Artificial Sequence: Synthetic oligonucleotide
  Target: ATXN2; (+) strand; PAM type: NNGRRT; PAM sequence: CAGAAT
aaaaaaaaaaaaaaacctcc

SEQ ID NO: 11588 - DNA, 20 bp, Artificial Sequence
  Description of Artificial Sequence: Synthetic oligonucleotide
  Target: ATXN2; (+) strand; PAM type: NNGRRT; PAM sequence: TGGAGT
tctcattttaacgcccaggc

SEQ ID NO: 11589 - DNA, 20 bp, Artificial Sequence
  Description of Artificial Sequence: Synthetic oligonucleotide
  Target: ATXN2; (+) strand; PAM type: NNGRRT; PAM sequence: TGGGGT
attaatattttttgttgaga

SEQ ID NO: 11590 - DNA, 20 bp, Artificial Sequence
  Description of Artificial Sequence: Synthetic oligonucleotide
  Target: ATXN2; (+) strand; PAM type: NNGRRT; PAM sequence: TGGGAT
gcttcagcctcccaaagtgt

SEQ ID NO: 11591 - DNA, 20 bp, Artificial Sequence
  Description of Artificial Sequence: Synthetic oligonucleotide
  Target: ATXN2; (+) strand; PAM type: NNGRRT; PAM sequence: CAGAGT
ctttttttttttttttgaga

SEQ ID NO: 11592 - DNA, 20 bp, Artificial Sequence
  Description of Artificial Sequence: Synthetic oligonucleotide
  Target: ATXN2; (+) strand; PAM type: NNGRRT; PAM sequence: CCGGGT
ctcactgcaaccttcacctc

SEQ ID NO: 11593 - DNA, 20 bp, Artificial Sequence
  Description of Artificial Sequence: Synthetic oligonucleotide
  Target: ATXN2; (+) strand; PAM type: NNGRRT; PAM sequence: TGGGAT
gcctcagcctcccaagtagc

SEQ ID NO: 11594 - DNA, 20 bp, Artificial Sequence
  Description of Artificial Sequence: Synthetic oligonucleotide
  Target: ATXN2; (+) strand; PAM type: NNGRRT; PAM sequence: CGGAGT
tttttttttttttttttaga

SEQ ID NO: 11595 - DNA, 20 bp, Artificial Sequence
  Description of Artificial Sequence: Synthetic oligonucleotide
  Target: ATXN2; (+) strand; PAM type: NNGRRT; PAM sequence: CCGGGT
ctcactgcaacctctgcctc

SEQ ID NO: 11596 - DNA, 20 bp, Artificial Sequence
  Description of Artificial Sequence: Synthetic oligonucleotide
  Target: ATXN2; (+) strand; PAM type: NNGRRT; PAM sequence: CCGAGT
aattctcctgcctcagcctc

SEQ ID NO: 11597 - DNA, 20 bp, Artificial Sequence
  Description of Artificial Sequence: Synthetic oligonucleotide
  Target: ATXN2; (+) strand; PAM type: NNGRRT; PAM sequence: TGGGGT
ttttgtatttttagtagaga

SEQ ID NO: 11598 - DNA, 20 bp, Artificial Sequence
  Description of Artificial Sequence: Synthetic oligonucleotide
  Target: ATXN2; (+) strand; PAM type: NNGRRT; PAM sequence: CAGAAT
tggggtttcaccctgttggc

SEQ ID NO: 11599 - DNA, 20 bp, Artificial Sequence
  Description of Artificial Sequence: Synthetic oligonucleotide
  Target: ATXN2; (+) strand; PAM type: NNGRRT; PAM sequence: TGGGAT
tcctcaacctcccaaagtgc

SEQ ID NO: 11600 - DNA, 20 bp, Artificial Sequence
  Description of Artificial Sequence: Synthetic oligonucleotide
  Target: ATXN2; (+) strand; PAM type: NNGRRT; PAM sequence: AGGGGT
tcccaaagtgctgggattac

SEQ ID NO: 11601 - DNA, 20 bp, Artificial Sequence
  Description of Artificial Sequence: Synthetic oligonucleotide
  Target: ATXN2; (+) strand; PAM type: NNGRRT; PAM sequence: CAGGGT
tttctgtttttcagtagaga

SEQ ID NO: 11602 - DNA, 20 bp, Artificial Sequence
  Description of Artificial Sequence: Synthetic oligonucleotide
  Target: ATXN2; (+) strand; PAM type: NNGRRT; PAM sequence: TGGGAT
tccttggcctcccaaagtgc

SEQ ID NO: 11603 - DNA, 20 bp, Artificial Sequence
  Description of Artificial Sequence: Synthetic oligonucleotide
  Target: ATXN2; (+) strand; PAM type: NNGRRT; PAM sequence: TAGAAT
catcagaaaagaaagctaga

SEQ ID NO: 11604 - DNA, 20 bp, Artificial Sequence
  Description of Artificial Sequence: Synthetic oligonucleotide
  Target: ATXN2; (+) strand; PAM type: NNGRRT; PAM sequence: AGGAAT
ctgatttcgaaatgtgtttc

SEQ ID NO: 11605 - DNA, 20 bp, Artificial Sequence
  Description of Artificial Sequence: Synthetic oligonucleotide
  Target: ATXN2; (+) strand; PAM type: NNGRRT; PAM sequence: AAGAAT
ttccacttagaaaaattatt

SEQ ID NO: 11606 - DNA, 20 bp, Artificial Sequence
  Description of Artificial Sequence: Synthetic oligonucleotide
  Target: ATXN2; (+) strand; PAM type: NNGRRT; PAM sequence: GTGGGT
aagcactttgggaaaactag

SEQ ID NO: 11607 - DNA, 20 bp, Artificial Sequence
  Description of Artificial Sequence: Synthetic oligonucleotide
  Target: ATXN2; (+) strand; PAM type: NNGRRT; PAM sequence: GTGGAT
actttgggaaaactaggtgg

SEQ ID NO: 11608 - DNA, 20 bp, Artificial Sequence
  Description of Artificial Sequence: Synthetic oligonucleotide
  Target: ATXN2; (+) strand; PAM type: NNGRRT; PAM sequence: TTGAAT
aaactaggtgggtggatcat

SEQ ID NO: 11609 - DNA, 20 bp, Artificial Sequence
  Description of Artificial Sequence: Synthetic oligonucleotide
  Target: ATXN2; (+) strand; PAM type: NNGRRT; PAM sequence: AAGAGT
tgggtggatcatttgaattt

SEQ ID NO: 11610 - DNA, 20 bp, Artificial Sequence
  Description of Artificial Sequence: Synthetic oligonucleotide
  Target: ATXN2; (+) strand; PAM type: NNGRRT; PAM sequence: CAGGAT
gtaggaggactgcttgagcc

SEQ ID NO: 11611 - DNA, 20 bp, Artificial Sequence
  Description of Artificial Sequence: Synthetic oligonucleotide
  Target: ATXN2; (+) strand; PAM type: NNGRRT; PAM sequence: CAGGGT
ctatactccaacctggccaa

SEQ ID NO: 11612 - DNA, 20 bp, Artificial Sequence
  Description of Artificial Sequence: Synthetic oligonucleotide
  Target: ATXN2; (+) strand; PAM type: NNGRRT; PAM sequence: ATGAGT
caagcctcataccacaacta

SEQ ID NO: 11613 - DNA, 20 bp, Artificial Sequence
  Description of Artificial Sequence: Synthetic oligonucleotide
  Target: ATXN2; (+) strand; PAM type: NNGRRT; PAM sequence: TAGAAT
gttttacaaagacttcatta

SEQ ID NO: 11614 - DNA, 20 bp, Artificial Sequence
  Description of Artificial Sequence: Synthetic oligonucleotide
  Target: ATXN2; (+) strand; PAM type: NNGRRT; PAM sequence: TGGGGT
agcatgttaggaggcctaag

SEQ ID NO: 11615 - DNA, 20 bp, Artificial Sequence
  Description of Artificial Sequence: Synthetic oligonucleotide
  Target: ATXN2; (+) strand; PAM type: NNGRRT; PAM sequence: GTGGAT
tgttaggaggcctaagtggg

SEQ ID NO: 11616 - DNA, 20 bp, Artificial Sequence
  Description of Artificial Sequence: Synthetic oligonucleotide
  Target: ATXN2; (+) strand; PAM type: NNGRRT; PAM sequence: ATGAGT
ggggtggatcactcgaggcc

SEQ ID NO: 11617 - DNA, 20 bp, Artificial Sequence
  Description of Artificial Sequence: Synthetic oligonucleotide
  Target: ATXN2; (+) strand; PAM type: NNGRRT; PAM sequence: GAGGAT
tacttgggaggctgaggtgg

SEQ ID NO: 11618 - DNA, 20 bp, Artificial Sequence
  Description of Artificial Sequence: Synthetic oligonucleotide
  Target: ATXN2; (+) strand; PAM type: NNGRRT; PAM sequence: CAGGGT
aaagtcacttgacacaactt

SEQ ID NO: 11619 - DNA, 20 bp, Artificial Sequence
  Description of Artificial Sequence: Synthetic oligonucleotide
  Target: ATXN2; (+) strand; PAM type: NNGRRT; PAM sequence: AAGAAT
aaattacaagcaatctatgt

SEQ ID NO: 11620 - DNA, 20 bp, Artificial Sequence
  Description of Artificial Sequence: Synthetic oligonucleotide
  Target: ATXN2; (+) strand; PAM type: NNGRRT; PAM sequence: GAGAAT
aagaatctttaaatgttaat

SEQ ID NO: 11621 - DNA, 20 bp, Artificial Sequence
  Description of Artificial Sequence: Synthetic oligonucleotide
  Target: ATXN2; (+) strand; PAM type: NNGRRT; PAM sequence: ATGAAT
tgagaatttcaaattttcac

SEQ ID NO: 11622 - DNA, 20 bp, Artificial Sequence
  Description of Artificial Sequence: Synthetic oligonucleotide
  Target: ATXN2; (+) strand; PAM type: NNGRRT; PAM sequence: GTGGAT
ggcatgggaggccaaggcag

SEQ ID NO: 11623 - DNA, 20 bp, Artificial Sequence
  Description of Artificial Sequence: Synthetic oligonucleotide
  Target: ATXN2; (+) strand; PAM type: NNGRRT; PAM sequence: GAGAAT
tactcgggaggctgaggcag

SEQ ID NO: 11624 - DNA, 20 bp, Artificial Sequence
  Description of Artificial Sequence: Synthetic oligonucleotide
  Target: ATXN2; (+) strand; PAM type: NNGRRT; PAM sequence: GCGGGT
cagcactttgggaggacgag

SEQ ID NO: 11625 - DNA, 20 bp, Artificial Sequence
  Description of Artificial Sequence: Synthetic oligonucleotide
  Target: ATXN2; (+) strand; PAM type: NNGRRT; PAM sequence: GTGGAT
actttgggaggacgaggcgg

SEQ ID NO: 11626 - DNA, 20 bp, Artificial Sequence
  Description of Artificial Sequence: Synthetic oligonucleotide
  Target: ATXN2; (+) strand; PAM type: NNGRRT; PAM sequence: AGGAGT
cgggtggatcatctaaggtc

SEQ ID NO: 11627 - DNA, 20 bp, Artificial Sequence
  Description of Artificial Sequence: Synthetic oligonucleotide
  Target: ATXN2; (+) strand; PAM type: NNGRRT; PAM sequence: CTGGGT
tcacatcactgcattccagc

SEQ ID NO: 11628 - DNA, 20 bp, Artificial Sequence
  Description of Artificial Sequence: Synthetic oligonucleotide
  Target: ATXN2; (+) strand; PAM type: NNGRRT; PAM sequence: CAGGGT
ctgcattccagcctgggtga

SEQ ID NO: 11629 - DNA, 20 bp, Artificial Sequence
  Description of Artificial Sequence: Synthetic oligonucleotide
  Target: ATXN2; (+) strand; PAM type: NNGRRT; PAM sequence: AGGAAT
agggcaaattgtttgaggtc

SEQ ID NO: 11630 - DNA, 20 bp, Artificial Sequence
  Description of Artificial Sequence: Synthetic oligonucleotide
  Target: ATXN2; (+) strand; PAM type: NNGRRT; PAM sequence: ATGGAT
acttcaggaggccaaggtat

SEQ ID NO: 11631 - DNA, 20 bp, Artificial Sequence
  Description of Artificial Sequence: Synthetic oligonucleotide
  Target: ATXN2; (+) strand; PAM type: NNGRRT; PAM sequence: GGGAGT
tatatggatcacctgaggtc

SEQ ID NO: 11632 - DNA, 20 bp, Artificial Sequence
  Description of Artificial Sequence: Synthetic oligonucleotide
  Target: ATXN2; (+) strand; PAM type: NNGRRT; PAM sequence: GAGAAT
tactcgggaggctgaggcat

SEQ ID NO: 11633 - DNA, 20 bp, Artificial Sequence
  Description of Artificial Sequence: Synthetic oligonucleotide
  Target: ATXN2; (+) strand; PAM type: NNGRRT; PAM sequence: CAGAGT
ctgcaccccaccctaggcaa

SEQ ID NO: 11634 - DNA, 20 bp, Artificial Sequence
  Description of Artificial Sequence: Synthetic oligonucleotide
  Target: ATXN2; (+) strand; PAM type: NNGRRT; PAM sequence: GAGGAT
tactcaggaggctgagatag

SEQ ID NO: 11635 - DNA, 20 bp, Artificial Sequence
  Description of Artificial Sequence: Synthetic oligonucleotide
  Target: ATXN2; (+) strand; PAM type: NNGRRT; PAM sequence: CTGGGT
tggcaccactgcactcccgc

SEQ ID NO: 11636 - DNA, 20 bp, Artificial Sequence
  Description of Artificial Sequence: Synthetic oligonucleotide
  Target: ATXN2; (+) strand; PAM type: NNGRRT; PAM sequence: AGGAGT
caggcagatcacctaaggtc

SEQ ID NO: 11637 - DNA, 20 bp, Artificial Sequence
  Description of Artificial Sequence: Synthetic oligonucleotide
  Target: ATXN2; (+) strand; PAM type: NNGRRT; PAM sequence: GAGAAT
tactcaggaggctgaggcag

SEQ ID NO: 11638 - DNA, 20 bp, Artificial Sequence
  Description of Artificial Sequence: Synthetic oligonucleotide
  Target: ATXN2; (+) strand; PAM type: NNGRRT; PAM sequence: CTGGGT
ttatgccactgctttccaga

SEQ ID NO: 11639 - DNA, 20 bp, Artificial Sequence
  Description of Artificial Sequence: Synthetic oligonucleotide
  Target: ATXN2; (+) strand; PAM type: NNGRRT; PAM sequence: CAGAGT
ctgctttccagactgggtga

SEQ ID NO: 11640 - DNA, 20 bp, Artificial Sequence
  Description of Artificial Sequence: Synthetic oligonucleotide
  Target: ATXN2; (+) strand; PAM type: NNGRRT; PAM sequence: AAGGAT
ctcaaaataaataaataacc

SEQ ID NO: 11641 - DNA, 20 bp, Artificial Sequence
  Description of Artificial Sequence: Synthetic oligonucleotide
  Target: ATXN2; (+) strand; PAM type: NNGRRT; PAM sequence: GCGGAT
gcactttgggaggctgttgg

SEQ ID NO: 11642 - DNA, 20 bp, Artificial Sequence
  Description of Artificial Sequence: Synthetic oligonucleotide
  Target: ATXN2; (+) strand; PAM type: NNGRRT; PAM sequence: GAGAAT
tacatgggaggctaaggcag

SEQ ID NO: 11643 - DNA, 20 bp, Artificial Sequence
  Description of Artificial Sequence: Synthetic oligonucleotide
  Target: ATXN2; (+) strand; PAM type: NNGRRT; PAM sequence: GAGAAT
gtaggttgtatgctctttat

SEQ ID NO: 11644 - DNA, 20 bp, Artificial Sequence
  Description of Artificial Sequence: Synthetic oligonucleotide
  Target: ATXN2; (+) strand; PAM type: NNGRRT; PAM sequence: CGGAGT
acaatttttttttttttaga

SEQ ID NO: 11645 - DNA, 20 bp, Artificial Sequence
  Description of Artificial Sequence: Synthetic oligonucleotide
  Target: ATXN2; (+) strand; PAM type: NNGRRT; PAM sequence: CCGGGT
ctcactgcaagctctgcctc

SEQ ID NO: 11646 - DNA, 20 bp, Artificial Sequence
  Description of Artificial Sequence: Synthetic oligonucleotide
  Target: ATXN2; (+) strand; PAM type: NNGRRT; PAM sequence: CGGAGT
cattctcttgcctcggcctc

SEQ ID NO: 11647 - DNA, 20 bp, Artificial Sequence
  Description of Artificial Sequence: Synthetic oligonucleotide
  Target: ATXN2; (+) strand; PAM type: NNGRRT; PAM sequence: GGGGGT
tttttgtatttttagtagag

SEQ ID NO: 11648 - DNA, 20 bp, Artificial Sequence
  Description of Artificial Sequence: Synthetic oligonucleotide
  Target: ATXN2; (+) strand; PAM type: NNGRRT; PAM sequence: CAGGAT
gggggtttcaccatgttagc

SEQ ID NO: 11649 - DNA, 20 bp, Artificial Sequence
  Description of Artificial Sequence: Synthetic oligonucleotide
  Target: ATXN2; (+) strand; PAM type: NNGRRT; PAM sequence: TGGGAT
gcctcggcctcccaaagtgc

SEQ ID NO: 11650 - DNA, 20 bp, Artificial Sequence
  Description of Artificial Sequence: Synthetic oligonucleotide
  Target: ATXN2; (+) strand; PAM type: NNGRRT; PAM sequence: GAGGAT
actttgggaagctgaggcag

SEQ ID NO: 11651 - DNA, 20 bp, Artificial Sequence
  Description of Artificial Sequence: Synthetic oligonucleotide
  Target: ATXN2; (+) strand; PAM type: NNGRRT; PAM sequence: AGGAGT
caggaggatcacttgagccc

SEQ ID NO: 11652 - DNA, 20 bp, Artificial Sequence
  Description of Artificial Sequence: Synthetic oligonucleotide
  Target: ATXN2; (+) strand; PAM type: NNGRRT; PAM sequence: CTGGGT
gattgaggctgcactccagc

SEQ ID NO: 11653 - DNA, 20 bp, Artificial Sequence
  Description of Artificial Sequence: Synthetic oligonucleotide
  Target: ATXN2; (+) strand; PAM type: NNGRRT; PAM sequence: TAGAGT
tcccctaatctctcaaagct

SEQ ID NO: 11654 - DNA, 20 bp, Artificial Sequence
  Description of Artificial Sequence: Synthetic oligonucleotide
  Target: ATXN2; (+) strand; PAM type: NNGRRT; PAM sequence: TAGGAT
tgccttccatttttaagatt

SEQ ID NO: 11655 - DNA, 20 bp, Artificial Sequence
  Description of Artificial Sequence: Synthetic oligonucleotide
  Target: ATXN2; (+) strand; PAM type: NNGRRT; PAM sequence: CAGGGT
tgttactgttttttaagaga

SEQ ID NO: 11656 - DNA, 20 bp, Artificial Sequence
  Description of Artificial Sequence: Synthetic oligonucleotide
  Target: ATXN2; (+) strand; PAM type: NNGRRT; PAM sequence: GTGGAT
actttgggaggccaaggcag

SEQ ID NO: 11657 - DNA, 20 bp, Artificial Sequence
  Description of Artificial Sequence: Synthetic oligonucleotide
  Target: ATXN2; (+) strand; PAM type: NNGRRT; PAM sequence: AGGAGT
caggtggatcgcttaaggtc

SEQ ID NO: 11658 - DNA, 20 bp, Artificial Sequence
  Description of Artificial Sequence: Synthetic oligonucleotide
  Target: ATXN2; (+) strand; PAM type: NNGRRT; PAM sequence: CTGAGT
gctaaaaatacaaaaattag

SEQ ID NO: 11659 - DNA, 20 bp, Artificial Sequence
  Description of Artificial Sequence: Synthetic oligonucleotide
  Target: ATXN2; (+) strand; PAM type: NNGRRT; PAM sequence: TGGGGT
aaatacaaaaattagctgag

SEQ ID NO: 11660 - DNA, 20 bp, Artificial Sequence
  Description of Artificial Sequence: Synthetic oligonucleotide
  Target: ATXN2; (+) strand; PAM type: NNGRRT; PAM sequence: GAGAAT
tactcagaaggctgaggcag

SEQ ID NO: 11661 - DNA, 20 bp, Artificial Sequence
  Description of Artificial Sequence: Synthetic oligonucleotide
  Target: ATXN2; (+) strand; PAM type: NNGRRT; PAM sequence: GGGGGT
cttagctcatgaggctgggc

SEQ ID NO: 11662 - DNA, 20 bp, Artificial Sequence
  Description of Artificial Sequence: Synthetic oligonucleotide
  Target: ATXN2; (+) strand; PAM type: NNGRRT; PAM sequence: GCGAAT
actttgggaggccgaggcaa

SEQ ID NO: 11663 - DNA, 20 bp, Artificial Sequence
  Description of Artificial Sequence: Synthetic oligonucleotide
  Target: ATXN2; (+) strand; PAM type: NNGRRT; PAM sequence: AGGAGT
caagcgaatcacctgaggtc

SEQ ID NO: 11664 - DNA, 20 bp, Artificial Sequence
  Description of Artificial Sequence: Synthetic oligonucleotide
  Target: ATXN2; (+) strand; PAM type: NNGRRT; PAM sequence: GCGGGT
aaacttagccaggcatggtg

SEQ ID NO: 11665 - DNA, 20 bp, Artificial Sequence
  Description of Artificial Sequence: Synthetic oligonucleotide
  Target: ATXN2; (+) strand; PAM type: NNGRRT; PAM sequence: GAGAAT
attcgggagggctaaggcag

SEQ ID NO: 11666 - DNA, 20 bp, Artificial Sequence
  Description of Artificial Sequence: Synthetic oligonucleotide
  Target: ATXN2; (+) strand; PAM type: NNGRRT; PAM sequence: GTGGAT
actttgggaggctgaggcag

SEQ ID NO: 11667 - DNA, 20 bp, Artificial Sequence
  Description of Artificial Sequence: Synthetic oligonucleotide
  Target: ATXN2; (+) strand; PAM type: NNGRRT; PAM sequence: AGGAGT
caggtggatcacctgaggtc

SEQ ID NO: 11668 - DNA, 20 bp, Artificial Sequence
  Description of Artificial Sequence: Synthetic oligonucleotide
  Target: ATXN2; (+) strand; PAM type: NNGRRT; PAM sequence: GAGAAT
tactcaggaggctgaggcag

SEQ ID NO: 11669 - DNA, 20 bp, Artificial Sequence
  Description of Artificial Sequence: Synthetic oligonucleotide
  Target: ATXN2; (+) strand; PAM type: NNGRRT; PAM sequence: TAGGGT
gaaatagctaaaaaaaaaaa

SEQ ID NO: 11670 - DNA, 20 bp, Artificial Sequence
  Description of Artificial Sequence: Synthetic oligonucleotide
  Target: ATXN2; (+) strand; PAM type: NNGRRT; PAM sequence: CAGAGT
tttgtttgtttgttttgaga

SEQ ID NO: 11671 - DNA, 20 bp, Artificial Sequence
  Description of Artificial Sequence: Synthetic oligonucleotide
  Target: ATXN2; (+) strand; PAM type: NNGRRT; PAM sequence: TGGAGT
tctcgctctgttgcccaggc

SEQ ID NO: 11672 - DNA, 20 bp, Artificial Sequence
  Description of Artificial Sequence: Synthetic oligonucleotide
  Target: ATXN2; (+) strand; PAM type: NNGRRT; PAM sequence: CGGGAT
tccgcactcattgcaacctc

SEQ ID NO: 11673 - DNA, 20 bp, Artificial Sequence
  Description of Artificial Sequence: Synthetic oligonucleotide
  Target: ATXN2; (+) strand; PAM type: NNGRRT; PAM sequence: TGGGAT
ccctcagcctcccaagaagc

SEQ ID NO: 11674 - DNA, 20 bp, Artificial Sequence
  Description of Artificial Sequence: Synthetic oligonucleotide
  Target: ATXN2; (+) strand; PAM type: NNGRRT; PAM sequence: GGGGGT
tttgtatttttagtagagat

SEQ ID NO: 11675 - DNA, 20 bp, Artificial Sequence
  Description of Artificial Sequence: Synthetic oligonucleotide
  Target: ATXN2; (+) strand; PAM type: NNGRRT; PAM sequence: TGGGAT
gcctcagcctcctaaagtgc

SEQ ID NO: 11676 - DNA, 20 bp, Artificial Sequence
  Description of Artificial Sequence: Synthetic oligonucleotide
  Target: ATXN2; (+) strand; PAM type: NNGRRT; PAM sequence: ATGAGT
ggctattaaatagctacaat

SEQ ID NO: 11677 - DNA, 20 bp, Artificial Sequence
  Description of Artificial Sequence: Synthetic oligonucleotide
  Target: ATXN2; (+) strand; PAM type: NNGRRT; PAM sequence: TAGAGT
aagtataaaccattgctaat

SEQ ID NO: 11678 - DNA, 20 bp, Artificial Sequence
  Description of Artificial Sequence: Synthetic oligonucleotide
  Target: ATXN2; (+) strand; PAM type: NNGRRT; PAM sequence: CAGAAT
atcccatgttttcactgttt

SEQ ID NO: 11679 - DNA, 20 bp, Artificial Sequence
  Description of Artificial Sequence: Synthetic oligonucleotide
  Target: ATXN2; (+) strand; PAM type: NNGRRT; PAM sequence: TGGAAT
gttttcactgtttcagaatg

SEQ ID NO: 11680 - DNA, 20 bp, Artificial Sequence
  Description of Artificial Sequence: Synthetic oligonucleotide
  Target: ATXN2; (+) strand; PAM type: NNGRRT; PAM sequence: AAGAAT
tagtatcaatgtgcacataa

SEQ ID NO: 11681 - DNA, 20 bp, Artificial Sequence
  Description of Artificial Sequence: Synthetic oligonucleotide
  Target: ATXN2; (+) strand; PAM type: NNGRRT; PAM sequence: AAGGAT
gtgcacataaaagaataaca

SEQ ID NO: 11682 - DNA, 20 bp, Artificial Sequence
  Description of Artificial Sequence: Synthetic oligonucleotide
  Target: ATXN2; (+) strand; PAM type: NNGRRT; PAM sequence: TAGAAT
cattgtctgcctagtcacat

SEQ ID NO: 11683 - DNA, 20 bp, Artificial Sequence
  Description of Artificial Sequence: Synthetic oligonucleotide
  Target: ATXN2; (+) strand; PAM type: NNGRRT; PAM sequence: TAGAGT
cattttttttttttttgaga

SEQ ID NO: 11684 - DNA, 20 bp, Artificial Sequence
  Description of Artificial Sequence: Synthetic oligonucleotide
  Target: ATXN2; (+) strand; PAM type: NNGRRT; PAM sequence: TGGAGT
tctcactctgtctcccaggc

SEQ ID NO: 11685 - DNA, 20 bp, Artificial Sequence
  Description of Artificial Sequence: Synthetic oligonucleotide
  Target: ATXN2; (+) strand; PAM type: NNGRRT; PAM sequence: TGGGAT
gcctcagcctcccaagtagc

SEQ ID NO: 11686 - DNA, 20 bp, Artificial Sequence
  Description of Artificial Sequence: Synthetic oligonucleotide
  Target: ATXN2; (+) strand; PAM type: NNGRRT; PAM sequence: CTGAAT
agaaaaatattttattcaga

SEQ ID NO: 11687 - DNA, 20 bp, Artificial Sequence
  Description of Artificial Sequence: Synthetic oligonucleotide
  Target: ATXN2; (+) strand; PAM type: NNGRRT; PAM sequence: AGGAAT
atgtcatattatttaggttt

SEQ ID NO: 11688 - DNA, 20 bp, Artificial Sequence
  Description of Artificial Sequence: Synthetic oligonucleotide
  Target: ATXN2; (+) strand; PAM type: NNGRRT; PAM sequence: TAGAGT
atattatttaggtttaggaa

SEQ ID NO: 11689 - DNA, 20 bp, Artificial Sequence
  Description of Artificial Sequence: Synthetic oligonucleotide
  Target: ATXN2; (+) strand; PAM type: NNGRRT; PAM sequence: GGGAAT
tttttatttttaatggggaa

SEQ ID NO: 11690 - DNA, 20 bp, Artificial Sequence
  Description of Artificial Sequence: Synthetic oligonucleotide
  Target: ATXN2; (+) strand; PAM type: NNGRRT; PAM sequence: AAGAGT
ggaagggaatgtagaagaag

SEQ ID NO: 11691 - DNA, 20 bp, Artificial Sequence
  Description of Artificial Sequence: Synthetic oligonucleotide
  Target: ATXN2; (+) strand; PAM type: NNGRRT; PAM sequence: AGGAAT
aagctttagaacagttcctc

SEQ ID NO: 11692 - DNA, 20 bp, Artificial Sequence
  Description of Artificial Sequence: Synthetic oligonucleotide
  Target: ATXN2; (+) strand; PAM type: NNGRRT; PAM sequence: AAGAAT
gaagtaatacaagtcttcta

SEQ ID NO: 11693 - DNA, 20 bp, Artificial Sequence
  Description of Artificial Sequence: Synthetic oligonucleotide
  Target: ATXN2; (+) strand; PAM type: NNGRRT; PAM sequence: TAGAAT
ggaaacccaattcccaacaa

SEQ ID NO: 11694 - DNA, 20 bp, Artificial Sequence
  Description of Artificial Sequence: Synthetic oligonucleotide
  Target: ATXN2; (+) strand; PAM type: NNGRRT; PAM sequence: GAGAAT
tactcaagaggctgaggtgg

SEQ ID NO: 11695 - DNA, 20 bp, Artificial Sequence
  Description of Artificial Sequence: Synthetic oligonucleotide
  Target: ATXN2; (+) strand; PAM type: NNGRRT; PAM sequence: AGGAGT
tgggagaatcgcttgaaccc

SEQ ID NO: 11696 - DNA, 20 bp, Artificial Sequence
  Description of Artificial Sequence: Synthetic oligonucleotide
  Target: ATXN2; (+) strand; PAM type: NNGRRT; PAM sequence: AAGAAT
aaaaggtaaaaagcaaaaat

SEQ ID NO: 11697 - DNA, 20 bp, Artificial Sequence
  Description of Artificial Sequence: Synthetic oligonucleotide
  Target: ATXN2; (+) strand; PAM type: NNGRRT; PAM sequence: GCGAAT
actttgggaggccgaggctg

SEQ ID NO: 11698 - DNA, 20 bp, Artificial Sequence
  Description of Artificial Sequence: Synthetic oligonucleotide
  Target: ATXN2; (+) strand; PAM type: NNGRRT; PAM sequence: AGGAGT
gcgaatcacttgaggtcagg

SEQ ID NO: 11699 - DNA, 20 bp, Artificial Sequence
  Description of Artificial Sequence: Synthetic oligonucleotide
  Target: ATXN2; (+) strand; PAM type: NNGRRT; PAM sequence: GCGGAT
actttgggaggccaaggcag

SEQ ID NO: 11700 - DNA, 20 bp, Artificial Sequence
  Description of Artificial Sequence: Synthetic oligonucleotide
  Target: ATXN2; (+) strand; PAM type: NNGRRT; PAM sequence: AGGAGT
caggcggatcacttgaggtc

SEQ ID NO: 11701 - DNA, 20 bp, Artificial Sequence
  Description of Artificial Sequence: Synthetic oligonucleotide
  Target: ATXN2; (+) strand; PAM type: NNGRRT; PAM sequence: GAGAAT
tactggggaggctgaggctg

SEQ ID NO: 11702 - DNA, 20 bp, Artificial Sequence
  Description of Artificial Sequence: Synthetic oligonucleotide
  Target: ATXN2; (+) strand; PAM type: NNGRRT; PAM sequence: CAGAGT
ctgcactccagcctgggcga

SEQ ID NO: 11703 - DNA, 20 bp, Artificial Sequence
  Description of Artificial Sequence: Synthetic oligonucleotide
  Target: ATXN2; (+) strand; PAM type: NNGRRT; PAM sequence: GTGAAT
aaatgtttcttaaagcagat

SEQ ID NO: 11704 - DNA, 20 bp, Artificial Sequence
  Description of Artificial Sequence: Synthetic oligonucleotide
  Target: ATXN2; (+) strand; PAM type: NNGRRT; PAM sequence: CCGAAT
ctatctcgaaacttgtcaaa

SEQ ID NO: 11705 - DNA, 20 bp, Artificial Sequence
  Description of Artificial Sequence: Synthetic oligonucleotide
  Target: ATXN2; (+) strand; PAM type: NNGRRT; PAM sequence: AGGAAT
gaagctgaaacttatttaca

SEQ ID NO: 11706 - DNA, 20 bp, Artificial Sequence
  Description of Artificial Sequence: Synthetic oligonucleotide
  Target: ATXN2; (+) strand; PAM type: NNGRRT; PAM sequence: AAGAAT
agtacattaacgatctgttc

SEQ ID NO: 11707 - DNA, 20 bp, Artificial Sequence
  Description of Artificial Sequence: Synthetic oligonucleotide
  Target: ATXN2; (+) strand; PAM type: NNGRRT; PAM sequence: AAGAAT
aatttcacctattcatcaga

SEQ ID NO: 11708 - DNA, 20 bp, Artificial Sequence
  Description of Artificial Sequence: Synthetic oligonucleotide
  Target: ATXN2; (+) strand; PAM type: NNGRRT; PAM sequence: TTGAAT
tgtttatatatttgaacatg

SEQ ID NO: 11709 - DNA, 20 bp, Artificial Sequence
  Description of Artificial Sequence: Synthetic oligonucleotide
  Target: ATXN2; (+) strand; PAM type: NNGRRT; PAM sequence: CAGAAT
aatacctaagaaagtaaaaa

SEQ ID NO: 11710 - DNA, 20 bp, Artificial Sequence
  Description of Artificial Sequence: Synthetic oligonucleotide
  Target: ATXN2; (+) strand; PAM type: NNGRRT; PAM sequence: TGGGAT
tagtttggctaagtagtgtt

SEQ ID NO: 11711 - DNA, 20 bp, Artificial Sequence
  Description of Artificial Sequence: Synthetic oligonucleotide
  Target: ATXN2; (+) strand; PAM type: NNGRRT; PAM sequence: CAGAAT
tccgccccctttgaaggcag

SEQ ID NO: 11712 - DNA, 20 bp, Artificial Sequence
  Description of Artificial Sequence: Synthetic oligonucleotide
  Target: ATXN2; (+) strand; PAM type: NNGRRT; PAM sequence: GGGAAT
ccagctgattcctcttgatg

SEQ ID NO: 11713 - DNA, 20 bp, Artificial Sequence
  Description of Artificial Sequence: Synthetic oligonucleotide
  Target: ATXN2; (+) strand; PAM type: NNGRRT; PAM sequence: ATGGGT
taaataaaaattctttggaa

SEQ ID NO: 11714 - DNA, 20 bp, Artificial Sequence
  Description of Artificial Sequence: Synthetic oligonucleotide
  Target: ATXN2; (+) strand; PAM type: NNGRRT; PAM sequence: TCGGGT
tgtgttttcaaaaagaaaac

SEQ ID NO: 11715 - DNA, 20 bp, Artificial Sequence
  Description of Artificial Sequence: Synthetic oligonucleotide
  Target: ATXN2; (+) strand; PAM type: NNGRRT; PAM sequence: GTGAAT
ttttcaaaaagaaaactcgg

SEQ ID NO: 11716 - DNA, 20 bp, Artificial Sequence
  Description of Artificial Sequence: Synthetic oligonucleotide
  Target: ATXN2; (+) strand; PAM type: NNGRRT; PAM sequence: ACGGAT
ggcacagtagtgcctacaac

SEQ ID NO: 11717 - DNA, 20 bp, Artificial Sequence
  Description of Artificial Sequence: Synthetic oligonucleotide
  Target: ATXN2; (+) strand; PAM type: NNGRRT; PAM sequence: TGGAAT
gttaaggacaccggccacaa

SEQ ID NO: 11718 - DNA, 20 bp, Artificial Sequence
  Description of Artificial Sequence: Synthetic oligonucleotide
  Target: ATXN2; (+) strand; PAM type: NNGRRT; PAM sequence: TGGAGT
ggacaccggccacaatggaa

SEQ ID NO: 11719 - DNA, 20 bp, Artificial Sequence
  Description of Artificial Sequence: Synthetic oligonucleotide
  Target: ATXN2; (+) strand; PAM type: NNGRRT; PAM sequence: TCGAGT
cctcctgcacaaacacaccc

SEQ ID NO: 11720 - DNA, 20 bp, Artificial Sequence
  Description of Artificial Sequence: Synthetic oligonucleotide
  Target: ATXN2; (+) strand; PAM type: NNGRRT; PAM sequence: GGGGGT
agcatttccgaaattggggc

SEQ ID NO: 11721 - DNA, 20 bp, Artificial Sequence
  Description of Artificial Sequence: Synthetic oligonucleotide
  Target: ATXN2; (+) strand; PAM type: NNGRRT; PAM sequence: TGGGAT
tccgaaattggggcgggggt

SEQ ID NO: 11722 - DNA, 20 bp, Artificial Sequence
  Description of Artificial Sequence: Synthetic oligonucleotide
  Target: ATXN2; (+) strand; PAM type: NNGRRT; PAM sequence: CAGGGT
cgggggttgggataagtgcg

SEQ ID NO: 11723 - DNA, 20 bp, Artificial Sequence
  Description of Artificial Sequence: Synthetic oligonucleotide
  Target: ATXN2; (+) strand; PAM type: NNGRRT; PAM sequence: CCGGAT
ctgccaccagcaccgccacc

SEQ ID NO: 11724 - DNA, 20 bp, Artificial Sequence
  Description of Artificial Sequence: Synthetic oligonucleotide
  Target: ATXN2; (+) strand; PAM type: NNGRRT; PAM sequence: CAGGGT
gcaccgccaccccggatctc

SEQ ID NO: 11725 - DNA, 20 bp, Artificial Sequence
  Description of Artificial Sequence: Synthetic oligonucleotide
  Target: ATXN2; (+) strand; PAM type: NNGRRT; PAM sequence: CTGGGT
ccggatctccagggtccagc

SEQ ID NO: 11726 - DNA, 20 bp, Artificial Sequence
  Description of Artificial Sequence: Synthetic oligonucleotide
  Target: ATXN2; (+) strand; PAM type: NNGRRT; PAM sequence: GCGGAT
ctgcggcctcgaacagcaat

SEQ ID NO: 11727 - DNA, 20 bp, Artificial Sequence
  Description of Artificial Sequence: Synthetic oligonucleotide
  Target: ATXN2; (+) strand; PAM type: NNGRRT; PAM sequence: GAGGGT
cttcccttccccaggtgggg

SEQ ID NO: 11728 - DNA, 20 bp, Artificial Sequence
  Description of Artificial Sequence: Synthetic oligonucleotide
  Target: ATXN2; (+) strand; PAM type: NNGRRT; PAM sequence: GGGAGT
atggagccccacgatttcag

SEQ ID NO: 11729 - DNA, 20 bp, Artificial Sequence
  Description of Artificial Sequence: Synthetic oligonucleotide
  Target: ATXN2; (+) strand; PAM type: NNGRRT; PAM sequence: AGGGGT
cgcctcggacacgaacgcag

SEQ ID NO: 11730 - DNA, 20 bp, Artificial Sequence
  Description of Artificial Sequence: Synthetic oligonucleotide
  Target: ATXN2; (+) strand; PAM type: NNGRRT; PAM sequence: GGGAGT
ccaacgttcacacctaaacc

SEQ ID NO: 11731 - DNA, 20 bp, Artificial Sequence
  Description of Artificial Sequence: Synthetic oligonucleotide
  Target: ATXN2; (+) strand; PAM type: NNGRRT; PAM sequence: GAGGAT
gcatccccacgctgcgggcg

SEQ ID NO: 11732 - DNA, 20 bp, Artificial Sequence
  Description of Artificial Sequence: Synthetic oligonucleotide
  Target: ATXN2; (+) strand; PAM type: NNGRRT; PAM sequence: GGGGAT
tgaccgccgggggagggggc

SEQ ID NO: 11733 - DNA, 20 bp, Artificial Sequence
  Description of Artificial Sequence: Synthetic oligonucleotide
  Target: ATXN2; (+) strand; PAM type: NNGRRT; PAM sequence: GCGAGT
gcctcggggctcaggcccga

SEQ ID NO: 11734 - DNA, 20 bp, Artificial Sequence
  Description of Artificial Sequence: Synthetic oligonucleotide
  Target: ATXN2; (+) strand; PAM type: NNGRRT; PAM sequence: CCGGGT
ctgccggcccccagcccacc

SEQ ID NO: 11735 - DNA, 20 bp, Artificial Sequence
  Description of Artificial Sequence: Synthetic oligonucleotide
  Target: ATXN2; (+) strand; PAM type: NNGRRT; PAM sequence: GCGGGT
agcccaccccgggtagcccg

SEQ ID NO: 11736 - DNA, 20 bp, Artificial Sequence
  Description of Artificial Sequence: Synthetic oligonucleotide
  Target: ATXN2; (+) strand; PAM type: NNGRRT; PAM sequence: TGGGGT
gggcccggagcggagggggc

SEQ ID NO: 11737 - DNA, 20 bp, Artificial Sequence
  Description of Artificial Sequence: Synthetic oligonucleotide
  Target: ATXN2; (+) strand; PAM type: NNGRRT; PAM sequence: GCGGGT
cgggcgccgagcggggaggc

SEQ ID NO: 11738 - DNA, 20 bp, Artificial Sequence
  Description of Artificial Sequence: Synthetic oligonucleotide
  Target: ATXN2; (+) strand; PAM type: NNGRRT; PAM sequence: AGGGAT
gggcgggggaggggcggcgg

SEQ ID NO: 11739 - DNA, 20 bp, Artificial Sequence
  Description of Artificial Sequence: Synthetic oligonucleotide
  Target: ATXN2; (+) strand; PAM type: NNGRRT; PAM sequence: CCGGGT
agggcgggcgcgccgaggcg

SEQ ID NO: 11740 - DNA, 20 bp, Artificial Sequence
  Description of Artificial Sequence: Synthetic oligonucleotide
  Target: ATXN2; (+) strand; PAM type: NNGRRT; PAM sequence: GCGGAT
cgccgggtgggagcggaggt

SEQ ID NO: 11741 - DNA, 20 bp, Artificial Sequence
  Description of Artificial Sequence: Synthetic oligonucleotide
  Target: ATXN2; (+) strand; PAM type: NNGRRT; PAM sequence: AGGGGT
gactctttaccggaagtcgg

SEQ ID NO: 11742 - DNA, 20 bp, Artificial Sequence
  Description of Artificial Sequence: Synthetic oligonucleotide
  Target: ATXN2; (+) strand; PAM type: NNGRRT; PAM sequence: CTGGGT
cgtgaggagcgggcggcgcg

SEQ ID NO: 11743 - DNA, 20 bp, Artificial Sequence
  Description of Artificial Sequence: Synthetic oligonucleotide
  Target: ATXN2; (+) strand; PAM type: NNGRRT; PAM sequence: GGGGGT
gcgcgctgggttgctttctc

SEQ ID NO: 11744 - DNA, 20 bp, Artificial Sequence
  Description of Artificial Sequence: Synthetic oligonucleotide
  Target: ATXN2; (+) strand; PAM type: NNGRRT; PAM sequence: TCGGGT
ctgggttgctttctcggggg

SEQ ID NO: 11745 - DNA, 20 bp, Artificial Sequence
  Description of Artificial Sequence: Synthetic oligonucleotide
  Target: ATXN2; (+) strand; PAM type: NNGRRT; PAM sequence: CCGGAT
ggccaggcggcggtccctac

SEQ ID NO: 11746 - DNA, 20 bp, Artificial Sequence
  Description of Artificial Sequence: Synthetic oligonucleotide
  Target: ATXN2; (+) strand; PAM type: NNGRRT; PAM sequence: GCGGGT
ccggatccgccttcctcaag

SEQ ID NO: 11747 - DNA, 20 bp, Artificial Sequence
  Description of Artificial Sequence: Synthetic oligonucleotide
  Target: ATXN2; (+) strand; PAM type: NNGRRT; PAM sequence: GCGAGT
acccagaaaatggactgact

SEQ ID NO: 11748 - DNA, 20 bp, Artificial Sequence
  Description of Artificial Sequence: Synthetic oligonucleotide
  Target: ATXN2; (+) strand; PAM type: NNGRRT; PAM sequence: GAGAAT
actgcgagtgccttggggcg

SEQ ID NO: 11749 - DNA, 20 bp, Artificial Sequence
  Description of Artificial Sequence: Synthetic oligonucleotide
  Target: ATXN2; (+) strand; PAM type: NNGRRT; PAM sequence: TGGAGT
ctgtcctgccctgccggggc

SEQ ID NO: 11750 - DNA, 20 bp, Artificial Sequence
  Description of Artificial Sequence: Synthetic oligonucleotide
  Target: ATXN2; (+) strand; PAM type: NNGRRT; PAM sequence: CTGGGT
ccctccggggccacccacat

SEQ ID NO: 11751 - DNA, 20 bp, Artificial Sequence
  Description of Artificial Sequence: Synthetic oligonucleotide
  Target: ATXN2; (+) strand; PAM type: NNGRRT; PAM sequence: TGGGAT
gagattctaaaggaaatata

SEQ ID NO: 11752 - DNA, 20 bp, Artificial Sequence
  Description of Artificial Sequence: Synthetic oligonucleotide
  Target: ATXN2; (+) strand; PAM type: NNGRRT; PAM sequence: ACGGAT
ggattgggactggtagaact

SEQ ID NO: 11753 - DNA, 20 bp, Artificial Sequence
  Description of Artificial Sequence: Synthetic oligonucleotide
  Target: ATXN2; (+) strand; PAM type: NNGRRT; PAM sequence: TGGGAT
actggtagaactacggataa

SEQ ID NO: 11754 - DNA, 20 bp, Artificial Sequence
  Description of Artificial Sequence: Synthetic oligonucleotide
  Target: ATXN2; (+) strand; PAM type: NNGRRT; PAM sequence: GTGAAT
tttttttttttttttgagca

SEQ ID NO: 11755 - DNA, 20 bp, Artificial Sequence
  Description of Artificial Sequence: Synthetic oligonucleotide
  Target: ATXN2; (+) strand; PAM type: NNGRRT; PAM sequence: GAGAAT
taaagacttagataaacgtg

SEQ ID NO: 11756 - DNA, 20 bp, Artificial Sequence
  Description of Artificial Sequence: Synthetic oligonucleotide
  Target: ATXN2; (+) strand; PAM type: NNGRRT; PAM sequence: CCGGGT
accaaaaatataaaaattag

SEQ ID NO: 11757 - DNA, 20 bp, Artificial Sequence
  Description of Artificial Sequence: Synthetic oligonucleotide
  Target: ATXN2; (+) strand; PAM type: NNGRRT; PAM sequence: GAGAAT
tactcgggaggctgatacag

SEQ ID NO: 11758 - DNA, 20 bp, Artificial Sequence
  Description of Artificial Sequence: Synthetic oligonucleotide
  Target: ATXN2; (+) strand; PAM type: NNGRRT; PAM sequence: TTGAAT
ggctgatacaggagaattgc

SEQ ID NO: 11759 - DNA, 20 bp, Artificial Sequence
  Description of Artificial Sequence: Synthetic oligonucleotide
  Target: ATXN2; (+) strand; PAM type: NNGRRT; PAM sequence: GAGGGT
tgtgaggggaagctcctgga

SEQ ID NO: 11760 - DNA, 20 bp, Artificial Sequence
  Description of Artificial Sequence: Synthetic oligonucleotide
  Target: ATXN2; (+) strand; PAM type: NNGRRT; PAM sequence: GAGGAT
acccaaatgagcatgggcat

SEQ ID NO: 11761 - DNA, 20 bp, Artificial Sequence
  Description of Artificial Sequence: Synthetic oligonucleotide
  Target: ATXN2; (+) strand; PAM type: NNGRRT; PAM sequence: GGGAGT
gagggcaaaggctctgaggg

SEQ ID NO: 11762 - DNA, 20 bp, Artificial Sequence
  Description of Artificial Sequence: Synthetic oligonucleotide
  Target: ATXN2; (+) strand; PAM type: NNGRRT; PAM sequence: GCGGAT
cagcactctgggaggccgag

SEQ ID NO: 11763 - DNA, 20 bp, Artificial Sequence
  Description of Artificial Sequence: Synthetic oligonucleotide
  Target: ATXN2; (+) strand; PAM type: NNGRRT; PAM sequence: ATGGAT
actctgggaggccgaggcgg

SEQ ID NO: 11764 - DNA, 20 bp, Artificial Sequence
  Description of Artificial Sequence: Synthetic oligonucleotide
  Target: ATXN2; (+) strand; PAM type: NNGRRT; PAM sequence: AGGAGT
cggatggatcacctgaggtc

SEQ ID NO: 11765 - DNA, 20 bp, Artificial Sequence
  Description of Artificial Sequence: Synthetic oligonucleotide
  Target: ATXN2; (+) strand; PAM type: NNGRRT; PAM sequence: CAGGAT
catctgtgatctcagctacg

SEQ ID NO: 11766 - DNA, 20 bp, Artificial Sequence
  Description of Artificial Sequence: Synthetic oligonucleotide
  Target: ATXN2; (+) strand; PAM type: NNGRRT; PAM sequence: GAGAAT
tacgcaggatgctgaggcag

SEQ ID NO: 11767 - DNA, 20 bp, Artificial Sequence
  Description of Artificial Sequence: Synthetic oligonucleotide
  Target: ATXN2; (+) strand; PAM type: NNGRRT; PAM sequence: TGGAAT
tacaatcacttttctctgat

SEQ ID NO: 11768 - DNA, 20 bp, Artificial Sequence
  Description of Artificial Sequence: Synthetic oligonucleotide
  Target: ATXN2; (+) strand; PAM type: NNGRRT; PAM sequence: CAGAAT
tctgattggaatcaaggtcc

SEQ ID NO: 11769 - DNA, 20 bp, Artificial Sequence
  Description of Artificial Sequence: Synthetic oligonucleotide
  Target: ATXN2; (+) strand; PAM type: NNGRRT; PAM sequence: GTGGAT
actttgggaggcagtggccg

SEQ ID NO: 11770 - DNA, 20 bp, Artificial Sequence
  Description of Artificial Sequence: Synthetic oligonucleotide
  Target: ATXN2; (+) strand; PAM type: NNGRRT; PAM sequence: AGGAGT
ccggtggatcacctgaggtc

SEQ ID NO: 11771 - DNA, 20 bp, Artificial Sequence
  Description of Artificial Sequence: Synthetic oligonucleotide
  Target: ATXN2; (+) strand; PAM type: NNGRRT; PAM sequence: CTGGGT
actaaaaatacaaaaattag

SEQ ID NO: 11772 - DNA, 20 bp, Artificial Sequence
  Description of Artificial Sequence: Synthetic oligonucleotide
  Target: ATXN2; (+) strand; PAM type: NNGRRT; PAM sequence: GAGAAT
tacttgggaggctgaggcag

SEQ ID NO: 11773 - DNA, 20 bp, Artificial Sequence
  Description of Artificial Sequence: Synthetic oligonucleotide
  Target: ATXN2; (+) strand; PAM type: NNGRRT; PAM sequence: TTGAAT
aagtttcaggtcgatggaag

SEQ ID NO: 11774 - DNA, 20 bp, Artificial Sequence
  Description of Artificial Sequence: Synthetic oligonucleotide
  Target: ATXN2; (+) strand; PAM type: NNGRRT; PAM sequence: CTGGAT
gttgaataagaaggcctagg

SEQ ID NO: 11775 - DNA, 20 bp, Artificial Sequence
  Description of Artificial Sequence: Synthetic oligonucleotide
  Target: ATXN2; (+) strand; PAM type: NNGRRT; PAM sequence: AGGAGT
caggcagatcctttgaacca

SEQ ID NO: 11776 - DNA, 20 bp, Artificial Sequence
  Description of Artificial Sequence: Synthetic oligonucleotide
  Target: ATXN2; (+) strand; PAM type: NNGRRT; PAM sequence: TTGAAT
tttgttttaactcactacca

SEQ ID NO: 11777 - DNA, 20 bp, Artificial Sequence
  Description of Artificial Sequence: Synthetic oligonucleotide
  Target: ATXN2; (+) strand; PAM type: NNGRRT; PAM sequence: ATGGAT
ctcatctacattttctctct

SEQ ID NO: 11778 - DNA, 20 bp, Artificial Sequence
  Description of Artificial Sequence: Synthetic oligonucleotide
  Target: ATXN2; (+) strand; PAM type: NNGRRT; PAM sequence: TAGAAT
gtccagatttttcacataag

SEQ ID NO: 11779 - DNA, 20 bp, Artificial Sequence
  Description of Artificial Sequence: Synthetic oligonucleotide
  Target: ATXN2; (+) strand; PAM type: NNGRRT; PAM sequence: GTGGAT
tttgtgtctactttccaatt

SEQ ID NO: 11780 - DNA, 20 bp, Artificial Sequence
  Description of Artificial Sequence: Synthetic oligonucleotide
  Target: ATXN2; (+) strand; PAM type: NNGRRT; PAM sequence: TTGAGT
gtttagattgtgtcaacttt

SEQ ID NO: 11781 - DNA, 20 bp, Artificial Sequence
  Description of Artificial Sequence: Synthetic oligonucleotide
  Target: ATXN2; (+) strand; PAM type: NNGRRT; PAM sequence: TAGGAT
ctcctgtaatcccaacactt

SEQ ID NO: 11782 - DNA, 20 bp, Artificial Sequence
  Description of Artificial Sequence: Synthetic oligonucleotide
  Target: ATXN2; (+) strand; PAM type: NNGRRT; PAM sequence: GAGGAT
actttaggataccgagatgg

SEQ ID NO: 11783 - DNA, 20 bp, Artificial Sequence
  Description of Artificial Sequence: Synthetic oligonucleotide
  Target: ATXN2; (+) strand; PAM type: NNGRRT; PAM sequence: TTGAAT
taccgagatgggaggatcac

SEQ ID NO: 11784 - DNA, 20 bp, Artificial Sequence
  Description of Artificial Sequence: Synthetic oligonucleotide
  Target: ATXN2; (+) strand; PAM type: NNGRRT; PAM sequence: CGGAGT
ggaggatcacttgaataccc

SEQ ID NO: 11785 - DNA, 20 bp, Artificial Sequence
  Description of Artificial Sequence: Synthetic oligonucleotide
  Target: ATXN2; (+) strand; PAM type: NNGRRT; PAM sequence: GTGGGT
cagcactttgggaggccgag

SEQ ID NO: 11786 - DNA, 20 bp, Artificial Sequence
  Description of Artificial Sequence: Synthetic oligonucleotide
  Target: ATXN2; (+) strand; PAM type: NNGRRT; PAM sequence: GTGGAT
actttgggaggccgaggtgg

SEQ ID NO: 11787 - DNA, 20 bp, Artificial Sequence
  Description of Artificial Sequence: Synthetic oligonucleotide
  Target: ATXN2; (+) strand; PAM type: NNGRRT; PAM sequence: AGGAGT
tgggtggatcacctgagatc

SEQ ID NO: 11788 - DNA, 20 bp, Artificial Sequence
  Description of Artificial Sequence: Synthetic oligonucleotide
  Target: ATXN2; (+) strand; PAM type: NNGRRT; PAM sequence: GAGAAT
tacttgggaggctgaggcag

SEQ ID NO: 11789 - DNA, 20 bp, Artificial Sequence
  Description of Artificial Sequence: Synthetic oligonucleotide
  Target: ATXN2; (+) strand; PAM type: NNGRRT; PAM sequence: CTGGGT
ttgcaccattgcactgaagc

SEQ ID NO: 11790 - DNA, 20 bp, Artificial Sequence
  Description of Artificial Sequence: Synthetic oligonucleotide
  Target: ATXN2; (+) strand; PAM type: NNGRRT; PAM sequence: ACGAAT
gatcgaggttgctgtgagct

SEQ ID NO: 11791 - DNA, 20 bp, Artificial Sequence
  Description of Artificial Sequence: Synthetic oligonucleotide
  Target: ATXN2; (+) strand; PAM type: NNGRRT; PAM sequence: TAGAGT
accctgtctcgttcagttaa

SEQ ID NO: 11792 - DNA, 20 bp, Artificial Sequence
  Description of Artificial Sequence: Synthetic oligonucleotide
  Target: ATXN2; (+) strand; PAM type: NNGRRT; PAM sequence: GTGGAT
ttgtgaacatatatcttcat

SEQ ID NO: 11793 - DNA, 20 bp, Artificial Sequence
  Description of Artificial Sequence: Synthetic oligonucleotide
  Target: ATXN2; (+) strand; PAM type: NNGRRT; PAM sequence: TTGGGT
gatatatgttttcatttatc

SEQ ID NO: 11794 - DNA, 20 bp, Artificial Sequence
  Description of Artificial Sequence: Synthetic oligonucleotide
  Target: ATXN2; (+) strand; PAM type: NNGRRT; PAM sequence: TTGGGT
ggttcctacaaacgaaattg

SEQ ID NO: 11795 - DNA, 20 bp, Artificial Sequence
  Description of Artificial Sequence: Synthetic oligonucleotide
  Target: ATXN2; (+) strand; PAM type: NNGRRT; PAM sequence: CAGAGT
taagctttatatgaaaatat

SEQ ID NO: 11796 - DNA, 20 bp, Artificial Sequence
  Description of Artificial Sequence: Synthetic oligonucleotide
  Target: ATXN2; (+) strand; PAM type: NNGRRT; PAM sequence: GTGGGT
ctaaaaatacaaaaaaatag

SEQ ID NO: 11797 - DNA, 20 bp, Artificial Sequence
  Description of Artificial Sequence: Synthetic oligonucleotide
  Target: ATXN2; (+) strand; PAM type: NNGRRT; PAM sequence: GAGAAT
tacttgggaggctgaggcag

SEQ ID NO: 11798 - DNA, 20 bp, Artificial Sequence
  Description of Artificial Sequence: Synthetic oligonucleotide
  Target: ATXN2; (+) strand; PAM type: NNGRRT; PAM sequence: GAGAAT
tactcgggaggctgaggcag

SEQ ID NO: 11799 - DNA, 20 bp, Artificial Sequence
  Description of Artificial Sequence: Synthetic oligonucleotide
  Target: ATXN2; (+) strand; PAM type: NNGRRT; PAM sequence: GTGAGT
cctggcaggcagaggttgca

SEQ ID NO: 11800 - DNA, 20 bp, Artificial Sequence
  Description of Artificial Sequence: Synthetic oligonucleotide
  Target: ATXN2; (+) strand; PAM type: NNGRRT; PAM sequence: CAGAGT
actgcactccagcctggtga

SEQ ID NO: 11801 - DNA, 20 bp, Artificial Sequence
  Description of Artificial Sequence: Synthetic oligonucleotide
  Target: ATXN2; (+) strand; PAM type: NNGRRT; PAM sequence: TAGAGT
atatatatatatatatatat

SEQ ID NO: 11802 - DNA, 20 bp, Artificial Sequence
  Description of Artificial Sequence: Synthetic oligonucleotide
  Target: ATXN2; (+) strand; PAM type: NNGRRT; PAM sequence: CTGAAT
cactgtgaaatcctccccac

SEQ ID NO: 11803 - DNA, 20 bp, Artificial Sequence
  Description of Artificial Sequence: Synthetic oligonucleotide
  Target: ATXN2; (+) strand; PAM type: NNGRRT; PAM sequence: CAGGGT
tttttttttttttttcgaga

SEQ ID NO: 11804 - DNA, 20 bp, Artificial Sequence
  Description of Artificial Sequence: Synthetic oligonucleotide
  Target: ATXN2; (+) strand; PAM type: NNGRRT; PAM sequence: TGGAGT
tcttactctgccaaccaggc

SEQ ID NO: 11805 - DNA, 20 bp, Artificial Sequence
  Description of Artificial Sequence: Synthetic oligonucleotide
  Target: ATXN2; (+) strand; PAM type: NNGRRT; PAM sequence: CAGAGT
aatcctcccatctcagcctt

SEQ ID NO: 11806 - DNA, 20 bp, Artificial Sequence
  Description of Artificial Sequence: Synthetic oligonucleotide
  Target: ATXN2; (+) strand; PAM type: NNGRRT; PAM sequence: GGGGAT
gctaatttttgttagttttg

SEQ ID NO: 11807 - DNA, 20 bp, Artificial Sequence
  Description of Artificial Sequence: Synthetic oligonucleotide
  Target: ATXN2; (+) strand; PAM type: NNGRRT; PAM sequence: CAGAGT
tttgtttgtttgtttttagg

SEQ ID NO: 11808 - DNA, 20 bp, Artificial Sequence
  Description of Artificial Sequence: Synthetic oligonucleotide
  Target: ATXN2; (+) strand; PAM type: NNGRRT; PAM sequence: TGGAAT
tcttgctgtcttgcccaggc

SEQ ID NO: 11809 - DNA, 20 bp, Artificial Sequence
  Description of Artificial Sequence: Synthetic oligonucleotide
  Target: ATXN2; (+) strand; PAM type: NNGRRT; PAM sequence: CTGGGT
ttcactgtaacctccacctc

SEQ ID NO: 11810 - DNA, 20 bp, Artificial Sequence
  Description of Artificial Sequence: Synthetic oligonucleotide
  Target: ATXN2; (+) strand; PAM type: NNGRRT; PAM sequence: TGGGAT
cgctcagccttccatgtagc

SEQ ID NO: 11811 - DNA, 20 bp, Artificial Sequence
  Description of Artificial Sequence: Synthetic oligonucleotide
  Target: ATXN2; (-) strand; PAM type: NNNNGHTT; PAM sequence: ATTGGTTT
cagaagacaatggcctagct

SEQ ID NO: 11812 - DNA, 20 bp, Artificial Sequence
  Description of Artificial Sequence: Synthetic oligonucleotide
  Target: ATXN2; (-) strand; PAM type: NNNNGHTT; PAM sequence: AGCTGCTT
ccctgcagctgaaccagctg

SEQ ID NO: 11813 - DNA, 20 bp, Artificial Sequence
  Description of Artificial Sequence: Synthetic oligonucleotide
  Target: ATXN2; (-) strand; PAM type: NNNNGHTT; PAM sequence: GCTCGATT
tttcgtagtccgagtcccgg

SEQ ID NO: 11814 - DNA, 20 bp, Artificial Sequence
  Description of Artificial Sequence: Synthetic oligonucleotide
  Target: ATXN2; (-) strand; PAM type: NNNNGHTT; PAM sequence: TACTGATT
tcactggtcagagaggtgtg

SEQ ID NO: 11815 - DNA, 20 bp, Artificial Sequence
  Description of Artificial Sequence: Synthetic oligonucleotide
  Target: ATXN2; (-) strand; PAM type: NNNNGHTT; PAM sequence: ACAAGTTT
cagtgtcagtgaaaaagaga

SEQ ID NO: 11816 - DNA, 20 bp, Artificial Sequence
  Description of Artificial Sequence: Synthetic oligonucleotide
  Target: ATXN2; (-) strand; PAM type: NNNNGHTT; PAM sequence: CTGGGCTT
gagaaccgcttgttagtgtt

SEQ ID NO: 11817 - DNA, 20 bp, Artificial Sequence
  Description of Artificial Sequence: Synthetic oligonucleotide
  Target: ATXN2; (-) strand; PAM type: NNNNGHTT; PAM sequence: AACCGCTT
ggactgacggtagatgggag

SEQ ID NO: 11818 - DNA, 20 bp, Artificial Sequence
  Description of Artificial Sequence: Synthetic oligonucleotide
  Target: ATXN2; (-) strand; PAM type: NNNNGHTT; PAM sequence: GCAGGATT
tcctaaagctgagagtagaa

SEQ ID NO: 11819 - DNA, 20 bp, Artificial Sequence
  Description of Artificial Sequence: Synthetic oligonucleotide
  Target: ATXN2; (-) strand; PAM type: NNNNGHTT; PAM sequence: CAGAGCTT
ccttcagcttgtgcctctga

SEQ ID NO: 11820 - DNA, 20 bp, Artificial Sequence
  Description of Artificial Sequence: Synthetic oligonucleotide
  Target: ATXN2; (-) strand; PAM type: NNNNGHTT; PAM sequence: TTCAGCTT
gttttaaatcatttttgacc

SEQ ID NO: 11821 - DNA, 20 bp, Artificial Sequence
  Description of Artificial Sequence: Synthetic oligonucleotide
  Target: ATXN2; (-) strand; PAM type: NNNNGHTT; PAM sequence: AAATGTTT
aaagaaattagtctgaggta

SEQ ID NO: 11822 - DNA, 20 bp, Artificial Sequence
  Description of Artificial Sequence: Synthetic oligonucleotide
  Target: ATXN2; (-) strand; PAM type: NNNNGHTT; PAM sequence: TTAAGTTT
tgcactgaaataagcagtgg

SEQ ID NO: 11823 - DNA, 20 bp, Artificial Sequence
  Description of Artificial Sequence: Synthetic oligonucleotide
  Target: ATXN2; (-) strand; PAM type: NNNNGHTT; PAM sequence: AGCTGTTT
aaattaggtagggtttgcat

SEQ ID NO: 11824 - DNA, 20 bp, Artificial Sequence
  Description of Artificial Sequence: Synthetic oligonucleotide
  Target: ATXN2; (-) strand; PAM type: NNNNGHTT; PAM sequence: TAGGGTTT
ggctcagactgtaaattagg

SEQ ID NO: 11825 - DNA, 20 bp, Artificial Sequence
  Description of Artificial Sequence: Synthetic oligonucleotide
  Target: ATXN2; (-) strand; PAM type: NNNNGHTT; PAM sequence: TCCAGTTT
aaagctgctgtaaaccagaa

SEQ ID NO: 11826 - DNA, 20 bp, Artificial Sequence
  Description of Artificial Sequence: Synthetic oligonucleotide
  Target: ATXN2; (-) strand; PAM type: NNNNGHTT; PAM sequence: TTTTGCTT
cctaggagtccttcttccct

SEQ ID NO: 11827 - DNA, 20 bp, Artificial Sequence
  Description of Artificial Sequence: Synthetic oligonucleotide
  Target: ATXN2; (-) strand; PAM type: NNNNGHTT; PAM sequence: GAAGGATT
accaagccagccttgttgct

SEQ ID NO: 11828 - DNA, 20 bp, Artificial Sequence
  Description of Artificial Sequence: Synthetic oligonucleotide
  Target: ATXN2; (-) strand; PAM type: NNNNGHTT; PAM sequence: AGATGCTT
ggataatttaataagccatt

SEQ ID NO: 11829 - DNA, 20 bp, Artificial Sequence
  Description of Artificial Sequence: Synthetic oligonucleotide
  Target: ATXN2; (-) strand; PAM type: NNNNGHTT; PAM sequence: CCCAGCTT
attagttatggcaccagatt

SEQ ID NO: 11830 - DNA, 20 bp, Artificial Sequence
  Description of Artificial Sequence: Synthetic oligonucleotide
  Target: ATXN2; (-) strand; PAM type: NNNNGHTT; PAM sequence: ACCAGATT
agtttctcattagttatggc

SEQ ID NO: 11831 - DNA, 20 bp, Artificial Sequence
  Description of Artificial Sequence: Synthetic oligonucleotide
  Target: ATXN2; (-) strand; PAM type: NNNNGHTT; PAM sequence: AGGAGTTT
cactgattgtgggctattaa

SEQ ID NO: 11832 - DNA, 20 bp, Artificial Sequence
  Description of Artificial Sequence: Synthetic oligonucleotide
  Target: ATXN2; (-) strand; PAM type: NNNNGHTT; PAM sequence: CACTGATT
agtagccagctagaacagaa

SEQ ID NO: 11833 - DNA, 20 bp, Artificial Sequence
  Description of Artificial Sequence: Synthetic oligonucleotide
  Target: ATXN2; (-) strand; PAM type: NNNNGHTT; PAM sequence: GATAGATT
cccatgtgtgcaaggagata

SEQ ID NO: 11834 - DNA, 20 bp, Artificial Sequence
  Description of Artificial Sequence: Synthetic oligonucleotide
  Target: ATXN2; (-) strand; PAM type: NNNNGHTT; PAM sequence: TGGAGATT
ttcaggacctccctggatgg

SEQ ID NO: 11835 - DNA, 20 bp, Artificial Sequence
  Description of Artificial Sequence: Synthetic oligonucleotide
  Target: ATXN2; (-) strand; PAM type: NNNNGHTT; PAM sequence: TAGAGATT
aattgtatcacttgtataga

SEQ ID NO: 11836 - DNA, 20 bp, Artificial Sequence
  Description of Artificial Sequence: Synthetic oligonucleotide
  Target: ATXN2; (-) strand; PAM type: NNNNGHTT; PAM sequence: CCCCGTTT
gctgactccactgtcactgc

SEQ ID NO: 11837 - DNA, 20 bp, Artificial Sequence
  Description of Artificial Sequence: Synthetic oligonucleotide
  Target: ATXN2; (-) strand; PAM type: NNNNGHTT; PAM sequence: CCCAGTTT
ctgtaaagctgatctaaact

SEQ ID NO: 11838 - DNA, 20 bp, Artificial Sequence
  Description of Artificial Sequence: Synthetic oligonucleotide
  Target: ATXN2; (-) strand; PAM type: NNNNGHTT; PAM sequence: TGAGGTTT
cagtcctatgagttttaggc

SEQ ID NO: 11839 - DNA, 20 bp, Artificial Sequence
  Description of Artificial Sequence: Synthetic oligonucleotide
  Target: ATXN2; (-) strand; PAM type: NNNNGHTT; PAM sequence: ATGAGTTT
cctcccaggcagtcagtcct

SEQ ID NO: 11840 - DNA, 20 bp, Artificial Sequence
  Description of Artificial Sequence: Synthetic oligonucleotide
  Target: ATXN2; (-) strand; PAM type: NNNNGHTT; PAM sequence: AGGGGTTT
aaaaaaaaagaaaagtgcat

SEQ ID NO: 11841 - DNA, 20 bp, Artificial Sequence
  Description of Artificial Sequence: Synthetic oligonucleotide
  Target: ATXN2; (-) strand; PAM type: NNNNGHTT; PAM sequence: CCAAGATT
aaggtggaggttgcagtgag

SEQ ID NO: 11842 - DNA, 20 bp, Artificial Sequence
  Description of Artificial Sequence: Synthetic oligonucleotide
  Target: ATXN2; (-) strand; PAM type: NNNNGHTT; PAM sequence: AATCGCTT
tacttgagaggtcgaggcag

SEQ ID NO: 11843 - DNA, 20 bp, Artificial Sequence
  Description of Artificial Sequence: Synthetic oligonucleotide
  Target: ATXN2; (-) strand; PAM type: NNNNGHTT; PAM sequence: TGGTGCTT
aattagccaggcatggtggc

SEQ ID NO: 11844 - DNA, 20 bp, Artificial Sequence
  Description of Artificial Sequence: Synthetic oligonucleotide
  Target: ATXN2; (-) strand; PAM type: NNNNGHTT; PAM sequence: GTCTGCTT
caaatctggatcagtgtcag

SEQ ID NO: 11845 - DNA, 20 bp, Artificial Sequence
  Description of Artificial Sequence: Synthetic oligonucleotide
  Target: ATXN2; (-) strand; PAM type: NNNNGHTT; PAM sequence: AGCTGCTT
agcattcattttccagagaa

SEQ ID NO: 11846 - DNA, 20 bp, Artificial Sequence
  Description of Artificial Sequence: Synthetic oligonucleotide
  Target: ATXN2; (-) strand; PAM type: NNNNGHTT; PAM sequence: ATAAGCTT
aggaccagtgactttccata

SEQ ID NO: 11847 - DNA, 20 bp, Artificial Sequence
  Description of Artificial Sequence: Synthetic oligonucleotide
  Target: ATXN2; (-) strand; PAM type: NNNNGHTT; PAM sequence: AGATGTTT
gcatgaagacgtcatatccc

SEQ ID NO: 11848 - DNA, 20 bp, Artificial Sequence
  Description of Artificial Sequence: Synthetic oligonucleotide
  Target: ATXN2; (-) strand; PAM type: NNNNGHTT; PAM sequence: CTAAGTTT
cagcctgttagtcagagctg

SEQ ID NO: 11849 - DNA, 20 bp, Artificial Sequence
  Description of Artificial Sequence: Synthetic oligonucleotide
  Target: ATXN2; (-) strand; PAM type: NNNNGHTT; PAM sequence: GCATGTTT
gccatgggagttttctgtca

SEQ ID NO: 11850 - DNA, 20 bp, Artificial Sequence
  Description of Artificial Sequence: Synthetic oligonucleotide
  Target: ATXN2; (-) strand; PAM type: NNNNGHTT; PAM sequence: GGGAGTTT
tcacttcttcctagagccat

SEQ ID NO: 11851 - DNA, 20 bp, Artificial Sequence
  Description of Artificial Sequence: Synthetic oligonucleotide
  Target: ATXN2; (-) strand; PAM type: NNNNGHTT; PAM sequence: GTTGGCTT
gctcccacataaagaaaggt

SEQ ID NO: 11852 - DNA, 20 bp, Artificial Sequence
  Description of Artificial Sequence: Synthetic oligonucleotide
  Target: ATXN2; (-) strand; PAM type: NNNNGHTT; PAM sequence: AGCTGATT
ctgctgcccaccccttcatc

SEQ ID NO: 11853 - DNA, 20 bp, Artificial Sequence
  Description of Artificial Sequence: Synthetic oligonucleotide
  Target: ATXN2; (-) strand; PAM type: NNNNGHTT; PAM sequence: TCCAGTTT
agggatcatgatgtctactg

SEQ ID NO: 11854 - DNA, 20 bp, Artificial Sequence
  Description of Artificial Sequence: Synthetic oligonucleotide
  Target: ATXN2; (-) strand; PAM type: NNNNGHTT; PAM sequence: GTTAGTTT
attctttggtgctggtgact

SEQ ID NO: 11855 - DNA, 20 bp, Artificial Sequence
  Description of Artificial Sequence: Synthetic oligonucleotide
  Target: ATXN2; (-) strand; PAM type: NNNNGHTT; PAM sequence: TATGGATT
atttataccagataaagcca

SEQ ID NO: 11856 - DNA, 20 bp, Artificial Sequence
  Description of Artificial Sequence: Synthetic oligonucleotide
  Target: ATXN2; (-) strand; PAM type: NNNNGHTT; PAM sequence: AGAAGATT
gtccagaaatgatcaaaggc

SEQ ID NO: 11857 - DNA, 20 bp, Artificial Sequence
  Description of Artificial Sequence: Synthetic oligonucleotide
  Target: ATXN2; (-) strand; PAM type: NNNNGHTT; PAM sequence: TAATGATT
tgttctctggcccaagattt

SEQ ID NO: 11858 - DNA, 20 bp, Artificial Sequence
  Description of Artificial Sequence: Synthetic oligonucleotide
  Target: ATXN2; (-) strand; PAM type: NNNNGHTT; PAM sequence: CCAAGATT
taaaaatagtgttctctggc

SEQ ID NO: 11859 - DNA, 20 bp, Artificial Sequence
  Description of Artificial Sequence: Synthetic oligonucleotide
  Target: ATXN2; (-) strand; PAM type: NNNNGHTT; PAM sequence: TCTAGCTT
ttaatatactcgcaagttcc

SEQ ID NO: 11860 - DNA, 20 bp, Artificial Sequence
  Description of Artificial Sequence: Synthetic oligonucleotide
  Target: ATXN2; (-) strand; PAM type: NNNNGHTT; PAM sequence: TCAAGATT
ttaaatattatgacagcaaa

SEQ ID NO: 11861 - DNA, 20 bp, Artificial Sequence
  Description of Artificial Sequence: Synthetic oligonucleotide
  Target: ATXN2; (-) strand; PAM type: NNNNGHTT; PAM sequence: CAAGGATT
gagcgagtatttgggcaggg

SEQ ID NO: 11862 - DNA, 20 bp, Artificial Sequence
  Description of Artificial Sequence: Synthetic oligonucleotide
  Target: ATXN2; (-) strand; PAM type: NNNNGHTT; PAM sequence: CCCAGATT
cataagcatttgttagtatt

SEQ ID NO: 11863 - DNA, 20 bp, Artificial Sequence
  Description of Artificial Sequence: Synthetic oligonucleotide
  Target: ATXN2; (-) strand; PAM type: NNNNGHTT; PAM sequence: AGCTGCTT
aaagatacaaagatgtacaa

SEQ ID NO: 11864 - DNA, 20 bp, Artificial Sequence
  Description of Artificial Sequence: Synthetic oligonucleotide
  Target: ATXN2; (-) strand; PAM type: NNNNGHTT; PAM sequence: GTAAGCTT
ctcgggctgacaccgattct

SEQ ID NO: 11865 - DNA, 20 bp, Artificial Sequence
  Description of Artificial Sequence: Synthetic oligonucleotide
  Target: ATXN2; (-) strand; PAM type: NNNNGHTT; PAM sequence: CACCGATT
attccacatcctcgggctga

SEQ ID NO: 11866 - DNA, 20 bp, Artificial Sequence
  Description of Artificial Sequence: Synthetic oligonucleotide
  Target: ATXN2; (-) strand; PAM type: NNNNGHTT; PAM sequence: ATCTGCTT
ttctctttggtggattagag

SEQ ID NO: 11867 - DNA, 20 bp, Artificial Sequence
  Description of Artificial Sequence: Synthetic oligonucleotide
  Target: ATXN2; (-) strand; PAM type: NNNNGHTT; PAM sequence: GGTGGATT
aagactgagctattctcttt

SEQ ID NO: 11868 - DNA, 20 bp, Artificial Sequence
  Description of Artificial Sequence: Synthetic oligonucleotide
  Target: ATXN2; (-) strand; PAM type: NNNNGHTT; PAM sequence: AAATGATT
tatcccggaaggtagctgtg

SEQ ID NO: 11869 - DNA, 20 bp, Artificial Sequence
  Description of Artificial Sequence: Synthetic oligonucleotide
  Target: ATXN2; (-) strand; PAM type: NNNNGHTT; PAM sequence: AAAAGTTT
aaaaaaatttaaaaaataaa

SEQ ID NO: 11870 - DNA, 20 bp, Artificial Sequence
  Description of Artificial Sequence: Synthetic oligonucleotide
  Target: ATXN2; (-) strand; PAM type: NNNNGHTT; PAM sequence: TCAAGTTT
gacggattattatttataaa

SEQ ID NO: 11871 - DNA, 20 bp, Artificial Sequence
  Description of Artificial Sequence: Synthetic oligonucleotide
  Target: ATXN2; (-) strand; PAM type: NNNNGHTT; PAM sequence: GACGGATT
taaattcttaccgtcaaact

SEQ ID NO: 11872 - DNA, 20 bp, Artificial Sequence
  Description of Artificial Sequence: Synthetic oligonucleotide
  Target: ATXN2; (-) strand; PAM type: NNNNGHTT; PAM sequence: CAAAGTTT
cgcccttttactaaacttga

SEQ ID NO: 11873 - DNA, 20 bp, Artificial Sequence
  Description of Artificial Sequence: Synthetic oligonucleotide
  Target: ATXN2; (-) strand; PAM type: NNNNGHTT; PAM sequence: GAGTGATT
gctagcaaaagaagtaacaa

SEQ ID NO: 11874 - DNA, 20 bp, Artificial Sequence
  Description of Artificial Sequence: Synthetic oligonucleotide
  Target: ATXN2; (-) strand; PAM type: NNNNGHTT; PAM sequence: CTCTGCTT
gagtcccgcaggtaccccag

SEQ ID NO: 11875 - DNA, 20 bp, Artificial Sequence
  Description of Artificial Sequence: Synthetic oligonucleotide
  Target: ATXN2; (-) strand; PAM type: NNNNGHTT; PAM sequence: TGCTGTTT
ggctattccataattccata

SEQ ID NO: 11876 - DNA, 20 bp, Artificial Sequence
  Description of Artificial Sequence: Synthetic oligonucleotide
  Target: ATXN2; (-) strand; PAM type: NNNNGHTT; PAM sequence: TGTTGATT
ttttgtttttaaaatatata

SEQ ID NO: 11877 - DNA, 20 bp, Artificial Sequence
  Description of Artificial Sequence: Synthetic oligonucleotide
  Target: ATXN2; (-) strand; PAM type: NNNNGHTT; PAM sequence: TTTTGTTT
gaaaactagaatttcattta

SEQ ID NO: 11878 - DNA, 20 bp, Artificial Sequence
  Description of Artificial Sequence: Synthetic oligonucleotide
  Target: ATXN2; (-) strand; PAM type: NNNNGHTT; PAM sequence: TACTGCTT
ccaaattccctcctcccttc

SEQ ID NO: 11879 - DNA, 20 bp, Artificial Sequence
  Description of Artificial Sequence: Synthetic oligonucleotide
  Target: ATXN2; (-) strand; PAM type: NNNNGHTT; PAM sequence: GTTCGCTT
tgccagttttctgtttcaat

SEQ ID NO: 11880 - DNA, 20 bp, Artificial Sequence
  Description of Artificial Sequence: Synthetic oligonucleotide
  Target: ATXN2; (-) strand; PAM type: NNNNGHTT; PAM sequence: TTCTGTTT
gatgtgtggtgttgccagtt

SEQ ID NO: 11881 - DNA, 20 bp, Artificial Sequence
  Description of Artificial Sequence: Synthetic oligonucleotide
  Target: ATXN2; (-) strand; PAM type: NNNNGHTT; PAM sequence: GCCAGTTT
ctaggctgatgtgtggtgtt

SEQ ID NO: 11882 - DNA, 20 bp, Artificial Sequence
  Description of Artificial Sequence: Synthetic oligonucleotide
  Target: ATXN2; (-) strand; PAM type: NNNNGHTT; PAM sequence: GATAGTTT
ttttgttcagctagcacgag

SEQ ID NO: 11883 - DNA, 20 bp, Artificial Sequence
  Description of Artificial Sequence: Synthetic oligonucleotide
  Target: ATXN2; (-) strand; PAM type: NNNNGHTT; PAM sequence: TTGAGTTT
ggggaaaagcgaattcaatt

SEQ ID NO: 11884 - DNA, 20 bp, Artificial Sequence
  Description of Artificial Sequence: Synthetic oligonucleotide
  Target: ATXN2; (-) strand; PAM type: NNNNGHTT; PAM sequence: GTTTGTTT
agtggttttacgtctgactg

SEQ ID NO: 11885 - DNA, 20 bp, Artificial Sequence
  Description of Artificial Sequence: Synthetic oligonucleotide
  Target: ATXN2; (-) strand; PAM type: NNNNGHTT; PAM sequence: ACTGGTTT
ctgaagtggttttacgtctg

SEQ ID NO: 11886 - DNA, 20 bp, Artificial Sequence
  Description of Artificial Sequence: Synthetic oligonucleotide
  Target: ATXN2; (-) strand; PAM type: NNNNGHTT; PAM sequence: AGTGGTTT
cttctgggagttttatctga

SEQ ID NO: 11887 - DNA, 20 bp, Artificial Sequence
  Description of Artificial Sequence: Synthetic oligonucleotide
  Target: ATXN2; (-) strand; PAM type: NNNNGHTT; PAM sequence: GGGAGTTT
accccatgaacaagtcttct

SEQ ID NO: 11888 - DNA, 20 bp, Artificial Sequence
  Description of Artificial Sequence: Synthetic oligonucleotide
  Target: ATXN2; (-) strand; PAM type: NNNNGHTT; PAM sequence: GGGGGTTT
gcttggctaatatttgggga

SEQ ID NO: 11889 - DNA, 20 bp, Artificial Sequence
  Description of Artificial Sequence: Synthetic oligonucleotide
  Target: ATXN2; (-) strand; PAM type: NNNNGHTT; PAM sequence: TGGTGCTT
tgttattctgaaagcaatac

SEQ ID NO: 11890 - DNA, 20 bp, Artificial Sequence
  Description of Artificial Sequence: Synthetic oligonucleotide
  Target: ATXN2; (-) strand; PAM type: NNNNGHTT; PAM sequence: CTGTGATT
cctgaacaggggagagcgcc

SEQ ID NO: 11891 - DNA, 20 bp, Artificial Sequence
  Description of Artificial Sequence: Synthetic oligonucleotide
  Target: ATXN2; (-) strand; PAM type: NNNNGHTT; PAM sequence: ACTGGCTT
tgagaaagcgctgtggatgg

SEQ ID NO: 11892 - DNA, 20 bp, Artificial Sequence
  Description of Artificial Sequence: Synthetic oligonucleotide
  Target: ATXN2; (-) strand; PAM type: NNNNGHTT; PAM sequence: GTTTGATT
ggggttattaccatggcaga

SEQ ID NO: 11893 - DNA, 20 bp, Artificial Sequence
  Description of Artificial Sequence: Synthetic oligonucleotide
  Target: ATXN2; (-) strand; PAM type: NNNNGHTT; PAM sequence: CAGAGTTT
gtggggggttattaccatgg

SEQ ID NO: 11894 - DNA, 20 bp, Artificial Sequence
  Description of Artificial Sequence: Synthetic oligonucleotide
  Target: ATXN2; (-) strand; PAM type: NNNNGHTT; PAM sequence: CAGTGTTT
ttatgacaggctggacaggg

SEQ ID NO: 11895 - DNA, 20 bp, Artificial Sequence
  Description of Artificial Sequence: Synthetic oligonucleotide
  Target: ATXN2; (-) strand; PAM type: NNNNGHTT; PAM sequence: TTTGGCTT
tgttctgatggtatacagga

SEQ ID NO: 11896 - DNA, 20 bp, Artificial Sequence
  Description of Artificial Sequence: Synthetic oligonucleotide
  Target: ATXN2; (-) strand; PAM type: NNNNGHTT; PAM sequence: ACAGGATT
tgtgtgtgttctgatggtat

SEQ ID NO: 11897 - DNA, 20 bp, Artificial Sequence
  Description of Artificial Sequence: Synthetic oligonucleotide
  Target: ATXN2; (-) strand; PAM type: NNNNGHTT; PAM sequence: TGAGGCTT
atcagttcagcatcagggcc

SEQ ID NO: 11898 - DNA, 20 bp, Artificial Sequence
  Description of Artificial Sequence: Synthetic oligonucleotide
  Target: ATXN2; (-) strand; PAM type: NNNNGHTT; PAM sequence: CAGTGCTT
ggtggaatggcaggcagggc

SEQ ID NO: 11899 - DNA, 20 bp, Artificial Sequence
  Description of Artificial Sequence: Synthetic oligonucleotide
  Target: ATXN2; (-) strand; PAM type: NNNNGHTT; PAM sequence: CTCTGTTT
cctgtatgcgtaaaagagct

SEQ ID NO: 11900 - DNA, 20 bp, Artificial Sequence
  Description of Artificial Sequence: Synthetic oligonucleotide
  Target: ATXN2; (-) strand; PAM type: NNNNGHTT; PAM sequence: TAGAGATT
caggtcaatagataatctac

SEQ ID NO: 11901 - DNA, 20 bp, Artificial Sequence
  Description of Artificial Sequence: Synthetic oligonucleotide
  Target: ATXN2; (-) strand; PAM type: NNNNGHTT; PAM sequence: GCCTGATT
acctcaggccccacatggca

SEQ ID NO: 11902 - DNA, 20 bp, Artificial Sequence
  Description of Artificial Sequence: Synthetic oligonucleotide
  Target: ATXN2; (-) strand; PAM type: NNNNGHTT; PAM sequence: ATCTGTTT
agtctctgcttattaatgta

SEQ ID NO: 11903 - DNA, 20 bp, Artificial Sequence
  Description of Artificial Sequence: Synthetic oligonucleotide
  Target: ATXN2; (-) strand; PAM type: NNNNGHTT; PAM sequence: CTCTGCTT
acatacttgactgtgacagt

SEQ ID NO: 11904 - DNA, 20 bp, Artificial Sequence
  Description of Artificial Sequence: Synthetic oligonucleotide
  Target: ATXN2; (-) strand; PAM type: NNNNGHTT; PAM sequence: AGCTGTTT
cccctgcagagctggaatcc

SEQ ID NO: 11905 - DNA, 20 bp, Artificial Sequence
  Description of Artificial Sequence: Synthetic oligonucleotide
  Target: ATXN2; (-) strand; PAM type: NNNNGHTT; PAM sequence: CAAGGCTT
agtaaaaacggcatttcatc

SEQ ID NO: 11906 - DNA, 20 bp, Artificial Sequence
  Description of Artificial Sequence: Synthetic oligonucleotide
  Target: ATXN2; (-) strand; PAM type: NNNNGHTT; PAM sequence: GCCCGTTT
gaagctcaaatttgccatgt

SEQ ID NO: 11907 - DNA, 20 bp, Artificial Sequence
  Description of Artificial Sequence: Synthetic oligonucleotide
  Target: ATXN2; (-) strand; PAM type: NNNNGHTT; PAM sequence: CTCTGTTT
cagggatccctaaaacctca

SEQ ID NO: 11908 - DNA, 20 bp, Artificial Sequence
  Description of Artificial Sequence: Synthetic oligonucleotide
  Target: ATXN2; (-) strand; PAM type: NNNNGHTT; PAM sequence: GTCAGCTT
ggccagcgtggtttggtgga

SEQ ID NO: 11909 - DNA, 20 bp, Artificial Sequence
  Description of Artificial Sequence: Synthetic oligonucleotide
  Target: ATXN2; (-) strand; PAM type: NNNNGHTT; PAM sequence: CGTGGTTT
gtttggtccgtgtgggccag

SEQ ID NO: 11910 - DNA, 20 bp, Artificial Sequence
  Description of Artificial Sequence: Synthetic oligonucleotide
  Target: ATXN2; (-) strand; PAM type: NNNNGHTT; PAM sequence: GCCGGTTT
ttttgatagtggggagggaa

SEQ ID NO: 11911 - DNA, 20 bp, Artificial Sequence
  Description of Artificial Sequence: Synthetic oligonucleotide
  Target: ATXN2; (-) strand; PAM type: NNNNGHTT; PAM sequence: ATTTGCTT
ggtgtagcgcactgcagttg

SEQ ID NO: 11912 - DNA, 20 bp, Artificial Sequence
  Description of Artificial Sequence: Synthetic oligonucleotide
  Target: ATXN2; (-) strand; PAM type: NNNNGHTT; PAM sequence: AGTTGATT
tctgtggtgtagcgcactgc

SEQ ID NO: 11913 - DNA, 20 bp, Artificial Sequence
  Description of Artificial Sequence: Synthetic oligonucleotide
  Target: ATXN2; (-) strand; PAM type: NNNNGHTT; PAM sequence: CAAAGTTT
gtttgggcgtcctcaccctg

SEQ ID NO: 11914 - DNA, 20 bp, Artificial Sequence
  Description of Artificial Sequence: Synthetic oligonucleotide
  Target: ATXN2; (-) strand; PAM type: NNNNGHTT; PAM sequence: GGAAGTTT
agtagagttccacagctctg

SEQ ID NO: 11915 - DNA, 20 bp, Artificial Sequence
  Description of Artificial Sequence: Synthetic oligonucleotide
  Target: ATXN2; (-) strand; PAM type: NNNNGHTT; PAM sequence: AGGGGATT
gtccctgcactccagggccc

SEQ ID NO: 11916 - DNA, 20 bp, Artificial Sequence
  Description of Artificial Sequence: Synthetic oligonucleotide
  Target: ATXN2; (-) strand; PAM type: NNNNGHTT; PAM sequence: GTGTGCTT
taagctgctacaggtgaaag

SEQ ID NO: 11917 - DNA, 20 bp, Artificial Sequence
  Description of Artificial Sequence: Synthetic oligonucleotide
  Target: ATXN2; (-) strand; PAM type: NNNNGHTT; PAM sequence: GAGGGCTT
accataagttgtactcttga

SEQ ID NO: 11918 - DNA, 20 bp, Artificial Sequence
  Description of Artificial Sequence: Synthetic oligonucleotide
  Target: ATXN2; (-) strand; PAM type: NNNNGHTT; PAM sequence: ATCTGCTT
ttttccctggttatccatat

SEQ ID NO: 11919 - DNA, 20 bp, Artificial Sequence
  Description of Artificial Sequence: Synthetic oligonucleotide
  Target: ATXN2; (-) strand; PAM type: NNNNGHTT; PAM sequence: AATTGTTT
agttccagacacatctctcc

SEQ ID NO: 11920 - DNA, 20 bp, Artificial Sequence
  Description of Artificial Sequence: Synthetic oligonucleotide
  Target: ATXN2; (-) strand; PAM type: NNNNGHTT; PAM sequence: ACTTGATT
gtgactaccggggcctgtca

SEQ ID NO: 11921 - DNA, 20 bp, Artificial Sequence
  Description of Artificial Sequence: Synthetic oligonucleotide
  Target: ATXN2; (-) strand; PAM type: NNNNGHTT; PAM sequence: GTCTGCTT
agtccttctttcctttctgt

SEQ ID NO: 11922 - DNA, 20 bp, Artificial Sequence
  Description of Artificial Sequence: Synthetic oligonucleotide
  Target: ATXN2; (-) strand; PAM type: NNNNGHTT; PAM sequence: TTTAGTTT
aggtgctgattggtcagtcc

SEQ ID NO: 11923 - DNA, 20 bp, Artificial Sequence
  Description of Artificial Sequence: Synthetic oligonucleotide
  Target: ATXN2; (-) strand; PAM type: NNNNGHTT; PAM sequence: TGCTGATT
tgtcatgggatcagtgaagg

SEQ ID NO: 11924 - DNA, 20 bp, Artificial Sequence
  Description of Artificial Sequence: Synthetic oligonucleotide
  Target: ATXN2; (-) strand; PAM type: NNNNGHTT; PAM sequence: TGTGGTTT
tggccctaagggaatgtttg

SEQ ID NO: 11925 - DNA, 20 bp, Artificial Sequence
  Description of Artificial Sequence: Synthetic oligonucleotide
  Target: ATXN2; (-) strand; PAM type: NNNNGHTT; PAM sequence: GAATGTTT
cacgtgatctggccctaagg

SEQ ID NO: 11926 - DNA, 20 bp, Artificial Sequence
  Description of Artificial Sequence: Synthetic oligonucleotide
  Target: ATXN2; (-) strand; PAM type: NNNNGHTT; PAM sequence: ACCAGCTT
gcccacgtacctcaggtaat

SEQ ID NO: 11927 - DNA, 20 bp, Artificial Sequence
  Description of Artificial Sequence: Synthetic oligonucleotide
  Target: ATXN2; (-) strand; PAM type: NNNNGHTT; PAM sequence: AATAGTTT
ccaacacgcagtcgccacag

SEQ ID NO: 11928 - DNA, 20 bp, Artificial Sequence
  Description of Artificial Sequence: Synthetic oligonucleotide
  Target: ATXN2; (-) strand; PAM type: NNNNGHTT; PAM sequence: CGGGGCTT
gcagtcagccatttaccacg

SEQ ID NO: 11929 - DNA, 20 bp, Artificial Sequence
  Description of Artificial Sequence: Synthetic oligonucleotide
  Target: ATXN2; (-) strand; PAM type: NNNNGHTT; PAM sequence: TGTCGCTT
ttttcctctcaattctttcc

SEQ ID NO: 11930 - DNA, 20 bp, Artificial Sequence
  Description of Artificial Sequence: Synthetic oligonucleotide
  Target: ATXN2; (-) strand; PAM type: NNNNGHTT; PAM sequence: AGAAGTTT
ccttggctgcttttcattaa

SEQ ID NO: 11931 - DNA, 20 bp, Artificial Sequence
  Description of Artificial Sequence: Synthetic oligonucleotide
  Target: ATXN2; (-) strand; PAM type: NNNNGHTT; PAM sequence: GGCTGCTT
tagctttgtgggtatccctt

SEQ ID NO: 11932 - DNA, 20 bp, Artificial Sequence
  Description of Artificial Sequence: Synthetic oligonucleotide
  Target: ATXN2; (-) strand; PAM type: NNNNGHTT; PAM sequence: CTTAGCTT
ataggcccaagtgtgcaaag

SEQ ID NO: 11933 - DNA, 20 bp, Artificial Sequence
  Description of Artificial Sequence: Synthetic oligonucleotide
  Target: ATXN2; (-) strand; PAM type: NNNNGHTT; PAM sequence: CAAAGCTT
tcatcataggcccaagtgtg

SEQ ID NO: 11934 - DNA, 20 bp, Artificial Sequence
  Description of Artificial Sequence: Synthetic oligonucleotide
  Target: ATXN2; (-) strand; PAM type: NNNNGHTT; PAM sequence: TCAGGCTT
tctaactgccagactgagaa

SEQ ID NO: 11935 - DNA, 20 bp, Artificial Sequence
  Description of Artificial Sequence: Synthetic oligonucleotide
  Target: ATXN2; (-) strand; PAM type: NNNNGHTT; PAM sequence: AGAAGTTT
tgactttagtatgtatgctc

SEQ ID NO: 11936 - DNA, 20 bp, Artificial Sequence
  Description of Artificial Sequence: Synthetic oligonucleotide
  Target: ATXN2; (-) strand; PAM type: NNNNGHTT; PAM sequence: TTATGTTT
tttcctatgagcttcttgaa

SEQ ID NO: 11937 - DNA, 20 bp, Artificial Sequence
  Description of Artificial Sequence: Synthetic oligonucleotide
  Target: ATXN2; (-) strand; PAM type: NNNNGHTT; PAM sequence: ATGAGCTT
tgtgatgaggttattttcct

SEQ ID NO: 11938 - DNA, 20 bp, Artificial Sequence
  Description of Artificial Sequence: Synthetic oligonucleotide
  Target: ATXN2; (-) strand; PAM type: NNNNGHTT; PAM sequence: TAAGGTTT
gcttgggactttttaatttc

SEQ ID NO: 11939 - DNA, 20 bp, Artificial Sequence
  Description of Artificial Sequence: Synthetic oligonucleotide
  Target: ATXN2; (-) strand; PAM type: NNNNGHTT; PAM sequence: ATTTGCTT
agttcataaggcaaattcct

SEQ ID NO: 11940 - DNA, 20 bp, Artificial Sequence
  Description of Artificial Sequence: Synthetic oligonucleotide
  Target: ATXN2; (-) strand; PAM type: NNNNGHTT; PAM sequence: AGGTGATT
taagatacatgttgataata

SEQ ID NO: 11941 - DNA, 20 bp, Artificial Sequence
  Description of Artificial Sequence: Synthetic oligonucleotide
  Target: ATXN2; (-) strand; PAM type: NNNNGHTT; PAM sequence: TCCAGCTT
cagagatcgcgccactgcac

SEQ ID NO: 11942 - DNA, 20 bp, Artificial Sequence
  Description of Artificial Sequence: Synthetic oligonucleotide
  Target: ATXN2; (-) strand; PAM type: NNNNGHTT; PAM sequence: CGGAGCTT
aatggcgtgaacccgggagg

SEQ ID NO: 11943 - DNA, 20 bp, Artificial Sequence
  Description of Artificial Sequence: Synthetic oligonucleotide
  Target: ATXN2; (-) strand; PAM type: NNNNGHTT; PAM sequence: CCCAGCTT
tggtggtgggcgcctgtagt

SEQ ID NO: 11944 - DNA, 20 bp, Artificial Sequence
  Description of Artificial Sequence: Synthetic oligonucleotide
  Target: ATXN2; (-) strand; PAM type: NNNNGHTT; PAM sequence: AGGAGATT
ggcgggtggatcacgaggtc

SEQ ID NO: 11945 - DNA, 20 bp, Artificial Sequence
  Description of Artificial Sequence: Synthetic oligonucleotide
  Target: ATXN2; (-) strand; PAM type: NNNNGHTT; PAM sequence: GGTGGTTT
tacagctgtgcccctggggt

SEQ ID NO: 11946 - DNA, 20 bp, Artificial Sequence
  Description of Artificial Sequence: Synthetic oligonucleotide
  Target: ATXN2; (-) strand; PAM type: NNNNGHTT; PAM sequence: GAGTGCTT
gcttctttatcctagtatct

SEQ ID NO: 11947 - DNA, 20 bp, Artificial Sequence
  Description of Artificial Sequence: Synthetic oligonucleotide
  Target: ATXN2; (-) strand; PAM type: NNNNGHTT; PAM sequence: AGTGGCTT
caactcagaggtctgcatgg

SEQ ID NO: 11948 - DNA, 20 bp, Artificial Sequence
  Description of Artificial Sequence: Synthetic oligonucleotide
  Target: ATXN2; (-) strand; PAM type: NNNNGHTT; PAM sequence: TTTAGTTT
catgctcctttttctttcac

SEQ ID NO: 11949 - DNA, 20 bp, Artificial Sequence
  Description of Artificial Sequence: Synthetic oligonucleotide
  Target: ATXN2; (-) strand; PAM type: NNNNGHTT; PAM sequence: GATGGTTT
cttattttttcaagacaatg

SEQ ID NO: 11950 - DNA, 20 bp, Artificial Sequence
  Description of Artificial Sequence: Synthetic oligonucleotide
  Target: ATXN2; (-) strand; PAM type: NNNNGHTT; PAM sequence: ATTTGATT
ttaagagtaaatgcaaacta

SEQ ID NO: 11951 - DNA, 20 bp, Artificial Sequence
  Description of Artificial Sequence: Synthetic oligonucleotide
  Target: ATXN2; (-) strand; PAM type: NNNNGHTT; PAM sequence: AGTAGTTT
acctaaaatgcacttgtttg

SEQ ID NO: 11952 - DNA, 20 bp, Artificial Sequence
  Description of Artificial Sequence: Synthetic oligonucleotide
  Target: ATXN2; (-) strand; PAM type: NNNNGHTT; PAM sequence: ACTTGTTT
agagtgtgcacctaaaatgc

SEQ ID NO: 11953 - DNA, 20 bp, Artificial Sequence
  Description of Artificial Sequence: Synthetic oligonucleotide
  Target: ATXN2; (-) strand; PAM type: NNNNGHTT; PAM sequence: CTGTGATT
actgagtggcagaagggctc

SEQ ID NO: 11954 - DNA, 20 bp, Artificial Sequence
  Description of Artificial Sequence: Synthetic oligonucleotide
  Target: ATXN2; (-) strand; PAM type: NNNNGHTT; PAM sequence: TAGGGCTT
aaagatgggagatcctccat

SEQ ID NO: 11955 - DNA, 20 bp, Artificial Sequence
  Description of Artificial Sequence: Synthetic oligonucleotide
  Target: ATXN2; (-) strand; PAM type: NNNNGHTT; PAM sequence: GGGAGTTT
aagggctggggcactcagaa

SEQ ID NO: 11956 - DNA, 20 bp, Artificial Sequence
  Description of Artificial Sequence: Synthetic oligonucleotide
  Target: ATXN2; (-) strand; PAM type: NNNNGHTT; PAM sequence: TTTTGATT
gctttcagttcttatcttta

SEQ ID NO: 11957 - DNA, 20 bp, Artificial Sequence
  Description of Artificial Sequence: Synthetic oligonucleotide
  Target: ATXN2; (-) strand; PAM type: NNNNGHTT; PAM sequence: ACTGGCTT
cacgctgagattcacaaaga

SEQ ID NO: 11958 - DNA, 20 bp, Artificial Sequence
  Description of Artificial Sequence: Synthetic oligonucleotide
  Target: ATXN2; (-) strand; PAM type: NNNNGHTT; PAM sequence: CTGAGATT
gtaccaaggtttggcccacg

SEQ ID NO: 11959 - DNA, 20 bp, Artificial Sequence
  Description of Artificial Sequence: Synthetic oligonucleotide
  Target: ATXN2; (-) strand; PAM type: NNNNGHTT; PAM sequence: CAAGGTTT
tgaagaaatggtttttgtac

SEQ ID NO: 11960 - DNA, 20 bp, Artificial Sequence
  Description of Artificial Sequence: Synthetic oligonucleotide
  Target: ATXN2; (-) strand; PAM type: NNNNGHTT; PAM sequence: AATGGTTT
aaaactgaaagacatgaaga

SEQ ID NO: 11961 - DNA, 20 bp, Artificial Sequence
  Description of Artificial Sequence: Synthetic oligonucleotide
  Target: ATXN2; (-) strand; PAM type: NNNNGHTT; PAM sequence: AATTGCTT
tcgggaggctgaggcaggag

SEQ ID NO: 11962 - DNA, 20 bp, Artificial Sequence
  Description of Artificial Sequence: Synthetic oligonucleotide
  Target: ATXN2; (-) strand; PAM type: NNNNGHTT; PAM sequence: AGGAGTTT
tgggcggatcatttgaggtc

SEQ ID NO: 11963 - DNA, 20 bp, Artificial Sequence
  Description of Artificial Sequence: Synthetic oligonucleotide
  Target: ATXN2; (-) strand; PAM type: NNNNGHTT; PAM sequence: TACTGTTT
tctgcttctgattctcaact

SEQ ID NO: 11964 - DNA, 20 bp, Artificial Sequence
  Description of Artificial Sequence: Synthetic oligonucleotide
  Target: ATXN2; (-) strand; PAM type: NNNNGHTT; PAM sequence: TTCTGATT
gtgaacacatcctactctgc

SEQ ID NO: 11965 - DNA, 20 bp, Artificial Sequence
  Description of Artificial Sequence: Synthetic oligonucleotide
  Target: ATXN2; (-) strand; PAM type: NNNNGHTT; PAM sequence: CTCTGCTT
gaagcagtgaacacatccta

SEQ ID NO: 11966 - DNA, 20 bp, Artificial Sequence
  Description of Artificial Sequence: Synthetic oligonucleotide
  Target: ATXN2; (-) strand; PAM type: NNNNGHTT; PAM sequence: GTTAGTTT
cagctcattgcctcgtggag

SEQ ID NO: 11967 - DNA, 20 bp, Artificial Sequence
  Description of Artificial Sequence: Synthetic oligonucleotide
  Target: ATXN2; (-) strand; PAM type: NNNNGHTT; PAM sequence: ATTTGTTT
ttatcttgagggattttagg

SEQ ID NO: 11968 - DNA, 20 bp, Artificial Sequence
  Description of Artificial Sequence: Synthetic oligonucleotide
  Target: ATXN2; (-) strand; PAM type: NNNNGHTT; PAM sequence: TTAGGATT
gcttattatcttgagggatt

SEQ ID NO: 11969 - DNA, 20 bp, Artificial Sequence
  Description of Artificial Sequence: Synthetic oligonucleotide
  Target: ATXN2; (-) strand; PAM type: NNNNGHTT; PAM sequence: GAGGGATT
gtgtatgggcttattatctt

SEQ ID NO: 11970 - DNA, 20 bp, Artificial Sequence
  Description of Artificial Sequence: Synthetic oligonucleotide
  Target: ATXN2; (-) strand; PAM type: NNNNGHTT; PAM sequence: ATGGGCTT
ttttggaatcatttctgtgt

SEQ ID NO: 11971 - DNA, 20 bp, Artificial Sequence
  Description of Artificial Sequence: Synthetic oligonucleotide
  Target: ATXN2; (-) strand; PAM type: NNNNGHTT; PAM sequence: CTGTGTTT
ccaatcagtcctgcatatgt

SEQ ID NO: 11972 - DNA, 20 bp, Artificial Sequence
  Description of Artificial Sequence: Synthetic oligonucleotide
  Target: ATXN2; (-) strand; PAM type: NNNNGHTT; PAM sequence: GCTTGCTT
gtgcctcttcccaaagctgt

SEQ ID NO: 11973 - DNA, 20 bp, Artificial Sequence
  Description of Artificial Sequence: Synthetic oligonucleotide
  Target: ATXN2; (-) strand; PAM type: NNNNGHTT; PAM sequence: CTGTGCTT
tagggtgcctcttcccaaag

SEQ ID NO: 11974 - DNA, 20 bp, Artificial Sequence
  Description of Artificial Sequence: Synthetic oligonucleotide
  Target: ATXN2; (-) strand; PAM type: NNNNGHTT; PAM sequence: CTAGGATT
ggcccttagccctacaacac

SEQ ID NO: 11975 - DNA, 20 bp, Artificial Sequence
  Description of Artificial Sequence: Synthetic oligonucleotide
  Target: ATXN2; (-) strand; PAM type: NNNNGHTT; PAM sequence: GATAGCTT
tgccctttcccctgctaaga

SEQ ID NO: 11976 - DNA, 20 bp, Artificial Sequence
  Description of Artificial Sequence: Synthetic oligonucleotide
  Target: ATXN2; (-) strand; PAM type: NNNNGHTT; PAM sequence: CACAGTTT
acattcagagactatgttgc

SEQ ID NO: 11977 - DNA, 20 bp, Artificial Sequence
  Description of Artificial Sequence: Synthetic oligonucleotide
  Target: ATXN2; (-) strand; PAM type: NNNNGHTT; PAM sequence: CATCGTTT
tgtgaagctcaggaaggctt

SEQ ID NO: 11978 - DNA, 20 bp, Artificial Sequence
  Description of Artificial Sequence: Synthetic oligonucleotide
  Target: ATXN2; (-) strand; PAM type: NNNNGHTT; PAM sequence: GAAGGCTT
tatgggactgtgaagctcag

SEQ ID NO: 11979 - DNA, 20 bp, Artificial Sequence
  Description of Artificial Sequence: Synthetic oligonucleotide
  Target: ATXN2; (-) strand; PAM type: NNNNGHTT; PAM sequence: GTAAGATT
aatacatttttaaaatgaac

SEQ ID NO: 11980 - DNA, 20 bp, Artificial Sequence
  Description of Artificial Sequence: Synthetic oligonucleotide
  Target: ATXN2; (-) strand; PAM type: NNNNGHTT; PAM sequence: AATCGCTT
tcggcaggctgaggcaggag

SEQ ID NO: 11981 - DNA, 20 bp, Artificial Sequence
  Description of Artificial Sequence: Synthetic oligonucleotide
  Target: ATXN2; (-) strand; PAM type: NNNNGHTT; PAM sequence: TGATGCTT
caaaaatcagccaggcatgg

SEQ ID NO: 11982 - DNA, 20 bp, Artificial Sequence
  Description of Artificial Sequence: Synthetic oligonucleotide
  Target: ATXN2; (-) strand; PAM type: NNNNGHTT; PAM sequence: AGGAGTTT
tggacggatcacttgaggcc

SEQ ID NO: 11983 - DNA, 20 bp, Artificial Sequence
  Description of Artificial Sequence: Synthetic oligonucleotide
  Target: ATXN2; (-) strand; PAM type: NNNNGHTT; PAM sequence: TGTGGCTT
gtattagctacttagctaca

SEQ ID NO: 11984 - DNA, 20 bp, Artificial Sequence
  Description of Artificial Sequence: Synthetic oligonucleotide
  Target: ATXN2; (-) strand; PAM type: NNNNGHTT; PAM sequence: AATCGCTT
tcaggaggctgacacaggag

SEQ ID NO: 11985 - DNA, 20 bp, Artificial Sequence
  Description of Artificial Sequence: Synthetic oligonucleotide
  Target: ATXN2; (-) strand; PAM type: NNNNGHTT; PAM sequence: AATGGTTT
tggcggtaggggttagtgct

SEQ ID NO: 11986 - DNA, 20 bp, Artificial Sequence
  Description of Artificial Sequence: Synthetic oligonucleotide
  Target: ATXN2; (-) strand; PAM type: NNNNGHTT; PAM sequence: TTTAGATT
attgcttttccttagacaga

SEQ ID NO: 11987 - DNA, 20 bp, Artificial Sequence
  Description of Artificial Sequence: Synthetic oligonucleotide
  Target: ATXN2; (-) strand; PAM type: NNNNGHTT; PAM sequence: GACAGATT
ttgggaattgcttttcctta

SEQ ID NO: 11988 - DNA, 20 bp, Artificial Sequence
  Description of Artificial Sequence: Synthetic oligonucleotide
  Target: ATXN2; (-) strand; PAM type: NNNNGHTT; PAM sequence: AATTGCTT
aacagaatttgggatttggg

SEQ ID NO: 11989 - DNA, 20 bp, Artificial Sequence
  Description of Artificial Sequence: Synthetic oligonucleotide
  Target: ATXN2; (-) strand; PAM type: NNNNGHTT; PAM sequence: TTGGGATT
tgaacctccatgaacagaat

SEQ ID NO: 11990 - DNA, 20 bp, Artificial Sequence
  Description of Artificial Sequence: Synthetic oligonucleotide
  Target: ATXN2; (-) strand; PAM type: NNNNGHTT; PAM sequence: CTGAGATT
caaaaaaaaaacaaaaacct

SEQ ID NO: 11991 - DNA, 20 bp, Artificial Sequence
  Description of Artificial Sequence: Synthetic oligonucleotide
  Target: ATXN2; (-) strand; PAM type: NNNNGHTT; PAM sequence: CTTTGCTT
actttttaatattcttaata

SEQ ID NO: 11992 - DNA, 20 bp, Artificial Sequence
  Description of Artificial Sequence: Synthetic oligonucleotide
  Target: ATXN2; (-) strand; PAM type: NNNNGHTT; PAM sequence: ATGAGATT
gttgatgaataacttaaatt

SEQ ID NO: 11993 - DNA, 20 bp, Artificial Sequence
  Description of Artificial Sequence: Synthetic oligonucleotide
  Target: ATXN2; (-) strand; PAM type: NNNNGHTT; PAM sequence: TTAAGATT
acttttctcttcaaatgatt

SEQ ID NO: 11994 - DNA, 20 bp, Artificial Sequence
  Description of Artificial Sequence: Synthetic oligonucleotide
  Target: ATXN2; (-) strand; PAM type: NNNNGHTT; PAM sequence: AAATGATT
tcatctttacttttctcttc

SEQ ID NO: 11995 - DNA, 20 bp, Artificial Sequence
  Description of Artificial Sequence: Synthetic oligonucleotide
  Target: ATXN2; (-) strand; PAM type: NNNNGHTT; PAM sequence: TATAGATT
tgctatgcatgcaaattagc

SEQ ID NO: 11996 - DNA, 20 bp, Artificial Sequence
  Description of Artificial Sequence: Synthetic oligonucleotide
  Target: ATXN2; (-) strand; PAM type: NNNNGHTT; PAM sequence: CTCAGCTT
acaaagcctatgtacattca

SEQ ID NO: 11997 - DNA, 20 bp, Artificial Sequence
  Description of Artificial Sequence: Synthetic oligonucleotide
  Target: ATXN2; (-) strand; PAM type: NNNNGHTT; PAM sequence: TTTTGTTT
aggtagggaaaggattttgt

SEQ ID NO: 11998 - DNA, 20 bp, Artificial Sequence
  Description of Artificial Sequence: Synthetic oligonucleotide
  Target: ATXN2; (-) strand; PAM type: NNNNGHTT; PAM sequence: TTTTGTTT
gtatttaggtagggaaagga

SEQ ID NO: 11999 - DNA, 20 bp, Artificial Sequence
  Description of Artificial Sequence: Synthetic oligonucleotide
  Target: ATXN2; (-) strand; PAM type: NNNNGHTT; PAM sequence: AAAGGATT
ttaccggtatttaggtaggg

SEQ ID NO: 12000 - DNA, 20 bp, Artificial Sequence
  Description of Artificial Sequence: Synthetic oligonucleotide
  Target: ATXN2; (-) strand; PAM type: NNNNGHTT; PAM sequence: GCAAGTTT
ttgtttttaatcaatgcctt

SEQ ID NO: 12001 - DNA, 20 bp, Artificial Sequence
  Description of Artificial Sequence: Synthetic oligonucleotide
  Target: ATXN2; (-) strand; PAM type: NNNNGHTT; PAM sequence: TCTTGTTT
tcctttgtggtttttgttcg

SEQ ID NO: 12002 - DNA, 20 bp, Artificial Sequence
  Description of Artificial Sequence: Synthetic oligonucleotide
  Target: ATXN2; (-) strand; PAM type: NNNNGHTT; PAM sequence: TGTGGTTT
tacatattttacacatcctt

SEQ ID NO: 12003 - DNA, 20 bp, Artificial Sequence
  Description of Artificial Sequence: Synthetic oligonucleotide
  Target: ATXN2; (-) strand; PAM type: NNNNGHTT; PAM sequence: TTTTGTTT
tctaattaactctttttaaa

SEQ ID NO: 12004 - DNA, 20 bp, Artificial Sequence
  Description of Artificial Sequence: Synthetic oligonucleotide
  Target: ATXN2; (-) strand; PAM type: NNNNGHTT; PAM sequence: TCCTGATT
aattcaaggaggaaaagaat

SEQ ID NO: 12005 - DNA, 20 bp, Artificial Sequence
  Description of Artificial Sequence: Synthetic oligonucleotide
  Target: ATXN2; (-) strand; PAM type: NNNNGHTT; PAM sequence: CTGGGATT
cgcctcggcctcccaaaatg

SEQ ID NO: 12006 - DNA, 20 bp, Artificial Sequence
  Description of Artificial Sequence: Synthetic oligonucleotide
  Target: ATXN2; (-) strand; PAM type: NNNNGHTT; PAM sequence: CAGGGTTT
ttttgtatttttagtagaga

SEQ ID NO: 12007 - DNA, 20 bp, Artificial Sequence
  Description of Artificial Sequence: Synthetic oligonucleotide
  Target: ATXN2; (-) strand; PAM type: NNNNGHTT; PAM sequence: CTGTGATT
ttccccactctccctagtag

SEQ ID NO: 12008 - DNA, 20 bp, Artificial Sequence
  Description of Artificial Sequence: Synthetic oligonucleotide
  Target: ATXN2; (-) strand; PAM type: NNNNGHTT; PAM sequence: CGGAGTTT
gtttattttattttttgaga

SEQ ID NO: 12009 - DNA, 20 bp, Artificial Sequence
  Description of Artificial Sequence: Synthetic oligonucleotide
  Target: ATXN2; (-) strand; PAM type: NNNNGHTT; PAM sequence: ATTTGTTT
ttattattatttatttattt

SEQ ID NO: 12010 - DNA, 20 bp, Artificial Sequence
  Description of Artificial Sequence: Synthetic oligonucleotide
  Target: ATXN2; (-) strand; PAM type: NNNNGHTT; PAM sequence: ATAAGTTT
tactagtattgatttaaagt

SEQ ID NO: 12011 - DNA, 20 bp, Artificial Sequence
  Description of Artificial Sequence: Synthetic oligonucleotide
  Target: ATXN2; (-) strand; PAM type: NNNNGHTT; PAM sequence: TATTGATT
aactgtatttttgttactag

SEQ ID NO: 12012 - DNA, 20 bp, Artificial Sequence
  Description of Artificial Sequence: Synthetic oligonucleotide
  Target: ATXN2; (-) strand; PAM type: NNNNGHTT; PAM sequence: CCCTGCTT
gcttttaaattttcttccta

SEQ ID NO: 12013 - DNA, 20 bp, Artificial Sequence
  Description of Artificial Sequence: Synthetic oligonucleotide
  Target: ATXN2; (-) strand; PAM type: NNNNGHTT; PAM sequence: CTTGGCTT
tcttccaagctatttttttc

SEQ ID NO: 12014 - DNA, 20 bp, Artificial Sequence
  Description of Artificial Sequence: Synthetic oligonucleotide
  Target: ATXN2; (-) strand; PAM type: NNNNGHTT; PAM sequence: CAGGGTTT
ttttgtatttttagtagaga

SEQ ID NO: 12015 - DNA, 20 bp, Artificial Sequence
  Description of Artificial Sequence: Synthetic oligonucleotide
  Target: ATXN2; (-) strand; PAM type: NNNNGHTT; PAM sequence: CTGGGATT
tgcctcagcttccagagtag

SEQ ID NO: 12016 - DNA, 20 bp, Artificial Sequence
  Description of Artificial Sequence: Synthetic oligonucleotide
  Target: ATXN2; (-) strand; PAM type: NNNNGHTT; PAM sequence: CTCAGCTT
aggttcaagcaattctctgc

SEQ ID NO: 12017 - DNA, 20 bp, Artificial Sequence
  Description of Artificial Sequence: Synthetic oligonucleotide
  Target: ATXN2; (-) strand; PAM type: NNNNGHTT; PAM sequence: CTGTGTTT
tctccttttccctgattctc

SEQ ID NO: 12018 - DNA, 20 bp, Artificial Sequence
  Description of Artificial Sequence: Synthetic oligonucleotide
  Target: ATXN2; (-) strand; PAM type: NNNNGHTT; PAM sequence: CCCTGATT
tcccactccactctcctttt

SEQ ID NO: 12019 - DNA, 20 bp, Artificial Sequence
  Description of Artificial Sequence: Synthetic oligonucleotide
  Target: ATXN2; (-) strand; PAM type: NNNNGHTT; PAM sequence: AGAAGTTT
aagactaaagttttataaat

SEQ ID NO: 12020 - DNA, 20 bp, Artificial Sequence
  Description of Artificial Sequence: Synthetic oligonucleotide
  Target: ATXN2; (-) strand; PAM type: NNNNGHTT; PAM sequence: TAAAGTTT
ctaaaagattttatgaagac

SEQ ID NO: 12021 - DNA, 20 bp, Artificial Sequence
  Description of Artificial Sequence: Synthetic oligonucleotide
  Target: ATXN2; (-) strand; PAM type: NNNNGHTT; PAM sequence: AAAAGATT
tctttgattatctttaatct

SEQ ID NO: 12022 - DNA, 20 bp, Artificial Sequence
  Description of Artificial Sequence: Synthetic oligonucleotide
  Target: ATXN2; (-) strand; PAM type: NNNNGHTT; PAM sequence: CTTTGATT
tggaccaaagaagcatatgt

SEQ ID NO: 12023 - DNA, 20 bp, Artificial Sequence
  Description of Artificial Sequence: Synthetic oligonucleotide
  Target: ATXN2; (-) strand; PAM type: NNNNGHTT; PAM sequence: ATATGTTT
ttaaggatttttgactgatc

SEQ ID NO: 12024 - DNA, 20 bp, Artificial Sequence
  Description of Artificial Sequence: Synthetic oligonucleotide
  Target: ATXN2; (-) strand; PAM type: NNNNGHTT; PAM sequence: TAAGGATT
tggaatgtggttagtgttat

SEQ ID NO: 12025 - DNA, 20 bp, Artificial Sequence
  Description of Artificial Sequence: Synthetic oligonucleotide
  Target: ATXN2; (-) strand; PAM type: NNNNGHTT; PAM sequence: ATTTGCTT
cacacagctttctgtactta

SEQ ID NO: 12026 - DNA, 20 bp, Artificial Sequence
  Description of Artificial Sequence: Synthetic oligonucleotide
  Target: ATXN2; (-) strand; PAM type: NNNNGHTT; PAM sequence: CACAGCTT
acctagttacaaattaaaca

SEQ ID NO: 12027 - DNA, 20 bp, Artificial Sequence
  Description of Artificial Sequence: Synthetic oligonucleotide
  Target: ATXN2; (-) strand; PAM type: NNNNGHTT; PAM sequence: ATAAGTTT
ggaagattttgttttgtttt

SEQ ID NO: 12028 - DNA, 20 bp, Artificial Sequence
  Description of Artificial Sequence: Synthetic oligonucleotide
  Target: ATXN2; (-) strand; PAM type: NNNNGHTT; PAM sequence: TTTTGTTT
ttacaagttggaagattttg

SEQ ID NO: 12029 - DNA, 20 bp, Artificial Sequence
  Description of Artificial Sequence: Synthetic oligonucleotide
  Target: ATXN2; (-) strand; PAM type: NNNNGHTT; PAM sequence: TTTTGTTT
cagatttacaagttggaaga

SEQ ID NO: 12030 - DNA, 20 bp, Artificial Sequence
  Description of Artificial Sequence: Synthetic oligonucleotide
  Target: ATXN2; (-) strand; PAM type: NNNNGHTT; PAM sequence: GGAAGATT
taacatcagatttacaagtt

SEQ ID NO: 12031 - DNA, 20 bp, Artificial Sequence
  Description of Artificial Sequence: Synthetic oligonucleotide
  Target: ATXN2; (-) strand; PAM type: NNNNGHTT; PAM sequence: ATCAGATT
tccctttttctgaatttaac

SEQ ID NO: 12032 - DNA, 20 bp, Artificial Sequence
  Description of Artificial Sequence: Synthetic oligonucleotide
  Target: ATXN2; (-) strand; PAM type: NNNNGHTT; PAM sequence: TAGAGTTT
gttgccttttattccccttt

SEQ ID NO: 12033 - DNA, 20 bp, Artificial Sequence
  Description of Artificial Sequence: Synthetic oligonucleotide
  Target: ATXN2; (-) strand; PAM type: NNNNGHTT; PAM sequence: GATGGTTT
cctgttctaagccattttat

SEQ ID NO: 12034 - DNA, 20 bp, Artificial Sequence
  Description of Artificial Sequence: Synthetic oligonucleotide
  Target: ATXN2; (-) strand; PAM type: NNNNGHTT; PAM sequence: TGCTGCTT
gttgggctgctaatttaatc

SEQ ID NO: 12035 - DNA, 20 bp, Artificial Sequence
  Description of Artificial Sequence: Synthetic oligonucleotide
  Target: ATXN2; (-) strand; PAM type: NNNNGHTT; PAM sequence: TGTTGTTT
tgtctctgttagtagtttgg

SEQ ID NO: 12036 - DNA, 20 bp, Artificial Sequence
  Description of Artificial Sequence: Synthetic oligonucleotide
  Target: ATXN2; (-) strand; PAM type: NNNNGHTT; PAM sequence: AGTAGTTT
accatcttactgtctctgtt

SEQ ID NO: 12037 - DNA, 20 bp, Artificial Sequence
  Description of Artificial Sequence: Synthetic oligonucleotide
  Target: ATXN2; (-) strand; PAM type: NNNNGHTT; PAM sequence: AGGTGATT
tgtagtgtgtaaaagatagt

SEQ ID NO: 12038 - DNA, 20 bp, Artificial Sequence
  Description of Artificial Sequence: Synthetic oligonucleotide
  Target: ATXN2; (-) strand; PAM type: NNNNGHTT; PAM sequence: CTGTGATT
tattaaaggggaaactatgt

SEQ ID NO: 12039 - DNA, 20 bp, Artificial Sequence
  Description of Artificial Sequence: Synthetic oligonucleotide
  Target: ATXN2; (-) strand; PAM type: NNNNGHTT; PAM sequence: TAAGGATT
tgttgtgttctagaggatat

SEQ ID NO: 12040 - DNA, 20 bp, Artificial Sequence
  Description of Artificial Sequence: Synthetic oligonucleotide
  Target: ATXN2; (-) strand; PAM type: NNNNGHTT; PAM sequence: CTGAGATT
gaggtggaggttgcagtgag

SEQ ID NO: 12041 - DNA, 20 bp, Artificial Sequence
  Description of Artificial Sequence: Synthetic oligonucleotide
  Target: ATXN2; (-) strand; PAM type: NNNNGHTT; PAM sequence: GATTGCTT
ttgggaggccgaggtgggtg

SEQ ID NO: 12042 - DNA, 20 bp, Artificial Sequence
  Description of Artificial Sequence: Synthetic oligonucleotide
  Target: ATXN2; (-) strand; PAM type: NNNNGHTT; PAM sequence: GGTGGATT
tactttgggaggccgaggtg

SEQ ID NO: 12043 - DNA, 20 bp, Artificial Sequence
  Description of Artificial Sequence: Synthetic oligonucleotide
  Target: ATXN2; (-) strand; PAM type: NNNNGHTT; PAM sequence: CAGAGCTT
cttcatggagaaagtctggg

SEQ ID NO: 12044 - DNA, 20 bp, Artificial Sequence
  Description of Artificial Sequence: Synthetic oligonucleotide
  Target: ATXN2; (-) strand; PAM type: NNNNGHTT; PAM sequence: TTGAGCTT
agcagacccctcaggatatc

SEQ ID NO: 12045 - DNA, 20 bp, Artificial Sequence
  Description of Artificial Sequence: Synthetic oligonucleotide
  Target: ATXN2; (-) strand; PAM type: NNNNGHTT; PAM sequence: AATTGCTT
tagggaggctgagacaggag

SEQ ID NO: 12046 - DNA, 20 bp, Artificial Sequence
  Description of Artificial Sequence: Synthetic oligonucleotide
  Target: ATXN2; (-) strand; PAM type: NNNNGHTT; PAM sequence: CAGTGCTT
gtggctcacacctgtaatcc

SEQ ID NO: 12047 - DNA, 20 bp, Artificial Sequence
  Description of Artificial Sequence: Synthetic oligonucleotide
  Target: ATXN2; (-) strand; PAM type: NNNNGHTT; PAM sequence: AAAGGTTT
tttcagtcctgtgcatggct

SEQ ID NO: 12048 - DNA, 20 bp, Artificial Sequence
  Description of Artificial Sequence: Synthetic oligonucleotide
  Target: ATXN2; (-) strand; PAM type: NNNNGHTT; PAM sequence: ATAGGATT
ctaccaggatttttaattga

SEQ ID NO: 12049 - DNA, 20 bp, Artificial Sequence
  Description of Artificial Sequence: Synthetic oligonucleotide
  Target: ATXN2; (-) strand; PAM type: NNNNGHTT; PAM sequence: CCAGGATT
taagatgaaatttatgccta

SEQ ID NO: 12050 - DNA, 20 bp, Artificial Sequence
  Description of Artificial Sequence: Synthetic oligonucleotide
  Target: ATXN2; (-) strand; PAM type: NNNNGHTT; PAM sequence: AAATGTTT
acaagcttggtataaactta

SEQ ID NO: 12051 - DNA, 20 bp, Artificial Sequence
  Description of Artificial Sequence: Synthetic oligonucleotide
  Target: ATXN2; (-) strand; PAM type: NNNNGHTT; PAM sequence: ACAAGCTT
acacacacacaccccaagcc

SEQ ID NO: 12052 - DNA, 20 bp, Artificial Sequence
  Description of Artificial Sequence: Synthetic oligonucleotide
  Target: ATXN2; (-) strand; PAM type: NNNNGHTT; PAM sequence: AAATGTTT
acaagcttggtataaattta

SEQ ID NO: 12053 - DNA, 20 bp, Artificial Sequence
  Description of Artificial Sequence: Synthetic oligonucleotide
  Target: ATXN2; (-) strand; PAM type: NNNNGHTT; PAM sequence: ACAAGCTT
caaacacacacacccaagcc

SEQ ID NO: 12054 - DNA, 20 bp, Artificial Sequence
  Description of Artificial Sequence: Synthetic oligonucleotide
  Target: ATXN2; (-) strand; PAM type: NNNNGHTT; PAM sequence: AACAGCTT
cttgttagagaaacttccta

SEQ ID NO: 12055 - DNA, 20 bp, Artificial Sequence
  Description of Artificial Sequence: Synthetic oligonucleotide
  Target: ATXN2; (-) strand; PAM type: NNNNGHTT; PAM sequence: AGTTGTTT
ctggagttaatgaaaaatgg

SEQ ID NO: 12056 - DNA, 20 bp, Artificial Sequence
  Description of Artificial Sequence: Synthetic oligonucleotide
  Target: ATXN2; (-) strand; PAM type: NNNNGHTT; PAM sequence: TTCAGTTT
gtacttatatatataaataa

SEQ ID NO: 12057 - DNA, 20 bp, Artificial Sequence
  Description of Artificial Sequence: Synthetic oligonucleotide
  Target: ATXN2; (-) strand; PAM type: NNNNGHTT; PAM sequence: TTGGGTTT
ctttctactttgccagtgag

SEQ ID NO: 12058 - DNA, 20 bp, Artificial Sequence
  Description of Artificial Sequence: Synthetic oligonucleotide
  Target: ATXN2; (-) strand; PAM type: NNNNGHTT; PAM sequence: AAGTGCTT
aaattctgtagcagtgttta

SEQ ID NO: 12059 - DNA, 20 bp, Artificial Sequence
  Description of Artificial Sequence: Synthetic oligonucleotide
  Target: ATXN2; (-) strand; PAM type: NNNNGHTT; PAM sequence: CAGTGTTT
tttcttttaaaattctgtag

SEQ ID NO: 12060 - DNA, 20 bp, Artificial Sequence
  Description of Artificial Sequence: Synthetic oligonucleotide
  Target: ATXN2; (-) strand; PAM type: NNNNGHTT; PAM sequence: TCCGGTTT
agtacagaagaacagtgtct

SEQ ID NO: 12061 - DNA, 20 bp, Artificial Sequence
  Description of Artificial Sequence: Synthetic oligonucleotide
  Target: ATXN2; (-) strand; PAM type: NNNNGHTT; PAM sequence: TAATGATT
atgttggtgtttttattaga

SEQ ID NO: 12062 - DNA, 20 bp, Artificial Sequence
  Description of Artificial Sequence: Synthetic oligonucleotide
  Target: ATXN2; (-) strand; PAM type: NNNNGHTT; PAM sequence: TGGTGTTT
tgttcagtagaatgccatgt

SEQ ID NO: 12063 - DNA, 20 bp, Artificial Sequence
  Description of Artificial Sequence: Synthetic oligonucleotide
  Target: ATXN2; (-) strand; PAM type: NNNNGHTT; PAM sequence: ACATGATT
taaaatagttttattttggt

SEQ ID NO: 12064 - DNA, 20 bp, Artificial Sequence
  Description of Artificial Sequence: Synthetic oligonucleotide
  Target: ATXN2; (-) strand; PAM type: NNNNGHTT; PAM sequence: AATAGTTT
ctattgaattaaacttgtaa

SEQ ID NO: 12065 - DNA, 20 bp, Artificial Sequence
  Description of Artificial Sequence: Synthetic oligonucleotide
  Target: ATXN2; (-) strand; PAM type: NNNNGHTT; PAM sequence: TAATGTTT
gataatgacatttccattag

SEQ ID NO: 12066 - DNA, 20 bp, Artificial Sequence
  Description of Artificial Sequence: Synthetic oligonucleotide
  Target: ATXN2; (-) strand; PAM type: NNNNGHTT; PAM sequence: TCATGTTT
gttttaataagaaataatat

SEQ ID NO: 12067 - DNA, 20 bp, Artificial Sequence
  Description of Artificial Sequence: Synthetic oligonucleotide
  Target: ATXN2; (-) strand; PAM type: NNNNGHTT; PAM sequence: ACATGTTT
taccctacccctttatgtag

SEQ ID NO: 12068 - DNA, 20 bp, Artificial Sequence
  Description of Artificial Sequence: Synthetic oligonucleotide
  Target: ATXN2; (-) strand; PAM type: NNNNGHTT; PAM sequence: GGTAGTTT
tccttttttgatttgttttt

SEQ ID NO: 12069 - DNA, 20 bp, Artificial Sequence
  Description of Artificial Sequence: Synthetic oligonucleotide
  Target: ATXN2; (-) strand; PAM type: NNNNGHTT; PAM sequence: ATTTGTTT
agatccagaatccttttttg

SEQ ID NO: 12070 - DNA, 20 bp, Artificial Sequence
  Description of Artificial Sequence: Synthetic oligonucleotide
  Target: ATXN2; (-) strand; PAM type: NNNNGHTT; PAM sequence: TTTTGATT
gaattagatccagaatcctt

SEQ ID NO: 12071 - DNA, 20 bp, Artificial Sequence
  Description of Artificial Sequence: Synthetic oligonucleotide
  Target: ATXN2; (-) strand; PAM type: NNNNGHTT; PAM sequence: TGATGCTT
catctaattttgttttatgg

SEQ ID NO: 12072 - DNA, 20 bp, Artificial Sequence
  Description of Artificial Sequence: Synthetic oligonucleotide
  Target: ATXN2; (-) strand; PAM type: NNNNGHTT; PAM sequence: TTTTGTTT
tactcttctaatccatctaa

SEQ ID NO: 12073 - DNA, 20 bp, Artificial Sequence
  Description of Artificial Sequence: Synthetic oligonucleotide
  Target: ATXN2; (-) strand; PAM type: NNNNGHTT; PAM sequence: CTGGGATT
tgcctaggcctcccaaagtg

SEQ ID NO: 12074 - DNA, 20 bp, Artificial Sequence
  Description of Artificial Sequence: Synthetic oligonucleotide
  Target: ATXN2; (-) strand; PAM type: NNNNGHTT; PAM sequence: TTGTGATT
ctgatctcgaacttctgacc

SEQ ID NO: 12075 - DNA, 20 bp, Artificial Sequence
  Description of Artificial Sequence: Synthetic oligonucleotide
  Target: ATXN2; (-) strand; PAM type: NNNNGHTT; PAM sequence: CGGGGTTT
ttttgtatttttagtagaga

SEQ ID NO: 12076 - DNA, 20 bp, Artificial Sequence
  Description of Artificial Sequence: Synthetic oligonucleotide
  Target: ATXN2; (-) strand; PAM type: NNNNGHTT; PAM sequence: AGCGGTTT
acatctgcctcccaggttca

SEQ ID NO: 12077 - DNA, 20 bp, Artificial Sequence
  Description of Artificial Sequence: Synthetic oligonucleotide
  Target: ATXN2; (-) strand; PAM type: NNNNGHTT; PAM sequence: CTGGGATT
cacctcagcctcccaaagtg

SEQ ID NO: 12078 - DNA, 20 bp, Artificial Sequence
  Description of Artificial Sequence: Synthetic oligonucleotide
  Target: ATXN2; (-) strand; PAM type: NNNNGHTT; PAM sequence: CAGGGTTT
ttttgtgtttttagtagaga

SEQ ID NO: 12079 - DNA, 20 bp, Artificial Sequence
  Description of Artificial Sequence: Synthetic oligonucleotide
  Target: ATXN2; (-) strand; PAM type: NNNNGHTT; PAM sequence: TTGTGTTT
ccaccacacctggctaattt

SEQ ID NO: 12080 - DNA, 20 bp, Artificial Sequence
  Description of Artificial Sequence: Synthetic oligonucleotide
  Target: ATXN2; (-) strand; PAM type: NNNNGHTT; PAM sequence: CTGGGATT
tgcctcagcctcccaaagtg

SEQ ID NO: 12081 - DNA, 20 bp, Artificial Sequence
  Description of Artificial Sequence: Synthetic oligonucleotide
  Target: ATXN2; (-) strand; PAM type: NNNNGHTT; PAM sequence: TGGGGTTT
tgtattttgtttagtagaga

SEQ ID NO: 12082 - DNA, 20 bp, Artificial Sequence
  Description of Artificial Sequence: Synthetic oligonucleotide
  Target: ATXN2; (-) strand; PAM type: NNNNGHTT; PAM sequence: TTTTGTTT
tgcccggctaattttttgta

SEQ ID NO: 12083 - DNA, 20 bp, Artificial Sequence
  Description of Artificial Sequence: Synthetic oligonucleotide
  Target: ATXN2; (-) strand; PAM type: NNNNGHTT; PAM sequence: AAGGGCTT
ctctttctagctatcttaga

SEQ ID NO: 12084 - DNA, 20 bp, Artificial Sequence
  Description of Artificial Sequence: Synthetic oligonucleotide
  Target: ATXN2; (-) strand; PAM type: NNNNGHTT; PAM sequence: GTATGTTT
ttattgtttttaaattttta

SEQ ID NO: 12085 - DNA, 20 bp, Artificial Sequence
  Description of Artificial Sequence: Synthetic oligonucleotide
  Target: ATXN2; (-) strand; PAM type: NNNNGHTT; PAM sequence: TATTGTTT
ctgcaaaatgaaatcctgat

SEQ ID NO: 12086 - DNA, 20 bp, Artificial Sequence
  Description of Artificial Sequence: Synthetic oligonucleotide
  Target: ATXN2; (-) strand; PAM type: NNNNGHTT; PAM sequence: TCCTGATT
ctaatgactgcaaaatgaaa

SEQ ID NO: 12087 - DNA, 20 bp, Artificial Sequence
  Description of Artificial Sequence: Synthetic oligonucleotide
  Target: ATXN2; (-) strand; PAM type: NNNNGHTT; PAM sequence: CTAGGTTT
ctttttaagctacatcatat

SEQ ID NO: 12088 - DNA, 20 bp, Artificial Sequence
  Description of Artificial Sequence: Synthetic oligonucleotide
  Target: ATXN2; (-) strand; PAM type: NNNNGHTT; PAM sequence: TTGTGCTT
ccaaatactttgagtatgaa

SEQ ID NO: 12089 - DNA, 20 bp, Artificial Sequence
  Description of Artificial Sequence: Synthetic oligonucleotide
  Target: ATXN2; (-) strand; PAM type: NNNNGHTT; PAM sequence: CAGTGATT
catgttcttcattaaatctg

SEQ ID NO: 12090 - DNA, 20 bp, Artificial Sequence
  Description of Artificial Sequence: Synthetic oligonucleotide
  Target: ATXN2; (-) strand; PAM type: NNNNGHTT; PAM sequence: ATCTGCTT
ccatcataagccataattta

SEQ ID NO: 12091 - DNA, 20 bp, Artificial Sequence
  Description of Artificial Sequence: Synthetic oligonucleotide
  Target: ATXN2; (-) strand; PAM type: NNNNGHTT; PAM sequence: AATTGTTT
aaaaagaaaacataagaaag

SEQ ID NO: 12092 - DNA, 20 bp, Artificial Sequence
  Description of Artificial Sequence: Synthetic oligonucleotide
  Target: ATXN2; (-) strand; PAM type: NNNNGHTT; PAM sequence: GATCGCTT
ttggggaggctgaagtggag

SEQ ID NO: 12093 - DNA, 20 bp, Artificial Sequence
  Description of Artificial Sequence: Synthetic oligonucleotide
  Target: ATXN2; (-) strand; PAM type: NNNNGHTT; PAM sequence: TGGTGCTT
gttaatcaagattccctttg

SEQ ID NO: 12094 - DNA, 20 bp, Artificial Sequence
  Description of Artificial Sequence: Synthetic oligonucleotide
  Target: ATXN2; (-) strand; PAM type: NNNNGHTT; PAM sequence: TCAAGATT
ttgtgattgtcactagttaa

SEQ ID NO: 12095 - DNA, 20 bp, Artificial Sequence
  Description of Artificial Sequence: Synthetic oligonucleotide
  Target: ATXN2; (-) strand; PAM type: NNNNGHTT; PAM sequence: TTGTGATT
ggagcaaggctgtggacttg

SEQ ID NO: 12096 - DNA, 20 bp, Artificial Sequence
  Description of Artificial Sequence: Synthetic oligonucleotide
  Target: ATXN2; (-) strand; PAM type: NNNNGHTT; PAM sequence: TGCAGTTT
ccaaatctgaactactctcc

SEQ ID NO: 12097 - DNA, 20 bp, Artificial Sequence
  Description of Artificial Sequence: Synthetic oligonucleotide
  Target: ATXN2; (-) strand; PAM type: NNNNGHTT; PAM sequence: AGATGATT
aaatactgtgtttgaggtac

SEQ ID NO: 12098 - DNA, 20 bp, Artificial Sequence
  Description of Artificial Sequence: Synthetic oligonucleotide
  Target: ATXN2; (-) strand; PAM type: NNNNGHTT; PAM sequence: CTGTGTTT
aacagcctatagggtaaata

SEQ ID NO: 12099 - DNA, 20 bp, Artificial Sequence
  Description of Artificial Sequence: Synthetic oligonucleotide
  Target: ATXN2; (-) strand; PAM type: NNNNGHTT; PAM sequence: ATTGGTTT
catcttttggatgaatgttc

SEQ ID NO: 12100 - DNA, 20 bp, Artificial Sequence
  Description of Artificial Sequence: Synthetic oligonucleotide
  Target: ATXN2; (-) strand; PAM type: NNNNGHTT; PAM sequence: TCTGGCTT
gtgttcattcactgccaaca

SEQ ID NO: 12101 - DNA, 20 bp, Artificial Sequence
  Description of Artificial Sequence: Synthetic oligonucleotide
  Target: ATXN2; (-) strand; PAM type: NNNNGHTT; PAM sequence: GCATGCTT
gagagtagttatttgtgtat

SEQ ID NO: 12102 - DNA, 20 bp, Artificial Sequence
  Description of Artificial Sequence: Synthetic oligonucleotide
  Target: ATXN2; (-) strand; PAM type: NNNNGHTT; PAM sequence: TCATGATT
atacatttctggtgaataca

SEQ ID NO: 12103 - DNA, 20 bp, Artificial Sequence
  Description of Artificial Sequence: Synthetic oligonucleotide
  Target: ATXN2; (-) strand; PAM type: NNNNGHTT; PAM sequence: GATTGTTT
ttaggttaaaagttcattat

SEQ ID NO: 12104 - DNA, 20 bp, Artificial Sequence
  Description of Artificial Sequence: Synthetic oligonucleotide
  Target: ATXN2; (-) strand; PAM type: NNNNGHTT; PAM sequence: TTATGATT
aggcttaggttaaaagttca

SEQ ID NO: 12105 - DNA, 20 bp, Artificial Sequence
  Description of Artificial Sequence: Synthetic oligonucleotide
  Target: ATXN2; (-) strand; PAM type: NNNNGHTT; PAM sequence: AAAGGCTT
taacaattttcctgtttgct

SEQ ID NO: 12106 - DNA, 20 bp, Artificial Sequence
  Description of Artificial Sequence: Synthetic oligonucleotide
  Target: ATXN2; (-) strand; PAM type: NNNNGHTT; PAM sequence: TCCTGTTT
tgtatatattttaacaattt

SEQ ID NO: 12107 - DNA, 20 bp, Artificial Sequence
  Description of Artificial Sequence: Synthetic oligonucleotide
  Target: ATXN2; (-) strand; PAM type: NNNNGHTT; PAM sequence: GCTGGCTT
aggcacgattgatttatcat

SEQ ID NO: 12108 - DNA, 20 bp, Artificial Sequence
  Description of Artificial Sequence: Synthetic oligonucleotide
  Target: ATXN2; (-) strand; PAM type: NNNNGHTT; PAM sequence: GATTGATT
gaatatgcgtgcaaaggcac

SEQ ID NO: 12109 - DNA, 20 bp, Artificial Sequence
  Description of Artificial Sequence: Synthetic oligonucleotide
  Target: ATXN2; (-) strand; PAM type: NNNNGHTT; PAM sequence: GCACGATT
gactgaatatgcgtgcaaag

SEQ ID NO: 12110 - DNA, 20 bp, Artificial Sequence
  Description of Artificial Sequence: Synthetic oligonucleotide
  Target: ATXN2; (-) strand; PAM type: NNNNGHTT; PAM sequence: CTTGGTTT
aaaagatactgacaaactaa

SEQ ID NO: 12111 - DNA, 20 bp, Artificial Sequence
  Description of Artificial Sequence: Synthetic oligonucleotide
  Target: ATXN2; (-) strand; PAM type: NNNNGHTT; PAM sequence: GTGTGATT
cgcattttaaataaaaaatt

SEQ ID NO: 12112 - DNA, 20 bp, Artificial Sequence
  Description of Artificial Sequence: Synthetic oligonucleotide
  Target: ATXN2; (-) strand; PAM type: NNNNGHTT; PAM sequence: TGTGGATT
tatcactttcaattttgtat

SEQ ID NO: 12113 - DNA, 20 bp, Artificial Sequence
  Description of Artificial Sequence: Synthetic oligonucleotide
  Target: ATXN2; (-) strand; PAM type: NNNNGHTT; PAM sequence: TTTAGTTT
tttgtatatgatcaaaggtg

SEQ ID NO: 12114 - DNA, 20 bp, Artificial Sequence
  Description of Artificial Sequence: Synthetic oligonucleotide
  Target: ATXN2; (-) strand; PAM type: NNNNGHTT; PAM sequence: AGGTGTTT
aggaatttgtatatgatcaa

SEQ ID NO: 12115 - DNA, 20 bp, Artificial Sequence
  Description of Artificial Sequence: Synthetic oligonucleotide
  Target: ATXN2; (-) strand; PAM type: NNNNGHTT; PAM sequence: TTATGCTT
tgtcacctgtaacccacagc

SEQ ID NO: 12116 - DNA, 20 bp, Artificial Sequence
  Description of Artificial Sequence: Synthetic oligonucleotide
  Target: ATXN2; (-) strand; PAM type: NNNNGHTT; PAM sequence: CACAGCTT
ccttcctgtcacctgtaacc

SEQ ID NO: 12117 - DNA, 20 bp, Artificial Sequence
  Description of Artificial Sequence: Synthetic oligonucleotide
  Target: ATXN2; (-) strand; PAM type: NNNNGHTT; PAM sequence: AAAAGTTT
ctctgtcctttttgaagaat

SEQ ID NO: 12118 - DNA, 20 bp, Artificial Sequence
  Description of Artificial Sequence: Synthetic oligonucleotide
  Target: ATXN2; (-) strand; PAM type: NNNNGHTT; PAM sequence: TACAGATT
aaaaaaaaaaaaaaagaatt

SEQ ID NO: 12119 - DNA, 20 bp, Artificial Sequence
  Description of Artificial Sequence: Synthetic oligonucleotide
  Target: ATXN2; (-) strand; PAM type: NNNNGHTT; PAM sequence: AATTGCTT
ttcggaggctgaggcaacag

SEQ ID NO: 12120 - DNA, 20 bp, Artificial Sequence
  Description of Artificial Sequence: Synthetic oligonucleotide
  Target: ATXN2; (-) strand; PAM type: NNNNGHTT; PAM sequence: GTATGTTT
agtttagatgtcctgaacga

SEQ ID NO: 12121 - DNA, 20 bp, Artificial Sequence
  Description of Artificial Sequence: Synthetic oligonucleotide
  Target: ATXN2; (-) strand; PAM type: NNNNGHTT; PAM sequence: TTAAGTTT
gaatataaaatttttatttt

SEQ ID NO: 12122 - DNA, 20 bp, Artificial Sequence
  Description of Artificial Sequence: Synthetic oligonucleotide
  Target: ATXN2; (-) strand; PAM type: NNNNGHTT; PAM sequence: ATGAGATT
aaaagtgtactgctatgaga

SEQ ID NO: 12123 - DNA, 20 bp, Artificial Sequence
  Description of Artificial Sequence: Synthetic oligonucleotide
  Target: ATXN2; (-) strand; PAM type: NNNNGHTT; PAM sequence: TTTGGTTT
tgtttggagtaggggataat

SEQ ID NO: 12124 - DNA, 20 bp, Artificial Sequence
  Description of Artificial Sequence: Synthetic oligonucleotide
  Target: ATXN2; (-) strand; PAM type: NNNNGHTT; PAM sequence: GGTTGTTT
gttttcctatttgcgttttt

SEQ ID NO: 12125 - DNA, 20 bp, Artificial Sequence
  Description of Artificial Sequence: Synthetic oligonucleotide
  Target: ATXN2; (-) strand; PAM type: NNNNGHTT; PAM sequence: TTGCGTTT
gtgtcgtttagttttcctat

SEQ ID NO: 12126 - DNA, 20 bp, Artificial Sequence
  Description of Artificial Sequence: Synthetic oligonucleotide
  Target: ATXN2; (-) strand; PAM type: NNNNGHTT; PAM sequence: TTTAGTTT
tgagaactaccgtagtgtcg

SEQ ID NO: 12127 - DNA, 20 bp, Artificial Sequence
  Description of Artificial Sequence: Synthetic oligonucleotide
  Target: ATXN2; (-) strand; PAM type: NNNNGHTT; PAM sequence: TGTCGTTT
atttctgagaactaccgtag

SEQ ID NO: 12128 - DNA, 20 bp, Artificial Sequence
  Description of Artificial Sequence: Synthetic oligonucleotide
  Target: ATXN2; (-) strand; PAM type: NNNNGHTT; PAM sequence: AGATGTTT
aaatagtactgatttcatta

SEQ ID NO: 12129 - DNA, 20 bp, Artificial Sequence
  Description of Artificial Sequence: Synthetic oligonucleotide
  Target: ATXN2; (-) strand; PAM type: NNNNGHTT; PAM sequence: TACTGATT
cagaatatgtttttaaatag

SEQ ID NO: 12130 - DNA, 20 bp, Artificial Sequence
  Description of Artificial Sequence: Synthetic oligonucleotide
  Target: ATXN2; (-) strand; PAM type: NNNNGHTT; PAM sequence: ATATGTTT
tgcttcaaatgtttttcaga

SEQ ID NO: 12131 - DNA, 20 bp, Artificial Sequence
  Description of Artificial Sequence: Synthetic oligonucleotide
  Target: ATXN2; (-) strand; PAM type: NNNNGHTT; PAM sequence: AAATGTTT
cagaattaatggattgcttc

SEQ ID NO: 12132 - DNA, 20 bp, Artificial Sequence
  Description of Artificial Sequence: Synthetic oligonucleotide
  Target: ATXN2; (-) strand; PAM type: NNNNGHTT; PAM sequence: GATTGCTT
cttatgatacagaattaatg

SEQ ID NO: 12133 - DNA, 20 bp, Artificial Sequence
  Description of Artificial Sequence: Synthetic oligonucleotide
  Target: ATXN2; (-) strand; PAM type: NNNNGHTT; PAM sequence: AATGGATT
atatcttatgatacagaatt

SEQ ID NO: 12134 - DNA, 20 bp, Artificial Sequence
  Description of Artificial Sequence: Synthetic oligonucleotide
  Target: ATXN2; (-) strand; PAM type: NNNNGHTT; PAM sequence: AATAGATT
gctgtctaaagtaccaaaat

SEQ ID NO: 12135 - DNA, 20 bp, Artificial Sequence
  Description of Artificial Sequence: Synthetic oligonucleotide
  Target: ATXN2; (-) strand; PAM type: NNNNGHTT; PAM sequence: CTTCGTTT
taataagcaaaaaaacccat

SEQ ID NO: 12136 - DNA, 20 bp, Artificial Sequence
  Description of Artificial Sequence: Synthetic oligonucleotide
  Target: ATXN2; (-) strand; PAM type: NNNNGHTT; PAM sequence: CTATGTTT
tgtttgttataatgataata

SEQ ID NO: 12137 - DNA, 20 bp, Artificial Sequence
  Description of Artificial Sequence: Synthetic oligonucleotide
  Target: ATXN2; (-) strand; PAM type: NNNNGHTT; PAM sequence: TGCTGTTT
ctggcattacatattttttt

SEQ ID NO: 12138 - DNA, 20 bp, Artificial Sequence
  Description of Artificial Sequence: Synthetic oligonucleotide
  Target: ATXN2; (-) strand; PAM type: NNNNGHTT; PAM sequence: TTTTGCTT
tgttctccagcatgaaaaca

SEQ ID NO: 12139 - DNA, 20 bp, Artificial Sequence
  Description of Artificial Sequence: Synthetic oligonucleotide
  Target: ATXN2; (-) strand; PAM type: NNNNGHTT; PAM sequence: TTATGCTT
tctcctcttcctcatcaata

SEQ ID NO: 12140 - DNA, 20 bp, Artificial Sequence
  Description of Artificial Sequence: Synthetic oligonucleotide
  Target: ATXN2; (-) strand; PAM type: NNNNGHTT; PAM sequence: TCCTGCTT
acctggtcttcagatctctt

SEQ ID NO: 12141 - DNA, 20 bp, Artificial Sequence
  Description of Artificial Sequence: Synthetic oligonucleotide
  Target: ATXN2; (-) strand; PAM type: NNNNGHTT; PAM sequence: AATAGTTT
ttgctttataacttttggca

SEQ ID NO: 12142 - DNA, 20 bp, Artificial Sequence
  Description of Artificial Sequence: Synthetic oligonucleotide
  Target: ATXN2; (-) strand; PAM type: NNNNGHTT; PAM sequence: ACTTGCTT
tgaacccatttctttgcctg

SEQ ID NO: 12143 - DNA, 20 bp, Artificial Sequence
  Description of Artificial Sequence: Synthetic oligonucleotide
  Target: ATXN2; (-) strand; PAM type: NNNNGHTT; PAM sequence: TTAAGTTT
tgtgtgtgactcttcttaat

SEQ ID NO: 12144 - DNA, 20 bp, Artificial Sequence
  Description of Artificial Sequence: Synthetic oligonucleotide
  Target: ATXN2; (-) strand; PAM type: NNNNGHTT; PAM sequence: CTTTGTTT
gcgatgtatggtaggaagca

SEQ ID NO: 12145 - DNA, 20 bp, Artificial Sequence
  Description of Artificial Sequence: Synthetic oligonucleotide
  Target: ATXN2; (-) strand; PAM type: NNNNGHTT; PAM sequence: CCTGGTTT
caccaccaacacacgcccag

SEQ ID NO: 12146 - DNA, 20 bp, Artificial Sequence
  Description of Artificial Sequence: Synthetic oligonucleotide
  Target: ATXN2; (-) strand; PAM type: NNNNGHTT; PAM sequence: TTTTGTTT
gttaatgtgctttctttatt

SEQ ID NO: 12147 - DNA, 20 bp, Artificial Sequence
  Description of Artificial Sequence: Synthetic oligonucleotide
  Target: ATXN2; (-) strand; PAM type: NNNNGHTT; PAM sequence: ATGTGCTT
tggctctatttgcagtgtta

SEQ ID NO: 12148 - DNA, 20 bp, Artificial Sequence
  Description of Artificial Sequence: Synthetic oligonucleotide
  Target: ATXN2; (-) strand; PAM type: NNNNGHTT; PAM sequence: GTCTGCTT
agttaaaaatcttaactaaa

SEQ ID NO: 12149 - DNA, 20 bp, Artificial Sequence
  Description of Artificial Sequence: Synthetic oligonucleotide
  Target: ATXN2; (-) strand; PAM type: NNNNGHTT; PAM sequence: AGCTGTTT
agaaagatttgagagtttac

SEQ ID NO: 12150 - DNA, 20 bp, Artificial Sequence
  Description of Artificial Sequence: Synthetic oligonucleotide
  Target: ATXN2; (-) strand; PAM type: NNNNGHTT; PAM sequence: GAGAGTTT
gaaacagccaagaaagattt

SEQ ID NO: 12151 - DNA, 20 bp, Artificial Sequence
  Description of Artificial Sequence: Synthetic oligonucleotide
  Target: ATXN2; (-) strand; PAM type: NNNNGHTT; PAM sequence: GAAAGATT
ggttcagaggaaacagccaa

SEQ ID NO: 12152 - DNA, 20 bp, Artificial Sequence
  Description of Artificial Sequence: Synthetic oligonucleotide
  Target: ATXN2; (-) strand; PAM type: NNNNGHTT; PAM sequence: TGATGATT
aatatatattcgaaggttac

SEQ ID NO: 12153 - DNA, 20 bp, Artificial Sequence
  Description of Artificial Sequence: Synthetic oligonucleotide
  Target: ATXN2; (-) strand; PAM type: NNNNGHTT; PAM sequence: TTTTGCTT
aagggattttcctttataat

SEQ ID NO: 12154 - DNA, 20 bp, Artificial Sequence
  Description of Artificial Sequence: Synthetic oligonucleotide
  Target: ATXN2; (-) strand; PAM type: NNNNGHTT; PAM sequence: AAGGGATT
aaaaaacttttaatatggta

SEQ ID NO: 12155 - DNA, 20 bp, Artificial Sequence
  Description of Artificial Sequence: Synthetic oligonucleotide
  Target: ATXN2; (-) strand; PAM type: NNNNGHTT; PAM sequence: ACCAGCTT
ccaccgattgcagccacccc

SEQ ID NO: 12156 - DNA, 20 bp, Artificial Sequence
  Description of Artificial Sequence: Synthetic oligonucleotide
  Target: ATXN2; (-) strand; PAM type: NNNNGHTT; PAM sequence: CACCGATT
cccagcgtcagcagcgggcc

SEQ ID NO: 12157 - DNA, 20 bp, Artificial Sequence
  Description of Artificial Sequence: Synthetic oligonucleotide
  Target: ATXN2; (-) strand; PAM type: NNNNGHTT; PAM sequence: GTCTGCTT
gagatactgtttaataggca

SEQ ID NO: 12158 - DNA, 20 bp, Artificial Sequence
  Description of Artificial Sequence: Synthetic oligonucleotide
  Target: ATXN2; (-) strand; PAM type: NNNNGHTT; PAM sequence: TACTGTTT
catgtattatgctgtggaga

SEQ ID NO: 12159 - DNA, 20 bp, Artificial Sequence
  Description of Artificial Sequence: Synthetic oligonucleotide
  Target: ATXN2; (-) strand; PAM type: NNNNGHTT; PAM sequence: CGCAGATT
gtatgagatggcatcagaga

SEQ ID NO: 12160 - DNA, 20 bp, Artificial Sequence
  Description of Artificial Sequence: Synthetic oligonucleotide
  Target: ATXN2; (-) strand; PAM type: NNNNGHTT; PAM sequence: TGGTGTTT
cccagctgggatttgggaac

SEQ ID NO: 12161 - DNA, 20 bp, Artificial Sequence
  Description of Artificial Sequence: Synthetic oligonucleotide
  Target: ATXN2; (-) strand; PAM type: NNNNGHTT; PAM sequence: CTGGGATT
atgaagcagaattatcccag

SEQ ID NO: 12162 - DNA, 20 bp, Artificial Sequence
  Description of Artificial Sequence: Synthetic oligonucleotide
  Target: ATXN2; (-) strand; PAM type: NNNNGHTT; PAM sequence: AGTTGCTT
agagaaagtccctctgagga

SEQ ID NO: 12163 - DNA, 20 bp, Artificial Sequence
  Description of Artificial Sequence: Synthetic oligonucleotide
  Target: ATXN2; (-) strand; PAM type: NNNNGHTT; PAM sequence: AAGCGATT
cccagaaaataccatatgag

SEQ ID NO: 12164 - DNA, 20 bp, Artificial Sequence
  Description of Artificial Sequence: Synthetic oligonucleotide
  Target: ATXN2; (-) strand; PAM type: NNNNGHTT; PAM sequence: CTTTGTTT
ttttggctctttggtcatgc

SEQ ID NO: 12165 - DNA, 20 bp, Artificial Sequence
  Description of Artificial Sequence: Synthetic oligonucleotide
  Target: ATXN2; (-) strand; PAM type: NNNNGHTT; PAM sequence: ATCTGTTT
agatagaaagttagtgttgg

SEQ ID NO: 12166 - DNA, 20 bp, Artificial Sequence
  Description of Artificial Sequence: Synthetic oligonucleotide
  Target: ATXN2; (-) strand; PAM type: NNNNGHTT; PAM sequence: CAAGGATT
agaaagaatgggaagtgtta

SEQ ID NO: 12167 - DNA, 20 bp, Artificial Sequence
  Description of Artificial Sequence: Synthetic oligonucleotide
  Target: ATXN2; (-) strand; PAM type: NNNNGHTT; PAM sequence: CTGGGTTT
ctacatggtgctgtgttata

SEQ ID NO: 12168 - DNA, 20 bp, Artificial Sequence
  Description of Artificial Sequence: Synthetic oligonucleotide
  Target: ATXN2; (-) strand; PAM type: NNNNGHTT; PAM sequence: TGTGGATT
ccttacatgcagaccacctg

SEQ ID NO: 12169 - DNA, 20 bp, Artificial Sequence
  Description of Artificial Sequence: Synthetic oligonucleotide
  Target: ATXN2; (-) strand; PAM type: NNNNGHTT; PAM sequence: AGTGGCTT
ttccacaattattttcctga

SEQ ID NO: 12170 - DNA, 20 bp, Artificial Sequence
  Description of Artificial Sequence: Synthetic oligonucleotide
  Target: ATXN2; (-) strand; PAM type: NNNNGHTT; PAM sequence: TTAGGATT
gttaattatataatcagttc

SEQ ID NO: 12171 - DNA, 20 bp, Artificial Sequence
  Description of Artificial Sequence: Synthetic oligonucleotide
  Target: ATXN2; (-) strand; PAM type: NNNNGHTT; PAM sequence: GAATGTTT
aaatttcagcaacagttagt

SEQ ID NO: 12172 - DNA, 20 bp, Artificial Sequence
  Description of Artificial Sequence: Synthetic oligonucleotide
  Target: ATXN2; (-) strand; PAM type: NNNNGHTT; PAM sequence: GTTTGCTT
aaatataaaaaaatgttcag

SEQ ID NO: 12173 - DNA, 20 bp, Artificial Sequence
  Description of Artificial Sequence: Synthetic oligonucleotide
  Target: ATXN2; (-) strand; PAM type: NNNNGHTT; PAM sequence: TCAGGTTT
gataaaatataaaaaaatgt

SEQ ID NO: 12174 - DNA, 20 bp, Artificial Sequence
  Description of Artificial Sequence: Synthetic oligonucleotide
  Target: ATXN2; (-) strand; PAM type: NNNNGHTT; PAM sequence: GGTGGTTT
ttttttgtttaccagaagga

SEQ ID NO: 12175 - DNA, 20 bp, Artificial Sequence
  Description of Artificial Sequence: Synthetic oligonucleotide
  Target: ATXN2; (-) strand; PAM type: NNNNGHTT; PAM sequence: TTTTGTTT
taagtagttttcagtggctt

SEQ ID NO: 12176 - DNA, 20 bp, Artificial Sequence
  Description of Artificial Sequence: Synthetic oligonucleotide
  Target: ATXN2; (-) strand; PAM type: NNNNGHTT; PAM sequence: AGTGGCTT
aaaagtgataagtagttttc

SEQ ID NO: 12177 - DNA, 20 bp, Artificial Sequence
  Description of Artificial Sequence: Synthetic oligonucleotide
  Target: ATXN2; (-) strand; PAM type: NNNNGHTT; PAM sequence: AGTAGTTT
ttcatttgataaaagtgata

SEQ ID NO: 12178 - DNA, 20 bp, Artificial Sequence
  Description of Artificial Sequence: Synthetic oligonucleotide
  Target: ATXN2; (-) strand; PAM type: NNNNGHTT; PAM sequence: AATAGTTT
gtaacaaagtaataatagtg

SEQ ID NO: 12179 - DNA, 20 bp, Artificial Sequence
  Description of Artificial Sequence: Synthetic oligonucleotide
  Target: ATXN2; (-) strand; PAM type: NNNNGHTT; PAM sequence: ACTAGCTT
atagcaccatagtatacttg

SEQ ID NO: 12180 - DNA, 20 bp, Artificial Sequence
  Description of Artificial Sequence: Synthetic oligonucleotide
  Target: ATXN2; (-) strand; PAM type: NNNNGHTT; PAM sequence: TCATGTTT
cactgcgcctggcctgggga

SEQ ID NO: 12181 - DNA, 20 bp, Artificial Sequence
  Description of Artificial Sequence: Synthetic oligonucleotide
  Target: ATXN2; (-) strand; PAM type: NNNNGHTT; PAM sequence: TAGGGATT
cgccctggcctcctaaagtg

SEQ ID NO: 12182 - DNA, 20 bp, Artificial Sequence
  Description of Artificial Sequence: Synthetic oligonucleotide
  Target: ATXN2; (-) strand; PAM type: NNNNGHTT; PAM sequence: TACGGCTT
ctggagtgcagtggtgcagt

SEQ ID NO: 12183 - DNA, 20 bp, Artificial Sequence
  Description of Artificial Sequence: Synthetic oligonucleotide
  Target: ATXN2; (-) strand; PAM type: NNNNGHTT; PAM sequence: CTTGGTTT
ataacaggcagagtcaaggg

SEQ ID NO: 12184 - DNA, 20 bp, Artificial Sequence
  Description of Artificial Sequence: Synthetic oligonucleotide
  Target: ATXN2; (-) strand; PAM type: NNNNGHTT; PAM sequence: AAGGGCTT
ttcaaataacaggcagagtc

SEQ ID NO: 12185 - DNA, 20 bp, Artificial Sequence
  Description of Artificial Sequence: Synthetic oligonucleotide
  Target: ATXN2; (-) strand; PAM type: NNNNGHTT; PAM sequence: GTTAGTTT
aaggctattgctgtttatat

SEQ ID NO: 12186 - DNA, 20 bp, Artificial Sequence
  Description of Artificial Sequence: Synthetic oligonucleotide
  Target: ATXN2; (-) strand; PAM type: NNNNGHTT; PAM sequence: TGCTGTTT
gtaccatatatgaaggctat

SEQ ID NO: 12187 - DNA, 20 bp, Artificial Sequence
  Description of Artificial Sequence: Synthetic oligonucleotide
  Target: ATXN2; (-) strand; PAM type: NNNNGHTT; PAM sequence: TAAGGTTT
ataaaaataaagtttatctt

SEQ ID NO: 12188 - DNA, 20 bp, Artificial Sequence
  Description of Artificial Sequence: Synthetic oligonucleotide
  Target: ATXN2; (-) strand; PAM type: NNNNGHTT; PAM sequence: TAAAGTTT
agaaaataaataaataaaaa

SEQ ID NO: 12189 - DNA, 20 bp, Artificial Sequence
  Description of Artificial Sequence: Synthetic oligonucleotide
  Target: ATXN2; (-) strand; PAM type: NNNNGHTT; PAM sequence: TCCAGCTT
tcaagattgcaccactgcac

SEQ ID NO: 12190 - DNA, 20 bp, Artificial Sequence
  Description of Artificial Sequence: Synthetic oligonucleotide
  Target: ATXN2; (-) strand; PAM type: NNNNGHTT; PAM sequence: TCAAGATT
gaggcagagagtgcagtgag

SEQ ID NO: 12191 - DNA, 20 bp, Artificial Sequence
  Description of Artificial Sequence: Synthetic oligonucleotide
  Target: ATXN2; (-) strand; PAM type: NNNNGHTT; PAM sequence: AATCGCTT
tctggaggctgaggtaggag

SEQ ID NO: 12192 - DNA, 20 bp, Artificial Sequence
  Description of Artificial Sequence: Synthetic oligonucleotide
  Target: ATXN2; (-) strand; PAM type: NNNNGHTT; PAM sequence: TAAAGTTT
gtataccttcaatagcatat

SEQ ID NO: 12193 - DNA, 20 bp, Artificial Sequence
  Description of Artificial Sequence: Synthetic oligonucleotide
  Target: ATXN2; (-) strand; PAM type: NNNNGHTT; PAM sequence: AAATGATT
ttataaattaacttgagaag

SEQ ID NO: 12194 - DNA, 20 bp, Artificial Sequence
  Description of Artificial Sequence: Synthetic oligonucleotide
  Target: ATXN2; (-) strand; PAM type: NNNNGHTT; PAM sequence: CAGGGTTT
ttttgtatattttgcagaga

SEQ ID NO: 12195 - DNA, 20 bp, Artificial Sequence
  Description of Artificial Sequence: Synthetic oligonucleotide
  Target: ATXN2; (-) strand; PAM type: NNNNGHTT; PAM sequence: CCTGGCTT
tacaggcaagcaccaccgtg

SEQ ID NO: 12196 - DNA, 20 bp, Artificial Sequence
  Description of Artificial Sequence: Synthetic oligonucleotide
  Target: ATXN2; (-) strand; PAM type: NNNNGHTT; PAM sequence: GGTGGTTT
cctccaaaggtaaccagtga

SEQ ID NO: 12197 - DNA, 20 bp, Artificial Sequence
  Description of Artificial Sequence: Synthetic oligonucleotide
  Target: ATXN2; (-) strand; PAM type: NNNNGHTT; PAM sequence: GTTGGTTT
ggcagtcttcaaaataatga

SEQ ID NO: 12198 - DNA, 20 bp, Artificial Sequence
  Description of Artificial Sequence: Synthetic oligonucleotide
  Target: ATXN2; (-) strand; PAM type: NNNNGHTT; PAM sequence: TATAGCTT
gctgtttggttaccctgagg

SEQ ID NO: 12199 - DNA, 20 bp, Artificial Sequence
  Description of Artificial Sequence: Synthetic oligonucleotide
  Target: ATXN2; (-) strand; PAM type: NNNNGHTT; PAM sequence: AGCTGTTT
agaaaaactttcccatatcc

SEQ ID NO: 12200 - DNA, 20 bp, Artificial Sequence
  Description of Artificial Sequence: Synthetic oligonucleotide
  Target: ATXN2; (-) strand; PAM type: NNNNGHTT; PAM sequence: GTGTGTTT
ttagcgccttaatttttttg

SEQ ID NO: 12201 - DNA, 20 bp, Artificial Sequence
  Description of Artificial Sequence: Synthetic oligonucleotide
  Target: ATXN2; (-) strand; PAM type: NNNNGHTT; PAM sequence: AGATGTTT
ggagtagtcagtgagttcct

SEQ ID NO: 12202 - DNA, 20 bp, Artificial Sequence
  Description of Artificial Sequence: Synthetic oligonucleotide
  Target: ATXN2; (-) strand; PAM type: NNNNGHTT; PAM sequence: CAATGTTT
gggttttttttttttttccc

SEQ ID NO: 12203 - DNA, 20 bp, Artificial Sequence
  Description of Artificial Sequence: Synthetic oligonucleotide
  Target: ATXN2; (-) strand; PAM type: NNNNGHTT; PAM sequence: TTGGGTTT
ataatgaaggcttgatcaga

SEQ ID NO: 12204 - DNA, 20 bp, Artificial Sequence
  Description of Artificial Sequence: Synthetic oligonucleotide
  Target: ATXN2; (-) strand; PAM type: NNNNGHTT; PAM sequence: ATCAGATT
tagtaaataatgaaggcttg

SEQ ID NO: 12205 - DNA, 20 bp, Artificial Sequence
  Description of Artificial Sequence: Synthetic oligonucleotide
  Target: ATXN2; (-) strand; PAM type: NNNNGHTT; PAM sequence: GAAGGCTT
gtaaactgatagtaaataat

SEQ ID NO: 12206 - DNA, 20 bp, Artificial Sequence
  Description of Artificial Sequence: Synthetic oligonucleotide
  Target: ATXN2; (-) strand; PAM type: NNNNGHTT; PAM sequence: TCCAGCTT
tagtttttgtcttgttcata

SEQ ID NO: 12207 - DNA, 20 bp, Artificial Sequence
  Description of Artificial Sequence: Synthetic oligonucleotide
  Target: ATXN2; (-) strand; PAM type: NNNNGHTT; PAM sequence: CTTAGTTT
gttttaattacagtttttcc

SEQ ID NO: 12208 - DNA, 20 bp, Artificial Sequence
  Description of Artificial Sequence: Synthetic oligonucleotide
  Target: ATXN2; (-) strand; PAM type: NNNNGHTT; PAM sequence: TACAGTTT
tcagccctcacagttttaat

SEQ ID NO: 12209 - DNA, 20 bp, Artificial Sequence
  Description of Artificial Sequence: Synthetic oligonucleotide
  Target: ATXN2; (-) strand; PAM type: NNNNGHTT; PAM sequence: CACAGTTT
gagccactgcactcagccct

SEQ ID NO: 12210 - DNA, 20 bp, Artificial Sequence
  Description of Artificial Sequence: Synthetic oligonucleotide
  Target: ATXN2; (-) strand; PAM type: NNNNGHTT; PAM sequence: CCAGGATT
ctgccttgactcccaaggtg

SEQ ID NO: 12211 - DNA, 20 bp, Artificial Sequence
  Description of Artificial Sequence: Synthetic oligonucleotide
  Target: ATXN2; (-) strand; PAM type: NNNNGHTT; PAM sequence: CAGGGTTT
ttttgtattttttgtagaga

SEQ ID NO: 12212 - DNA, 20 bp, Artificial Sequence
  Description of Artificial Sequence: Synthetic oligonucleotide
  Target: ATXN2; (-) strand; PAM type: NNNNGHTT; PAM sequence: TTGGGCTT
ctcagtgcagtctctaccaa

SEQ ID NO: 12213 - DNA, 20 bp, Artificial Sequence
  Description of Artificial Sequence: Synthetic oligonucleotide
  Target: ATXN2; (-) strand; PAM type: NNNNGHTT; PAM sequence: GCATGATT
acccaagctggagtgcagtg

SEQ ID NO: 12214 - DNA, 20 bp, Artificial Sequence
  Description of Artificial Sequence: Synthetic oligonucleotide
  Target: ATXN2; (-) strand; PAM type: NNNNGHTT; PAM sequence: GTTTGTTT
agtcataggtttttttgttt

SEQ ID NO: 12215 - DNA, 20 bp, Artificial Sequence
  Description of Artificial Sequence: Synthetic oligonucleotide
  Target: ATXN2; (-) strand; PAM type: NNNNGHTT; PAM sequence: GTTTGTTT
gccaagtcataggttttttt

SEQ ID NO: 12216 - DNA, 20 bp, Artificial Sequence
  Description of Artificial Sequence: Synthetic oligonucleotide
  Target: ATXN2; (-) strand; PAM type: NNNNGHTT; PAM sequence: TTTTGTTT
cccagccaagtcataggttt

SEQ ID NO: 12217 - DNA, 20 bp, Artificial Sequence
  Description of Artificial Sequence: Synthetic oligonucleotide
  Target: ATXN2; (-) strand; PAM type: NNNNGHTT; PAM sequence: ATAGGTTT
ccatcacacccagccaagtc

SEQ ID NO: 12218 - DNA, 20 bp, Artificial Sequence
  Description of Artificial Sequence: Synthetic oligonucleotide
  Target: ATXN2; (-) strand; PAM type: NNNNGHTT; PAM sequence: CTAGGATT
tacctcagcctcctaaagtg

SEQ ID NO: 12219 - DNA, 20 bp, Artificial Sequence
  Description of Artificial Sequence: Synthetic oligonucleotide
  Target: ATXN2; (-) strand; PAM type: NNNNGHTT; PAM sequence: CAGGGCTT
cccaggctagtcctaaattc

SEQ ID NO: 12220 - DNA, 20 bp, Artificial Sequence
  Description of Artificial Sequence: Synthetic oligonucleotide
  Target: ATXN2; (-) strand; PAM type: NNNNGHTT; PAM sequence: TTTTGTTT
tctttgtttttttgtttgtt

SEQ ID NO: 12221 - DNA, 20 bp, Artificial Sequence
  Description of Artificial Sequence: Synthetic oligonucleotide
  Target: ATXN2; (-) strand; PAM type: NNNNGHTT; PAM sequence: GTTTGTTT
ttcttcttctttgttttttt

SEQ ID NO: 12222 - DNA, 20 bp, Artificial Sequence
  Description of Artificial Sequence: Synthetic oligonucleotide
  Target: ATXN2; (-) strand; PAM type: NNNNGHTT; PAM sequence: TTTTGTTT
gtctttcttcttctttgttt

SEQ ID NO: 12223 - DNA, 20 bp, Artificial Sequence
  Description of Artificial Sequence: Synthetic oligonucleotide
  Target: ATXN2; (-) strand; PAM type: NNNNGHTT; PAM sequence: CTTTGTTT
cttgtcttgtctttcttctt

SEQ ID NO: 12224 - DNA, 20 bp, Artificial Sequence
  Description of Artificial Sequence: Synthetic oligonucleotide
  Target: ATXN2; (-) strand; PAM type: NNNNGHTT; PAM sequence: GCCAGCTT
ctacaggcacatgccacctt

SEQ ID NO: 12225 - DNA, 20 bp, Artificial Sequence
  Description of Artificial Sequence: Synthetic oligonucleotide
  Target: ATXN2; (-) strand; PAM type: NNNNGHTT; PAM sequence: CCAGGCTT
atggggtctggctttgttgc

SEQ ID NO: 12226 - DNA, 20 bp, Artificial Sequence
  Description of Artificial Sequence: Synthetic oligonucleotide
  Target: ATXN2; (-) strand; PAM type: NNNNGHTT; PAM sequence: TCTGGCTT
tttttgtttttgagatgggg

SEQ ID NO: 12227 - DNA, 20 bp, Artificial Sequence
  Description of Artificial Sequence: Synthetic oligonucleotide
  Target: ATXN2; (-) strand; PAM type: NNNNGHTT; PAM sequence: TTTTGTTT
aagttggttttggttttgtt

SEQ ID NO: 12228 - DNA, 20 bp, Artificial Sequence
  Description of Artificial Sequence: Synthetic oligonucleotide
  Target: ATXN2; (-) strand; PAM type: NNNNGHTT; PAM sequence: TTTTGTTT
tatctttaagttggttttgg

SEQ ID NO: 12229 - DNA, 20 bp, Artificial Sequence
  Description of Artificial Sequence: Synthetic oligonucleotide
  Target: ATXN2; (-) strand; PAM type: NNNNGHTT; PAM sequence: TTTGGTTT
gtgtgtatctttaagttggt

SEQ ID NO: 12230 - DNA, 20 bp, Artificial Sequence
  Description of Artificial Sequence: Synthetic oligonucleotide
  Target: ATXN2; (-) strand; PAM type: NNNNGHTT; PAM sequence: GTTGGTTT
attttagtgtgtatctttaa

SEQ ID NO: 12231 - DNA, 20 bp, Artificial Sequence
  Description of Artificial Sequence: Synthetic oligonucleotide
  Target: ATXN2; (-) strand; PAM type: NNNNGHTT; PAM sequence: ATCAGTTT
aagcaaattctagacattgc

SEQ ID NO: 12232 - DNA, 20 bp, Artificial Sequence
  Description of Artificial Sequence: Synthetic oligonucleotide
  Target: ATXN2; (-) strand; PAM type: NNNNGHTT; PAM sequence: ACTGGATT
ctcttaaaagctttgagtcc

SEQ ID NO: 12233 - DNA, 20 bp, Artificial Sequence
  Description of Artificial Sequence: Synthetic oligonucleotide
  Target: ATXN2; (-) strand; PAM type: NNNNGHTT; PAM sequence: AAAAGCTT
atccctacccattgtctctt

SEQ ID NO: 12234 - DNA, 20 bp, Artificial Sequence
  Description of Artificial Sequence: Synthetic oligonucleotide
  Target: ATXN2; (-) strand; PAM type: NNNNGHTT; PAM sequence: TCATGTTT
acattaataacctaggccag

SEQ ID NO: 12235 - DNA, 20 bp, Artificial Sequence
  Description of Artificial Sequence: Synthetic oligonucleotide
  Target: ATXN2; (-) strand; PAM type: NNNNGHTT; PAM sequence: CTGGGATT
cgcctcggcctcccaaagtg

SEQ ID NO: 12236 - DNA, 20 bp, Artificial Sequence
  Description of Artificial Sequence: Synthetic oligonucleotide
  Target: ATXN2; (-) strand; PAM type: NNNNGHTT; PAM sequence: TGGGGTTT
ccttgtatttttaatagaga

SEQ ID NO: 12237 - DNA, 20 bp, Artificial Sequence
  Description of Artificial Sequence: Synthetic oligonucleotide
  Target: ATXN2; (-) strand; PAM type: NNNNGHTT; PAM sequence: CTGGGATT
cgcctcggcctcccaaagtg

SEQ ID NO: 12238 - DNA, 20 bp, Artificial Sequence
  Description of Artificial Sequence: Synthetic oligonucleotide
  Target: ATXN2; (-) strand; PAM type: NNNNGHTT; PAM sequence: CAGGGTTT
ttttgtatttttagtagaga

SEQ ID NO: 12239 - DNA, 20 bp, Artificial Sequence
  Description of Artificial Sequence: Synthetic oligonucleotide
  Target: ATXN2; (-) strand; PAM type: NNNNGHTT; PAM sequence: AATTGTTT
tgaagtcttttttttttttt

SEQ ID NO: 12240 - DNA, 20 bp, Artificial Sequence
  Description of Artificial Sequence: Synthetic oligonucleotide
  Target: ATXN2; (-) strand; PAM type: NNNNGHTT; PAM sequence: ATTTGTTT
aagtcaggcttgcaatttgg

SEQ ID NO: 12241 - DNA, 20 bp, Artificial Sequence
  Description of Artificial Sequence: Synthetic oligonucleotide
  Target: ATXN2; (-) strand; PAM type: NNNNGHTT; PAM sequence: TTTGGATT
ggtccaagtcaggcttgcaa

SEQ ID NO: 12242 - DNA, 20 bp, Artificial Sequence
  Description of Artificial Sequence: Synthetic oligonucleotide
  Target: ATXN2; (-) strand; PAM type: NNNNGHTT; PAM sequence: TCAGGCTT
tgttccaattagggtccaag

SEQ ID NO: 12243 - DNA, 20 bp, Artificial Sequence
  Description of Artificial Sequence: Synthetic oligonucleotide
  Target: ATXN2; (-) strand; PAM type: NNNNGHTT; PAM sequence: GCAAGATT
actccagcctgggtgacaga

SEQ ID NO: 12244 - DNA, 20 bp, Artificial Sequence
  Description of Artificial Sequence: Synthetic oligonucleotide
  Target: ATXN2; (-) strand; PAM type: NNNNGHTT; PAM sequence: TTGAGATT
aggcggaagttgtagttgag

SEQ ID NO: 12245 - DNA, 20 bp, Artificial Sequence
  Description of Artificial Sequence: Synthetic oligonucleotide
  Target: ATXN2; (-) strand; PAM type: NNNNGHTT; PAM sequence: AATTGCTT
ttgggagactgaggcagaag

SEQ ID NO: 12246 - DNA, 20 bp, Artificial Sequence
  Description of Artificial Sequence: Synthetic oligonucleotide
  Target: ATXN2; (-) strand; PAM type: NNNNGHTT; PAM sequence: TTCTGTTT
ttttcagattaccttgaatt

SEQ ID NO: 12247 - DNA, 20 bp, Artificial Sequence
  Description of Artificial Sequence: Synthetic oligonucleotide
  Target: ATXN2; (-) strand; PAM type: NNNNGHTT; PAM sequence: TTCAGATT
tgccaacattgatttttttt

SEQ ID NO: 12248 - DNA, 20 bp, Artificial Sequence
  Description of Artificial Sequence: Synthetic oligonucleotide
  Target: ATXN2; (-) strand; PAM type: NNNNGHTT; PAM sequence: CATTGATT
tctcatccactcactgccaa

SEQ ID NO: 12249 - DNA, 20 bp, Artificial Sequence
  Description of Artificial Sequence: Synthetic oligonucleotide
  Target: ATXN2; (-) strand; PAM type: NNNNGHTT; PAM sequence: CTCTGCTT
atttgtttctggatttttca

SEQ ID NO: 12250 - DNA, 20 bp, Artificial Sequence
  Description of Artificial Sequence: Synthetic oligonucleotide
  Target: ATXN2; (-) strand; PAM type: NNNNGHTT; PAM sequence: TCTGGATT
tttttgtggttgaatttgtt

SEQ ID NO: 12251 - DNA, 20 bp, Artificial Sequence
  Description of Artificial Sequence: Synthetic oligonucleotide
  Target: ATXN2; (-) strand; PAM type: NNNNGHTT; PAM sequence: ATTTGTTT
aagtgtctttttgtggttga

SEQ ID NO: 12252 - DNA, 20 bp, Artificial Sequence
  Description of Artificial Sequence: Synthetic oligonucleotide
  Target: ATXN2; (-) strand; PAM type: NNNNGHTT; PAM sequence: CTGTGATT
tagtttaaagcagcagtgag

SEQ ID NO: 12253 - DNA, 20 bp, Artificial Sequence
  Description of Artificial Sequence: Synthetic oligonucleotide
  Target: ATXN2; (-) strand; PAM type: NNNNGHTT; PAM sequence: AGTAGTTT
aaggagaattgcttgagccc

SEQ ID NO: 12254 - DNA, 20 bp, Artificial Sequence
  Description of Artificial Sequence: Synthetic oligonucleotide
  Target: ATXN2; (-) strand; PAM type: NNNNGHTT; PAM sequence: AATTGCTT
ttgagaggctgaggaaggag

SEQ ID NO: 12255 - DNA, 20 bp, Artificial Sequence
  Description of Artificial Sequence: Synthetic oligonucleotide
  Target: ATXN2; (-) strand; PAM type: NNNNGHTT; PAM sequence: GATCGCTT
ttgggaggccaaggcaggag

SEQ ID NO: 12256 - DNA, 20 bp, Artificial Sequence
  Description of Artificial Sequence: Synthetic oligonucleotide
  Target: ATXN2; (-) strand; PAM type: NNNNGHTT; PAM sequence: CAGAGCTT
gtggctcatacctgtaacct

SEQ ID NO: 12257 - DNA, 20 bp, Artificial Sequence
  Description of Artificial Sequence: Synthetic oligonucleotide
  Target: ATXN2; (-) strand; PAM type: NNNNGHTT; PAM sequence: GTTGGATT
ctttttaatcatgaatggtt

SEQ ID NO: 12258 - DNA, 20 bp, Artificial Sequence
  Description of Artificial Sequence: Synthetic oligonucleotide
  Target: ATXN2; (-) strand; PAM type: NNNNGHTT; PAM sequence: GTTTGTTT
ttcctaatttgcagaggtgg

SEQ ID NO: 12259 - DNA, 20 bp, Artificial Sequence
  Description of Artificial Sequence: Synthetic oligonucleotide
  Target: ATXN2; (-) strand; PAM type: NNNNGHTT; PAM sequence: GTGGGTTT
tcagttcctaatttgcagag

SEQ ID NO: 12260 - DNA, 20 bp, Artificial Sequence
  Description of Artificial Sequence: Synthetic oligonucleotide
  Target: ATXN2; (-) strand; PAM type: NNNNGHTT; PAM sequence: ATGAGATT
ggtgcattactgaaaaaggc

SEQ ID NO: 12261 - DNA, 20 bp, Artificial Sequence
  Description of Artificial Sequence: Synthetic oligonucleotide
  Target: ATXN2; (-) strand; PAM type: NNNNGHTT; PAM sequence: TTGGGTTT
taatcaccatgttggtgttt

SEQ ID NO: 12262 - DNA, 20 bp, Artificial Sequence
  Description of Artificial Sequence: Synthetic oligonucleotide
  Target: ATXN2; (-) strand; PAM type: NNNNGHTT; PAM sequence: TGGTGTTT
tcatgatctaatcaccatgt

SEQ ID NO: 12263 - DNA, 20 bp, Artificial Sequence
  Description of Artificial Sequence: Synthetic oligonucleotide
  Target: ATXN2; (-) strand; PAM type: NNNNGHTT; PAM sequence: CACTGTTT
tcttgatgtgttggtaaacc

SEQ ID NO: 12264 - DNA, 20 bp, Artificial Sequence
  Description of Artificial Sequence: Synthetic oligonucleotide
  Target: ATXN2; (-) strand; PAM type: NNNNGHTT; PAM sequence: ACTTGATT
ttattcgtaaatagagatgc

SEQ ID NO: 12265 - DNA, 20 bp, Artificial Sequence
  Description of Artificial Sequence: Synthetic oligonucleotide
  Target: ATXN2; (-) strand; PAM type: NNNNGHTT; PAM sequence: GTTTGTTT
atattttaaaaactttcaac

SEQ ID NO: 12266 - DNA, 20 bp, Artificial Sequence
  Description of Artificial Sequence: Synthetic oligonucleotide
  Target: ATXN2; (-) strand; PAM type: NNNNGHTT; PAM sequence: CAACGTTT
agttatattttaaaaacttt

SEQ ID NO: 12267 - DNA, 20 bp, Artificial Sequence
  Description of Artificial Sequence: Synthetic oligonucleotide
  Target: ATXN2; (-) strand; PAM type: NNNNGHTT; PAM sequence: ATCTGTTT
aatttatcccttaatatttc

SEQ ID NO: 12268 - DNA, 20 bp, Artificial Sequence
  Description of Artificial Sequence: Synthetic oligonucleotide
  Target: ATXN2; (-) strand; PAM type: NNNNGHTT; PAM sequence: GCCTGCTT
tttctttgtatcagttttgt

SEQ ID NO: 12269 - DNA, 20 bp, Artificial Sequence
  Description of Artificial Sequence: Synthetic oligonucleotide
  Target: ATXN2; (-) strand; PAM type: NNNNGHTT; PAM sequence: ATCAGTTT
tgttttctagttttctttgt

SEQ ID NO: 12270 - DNA, 20 bp, Artificial Sequence
  Description of Artificial Sequence: Synthetic oligonucleotide
  Target: ATXN2; (-) strand; PAM type: NNNNGHTT; PAM sequence: TCTAGTTT
cttaagtttcaccagtgttt

SEQ ID NO: 12271 - DNA, 20 bp, Artificial Sequence
  Description of Artificial Sequence: Synthetic oligonucleotide
  Target: ATXN2; (-) strand; PAM type: NNNNGHTT; PAM sequence: CAGTGTTT
atttaagtcttaagtttcac

SEQ ID NO: 12272 - DNA, 20 bp, Artificial Sequence
  Description of Artificial Sequence: Synthetic oligonucleotide
  Target: ATXN2; (-) strand; PAM type: NNNNGHTT; PAM sequence: TTAAGTTT
ctgctccatttatttaagtc

SEQ ID NO: 12273 - DNA, 20 bp, Artificial Sequence
  Description of Artificial Sequence: Synthetic oligonucleotide
  Target: ATXN2; (-) strand; PAM type: NNNNGHTT; PAM sequence: TTGGGATT
aaataaattttagaatcagc

SEQ ID NO: 12274 - DNA, 20 bp, Artificial Sequence
  Description of Artificial Sequence: Synthetic oligonucleotide
  Target: ATXN2; (-) strand; PAM type: NNNNGHTT; PAM sequence: ATCAGCTT
atttgcaaataaattttaga

SEQ ID NO: 12275 - DNA, 20 bp, Artificial Sequence
  Description of Artificial Sequence: Synthetic oligonucleotide
  Target: ATXN2; (-) strand; PAM type: NNNNGHTT; PAM sequence: CCCAGTTT
ctttaagttcatatgagtct

SEQ ID NO: 12276 - DNA, 20 bp, Artificial Sequence
  Description of Artificial Sequence: Synthetic oligonucleotide
  Target: ATXN2; (-) strand; PAM type: NNNNGHTT; PAM sequence: AACTGTTT
tgtatgtgtgtctatttgtg

SEQ ID NO: 12277 - DNA, 20 bp, Artificial Sequence
  Description of Artificial Sequence: Synthetic oligonucleotide
  Target: ATXN2; (-) strand; PAM type: NNNNGHTT; PAM sequence: AGTAGCTT
gagccactgcgcccagccat

SEQ ID NO: 12278 - DNA, 20 bp, Artificial Sequence
  Description of Artificial Sequence: Synthetic oligonucleotide
  Target: ATXN2; (-) strand; PAM type: NNNNGHTT; PAM sequence: CTGGGATT
catctcagcctcccaaagtt

SEQ ID NO: 12279 - DNA, 20 bp, Artificial Sequence
  Description of Artificial Sequence: Synthetic oligonucleotide
  Target: ATXN2; (-) strand; PAM type: NNNNGHTT; PAM sequence: CTAGGATT
tgcctcagcctctcgagtag

SEQ ID NO: 12280 - DNA, 20 bp, Artificial Sequence
  Description of Artificial Sequence: Synthetic oligonucleotide
  Target: ATXN2; (-) strand; PAM type: NNNNGHTT; PAM sequence: AAGCGATT
aacctccacttcccagggtc

SEQ ID NO: 12281 - DNA, 20 bp, Artificial Sequence
  Description of Artificial Sequence: Synthetic oligonucleotide
  Target: ATXN2; (-) strand; PAM type: NNNNGHTT; PAM sequence: GGTGGCTT
accagcctctgttttccatt

SEQ ID NO: 12282 - DNA, 20 bp, Artificial Sequence
  Description of Artificial Sequence: Synthetic oligonucleotide
  Target: ATXN2; (-) strand; PAM type: NNNNGHTT; PAM sequence: CTCTGTTT
tcggtttctctggcaccagc

SEQ ID NO: 12283 - DNA, 20 bp, Artificial Sequence
  Description of Artificial Sequence: Synthetic oligonucleotide
  Target: ATXN2; (-) strand; PAM type: NNNNGHTT; PAM sequence: CTCGGTTT
ttctccaccataaatattta

SEQ ID NO: 12284 - DNA, 20 bp, Artificial Sequence
  Description of Artificial Sequence: Synthetic oligonucleotide
  Target: ATXN2; (-) strand; PAM type: NNNNGHTT; PAM sequence: TCTAGCTT
tgtagggtgtgatgtaaagg

SEQ ID NO: 12285 - DNA, 20 bp, Artificial Sequence
  Description of Artificial Sequence: Synthetic oligonucleotide
  Target: ATXN2; (-) strand; PAM type: NNNNGHTT; PAM sequence: TTAGGTTT
ggtatatggttgatttcagg

SEQ ID NO: 12286 - DNA, 20 bp, Artificial Sequence
  Description of Artificial Sequence: Synthetic oligonucleotide
  Target: ATXN2; (-) strand; PAM type: NNNNGHTT; PAM sequence: GGTTGATT
gtttttatggttaggtatat

SEQ ID NO: 12287 - DNA, 20 bp, Artificial Sequence
  Description of Artificial Sequence: Synthetic oligonucleotide
  Target: ATXN2; (-) strand; PAM type: NNNNGHTT; PAM sequence: GAATGTTT
ttttacgtaccctaggttat

SEQ ID NO: 12288 - DNA, 20 bp, Artificial Sequence
  Description of Artificial Sequence: Synthetic oligonucleotide
  Target: ATXN2; (-) strand; PAM type: NNNNGHTT; PAM sequence: TCATGCTT
tcaagcttttctcttaaggt

SEQ ID NO: 12289 - DNA, 20 bp, Artificial Sequence
  Description of Artificial Sequence: Synthetic oligonucleotide
  Target: ATXN2; (-) strand; PAM type: NNNNGHTT; PAM sequence: TCAAGCTT
ttttaatgaagccttattta

SEQ ID NO: 12290 - DNA, 20 bp, Artificial Sequence
  Description of Artificial Sequence: Synthetic oligonucleotide
  Target: ATXN2; (-) strand; PAM type: NNNNGHTT; PAM sequence: TGCGGTTT
gtgaatattttctcccagtc

SEQ ID NO: 12291 - DNA, 20 bp, Artificial Sequence
  Description of Artificial Sequence: Synthetic oligonucleotide
  Target: ATXN2; (-) strand; PAM type: NNNNGHTT; PAM sequence: TCATGTTT
acaaaaaaaagaaaaaaaag

SEQ ID NO: 12292 - DNA, 20 bp, Artificial Sequence
  Description of Artificial Sequence: Synthetic oligonucleotide
  Target: ATXN2; (-) strand; PAM type: NNNNGHTT; PAM sequence: CTGAGATT
gtgatcgaggttgcagtgag

SEQ ID NO: 12293 - DNA, 20 bp, Artificial Sequence
  Description of Artificial Sequence: Synthetic oligonucleotide
  Target: ATXN2; (-) strand; PAM type: NNNNGHTT; PAM sequence: GGGGGTTT
aatcgcttgagcgaggttgc

SEQ ID NO: 12294 - DNA, 20 bp, Artificial Sequence
  Description of Artificial Sequence: Synthetic oligonucleotide
  Target: ATXN2; (-) strand; PAM type: NNNNGHTT; PAM sequence: AATCGCTT
ttggggggctgaggtgggac

SEQ ID NO: 12295 - DNA, 20 bp, Artificial Sequence
  Description of Artificial Sequence: Synthetic oligonucleotide
  Target: ATXN2; (-) strand; PAM type: NNNNGHTT; PAM sequence: AACAGTTT
ctggatggatcatttgagcc

SEQ ID NO: 12296 - DNA, 20 bp, Artificial Sequence
  Description of Artificial Sequence: Synthetic oligonucleotide
  Target: ATXN2; (-) strand; PAM type: NNNNGHTT; PAM sequence: CAATGTTT
ctaataatttctttttgtct

SEQ ID NO: 12297 - DNA, 20 bp, Artificial Sequence
  Description of Artificial Sequence: Synthetic oligonucleotide
  Target: ATXN2; (-) strand; PAM type: NNNNGHTT; PAM sequence: CTGAGATT
tgcctcggcctcccaaagtg

SEQ ID NO: 12298 - DNA, 20 bp, Artificial Sequence
  Description of Artificial Sequence: Synthetic oligonucleotide
  Target: ATXN2; (-) strand; PAM type: NNNNGHTT; PAM sequence: TGGGGTTT
ttttgtatttttagtgtagg

SEQ ID NO: 12299 - DNA, 20 bp, Artificial Sequence
  Description of Artificial Sequence: Synthetic oligonucleotide
  Target: ATXN2; (-) strand; PAM type: NNNNGHTT; PAM sequence: CTGGGATT
cgccttagcctcccaagtag

SEQ ID NO: 12300 - DNA, 20 bp, Artificial Sequence
  Description of Artificial Sequence: Synthetic oligonucleotide
  Target: ATXN2; (-) strand; PAM type: NNNNGHTT; PAM sequence: GTTTGTTT
gagcacctcatcatgtgtgt

SEQ ID NO: 12301 - DNA, 20 bp, Artificial Sequence
  Description of Artificial Sequence: Synthetic oligonucleotide
  Target: ATXN2; (-) strand; PAM type: NNNNGHTT; PAM sequence: GTGTGTTT
ccaggagcacctcatcatgt

SEQ ID NO: 12302 - DNA, 20 bp, Artificial Sequence
  Description of Artificial Sequence: Synthetic oligonucleotide
  Target: ATXN2; (-) strand; PAM type: NNNNGHTT; PAM sequence: AAGTGATT
aagaaactagcaatcttcta

SEQ ID NO: 12303 - DNA, 20 bp, Artificial Sequence
  Description of Artificial Sequence: Synthetic oligonucleotide
  Target: ATXN2; (-) strand; PAM type: NNNNGHTT; PAM sequence: TTGGGATT
cgccccagcctcccaaagtg

SEQ ID NO: 12304 - DNA, 20 bp, Artificial Sequence
  Description of Artificial Sequence: Synthetic oligonucleotide
  Target: ATXN2; (-) strand; PAM type: NNNNGHTT; PAM sequence: CGGGGTTT
ttttgtatttttagtagaga

SEQ ID NO: 12305 - DNA, 20 bp, Artificial Sequence
  Description of Artificial Sequence: Synthetic oligonucleotide
  Target: ATXN2; (-) strand; PAM type: NNNNGHTT; PAM sequence: CTGGGATT
cgcctcagcctcccaagtag

SEQ ID NO: 12306 - DNA, 20 bp, Artificial Sequence
  Description of Artificial Sequence: Synthetic oligonucleotide
  Target: ATXN2; (-) strand; PAM type: NNNNGHTT; PAM sequence: GCGTGATT
gcccaggctggagttcagtg

SEQ ID NO: 12307 - DNA, 20 bp, Artificial Sequence
  Description of Artificial Sequence: Synthetic oligonucleotide
  Target: ATXN2; (-) strand; PAM type: NNNNGHTT; PAM sequence: TTGTGTTT
gagcatttgtgtacaagtgt

SEQ ID NO: 12308 - DNA, 20 bp, Artificial Sequence
  Description of Artificial Sequence: Synthetic oligonucleotide
  Target: ATXN2; (-) strand; PAM type: NNNNGHTT; PAM sequence: AAGTGTTT
tgctgtgagcatttgtgtac

SEQ ID NO: 12309 - DNA, 20 bp, Artificial Sequence
  Description of Artificial Sequence: Synthetic oligonucleotide
  Target: ATXN2; (-) strand; PAM type: NNNNGHTT; PAM sequence: GCCAGCTT
cgatgggcatttgagttatt

SEQ ID NO: 12310 - DNA, 20 bp, Artificial Sequence
  Description of Artificial Sequence: Synthetic oligonucleotide
  Target: ATXN2; (-) strand; PAM type: NNNNGHTT; PAM sequence: TTATGATT
ttgctgggtagcatttcatt

SEQ ID NO: 12311 - DNA, 20 bp, Artificial Sequence
  Description of Artificial Sequence: Synthetic oligonucleotide
  Target: ATXN2; (-) strand; PAM type: NNNNGHTT; PAM sequence: GCCAGCTT
ggtgtgagtcaccgtgccca

SEQ ID NO: 12312 - DNA, 20 bp, Artificial Sequence
  Description of Artificial Sequence: Synthetic oligonucleotide
  Target: ATXN2; (-) strand; PAM type: NNNNGHTT; PAM sequence: CTGGGATT
tgccttggcctcccaaagtg

SEQ ID NO: 12313 - DNA, 20 bp, Artificial Sequence
  Description of Artificial Sequence: Synthetic oligonucleotide
  Target: ATXN2; (-) strand; PAM type: NNNNGHTT; PAM sequence: ACGGGATT
tttttttttttttagcagag

SEQ ID NO: 12314 - DNA, 20 bp, Artificial Sequence
  Description of Artificial Sequence: Synthetic oligonucleotide
  Target: ATXN2; (-) strand; PAM type: NNNNGHTT; PAM sequence: CTGGGATT
tgcctcagcctcccaagtag

SEQ ID NO: 12315 - DNA, 20 bp, Artificial Sequence
  Description of Artificial Sequence: Synthetic oligonucleotide
  Target: ATXN2; (-) strand; PAM type: NNNNGHTT; PAM sequence: GTTTGTTT
ttattcctttttgtttgttt

SEQ ID NO: 12316 - DNA, 20 bp, Artificial Sequence
  Description of Artificial Sequence: Synthetic oligonucleotide
  Target: ATXN2; (-) strand; PAM type: NNNNGHTT; PAM sequence: GTTTGTTT
cagcttattcctttttgttt

SEQ ID NO: 12317 - DNA, 20 bp, Artificial Sequence
  Description of Artificial Sequence: Synthetic oligonucleotide
  Target: ATXN2; (-) strand; PAM type: NNNNGHTT; PAM sequence: GTTTGTTT
gtatcagcttattccttttt

SEQ ID NO: 12318 - DNA, 20 bp, Artificial Sequence
  Description of Artificial Sequence: Synthetic oligonucleotide
  Target: ATXN2; (-) strand; PAM type: NNNNGHTT; PAM sequence: TTTTGTTT
gttagtatcagcttattcct

SEQ ID NO: 12319 - DNA, 20 bp, Artificial Sequence
  Description of Artificial Sequence: Synthetic oligonucleotide
  Target: ATXN2; (-) strand; PAM type: NNNNGHTT; PAM sequence: ATCAGCTT
aatttgaatttcatgttagt

SEQ ID NO: 12320 - DNA, 20 bp, Artificial Sequence
  Description of Artificial Sequence: Synthetic oligonucleotide
  Target: ATXN2; (-) strand; PAM type: NNNNGHTT; PAM sequence: ACAAGCTT
cgtcccaggacgcaagttgg

SEQ ID NO: 12321 - DNA, 20 bp, Artificial Sequence
  Description of Artificial Sequence: Synthetic oligonucleotide
  Target: ATXN2; (-) strand; PAM type: NNNNGHTT; PAM sequence: GAAAGTTT
caaaacttataatgttttaa

SEQ ID NO: 12322 - DNA, 20 bp, Artificial Sequence
  Description of Artificial Sequence: Synthetic oligonucleotide
  Target: ATXN2; (-) strand; PAM type: NNNNGHTT; PAM sequence: TAATGTTT
aaaaaaaatagcaaaactta

SEQ ID NO: 12323 - DNA, 20 bp, Artificial Sequence
  Description of Artificial Sequence: Synthetic oligonucleotide
  Target: ATXN2; (-) strand; PAM type: NNNNGHTT; PAM sequence: TTTGGCTT
gtaacagaggtgttcaatct

SEQ ID NO: 12324 - DNA, 20 bp, Artificial Sequence
  Description of Artificial Sequence: Synthetic oligonucleotide
  Target: ATXN2; (-) strand; PAM type: NNNNGHTT; PAM sequence: CCTAGATT
gtgagccacctcagccagcc

SEQ ID NO: 12325 - DNA, 20 bp, Artificial Sequence
  Description of Artificial Sequence: Synthetic oligonucleotide
  Target: ATXN2; (-) strand; PAM type: NNNNGHTT; PAM sequence: CTAGGATT
cacctcagcctcccagagtg

SEQ ID NO: 12326 - DNA, 20 bp, Artificial Sequence
  Description of Artificial Sequence: Synthetic oligonucleotide
  Target: ATXN2; (-) strand; PAM type: NNNNGHTT; PAM sequence: TTAGGTTT
ttttctttttttttttttga

SEQ ID NO: 12327 - DNA, 20 bp, Artificial Sequence
  Description of Artificial Sequence: Synthetic oligonucleotide
  Target: ATXN2; (-) strand; PAM type: NNNNGHTT; PAM sequence: TTTTGATT
atttctttttcttttttttt

SEQ ID NO: 12328 - DNA, 20 bp, Artificial Sequence
  Description of Artificial Sequence: Synthetic oligonucleotide
  Target: ATXN2; (-) strand; PAM type: NNNNGHTT; PAM sequence: TTTAGATT
tatagattagatttatcctc

SEQ ID NO: 12329 - DNA, 20 bp, Artificial Sequence
  Description of Artificial Sequence: Synthetic oligonucleotide
  Target: ATXN2; (-) strand; PAM type: NNNNGHTT; PAM sequence: ATTAGATT
tctgccttcttttactatag

SEQ ID NO: 12330 - DNA, 20 bp, Artificial Sequence
  Description of Artificial Sequence: Synthetic oligonucleotide
  Target: ATXN2; (-) strand; PAM type: NNNNGHTT; PAM sequence: TATAGATT
agtaatctgccttcttttac

SEQ ID NO: 12331 - DNA, 20 bp, Artificial Sequence
  Description of Artificial Sequence: Synthetic oligonucleotide
  Target: ATXN2; (-) strand; PAM type: NNNNGHTT; PAM sequence: ACTTGCTT
atatatttgctcatgtaact

SEQ ID NO: 12332 - DNA, 20 bp, Artificial Sequence
  Description of Artificial Sequence: Synthetic oligonucleotide
  Target: ATXN2; (-) strand; PAM type: NNNNGHTT; PAM sequence: ATGAGTTT
ctttttatgtttacatttta

SEQ ID NO: 12333 - DNA, 20 bp, Artificial Sequence
  Description of Artificial Sequence: Synthetic oligonucleotide
  Target: ATXN2; (-) strand; PAM type: NNNNGHTT; PAM sequence: TTATGTTT
acaagaaaatgctcatcttt

SEQ ID NO: 12334 - DNA, 20 bp, Artificial Sequence
  Description of Artificial Sequence: Synthetic oligonucleotide
  Target: ATXN2; (-) strand; PAM type: NNNNGHTT; PAM sequence: ACCAGTTT
tgactatccaaaatgtttta

SEQ ID NO: 12335 - DNA, 20 bp, Artificial Sequence
  Description of Artificial Sequence: Synthetic oligonucleotide
  Target: ATXN2; (-) strand; PAM type: NNNNGHTT; PAM sequence: AAATGTTT
ttgttctaaatgactatcca

SEQ ID NO: 12336 - DNA, 20 bp, Artificial Sequence
  Description of Artificial Sequence: Synthetic oligonucleotide
  Target: ATXN2; (-) strand; PAM type: NNNNGHTT; PAM sequence: AGGAGTTT
tgggaggatcacttgagctc

SEQ ID NO: 12337 - DNA, 20 bp, Artificial Sequence
  Description of Artificial Sequence: Synthetic oligonucleotide
  Target: ATXN2; (-) strand; PAM type: NNNNGHTT; PAM sequence: CGGGGTTT
ttttgtatttttagtagaga

SEQ ID NO: 12338 - DNA, 20 bp, Artificial Sequence
  Description of Artificial Sequence: Synthetic oligonucleotide
  Target: ATXN2; (-) strand; PAM type: NNNNGHTT; PAM sequence: AAGCGATT
aacctccgcctctcagattc

SEQ ID NO: 12339 - DNA, 20 bp, Artificial Sequence
  Description of Artificial Sequence: Synthetic oligonucleotide
  Target: ATXN2; (-) strand; PAM type: NNNNGHTT; PAM sequence: CTCAGATT
cttcactgcaacctccgcct

SEQ ID NO: 12340 - DNA, 20 bp, Artificial Sequence
  Description of Artificial Sequence: Synthetic oligonucleotide
  Target: ATXN2; (-) strand; PAM type: NNNNGHTT; PAM sequence: CTTAGCTT
ctctgatggagtggcgctaa

SEQ ID NO: 12341 - DNA, 20 bp, Artificial Sequence
  Description of Artificial Sequence: Synthetic oligonucleotide
  Target: ATXN2; (-) strand; PAM type: NNNNGHTT; PAM sequence: GTTTGTTT
tctttcctcttaaattgttt

SEQ ID NO: 12342 - DNA, 20 bp, Artificial Sequence
  Description of Artificial Sequence: Synthetic oligonucleotide
  Target: ATXN2; (-) strand; PAM type: NNNNGHTT; PAM sequence: GTTTGTTT
ctattctttcctcttaaatt

SEQ ID NO: 12343 - DNA, 20 bp, Artificial Sequence
  Description of Artificial Sequence: Synthetic oligonucleotide
  Target: ATXN2; (-) strand; PAM type: NNNNGHTT; PAM sequence: AATTGTTT
aagactattctttcctctta

SEQ ID NO: 12344 - DNA, 20 bp, Artificial Sequence
  Description of Artificial Sequence: Synthetic oligonucleotide
  Target: ATXN2; (-) strand; PAM type: NNNNGHTT; PAM sequence: TTTTGCTT
gtagtggtccaggtttttcc

SEQ ID NO: 12345 - DNA, 20 bp, Artificial Sequence
  Description of Artificial Sequence: Synthetic oligonucleotide
  Target: ATXN2; (-) strand; PAM type: NNNNGHTT; PAM sequence: CCAGGTTT
tatgagatgagagtagtggt

SEQ ID NO: 12346 - DNA, 20 bp, Artificial Sequence
  Description of Artificial Sequence: Synthetic oligonucleotide
  Target: ATXN2; (-) strand; PAM type: NNNNGHTT; PAM sequence: TATAGTTT
tataaaactcctatgatttt

SEQ ID NO: 12347 - DNA, 20 bp, Artificial Sequence
  Description of Artificial Sequence: Synthetic oligonucleotide
  Target: ATXN2; (-) strand; PAM type: NNNNGHTT; PAM sequence: CTATGATT
atgaaacgcctataaaactc

SEQ ID NO: 12348 - DNA, 20 bp, Artificial Sequence
  Description of Artificial Sequence: Synthetic oligonucleotide
  Target: ATXN2; (-) strand; PAM type: NNNNGHTT; PAM sequence: CAGAGATT
cattgcctaactcaaggcca

SEQ ID NO: 12349 - DNA, 20 bp, Artificial Sequence
  Description of Artificial Sequence: Synthetic oligonucleotide
  Target: ATXN2; (-) strand; PAM type: NNNNGHTT; PAM sequence: GTTTGTTT
tgatgaagttcaatttatct

SEQ ID NO: 12350 - DNA, 20 bp, Artificial Sequence
  Description of Artificial Sequence: Synthetic oligonucleotide
  Target: ATXN2; (-) strand; PAM type: NNNNGHTT; PAM sequence: ATCTGTTT
attttgatgaagttcaattt

SEQ ID NO: 12351 - DNA, 20 bp, Artificial Sequence
  Description of Artificial Sequence: Synthetic oligonucleotide
  Target: ATXN2; (-) strand; PAM type: NNNNGHTT; PAM sequence: CACAGTTT
cttgatggtgttctttgtaa

SEQ ID NO: 12352 - DNA, 20 bp, Artificial Sequence
  Description of Artificial Sequence: Synthetic oligonucleotide
  Target: ATXN2; (-) strand; PAM type: NNNNGHTT; PAM sequence: ACTTGCTT
tgactataggttatcttttt

SEQ ID NO: 12353 - DNA, 20 bp, Artificial Sequence
  Description of Artificial Sequence: Synthetic oligonucleotide
  Target: ATXN2; (-) strand; PAM type: NNNNGHTT; PAM sequence: CTGAGATT
tgcctcaccttcccaaagtg

SEQ ID NO: 12354 - DNA, 20 bp, Artificial Sequence
  Description of Artificial Sequence: Synthetic oligonucleotide
  Target: ATXN2; (-) strand; PAM type: NNNNGHTT; PAM sequence: CCGTGCTT
tttgtagagatggagcttct

SEQ ID NO: 12355 - DNA, 20 bp, Artificial Sequence
  Description of Artificial Sequence: Synthetic oligonucleotide
  Target: ATXN2; (-) strand; PAM type: NNNNGHTT; PAM sequence: TGGAGCTT
ttttatattttttgtagaga

SEQ ID NO: 12356 - DNA, 20 bp, Artificial Sequence
  Description of Artificial Sequence: Synthetic oligonucleotide
  Target: ATXN2; (-) strand; PAM type: NNNNGHTT; PAM sequence: CTTCGCTT
caatctcggctcactgcagc

SEQ ID NO: 12357 - DNA, 20 bp, Artificial Sequence
  Description of Artificial Sequence: Synthetic oligonucleotide
  Target: ATXN2; (-) strand; PAM type: NNNNGHTT; PAM sequence: TATTGTTT
tgtggttttttgtttttttg

SEQ ID NO: 12358 - DNA, 20 bp, Artificial Sequence
  Description of Artificial Sequence: Synthetic oligonucleotide
  Target: ATXN2; (-) strand; PAM type: NNNNGHTT; PAM sequence: TTTTGTTT
tatgaagtgtcattgtggtt

SEQ ID NO: 12359 - DNA, 20 bp, Artificial Sequence
  Description of Artificial Sequence: Synthetic oligonucleotide
  Target: ATXN2; (-) strand; PAM type: NNNNGHTT; PAM sequence: TGTGGTTT
tagtggttatgaagtgtcat

SEQ ID NO: 12360 - DNA, 20 bp, Artificial Sequence
  Description of Artificial Sequence: Synthetic oligonucleotide
  Target: ATXN2; (-) strand; PAM type: NNNNGHTT; PAM sequence: TTTGGTTT
tcataaataaccgatatgtc

SEQ ID NO: 12361 - DNA, 20 bp, Artificial Sequence
  Description of Artificial Sequence: Synthetic oligonucleotide
  Target: ATXN2; (-) strand; PAM type: NNNNGHTT; PAM sequence: TCCAGTTT
taccagtaatgtacaagtgt

SEQ ID NO: 12362 - DNA, 20 bp, Artificial Sequence
  Description of Artificial Sequence: Synthetic oligonucleotide
  Target: ATXN2; (-) strand; PAM type: NNNNGHTT; PAM sequence: CTTAGATT
aaaattttttttcatgtggc

SEQ ID NO: 12363 - DNA, 20 bp, Artificial Sequence
  Description of Artificial Sequence: Synthetic oligonucleotide
  Target: ATXN2; (-) strand; PAM type: NNNNGHTT; PAM sequence: AATCGCTT
ggctgaggcaggagcatcag

SEQ ID NO: 12364 - DNA, 20 bp, Artificial Sequence
  Description of Artificial Sequence: Synthetic oligonucleotide
  Target: ATXN2; (-) strand; PAM type: NNNNGHTT; PAM sequence: AGGAGTTT
tgggcagatgacttgaggtc

SEQ ID NO: 12365 - DNA, 20 bp, Artificial Sequence
  Description of Artificial Sequence: Synthetic oligonucleotide
  Target: ATXN2; (-) strand; PAM type: NNNNGHTT; PAM sequence: TGTGGATT
ctggcaatgagtaatgcttt

SEQ ID NO: 12366 - DNA, 20 bp, Artificial Sequence
  Description of Artificial Sequence: Synthetic oligonucleotide
  Target: ATXN2; (-) strand; PAM type: NNNNGHTT; PAM sequence: TAATGCTT
ttcctttttctggcaatgag

SEQ ID NO: 12367 - DNA, 20 bp, Artificial Sequence
  Description of Artificial Sequence: Synthetic oligonucleotide
  Target: ATXN2; (-) strand; PAM type: NNNNGHTT; PAM sequence: TTTGGATT
ctatcatcagttgatgaaca

SEQ ID NO: 12368 - DNA, 20 bp, Artificial Sequence
  Description of Artificial Sequence: Synthetic oligonucleotide
  Target: ATXN2; (-) strand; PAM type: NNNNGHTT; PAM sequence: CTGGGATT
tccctcggcctcccaaagtg

SEQ ID NO: 12369 - DNA, 20 bp, Artificial Sequence
  Description of Artificial Sequence: Synthetic oligonucleotide
  Target: ATXN2; (-) strand; PAM type: NNNNGHTT; PAM sequence: AAGGGCTT
aaaaaaaaaaatagtagaga

SEQ ID NO: 12370 - DNA, 20 bp, Artificial Sequence
  Description of Artificial Sequence: Synthetic oligonucleotide
  Target: ATXN2; (-) strand; PAM type: NNNNGHTT; PAM sequence: GACAGTTT
actgtagtaagagcaagcat

SEQ ID NO: 12371 - DNA, 20 bp, Artificial Sequence
  Description of Artificial Sequence: Synthetic oligonucleotide
  Target: ATXN2; (-) strand; PAM type: NNNNGHTT; PAM sequence: CAATGATT
ccagcaggtgtagctgtttt

SEQ ID NO: 12372 - DNA, 20 bp, Artificial Sequence
  Description of Artificial Sequence: Synthetic oligonucleotide
  Target: ATXN2; (-) strand; PAM type: NNNNGHTT; PAM sequence: AGCTGTTT
catgtatcaccagcaggtgt

SEQ ID NO: 12373 - DNA, 20 bp, Artificial Sequence
  Description of Artificial Sequence: Synthetic oligonucleotide
  Target: ATXN2; (-) strand; PAM type: NNNNGHTT; PAM sequence: GTGGGTTT
ttagaaattctgagaagaaa

SEQ ID NO: 12374 - DNA, 20 bp, Artificial Sequence
  Description of Artificial Sequence: Synthetic oligonucleotide
  Target: ATXN2; (-) strand; PAM type: NNNNGHTT; PAM sequence: TAGAGTTT
gaaataatgtaatcaaatta

SEQ ID NO: 12375 - DNA, 20 bp, Artificial Sequence
  Description of Artificial Sequence: Synthetic oligonucleotide
  Target: ATXN2; (-) strand; PAM type: NNNNGHTT; PAM sequence: TTTCGTTT
tgttaactaaaactcttaat

SEQ ID NO: 12376 - DNA, 20 bp, Artificial Sequence
  Description of Artificial Sequence: Synthetic oligonucleotide
  Target: ATXN2; (-) strand; PAM type: NNNNGHTT; PAM sequence: TTGTGATT
tttctccatgtttgacctaa

SEQ ID NO: 12377 - DNA, 20 bp, Artificial Sequence
  Description of Artificial Sequence: Synthetic oligonucleotide
  Target: ATXN2; (-) strand; PAM type: NNNNGHTT; PAM sequence: CCATGTTT
ctgcgcccagccaattttct

SEQ ID NO: 12378 - DNA, 20 bp, Artificial Sequence
  Description of Artificial Sequence: Synthetic oligonucleotide
  Target: ATXN2; (-) strand; PAM type: NNNNGHTT; PAM sequence: CTCTGCTT
ggctcaagcgatctgcctgg

SEQ ID NO: 12379 - DNA, 20 bp, Artificial Sequence
  Description of Artificial Sequence: Synthetic oligonucleotide
  Target: ATXN2; (-) strand; PAM type: NNNNGHTT; PAM sequence: ATGGGTTT
tttttgtattttttgtagag

SEQ ID NO: 12380 - DNA, 20 bp, Artificial Sequence
  Description of Artificial Sequence: Synthetic oligonucleotide
  Target: ATXN2; (-) strand; PAM type: NNNNGHTT; PAM sequence: TCTTGCTT
tgtatgtgtttgatacaggg

SEQ ID NO: 12381 - DNA, 20 bp, Artificial Sequence
  Description of Artificial Sequence: Synthetic oligonucleotide
  Target: ATXN2; (-) strand; PAM type: NNNNGHTT; PAM sequence: ATGTGTTT
gtgtgtgtgtgtgtgtgtgt

SEQ ID NO: 12382 - DNA, 20 bp, Artificial Sequence
  Description of Artificial Sequence: Synthetic oligonucleotide
  Target: ATXN2; (-) strand; PAM type: NNNNGHTT; PAM sequence: GGGTGTTT
tttcctcaatgtgttttttt

SEQ ID NO: 12383 - DNA, 20 bp, Artificial Sequence
  Description of Artificial Sequence: Synthetic oligonucleotide
  Target: ATXN2; (-) strand; PAM type: NNNNGHTT; PAM sequence: ATGTGTTT
gaattaataagatttcctca

SEQ ID NO: 12384 - DNA, 20 bp, Artificial Sequence
  Description of Artificial Sequence: Synthetic oligonucleotide
  Target: ATXN2; (-) strand; PAM type: NNNNGHTT; PAM sequence: ATAAGATT
ttttcatttttcctgaatta

SEQ ID NO: 12385 - DNA, 20 bp, Artificial Sequence
  Description of Artificial Sequence: Synthetic oligonucleotide
  Target: ATXN2; (-) strand; PAM type: NNNNGHTT; PAM sequence: TAAAGTTT
caataattgcctttctgaca

SEQ ID NO: 12386 - DNA, 20 bp, Artificial Sequence
  Description of Artificial Sequence: Synthetic oligonucleotide
  Target: ATXN2; (-) strand; PAM type: NNNNGHTT; PAM sequence: GAGTGATT
tttgccaaccagttaattta

SEQ ID NO: 12387 - DNA, 20 bp, Artificial Sequence
  Description of Artificial Sequence: Synthetic oligonucleotide
  Target: ATXN2; (-) strand; PAM type: NNNNGHTT; PAM sequence: AAGGGTTT
tttaatgttggaaaatgcta

SEQ ID NO: 12388 - DNA, 20 bp, Artificial Sequence
  Description of Artificial Sequence: Synthetic oligonucleotide
  Target: ATXN2; (-) strand; PAM type: NNNNGHTT; PAM sequence: CTGTGCTT
tagttgcataaactagtatt

SEQ ID NO: 12389 - DNA, 20 bp, Artificial Sequence
  Description of Artificial Sequence: Synthetic oligonucleotide
  Target: ATXN2; (-) strand; PAM type: NNNNGHTT; PAM sequence: GGATGTTT
ctcaaaaagaaaaataagat

SEQ ID NO: 12390 - DNA, 20 bp, Artificial Sequence
  Description of Artificial Sequence: Synthetic oligonucleotide
  Target: ATXN2; (-) strand; PAM type: NNNNGHTT; PAM sequence: TCCAGCTT
ctgtgactgcaccactgggc

SEQ ID NO: 12391 - DNA, 20 bp, Artificial Sequence
  Description of Artificial Sequence: Synthetic oligonucleotide
  Target: ATXN2; (-) strand; PAM type: NNNNGHTT; PAM sequence: GGGAGTTT
ggtgggcagatcacatgacc

SEQ ID NO: 12392 - DNA, 20 bp, Artificial Sequence
  Description of Artificial Sequence: Synthetic oligonucleotide
  Target: ATXN2; (-) strand; PAM type: NNNNGHTT; PAM sequence: CTAGGCTT
ctattagaaggatgtttcgg

SEQ ID NO: 12393 - DNA, 20 bp, Artificial Sequence
  Description of Artificial Sequence: Synthetic oligonucleotide
  Target: ATXN2; (-) strand; PAM type: NNNNGHTT; PAM sequence: GGATGTTT
atgttaagatcctattagaa

SEQ ID NO: 12394 - DNA, 20 bp, Artificial Sequence
  Description of Artificial Sequence: Synthetic oligonucleotide
  Target: ATXN2; (-) strand; PAM type: NNNNGHTT; PAM sequence: CCTTGCTT
ttaatttactagattgctaa

SEQ ID NO: 12395 - DNA, 20 bp, Artificial Sequence
  Description of Artificial Sequence: Synthetic oligonucleotide
  Target: ATXN2; (-) strand; PAM type: NNNNGHTT; PAM sequence: ACTAGATT
agggtttgctagattaattt

SEQ ID NO: 12396 - DNA, 20 bp, Artificial Sequence
  Description of Artificial Sequence: Synthetic oligonucleotide
  Target: ATXN2; (-) strand; PAM type: NNNNGHTT; PAM sequence: GCTAGATT
aaatttgaagaagagggttt

SEQ ID NO: 12397 - DNA, 20 bp, Artificial Sequence
  Description of Artificial Sequence: Synthetic oligonucleotide
  Target: ATXN2; (-) strand; PAM type: NNNNGHTT; PAM sequence: GAGGGTTT
ctgaacttaaatttgaagaa

SEQ ID NO: 12398 - DNA, 20 bp, Artificial Sequence
  Description of Artificial Sequence: Synthetic oligonucleotide
  Target: ATXN2; (-) strand; PAM type: NNNNGHTT; PAM sequence: ATCTGATT
ccaaagctttttgatctgaa

SEQ ID NO: 12399 - DNA, 20 bp, Artificial Sequence
  Description of Artificial Sequence: Synthetic oligonucleotide
  Target: ATXN2; (-) strand; PAM type: NNNNGHTT; PAM sequence: CAAAGCTT
aaaaaaaaaaaagttaattc

SEQ ID NO: 12400 - DNA, 20 bp, Artificial Sequence
  Description of Artificial Sequence: Synthetic oligonucleotide
  Target: ATXN2; (-) strand; PAM type: NNNNGHTT; PAM sequence: AATTGCTT
aggtggggctgaggcaggag

SEQ ID NO: 12401 - DNA, 20 bp, Artificial Sequence
  Description of Artificial Sequence: Synthetic oligonucleotide
  Target: ATXN2; (-) strand; PAM type: NNNNGHTT; PAM sequence: AGTAGTTT
tgggtgtatcacctgaggtc

SEQ ID NO: 12402 - DNA, 20 bp, Artificial Sequence
  Description of Artificial Sequence: Synthetic oligonucleotide
  Target: ATXN2; (-) strand; PAM type: NNNNGHTT; PAM sequence: GGTGGCTT
cataaatactggctgggcat

SEQ ID NO: 12403 - DNA, 20 bp, Artificial Sequence
  Description of Artificial Sequence: Synthetic oligonucleotide
  Target: ATXN2; (-) strand; PAM type: NNNNGHTT; PAM sequence: CTGTGATT
gaagtagaggctgcagtgag

SEQ ID NO: 12404 - DNA, 20 bp, Artificial Sequence
  Description of Artificial Sequence: Synthetic oligonucleotide
  Target: ATXN2; (-) strand; PAM type: NNNNGHTT; PAM sequence: AGCTGTTT
tggcatatgcctgtagcccc

SEQ ID NO: 12405 - DNA, 20 bp, Artificial Sequence
  Description of Artificial Sequence: Synthetic oligonucleotide
  Target: ATXN2; (-) strand; PAM type: NNNNGHTT; PAM sequence: GATTGCTT
ttgggaggccaaggcaggag

SEQ ID NO: 12406 - DNA, 20 bp, Artificial Sequence
  Description of Artificial Sequence: Synthetic oligonucleotide
  Target: ATXN2; (-) strand; PAM type: NNNNGHTT; PAM sequence: GGAGGATT
cactttgggaggccaaggca

SEQ ID NO: 12407 - DNA, 20 bp, Artificial Sequence
  Description of Artificial Sequence: Synthetic oligonucleotide
  Target: ATXN2; (-) strand; PAM type: NNNNGHTT; PAM sequence: TTGTGATT
ggagaaaaaatgcccatcag

SEQ ID NO: 12408 - DNA, 20 bp, Artificial Sequence
  Description of Artificial Sequence: Synthetic oligonucleotide
  Target: ATXN2; (-) strand; PAM type: NNNNGHTT; PAM sequence: CATGGATT
caacattacatagatattca

SEQ ID NO: 12409 - DNA, 20 bp, Artificial Sequence
  Description of Artificial Sequence: Synthetic oligonucleotide
  Target: ATXN2; (-) strand; PAM type: NNNNGHTT; PAM sequence: ATTGGCTT
actttttgatgaggctatgc

SEQ ID NO: 12410 - DNA, 20 bp, Artificial Sequence
  Description of Artificial Sequence: Synthetic oligonucleotide
  Target: ATXN2; (-) strand; PAM type: NNNNGHTT; PAM sequence: TGTAGTTT
gtttataatgaataaatagt

SEQ ID NO: 12411 - DNA, 20 bp, Artificial Sequence
  Description of Artificial Sequence: Synthetic oligonucleotide
  Target: ATXN2; (-) strand; PAM type: NNNNGHTT; PAM sequence: CTAAGTTT
atgctgcatgaattgagtaa

SEQ ID NO: 12412 - DNA, 20 bp, Artificial Sequence
  Description of Artificial Sequence: Synthetic oligonucleotide
  Target: ATXN2; (-) strand; PAM type: NNNNGHTT; PAM sequence: TGTAGTTT
taatcctgcctgtgtttgct

SEQ ID NO: 12413 - DNA, 20 bp, Artificial Sequence
  Description of Artificial Sequence: Synthetic oligonucleotide
  Target: ATXN2; (-) strand; PAM type: NNNNGHTT; PAM sequence: GTTTGCTT
gtgagaataatcctgcctgt

SEQ ID NO: 12414 - DNA, 20 bp, Artificial Sequence
  Description of Artificial Sequence: Synthetic oligonucleotide
  Target: ATXN2; (-) strand; PAM type: NNNNGHTT; PAM sequence: CTGTGTTT
aaaggtgagaataatcctgc

SEQ ID NO: 12415 - DNA, 20 bp, Artificial Sequence
  Description of Artificial Sequence: Synthetic oligonucleotide
  Target: ATXN2; (-) strand; PAM type: NNNNGHTT; PAM sequence: TGGGGTTT
ggtttagatttactgtagtt

SEQ ID NO: 12416 - DNA, 20 bp, Artificial Sequence
  Description of Artificial Sequence: Synthetic oligonucleotide
  Target: ATXN2; (-) strand; PAM type: NNNNGHTT; PAM sequence: TGTAGTTT
aaaagatggtttagatttac

SEQ ID NO: 12417 - DNA, 20 bp, Artificial Sequence
  Description of Artificial Sequence: Synthetic oligonucleotide
  Target: ATXN2; (-) strand; PAM type: NNNNGHTT; PAM sequence: TTTAGATT
gttttctgtgaaaaagatgg

SEQ ID NO: 12418 - DNA, 20 bp, Artificial Sequence
  Description of Artificial Sequence: Synthetic oligonucleotide
  Target: ATXN2; (-) strand; PAM type: NNNNGHTT; PAM sequence: GATGGTTT
agaatgttttctgtgaaaaa

SEQ ID NO: 12419 - DNA, 20 bp, Artificial Sequence
  Description of Artificial Sequence: Synthetic oligonucleotide
  Target: ATXN2; (-) strand; PAM type: NNNNGHTT; PAM sequence: GAATGTTT
gtatgaggacctaaatctga

SEQ ID NO: 12420 - DNA, 20 bp, Artificial Sequence
  Description of Artificial Sequence: Synthetic oligonucleotide
  Target: ATXN2; (-) strand; PAM type: NNNNGHTT; PAM sequence: CAGAGATT
atttgaaacagacaggcatg

SEQ ID NO: 12421 - DNA, 20 bp, Artificial Sequence
  Description of Artificial Sequence: Synthetic oligonucleotide
  Target: ATXN2; (-) strand; PAM type: NNNNGHTT; PAM sequence: TTAGGTTT
tatctgacaccaagcactct

SEQ ID NO: 12422 - DNA, 20 bp, Artificial Sequence
  Description of Artificial Sequence: Synthetic oligonucleotide
  Target: ATXN2; (-) strand; PAM type: NNNNGHTT; PAM sequence: AATTGTTT
gatgttcacttagcctcccc

SEQ ID NO: 12423 - DNA, 20 bp, Artificial Sequence
  Description of Artificial Sequence: Synthetic oligonucleotide
  Target: ATXN2; (-) strand; PAM type: NNNNGHTT; PAM sequence: GTTTGTTT
ctccagtttatactcagcct

SEQ ID NO: 12424 - DNA, 20 bp, Artificial Sequence
  Description of Artificial Sequence: Synthetic oligonucleotide
  Target: ATXN2; (-) strand; PAM type: NNNNGHTT; PAM sequence: GCCTGTTT
ccaactccagtttatactca

SEQ ID NO: 12425 - DNA, 20 bp, Artificial Sequence
  Description of Artificial Sequence: Synthetic oligonucleotide
  Target: ATXN2; (-) strand; PAM type: NNNNGHTT; PAM sequence: TCCAGTTT
gtgggtcatcaacagccaac

SEQ ID NO: 12426 - DNA, 20 bp, Artificial Sequence
  Description of Artificial Sequence: Synthetic oligonucleotide
  Target: ATXN2; (-) strand; PAM type: NNNNGHTT; PAM sequence: TGTTGTTT
cttgagataattgaatttat

SEQ ID NO: 12427 - DNA, 20 bp, Artificial Sequence
  Description of Artificial Sequence: Synthetic oligonucleotide
  Target: ATXN2; (-) strand; PAM type: NNNNGHTT; PAM sequence: TTTTGTTT
tgaaaatttatgtgctgtgt

SEQ ID NO: 12428 - DNA, 20 bp, Artificial Sequence
  Description of Artificial Sequence: Synthetic oligonucleotide
  Target: ATXN2; (-) strand; PAM type: NNNNGHTT; PAM sequence: CTGTGTTT
gaaatgtgaaaatttatgtg

SEQ ID NO: 12429 - DNA, 20 bp, Artificial Sequence
  Description of Artificial Sequence: Synthetic oligonucleotide
  Target: ATXN2; (-) strand; PAM type: NNNNGHTT; PAM sequence: CAAAGTTT
ttttaatattttttaattga

SEQ ID NO: 12430 - DNA, 20 bp, Artificial Sequence
  Description of Artificial Sequence: Synthetic oligonucleotide
  Target: ATXN2; (-) strand; PAM type: NNNNGHTT; PAM sequence: CACTGTTT
agtttcttaaaaatagctgc

SEQ ID NO: 12431 - DNA, 20 bp, Artificial Sequence
  Description of Artificial Sequence: Synthetic oligonucleotide
  Target: ATXN2; (-) strand; PAM type: NNNNGHTT; PAM sequence: ATCAGTTT
taatttttaaaaacacttcc

SEQ ID NO: 12432 - DNA, 20 bp, Artificial Sequence
  Description of Artificial Sequence: Synthetic oligonucleotide
  Target: ATXN2; (-) strand; PAM type: NNNNGHTT; PAM sequence: ACATGATT
ataggttgtatgcgaatact

SEQ ID NO: 12433 - DNA, 20 bp, Artificial Sequence
  Description of Artificial Sequence: Synthetic oligonucleotide
  Target: ATXN2; (-) strand; PAM type: NNNNGHTT; PAM sequence: CCTTGTTT
acaatacagtaaagcattta

SEQ ID NO: 12434 - DNA, 20 bp, Artificial Sequence
  Description of Artificial Sequence: Synthetic oligonucleotide
  Target: ATXN2; (-) strand; PAM type: NNNNGHTT; PAM sequence: AGACGTTT
aatctatactgaacacatgc

SEQ ID NO: 12435 - DNA, 20 bp, Artificial Sequence
  Description of Artificial Sequence: Synthetic oligonucleotide
  Target: ATXN2; (-) strand; PAM type: NNNNGHTT; PAM sequence: ACTGGATT
gcacctgagggttttgcatc

SEQ ID NO: 12436 - DNA, 20 bp, Artificial Sequence
  Description of Artificial Sequence: Synthetic oligonucleotide
  Target: ATXN2; (-) strand; PAM type: NNNNGHTT; PAM sequence: GAGGGTTT
tagatacgtcctctgcacct

SEQ ID NO: 12437 - DNA, 20 bp, Artificial Sequence
  Description of Artificial Sequence: Synthetic oligonucleotide
  Target: ATXN2; (-) strand; PAM type: NNNNGHTT; PAM sequence: TCAGGTTT
atggttggctagctaggctg

SEQ ID NO: 12438 - DNA, 20 bp, Artificial Sequence
  Description of Artificial Sequence: Synthetic oligonucleotide
  Target: ATXN2; (-) strand; PAM type: NNNNGHTT; PAM sequence: CTTTGTTT
tttaaacattaaaaaaaggt

SEQ ID NO: 12439 - DNA, 20 bp, Artificial Sequence
  Description of Artificial Sequence: Synthetic oligonucleotide
  Target: ATXN2; (-) strand; PAM type: NNNNGHTT; PAM sequence: TTTTGTTT
ttccatacctgccatctgaa

SEQ ID NO: 12440 - DNA, 20 bp, Artificial Sequence
  Description of Artificial Sequence: Synthetic oligonucleotide
  Target: ATXN2; (-) strand; PAM type: NNNNGHTT; PAM sequence: GTAGGTTT
acccacgttccttctctcag

SEQ ID NO: 12441 - DNA, 20 bp, Artificial Sequence
  Description of Artificial Sequence: Synthetic oligonucleotide
  Target: ATXN2; (-) strand; PAM type: NNNNGHTT; PAM sequence: TGTAGATT
ttagagcaacgtaaagtcca

SEQ ID NO: 12442 - DNA, 20 bp, Artificial Sequence
  Description of Artificial Sequence: Synthetic oligonucleotide
  Target: ATXN2; (-) strand; PAM type: NNNNGHTT; PAM sequence: GGAAGATT
ttttttaaattgtcaggtat

SEQ ID NO: 12443 - DNA, 20 bp, Artificial Sequence
  Description of Artificial Sequence: Synthetic oligonucleotide
  Target: ATXN2; (-) strand; PAM type: NNNNGHTT; PAM sequence: AACAGTTT
attagtgatcttctagtgag

SEQ ID NO: 12444 - DNA, 20 bp, Artificial Sequence
  Description of Artificial Sequence: Synthetic oligonucleotide
  Target: ATXN2; (-) strand; PAM type: NNNNGHTT; PAM sequence: AAACGATT
aagtgtatatgtttcaataa

SEQ ID NO: 12445 - DNA, 20 bp, Artificial Sequence
  Description of Artificial Sequence: Synthetic oligonucleotide
  Target: ATXN2; (-) strand; PAM type: NNNNGHTT; PAM sequence: ATATGTTT
ggaatgggcaatataagtgt

SEQ ID NO: 12446 - DNA, 20 bp, Artificial Sequence
  Description of Artificial Sequence: Synthetic oligonucleotide
  Target: ATXN2; (-) strand; PAM type: NNNNGHTT; PAM sequence: AAGGGATT
cttttatggctgtattcttt

SEQ ID NO: 12447 - DNA, 20 bp, Artificial Sequence
  Description of Artificial Sequence: Synthetic oligonucleotide
  Target: ATXN2; (-) strand; PAM type: NNNNGHTT; PAM sequence: CTCAGATT
agaggaacggttgtatatta

SEQ ID NO: 12448 - DNA, 20 bp, Artificial Sequence
  Description of Artificial Sequence: Synthetic oligonucleotide
  Target: ATXN2; (-) strand; PAM type: NNNNGHTT; PAM sequence: TTTTGATT
aaggaaaaaaaaaaagtatt

SEQ ID NO: 12449 - DNA, 20 bp, Artificial Sequence
  Description of Artificial Sequence: Synthetic oligonucleotide
  Target: ATXN2; (-) strand; PAM type: NNNNGHTT; PAM sequence: CCAAGATT
gaggcagaggttgcagtgag

SEQ ID NO: 12450 - DNA, 20 bp, Artificial Sequence
  Description of Artificial Sequence: Synthetic oligonucleotide
  Target: ATXN2; (-) strand; PAM type: NNNNGHTT; PAM sequence: AATGGCTT
tcaggaggctaaggcaagag

SEQ ID NO: 12451 - DNA, 20 bp, Artificial Sequence
  Description of Artificial Sequence: Synthetic oligonucleotide
  Target: ATXN2; (-) strand; PAM type: NNNNGHTT; PAM sequence: TGTTGATT
gtcttttcagctcaagtgtt

SEQ ID NO: 12452 - DNA, 20 bp, Artificial Sequence
  Description of Artificial Sequence: Synthetic oligonucleotide
  Target: ATXN2; (-) strand; PAM type: NNNNGHTT; PAM sequence: AAGTGTTT
agctactgtcttttcagctc

SEQ ID NO: 12453 - DNA, 20 bp, Artificial Sequence
  Description of Artificial Sequence: Synthetic oligonucleotide
  Target: ATXN2; (-) strand; PAM type: NNNNGHTT; PAM sequence: AATTGCTT
aaggatactgttatgttaag

SEQ ID NO: 12454 - DNA, 20 bp, Artificial Sequence
  Description of Artificial Sequence: Synthetic oligonucleotide
  Target: ATXN2; (-) strand; PAM type: NNNNGHTT; PAM sequence: AATTGCTT
tcgggaggctgaggcaggag

SEQ ID NO: 12455 - DNA, 20 bp, Artificial Sequence
  Description of Artificial Sequence: Synthetic oligonucleotide
  Target: ATXN2; (-) strand; PAM type: NNNNGHTT; PAM sequence: GGTAGATT
cactctgggaggtccaagca

SEQ ID NO: 12456 - DNA, 20 bp, Artificial Sequence
  Description of Artificial Sequence: Synthetic oligonucleotide
  Target: ATXN2; (-) strand; PAM type: NNNNGHTT; PAM sequence: TCTTGATT
ataaattggggactgcttat

SEQ ID NO: 12457 - DNA, 20 bp, Artificial Sequence
  Description of Artificial Sequence: Synthetic oligonucleotide
  Target: ATXN2; (-) strand; PAM type: NNNNGHTT; PAM sequence: GACTGCTT
cagcttattgataaattggg

SEQ ID NO: 12458 - DNA, 20 bp, Artificial Sequence
  Description of Artificial Sequence: Synthetic oligonucleotide
  Target: ATXN2; (-) strand; PAM type: NNNNGHTT; PAM sequence: TGCAGCTT
ttaaagctgaagttttggaa

SEQ ID NO: 12459 - DNA, 20 bp, Artificial Sequence
  Description of Artificial Sequence: Synthetic oligonucleotide
  Target: ATXN2; (-) strand; PAM type: NNNNGHTT; PAM sequence: TGAAGTTT
ccaaacaatccagttaaagc

SEQ ID NO: 12460 - DNA, 20 bp, Artificial Sequence
  Description of Artificial Sequence: Synthetic oligonucleotide
  Target: ATXN2; (-) strand; PAM type: NNNNGHTT; PAM sequence: AGGTGTTT
aacttaactaccattgactt

SEQ ID NO: 12461 - DNA, 20 bp, Artificial Sequence
  Description of Artificial Sequence: Synthetic oligonucleotide
  Target: ATXN2; (-) strand; PAM type: NNNNGHTT; PAM sequence: TTTAGATT
aaactgtgttttagttaatg

SEQ ID NO: 12462 - DNA, 20 bp, Artificial Sequence
  Description of Artificial Sequence: Synthetic oligonucleotide
  Target: ATXN2; (-) strand; PAM type: NNNNGHTT; PAM sequence: TAATGTTT
atcagaaactgtgttttagt

SEQ ID NO: 12463 - DNA, 20 bp, Artificial Sequence
  Description of Artificial Sequence: Synthetic oligonucleotide
  Target: ATXN2; (-) strand; PAM type: NNNNGHTT; PAM sequence: CTGTGTTT
aaaatatttttcatcagaaa

SEQ ID NO: 12464 - DNA, 20 bp, Artificial Sequence
  Description of Artificial Sequence: Synthetic oligonucleotide
  Target: ATXN2; (-) strand; PAM type: NNNNGHTT; PAM sequence: CGGTGCTT
ctgtcaaggagagaagcatg

SEQ ID NO: 12465 - DNA, 20 bp, Artificial Sequence
  Description of Artificial Sequence: Synthetic oligonucleotide
  Target: ATXN2; (-) strand; PAM type: NNNNGHTT; PAM sequence: ACTGGATT
aattcaggggacctatcttt

SEQ ID NO: 12466 - DNA, 20 bp, Artificial Sequence
  Description of Artificial Sequence: Synthetic oligonucleotide
  Target: ATXN2; (-) strand; PAM type: NNNNGHTT; PAM sequence: AAAAGTTT
aaaacaaggcataaattaag

SEQ ID NO: 12467 - DNA, 20 bp, Artificial Sequence
  Description of Artificial Sequence: Synthetic oligonucleotide
  Target: ATXN2; (-) strand; PAM type: NNNNGHTT; PAM sequence: CTTAGTTT
agactactttatacattgcc

SEQ ID NO: 12468 - DNA, 20 bp, Artificial Sequence
  Description of Artificial Sequence: Synthetic oligonucleotide
  Target: ATXN2; (-) strand; PAM type: NNNNGHTT; PAM sequence: TAAGGATT
gacaaaattgaaccaagtgc

SEQ ID NO: 12469 - DNA, 20 bp, Artificial Sequence
  Description of Artificial Sequence: Synthetic oligonucleotide
  Target: ATXN2; (-) strand; PAM type: NNNNGHTT; PAM sequence: AAGAGATT
aatagagagggagaaaaatc

SEQ ID NO: 12470 - DNA, 20 bp, Artificial Sequence
  Description of Artificial Sequence: Synthetic oligonucleotide
  Target: ATXN2; (-) strand; PAM type: NNNNGHTT; PAM sequence: AATTGTTT
tatttaagatatttaagtat

SEQ ID NO: 12471 - DNA, 20 bp, Artificial Sequence
  Description of Artificial Sequence: Synthetic oligonucleotide
  Target: ATXN2; (-) strand; PAM type: NNNNGHTT; PAM sequence: CGTAGCTT
catgcgtatagttaatatta

SEQ ID NO: 12472 - DNA, 20 bp, Artificial Sequence
  Description of Artificial Sequence: Synthetic oligonucleotide
  Target: ATXN2; (-) strand; PAM type: NNNNGHTT; PAM sequence: GTTAGTTT
tatataggtactctgttatt

SEQ ID NO: 12473 - DNA, 20 bp, Artificial Sequence
  Description of Artificial Sequence: Synthetic oligonucleotide
  Target: ATXN2; (-) strand; PAM type: NNNNGHTT; PAM sequence: GAGTGCTT
ctttagaggctaggacattt

SEQ ID NO: 12474 - DNA, 20 bp, Artificial Sequence
  Description of Artificial Sequence: Synthetic oligonucleotide
  Target: ATXN2; (-) strand; PAM type: NNNNGHTT; PAM sequence: GGTTGCTT
agaaacctttcttttttata

SEQ ID NO: 12475 - DNA, 20 bp, Artificial Sequence
  Description of Artificial Sequence: Synthetic oligonucleotide
  Target: ATXN2; (-) strand; PAM type: NNNNGHTT; PAM sequence: TTTGGATT
gagccagcttctcccttttc

SEQ ID NO: 12476 - DNA, 20 bp, Artificial Sequence
  Description of Artificial Sequence: Synthetic oligonucleotide
  Target: ATXN2; (-) strand; PAM type: NNNNGHTT; PAM sequence: GCCAGCTT
ctattgttttatgtgataga

SEQ ID NO: 12477 - DNA, 20 bp, Artificial Sequence
  Description of Artificial Sequence: Synthetic oligonucleotide
  Target: ATXN2; (-) strand; PAM type: NNNNGHTT; PAM sequence: TATTGTTT
tgcccggcccccattggtgc

SEQ ID NO: 12478 - DNA, 20 bp, Artificial Sequence
  Description of Artificial Sequence: Synthetic oligonucleotide
  Target: ATXN2; (-) strand; PAM type: NNNNGHTT; PAM sequence: CTGGGATT
tgccttggcctcccaaagtg

SEQ ID NO: 12479 - DNA, 20 bp, Artificial Sequence
  Description of Artificial Sequence: Synthetic oligonucleotide
  Target: ATXN2; (-) strand; PAM type: NNNNGHTT; PAM sequence: TGGGGTTT
ttttgtatttttagtagaga

SEQ ID NO: 12480 - DNA, 20 bp, Artificial Sequence
  Description of Artificial Sequence: Synthetic oligonucleotide
  Target: ATXN2; (-) strand; PAM type: NNNNGHTT; PAM sequence: GTCTGCTT
tgaactcctgagcttaagca

SEQ ID NO: 12481 - DNA, 20 bp, Artificial Sequence
  Description of Artificial Sequence: Synthetic oligonucleotide
  Target: ATXN2; (-) strand; PAM type: NNNNGHTT; PAM sequence: CTGAGCTT
cccaggctggtcttgaactc

SEQ ID NO: 12482 - DNA, 20 bp, Artificial Sequence
  Description of Artificial Sequence: Synthetic oligonucleotide
  Target: ATXN2; (-) strand; PAM type: NNNNGHTT; PAM sequence: TGGTGCTT
ctcacccttggtccagccat

SEQ ID NO: 12483 - DNA, 20 bp, Artificial Sequence
  Description of Artificial Sequence: Synthetic oligonucleotide
  Target: ATXN2; (-) strand; PAM type: NNNNGHTT; PAM sequence: CATAGCTT
ccactgcacgcagccctgaa

SEQ ID NO: 12484 - DNA, 20 bp, Artificial Sequence
  Description of Artificial Sequence: Synthetic oligonucleotide
  Target: ATXN2; (-) strand; PAM type: NNNNGHTT; PAM sequence: CTTGGCTT
acctcaagtgatccacctgc

SEQ ID NO: 12485 - DNA, 20 bp, Artificial Sequence
  Description of Artificial Sequence: Synthetic oligonucleotide
  Target: ATXN2; (-) strand; PAM type: NNNNGHTT; PAM sequence: CGGAGTTT
ttttttatctttagtagaga

SEQ ID NO: 12486 - DNA, 20 bp, Artificial Sequence
  Description of Artificial Sequence: Synthetic oligonucleotide
  Target: ATXN2; (-) strand; PAM type: NNNNGHTT; PAM sequence: CTGGGATT
tatgtcagcctcccaagtag

SEQ ID NO: 12487 - DNA, 20 bp, Artificial Sequence
  Description of Artificial Sequence: Synthetic oligonucleotide
  Target: ATXN2; (-) strand; PAM type: NNNNGHTT; PAM sequence: CGTAGCTT
ttaaaagccaaagtcctaaa

SEQ ID NO: 12488 - DNA, 20 bp, Artificial Sequence
  Description of Artificial Sequence: Synthetic oligonucleotide
  Target: ATXN2; (-) strand; PAM type: NNNNGHTT; PAM sequence: CAGCGCTT
ccttccaagctgactaggcc

SEQ ID NO: 12489 - DNA, 20 bp, Artificial Sequence
  Description of Artificial Sequence: Synthetic oligonucleotide
  Target: ATXN2; (-) strand; PAM type: NNNNGHTT; PAM sequence: AGGGGTTT
gccatctcctttttttactt

SEQ ID NO: 12490 - DNA, 20 bp, Artificial Sequence
  Description of Artificial Sequence: Synthetic oligonucleotide
  Target: ATXN2; (-) strand; PAM type: NNNNGHTT; PAM sequence: TTCTGTTT
tggggatgatcactggaagg

SEQ ID NO: 12491 - DNA, 20 bp, Artificial Sequence
  Description of Artificial Sequence: Synthetic oligonucleotide
  Target: ATXN2; (-) strand; PAM type: NNNNGHTT; PAM sequence: AGGTGCTT
ctaatttttggttcttatga

SEQ ID NO: 12492 - DNA, 20 bp, Artificial Sequence
  Description of Artificial Sequence: Synthetic oligonucleotide
  Target: ATXN2; (-) strand; PAM type: NNNNGHTT; PAM sequence: GATCGCTT
atgtcaaaactgggtactgt

SEQ ID NO: 12493 - DNA, 20 bp, Artificial Sequence
  Description of Artificial Sequence: Synthetic oligonucleotide
  Target: ATXN2; (-) strand; PAM type: NNNNGHTT; PAM sequence: CACAGATT
ctctctctctcccccgagca

SEQ ID NO: 12494 - DNA, 20 bp, Artificial Sequence
  Description of Artificial Sequence: Synthetic oligonucleotide
  Target: ATXN2; (-) strand; PAM type: NNNNGHTT; PAM sequence: CTGAGTTT
tccactgtgacagggcagca

SEQ ID NO: 12495 - DNA, 20 bp, Artificial Sequence
  Description of Artificial Sequence: Synthetic oligonucleotide
  Target: ATXN2; (-) strand; PAM type: NNNNGHTT; PAM sequence: TGCTGCTT
gctggctgaattctgtccta

SEQ ID NO: 12496 - DNA, 20 bp, Artificial Sequence
  Description of Artificial Sequence: Synthetic oligonucleotide
  Target: ATXN2; (-) strand; PAM type: NNNNGHTT; PAM sequence: TTCAGATT
ccatagtgcccagcccgaaa

SEQ ID NO: 12497 - DNA, 20 bp, Artificial Sequence
  Description of Artificial Sequence: Synthetic oligonucleotide
  Target: ATXN2; (-) strand; PAM type: NNNNGHTT; PAM sequence: CTGGGATT
cgcctcggcctcccaaagtg

SEQ ID NO: 12498 - DNA, 20 bp, Artificial Sequence
  Description of Artificial Sequence: Synthetic oligonucleotide
  Target: ATXN2; (-) strand; PAM type: NNNNGHTT; PAM sequence: TGAGGTTT
tttttgttttttagtagaga

SEQ ID NO: 12499 - DNA, 20 bp, Artificial Sequence
  Description of Artificial Sequence: Synthetic oligonucleotide
  Target: ATXN2; (-) strand; PAM type: NNNNGHTT; PAM sequence: TTTTGTTT
ctaccacctctggctaattt

SEQ ID NO: 12500 - DNA, 20 bp, Artificial Sequence
  Description of Artificial Sequence: Synthetic oligonucleotide
  Target: ATXN2; (-) strand; PAM type: NNNNGHTT; PAM sequence: CTGGGATT
tacctcagcctcctgagtag

SEQ ID NO: 12501 - DNA, 20 bp, Artificial Sequence
  Description of Artificial Sequence: Synthetic oligonucleotide
  Target: ATXN2; (-) strand; PAM type: NNNNGHTT; PAM sequence: CAGAGTTT
attcttttggttttttttgg

SEQ ID NO: 12502 - DNA, 20 bp, Artificial Sequence
  Description of Artificial Sequence: Synthetic oligonucleotide
  Target: ATXN2; (-) strand; PAM type: NNNNGHTT; PAM sequence: TTTGGTTT
cttaccaaaattaagattct

SEQ ID NO: 12503 - DNA, 20 bp, Artificial Sequence
  Description of Artificial Sequence: Synthetic oligonucleotide
  Target: ATXN2; (-) strand; PAM type: NNNNGHTT; PAM sequence: TTAAGATT
ggtggtggggcttaccaaaa

SEQ ID NO: 12504 - DNA, 20 bp, Artificial Sequence
  Description of Artificial Sequence: Synthetic oligonucleotide
  Target: ATXN2; (-) strand; PAM type: NNNNGHTT; PAM sequence: TGGGGCTT
gaggactttacccacggtgg

SEQ ID NO: 12505 - DNA, 20 bp, Artificial Sequence
  Description of Artificial Sequence: Synthetic oligonucleotide
  Target: ATXN2; (-) strand; PAM type: NNNNGHTT; PAM sequence: TCAAGTTT
cttctggtctagactgcctt

SEQ ID NO: 12506 - DNA, 20 bp, Artificial Sequence
  Description of Artificial Sequence: Synthetic oligonucleotide
  Target: ATXN2; (-) strand; PAM type: NNNNGHTT; PAM sequence: TGGTGCTT
tgaggcttcagaactatgct

SEQ ID NO: 12507 - DNA, 20 bp, Artificial Sequence
  Description of Artificial Sequence: Synthetic oligonucleotide
  Target: ATXN2; (-) strand; PAM type: NNNNGHTT; PAM sequence: CTATGCTT
ctagaattgaggcttcagaa

SEQ ID NO: 12508 - DNA, 20 bp, Artificial Sequence
  Description of Artificial Sequence: Synthetic oligonucleotide
  Target: ATXN2; (-) strand; PAM type: NNNNGHTT; PAM sequence: TGAGGCTT
tgggagctatggcctagaat

SEQ ID NO: 12509 - DNA, 20 bp, Artificial Sequence
  Description of Artificial Sequence: Synthetic oligonucleotide
  Target: ATXN2; (-) strand; PAM type: NNNNGHTT; PAM sequence: CCTTGTTT
tggcacaatacgacatggca

SEQ ID NO: 12510 - DNA, 20 bp, Artificial Sequence
  Description of Artificial Sequence: Synthetic oligonucleotide
  Target: ATXN2; (-) strand; PAM type: NNNNGHTT; PAM sequence: ATCTGCTT
tgggatcgggagctttagga

SEQ ID NO: 12511 - DNA, 20 bp, Artificial Sequence
  Description of Artificial Sequence: Synthetic oligonucleotide
  Target: ATXN2; (-) strand; PAM type: NNNNGHTT; PAM sequence: GGGAGCTT
aggagccagggcctgggatc

SEQ ID NO: 12512 - DNA, 20 bp, Artificial Sequence
  Description of Artificial Sequence: Synthetic oligonucleotide
  Target: ATXN2; (-) strand; PAM type: NNNNGHTT; PAM sequence: GGGTGCTT
gatgttaatttaaggcccaa

SEQ ID NO: 12513 - DNA, 20 bp, Artificial Sequence
  Description of Artificial Sequence: Synthetic oligonucleotide
  Target: ATXN2; (-) strand; PAM type: NNNNGHTT; PAM sequence: TGGAGTTT
tctctttgtgctgagctgct

SEQ ID NO: 12514 - DNA, 20 bp, Artificial Sequence
  Description of Artificial Sequence: Synthetic oligonucleotide
  Target: ATXN2; (-) strand; PAM type: NNNNGHTT; PAM sequence: AGCTGCTT
tggagtctctctttgtgctg

SEQ ID NO: 12515 - DNA, 20 bp, Artificial Sequence
  Description of Artificial Sequence: Synthetic oligonucleotide
  Target: ATXN2; (-) strand; PAM type: NNNNGHTT; PAM sequence: GAAGGTTT
ccggctcccattcttcttga

SEQ ID NO: 12516 - DNA, 20 bp, Artificial Sequence
  Description of Artificial Sequence: Synthetic oligonucleotide
  Target: ATXN2; (-) strand; PAM type: NNNNGHTT; PAM sequence: TTGGGATT
cgccttggcctctcagagtg

SEQ ID NO: 12517 - DNA, 20 bp, Artificial Sequence
  Description of Artificial Sequence: Synthetic oligonucleotide
  Target: ATXN2; (-) strand; PAM type: NNNNGHTT; PAM sequence: TGGTGTTT
ttttgtatttttagtaaata

SEQ ID NO: 12518 - DNA, 20 bp, Artificial Sequence
  Description of Artificial Sequence: Synthetic oligonucleotide
  Target: ATXN2; (-) strand; PAM type: NNNNGHTT; PAM sequence: CTGGGATT
tgcctcagcctcctgagtag

SEQ ID NO: 12519 - DNA, 20 bp, Artificial Sequence
  Description of Artificial Sequence: Synthetic oligonucleotide
  Target: ATXN2; (-) strand; PAM type: NNNNGHTT; PAM sequence: CCCGGATT
gctcaccgcaacctccgtct

SEQ ID NO: 12520 - DNA, 20 bp, Artificial Sequence
  Description of Artificial Sequence: Synthetic oligonucleotide
  Target: ATXN2; (-) strand; PAM type: NNNNGHTT; PAM sequence: TTCTGTTT
acgcattctttttttttttt

SEQ ID NO: 12521 - DNA, 20 bp, Artificial Sequence
  Description of Artificial Sequence: Synthetic oligonucleotide
  Target: ATXN2; (-) strand; PAM type: NNNNGHTT; PAM sequence: TTTTGTTT
ttctgttctttgtagtctgg

SEQ ID NO: 12522 - DNA, 20 bp, Artificial Sequence
  Description of Artificial Sequence: Synthetic oligonucleotide
  Target: ATXN2; (-) strand; PAM type: NNNNGHTT; PAM sequence: TCTGGTTT
gggtattctgttctttgtag

SEQ ID NO: 12523 - DNA, 20 bp, Artificial Sequence
  Description of Artificial Sequence: Synthetic oligonucleotide
  Target: ATXN2; (-) strand; PAM type: NNNNGHTT; PAM sequence: TGATGCTT
catgttttctcagatggcct

SEQ ID NO: 12524 - DNA, 20 bp, Artificial Sequence
  Description of Artificial Sequence: Synthetic oligonucleotide
  Target: ATXN2; (-) strand; PAM type: NNNNGHTT; PAM sequence: TCATGTTT
ttttagttcatttggtgagg

SEQ ID NO: 12525 - DNA, 20 bp, Artificial Sequence
  Description of Artificial Sequence: Synthetic oligonucleotide
  Target: ATXN2; (-) strand; PAM type: NNNNGHTT; PAM sequence: TTCAGCTT
cgttgaactttctcaaagca

SEQ ID NO: 12526 - DNA, 20 bp, Artificial Sequence
  Description of Artificial Sequence: Synthetic oligonucleotide
  Target: ATXN2; (-) strand; PAM type: NNNNGHTT; PAM sequence: CTTGGATT
gaatttgttctctgtattat

SEQ ID NO: 12527 - DNA, 20 bp, Artificial Sequence
  Description of Artificial Sequence: Synthetic oligonucleotide
  Target: ATXN2; (-) strand; PAM type: NNNNGHTT; PAM sequence: ATAGGATT
gcagtctcttttttaaattt

SEQ ID NO: 12528 - DNA, 20 bp, Artificial Sequence
  Description of Artificial Sequence: Synthetic oligonucleotide
  Target: ATXN2; (-) strand; PAM type: NNNNGHTT; PAM sequence: GCTTGATT
ttttccactttgggatttct

SEQ ID NO: 12529 - DNA, 20 bp, Artificial Sequence
  Description of Artificial Sequence: Synthetic oligonucleotide
  Target: ATXN2; (-) strand; PAM type: NNNNGHTT; PAM sequence: TTCTGCTT
gaatttttccactttgggat

SEQ ID NO: 12530 - DNA, 20 bp, Artificial Sequence
  Description of Artificial Sequence: Synthetic oligonucleotide
  Target: ATXN2; (-) strand; PAM type: NNNNGHTT; PAM sequence: TTGGGATT
gtcaattgaatttttccact

SEQ ID NO: 12531 - DNA, 20 bp, Artificial Sequence
  Description of Artificial Sequence: Synthetic oligonucleotide
  Target: ATXN2; (-) strand; PAM type: NNNNGHTT; PAM sequence: TTCAGTTT
attgagagactgatgcattt

SEQ ID NO: 12532 - DNA, 20 bp, Artificial Sequence
  Description of Artificial Sequence: Synthetic oligonucleotide
  Target: ATXN2; (-) strand; PAM type: NNNNGHTT; PAM sequence: TGCTGCTT
tcaagctcactaatgttttc

SEQ ID NO: 12533 - DNA, 20 bp, Artificial Sequence
  Description of Artificial Sequence: Synthetic oligonucleotide
  Target: ATXN2; (-) strand; PAM type: NNNNGHTT; PAM sequence: TAATGTTT
tagcctgaattcaagctcac

SEQ ID NO: 12534 - DNA, 20 bp, Artificial Sequence
  Description of Artificial Sequence: Synthetic oligonucleotide
  Target: ATXN2; (-) strand; PAM type: NNNNGHTT; PAM sequence: GGTTGTTT
tgagtcatcgtgcccaactt

SEQ ID NO: 12535 - DNA, 20 bp, Artificial Sequence
  Description of Artificial Sequence: Synthetic oligonucleotide
  Target: ATXN2; (-) strand; PAM type: NNNNGHTT; PAM sequence: CTAGGATT
cgccttggcatcctaaagtg

SEQ ID NO: 12536 - DNA, 20 bp, Artificial Sequence
  Description of Artificial Sequence: Synthetic oligonucleotide
  Target: ATXN2; (-) strand; PAM type: NNNNGHTT; PAM sequence: CGGGGTTT
ttttgtatttttagtaaaga

SEQ ID NO: 12537 - DNA, 20 bp, Artificial Sequence
  Description of Artificial Sequence: Synthetic oligonucleotide
  Target: ATXN2; (-) strand; PAM type: NNNNGHTT; PAM sequence: CTGGGATT
tgcctcagcctcccaagtag

SEQ ID NO: 12538 - DNA, 20 bp, Artificial Sequence
  Description of Artificial Sequence: Synthetic oligonucleotide
  Target: ATXN2; (-) strand; PAM type: NNNNGHTT; PAM sequence: AAGCGATT
aacctccaactcccaggttc

SEQ ID NO: 12539 - DNA, 20 bp, Artificial Sequence
  Description of Artificial Sequence: Synthetic oligonucleotide
  Target: ATXN2; (-) strand; PAM type: NNNNGHTT; PAM sequence: TGCAGATT
gtttgttaacatccttttct

SEQ ID NO: 12540 - DNA, 20 bp, Artificial Sequence
  Description of Artificial Sequence: Synthetic oligonucleotide
  Target: ATXN2; (-) strand; PAM type: NNNNGHTT; PAM sequence: TATTGTTT
tgcaccttcaggtgatttat

SEQ ID NO: 12541 - DNA, 20 bp, Artificial Sequence
  Description of Artificial Sequence: Synthetic oligonucleotide
  Target: ATXN2; (-) strand; PAM type: NNNNGHTT; PAM sequence: AGGTGATT
cagtgagtttttgcaccttc

SEQ ID NO: 12542 - DNA, 20 bp, Artificial Sequence
  Description of Artificial Sequence: Synthetic oligonucleotide
  Target: ATXN2; (-) strand; PAM type: NNNNGHTT; PAM sequence: GTGAGTTT
tttctgtgtacttgttacca

SEQ ID NO: 12543 - DNA, 20 bp, Artificial Sequence
  Description of Artificial Sequence: Synthetic oligonucleotide
  Target: ATXN2; (-) strand; PAM type: NNNNGHTT; PAM sequence: AGTAGTTT
ttcctgctcaaaatatgagt

SEQ ID NO: 12544 - DNA, 20 bp, Artificial Sequence
  Description of Artificial Sequence: Synthetic oligonucleotide
  Target: ATXN2; (-) strand; PAM type: NNNNGHTT; PAM sequence: AATCGCTT
tcaggaggctgaggcaggag

SEQ ID NO: 12545 - DNA, 20 bp, Artificial Sequence
  Description of Artificial Sequence: Synthetic oligonucleotide
  Target: ATXN2; (-) strand; PAM type: NNNNGHTT; PAM sequence: TGTTGTTT
tctgcccgctttttaacttt

SEQ ID NO: 12546 - DNA, 20 bp, Artificial Sequence
  Description of Artificial Sequence: Synthetic oligonucleotide
  Target: ATXN2; (-) strand; PAM type: NNNNGHTT; PAM sequence: GCCCGCTT
aaaaactctacacttcatct

SEQ ID NO: 12547 - DNA, 20 bp, Artificial Sequence
  Description of Artificial Sequence: Synthetic oligonucleotide
  Target: ATXN2; (-) strand; PAM type: NNNNGHTT; PAM sequence: CTTTGATT
aaaccaatgacaacttgaaa

SEQ ID NO: 12548 - DNA, 20 bp, Artificial Sequence
  Description of Artificial Sequence: Synthetic oligonucleotide
  Target: ATXN2; (-) strand; PAM type: NNNNGHTT; PAM sequence: AATTGCTT
tcaggaggctgaggcaggag

SEQ ID NO: 12549 - DNA, 20 bp, Artificial Sequence
  Description of Artificial Sequence: Synthetic oligonucleotide
  Target: ATXN2; (-) strand; PAM type: NNNNGHTT; PAM sequence: AGGAGATT
ggtgggtggatcaagaggtc

SEQ ID NO: 12550 - DNA, 20 bp, Artificial Sequence
  Description of Artificial Sequence: Synthetic oligonucleotide
  Target: ATXN2; (-) strand; PAM type: NNNNGHTT; PAM sequence: TTTTGATT
tgtgtatctgttgtaggtgt

SEQ ID NO: 12551 - DNA, 20 bp, Artificial Sequence
  Description of Artificial Sequence: Synthetic oligonucleotide
  Target: ATXN2; (-) strand; PAM type: NNNNGHTT; PAM sequence: AGGTGTTT
attttttgtgtatctgttgt

SEQ ID NO: 12552 - DNA, 20 bp, Artificial Sequence
  Description of Artificial Sequence: Synthetic oligonucleotide
  Target: ATXN2; (-) strand; PAM type: NNNNGHTT; PAM sequence: TCCTGCTT
tctggtggtatgttttaatt

SEQ ID NO: 12553 - DNA, 20 bp, Artificial Sequence
  Description of Artificial Sequence: Synthetic oligonucleotide
  Target: ATXN2; (-) strand; PAM type: NNNNGHTT; PAM sequence: GTATGTTT
gaaagtgattttctctggtg

SEQ ID NO: 12554 - DNA, 20 bp, Artificial Sequence
  Description of Artificial Sequence: Synthetic oligonucleotide
  Target: ATXN2; (-) strand; PAM type: NNNNGHTT; PAM sequence: AAGTGATT
ccctcccttccttgttttga

SEQ ID NO: 12555 - DNA, 20 bp, Artificial Sequence
  Description of Artificial Sequence: Synthetic oligonucleotide
  Target: ATXN2; (-) strand; PAM type: NNNNGHTT; PAM sequence: CCTTGTTT
cttttttccctccctccctt

SEQ ID NO: 12556 - DNA, 20 bp, Artificial Sequence
  Description of Artificial Sequence: Synthetic oligonucleotide
  Target: ATXN2; (-) strand; PAM type: NNNNGHTT; PAM sequence: GGTTGTTT
cattttgttacttattatct

SEQ ID NO: 12557 - DNA, 20 bp, Artificial Sequence
  Description of Artificial Sequence: Synthetic oligonucleotide
  Target: ATXN2; (-) strand; PAM type: NNNNGHTT; PAM sequence: TACTGATT
cgatttacattcagtgttgt

SEQ ID NO: 12558 - DNA, 20 bp, Artificial Sequence
  Description of Artificial Sequence: Synthetic oligonucleotide
  Target: ATXN2; (-) strand; PAM type: NNNNGHTT; PAM sequence: AGTCGATT
atcttttgattggagagttt

SEQ ID NO: 12559 - DNA, 20 bp, Artificial Sequence
  Description of Artificial Sequence: Synthetic oligonucleotide
  Target: ATXN2; (-) strand; PAM type: NNNNGHTT; PAM sequence: GAGAGTTT
cactctgtatcttttgattg

SEQ ID NO: 12560 - DNA, 20 bp, Artificial Sequence
  Description of Artificial Sequence: Synthetic oligonucleotide
  Target: ATXN2; (-) strand; PAM type: NNNNGHTT; PAM sequence: TTTTGATT
ccatttagccactctgtatc

SEQ ID NO: 12561 - DNA, 20 bp, Artificial Sequence
  Description of Artificial Sequence: Synthetic oligonucleotide
  Target: ATXN2; (-) strand; PAM type: NNNNGHTT; PAM sequence: CTGGGATT
tgccttggcctcccaaagtc

SEQ ID NO: 12562 - DNA, 20 bp, Artificial Sequence
  Description of Artificial Sequence: Synthetic oligonucleotide
  Target: ATXN2; (-) strand; PAM type: NNNNGHTT; PAM sequence: AGGTGATT
gttcttgaactcctaacctc

SEQ ID NO: 12563 - DNA, 20 bp, Artificial Sequence
  Description of Artificial Sequence: Synthetic oligonucleotide
  Target: ATXN2; (-) strand; PAM type: NNNNGHTT; PAM sequence: TGGGGTTT
ttttgtattttcagtagaga

SEQ ID NO: 12564 - DNA, 20 bp, Artificial Sequence
  Description of Artificial Sequence: Synthetic oligonucleotide
  Target: ATXN2; (-) strand; PAM type: NNNNGHTT; PAM sequence: CTGGGATT
tgcctcagcctcccaagtag

SEQ ID NO: 12565 - DNA, 20 bp, Artificial Sequence
  Description of Artificial Sequence: Synthetic oligonucleotide
  Target: ATXN2; (-) strand; PAM type: NNNNGHTT; PAM sequence: AAGCGATT
aacctccgcctcctgagttc

SEQ ID NO: 12566 - DNA, 20 bp, Artificial Sequence
  Description of Artificial Sequence: Synthetic oligonucleotide
  Target: ATXN2; (-) strand; PAM type: NNNNGHTT; PAM sequence: CAGAGTTT
ttttttttttttttttgaga

SEQ ID NO: 12567 - DNA, 20 bp, Artificial Sequence
  Description of Artificial Sequence: Synthetic oligonucleotide
  Target: ATXN2; (-) strand; PAM type: NNNNGHTT; PAM sequence: TTTGGTTT
tttcttgtaggcaatggatc

SEQ ID NO: 12568 - DNA, 20 bp, Artificial Sequence
  Description of Artificial Sequence: Synthetic oligonucleotide
  Target: ATXN2; (-) strand; PAM type: NNNNGHTT; PAM sequence: GTGTGTTT
tgtgtgattttataggtaaa

SEQ ID NO: 12569 - DNA, 20 bp, Artificial Sequence
  Description of Artificial Sequence: Synthetic oligonucleotide
  Target: ATXN2; (-) strand; PAM type: NNNNGHTT; PAM sequence: GTGTGATT
gctcttcaattttagtctat

SEQ ID NO: 12570 - DNA, 20 bp, Artificial Sequence
  Description of Artificial Sequence: Synthetic oligonucleotide
  Target: ATXN2; (-) strand; PAM type: NNNNGHTT; PAM sequence: TATTGTTT
tggtttccatttgcatggaa

SEQ ID NO: 12571 - DNA, 20 bp, Artificial Sequence
  Description of Artificial Sequence: Synthetic oligonucleotide
  Target: ATXN2; (-) strand; PAM type: NNNNGHTT; PAM sequence: TCTGGTTT
catagctactcctgttcttt

SEQ ID NO: 12572 - DNA, 20 bp, Artificial Sequence
  Description of Artificial Sequence: Synthetic oligonucleotide
  Target: ATXN2; (-) strand; PAM type: NNNNGHTT; PAM sequence: GTCTGTTT
attatacaataatcttcttt

SEQ ID NO: 12573 - DNA, 20 bp, Artificial Sequence
  Description of Artificial Sequence: Synthetic oligonucleotide
  Target: ATXN2; (-) strand; PAM type: NNNNGHTT; PAM sequence: GTTTGCTT
ctcttttttgctctaataat

SEQ ID NO: 12574 - DNA, 20 bp, Artificial Sequence
  Description of Artificial Sequence: Synthetic oligonucleotide
  Target: ATXN2; (-) strand; PAM type: NNNNGHTT; PAM sequence: TAATGTTT
gtttctcttttttgctctaa

SEQ ID NO: 12575 - DNA, 20 bp, Artificial Sequence
  Description of Artificial Sequence: Synthetic oligonucleotide
  Target: ATXN2; (-) strand; PAM type: NNNNGHTT; PAM sequence: GTCTGTTT
agtttccgactgttactgag

SEQ ID NO: 12576 - DNA, 20 bp, Artificial Sequence
  Description of Artificial Sequence: Synthetic oligonucleotide
  Target: ATXN2; (-) strand; PAM type: NNNNGHTT; PAM sequence: TGAAGTTT
cattgctgagagtggggtgt

SEQ ID NO: 12577 - DNA, 20 bp, Artificial Sequence
  Description of Artificial Sequence: Synthetic oligonucleotide
  Target: ATXN2; (-) strand; PAM type: NNNNGHTT; PAM sequence: TGTTGATT
aattaggtctaatgtttctt

SEQ ID NO: 12578 - DNA, 20 bp, Artificial Sequence
  Description of Artificial Sequence: Synthetic oligonucleotide
  Target: ATXN2; (-) strand; PAM type: NNNNGHTT; PAM sequence: TAATGTTT
tctatagagcaaattaggtc

SEQ ID NO: 12579 - DNA, 20 bp, Artificial Sequence
  Description of Artificial Sequence: Synthetic oligonucleotide
  Target: ATXN2; (-) strand; PAM type: NNNNGHTT; PAM sequence: TGTGGCTT
tcaaatctttagacttgttt

SEQ ID NO: 12580 - DNA, 20 bp, Artificial Sequence
  Description of Artificial Sequence: Synthetic oligonucleotide
  Target: ATXN2; (-) strand; PAM type: NNNNGHTT; PAM sequence: ACTTGTTT
gtgccacgtcaaatctttag

SEQ ID NO: 12581 - DNA, 20 bp, Artificial Sequence
  Description of Artificial Sequence: Synthetic oligonucleotide
  Target: ATXN2; (-) strand; PAM type: NNNNGHTT; PAM sequence: CTGGGATT
tatttcggcctcccaaggtg

SEQ ID NO: 12582 - DNA, 20 bp, Artificial Sequence
  Description of Artificial Sequence: Synthetic oligonucleotide
  Target: ATXN2; (-) strand; PAM type: NNNNGHTT; PAM sequence: GGTTGTTT
ggctttgcgatgtgtcccag

SEQ ID NO: 12583 - DNA, 20 bp, Artificial Sequence
  Description of Artificial Sequence: Synthetic oligonucleotide
  Target: ATXN2; (-) strand; PAM type: NNNNGHTT; PAM sequence: TGGGGCTT
tttttttttttttgtagaga

SEQ ID NO: 12584 - DNA, 20 bp, Artificial Sequence
  Description of Artificial Sequence: Synthetic oligonucleotide
  Target: ATXN2; (-) strand; PAM type: NNNNGHTT; PAM sequence: TTTGGATT
cgtcacatatggctgatatt

SEQ ID NO: 12585 - DNA, 20 bp, Artificial Sequence
  Description of Artificial Sequence: Synthetic oligonucleotide
  Target: ATXN2; (-) strand; PAM type: NNNNGHTT; PAM sequence: GTTTGTTT
atttatttgtttgtttgttt

SEQ ID NO: 12586 - DNA, 20 bp, Artificial Sequence
  Description of Artificial Sequence: Synthetic oligonucleotide
  Target: ATXN2; (-) strand; PAM type: NNNNGHTT; PAM sequence: GTTTGTTT
atttatttatttgtttgttt

SEQ ID NO: 12587 - DNA, 20 bp, Artificial Sequence
  Description of Artificial Sequence: Synthetic oligonucleotide
  Target: ATXN2; (-) strand; PAM type: NNNNGHTT; PAM sequence: GTTTGTTT
ttttatttatttatttgttt

SEQ ID NO: 12588 - DNA, 20 bp, Artificial Sequence
  Description of Artificial Sequence: Synthetic oligonucleotide
  Target: ATXN2; (-) strand; PAM type: NNNNGHTT; PAM sequence: GTTTGTTT
gaatttttatttatttattt

SEQ ID NO: 12589 - DNA, 20 bp, Artificial Sequence
  Description of Artificial Sequence: Synthetic oligonucleotide
  Target: ATXN2; (-) strand; PAM type: NNNNGHTT; PAM sequence: ATTTGTTT
ttttgaatttttatttattt

SEQ ID NO: 12590 - DNA, 20 bp, Artificial Sequence
  Description of Artificial Sequence: Synthetic oligonucleotide
  Target: ATXN2; (-) strand; PAM type: NNNNGHTT; PAM sequence: ATATGATT
gtgatcagagaagatagttg

SEQ ID NO: 12591 - DNA, 20 bp, Artificial Sequence
  Description of Artificial Sequence: Synthetic oligonucleotide
  Target: ATXN2; (-) strand; PAM type: NNNNGHTT; PAM sequence: GGGGGTTT
ttttgtatttttagtagaga

SEQ ID NO: 12592 - DNA, 20 bp, Artificial Sequence
  Description of Artificial Sequence: Synthetic oligonucleotide
  Target: ATXN2; (-) strand; PAM type: NNNNGHTT; PAM sequence: CTGGGATT
tgcctcagcctcctgagtag

SEQ ID NO: 12593 - DNA, 20 bp, Artificial Sequence
  Description of Artificial Sequence: Synthetic oligonucleotide
  Target: ATXN2; (-) strand; PAM type: NNNNGHTT; PAM sequence: AAGTGATT
aacctctgcctccccagttc

SEQ ID NO: 12594 - DNA, 20 bp, Artificial Sequence
  Description of Artificial Sequence: Synthetic oligonucleotide
  Target: ATXN2; (-) strand; PAM type: NNNNGHTT; PAM sequence: CTCGGCTT
ctggagtgtagtggcgcgat

SEQ ID NO: 12595 - DNA, 20 bp, Artificial Sequence
  Description of Artificial Sequence: Synthetic oligonucleotide
  Target: ATXN2; (-) strand; PAM type: NNNNGHTT; PAM sequence: TTTTGTTT
ttattttattttatttttat

SEQ ID NO: 12596 - DNA, 20 bp, Artificial Sequence
  Description of Artificial Sequence: Synthetic oligonucleotide
  Target: ATXN2; (-) strand; PAM type: NNNNGHTT; PAM sequence: TATTGCTT
ccactggtcattcaggagca

SEQ ID NO: 12597 - DNA, 20 bp, Artificial Sequence
  Description of Artificial Sequence: Synthetic oligonucleotide
  Target: ATXN2; (-) strand; PAM type: NNNNGHTT; PAM sequence: TCCAGTTT
tcatttgtttcaaggaattt

SEQ ID NO: 12598 - DNA, 20 bp, Artificial Sequence
  Description of Artificial Sequence: Synthetic oligonucleotide
  Target: ATXN2; (-) strand; PAM type: NNNNGHTT; PAM sequence: ATTTGTTT
taagctgtgtttccattttc

SEQ ID NO: 12599 - DNA, 20 bp, Artificial Sequence
  Description of Artificial Sequence: Synthetic oligonucleotide
  Target: ATXN2; (-) strand; PAM type: NNNNGHTT; PAM sequence: CTGTGTTT
atcctataggttttgataag

SEQ ID NO: 12600 - DNA, 20 bp, Artificial Sequence
  Description of Artificial Sequence: Synthetic oligonucleotide
  Target: ATXN2; (-) strand; PAM type: NNNNGHTT; PAM sequence: ATAGGTTT
tgttgcttttactgtatcct

SEQ ID NO: 12601 - DNA, 20 bp, Artificial Sequence
  Description of Artificial Sequence: Synthetic oligonucleotide
  Target: ATXN2; (-) strand; PAM type: NNNNGHTT; PAM sequence: TGTTGCTT
gctgtaaacattcctcttat

SEQ ID NO: 12602 - DNA, 20 bp, Artificial Sequence
  Description of Artificial Sequence: Synthetic oligonucleotide
  Target: ATXN2; (-) strand; PAM type: NNNNGHTT; PAM sequence: TGAAGTTT
ctttaggatgtattggcaga

SEQ ID NO: 12603 - DNA, 20 bp, Artificial Sequence
  Description of Artificial Sequence: Synthetic oligonucleotide
  Target: ATXN2; (-) strand; PAM type: NNNNGHTT; PAM sequence: CCTTGCTT
ctactgattttaggttttgt

SEQ ID NO: 12604 - DNA, 20 bp, Artificial Sequence
  Description of Artificial Sequence: Synthetic oligonucleotide
  Target: ATXN2; (-) strand; PAM type: NNNNGHTT; PAM sequence: TTAGGTTT
ttttatttcttctactgatt

SEQ ID NO: 12605 - DNA, 20 bp, Artificial Sequence
  Description of Artificial Sequence: Synthetic oligonucleotide
  Target: ATXN2; (-) strand; PAM type: NNNNGHTT; PAM sequence: TACTGATT
ttgattttttttatttcttc

SEQ ID NO: 12606 - DNA, 20 bp, Artificial Sequence
  Description of Artificial Sequence: Synthetic oligonucleotide
  Target: ATXN2; (-) strand; PAM type: NNNNGHTT; PAM sequence: CTTTGATT
ttcaattttatttatttctg

SEQ ID NO: 12607 - DNA, 20 bp, Artificial Sequence
  Description of Artificial Sequence: Synthetic oligonucleotide
  Target: ATXN2; (-) strand; PAM type: NNNNGHTT; PAM sequence: TTCTGCTT
ttcatttcaattttatttat

SEQ ID NO: 12608 - DNA, 20 bp, Artificial Sequence
  Description of Artificial Sequence: Synthetic oligonucleotide
  Target: ATXN2; (-) strand; PAM type: NNNNGHTT; PAM sequence: TACTGTTT
tttatctcttcaaaacaatt

SEQ ID NO: 12609 - DNA, 20 bp, Artificial Sequence
  Description of Artificial Sequence: Synthetic oligonucleotide
  Target: ATXN2; (-) strand; PAM type: NNNNGHTT; PAM sequence: TTTTGTTT
tctggctaaaggtttgtcag

SEQ ID NO: 12610 - DNA, 20 bp, Artificial Sequence
  Description of Artificial Sequence: Synthetic oligonucleotide
  Target: ATXN2; (-) strand; PAM type: NNNNGHTT; PAM sequence: GTCAGTTT
ctgagtctggctaaaggttt

SEQ ID NO: 12611 - DNA, 20 bp, Artificial Sequence
  Description of Artificial Sequence: Synthetic oligonucleotide
  Target: ATXN2; (-) strand; PAM type: NNNNGHTT; PAM sequence: AAAGGTTT
ttttttttctgagtctggct

SEQ ID NO: 12612 - DNA, 20 bp, Artificial Sequence
  Description of Artificial Sequence: Synthetic oligonucleotide
  Target: ATXN2; (-) strand; PAM type: NNNNGHTT; PAM sequence: TTGGGTTT
ttcatctctcattttattat

SEQ ID NO: 12613 - DNA, 20 bp, Artificial Sequence
  Description of Artificial Sequence: Synthetic oligonucleotide
  Target: ATXN2; (-) strand; PAM type: NNNNGHTT; PAM sequence: CAAGGTTT
taggaatttatccatttctt

SEQ ID NO: 12614 - DNA, 20 bp, Artificial Sequence
  Description of Artificial Sequence: Synthetic oligonucleotide
  Target: ATXN2; (-) strand; PAM type: NNNNGHTT; PAM sequence: TTTGGATT
acttgttattgtatttgggt

SEQ ID NO: 12615 - DNA, 20 bp, Artificial Sequence
  Description of Artificial Sequence: Synthetic oligonucleotide
  Target: ATXN2; (-) strand; PAM type: NNNNGHTT; PAM sequence: TTGGGTTT
ctcgttacttgttattgtat

SEQ ID NO: 12616 - DNA, 20 bp, Artificial Sequence
  Description of Artificial Sequence: Synthetic oligonucleotide
  Target: ATXN2; (-) strand; PAM type: NNNNGHTT; PAM sequence: TATAGCTT
tttgctgggagactatttct

SEQ ID NO: 12617 - DNA, 20 bp, Artificial Sequence
  Description of Artificial Sequence: Synthetic oligonucleotide
  Target: ATXN2; (-) strand; PAM type: NNNNGHTT; PAM sequence: CATGGCTT
agcagtgaagccatcaggtc

SEQ ID NO: 12618 - DNA, 20 bp, Artificial Sequence
  Description of Artificial Sequence: Synthetic oligonucleotide
  Target: ATXN2; (-) strand; PAM type: NNNNGHTT; PAM sequence: AAAGGTTT
attggtattagttcttcttt

SEQ ID NO: 12619 - DNA, 20 bp, Artificial Sequence
  Description of Artificial Sequence: Synthetic oligonucleotide
  Target: ATXN2; (-) strand; PAM type: NNNNGHTT; PAM sequence: GTAGGATT
attgtgttggaatagtttga

SEQ ID NO: 12620 - DNA, 20 bp, Artificial Sequence
  Description of Artificial Sequence: Synthetic oligonucleotide
  Target: ATXN2; (-) strand; PAM type: NNNNGHTT; PAM sequence: AATAGTTT
ctcttcctgtattgtgttgg

SEQ ID NO: 12621 - DNA, 20 bp, Artificial Sequence
  Description of Artificial Sequence: Synthetic oligonucleotide
  Target: ATXN2; (-) strand; PAM type: NNNNGHTT; PAM sequence: ATGAGTTT
ggtaatagtggccttgtaga

SEQ ID NO: 12622 - DNA, 20 bp, Artificial Sequence
  Description of Artificial Sequence: Synthetic oligonucleotide
  Target: ATXN2; (-) strand; PAM type: NNNNGHTT; PAM sequence: TTTGGTTT
tttccctttttgatgtgtcc

SEQ ID NO: 12623 - DNA, 20 bp, Artificial Sequence
  Description of Artificial Sequence: Synthetic oligonucleotide
  Target: ATXN2; (-) strand; PAM type: NNNNGHTT; PAM sequence: TCTAGTTT
gttcttcagagacactggct

SEQ ID NO: 12624 - DNA, 20 bp, Artificial Sequence
  Description of Artificial Sequence: Synthetic oligonucleotide
  Target: ATXN2; (-) strand; PAM type: NNNNGHTT; PAM sequence: ACTGGCTT
gcataatgttcttcagagac

SEQ ID NO: 12625 - DNA, 20 bp, Artificial Sequence
  Description of Artificial Sequence: Synthetic oligonucleotide
  Target: ATXN2; (-) strand; PAM type: NNNNGHTT; PAM sequence: TGAGGATT
tcggtttgctagtattatat

SEQ ID NO: 12626 - DNA, 20 bp, Artificial Sequence
  Description of Artificial Sequence: Synthetic oligonucleotide
  Target: ATXN2; (-) strand; PAM type: NNNNGHTT; PAM sequence: TTCGGTTT
ctttttaatgtgttactgaa

SEQ ID NO: 12627 - DNA, 20 bp, Artificial Sequence
  Description of Artificial Sequence: Synthetic oligonucleotide
  Target: ATXN2; (-) strand; PAM type: NNNNGHTT; PAM sequence: TATTGATT
ctgttaagatgtaccatgtt

SEQ ID NO: 12628 - DNA, 20 bp, Artificial Sequence
  Description of Artificial Sequence: Synthetic oligonucleotide
  Target: ATXN2; (-) strand; PAM type: NNNNGHTT; PAM sequence: CCATGTTT
ttttattctgttaagatgta

SEQ ID NO: 12629 - DNA, 20 bp, Artificial Sequence
  Description of Artificial Sequence: Synthetic oligonucleotide
  Target: ATXN2; (-) strand; PAM type: NNNNGHTT; PAM sequence: AAGGGTTT
gtgagccaccacgcccggcc

SEQ ID NO: 12630 - DNA, 20 bp, Artificial Sequence
  Description of Artificial Sequence: Synthetic oligonucleotide
  Target: ATXN2; (-) strand; PAM type: NNNNGHTT; PAM sequence: CTGGGATT
cgtctcagcctcccaaagtg

SEQ ID NO: 12631 - DNA, 20 bp, Artificial Sequence
  Description of Artificial Sequence: Synthetic oligonucleotide
  Target: ATXN2; (-) strand; PAM type: NNNNGHTT; PAM sequence: CGGGGTTT
ttttgtatttttagtagaga

SEQ ID NO: 12632 - DNA, 20 bp, Artificial Sequence
  Description of Artificial Sequence: Synthetic oligonucleotide
  Target: ATXN2; (-) strand; PAM type: NNNNGHTT; PAM sequence: GTTTGTTT
tctttggggtttttttgttt

SEQ ID NO: 12633 - DNA, 20 bp, Artificial Sequence
  Description of Artificial Sequence: Synthetic oligonucleotide
  Target: ATXN2; (-) strand; PAM type: NNNNGHTT; PAM sequence: GTTTGTTT
cagttctttggggttttttt

SEQ ID NO: 12634 - DNA, 20 bp, Artificial Sequence
  Description of Artificial Sequence: Synthetic oligonucleotide
  Target: ATXN2; (-) strand; PAM type: NNNNGHTT; PAM sequence: TTTTGTTT
tacccagttctttggggttt

SEQ ID NO: 12635 - DNA, 20 bp, Artificial Sequence
  Description of Artificial Sequence: Synthetic oligonucleotide
  Target: ATXN2; (-) strand; PAM type: NNNNGHTT; PAM sequence: TGGGGTTT
tccttctatacccagttctt

SEQ ID NO: 12636 - DNA, 20 bp, Artificial Sequence
  Description of Artificial Sequence: Synthetic oligonucleotide
  Target: ATXN2; (-) strand; PAM type: NNNNGHTT; PAM sequence: TTCTGTTT
atgggtctgtcatatatggc

SEQ ID NO: 12637 - DNA, 20 bp, Artificial Sequence
  Description of Artificial Sequence: Synthetic oligonucleotide
  Target: ATXN2; (-) strand; PAM type: NNNNGHTT; PAM sequence: TATGGCTT
ctagttatgggtctgtcata

SEQ ID NO: 12638 - DNA, 20 bp, Artificial Sequence
  Description of Artificial Sequence: Synthetic oligonucleotide
  Target: ATXN2; (-) strand; PAM type: NNNNGHTT; PAM sequence: TTCAGTTT
cagatcttagaggaaagcct

SEQ ID NO: 12639 - DNA, 20 bp, Artificial Sequence
  Description of Artificial Sequence: Synthetic oligonucleotide
  Target: ATXN2; (-) strand; PAM type: NNNNGHTT; PAM sequence: GTCTGATT
gctttttatttctttctgtt

SEQ ID NO: 12640 - DNA, 20 bp, Artificial Sequence
  Description of Artificial Sequence: Synthetic oligonucleotide
  Target: ATXN2; (-) strand; PAM type: NNNNGHTT; PAM sequence: GGATGCTT
gacttcttccattccagtgt

SEQ ID NO: 12641 - DNA, 20 bp, Artificial Sequence
  Description of Artificial Sequence: Synthetic oligonucleotide
  Target: ATXN2; (-) strand; PAM type: NNNNGHTT; PAM sequence: CTAGGTTT
aggtttttcttttttggagt

SEQ ID NO: 12642 - DNA, 20 bp, Artificial Sequence
  Description of Artificial Sequence: Synthetic oligonucleotide
  Target: ATXN2; (-) strand; PAM type: NNNNGHTT; PAM sequence: ATAGGTTT
gaatttgtttgtcagttcta

SEQ ID NO: 12643 - DNA, 20 bp, Artificial Sequence
  Description of Artificial Sequence: Synthetic oligonucleotide
  Target: ATXN2; (-) strand; PAM type: NNNNGHTT; PAM sequence: ATTTGTTT
gtatcctgcaattttactga

SEQ ID NO: 12644 - DNA, 20 bp, Artificial Sequence
  Description of Artificial Sequence: Synthetic oligonucleotide
  Target: ATXN2; (-) strand; PAM type: NNNNGHTT; PAM sequence: TGTTGATT
aaatgctcctgatttttgtg

SEQ ID NO: 12645 - DNA, 20 bp, Artificial Sequence
  Description of Artificial Sequence: Synthetic oligonucleotide
  Target: ATXN2; (-) strand; PAM type: NNNNGHTT; PAM sequence: TCCTGATT
gctgttaaatataaaaatgc

SEQ ID NO: 12646 - DNA, 20 bp, Artificial Sequence
  Description of Artificial Sequence: Synthetic oligonucleotide
  Target: ATXN2; (-) strand; PAM type: NNNNGHTT; PAM sequence: GATTGTTT
tgcgtttaaaaaatttttca

SEQ ID NO: 12647 - DNA, 20 bp, Artificial Sequence
  Description of Artificial Sequence: Synthetic oligonucleotide
  Target: ATXN2; (-) strand; PAM type: NNNNGHTT; PAM sequence: TTCAGATT
ggattgcgtttaaaaaattt

SEQ ID NO: 12648 - DNA, 20 bp, Artificial Sequence
  Description of Artificial Sequence: Synthetic oligonucleotide
  Target: ATXN2; (-) strand; PAM type: NNNNGHTT; PAM sequence: TTGCGTTT
tgtagctattgtaaatggga

SEQ ID NO: 12649 - DNA, 20 bp, Artificial Sequence
  Description of Artificial Sequence: Synthetic oligonucleotide
  Target: ATXN2; (-) strand; PAM type: NNNNGHTT; PAM sequence: ATGGGATT
tatatttgtagctattgtaa

SEQ ID NO: 12650 - DNA, 20 bp, Artificial Sequence
  Description of Artificial Sequence: Synthetic oligonucleotide
  Target: ATXN2; (-) strand; PAM type: NNNNGHTT; PAM sequence: TTAAGTTT
gaaatcttttactcatttgg

SEQ ID NO: 12651 - DNA, 20 bp, Artificial Sequence
  Description of Artificial Sequence: Synthetic oligonucleotide
  Target: ATXN2; (-) strand; PAM type: NNNNGHTT; PAM sequence: CAGTGTTT
tttttctgtgtcatcaattt

SEQ ID NO: 12652 - DNA, 20 bp, Artificial Sequence
  Description of Artificial Sequence: Synthetic oligonucleotide
  Target: ATXN2; (-) strand; PAM type: NNNNGHTT; PAM sequence: TCATGTTT
cataaacatggaatctcttt

SEQ ID NO: 12653 - DNA, 20 bp, Artificial Sequence
  Description of Artificial Sequence: Synthetic oligonucleotide
  Target: ATXN2; (-) strand; PAM type: NNNNGHTT; PAM sequence: GATTGCTT
gggattgcactgaatctgta

SEQ ID NO: 12654 - DNA, 20 bp, Artificial Sequence
  Description of Artificial Sequence: Synthetic oligonucleotide
  Target: ATXN2; (-) strand; PAM type: NNNNGHTT; PAM sequence: TGTAGATT
gatagggattgcactgaatc

SEQ ID NO: 12655 - DNA, 20 bp, Artificial Sequence
  Description of Artificial Sequence: Synthetic oligonucleotide
  Target: ATXN2; (-) strand; PAM type: NNNNGHTT; PAM sequence: TAGGGATT
gaatgtcattggtattttga

SEQ ID NO: 12656 - DNA, 20 bp, Artificial Sequence
  Description of Artificial Sequence: Synthetic oligonucleotide
  Target: ATXN2; (-) strand; PAM type: NNNNGHTT; PAM sequence: TATGGCTT
gttttgttcattttgctcag

SEQ ID NO: 12657 - DNA, 20 bp, Artificial Sequence
  Description of Artificial Sequence: Synthetic oligonucleotide
  Target: ATXN2; (-) strand; PAM type: NNNNGHTT; PAM sequence: TCCCGTTT
tgaagtcagataatgattcc

SEQ ID NO: 12658 - DNA, 20 bp, Artificial Sequence
  Description of Artificial Sequence: Synthetic oligonucleotide
  Target: ATXN2; (-) strand; PAM type: NNNNGHTT; PAM sequence: TAATGATT
tacaataatttgaagtcaga

SEQ ID NO: 12659 - DNA, 20 bp, Artificial Sequence
  Description of Artificial Sequence: Synthetic oligonucleotide
  Target: ATXN2; (-) strand; PAM type: NNNNGHTT; PAM sequence: TTCTGTTT
attcatttctgagttctctg

SEQ ID NO: 12660 - DNA, 20 bp, Artificial Sequence
  Description of Artificial Sequence: Synthetic oligonucleotide
  Target: ATXN2; (-) strand; PAM type: NNNNGHTT; PAM sequence: TATGGATT
aaaatgagttcacttagacg

SEQ ID NO: 12661 - DNA, 20 bp, Artificial Sequence
  Description of Artificial Sequence: Synthetic oligonucleotide
  Target: ATXN2; (-) strand; PAM type: NNNNGHTT; PAM sequence: CATGGCTT
tcctttccccagtgtatgtt

SEQ ID NO: 12662 - DNA, 20 bp, Artificial Sequence
  Description of Artificial Sequence: Synthetic oligonucleotide
  Target: ATXN2; (-) strand; PAM type: NNNNGHTT; PAM sequence: TCCAGTTT
cattcttctgcatatggata

SEQ ID NO: 12663 - DNA, 20 bp, Artificial Sequence
  Description of Artificial Sequence: Synthetic oligonucleotide
  Target: ATXN2; (-) strand; PAM type: NNNNGHTT; PAM sequence: TCTGGTTT
aatatggtgggacacagggg

SEQ ID NO: 12664 - DNA, 20 bp, Artificial Sequence
  Description of Artificial Sequence: Synthetic oligonucleotide
  Target: ATXN2; (-) strand; PAM type: NNNNGHTT; PAM sequence: ATTTGATT
taaatctttagtccattttg

SEQ ID NO: 12665 - DNA, 20 bp, Artificial Sequence
  Description of Artificial Sequence: Synthetic oligonucleotide
  Target: ATXN2; (-) strand; PAM type: NNNNGHTT; PAM sequence: TTTTGATT
agatttaaatctttagtcca

SEQ ID NO: 12666 - DNA, 20 bp, Artificial Sequence
  Description of Artificial Sequence: Synthetic oligonucleotide
  Target: ATXN2; (-) strand; PAM type: NNNNGHTT; PAM sequence: CTTAGATT
gtagtttcatagtttgaggt

SEQ ID NO: 12667 - DNA, 20 bp, Artificial Sequence
  Description of Artificial Sequence: Synthetic oligonucleotide
  Target: ATXN2; (-) strand; PAM type: NNNNGHTT; PAM sequence: CATAGTTT
atgttttcttttagtagttt

SEQ ID NO: 12668 - DNA, 20 bp, Artificial Sequence
  Description of Artificial Sequence: Synthetic oligonucleotide
  Target: ATXN2; (-) strand; PAM type: NNNNGHTT; PAM sequence: AGTAGTTT
ggagtttaatgttttctttt

SEQ ID NO: 12669 - DNA, 20 bp, Artificial Sequence
  Description of Artificial Sequence: Synthetic oligonucleotide
  Target: ATXN2; (-) strand; PAM type: NNNNGHTT; PAM sequence: TAATGTTT
gagtaatgtccctgggagtt

SEQ ID NO: 12670 - DNA, 20 bp, Artificial Sequence
  Description of Artificial Sequence: Synthetic oligonucleotide
  Target: ATXN2; (-) strand; PAM type: NNNNGHTT; PAM sequence: GGGAGTTT
ttgcccagagtaatgtccct

SEQ ID NO: 12671 - DNA, 20 bp, Artificial Sequence
  Description of Artificial Sequence: Synthetic oligonucleotide
  Target: ATXN2; (-) strand; PAM type: NNNNGHTT; PAM sequence: CTTTGCTT
atgtgatcccatttgtccat

SEQ ID NO: 12672 - DNA, 20 bp, Artificial Sequence
  Description of Artificial Sequence: Synthetic oligonucleotide
  Target: ATXN2; (-) strand; PAM type: NNNNGHTT; PAM sequence: AGAAGCTT
gatggtttcctttgctgtgc

SEQ ID NO: 12673 - DNA, 20 bp, Artificial Sequence
  Description of Artificial Sequence: Synthetic oligonucleotide
  Target: ATXN2; (-) strand; PAM type: NNNNGHTT; PAM sequence: GATGGTTT
ggctgtctcttcactttgtt

SEQ ID NO: 12674 - DNA, 20 bp, Artificial Sequence
  Description of Artificial Sequence: Synthetic oligonucleotide
  Target: ATXN2; (-) strand; PAM type: NNNNGHTT; PAM sequence: AGTAGTTT
tattgatcccttgtcagatg

SEQ ID NO: 12675 - DNA, 20 bp, Artificial Sequence
  Description of Artificial Sequence: Synthetic oligonucleotide
  Target: ATXN2; (-) strand; PAM type: NNNNGHTT; PAM sequence: AGTTGCTT
tactaaaattttccctatgg

SEQ ID NO: 12676 - DNA, 20 bp, Artificial Sequence
  Description of Artificial Sequence: Synthetic oligonucleotide
  Target: ATXN2; (-) strand; PAM type: NNNNGHTT; PAM sequence: CTAGGATT
tgcctcagcctcccaaagtg

SEQ ID NO: 12677 - DNA, 20 bp, Artificial Sequence
  Description of Artificial Sequence: Synthetic oligonucleotide
  Target: ATXN2; (-) strand; PAM type: NNNNGHTT; PAM sequence: AGGTGATT
ggtcttgaactcctaacctc

SEQ ID NO: 12678 - DNA, 20 bp, Artificial Sequence
  Description of Artificial Sequence: Synthetic oligonucleotide
  Target: ATXN2; (-) strand; PAM type: NNNNGHTT; PAM sequence: ACGGGATT
tttttgtatttttagtagag

SEQ ID NO: 12679 - DNA, 20 bp, Artificial Sequence
  Description of Artificial Sequence: Synthetic oligonucleotide
  Target: ATXN2; (-) strand; PAM type: NNNNGHTT; PAM sequence: CCCGGATT
gctcactgcgccctacacct

SEQ ID NO: 12680 - DNA, 20 bp, Artificial Sequence
  Description of Artificial Sequence: Synthetic oligonucleotide
  Target: ATXN2; (-) strand; PAM type: NNNNGHTT; PAM sequence: TTTTGTTT
ttccttttttttttgttttg

SEQ ID NO: 12681 - DNA, 20 bp, Artificial Sequence
  Description of Artificial Sequence: Synthetic oligonucleotide
  Target: ATXN2; (-) strand; PAM type: NNNNGHTT; PAM sequence: TTTTGTTT
atgtcttccttttttttttg

SEQ ID NO: 12682 - DNA, 20 bp, Artificial Sequence
  Description of Artificial Sequence: Synthetic oligonucleotide
  Target: ATXN2; (-) strand; PAM type: NNNNGHTT; PAM sequence: TTTTGTTT
cttgtatgtcttcctttttt

SEQ ID NO: 12683 - DNA, 20 bp, Artificial Sequence
  Description of Artificial Sequence: Synthetic oligonucleotide
  Target: ATXN2; (-) strand; PAM type: NNNNGHTT; PAM sequence: CTTGGCTT
ggctcaagcaatcctcccac

SEQ ID NO: 12684 - DNA, 20 bp, Artificial Sequence
  Description of Artificial Sequence: Synthetic oligonucleotide
  Target: ATXN2; (-) strand; PAM type: NNNNGHTT; PAM sequence: TGCTGTTT
cataaataacgatgaggtct

SEQ ID NO: 12685 - DNA, 20 bp, Artificial Sequence
  Description of Artificial Sequence: Synthetic oligonucleotide
  Target: ATXN2; (-) strand; PAM type: NNNNGHTT; PAM sequence: ACCTGTTT
gtattgaatacctttcatat

SEQ ID NO: 12686 - DNA, 20 bp, Artificial Sequence
  Description of Artificial Sequence: Synthetic oligonucleotide
  Target: ATXN2; (-) strand; PAM type: NNNNGHTT; PAM sequence: TGTAGTTT
ggggtgagatgatatcttgt

SEQ ID NO: 12687 - DNA, 20 bp, Artificial Sequence
  Description of Artificial Sequence: Synthetic oligonucleotide
  Target: ATXN2; (-) strand; PAM type: NNNNGHTT; PAM sequence: AGTGGTTT
atttccatactgttctccat

SEQ ID NO: 12688 - DNA, 20 bp, Artificial Sequence
  Description of Artificial Sequence: Synthetic oligonucleotide
  Target: ATXN2; (-) strand; PAM type: NNNNGHTT; PAM sequence: TTTAGTTT
gatcatatggtagctctatt

SEQ ID NO: 12689 - DNA, 20 bp, Artificial Sequence
  Description of Artificial Sequence: Synthetic oligonucleotide
  Target: ATXN2; (-) strand; PAM type: NNNNGHTT; PAM sequence: AACTGATT
gtgcagatattccttcaata

SEQ ID NO: 12690 - DNA, 20 bp, Artificial Sequence
  Description of Artificial Sequence: Synthetic oligonucleotide
  Target: ATXN2; (-) strand; PAM type: NNNNGHTT; PAM sequence: GGTTGATT
tgtctgtcagtggacacgta

SEQ ID NO: 12691 - DNA, 20 bp, Artificial Sequence
  Description of Artificial Sequence: Synthetic oligonucleotide
  Target: ATXN2; (-) strand; PAM type: NNNNGHTT; PAM sequence: CCTGGCTT
gcaaagtttatctttctgtc

SEQ ID NO: 12692 - DNA, 20 bp, Artificial Sequence
  Description of Artificial Sequence: Synthetic oligonucleotide
  Target: ATXN2; (-) strand; PAM type: NNNNGHTT; PAM sequence: CAAAGTTT
tgcaaacgagtaagaatatg

SEQ ID NO: 12693 - DNA, 20 bp, Artificial Sequence
  Description of Artificial Sequence: Synthetic oligonucleotide
  Target: ATXN2; (-) strand; PAM type: NNNNGHTT; PAM sequence: AATTGTTT
tctgctatctccatgtgttc

SEQ ID NO: 12694 - DNA, 20 bp, Artificial Sequence
  Description of Artificial Sequence: Synthetic oligonucleotide
  Target: ATXN2; (-) strand; PAM type: NNNNGHTT; PAM sequence: CGGGGTTT
ttttgtatttttagtagaga

SEQ ID NO: 12695 - DNA, 20 bp, Artificial Sequence
  Description of Artificial Sequence: Synthetic oligonucleotide
  Target: ATXN2; (-) strand; PAM type: NNNNGHTT; PAM sequence: AAGTGATT
aacctccgcctccagggttc

SEQ ID NO: 12696 - DNA, 20 bp, Artificial Sequence
  Description of Artificial Sequence: Synthetic oligonucleotide
  Target: ATXN2; (-) strand; PAM type: NNNNGHTT; PAM sequence: CCCTGCTT
attaatgctgactgtagtca

SEQ ID NO: 12697 - DNA, 20 bp, Artificial Sequence
  Description of Artificial Sequence: Synthetic oligonucleotide
  Target: ATXN2; (-) strand; PAM type: NNNNGHTT; PAM sequence: AAAGGTTT
ttggttttgcagtctacttt

SEQ ID NO: 12698 - DNA, 20 bp, Artificial Sequence
  Description of Artificial Sequence: Synthetic oligonucleotide
  Target: ATXN2; (-) strand; PAM type: NNNNGHTT; PAM sequence: CTTGGTTT
ttctgttctttttgatggtc

SEQ ID NO: 12699 - DNA, 20 bp, Artificial Sequence
  Description of Artificial Sequence: Synthetic oligonucleotide
  Target: ATXN2; (-) strand; PAM type: NNNNGHTT; PAM sequence: TCCTGTTT
ctcccccttttttcagccat

SEQ ID NO: 12700 - DNA, 20 bp, Artificial Sequence
  Description of Artificial Sequence: Synthetic oligonucleotide
  Target: ATXN2; (-) strand; PAM type: NNNNGHTT; PAM sequence: TGTTGCTT
tgtggcttaggttctgtttt

SEQ ID NO: 12701 - DNA, 20 bp, Artificial Sequence
  Description of Artificial Sequence: Synthetic oligonucleotide
  Target: ATXN2; (-) strand; PAM type: NNNNGHTT; PAM sequence: TTCTGTTT
gtcctaacctgtggcttagg

SEQ ID NO: 12702 - DNA, 20 bp, Artificial Sequence
  Description of Artificial Sequence: Synthetic oligonucleotide
  Target: ATXN2; (-) strand; PAM type: NNNNGHTT; PAM sequence: TGTGGCTT
ttaggtccgttgtcctaacc

SEQ ID NO: 12703 - DNA, 20 bp, Artificial Sequence
  Description of Artificial Sequence: Synthetic oligonucleotide
  Target: ATXN2; (-) strand; PAM type: NNNNGHTT; PAM sequence: TGTGGCTT
tgtttctcaccacctggggc

SEQ ID NO: 12704 - DNA, 20 bp, Artificial Sequence
  Description of Artificial Sequence: Synthetic oligonucleotide
  Target: ATXN2; (-) strand; PAM type: NNNNGHTT; PAM sequence: GCTTGTTT
gctgtgtaggtttctcttta

SEQ ID NO: 12705 - DNA, 20 bp, Artificial Sequence
  Description of Artificial Sequence: Synthetic oligonucleotide
  Target: ATXN2; (-) strand; PAM type: NNNNGHTT; PAM sequence: TTTAGCTT
tttggctgtgtaggtttctc

SEQ ID NO: 12706 - DNA, 20 bp, Artificial Sequence
  Description of Artificial Sequence: Synthetic oligonucleotide
  Target: ATXN2; (-) strand; PAM type: NNNNGHTT; PAM sequence: GTAGGTTT
aaggcaacctttttggctgt

SEQ ID NO: 12707 - DNA, 20 bp, Artificial Sequence
  Description of Artificial Sequence: Synthetic oligonucleotide
  Target: ATXN2; (-) strand; PAM type: NNNNGHTT; PAM sequence: ATTGGTTT
ttggtaatgaaaccattgaa

SEQ ID NO: 12708 - DNA, 20 bp, Artificial Sequence
  Description of Artificial Sequence: Synthetic oligonucleotide
  Target: ATXN2; (-) strand; PAM type: NNNNGHTT; PAM sequence: TGCTGTTT
gatgcgccagagttgcataa

SEQ ID NO: 12709 - DNA, 20 bp, Artificial Sequence
  Description of Artificial Sequence: Synthetic oligonucleotide
  Target: ATXN2; (-) strand; PAM type: NNNNGHTT; PAM sequence: TAAAGCTT
tagctatattggtaatgcag

SEQ ID NO: 12710 - DNA, 20 bp, Artificial Sequence
  Description of Artificial Sequence: Synthetic oligonucleotide
  Target: ATXN2; (-) strand; PAM type: NNNNGHTT; PAM sequence: GAAAGTTT
aaagatttttgtgaacaaat

SEQ ID NO: 12711 - DNA, 20 bp, Artificial Sequence
  Description of Artificial Sequence: Synthetic oligonucleotide
  Target: ATXN2; (-) strand; PAM type: NNNNGHTT; PAM sequence: TAAAGATT
gttatgtggatcgcctctac

SEQ ID NO: 12712 - DNA, 20 bp, Artificial Sequence
  Description of Artificial Sequence: Synthetic oligonucleotide
  Target: ATXN2; (-) strand; PAM type: NNNNGHTT; PAM sequence: GTCTGATT
aagaaaaagcaacaccaaaa

SEQ ID NO: 12713 - DNA, 20 bp, Artificial Sequence
  Description of Artificial Sequence: Synthetic oligonucleotide
  Target: ATXN2; (-) strand; PAM type: NNNNGHTT; PAM sequence: ATGTGTTT
acccatagtaagaaatgcag

SEQ ID NO: 12714 - DNA, 20 bp, Artificial Sequence
  Description of Artificial Sequence: Synthetic oligonucleotide
  Target: ATXN2; (-) strand; PAM type: NNNNGHTT; PAM sequence: CCCTGTTT
gtctgggcaacggagtcaga

SEQ ID NO: 12715 - DNA, 20 bp, Artificial Sequence
  Description of Artificial Sequence: Synthetic oligonucleotide
  Target: ATXN2; (-) strand; PAM type: NNNNGHTT; PAM sequence: GTGAGCTT
gagatggaggttgcagtgag

SEQ ID NO: 12716 - DNA, 20 bp, Artificial Sequence
  Description of Artificial Sequence: Synthetic oligonucleotide
  Target: ATXN2; (-) strand; PAM type: NNNNGHTT; PAM sequence: CCCTGTTT
acctgggtaacatggtaaaa

SEQ ID NO: 12717 - DNA, 20 bp, Artificial Sequence
  Description of Artificial Sequence: Synthetic oligonucleotide
  Target: ATXN2; (-) strand; PAM type: NNNNGHTT; PAM sequence: GATAGCTT
ttgggaggctgagacaggtg

SEQ ID NO: 12718 - DNA, 20 bp, Artificial Sequence
  Description of Artificial Sequence: Synthetic oligonucleotide
  Target: ATXN2; (-) strand; PAM type: NNNNGHTT; PAM sequence: AATAGTTT
actaaatgaataagtctata

SEQ ID NO: 12719 - DNA, 20 bp, Artificial Sequence
  Description of Artificial Sequence: Synthetic oligonucleotide
  Target: ATXN2; (-) strand; PAM type: NNNNGHTT; PAM sequence: ATTAGATT
aaaaagaacttaagttttcc

SEQ ID NO: 12720 - DNA, 20 bp, Artificial Sequence
  Description of Artificial Sequence: Synthetic oligonucleotide
  Target: ATXN2; (-) strand; PAM type: NNNNGHTT; PAM sequence: TTAAGTTT
aaaaaagaaaaaaaaagaac

SEQ ID NO: 12721 - DNA, 20 bp, Artificial Sequence
  Description of Artificial Sequence: Synthetic oligonucleotide
  Target: ATXN2; (-) strand; PAM type: NNNNGHTT; PAM sequence: AAATGCTT
tcgcaagactgaggcaggag

SEQ ID NO: 12722 - DNA, 20 bp, Artificial Sequence
  Description of Artificial Sequence: Synthetic oligonucleotide
  Target: ATXN2; (-) strand; PAM type: NNNNGHTT; PAM sequence: TTCAGTTT
atgtggagtcacataagaat

SEQ ID NO: 12723 - DNA, 20 bp, Artificial Sequence
  Description of Artificial Sequence: Synthetic oligonucleotide
  Target: ATXN2; (-) strand; PAM type: NNNNGHTT; PAM sequence: AAGTGTTT
tcgatgagatattgcctata

SEQ ID NO: 12724 - DNA, 20 bp, Artificial Sequence
  Description of Artificial Sequence: Synthetic oligonucleotide
  Target: ATXN2; (-) strand; PAM type: NNNNGHTT; PAM sequence: ACCTGCTT
caaaatgggttaattttaga

SEQ ID NO: 12725 - DNA, 20 bp, Artificial Sequence
  Description of Artificial Sequence: Synthetic oligonucleotide
  Target: ATXN2; (-) strand; PAM type: NNNNGHTT; PAM sequence: CTAGGTTT
ggttttagaggtaaatggac

SEQ ID NO: 12726 - DNA, 20 bp, Artificial Sequence
  Description of Artificial Sequence: Synthetic oligonucleotide
  Target: ATXN2; (-) strand; PAM type: NNNNGHTT; PAM sequence: GTGGGTTT
atctgttttgggttaataat

SEQ ID NO: 12727 - DNA, 20 bp, Artificial Sequence
  Description of Artificial Sequence: Synthetic oligonucleotide
  Target: ATXN2; (-) strand; PAM type: NNNNGHTT; PAM sequence: ATCTGTTT
taagaattgctagtaatttg

SEQ ID NO: 12728 - DNA, 20 bp, Artificial Sequence
  Description of Artificial Sequence: Synthetic oligonucleotide
  Target: ATXN2; (-) strand; PAM type: NNNNGHTT; PAM sequence: GATAGCTT
tgagccatatgcagagtgct

SEQ ID NO: 12729 - DNA, 20 bp, Artificial Sequence
  Description of Artificial Sequence: Synthetic oligonucleotide
  Target: ATXN2; (-) strand; PAM type: NNNNGHTT; PAM sequence: GTGTGTTT
ggcagaaatagaaatacctt

SEQ ID NO: 12730 - DNA, 20 bp, Artificial Sequence
  Description of Artificial Sequence: Synthetic oligonucleotide
  Target: ATXN2; (-) strand; PAM type: NNNNGHTT; PAM sequence: CAGTGATT
gtgcatgctgcactgtcagt

SEQ ID NO: 12731 - DNA, 20 bp, Artificial Sequence
  Description of Artificial Sequence: Synthetic oligonucleotide
  Target: ATXN2; (-) strand; PAM type: NNNNGHTT; PAM sequence: CAGTGCTT
tctggtgtttaagcttctag

SEQ ID NO: 12732 - DNA, 20 bp, Artificial Sequence
  Description of Artificial Sequence: Synthetic oligonucleotide
  Target: ATXN2; (-) strand; PAM type: NNNNGHTT; PAM sequence: TTAAGCTT
gagggctgaccatctggtgt

SEQ ID NO: 12733 - DNA, 20 bp, Artificial Sequence
  Description of Artificial Sequence: Synthetic oligonucleotide
  Target: ATXN2; (-) strand; PAM type: NNNNGHTT; PAM sequence: TGGTGTTT
aagtaagagggctgaccatc

SEQ ID NO: 12734 - DNA, 20 bp, Artificial Sequence
  Description of Artificial Sequence: Synthetic oligonucleotide
  Target: ATXN2; (-) strand; PAM type: NNNNGHTT; PAM sequence: GGCAGCTT
tatctgcactgtgtatatta

SEQ ID NO: 12735 - DNA, 20 bp, Artificial Sequence
  Description of Artificial Sequence: Synthetic oligonucleotide
  Target: ATXN2; (-) strand; PAM type: NNNNGHTT; PAM sequence: TTCTGTTT
taacatctctgtcaagcaag

SEQ ID NO: 12736 - DNA, 20 bp, Artificial Sequence
  Description of Artificial Sequence: Synthetic oligonucleotide
  Target: ATXN2; (-) strand; PAM type: NNNNGHTT; PAM sequence: TCATGCTT
tgtgtaccagatgctgttct

SEQ ID NO: 12737 - DNA, 20 bp, Artificial Sequence
  Description of Artificial Sequence: Synthetic oligonucleotide
  Target: ATXN2; (-) strand; PAM type: NNNNGHTT; PAM sequence: TTATGTTT
gataatataatgttattctc

SEQ ID NO: 12738 - DNA, 20 bp, Artificial Sequence
  Description of Artificial Sequence: Synthetic oligonucleotide
  Target: ATXN2; (-) strand; PAM type: NNNNGHTT; PAM sequence: CCGAGATT
gaggtggaggttgcagtgat

SEQ ID NO: 12739 - DNA, 20 bp, Artificial Sequence
  Description of Artificial Sequence: Synthetic oligonucleotide
  Target: ATXN2; (-) strand; PAM type: NNNNGHTT; PAM sequence: AGGAGTTT
cgggtggatcacttgaggtc

SEQ ID NO: 12740 - DNA, 20 bp, Artificial Sequence
  Description of Artificial Sequence: Synthetic oligonucleotide
  Target: ATXN2; (-) strand; PAM type: NNNNGHTT; PAM sequence: AGTGGTTT
ggcataccaggaagaaaaga

SEQ ID NO: 12741 - DNA, 20 bp, Artificial Sequence
  Description of Artificial Sequence: Synthetic oligonucleotide
  Target: ATXN2; (-) strand; PAM type: NNNNGHTT; PAM sequence: AGGAGTTT
ataaaaagtcttatctcttt

SEQ ID NO: 12742 - DNA, 20 bp, Artificial Sequence
  Description of Artificial Sequence: Synthetic oligonucleotide
  Target: ATXN2; (-) strand; PAM type: NNNNGHTT; PAM sequence: TAATGCTT
aactttctgtaaaccttcat

SEQ ID NO: 12743 - DNA, 20 bp, Artificial Sequence
  Description of Artificial Sequence: Synthetic oligonucleotide
  Target: ATXN2; (-) strand; PAM type: NNNNGHTT; PAM sequence: TCTTGATT
cttatggcagtaccatactg

SEQ ID NO: 12744 - DNA, 20 bp, Artificial Sequence
  Description of Artificial Sequence: Synthetic oligonucleotide
  Target: ATXN2; (-) strand; PAM type: NNNNGHTT; PAM sequence: GAAAGTTT
agtctgttgactacaaatgt

SEQ ID NO: 12745 - DNA, 20 bp, Artificial Sequence
  Description of Artificial Sequence: Synthetic oligonucleotide
  Target: ATXN2; (-) strand; PAM type: NNNNGHTT; PAM sequence: ACATGCTT
tcctccattgaattatcttc

SEQ ID NO: 12746 - DNA, 20 bp, Artificial Sequence
  Description of Artificial Sequence: Synthetic oligonucleotide
  Target: ATXN2; (-) strand; PAM type: NNNNGHTT; PAM sequence: ATTCGCTT
tgtagtggctgaggcaggag

SEQ ID NO: 12747 - DNA, 20 bp, Artificial Sequence
  Description of Artificial Sequence: Synthetic oligonucleotide
  Target: ATXN2; (-) strand; PAM type: NNNNGHTT; PAM sequence: AGGAGATT
actactgtagtggctgaggc

SEQ ID NO: 12748 - DNA, 20 bp, Artificial Sequence
  Description of Artificial Sequence: Synthetic oligonucleotide
  Target: ATXN2; (-) strand; PAM type: NNNNGHTT; PAM sequence: TTCAGATT
aaccatttttactgtgtaag

SEQ ID NO: 12749 - DNA, 20 bp, Artificial Sequence
  Description of Artificial Sequence: Synthetic oligonucleotide
  Target: ATXN2; (-) strand; PAM type: NNNNGHTT; PAM sequence: ATTTGATT
aacaatattatgagaataac

SEQ ID NO: 12750 - DNA, 20 bp, Artificial Sequence
  Description of Artificial Sequence: Synthetic oligonucleotide
  Target: ATXN2; (-) strand; PAM type: NNNNGHTT; PAM sequence: AATTGCTT
ctcagcctcccaaagtgaaa

SEQ ID NO: 12751 - DNA, 20 bp, Artificial Sequence
  Description of Artificial Sequence: Synthetic oligonucleotide
  Target: ATXN2; (-) strand; PAM type: NNNNGHTT; PAM sequence: TTTTGCTT
tttgacacagaatctcgctc

SEQ ID NO: 12752 - DNA, 20 bp, Artificial Sequence
  Description of Artificial Sequence: Synthetic oligonucleotide
  Target: ATXN2; (-) strand; PAM type: NNNNGHTT; PAM sequence: CTGGGTTT
cattaaggtttattactctt

SEQ ID NO: 12753 - DNA, 20 bp, Artificial Sequence
  Description of Artificial Sequence: Synthetic oligonucleotide
  Target: ATXN2; (-) strand; PAM type: NNNNGHTT; PAM sequence: TAAGGTTT
aatactgtttcatcaatcat

SEQ ID NO: 12754 - DNA, 20 bp, Artificial Sequence
  Description of Artificial Sequence: Synthetic oligonucleotide
  Target: ATXN2; (-) strand; PAM type: NNNNGHTT; PAM sequence: TACTGTTT
tggtgtcgtatctaagaaaa

SEQ ID NO: 12755 - DNA, 20 bp, Artificial Sequence
  Description of Artificial Sequence: Synthetic oligonucleotide
  Target: ATXN2; (-) strand; PAM type: NNNNGHTT; PAM sequence: GTAAGCTT
ccaatttatctgattttgaa

SEQ ID NO: 12756 - DNA, 20 bp, Artificial Sequence
  Description of Artificial Sequence: Synthetic oligonucleotide
  Target: ATXN2; (-) strand; PAM type: NNNNGHTT; PAM sequence: ATCTGATT
attttgatgaagtccaattt

SEQ ID NO: 12757 - DNA, 20 bp, Artificial Sequence
  Description of Artificial Sequence: Synthetic oligonucleotide
  Target: ATXN2; (-) strand; PAM type: NNNNGHTT; PAM sequence: AAATGTTT
ctgttagatacatggtttgc

SEQ ID NO: 12758 - DNA, 20 bp, Artificial Sequence
  Description of Artificial Sequence: Synthetic oligonucleotide
  Target: ATXN2; (-) strand; PAM type: NNNNGHTT; PAM sequence: CATGGTTT
gtacaagtccctgttagata

SEQ ID NO: 12759 - DNA, 20 bp, Artificial Sequence
  Description of Artificial Sequence: Synthetic oligonucleotide
  Target: ATXN2; (-) strand; PAM type: NNNNGHTT; PAM sequence: TTTGGATT
ttggccatttatatatcttc

SEQ ID NO: 12760 - DNA, 20 bp, Artificial Sequence
  Description of Artificial Sequence: Synthetic oligonucleotide
  Target: ATXN2; (-) strand; PAM type: NNNNGHTT; PAM sequence: TTGTGTTT
ctaatgatgttgaacatctt

SEQ ID NO: 12761 - DNA, 20 bp, Artificial Sequence
  Description of Artificial Sequence: Synthetic oligonucleotide
  Target: ATXN2; (-) strand; PAM type: NNNNGHTT; PAM sequence: TGTGGCTT
gtgtgaagtgttaacctcat

SEQ ID NO: 12762 - DNA, 20 bp, Artificial Sequence
  Description of Artificial Sequence: Synthetic oligonucleotide
  Target: ATXN2; (-) strand; PAM type: NNNNGHTT; PAM sequence: TTTTGATT
aacacttattgtcttgtctt

SEQ ID NO: 12763 - DNA, 20 bp, Artificial Sequence
  Description of Artificial Sequence: Synthetic oligonucleotide
  Target: ATXN2; (-) strand; PAM type: NNNNGHTT; PAM sequence: TTCTGTTT
caccagcagggtatgagggt

SEQ ID NO: 12764 - DNA, 20 bp, Artificial Sequence
  Description of Artificial Sequence: Synthetic oligonucleotide
  Target: ATXN2; (-) strand; PAM type: NNNNGHTT; PAM sequence: GAGGGTTT
cattcccaccagcagggtat

SEQ ID NO: 12765 - DNA, 20 bp, Artificial Sequence
  Description of Artificial Sequence: Synthetic oligonucleotide
  Target: ATXN2; (-) strand; PAM type: NNNNGHTT; PAM sequence: CTGTGTTT
attgctgggtcatatggcaa

SEQ ID NO: 12766 - DNA, 20 bp, Artificial Sequence
  Description of Artificial Sequence: Synthetic oligonucleotide
  Target: ATXN2; (-) strand; PAM type: NNNNGHTT; PAM sequence: TGCAGTTT
cactgccacaaacatgagtg

SEQ ID NO: 12767 - DNA, 20 bp, Artificial Sequence
  Description of Artificial Sequence: Synthetic oligonucleotide
  Target: ATXN2; (-) strand; PAM type: NNNNGHTT; PAM sequence: CACTGTTT
gtagctatttgtggtgttct

SEQ ID NO: 12768 - DNA, 20 bp, Artificial Sequence
  Description of Artificial Sequence: Synthetic oligonucleotide
  Target: ATXN2; (-) strand; PAM type: NNNNGHTT; PAM sequence: ATCAGTTT
cacattttgtttatccatta

SEQ ID NO: 12769 - DNA, 20 bp, Artificial Sequence
  Description of Artificial Sequence: Synthetic oligonucleotide
  Target: ATXN2; (-) strand; PAM type: NNNNGHTT; PAM sequence: TTTTGTTT
ttgatgtggataataccaca

SEQ ID NO: 12770 - DNA, 20 bp, Artificial Sequence
  Description of Artificial Sequence: Synthetic oligonucleotide
  Target: ATXN2; (-) strand; PAM type: NNNNGHTT; PAM sequence: GCATGTTT
aaaagttcatccatgttgga

SEQ ID NO: 12771 - DNA, 20 bp, Artificial Sequence
  Description of Artificial Sequence: Synthetic oligonucleotide
  Target: ATXN2; (-) strand; PAM type: NNNNGHTT; PAM sequence: ACTGGCTT
taaaatatgtggcttttatg

SEQ ID NO: 12772 - DNA, 20 bp, Artificial Sequence
  Description of Artificial Sequence: Synthetic oligonucleotide
  Target: ATXN2; (-) strand; PAM type: NNNNGHTT; PAM sequence: TGTGGCTT
acaaatggaataataaaata

SEQ ID NO: 12773 - DNA, 20 bp, Artificial Sequence
  Description of Artificial Sequence: Synthetic oligonucleotide
  Target: ATXN2; (-) strand; PAM type: NNNNGHTT; PAM sequence: ATGGGCTT
tctactttctgtctctatgg

SEQ ID NO: 12774 - DNA, 20 bp, Artificial Sequence
  Description of Artificial Sequence: Synthetic oligonucleotide
  Target: ATXN2; (-) strand; PAM type: NNNNGHTT; PAM sequence: CCCAGTTT
cccccaaaagaaaccccgtg

SEQ ID NO: 12775 - DNA, 20 bp, Artificial Sequence
  Description of Artificial Sequence: Synthetic oligonucleotide
  Target: ATXN2; (-) strand; PAM type: NNNNGHTT; PAM sequence: AGTTGATT
tgttgtacaaccgtcttctc

SEQ ID NO: 12776 - DNA, 20 bp, Artificial Sequence
  Description of Artificial Sequence: Synthetic oligonucleotide
  Target: ATXN2; (-) strand; PAM type: NNNNGHTT; PAM sequence: AGTGGTTT
ccatttaaagtgtataaatc

SEQ ID NO: 12777 - DNA, 20 bp, Artificial Sequence
  Description of Artificial Sequence: Synthetic oligonucleotide
  Target: ATXN2; (-) strand; PAM type: NNNNGHTT; PAM sequence: AGTGGTTT
ccgtttaaagtgtataaatc

SEQ ID NO: 12778 - DNA, 20 bp, Artificial Sequence
  Description of Artificial Sequence: Synthetic oligonucleotide
  Target: ATXN2; (-) strand; PAM type: NNNNGHTT; PAM sequence: AACCGTTT
ataatttacatatataaata

SEQ ID NO: 12779 - DNA, 20 bp, Artificial Sequence
  Description of Artificial Sequence: Synthetic oligonucleotide
  Target: ATXN2; (-) strand; PAM type: NNNNGHTT; PAM sequence: AACAGCTT
gtgaattagcatgtttttat

SEQ ID NO: 12780 - DNA, 20 bp, Artificial Sequence
  Description of Artificial Sequence: Synthetic oligonucleotide
  Target: ATXN2; (-) strand; PAM type: NNNNGHTT; PAM sequence: GCATGTTT
actttgaagcatgtgaatta

SEQ ID NO: 12781 - DNA, 20 bp, Artificial Sequence
  Description of Artificial Sequence: Synthetic oligonucleotide
  Target: ATXN2; (-) strand; PAM type: NNNNGHTT; PAM sequence: CTTGGATT
cagtctcctcttatactaca

SEQ ID NO: 12782 - DNA, 20 bp, Artificial Sequence
  Description of Artificial Sequence: Synthetic oligonucleotide
  Target: ATXN2; (-) strand; PAM type: NNNNGHTT; PAM sequence: TCTAGCTT
ccgagatggcagcagtacag

SEQ ID NO: 12783 - DNA, 20 bp, Artificial Sequence
  Description of Artificial Sequence: Synthetic oligonucleotide
  Target: ATXN2; (-) strand; PAM type: NNNNGHTT; PAM sequence: AGGGGCTT
acggggtggctgccaggcgg

SEQ ID NO: 12784 - DNA, 20 bp, Artificial Sequence
  Description of Artificial Sequence: Synthetic oligonucleotide
  Target: ATXN2; (-) strand; PAM type: NNNNGHTT; PAM sequence: ATCCGATT
tctccacagacgcagcaacc

SEQ ID NO: 12785 - DNA, 20 bp, Artificial Sequence
  Description of Artificial Sequence: Synthetic oligonucleotide
  Target: ATXN2; (-) strand; PAM type: NNNNGHTT; PAM sequence: ACATGTTT
ttaaccctgagtgacacagc

SEQ ID NO: 12786 - DNA, 20 bp, Artificial Sequence
  Description of Artificial Sequence: Synthetic oligonucleotide
  Target: ATXN2; (-) strand; PAM type: NNNNGHTT; PAM sequence: ATCTGTTT
cgagcatgctgccttcaagc

SEQ ID NO: 12787 - DNA, 20 bp, Artificial Sequence
  Description of Artificial Sequence: Synthetic oligonucleotide
  Target: ATXN2; (-) strand; PAM type: NNNNGHTT; PAM sequence: TTGAGATT
gtgtttgtgtccctgggtac

SEQ ID NO: 12788 - DNA, 20 bp, Artificial Sequence
  Description of Artificial Sequence: Synthetic oligonucleotide
  Target: ATXN2; (-) strand; PAM type: NNNNGHTT; PAM sequence: CAGTGTTT
gaggaccctgcggccttccg

SEQ ID NO: 12789 - DNA, 20 bp, Artificial Sequence
  Description of Artificial Sequence: Synthetic oligonucleotide
  Target: ATXN2; (-) strand; PAM type: NNNNGHTT; PAM sequence: TCTGGTTT
ataaaaagtgaacaaaggtc

SEQ ID NO: 12790 - DNA, 20 bp, Artificial Sequence
  Description of Artificial Sequence: Synthetic oligonucleotide
  Target: ATXN2; (-) strand; PAM type: NNNNGHTT; PAM sequence: GGGGGATT
tcttgggtgtttctcgcaga

SEQ ID NO: 12791 - DNA, 20 bp, Artificial Sequence
  Description of Artificial Sequence: Synthetic oligonucleotide
  Target: ATXN2; (-) strand; PAM type: NNNNGHTT; PAM sequence: GGGTGTTT
ttttttaattgatcattctt

SEQ ID NO: 12792 - DNA, 20 bp, Artificial Sequence
  Description of Artificial Sequence: Synthetic oligonucleotide
  Target: ATXN2; (-) strand; PAM type: NNNNGHTT; PAM sequence: AAGGGTTT
ccctgtttccttccaaaagg

SEQ ID NO: 12793 - DNA, 20 bp, Artificial Sequence
  Description of Artificial Sequence: Synthetic oligonucleotide
  Target: ATXN2; (-) strand; PAM type: NNNNGHTT; PAM sequence: CCCTGTTT
gcccctcctcagctgcttcc

SEQ ID NO: 12794 - DNA, 20 bp, Artificial Sequence
  Description of Artificial Sequence: Synthetic oligonucleotide
  Target: ATXN2; (-) strand; PAM type: NNNNGHTT; PAM sequence: AGCTGCTT
ttatgtatctgcccctcctc

SEQ ID NO: 12795 - DNA, 20 bp, Artificial Sequence
  Description of Artificial Sequence: Synthetic oligonucleotide
  Target: ATXN2; (-) strand; PAM type: NNNNGHTT; PAM sequence: CCCAGCTT
atatgatcatgtgcccacta

SEQ ID NO: 12796 - DNA, 20 bp, Artificial Sequence
  Description of Artificial Sequence: Synthetic oligonucleotide
  Target: ATXN2; (-) strand; PAM type: NNNNGHTT; PAM sequence: AAAAGTTT
caaaaaaaaaaaaaaaaaaa

SEQ ID NO: 12797 - DNA, 20 bp, Artificial Sequence
  Description of Artificial Sequence: Synthetic oligonucleotide
  Target: ATXN2; (-) strand; PAM type: NNNNGHTT; PAM sequence: AATCGCTT
ttggcaggctgaggcaggat

SEQ ID NO: 12798 - DNA, 20 bp, Artificial Sequence
  Description of Artificial Sequence: Synthetic oligonucleotide
  Target: ATXN2; (-) strand; PAM type: NNNNGHTT; PAM sequence: CTAAGTTT
tgctattaacagttgttaac

SEQ ID NO: 12799 - DNA, 20 bp, Artificial Sequence
  Description of Artificial Sequence: Synthetic oligonucleotide
  Target: ATXN2; (-) strand; PAM type: NNNNGHTT; PAM sequence: TTCAGCTT
tactttagcacatgtatcta

SEQ ID NO: 12800 - DNA, 20 bp, Artificial Sequence
  Description of Artificial Sequence: Synthetic oligonucleotide
  Target: ATXN2; (-) strand; PAM type: NNNNGHTT; PAM sequence: AATAGCTT
ttagctttctaaatgttaac

SEQ ID NO: 12801 - DNA, 20 bp, Artificial Sequence
  Description of Artificial Sequence: Synthetic oligonucleotide
  Target: ATXN2; (-) strand; PAM type: NNNNGHTT; PAM sequence: TTTAGCTT
agcctttcctcagcctgtgt

SEQ ID NO: 12802 - DNA, 20 bp, Artificial Sequence
  Description of Artificial Sequence: Synthetic oligonucleotide
  Target: ATXN2; (-) strand; PAM type: NNNNGHTT; PAM sequence: CTGTGTTT
aaaggtagcctttcctcagc

SEQ ID NO: 12803 - DNA, 20 bp, Artificial Sequence
  Description of Artificial Sequence: Synthetic oligonucleotide
  Target: ATXN2; (-) strand; PAM type: NNNNGHTT; PAM sequence: CTTAGCTT
accaataaatcttcttgaaa

SEQ ID NO: 12804 - DNA, 20 bp, Artificial Sequence
  Description of Artificial Sequence: Synthetic oligonucleotide
  Target: ATXN2; (-) strand; PAM type: NNNNGHTT; PAM sequence: GGTAGATT
ttatttactataggtatcga

SEQ ID NO: 12805 - DNA, 20 bp, Artificial Sequence
  Description of Artificial Sequence: Synthetic oligonucleotide
  Target: ATXN2; (-) strand; PAM type: NNNNGHTT; PAM sequence: CCTTGATT
aggctttacttaacatctct

SEQ ID NO: 12806 - DNA, 20 bp, Artificial Sequence
  Description of Artificial Sequence: Synthetic oligonucleotide
  Target: ATXN2; (-) strand; PAM type: NNNNGHTT; PAM sequence: ACAGGCTT
cattatttctctgtcttagc

SEQ ID NO: 12807 - DNA, 20 bp, Artificial Sequence
  Description of Artificial Sequence: Synthetic oligonucleotide
  Target: ATXN2; (-) strand; PAM type: NNNNGHTT; PAM sequence: TGGAGATT
ctctggtgttctgaggtagt

SEQ ID NO: 12808 - DNA, 20 bp, Artificial Sequence
  Description of Artificial Sequence: Synthetic oligonucleotide
  Target: ATXN2; (-) strand; PAM type: NNNNGHTT; PAM sequence: CACAGCTT
gacatttgaaaccaccatag

SEQ ID NO: 12809 - DNA, 20 bp, Artificial Sequence
  Description of Artificial Sequence: Synthetic oligonucleotide
  Target: ATXN2; (-) strand; PAM type: NNNNGHTT; PAM sequence: ATGAGATT
taagtgggataactaaaatc

SEQ ID NO: 12810 - DNA, 20 bp, Artificial Sequence
  Description of Artificial Sequence: Synthetic oligonucleotide
  Target: ATXN2; (-) strand; PAM type: NNNNGHTT; PAM sequence: TAAAGATT
ttttagaaaataagcattac

SEQ ID NO: 12811 - DNA, 20 bp, Artificial Sequence
  Description of Artificial Sequence: Synthetic oligonucleotide
  Target: ATXN2; (-) strand; PAM type: NNNNGHTT; PAM sequence: TTGAGTTT
tattgtactaactgatgaat

SEQ ID NO: 12812 - DNA, 20 bp, Artificial Sequence
  Description of Artificial Sequence: Synthetic oligonucleotide
  Target: ATXN2; (-) strand; PAM type: NNNNGHTT; PAM sequence: GAATGATT
gatgatttaaagaaatttaa

SEQ ID NO: 12813 - DNA, 20 bp, Artificial Sequence
  Description of Artificial Sequence: Synthetic oligonucleotide
  Target: ATXN2; (-) strand; PAM type: NNNNGHTT; PAM sequence: TGATGATT
tctgaacatagaaaacagat

SEQ ID NO: 12814 - DNA, 20 bp, Artificial Sequence
  Description of Artificial Sequence: Synthetic oligonucleotide
  Target: ATXN2; (-) strand; PAM type: NNNNGHTT; PAM sequence: AACAGATT
agttgtttctgaacatagaa

SEQ ID NO: 12815 - DNA, 20 bp, Artificial Sequence
  Description of Artificial Sequence: Synthetic oligonucleotide
  Target: ATXN2; (-) strand; PAM type: NNNNGHTT; PAM sequence: AGTTGTTT
aattttacaggtatatcacc

SEQ ID NO: 12816 - DNA, 20 bp, Artificial Sequence
  Description of Artificial Sequence: Synthetic oligonucleotide
  Target: ATXN2; (-) strand; PAM type: NNNNGHTT; PAM sequence: TAAAGTTT
tactaaaaagaatgtgatgt

SEQ ID NO: 12817 - DNA, 20 bp, Artificial Sequence
  Description of Artificial Sequence: Synthetic oligonucleotide
  Target: ATXN2; (-) strand; PAM type: NNNNGHTT; PAM sequence: TATTGCTT
actattgtgatagataaatg

SEQ ID NO: 12818 - DNA, 20 bp, Artificial Sequence
  Description of Artificial Sequence: Synthetic oligonucleotide
  Target: ATXN2; (-) strand; PAM type: NNNNGHTT; PAM sequence: TTAAGCTT
ggttagagtttaaagagtca

SEQ ID NO: 12819 - DNA, 20 bp, Artificial Sequence
  Description of Artificial Sequence: Synthetic oligonucleotide
  Target: ATXN2; (-) strand; PAM type: NNNNGHTT; PAM sequence: TAGAGTTT
caaaagctgaaaacaaaggt

SEQ ID NO: 12820 - DNA, 20 bp, Artificial Sequence
  Description of Artificial Sequence: Synthetic oligonucleotide
  Target: ATXN2; (-) strand; PAM type: NNNNGHTT; PAM sequence: CCTAGCTT
ttaaacccaatgaaacatca

SEQ ID NO: 12821 - DNA, 20 bp, Artificial Sequence
  Description of Artificial Sequence: Synthetic oligonucleotide
  Target: ATXN2; (-) strand; PAM type: NNNNGHTT; PAM sequence: CCAGGCTT
ttgttttctagctaaagatt

SEQ ID NO: 12822 - DNA, 20 bp, Artificial Sequence
  Description of Artificial Sequence: Synthetic oligonucleotide
  Target: ATXN2; (-) strand; PAM type: NNNNGHTT; PAM sequence: TAAAGATT
ttaaaaaattgttttctagc

SEQ ID NO: 12823 - DNA, 20 bp, Artificial Sequence
  Description of Artificial Sequence: Synthetic oligonucleotide
  Target: ATXN2; (-) strand; PAM type: NNNNGHTT; PAM sequence: AATTGTTT
tatctgaattttttttaaaa

SEQ ID NO: 12824 - DNA, 20 bp, Artificial Sequence
  Description of Artificial Sequence: Synthetic oligonucleotide
  Target: ATXN2; (-) strand; PAM type: NNNNGHTT; PAM sequence: TTTTGCTT
tattgttcagtgttttcttg

SEQ ID NO: 12825 - DNA, 20 bp, Artificial Sequence
  Description of Artificial Sequence: Synthetic oligonucleotide
  Target: ATXN2; (-) strand; PAM type: NNNNGHTT; PAM sequence: TCTTGTTT
aaaattattgttcagtgttt

SEQ ID NO: 12826 - DNA, 20 bp, Artificial Sequence
  Description of Artificial Sequence: Synthetic oligonucleotide
  Target: ATXN2; (-) strand; PAM type: NNNNGHTT; PAM sequence: CAGTGTTT
aggaaatcaaaattattgtt

SEQ ID NO: 12827 - DNA, 20 bp, Artificial Sequence
  Description of Artificial Sequence: Synthetic oligonucleotide
  Target: ATXN2; (-) strand; PAM type: NNNNGHTT; PAM sequence: CTCTGTTT
atctgcaaaggaaaaaaagc

SEQ ID NO: 12828 - DNA, 20 bp, Artificial Sequence
  Description of Artificial Sequence: Synthetic oligonucleotide
  Target: ATXN2; (-) strand; PAM type: NNNNGHTT; PAM sequence: TGGTGTTT
acctacataaataaaattat

SEQ ID NO: 12829 - DNA, 20 bp, Artificial Sequence
  Description of Artificial Sequence: Synthetic oligonucleotide
  Target: ATXN2; (-) strand; PAM type: NNNNGHTT; PAM sequence: TGTTGTTT
aaagtttatgtaaattttga

SEQ ID NO: 12830 - DNA, 20 bp, Artificial Sequence
  Description of Artificial Sequence: Synthetic oligonucleotide
  Target: ATXN2; (-) strand; PAM type: NNNNGHTT; PAM sequence: AAAAGTTT
agtatttttagtgcacattt

SEQ ID NO: 12831 - DNA, 20 bp, Artificial Sequence
  Description of Artificial Sequence: Synthetic oligonucleotide
  Target: ATXN2; (-) strand; PAM type: NNNNGHTT; PAM sequence: AAGGGCTT
tctagtgagggtatgtaaca

SEQ ID NO: 12832 - DNA, 20 bp, Artificial Sequence
  Description of Artificial Sequence: Synthetic oligonucleotide
  Target: ATXN2; (-) strand; PAM type: NNNNGHTT; PAM sequence: TCTTGCTT
aatacccccagtgggccagt

SEQ ID NO: 12833 - DNA, 20 bp, Artificial Sequence
  Description of Artificial Sequence: Synthetic oligonucleotide
  Target: ATXN2; (-) strand; PAM type: NNNNGHTT; PAM sequence: CCAAGATT
attttccctttcttctagtt

SEQ ID NO: 12834 - DNA, 20 bp, Artificial Sequence
  Description of Artificial Sequence: Synthetic oligonucleotide
  Target: ATXN2; (-) strand; PAM type: NNNNGHTT; PAM sequence: GACAGTTT
aaagggtaagggctagagag

SEQ ID NO: 12835 - DNA, 20 bp, Artificial Sequence
  Description of Artificial Sequence: Synthetic oligonucleotide
  Target: ATXN2; (-) strand; PAM type: NNNNGHTT; PAM sequence: TTTTGATT
tgttcttcatatacttgtgg

SEQ ID NO: 12836 - DNA, 20 bp, Artificial Sequence
  Description of Artificial Sequence: Synthetic oligonucleotide
  Target: ATXN2; (-) strand; PAM type: NNNNGHTT; PAM sequence: TGTGGTTT
gctgctgttcttcatatact

SEQ ID NO: 12837 - DNA, 20 bp, Artificial Sequence
  Description of Artificial Sequence: Synthetic oligonucleotide
  Target: ATXN2; (-) strand; PAM type: NNNNGHTT; PAM sequence: AGGAGTTT
taggcagatcacctgaggtc

SEQ ID NO: 12838 - DNA, 20 bp, Artificial Sequence
  Description of Artificial Sequence: Synthetic oligonucleotide
  Target: ATXN2; (-) strand; PAM type: NNNNGHTT; PAM sequence: TCAAGTTT
ccttttgactaacttgggtc

SEQ ID NO: 12839 - DNA, 20 bp, Artificial Sequence
  Description of Artificial Sequence: Synthetic oligonucleotide
  Target: ATXN2; (-) strand; PAM type: NNNNGHTT; PAM sequence: CCCTGCTT
gaagtcatatgggatacaaa

SEQ ID NO: 12840 - DNA, 20 bp, Artificial Sequence
  Description of Artificial Sequence: Synthetic oligonucleotide
  Target: ATXN2; (-) strand; PAM type: NNNNGHTT; PAM sequence: TTAGGTTT
tttgaatctgagctctgcag

SEQ ID NO: 12841 - DNA, 20 bp, Artificial Sequence
  Description of Artificial Sequence: Synthetic oligonucleotide
  Target: ATXN2; (-) strand; PAM type: NNNNGHTT; PAM sequence: AATAGTTT
aaaaatggcagttgttgaat

SEQ ID NO: 12842 - DNA, 20 bp, Artificial Sequence
  Description of Artificial Sequence: Synthetic oligonucleotide
  Target: ATXN2; (-) strand; PAM type: NNNNGHTT; PAM sequence: TATAGATT
agatacactcagaatagcat

SEQ ID NO: 12843 - DNA, 20 bp, Artificial Sequence
  Description of Artificial Sequence: Synthetic oligonucleotide
  Target: ATXN2; (-) strand; PAM type: NNNNGHTT; PAM sequence: CATAGTTT
tagaagtgagagagtataag

SEQ ID NO: 12844 - DNA, 20 bp, Artificial Sequence
  Description of Artificial Sequence: Synthetic oligonucleotide
  Target: ATXN2; (-) strand; PAM type: NNNNGHTT; PAM sequence: ACATGATT
ggaaataaattttgagaata

SEQ ID NO: 12845 - DNA, 20 bp, Artificial Sequence
  Description of Artificial Sequence: Synthetic oligonucleotide
  Target: ATXN2; (-) strand; PAM type: NNNNGHTT; PAM sequence: ATCTGCTT
tttcaaaaaaaaaaaaaaaa

SEQ ID NO: 12846 - DNA, 20 bp, Artificial Sequence
  Description of Artificial Sequence: Synthetic oligonucleotide
  Target: ATXN2; (-) strand; PAM type: NNNNGHTT; PAM sequence: AATTGCTT
tcaggaggctgaggcaggag

SEQ ID NO: 12847 - DNA, 20 bp, Artificial Sequence
  Description of Artificial Sequence: Synthetic oligonucleotide
  Target: ATXN2; (-) strand; PAM type: NNNNGHTT; PAM sequence: CTCAGCTT
ttagttgctatacatttctg

SEQ ID NO: 12848 - DNA, 20 bp, Artificial Sequence
  Description of Artificial Sequence: Synthetic oligonucleotide
  Target: ATXN2; (-) strand; PAM type: NNNNGHTT; PAM sequence: ATCTGTTT
acaaaactcagctgtgttaa

SEQ ID NO: 12849 - DNA, 20 bp, Artificial Sequence
  Description of Artificial Sequence: Synthetic oligonucleotide
  Target: ATXN2; (-) strand; PAM type: NNNNGHTT; PAM sequence: TCAAGCTT
agaaaaaagaaacaagatct

SEQ ID NO: 12850 - DNA, 20 bp, Artificial Sequence
  Description of Artificial Sequence: Synthetic oligonucleotide
  Target: ATXN2; (-) strand; PAM type: NNNNGHTT; PAM sequence: AAGAGCTT
ttcccataactgtggtaagc

SEQ ID NO: 12851 - DNA, 20 bp, Artificial Sequence
  Description of Artificial Sequence: Synthetic oligonucleotide
  Target: ATXN2; (-) strand; PAM type: NNNNGHTT; PAM sequence: TAGTGCTT
ctactttgccaatcagtcct

SEQ ID NO: 12852 - DNA, 20 bp, Artificial Sequence
  Description of Artificial Sequence: Synthetic oligonucleotide
  Target: ATXN2; (-) strand; PAM type: NNNNGHTT; PAM sequence: GACTGCTT
catgattttacaataaggct

SEQ ID NO: 12853 - DNA, 20 bp, Artificial Sequence
  Description of Artificial Sequence: Synthetic oligonucleotide
  Target: ATXN2; (-) strand; PAM type: NNNNGHTT; PAM sequence: ACATGATT
agtttaaaaactagacgttg

SEQ ID NO: 12854 - DNA, 20 bp, Artificial Sequence
  Description of Artificial Sequence: Synthetic oligonucleotide
  Target: ATXN2; (-) strand; PAM type: NNNNGHTT; PAM sequence: AAAAGTTT
ctcaaaaaaaaaaaaaaaaa

SEQ ID NO: 12855 - DNA, 20 bp, Artificial Sequence
  Description of Artificial Sequence: Synthetic oligonucleotide
  Target: ATXN2; (-) strand; PAM type: NNNNGHTT; PAM sequence: CGGAGCTT
aatggcatgaactcgggaag

SEQ ID NO: 12856 - DNA, 20 bp, Artificial Sequence
  Description of Artificial Sequence: Synthetic oligonucleotide
  Target: ATXN2; (-) strand; PAM type: NNNNGHTT; PAM sequence: TTGTGATT
ataaagggtccaagttttat

SEQ ID NO: 12857 - DNA, 20 bp, Artificial Sequence
  Description of Artificial Sequence: Synthetic oligonucleotide
  Target: ATXN2; (-) strand; PAM type: NNNNGHTT; PAM sequence: CCAAGTTT
atcaaatacaaataaagggt

SEQ ID NO: 12858 - DNA, 20 bp, Artificial Sequence
  Description of Artificial Sequence: Synthetic oligonucleotide
  Target: ATXN2; (-) strand; PAM type: NNNNGHTT; PAM sequence: GTGTGTTT
tatttttggcttacattgta

SEQ ID NO: 12859 - DNA, 20 bp, Artificial Sequence
  Description of Artificial Sequence: Synthetic oligonucleotide
  Target: ATXN2; (-) strand; PAM type: NNNNGHTT; PAM sequence: TTTGGCTT
acattctataaacatttatt

SEQ ID NO: 12860 - DNA, 20 bp, Artificial Sequence
  Description of Artificial Sequence: Synthetic oligonucleotide
  Target: ATXN2; (-) strand; PAM type: NNNNGHTT; PAM sequence: CTTTGTTT
tttccttatctttttagcag

SEQ ID NO: 12861 - DNA, 20 bp, Artificial Sequence
  Description of Artificial Sequence: Synthetic oligonucleotide
  Target: ATXN2; (-) strand; PAM type: NNNNGHTT; PAM sequence: AGCAGCTT
ccgtatttccttatcttttt

SEQ ID NO: 12862 - DNA, 20 bp, Artificial Sequence
  Description of Artificial Sequence: Synthetic oligonucleotide
  Target: ATXN2; (-) strand; PAM type: NNNNGHTT; PAM sequence: TAAAGTTT
acagatatattgtaaaacta

SEQ ID NO: 12863 - DNA, 20 bp, Artificial Sequence
  Description of Artificial Sequence: Synthetic oligonucleotide
  Target: ATXN2; (-) strand; PAM type: NNNNGHTT; PAM sequence: ATGAGATT
gtctacattatgggattgtg

SEQ ID NO: 12864 - DNA, 20 bp, Artificial Sequence
  Description of Artificial Sequence: Synthetic oligonucleotide
  Target: ATXN2; (-) strand; PAM type: NNNNGHTT; PAM sequence: ATGGGATT
attcttgcctagtctacatt

SEQ ID NO: 12865 - DNA, 20 bp, Artificial Sequence
  Description of Artificial Sequence: Synthetic oligonucleotide
  Target: ATXN2; (-) strand; PAM type: NNNNGHTT; PAM sequence: TTGAGATT
gtcagacactcattctgaag

SEQ ID NO: 12866 - DNA, 20 bp, Artificial Sequence
  Description of Artificial Sequence: Synthetic oligonucleotide
  Target: ATXN2; (-) strand; PAM type: NNNNGHTT; PAM sequence: CTCTGTTT
taaagagggctgagctacaa

SEQ ID NO: 12867 - DNA, 20 bp, Artificial Sequence
  Description of Artificial Sequence: Synthetic oligonucleotide
  Target: ATXN2; (-) strand; PAM type: NNNNGHTT; PAM sequence: CAGAGTTT
cagcgacatcctcgaaatca

SEQ ID NO: 12868 - DNA, 20 bp, Artificial Sequence
  Description of Artificial Sequence: Synthetic oligonucleotide
  Target: ATXN2; (-) strand; PAM type: NNNNGHTT; PAM sequence: CACTGTTT
catggaatttatgtgatgtt

SEQ ID NO: 12869 - DNA, 20 bp, Artificial Sequence
  Description of Artificial Sequence: Synthetic oligonucleotide
  Target: ATXN2; (-) strand; PAM type: NNNNGHTT; PAM sequence: TGGTGTTT
tatggccaaaaaaatatgta

SEQ ID NO: 12870 - DNA, 20 bp, Artificial Sequence
  Description of Artificial Sequence: Synthetic oligonucleotide
  Target: ATXN2; (-) strand; PAM type: NNNNGHTT; PAM sequence: TGTTGATT
tttaagagttgacatcttat

SEQ ID NO: 12871 - DNA, 20 bp, Artificial Sequence
  Description of Artificial Sequence: Synthetic oligonucleotide
  Target: ATXN2; (-) strand; PAM type: NNNNGHTT; PAM sequence: AACAGATT
tacaaataagacatagttga

SEQ ID NO: 12872 - DNA, 20 bp, Artificial Sequence
  Description of Artificial Sequence: Synthetic oligonucleotide
  Target: ATXN2; (-) strand; PAM type: NNNNGHTT; PAM sequence: TTCTGTTT
gtgtatagggattaatagtc

SEQ ID NO: 12873 - DNA, 20 bp, Artificial Sequence
  Description of Artificial Sequence: Synthetic oligonucleotide
  Target: ATXN2; (-) strand; PAM type: NNNNGHTT; PAM sequence: TAGGGATT
tttagtggtatcggggtgta

SEQ ID NO: 12874 - DNA, 20 bp, Artificial Sequence
  Description of Artificial Sequence: Synthetic oligonucleotide
  Target: ATXN2; (-) strand; PAM type: NNNNGHTT; PAM sequence: ATATGTTT
aatttaagaagggtatgtac

SEQ ID NO: 12875 - DNA, 20 bp, Artificial Sequence
  Description of Artificial Sequence: Synthetic oligonucleotide
  Target: ATXN2; (-) strand; PAM type: NNNNGHTT; PAM sequence: CCGAGTTT
ttactgcttactgttttaag

SEQ ID NO: 12876 - DNA, 20 bp, Artificial Sequence
  Description of Artificial Sequence: Synthetic oligonucleotide
  Target: ATXN2; (-) strand; PAM type: NNNNGHTT; PAM sequence: TACTGTTT
actgcttacaggttactgct

SEQ ID NO: 12877 - DNA, 20 bp, Artificial Sequence
  Description of Artificial Sequence: Synthetic oligonucleotide
  Target: ATXN2; (-) strand; PAM type: NNNNGHTT; PAM sequence: TACTGCTT
ctaagaaactgcttacaggt

SEQ ID NO: 12878 - DNA, 20 bp, Artificial Sequence
  Description of Artificial Sequence: Synthetic oligonucleotide
  Target: ATXN2; (-) strand; PAM type: NNNNGHTT; PAM sequence: AACTGCTT
acagcctgctaagcctaaga

SEQ ID NO: 12879 - DNA, 20 bp, Artificial Sequence
  Description of Artificial Sequence: Synthetic oligonucleotide
  Target: ATXN2; (-) strand; PAM type: NNNNGHTT; PAM sequence: TGCTGATT
aattttgacaattcatatag

SEQ ID NO: 12880 - DNA, 20 bp, Artificial Sequence
  Description of Artificial Sequence: Synthetic oligonucleotide
  Target: ATXN2; (-) strand; PAM type: NNNNGHTT; PAM sequence: GACTGATT
gattggtctaatgcacagta

SEQ ID NO: 12881 - DNA, 20 bp, Artificial Sequence
  Description of Artificial Sequence: Synthetic oligonucleotide
  Target: ATXN2; (-) strand; PAM type: NNNNGHTT; PAM sequence: GATAGATT
ttctgtccactcttttacct

SEQ ID NO: 12882 - DNA, 20 bp, Artificial Sequence
  Description of Artificial Sequence: Synthetic oligonucleotide
  Target: ATXN2; (-) strand; PAM type: NNNNGHTT; PAM sequence: GTAGGCTT
ttcgcttggtgttaacacca

SEQ ID NO: 12883 - DNA, 20 bp, Artificial Sequence
  Description of Artificial Sequence: Synthetic oligonucleotide
  Target: ATXN2; (-) strand; PAM type: NNNNGHTT; PAM sequence: TTTCGCTT
ggctttgacattagggaagt

SEQ ID NO: 12884 - DNA, 20 bp, Artificial Sequence
  Description of Artificial Sequence: Synthetic oligonucleotide
  Target: ATXN2; (-) strand; PAM type: NNNNGHTT; PAM sequence: GGAAGTTT
agatttggctttgacattag

SEQ ID NO: 12885 - DNA, 20 bp, Artificial Sequence
  Description of Artificial Sequence: Synthetic oligonucleotide
  Target: ATXN2; (-) strand; PAM type: NNNNGHTT; PAM sequence: TTTGGCTT
cgggtgagagagtgaggaga

SEQ ID NO: 12886 - DNA, 20 bp, Artificial Sequence
  Description of Artificial Sequence: Synthetic oligonucleotide
  Target: ATXN2; (-) strand; PAM type: NNNNGHTT; PAM sequence: AGGAGATT
ggcagccgggtgagagagtg

SEQ ID NO: 12887 - DNA, 20 bp, Artificial Sequence
  Description of Artificial Sequence: Synthetic oligonucleotide
  Target: ATXN2; (-) strand; PAM type: NNNNGHTT; PAM sequence: AAGAGTTT
tatattaatttgaagttcta

SEQ ID NO: 12888 - DNA, 20 bp, Artificial Sequence
  Description of Artificial Sequence: Synthetic oligonucleotide
  Target: ATXN2; (-) strand; PAM type: NNNNGHTT; PAM sequence: AGGAGTTT
caggtggatcacttgaggtc

SEQ ID NO: 12889 - DNA, 20 bp, Artificial Sequence
  Description of Artificial Sequence: Synthetic oligonucleotide
  Target: ATXN2; (-) strand; PAM type: NNNNGHTT; PAM sequence: TCGTGTTT
cattcttctaaagatcatgt

SEQ ID NO: 12890 - DNA, 20 bp, Artificial Sequence
  Description of Artificial Sequence: Synthetic oligonucleotide
  Target: ATXN2; (-) strand; PAM type: NNNNGHTT; PAM sequence: TTAAGATT
ctgtgaacatctttattaca

SEQ ID NO: 12891 - DNA, 20 bp, Artificial Sequence
  Description of Artificial Sequence: Synthetic oligonucleotide
  Target: ATXN2; (-) strand; PAM type: NNNNGHTT; PAM sequence: CGATGTTT
tagtccatcatttgagtaag

SEQ ID NO: 12892 - DNA, 20 bp, Artificial Sequence
  Description of Artificial Sequence: Synthetic oligonucleotide
  Target: ATXN2; (-) strand; PAM type: NNNNGHTT; PAM sequence: CACTGATT
taaccttgaagagcaagttc

SEQ ID NO: 12893 - DNA, 20 bp, Artificial Sequence
  Description of Artificial Sequence: Synthetic oligonucleotide
  Target: ATXN2; (-) strand; PAM type: NNNNGHTT; PAM sequence: TCCTGCTT
ttccgcacaaaatgtgtttc

SEQ ID NO: 12894 - DNA, 20 bp, Artificial Sequence
  Description of Artificial Sequence: Synthetic oligonucleotide
  Target: ATXN2; (-) strand; PAM type: NNNNGHTT; PAM sequence: ATGTGTTT
aataaagttttccgcacaaa

SEQ ID NO: 12895 - DNA, 20 bp, Artificial Sequence
  Description of Artificial Sequence: Synthetic oligonucleotide
  Target: ATXN2; (-) strand; PAM type: NNNNGHTT; PAM sequence: TAAAGTTT
attgcttatgttgggactaa

SEQ ID NO: 12896 - DNA, 20 bp, Artificial Sequence
  Description of Artificial Sequence: Synthetic oligonucleotide
  Target: ATXN2; (-) strand; PAM type: NNNNGHTT; PAM sequence: TATTGCTT
tgttcattaaaattagttaa

SEQ ID NO: 12897 - DNA, 20 bp, Artificial Sequence
  Description of Artificial Sequence: Synthetic oligonucleotide
  Target: ATXN2; (-) strand; PAM type: NNNNGHTT; PAM sequence: ATCTGATT
atatttgtgttaaaatttta

SEQ ID NO: 12898 - DNA, 20 bp, Artificial Sequence
  Description of Artificial Sequence: Synthetic oligonucleotide
  Target: ATXN2; (-) strand; PAM type: NNNNGHTT; PAM sequence: ACCTGTTT
atgccacccatatattaaaa

SEQ ID NO: 12899 - DNA, 20 bp, Artificial Sequence
  Description of Artificial Sequence: Synthetic oligonucleotide
  Target: ATXN2; (-) strand; PAM type: NNNNGHTT; PAM sequence: GGCTGCTT
tgcaatcttacatagtgaaa

SEQ ID NO: 12900 - DNA, 20 bp, Artificial Sequence
  Description of Artificial Sequence: Synthetic oligonucleotide
  Target: ATXN2; (-) strand; PAM type: NNNNGHTT; PAM sequence: GTTAGCTT
aactgagtaatttttttaaa

SEQ ID NO: 12901 - DNA, 20 bp, Artificial Sequence
  Description of Artificial Sequence: Synthetic oligonucleotide
  Target: ATXN2; (-) strand; PAM type: NNNNGHTT; PAM sequence: AGTTGATT
gtctgcccttagattaaagt

SEQ ID NO: 12902 - DNA, 20 bp, Artificial Sequence
  Description of Artificial Sequence: Synthetic oligonucleotide
  Target: ATXN2; (-) strand; PAM type: NNNNGHTT; PAM sequence: CTTAGATT
gctgactttgcgtgtctgcc

SEQ ID NO: 12903 - DNA, 20 bp, Artificial Sequence
  Description of Artificial Sequence: Synthetic oligonucleotide
  Target: ATXN2; (-) strand; PAM type: NNNNGHTT; PAM sequence: TGGTGTTT
ctattggccataagcaggga

SEQ ID NO: 12904 - DNA, 20 bp, Artificial Sequence
  Description of Artificial Sequence: Synthetic oligonucleotide
  Target: ATXN2; (-) strand; PAM type: NNNNGHTT; PAM sequence: TTATGCTT
ggtttatctctgcctgataa

SEQ ID NO: 12905 - DNA, 20 bp, Artificial Sequence
  Description of Artificial Sequence: Synthetic oligonucleotide
  Target: ATXN2; (-) strand; PAM type: NNNNGHTT; PAM sequence: GGGGGTTT
tcttgaattgttgttaaaaa

SEQ ID NO: 12906 - DNA, 20 bp, Artificial Sequence
  Description of Artificial Sequence: Synthetic oligonucleotide
  Target: ATXN2; (-) strand; PAM type: NNNNGHTT; PAM sequence: TTTAGTTT
tataatttctgtgttttaac

SEQ ID NO: 12907 - DNA, 20 bp, Artificial Sequence
  Description of Artificial Sequence: Synthetic oligonucleotide
  Target: ATXN2; (-) strand; PAM type: NNNNGHTT; PAM sequence: CTGTGTTT
tatttaataacctataattt

SEQ ID NO: 12908 - DNA, 20 bp, Artificial Sequence
  Description of Artificial Sequence: Synthetic oligonucleotide
  Target: ATXN2; (-) strand; PAM type: NNNNGHTT; PAM sequence: AATAGTTT
atgtgagtttataattacaa

SEQ ID NO: 12909 - DNA, 20 bp, Artificial Sequence
  Description of Artificial Sequence: Synthetic oligonucleotide
  Target: ATXN2; (-) strand; PAM type: NNNNGHTT; PAM sequence: GTGAGTTT
tgtctttgtttaactcctat

SEQ ID NO: 12910 - DNA, 20 bp, Artificial Sequence
  Description of Artificial Sequence: Synthetic oligonucleotide
  Target: ATXN2; (-) strand; PAM type: NNNNGHTT; PAM sequence: CTTTGTTT
ttgttcatgtttttgtttgt

SEQ ID NO: 12911 - DNA, 20 bp, Artificial Sequence
  Description of Artificial Sequence: Synthetic oligonucleotide
  Target: ATXN2; (-) strand; PAM type: NNNNGHTT; PAM sequence: TTTTGTTT
ataccacaatttgttcatgt

SEQ ID NO: 12912 - DNA, 20 bp, Artificial Sequence
  Description of Artificial Sequence: Synthetic oligonucleotide
  Target: ATXN2; (-) strand; PAM type: NNNNGHTT; PAM sequence: TCATGTTT
ggtacaataccacaatttgt

SEQ ID NO: 12913 - DNA, 20 bp, Artificial Sequence
  Description of Artificial Sequence: Synthetic oligonucleotide
  Target: ATXN2; (-) strand; PAM type: NNNNGHTT; PAM sequence: TTTAGTTT
ttttttccctcatttttttc

SEQ ID NO: 12914 - DNA, 20 bp, Artificial Sequence
  Description of Artificial Sequence: Synthetic oligonucleotide
  Target: ATXN2; (-) strand; PAM type: NNNNGHTT; PAM sequence: TTCTGTTT
tttttgtcattttacttttt

SEQ ID NO: 12915 - DNA, 20 bp, Artificial Sequence
  Description of Artificial Sequence: Synthetic oligonucleotide
  Target: ATXN2; (-) strand; PAM type: NNNNGHTT; PAM sequence: GCAGGATT
actgagaaacagttatagaa

SEQ ID NO: 12916 - DNA, 20 bp, Artificial Sequence
  Description of Artificial Sequence: Synthetic oligonucleotide
  Target: ATXN2; (-) strand; PAM type: NNNNGHTT; PAM sequence: TTGTGATT
ttactcctgagtaggaatta

SEQ ID NO: 12917 - DNA, 20 bp, Artificial Sequence
  Description of Artificial Sequence: Synthetic oligonucleotide
  Target: ATXN2; (-) strand; PAM type: NNNNGHTT; PAM sequence: TACTGCTT
ttctaattggatataatagc

SEQ ID NO: 12918 - DNA, 20 bp, Artificial Sequence
  Description of Artificial Sequence: Synthetic oligonucleotide
  Target: ATXN2; (-) strand; PAM type: NNNNGHTT; PAM sequence: ATAAGATT
acttaaatgggacttgctta

SEQ ID NO: 12919 - DNA, 20 bp, Artificial Sequence
  Description of Artificial Sequence: Synthetic oligonucleotide
  Target: ATXN2; (-) strand; PAM type: NNNNGHTT; PAM sequence: ACTTGCTT
tttatttctacttaaatggg

SEQ ID NO: 12920 - DNA, 20 bp, Artificial Sequence
  Description of Artificial Sequence: Synthetic oligonucleotide
  Target: ATXN2; (-) strand; PAM type: NNNNGHTT; PAM sequence: TAATGTTT
agtcacaaactctagaagag

SEQ ID NO: 12921 - DNA, 20 bp, Artificial Sequence
  Description of Artificial Sequence: Synthetic oligonucleotide
  Target: ATXN2; (-) strand; PAM type: NNNNGHTT; PAM sequence: TCTAGTTT
atttagaaggtctccctttt

SEQ ID NO: 12922 - DNA, 20 bp, Artificial Sequence
  Description of Artificial Sequence: Synthetic oligonucleotide
  Target: ATXN2; (-) strand; PAM type: NNNNGHTT; PAM sequence: AAGTGTTT
tattaagcagtcgcttagat

SEQ ID NO: 12923 - DNA, 20 bp, Artificial Sequence
  Description of Artificial Sequence: Synthetic oligonucleotide
  Target: ATXN2; (-) strand; PAM type: NNNNGHTT; PAM sequence: AGTCGCTT
agttgcagtatttattaagc

SEQ ID NO: 12924 - DNA, 20 bp, Artificial Sequence
  Description of Artificial Sequence: Synthetic oligonucleotide
  Target: ATXN2; (-) strand; PAM type: NNNNGHTT; PAM sequence: GACTGCTT
gtataaatttatttggtgat

SEQ ID NO: 12925 - DNA, 20 bp, Artificial Sequence
  Description of Artificial Sequence: Synthetic oligonucleotide
  Target: ATXN2; (-) strand; PAM type: NNNNGHTT; PAM sequence: ATAAGATT
gaggagacctggactgtttg

SEQ ID NO: 12926 - DNA, 20 bp, Artificial Sequence
  Description of Artificial Sequence: Synthetic oligonucleotide
  Target: ATXN2; (-) strand; PAM type: NNNNGHTT; PAM sequence: GACTGTTT
ccctatggagaggagacctg

SEQ ID NO: 12927 - DNA, 20 bp, Artificial Sequence
  Description of Artificial Sequence: Synthetic oligonucleotide
  Target: ATXN2; (-) strand; PAM type: NNNNGHTT; PAM sequence: AGTTGTTT
gctcactgaggaaagatttt

SEQ ID NO: 12928 - DNA, 20 bp, Artificial Sequence
  Description of Artificial Sequence: Synthetic oligonucleotide
  Target: ATXN2; (-) strand; PAM type: NNNNGHTT; PAM sequence: GAAAGATT
aaatttctttgctcactgag

SEQ ID NO: 12929 - DNA, 20 bp, Artificial Sequence
  Description of Artificial Sequence: Synthetic oligonucleotide
  Target: ATXN2; (-) strand; PAM type: NNNNGHTT; PAM sequence: ATTTGTTT
aacactaagtttccaatttc

SEQ ID NO: 12930 - DNA, 20 bp, Artificial Sequence
  Description of Artificial Sequence: Synthetic oligonucleotide
  Target: ATXN2; (-) strand; PAM type: NNNNGHTT; PAM sequence: CTAAGTTT
ttagatgaaaatagagaaca

SEQ ID NO: 12931 - DNA, 20 bp, Artificial Sequence
  Description of Artificial Sequence: Synthetic oligonucleotide
  Target: ATXN2; (-) strand; PAM type: NNNNGHTT; PAM sequence: TACAGTTT
cttagtctaagggtggatgt

SEQ ID NO: 12932 - DNA, 20 bp, Artificial Sequence
  Description of Artificial Sequence: Synthetic oligonucleotide
  Target: ATXN2; (-) strand; PAM type: NNNNGHTT; PAM sequence: ATTTGCTT
tgaagaaagtgactagagaa

SEQ ID NO: 12933 - DNA, 20 bp, Artificial Sequence
  Description of Artificial Sequence: Synthetic oligonucleotide
  Target: ATXN2; (-) strand; PAM type: NNNNGHTT; PAM sequence: TTATGCTT
tttcattatttgtttctata

SEQ ID NO: 12934 - DNA, 20 bp, Artificial Sequence
  Description of Artificial Sequence: Synthetic oligonucleotide
  Target: ATXN2; (-) strand; PAM type: NNNNGHTT; PAM sequence: ATTTGTTT
aatatagatcaattttcatt

SEQ ID NO: 12935 - DNA, 20 bp, Artificial Sequence
  Description of Artificial Sequence: Synthetic oligonucleotide
  Target: ATXN2; (-) strand; PAM type: NNNNGHTT; PAM sequence: ATTGGCTT
tcacttcagcattacttaaa

SEQ ID NO: 12936 - DNA, 20 bp, Artificial Sequence
  Description of Artificial Sequence: Synthetic oligonucleotide
  Target: ATXN2; (-) strand; PAM type: NNNNGHTT; PAM sequence: AGTAGCTT
tgcactttaatgatttggtg

SEQ ID NO: 12937 - DNA, 20 bp, Artificial Sequence
  Description of Artificial Sequence: Synthetic oligonucleotide
  Target: ATXN2; (-) strand; PAM type: NNNNGHTT; PAM sequence: TAATGATT
actgatatgaatgtgcactt

SEQ ID NO: 12938 - DNA, 20 bp, Artificial Sequence
  Description of Artificial Sequence: Synthetic oligonucleotide
  Target: ATXN2; (-) strand; PAM type: NNNNGHTT; PAM sequence: AATAGTTT
taaatacttaaaatacttaa

SEQ ID NO: 12939 - DNA, 20 bp, Artificial Sequence
  Description of Artificial Sequence: Synthetic oligonucleotide
  Target: ATXN2; (-) strand; PAM type: NNNNGHTT; PAM sequence: AATAGTTT
cttgtcaatatcattgataa

SEQ ID NO: 12940 - DNA, 20 bp, Artificial Sequence
  Description of Artificial Sequence: Synthetic oligonucleotide
  Target: ATXN2; (-) strand; PAM type: NNNNGHTT; PAM sequence: TTCAGATT
tcaagatccacttctcacac

SEQ ID NO: 12941 - DNA, 20 bp, Artificial Sequence
  Description of Artificial Sequence: Synthetic oligonucleotide
  Target: ATXN2; (-) strand; PAM type: NNNNGHTT; PAM sequence: AAATGATT
gcttggtaccttttagaata

SEQ ID NO: 12942 - DNA, 20 bp, Artificial Sequence
  Description of Artificial Sequence: Synthetic oligonucleotide
  Target: ATXN2; (-) strand; PAM type: NNNNGHTT; PAM sequence: ATTGGCTT
atgacttttagatatgtttc

SEQ ID NO: 12943 - DNA, 20 bp, Artificial Sequence
  Description of Artificial Sequence: Synthetic oligonucleotide
  Target: ATXN2; (-) strand; PAM type: NNNNGHTT; PAM sequence: ATATGTTT
tctgtctagatgacttttag

SEQ ID NO: 12944 - DNA, 20 bp, Artificial Sequence
  Description of Artificial Sequence: Synthetic oligonucleotide
  Target: ATXN2; (-) strand; PAM type: NNNNGHTT; PAM sequence: TTTGGTTT
ggcatctgggagtgaggcag

SEQ ID NO: 12945 - DNA, 20 bp, Artificial Sequence
  Description of Artificial Sequence: Synthetic oligonucleotide
  Target: ATXN2; (-) strand; PAM type: NNNNGHTT; PAM sequence: GGCAGTTT
acaggggcatctgggagtga

SEQ ID NO: 12946 - DNA, 20 bp, Artificial Sequence
  Description of Artificial Sequence: Synthetic oligonucleotide
  Target: ATXN2; (-) strand; PAM type: NNNNGHTT; PAM sequence: TTGTGCTT
gagcacgcatctgttaaact

SEQ ID NO: 12947 - DNA, 20 bp, Artificial Sequence
  Description of Artificial Sequence: Synthetic oligonucleotide
  Target: ATXN2; (-) strand; PAM type: NNNNGHTT; PAM sequence: CCAAGATT
aaaaatgttgtgaagataga

SEQ ID NO: 12948 - DNA, 20 bp, Artificial Sequence
  Description of Artificial Sequence: Synthetic oligonucleotide
  Target: ATXN2; (-) strand; PAM type: NNNNGHTT; PAM sequence: TGAGGTTT
gtgagactggcggttcagtt

SEQ ID NO: 12949 - DNA, 20 bp, Artificial Sequence
  Description of Artificial Sequence: Synthetic oligonucleotide
  Target: ATXN2; (-) strand; PAM type: NNNNGHTT; PAM sequence: TTCAGTTT
tgacactgtgagactggcgg

SEQ ID NO: 12950 - DNA, 20 bp, Artificial Sequence
  Description of Artificial Sequence: Synthetic oligonucleotide
  Target: ATXN2; (-) strand; PAM type: NNNNGHTT; PAM sequence: TGGTGATT
aaggcagtcagcttagagtc

SEQ ID NO: 12951 - DNA, 20 bp, Artificial Sequence
  Description of Artificial Sequence: Synthetic oligonucleotide
  Target: ATXN2; (-) strand; PAM type: NNNNGHTT; PAM sequence: GTCAGCTT
tgcatcctctcttaaaggca

SEQ ID NO: 12952 - DNA, 20 bp, Artificial Sequence
  Description of Artificial Sequence: Synthetic oligonucleotide
  Target: ATXN2; (-) strand; PAM type: NNNNGHTT; PAM sequence: GTGGGCTT
ttgtgcagctaattgcatat

SEQ ID NO: 12953 - DNA, 20 bp, Artificial Sequence
  Description of Artificial Sequence: Synthetic oligonucleotide
  Target: ATXN2; (-) strand; PAM type: NNNNGHTT; PAM sequence: CTCCGTTT
tttgaggggaaaaacagtga

SEQ ID NO: 12954 - DNA, 20 bp, Artificial Sequence
  Description of Artificial Sequence: Synthetic oligonucleotide
  Target: ATXN2; (-) strand; PAM type: NNNNGHTT; PAM sequence: GCAAGTTT
agagagagaggaaacatgga

SEQ ID NO: 12955 - DNA, 20 bp, Artificial Sequence
  Description of Artificial Sequence: Synthetic oligonucleotide
  Target: ATXN2; (-) strand; PAM type: NNNNGHTT; PAM sequence: TGAGGTTT
acctagttaagggatgagcc

SEQ ID NO: 12956 - DNA, 20 bp, Artificial Sequence
  Description of Artificial Sequence: Synthetic oligonucleotide
  Target: ATXN2; (-) strand; PAM type: NNNNGHTT; PAM sequence: AAGAGTTT
acttagagaagagttgggag

SEQ ID NO: 12957 - DNA, 20 bp, Artificial Sequence
  Description of Artificial Sequence: Synthetic oligonucleotide
  Target: ATXN2; (-) strand; PAM type: NNNNGHTT; PAM sequence: ATTTGCTT
aatcacagcagtacaatatg

SEQ ID NO: 12958 - DNA, 20 bp, Artificial Sequence
  Description of Artificial Sequence: Synthetic oligonucleotide
  Target: ATXN2; (-) strand; PAM type: NNNNGHTT; PAM sequence: ATATGATT
gtaacaatcacagcagtaca

SEQ ID NO: 12959 - DNA, 20 bp, Artificial Sequence
  Description of Artificial Sequence: Synthetic oligonucleotide
  Target: ATXN2; (-) strand; PAM type: NNNNGHTT; PAM sequence: AAGAGCTT
gtgagcaatccaagatcttg

SEQ ID NO: 12960 - DNA, 20 bp, Artificial Sequence
  Description of Artificial Sequence: Synthetic oligonucleotide
  Target: ATXN2; (-) strand; PAM type: NNNNGHTT; PAM sequence: ATATGCTT
ggttatggtgatcttggaaa

SEQ ID NO: 12961 - DNA, 20 bp, Artificial Sequence
  Description of Artificial Sequence: Synthetic oligonucleotide
  Target: ATXN2; (-) strand; PAM type: NNNNGHTT; PAM sequence: ATTGGTTT
aggtagagaatgcaagtaga

SEQ ID NO: 12962 - DNA, 20 bp, Artificial Sequence
  Description of Artificial Sequence: Synthetic oligonucleotide
  Target: ATXN2; (-) strand; PAM type: NNNNGHTT; PAM sequence: TATAGCTT
tatatttcctcttcctttaa

SEQ ID NO: 12963 - DNA, 20 bp, Artificial Sequence
  Description of Artificial Sequence: Synthetic oligonucleotide
  Target: ATXN2; (-) strand; PAM type: NNNNGHTT; PAM sequence: TCATGTTT
tcattttgcttttcttttcc

SEQ ID NO: 12964 - DNA, 20 bp, Artificial Sequence
  Description of Artificial Sequence: Synthetic oligonucleotide
  Target: ATXN2; (-) strand; PAM type: NNNNGHTT; PAM sequence: TTTTGCTT
ctgtggctttaaaggactca

SEQ ID NO: 12965 - DNA, 20 bp, Artificial Sequence
  Description of Artificial Sequence: Synthetic oligonucleotide
  Target: ATXN2; (-) strand; PAM type: NNNNGHTT; PAM sequence: TGTGGCTT
attatgacagatacataaac

SEQ ID NO: 12966 - DNA, 20 bp, Artificial Sequence
  Description of Artificial Sequence: Synthetic oligonucleotide
  Target: ATXN2; (-) strand; PAM type: NNNNGHTT; PAM sequence: AGTTGATT
aaactctaaactttcttagt

SEQ ID NO: 12967 - DNA, 20 bp, Artificial Sequence
  Description of Artificial Sequence: Synthetic oligonucleotide
  Target: ATXN2; (-) strand; PAM type: NNNNGHTT; PAM sequence: TTCTGTTT
gttttagttttagttttagt

SEQ ID NO: 12968 - DNA, 20 bp, Artificial Sequence
  Description of Artificial Sequence: Synthetic oligonucleotide
  Target: ATXN2; (-) strand; PAM type: NNNNGHTT; PAM sequence: TTTAGTTT
cttttagttttagttttagt

SEQ ID NO: 12969 - DNA, 20 bp, Artificial Sequence
  Description of Artificial Sequence: Synthetic oligonucleotide
  Target: ATXN2; (-) strand; PAM type: NNNNGHTT; PAM sequence: TTTAGTTT
ctataacttttagttttagt

SEQ ID NO: 12970 - DNA, 20 bp, Artificial Sequence
  Description of Artificial Sequence: Synthetic oligonucleotide
  Target: ATXN2; (-) strand; PAM type: NNNNGHTT; PAM sequence: TTTAGTTT
agatcactataacttttagt

SEQ ID NO: 12971 - DNA, 20 bp, Artificial Sequence
  Description of Artificial Sequence: Synthetic oligonucleotide
  Target: ATXN2; (-) strand; PAM type: NNNNGHTT; PAM sequence: TTTAGTTT
atacacagatcactataact

SEQ ID NO: 12972 - DNA, 20 bp, Artificial Sequence
  Description of Artificial Sequence: Synthetic oligonucleotide
  Target: ATXN2; (-) strand; PAM type: NNNNGHTT; PAM sequence: TTTTGATT
aacagaaaaaaaagttagaa

SEQ ID NO: 12973 - DNA, 20 bp, Artificial Sequence
  Description of Artificial Sequence: Synthetic oligonucleotide
  Target: ATXN2; (-) strand; PAM type: NNNNGHTT; PAM sequence: ACCAGTTT
agattatggtgaacagttta

SEQ ID NO: 12974 - DNA, 20 bp, Artificial Sequence
  Description of Artificial Sequence: Synthetic oligonucleotide
  Target: ATXN2; (-) strand; PAM type: NNNNGHTT; PAM sequence: AACAGTTT
caagggcagagattatggtg

SEQ ID NO: 12975 - DNA, 20 bp, Artificial Sequence
  Description of Artificial Sequence: Synthetic oligonucleotide
  Target: ATXN2; (-) strand; PAM type: NNNNGHTT; PAM sequence: CAGAGATT
aatatctaaatttgcaaggg

SEQ ID NO: 12976 - DNA, 20 bp, Artificial Sequence
  Description of Artificial Sequence: Synthetic oligonucleotide
  Target: ATXN2; (-) strand; PAM type: NNNNGHTT; PAM sequence: GCCGGTTT
ggtgtgagccactgtgcctg

SEQ ID NO: 12977 - DNA, 20 bp, Artificial Sequence
  Description of Artificial Sequence: Synthetic oligonucleotide
  Target: ATXN2; (-) strand; PAM type: NNNNGHTT; PAM sequence: CTGGGATT
tgcctcggcctcccaaagtg

SEQ ID NO: 12978 - DNA, 20 bp, Artificial Sequence
  Description of Artificial Sequence: Synthetic oligonucleotide
  Target: ATXN2; (-) strand; PAM type: NNNNGHTT; PAM sequence: CGGGGTTT
ttctgtatttttagtagaga

SEQ ID NO: 12979 - DNA, 20 bp, Artificial Sequence
  Description of Artificial Sequence: Synthetic oligonucleotide
  Target: ATXN2; (-) strand; PAM type: NNNNGHTT; PAM sequence: AAGCGATT
aacctctgcatcccgggttc

SEQ ID NO: 12980 - DNA, 20 bp, Artificial Sequence
  Description of Artificial Sequence: Synthetic oligonucleotide
  Target: ATXN2; (-) strand; PAM type: NNNNGHTT; PAM sequence: TTTGGTTT
tttttatgctctaaacaaat

SEQ ID NO: 12981 - DNA, 20 bp, Artificial Sequence
  Description of Artificial Sequence: Synthetic oligonucleotide
  Target: ATXN2; (-) strand; PAM type: NNNNGHTT; PAM sequence: CCCTGTTT
ataaatgtagtttgcctata

SEQ ID NO: 12982 - DNA, 20 bp, Artificial Sequence
  Description of Artificial Sequence: Synthetic oligonucleotide
  Target: ATXN2; (-) strand; PAM type: NNNNGHTT; PAM sequence: TGTAGTTT
cattaaaaaaagggaataaa

SEQ ID NO: 12983 - DNA, 20 bp, Artificial Sequence
  Description of Artificial Sequence: Synthetic oligonucleotide
  Target: ATXN2; (-) strand; PAM type: NNNNGHTT; PAM sequence: GTTAGTTT
tttatgatgaataaatgttt

SEQ ID NO: 12984 - DNA, 20 bp, Artificial Sequence
  Description of Artificial Sequence: Synthetic oligonucleotide
  Target: ATXN2; (-) strand; PAM type: NNNNGHTT; PAM sequence: AAATGTTT
cagcttaatttatgatgaat

SEQ ID NO: 12985 - DNA, 20 bp, Artificial Sequence
  Description of Artificial Sequence: Synthetic oligonucleotide
  Target: ATXN2; (-) strand; PAM type: NNNNGHTT; PAM sequence: ATCAGCTT
tgcatttgtctttgattttc

SEQ ID NO: 12986 - DNA, 20 bp, Artificial Sequence
  Description of Artificial Sequence: Synthetic oligonucleotide
  Target: ATXN2; (-) strand; PAM type: NNNNGHTT; PAM sequence: CTTTGATT
ttttattttagtgcatttgt

SEQ ID NO: 12987 - DNA, 20 bp, Artificial Sequence
  Description of Artificial Sequence: Synthetic oligonucleotide
  Target: ATXN2; (-) strand; PAM type: NNNNGHTT; PAM sequence: GTTTGTTT
cgtatacgtaagtttgaaaa

SEQ ID NO: 12988 - DNA, 20 bp, Artificial Sequence
  Description of Artificial Sequence: Synthetic oligonucleotide
  Target: ATXN2; (-) strand; PAM type: NNNNGHTT; PAM sequence: AAAAGTTT
tcttcgtatacgtaagtttg

SEQ ID NO: 12989 - DNA, 20 bp, Artificial Sequence
  Description of Artificial Sequence: Synthetic oligonucleotide
  Target: ATXN2; (-) strand; PAM type: NNNNGHTT; PAM sequence: GTAAGTTT
agcagtttatcttcgtatac

SEQ ID NO: 12990 - DNA, 20 bp, Artificial Sequence
  Description of Artificial Sequence: Synthetic oligonucleotide
  Target: ATXN2; (-) strand; PAM type: NNNNGHTT; PAM sequence: AGCAGTTT
gtgtagtgtctacgtatgat

SEQ ID NO: 12991 - DNA, 20 bp, Artificial Sequence
  Description of Artificial Sequence: Synthetic oligonucleotide
  Target: ATXN2; (-) strand; PAM type: NNNNGHTT; PAM sequence: ATATGTTT
taatggatgggatcccaatg

SEQ ID NO: 12992 - DNA, 20 bp, Artificial Sequence
  Description of Artificial Sequence: Synthetic oligonucleotide
  Target: ATXN2; (-) strand; PAM type: NNNNGHTT; PAM sequence: ACAAGCTT
ctactttgacattttgaaaa

SEQ ID NO: 12993 - DNA, 20 bp, Artificial Sequence
  Description of Artificial Sequence: Synthetic oligonucleotide
  Target: ATXN2; (-) strand; PAM type: NNNNGHTT; PAM sequence: AGTAGTTT
taatttgctaattttgctca

SEQ ID NO: 12994 - DNA, 20 bp, Artificial Sequence
  Description of Artificial Sequence: Synthetic oligonucleotide
  Target: ATXN2; (-) strand; PAM type: NNNNGHTT; PAM sequence: GGTGGCTT
gtagatgtctctaactgaaa

SEQ ID NO: 12995 - DNA, 20 bp, Artificial Sequence
  Description of Artificial Sequence: Synthetic oligonucleotide
  Target: ATXN2; (-) strand; PAM type: NNNNGHTT; PAM sequence: CCTTGTTT
cccttgttccatgtggaatc

SEQ ID NO: 12996 - DNA, 20 bp, Artificial Sequence
  Description of Artificial Sequence: Synthetic oligonucleotide
  Target: ATXN2; (-) strand; PAM type: NNNNGHTT; PAM sequence: GTTGGCTT
cgttgaatatgagggaaagc

SEQ ID NO: 12997 - DNA, 20 bp, Artificial Sequence
  Description of Artificial Sequence: Synthetic oligonucleotide
  Target: ATXN2; (-) strand; PAM type: NNNNGHTT; PAM sequence: CACCGTTT
ttgtccagtgattgcctgtt

SEQ ID NO: 12998 - DNA, 20 bp, Artificial Sequence
  Description of Artificial Sequence: Synthetic oligonucleotide
  Target: ATXN2; (-) strand; PAM type: NNNNGHTT; PAM sequence: CAGTGATT
ccagttcttgtgactttgtc

SEQ ID NO: 12999 - DNA, 20 bp, Artificial Sequence
  Description of Artificial Sequence: Synthetic oligonucleotide
  Target: ATXN2; (-) strand; PAM type: NNNNGHTT; PAM sequence: TATAGTTT
ttttgcgaatggtaatttcc

SEQ ID NO: 13000 - DNA, 20 bp, Artificial Sequence
  Description of Artificial Sequence: Synthetic oligonucleotide
  Target: ATXN2; (-) strand; PAM type: NNNNGHTT; PAM sequence: ACTTGCTT
tttatttactttcttaataa

SEQ ID NO: 13001 - DNA, 20 bp, Artificial Sequence
  Description of Artificial Sequence: Synthetic oligonucleotide
  Target: ATXN2; (-) strand; PAM type: NNNNGHTT; PAM sequence: GTAGGATT
tcagctgctctgcctatgga

SEQ ID NO: 13002 - DNA, 20 bp, Artificial Sequence
  Description of Artificial Sequence: Synthetic oligonucleotide
  Target: ATXN2; (-) strand; PAM type: NNNNGHTT; PAM sequence: GGTTGATT
ttccagcctgtggcccaatt

SEQ ID NO: 13003 - DNA, 20 bp, Artificial Sequence
  Description of Artificial Sequence: Synthetic oligonucleotide
  Target: ATXN2; (-) strand; PAM type: NNNNGHTT; PAM sequence: TAAGGCTT
gactttatacttttcaccag

SEQ ID NO: 13004 - DNA, 20 bp, Artificial Sequence
  Description of Artificial Sequence: Synthetic oligonucleotide
  Target: ATXN2; (-) strand; PAM type: NNNNGHTT; PAM sequence: GATGGATT
tgatgtgttcattcttctgg

SEQ ID NO: 13005 - DNA, 20 bp, Artificial Sequence
  Description of Artificial Sequence: Synthetic oligonucleotide
  Target: ATXN2; (-) strand; PAM type: NNNNGHTT; PAM sequence: CATTGCTT
agcattgaggttgccatcag

SEQ ID NO: 13006 - DNA, 20 bp, Artificial Sequence
  Description of Artificial Sequence: Synthetic oligonucleotide
  Target: ATXN2; (-) strand; PAM type: NNNNGHTT; PAM sequence: ATGTGTTT
gtaagtgtgatttcctgccc

SEQ ID NO: 13007 - DNA, 20 bp, Artificial Sequence
  Description of Artificial Sequence: Synthetic oligonucleotide
  Target: ATXN2; (-) strand; PAM type: NNNNGHTT; PAM sequence: GTGTGATT
tttaaagcctccataagtaa

SEQ ID NO: 13008 - DNA, 20 bp, Artificial Sequence
  Description of Artificial Sequence: Synthetic oligonucleotide
  Target: ATXN2; (-) strand; PAM type: NNNNGHTT; PAM sequence: GTGTGCTT
actggatgtctttccgtatt

SEQ ID NO: 13009 - DNA, 20 bp, Artificial Sequence
  Description of Artificial Sequence: Synthetic oligonucleotide
  Target: ATXN2; (-) strand; PAM type: NNNNGHTT; PAM sequence: CTGGGATT
atagtagttatttatgcacg

SEQ ID NO: 13010 - DNA, 20 bp, Artificial Sequence
  Description of Artificial Sequence: Synthetic oligonucleotide
  Target: ATXN2; (-) strand; PAM type: NNNNGHTT; PAM sequence: CAGGGTTT
ttttgtatttttagtagaga

SEQ ID NO: 13011 - DNA, 20 bp, Artificial Sequence
  Description of Artificial Sequence: Synthetic oligonucleotide
  Target: ATXN2; (-) strand; PAM type: NNNNGHTT; PAM sequence: CTGGGATT
caccttggcctctcaaagtg

SEQ ID NO: 13012 - DNA, 20 bp, Artificial Sequence
  Description of Artificial Sequence: Synthetic oligonucleotide
  Target: ATXN2; (-) strand; PAM type: NNNNGHTT; PAM sequence: CAGGGTTT
ttttgtatttttagtagaga

SEQ ID NO: 13013 - DNA, 20 bp, Artificial Sequence
  Description of Artificial Sequence: Synthetic oligonucleotide
  Target: ATXN2; (-) strand; PAM type: NNNNGHTT; PAM sequence: TCCTGCTT
cttccaggttcaagcgattc

SEQ ID NO: 13014 - DNA, 20 bp, Artificial Sequence
  Description of Artificial Sequence: Synthetic oligonucleotide
  Target: ATXN2; (-) strand; PAM type: NNNNGHTT; PAM sequence: AAGCGATT
aacctctgccttccaggttc

SEQ ID NO: 13015 - DNA, 20 bp, Artificial Sequence
  Description of Artificial Sequence: Synthetic oligonucleotide
  Target: ATXN2; (-) strand; PAM type: NNNNGHTT; PAM sequence: CTGCGATT
tgcctcagcctcccaaagtg

SEQ ID NO: 13016 - DNA, 20 bp, Artificial Sequence
  Description of Artificial Sequence: Synthetic oligonucleotide
  Target: ATXN2; (-) strand; PAM type: NNNNGHTT; PAM sequence: CCATGTTT
ttagtagagaaggggtttca

SEQ ID NO: 13017 - DNA, 20 bp, Artificial Sequence
  Description of Artificial Sequence: Synthetic oligonucleotide
  Target: ATXN2; (-) strand; PAM type: NNNNGHTT; PAM sequence: AGGGGTTT
ttttgtgtttttagtagaga

SEQ ID NO: 13018 - DNA, 20 bp, Artificial Sequence
  Description of Artificial Sequence: Synthetic oligonucleotide
  Target: ATXN2; (-) strand; PAM type: NNNNGHTT; PAM sequence: TTGTGTTT
ccaccatgcccagctaattt

SEQ ID NO: 13019 - DNA, 20 bp, Artificial Sequence
  Description of Artificial Sequence: Synthetic oligonucleotide
  Target: ATXN2; (-) strand; PAM type: NNNNGHTT; PAM sequence: AAGCGATT
aacctccgcctcccgggttc

SEQ ID NO: 13020 - DNA, 20 bp, Artificial Sequence
  Description of Artificial Sequence: Synthetic oligonucleotide
  Target: ATXN2; (-) strand; PAM type: NNNNGHTT; PAM sequence: ATTTGCTT
ttgcagaacactgggatcct

SEQ ID NO: 13021 - DNA, 20 bp, Artificial Sequence
  Description of Artificial Sequence: Synthetic oligonucleotide
  Target: ATXN2; (-) strand; PAM type: NNNNGHTT; PAM sequence: CTAAGATT
gttccaatatggaaagatat

SEQ ID NO: 13022 - DNA, 20 bp, Artificial Sequence
  Description of Artificial Sequence: Synthetic oligonucleotide
  Target: ATXN2; (-) strand; PAM type: NNNNGHTT; PAM sequence: GTTAGATT
tgtctatcaatatagcatga

SEQ ID NO: 13023 - DNA, 20 bp, Artificial Sequence
  Description of Artificial Sequence: Synthetic oligonucleotide
  Target: ATXN2; (-) strand; PAM type: NNNNGHTT; PAM sequence: CTGAGATT
cacctcggcctcccaaagtg

SEQ ID NO: 13024 - DNA, 20 bp, Artificial Sequence
  Description of Artificial Sequence: Synthetic oligonucleotide
  Target: ATXN2; (-) strand; PAM type: NNNNGHTT; PAM sequence: CGGGGTTT
ttttgtatttttagtagaga

SEQ ID NO: 13025 - DNA, 20 bp, Artificial Sequence
  Description of Artificial Sequence: Synthetic oligonucleotide
  Target: ATXN2; (-) strand; PAM type: NNNNGHTT; PAM sequence: CTCAGCTT
ggttcaagtgattctactgc

SEQ ID NO: 13026 - DNA, 20 bp, Artificial Sequence
  Description of Artificial Sequence: Synthetic oligonucleotide
  Target: ATXN2; (-) strand; PAM type: NNNNGHTT; PAM sequence: AAGTGATT
aacctccacctcctgggttc

SEQ ID NO: 13027 - DNA, 20 bp, Artificial Sequence
  Description of Artificial Sequence: Synthetic oligonucleotide
  Target: ATXN2; (-) strand; PAM type: NNNNGHTT; PAM sequence: TGTTGTTT
atttcttttgttgttgttgc

SEQ ID NO: 13028 - DNA, 20 bp, Artificial Sequence
  Description of Artificial Sequence: Synthetic oligonucleotide
  Target: ATXN2; (-) strand; PAM type: NNNNGHTT; PAM sequence: CCAGGATT
gtgtgagccatcatgcctga

SEQ ID NO: 13029 - DNA, 20 bp, Artificial Sequence
  Description of Artificial Sequence: Synthetic oligonucleotide
  Target: ATXN2; (-) strand; PAM type: NNNNGHTT; PAM sequence: CTGGGATT
cacctcagcctcccaaagtg

SEQ ID NO: 13030 - DNA, 20 bp, Artificial Sequence
  Description of Artificial Sequence: Synthetic oligonucleotide
  Target: ATXN2; (-) strand; PAM type: NNNNGHTT; PAM sequence: CAGGGTTT
tttttctttttctgcagaga

SEQ ID NO: 13031 - DNA, 20 bp, Artificial Sequence
  Description of Artificial Sequence: Synthetic oligonucleotide
  Target: ATXN2; (-) strand; PAM type: NNNNGHTT; PAM sequence: TGAAGATT
gacatgcaaataattatatg

SEQ ID NO: 13032 - DNA, 20 bp, Artificial Sequence
  Description of Artificial Sequence: Synthetic oligonucleotide
  Target: ATXN2; (-) strand; PAM type: NNNNGHTT; PAM sequence: AACAGCTT
gtgtttgatgtttaaggcat

SEQ ID NO: 13033 - DNA, 20 bp, Artificial Sequence
  Description of Artificial Sequence: Synthetic oligonucleotide
  Target: ATXN2; (-) strand; PAM type: NNNNGHTT; PAM sequence: TGATGTTT
atttgtaacatatctgtgtt

SEQ ID NO: 13034 - DNA, 20 bp, Artificial Sequence
  Description of Artificial Sequence: Synthetic oligonucleotide
  Target: ATXN2; (-) strand; PAM type: NNNNGHTT; PAM sequence: CTGTGTTT
aaagagaatttgtaacatat

SEQ ID NO: 13035 - DNA, 20 bp, Artificial Sequence
  Description of Artificial Sequence: Synthetic oligonucleotide
  Target: ATXN2; (-) strand; PAM type: NNNNGHTT; PAM sequence: AAGTGCTT
taatgcattatctgtacttg

SEQ ID NO: 13036 - DNA, 20 bp, Artificial Sequence
  Description of Artificial Sequence: Synthetic oligonucleotide
  Target: ATXN2; (-) strand; PAM type: NNNNGHTT; PAM sequence: TTTTGTTT
cgcctcttgtcacatactag

SEQ ID NO: 13037 - DNA, 20 bp, Artificial Sequence
  Description of Artificial Sequence: Synthetic oligonucleotide
  Target: ATXN2; (-) strand; PAM type: NNNNGHTT; PAM sequence: ACTAGTTT
taaaacgcctcttgtcacat

SEQ ID NO: 13038 - DNA, 20 bp, Artificial Sequence
  Description of Artificial Sequence: Synthetic oligonucleotide
  Target: ATXN2; (-) strand; PAM type: NNNNGHTT; PAM sequence: TTTGGATT
ataaatttcttggtcttaaa

SEQ ID NO: 13039 - DNA, 20 bp, Artificial Sequence
  Description of Artificial Sequence: Synthetic oligonucleotide
  Target: ATXN2; (-) strand; PAM type: NNNNGHTT; PAM sequence: TTTTGCTT
ccatgggaaatgccggtgtg

SEQ ID NO: 13040 - DNA, 20 bp, Artificial Sequence
  Description of Artificial Sequence: Synthetic oligonucleotide
  Target: ATXN2; (-) strand; PAM type: NNNNGHTT; PAM sequence: GTGTGTTT
agaaaccatgggaaatgccg

SEQ ID NO: 13041 - DNA, 20 bp, Artificial Sequence
  Description of Artificial Sequence: Synthetic oligonucleotide
  Target: ATXN2; (-) strand; PAM type: NNNNGHTT; PAM sequence: AGTAGCTT
gattaaaataaataataaga

SEQ ID NO: 13042 - DNA, 20 bp, Artificial Sequence
  Description of Artificial Sequence: Synthetic oligonucleotide
  Target: ATXN2; (-) strand; PAM type: NNNNGHTT; PAM sequence: TTGTGATT
gatgctcatgaattacttct

SEQ ID NO: 13043 - DNA, 20 bp, Artificial Sequence
  Description of Artificial Sequence: Synthetic oligonucleotide
  Target: ATXN2; (-) strand; PAM type: NNNNGHTT; PAM sequence: AAATGTTT
cccaagcaatatataaagaa

SEQ ID NO: 13044 - DNA, 20 bp, Artificial Sequence
  Description of Artificial Sequence: Synthetic oligonucleotide
  Target: ATXN2; (-) strand; PAM type: NNNNGHTT; PAM sequence: GCAGGTTT
tagtgagtgtatttagagca

SEQ ID NO: 13045 - DNA, 20 bp, Artificial Sequence
  Description of Artificial Sequence: Synthetic oligonucleotide
  Target: ATXN2; (-) strand; PAM type: NNNNGHTT; PAM sequence: ATGTGCTT
gtcacttggttgtaatttaa

SEQ ID NO: 13046 - DNA, 20 bp, Artificial Sequence
  Description of Artificial Sequence: Synthetic oligonucleotide
  Target: ATXN2; (-) strand; PAM type: NNNNGHTT; PAM sequence: TGAGGCTT
ctcacagccaatgaggaact

SEQ ID NO: 13047 - DNA, 20 bp, Artificial Sequence
  Description of Artificial Sequence: Synthetic oligonucleotide
  Target: ATXN2; (-) strand; PAM type: NNNNGHTT; PAM sequence: AGATGCTT
caaccaaaaccattctttgc

SEQ ID NO: 13048 - DNA, 20 bp, Artificial Sequence
  Description of Artificial Sequence: Synthetic oligonucleotide
  Target: ATXN2; (-) strand; PAM type: NNNNGHTT; PAM sequence: GCCAGATT
gtgtgtgagtgtaactgatt

SEQ ID NO: 13049 - DNA, 20 bp, Artificial Sequence
  Description of Artificial Sequence: Synthetic oligonucleotide
  Target: ATXN2; (-) strand; PAM type: NNNNGHTT; PAM sequence: AACTGATT
taattcacgtgtgtgagtgt

SEQ ID NO: 13050 - DNA, 20 bp, Artificial Sequence
  Description of Artificial Sequence: Synthetic oligonucleotide
  Target: ATXN2; (-) strand; PAM type: NNNNGHTT; PAM sequence: AATTGTTT
atgtgaaattcatttttcgt

SEQ ID NO: 13051 - DNA, 20 bp, Artificial Sequence
  Description of Artificial Sequence: Synthetic oligonucleotide
  Target: ATXN2; (-) strand; PAM type: NNNNGHTT; PAM sequence: GTTAGATT
tatgttcaataaatgtttct

SEQ ID NO: 13052 - DNA, 20 bp, Artificial Sequence
  Description of Artificial Sequence: Synthetic oligonucleotide
  Target: ATXN2; (-) strand; PAM type: NNNNGHTT; PAM sequence: AAATGTTT
caacctaaattatgttcaat

SEQ ID NO: 13053 - DNA, 20 bp, Artificial Sequence
  Description of Artificial Sequence: Synthetic oligonucleotide
  Target: ATXN2; (-) strand; PAM type: NNNNGHTT; PAM sequence: TTTTGTTT
tttattatagtgcattggtc

SEQ ID NO: 13054 - DNA, 20 bp, Artificial Sequence
  Description of Artificial Sequence: Synthetic oligonucleotide
  Target: ATXN2; (-) strand; PAM type: NNNNGHTT; PAM sequence: TTAAGTTT
tatcttcacatacataagtt

SEQ ID NO: 13055 - DNA, 20 bp, Artificial Sequence
  Description of Artificial Sequence: Synthetic oligonucleotide
  Target: ATXN2; (-) strand; PAM type: NNNNGHTT; PAM sequence: ATAAGTTT
agcagtttatcttcacatac

SEQ ID NO: 13056 - DNA, 20 bp, Artificial Sequence
  Description of Artificial Sequence: Synthetic oligonucleotide
  Target: ATXN2; (-) strand; PAM type: NNNNGHTT; PAM sequence: AGCAGTTT
tattccgtatcagtttagat

SEQ ID NO: 13057 - DNA, 20 bp, Artificial Sequence
  Description of Artificial Sequence: Synthetic oligonucleotide
  Target: ATXN2; (-) strand; PAM type: NNNNGHTT; PAM sequence: ATCAGTTT
ctgaatactatatattccgt

SEQ ID NO: 13058 - DNA, 20 bp, Artificial Sequence
  Description of Artificial Sequence: Synthetic oligonucleotide
  Target: ATXN2; (-) strand; PAM type: NNNNGHTT; PAM sequence: CTGTGATT
atacctttactgatagtcat

SEQ ID NO: 13059 - DNA, 20 bp, Artificial Sequence
  Description of Artificial Sequence: Synthetic oligonucleotide
  Target: ATXN2; (-) strand; PAM type: NNNNGHTT; PAM sequence: TGTGGCTT
aaaaaaaaaaaaatgcttcg

SEQ ID NO: 13060 - DNA, 20 bp, Artificial Sequence
  Description of Artificial Sequence: Synthetic oligonucleotide
  Target: ATXN2; (-) strand; PAM type: NNNNGHTT; PAM sequence: AAATGCTT
ctatctcaaaaaaaaaaaaa

SEQ ID NO: 13061 - DNA, 20 bp, Artificial Sequence
  Description of Artificial Sequence: Synthetic oligonucleotide
  Target: ATXN2; (-) strand; PAM type: NNNNGHTT; PAM sequence: AATCGCTT
tcgggagactgaggcaggag

SEQ ID NO: 13062 - DNA, 20 bp, Artificial Sequence
  Description of Artificial Sequence: Synthetic oligonucleotide
  Target: ATXN2; (-) strand; PAM type: NNNNGHTT; PAM sequence: ATATGCTT
aattatgtcaatatattaaa

SEQ ID NO: 13063 - DNA, 20 bp, Artificial Sequence
  Description of Artificial Sequence: Synthetic oligonucleotide
  Target: ATXN2; (-) strand; PAM type: NNNNGHTT; PAM sequence: GAGGGTTT
ttttgtatttttagtagaga

SEQ ID NO: 13064 - DNA, 20 bp, Artificial Sequence
  Description of Artificial Sequence: Synthetic oligonucleotide
  Target: ATXN2; (-) strand; PAM type: NNNNGHTT; PAM sequence: AAACGATT
aacctccacctcccgggttc

SEQ ID NO: 13065 - DNA, 20 bp, Artificial Sequence
  Description of Artificial Sequence: Synthetic oligonucleotide
  Target: ATXN2; (-) strand; PAM type: NNNNGHTT; PAM sequence: GATGGATT
aaaaaaaaagagatattttt

SEQ ID NO: 13066 - DNA, 20 bp, Artificial Sequence
  Description of Artificial Sequence: Synthetic oligonucleotide
  Target: ATXN2; (-) strand; PAM type: NNNNGHTT; PAM sequence: AGGAGATT
gctacttgggaggctgaggc

SEQ ID NO: 13067 - DNA, 20 bp, Artificial Sequence
  Description of Artificial Sequence: Synthetic oligonucleotide
  Target: ATXN2; (-) strand; PAM type: NNNNGHTT; PAM sequence: AAGAGTTT
tggcttcatttactaatggc

SEQ ID NO: 13068 - DNA, 20 bp, Artificial Sequence
  Description of Artificial Sequence: Synthetic oligonucleotide
  Target: ATXN2; (-) strand; PAM type: NNNNGHTT; PAM sequence: AATGGCTT
ggaggggttaaaccacttag

SEQ ID NO: 13069 - DNA, 20 bp, Artificial Sequence
  Description of Artificial Sequence: Synthetic oligonucleotide
  Target: ATXN2; (-) strand; PAM type: NNNNGHTT; PAM sequence: ATTTGCTT
agctaacatgtggatgctac

SEQ ID NO: 13070 - DNA, 20 bp, Artificial Sequence
  Description of Artificial Sequence: Synthetic oligonucleotide
  Target: ATXN2; (-) strand; PAM type: NNNNGHTT; PAM sequence: GAGCGTTT
aatgcaagcctgtatctaca

SEQ ID NO: 13071 - DNA, 20 bp, Artificial Sequence
  Description of Artificial Sequence: Synthetic oligonucleotide
  Target: ATXN2; (-) strand; PAM type: NNNNGHTT; PAM sequence: GGGAGCTT
actgggaaggaacagtggct

SEQ ID NO: 13072 - DNA, 20 bp, Artificial Sequence
  Description of Artificial Sequence: Synthetic oligonucleotide
  Target: ATXN2; (-) strand; PAM type: NNNNGHTT; PAM sequence: TGTTGATT
aggagtattgtgtgtttagt

SEQ ID NO: 13073 - DNA, 20 bp, Artificial Sequence
  Description of Artificial Sequence: Synthetic oligonucleotide
  Target: ATXN2; (-) strand; PAM type: NNNNGHTT; PAM sequence: GTGTGTTT
acctcttttgtaggagtatt

SEQ ID NO: 13074 - DNA, 20 bp, Artificial Sequence
  Description of Artificial Sequence: Synthetic oligonucleotide
  Target: ATXN2; (-) strand; PAM type: NNNNGHTT; PAM sequence: CTCAGATT
tccatgcttaaatttgctgg

SEQ ID NO: 13075 - DNA, 20 bp, Artificial Sequence
  Description of Artificial Sequence: Synthetic oligonucleotide
  Target: ATXN2; (-) strand; PAM type: NNNNGHTT; PAM sequence: CCATGCTT
aattagctaggcttgaagtt

SEQ ID NO: 13076 - DNA, 20 bp, Artificial Sequence
  Description of Artificial Sequence: Synthetic oligonucleotide
  Target: ATXN2; (-) strand; PAM type: NNNNGHTT; PAM sequence: CTAGGCTT
taagaagaggttagaattag

SEQ ID NO: 13077 - DNA, 20 bp, Artificial Sequence
  Description of Artificial Sequence: Synthetic oligonucleotide
  Target: ATXN2; (-) strand; PAM type: NNNNGHTT; PAM sequence: CCTAGTTT
cacactcatacctacccaca

SEQ ID NO: 13078 - DNA, 20 bp, Artificial Sequence
  Description of Artificial Sequence: Synthetic oligonucleotide
  Target: ATXN2; (-) strand; PAM type: NNNNGHTT; PAM sequence: TAATGCTT
agctaagcccagaggtggat

SEQ ID NO: 13079 - DNA, 20 bp, Artificial Sequence
  Description of Artificial Sequence: Synthetic oligonucleotide
  Target: ATXN2; (-) strand; PAM type: NNNNGHTT; PAM sequence: GGTGGATT
agctggcagctaagcccaga

SEQ ID NO: 13080 - DNA, 20 bp, Artificial Sequence
  Description of Artificial Sequence: Synthetic oligonucleotide
  Target: ATXN2; (-) strand; PAM type: NNNNGHTT; PAM sequence: GAGAGATT
tagtctcttagaatctctta

SEQ ID NO: 13081 - DNA, 20 bp, Artificial Sequence
  Description of Artificial Sequence: Synthetic oligonucleotide
  Target: ATXN2; (-) strand; PAM type: NNNNGHTT; PAM sequence: AGTAGCTT
gtcagatttctagtgccatc

SEQ ID NO: 13082 - DNA, 20 bp, Artificial Sequence
  Description of Artificial Sequence: Synthetic oligonucleotide
  Target: ATXN2; (-) strand; PAM type: NNNNGHTT; PAM sequence: GTCAGATT
tcaggttagtatcaaataag

SEQ ID NO: 13083 - DNA, 20 bp, Artificial Sequence
  Description of Artificial Sequence: Synthetic oligonucleotide
  Target: ATXN2; (-) strand; PAM type: NNNNGHTT; PAM sequence: ACGTGATT
ttaagataatgtagagaaga

SEQ ID NO: 13084 - DNA, 20 bp, Artificial Sequence
  Description of Artificial Sequence: Synthetic oligonucleotide
  Target: ATXN2; (-) strand; PAM type: NNNNGHTT; PAM sequence: TGATGTTT
tcttaaggtaggttattatt

SEQ ID NO: 13085 - DNA, 20 bp, Artificial Sequence
  Description of Artificial Sequence: Synthetic oligonucleotide
  Target: ATXN2; (-) strand; PAM type: NNNNGHTT; PAM sequence: AAGGGATT
gtctagtgttgtgagaatta

SEQ ID NO: 13086 - DNA, 20 bp, Artificial Sequence
  Description of Artificial Sequence: Synthetic oligonucleotide
  Target: ATXN2; (-) strand; PAM type: NNNNGHTT; PAM sequence: TGTAGTTT
cgtttggaattttcctatag

SEQ ID NO: 13087 - DNA, 20 bp, Artificial Sequence
  Description of Artificial Sequence: Synthetic oligonucleotide
  Target: ATXN2; (-) strand; PAM type: NNNNGHTT; PAM sequence: ACTCGTTT
ttcttccagaagataatatg

SEQ ID NO: 13088 - DNA, 20 bp, Artificial Sequence
  Description of Artificial Sequence: Synthetic oligonucleotide
  Target: ATXN2; (-) strand; PAM type: NNNNGHTT; PAM sequence: TGTTGCTT
tagacgtaaaggaacagtcc

SEQ ID NO: 13089 - DNA, 20 bp, Artificial Sequence
  Description of Artificial Sequence: Synthetic oligonucleotide
  Target: ATXN2; (-) strand; PAM type: NNNNGHTT; PAM sequence: GTATGATT
tgtgtgcttttcaaaaacta

SEQ ID NO: 13090 - DNA, 20 bp, Artificial Sequence
  Description of Artificial Sequence: Synthetic oligonucleotide
  Target: ATXN2; (-) strand; PAM type: NNNNGHTT; PAM sequence: GTGTGCTT
aatgctttatttacttaaat

SEQ ID NO: 13091 - DNA, 20 bp, Artificial Sequence
  Description of Artificial Sequence: Synthetic oligonucleotide
  Target: ATXN2; (-) strand; PAM type: NNNNGHTT; PAM sequence: AAATGCTT
tactgagcttctatctaaat

SEQ ID NO: 13092 - DNA, 20 bp, Artificial Sequence
  Description of Artificial Sequence: Synthetic oligonucleotide
  Target: ATXN2; (-) strand; PAM type: NNNNGHTT; PAM sequence: CTGAGCTT
aaagagtattgtttttaata

SEQ ID NO: 13093 - DNA, 20 bp, Artificial Sequence
  Description of Artificial Sequence: Synthetic oligonucleotide
  Target: ATXN2; (-) strand; PAM type: NNNNGHTT; PAM sequence: TATTGTTT
aatttcttgaatcaaaagag

SEQ ID NO: 13094 - DNA, 20 bp, Artificial Sequence
  Description of Artificial Sequence: Synthetic oligonucleotide
  Target: ATXN2; (-) strand; PAM type: NNNNGHTT; PAM sequence: TCGAGCTT
tataaaaatctctagctgct

SEQ ID NO: 13095 - DNA, 20 bp, Artificial Sequence
  Description of Artificial Sequence: Synthetic oligonucleotide
  Target: ATXN2; (-) strand; PAM type: NNNNGHTT; PAM sequence: AGCTGCTT
atggttctataaaaatctct

SEQ ID NO: 13096 - DNA, 20 bp, Artificial Sequence
  Description of Artificial Sequence: Synthetic oligonucleotide
  Target: ATXN2; (-) strand; PAM type: NNNNGHTT; PAM sequence: ATCCGTTT
taccctgtagtgagaaaaaa

SEQ ID NO: 13097 - DNA, 20 bp, Artificial Sequence
  Description of Artificial Sequence: Synthetic oligonucleotide
  Target: ATXN2; (-) strand; PAM type: NNNNGHTT; PAM sequence: GACGGCTT
ttgggatcttttggtttgaa

SEQ ID NO: 13098 - DNA, 20 bp, Artificial Sequence
  Description of Artificial Sequence: Synthetic oligonucleotide
  Target: ATXN2; (-) strand; PAM type: NNNNGHTT; PAM sequence: TTTGGTTT
tgtgtgtacatttgggatct

SEQ ID NO: 13099 - DNA, 20 bp, Artificial Sequence
  Description of Artificial Sequence: Synthetic oligonucleotide
  Target: ATXN2; (-) strand; PAM type: NNNNGHTT; PAM sequence: ATTTGTTT
acttggggatccttttagaa

SEQ ID NO: 13100 - DNA, 20 bp, Artificial Sequence
  Description of Artificial Sequence: Synthetic oligonucleotide
  Target: ATXN2; (-) strand; PAM type: NNNNGHTT; PAM sequence: GCTTGCTT
tcctaaagttttagacgctt

SEQ ID NO: 13101 - DNA, 20 bp, Artificial Sequence
  Description of Artificial Sequence: Synthetic oligonucleotide
  Target: ATXN2; (-) strand; PAM type: NNNNGHTT; PAM sequence: GCTTGCTT
tgggtcctaaagttttagac

SEQ ID NO: 13102 - DNA, 20 bp, Artificial Sequence
  Description of Artificial Sequence: Synthetic oligonucleotide
  Target: ATXN2; (-) strand; PAM type: NNNNGHTT; PAM sequence: AGACGCTT
agcctgggtcctaaagtttt

SEQ ID NO: 13103 - DNA, 20 bp, Artificial Sequence
  Description of Artificial Sequence: Synthetic oligonucleotide
  Target: ATXN2; (-) strand; PAM type: NNNNGHTT; PAM sequence: TAAAGTTT
gtggaataaagcctgggtcc

SEQ ID NO: 13104 - DNA, 20 bp, Artificial Sequence
  Description of Artificial Sequence: Synthetic oligonucleotide
  Target: ATXN2; (-) strand; PAM type: NNNNGHTT; PAM sequence: AATAGATT
taaaatgtagcattgagaaa

SEQ ID NO: 13105 - DNA, 20 bp, Artificial Sequence
  Description of Artificial Sequence: Synthetic oligonucleotide
  Target: ATXN2; (-) strand; PAM type: NNNNGHTT; PAM sequence: TTAAGATT
tggtattgtaaacagaagat

SEQ ID NO: 13106 - DNA, 20 bp, Artificial Sequence
  Description of Artificial Sequence: Synthetic oligonucleotide
  Target: ATXN2; (-) strand; PAM type: NNNNGHTT; PAM sequence: AGAAGATT
aaaagtttggtattgtaaac

SEQ ID NO: 13107 - DNA, 20 bp, Artificial Sequence
  Description of Artificial Sequence: Synthetic oligonucleotide
  Target: ATXN2; (-) strand; PAM type: NNNNGHTT; PAM sequence: AAAAGTTT
tgtgaatacttttttttaaa

SEQ ID NO: 13108 - DNA, 20 bp, Artificial Sequence
  Description of Artificial Sequence: Synthetic oligonucleotide
  Target: ATXN2; (-) strand; PAM type: NNNNGHTT; PAM sequence: CTGTGTTT
ttctttatagaatcacactt

SEQ ID NO: 13109 - DNA, 20 bp, Artificial Sequence
  Description of Artificial Sequence: Synthetic oligonucleotide
  Target: ATXN2; (-) strand; PAM type: NNNNGHTT; PAM sequence: CAGGGATT
tgaaatgcattacttatagc

SEQ ID NO: 13110 - DNA, 20 bp, Artificial Sequence
  Description of Artificial Sequence: Synthetic oligonucleotide
  Target: ATXN2; (-) strand; PAM type: NNNNGHTT; PAM sequence: TCTTGCTT
gtgcagaatggatacccaga

SEQ ID NO: 13111 - DNA, 20 bp, Artificial Sequence
  Description of Artificial Sequence: Synthetic oligonucleotide
  Target: ATXN2; (-) strand; PAM type: NNNNGHTT; PAM sequence: CAGTGATT
attgcttgagcccagggctg

SEQ ID NO: 13112 - DNA, 20 bp, Artificial Sequence
  Description of Artificial Sequence: Synthetic oligonucleotide
  Target: ATXN2; (-) strand; PAM type: NNNNGHTT; PAM sequence: GATTGCTT
ttgggaggctgaggtgggag

SEQ ID NO: 13113 - DNA, 20 bp, Artificial Sequence
  Description of Artificial Sequence: Synthetic oligonucleotide
  Target: ATXN2; (-) strand; PAM type: NNNNGHTT; PAM sequence: GGAGGATT
cgacttgggaggctgaggtg

SEQ ID NO: 13114 - DNA, 20 bp, Artificial Sequence
  Description of Artificial Sequence: Synthetic oligonucleotide
  Target: ATXN2; (-) strand; PAM type: NNNNGHTT; PAM sequence: CAGTGTTT
attgtactatttactaccaa

SEQ ID NO: 13115 - DNA, 20 bp, Artificial Sequence
  Description of Artificial Sequence: Synthetic oligonucleotide
  Target: ATXN2; (-) strand; PAM type: NNNNGHTT; PAM sequence: AGTTGTTT
gttgcctgtagattagagcc

SEQ ID NO: 13116 - DNA, 20 bp, Artificial Sequence
  Description of Artificial Sequence: Synthetic oligonucleotide
  Target: ATXN2; (-) strand; PAM type: NNNNGHTT; PAM sequence: TGTAGATT
tgcaaattcccacagttgcc

SEQ ID NO: 13117 - DNA, 20 bp, Artificial Sequence
  Description of Artificial Sequence: Synthetic oligonucleotide
  Target: ATXN2; (-) strand; PAM type: NNNNGHTT; PAM sequence: TTTTGTTT
gcatcttgttgttacaatgc

SEQ ID NO: 13118 - DNA, 20 bp, Artificial Sequence
  Description of Artificial Sequence: Synthetic oligonucleotide
  Target: ATXN2; (-) strand; PAM type: NNNNGHTT; PAM sequence: CAATGCTT
attcttgcatcttgttgtta

SEQ ID NO: 13119 - DNA, 20 bp, Artificial Sequence
  Description of Artificial Sequence: Synthetic oligonucleotide
  Target: ATXN2; (-) strand; PAM type: NNNNGHTT; PAM sequence: TTATGTTT
atcatctcatctgatggttt

SEQ ID NO: 13120 - DNA, 20 bp, Artificial Sequence
  Description of Artificial Sequence: Synthetic oligonucleotide
  Target: ATXN2; (-) strand; PAM type: NNNNGHTT; PAM sequence: GATGGTTT
aattctttatcatctcatct

SEQ ID NO: 13121 - DNA, 20 bp, Artificial Sequence
  Description of Artificial Sequence: Synthetic oligonucleotide
  Target: ATXN2; (-) strand; PAM type: NNNNGHTT; PAM sequence: AGAGGCTT
ccaacatcgcctgctagtct

SEQ ID NO: 13122 - DNA, 20 bp, Artificial Sequence
  Description of Artificial Sequence: Synthetic oligonucleotide
  Target: ATXN2; (-) strand; PAM type: NNNNGHTT; PAM sequence: TTTTGTTT
aggggctggaggtgatacaa

SEQ ID NO: 13123 - DNA, 20 bp, Artificial Sequence
  Description of Artificial Sequence: Synthetic oligonucleotide
  Target: ATXN2; (-) strand; PAM type: NNNNGHTT; PAM sequence: CTAAGTTT
gcatcaccggcccaaaatga

SEQ ID NO: 13124 - DNA, 20 bp, Artificial Sequence
  Description of Artificial Sequence: Synthetic oligonucleotide
  Target: ATXN2; (-) strand; PAM type: NNNNGHTT; PAM sequence: CTCTGTTT
attgagaagctgaatatgta

SEQ ID NO: 13125 - DNA, 20 bp, Artificial Sequence
  Description of Artificial Sequence: Synthetic oligonucleotide
  Target: ATXN2; (-) strand; PAM type: NNNNGHTT; PAM sequence: GAAAGATT
ttggctcagaggtaaaagag

SEQ ID NO: 13126 - DNA, 20 bp, Artificial Sequence
  Description of Artificial Sequence: Synthetic oligonucleotide
  Target: ATXN2; (-) strand; PAM type: NNNNGHTT; PAM sequence: GAATGATT
aaaaatgctcagacaagttt

SEQ ID NO: 13127 - DNA, 20 bp, Artificial Sequence
  Description of Artificial Sequence: Synthetic oligonucleotide
  Target: ATXN2; (-) strand; PAM type: NNNNGHTT; PAM sequence: ACAAGTTT
gccctttaaaaaatgctcag

SEQ ID NO: 13128 - DNA, 20 bp, Artificial Sequence
  Description of Artificial Sequence: Synthetic oligonucleotide
  Target: ATXN2; (-) strand; PAM type: NNNNGHTT; PAM sequence: TAATGTTT
catttaagtatatttatttc

SEQ ID NO: 13129 - DNA, 20 bp, Artificial Sequence
  Description of Artificial Sequence: Synthetic oligonucleotide
  Target: ATXN2; (-) strand; PAM type: NNNNGHTT; PAM sequence: TATAGTTT
catccagttttatgtcattt

SEQ ID NO: 13130 - DNA, 20 bp, Artificial Sequence
  Description of Artificial Sequence: Synthetic oligonucleotide
  Target: ATXN2; (-) strand; PAM type: NNNNGHTT; PAM sequence: TCCAGTTT
tgatgttaatgattatttca

SEQ ID NO: 13131 - DNA, 20 bp, Artificial Sequence
  Description of Artificial Sequence: Synthetic oligonucleotide
  Target: ATXN2; (-) strand; PAM type: NNNNGHTT; PAM sequence: TAATGATT
tgtgatgttaaatctgatgt

SEQ ID NO: 13132 - DNA, 20 bp, Artificial Sequence
  Description of Artificial Sequence: Synthetic oligonucleotide
  Target: ATXN2; (-) strand; PAM type: NNNNGHTT; PAM sequence: GAGGGTTT
acttctctggaagcacattt

SEQ ID NO: 13133 - DNA, 20 bp, Artificial Sequence
  Description of Artificial Sequence: Synthetic oligonucleotide
  Target: ATXN2; (-) strand; PAM type: NNNNGHTT; PAM sequence: TGAGGATT
gttgagaagaaatggttagc

SEQ ID NO: 13134 - DNA, 20 bp, Artificial Sequence
  Description of Artificial Sequence: Synthetic oligonucleotide
  Target: ATXN2; (-) strand; PAM type: NNNNGHTT; PAM sequence: GGCTGATT
aactttgatgtttgagaaaa

SEQ ID NO: 13135 - DNA, 20 bp, Artificial Sequence
  Description of Artificial Sequence: Synthetic oligonucleotide
  Target: ATXN2; (-) strand; PAM type: NNNNGHTT; PAM sequence: TGATGTTT
tttaggtttatatggaactt

SEQ ID NO: 13136 - DNA, 20 bp, Artificial Sequence
  Description of Artificial Sequence: Synthetic oligonucleotide
  Target: ATXN2; (-) strand; PAM type: NNNNGHTT; PAM sequence: TTAGGTTT
gatcaaaacaatatgatttt

SEQ ID NO: 13137 - DNA, 20 bp, Artificial Sequence
  Description of Artificial Sequence: Synthetic oligonucleotide
  Target: ATXN2; (-) strand; PAM type: NNNNGHTT; PAM sequence: ATATGATT
aataggaattgatcaaaaca

SEQ ID NO: 13138 - DNA, 20 bp, Artificial Sequence
  Description of Artificial Sequence: Synthetic oligonucleotide
  Target: ATXN2; (-) strand; PAM type: NNNNGHTT; PAM sequence: TATAGATT
tactgatactttatatagta

SEQ ID NO: 13139 - DNA, 20 bp, Artificial Sequence
  Description of Artificial Sequence: Synthetic oligonucleotide
  Target: ATXN2; (-) strand; PAM type: NNNNGHTT; PAM sequence: ATTTGCTT
attgtattcgattctaaaag

SEQ ID NO: 13140 - DNA, 20 bp, Artificial Sequence
  Description of Artificial Sequence: Synthetic oligonucleotide
  Target: ATXN2; (-) strand; PAM type: NNNNGHTT; PAM sequence: AAAAGATT
cactcattgtattcgattct

SEQ ID NO: 13141 - DNA, 20 bp, Artificial Sequence
  Description of Artificial Sequence: Synthetic oligonucleotide
  Target: ATXN2; (-) strand; PAM type: NNNNGHTT; PAM sequence: ATTCGATT
tgtattgtagcactcattgt

SEQ ID NO: 13142 - DNA, 20 bp, Artificial Sequence
  Description of Artificial Sequence: Synthetic oligonucleotide
  Target: ATXN2; (-) strand; PAM type: NNNNGHTT; PAM sequence: CTTTGTTT
gagccttttgttccttagaa

SEQ ID NO: 13143 - DNA, 20 bp, Artificial Sequence
  Description of Artificial Sequence: Synthetic oligonucleotide
  Target: ATXN2; (-) strand; PAM type: NNNNGHTT; PAM sequence: CTGAGATT
tgactgggcctcccaaaatg

SEQ ID NO: 13144 - DNA, 20 bp, Artificial Sequence
  Description of Artificial Sequence: Synthetic oligonucleotide
  Target: ATXN2; (-) strand; PAM type: NNNNGHTT; PAM sequence: TGGGGTTT
ttttgtatttttagtagaga

SEQ ID NO: 13145 - DNA, 20 bp, Artificial Sequence
  Description of Artificial Sequence: Synthetic oligonucleotide
  Target: ATXN2; (-) strand; PAM type: NNNNGHTT; PAM sequence: CTGGGATT
tgcctcagcctcccgagtag

SEQ ID NO: 13146 - DNA, 20 bp, Artificial Sequence
  Description of Artificial Sequence: Synthetic oligonucleotide
  Target: ATXN2; (-) strand; PAM type: NNNNGHTT; PAM sequence: TTTTGTTT
cctatacacatttttttgtt

SEQ ID NO: 13147 - DNA, 20 bp, Artificial Sequence
  Description of Artificial Sequence: Synthetic oligonucleotide
  Target: ATXN2; (-) strand; PAM type: NNNNGHTT; PAM sequence: TTTTGTTT
caccccgcctatacacattt

SEQ ID NO: 13148 - DNA, 20 bp, Artificial Sequence
  Description of Artificial Sequence: Synthetic oligonucleotide
  Target: ATXN2; (-) strand; PAM type: NNNNGHTT; PAM sequence: ATGGGATT
cgcctcggcctcccaaagtg

SEQ ID NO: 13149 - DNA, 20 bp, Artificial Sequence
  Description of Artificial Sequence: Synthetic oligonucleotide
  Target: ATXN2; (-) strand; PAM type: NNNNGHTT; PAM sequence: GGGGGTTT
cagctatatttagtagagat

SEQ ID NO: 13150 - DNA, 20 bp, Artificial Sequence
  Description of Artificial Sequence: Synthetic oligonucleotide
  Target: ATXN2; (-) strand; PAM type: NNNNGHTT; PAM sequence: CTGGGATT
tgcttcagcctcccgagcag

SEQ ID NO: 13151 - DNA, 20 bp, Artificial Sequence
  Description of Artificial Sequence: Synthetic oligonucleotide
  Target: ATXN2; (-) strand; PAM type: NNNNGHTT; PAM sequence: TCCTGCTT
ctcccaggttcaagtgattc

SEQ ID NO: 13152 - DNA, 20 bp, Artificial Sequence
  Description of Artificial Sequence: Synthetic oligonucleotide
  Target: ATXN2; (-) strand; PAM type: NNNNGHTT; PAM sequence: AAGTGATT
agcctctgcctcccaggttc

SEQ ID NO: 13153 - DNA, 20 bp, Artificial Sequence
  Description of Artificial Sequence: Synthetic oligonucleotide
  Target: ATXN2; (-) strand; PAM type: NNNNGHTT; PAM sequence: CAGAGTTT
cctgttgatttaattttaaa

SEQ ID NO: 13154 - DNA, 20 bp, Artificial Sequence
  Description of Artificial Sequence: Synthetic oligonucleotide
  Target: ATXN2; (-) strand; PAM type: NNNNGHTT; PAM sequence: TGTTGATT
gtgagccactgtgcccagcc

SEQ ID NO: 13155 - DNA, 20 bp, Artificial Sequence
  Description of Artificial Sequence: Synthetic oligonucleotide
  Target: ATXN2; (-) strand; PAM type: NNNNGHTT; PAM sequence: CTGGGATT
cgcctcagcctcccaaagtg

SEQ ID NO: 13156 - DNA, 20 bp, Artificial Sequence
  Description of Artificial Sequence: Synthetic oligonucleotide
  Target: ATXN2; (-) strand; PAM type: NNNNGHTT; PAM sequence: CAGGGTTT
ttttgtatttttagtagaga

SEQ ID NO: 13157 - DNA, 20 bp, Artificial Sequence
  Description of Artificial Sequence: Synthetic oligonucleotide
  Target: ATXN2; (-) strand; PAM type: NNNNGHTT; PAM sequence: AAATGTTT
gttcttgtgtacaattcaga

SEQ ID NO: 13158 - DNA, 20 bp, Artificial Sequence
  Description of Artificial Sequence: Synthetic oligonucleotide
  Target: ATXN2; (-) strand; PAM type: NNNNGHTT; PAM sequence: ACTTGTTT
aactgtgtttcttatcccca

SEQ ID NO: 13159 - DNA, 20 bp, Artificial Sequence
  Description of Artificial Sequence: Synthetic oligonucleotide
  Target: ATXN2; (-) strand; PAM type: NNNNGHTT; PAM sequence: CTGTGTTT
catacatcctgcacccttaa

SEQ ID NO: 13160 - DNA, 20 bp, Artificial Sequence
  Description of Artificial Sequence: Synthetic oligonucleotide
  Target: ATXN2; (-) strand; PAM type: NNNNGHTT; PAM sequence: CTTGGTTT
agcgtggctccacctgtgcc

SEQ ID NO: 13161 - DNA, 20 bp, Artificial Sequence
  Description of Artificial Sequence: Synthetic oligonucleotide
  Target: ATXN2; (-) strand; PAM type: NNNNGHTT; PAM sequence: CATGGATT
cctaaaatattgaaggggcc

SEQ ID NO: 13162 - DNA, 20 bp, Artificial Sequence
  Description of Artificial Sequence: Synthetic oligonucleotide
  Target: ATXN2; (-) strand; PAM type: NNNNGHTT; PAM sequence: ATAGGCTT
tacattctgaatacggtttc

SEQ ID NO: 13163 - DNA, 20 bp, Artificial Sequence
  Description of Artificial Sequence: Synthetic oligonucleotide
  Target: ATXN2; (-) strand; PAM type: NNNNGHTT; PAM sequence: TACGGTTT
gaatttaagtacattctgaa

SEQ ID NO: 13164 - DNA, 20 bp, Artificial Sequence
  Description of Artificial Sequence: Synthetic oligonucleotide
  Target: ATXN2; (-) strand; PAM type: NNNNGHTT; PAM sequence: ATTTGATT
tttcattgttacttgttctc

SEQ ID NO: 13165 - DNA, 20 bp, Artificial Sequence
  Description of Artificial Sequence: Synthetic oligonucleotide
  Target: ATXN2; (-) strand; PAM type: NNNNGHTT; PAM sequence: TTTAGTTT
ttactatgccaacagatttt

SEQ ID NO: 13166 - DNA, 20 bp, Artificial Sequence
  Description of Artificial Sequence: Synthetic oligonucleotide
  Target: ATXN2; (-) strand; PAM type: NNNNGHTT; PAM sequence: AACAGATT
aacatgtatgttactatgcc

SEQ ID NO: 13167 - DNA, 20 bp, Artificial Sequence
  Description of Artificial Sequence: Synthetic oligonucleotide
  Target: ATXN2; (-) strand; PAM type: NNNNGHTT; PAM sequence: TAATGCTT
tgttactggatcttaatatt

SEQ ID NO: 13168 - DNA, 20 bp, Artificial Sequence
  Description of Artificial Sequence: Synthetic oligonucleotide
  Target: ATXN2; (-) strand; PAM type: NNNNGHTT; PAM sequence: CCAGGCTT
tataggcatgtgccactgca

SEQ ID NO: 13169 - DNA, 20 bp, Artificial Sequence
  Description of Artificial Sequence: Synthetic oligonucleotide
  Target: ATXN2; (-) strand; PAM type: NNNNGHTT; PAM sequence: CTGGGATT
cacctcagcctcctgagtag

SEQ ID NO: 13170 - DNA, 20 bp, Artificial Sequence
  Description of Artificial Sequence: Synthetic oligonucleotide
  Target: ATXN2; (-) strand; PAM type: NNNNGHTT; PAM sequence: CTGGGATT
ctgccttggcttccaaagtg

SEQ ID NO: 13171 - DNA, 20 bp, Artificial Sequence
  Description of Artificial Sequence: Synthetic oligonucleotide
  Target: ATXN2; (-) strand; PAM type: NNNNGHTT; PAM sequence: CTTGGCTT
acctcaagtgatccgcctgc

SEQ ID NO: 13172 - DNA, 20 bp, Artificial Sequence
  Description of Artificial Sequence: Synthetic oligonucleotide
  Target: ATXN2; (-) strand; PAM type: NNNNGHTT; PAM sequence: AGGGGTTT
gtttgtattttcagtagaga

SEQ ID NO: 13173 - DNA, 20 bp, Artificial Sequence
  Description of Artificial Sequence: Synthetic oligonucleotide
  Target: ATXN2; (-) strand; PAM type: NNNNGHTT; PAM sequence: TAATGTTT
cgcacaccaccacgcctagc

SEQ ID NO: 13174 - DNA, 20 bp, Artificial Sequence
  Description of Artificial Sequence: Synthetic oligonucleotide
  Target: ATXN2; (-) strand; PAM type: NNNNGHTT; PAM sequence: CTGGGATT
tgcctcagcctcctgagtag

SEQ ID NO: 13175 - DNA, 20 bp, Artificial Sequence
  Description of Artificial Sequence: Synthetic oligonucleotide
  Target: ATXN2; (-) strand; PAM type: NNNNGHTT; PAM sequence: AAACGATT
aacctctgcctcctgggttc

SEQ ID NO: 13176 - DNA, 20 bp, Artificial Sequence
  Description of Artificial Sequence: Synthetic oligonucleotide
  Target: ATXN2; (-) strand; PAM type: NNNNGHTT; PAM sequence: TATCGCTT
atagaactcagttaatttca

SEQ ID NO: 13177 - DNA, 20 bp, Artificial Sequence
  Description of Artificial Sequence: Synthetic oligonucleotide
  Target: ATXN2; (-) strand; PAM type: NNNNGHTT; PAM sequence: TGTGGATT
caggattcttcacctggatc

SEQ ID NO: 13178 - DNA, 20 bp, Artificial Sequence
  Description of Artificial Sequence: Synthetic oligonucleotide
  Target: ATXN2; (-) strand; PAM type: NNNNGHTT; PAM sequence: GCAGGATT
ctgcttgtcagtacaaagag

SEQ ID NO: 13179 - DNA, 20 bp, Artificial Sequence
  Description of Artificial Sequence: Synthetic oligonucleotide
  Target: ATXN2; (-) strand; PAM type: NNNNGHTT; PAM sequence: TCCTGCTT
tcatggcagaggctctttct

SEQ ID NO: 13180 - DNA, 20 bp, Artificial Sequence
  Description of Artificial Sequence: Synthetic oligonucleotide
  Target: ATXN2; (-) strand; PAM type: NNNNGHTT; PAM sequence: ATTTGCTT
ctccttccagtccctcacct

SEQ ID NO: 13181 - DNA, 20 bp, Artificial Sequence
  Description of Artificial Sequence: Synthetic oligonucleotide
  Target: ATXN2; (-) strand; PAM type: NNNNGHTT; PAM sequence: TAGGGTTT
gggctgattagttaggaatg

SEQ ID NO: 13182 - DNA, 20 bp, Artificial Sequence
  Description of Artificial Sequence: Synthetic oligonucleotide
  Target: ATXN2; (-) strand; PAM type: NNNNGHTT; PAM sequence: GGCTGATT
tggagaaagtcccactgggg

SEQ ID NO: 13183 - DNA, 20 bp, Artificial Sequence
  Description of Artificial Sequence: Synthetic oligonucleotide
  Target: ATXN2; (-) strand; PAM type: NNNNGHTT; PAM sequence: GAATGCTT
aaggaactgcttctcttcca

SEQ ID NO: 13184 - DNA, 20 bp, Artificial Sequence
  Description of Artificial Sequence: Synthetic oligonucleotide
  Target: ATXN2; (-) strand; PAM type: NNNNGHTT; PAM sequence: AACTGCTT
ctgtgtcatcactcggaagg

SEQ ID NO: 13185 - DNA, 20 bp, Artificial Sequence
  Description of Artificial Sequence: Synthetic oligonucleotide
  Target: ATXN2; (-) strand; PAM type: NNNNGHTT; PAM sequence: TCCTGCTT
acctccacggcgttgtagca

SEQ ID NO: 13186 - DNA, 20 bp, Artificial Sequence
  Description of Artificial Sequence: Synthetic oligonucleotide
  Target: ATXN2; (-) strand; PAM type: NNNNGHTT; PAM sequence: CCTGGATT
gtatcagggacttaagcatc

SEQ ID NO: 13187 - DNA, 20 bp, Artificial Sequence
  Description of Artificial Sequence: Synthetic oligonucleotide
  Target: ATXN2; (-) strand; PAM type: NNNNGHTT; PAM sequence: AGAGGTTT
ttaggtattataggtaacct

SEQ ID NO: 13188 - DNA, 20 bp, Artificial Sequence
  Description of Artificial Sequence: Synthetic oligonucleotide
  Target: ATXN2; (-) strand; PAM type: NNNNGHTT; PAM sequence: CTGAGATT
gaagtagaggtttccatgag

SEQ ID NO: 13189 - DNA, 20 bp, Artificial Sequence
  Description of Artificial Sequence: Synthetic oligonucleotide
  Target: ATXN2; (-) strand; PAM type: NNNNGHTT; PAM sequence: AGAGGTTT
tttgcttgaacctgagaagt

SEQ ID NO: 13190 - DNA, 20 bp, Artificial Sequence
  Description of Artificial Sequence: Synthetic oligonucleotide
  Target: ATXN2; (-) strand; PAM type: NNNNGHTT; PAM sequence: ATTTGCTT
tcgagaggttgagacaagca

SEQ ID NO: 13191 - DNA, 20 bp, Artificial Sequence
  Description of Artificial Sequence: Synthetic oligonucleotide
  Target: ATXN2; (-) strand; PAM type: NNNNGHTT; PAM sequence: GTTAGTTT
ggacactgatgtcttcaaat

SEQ ID NO: 13192 - DNA, 20 bp, Artificial Sequence
  Description of Artificial Sequence: Synthetic oligonucleotide
  Target: ATXN2; (-) strand; PAM type: NNNNGHTT; PAM sequence: CTTAGTTT
attgtaattaccattcattt

SEQ ID NO: 13193 - DNA, 20 bp, Artificial Sequence
  Description of Artificial Sequence: Synthetic oligonucleotide
  Target: ATXN2; (-) strand; PAM type: NNNNGHTT; PAM sequence: CAATGATT
cataggcatgataccataga

SEQ ID NO: 13194 - DNA, 20 bp, Artificial Sequence
  Description of Artificial Sequence: Synthetic oligonucleotide
  Target: ATXN2; (-) strand; PAM type: NNNNGHTT; PAM sequence: AACTGTTT
atactcctaaaccagggaat

SEQ ID NO: 13195 - DNA, 20 bp, Artificial Sequence
  Description of Artificial Sequence: Synthetic oligonucleotide
  Target: ATXN2; (-) strand; PAM type: NNNNGHTT; PAM sequence: TTATGTTT
tatttatatttattatattt

SEQ ID NO: 13196 - DNA, 20 bp, Artificial Sequence
  Description of Artificial Sequence: Synthetic oligonucleotide
  Target: ATXN2; (-) strand; PAM type: NNNNGHTT; PAM sequence: CTTGGCTT
agctcaggcagtccacctgc

SEQ ID NO: 13197 - DNA, 20 bp, Artificial Sequence
  Description of Artificial Sequence: Synthetic oligonucleotide
  Target: ATXN2; (-) strand; PAM type: NNNNGHTT; PAM sequence: GTTGGTTT
gattttgccgtgttgcccag

SEQ ID NO: 13198 - DNA, 20 bp, Artificial Sequence
  Description of Artificial Sequence: Synthetic oligonucleotide
  Target: ATXN2; (-) strand; PAM type: NNNNGHTT; PAM sequence: ACAGGATT
tttttatatttttggtagag

SEQ ID NO: 13199 - DNA, 20 bp, Artificial Sequence
  Description of Artificial Sequence: Synthetic oligonucleotide
  Target: ATXN2; (-) strand; PAM type: NNNNGHTT; PAM sequence: AAGTGATT
aacctcctcctcccaggctc

SEQ ID NO: 13200 - DNA, 20 bp, Artificial Sequence
  Description of Artificial Sequence: Synthetic oligonucleotide
  Target: ATXN2; (-) strand; PAM type: NNNNGHTT; PAM sequence: AAAAGTTT
attcctttgattgatttttg

SEQ ID NO: 13201 - DNA, 20 bp, Artificial Sequence
  Description of Artificial Sequence: Synthetic oligonucleotide
  Target: ATXN2; (-) strand; PAM type: NNNNGHTT; PAM sequence: GATTGATT
caacatatatatattccttt

SEQ ID NO: 13202 - DNA, 20 bp, Artificial Sequence
  Description of Artificial Sequence: Synthetic oligonucleotide
  Target: ATXN2; (-) strand; PAM type: NNNNGHTT; PAM sequence: CTTTGATT
tgttcaacatatatatattc

SEQ ID NO: 13203 - DNA, 20 bp, Artificial Sequence
  Description of Artificial Sequence: Synthetic oligonucleotide
  Target: ATXN2; (-) strand; PAM type: NNNNGHTT; PAM sequence: CAAGGCTT
atgctgactcttagttaaaa

SEQ ID NO: 13204 - DNA, 20 bp, Artificial Sequence
  Description of Artificial Sequence: Synthetic oligonucleotide
  Target: ATXN2; (-) strand; PAM type: NNNNGHTT; PAM sequence: GTCAGTTT
ttctttttagtatagaatag

SEQ ID NO: 13205 - DNA, 20 bp, Artificial Sequence
  Description of Artificial Sequence: Synthetic oligonucleotide
  Target: ATXN2; (-) strand; PAM type: NNNNGHTT; PAM sequence: CTGGGATT
catctcagcctccccaagtg

SEQ ID NO: 13206 - DNA, 20 bp, Artificial Sequence
  Description of Artificial Sequence: Synthetic oligonucleotide
  Target: ATXN2; (-) strand; PAM type: NNNNGHTT; PAM sequence: TTTAGTTT
tttttgtttgttttttttag

SEQ ID NO: 13207 - DNA, 20 bp, Artificial Sequence
  Description of Artificial Sequence: Synthetic oligonucleotide
  Target: ATXN2; (-) strand; PAM type: NNNNGHTT; PAM sequence: TTTAGTTT
taatttttttgtttgttttt

SEQ ID NO: 13208 - DNA, 20 bp, Artificial Sequence
  Description of Artificial Sequence: Synthetic oligonucleotide
  Target: ATXN2; (-) strand; PAM type: NNNNGHTT; PAM sequence: GTTTGTTT
cctacctggctaattttttt

SEQ ID NO: 13209 - DNA, 20 bp, Artificial Sequence
  Description of Artificial Sequence: Synthetic oligonucleotide
  Target: ATXN2; (-) strand; PAM type: NNNNGHTT; PAM sequence: TTTTGTTT
ccaccctacctggctaattt

SEQ ID NO: 13210 - DNA, 20 bp, Artificial Sequence
  Description of Artificial Sequence: Synthetic oligonucleotide
  Target: ATXN2; (-) strand; PAM type: NNNNGHTT; PAM sequence: TACTGCTT
gcagtggcgccatcatggct

SEQ ID NO: 13211 - DNA, 20 bp, Artificial Sequence
  Description of Artificial Sequence: Synthetic oligonucleotide
  Target: ATXN2; (-) strand; PAM type: NNNNGHTT; PAM sequence: CATGGCTT
ctagaatgcagtggcgccat

SEQ ID NO: 13212 - DNA, 20 bp, Artificial Sequence
  Description of Artificial Sequence: Synthetic oligonucleotide
  Target: ATXN2; (-) strand; PAM type: NNNNGHTT; PAM sequence: TTATGTTT
actttacattttaaattaat

SEQ ID NO: 13213 - DNA, 20 bp, Artificial Sequence
  Description of Artificial Sequence: Synthetic oligonucleotide
  Target: ATXN2; (-) strand; PAM type: NNNNGHTT; PAM sequence: GTTTGTTT
gaccttccctgctcattgtg

SEQ ID NO: 13214 - DNA, 20 bp, Artificial Sequence
  Description of Artificial Sequence: Synthetic oligonucleotide
  Target: ATXN2; (-) strand; PAM type: NNNNGHTT; PAM sequence: TGTGGTTT
ctctgaccttccctgctcat

SEQ ID NO: 13215 - DNA, 20 bp, Artificial Sequence
  Description of Artificial Sequence: Synthetic oligonucleotide
  Target: ATXN2; (-) strand; PAM type: NNNNGHTT; PAM sequence: TAGAGTTT
gaagaatctaccttactaac

SEQ ID NO: 13216 - DNA, 20 bp, Artificial Sequence
  Description of Artificial Sequence: Synthetic oligonucleotide
  Target: ATXN2; (-) strand; PAM type: NNNNGHTT; PAM sequence: CCTGGATT
ctgtgccttcttcttttact

SEQ ID NO: 13217 - DNA, 20 bp, Artificial Sequence
  Description of Artificial Sequence: Synthetic oligonucleotide
  Target: ATXN2; (-) strand; PAM type: NNNNGHTT; PAM sequence: CTGGGATT
tgccttgggctcccaaattg

SEQ ID NO: 13218 - DNA, 20 bp, Artificial Sequence
  Description of Artificial Sequence: Synthetic oligonucleotide
  Target: ATXN2; (-) strand; PAM type: NNNNGHTT; PAM sequence: CTGTGTTT
tttagtagagatgggtttca

SEQ ID NO: 13219 - DNA, 20 bp, Artificial Sequence
  Description of Artificial Sequence: Synthetic oligonucleotide
  Target: ATXN2; (-) strand; PAM type: NNNNGHTT; PAM sequence: ATGGGTTT
cttttgtatttttagtagag

SEQ ID NO: 13220 - DNA, 20 bp, Artificial Sequence
  Description of Artificial Sequence: Synthetic oligonucleotide
  Target: ATXN2; (-) strand; PAM type: NNNNGHTT; PAM sequence: CAGTGATT
aacctctgcctcccgggttc

SEQ ID NO: 13221 - DNA, 20 bp, Artificial Sequence
  Description of Artificial Sequence: Synthetic oligonucleotide
  Target: ATXN2; (-) strand; PAM type: NNNNGHTT; PAM sequence: GTTTGTTT
actttgtgccttcttttttt

SEQ ID NO: 13222 - DNA, 20 bp, Artificial Sequence
  Description of Artificial Sequence: Synthetic oligonucleotide
  Target: ATXN2; (-) strand; PAM type: NNNNGHTT; PAM sequence: TTTTGTTT
accaactttgtgccttcttt

SEQ ID NO: 13223 - DNA, 20 bp, Artificial Sequence
  Description of Artificial Sequence: Synthetic oligonucleotide
  Target: ATXN2; (-) strand; PAM type: NNNNGHTT; PAM sequence: CTGGGATT
cacctcggcctcccaaagtg

SEQ ID NO: 13224 - DNA, 20 bp, Artificial Sequence
  Description of Artificial Sequence: Synthetic oligonucleotide
  Target: ATXN2; (-) strand; PAM type: NNNNGHTT; PAM sequence: CACCGTTT
ttttagtagagacggggttt

SEQ ID NO: 13225 - DNA, 20 bp, Artificial Sequence
  Description of Artificial Sequence: Synthetic oligonucleotide
  Target: ATXN2; (-) strand; PAM type: NNNNGHTT; PAM sequence: CGGGGTTT
ttttgtatttttagtagaga

SEQ ID NO: 13226 - DNA, 20 bp, Artificial Sequence
  Description of Artificial Sequence: Synthetic oligonucleotide
  Target: ATXN2; (-) strand; PAM type: NNNNGHTT; PAM sequence: CAATGTTT
ccttatctctcattatttcc

SEQ ID NO: 13227 - DNA, 20 bp, Artificial Sequence
  Description of Artificial Sequence: Synthetic oligonucleotide
  Target: ATXN2; (-) strand; PAM type: NNNNGHTT; PAM sequence: TGTTGTTT
tcaaaatcttcagtggccac

SEQ ID NO: 13228 - DNA, 20 bp, Artificial Sequence
  Description of Artificial Sequence: Synthetic oligonucleotide
  Target: ATXN2; (-) strand; PAM type: NNNNGHTT; PAM sequence: CATTGCTT
gacataaagaaattcttaga

SEQ ID NO: 13229 - DNA, 20 bp, Artificial Sequence
  Description of Artificial Sequence: Synthetic oligonucleotide
  Target: ATXN2; (-) strand; PAM type: NNNNGHTT; PAM sequence: TCCAGATT
atctcctaaacaacttgtct

SEQ ID NO: 13230 - DNA, 20 bp, Artificial Sequence
  Description of Artificial Sequence: Synthetic oligonucleotide
  Target: ATXN2; (-) strand; PAM type: NNNNGHTT; PAM sequence: CCTTGTTT
aaatagaaaataagtgtggt

SEQ ID NO: 13231 - DNA, 20 bp, Artificial Sequence
  Description of Artificial Sequence: Synthetic oligonucleotide
  Target: ATXN2; (-) strand; PAM type: NNNNGHTT; PAM sequence: AAAAGATT
aagttcaaaacgtgtgtacc

SEQ ID NO: 13232 - DNA, 20 bp, Artificial Sequence
  Description of Artificial Sequence: Synthetic oligonucleotide
  Target: ATXN2; (-) strand; PAM type: NNNNGHTT; PAM sequence: TTCTGTTT
tctcactgtagatttttttt

SEQ ID NO: 13233 - DNA, 20 bp, Artificial Sequence
  Description of Artificial Sequence: Synthetic oligonucleotide
  Target: ATXN2; (-) strand; PAM type: NNNNGHTT; PAM sequence: TGTAGATT
agtaagaagtagtatctcac

SEQ ID NO: 13234 - DNA, 20 bp, Artificial Sequence
  Description of Artificial Sequence: Synthetic oligonucleotide
  Target: ATXN2; (-) strand; PAM type: NNNNGHTT; PAM sequence: CTTTGATT
gcatttgttattgtctgtct

SEQ ID NO: 13235 - DNA, 20 bp, Artificial Sequence
  Description of Artificial Sequence: Synthetic oligonucleotide
  Target: ATXN2; (-) strand; PAM type: NNNNGHTT; PAM sequence: TTATGTTT
ctagcagtgtctgaggtttc

SEQ ID NO: 13236 - DNA, 20 bp, Artificial Sequence
  Description of Artificial Sequence: Synthetic oligonucleotide
  Target: ATXN2; (-) strand; PAM type: NNNNGHTT; PAM sequence: TGAGGTTT
acaatcctactagcagtgtc

SEQ ID NO: 13237 - DNA, 20 bp, Artificial Sequence
  Description of Artificial Sequence: Synthetic oligonucleotide
  Target: ATXN2; (-) strand; PAM type: NNNNGHTT; PAM sequence: AGCTGTTT
atcattttacaatcctacat

SEQ ID NO: 13238 - DNA, 20 bp, Artificial Sequence
  Description of Artificial Sequence: Synthetic oligonucleotide
  Target: ATXN2; (-) strand; PAM type: NNNNGHTT; PAM sequence: GGCTGATT
tggggtctcactgttgcaca

SEQ ID NO: 13239 - DNA, 20 bp, Artificial Sequence
  Description of Artificial Sequence: Synthetic oligonucleotide
  Target: ATXN2; (-) strand; PAM type: NNNNGHTT; PAM sequence: TTTTGTTT
tttacataactgttgggctg

SEQ ID NO: 13240 - DNA, 20 bp, Artificial Sequence
  Description of Artificial Sequence: Synthetic oligonucleotide
  Target: ATXN2; (-) strand; PAM type: NNNNGHTT; PAM sequence: GGCTGTTT
aaccttttacataactgttg

SEQ ID NO: 13241 - DNA, 20 bp, Artificial Sequence
  Description of Artificial Sequence: Synthetic oligonucleotide
  Target: ATXN2; (-) strand; PAM type: NNNNGHTT; PAM sequence: ATAGGTTT
aaaaaaaactgcgtgtggac

SEQ ID NO: 13242 - DNA, 20 bp, Artificial Sequence
  Description of Artificial Sequence: Synthetic oligonucleotide
  Target: ATXN2; (-) strand; PAM type: NNNNGHTT; PAM sequence: TAAAGTTT
ctgctgcgaacagtgacttt

SEQ ID NO: 13243 - DNA, 20 bp, Artificial Sequence
  Description of Artificial Sequence: Synthetic oligonucleotide
  Target: ATXN2; (-) strand; PAM type: NNNNGHTT; PAM sequence: TTTTGATT
acattttcattgtttccacc

SEQ ID NO: 13244 - DNA, 20 bp, Artificial Sequence
  Description of Artificial Sequence: Synthetic oligonucleotide
  Target: ATXN2; (-) strand; PAM type: NNNNGHTT; PAM sequence: CATTGTTT
catcagttggtggacatttt

SEQ ID NO: 13245 - DNA, 20 bp, Artificial Sequence
  Description of Artificial Sequence: Synthetic oligonucleotide
  Target: ATXN2; (-) strand; PAM type: NNNNGHTT; PAM sequence: TTTTGTTT
agttacacaggtacactaca

SEQ ID NO: 13246 - DNA, 20 bp, Artificial Sequence
  Description of Artificial Sequence: Synthetic oligonucleotide
  Target: ATXN2; (-) strand; PAM type: NNNNGHTT; PAM sequence: GTATGTTT
tgataggcttgtttcactta

SEQ ID NO: 13247 - DNA, 20 bp, Artificial Sequence
  Description of Artificial Sequence: Synthetic oligonucleotide
  Target: ATXN2; (-) strand; PAM type: NNNNGHTT; PAM sequence: GCTTGTTT
ggccatatatattatgatag

SEQ ID NO: 13248 - DNA, 20 bp, Artificial Sequence
  Description of Artificial Sequence: Synthetic oligonucleotide
  Target: ATXN2; (-) strand; PAM type: NNNNGHTT; PAM sequence: ATAGGCTT
atctggccatatatattatg

SEQ ID NO: 13249 - DNA, 20 bp, Artificial Sequence
  Description of Artificial Sequence: Synthetic oligonucleotide
  Target: ATXN2; (-) strand; PAM type: NNNNGHTT; PAM sequence: CTGGGATT
cacctcggactcccaaagtg

SEQ ID NO: 13250 - DNA, 20 bp, Artificial Sequence
  Description of Artificial Sequence: Synthetic oligonucleotide
  Target: ATXN2; (-) strand; PAM type: NNNNGHTT; PAM sequence: AAGCGATT
atcctctgcctcccaggttg

SEQ ID NO: 13251 - DNA, 20 bp, Artificial Sequence
  Description of Artificial Sequence: Synthetic oligonucleotide
  Target: ATXN2; (-) strand; PAM type: NNNNGHTT; PAM sequence: GCATGATT
gcccaggctggagcgcagtg

SEQ ID NO: 13252 - DNA, 20 bp, Artificial Sequence
  Description of Artificial Sequence: Synthetic oligonucleotide
  Target: ATXN2; (-) strand; PAM type: NNNNGHTT; PAM sequence: ATAGGTTT
actattgatttattgtcttc

SEQ ID NO: 13253 - DNA, 20 bp, Artificial Sequence
  Description of Artificial Sequence: Synthetic oligonucleotide
  Target: ATXN2; (-) strand; PAM type: NNNNGHTT; PAM sequence: TATTGATT
tttccccagctccaggcaac

SEQ ID NO: 13254 - DNA, 20 bp, Artificial Sequence
  Description of Artificial Sequence: Synthetic oligonucleotide
  Target: ATXN2; (-) strand; PAM type: NNNNGHTT; PAM sequence: GTTTGTTT
ccccttagcagttcctctct

SEQ ID NO: 13255 - DNA, 20 bp, Artificial Sequence
  Description of Artificial Sequence: Synthetic oligonucleotide
  Target: ATXN2; (-) strand; PAM type: NNNNGHTT; PAM sequence: CTCTGTTT
tgaaccccttagcagttcct

SEQ ID NO: 13256 - DNA, 20 bp, Artificial Sequence
  Description of Artificial Sequence: Synthetic oligonucleotide
  Target: ATXN2; (-) strand; PAM type: NNNNGHTT; PAM sequence: CTGGGATT
tgccccagcctcccaaagtg

SEQ ID NO: 13257 - DNA, 20 bp, Artificial Sequence
  Description of Artificial Sequence: Synthetic oligonucleotide
  Target: ATXN2; (-) strand; PAM type: NNNNGHTT; PAM sequence: TTTTGTTT
ggctaatttttgttgttatt

SEQ ID NO: 13258 - DNA, 20 bp, Artificial Sequence
  Description of Artificial Sequence: Synthetic oligonucleotide
  Target: ATXN2; (-) strand; PAM type: NNNNGHTT; PAM sequence: TCCTGATT
tcaggtgattcaccttagcc

SEQ ID NO: 13259 - DNA, 20 bp, Artificial Sequence
  Description of Artificial Sequence: Synthetic oligonucleotide
  Target: ATXN2; (-) strand; PAM type: NNNNGHTT; PAM sequence: AGGTGATT
aacctcaaactcatgggttc

SEQ ID NO: 13260 - DNA, 20 bp, Artificial Sequence
  Description of Artificial Sequence: Synthetic oligonucleotide
  Target: ATXN2; (-) strand; PAM type: NNNNGHTT; PAM sequence: TTAGGTTT
catttgagatagggagaaaa

SEQ ID NO: 13261 - DNA, 20 bp, Artificial Sequence
  Description of Artificial Sequence: Synthetic oligonucleotide
  Target: ATXN2; (-) strand; PAM type: NNNNGHTT; PAM sequence: TAGGGATT
aataggatatatttttctct

SEQ ID NO: 13262 - DNA, 20 bp, Artificial Sequence
  Description of Artificial Sequence: Synthetic oligonucleotide
  Target: ATXN2; (-) strand; PAM type: NNNNGHTT; PAM sequence: TACTGCTT
gtattagtaaggaaaataaa

SEQ ID NO: 13263 - DNA, 20 bp, Artificial Sequence
  Description of Artificial Sequence: Synthetic oligonucleotide
  Target: ATXN2; (-) strand; PAM type: NNNNGHTT; PAM sequence: AAATGTTT
gatgatgtattttatcttat

SEQ ID NO: 13264 - DNA, 20 bp, Artificial Sequence
  Description of Artificial Sequence: Synthetic oligonucleotide
  Target: ATXN2; (-) strand; PAM type: NNNNGHTT; PAM sequence: ATGGGCTT
agtgccttttatcttattta

SEQ ID NO: 13265 - DNA, 20 bp, Artificial Sequence
  Description of Artificial Sequence: Synthetic oligonucleotide
  Target: ATXN2; (-) strand; PAM type: NNNNGHTT; PAM sequence: CCTGGTTT
tgcagtgagccaagtgagac

SEQ ID NO: 13266 - DNA, 20 bp, Artificial Sequence
  Description of Artificial Sequence: Synthetic oligonucleotide
  Target: ATXN2; (-) strand; PAM type: NNNNGHTT; PAM sequence: GGGAGATT
gagaggatcatctgagcgca

SEQ ID NO: 13267 - DNA, 20 bp, Artificial Sequence
  Description of Artificial Sequence: Synthetic oligonucleotide
  Target: ATXN2; (-) strand; PAM type: NNNNGHTT; PAM sequence: CCCCGTTT
gcctgggcaatatggtggaa

SEQ ID NO: 13268 - DNA, 20 bp, Artificial Sequence
  Description of Artificial Sequence: Synthetic oligonucleotide
  Target: ATXN2; (-) strand; PAM type: NNNNGHTT; PAM sequence: AATTGCTT
ttgggaggccaaggcagatg

SEQ ID NO: 13269 - DNA, 20 bp, Artificial Sequence
  Description of Artificial Sequence: Synthetic oligonucleotide
  Target: ATXN2; (-) strand; PAM type: NNNNGHTT; PAM sequence: AATTGCTT
gctaatttagagcttaagaa

SEQ ID NO: 13270 - DNA, 20 bp, Artificial Sequence
  Description of Artificial Sequence: Synthetic oligonucleotide
  Target: ATXN2; (-) strand; PAM type: NNNNGHTT; PAM sequence: TAGAGCTT
aaattttaagttagctaatt

SEQ ID NO: 13271 - DNA, 20 bp, Artificial Sequence
  Description of Artificial Sequence: Synthetic oligonucleotide
  Target: ATXN2; (-) strand; PAM type: NNNNGHTT; PAM sequence: AGTTGATT
tgagttttttattatttttt

SEQ ID NO: 13272 - DNA, 20 bp, Artificial Sequence
  Description of Artificial Sequence: Synthetic oligonucleotide
  Target: ATXN2; (-) strand; PAM type: NNNNGHTT; PAM sequence: TTGAGTTT
gaggaatctgattagtaagt

SEQ ID NO: 13273 - DNA, 20 bp, Artificial Sequence
  Description of Artificial Sequence: Synthetic oligonucleotide
  Target: ATXN2; (-) strand; PAM type: NNNNGHTT; PAM sequence: GTAAGTTT
ctttcagaggaatctgatta

SEQ ID NO: 13274 - DNA, 20 bp, Artificial Sequence
  Description of Artificial Sequence: Synthetic oligonucleotide
  Target: ATXN2; (-) strand; PAM type: NNNNGHTT; PAM sequence: ATCTGATT
ttcactcagctttcagagga

SEQ ID NO: 13275 - DNA, 20 bp, Artificial Sequence
  Description of Artificial Sequence: Synthetic oligonucleotide
  Target: ATXN2; (-) strand; PAM type: NNNNGHTT; PAM sequence: CTCAGCTT
gcatgggctattgatcttca

SEQ ID NO: 13276 - DNA, 20 bp, Artificial Sequence
  Description of Artificial Sequence: Synthetic oligonucleotide
  Target: ATXN2; (-) strand; PAM type: NNNNGHTT; PAM sequence: ATTTGATT
tgctgtagaatttgatgtat

SEQ ID NO: 13277 - DNA, 20 bp, Artificial Sequence
  Description of Artificial Sequence: Synthetic oligonucleotide
  Target: ATXN2; (-) strand; PAM type: NNNNGHTT; PAM sequence: TCAGGCTT
tcttgttagttttgcaccac

SEQ ID NO: 13278 - DNA, 20 bp, Artificial Sequence
  Description of Artificial Sequence: Synthetic oligonucleotide
  Target: ATXN2; (-) strand; PAM type: NNNNGHTT; PAM sequence: GTTAGTTT
ccatattttttcttgttctt

SEQ ID NO: 13279 - DNA, 20 bp, Artificial Sequence
  Description of Artificial Sequence: Synthetic oligonucleotide
  Target: ATXN2; (-) strand; PAM type: NNNNGHTT; PAM sequence: CCTTGTTT
tacgtacgtggaatctgtca

SEQ ID NO: 13280 - DNA, 20 bp, Artificial Sequence
  Description of Artificial Sequence: Synthetic oligonucleotide
  Target: ATXN2; (-) strand; PAM type: NNNNGHTT; PAM sequence: GCTAGCTT
gcacaaatttctttcaggta

SEQ ID NO: 13281 - DNA, 20 bp, Artificial Sequence
  Description of Artificial Sequence: Synthetic oligonucleotide
  Target: ATXN2; (-) strand; PAM type: NNNNGHTT; PAM sequence: ACAGGCTT
cctcccaaagtgctcggatt

SEQ ID NO: 13282 - DNA, 20 bp, Artificial Sequence
  Description of Artificial Sequence: Synthetic oligonucleotide
  Target: ATXN2; (-) strand; PAM type: NNNNGHTT; PAM sequence: CTCGGATT
tgcctcagcctcccaaagtg

SEQ ID NO: 13283 - DNA, 20 bp, Artificial Sequence
  Description of Artificial Sequence: Synthetic oligonucleotide
  Target: ATXN2; (-) strand; PAM type: NNNNGHTT; PAM sequence: GACTGATT
aagtgctcaaacgatgattg

SEQ ID NO: 13284 - DNA, 20 bp, Artificial Sequence
  Description of Artificial Sequence: Synthetic oligonucleotide
  Target: ATXN2; (-) strand; PAM type: NNNNGHTT; PAM sequence: CGATGATT
tttataaagaagtgctcaaa

SEQ ID NO: 13285 - DNA, 20 bp, Artificial Sequence
  Description of Artificial Sequence: Synthetic oligonucleotide
  Target: ATXN2; (-) strand; PAM type: NNNNGHTT; PAM sequence: CTGGGATT
cgcctcggcctcccaaagtg

SEQ ID NO: 13286 - DNA, 20 bp, Artificial Sequence
  Description of Artificial Sequence: Synthetic oligonucleotide
  Target: ATXN2; (-) strand; PAM type: NNNNGHTT; PAM sequence: CGGGGTTT
ttttgtatttttagtagaga

SEQ ID NO: 13287 - DNA, 20 bp, Artificial Sequence
  Description of Artificial Sequence: Synthetic oligonucleotide
  Target: ATXN2; (-) strand; PAM type: NNNNGHTT; PAM sequence: TTTTGATT
ttcaattcctaaattctgtt

SEQ ID NO: 13288 - DNA, 20 bp, Artificial Sequence
  Description of Artificial Sequence: Synthetic oligonucleotide
  Target: ATXN2; (-) strand; PAM type: NNNNGHTT; PAM sequence: TTCTGTTT
ttggcatttcaattcctaaa

SEQ ID NO: 13289 - DNA, 20 bp, Artificial Sequence
  Description of Artificial Sequence: Synthetic oligonucleotide
  Target: ATXN2; (-) strand; PAM type: NNNNGHTT; PAM sequence: ATAGGTTT
taattctgaacacttttgcc

SEQ ID NO: 13290 - DNA, 20 bp, Artificial Sequence
  Description of Artificial Sequence: Synthetic oligonucleotide
  Target: ATXN2; (-) strand; PAM type: NNNNGHTT; PAM sequence: AAATGTTT
gaaaagaatccgaatctata

SEQ ID NO: 13291 - DNA, 20 bp, Artificial Sequence
  Description of Artificial Sequence: Synthetic oligonucleotide
  Target: ATXN2; (-) strand; PAM type: NNNNGHTT; PAM sequence: TTCTGTTT
catgtgtacttgaacagttg

SEQ ID NO: 13292 - DNA, 20 bp, Artificial Sequence
  Description of Artificial Sequence: Synthetic oligonucleotide
  Target: ATXN2; (-) strand; PAM type: NNNNGHTT; PAM sequence: GATGGTTT
tatttttttctcttgtcttg

SEQ ID NO: 13293 - DNA, 20 bp, Artificial Sequence
  Description of Artificial Sequence: Synthetic oligonucleotide
  Target: ATXN2; (-) strand; PAM type: NNNNGHTT; PAM sequence: TCTAGTTT
taatgctaatatacttacta

SEQ ID NO: 13294 - DNA, 20 bp, Artificial Sequence
  Description of Artificial Sequence: Synthetic oligonucleotide
  Target: ATXN2; (-) strand; PAM type: NNNNGHTT; PAM sequence: GACTGTTT
ttccaggacattttcagtaa

SEQ ID NO: 13295 - DNA, 20 bp, Artificial Sequence
  Description of Artificial Sequence: Synthetic oligonucleotide
  Target: ATXN2; (-) strand; PAM type: NNNNGHTT; PAM sequence: ATATGTTT
aaagaataggtaagtaatgc

SEQ ID NO: 13296 - DNA, 20 bp, Artificial Sequence
  Description of Artificial Sequence: Synthetic oligonucleotide
  Target: ATXN2; (-) strand; PAM type: NNNNGHTT; PAM sequence: GATGGTTT
acacttaacactgctagtgg

SEQ ID NO: 13297 - DNA, 20 bp, Artificial Sequence
  Description of Artificial Sequence: Synthetic oligonucleotide
  Target: ATXN2; (-) strand; PAM type: NNNNGHTT; PAM sequence: GAAAGATT
gcgctgaatggtaaatgtga

SEQ ID NO: 13298 - DNA, 20 bp, Artificial Sequence
  Description of Artificial Sequence: Synthetic oligonucleotide
  Target: ATXN2; (-) strand; PAM type: NNNNGHTT; PAM sequence: ATCAGCTT
gcagtggaatatgattgtct

SEQ ID NO: 13299 - DNA, 20 bp, Artificial Sequence
  Description of Artificial Sequence: Synthetic oligonucleotide
  Target: ATXN2; (-) strand; PAM type: NNNNGHTT; PAM sequence: ATATGATT
ttcagttttaaagcagtgga

SEQ ID NO: 13300 - DNA, 20 bp, Artificial Sequence
  Description of Artificial Sequence: Synthetic oligonucleotide
  Target: ATXN2; (-) strand; PAM type: NNNNGHTT; PAM sequence: TTCAGTTT
ttattgtatttttaaagaaa

SEQ ID NO: 13301 - DNA, 20 bp, Artificial Sequence
  Description of Artificial Sequence: Synthetic oligonucleotide
  Target: ATXN2; (-) strand; PAM type: NNNNGHTT; PAM sequence: TGCAGTTT
acttgtaatgatttaagaaa

SEQ ID NO: 13302 - DNA, 20 bp, Artificial Sequence
  Description of Artificial Sequence: Synthetic oligonucleotide
  Target: ATXN2; (-) strand; PAM type: NNNNGHTT; PAM sequence: TAATGATT
aaggtggccctcctcacttg

SEQ ID NO: 13303 - DNA, 20 bp, Artificial Sequence
  Description of Artificial Sequence: Synthetic oligonucleotide
  Target: ATXN2; (-) strand; PAM type: NNNNGHTT; PAM sequence: AATAGTTT
caaactgggaaaagtagaaa

SEQ ID NO: 13304 - DNA, 20 bp, Artificial Sequence
  Description of Artificial Sequence: Synthetic oligonucleotide
  Target: ATXN2; (-) strand; PAM type: NNNNGHTT; PAM sequence: TCCAGCTT
ccgagattgtgccacatcac

SEQ ID NO: 13305 - DNA, 20 bp, Artificial Sequence
  Description of Artificial Sequence: Synthetic oligonucleotide
  Target: ATXN2; (-) strand; PAM type: NNNNGHTT; PAM sequence: CCGAGATT
gaagtggaggttgcagtgag

SEQ ID NO: 13306 - DNA, 20 bp, Artificial Sequence
  Description of Artificial Sequence: Synthetic oligonucleotide
  Target: ATXN2; (-) strand; PAM type: NNNNGHTT; PAM sequence: AATTGCTT
tcaggaggctaaggcaggag

SEQ ID NO: 13307 - DNA, 20 bp, Artificial Sequence
  Description of Artificial Sequence: Synthetic oligonucleotide
  Target: ATXN2; (-) strand; PAM type: NNNNGHTT; PAM sequence: AGGAGTTT
cgggtggatcacttgaggtc

SEQ ID NO: 13308 - DNA, 20 bp, Artificial Sequence
  Description of Artificial Sequence: Synthetic oligonucleotide
  Target: ATXN2; (-) strand; PAM type: NNNNGHTT; PAM sequence: TCACGCTT
atttaggccgggtgtggtgc

SEQ ID NO: 13309 - DNA, 20 bp, Artificial Sequence
  Description of Artificial Sequence: Synthetic oligonucleotide
  Target: ATXN2; (-) strand; PAM type: NNNNGHTT; PAM sequence: TAAAGATT
acctttgattataaagagat

SEQ ID NO: 13310 - DNA, 20 bp, Artificial Sequence
  Description of Artificial Sequence: Synthetic oligonucleotide
  Target: ATXN2; (-) strand; PAM type: NNNNGHTT; PAM sequence: AAGAGATT
gatcgatacctttgattata

SEQ ID NO: 13311 - DNA, 20 bp, Artificial Sequence
  Description of Artificial Sequence: Synthetic oligonucleotide
  Target: ATXN2; (-) strand; PAM type: NNNNGHTT; PAM sequence: CTTTGATT
atgaagtaaaagatcgatac

SEQ ID NO: 13312 - DNA, 20 bp, Artificial Sequence
  Description of Artificial Sequence: Synthetic oligonucleotide
  Target: ATXN2; (-) strand; PAM type: NNNNGHTT; PAM sequence: ATTTGTTT
acactggagcaaatctgtga

SEQ ID NO: 13313 - DNA, 20 bp, Artificial Sequence
  Description of Artificial Sequence: Synthetic oligonucleotide
  Target: ATXN2; (-) strand; PAM type: NNNNGHTT; PAM sequence: CTGTGATT
caaatagattaatgagaaaa

SEQ ID NO: 13314 - DNA, 20 bp, Artificial Sequence
  Description of Artificial Sequence: Synthetic oligonucleotide
  Target: ATXN2; (-) strand; PAM type: NNNNGHTT; PAM sequence: AATAGATT
cacactgataaataaaacca

SEQ ID NO: 13315 - DNA, 20 bp, Artificial Sequence
  Description of Artificial Sequence: Synthetic oligonucleotide
  Target: ATXN2; (-) strand; PAM type: NNNNGHTT; PAM sequence: AAATGATT
ggaaaggtggattattcagt

SEQ ID NO: 13316 - DNA, 20 bp, Artificial Sequence
  Description of Artificial Sequence: Synthetic oligonucleotide
  Target: ATXN2; (-) strand; PAM type: NNNNGHTT; PAM sequence: GGTGGATT
cactttaattctggaggaaa

SEQ ID NO: 13317 - DNA, 20 bp, Artificial Sequence
  Description of Artificial Sequence: Synthetic oligonucleotide
  Target: ATXN2; (-) strand; PAM type: NNNNGHTT; PAM sequence: CTCTGTTT
cctgggcaacaagagtaaaa

SEQ ID NO: 13318 - DNA, 20 bp, Artificial Sequence
  Description of Artificial Sequence: Synthetic oligonucleotide
  Target: ATXN2; (-) strand; PAM type: NNNNGHTT; PAM sequence: AATCGCTT
tcgggaggctgaggcaggag

SEQ ID NO: 13319 - DNA, 20 bp, Artificial Sequence
  Description of Artificial Sequence: Synthetic oligonucleotide
  Target: ATXN2; (-) strand; PAM type: NNNNGHTT; PAM sequence: ATTAGATT
acaaaatgattctaaagctt

SEQ ID NO: 13320 - DNA, 20 bp, Artificial Sequence
  Description of Artificial Sequence: Synthetic oligonucleotide
  Target: ATXN2; (-) strand; PAM type: NNNNGHTT; PAM sequence: TAAAGCTT
agaaattgacaaaatgattc

SEQ ID NO: 13321 - DNA, 20 bp, Artificial Sequence
  Description of Artificial Sequence: Synthetic oligonucleotide
  Target: ATXN2; (-) strand; PAM type: NNNNGHTT; PAM sequence: AAATGATT
cgtttttgtagaaattgaca

SEQ ID NO: 13322 - DNA, 20 bp, Artificial Sequence
  Description of Artificial Sequence: Synthetic oligonucleotide
  Target: ATXN2; (-) strand; PAM type: NNNNGHTT; PAM sequence: ATCCGTTT
tttataatatatatatatat

SEQ ID NO: 13323 - DNA, 20 bp, Artificial Sequence
  Description of Artificial Sequence: Synthetic oligonucleotide
  Target: ATXN2; (-) strand; PAM type: NNNNGHTT; PAM sequence: CTGAGATT
taggtggaggttgcagtgag

SEQ ID NO: 13324 - DNA, 20 bp, Artificial Sequence
  Description of Artificial Sequence: Synthetic oligonucleotide
  Target: ATXN2; (-) strand; PAM type: NNNNGHTT; PAM sequence: GGGAGTTT
tgggccgatcacttgaggac

SEQ ID NO: 13325 - DNA, 20 bp, Artificial Sequence
  Description of Artificial Sequence: Synthetic oligonucleotide
  Target: ATXN2; (-) strand; PAM type: NNNNGHTT; PAM sequence: TTCAGTTT
aaatctctaaagataatata

SEQ ID NO: 13326 - DNA, 20 bp, Artificial Sequence
  Description of Artificial Sequence: Synthetic oligonucleotide
  Target: ATXN2; (-) strand; PAM type: NNNNGHTT; PAM sequence: AGTAGATT
acagctgaaggagacataaa

SEQ ID NO: 13327 - DNA, 20 bp, Artificial Sequence
  Description of Artificial Sequence: Synthetic oligonucleotide
  Target: ATXN2; (-) strand; PAM type: NNNNGHTT; PAM sequence: TGAAGATT
cataggacatggggataaat

SEQ ID NO: 13328 - DNA, 20 bp, Artificial Sequence
  Description of Artificial Sequence: Synthetic oligonucleotide
  Target: ATXN2; (-) strand; PAM type: NNNNGHTT; PAM sequence: CGGAGTTT
aatcgcttgaatccaggaga

SEQ ID NO: 13329 - DNA, 20 bp, Artificial Sequence
  Description of Artificial Sequence: Synthetic oligonucleotide
  Target: ATXN2; (-) strand; PAM type: NNNNGHTT; PAM sequence: AATCGCTT
ttgggaggctgaggcaggag

SEQ ID NO: 13330 - DNA, 20 bp, Artificial Sequence
  Description of Artificial Sequence: Synthetic oligonucleotide
  Target: ATXN2; (-) strand; PAM type: NNNNGHTT; PAM sequence: GGTTGATT
tgtggtactagtaagagtaa

SEQ ID NO: 13331 - DNA, 20 bp, Artificial Sequence
  Description of Artificial Sequence: Synthetic oligonucleotide
  Target: ATXN2; (-) strand; PAM type: NNNNGHTT; PAM sequence: TCATGTTT
tatagaaattctctacccta

SEQ ID NO: 13332 - DNA, 20 bp, Artificial Sequence
  Description of Artificial Sequence: Synthetic oligonucleotide
  Target: ATXN2; (-) strand; PAM type: NNNNGHTT; PAM sequence: ACATGTTT
atcttccatttattaaagtt

SEQ ID NO: 13333 - DNA, 20 bp, Artificial Sequence
  Description of Artificial Sequence: Synthetic oligonucleotide
  Target: ATXN2; (-) strand; PAM type: NNNNGHTT; PAM sequence: ACATGTTT
gtacacagtagaaaagcatt

SEQ ID NO: 13334 - DNA, 20 bp, Artificial Sequence
  Description of Artificial Sequence: Synthetic oligonucleotide
  Target: ATXN2; (-) strand; PAM type: NNNNGHTT; PAM sequence: TTGAGATT
tggaggcagtacagagatta

SEQ ID NO: 13335 - DNA, 20 bp, Artificial Sequence
  Description of Artificial Sequence: Synthetic oligonucleotide
  Target: ATXN2; (-) strand; PAM type: NNNNGHTT; PAM sequence: CAGAGATT
aggccagtatggaggcagta

SEQ ID NO: 13336 - DNA, 20 bp, Artificial Sequence
  Description of Artificial Sequence: Synthetic oligonucleotide
  Target: ATXN2; (-) strand; PAM type: NNNNGHTT; PAM sequence: TGTGGTTT
gtttacggcctcaactttgc

SEQ ID NO: 13337 - DNA, 20 bp, Artificial Sequence
  Description of Artificial Sequence: Synthetic oligonucleotide
  Target: ATXN2; (-) strand; PAM type: NNNNGHTT; PAM sequence: AGCTGTTT
gaacggcgtgacattagaaa

SEQ ID NO: 13338 - DNA, 20 bp, Artificial Sequence
  Description of Artificial Sequence: Synthetic oligonucleotide
  Target: ATXN2; (-) strand; PAM type: NNNNGHTT; PAM sequence: GATTGTTT
gtgagaaataaaattctaca

SEQ ID NO: 13339 - DNA, 20 bp, Artificial Sequence
  Description of Artificial Sequence: Synthetic oligonucleotide
  Target: ATXN2; (-) strand; PAM type: NNNNGHTT; PAM sequence: TACAGATT
aacagtgagaaataaaattc

SEQ ID NO: 13340 - DNA, 20 bp, Artificial Sequence
  Description of Artificial Sequence: Synthetic oligonucleotide
  Target: ATXN2; (-) strand; PAM type: NNNNGHTT; PAM sequence: TGTAGATT
aataaaaaataaaagaattg

SEQ ID NO: 13341 - DNA, 20 bp, Artificial Sequence
  Description of Artificial Sequence: Synthetic oligonucleotide
  Target: ATXN2; (-) strand; PAM type: NNNNGHTT; PAM sequence: TCTAGATT
gtcagcgatgcaaataattg

SEQ ID NO: 13342 - DNA, 20 bp, Artificial Sequence
  Description of Artificial Sequence: Synthetic oligonucleotide
  Target: ATXN2; (-) strand; PAM type: NNNNGHTT; PAM sequence: CACAGTTT
taatgtaatttcatggtgtt

SEQ ID NO: 13343 - DNA, 20 bp, Artificial Sequence
  Description of Artificial Sequence: Synthetic oligonucleotide
  Target: ATXN2; (-) strand; PAM type: NNNNGHTT; PAM sequence: ATGGGATT
taccttggccttcaaaagtg

SEQ ID NO: 13344 - DNA, 20 bp, Artificial Sequence
  Description of Artificial Sequence: Synthetic oligonucleotide
  Target: ATXN2; (-) strand; PAM type: NNNNGHTT; PAM sequence: CTATGTTT
tttatagacactggttctca

SEQ ID NO: 13345 - DNA, 20 bp, Artificial Sequence
  Description of Artificial Sequence: Synthetic oligonucleotide
  Target: ATXN2; (-) strand; PAM type: NNNNGHTT; PAM sequence: CATGGCTT
ctggaatgcagtggtgtgat

SEQ ID NO: 13346 - DNA, 20 bp, Artificial Sequence
  Description of Artificial Sequence: Synthetic oligonucleotide
  Target: ATXN2; (-) strand; PAM type: NNNNGHTT; PAM sequence: TGTAGATT
cctagaaaaatttacacaca

SEQ ID NO: 13347 - DNA, 20 bp, Artificial Sequence
  Description of Artificial Sequence: Synthetic oligonucleotide
  Target: ATXN2; (-) strand; PAM type: NNNNGHTT; PAM sequence: CTGTGCTT
gctctgggatgtgttccttg

SEQ ID NO: 13348 - DNA, 20 bp, Artificial Sequence
  Description of Artificial Sequence: Synthetic oligonucleotide
  Target: ATXN2; (-) strand; PAM type: NNNNGHTT; PAM sequence: ATGTGTTT
atagtacaggctcaatataa

SEQ ID NO: 13349 - DNA, 20 bp, Artificial Sequence
  Description of Artificial Sequence: Synthetic oligonucleotide
  Target: ATXN2; (-) strand; PAM type: NNNNGHTT; PAM sequence: TAGTGCTT
tttattctcatggtctagta

SEQ ID NO: 13350 - DNA, 20 bp, Artificial Sequence
  Description of Artificial Sequence: Synthetic oligonucleotide
  Target: ATXN2; (-) strand; PAM type: NNNNGHTT; PAM sequence: TACAGTTT
tatatgcttgtctcccctgt

SEQ ID NO: 13351 - DNA, 20 bp, Artificial Sequence
  Description of Artificial Sequence: Synthetic oligonucleotide
  Target: ATXN2; (-) strand; PAM type: NNNNGHTT; PAM sequence: ATATGCTT
taccatgttgtattaaaatt

SEQ ID NO: 13352 - DNA, 20 bp, Artificial Sequence
  Description of Artificial Sequence: Synthetic oligonucleotide
  Target: ATXN2; (-) strand; PAM type: NNNNGHTT; PAM sequence: GTTTGTTT
cttagatgtgtgtccccagt

SEQ ID NO: 13353 - DNA, 20 bp, Artificial Sequence
  Description of Artificial Sequence: Synthetic oligonucleotide
  Target: ATXN2; (-) strand; PAM type: NNNNGHTT; PAM sequence: CAGTGTTT
accccttagatgtgtgtccc

SEQ ID NO: 13354 - DNA, 20 bp, Artificial Sequence
  Description of Artificial Sequence: Synthetic oligonucleotide
  Target: ATXN2; (-) strand; PAM type: NNNNGHTT; PAM sequence: CTGGGCTT
attccttccctgcctcattc

SEQ ID NO: 13355 - DNA, 20 bp, Artificial Sequence
  Description of Artificial Sequence: Synthetic oligonucleotide
  Target: ATXN2; (-) strand; PAM type: NNNNGHTT; PAM sequence: TTATGTTT
aatttcctcttctgtatttt

SEQ ID NO: 13356 - DNA, 20 bp, Artificial Sequence
  Description of Artificial Sequence: Synthetic oligonucleotide
  Target: ATXN2; (-) strand; PAM type: NNNNGHTT; PAM sequence: GTTGGTTT
ctttattgctgcacttgaat

SEQ ID NO: 13357 - DNA, 20 bp, Artificial Sequence
  Description of Artificial Sequence: Synthetic oligonucleotide
  Target: ATXN2; (-) strand; PAM type: NNNNGHTT; PAM sequence: CTACGATT
agccattatcctgcctaagg

SEQ ID NO: 13358 - DNA, 20 bp, Artificial Sequence
  Description of Artificial Sequence: Synthetic oligonucleotide
  Target: ATXN2; (-) strand; PAM type: NNNNGHTT; PAM sequence: AAAGGATT
gagccaccgcactgggccca

SEQ ID NO: 13359 - DNA, 20 bp, Artificial Sequence
  Description of Artificial Sequence: Synthetic oligonucleotide
  Target: ATXN2; (-) strand; PAM type: NNNNGHTT; PAM sequence: CTGGGATT
tgcctcggcctcccaaagtg

SEQ ID NO: 13360 - DNA, 20 bp, Artificial Sequence
  Description of Artificial Sequence: Synthetic oligonucleotide
  Target: ATXN2; (-) strand; PAM type: NNNNGHTT; PAM sequence: TGGGGTTT
ttttgtatttttagtagaga

SEQ ID NO: 13361 - DNA, 20 bp, Artificial Sequence
  Description of Artificial Sequence: Synthetic oligonucleotide
  Target: ATXN2; (-) strand; PAM type: NNNNGHTT; PAM sequence: TTTTGTTT
tcttttttgttttgttttgt

SEQ ID NO: 13362 - DNA, 20 bp, Artificial Sequence
  Description of Artificial Sequence: Synthetic oligonucleotide
  Target: ATXN2; (-) strand; PAM type: NNNNGHTT; PAM sequence: TTTTGTTT
aaggattcttttttgttttg

SEQ ID NO: 13363 - DNA, 20 bp, Artificial Sequence
  Description of Artificial Sequence: Synthetic oligonucleotide
  Target: ATXN2; (-) strand; PAM type: NNNNGHTT; PAM sequence: TTTTGTTT
ctaaaaaggattcttttttg

SEQ ID NO: 13364 - DNA, 20 bp, Artificial Sequence
  Description of Artificial Sequence: Synthetic oligonucleotide
  Target: ATXN2; (-) strand; PAM type: NNNNGHTT; PAM sequence: TTTTGTTT
tcatcctaaaaaggattctt

SEQ ID NO: 13365 - DNA, 20 bp, Artificial Sequence
  Description of Artificial Sequence: Synthetic oligonucleotide
  Target: ATXN2; (-) strand; PAM type: NNNNGHTT; PAM sequence: AAAGGATT
tcacttcctgctcatcctaa

SEQ ID NO: 13366 - DNA, 20 bp, Artificial Sequence
  Description of Artificial Sequence: Synthetic oligonucleotide
  Target: ATXN2; (-) strand; PAM type: NNNNGHTT; PAM sequence: CTCTGTTT
cttgctcttttataccactt

SEQ ID NO: 13367 - DNA, 20 bp, Artificial Sequence
  Description of Artificial Sequence: Synthetic oligonucleotide
  Target: ATXN2; (-) strand; PAM type: NNNNGHTT; PAM sequence: CTGGGATT
tgcctcagcctcccaaagtg

SEQ ID NO: 13368 - DNA, 20 bp, Artificial Sequence
  Description of Artificial Sequence: Synthetic oligonucleotide
  Target: ATXN2; (-) strand; PAM type: NNNNGHTT; PAM sequence: TGGGGTTT
ttttgtatttttagtagaga

SEQ ID NO: 13369 - DNA, 20 bp, Artificial Sequence
  Description of Artificial Sequence: Synthetic oligonucleotide
  Target: ATXN2; (-) strand; PAM type: NNNNGHTT; PAM sequence: GCGTGATT
acccaggctgaagtgcagtg

SEQ ID NO: 13370 - DNA, 20 bp, Artificial Sequence
  Description of Artificial Sequence: Synthetic oligonucleotide
  Target: ATXN2; (-) strand; PAM type: NNNNGHTT; PAM sequence: AGAGGATT
ttttcctctggttttagtag

SEQ ID NO: 13371 - DNA, 20 bp, Artificial Sequence
  Description of Artificial Sequence: Synthetic oligonucleotide
  Target: ATXN2; (-) strand; PAM type: NNNNGHTT; PAM sequence: TCTGGTTT
ggcctcattattatttttcc

SEQ ID NO: 13372 - DNA, 20 bp, Artificial Sequence
  Description of Artificial Sequence: Synthetic oligonucleotide
  Target: ATXN2; (-) strand; PAM type: NNNNGHTT; PAM sequence: CTGGGATT
caccttggcctcccaaagtc

SEQ ID NO: 13373 - DNA, 20 bp, Artificial Sequence
  Description of Artificial Sequence: Synthetic oligonucleotide
  Target: ATXN2; (-) strand; PAM type: NNNNGHTT; PAM sequence: TGGGGTTT
atttatattttttgtagaga

SEQ ID NO: 13374 - DNA, 20 bp, Artificial Sequence
  Description of Artificial Sequence: Synthetic oligonucleotide
  Target: ATXN2; (-) strand; PAM type: NNNNGHTT; PAM sequence: AACAGATT
ctgaagaattacttttgctt

SEQ ID NO: 13375 - DNA, 20 bp, Artificial Sequence
  Description of Artificial Sequence: Synthetic oligonucleotide
  Target: ATXN2; (-) strand; PAM type: NNNNGHTT; PAM sequence: TTTTGCTT
gatttagtctgaagaattac

SEQ ID NO: 13376 - DNA, 20 bp, Artificial Sequence
  Description of Artificial Sequence: Synthetic oligonucleotide
  Target: ATXN2; (-) strand; PAM type: NNNNGHTT; PAM sequence: ATTGGATT
tcttattcatgaccattcta

SEQ ID NO: 13377 - DNA, 20 bp, Artificial Sequence
  Description of Artificial Sequence: Synthetic oligonucleotide
  Target: ATXN2; (-) strand; PAM type: NNNNGHTT; PAM sequence: CTGCGATT
ttctaatactgtataatatc

SEQ ID NO: 13378 - DNA, 20 bp, Artificial Sequence
  Description of Artificial Sequence: Synthetic oligonucleotide
  Target: ATXN2; (-) strand; PAM type: NNNNGHTT; PAM sequence: CTTTGATT
aacttacaactaattgcatg

SEQ ID NO: 13379 - DNA, 20 bp, Artificial Sequence
  Description of Artificial Sequence: Synthetic oligonucleotide
  Target: ATXN2; (-) strand; PAM type: NNNNGHTT; PAM sequence: GCATGCTT
ctttaaacttacaactaatt

SEQ ID NO: 13380 - DNA, 20 bp, Artificial Sequence
  Description of Artificial Sequence: Synthetic oligonucleotide
  Target: ATXN2; (-) strand; PAM type: NNNNGHTT; PAM sequence: ACTGGCTT
tgatcaaaaatacatgctat

SEQ ID NO: 13381 - DNA, 20 bp, Artificial Sequence
  Description of Artificial Sequence: Synthetic oligonucleotide
  Target: ATXN2; (-) strand; PAM type: NNNNGHTT; PAM sequence: TAGGGCTT
atcatattttccgctgcatt

SEQ ID NO: 13382 - DNA, 20 bp, Artificial Sequence
  Description of Artificial Sequence: Synthetic oligonucleotide
  Target: ATXN2; (-) strand; PAM type: NNNNGHTT; PAM sequence: AAAAGTTT
atttgactgtctctttacag

SEQ ID NO: 13383 - DNA, 20 bp, Artificial Sequence
  Description of Artificial Sequence: Synthetic oligonucleotide
  Target: ATXN2; (-) strand; PAM type: NNNNGHTT; PAM sequence: GGCTGTTT
tgcgtttgtgcattgtctat

SEQ ID NO: 13384 - DNA, 20 bp, Artificial Sequence
  Description of Artificial Sequence: Synthetic oligonucleotide
  Target: ATXN2; (-) strand; PAM type: NNNNGHTT; PAM sequence: ATGCGTTT
attgtagcatagctatgccc

SEQ ID NO: 13385 - DNA, 20 bp, Artificial Sequence
  Description of Artificial Sequence: Synthetic oligonucleotide
  Target: ATXN2; (-) strand; PAM type: NNNNGHTT; PAM sequence: TACTGCTT
ttgttcctcatactttttcc

SEQ ID NO: 13386 - DNA, 20 bp, Artificial Sequence
  Description of Artificial Sequence: Synthetic oligonucleotide
  Target: ATXN2; (-) strand; PAM type: NNNNGHTT; PAM sequence: TTCTGTTT
caactcaactatggctttac

SEQ ID NO: 13387 - DNA, 20 bp, Artificial Sequence
  Description of Artificial Sequence: Synthetic oligonucleotide
  Target: ATXN2; (-) strand; PAM type: NNNNGHTT; PAM sequence: TATGGCTT
cctctttactccaactcaac

SEQ ID NO: 13388 - DNA, 20 bp, Artificial Sequence
  Description of Artificial Sequence: Synthetic oligonucleotide
  Target: ATXN2; (-) strand; PAM type: NNNNGHTT; PAM sequence: TCATGTTT
tcttcctgttgcgccattat

SEQ ID NO: 13389 - DNA, 20 bp, Artificial Sequence
  Description of Artificial Sequence: Synthetic oligonucleotide
  Target: ATXN2; (-) strand; PAM type: NNNNGHTT; PAM sequence: ACTTGATT
gttatctctgcttgtttttt

SEQ ID NO: 13390 - DNA, 20 bp, Artificial Sequence
  Description of Artificial Sequence: Synthetic oligonucleotide
  Target: ATXN2; (-) strand; PAM type: NNNNGHTT; PAM sequence: GCTTGTTT
ggaattgtcctgttatctct

SEQ ID NO: 13391 - DNA, 20 bp, Artificial Sequence
  Description of Artificial Sequence: Synthetic oligonucleotide
  Target: ATXN2; (-) strand; PAM type: NNNNGHTT; PAM sequence: CTCTGCTT
ctttggaattgtcctgttat

SEQ ID NO: 13392 - DNA, 20 bp, Artificial Sequence
  Description of Artificial Sequence: Synthetic oligonucleotide
  Target: ATXN2; (-) strand; PAM type: NNNNGHTT; PAM sequence: AGTCGCTT
taaaacttcttagggccttc

SEQ ID NO: 13393 - DNA, 20 bp, Artificial Sequence
  Description of Artificial Sequence: Synthetic oligonucleotide
  Target: ATXN2; (-) strand; PAM type: NNNNGHTT; PAM sequence: ATCAGTTT
catcagattatcattggaaa

SEQ ID NO: 13394 - DNA, 20 bp, Artificial Sequence
  Description of Artificial Sequence: Synthetic oligonucleotide
  Target: ATXN2; (-) strand; PAM type: NNNNGHTT; PAM sequence: ATCAGATT
attcataattagaagagacc

SEQ ID NO: 13395 - DNA, 20 bp, Artificial Sequence
  Description of Artificial Sequence: Synthetic oligonucleotide
  Target: ATXN2; (-) strand; PAM type: NNNNGHTT; PAM sequence: GTTTGATT
tgaatgttatacatgttcca

SEQ ID NO: 13396 - DNA, 20 bp, Artificial Sequence
  Description of Artificial Sequence: Synthetic oligonucleotide
  Target: ATXN2; (-) strand; PAM type: NNNNGHTT; PAM sequence: TCCAGTTT
ctcttgaatgttatacatgt

SEQ ID NO: 13397 - DNA, 20 bp, Artificial Sequence
  Description of Artificial Sequence: Synthetic oligonucleotide
  Target: ATXN2; (-) strand; PAM type: NNNNGHTT; PAM sequence: ATAAGTTT
gacttcttacggtacagtga

SEQ ID NO: 13398 - DNA, 20 bp, Artificial Sequence
  Description of Artificial Sequence: Synthetic oligonucleotide
  Target: ATXN2; (-) strand; PAM type: NNNNGHTT; PAM sequence: AAAGGCTT
tgcatatatgcaaatgaata

SEQ ID NO: 13399 - DNA, 20 bp, Artificial Sequence
  Description of Artificial Sequence: Synthetic oligonucleotide
  Target: ATXN2; (-) strand; PAM type: NNNNGHTT; PAM sequence: TAAAGTTT
gctaacatcattgatttcaa

SEQ ID NO: 13400 - DNA, 20 bp, Artificial Sequence
  Description of Artificial Sequence: Synthetic oligonucleotide
  Target: ATXN2; (-) strand; PAM type: NNNNGHTT; PAM sequence: CATTGATT
taagttcttgatgctaacat

SEQ ID NO: 13401 - DNA, 20 bp, Artificial Sequence
  Description of Artificial Sequence: Synthetic oligonucleotide
  Target: ATXN2; (-) strand; PAM type: NNNNGHTT; PAM sequence: CTAGGATT
caccttggcctcccaaagtg

SEQ ID NO: 13402 - DNA, 20 bp, Artificial Sequence
  Description of Artificial Sequence: Synthetic oligonucleotide
  Target: ATXN2; (-) strand; PAM type: NNNNGHTT; PAM sequence: CGGGGTTT
ttttatatttttagtagaga

SEQ ID NO: 13403 - DNA, 20 bp, Artificial Sequence
  Description of Artificial Sequence: Synthetic oligonucleotide
  Target: ATXN2; (-) strand; PAM type: NNNNGHTT; PAM sequence: CTGGGATT
tgcctaagcctcccgaggag

SEQ ID NO: 13404 - DNA, 20 bp, Artificial Sequence
  Description of Artificial Sequence: Synthetic oligonucleotide
  Target: ATXN2; (-) strand; PAM type: NNNNGHTT; PAM sequence: CTCTGCTT
tgatctcagctcactgcaac

SEQ ID NO: 13405 - DNA, 20 bp, Artificial Sequence
  Description of Artificial Sequence: Synthetic oligonucleotide
  Target: ATXN2; (-) strand; PAM type: NNNNGHTT; PAM sequence: CTGGGTTT
ctttgtatttttagtagaga

SEQ ID NO: 13406 - DNA, 20 bp, Artificial Sequence
  Description of Artificial Sequence: Synthetic oligonucleotide
  Target: ATXN2; (-) strand; PAM type: NNNNGHTT; PAM sequence: CTGGGATT
tatctcagcctcccgagtag

SEQ ID NO: 13407 - DNA, 20 bp, Artificial Sequence
  Description of Artificial Sequence: Synthetic oligonucleotide
  Target: ATXN2; (-) strand; PAM type: NNNNGHTT; PAM sequence: AAGCGATT
aacctccgccttctgggttc

SEQ ID NO: 13408 - DNA, 20 bp, Artificial Sequence
  Description of Artificial Sequence: Synthetic oligonucleotide
  Target: ATXN2; (-) strand; PAM type: NNNNGHTT; PAM sequence: CGGAGTTT
cttttttgttttccttggga

SEQ ID NO: 13409 - DNA, 20 bp, Artificial Sequence
  Description of Artificial Sequence: Synthetic oligonucleotide
  Target: ATXN2; (-) strand; PAM type: NNNNGHTT; PAM sequence: TTTTGTTT
ggggaaaccttttttttctt

SEQ ID NO: 13410 - DNA, 20 bp, Artificial Sequence
  Description of Artificial Sequence: Synthetic oligonucleotide
  Target: ATXN2; (-) strand; PAM type: NNNNGHTT; PAM sequence: TTTGGCTT
ttttttttttttttttaatc

SEQ ID NO: 13411 - DNA, 20 bp, Artificial Sequence
  Description of Artificial Sequence: Synthetic oligonucleotide
  Target: ATXN2; (-) strand; PAM type: NNNNGHTT; PAM sequence: TCAAGTTT
gatgcagactattatgttgt

SEQ ID NO: 13412 - DNA, 20 bp, Artificial Sequence
  Description of Artificial Sequence: Synthetic oligonucleotide
  Target: ATXN2; (-) strand; PAM type: NNNNGHTT; PAM sequence: AAAGGATT
cagtaagttccatggttgtt

SEQ ID NO: 13413 - DNA, 20 bp, Artificial Sequence
  Description of Artificial Sequence: Synthetic oligonucleotide
  Target: ATXN2; (-) strand; PAM type: NNNNGHTT; PAM sequence: CTGGGATT
cacctgggcctcccaaattg

SEQ ID NO: 13414 - DNA, 20 bp, Artificial Sequence
  Description of Artificial Sequence: Synthetic oligonucleotide
  Target: ATXN2; (-) strand; PAM type: NNNNGHTT; PAM sequence: GGCTGATT
gggttttaccatgttggcca

SEQ ID NO: 13415 - DNA, 20 bp, Artificial Sequence
  Description of Artificial Sequence: Synthetic oligonucleotide
  Target: ATXN2; (-) strand; PAM type: NNNNGHTT; PAM sequence: TGGGGTTT
ttttgtatttttagtagaga

SEQ ID NO: 13416 - DNA, 20 bp, Artificial Sequence
  Description of Artificial Sequence: Synthetic oligonucleotide
  Target: ATXN2; (-) strand; PAM type: NNNNGHTT; PAM sequence: CTGGGATT
tgcttcagcctccctaataa

SEQ ID NO: 13417 - DNA, 20 bp, Artificial Sequence
  Description of Artificial Sequence: Synthetic oligonucleotide
  Target: ATXN2; (-) strand; PAM type: NNNNGHTT; PAM sequence: TCTTGCTT
ctcctgggttcaagcagtta

SEQ ID NO: 13418 - DNA, 20 bp, Artificial Sequence
  Description of Artificial Sequence: Synthetic oligonucleotide
  Target: ATXN2; (-) strand; PAM type: NNNNGHTT; PAM sequence: GTTTGTTT
agtcgaattaatgtttgttt

SEQ ID NO: 13419 - DNA, 20 bp, Artificial Sequence
  Description of Artificial Sequence: Synthetic oligonucleotide
  Target: ATXN2; (-) strand; PAM type: NNNNGHTT; PAM sequence: GTTTGTTT
cataagtcgaattaatgttt

SEQ ID NO: 13420 - DNA, 20 bp, Artificial Sequence
  Description of Artificial Sequence: Synthetic oligonucleotide
  Target: ATXN2; (-) strand; PAM type: NNNNGHTT; PAM sequence: GTTTGTTT
ttgtcataagtcgaattaat

SEQ ID NO: 13421 - DNA, 20 bp, Artificial Sequence
  Description of Artificial Sequence: Synthetic oligonucleotide
  Target: ATXN2; (-) strand; PAM type: NNNNGHTT; PAM sequence: TAATGTTT
tcagttgtcataagtcgaat

SEQ ID NO: 13422 - DNA, 20 bp, Artificial Sequence
  Description of Artificial Sequence: Synthetic oligonucleotide
  Target: ATXN2; (-) strand; PAM type: NNNNGHTT; PAM sequence: TGTTGTTT
ataaattatgtggtttggtt

SEQ ID NO: 13423 - DNA, 20 bp, Artificial Sequence
  Description of Artificial Sequence: Synthetic oligonucleotide
  Target: ATXN2; (-) strand; PAM type: NNNNGHTT; PAM sequence: TTTGGTTT
cagtgacataaattatgtgg

SEQ ID NO: 13424 - DNA, 20 bp, Artificial Sequence
  Description of Artificial Sequence: Synthetic oligonucleotide
  Target: ATXN2; (-) strand; PAM type: NNNNGHTT; PAM sequence: TGTGGTTT
tactgcagtgacataaatta

SEQ ID NO: 13425 - DNA, 20 bp, Artificial Sequence
  Description of Artificial Sequence: Synthetic oligonucleotide
  Target: ATXN2; (-) strand; PAM type: NNNNGHTT; PAM sequence: TCTAGCTT
tgctaaagtgaggacacaaa

SEQ ID NO: 13426 - DNA, 20 bp, Artificial Sequence
  Description of Artificial Sequence: Synthetic oligonucleotide
  Target: ATXN2; (-) strand; PAM type: NNNNGHTT; PAM sequence: AGTTGTTT
ttgttcacataatcatcaca

SEQ ID NO: 13427 - DNA, 20 bp, Artificial Sequence
  Description of Artificial Sequence: Synthetic oligonucleotide
  Target: ATXN2; (-) strand; PAM type: NNNNGHTT; PAM sequence: AACAGATT
tatgtgccagactctgtgct

SEQ ID NO: 13428 - DNA, 20 bp, Artificial Sequence
  Description of Artificial Sequence: Synthetic oligonucleotide
  Target: ATXN2; (-) strand; PAM type: NNNNGHTT; PAM sequence: CTGAGCTT
gatatgaattgatttcattt

SEQ ID NO: 13429 - DNA, 20 bp, Artificial Sequence
  Description of Artificial Sequence: Synthetic oligonucleotide
  Target: ATXN2; (-) strand; PAM type: NNNNGHTT; PAM sequence: AATTGATT
gtattttcctaaaagatatg

SEQ ID NO: 13430 - DNA, 20 bp, Artificial Sequence
  Description of Artificial Sequence: Synthetic oligonucleotide
  Target: ATXN2; (-) strand; PAM type: NNNNGHTT; PAM sequence: GAATGATT
tttttataatagaagtggat

SEQ ID NO: 13431 - DNA, 20 bp, Artificial Sequence
  Description of Artificial Sequence: Synthetic oligonucleotide
  Target: ATXN2; (-) strand; PAM type: NNNNGHTT; PAM sequence: GAGTGTTT
acatcttgaatggatagata

SEQ ID NO: 13432 - DNA, 20 bp, Artificial Sequence
  Description of Artificial Sequence: Synthetic oligonucleotide
  Target: ATXN2; (-) strand; PAM type: NNNNGHTT; PAM sequence: TTGTGCTT
caacagaataaaaaaagaat

SEQ ID NO: 13433 - DNA, 20 bp, Artificial Sequence
  Description of Artificial Sequence: Synthetic oligonucleotide
  Target: ATXN2; (-) strand; PAM type: NNNNGHTT; PAM sequence: CAGAGATT
aatcgcttgaacccgggagg

SEQ ID NO: 13434 - DNA, 20 bp, Artificial Sequence
  Description of Artificial Sequence: Synthetic oligonucleotide
  Target: ATXN2; (-) strand; PAM type: NNNNGHTT; PAM sequence: AATCGCTT
gggagaggctgaggcagaag

SEQ ID NO: 13435 - DNA, 20 bp, Artificial Sequence
  Description of Artificial Sequence: Synthetic oligonucleotide
  Target: ATXN2; (-) strand; PAM type: NNNNGHTT; PAM sequence: TTGTGCTT
tgttctgtggccttgagaat

SEQ ID NO: 13436 - DNA, 20 bp, Artificial Sequence
  Description of Artificial Sequence: Synthetic oligonucleotide
  Target: ATXN2; (-) strand; PAM type: NNNNGHTT; PAM sequence: ATGGGTTT
ggacagtcagggtgtgagct

SEQ ID NO: 13437 - DNA, 20 bp, Artificial Sequence
  Description of Artificial Sequence: Synthetic oligonucleotide
  Target: ATXN2; (-) strand; PAM type: NNNNGHTT; PAM sequence: CCTGGTTT
atgttctcacttctagggat

SEQ ID NO: 13438 - DNA, 20 bp, Artificial Sequence
  Description of Artificial Sequence: Synthetic oligonucleotide
  Target: ATXN2; (-) strand; PAM type: NNNNGHTT; PAM sequence: GGGAGTTT
ggttcacgtttagtcacctg

SEQ ID NO: 13439 - DNA, 20 bp, Artificial Sequence
  Description of Artificial Sequence: Synthetic oligonucleotide
  Target: ATXN2; (-) strand; PAM type: NNNNGHTT; PAM sequence: TCACGTTT
aatgcttcttaatgctgggt

SEQ ID NO: 13440 - DNA, 20 bp, Artificial Sequence
  Description of Artificial Sequence: Synthetic oligonucleotide
  Target: ATXN2; (-) strand; PAM type: NNNNGHTT; PAM sequence: CAATGCTT
aaaggaaggtatggtttaat

SEQ ID NO: 13441 - DNA, 20 bp, Artificial Sequence
  Description of Artificial Sequence: Synthetic oligonucleotide
  Target: ATXN2; (-) strand; PAM type: NNNNGHTT; PAM sequence: TATGGTTT
actcccaaagtaaaggaagg

SEQ ID NO: 13442 - DNA, 20 bp, Artificial Sequence
  Description of Artificial Sequence: Synthetic oligonucleotide
  Target: ATXN2; (-) strand; PAM type: NNNNGHTT; PAM sequence: CTCAGATT
tattttttattagagactta

SEQ ID NO: 13443 - DNA, 20 bp, Artificial Sequence
  Description of Artificial Sequence: Synthetic oligonucleotide
  Target: ATXN2; (-) strand; PAM type: NNNNGHTT; PAM sequence: TCTAGATT
ttaaggcatttattactgca

SEQ ID NO: 13444 - DNA, 20 bp, Artificial Sequence
  Description of Artificial Sequence: Synthetic oligonucleotide
  Target: ATXN2; (-) strand; PAM type: NNNNGHTT; PAM sequence: CATGGTTT
tcaccatgttggccaggccg

SEQ ID NO: 13445 - DNA, 20 bp, Artificial Sequence
  Description of Artificial Sequence: Synthetic oligonucleotide
  Target: ATXN2; (-) strand; PAM type: NNNNGHTT; PAM sequence: CTGGGTTT
gtttgtattcttagtacaga

SEQ ID NO: 13446 - DNA, 20 bp, Artificial Sequence
  Description of Artificial Sequence: Synthetic oligonucleotide
  Target: ATXN2; (-) strand; PAM type: NNNNGHTT; PAM sequence: TTTTGTTT
catgccctgctaattttttt

SEQ ID NO: 13447 - DNA, 20 bp, Artificial Sequence
  Description of Artificial Sequence: Synthetic oligonucleotide
  Target: ATXN2; (-) strand; PAM type: NNNNGHTT; PAM sequence: CTGGGATT
tgcctcagcctcccgagtag

SEQ ID NO: 13448 - DNA, 20 bp, Artificial Sequence
  Description of Artificial Sequence: Synthetic oligonucleotide
  Target: ATXN2; (-) strand; PAM type: NNNNGHTT; PAM sequence: AAGCGATT
aacctctgcctcctgggttt

SEQ ID NO: 13449 - DNA, 20 bp, Artificial Sequence
  Description of Artificial Sequence: Synthetic oligonucleotide
  Target: ATXN2; (-) strand; PAM type: NNNNGHTT; PAM sequence: CTGGGTTT
ctcactgcaacctctgcctc

SEQ ID NO: 13450 - DNA, 20 bp, Artificial Sequence
  Description of Artificial Sequence: Synthetic oligonucleotide
  Target: ATXN2; (-) strand; PAM type: NNNNGHTT; PAM sequence: CATGGTTT
attttagaattattaattgg

SEQ ID NO: 13451 - DNA, 20 bp, Artificial Sequence
  Description of Artificial Sequence: Synthetic oligonucleotide
  Target: ATXN2; (-) strand; PAM type: NNNNGHTT; PAM sequence: ATGTGTTT
cctgaaaatagtattaagtc

SEQ ID NO: 13452 - DNA, 20 bp, Artificial Sequence
  Description of Artificial Sequence: Synthetic oligonucleotide
  Target: ATXN2; (-) strand; PAM type: NNNNGHTT; PAM sequence: AGTGGTTT
tatcttatttcaaaacttac

SEQ ID NO: 13453 - DNA, 20 bp, Artificial Sequence
  Description of Artificial Sequence: Synthetic oligonucleotide
  Target: ATXN2; (-) strand; PAM type: NNNNGHTT; PAM sequence: CTGGGATT
tgccttggcctcccagagtg

SEQ ID NO: 13454 - DNA, 20 bp, Artificial Sequence
  Description of Artificial Sequence: Synthetic oligonucleotide
  Target: ATXN2; (-) strand; PAM type: NNNNGHTT; PAM sequence: CGGGGTTT
ttttgtatttttagtagaga

SEQ ID NO: 13455 - DNA, 20 bp, Artificial Sequence
  Description of Artificial Sequence: Synthetic oligonucleotide
  Target: ATXN2; (-) strand; PAM type: NNNNGHTT; PAM sequence: AAGCGATT
aacctctgcctcctgggttc

SEQ ID NO: 13456 - DNA, 20 bp, Artificial Sequence
  Description of Artificial Sequence: Synthetic oligonucleotide
  Target: ATXN2; (-) strand; PAM type: NNNNGHTT; PAM sequence: CGGAGTTT
tttttttttttttttggaga

SEQ ID NO: 13457 - DNA, 20 bp, Artificial Sequence
  Description of Artificial Sequence: Synthetic oligonucleotide
  Target: ATXN2; (-) strand; PAM type: NNNNGHTT; PAM sequence: ATTAGTTT
attttgctatatattacaaa

SEQ ID NO: 13458 - DNA, 20 bp, Artificial Sequence
  Description of Artificial Sequence: Synthetic oligonucleotide
  Target: ATXN2; (-) strand; PAM type: NNNNGHTT; PAM sequence: AGATGTTT
gaagagtgaatattactttg

SEQ ID NO: 13459 - DNA, 20 bp, Artificial Sequence
  Description of Artificial Sequence: Synthetic oligonucleotide
  Target: ATXN2; (-) strand; PAM type: NNNNGHTT; PAM sequence: TTTTGTTT
atttacggtatgcattgtct

SEQ ID NO: 13460 - DNA, 20 bp, Artificial Sequence
  Description of Artificial Sequence: Synthetic oligonucleotide
  Target: ATXN2; (-) strand; PAM type: NNNNGHTT; PAM sequence: TTTTGTTT
gctgctacctttggagttga

SEQ ID NO: 13461 - DNA, 20 bp, Artificial Sequence
  Description of Artificial Sequence: Synthetic oligonucleotide
  Target: ATXN2; (-) strand; PAM type: NNNNGHTT; PAM sequence: AGTTGATT
tttttagctgctacctttgg

SEQ ID NO: 13462 - DNA, 20 bp, Artificial Sequence
  Description of Artificial Sequence: Synthetic oligonucleotide
  Target: ATXN2; (-) strand; PAM type: NNNNGHTT; PAM sequence: CTTTGATT
atcttctcaaatgtccttgt

SEQ ID NO: 13463 - DNA, 20 bp, Artificial Sequence
  Description of Artificial Sequence: Synthetic oligonucleotide
  Target: ATXN2; (-) strand; PAM type: NNNNGHTT; PAM sequence: TTCTGTTT
atgctgatgaaagcacagtg

SEQ ID NO: 13464 - DNA, 20 bp, Artificial Sequence
  Description of Artificial Sequence: Synthetic oligonucleotide
  Target: ATXN2; (-) strand; PAM type: NNNNGHTT; PAM sequence: GCTTGCTT
acttaggagtctttctcttt

SEQ ID NO: 13465 - DNA, 20 bp, Artificial Sequence
  Description of Artificial Sequence: Synthetic oligonucleotide
  Target: ATXN2; (-) strand; PAM type: NNNNGHTT; PAM sequence: CTTTGCTT
ttagacttaggagtctttct

SEQ ID NO: 13466 - DNA, 20 bp, Artificial Sequence
  Description of Artificial Sequence: Synthetic oligonucleotide
  Target: ATXN2; (-) strand; PAM type: NNNNGHTT; PAM sequence: CCAGGATT
tacttggaaataataatata

SEQ ID NO: 13467 - DNA, 20 bp, Artificial Sequence
  Description of Artificial Sequence: Synthetic oligonucleotide
  Target: ATXN2; (-) strand; PAM type: NNNNGHTT; PAM sequence: GGCTGATT
aaaagctgtttttattgttg

SEQ ID NO: 13468 - DNA, 20 bp, Artificial Sequence
  Description of Artificial Sequence: Synthetic oligonucleotide
  Target: ATXN2; (-) strand; PAM type: NNNNGHTT; PAM sequence: AGCTGTTT
ctattcaaatctataccaaa

SEQ ID NO: 13469 - DNA, 20 bp, Artificial Sequence
  Description of Artificial Sequence: Synthetic oligonucleotide
  Target: ATXN2; (-) strand; PAM type: NNNNGHTT; PAM sequence: ATTTGATT
gtaaattgtagttcagtaca

SEQ ID NO: 13470 - DNA, 20 bp, Artificial Sequence
  Description of Artificial Sequence: Synthetic oligonucleotide
  Target: ATXN2; (-) strand; PAM type: NNNNGHTT; PAM sequence: GATTGTTT
atgttggccaggatggtctc

SEQ ID NO: 13471 - DNA, 20 bp, Artificial Sequence
  Description of Artificial Sequence: Synthetic oligonucleotide
  Target: ATXN2; (-) strand; PAM type: NNNNGHTT; PAM sequence: TCTCGATT
caccatgttggccaggatgg

SEQ ID NO: 13472 - DNA, 20 bp, Artificial Sequence
  Description of Artificial Sequence: Synthetic oligonucleotide
  Target: ATXN2; (-) strand; PAM type: NNNNGHTT; PAM sequence: CAGGGTTT
ttttgtattttttgtagaga

SEQ ID NO: 13473 - DNA, 20 bp, Artificial Sequence
  Description of Artificial Sequence: Synthetic oligonucleotide
  Target: ATXN2; (-) strand; PAM type: NNNNGHTT; PAM sequence: AAGCGATT
agcctctgcctcccaggttc

SEQ ID NO: 13474 - DNA, 20 bp, Artificial Sequence
  Description of Artificial Sequence: Synthetic oligonucleotide
  Target: ATXN2; (-) strand; PAM type: NNNNGHTT; PAM sequence: AAGCGATT
acaaggttttgagaatttaa

SEQ ID NO: 13475 - DNA, 20 bp, Artificial Sequence
  Description of Artificial Sequence: Synthetic oligonucleotide
  Target: ATXN2; (-) strand; PAM type: NNNNGHTT; PAM sequence: CAAGGTTT
aaaatattcagagtatgaga

SEQ ID NO: 13476 - DNA, 20 bp, Artificial Sequence
  Description of Artificial Sequence: Synthetic oligonucleotide
  Target: ATXN2; (-) strand; PAM type: NNNNGHTT; PAM sequence: TTTAGTTT
tcccatttggcctacaatgc

SEQ ID NO: 13477 - DNA, 20 bp, Artificial Sequence
  Description of Artificial Sequence: Synthetic oligonucleotide
  Target: ATXN2; (-) strand; PAM type: NNNNGHTT; PAM sequence: CAATGCTT
ttcttgtcccatttggccta

SEQ ID NO: 13478 - DNA, 20 bp, Artificial Sequence
  Description of Artificial Sequence: Synthetic oligonucleotide
  Target: ATXN2; (-) strand; PAM type: NNNNGHTT; PAM sequence: TACTGATT
agttttgtggtcaagaatgc

SEQ ID NO: 13479 - DNA, 20 bp, Artificial Sequence
  Description of Artificial Sequence: Synthetic oligonucleotide
  Target: ATXN2; (-) strand; PAM type: NNNNGHTT; PAM sequence: TACAGTTT
ttagtttgtaaagcattttc

SEQ ID NO: 13480 - DNA, 20 bp, Artificial Sequence
  Description of Artificial Sequence: Synthetic oligonucleotide
  Target: ATXN2; (-) strand; PAM type: NNNNGHTT; PAM sequence: ATTAGTTT
tttttgtgatctcttaaaaa

SEQ ID NO: 13481 - DNA, 20 bp, Artificial Sequence
  Description of Artificial Sequence: Synthetic oligonucleotide
  Target: ATXN2; (-) strand; PAM type: NNNNGHTT; PAM sequence: TAGAGTTT
aactttagagaaaaattaaa

SEQ ID NO: 13482 - DNA, 20 bp, Artificial Sequence
  Description of Artificial Sequence: Synthetic oligonucleotide
  Target: ATXN2; (-) strand; PAM type: NNNNGHTT; PAM sequence: CTCCGTTT
gcctgggtgacagagcaaga

SEQ ID NO: 13483 - DNA, 20 bp, Artificial Sequence
  Description of Artificial Sequence: Synthetic oligonucleotide
  Target: ATXN2; (-) strand; PAM type: NNNNGHTT; PAM sequence: AATTGCTT
tactagggaggctgagacag

SEQ ID NO: 13484 - DNA, 20 bp, Artificial Sequence
  Description of Artificial Sequence: Synthetic oligonucleotide
  Target: ATXN2; (-) strand; PAM type: NNNNGHTT; PAM sequence: CAAAGATT
gtttattagatttattcaag

SEQ ID NO: 13485 - DNA, 20 bp, Artificial Sequence
  Description of Artificial Sequence: Synthetic oligonucleotide
  Target: ATXN2; (-) strand; PAM type: NNNNGHTT; PAM sequence: ATTAGATT
ctaaatatgcctcatggttt

SEQ ID NO: 13486 - DNA, 20 bp, Artificial Sequence
  Description of Artificial Sequence: Synthetic oligonucleotide
  Target: ATXN2; (-) strand; PAM type: NNNNGHTT; PAM sequence: CATGGTTT
ttgatttcctaaatatgcct

SEQ ID NO: 13487 - DNA, 20 bp, Artificial Sequence
  Description of Artificial Sequence: Synthetic oligonucleotide
  Target: ATXN2; (-) strand; PAM type: NNNNGHTT; PAM sequence: TTTTGATT
gttatgcaaaaagaggtggg

SEQ ID NO: 13488 - DNA, 20 bp, Artificial Sequence
  Description of Artificial Sequence: Synthetic oligonucleotide
  Target: ATXN2; (-) strand; PAM type: NNNNGHTT; PAM sequence: GTGGGTTT
ctccagttatgcaaaaagag

SEQ ID NO: 13489 - DNA, 20 bp, Artificial Sequence
  Description of Artificial Sequence: Synthetic oligonucleotide
  Target: ATXN2; (-) strand; PAM type: NNNNGHTT; PAM sequence: TACAGTTT
atgttcagactttgttgtgg

SEQ ID NO: 13490 - DNA, 20 bp, Artificial Sequence
  Description of Artificial Sequence: Synthetic oligonucleotide
  Target: ATXN2; (-) strand; PAM type: NNNNGHTT; PAM sequence: GTGTGATT
tacttgtgtttttcatttta

SEQ ID NO: 13491 - DNA, 20 bp, Artificial Sequence
  Description of Artificial Sequence: Synthetic oligonucleotide
  Target: ATXN2; (-) strand; PAM type: NNNNGHTT; PAM sequence: TTGTGTTT
taaaggtttggagtacttac

SEQ ID NO: 13492 - DNA, 20 bp, Artificial Sequence
  Description of Artificial Sequence: Synthetic oligonucleotide
  Target: ATXN2; (-) strand; PAM type: NNNNGHTT; PAM sequence: AAAGGTTT
cctaacaaattttattttgt

SEQ ID NO: 13493 - DNA, 20 bp, Artificial Sequence
  Description of Artificial Sequence: Synthetic oligonucleotide
  Target: ATXN2; (-) strand; PAM type: NNNNGHTT; PAM sequence: TTGAGATT
ggaaaaagggtatgattctc

SEQ ID NO: 13494 - DNA, 20 bp, Artificial Sequence
  Description of Artificial Sequence: Synthetic oligonucleotide
  Target: ATXN2; (-) strand; PAM type: NNNNGHTT; PAM sequence: GTATGATT
tcatatgcctgggaaaaagg

SEQ ID NO: 13495 - DNA, 20 bp, Artificial Sequence
  Description of Artificial Sequence: Synthetic oligonucleotide
  Target: ATXN2; (-) strand; PAM type: NNNNGHTT; PAM sequence: TGAGGATT
aaacaaaaaacatttagata

SEQ ID NO: 13496 - DNA, 20 bp, Artificial Sequence
  Description of Artificial Sequence: Synthetic oligonucleotide
  Target: ATXN2; (-) strand; PAM type: NNNNGHTT; PAM sequence: GTTTGTTT
gctaatagagggatgtggtg

SEQ ID NO: 13497 - DNA, 20 bp, Artificial Sequence
  Description of Artificial Sequence: Synthetic oligonucleotide
  Target: ATXN2; (-) strand; PAM type: NNNNGHTT; PAM sequence: GGTGGTTT
gtgagctaatagagggatgt

SEQ ID NO: 13498 - DNA, 20 bp, Artificial Sequence
  Description of Artificial Sequence: Synthetic oligonucleotide
  Target: ATXN2; (-) strand; PAM type: NNNNGHTT; PAM sequence: GTGTGCTT
tcagagaggcttcttgatgt

SEQ ID NO: 13499 - DNA, 20 bp, Artificial Sequence
  Description of Artificial Sequence: Synthetic oligonucleotide
  Target: ATXN2; (-) strand; PAM type: NNNNGHTT; PAM sequence: AGAGGCTT
agactggtttgtgtaatcag

SEQ ID NO: 13500 - DNA, 20 bp, Artificial Sequence
  Description of Artificial Sequence: Synthetic oligonucleotide
  Target: ATXN2; (-) strand; PAM type: NNNNGHTT; PAM sequence: ACTGGTTT
aaatactgattattttatag

SEQ ID NO: 13501 - DNA, 20 bp, Artificial Sequence
  Description of Artificial Sequence: Synthetic oligonucleotide
  Target: ATXN2; (-) strand; PAM type: NNNNGHTT; PAM sequence: TACTGATT
ttttacttctcagtttcaaa

SEQ ID NO: 13502 - DNA, 20 bp, Artificial Sequence
  Description of Artificial Sequence: Synthetic oligonucleotide
  Target: ATXN2; (-) strand; PAM type: NNNNGHTT; PAM sequence: CTCAGTTT
cactttgaatgattttactt

SEQ ID NO: 13503 - DNA, 20 bp, Artificial Sequence
  Description of Artificial Sequence: Synthetic oligonucleotide
  Target: ATXN2; (-) strand; PAM type: NNNNGHTT; PAM sequence: GAATGATT
ctagtttttaaagccacttt

SEQ ID NO: 13504 - DNA, 20 bp, Artificial Sequence
  Description of Artificial Sequence: Synthetic oligonucleotide
  Target: ATXN2; (-) strand; PAM type: NNNNGHTT; PAM sequence: CCTAGTTT
ttttcatagtcagtgtttta

SEQ ID NO: 13505 - DNA, 20 bp, Artificial Sequence
  Description of Artificial Sequence: Synthetic oligonucleotide
  Target: ATXN2; (-) strand; PAM type: NNNNGHTT; PAM sequence: CAGTGTTT
taaaagaacattttcatagt

SEQ ID NO: 13506 - DNA, 20 bp, Artificial Sequence
  Description of Artificial Sequence: Synthetic oligonucleotide
  Target: ATXN2; (-) strand; PAM type: NNNNGHTT; PAM sequence: AGGAGTTT
aaaaatggaggtatatatga

SEQ ID NO: 13507 - DNA, 20 bp, Artificial Sequence
  Description of Artificial Sequence: Synthetic oligonucleotide
  Target: ATXN2; (-) strand; PAM type: NNNNGHTT; PAM sequence: ATATGTTT
gtttctttgataaataaatt

SEQ ID NO: 13508 - DNA, 20 bp, Artificial Sequence
  Description of Artificial Sequence: Synthetic oligonucleotide
  Target: ATXN2; (-) strand; PAM type: NNNNGHTT; PAM sequence: TACTGTTT
tccctggtgaccgggtagta

SEQ ID NO: 13509 - DNA, 20 bp, Artificial Sequence
  Description of Artificial Sequence: Synthetic oligonucleotide
  Target: ATXN2; (-) strand; PAM type: NNNNGHTT; PAM sequence: TATTGTTT
ttaatgttttgaaatttttt

SEQ ID NO: 13510 - DNA, 20 bp, Artificial Sequence
  Description of Artificial Sequence: Synthetic oligonucleotide
  Target: ATXN2; (-) strand; PAM type: NNNNGHTT; PAM sequence: TAATGTTT
tcaagagttcagtgtattgt

SEQ ID NO: 13511 - DNA, 20 bp, Artificial Sequence
  Description of Artificial Sequence: Synthetic oligonucleotide
  Target: ATXN2; (-) strand; PAM type: NNNNGHTT; PAM sequence: AAATGTTT
cttaaaatagctggggtcag

SEQ ID NO: 13512 - DNA, 20 bp, Artificial Sequence
  Description of Artificial Sequence: Synthetic oligonucleotide
  Target: ATXN2; (-) strand; PAM type: NNNNGHTT; PAM sequence: AGTTGATT
gtgtgtaaaataatgttagt

SEQ ID NO: 13513 - DNA, 20 bp, Artificial Sequence
  Description of Artificial Sequence: Synthetic oligonucleotide
  Target: ATXN2; (-) strand; PAM type: NNNNGHTT; PAM sequence: ATGTGCTT
agtttaaagtatttgggaga

SEQ ID NO: 13514 - DNA, 20 bp, Artificial Sequence
  Description of Artificial Sequence: Synthetic oligonucleotide
  Target: ATXN2; (-) strand; PAM type: NNNNGHTT; PAM sequence: GATAGTTT
ggtattacaagtaatttagg

SEQ ID NO: 13515 - DNA, 20 bp, Artificial Sequence
  Description of Artificial Sequence: Synthetic oligonucleotide
  Target: ATXN2; (-) strand; PAM type: NNNNGHTT; PAM sequence: GGACGTTT
cgtctgaaccaaagatgtac

SEQ ID NO: 13516 - DNA, 20 bp, Artificial Sequence
  Description of Artificial Sequence: Synthetic oligonucleotide
  Target: ATXN2; (-) strand; PAM type: NNNNGHTT; PAM sequence: GGAGGTTT
attgtttgagcctgggaggt

SEQ ID NO: 13517 - DNA, 20 bp, Artificial Sequence
  Description of Artificial Sequence: Synthetic oligonucleotide
  Target: ATXN2; (-) strand; PAM type: NNNNGHTT; PAM sequence: GATTGTTT
ttgggaggctgacgtgggag

SEQ ID NO: 13518 - DNA, 20 bp, Artificial Sequence
  Description of Artificial Sequence: Synthetic oligonucleotide
  Target: ATXN2; (-) strand; PAM type: NNNNGHTT; PAM sequence: GGAGGATT
tgacttgggaggctgacgtg

SEQ ID NO: 13519 - DNA, 20 bp, Artificial Sequence
  Description of Artificial Sequence: Synthetic oligonucleotide
  Target: ATXN2; (-) strand; PAM type: NNNNGHTT; PAM sequence: ACAAGTTT
tgggcagatggcttgagctc

SEQ ID NO: 13520 - DNA, 20 bp, Artificial Sequence
  Description of Artificial Sequence: Synthetic oligonucleotide
  Target: ATXN2; (-) strand; PAM type: NNNNGHTT; PAM sequence: GATGGCTT
ttgggagtttgaggtgggca

SEQ ID NO: 13521 - DNA, 20 bp, Artificial Sequence
  Description of Artificial Sequence: Synthetic oligonucleotide
  Target: ATXN2; (-) strand; PAM type: NNNNGHTT; PAM sequence: GGGAGTTT
gcctgtaatcccagcacttt

SEQ ID NO: 13522 - DNA, 20 bp, Artificial Sequence
  Description of Artificial Sequence: Synthetic oligonucleotide
  Target: ATXN2; (-) strand; PAM type: NNNNGHTT; PAM sequence: CATGGATT
gcatctgtgggttccatatt

SEQ ID NO: 13523 - DNA, 20 bp, Artificial Sequence
  Description of Artificial Sequence: Synthetic oligonucleotide
  Target: ATXN2; (-) strand; PAM type: NNNNGHTT; PAM sequence: AATAGATT
tagtcaggatgatttagaga

SEQ ID NO: 13524 - DNA, 20 bp, Artificial Sequence
  Description of Artificial Sequence: Synthetic oligonucleotide
  Target: ATXN2; (-) strand; PAM type: NNNNGHTT; PAM sequence: GGATGATT
gcttagatcatgtttagtca

SEQ ID NO: 13525 - DNA, 20 bp, Artificial Sequence
  Description of Artificial Sequence: Synthetic oligonucleotide
  Target: ATXN2; (-) strand; PAM type: NNNNGHTT; PAM sequence: TCATGTTT
tcaaagtaacattgcttaga

SEQ ID NO: 13526 - DNA, 20 bp, Artificial Sequence
  Description of Artificial Sequence: Synthetic oligonucleotide
  Target: ATXN2; (-) strand; PAM type: NNNNGHTT; PAM sequence: CATTGCTT
ataaatgattgtcaaagtaa

SEQ ID NO: 13527 - DNA, 20 bp, Artificial Sequence
  Description of Artificial Sequence: Synthetic oligonucleotide
  Target: ATXN2; (-) strand; PAM type: NNNNGHTT; PAM sequence: AAATGATT
catgaagttaaaatgtggat

SEQ ID NO: 13528 - DNA, 20 bp, Artificial Sequence
  Description of Artificial Sequence: Synthetic oligonucleotide
  Target: ATXN2; (-) strand; PAM type: NNNNGHTT; PAM sequence: ATTAGATT
tacatcagttgttgtaagtt

SEQ ID NO: 13529 - DNA, 20 bp, Artificial Sequence
  Description of Artificial Sequence: Synthetic oligonucleotide
  Target: ATXN2; (-) strand; PAM type: NNNNGHTT; PAM sequence: TCCAGATT
gttttttttttttttaatat

SEQ ID NO: 13530 - DNA, 20 bp, Artificial Sequence
  Description of Artificial Sequence: Synthetic oligonucleotide
  Target: ATXN2; (-) strand; PAM type: NNNNGHTT; PAM sequence: AATAGTTT
ttcagtttgtactaatttct

SEQ ID NO: 13531 - DNA, 20 bp, Artificial Sequence
  Description of Artificial Sequence: Synthetic oligonucleotide
  Target: ATXN2; (-) strand; PAM type: NNNNGHTT; PAM sequence: TTCAGTTT
agcattttagatgaggaaga

SEQ ID NO: 13532 - DNA, 20 bp, Artificial Sequence
  Description of Artificial Sequence: Synthetic oligonucleotide
  Target: ATXN2; (-) strand; PAM type: NNNNGHTT; PAM sequence: GGAAGATT
gtcccaagcattttagatga

SEQ ID NO: 13533 - DNA, 20 bp, Artificial Sequence
  Description of Artificial Sequence: Synthetic oligonucleotide
  Target: ATXN2; (-) strand; PAM type: NNNNGHTT; PAM sequence: GTTAGCTT
ttttgcaacaaataataaac

SEQ ID NO: 13534 - DNA, 20 bp, Artificial Sequence
  Description of Artificial Sequence: Synthetic oligonucleotide
  Target: ATXN2; (-) strand; PAM type: NNNNGHTT; PAM sequence: GTTGGTTT
gtttagtcaaaacaccatta

SEQ ID NO: 13535 - DNA, 20 bp, Artificial Sequence
  Description of Artificial Sequence: Synthetic oligonucleotide
  Target: ATXN2; (-) strand; PAM type: NNNNGHTT; PAM sequence: TCATGTTT
tttactcttgcttttttatg

SEQ ID NO: 13536 - DNA, 20 bp, Artificial Sequence
  Description of Artificial Sequence: Synthetic oligonucleotide
  Target: ATXN2; (-) strand; PAM type: NNNNGHTT; PAM sequence: TCTTGCTT
cctcctctatggaagtttac

SEQ ID NO: 13537 - DNA, 20 bp, Artificial Sequence
  Description of Artificial Sequence: Synthetic oligonucleotide
  Target: ATXN2; (-) strand; PAM type: NNNNGHTT; PAM sequence: GGAAGTTT
ttgtgtccttcctcctctat

SEQ ID NO: 13538 - DNA, 20 bp, Artificial Sequence
  Description of Artificial Sequence: Synthetic oligonucleotide
  Target: ATXN2; (-) strand; PAM type: NNNNGHTT; PAM sequence: TACGGTTT
attgatttgtcttccatcct

SEQ ID NO: 13539 - DNA, 20 bp, Artificial Sequence
  Description of Artificial Sequence: Synthetic oligonucleotide
  Target: ATXN2; (-) strand; PAM type: NNNNGHTT; PAM sequence: CATTGATT
aaccctcctctctctccaac

SEQ ID NO: 13540 - DNA, 20 bp, Artificial Sequence
  Description of Artificial Sequence: Synthetic oligonucleotide
  Target: ATXN2; (-) strand; PAM type: NNNNGHTT; PAM sequence: AACAGTTT
caccacaatcaagttaatag

SEQ ID NO: 13541 - DNA, 20 bp, Artificial Sequence
  Description of Artificial Sequence: Synthetic oligonucleotide
  Target: ATXN2; (-) strand; PAM type: NNNNGHTT; PAM sequence: GTGAGTTT
ccttcttagggtacatttct

SEQ ID NO: 13542 - DNA, 20 bp, Artificial Sequence
  Description of Artificial Sequence: Synthetic oligonucleotide
  Target: ATXN2; (-) strand; PAM type: NNNNGHTT; PAM sequence: CCTGGCTT
gttcttctatgaaggtatga

SEQ ID NO: 13543 - DNA, 20 bp, Artificial Sequence
  Description of Artificial Sequence: Synthetic oligonucleotide
  Target: ATXN2; (-) strand; PAM type: NNNNGHTT; PAM sequence: GATTGTTT
ttgagactttgcctttatta

SEQ ID NO: 13544 - DNA, 20 bp, Artificial Sequence
  Description of Artificial Sequence: Synthetic oligonucleotide
  Target: ATXN2; (-) strand; PAM type: NNNNGHTT; PAM sequence: ATTAGATT
atttttgagactttgccttt

SEQ ID NO: 13545 - DNA, 20 bp, Artificial Sequence
  Description of Artificial Sequence: Synthetic oligonucleotide
  Target: ATXN2; (-) strand; PAM type: NNNNGHTT; PAM sequence: TTTGGCTT
tgctgctttcatttttctcc

SEQ ID NO: 13546 - DNA, 20 bp, Artificial Sequence
  Description of Artificial Sequence: Synthetic oligonucleotide
  Target: ATXN2; (-) strand; PAM type: NNNNGHTT; PAM sequence: TGCTGCTT
gaattaatgtgctttttttc

SEQ ID NO: 13547 - DNA, 20 bp, Artificial Sequence
  Description of Artificial Sequence: Synthetic oligonucleotide
  Target: ATXN2; (-) strand; PAM type: NNNNGHTT; PAM sequence: ATGTGCTT
atgctttttattttgaatta

SEQ ID NO: 13548 - DNA, 20 bp, Artificial Sequence
  Description of Artificial Sequence: Synthetic oligonucleotide
  Target: ATXN2; (-) strand; PAM type: NNNNGHTT; PAM sequence: TTATGCTT
agtggagtctgcagagttct

SEQ ID NO: 13549 - DNA, 20 bp, Artificial Sequence
  Description of Artificial Sequence: Synthetic oligonucleotide
  Target: ATXN2; (-) strand; PAM type: NNNNGHTT; PAM sequence: AGTCGCTT
cacgtgtaataacaagaaca

SEQ ID NO: 13550 - DNA, 20 bp, Artificial Sequence
  Description of Artificial Sequence: Synthetic oligonucleotide
  Target: ATXN2; (-) strand; PAM type: NNNNGHTT; PAM sequence: ATAAGATT
gagaattattataattaaag

SEQ ID NO: 13551 - DNA, 20 bp, Artificial Sequence
  Description of Artificial Sequence: Synthetic oligonucleotide
  Target: ATXN2; (-) strand; PAM type: NNNNGHTT; PAM sequence: CCATGATT
cagcgtaggggaaactgccc

SEQ ID NO: 13552 - DNA, 20 bp, Artificial Sequence
  Description of Artificial Sequence: Synthetic oligonucleotide
  Target: ATXN2; (-) strand; PAM type: NNNNGHTT; PAM sequence: AGAGGTTT
ctgggtaatttataaaggaa

SEQ ID NO: 13553 - DNA, 20 bp, Artificial Sequence
  Description of Artificial Sequence: Synthetic oligonucleotide
  Target: ATXN2; (-) strand; PAM type: NNNNGHTT; PAM sequence: ATGTGTTT
taagtatgttattagcctat

SEQ ID NO: 13554 - DNA, 20 bp, Artificial Sequence
  Description of Artificial Sequence: Synthetic oligonucleotide
  Target: ATXN2; (-) strand; PAM type: NNNNGHTT; PAM sequence: GACTGTTT
aattttgtcatagataactt

SEQ ID NO: 13555 - DNA, 20 bp, Artificial Sequence
  Description of Artificial Sequence: Synthetic oligonucleotide
  Target: ATXN2; (-) strand; PAM type: NNNNGHTT; PAM sequence: AAAAGATT
cacagaccaaatgccaaggc

SEQ ID NO: 13556 - DNA, 20 bp, Artificial Sequence
  Description of Artificial Sequence: Synthetic oligonucleotide
  Target: ATXN2; (-) strand; PAM type: NNNNGHTT; PAM sequence: TTCAGCTT
ttttaagtttggaaatattt

SEQ ID NO: 13557 - DNA, 20 bp, Artificial Sequence
  Description of Artificial Sequence: Synthetic oligonucleotide
  Target: ATXN2; (-) strand; PAM type: NNNNGHTT; PAM sequence: TTAAGTTT
tatttgaatggaattatatt

SEQ ID NO: 13558 - DNA, 20 bp, Artificial Sequence
  Description of Artificial Sequence: Synthetic oligonucleotide
  Target: ATXN2; (-) strand; PAM type: NNNNGHTT; PAM sequence: GTTTGCTT
atgaagtttgattatttcta

SEQ ID NO: 13559 - DNA, 20 bp, Artificial Sequence
  Description of Artificial Sequence: Synthetic oligonucleotide
  Target: ATXN2; (-) strand; PAM type: NNNNGHTT; PAM sequence: TCTAGTTT
tttgatgaagtttgattatt

SEQ ID NO: 13560 - DNA, 20 bp, Artificial Sequence
  Description of Artificial Sequence: Synthetic oligonucleotide
  Target: ATXN2; (-) strand; PAM type: NNNNGHTT; PAM sequence: GTTTGATT
atttatttgattttgatgaa

SEQ ID NO: 13561 - DNA, 20 bp, Artificial Sequence
  Description of Artificial Sequence: Synthetic oligonucleotide
  Target: ATXN2; (-) strand; PAM type: NNNNGHTT; PAM sequence: TGAAGTTT
ctttatttatttgattttga

SEQ ID NO: 13562 - DNA, 20 bp, Artificial Sequence
  Description of Artificial Sequence: Synthetic oligonucleotide
  Target: ATXN2; (-) strand; PAM type: NNNNGHTT; PAM sequence: ATTTGATT
taggctattttactttattt

SEQ ID NO: 13563 - DNA, 20 bp, Artificial Sequence
  Description of Artificial Sequence: Synthetic oligonucleotide
  Target: ATXN2; (-) strand; PAM type: NNNNGHTT; PAM sequence: ATTAGTTT
attattaatttacgtttagc

SEQ ID NO: 13564 - DNA, 20 bp, Artificial Sequence
  Description of Artificial Sequence: Synthetic oligonucleotide
  Target: ATXN2; (-) strand; PAM type: NNNNGHTT; PAM sequence: TTACGTTT
tggctataattattattaat

SEQ ID NO: 13565 - DNA, 20 bp, Artificial Sequence
  Description of Artificial Sequence: Synthetic oligonucleotide
  Target: ATXN2; (-) strand; PAM type: NNNNGHTT; PAM sequence: TCTTGCTT
attattatttagagacagag

SEQ ID NO: 13566 - DNA, 20 bp, Artificial Sequence
  Description of Artificial Sequence: Synthetic oligonucleotide
  Target: ATXN2; (-) strand; PAM type: NNNNGHTT; PAM sequence: TAAAGATT
gtgattggttactttgggag

SEQ ID NO: 13567 - DNA, 20 bp, Artificial Sequence
  Description of Artificial Sequence: Synthetic oligonucleotide
  Target: ATXN2; (-) strand; PAM type: NNNNGHTT; PAM sequence: CAGTGATT
ttctgaatagctctttataa

SEQ ID NO: 13568 - DNA, 20 bp, Artificial Sequence
  Description of Artificial Sequence: Synthetic oligonucleotide
  Target: ATXN2; (-) strand; PAM type: NNNNGHTT; PAM sequence: TTTTGCTT
aatcaagaatataatccgtg

SEQ ID NO: 13569 - DNA, 20 bp, Artificial Sequence
  Description of Artificial Sequence: Synthetic oligonucleotide
  Target: ATXN2; (-) strand; PAM type: NNNNGHTT; PAM sequence: CCGTGTTT
ggttaaatcaagaatataat

SEQ ID NO: 13570 - DNA, 20 bp, Artificial Sequence
  Description of Artificial Sequence: Synthetic oligonucleotide
  Target: ATXN2; (-) strand; PAM type: NNNNGHTT; PAM sequence: ACCTGTTT
cactgcgcccggcccatatg

SEQ ID NO: 13571 - DNA, 20 bp, Artificial Sequence
  Description of Artificial Sequence: Synthetic oligonucleotide
  Target: ATXN2; (-) strand; PAM type: NNNNGHTT; PAM sequence: CTGGGATT
cacctctgcctcccaaagtg

SEQ ID NO: 13572 - DNA, 20 bp, Artificial Sequence
  Description of Artificial Sequence: Synthetic oligonucleotide
  Target: ATXN2; (-) strand; PAM type: NNNNGHTT; PAM sequence: TGGGGTTT
ttttttattcttagtagaga

SEQ ID NO: 13573 - DNA, 20 bp, Artificial Sequence
  Description of Artificial Sequence: Synthetic oligonucleotide
  Target: ATXN2; (-) strand; PAM type: NNNNGHTT; PAM sequence: AGGCGATT
aacctccacctcccaggttc

SEQ ID NO: 13574 - DNA, 20 bp, Artificial Sequence
  Description of Artificial Sequence: Synthetic oligonucleotide
  Target: ATXN2; (-) strand; PAM type: NNNNGHTT; PAM sequence: ACCTGTTT
tctgcagttgtaatcatatg

SEQ ID NO: 13575 - DNA, 20 bp, Artificial Sequence
  Description of Artificial Sequence: Synthetic oligonucleotide
  Target: ATXN2; (-) strand; PAM type: NNNNGHTT; PAM sequence: TTCAGTTT
tttgaatgatttagcttatt

SEQ ID NO: 13576 - DNA, 20 bp, Artificial Sequence
  Description of Artificial Sequence: Synthetic oligonucleotide
  Target: ATXN2; (-) strand; PAM type: NNNNGHTT; PAM sequence: TTTAGCTT
aatgaaagtgctttgaatga

SEQ ID NO: 13577 - DNA, 20 bp, Artificial Sequence
  Description of Artificial Sequence: Synthetic oligonucleotide
  Target: ATXN2; (-) strand; PAM type: NNNNGHTT; PAM sequence: GAATGATT
tttagaaatgaaagtgcttt

SEQ ID NO: 13578 - DNA, 20 bp, Artificial Sequence
  Description of Artificial Sequence: Synthetic oligonucleotide
  Target: ATXN2; (-) strand; PAM type: NNNNGHTT; PAM sequence: AAGTGCTT
cgcatattatttagaaatga

SEQ ID NO: 13579 - DNA, 20 bp, Artificial Sequence
  Description of Artificial Sequence: Synthetic oligonucleotide
  Target: ATXN2; (-) strand; PAM type: NNNNGHTT; PAM sequence: ATAAGCTT
gcctaatctttttcagtgga

SEQ ID NO: 13580 - DNA, 20 bp, Artificial Sequence
  Description of Artificial Sequence: Synthetic oligonucleotide
  Target: ATXN2; (-) strand; PAM type: NNNNGHTT; PAM sequence: TGATGTTT
aatataacatttcactttaa

SEQ ID NO: 13581 - DNA, 20 bp, Artificial Sequence
  Description of Artificial Sequence: Synthetic oligonucleotide
  Target: ATXN2; (-) strand; PAM type: NNNNGHTT; PAM sequence: TAATGTTT
tccagtcctattgtcatgac

SEQ ID NO: 13582 - DNA, 20 bp, Artificial Sequence
  Description of Artificial Sequence: Synthetic oligonucleotide
  Target: ATXN2; (-) strand; PAM type: NNNNGHTT; PAM sequence: ATGAGATT
gttgtgattattttattaaa

SEQ ID NO: 13583 - DNA, 20 bp, Artificial Sequence
  Description of Artificial Sequence: Synthetic oligonucleotide
  Target: ATXN2; (-) strand; PAM type: NNNNGHTT; PAM sequence: TTGTGATT
tttgaattttggcttgagtg

SEQ ID NO: 13584 - DNA, 20 bp, Artificial Sequence
  Description of Artificial Sequence: Synthetic oligonucleotide
  Target: ATXN2; (-) strand; PAM type: NNNNGHTT; PAM sequence: TTTGGCTT
tttccttgaatgttttgaat

SEQ ID NO: 13585 - DNA, 20 bp, Artificial Sequence
  Description of Artificial Sequence: Synthetic oligonucleotide
  Target: ATXN2; (-) strand; PAM type: NNNNGHTT; PAM sequence: GAATGTTT
tctgaattgtgcttttcctt

SEQ ID NO: 13586 - DNA, 20 bp, Artificial Sequence
  Description of Artificial Sequence: Synthetic oligonucleotide
  Target: ATXN2; (-) strand; PAM type: NNNNGHTT; PAM sequence: TTGTGCTT
ctagactttttggatctgaa

SEQ ID NO: 13587 - DNA, 20 bp, Artificial Sequence
  Description of Artificial Sequence: Synthetic oligonucleotide
  Target: ATXN2; (-) strand; PAM type: NNNNGHTT; PAM sequence: CATTGTTT
gatgtcatttaattcaagtc

SEQ ID NO: 13588 - DNA, 20 bp, Artificial Sequence
  Description of Artificial Sequence: Synthetic oligonucleotide
  Target: ATXN2; (-) strand; PAM type: NNNNGHTT; PAM sequence: CCATGTTT
ttcaggaatttatctctgtg

SEQ ID NO: 13589 - DNA, 20 bp, Artificial Sequence
  Description of Artificial Sequence: Synthetic oligonucleotide
  Target: ATXN2; (-) strand; PAM type: NNNNGHTT; PAM sequence: TCTGGTTT
gtgaagtacttagtatggtg

SEQ ID NO: 13590 - DNA, 20 bp, Artificial Sequence
  Description of Artificial Sequence: Synthetic oligonucleotide
  Target: ATXN2; (-) strand; PAM type: NNNNGHTT; PAM sequence: GATAGATT
ctcacctgtaaagtagaggt

SEQ ID NO: 13591 - DNA, 20 bp, Artificial Sequence
  Description of Artificial Sequence: Synthetic oligonucleotide
  Target: ATXN2; (-) strand; PAM type: NNNNGHTT; PAM sequence: TTCAGTTT
aagatacttgactgctgagg

SEQ ID NO: 13592 - DNA, 20 bp, Artificial Sequence
  Description of Artificial Sequence: Synthetic oligonucleotide
  Target: ATXN2; (-) strand; PAM type: NNNNGHTT; PAM sequence: GGATGATT
agctctactgctcatgaact

SEQ ID NO: 13593 - DNA, 20 bp, Artificial Sequence
  Description of Artificial Sequence: Synthetic oligonucleotide
  Target: ATXN2; (-) strand; PAM type: NNNNGHTT; PAM sequence: CCTGGTTT
tagacgtggaatcagataca

SEQ ID NO: 13594 - DNA, 20 bp, Artificial Sequence
  Description of Artificial Sequence: Synthetic oligonucleotide
  Target: ATXN2; (-) strand; PAM type: NNNNGHTT; PAM sequence: GGTAGTTT
atagaatttttgttaggcga

SEQ ID NO: 13595 - DNA, 20 bp, Artificial Sequence
  Description of Artificial Sequence: Synthetic oligonucleotide
  Target: ATXN2; (-) strand; PAM type: NNNNGHTT; PAM sequence: TGATGTTT
accaaaactgtaaattcaaa

SEQ ID NO: 13596 - DNA, 20 bp, Artificial Sequence
  Description of Artificial Sequence: Synthetic oligonucleotide
  Target: ATXN2; (-) strand; PAM type: NNNNGHTT; PAM sequence: GTAAGATT
ataccagatcatcgttctaa

SEQ ID NO: 13597 - DNA, 20 bp, Artificial Sequence
  Description of Artificial Sequence: Synthetic oligonucleotide
  Target: ATXN2; (-) strand; PAM type: NNNNGHTT; PAM sequence: CAAGGTTT
gacagttcgtggcatttgtt

SEQ ID NO: 13598 - DNA, 20 bp, Artificial Sequence
  Description of Artificial Sequence: Synthetic oligonucleotide
  Target: ATXN2; (-) strand; PAM type: NNNNGHTT; PAM sequence: ATGAGTTT
tagctttgtagggaggccat

SEQ ID NO: 13599 - DNA, 20 bp, Artificial Sequence
  Description of Artificial Sequence: Synthetic oligonucleotide
  Target: ATXN2; (-) strand; PAM type: NNNNGHTT; PAM sequence: TATAGCTT
ttatgtttttaagtctttta

SEQ ID NO: 13600 - DNA, 20 bp, Artificial Sequence
  Description of Artificial Sequence: Synthetic oligonucleotide
  Target: ATXN2; (-) strand; PAM type: NNNNGHTT; PAM sequence: TTATGTTT
tgtgacttatttaaagggga

SEQ ID NO: 13601 - DNA, 20 bp, Artificial Sequence
  Description of Artificial Sequence: Synthetic oligonucleotide
  Target: ATXN2; (-) strand; PAM type: NNNNGHTT; PAM sequence: AGGGGATT
gaacagtgtgacttatttaa

SEQ ID NO: 13602 - DNA, 20 bp, Artificial Sequence
  Description of Artificial Sequence: Synthetic oligonucleotide
  Target: ATXN2; (-) strand; PAM type: NNNNGHTT; PAM sequence: GAATGATT
atgataatattttcctggtt

SEQ ID NO: 13603 - DNA, 20 bp, Artificial Sequence
  Description of Artificial Sequence: Synthetic oligonucleotide
  Target: ATXN2; (-) strand; PAM type: NNNNGHTT; PAM sequence: TACTGTTT
gtggtttctgcactttactg

SEQ ID NO: 13604 - DNA, 20 bp, Artificial Sequence
  Description of Artificial Sequence: Synthetic oligonucleotide
  Target: ATXN2; (-) strand; PAM type: NNNNGHTT; PAM sequence: AGTGGTTT
gtcatagatcagtggaaatt

SEQ ID NO: 13605 - DNA, 20 bp, Artificial Sequence
  Description of Artificial Sequence: Synthetic oligonucleotide
  Target: ATXN2; (-) strand; PAM type: NNNNGHTT; PAM sequence: TACTGCTT
cttcagtggatttcagagaa

SEQ ID NO: 13606 - DNA, 20 bp, Artificial Sequence
  Description of Artificial Sequence: Synthetic oligonucleotide
  Target: ATXN2; (-) strand; PAM type: NNNNGHTT; PAM sequence: AGTGGATT
gaaacaagaatttagacttc

SEQ ID NO: 13607 - DNA, 20 bp, Artificial Sequence
  Description of Artificial Sequence: Synthetic oligonucleotide
  Target: ATXN2; (-) strand; PAM type: NNNNGHTT; PAM sequence: AAAAGATT
tttggtttgagatactaatg

SEQ ID NO: 13608 - DNA, 20 bp, Artificial Sequence
  Description of Artificial Sequence: Synthetic oligonucleotide
  Target: ATXN2; (-) strand; PAM type: NNNNGHTT; PAM sequence: TTTGGTTT
ctatattaaatagtaaaata

SEQ ID NO: 13609 - DNA, 20 bp, Artificial Sequence
  Description of Artificial Sequence: Synthetic oligonucleotide
  Target: ATXN2; (-) strand; PAM type: NNNNGHTT; PAM sequence: CTTTGTTT
gtctaaaatatgctcttggc

SEQ ID NO: 13610 - DNA, 20 bp, Artificial Sequence
  Description of Artificial Sequence: Synthetic oligonucleotide
  Target: ATXN2; (-) strand; PAM type: NNNNGHTT; PAM sequence: TAGTGTTT
aagcatagagtcctggatat

SEQ ID NO: 13611 - DNA, 20 bp, Artificial Sequence
  Description of Artificial Sequence: Synthetic oligonucleotide
  Target: ATXN2; (-) strand; PAM type: NNNNGHTT; PAM sequence: CTGGGATT
tgcctcagcctcctaaagtg

SEQ ID NO: 13612 - DNA, 20 bp, Artificial Sequence
  Description of Artificial Sequence: Synthetic oligonucleotide
  Target: ATXN2; (-) strand; PAM type: NNNNGHTT; PAM sequence: TTTTGCTT
tattttttgtagaaacaggg

SEQ ID NO: 13613 - DNA, 20 bp, Artificial Sequence
  Description of Artificial Sequence: Synthetic oligonucleotide
  Target: ATXN2; (-) strand; PAM type: NNNNGHTT; PAM sequence: CAGGGTTT
ttttttattttttgtagaaa

SEQ ID NO: 13614 - DNA, 20 bp, Artificial Sequence
  Description of Artificial Sequence: Synthetic oligonucleotide
  Target: ATXN2; (-) strand; PAM type: NNNNGHTT; PAM sequence: GCTAGTTT
ggcgtgtgccaccatgcctg

SEQ ID NO: 13615 - DNA, 20 bp, Artificial Sequence
  Description of Artificial Sequence: Synthetic oligonucleotide
  Target: ATXN2; (-) strand; PAM type: NNNNGHTT; PAM sequence: CAGGGTTT
tagttaattattttttgaga

SEQ ID NO: 13616 - DNA, 20 bp, Artificial Sequence
  Description of Artificial Sequence: Synthetic oligonucleotide
  Target: ATXN2; (-) strand; PAM type: NNNNGHTT; PAM sequence: GTTTGATT
tatcagctcataccattctt

SEQ ID NO: 13617 - DNA, 20 bp, Artificial Sequence
  Description of Artificial Sequence: Synthetic oligonucleotide
  Target: ATXN2; (-) strand; PAM type: NNNNGHTT; PAM sequence: TCTTGTTT
tagttatcagctcataccat

SEQ ID NO: 13618 - DNA, 20 bp, Artificial Sequence
  Description of Artificial Sequence: Synthetic oligonucleotide
  Target: ATXN2; (-) strand; PAM type: NNNNGHTT; PAM sequence: CCCAGCTT
gaacccctgcacacctatca

SEQ ID NO: 13619 - DNA, 20 bp, Artificial Sequence
  Description of Artificial Sequence: Synthetic oligonucleotide
  Target: ATXN2; (-) strand; PAM type: NNNNGHTT; PAM sequence: AGGTGCTT
tgtatcacatcagaagcaga

SEQ ID NO: 13620 - DNA, 20 bp, Artificial Sequence
  Description of Artificial Sequence: Synthetic oligonucleotide
  Target: ATXN2; (-) strand; PAM type: NNNNGHTT; PAM sequence: ACTTGATT
gtaaactggtagatctgtaa

SEQ ID NO: 13621 - DNA, 20 bp, Artificial Sequence
  Description of Artificial Sequence: Synthetic oligonucleotide
  Target: ATXN2; (-) strand; PAM type: NNNNGHTT; PAM sequence: TAATGTTT
gttaatatattcttccatct

SEQ ID NO: 13622 - DNA, 20 bp, Artificial Sequence
  Description of Artificial Sequence: Synthetic oligonucleotide
  Target: ATXN2; (-) strand; PAM type: NNNNGHTT; PAM sequence: TCTGGATT
ttatgttgcatttactgcat

SEQ ID NO: 13623 - DNA, 20 bp, Artificial Sequence
  Description of Artificial Sequence: Synthetic oligonucleotide
  Target: ATXN2; (-) strand; PAM type: NNNNGHTT; PAM sequence: ATGTGATT
tcctatgatgtttttgtccc

SEQ ID NO: 13624 - DNA, 20 bp, Artificial Sequence
  Description of Artificial Sequence: Synthetic oligonucleotide
  Target: ATXN2; (-) strand; PAM type: NNNNGHTT; PAM sequence: TGATGTTT
attcataagttctcctccta

SEQ ID NO: 13625 - DNA, 20 bp, Artificial Sequence
  Description of Artificial Sequence: Synthetic oligonucleotide
  Target: ATXN2; (-) strand; PAM type: NNNNGHTT; PAM sequence: CATTGCTT
gccaccacacctggcctatg

SEQ ID NO: 13626 - DNA, 20 bp, Artificial Sequence
  Description of Artificial Sequence: Synthetic oligonucleotide
  Target: ATXN2; (-) strand; PAM type: NNNNGHTT; PAM sequence: CTGGGATT
cacctcggcctcccaaagtg

SEQ ID NO: 13627 - DNA, 20 bp, Artificial Sequence
  Description of Artificial Sequence: Synthetic oligonucleotide
  Target: ATXN2; (-) strand; PAM type: NNNNGHTT; PAM sequence: CGGGGTTT
ttttctatttttagtagaaa

SEQ ID NO: 13628 - DNA, 20 bp, Artificial Sequence
  Description of Artificial Sequence: Synthetic oligonucleotide
  Target: ATXN2; (-) strand; PAM type: NNNNGHTT; PAM sequence: CTGGGATT
gtctcagcctccccaaatat

SEQ ID NO: 13629 - DNA, 20 bp, Artificial Sequence
  Description of Artificial Sequence: Synthetic oligonucleotide
  Target: ATXN2; (-) strand; PAM type: NNNNGHTT; PAM sequence: AAGTGATT
aacctccacttcccgggttc

SEQ ID NO: 13630 - DNA, 20 bp, Artificial Sequence
  Description of Artificial Sequence: Synthetic oligonucleotide
  Target: ATXN2; (-) strand; PAM type: NNNNGHTT; PAM sequence: TTTTGTTT
tttttttgtagttttttttt

SEQ ID NO: 13631 - DNA, 20 bp, Artificial Sequence
  Description of Artificial Sequence: Synthetic oligonucleotide
  Target: ATXN2; (-) strand; PAM type: NNNNGHTT; PAM sequence: TGTAGTTT
tattaagtgttttttttttt

SEQ ID NO: 13632 - DNA, 20 bp, Artificial Sequence
  Description of Artificial Sequence: Synthetic oligonucleotide
  Target: ATXN2; (-) strand; PAM type: NNNNGHTT; PAM sequence: AAGTGTTT
ttaacaattttaagtgtatt

SEQ ID NO: 13633 - DNA, 20 bp, Artificial Sequence
  Description of Artificial Sequence: Synthetic oligonucleotide
  Target: ATXN2; (-) strand; PAM type: NNNNGHTT; PAM sequence: GTGAGTTT
aatttctttgggaagagatt

SEQ ID NO: 13634 - DNA, 20 bp, Artificial Sequence
  Description of Artificial Sequence: Synthetic oligonucleotide
  Target: ATXN2; (-) strand; PAM type: NNNNGHTT; PAM sequence: AAGAGATT
gcaaatgaaatttctttggg

SEQ ID NO: 13635 - DNA, 20 bp, Artificial Sequence
  Description of Artificial Sequence: Synthetic oligonucleotide
  Target: ATXN2; (-) strand; PAM type: NNNNGHTT; PAM sequence: CAATGATT
tacaatttagcacttatctc

SEQ ID NO: 13636 - DNA, 20 bp, Artificial Sequence
  Description of Artificial Sequence: Synthetic oligonucleotide
  Target: ATXN2; (-) strand; PAM type: NNNNGHTT; PAM sequence: CAGTGTTT
gaagggatagtttctgagat

SEQ ID NO: 13637 - DNA, 20 bp, Artificial Sequence
  Description of Artificial Sequence: Synthetic oligonucleotide
  Target: ATXN2; (-) strand; PAM type: NNNNGHTT; PAM sequence: GATAGTTT
aatttgcgcttctttgaagg

SEQ ID NO: 13638 - DNA, 20 bp, Artificial Sequence
  Description of Artificial Sequence: Synthetic oligonucleotide
  Target: ATXN2; (-) strand; PAM type: NNNNGHTT; PAM sequence: TTGCGCTT
acagactgatctgatcaaat

SEQ ID NO: 13639 - DNA, 20 bp, Artificial Sequence
  Description of Artificial Sequence: Synthetic oligonucleotide
  Target: ATXN2; (-) strand; PAM type: NNNNGHTT; PAM sequence: TGGAGCTT
agggcctgcattgttttccg

SEQ ID NO: 13640 - DNA, 20 bp, Artificial Sequence
  Description of Artificial Sequence: Synthetic oligonucleotide
  Target: ATXN2; (-) strand; PAM type: NNNNGHTT; PAM sequence: CATTGTTT
ctgcagatatggagggcctg

SEQ ID NO: 13641 - DNA, 20 bp, Artificial Sequence
  Description of Artificial Sequence: Synthetic oligonucleotide
  Target: ATXN2; (-) strand; PAM type: NNNNGHTT; PAM sequence: GAGTGATT
ttttaagtgtttttaatctc

SEQ ID NO: 13642 - DNA, 20 bp, Artificial Sequence
  Description of Artificial Sequence: Synthetic oligonucleotide
  Target: ATXN2; (-) strand; PAM type: NNNNGHTT; PAM sequence: AAGTGTTT
tttttattgtatttattttt

SEQ ID NO: 13643 - DNA, 20 bp, Artificial Sequence
  Description of Artificial Sequence: Synthetic oligonucleotide
  Target: ATXN2; (-) strand; PAM type: NNNNGHTT; PAM sequence: TCTAGATT
ctcctgtatgctttgtcatt

SEQ ID NO: 13644 - DNA, 20 bp, Artificial Sequence
  Description of Artificial Sequence: Synthetic oligonucleotide
  Target: ATXN2; (-) strand; PAM type: NNNNGHTT; PAM sequence: GTATGCTT
ataccggtgcacatcctcct

SEQ ID NO: 13645 - DNA, 20 bp, Artificial Sequence
  Description of Artificial Sequence: Synthetic oligonucleotide
  Target: ATXN2; (-) strand; PAM type: NNNNGHTT; PAM sequence: GGGGGATT
agtcatttcttggtgtcctt

SEQ ID NO: 13646 - DNA, 20 bp, Artificial Sequence
  Description of Artificial Sequence: Synthetic oligonucleotide
  Target: ATXN2; (-) strand; PAM type: NNNNGHTT; PAM sequence: CATGGCTT
tagaatcacagtgattttgg

SEQ ID NO: 13647 - DNA, 20 bp, Artificial Sequence
  Description of Artificial Sequence: Synthetic oligonucleotide
  Target: ATXN2; (-) strand; PAM type: NNNNGHTT; PAM sequence: CAGTGATT
ctaccatcactctagaatca

SEQ ID NO: 13648 - DNA, 20 bp, Artificial Sequence
  Description of Artificial Sequence: Synthetic oligonucleotide
  Target: ATXN2; (-) strand; PAM type: NNNNGHTT; PAM sequence: GCTAGTTT
tacagtgtgacacgtctgat

SEQ ID NO: 13649 - DNA, 20 bp, Artificial Sequence
  Description of Artificial Sequence: Synthetic oligonucleotide
  Target: ATXN2; (-) strand; PAM type: NNNNGHTT; PAM sequence: GAATGATT
tatttgtctaatgactggct

SEQ ID NO: 13650 - DNA, 20 bp, Artificial Sequence
  Description of Artificial Sequence: Synthetic oligonucleotide
  Target: ATXN2; (-) strand; PAM type: NNNNGHTT; PAM sequence: ATTTGCTT
gggtggtggttgttactgtt

SEQ ID NO: 13651 - DNA, 20 bp, Artificial Sequence
  Description of Artificial Sequence: Synthetic oligonucleotide
  Target: ATXN2; (-) strand; PAM type: NNNNGHTT; PAM sequence: TGTCGTTT
tactttcctgtgtcttagct

SEQ ID NO: 13652 - DNA, 20 bp, Artificial Sequence
  Description of Artificial Sequence: Synthetic oligonucleotide
  Target: ATXN2; (-) strand; PAM type: NNNNGHTT; PAM sequence: CTTAGCTT
ggggttatactttcctgtgt

SEQ ID NO: 13653 - DNA, 20 bp, Artificial Sequence
  Description of Artificial Sequence: Synthetic oligonucleotide
  Target: ATXN2; (-) strand; PAM type: NNNNGHTT; PAM sequence: ACATGTTT
ggttttctttcgttcttaaa

SEQ ID NO: 13654 - DNA, 20 bp, Artificial Sequence
  Description of Artificial Sequence: Synthetic oligonucleotide
  Target: ATXN2; (-) strand; PAM type: NNNNGHTT; PAM sequence: TATGGTTT
ccttcttttactgcattaat

SEQ ID NO: 13655 - DNA, 20 bp, Artificial Sequence
  Description of Artificial Sequence: Synthetic oligonucleotide
  Target: ATXN2; (-) strand; PAM type: NNNNGHTT; PAM sequence: CTGGGATT
cgccttggcctcctggagtg

SEQ ID NO: 13656 - DNA, 20 bp, Artificial Sequence
  Description of Artificial Sequence: Synthetic oligonucleotide
  Target: ATXN2; (-) strand; PAM type: NNNNGHTT; PAM sequence: TGGGGTTT
ttttgtatttttagtagaga

SEQ ID NO: 13657 - DNA, 20 bp, Artificial Sequence
  Description of Artificial Sequence: Synthetic oligonucleotide
  Target: ATXN2; (-) strand; PAM type: NNNNGHTT; PAM sequence: TTTTGTTT
ctgccaccacgcctggctaa

SEQ ID NO: 13658 - DNA, 20 bp, Artificial Sequence
  Description of Artificial Sequence: Synthetic oligonucleotide
  Target: ATXN2; (-) strand; PAM type: NNNNGHTT; PAM sequence: CTGGGATT
tgccttggcctcccaaagtg

SEQ ID NO: 13659 - DNA, 20 bp, Artificial Sequence
  Description of Artificial Sequence: Synthetic oligonucleotide
  Target: ATXN2; (-) strand; PAM type: NNNNGHTT; PAM sequence: TGGAGTTT
ttttgtatatctagtagtga

SEQ ID NO: 13660 - DNA, 20 bp, Artificial Sequence
  Description of Artificial Sequence: Synthetic oligonucleotide
  Target: ATXN2; (-) strand; PAM type: NNNNGHTT; PAM sequence: TTGGGATT
agccacctcctcctgaatag

SEQ ID NO: 13661 - DNA, 20 bp, Artificial Sequence
  Description of Artificial Sequence: Synthetic oligonucleotide
  Target: ATXN2; (-) strand; PAM type: NNNNGHTT; PAM sequence: GGAGGTTT
gatttttttttctttgagac

SEQ ID NO: 13662 - DNA, 20 bp, Artificial Sequence
  Description of Artificial Sequence: Synthetic oligonucleotide
  Target: ATXN2; (-) strand; PAM type: NNNNGHTT; PAM sequence: TTATGATT
gcttatgtagtattttaatt

SEQ ID NO: 13663 - DNA, 20 bp, Artificial Sequence
  Description of Artificial Sequence: Synthetic oligonucleotide
  Target: ATXN2; (-) strand; PAM type: NNNNGHTT; PAM sequence: ATTTGCTT
ctgtgcccagccaagtgagt

SEQ ID NO: 13664 - DNA, 20 bp, Artificial Sequence
  Description of Artificial Sequence: Synthetic oligonucleotide
  Target: ATXN2; (-) strand; PAM type: NNNNGHTT; PAM sequence: GTGGGATT
cgccttggcctcttgaagtg

SEQ ID NO: 13665 - DNA, 20 bp, Artificial Sequence
  Description of Artificial Sequence: Synthetic oligonucleotide
  Target: ATXN2; (-) strand; PAM type: NNNNGHTT; PAM sequence: TGGAGTTT
ttttatagttttagtagagg

SEQ ID NO: 13666 - DNA, 20 bp, Artificial Sequence
  Description of Artificial Sequence: Synthetic oligonucleotide
  Target: ATXN2; (-) strand; PAM type: NNNNGHTT; PAM sequence: TATAGTTT
caccacacgtggctaatttt

SEQ ID NO: 13667 - DNA, 20 bp, Artificial Sequence
  Description of Artificial Sequence: Synthetic oligonucleotide
  Target: ATXN2; (-) strand; PAM type: NNNNGHTT; PAM sequence: CTGGGATT
tgcctcagcctcccaagtag

SEQ ID NO: 13668 - DNA, 20 bp, Artificial Sequence
  Description of Artificial Sequence: Synthetic oligonucleotide
  Target: ATXN2; (-) strand; PAM type: NNNNGHTT; PAM sequence: AATTGCTT
tcgggaggctgaggcaggag

SEQ ID NO: 13669 - DNA, 20 bp, Artificial Sequence
  Description of Artificial Sequence: Synthetic oligonucleotide
  Target: ATXN2; (-) strand; PAM type: NNNNGHTT; PAM sequence: TCTGGATT
gtggtccttctgcctcagcc

SEQ ID NO: 13670 - DNA, 20 bp, Artificial Sequence
  Description of Artificial Sequence: Synthetic oligonucleotide
  Target: ATXN2; (-) strand; PAM type: NNNNGHTT; PAM sequence: GACTGTTT
caggcacctgcataacacct

SEQ ID NO: 13671 - DNA, 20 bp, Artificial Sequence
  Description of Artificial Sequence: Synthetic oligonucleotide
  Target: ATXN2; (-) strand; PAM type: NNNNGHTT; PAM sequence: TCCTGCTT
ttctcttttaagagatagag

SEQ ID NO: 13672 - DNA, 20 bp, Artificial Sequence
  Description of Artificial Sequence: Synthetic oligonucleotide
  Target: ATXN2; (-) strand; PAM type: NNNNGHTT; PAM sequence: CTAGGATT
cacctcagcctcccagagtg

SEQ ID NO: 13673 - DNA, 20 bp, Artificial Sequence
  Description of Artificial Sequence: Synthetic oligonucleotide
  Target: ATXN2; (-) strand; PAM type: NNNNGHTT; PAM sequence: ACAGGATT
attttgtatgttcagtagag

SEQ ID NO: 13674 - DNA, 20 bp, Artificial Sequence
  Description of Artificial Sequence: Synthetic oligonucleotide
  Target: ATXN2; (-) strand; PAM type: NNNNGHTT; PAM sequence: CTGGGATT
tgcgtcagcctcccgagtag

SEQ ID NO: 13675 - DNA, 20 bp, Artificial Sequence
  Description of Artificial Sequence: Synthetic oligonucleotide
  Target: ATXN2; (-) strand; PAM type: NNNNGHTT; PAM sequence: TGGAGTTT
ttttttttttttttttgaga

SEQ ID NO: 13676 - DNA, 20 bp, Artificial Sequence
  Description of Artificial Sequence: Synthetic oligonucleotide
  Target: ATXN2; (-) strand; PAM type: NNNNGHTT; PAM sequence: TTTAGCTT
ttctactttcccttactata

SEQ ID NO: 13677 - DNA, 20 bp, Artificial Sequence
  Description of Artificial Sequence: Synthetic oligonucleotide
  Target: ATXN2; (-) strand; PAM type: NNNNGHTT; PAM sequence: CTCTGTTT
actttgtggttatataaata

SEQ ID NO: 13678 - DNA, 20 bp, Artificial Sequence
  Description of Artificial Sequence: Synthetic oligonucleotide
  Target: ATXN2; (-) strand; PAM type: NNNNGHTT; PAM sequence: CTAAGTTT
cttggttagagttgtgtcta

SEQ ID NO: 13679 - DNA, 20 bp, Artificial Sequence
  Description of Artificial Sequence: Synthetic oligonucleotide
  Target: ATXN2; (-) strand; PAM type: NNNNGHTT; PAM sequence: GTGTGTTT
gaatacaacagaaatgattt

SEQ ID NO: 13680 - DNA, 20 bp, Artificial Sequence
  Description of Artificial Sequence: Synthetic oligonucleotide
  Target: ATXN2; (-) strand; PAM type: NNNNGHTT; PAM sequence: AAATGATT
ttttggcaggaatacaacag

SEQ ID NO: 13681 - DNA, 20 bp, Artificial Sequence
  Description of Artificial Sequence: Synthetic oligonucleotide
  Target: ATXN2; (-) strand; PAM type: NNNNGHTT; PAM sequence: ATTAGATT
ttatctgaggtttccttatg

SEQ ID NO: 13682 - DNA, 20 bp, Artificial Sequence
  Description of Artificial Sequence: Synthetic oligonucleotide
  Target: ATXN2; (-) strand; PAM type: NNNNGHTT; PAM sequence: TTATGATT
agggtttatctgaggtttcc

SEQ ID NO: 13683 - DNA, 20 bp, Artificial Sequence
  Description of Artificial Sequence: Synthetic oligonucleotide
  Target: ATXN2; (-) strand; PAM type: NNNNGHTT; PAM sequence: TGAGGTTT
tccctcaactagggtttatc

SEQ ID NO: 13684 - DNA, 20 bp, Artificial Sequence
  Description of Artificial Sequence: Synthetic oligonucleotide
  Target: ATXN2; (-) strand; PAM type: NNNNGHTT; PAM sequence: TAGGGTTT
tttgtagactgtccctcaac

SEQ ID NO: 13685 - DNA, 20 bp, Artificial Sequence
  Description of Artificial Sequence: Synthetic oligonucleotide
  Target: ATXN2; (-) strand; PAM type: NNNNGHTT; PAM sequence: TGAAGATT
cttttatgacttgacacttt

SEQ ID NO: 13686 - DNA, 20 bp, Artificial Sequence
  Description of Artificial Sequence: Synthetic oligonucleotide
  Target: ATXN2; (-) strand; PAM type: NNNNGHTT; PAM sequence: AGCAGTTT
tttggtctcctttaatccaa

SEQ ID NO: 13687 - DNA, 20 bp, Artificial Sequence
  Description of Artificial Sequence: Synthetic oligonucleotide
  Target: ATXN2; (-) strand; PAM type: NNNNGHTT; PAM sequence: CCAGGATT
ccctctgtccaagaaccaat

SEQ ID NO: 13688 - DNA, 20 bp, Artificial Sequence
  Description of Artificial Sequence: Synthetic oligonucleotide
  Target: ATXN2; (-) strand; PAM type: NNNNGHTT; PAM sequence: TTCTGTTT
ataattgtgtcaaactgtta

SEQ ID NO: 13689 - DNA, 20 bp, Artificial Sequence
  Description of Artificial Sequence: Synthetic oligonucleotide
  Target: ATXN2; (-) strand; PAM type: NNNNGHTT; PAM sequence: GTAAGATT
ctgtattggtaattgtatat

SEQ ID NO: 13690 - DNA, 20 bp, Artificial Sequence
  Description of Artificial Sequence: Synthetic oligonucleotide
  Target: ATXN2; (-) strand; PAM type: NNNNGHTT; PAM sequence: GTAGGATT
catttgagtttcaaggctga

SEQ ID NO: 13691 - DNA, 20 bp, Artificial Sequence
  Description of Artificial Sequence: Synthetic oligonucleotide
  Target: ATXN2; (-) strand; PAM type: NNNNGHTT; PAM sequence: TTGAGTTT
acttcctgaaaagatggcat

SEQ ID NO: 13692 - DNA, 20 bp, Artificial Sequence
  Description of Artificial Sequence: Synthetic oligonucleotide
  Target: ATXN2; (-) strand; PAM type: NNNNGHTT; PAM sequence: ATTTGATT
agttgaaaacagcatcgtat

SEQ ID NO: 13693 - DNA, 20 bp, Artificial Sequence
  Description of Artificial Sequence: Synthetic oligonucleotide
  Target: ATXN2; (-) strand; PAM type: NNNNGHTT; PAM sequence: TTCTGATT
cccctggaagaggcatcatt

SEQ ID NO: 13694 - DNA, 20 bp, Artificial Sequence
  Description of Artificial Sequence: Synthetic oligonucleotide
  Target: ATXN2; (-) strand; PAM type: NNNNGHTT; PAM sequence: CACTGTTT
aagacactgcttgccgacca

SEQ ID NO: 13695 - DNA, 20 bp, Artificial Sequence
  Description of Artificial Sequence: Synthetic oligonucleotide
  Target: ATXN2; (-) strand; PAM type: NNNNGHTT; PAM sequence: CACTGCTT
tcttttaattttcacaaaga

SEQ ID NO: 13696 - DNA, 20 bp, Artificial Sequence
  Description of Artificial Sequence: Synthetic oligonucleotide
  Target: ATXN2; (-) strand; PAM type: NNNNGHTT; PAM sequence: ATGTGCTT
tgcctttgggggctatatct

SEQ ID NO: 13697 - DNA, 20 bp, Artificial Sequence
  Description of Artificial Sequence: Synthetic oligonucleotide
  Target: ATXN2; (-) strand; PAM type: NNNNGHTT; PAM sequence: AGGTGTTT
gtgaatggatgttgaaatca

SEQ ID NO: 13698 - DNA, 20 bp, Artificial Sequence
  Description of Artificial Sequence: Synthetic oligonucleotide
  Target: ATXN2; (-) strand; PAM type: NNNNGHTT; PAM sequence: TTAGGTTT
acttttgccaagcttggttg

SEQ ID NO: 13699 - DNA, 20 bp, Artificial Sequence
  Description of Artificial Sequence: Synthetic oligonucleotide
  Target: ATXN2; (-) strand; PAM type: NNNNGHTT; PAM sequence: CCAAGCTT
gtggtagaaagatacttttg

SEQ ID NO: 13700 - DNA, 20 bp, Artificial Sequence
  Description of Artificial Sequence: Synthetic oligonucleotide
  Target: ATXN2; (-) strand; PAM type: NNNNGHTT; PAM sequence: GCATGATT
ctcagtgtgtatcatatgag

SEQ ID NO: 13701 - DNA, 20 bp, Artificial Sequence
  Description of Artificial Sequence: Synthetic oligonucleotide
  Target: ATXN2; (-) strand; PAM type: NNNNGHTT; PAM sequence: TTCTGATT
ctttttttttctttcccttg

SEQ ID NO: 13702 - DNA, 20 bp, Artificial Sequence
  Description of Artificial Sequence: Synthetic oligonucleotide
  Target: ATXN2; (-) strand; PAM type: NNNNGHTT; PAM sequence: GAAAGTTT
agattgatagctttgaaatg

SEQ ID NO: 13703 - DNA, 20 bp, Artificial Sequence
  Description of Artificial Sequence: Synthetic oligonucleotide
  Target: ATXN2; (-) strand; PAM type: NNNNGHTT; PAM sequence: GATAGCTT
tgacccctgatttaaagatt

SEQ ID NO: 13704 - DNA, 20 bp, Artificial Sequence
  Description of Artificial Sequence: Synthetic oligonucleotide
  Target: ATXN2; (-) strand; PAM type: NNNNGHTT; PAM sequence: TAAAGATT
tagtgtcctgacccctgatt

SEQ ID NO: 13705 - DNA, 20 bp, Artificial Sequence
  Description of Artificial Sequence: Synthetic oligonucleotide
  Target: ATXN2; (-) strand; PAM type: NNNNGHTT; PAM sequence: CCCTGATT
gtgggctgtagtgtcctgac

SEQ ID NO: 13706 - DNA, 20 bp, Artificial Sequence
  Description of Artificial Sequence: Synthetic oligonucleotide
  Target: ATXN2; (-) strand; PAM type: NNNNGHTT; PAM sequence: TATAGCTT
tattttaggctctagggcca

SEQ ID NO: 13707 - DNA, 20 bp, Artificial Sequence
  Description of Artificial Sequence: Synthetic oligonucleotide
  Target: ATXN2; (-) strand; PAM type: NNNNGHTT; PAM sequence: CTATGTTT
ttgttgtattgctgttgcag

SEQ ID NO: 13708 - DNA, 20 bp, Artificial Sequence
  Description of Artificial Sequence: Synthetic oligonucleotide
  Target: ATXN2; (-) strand; PAM type: NNNNGHTT; PAM sequence: GCTTGATT
gcacctctgcacctggctct

SEQ ID NO: 13709 - DNA, 20 bp, Artificial Sequence
  Description of Artificial Sequence: Synthetic oligonucleotide
  Target: ATXN2; (-) strand; PAM type: NNNNGHTT; PAM sequence: CTCTGCTT
ggctgcacctctgcacctgg

SEQ ID NO: 13710 - DNA, 20 bp, Artificial Sequence
  Description of Artificial Sequence: Synthetic oligonucleotide
  Target: ATXN2; (-) strand; PAM type: NNNNGHTT; PAM sequence: TTCAGTTT
aataataaacaactttatct

SEQ ID NO: 13711 - DNA, 20 bp, Artificial Sequence
  Description of Artificial Sequence: Synthetic oligonucleotide
  Target: ATXN2; (-) strand; PAM type: NNNNGHTT; PAM sequence: TACTGATT
ccccatgcagaagtagtaaa

SEQ ID NO: 13712 - DNA, 20 bp, Artificial Sequence
  Description of Artificial Sequence: Synthetic oligonucleotide
  Target: ATXN2; (-) strand; PAM type: NNNNGHTT; PAM sequence: GCAGGTTT
gctcttacagaatttgtcta

SEQ ID NO: 13713 - DNA, 20 bp, Artificial Sequence
  Description of Artificial Sequence: Synthetic oligonucleotide
  Target: ATXN2; (-) strand; PAM type: NNNNGHTT; PAM sequence: ACCAGCTT
cttgagttcaggagctggag

SEQ ID NO: 13714 - DNA, 20 bp, Artificial Sequence
  Description of Artificial Sequence: Synthetic oligonucleotide
  Target: ATXN2; (-) strand; PAM type: NNNNGHTT; PAM sequence: AGCAGTTT
aaaataatttaatgctatcc

SEQ ID NO: 13715 - DNA, 20 bp, Artificial Sequence
  Description of Artificial Sequence: Synthetic oligonucleotide
  Target: ATXN2; (-) strand; PAM type: NNNNGHTT; PAM sequence: ATACGTTT
atcacatgtacactagtaaa

SEQ ID NO: 13716 - DNA, 20 bp, Artificial Sequence
  Description of Artificial Sequence: Synthetic oligonucleotide
  Target: ATXN2; (-) strand; PAM type: NNNNGHTT; PAM sequence: GTCAGCTT
actcggggtttccacagacg

SEQ ID NO: 13717 - DNA, 20 bp, Artificial Sequence
  Description of Artificial Sequence: Synthetic oligonucleotide
  Target: ATXN2; (-) strand; PAM type: NNNNGHTT; PAM sequence: CGGGGTTT
actaatggacttgcccgact

SEQ ID NO: 13718 - DNA, 20 bp, Artificial Sequence
  Description of Artificial Sequence: Synthetic oligonucleotide
  Target: ATXN2; (-) strand; PAM type: NNNNGHTT; PAM sequence: GTGAGATT
tggaaaagtttgaaaatatt

SEQ ID NO: 13719 - DNA, 20 bp, Artificial Sequence
  Description of Artificial Sequence: Synthetic oligonucleotide
  Target: ATXN2; (-) strand; PAM type: NNNNGHTT; PAM sequence: AAAAGTTT
aacgtatacaataatagtgg

SEQ ID NO: 13720 - DNA, 20 bp, Artificial Sequence
  Description of Artificial Sequence: Synthetic oligonucleotide
  Target: ATXN2; (-) strand; PAM type: NNNNGHTT; PAM sequence: TACAGATT
attgtaaaatacaatctgat

SEQ ID NO: 13721 - DNA, 20 bp, Artificial Sequence
  Description of Artificial Sequence: Synthetic oligonucleotide
  Target: ATXN2; (-) strand; PAM type: NNNNGHTT; PAM sequence: ATCTGATT
tacaattattgtaaaataca

SEQ ID NO: 13722 - DNA, 20 bp, Artificial Sequence
  Description of Artificial Sequence: Synthetic oligonucleotide
  Target: ATXN2; (-) strand; PAM type: NNNNGHTT; PAM sequence: TACAGATT
taacatcaacgattactgat

SEQ ID NO: 13723 - DNA, 20 bp, Artificial Sequence
  Description of Artificial Sequence: Synthetic oligonucleotide
  Target: ATXN2; (-) strand; PAM type: NNNNGHTT; PAM sequence: TACTGATT
atcagggtaacatcaacgat

SEQ ID NO: 13724 - DNA, 20 bp, Artificial Sequence
  Description of Artificial Sequence: Synthetic oligonucleotide
  Target: ATXN2; (-) strand; PAM type: NNNNGHTT; PAM sequence: CAACGATT
aaaagaaatcagggtaacat

SEQ ID NO: 13725 - DNA, 20 bp, Artificial Sequence
  Description of Artificial Sequence: Synthetic oligonucleotide
  Target: ATXN2; (-) strand; PAM type: NNNNGHTT; PAM sequence: GACCGTTT
taagattgctgtcttatatg

SEQ ID NO: 13726 - DNA, 20 bp, Artificial Sequence
  Description of Artificial Sequence: Synthetic oligonucleotide
  Target: ATXN2; (-) strand; PAM type: NNNNGHTT; PAM sequence: TTAAGATT
gtcataacacacaacattta

SEQ ID NO: 13727 - DNA, 20 bp, Artificial Sequence
  Description of Artificial Sequence: Synthetic oligonucleotide
  Target: ATXN2; (-) strand; PAM type: NNNNGHTT; PAM sequence: CTGGGATT
tgccttggcctcccaaagtg

SEQ ID NO: 13728 - DNA, 20 bp, Artificial Sequence
  Description of Artificial Sequence: Synthetic oligonucleotide
  Target: ATXN2; (-) strand; PAM type: NNNNGHTT; PAM sequence: CCTGGCTT
ggccaggctgggctcgaact

SEQ ID NO: 13729 - DNA, 20 bp, Artificial Sequence
  Description of Artificial Sequence: Synthetic oligonucleotide
  Target: ATXN2; (-) strand; PAM type: NNNNGHTT; PAM sequence: TGGGGTTT
ttttgtatttttagtagaga

SEQ ID NO: 13730 - DNA, 20 bp, Artificial Sequence
  Description of Artificial Sequence: Synthetic oligonucleotide
  Target: ATXN2; (-) strand; PAM type: NNNNGHTT; PAM sequence: CTGGGATT
tgcctcagcttactgagtag

SEQ ID NO: 13731 - DNA, 20 bp, Artificial Sequence
  Description of Artificial Sequence: Synthetic oligonucleotide
  Target: ATXN2; (-) strand; PAM type: NNNNGHTT; PAM sequence: CTCAGCTT
ggttcaagcaattctcgtgc

SEQ ID NO: 13732 - DNA, 20 bp, Artificial Sequence
  Description of Artificial Sequence: Synthetic oligonucleotide
  Target: ATXN2; (-) strand; PAM type: NNNNGHTT; PAM sequence: CTCTGTTT
ttttttgagacagaatctca

SEQ ID NO: 13733 - DNA, 20 bp, Artificial Sequence
  Description of Artificial Sequence: Synthetic oligonucleotide
  Target: ATXN2; (-) strand; PAM type: NNNNGHTT; PAM sequence: CATAGCTT
atgtccttgtacattcccat

SEQ ID NO: 13734 - DNA, 20 bp, Artificial Sequence
  Description of Artificial Sequence: Synthetic oligonucleotide
  Target: ATXN2; (-) strand; PAM type: NNNNGHTT; PAM sequence: GACTGATT
cccttgatccctgggctatg

SEQ ID NO: 13735 - DNA, 20 bp, Artificial Sequence
  Description of Artificial Sequence: Synthetic oligonucleotide
  Target: ATXN2; (-) strand; PAM type: NNNNGHTT; PAM sequence: AATGGCTT
cggccgtatttcttaaataa

SEQ ID NO: 13736 - DNA, 20 bp, Artificial Sequence
  Description of Artificial Sequence: Synthetic oligonucleotide
  Target: ATXN2; (-) strand; PAM type: NNNNGHTT; PAM sequence: TTGAGATT
tgcctcggccttccgaagtg

SEQ ID NO: 13737 - DNA, 20 bp, Artificial Sequence
  Description of Artificial Sequence: Synthetic oligonucleotide
  Target: ATXN2; (-) strand; PAM type: NNNNGHTT; PAM sequence: CGGGGTTT
ttttgtatttttagtagagg

SEQ ID NO: 13738 - DNA, 20 bp, Artificial Sequence
  Description of Artificial Sequence: Synthetic oligonucleotide
  Target: ATXN2; (-) strand; PAM type: NNNNGHTT; PAM sequence: CTGGGATT
tgcctcagcctcctgagtag

SEQ ID NO: 13739 - DNA, 20 bp, Artificial Sequence
  Description of Artificial Sequence: Synthetic oligonucleotide
  Target: ATXN2; (-) strand; PAM type: NNNNGHTT; PAM sequence: TGGAGTTT
ttttttctttttttttgaga

SEQ ID NO: 13740 - DNA, 20 bp, Artificial Sequence
  Description of Artificial Sequence: Synthetic oligonucleotide
  Target: ATXN2; (-) strand; PAM type: NNNNGHTT; PAM sequence: GAAAGTTT
agaatggtgaatacttttta

SEQ ID NO: 13741 - DNA, 20 bp, Artificial Sequence
  Description of Artificial Sequence: Synthetic oligonucleotide
  Target: ATXN2; (-) strand; PAM type: NNNNGHTT; PAM sequence: TGATGTTT
tctaaaactcctgttaatgt

SEQ ID NO: 13742 - DNA, 20 bp, Artificial Sequence
  Description of Artificial Sequence: Synthetic oligonucleotide
  Target: ATXN2; (-) strand; PAM type: NNNNGHTT; PAM sequence: TTGAGATT
gaggtggaggttgcagtgag

SEQ ID NO: 13743 - DNA, 20 bp, Artificial Sequence
  Description of Artificial Sequence: Synthetic oligonucleotide
  Target: ATXN2; (-) strand; PAM type: NNNNGHTT; PAM sequence: AATCGCTT
ttgggagactgaggcaggag

SEQ ID NO: 13744 - DNA, 20 bp, Artificial Sequence
  Description of Artificial Sequence: Synthetic oligonucleotide
  Target: ATXN2; (-) strand; PAM type: NNNNGHTT; PAM sequence: CCCCGTTT
gtctggcaaacgtggtgaaa

SEQ ID NO: 13745 - DNA, 20 bp, Artificial Sequence
  Description of Artificial Sequence: Synthetic oligonucleotide
  Target: ATXN2; (-) strand; PAM type: NNNNGHTT; PAM sequence: TCTTGCTT
cccacttctaattttagttc

SEQ ID NO: 13746 - DNA, 20 bp, Artificial Sequence
  Description of Artificial Sequence: Synthetic oligonucleotide
  Target: ATXN2; (-) strand; PAM type: NNNNGHTT; PAM sequence: ATGAGATT
tcatctattcaagttttatc

SEQ ID NO: 13747 - DNA, 20 bp, Artificial Sequence
  Description of Artificial Sequence: Synthetic oligonucleotide
  Target: ATXN2; (-) strand; PAM type: NNNNGHTT; PAM sequence: TCAAGTTT
agaagcaacacctcatctat

SEQ ID NO: 13748 - DNA, 20 bp, Artificial Sequence
  Description of Artificial Sequence: Synthetic oligonucleotide
  Target: ATXN2; (-) strand; PAM type: NNNNGHTT; PAM sequence: CTTTGCTT
ccatcttaagaaaccacttt

SEQ ID NO: 13749 - DNA, 20 bp, Artificial Sequence
  Description of Artificial Sequence: Synthetic oligonucleotide
  Target: ATXN2; (-) strand; PAM type: NNNNGHTT; PAM sequence: TGTAGATT
ctcacagcagcttcaccagg

SEQ ID NO: 13750 - DNA, 20 bp, Artificial Sequence
  Description of Artificial Sequence: Synthetic oligonucleotide
  Target: ATXN2; (-) strand; PAM type: NNNNGHTT; PAM sequence: AGCAGCTT
gtcatttcaacagtgctcac

SEQ ID NO: 13751 - DNA, 20 bp, Artificial Sequence
  Description of Artificial Sequence: Synthetic oligonucleotide
  Target: ATXN2; (-) strand; PAM type: NNNNGHTT; PAM sequence: GCCTGTTT
agtgtgagccaccacgcccg

SEQ ID NO: 13752 - DNA, 20 bp, Artificial Sequence
  Description of Artificial Sequence: Synthetic oligonucleotide
  Target: ATXN2; (-) strand; PAM type: NNNNGHTT; PAM sequence: CTGGGATT
cgcctcaacttcgcaaagtg

SEQ ID NO: 13753 - DNA, 20 bp, Artificial Sequence
  Description of Artificial Sequence: Synthetic oligonucleotide
  Target: ATXN2; (-) strand; PAM type: NNNNGHTT; PAM sequence: CCTGGCTT
ggtgaggctggtcttgaact

SEQ ID NO: 13754 - DNA, 20 bp, Artificial Sequence
  Description of Artificial Sequence: Synthetic oligonucleotide
  Target: ATXN2; (-) strand; PAM type: NNNNGHTT; PAM sequence: CGGGGTTT
ttttgtatttttagtagaga

SEQ ID NO: 13755 - DNA, 20 bp, Artificial Sequence
  Description of Artificial Sequence: Synthetic oligonucleotide
  Target: ATXN2; (-) strand; PAM type: NNNNGHTT; PAM sequence: AAGTGATT
aacctctgccttccgggttc

SEQ ID NO: 13756 - DNA, 20 bp, Artificial Sequence
  Description of Artificial Sequence: Synthetic oligonucleotide
  Target: ATXN2; (-) strand; PAM type: NNNNGHTT; PAM sequence: CTCAGCTT
ctggagtgcagtggctcaat

SEQ ID NO: 13757 - DNA, 20 bp, Artificial Sequence
  Description of Artificial Sequence: Synthetic oligonucleotide
  Target: ATXN2; (-) strand; PAM type: NNNNGHTT; PAM sequence: TGGGGTTT
ttttatatttttagtagaga

SEQ ID NO: 13758 - DNA, 20 bp, Artificial Sequence
  Description of Artificial Sequence: Synthetic oligonucleotide
  Target: ATXN2; (-) strand; PAM type: NNNNGHTT; PAM sequence: AAGCGATT
aacctctgcctcctgagttg

SEQ ID NO: 13759 - DNA, 20 bp, Artificial Sequence
  Description of Artificial Sequence: Synthetic oligonucleotide
  Target: ATXN2; (-) strand; PAM type: NNNNGHTT; PAM sequence: TTTTGCTT
tagattgtttgtgtatattg

SEQ ID NO: 13760 - DNA, 20 bp, Artificial Sequence
  Description of Artificial Sequence: Synthetic oligonucleotide
  Target: ATXN2; (-) strand; PAM type: NNNNGHTT; PAM sequence: TATTGTTT
tgtgttagattgtttgtgta

SEQ ID NO: 13761 - DNA, 20 bp, Artificial Sequence
  Description of Artificial Sequence: Synthetic oligonucleotide
  Target: ATXN2; (-) strand; PAM type: NNNNGHTT; PAM sequence: GATTGTTT
tcagttatcaggatgtgtta

SEQ ID NO: 13762 - DNA, 20 bp, Artificial Sequence
  Description of Artificial Sequence: Synthetic oligonucleotide
  Target: ATXN2; (-) strand; PAM type: NNNNGHTT; PAM sequence: GTTAGATT
tttttcagttatcaggatgt

SEQ ID NO: 13763 - DNA, 20 bp, Artificial Sequence
  Description of Artificial Sequence: Synthetic oligonucleotide
  Target: ATXN2; (-) strand; PAM type: NNNNGHTT; PAM sequence: TAATGTTT
aattttattcttagattatt

SEQ ID NO: 13764 - DNA, 20 bp, Artificial Sequence
  Description of Artificial Sequence: Synthetic oligonucleotide
  Target: ATXN2; (-) strand; PAM type: NNNNGHTT; PAM sequence: CTTAGATT
taatggaaggtaattttatt

SEQ ID NO: 13765 - DNA, 20 bp, Artificial Sequence
  Description of Artificial Sequence: Synthetic oligonucleotide
  Target: ATXN2; (-) strand; PAM type: NNNNGHTT; PAM sequence: CCGGGATT
tgcctcagcctcccaaagtg

SEQ ID NO: 13766 - DNA, 20 bp, Artificial Sequence
  Description of Artificial Sequence: Synthetic oligonucleotide
  Target: ATXN2; (-) strand; PAM type: NNNNGHTT; PAM sequence: AGGGGATT
tttttgtatttttatttgag

SEQ ID NO: 13767 - DNA, 20 bp, Artificial Sequence
  Description of Artificial Sequence: Synthetic oligonucleotide
  Target: ATXN2; (-) strand; PAM type: NNNNGHTT; PAM sequence: CTGGGATT
tgcctcagcctcctgagtag

SEQ ID NO: 13768 - DNA, 20 bp, Artificial Sequence
  Description of Artificial Sequence: Synthetic oligonucleotide
  Target: ATXN2; (-) strand; PAM type: NNNNGHTT; PAM sequence: AAGCGATT
aacctctgcttcctgggttc

SEQ ID NO: 13769 - DNA, 20 bp, Artificial Sequence
  Description of Artificial Sequence: Synthetic oligonucleotide
  Target: ATXN2; (-) strand; PAM type: NNNNGHTT; PAM sequence: CTCTGCTT
tgatattggcttactgcaac

SEQ ID NO: 13770 - DNA, 20 bp, Artificial Sequence
  Description of Artificial Sequence: Synthetic oligonucleotide
  Target: ATXN2; (-) strand; PAM type: NNNNGHTT; PAM sequence: ATTGGCTT
ctggagtgcattgtcgtgat

SEQ ID NO: 13771 - DNA, 20 bp, Artificial Sequence
  Description of Artificial Sequence: Synthetic oligonucleotide
  Target: ATXN2; (-) strand; PAM type: NNNNGHTT; PAM sequence: TTTTGTTT
gtttttttttttgttttgtt

SEQ ID NO: 13772 - DNA, 20 bp, Artificial Sequence
  Description of Artificial Sequence: Synthetic oligonucleotide
  Target: ATXN2; (-) strand; PAM type: NNNNGHTT; PAM sequence: TTTTGTTT
ctccccagtttttttttttg

SEQ ID NO: 13773 - DNA, 20 bp, Artificial Sequence
  Description of Artificial Sequence: Synthetic oligonucleotide
  Target: ATXN2; (-) strand; PAM type: NNNNGHTT; PAM sequence: TTTTGTTT
tttttctccccagttttttt

SEQ ID NO: 13774 - DNA, 20 bp, Artificial Sequence
  Description of Artificial Sequence: Synthetic oligonucleotide
  Target: ATXN2; (-) strand; PAM type: NNNNGHTT; PAM sequence: CCCAGTTT
gagattgcatgttttttctc

SEQ ID NO: 13775 - DNA, 20 bp, Artificial Sequence
  Description of Artificial Sequence: Synthetic oligonucleotide
  Target: ATXN2; (-) strand; PAM type: NNNNGHTT; PAM sequence: GCATGTTT
tgacagtaccaatagagatt

SEQ ID NO: 13776 - DNA, 20 bp, Artificial Sequence
  Description of Artificial Sequence: Synthetic oligonucleotide
  Target: ATXN2; (-) strand; PAM type: NNNNGHTT; PAM sequence: TAGAGATT
ttgtatggtgacagtaccaa

SEQ ID NO: 13777 - DNA, 20 bp, Artificial Sequence
  Description of Artificial Sequence: Synthetic oligonucleotide
  Target: ATXN2; (-) strand; PAM type: NNNNGHTT; PAM sequence: TTTTGATT
aaacctggatcaatgaaata

SEQ ID NO: 13778 - DNA, 20 bp, Artificial Sequence
  Description of Artificial Sequence: Synthetic oligonucleotide
  Target: ATXN2; (-) strand; PAM type: NNNNGHTT; PAM sequence: GTCTGATT
tagttacttctatacaacca

SEQ ID NO: 13779 - DNA, 20 bp, Artificial Sequence
  Description of Artificial Sequence: Synthetic oligonucleotide
  Target: ATXN2; (-) strand; PAM type: NNNNGHTT; PAM sequence: TACAGTTT
gctggagggaagagcattct

SEQ ID NO: 13780 - DNA, 20 bp, Artificial Sequence
  Description of Artificial Sequence: Synthetic oligonucleotide
  Target: ATXN2; (-) strand; PAM type: NNNNGHTT; PAM sequence: GAAGGCTT
ctgtagagggggtagtttga

SEQ ID NO: 13781 - DNA, 20 bp, Artificial Sequence
  Description of Artificial Sequence: Synthetic oligonucleotide
  Target: ATXN2; (-) strand; PAM type: NNNNGHTT; PAM sequence: GGTAGTTT
tggggagctgctgtagaggg

SEQ ID NO: 13782 - DNA, 20 bp, Artificial Sequence
  Description of Artificial Sequence: Synthetic oligonucleotide
  Target: ATXN2; (-) strand; PAM type: NNNNGHTT; PAM sequence: TCTAGATT
ttaagaggtggaacttgatt

SEQ ID NO: 13783 - DNA, 20 bp, Artificial Sequence
  Description of Artificial Sequence: Synthetic oligonucleotide
  Target: ATXN2; (-) strand; PAM type: NNNNGHTT; PAM sequence: ACTTGATT
agttaaccttaagaggtgga

SEQ ID NO: 13784 - DNA, 20 bp, Artificial Sequence
  Description of Artificial Sequence: Synthetic oligonucleotide
  Target: ATXN2; (-) strand; PAM type: NNNNGHTT; PAM sequence: ATAGGATT
gaaaatattcaatacgtggt

SEQ ID NO: 13785 - DNA, 20 bp, Artificial Sequence
  Description of Artificial Sequence: Synthetic oligonucleotide
  Target: ATXN2; (-) strand; PAM type: NNNNGHTT; PAM sequence: CTGTGTTT
caaaaaaaactctagcttca

SEQ ID NO: 13786 - DNA, 20 bp, Artificial Sequence
  Description of Artificial Sequence: Synthetic oligonucleotide
  Target: ATXN2; (-) strand; PAM type: NNNNGHTT; PAM sequence: TCTAGCTT
caaaacaaaacaaaaaaaac

SEQ ID NO: 13787 - DNA, 20 bp, Artificial Sequence
  Description of Artificial Sequence: Synthetic oligonucleotide
  Target: ATXN2; (-) strand; PAM type: NNNNGHTT; PAM sequence: CTCAGTTT
atttagagttgccttcccac

SEQ ID NO: 13788 - DNA, 20 bp, Artificial Sequence
  Description of Artificial Sequence: Synthetic oligonucleotide
  Target: ATXN2; (-) strand; PAM type: NNNNGHTT; PAM sequence: ACCGGATT
tgatcctagatgattatatg

SEQ ID NO: 13789 - DNA, 20 bp, Artificial Sequence
  Description of Artificial Sequence: Synthetic oligonucleotide
  Target: ATXN2; (-) strand; PAM type: NNNNGHTT; PAM sequence: AGATGATT
tgttttgaaacaatgatcct

SEQ ID NO: 13790 - DNA, 20 bp, Artificial Sequence
  Description of Artificial Sequence: Synthetic oligonucleotide
  Target: ATXN2; (-) strand; PAM type: NNNNGHTT; PAM sequence: AATTGTTT
ttagttcttgtgtgaatggt

SEQ ID NO: 13791 - DNA, 20 bp, Artificial Sequence
  Description of Artificial Sequence: Synthetic oligonucleotide
  Target: ATXN2; (-) strand; PAM type: NNNNGHTT; PAM sequence: ACAGGATT
aaacacagagagctgaagtc

SEQ ID NO: 13792 - DNA, 20 bp, Artificial Sequence
  Description of Artificial Sequence: Synthetic oligonucleotide
  Target: ATXN2; (-) strand; PAM type: NNNNGHTT; PAM sequence: CACTGTTT
acacttaataacataccagg

SEQ ID NO: 13793 - DNA, 20 bp, Artificial Sequence
  Description of Artificial Sequence: Synthetic oligonucleotide
  Target: ATXN2; (-) strand; PAM type: NNNNGHTT; PAM sequence: CTGGGATT
caccttggcctcccagagtg

SEQ ID NO: 13794 - DNA, 20 bp, Artificial Sequence
  Description of Artificial Sequence: Synthetic oligonucleotide
  Target: ATXN2; (-) strand; PAM type: NNNNGHTT; PAM sequence: ACGAGATT
ttttaaaactttctgtagag

SEQ ID NO: 13795 - DNA, 20 bp, Artificial Sequence
  Description of Artificial Sequence: Synthetic oligonucleotide
  Target: ATXN2; (-) strand; PAM type: NNNNGHTT; PAM sequence: CTGGGCTT
ctcactgcagcctcgacttc

SEQ ID NO: 13796 - DNA, 20 bp, Artificial Sequence
  Description of Artificial Sequence: Synthetic oligonucleotide
  Target: ATXN2; (-) strand; PAM type: NNNNGHTT; PAM sequence: TGGTGTTT
gaagagtgtggtggtggtgg

SEQ ID NO: 13797 - DNA, 20 bp, Artificial Sequence
  Description of Artificial Sequence: Synthetic oligonucleotide
  Target: ATXN2; (-) strand; PAM type: NNNNGHTT; PAM sequence: CATGGCTT
ctaggttggatctagttgtt

SEQ ID NO: 13798 - DNA, 20 bp, Artificial Sequence
  Description of Artificial Sequence: Synthetic oligonucleotide
  Target: ATXN2; (-) strand; PAM type: NNNNGHTT; PAM sequence: TTTGGATT
atccttttctacctgagttg

SEQ ID NO: 13799 - DNA, 20 bp, Artificial Sequence
  Description of Artificial Sequence: Synthetic oligonucleotide
  Target: ATXN2; (-) strand; PAM type: NNNNGHTT; PAM sequence: AGTTGTTT
ctaagatccttttctacctg

SEQ ID NO: 13800 - DNA, 20 bp, Artificial Sequence
  Description of Artificial Sequence: Synthetic oligonucleotide
  Target: ATXN2; (-) strand; PAM type: NNNNGHTT; PAM sequence: AAGTGCTT
agccatactaatcgtatttc

SEQ ID NO: 13801 - DNA, 20 bp, Artificial Sequence
  Description of Artificial Sequence: Synthetic oligonucleotide
  Target: ATXN2; (-) strand; PAM type: NNNNGHTT; PAM sequence: TGTTGATT
gttctttaaatttaaaatta

SEQ ID NO: 13802 - DNA, 20 bp, Artificial Sequence
  Description of Artificial Sequence: Synthetic oligonucleotide
  Target: ATXN2; (-) strand; PAM type: NNNNGHTT; PAM sequence: GGTGGCTT
atatgaatgccgtggaaggg

SEQ ID NO: 13803 - DNA, 20 bp, Artificial Sequence
  Description of Artificial Sequence: Synthetic oligonucleotide
  Target: ATXN2; (-) strand; PAM type: NNNNGHTT; PAM sequence: TTGAGTTT
ggtagatcgttgggagagac

SEQ ID NO: 13804 - DNA, 20 bp, Artificial Sequence
  Description of Artificial Sequence: Synthetic oligonucleotide
  Target: ATXN2; (-) strand; PAM type: NNNNGHTT; PAM sequence: ATAAGTTT
tttgtggcctccagaaaggg

SEQ ID NO: 13805 - DNA, 20 bp, Artificial Sequence
  Description of Artificial Sequence: Synthetic oligonucleotide
  Target: ATXN2; (-) strand; PAM type: NNNNGHTT; PAM sequence: AATTGTTT
agtcttttgaaggggaatac

SEQ ID NO: 13806 - DNA, 20 bp, Artificial Sequence
  Description of Artificial Sequence: Synthetic oligonucleotide
  Target: ATXN2; (-) strand; PAM type: NNNNGHTT; PAM sequence: CGTTGTTT
agttatcagtaaatggccaa

SEQ ID NO: 13807 - DNA, 20 bp, Artificial Sequence
  Description of Artificial Sequence: Synthetic oligonucleotide
  Target: ATXN2; (-) strand; PAM type: NNNNGHTT; PAM sequence: CTCAGCTT
tgaatcttatgtacctgtca

SEQ ID NO: 13808 - DNA, 20 bp, Artificial Sequence
  Description of Artificial Sequence: Synthetic oligonucleotide
  Target: ATXN2; (-) strand; PAM type: NNNNGHTT; PAM sequence: TAAGGTTT
gagcttaaagtaaacgctaa

SEQ ID NO: 13809 - DNA, 20 bp, Artificial Sequence
  Description of Artificial Sequence: Synthetic oligonucleotide
  Target: ATXN2; (-) strand; PAM type: NNNNGHTT; PAM sequence: ATGAGCTT
tgtttcagttagaaaatgaa

SEQ ID NO: 13810 - DNA, 20 bp, Artificial Sequence
  Description of Artificial Sequence: Synthetic oligonucleotide
  Target: ATXN2; (-) strand; PAM type: NNNNGHTT; PAM sequence: ATATGTTT
aaggaaacacatttggaaga

SEQ ID NO: 13811 - DNA, 20 bp, Artificial Sequence
  Description of Artificial Sequence: Synthetic oligonucleotide
  Target: ATXN2; (-) strand; PAM type: NNNNGHTT; PAM sequence: CAGGGATT
gaagagtttgtgctaaagta

SEQ ID NO: 13812 - DNA, 20 bp, Artificial Sequence
  Description of Artificial Sequence: Synthetic oligonucleotide
  Target: ATXN2; (-) strand; PAM type: NNNNGHTT; PAM sequence: AAGAGTTT
aggaggaagttccaggcggg

SEQ ID NO: 13813 - DNA, 20 bp, Artificial Sequence
  Description of Artificial Sequence: Synthetic oligonucleotide
  Target: ATXN2; (-) strand; PAM type: NNNNGHTT; PAM sequence: AGCAGTTT
atggatcttcaaggaagata

SEQ ID NO: 13814 - DNA, 20 bp, Artificial Sequence
  Description of Artificial Sequence: Synthetic oligonucleotide
  Target: ATXN2; (-) strand; PAM type: NNNNGHTT; PAM sequence: AAGGGCTT
atgggtgggcagtgaagaaa

SEQ ID NO: 13815 - DNA, 20 bp, Artificial Sequence
  Description of Artificial Sequence: Synthetic oligonucleotide
  Target: ATXN2; (-) strand; PAM type: NNNNGHTT; PAM sequence: GATAGTTT
gtagagaaggcaggcatgca

SEQ ID NO: 13816 - DNA, 20 bp, Artificial Sequence
  Description of Artificial Sequence: Synthetic oligonucleotide
  Target: ATXN2; (-) strand; PAM type: NNNNGHTT; PAM sequence: CTCTGCTT
aaagatgaatgaaacattat

SEQ ID NO: 13817 - DNA, 20 bp, Artificial Sequence
  Description of Artificial Sequence: Synthetic oligonucleotide
  Target: ATXN2; (-) strand; PAM type: NNNNGHTT; PAM sequence: TTAAGTTT
ggctacagtttagcgtttca

SEQ ID NO: 13818 - DNA, 20 bp, Artificial Sequence
  Description of Artificial Sequence: Synthetic oligonucleotide
  Target: ATXN2; (-) strand; PAM type: NNNNGHTT; PAM sequence: TAGCGTTT
cagtatgaatggctacagtt

SEQ ID NO: 13819 - DNA, 20 bp, Artificial Sequence
  Description of Artificial Sequence: Synthetic oligonucleotide
  Target: ATXN2; (-) strand; PAM type: NNNNGHTT; PAM sequence: TACAGTTT
ggtagtacagtatgaatggc

SEQ ID NO: 13820 - DNA, 20 bp, Artificial Sequence
  Description of Artificial Sequence: Synthetic oligonucleotide
  Target: ATXN2; (-) strand; PAM type: NNNNGHTT; PAM sequence: ATGGGCTT
aaggttgaaaagtggtattg

SEQ ID NO: 13821 - DNA, 20 bp, Artificial Sequence
  Description of Artificial Sequence: Synthetic oligonucleotide
  Target: ATXN2; (-) strand; PAM type: NNNNGHTT; PAM sequence: GCATGTTT
acttttagctgttcttatta

SEQ ID NO: 13822 - DNA, 20 bp, Artificial Sequence
  Description of Artificial Sequence: Synthetic oligonucleotide
  Target: ATXN2; (-) strand; PAM type: NNNNGHTT; PAM sequence: ACACGCTT
ttaaatgaattaaacatgta

SEQ ID NO: 13823 - DNA, 20 bp, Artificial Sequence
  Description of Artificial Sequence: Synthetic oligonucleotide
  Target: ATXN2; (-) strand; PAM type: NNNNGHTT; PAM sequence: AGAGGATT
ccctgtaaaaaggggatgga

SEQ ID NO: 13824 - DNA, 20 bp, Artificial Sequence
  Description of Artificial Sequence: Synthetic oligonucleotide
  Target: ATXN2; (-) strand; PAM type: NNNNGHTT; PAM sequence: TTAAGTTT
caagttattttcacttatgc

SEQ ID NO: 13825 - DNA, 20 bp, Artificial Sequence
  Description of Artificial Sequence: Synthetic oligonucleotide
  Target: ATXN2; (-) strand; PAM type: NNNNGHTT; PAM sequence: TTATGCTT
gtaaggcaagttattttcac

SEQ ID NO: 13826 - DNA, 20 bp, Artificial Sequence
  Description of Artificial Sequence: Synthetic oligonucleotide
  Target: ATXN2; (-) strand; PAM type: NNNNGHTT; PAM sequence: TTATGATT
tttgaagcttgcatttgaga

SEQ ID NO: 13827 - DNA, 20 bp, Artificial Sequence
  Description of Artificial Sequence: Synthetic oligonucleotide
  Target: ATXN2; (-) strand; PAM type: NNNNGHTT; PAM sequence: TTGAGATT
ttgggatttgaagcttgcat

SEQ ID NO: 13828 - DNA, 20 bp, Artificial Sequence
  Description of Artificial Sequence: Synthetic oligonucleotide
  Target: ATXN2; (-) strand; PAM type: NNNNGHTT; PAM sequence: TGAAGCTT
caaatctgaattttgggatt

SEQ ID NO: 13829 - DNA, 20 bp, Artificial Sequence
  Description of Artificial Sequence: Synthetic oligonucleotide
  Target: ATXN2; (-) strand; PAM type: NNNNGHTT; PAM sequence: TTGGGATT
ccctttcccaaatctgaatt

SEQ ID NO: 13830 - DNA, 20 bp, Artificial Sequence
  Description of Artificial Sequence: Synthetic oligonucleotide
  Target: ATXN2; (-) strand; PAM type: NNNNGHTT; PAM sequence: CACTGTTT
aagattaccattttccctca

SEQ ID NO: 13831 - DNA, 20 bp, Artificial Sequence
  Description of Artificial Sequence: Synthetic oligonucleotide
  Target: ATXN2; (-) strand; PAM type: NNNNGHTT; PAM sequence: AAAAGATT
tactataaattacaagaata

SEQ ID NO: 13832 - DNA, 20 bp, Artificial Sequence
  Description of Artificial Sequence: Synthetic oligonucleotide
  Target: ATXN2; (-) strand; PAM type: NNNNGHTT; PAM sequence: AGTAGCTT
agttagctttcttattcagt

SEQ ID NO: 13833 - DNA, 20 bp, Artificial Sequence
  Description of Artificial Sequence: Synthetic oligonucleotide
  Target: ATXN2; (-) strand; PAM type: NNNNGHTT; PAM sequence: GTTAGCTT
cttaactttgtctagtacaa

SEQ ID NO: 13834 - DNA, 20 bp, Artificial Sequence
  Description of Artificial Sequence: Synthetic oligonucleotide
  Target: ATXN2; (-) strand; PAM type: NNNNGHTT; PAM sequence: TCTTGCTT
tccagtgcccagtgtctgcc

SEQ ID NO: 13835 - DNA, 20 bp, Artificial Sequence
  Description of Artificial Sequence: Synthetic oligonucleotide
  Target: ATXN2; (-) strand; PAM type: NNNNGHTT; PAM sequence: CACTGCTT
atcaagatggtctccttcct

SEQ ID NO: 13836 - DNA, 20 bp, Artificial Sequence
  Description of Artificial Sequence: Synthetic oligonucleotide
  Target: ATXN2; (-) strand; PAM type: NNNNGHTT; PAM sequence: TCATGTTT
actccattttacctttctga

SEQ ID NO: 13837 - DNA, 20 bp, Artificial Sequence
  Description of Artificial Sequence: Synthetic oligonucleotide
  Target: ATXN2; (-) strand; PAM type: NNNNGHTT; PAM sequence: CTGAGCTT
tttacagtgtaaaaaatatt

SEQ ID NO: 13838 - DNA, 20 bp, Artificial Sequence
  Description of Artificial Sequence: Synthetic oligonucleotide
  Target: ATXN2; (-) strand; PAM type: NNNNGHTT; PAM sequence: CTGGGATT
cacctctgcctcccaaagtg

SEQ ID NO: 13839 - DNA, 20 bp, Artificial Sequence
  Description of Artificial Sequence: Synthetic oligonucleotide
  Target: ATXN2; (-) strand; PAM type: NNNNGHTT; PAM sequence: TGGGGTTT
ttttgtatttttagtaaaga

SEQ ID NO: 13840 - DNA, 20 bp, Artificial Sequence
  Description of Artificial Sequence: Synthetic oligonucleotide
  Target: ATXN2; (-) strand; PAM type: NNNNGHTT; PAM sequence: CTGGGATT
tgtctcagcttcccgagtaa

SEQ ID NO: 13841 - DNA, 20 bp, Artificial Sequence
  Description of Artificial Sequence: Synthetic oligonucleotide
  Target: ATXN2; (-) strand; PAM type: NNNNGHTT; PAM sequence: CTCAGCTT
ggttcaggcgattctcctgt

SEQ ID NO: 13842 - DNA, 20 bp, Artificial Sequence
  Description of Artificial Sequence: Synthetic oligonucleotide
  Target: ATXN2; (-) strand; PAM type: NNNNGHTT; PAM sequence: AGGCGATT
aacctctgcctcctgggttc

SEQ ID NO: 13843 - DNA, 20 bp, Artificial Sequence
  Description of Artificial Sequence: Synthetic oligonucleotide
  Target: ATXN2; (-) strand; PAM type: NNNNGHTT; PAM sequence: GCACGTTT
ccatttttttgtgtatgttt

SEQ ID NO: 13844 - DNA, 20 bp, Artificial Sequence
  Description of Artificial Sequence: Synthetic oligonucleotide
  Target: ATXN2; (-) strand; PAM type: NNNNGHTT; PAM sequence: GTATGTTT
atacagtcccatttttttgt

SEQ ID NO: 13845 - DNA, 20 bp, Artificial Sequence
  Description of Artificial Sequence: Synthetic oligonucleotide
  Target: ATXN2; (-) strand; PAM type: NNNNGHTT; PAM sequence: TTAGGCTT
ccagcccgatagtaaatatt

SEQ ID NO: 13846 - DNA, 20 bp, Artificial Sequence
  Description of Artificial Sequence: Synthetic oligonucleotide
  Target: ATXN2; (-) strand; PAM type: NNNNGHTT; PAM sequence: CTGGGATT
tgctgcggcctcccaaagtg

SEQ ID NO: 13847 - DNA, 20 bp, Artificial Sequence
  Description of Artificial Sequence: Synthetic oligonucleotide
  Target: ATXN2; (-) strand; PAM type: NNNNGHTT; PAM sequence: GGGGGTTT
tctttgtatttagtagagat

SEQ ID NO: 13848 - DNA, 20 bp, Artificial Sequence
  Description of Artificial Sequence: Synthetic oligonucleotide
  Target: ATXN2; (-) strand; PAM type: NNNNGHTT; PAM sequence: AAGTGATT
aacctctgcctcccaggttc

SEQ ID NO: 13849 - DNA, 20 bp, Artificial Sequence
  Description of Artificial Sequence: Synthetic oligonucleotide
  Target: ATXN2; (-) strand; PAM type: NNNNGHTT; PAM sequence: TGGAGTTT
tttgttttttttttttgaga

SEQ ID NO: 13850 - DNA, 20 bp, Artificial Sequence
  Description of Artificial Sequence: Synthetic oligonucleotide
  Target: ATXN2; (-) strand; PAM type: NNNNGHTT; PAM sequence: ATTTGTTT
cgtaaagggccagatagtaa

SEQ ID NO: 13851 - DNA, 20 bp, Artificial Sequence
  Description of Artificial Sequence: Synthetic oligonucleotide
  Target: ATXN2; (-) strand; PAM type: NNNNGHTT; PAM sequence: CAAAGCTT
agcctgagggagtctacctt

SEQ ID NO: 13852 - DNA, 20 bp, Artificial Sequence
  Description of Artificial Sequence: Synthetic oligonucleotide
  Target: ATXN2; (-) strand; PAM type: NNNNGHTT; PAM sequence: CTCTGCTT
ctacttgtgttgggttaccc

SEQ ID NO: 13853 - DNA, 20 bp, Artificial Sequence
  Description of Artificial Sequence: Synthetic oligonucleotide
  Target: ATXN2; (-) strand; PAM type: NNNNGHTT; PAM sequence: ATGGGTTT
gcgatacattaattttatcc

SEQ ID NO: 13854 - DNA, 20 bp, Artificial Sequence
  Description of Artificial Sequence: Synthetic oligonucleotide
  Target: ATXN2; (-) strand; PAM type: NNNNGHTT; PAM sequence: CCACGCTT
agagtatggaactcacttgc

SEQ ID NO: 13855 - DNA, 20 bp, Artificial Sequence
  Description of Artificial Sequence: Synthetic oligonucleotide
  Target: ATXN2; (-) strand; PAM type: NNNNGHTT; PAM sequence: GGATGCTT
gagaacccacacaccactta

SEQ ID NO: 13856 - DNA, 20 bp, Artificial Sequence
  Description of Artificial Sequence: Synthetic oligonucleotide
  Target: ATXN2; (-) strand; PAM type: NNNNGHTT; PAM sequence: ATGTGTTT
tacgatatcatgggctgtga

SEQ ID NO: 13857 - DNA, 20 bp, Artificial Sequence
  Description of Artificial Sequence: Synthetic oligonucleotide
  Target: ATXN2; (-) strand; PAM type: NNNNGHTT; PAM sequence: GTTAGTTT
aaacaacatcataaatgatg

SEQ ID NO: 13858 - DNA, 20 bp, Artificial Sequence
  Description of Artificial Sequence: Synthetic oligonucleotide
  Target: ATXN2; (-) strand; PAM type: NNNNGHTT; PAM sequence: GTTTGTTT
cagtgagtttcaatcaaaaa

SEQ ID NO: 13859 - DNA, 20 bp, Artificial Sequence
  Description of Artificial Sequence: Synthetic oligonucleotide
  Target: ATXN2; (-) strand; PAM type: NNNNGHTT; PAM sequence: AAAAGTTT
ctatcagtgagtttcaatca

SEQ ID NO: 13860 - DNA, 20 bp, Artificial Sequence
  Description of Artificial Sequence: Synthetic oligonucleotide
  Target: ATXN2; (-) strand; PAM type: NNNNGHTT; PAM sequence: GTGAGTTT
gtcctggcagttctctatca

SEQ ID NO: 13861 - DNA, 20 bp, Artificial Sequence
  Description of Artificial Sequence: Synthetic oligonucleotide
  Target: ATXN2; (-) strand; PAM type: NNNNGHTT; PAM sequence: CCATGCTT
aataaaatttcttcaatcaa

SEQ ID NO: 13862 - DNA, 20 bp, Artificial Sequence
  Description of Artificial Sequence: Synthetic oligonucleotide
  Target: ATXN2; (-) strand; PAM type: NNNNGHTT; PAM sequence: CGGTGATT
caataatgaagaaaacaatc

SEQ ID NO: 13863 - DNA, 20 bp, Artificial Sequence
  Description of Artificial Sequence: Synthetic oligonucleotide
  Target: ATXN2; (-) strand; PAM type: NNNNGHTT; PAM sequence: AATCGCTT
cagtaggctgaggcaaggag

SEQ ID NO: 13864 - DNA, 20 bp, Artificial Sequence
  Description of Artificial Sequence: Synthetic oligonucleotide
  Target: ATXN2; (-) strand; PAM type: NNNNGHTT; PAM sequence: AGCAGTTT
tcgcttatgcctgtaatccc

SEQ ID NO: 13865 - DNA, 20 bp, Artificial Sequence
  Description of Artificial Sequence: Synthetic oligonucleotide
  Target: ATXN2; (-) strand; PAM type: NNNNGHTT; PAM sequence: AGTCGCTT
cagtgaagaaggctgggagc

SEQ ID NO: 13866 - DNA, 20 bp, Artificial Sequence
  Description of Artificial Sequence: Synthetic oligonucleotide
  Target: ATXN2; (-) strand; PAM type: NNNNGHTT; PAM sequence: CATTGCTT
ttgctttttaataactgttc

SEQ ID NO: 13867 - DNA, 20 bp, Artificial Sequence
  Description of Artificial Sequence: Synthetic oligonucleotide
  Target: ATXN2; (-) strand; PAM type: NNNNGHTT; PAM sequence: CTTTGCTT
accttgtgagatttcaaagt

SEQ ID NO: 13868 - DNA, 20 bp, Artificial Sequence
  Description of Artificial Sequence: Synthetic oligonucleotide
  Target: ATXN2; (-) strand; PAM type: NNNNGHTT; PAM sequence: GTGAGATT
aagctgagatttttaacctt

SEQ ID NO: 13869 - DNA, 20 bp, Artificial Sequence
  Description of Artificial Sequence: Synthetic oligonucleotide
  Target: ATXN2; (-) strand; PAM type: NNNNGHTT; PAM sequence: CTGAGATT
agagataggaagtgacaaag

SEQ ID NO: 13870 - DNA, 20 bp, Artificial Sequence
  Description of Artificial Sequence: Synthetic oligonucleotide
  Target: ATXN2; (-) strand; PAM type: NNNNGHTT; PAM sequence: GATGGATT
tgttttacagatgaggaagt

SEQ ID NO: 13871 - DNA, 20 bp, Artificial Sequence
  Description of Artificial Sequence: Synthetic oligonucleotide
  Target: ATXN2; (-) strand; PAM type: NNNNGHTT; PAM sequence: ATCTGTTT
tgtcaggctggtagtgccat

SEQ ID NO: 13872 - DNA, 20 bp, Artificial Sequence
  Description of Artificial Sequence: Synthetic oligonucleotide
  Target: ATXN2; (-) strand; PAM type: NNNNGHTT; PAM sequence: TTAGGTTT
taccatttattgtgtgccta

SEQ ID NO: 13873 - DNA, 20 bp, Artificial Sequence
  Description of Artificial Sequence: Synthetic oligonucleotide
  Target: ATXN2; (-) strand; PAM type: NNNNGHTT; PAM sequence: GCAGGCTT
cctcccaaagtgctgggatt

SEQ ID NO: 13874 - DNA, 20 bp, Artificial Sequence
  Description of Artificial Sequence: Synthetic oligonucleotide
  Target: ATXN2; (-) strand; PAM type: NNNNGHTT; PAM sequence: CTGGGATT
tgcctcagcctcccaaagtg

SEQ ID NO: 13875 - DNA, 20 bp, Artificial Sequence
  Description of Artificial Sequence: Synthetic oligonucleotide
  Target: ATXN2; (-) strand; PAM type: NNNNGHTT; PAM sequence: TGAGGTTT
ttttgtatttttggtagaga

SEQ ID NO: 13876 - DNA, 20 bp, Artificial Sequence
  Description of Artificial Sequence: Synthetic oligonucleotide
  Target: ATXN2; (-) strand; PAM type: NNNNGHTT; PAM sequence: CTATGATT
gaattggaggttgcagtgag

SEQ ID NO: 13877 - DNA, 20 bp, Artificial Sequence
  Description of Artificial Sequence: Synthetic oligonucleotide
  Target: ATXN2; (-) strand; PAM type: NNNNGHTT; PAM sequence: GGTCGCTT
ttgggaagccaagggaggag

SEQ ID NO: 13878 - DNA, 20 bp, Artificial Sequence
  Description of Artificial Sequence: Synthetic oligonucleotide
  Target: ATXN2; (-) strand; PAM type: NNNNGHTT; PAM sequence: ACTAGCTT
atcaaccaggaacttgagtc

SEQ ID NO: 13879 - DNA, 20 bp, Artificial Sequence
  Description of Artificial Sequence: Synthetic oligonucleotide
  Target: ATXN2; (-) strand; PAM type: NNNNGHTT; PAM sequence: AATAGTTT
tggtattaaaaaatgttatt

SEQ ID NO: 13880 - DNA, 20 bp, Artificial Sequence
  Description of Artificial Sequence: Synthetic oligonucleotide
  Target: ATXN2; (-) strand; PAM type: NNNNGHTT; PAM sequence: ATGTGATT
cccagggcatacataatctc

SEQ ID NO: 13881 - DNA, 20 bp, Artificial Sequence
  Description of Artificial Sequence: Synthetic oligonucleotide
  Target: ATXN2; (-) strand; PAM type: NNNNGHTT; PAM sequence: GTGAGTTT
tgagtgaaccggacgctacc

SEQ ID NO: 13882 - DNA, 20 bp, Artificial Sequence
  Description of Artificial Sequence: Synthetic oligonucleotide
  Target: ATXN2; (-) strand; PAM type: NNNNGHTT; PAM sequence: ACAGGATT
ataattaaaaagggagggaa

SEQ ID NO: 13883 - DNA, 20 bp, Artificial Sequence
  Description of Artificial Sequence: Synthetic oligonucleotide
  Target: ATXN2; (-) strand; PAM type: NNNNGHTT; PAM sequence: AATTGATT
tttctgacctcagcttgaaa

SEQ ID NO: 13884 - DNA, 20 bp, Artificial Sequence
  Description of Artificial Sequence: Synthetic oligonucleotide
  Target: ATXN2; (-) strand; PAM type: NNNNGHTT; PAM sequence: CTCAGCTT
tgtttgagaagctttctgac

SEQ ID NO: 13885 - DNA, 20 bp, Artificial Sequence
  Description of Artificial Sequence: Synthetic oligonucleotide
  Target: ATXN2; (-) strand; PAM type: NNNNGHTT; PAM sequence: AGAAGCTT
cccagaaataagtatgtttg

SEQ ID NO: 13886 - DNA, 20 bp, Artificial Sequence
  Description of Artificial Sequence: Synthetic oligonucleotide
  Target: ATXN2; (-) strand; PAM type: NNNNGHTT; PAM sequence: GTATGTTT
ctggctatgcccagaaataa

SEQ ID NO: 13887 - DNA, 20 bp, Artificial Sequence
  Description of Artificial Sequence: Synthetic oligonucleotide
  Target: ATXN2; (-) strand; PAM type: NNNNGHTT; PAM sequence: TAGTGCTT
gctaagggtcttgttctttt

SEQ ID NO: 13888 - DNA, 20 bp, Artificial Sequence
  Description of Artificial Sequence: Synthetic oligonucleotide
  Target: ATXN2; (-) strand; PAM type: NNNNGHTT; PAM sequence: TAAAGATT
gattgcttgagctcaggagt

SEQ ID NO: 13889 - DNA, 20 bp, Artificial Sequence
  Description of Artificial Sequence: Synthetic oligonucleotide
  Target: ATXN2; (-) strand; PAM type: NNNNGHTT; PAM sequence: GATTGCTT
ctacgaggctgaagcgagag

SEQ ID NO: 13890 - DNA, 20 bp, Artificial Sequence
  Description of Artificial Sequence: Synthetic oligonucleotide
  Target: ATXN2; (-) strand; PAM type: NNNNGHTT; PAM sequence: AGAGGATT
gctactacgaggctgaagcg

SEQ ID NO: 13891 - DNA, 20 bp, Artificial Sequence
  Description of Artificial Sequence: Synthetic oligonucleotide
  Target: ATXN2; (-) strand; PAM type: NNNNGHTT; PAM sequence: TGATGTTT
cattgaggtgtttgagatgc

SEQ ID NO: 13892 - DNA, 20 bp, Artificial Sequence
  Description of Artificial Sequence: Synthetic oligonucleotide
  Target: ATXN2; (-) strand; PAM type: NNNNGHTT; PAM sequence: AGGTGTTT
cctgccaccttatggcattg

SEQ ID NO: 13893 - DNA, 20 bp, Artificial Sequence
  Description of Artificial Sequence: Synthetic oligonucleotide
  Target: ATXN2; (-) strand; PAM type: NNNNGHTT; PAM sequence: TGGAGCTT
agatgaggtctctctctttt

SEQ ID NO: 13894 - DNA, 20 bp, Artificial Sequence
  Description of Artificial Sequence: Synthetic oligonucleotide
  Target: ATXN2; (-) strand; PAM type: NNNNGHTT; PAM sequence: TGAGGCTT
tttggagtacctcctgcttg

SEQ ID NO: 13895 - DNA, 20 bp, Artificial Sequence
  Description of Artificial Sequence: Synthetic oligonucleotide
  Target: ATXN2; (-) strand; PAM type: NNNNGHTT; PAM sequence: TCCTGCTT
ttttttatttttggagtacc

SEQ ID NO: 13896 - DNA, 20 bp, Artificial Sequence
  Description of Artificial Sequence: Synthetic oligonucleotide
  Target: ATXN2; (-) strand; PAM type: NNNNGHTT; PAM sequence: CCACGTTT
gcatggcatttataggcata

SEQ ID NO: 13897 - DNA, 20 bp, Artificial Sequence
  Description of Artificial Sequence: Synthetic oligonucleotide
  Target: ATXN2; (-) strand; PAM type: NNNNGHTT; PAM sequence: ATTGGTTT
gccactgcgcctggctgact

SEQ ID NO: 13898 - DNA, 20 bp, Artificial Sequence
  Description of Artificial Sequence: Synthetic oligonucleotide
  Target: ATXN2; (-) strand; PAM type: NNNNGHTT; PAM sequence: CTGGGATT
cgccttggcctcccaaagtg

SEQ ID NO: 13899 - DNA, 20 bp, Artificial Sequence
  Description of Artificial Sequence: Synthetic oligonucleotide
  Target: ATXN2; (-) strand; PAM type: NNNNGHTT; PAM sequence: CAGGGTTT
ttttgtatttttagtagaga

SEQ ID NO: 13900 - DNA, 20 bp, Artificial Sequence
  Description of Artificial Sequence: Synthetic oligonucleotide
  Target: ATXN2; (-) strand; PAM type: NNNNGHTT; PAM sequence: CTGGGATT
tgtcttagcctcccaagtag

SEQ ID NO: 13901 - DNA, 20 bp, Artificial Sequence
  Description of Artificial Sequence: Synthetic oligonucleotide
  Target: ATXN2; (-) strand; PAM type: NNNNGHTT; PAM sequence: AAGTGATT
aacctccgcctcccaggttc

SEQ ID NO: 13902 - DNA, 20 bp, Artificial Sequence
  Description of Artificial Sequence: Synthetic oligonucleotide
  Target: ATXN2; (-) strand; PAM type: NNNNGHTT; PAM sequence: CTCGGCTT
ctggagtgcagcggcatgat

SEQ ID NO: 13903 - DNA, 20 bp, Artificial Sequence
  Description of Artificial Sequence: Synthetic oligonucleotide
  Target: ATXN2; (-) strand; PAM type: NNNNGHTT; PAM sequence: CAGAGTTT
tatgttatgttattttaaga

SEQ ID NO: 13904 - DNA, 20 bp, Artificial Sequence
  Description of Artificial Sequence: Synthetic oligonucleotide
  Target: ATXN2; (-) strand; PAM type: NNNNGHTT; PAM sequence: TTTGGTTT
gtgcccggccagactattgg

SEQ ID NO: 13905 - DNA, 20 bp, Artificial Sequence
  Description of Artificial Sequence: Synthetic oligonucleotide
  Target: ATXN2; (-) strand; PAM type: NNNNGHTT; PAM sequence: ATTGGTTT
ccgtggtgcccggccagact

SEQ ID NO: 13906 - DNA, 20 bp, Artificial Sequence
  Description of Artificial Sequence: Synthetic oligonucleotide
  Target: ATXN2; (-) strand; PAM type: NNNNGHTT; PAM sequence: TGGGGTTT
ttttgtatttttagtagaaa

SEQ ID NO: 13907 - DNA, 20 bp, Artificial Sequence
  Description of Artificial Sequence: Synthetic oligonucleotide
  Target: ATXN2; (-) strand; PAM type: NNNNGHTT; PAM sequence: AGGTGATT
aacctccgcctcctgtgttc

SEQ ID NO: 13908 - DNA, 20 bp, Artificial Sequence
  Description of Artificial Sequence: Synthetic oligonucleotide
  Target: ATXN2; (-) strand; PAM type: NNNNGHTT; PAM sequence: GTTGGTTT
aatttgttgaatatgtgact

SEQ ID NO: 13909 - DNA, 20 bp, Artificial Sequence
  Description of Artificial Sequence: Synthetic oligonucleotide
  Target: ATXN2; (-) strand; PAM type: NNNNGHTT; PAM sequence: CTGTGTTT
gccaccacacctggcctacc

SEQ ID NO: 13910 - DNA, 20 bp, Artificial Sequence
  Description of Artificial Sequence: Synthetic oligonucleotide
  Target: ATXN2; (-) strand; PAM type: NNNNGHTT; PAM sequence: CTGGGATT
cgcctcggcctcccaaagtt

SEQ ID NO: 13911 - DNA, 20 bp, Artificial Sequence
  Description of Artificial Sequence: Synthetic oligonucleotide
  Target: ATXN2; (-) strand; PAM type: NNNNGHTT; PAM sequence: TGGGGTTT
ttttttatttttagtagaga

SEQ ID NO: 13912 - DNA, 20 bp, Artificial Sequence
  Description of Artificial Sequence: Synthetic oligonucleotide
  Target: ATXN2; (-) strand; PAM type: NNNNGHTT; PAM sequence: GTTTGTTT
gtgaaaccctgggtttgttt

SEQ ID NO: 13913 - DNA, 20 bp, Artificial Sequence
  Description of Artificial Sequence: Synthetic oligonucleotide
  Target: ATXN2; (-) strand; PAM type: NNNNGHTT; PAM sequence: GTTTGTTT
cgtggtgaaaccctgggttt

SEQ ID NO: 13914 - DNA, 20 bp, Artificial Sequence
  Description of Artificial Sequence: Synthetic oligonucleotide
  Target: ATXN2; (-) strand; PAM type: NNNNGHTT; PAM sequence: GTTTGTTT
ccaacgtggtgaaaccctgg

SEQ ID NO: 13915 - DNA, 20 bp, Artificial Sequence
  Description of Artificial Sequence: Synthetic oligonucleotide
  Target: ATXN2; (-) strand; PAM type: NNNNGHTT; PAM sequence: CTGGGTTT
gtggccaacgtggtgaaacc

SEQ ID NO: 13916 - DNA, 20 bp, Artificial Sequence
  Description of Artificial Sequence: Synthetic oligonucleotide
  Target: ATXN2; (-) strand; PAM type: NNNNGHTT; PAM sequence: GTATGCTT
caagtgttttgtacaacttt

SEQ ID NO: 13917 - DNA, 20 bp, Artificial Sequence
  Description of Artificial Sequence: Synthetic oligonucleotide
  Target: ATXN2; (-) strand; PAM type: NNNNGHTT; PAM sequence: AAGTGTTT
agcatcttgacagtaggaac

SEQ ID NO: 13918 - DNA, 20 bp, Artificial Sequence
  Description of Artificial Sequence: Synthetic oligonucleotide
  Target: ATXN2; (-) strand; PAM type: NNNNGHTT; PAM sequence: TCTAGATT
aatatttgcattatcttcct

SEQ ID NO: 13919 - DNA, 20 bp, Artificial Sequence
  Description of Artificial Sequence: Synthetic oligonucleotide
  Target: ATXN2; (-) strand; PAM type: NNNNGHTT; PAM sequence: ACTTGTTT
atgtgtttatttgcgatctg

SEQ ID NO: 13920 - DNA, 20 bp, Artificial Sequence
  Description of Artificial Sequence: Synthetic oligonucleotide
  Target: ATXN2; (-) strand; PAM type: NNNNGHTT; PAM sequence: ATGTGTTT
ataattgaaacatgcggtgc

SEQ ID NO: 13921 - DNA, 20 bp, Artificial Sequence
  Description of Artificial Sequence: Synthetic oligonucleotide
  Target: ATXN2; (-) strand; PAM type: NNNNGHTT; PAM sequence: CGGAGCTT
aatggcgtgaacccgggagg

SEQ ID NO: 13922 - DNA, 20 bp, Artificial Sequence
  Description of Artificial Sequence: Synthetic oligonucleotide
  Target: ATXN2; (-) strand; PAM type: NNNNGHTT; PAM sequence: CTGGGATT
caccttgacctcccaaagtg

SEQ ID NO: 13923 - DNA, 20 bp, Artificial Sequence
  Description of Artificial Sequence: Synthetic oligonucleotide
  Target: ATXN2; (-) strand; PAM type: NNNNGHTT; PAM sequence: AGCCGTTT
gggtgcacgccatcatgcct

SEQ ID NO: 13924 - DNA, 20 bp, Artificial Sequence
  Description of Artificial Sequence: Synthetic oligonucleotide
  Target: ATXN2; (-) strand; PAM type: NNNNGHTT; PAM sequence: CTCAGCTT
ggctccagcaatcctcccac

SEQ ID NO: 13925 - DNA, 20 bp, Artificial Sequence
  Description of Artificial Sequence: Synthetic oligonucleotide
  Target: ATXN2; (-) strand; PAM type: NNNNGHTT; PAM sequence: CTGGGATT
cgccgtggcctcccaaagtg

SEQ ID NO: 13926 - DNA, 20 bp, Artificial Sequence
  Description of Artificial Sequence: Synthetic oligonucleotide
  Target: ATXN2; (-) strand; PAM type: NNNNGHTT; PAM sequence: GGGGGTTT
tttgtatttttagtagagac

SEQ ID NO: 13927 - DNA, 20 bp, Artificial Sequence
  Description of Artificial Sequence: Synthetic oligonucleotide
  Target: ATXN2; (-) strand; PAM type: NNNNGHTT; PAM sequence: CTGGGATT
tgcctcaacctcctgaatag

SEQ ID NO: 13928 - DNA, 20 bp, Artificial Sequence
  Description of Artificial Sequence: Synthetic oligonucleotide
  Target: ATXN2; (-) strand; PAM type: NNNNGHTT; PAM sequence: AAGCGATT
agtctctgccttctgggttc

SEQ ID NO: 13929 - DNA, 20 bp, Artificial Sequence
  Description of Artificial Sequence: Synthetic oligonucleotide
  Target: ATXN2; (-) strand; PAM type: NNNNGHTT; PAM sequence: TTTTGTTT
attgataaatatctttctta

SEQ ID NO: 13930 - DNA, 20 bp, Artificial Sequence
  Description of Artificial Sequence: Synthetic oligonucleotide
  Target: ATXN2; (-) strand; PAM type: NNNNGHTT; PAM sequence: AGTTGCTT
atggagcttgcaggacagga

SEQ ID NO: 13931 - DNA, 20 bp, Artificial Sequence
  Description of Artificial Sequence: Synthetic oligonucleotide
  Target: ATXN2; (-) strand; PAM type: NNNNGHTT; PAM sequence: TGGAGCTT
aataggtcacttaccatgaa

SEQ ID NO: 13932 - DNA, 20 bp, Artificial Sequence
  Description of Artificial Sequence: Synthetic oligonucleotide
  Target: ATXN2; (-) strand; PAM type: NNNNGHTT; PAM sequence: TAGAGTTT
atcttatcattgtacaaata

SEQ ID NO: 13933 - DNA, 20 bp, Artificial Sequence
  Description of Artificial Sequence: Synthetic oligonucleotide
  Target: ATXN2; (-) strand; PAM type: NNNNGHTT; PAM sequence: ATGTGTTT
tgcattgcttaatgatgggg

SEQ ID NO: 13934 - DNA, 20 bp, Artificial Sequence
  Description of Artificial Sequence: Synthetic oligonucleotide
  Target: ATXN2; (-) strand; PAM type: NNNNGHTT; PAM sequence: CATTGCTT
gatgagaaactatgtttatg

SEQ ID NO: 13935 - DNA, 20 bp, Artificial Sequence
  Description of Artificial Sequence: Synthetic oligonucleotide
  Target: ATXN2; (-) strand; PAM type: NNNNGHTT; PAM sequence: CTATGTTT
ccatctttggtgatgagaaa

SEQ ID NO: 13936 - DNA, 20 bp, Artificial Sequence
  Description of Artificial Sequence: Synthetic oligonucleotide
  Target: ATXN2; (-) strand; PAM type: NNNNGHTT; PAM sequence: ATGTGTTT
gtgatattgagcattttttc

SEQ ID NO: 13937 - DNA, 20 bp, Artificial Sequence
  Description of Artificial Sequence: Synthetic oligonucleotide
  Target: ATXN2; (-) strand; PAM type: NNNNGHTT; PAM sequence: TGTGGTTT
gcccctgtgcctggcctcat

SEQ ID NO: 13938 - DNA, 20 bp, Artificial Sequence
  Description of Artificial Sequence: Synthetic oligonucleotide
  Target: ATXN2; (-) strand; PAM type: NNNNGHTT; PAM sequence: CTGGGATT
tacctcagcctcccaaagtg

SEQ ID NO: 13939 - DNA, 20 bp, Artificial Sequence
  Description of Artificial Sequence: Synthetic oligonucleotide
  Target: ATXN2; (-) strand; PAM type: NNNNGHTT; PAM sequence: AAGTGATT
ggtgttgaactcctgggctc

SEQ ID NO: 13940 - DNA, 20 bp, Artificial Sequence
  Description of Artificial Sequence: Synthetic oligonucleotide
  Target: ATXN2; (-) strand; PAM type: NNNNGHTT; PAM sequence: CTTTGATT
ccaccacacctggtagtttg

SEQ ID NO: 13941 - DNA, 20 bp, Artificial Sequence
  Description of Artificial Sequence: Synthetic oligonucleotide
  Target: ATXN2; (-) strand; PAM type: NNNNGHTT; PAM sequence: GTTTGCTT
atgtaccaccacacctggta

SEQ ID NO: 13942 - DNA, 20 bp, Artificial Sequence
  Description of Artificial Sequence: Synthetic oligonucleotide
  Target: ATXN2; (-) strand; PAM type: NNNNGHTT; PAM sequence: GGTAGTTT
aggcatgtaccaccacacct

SEQ ID NO: 13943 - DNA, 20 bp, Artificial Sequence
  Description of Artificial Sequence: Synthetic oligonucleotide
  Target: ATXN2; (-) strand; PAM type: NNNNGHTT; PAM sequence: AACTGTTT
aattttaaaagtaattgcta

SEQ ID NO: 13944 - DNA, 20 bp, Artificial Sequence
  Description of Artificial Sequence: Synthetic oligonucleotide
  Target: ATXN2; (-) strand; PAM type: NNNNGHTT; PAM sequence: GAGTGTTT
cagggtacatataatcctgt

SEQ ID NO: 13945 - DNA, 20 bp, Artificial Sequence
  Description of Artificial Sequence: Synthetic oligonucleotide
  Target: ATXN2; (-) strand; PAM type: NNNNGHTT; PAM sequence: AAGTGTTT
agattgctgggttttgtggc

SEQ ID NO: 13946 - DNA, 20 bp, Artificial Sequence
  Description of Artificial Sequence: Synthetic oligonucleotide
  Target: ATXN2; (-) strand; PAM type: NNNNGHTT; PAM sequence: CTGGGTTT
aatgcatagaaatgagattg

SEQ ID NO: 13947 - DNA, 20 bp, Artificial Sequence
  Description of Artificial Sequence: Synthetic oligonucleotide
  Target: ATXN2; (-) strand; PAM type: NNNNGHTT; PAM sequence: ATGAGATT
cttggttggaatgcatagaa

SEQ ID NO: 13948 - DNA, 20 bp, Artificial Sequence
  Description of Artificial Sequence: Synthetic oligonucleotide
  Target: ATXN2; (-) strand; PAM type: NNNNGHTT; PAM sequence: ATATGATT
tgtacaggttttgtgtgaac

SEQ ID NO: 13949 - DNA, 20 bp, Artificial Sequence
  Description of Artificial Sequence: Synthetic oligonucleotide
  Target: ATXN2; (-) strand; PAM type: NNNNGHTT; PAM sequence: ACAGGTTT
gctggtatgaatatttatgt

SEQ ID NO: 13950 - DNA, 20 bp, Artificial Sequence
  Description of Artificial Sequence: Synthetic oligonucleotide
  Target: ATXN2; (-) strand; PAM type: NNNNGHTT; PAM sequence: CCAAGATT
gaggcagaggttgtggtgag

SEQ ID NO: 13951 - DNA, 20 bp, Artificial Sequence
  Description of Artificial Sequence: Synthetic oligonucleotide
  Target: ATXN2; (-) strand; PAM type: NNNNGHTT; PAM sequence: AATCGCTT
tcaggaggctgaggcaggag

SEQ ID NO: 13952 - DNA, 20 bp, Artificial Sequence
  Description of Artificial Sequence: Synthetic oligonucleotide
  Target: ATXN2; (-) strand; PAM type: NNNNGHTT; PAM sequence: GGGAGTTT
caggcggatcacctaaggtt

SEQ ID NO: 13953 - DNA, 20 bp, Artificial Sequence
  Description of Artificial Sequence: Synthetic oligonucleotide
  Target: ATXN2; (-) strand; PAM type: NNNNGHTT; PAM sequence: GCAGGTTT
tagtggtggacattgagtta

SEQ ID NO: 13954 - DNA, 20 bp, Artificial Sequence
  Description of Artificial Sequence: Synthetic oligonucleotide
  Target: ATXN2; (-) strand; PAM type: NNNNGHTT; PAM sequence: ACCAGTTT
gtagtctattgtatgcatgt

SEQ ID NO: 13955 - DNA, 20 bp, Artificial Sequence
  Description of Artificial Sequence: Synthetic oligonucleotide
  Target: ATXN2; (-) strand; PAM type: NNNNGHTT; PAM sequence: TTCTGCTT
attgcatgttagtagtttct

SEQ ID NO: 13956 - DNA, 20 bp, Artificial Sequence
  Description of Artificial Sequence: Synthetic oligonucleotide
  Target: ATXN2; (-) strand; PAM type: NNNNGHTT; PAM sequence: AGTAGTTT
cgtctgtactattgcatgtt

SEQ ID NO: 13957 - DNA, 20 bp, Artificial Sequence
  Description of Artificial Sequence: Synthetic oligonucleotide
  Target: ATXN2; (-) strand; PAM type: NNNNGHTT; PAM sequence: GAGGGATT
ttggcctcccaaagtgttgg

SEQ ID NO: 13958 - DNA, 20 bp, Artificial Sequence
  Description of Artificial Sequence: Synthetic oligonucleotide
  Target: ATXN2; (-) strand; PAM type: NNNNGHTT; PAM sequence: CTCAGCTT
caatcatcccatcatcccac

SEQ ID NO: 13959 - DNA, 20 bp, Artificial Sequence
  Description of Artificial Sequence: Synthetic oligonucleotide
  Target: ATXN2; (-) strand; PAM type: NNNNGHTT; PAM sequence: CATAGCTT
gtggagtgtagtggcacgat

SEQ ID NO: 13960 - DNA, 20 bp, Artificial Sequence
  Description of Artificial Sequence: Synthetic oligonucleotide
  Target: ATXN2; (-) strand; PAM type: NNNNGHTT; PAM sequence: AGATGATT
gaccttgaactcctgagccc

SEQ ID NO: 13961 - DNA, 20 bp, Artificial Sequence
  Description of Artificial Sequence: Synthetic oligonucleotide
  Target: ATXN2; (-) strand; PAM type: NNNNGHTT; PAM sequence: TGTCGTTT
caccatgcctggcctttctt

SEQ ID NO: 13962 - DNA, 20 bp, Artificial Sequence
  Description of Artificial Sequence: Synthetic oligonucleotide
  Target: ATXN2; (-) strand; PAM type: NNNNGHTT; PAM sequence: CTGGGATT
cctgcctcggcctcccagtg

SEQ ID NO: 13963 - DNA, 20 bp, Artificial Sequence
  Description of Artificial Sequence: Synthetic oligonucleotide
  Target: ATXN2; (-) strand; PAM type: NNNNGHTT; PAM sequence: CTAGGTTT
gcacctgccaccacagccgg

SEQ ID NO: 13964 - DNA, 20 bp, Artificial Sequence
  Description of Artificial Sequence: Synthetic oligonucleotide
  Target: ATXN2; (-) strand; PAM type: NNNNGHTT; PAM sequence: GGTGGTTT
gtttggatttctctggctct

SEQ ID NO: 13965 - DNA, 20 bp, Artificial Sequence
  Description of Artificial Sequence: Synthetic oligonucleotide
  Target: ATXN2; (-) strand; PAM type: NNNNGHTT; PAM sequence: TTTGGATT
cccctccctttccctggtag

SEQ ID NO: 13966 - DNA, 20 bp, Artificial Sequence
  Description of Artificial Sequence: Synthetic oligonucleotide
  Target: ATXN2; (-) strand; PAM type: NNNNGHTT; PAM sequence: GGTAGTTT
gtgggcccctccctttccct

SEQ ID NO: 13967 - DNA, 20 bp, Artificial Sequence
  Description of Artificial Sequence: Synthetic oligonucleotide
  Target: ATXN2; (-) strand; PAM type: NNNNGHTT; PAM sequence: AGAGGTTT
gccgatgttggcaggagtga

SEQ ID NO: 13968 - DNA, 20 bp, Artificial Sequence
  Description of Artificial Sequence: Synthetic oligonucleotide
  Target: ATXN2; (-) strand; PAM type: NNNNGHTT; PAM sequence: TGCAGTTT
ttttttaaaccagaaacacg

SEQ ID NO: 13969 - DNA, 20 bp, Artificial Sequence
  Description of Artificial Sequence: Synthetic oligonucleotide
  Target: ATXN2; (-) strand; PAM type: NNNNGHTT; PAM sequence: TGGTGTTT
atttggagttggaatggctc

SEQ ID NO: 13970 - DNA, 20 bp, Artificial Sequence
  Description of Artificial Sequence: Synthetic oligonucleotide
  Target: ATXN2; (-) strand; PAM type: NNNNGHTT; PAM sequence: GCTGGTTT
acagtctcactgttacccgg

SEQ ID NO: 13971 - DNA, 20 bp, Artificial Sequence
  Description of Artificial Sequence: Synthetic oligonucleotide
  Target: ATXN2; (-) strand; PAM type: NNNNGHTT; PAM sequence: AGTAGCTT
agttctgcctcagcctcctg

SEQ ID NO: 13972 - DNA, 20 bp, Artificial Sequence
  Description of Artificial Sequence: Synthetic oligonucleotide
  Target: ATXN2; (-) strand; PAM type: NNNNGHTT; PAM sequence: TCTCGCTT
tttttttttttgagacaccg

SEQ ID NO: 13973 - DNA, 20 bp, Artificial Sequence
  Description of Artificial Sequence: Synthetic oligonucleotide
  Target: ATXN2; (-) strand; PAM type: NNNNGHTT; PAM sequence: CATGGCTT
ttggagtacagtattgtgat

SEQ ID NO: 13974 - DNA, 20 bp, Artificial Sequence
  Description of Artificial Sequence: Synthetic oligonucleotide
  Target: ATXN2; (-) strand; PAM type: NNNNGHTT; PAM sequence: TTCTGTTT
gatactaaagtcttaatatt

SEQ ID NO: 13975 - DNA, 20 bp, Artificial Sequence
  Description of Artificial Sequence: Synthetic oligonucleotide
  Target: ATXN2; (-) strand; PAM type: NNNNGHTT; PAM sequence: CAGAGCTT
aatggcgtgaacccgggagg

SEQ ID NO: 13976 - DNA, 20 bp, Artificial Sequence
  Description of Artificial Sequence: Synthetic oligonucleotide
  Target: ATXN2; (-) strand; PAM type: NNNNGHTT; PAM sequence: CCAAGATT
gaggtggaggttgcagtgag

SEQ ID NO: 13977 - DNA, 20 bp, Artificial Sequence
  Description of Artificial Sequence: Synthetic oligonucleotide
  Target: ATXN2; (-) strand; PAM type: NNNNGHTT; PAM sequence: AATCGCTT
tcgagaggctgaggcagggg

SEQ ID NO: 13978 - DNA, 20 bp, Artificial Sequence
  Description of Artificial Sequence: Synthetic oligonucleotide
  Target: ATXN2; (-) strand; PAM type: NNNNGHTT; PAM sequence: CTTAGTTT
gttactcagccactctcagg

SEQ ID NO: 13979 - DNA, 20 bp, Artificial Sequence
  Description of Artificial Sequence: Synthetic oligonucleotide
  Target: ATXN2; (-) strand; PAM type: NNNNGHTT; PAM sequence: TCAGGCTT
ggcaagttactcagccactc

SEQ ID NO: 13980 - DNA, 20 bp, Artificial Sequence
  Description of Artificial Sequence: Synthetic oligonucleotide
  Target: ATXN2; (-) strand; PAM type: NNNNGHTT; PAM sequence: ACATGTTT
tggcacttaactgcttggtc

SEQ ID NO: 13981 - DNA, 20 bp, Artificial Sequence
  Description of Artificial Sequence: Synthetic oligonucleotide
  Target: ATXN2; (-) strand; PAM type: NNNNGHTT; PAM sequence: AACTGCTT
ttcttgaatggttggcactt

SEQ ID NO: 13982 - DNA, 20 bp, Artificial Sequence
  Description of Artificial Sequence: Synthetic oligonucleotide
  Target: ATXN2; (-) strand; PAM type: NNNNGHTT; PAM sequence: TATTGATT
aggaactttgttttgttcac

SEQ ID NO: 13983 - DNA, 20 bp, Artificial Sequence
  Description of Artificial Sequence: Synthetic oligonucleotide
  Target: ATXN2; (-) strand; PAM type: NNNNGHTT; PAM sequence: CTTTGTTT
aagctctatgaaagcaggaa

SEQ ID NO: 13984 - DNA, 20 bp, Artificial Sequence
  Description of Artificial Sequence: Synthetic oligonucleotide
  Target: ATXN2; (-) strand; PAM type: NNNNGHTT; PAM sequence: CTGGGATT
cacctgggcctcccaacgtg

SEQ ID NO: 13985 - DNA, 20 bp, Artificial Sequence
  Description of Artificial Sequence: Synthetic oligonucleotide
  Target: ATXN2; (-) strand; PAM type: NNNNGHTT; PAM sequence: CGGGGTTT
ttttatatttttagtagaga

SEQ ID NO: 13986 - DNA, 20 bp, Artificial Sequence
  Description of Artificial Sequence: Synthetic oligonucleotide
  Target: ATXN2; (-) strand; PAM type: NNNNGHTT; PAM sequence: TTGGGATT
tgcctcagcctcctgaatag

SEQ ID NO: 13987 - DNA, 20 bp, Artificial Sequence
  Description of Artificial Sequence: Synthetic oligonucleotide
  Target: ATXN2; (-) strand; PAM type: NNNNGHTT; PAM sequence: AAGTGATT
aacctccacctcctgtgttc

SEQ ID NO: 13988 - DNA, 20 bp, Artificial Sequence
  Description of Artificial Sequence: Synthetic oligonucleotide
  Target: ATXN2; (-) strand; PAM type: NNNNGHTT; PAM sequence: CACTGTTT
tctaagctggaatcatggtt

SEQ ID NO: 13989 - DNA, 20 bp, Artificial Sequence
  Description of Artificial Sequence: Synthetic oligonucleotide
  Target: ATXN2; (-) strand; PAM type: NNNNGHTT; PAM sequence: ACCAGTTT
tgaatttttgatgaacattg

SEQ ID NO: 13990 - DNA, 20 bp, Artificial Sequence
  Description of Artificial Sequence: Synthetic oligonucleotide
  Target: ATXN2; (-) strand; PAM type: NNNNGHTT; PAM sequence: GTCAGATT
gttatatctaagctagggtt

SEQ ID NO: 13991 - DNA, 20 bp, Artificial Sequence
  Description of Artificial Sequence: Synthetic oligonucleotide
  Target: ATXN2; (-) strand; PAM type: NNNNGHTT; PAM sequence: AAGAGTTT
acgcagtaaaaggattgaga

SEQ ID NO: 13992 - DNA, 20 bp, Artificial Sequence
  Description of Artificial Sequence: Synthetic oligonucleotide
  Target: ATXN2; (-) strand; PAM type: NNNNGHTT; PAM sequence: AAAGGATT
agagccagagaaacgcagta

SEQ ID NO: 13993 - DNA, 20 bp, Artificial Sequence
  Description of Artificial Sequence: Synthetic oligonucleotide
  Target: ATXN2; (-) strand; PAM type: NNNNGHTT; PAM sequence: TACTGCTT
attgatatagtcaaaaaagt

SEQ ID NO: 13994 - DNA, 20 bp, Artificial Sequence
  Description of Artificial Sequence: Synthetic oligonucleotide
  Target: ATXN2; (-) strand; PAM type: NNNNGHTT; PAM sequence: CTGGGATT
caccttggtgtccagaaatg

SEQ ID NO: 13995 - DNA, 20 bp, Artificial Sequence
  Description of Artificial Sequence: Synthetic oligonucleotide
  Target: ATXN2; (-) strand; PAM type: NNNNGHTT; PAM sequence: TGAGGTTT
ttttgtattttttgaagaga

SEQ ID NO: 13996 - DNA, 20 bp, Artificial Sequence
  Description of Artificial Sequence: Synthetic oligonucleotide
  Target: ATXN2; (-) strand; PAM type: NNNNGHTT; PAM sequence: CTCTGTTT
cagtctcggctcactgcaac

SEQ ID NO: 13997 - DNA, 20 bp, Artificial Sequence
  Description of Artificial Sequence: Synthetic oligonucleotide
  Target: ATXN2; (-) strand; PAM type: NNNNGHTT; PAM sequence: TTTGGTTT
tgccaagaattgttttaagc

SEQ ID NO: 13998 - DNA, 20 bp, Artificial Sequence
  Description of Artificial Sequence: Synthetic oligonucleotide
  Target: ATXN2; (-) strand; PAM type: NNNNGHTT; PAM sequence: TTAAGCTT
cccagctgccaagaattgtt

SEQ ID NO: 13999 - DNA, 20 bp, Artificial Sequence
  Description of Artificial Sequence: Synthetic oligonucleotide
  Target: ATXN2; (-) strand; PAM type: NNNNGHTT; PAM sequence: AATTGTTT
cactgcacccagctgccaag

SEQ ID NO: 14000 - DNA, 20 bp, Artificial Sequence
  Description of Artificial Sequence: Synthetic oligonucleotide
  Target: ATXN2; (-) strand; PAM type: NNNNGHTT; PAM sequence: CTGGGATT
ccacctcgactcccaaagtg

SEQ ID NO: 14001 - DNA, 20 bp, Artificial Sequence
  Description of Artificial Sequence: Synthetic oligonucleotide
  Target: ATXN2; (-) strand; PAM type: NNNNGHTT; PAM sequence: TGGGGTTT
ttttgtatttttagtagaga

SEQ ID NO: 14002 - DNA, 20 bp, Artificial Sequence
  Description of Artificial Sequence: Synthetic oligonucleotide
  Target: ATXN2; (-) strand; PAM type: NNNNGHTT; PAM sequence: TGGGGTTT
gtatttagttttagtagaga

SEQ ID NO: 14003 - DNA, 20 bp, Artificial Sequence
  Description of Artificial Sequence: Synthetic oligonucleotide
  Target: ATXN2; (-) strand; PAM type: NNNNGHTT; PAM sequence: TTTAGTTT
catgcctggctaattttgta

SEQ ID NO: 14004 - DNA, 20 bp, Artificial Sequence
  Description of Artificial Sequence: Synthetic oligonucleotide
  Target: ATXN2; (-) strand; PAM type: NNNNGHTT; PAM sequence: CTGGGATT
tacctcagcctcctgagtag

SEQ ID NO: 14005 - DNA, 20 bp, Artificial Sequence
  Description of Artificial Sequence: Synthetic oligonucleotide
  Target: ATXN2; (-) strand; PAM type: NNNNGHTT; PAM sequence: AAGTGATT
ccgatctgcctcccgggttc

SEQ ID NO: 14006 - DNA, 20 bp, Artificial Sequence
  Description of Artificial Sequence: Synthetic oligonucleotide
  Target: ATXN2; (-) strand; PAM type: NNNNGHTT; PAM sequence: TGGAGTTT
tgaaataattgtttttgaga

SEQ ID NO: 14007 - DNA, 20 bp, Artificial Sequence
  Description of Artificial Sequence: Synthetic oligonucleotide
  Target: ATXN2; (-) strand; PAM type: NNNNGHTT; PAM sequence: AATTGTTT
atgcattgcattattgaaat

SEQ ID NO: 14008 - DNA, 20 bp, Artificial Sequence
  Description of Artificial Sequence: Synthetic oligonucleotide
  Target: ATXN2; (-) strand; PAM type: NNNNGHTT; PAM sequence: AGTGGATT
agtagattgtgaaacacatt

SEQ ID NO: 14009 - DNA, 20 bp, Artificial Sequence
  Description of Artificial Sequence: Synthetic oligonucleotide
  Target: ATXN2; (-) strand; PAM type: NNNNGHTT; PAM sequence: AGTAGATT
tctgcagatcatgacccctt

SEQ ID NO: 14010 - DNA, 20 bp, Artificial Sequence
  Description of Artificial Sequence: Synthetic oligonucleotide
  Target: ATXN2; (-) strand; PAM type: NNNNGHTT; PAM sequence: AAATGATT
gtgactcataacaccaggtt

SEQ ID NO: 14011 - DNA, 20 bp, Artificial Sequence
  Description of Artificial Sequence: Synthetic oligonucleotide
  Target: ATXN2; (-) strand; PAM type: NNNNGHTT; PAM sequence: TACTGTTT
atcttaggccctaagggcat

SEQ ID NO: 14012 - DNA, 20 bp, Artificial Sequence
  Description of Artificial Sequence: Synthetic oligonucleotide
  Target: ATXN2; (-) strand; PAM type: NNNNGHTT; PAM sequence: GTAAGTTT
ccggcctgggagttttgact

SEQ ID NO: 14013 - DNA, 20 bp, Artificial Sequence
  Description of Artificial Sequence: Synthetic oligonucleotide
  Target: ATXN2; (-) strand; PAM type: NNNNGHTT; PAM sequence: GGGAGTTT
tgagccaccactcccggcct

SEQ ID NO: 14014 - DNA, 20 bp, Artificial Sequence
  Description of Artificial Sequence: Synthetic oligonucleotide
  Target: ATXN2; (-) strand; PAM type: NNNNGHTT; PAM sequence: CCGGGATT
tgcctaggcctcccaaagtg

SEQ ID NO: 14015 - DNA, 20 bp, Artificial Sequence
  Description of Artificial Sequence: Synthetic oligonucleotide
  Target: ATXN2; (-) strand; PAM type: NNNNGHTT; PAM sequence: TGGGGTTT
ttttgtatttttagtagaga

SEQ ID NO: 14016 - DNA, 20 bp, Artificial Sequence
  Description of Artificial Sequence: Synthetic oligonucleotide
  Target: ATXN2; (-) strand; PAM type: NNNNGHTT; PAM sequence: CTGGGATT
tgcctctgactcctgagtag

SEQ ID NO: 14017 - DNA, 20 bp, Artificial Sequence
  Description of Artificial Sequence: Synthetic oligonucleotide
  Target: ATXN2; (-) strand; PAM type: NNNNGHTT; PAM sequence: TAGCGATT
aacctctgcctcccagcttc

SEQ ID NO: 14018 - DNA, 20 bp, Artificial Sequence
  Description of Artificial Sequence: Synthetic oligonucleotide
  Target: ATXN2; (-) strand; PAM type: NNNNGHTT; PAM sequence: CCCAGCTT
gcccactgcaacctctgcct

SEQ ID NO: 14019 - DNA, 20 bp, Artificial Sequence
  Description of Artificial Sequence: Synthetic oligonucleotide
  Target: ATXN2; (-) strand; PAM type: NNNNGHTT; PAM sequence: CCTGGCTT
cacaggcgtgagccaccgca

SEQ ID NO: 14020 - DNA, 20 bp, Artificial Sequence
  Description of Artificial Sequence: Synthetic oligonucleotide
  Target: ATXN2; (-) strand; PAM type: NNNNGHTT; PAM sequence: GCCTGCTT
ctcctgacctcaggtgatcc

SEQ ID NO: 14021 - DNA, 20 bp, Artificial Sequence
  Description of Artificial Sequence: Synthetic oligonucleotide
  Target: ATXN2; (-) strand; PAM type: NNNNGHTT; PAM sequence: CGGGGTTT
ttttgtatttttagtagaga

SEQ ID NO: 14022 - DNA, 20 bp, Artificial Sequence
  Description of Artificial Sequence: Synthetic oligonucleotide
  Target: ATXN2; (-) strand; PAM type: NNNNGHTT; PAM sequence: TGGAGTTT
ttttttttttttttttgaga

SEQ ID NO: 14023 - DNA, 20 bp, Artificial Sequence
  Description of Artificial Sequence: Synthetic oligonucleotide
  Target: ATXN2; (-) strand; PAM type: NNNNGHTT; PAM sequence: GGAGGTTT
tcaacaagtataccattctg

SEQ ID NO: 14024 - DNA, 20 bp, Artificial Sequence
  Description of Artificial Sequence: Synthetic oligonucleotide
  Target: ATXN2; (-) strand; PAM type: NNNNGHTT; PAM sequence: CCATGATT
agtctggatgtcgaggtgag

SEQ ID NO: 14025 - DNA, 20 bp, Artificial Sequence
  Description of Artificial Sequence: Synthetic oligonucleotide
  Target: ATXN2; (-) strand; PAM type: NNNNGHTT; PAM sequence: GGCAGATT
cactttgggaggctgaagca

SEQ ID NO: 14026 - DNA, 20 bp, Artificial Sequence
  Description of Artificial Sequence: Synthetic oligonucleotide
  Target: ATXN2; (-) strand; PAM type: NNNNGHTT; PAM sequence: AAAAGTTT
ctctgtctcaaaaaaaaaaa

SEQ ID NO: 14027 - DNA, 20 bp, Artificial Sequence
  Description of Artificial Sequence: Synthetic oligonucleotide
  Target: ATXN2; (-) strand; PAM type: NNNNGHTT; PAM sequence: CTCAGATT
gaggtgaaggttgcagtgag

SEQ ID NO: 14028 - DNA, 20 bp, Artificial Sequence
  Description of Artificial Sequence: Synthetic oligonucleotide
  Target: ATXN2; (-) strand; PAM type: NNNNGHTT; PAM sequence: AATCGCTT
ttgggaggctgaggcaggag

SEQ ID NO: 14029 - DNA, 20 bp, Artificial Sequence
  Description of Artificial Sequence: Synthetic oligonucleotide
  Target: ATXN2; (-) strand; PAM type: NNNNGHTT; PAM sequence: AATTGCTT
tcgggaggctgaggcaggag

SEQ ID NO: 14030 - DNA, 20 bp, Artificial Sequence
  Description of Artificial Sequence: Synthetic oligonucleotide
  Target: ATXN2; (-) strand; PAM type: NNNNGHTT; PAM sequence: AAGAGATT
ggagggcggattacaaggtc

SEQ ID NO: 14031 - DNA, 20 bp, Artificial Sequence
  Description of Artificial Sequence: Synthetic oligonucleotide
  Target: ATXN2; (-) strand; PAM type: NNNNGHTT; PAM sequence: GGCGGATT
cactttgggaggttgaggag

SEQ ID NO: 14032 - DNA, 20 bp, Artificial Sequence
  Description of Artificial Sequence: Synthetic oligonucleotide
  Target: ATXN2; (-) strand; PAM type: NNNNGHTT; PAM sequence: TCACGCTT
acttagctgggtgcggtggc

SEQ ID NO: 14033 - DNA, 20 bp, Artificial Sequence
  Description of Artificial Sequence: Synthetic oligonucleotide
  Target: ATXN2; (-) strand; PAM type: NNNNGHTT; PAM sequence: CAATGTTT
attggcagcaagtagaaaag

SEQ ID NO: 14034 - DNA, 20 bp, Artificial Sequence
  Description of Artificial Sequence: Synthetic oligonucleotide
  Target: ATXN2; (-) strand; PAM type: NNNNGHTT; PAM sequence: TCTAGCTT
ttactttacacatgattcta

SEQ ID NO: 14035 - DNA, 20 bp, Artificial Sequence
  Description of Artificial Sequence: Synthetic oligonucleotide
  Target: ATXN2; (-) strand; PAM type: NNNNGHTT; PAM sequence: ACATGATT
tttgagaacttttactttac

SEQ ID NO: 14036 - DNA, 20 bp, Artificial Sequence
  Description of Artificial Sequence: Synthetic oligonucleotide
  Target: ATXN2; (-) strand; PAM type: NNNNGHTT; PAM sequence: TCCTGCTT
cttctgggcttaaactgtcc

SEQ ID NO: 14037 - DNA, 20 bp, Artificial Sequence
  Description of Artificial Sequence: Synthetic oligonucleotide
  Target: ATXN2; (-) strand; PAM type: NNNNGHTT; PAM sequence: CTGGGCTT
cccaggctggcctccaactt

SEQ ID NO: 14038 - DNA, 20 bp, Artificial Sequence
  Description of Artificial Sequence: Synthetic oligonucleotide
  Target: ATXN2; (-) strand; PAM type: NNNNGHTT; PAM sequence: AGCAGATT
tgtcttttcactgaagcttg

SEQ ID NO: 14039 - DNA, 20 bp, Artificial Sequence
  Description of Artificial Sequence: Synthetic oligonucleotide
  Target: ATXN2; (-) strand; PAM type: NNNNGHTT; PAM sequence: TGAAGCTT
aagactaaatgtcttttcac

SEQ ID NO: 14040 - DNA, 20 bp, Artificial Sequence
  Description of Artificial Sequence: Synthetic oligonucleotide
  Target: ATXN2; (-) strand; PAM type: NNNNGHTT; PAM sequence: TCGGGTTT
caagtactgcatttttcttt

SEQ ID NO: 14041 - DNA, 20 bp, Artificial Sequence
  Description of Artificial Sequence: Synthetic oligonucleotide
  Target: ATXN2; (-) strand; PAM type: NNNNGHTT; PAM sequence: GCGGGTTT
attttagttttttataaagg

SEQ ID NO: 14042 - DNA, 20 bp, Artificial Sequence
  Description of Artificial Sequence: Synthetic oligonucleotide
  Target: ATXN2; (-) strand; PAM type: NNNNGHTT; PAM sequence: TTTAGTTT
gaattaatcttgattataat

SEQ ID NO: 14043 - DNA, 20 bp, Artificial Sequence
  Description of Artificial Sequence: Synthetic oligonucleotide
  Target: ATXN2; (-) strand; PAM type: NNNNGHTT; PAM sequence: TCTTGATT
atttttctaagtggaattaa

SEQ ID NO: 14044 - DNA, 20 bp, Artificial Sequence
  Description of Artificial Sequence: Synthetic oligonucleotide
  Target: ATXN2; (-) strand; PAM type: NNNNGHTT; PAM sequence: TATTGCTT
tttttcattgacgtttttca

SEQ ID NO: 14045 - DNA, 20 bp, Artificial Sequence
  Description of Artificial Sequence: Synthetic oligonucleotide
  Target: ATXN2; (-) strand; PAM type: NNNNGHTT; PAM sequence: TGACGTTT
ccaggtcaaatatttttcat

SEQ ID NO: 14046 - DNA, 20 bp, Artificial Sequence
  Description of Artificial Sequence: Synthetic oligonucleotide
  Target: ATXN2; (-) strand; PAM type: NNNNGHTT; PAM sequence: AAGTGCTT
ccacccacctagttttccca

SEQ ID NO: 14047 - DNA, 20 bp, Artificial Sequence
  Description of Artificial Sequence: Synthetic oligonucleotide
  Target: ATXN2; (-) strand; PAM type: NNNNGHTT; PAM sequence: CCTAGTTT
aaattcaaatgatccaccca

SEQ ID NO: 14048 - DNA, 20 bp, Artificial Sequence
  Description of Artificial Sequence: Synthetic oligonucleotide
  Target: ATXN2; (-) strand; PAM type: NNNNGHTT; PAM sequence: CAGGGTTT
ttttgtatattttgtagaga

SEQ ID NO: 14049 - DNA, 20 bp, Artificial Sequence
  Description of Artificial Sequence: Synthetic oligonucleotide
  Target: ATXN2; (-) strand; PAM type: NNNNGHTT; PAM sequence: CCTGGCTT
tacaggtgtatgccaccatg

SEQ ID NO: 14050 - DNA, 20 bp, Artificial Sequence
  Description of Artificial Sequence: Synthetic oligonucleotide
  Target: ATXN2; (-) strand; PAM type: NNNNGHTT; PAM sequence: ATCAGTTT
attgaacagtgttgccaatg

SEQ ID NO: 14051 - DNA, 20 bp, Artificial Sequence
  Description of Artificial Sequence: Synthetic oligonucleotide
  Target: ATXN2; (-) strand; PAM type: NNNNGHTT; PAM sequence: AGAGGCTT
ctcctgaaaccattgccttg

SEQ ID NO: 14052 - DNA, 20 bp, Artificial Sequence
  Description of Artificial Sequence: Synthetic oligonucleotide
  Target: ATXN2; (-) strand; PAM type: NNNNGHTT; PAM sequence: CGTGGTTT
ttgtcggcaatataagtgaa

SEQ ID NO: 14053 - DNA, 20 bp, Artificial Sequence
  Description of Artificial Sequence: Synthetic oligonucleotide
  Target: ATXN2; (-) strand; PAM type: NNNNGHTT; PAM sequence: TGAGGCTT
aaaactcattagttgtggta

SEQ ID NO: 14054 - DNA, 20 bp, Artificial Sequence
  Description of Artificial Sequence: Synthetic oligonucleotide
  Target: ATXN2; (-) strand; PAM type: NNNNGHTT; PAM sequence: CCATGATT
ccgaaaatgtcagtttcgtg

SEQ ID NO: 14055 - DNA, 20 bp, Artificial Sequence
  Description of Artificial Sequence: Synthetic oligonucleotide
  Target: ATXN2; (-) strand; PAM type: NNNNGHTT; PAM sequence: GTCAGTTT
actgtgtccagcccgaaaat

SEQ ID NO: 14056 - DNA, 20 bp, Artificial Sequence
  Description of Artificial Sequence: Synthetic oligonucleotide
  Target: ATXN2; (-) strand; PAM type: NNNNGHTT; PAM sequence: TGGAGTTT
ttttgtattttcagtagatg

SEQ ID NO: 14057 - DNA, 20 bp, Artificial Sequence
  Description of Artificial Sequence: Synthetic oligonucleotide
  Target: ATXN2; (-) strand; PAM type: NNNNGHTT; PAM sequence: CCTAGTTT
ggtgcgccccacagtgcctg

SEQ ID NO: 14058 - DNA, 20 bp, Artificial Sequence
  Description of Artificial Sequence: Synthetic oligonucleotide
  Target: ATXN2; (-) strand; PAM type: NNNNGHTT; PAM sequence: ATTTGTTT
caagtgactttacaatgtca

SEQ ID NO: 14059 - DNA, 20 bp, Artificial Sequence
  Description of Artificial Sequence: Synthetic oligonucleotide
  Target: ATXN2; (-) strand; PAM type: NNNNGHTT; PAM sequence: GATTGCTT
catttaaagattcttacata

SEQ ID NO: 14060 - DNA, 20 bp, Artificial Sequence
  Description of Artificial Sequence: Synthetic oligonucleotide
  Target: ATXN2; (-) strand; PAM type: NNNNGHTT; PAM sequence: CATAGATT
ttaacatttaaagattctta

SEQ ID NO: 14061 - DNA, 20 bp, Artificial Sequence
  Description of Artificial Sequence: Synthetic oligonucleotide
  Target: ATXN2; (-) strand; PAM type: NNNNGHTT; PAM sequence: TAAAGATT
ttgaaattctcattaacatt

SEQ ID NO: 14062 - DNA, 20 bp, Artificial Sequence
  Description of Artificial Sequence: Synthetic oligonucleotide
  Target: ATXN2; (-) strand; PAM type: NNNNGHTT; PAM sequence: TTGTGTTT
ttttatttgctggtaattat

SEQ ID NO: 14063 - DNA, 20 bp, Artificial Sequence
  Description of Artificial Sequence: Synthetic oligonucleotide
  Target: ATXN2; (-) strand; PAM type: NNNNGHTT; PAM sequence: TGGGGTTT
tttttgtattttagtagaga

SEQ ID NO: 14064 - DNA, 20 bp, Artificial Sequence
  Description of Artificial Sequence: Synthetic oligonucleotide
  Target: ATXN2; (-) strand; PAM type: NNNNGHTT; PAM sequence: AAGCGATT
aacctctgcctcccaggtta

SEQ ID NO: 14065 - DNA, 20 bp, Artificial Sequence
  Description of Artificial Sequence: Synthetic oligonucleotide
  Target: ATXN2; (-) strand; PAM type: NNNNGHTT; PAM sequence: GGTTGTTT
gtattttttttatgagtctg

SEQ ID NO: 14066 - DNA, 20 bp, Artificial Sequence
  Description of Artificial Sequence: Synthetic oligonucleotide
  Target: ATXN2; (-) strand; PAM type: NNNNGHTT; PAM sequence: CCTGGTTT
gcatgagccaccgcgtccgg

SEQ ID NO: 14067 - DNA, 20 bp, Artificial Sequence
  Description of Artificial Sequence: Synthetic oligonucleotide
  Target: ATXN2; (-) strand; PAM type: NNNNGHTT; PAM sequence: CTGGGATT
cgcctcggcttcccaaagtg

SEQ ID NO: 14068 - DNA, 20 bp, Artificial Sequence
  Description of Artificial Sequence: Synthetic oligonucleotide
  Target: ATXN2; (-) strand; PAM type: NNNNGHTT; PAM sequence: CTCGGCTT
cgacctcttgatctgcccgc

SEQ ID NO: 14069 - DNA, 20 bp, Artificial Sequence
  Description of Artificial Sequence: Synthetic oligonucleotide
  Target: ATXN2; (-) strand; PAM type: NNNNGHTT; PAM sequence: CCAGGATT
atggggtttcactgtgttag

SEQ ID NO: 14070 - DNA, 20 bp, Artificial Sequence
  Description of Artificial Sequence: Synthetic oligonucleotide
  Target: ATXN2; (-) strand; PAM type: NNNNGHTT; PAM sequence: TGGGGTTT
ttatgcattttaagtagaga

SEQ ID NO: 14071 - DNA, 20 bp, Artificial Sequence
  Description of Artificial Sequence: Synthetic oligonucleotide
  Target: ATXN2; (-) strand; PAM type: NNNNGHTT; PAM sequence: TTTAGTTT
agccaccgtgaccagtttgg

SEQ ID NO: 14072 - DNA, 20 bp, Artificial Sequence
  Description of Artificial Sequence: Synthetic oligonucleotide
  Target: ATXN2; (-) strand; PAM type: NNNNGHTT; PAM sequence: TTTGGTTT
gtgtgagccaccgtgaccag

SEQ ID NO: 14073 - DNA, 20 bp, Artificial Sequence
  Description of Artificial Sequence: Synthetic oligonucleotide
  Target: ATXN2; (-) strand; PAM type: NNNNGHTT; PAM sequence: ACCAGTTT
tacaggtgtgagccaccgtg

SEQ ID NO: 14074 - DNA, 20 bp, Artificial Sequence
  Description of Artificial Sequence: Synthetic oligonucleotide
  Target: ATXN2; (-) strand; PAM type: NNNNGHTT; PAM sequence: CTGGGATT
cgcctcgtcctcccaaagtg

SEQ ID NO: 14075 - DNA, 20 bp, Artificial Sequence
  Description of Artificial Sequence: Synthetic oligonucleotide
  Target: ATXN2; (-) strand; PAM type: NNNNGHTT; PAM sequence: TGGGGTTT
ttttgtatttttagtagaga

SEQ ID NO: 14076 - DNA, 20 bp, Artificial Sequence
  Description of Artificial Sequence: Synthetic oligonucleotide
  Target: ATXN2; (-) strand; PAM type: NNNNGHTT; PAM sequence: AAGTGATT
aacctccgcctcctaggttc

SEQ ID NO: 14077 - DNA, 20 bp, Artificial Sequence
  Description of Artificial Sequence: Synthetic oligonucleotide
  Target: ATXN2; (-) strand; PAM type: NNNNGHTT; PAM sequence: CTCGGCTT
ctggaatgcagtgatgtgat

SEQ ID NO: 14078 - DNA, 20 bp, Artificial Sequence
  Description of Artificial Sequence: Synthetic oligonucleotide
  Target: ATXN2; (-) strand; PAM type: NNNNGHTT; PAM sequence: TATTGTTT
ctggttttttaaattattat

SEQ ID NO: 14079 - DNA, 20 bp, Artificial Sequence
  Description of Artificial Sequence: Synthetic oligonucleotide
  Target: ATXN2; (-) strand; PAM type: NNNNGHTT; PAM sequence: GCTGGTTT
ggtgtgagccactatgcctg

SEQ ID NO: 14080 - DNA, 20 bp, Artificial Sequence
  Description of Artificial Sequence: Synthetic oligonucleotide
  Target: ATXN2; (-) strand; PAM type: NNNNGHTT; PAM sequence: CTGGGATT
ctccttggcctcccaaggtg

SEQ ID NO: 14081 - DNA, 20 bp, Artificial Sequence
  Description of Artificial Sequence: Synthetic oligonucleotide
  Target: ATXN2; (-) strand; PAM type: NNNNGHTT; PAM sequence: CAGAGATT
ttgtttttattttgtaggga

SEQ ID NO: 14082 - DNA, 20 bp, Artificial Sequence
  Description of Artificial Sequence: Synthetic oligonucleotide
  Target: ATXN2; (-) strand; PAM type: NNNNGHTT; PAM sequence: GTTTGTTT
ccactgcgcctagctttttt

SEQ ID NO: 14083 - DNA, 20 bp, Artificial Sequence
  Description of Artificial Sequence: Synthetic oligonucleotide
  Target: ATXN2; (-) strand; PAM type: NNNNGHTT; PAM sequence: TTTTGTTT
taagccactgcgcctagctt

SEQ ID NO: 14084 - DNA, 20 bp, Artificial Sequence
  Description of Artificial Sequence: Synthetic oligonucleotide
  Target: ATXN2; (-) strand; PAM type: NNNNGHTT; PAM sequence: CCTAGCTT
tacaggcataagccactgcg

SEQ ID NO: 14085 - DNA, 20 bp, Artificial Sequence
  Description of Artificial Sequence: Synthetic oligonucleotide
  Target: ATXN2; (-) strand; PAM type: NNNNGHTT; PAM sequence: TGGGGTTT
ttttgtattattggtagaga

SEQ ID NO: 14086 - DNA, 20 bp, Artificial Sequence
  Description of Artificial Sequence: Synthetic oligonucleotide
  Target: ATXN2; (-) strand; PAM type: NNNNGHTT; PAM sequence: CTGGGATT
tgcctcagcctcccgagtag

SEQ ID NO: 14087 - DNA, 20 bp, Artificial Sequence
  Description of Artificial Sequence: Synthetic oligonucleotide
  Target: ATXN2; (-) strand; PAM type: NNNNGHTT; PAM sequence: AAATGATT
aacctctgcctcttgcgttc

SEQ ID NO: 14088 - DNA, 20 bp, Artificial Sequence
  Description of Artificial Sequence: Synthetic oligonucleotide
  Target: ATXN2; (-) strand; PAM type: NNNNGHTT; PAM sequence: TTTTGTTT
gccactatgcccagcaaaat

SEQ ID NO: 14089 - DNA, 20 bp, Artificial Sequence
  Description of Artificial Sequence: Synthetic oligonucleotide
  Target: ATXN2; (-) strand; PAM type: NNNNGHTT; PAM sequence: TTGGGATT
tgtcttggcctcccaaagtt

SEQ ID NO: 14090 - DNA, 20 bp, Artificial Sequence
  Description of Artificial Sequence: Synthetic oligonucleotide
  Target: ATXN2; (-) strand; PAM type: NNNNGHTT; PAM sequence: CAAAGTTT
atctgcctgtcttggcctcc

SEQ ID NO: 14091 - DNA, 20 bp, Artificial Sequence
  Description of Artificial Sequence: Synthetic oligonucleotide
  Target: ATXN2; (-) strand; PAM type: NNNNGHTT; PAM sequence: TGGGGTTT
gtatttttttttagtagaga

SEQ ID NO: 14092 - DNA, 20 bp, Artificial Sequence
  Description of Artificial Sequence: Synthetic oligonucleotide
  Target: ATXN2; (-) strand; PAM type: NNNNGHTT; PAM sequence: CTGGGATT
tgcctcagcctcctgagtag

SEQ ID NO: 14093 - DNA, 20 bp, Artificial Sequence
  Description of Artificial Sequence: Synthetic oligonucleotide
  Target: ATXN2; (-) strand; PAM type: NNNNGHTT; PAM sequence: CAGTGATT
aacctccacttcccaggttc

SEQ ID NO: 14094 - DNA, 20 bp, Artificial Sequence
  Description of Artificial Sequence: Synthetic oligonucleotide
  Target: ATXN2; (-) strand; PAM type: NNNNGHTT; PAM sequence: CTTTGTTT
taggaggtctattttctttt

SEQ ID NO: 14095 - DNA, 20 bp, Artificial Sequence
  Description of Artificial Sequence: Synthetic oligonucleotide
  Target: ATXN2; (-) strand; PAM type: NNNNGHTT; PAM sequence: TTTGGCTT
tatctttttgtaaccttgat

SEQ ID NO: 14096 - DNA, 20 bp, Artificial Sequence
  Description of Artificial Sequence: Synthetic oligonucleotide
  Target: ATXN2; (-) strand; PAM type: NNNNGHTT; PAM sequence: CCTTGATT
ttcaggatatctttttgtaa

SEQ ID NO: 14097 - DNA, 20 bp, Artificial Sequence
  Description of Artificial Sequence: Synthetic oligonucleotide
  Target: ATXN2; (-) strand; PAM type: NNNNGHTT; PAM sequence: GCTTGTTT
tgcgtccggccccctaacag

SEQ ID NO: 14098 - DNA, 20 bp, Artificial Sequence
  Description of Artificial Sequence: Synthetic oligonucleotide
  Target: ATXN2; (-) strand; PAM type: NNNNGHTT; PAM sequence: ACAGGCTT
ctgctgcgtccggcccccta

SEQ ID NO: 14099 - DNA, 20 bp, Artificial Sequence
  Description of Artificial Sequence: Synthetic oligonucleotide
  Target: ATXN2; (-) strand; PAM type: NNNNGHTT; PAM sequence: CGGGGTTT
ttttgtatttttagtagaga

SEQ ID NO: 14100 - DNA, 20 bp, Artificial Sequence
  Description of Artificial Sequence: Synthetic oligonucleotide
  Target: ATXN2; (-) strand; PAM type: NNNNGHTT; PAM sequence: AAGCGATT
aacctctgcctcccgggttc

SEQ ID NO: 14101 - DNA, 20 bp, Artificial Sequence
  Description of Artificial Sequence: Synthetic oligonucleotide
  Target: ATXN2; (-) strand; PAM type: NNNNGHTT; PAM sequence: GCCTGTTT
tgcagtctggttcctaacag

SEQ ID NO: 14102 - DNA, 20 bp, Artificial Sequence
  Description of Artificial Sequence: Synthetic oligonucleotide
  Target: ATXN2; (-) strand; PAM type: NNNNGHTT; PAM sequence: TTGTGCTT
tatgcagttcccagtagggt

SEQ ID NO: 14103 - DNA, 20 bp, Artificial Sequence
  Description of Artificial Sequence: Synthetic oligonucleotide
  Target: ATXN2; (-) strand; PAM type: NNNNGHTT; PAM sequence: TAGGGTTT
ttgctatatgcagttcccag

SEQ ID NO: 14104 - DNA, 20 bp, Artificial Sequence
  Description of Artificial Sequence: Synthetic oligonucleotide
  Target: ATXN2; (-) strand; PAM type: NNNNGHTT; PAM sequence: GTTAGATT
cctcagatcattatgcattt

SEQ ID NO: 14105 - DNA, 20 bp, Artificial Sequence
  Description of Artificial Sequence: Synthetic oligonucleotide
  Target: ATXN2; (-) strand; PAM type: NNNNGHTT; PAM sequence: CAGAGCTT
atggcatgaaacccgggagg

SEQ ID NO: 14106 - DNA, 20 bp, Artificial Sequence
  Description of Artificial Sequence: Synthetic oligonucleotide
  Target: ATXN2; (-) strand; PAM type: NNNNGHTT; PAM sequence: GGATGATT
ggtttttccataggggcagg

SEQ ID NO: 14107 - DNA, 20 bp, Artificial Sequence
  Description of Artificial Sequence: Synthetic oligonucleotide
  Target: ATXN2; (-) strand; PAM type: NNNNGHTT; PAM sequence: GATGGTTT
tagggaccggttttgtggaa

SEQ ID NO: 14108 - DNA, 20 bp, Artificial Sequence
  Description of Artificial Sequence: Synthetic oligonucleotide
  Target: ATXN2; (-) strand; PAM type: NNNNGHTT; PAM sequence: ACCGGTTT
caacctttttaacactaggg

SEQ ID NO: 14109 - DNA, 20 bp, Artificial Sequence
  Description of Artificial Sequence: Synthetic oligonucleotide
  Target: ATXN2; (-) strand; PAM type: NNNNGHTT; PAM sequence: CTGAGATT
tgcctcagcttcccaaagtg

SEQ ID NO: 14110 - DNA, 20 bp, Artificial Sequence
  Description of Artificial Sequence: Synthetic oligonucleotide
  Target: ATXN2; (-) strand; PAM type: NNNNGHTT; PAM sequence: CTCAGCTT
ggctcaagtgatcctcctgc

SEQ ID NO: 14111 - DNA, 20 bp, Artificial Sequence
  Description of Artificial Sequence: Synthetic oligonucleotide
  Target: ATXN2; (-) strand; PAM type: NNNNGHTT; PAM sequence: CCCAGATT
gacagggtcctgccatgttg

SEQ ID NO: 14112 - DNA, 20 bp, Artificial Sequence
  Description of Artificial Sequence: Synthetic oligonucleotide
  Target: ATXN2; (-) strand; PAM type: NNNNGHTT; PAM sequence: GTAGGATT
acttgcccaaagcaatattt

SEQ ID NO: 14113 - DNA, 20 bp, Artificial Sequence
  Description of Artificial Sequence: Synthetic oligonucleotide
  Target: ATXN2; (-) strand; PAM type: NNNNGHTT; PAM sequence: GAGAGATT
aggcaaaaactctaagcttt

SEQ ID NO: 14114 - DNA, 20 bp, Artificial Sequence
  Description of Artificial Sequence: Synthetic oligonucleotide
  Target: ATXN2; (-) strand; PAM type: NNNNGHTT; PAM sequence: CTAAGCTT
aaaaatggaaggcaaaaact

SEQ ID NO: 14115 - DNA, 20 bp, Artificial Sequence
  Description of Artificial Sequence: Synthetic oligonucleotide
  Target: ATXN2; (-) strand; PAM type: NNNNGHTT; PAM sequence: CTGGGATT
tgccttggcctcccaaagtg

SEQ ID NO: 14116 - DNA, 20 bp, Artificial Sequence
  Description of Artificial Sequence: Synthetic oligonucleotide
  Target: ATXN2; (-) strand; PAM type: NNNNGHTT; PAM sequence: CAGGGTTT
ttttgtatttttagcagaga

SEQ ID NO: 14117 - DNA, 20 bp, Artificial Sequence
  Description of Artificial Sequence: Synthetic oligonucleotide
  Target: ATXN2; (-) strand; PAM type: NNNNGHTT; PAM sequence: CTGAGATT
tgcctcagccttctgagtag

SEQ ID NO: 14118 - DNA, 20 bp, Artificial Sequence
  Description of Artificial Sequence: Synthetic oligonucleotide
  Target: ATXN2; (-) strand; PAM type: NNNNGHTT; PAM sequence: AAGCGATT
aacctctgtttcccgggttc

SEQ ID NO: 14119 - DNA, 20 bp, Artificial Sequence
  Description of Artificial Sequence: Synthetic oligonucleotide
  Target: ATXN2; (-) strand; PAM type: NNNNGHTT; PAM sequence: CTCTGTTT
caatctcagctcactgcaac

SEQ ID NO: 14120 - DNA, 20 bp, Artificial Sequence
  Description of Artificial Sequence: Synthetic oligonucleotide
  Target: ATXN2; (-) strand; PAM type: NNNNGHTT; PAM sequence: GACAGTTT
ggtgttttttttttttttga

SEQ ID NO: 14121 - DNA, 20 bp, Artificial Sequence
  Description of Artificial Sequence: Synthetic oligonucleotide
  Target: ATXN2; (-) strand; PAM type: NNNNGHTT; PAM sequence: AGGTGTTT
ccgcccagcctcatgagcta

SEQ ID NO: 14122 - DNA, 20 bp, Artificial Sequence
  Description of Artificial Sequence: Synthetic oligonucleotide
  Target: ATXN2; (-) strand; PAM type: NNNNGHTT; PAM sequence: CTGGGATT
tgcctcggcctcccaaagtg

SEQ ID NO: 14123 - DNA, 20 bp, Artificial Sequence
  Description of Artificial Sequence: Synthetic oligonucleotide
  Target: ATXN2; (-) strand; PAM type: NNNNGHTT; PAM sequence: ATTCGCTT
tgaactcctgacctcaggtg

SEQ ID NO: 14124 - DNA, 20 bp, Artificial Sequence
  Description of Artificial Sequence: Synthetic oligonucleotide
  Target: ATXN2; (-) strand; PAM type: NNNNGHTT; PAM sequence: AGGTGATT
gctcttgaactcctgacctc

SEQ ID NO: 14125 - DNA, 20 bp, Artificial Sequence
  Description of Artificial Sequence: Synthetic oligonucleotide
  Target: ATXN2; (-) strand; PAM type: NNNNGHTT; PAM sequence: TGGAGTTT
ttttgcatttttagtagata

SEQ ID NO: 14126 - DNA, 20 bp, Artificial Sequence
  Description of Artificial Sequence: Synthetic oligonucleotide
  Target: ATXN2; (-) strand; PAM type: NNNNGHTT; PAM sequence: CTAAGTTT
gcacccgccaccatgcctgg

SEQ ID NO: 14127 - DNA, 20 bp, Artificial Sequence
  Description of Artificial Sequence: Synthetic oligonucleotide
  Target: ATXN2; (-) strand; PAM type: NNNNGHTT; PAM sequence: CTGGGATT
gccttagccctcccgaatag

SEQ ID NO: 14128 - DNA, 20 bp, Artificial Sequence
  Description of Artificial Sequence: Synthetic oligonucleotide
  Target: ATXN2; (-) strand; PAM type: NNNNGHTT; PAM sequence: GTTTGTTT
taccatctaagggttttttt

SEQ ID NO: 14129 - DNA, 20 bp, Artificial Sequence
  Description of Artificial Sequence: Synthetic oligonucleotide
  Target: ATXN2; (-) strand; PAM type: NNNNGHTT; PAM sequence: TTTTGTTT
ctgttaccatctaagggttt

SEQ ID NO: 14130 - DNA, 20 bp, Artificial Sequence
  Description of Artificial Sequence: Synthetic oligonucleotide
  Target: ATXN2; (-) strand; PAM type: NNNNGHTT; PAM sequence: AAGGGTTT
tgatgttactgttaccatct

SEQ ID NO: 14131 - DNA, 20 bp, Artificial Sequence
  Description of Artificial Sequence: Synthetic oligonucleotide
  Target: ATXN2; (-) strand; PAM type: NNNNGHTT; PAM sequence: TTTTGTTT
aatgaaagtacttgtgtttt

SEQ ID NO: 14132 - DNA, 20 bp, Artificial Sequence
  Description of Artificial Sequence: Synthetic oligonucleotide
  Target: ATXN2; (-) strand; PAM type: NNNNGHTT; PAM sequence: TTGTGTTT
atctttttaaatgaaagtac

SEQ ID NO: 14133 - DNA, 20 bp, Artificial Sequence
  Description of Artificial Sequence: Synthetic oligonucleotide
  Target: ATXN2; (-) strand; PAM type: NNNNGHTT; PAM sequence: CCGTGCTT
gggattacaggcatgagcca

SEQ ID NO: 14134 - DNA, 20 bp, Artificial Sequence
  Description of Artificial Sequence: Synthetic oligonucleotide
  Target: ATXN2; (-) strand; PAM type: NNNNGHTT; PAM sequence: CTGGGATT
tgcctcagcctcccaaagtt

SEQ ID NO: 14135 - DNA, 20 bp, Artificial Sequence
  Description of Artificial Sequence: Synthetic oligonucleotide
  Target: ATXN2; (-) strand; PAM type: NNNNGHTT; PAM sequence: CAGGGTTT
ttttgtatttttagtagaga

SEQ ID NO: 14136 - DNA, 20 bp, Artificial Sequence
  Description of Artificial Sequence: Synthetic oligonucleotide
  Target: ATXN2; (-) strand; PAM type: NNNNGHTT; PAM sequence: AAGTGATT
aacctttgcctcccgggttc

SEQ ID NO: 14137 - DNA, 20 bp, Artificial Sequence
  Description of Artificial Sequence: Synthetic oligonucleotide
  Target: ATXN2; (-) strand; PAM type: NNNNGHTT; PAM sequence: CTCTGCTT
ctggagtgcagtggcacgat

SEQ ID NO: 14138 - DNA, 20 bp, Artificial Sequence
  Description of Artificial Sequence: Synthetic oligonucleotide
  Target: ATXN2; (-) strand; PAM type: NNNNGHTT; PAM sequence: AACAGTTT
acaacttcaacggagatgta

SEQ ID NO: 14139 - DNA, 20 bp, Artificial Sequence
  Description of Artificial Sequence: Synthetic oligonucleotide
  Target: ATXN2; (-) strand; PAM type: NNNNGHTT; PAM sequence: AAGTGATT
tttttttttttagctatttc

SEQ ID NO: 14140 - DNA, 20 bp, Artificial Sequence
  Description of Artificial Sequence: Synthetic oligonucleotide
  Target: ATXN2; (-) strand; PAM type: NNNNGHTT; PAM sequence: TTCTGTTT
tgttctctagaattacaatt

SEQ ID NO: 14141 - DNA, 20 bp, Artificial Sequence
  Description of Artificial Sequence: Synthetic oligonucleotide
  Target: ATXN2; (-) strand; PAM type: NNNNGHTT; PAM sequence: AGAAGATT
gaaacgaattttaaggtttt

SEQ ID NO: 14142 - DNA, 20 bp, Artificial Sequence
  Description of Artificial Sequence: Synthetic oligonucleotide
  Target: ATXN2; (-) strand; PAM type: NNNNGHTT; PAM sequence: TAAGGTTT
ttttactttgaaacgaattt

SEQ ID NO: 14143 - DNA, 20 bp, Artificial Sequence
  Description of Artificial Sequence: Synthetic oligonucleotide
  Target: ATXN2; (-) strand; PAM type: NNNNGHTT; PAM sequence: TATTGTTT
gaactgtcaccttagcaaag

SEQ ID NO: 14144 - DNA, 20 bp, Artificial Sequence
  Description of Artificial Sequence: Synthetic oligonucleotide
  Target: ATXN2; (-) strand; PAM type: NNNNGHTT; PAM sequence: AATTGCTT
ttgggaggctgagggaagag

SEQ ID NO: 14145 - DNA, 20 bp, Artificial Sequence
  Description of Artificial Sequence: Synthetic oligonucleotide
  Target: ATXN2; (-) strand; PAM type: NNNNGHTT; PAM sequence: CCCAGCTT
tggtggtgggcgcctgtaat

SEQ ID NO: 14146 - DNA, 20 bp, Artificial Sequence
  Description of Artificial Sequence: Synthetic oligonucleotide
  Target: ATXN2; (-) strand; PAM type: NNNNGHTT; PAM sequence: AGGAGTTT
cgggtggatcacctggggtc

SEQ ID NO: 14147 - DNA, 20 bp, Artificial Sequence
  Description of Artificial Sequence: Synthetic oligonucleotide
  Target: ATXN2; (-) strand; PAM type: NNNNGHTT; PAM sequence: AATGGTTT
tcagtgttactctaattagc

SEQ ID NO: 14148 - DNA, 20 bp, Artificial Sequence
  Description of Artificial Sequence: Synthetic oligonucleotide
  Target: ATXN2; (-) strand; PAM type: NNNNGHTT; PAM sequence: TAAAGATT
aatgtaagcctgtagttgct

SEQ ID NO: 14149 - DNA, 20 bp, Artificial Sequence
  Description of Artificial Sequence: Synthetic oligonucleotide
  Target: ATXN2; (-) strand; PAM type: NNNNGHTT; PAM sequence: AGTTGCTT
agagaaaaatgtaagcctgt

SEQ ID NO: 14150 - DNA, 20 bp, Artificial Sequence
  Description of Artificial Sequence: Synthetic oligonucleotide
  Target: ATXN2; (-) strand; PAM type: NNNNGHTT; PAM sequence: TTTGGTTT
aagtttgggccaaaacttgc

SEQ ID NO: 14151 - DNA, 20 bp, Artificial Sequence
  Description of Artificial Sequence: Synthetic oligonucleotide
  Target: ATXN2; (-) strand; PAM type: NNNNGHTT; PAM sequence: ACTTGCTT
ctttttaagtttgggccaaa

SEQ ID NO: 14152 - DNA, 20 bp, Artificial Sequence
  Description of Artificial Sequence: Synthetic oligonucleotide
  Target: ATXN2; (-) strand; PAM type: NNNNGHTT; PAM sequence: TTAAGTTT
atgtggagaaaataaacttt

SEQ ID NO: 14153 - DNA, 20 bp, Artificial Sequence
  Description of Artificial Sequence: Synthetic oligonucleotide
  Target: ATXN2; (-) strand; PAM type: NNNNGHTT; PAM sequence: TTTTGTTT
ttttacctaattagtttagt

SEQ ID NO: 14154 - DNA, 20 bp, Artificial Sequence
  Description of Artificial Sequence: Synthetic oligonucleotide
  Target: ATXN2; (-) strand; PAM type: NNNNGHTT; PAM sequence: TTTAGTTT
tacgtattttacctaattag

SEQ ID NO: 14155 - DNA, 20 bp, Artificial Sequence
  Description of Artificial Sequence: Synthetic oligonucleotide
  Target: ATXN2; (-) strand; PAM type: NNNNGHTT; PAM sequence: ATTAGTTT
gggcttacgtattttaccta

SEQ ID NO: 14156 - DNA, 20 bp, Artificial Sequence
  Description of Artificial Sequence: Synthetic oligonucleotide
  Target: ATXN2; (-) strand; PAM type: NNNNGHTT; PAM sequence: TTGGGCTT
agacatgttttgtttttctt

SEQ ID NO: 14157 - DNA, 20 bp, Artificial Sequence
  Description of Artificial Sequence: Synthetic oligonucleotide
  Target: ATXN2; (-) strand; PAM type: NNNNGHTT; PAM sequence: TTTTGTTT
ttactaaccaaagagacatg

SEQ ID NO: 14158 - DNA, 20 bp, Artificial Sequence
  Description of Artificial Sequence: Synthetic oligonucleotide
  Target: ATXN2; (-) strand; PAM type: NNNNGHTT; PAM sequence: ACATGTTT
ggctattactaaccaaagag

SEQ ID NO: 14159 - DNA, 20 bp, Artificial Sequence
  Description of Artificial Sequence: Synthetic oligonucleotide
  Target: ATXN2; (-) strand; PAM type: NNNNGHTT; PAM sequence: TAAGGTTT
gtggcttcattagtaattta

SEQ ID NO: 14160 - DNA, 20 bp, Artificial Sequence
  Description of Artificial Sequence: Synthetic oligonucleotide
  Target: ATXN2; (-) strand; PAM type: NNNNGHTT; PAM sequence: TGTGGCTT
ttatctaggttaattagtca

SEQ ID NO: 14161 - DNA, 20 bp, Artificial Sequence
  Description of Artificial Sequence: Synthetic oligonucleotide
  Target: ATXN2; (-) strand; PAM type: NNNNGHTT; PAM sequence: GTTTGCTT
tgaaggttgggtatttagcc

SEQ ID NO: 14162 - DNA, 20 bp, Artificial Sequence
  Description of Artificial Sequence: Synthetic oligonucleotide
  Target: ATXN2; (-) strand; PAM type: NNNNGHTT; PAM sequence: AGCCGTTT
gatttgaaggttgggtattt

SEQ ID NO: 14163 - DNA, 20 bp, Artificial Sequence
  Description of Artificial Sequence: Synthetic oligonucleotide
  Target: ATXN2; (-) strand; PAM type: NNNNGHTT; PAM sequence: CAAAGATT
ttgaggagctaacatttgag

SEQ ID NO: 14164 - DNA, 20 bp, Artificial Sequence
  Description of Artificial Sequence: Synthetic oligonucleotide
  Target: ATXN2; (-) strand; PAM type: NNNNGHTT; PAM sequence: AATGGATT
gggaatgagttacaatttta

SEQ ID NO: 14165 - DNA, 20 bp, Artificial Sequence
  Description of Artificial Sequence: Synthetic oligonucleotide
  Target: ATXN2; (-) strand; PAM type: NNNNGHTT; PAM sequence: AGCAGATT
gagctatggaattagaagaa

SEQ ID NO: 14166 - DNA, 20 bp, Artificial Sequence
  Description of Artificial Sequence: Synthetic oligonucleotide
  Target: ATXN2; (-) strand; PAM type: NNNNGHTT; PAM sequence: TGGAGTTT
aagcaaacatattgtccttt

SEQ ID NO: 14167 - DNA, 20 bp, Artificial Sequence
  Description of Artificial Sequence: Synthetic oligonucleotide
  Target: ATXN2; (-) strand; PAM type: NNNNGHTT; PAM sequence: TGGGGTTT
tattgaagcatctatgtaca

SEQ ID NO: 14168 - DNA, 20 bp, Artificial Sequence
  Description of Artificial Sequence: Synthetic oligonucleotide
  Target: ATXN2; (-) strand; PAM type: NNNNGHTT; PAM sequence: TACAGCTT
cctaaaatatctacgttgaa

SEQ ID NO: 14169 - DNA, 20 bp, Artificial Sequence
  Description of Artificial Sequence: Synthetic oligonucleotide
  Target: ATXN2; (-) strand; PAM type: NNNNGHTT; PAM sequence: TCATGCTT
tgatttaatgtagttgttca

SEQ ID NO: 14170 - DNA, 20 bp, Artificial Sequence
  Description of Artificial Sequence: Synthetic oligonucleotide
  Target: ATXN2; (-) strand; PAM type: NNNNGHTT; PAM sequence: CTGTGATT
tcaaaaaaaaaaaaaatgtg

SEQ ID NO: 14171 - DNA, 20 bp, Artificial Sequence
  Description of Artificial Sequence: Synthetic oligonucleotide
  Target: ATXN2; (-) strand; PAM type: NNNNGHTT; PAM sequence: CTGAGATT
gaggcggaggttgcagtcag

SEQ ID NO: 14172 - DNA, 20 bp, Artificial Sequence
  Description of Artificial Sequence: Synthetic oligonucleotide
  Target: ATXN2; (-) strand; PAM type: NNNNGHTT; PAM sequence: TGCTGTTT
gcattgcaacttaaaaattg

SEQ ID NO: 14173 - DNA, 20 bp, Artificial Sequence
  Description of Artificial Sequence: Synthetic oligonucleotide
  Target: ATXN2; (-) strand; PAM type: NNNNGHTT; PAM sequence: TACTGCTT
gattttcagcttagtatttt

SEQ ID NO: 14174 - DNA, 20 bp, Artificial Sequence
  Description of Artificial Sequence: Synthetic oligonucleotide
  Target: ATXN2; (-) strand; PAM type: NNNNGHTT; PAM sequence: TTCAGCTT
atatttttcttttagtgatt

SEQ ID NO: 14175 - DNA, 20 bp, Artificial Sequence
  Description of Artificial Sequence: Synthetic oligonucleotide
  Target: ATXN2; (-) strand; PAM type: NNNNGHTT; PAM sequence: TAGTGATT
tgaataaaatatttttcttt

SEQ ID NO: 14176 - DNA, 20 bp, Artificial Sequence
  Description of Artificial Sequence: Synthetic oligonucleotide
  Target: ATXN2; (-) strand; PAM type: NNNNGHTT; PAM sequence: ACAGGATT
acattagaattgcttgggat

SEQ ID NO: 14177 - DNA, 20 bp, Artificial Sequence
  Description of Artificial Sequence: Synthetic oligonucleotide
  Target: ATXN2; (-) strand; PAM type: NNNNGHTT; PAM sequence: AATTGCTT
cctaaataatatgacattag

SEQ ID NO: 14178 - DNA, 20 bp, Artificial Sequence
  Description of Artificial Sequence: Synthetic oligonucleotide
  Target: ATXN2; (-) strand; PAM type: NNNNGHTT; PAM sequence: TATGGATT
ttccccattaaaaataaaaa

SEQ ID NO: 14179 - DNA, 20 bp, Artificial Sequence
  Description of Artificial Sequence: Synthetic oligonucleotide
  Target: ATXN2; (-) strand; PAM type: NNNNGHTT; PAM sequence: AAGTGTTT
aacctttctttttcatctga

SEQ ID NO: 14180 - DNA, 20 bp, Artificial Sequence
  Description of Artificial Sequence: Synthetic oligonucleotide
  Target: ATXN2; (-) strand; PAM type: NNNNGHTT; PAM sequence: TAAAGCTT
aaattcctgaggaactgttc

SEQ ID NO: 14181 - DNA, 20 bp, Artificial Sequence
  Description of Artificial Sequence: Synthetic oligonucleotide
  Target: ATXN2; (-) strand; PAM type: NNNNGHTT; PAM sequence: CTTGGTTT
cattattattaatgagggta

SEQ ID NO: 14182 - DNA, 20 bp, Artificial Sequence
  Description of Artificial Sequence: Synthetic oligonucleotide
  Target: ATXN2; (-) strand; PAM type: NNNNGHTT; PAM sequence: AGATGTTT
taataaggtaatatatgtga

SEQ ID NO: 14183 - DNA, 20 bp, Artificial Sequence
  Description of Artificial Sequence: Synthetic oligonucleotide
  Target: ATXN2; (-) strand; PAM type: NNNNGHTT; PAM sequence: TGAGGATT
tgagtttaatttggttcctc

SEQ ID NO: 14184 - DNA, 20 bp, Artificial Sequence
  Description of Artificial Sequence: Synthetic oligonucleotide
  Target: ATXN2; (-) strand; PAM type: NNNNGHTT; PAM sequence: TTGAGTTT
agttactggattattgatat

SEQ ID NO: 14185 - DNA, 20 bp, Artificial Sequence
  Description of Artificial Sequence: Synthetic oligonucleotide
  Target: ATXN2; (-) strand; PAM type: NNNNGHTT; PAM sequence: ACTGGATT
attaagtgcttttgttagtt

SEQ ID NO: 14186 - DNA, 20 bp, Artificial Sequence
  Description of Artificial Sequence: Synthetic oligonucleotide
  Target: ATXN2; (-) strand; PAM type: NNNNGHTT; PAM sequence: AAGTGCTT
tgtcaagtgcatatattatt

SEQ ID NO: 14187 - DNA, 20 bp, Artificial Sequence
  Description of Artificial Sequence: Synthetic oligonucleotide
  Target: ATXN2; (-) strand; PAM type: NNNNGHTT; PAM sequence: TGTAGTTT
cttccatggaatggtttctt

SEQ ID NO: 14188 - DNA, 20 bp, Artificial Sequence
  Description of Artificial Sequence: Synthetic oligonucleotide
  Target: ATXN2; (-) strand; PAM type: NNNNGHTT; PAM sequence: AATGGTTT
agaaggttgctcttccatgg

SEQ ID NO: 14189 - DNA, 20 bp, Artificial Sequence
  Description of Artificial Sequence: Synthetic oligonucleotide
  Target: ATXN2; (-) strand; PAM type: NNNNGHTT; PAM sequence: TCAGGATT
ttttactagttcagagggct

SEQ ID NO: 14190 - DNA, 20 bp, Artificial Sequence
  Description of Artificial Sequence: Synthetic oligonucleotide
  Target: ATXN2; (-) strand; PAM type: NNNNGHTT; PAM sequence: GAGGGCTT
agagtggttttactagttca

SEQ ID NO: 14191 - DNA, 20 bp, Artificial Sequence
  Description of Artificial Sequence: Synthetic oligonucleotide
  Target: ATXN2; (-) strand; PAM type: NNNNGHTT; PAM sequence: AGTGGTTT
ccttagagaaagttaccaag

SEQ ID NO: 14192 - DNA, 20 bp, Artificial Sequence
  Description of Artificial Sequence: Synthetic oligonucleotide
  Target: ATXN2; (-) strand; PAM type: NNNNGHTT; PAM sequence: TTTTGCTT
gtgaacatttttaaatagct

SEQ ID NO: 14193 - DNA, 20 bp, Artificial Sequence
  Description of Artificial Sequence: Synthetic oligonucleotide
  Target: ATXN2; (-) strand; PAM type: NNNNGHTT; PAM sequence: AATAGCTT
tggtgcagtgaacattttta

SEQ ID NO: 14194 - DNA, 20 bp, Artificial Sequence
  Description of Artificial Sequence: Synthetic oligonucleotide
  Target: ATXN2; (-) strand; PAM type: NNNNGHTT; PAM sequence: TTGGGTTT
aaccattctattgttgggaa

SEQ ID NO: 14195 - DNA, 20 bp, Artificial Sequence
  Description of Artificial Sequence: Synthetic oligonucleotide
  Target: ATXN2; (-) strand; PAM type: NNNNGHTT; PAM sequence: TAAGGTTT
tgagccactgcgcccggctg

SEQ ID NO: 14196 - DNA, 20 bp, Artificial Sequence
  Description of Artificial Sequence: Synthetic oligonucleotide
  Target: ATXN2; (-) strand; PAM type: NNNNGHTT; PAM sequence: CTGGGATT
cgcctcggcctcccaaagtg

SEQ ID NO: 14197 - DNA, 20 bp, Artificial Sequence
  Description of Artificial Sequence: Synthetic oligonucleotide
  Target: ATXN2; (-) strand; PAM type: NNNNGHTT; PAM sequence: GCCAGTTT
gacaaggtttcaccatgttg

SEQ ID NO: 14198 - DNA, 20 bp, Artificial Sequence
  Description of Artificial Sequence: Synthetic oligonucleotide
  Target: ATXN2; (-) strand; PAM type: NNNNGHTT; PAM sequence: CAAGGTTT
ttttgtatttttggtagaga

SEQ ID NO: 14199 - DNA, 20 bp, Artificial Sequence
  Description of Artificial Sequence: Synthetic oligonucleotide
  Target: ATXN2; (-) strand; PAM type: NNNNGHTT; PAM sequence: CCACGCTT
ggggctacaggaatgttcca

SEQ ID NO: 14200 - DNA, 20 bp, Artificial Sequence
  Description of Artificial Sequence: Synthetic oligonucleotide
  Target: ATXN2; (-) strand; PAM type: NNNNGHTT; PAM sequence: AAGCGATT
agcctctgactcctgggttc

SEQ ID NO: 14201 - DNA, 20 bp, Artificial Sequence
  Description of Artificial Sequence: Synthetic oligonucleotide
  Target: ATXN2; (-) strand; PAM type: NNNNGHTT; PAM sequence: CGGTGTTT
ttttttttgagacagagtct

SEQ ID NO: 14202 - DNA, 20 bp, Artificial Sequence
  Description of Artificial Sequence: Synthetic oligonucleotide
  Target: ATXN2; (-) strand; PAM type: NNNNGHTT; PAM sequence: GTTAGCTT
attgtgtatgttattttgta

SEQ ID NO: 14203 - DNA, 20 bp, Artificial Sequence
  Description of Artificial Sequence: Synthetic oligonucleotide
  Target: ATXN2; (-) strand; PAM type: NNNNGHTT; PAM sequence: AGGTGATT
ttttcatttttatgtagtag

SEQ ID NO: 14204 - DNA, 20 bp, Artificial Sequence
  Description of Artificial Sequence: Synthetic oligonucleotide
  Target: ATXN2; (-) strand; PAM type: NNNNGHTT; PAM sequence: TTTTGCTT
accatcagtctaattcttat

SEQ ID NO: 14205 - DNA, 20 bp, Artificial Sequence
  Description of Artificial Sequence: Synthetic oligonucleotide
  Target: ATXN2; (-) strand; PAM type: NNNNGHTT; PAM sequence: CCAGGATT
agcctcggcctcccaaagtg

SEQ ID NO: 14206 - DNA, 20 bp, Artificial Sequence
  Description of Artificial Sequence: Synthetic oligonucleotide
  Target: ATXN2; (-) strand; PAM type: NNNNGHTT; PAM sequence: AAGTGATT
ctcgaactcctcctgacctc

SEQ ID NO: 14207 - DNA, 20 bp, Artificial Sequence
  Description of Artificial Sequence: Synthetic oligonucleotide
  Target: ATXN2; (-) strand; PAM type: NNNNGHTT; PAM sequence: TGGGGTTT
ttttgtatttttagtagaga

SEQ ID NO: 14208 - DNA, 20 bp, Artificial Sequence
  Description of Artificial Sequence: Synthetic oligonucleotide
  Target: ATXN2; (-) strand; PAM type: NNNNGHTT; PAM sequence: CTGGGATT
tgccttggcctcccaaagtg

SEQ ID NO: 14209 - DNA, 20 bp, Artificial Sequence
  Description of Artificial Sequence: Synthetic oligonucleotide
  Target: ATXN2; (-) strand; PAM type: NNNNGHTT; PAM sequence: ACGGGATT
tttttgtatttttagtgagg

SEQ ID NO: 14210 - DNA, 20 bp, Artificial Sequence
  Description of Artificial Sequence: Synthetic oligonucleotide
  Target: ATXN2; (-) strand; PAM type: NNNNGHTT; PAM sequence: CTGGGATT
agcctcagcctccccagtag

SEQ ID NO: 14211 - DNA, 20 bp, Artificial Sequence
  Description of Artificial Sequence: Synthetic oligonucleotide
  Target: ATXN2; (-) strand; PAM type: NNNNGHTT; PAM sequence: AAGTGATT
tctgtctcctgggttcattt

SEQ ID NO: 14212 - DNA, 20 bp, Artificial Sequence
  Description of Artificial Sequence: Synthetic oligonucleotide
  Target: ATXN2; (-) strand; PAM type: NNNNGHTT; PAM sequence: CTCAGCTT
ctggagtgcagtggcctgat

SEQ ID NO: 14213 - DNA, 20 bp, Artificial Sequence
  Description of Artificial Sequence: Synthetic oligonucleotide
  Target: ATXN2; (-) strand; PAM type: NNNNGHTT; PAM sequence: GTGTGTTT
gtgtgtgtgtgtgtgtgtgt

SEQ ID NO: 14214 - DNA, 20 bp, Artificial Sequence
  Description of Artificial Sequence: Synthetic oligonucleotide
  Target: ATXN2; (-) strand; PAM type: NNNNGHTT; PAM sequence: GGCTGTTT
ttatatatatttttgaaggt

SEQ ID NO: 14215 - DNA, 20 bp, Artificial Sequence
  Description of Artificial Sequence: Synthetic oligonucleotide
  Target: ATXN2; (-) strand; PAM type: NNNNGHTT; PAM sequence: AAGTGATT
tagtttttcatgactttcag

SEQ ID NO: 14216 - DNA, 20 bp, Artificial Sequence
  Description of Artificial Sequence: Synthetic oligonucleotide
  Target: ATXN2; (-) strand; PAM type: NNNNGHTT; PAM sequence: AATAGTTT
actttgtgtgtgtgtgtgtg

SEQ ID NO: 14217 - DNA, 20 bp, Artificial Sequence
  Description of Artificial Sequence: Synthetic oligonucleotide
  Target: ATXN2; (-) strand; PAM type: NNNNGHTT; PAM sequence: ATCTGCTT
ttgaaagtctggaaattcac

SEQ ID NO: 14218 - DNA, 20 bp, Artificial Sequence
  Description of Artificial Sequence: Synthetic oligonucleotide
  Target: ATXN2; (-) strand; PAM type: NNNNGHTT; PAM sequence: ATATGCTT
acaagtttcgagatagcaaa

SEQ ID NO: 14219 - DNA, 20 bp, Artificial Sequence
  Description of Artificial Sequence: Synthetic oligonucleotide
  Target: ATXN2; (-) strand; PAM type: NNNNGHTT; PAM sequence: ACAAGTTT
aaaatgcagcattcggtttg

SEQ ID NO: 14220 - DNA, 20 bp, Artificial Sequence
  Description of Artificial Sequence: Synthetic oligonucleotide
  Target: ATXN2; (-) strand; PAM type: NNNNGHTT; PAM sequence: TTCGGTTT
gggtgaaaaaaaatgcagca

SEQ ID NO: 14221 - DNA, 20 bp, Artificial Sequence
  Description of Artificial Sequence: Synthetic oligonucleotide
  Target: ATXN2; (-) strand; PAM type: NNNNGHTT; PAM sequence: TTAGGTTT
agcttctagaatctcctcac

SEQ ID NO: 14222 - DNA, 20 bp, Artificial Sequence
  Description of Artificial Sequence: Synthetic oligonucleotide
  Target: ATXN2; (-) strand; PAM type: NNNNGHTT; PAM sequence: TTCAGCTT
tgcattccttgtaaataagt

SEQ ID NO: 14223 - DNA, 20 bp, Artificial Sequence
  Description of Artificial Sequence: Synthetic oligonucleotide
  Target: ATXN2; (-) strand; PAM type: NNNNGHTT; PAM sequence: ATAAGTTT
ctttcctgcattccttgtaa

SEQ ID NO: 14224 - DNA, 20 bp, Artificial Sequence
  Description of Artificial Sequence: Synthetic oligonucleotide
  Target: ATXN2; (-) strand; PAM type: NNNNGHTT; PAM sequence: TGAAGTTT
tgtgttggatttgtgtaatg

SEQ ID NO: 14225 - DNA, 20 bp, Artificial Sequence
  Description of Artificial Sequence: Synthetic oligonucleotide
  Target: ATXN2; (-) strand; PAM type: NNNNGHTT; PAM sequence: GTTGGATT
ggtgaaattttgtttactgt

SEQ ID NO: 14226 - DNA, 20 bp, Artificial Sequence
  Description of Artificial Sequence: Synthetic oligonucleotide
  Target: ATXN2; (-) strand; PAM type: NNNNGHTT; PAM sequence: TTTTGTTT
tttctgatgaataggtgaaa

SEQ ID NO: 14227 - DNA, 20 bp, Artificial Sequence
  Description of Artificial Sequence: Synthetic oligonucleotide
  Target: ATXN2; (-) strand; PAM type: NNNNGHTT; PAM sequence: CCTTGCTT
taaggttaatttagattttt

SEQ ID NO: 14228 - DNA, 20 bp, Artificial Sequence
  Description of Artificial Sequence: Synthetic oligonucleotide
  Target: ATXN2; (-) strand; PAM type: NNNNGHTT; PAM sequence: TTTAGATT
ttacaacaatttaaggttaa

SEQ ID NO: 14229 - DNA, 20 bp, Artificial Sequence
  Description of Artificial Sequence: Synthetic oligonucleotide
  Target: ATXN2; (-) strand; PAM type: NNNNGHTT; PAM sequence: TGAGGCTT
aaggtcttttttctgttcct

SEQ ID NO: 14230 - DNA, 20 bp, Artificial Sequence
  Description of Artificial Sequence: Synthetic oligonucleotide
  Target: ATXN2; (-) strand; PAM type: NNNNGHTT; PAM sequence: GAATGTTT
tgagtgatcaaagatatttg

SEQ ID NO: 14231 - DNA, 20 bp, Artificial Sequence
  Description of Artificial Sequence: Synthetic oligonucleotide
  Target: ATXN2; (-) strand; PAM type: NNNNGHTT; PAM sequence: AGTAGTTT
tataagagaatttgctcctg

SEQ ID NO: 14232 - DNA, 20 bp, Artificial Sequence
  Description of Artificial Sequence: Synthetic oligonucleotide
  Target: ATXN2; (-) strand; PAM type: NNNNGHTT; PAM sequence: ATTAGATT
attgactactaggcttaaaa

SEQ ID NO: 14233 - DNA, 20 bp, Artificial Sequence
  Description of Artificial Sequence: Synthetic oligonucleotide
  Target: ATXN2; (-) strand; PAM type: NNNNGHTT; PAM sequence: CTAGGCTT
ttattaagttgcattgacta

SEQ ID NO: 14234 - DNA, 20 bp, Artificial Sequence
  Description of Artificial Sequence: Synthetic oligonucleotide
  Target: ATXN2; (-) strand; PAM type: NNNNGHTT; PAM sequence: AAGAGATT
ttactttcttaggtattagg

SEQ ID NO: 14235 - DNA, 20 bp, Artificial Sequence
  Description of Artificial Sequence: Synthetic oligonucleotide
  Target: ATXN2; (-) strand; PAM type: NNNNGHTT; PAM sequence: TTCTGTTT
cttttatagaaaaggatgta

SEQ ID NO: 14236 - DNA, 20 bp, Artificial Sequence
  Description of Artificial Sequence: Synthetic oligonucleotide
  Target: ATXN2; (-) strand; PAM type: NNNNGHTT; PAM sequence: TTCAGTTT
gtttccccaagtagggtaac

SEQ ID NO: 14237 - DNA, 20 bp, Artificial Sequence
  Description of Artificial Sequence: Synthetic oligonucleotide
  Target: ATXN2; (-) strand; PAM type: NNNNGHTT; PAM sequence: GATCGTTT
caaactagttcagatgaagt

SEQ ID NO: 14238 - DNA, 20 bp, Artificial Sequence
  Description of Artificial Sequence: Synthetic oligonucleotide
  Target: ATXN2; (-) strand; PAM type: NNNNGHTT; PAM sequence: GCTGGTTT
ttccccatcaagaggaatca

SEQ ID NO: 14239 - DNA, 20 bp, Artificial Sequence
  Description of Artificial Sequence: Synthetic oligonucleotide
  Target: ATXN2; (-) strand; PAM type: NNNNGHTT; PAM sequence: CCGAGTTT
taagaggatttttcattcac

SEQ ID NO: 14240 - DNA, 20 bp, Artificial Sequence
  Description of Artificial Sequence: Synthetic oligonucleotide
  Target: ATXN2; (-) strand; PAM type: NNNNGHTT; PAM sequence: AGAGGATT
gggctttggaaggtggaata

SEQ ID NO: 14241 - DNA, 20 bp, Artificial Sequence
  Description of Artificial Sequence: Synthetic oligonucleotide
  Target: ATXN2; (-) strand; PAM type: NNNNGHTT; PAM sequence: TTGGGCTT
gtcctccttaaataggcatc

SEQ ID NO: 14242 - DNA, 20 bp, Artificial Sequence
  Description of Artificial Sequence: Synthetic oligonucleotide
  Target: ATXN2; (-) strand; PAM type: NNNNGHTT; PAM sequence: GCCGGCTT
gccttctttaggcctaggcc

SEQ ID NO: 14243 - DNA, 20 bp, Artificial Sequence
  Description of Artificial Sequence: Synthetic oligonucleotide
  Target: ATXN2; (-) strand; PAM type: NNNNGHTT; PAM sequence: CAGAGCTT
cttaacttcgggagtgccgc

SEQ ID NO: 14244 - DNA, 20 bp, Artificial Sequence
  Description of Artificial Sequence: Synthetic oligonucleotide
  Target: ATXN2; (-) strand; PAM type: NNNNGHTT; PAM sequence: AAATGCTT
tcgtatttcacgaactaaga

SEQ ID NO: 14245 - DNA, 20 bp, Artificial Sequence
  Description of Artificial Sequence: Synthetic oligonucleotide
  Target: ATXN2; (-) strand; PAM type: NNNNGHTT; PAM sequence: GTGTGTTT
taactgggtttgactcgagg

SEQ ID NO: 14246 - DNA, 20 bp, Artificial Sequence
  Description of Artificial Sequence: Synthetic oligonucleotide
  Target: ATXN2; (-) strand; PAM type: NNNNGHTT; PAM sequence: CTGGGTTT
ctcagtgttgtcccggctaa

SEQ ID NO: 14247 - DNA, 20 bp, Artificial Sequence
  Description of Artificial Sequence: Synthetic oligonucleotide
  Target: ATXN2; (-) strand; PAM type: NNNNGHTT; PAM sequence: GGGTGTTT
gttcctgaaggcagaaaggc

SEQ ID NO: 14248 - DNA, 20 bp, Artificial Sequence
  Description of Artificial Sequence: Synthetic oligonucleotide
  Target: ATXN2; (-) strand; PAM type: NNNNGHTT; PAM sequence: GAGAGATT
atttcggaaatgctaggaga

SEQ ID NO: 14249 - DNA, 20 bp, Artificial Sequence
  Description of Artificial Sequence: Synthetic oligonucleotide
  Target: ATXN2; (-) strand; PAM type: NNNNGHTT; PAM sequence: TGGCGTTT
gaggggtctggaggctgtgg

SEQ ID NO: 14250 - DNA, 20 bp, Artificial Sequence
  Description of Artificial Sequence: Synthetic oligonucleotide
  Target: ATXN2; (-) strand; PAM type: NNNNGHTT; PAM sequence: CCCGGTTT
gctcgggcagctcctccact

SEQ ID NO: 14251 - DNA, 20 bp, Artificial Sequence
  Description of Artificial Sequence: Synthetic oligonucleotide
  Target: ATXN2; (-) strand; PAM type: NNNNGHTT; PAM sequence: CTGGGATT
gtgggcgcagccggggtcct

SEQ ID NO: 14252 - DNA, 20 bp, Artificial Sequence
  Description of Artificial Sequence: Synthetic oligonucleotide
  Target: ATXN2; (-) strand; PAM type: NNNNGHTT; PAM sequence: GCGCGTTT
tagcaacggcaacggcggcg

SEQ ID NO: 14253 - DNA, 20 bp, Artificial Sequence
  Description of Artificial Sequence: Synthetic oligonucleotide
  Target: ATXN2; (-) strand; PAM type: NNNNGHTT; PAM sequence: GACTGTTT
gctcgcctccctccgcctca

SEQ ID NO: 14254 - DNA, 20 bp, Artificial Sequence
  Description of Artificial Sequence: Synthetic oligonucleotide
  Target: ATXN2; (-) strand; PAM type: NNNNGHTT; PAM sequence: CGCCGCTT
ccgcggtggccaccgagtct

SEQ ID NO: 14255 - DNA, 20 bp, Artificial Sequence
  Description of Artificial Sequence: Synthetic oligonucleotide
  Target: ATXN2; (-) strand; PAM type: NNNNGHTT; PAM sequence: TTCTGCTT
ggccccggggccacctcacg

SEQ ID NO: 14256 - DNA, 20 bp, Artificial Sequence
  Description of Artificial Sequence: Synthetic oligonucleotide
  Target: ATXN2; (-) strand; PAM type: NNNNGHTT; PAM sequence: AAATGCTT
aaggaatacagtaggagaag

SEQ ID NO: 14257 - DNA, 20 bp, Artificial Sequence
  Description of Artificial Sequence: Synthetic oligonucleotide
  Target: ATXN2; (-) strand; PAM type: NNNNGHTT; PAM sequence: AGGTGCTT
cctgaatctggcagggttct

SEQ ID NO: 14258 - DNA, 20 bp, Artificial Sequence
  Description of Artificial Sequence: Synthetic oligonucleotide
  Target: ATXN2; (-) strand; PAM type: NNNNGHTT; PAM sequence: AAGAGTTT
aatgaaggtcagatacctaa

SEQ ID NO: 14259 - DNA, 20 bp, Artificial Sequence
  Description of Artificial Sequence: Synthetic oligonucleotide
  Target: ATXN2; (-) strand; PAM type: NNNNGHTT; PAM sequence: CATTGTTT
tccaaggtctaaagttcgca

SEQ ID NO: 14260 - DNA, 20 bp, Artificial Sequence
  Description of Artificial Sequence: Synthetic oligonucleotide
  Target: ATXN2; (-) strand; PAM type: NNNNGHTT; PAM sequence: TCCAGTTT
ttacctactttctacttgct

SEQ ID NO: 14261 - DNA, 20 bp, Artificial Sequence
  Description of Artificial Sequence: Synthetic oligonucleotide
  Target: ATXN2; (-) strand; PAM type: NNNNGHTT; PAM sequence: ACTTGCTT
aaaaaagttacctactttct

SEQ ID NO: 14262 - DNA, 20 bp, Artificial Sequence
  Description of Artificial Sequence: Synthetic oligonucleotide
  Target: ATXN2; (-) strand; PAM type: NNNNGHTT; PAM sequence: AATAGATT
gtcatttcactttaaaaaac

SEQ ID NO: 14263 - DNA, 20 bp, Artificial Sequence
  Description of Artificial Sequence: Synthetic oligonucleotide
  Target: ATXN2; (-) strand; PAM type: NNNNGHTT; PAM sequence: TGGTGTTT
taggacattgaggggaattt

SEQ ID NO: 14264 - DNA, 20 bp, Artificial Sequence
  Description of Artificial Sequence: Synthetic oligonucleotide
  Target: ATXN2; (-) strand; PAM type: NNNNGHTT; PAM sequence: CCACGTTT
actgctggttcaatcattct

SEQ ID NO: 14265 - DNA, 20 bp, Artificial Sequence
  Description of Artificial Sequence: Synthetic oligonucleotide
  Target: ATXN2; (-) strand; PAM type: NNNNGHTT; PAM sequence: AACTGATT
ttaccttagatgggaaataa

SEQ ID NO: 14266 - DNA, 20 bp, Artificial Sequence
  Description of Artificial Sequence: Synthetic oligonucleotide
  Target: ATXN2; (-) strand; PAM type: NNNNGHTT; PAM sequence: AAGGGTTT
ctaggctaggttaattttta

SEQ ID NO: 14267 - DNA, 20 bp, Artificial Sequence
  Description of Artificial Sequence: Synthetic oligonucleotide
  Target: ATXN2; (-) strand; PAM type: NNNNGHTT; PAM sequence: CGGGGTTT
ttttatatttttggtagaga

SEQ ID NO: 14268 - DNA, 20 bp, Artificial Sequence
  Description of Artificial Sequence: Synthetic oligonucleotide
  Target: ATXN2; (-) strand; PAM type: NNNNGHTT; PAM sequence: CTGGGATT
tgtatcagcctcccgagtag

SEQ ID NO: 14269 - DNA, 20 bp, Artificial Sequence
  Description of Artificial Sequence: Synthetic oligonucleotide
  Target: ATXN2; (-) strand; PAM type: NNNNGHTT; PAM sequence: CCCGGATT
gctgactgcaacctccacct

SEQ ID NO: 14270 - DNA, 20 bp, Artificial Sequence
  Description of Artificial Sequence: Synthetic oligonucleotide
  Target: ATXN2; (-) strand; PAM type: NNNNGHTT; PAM sequence: TCCAGTTT
gtttcaactggttttttagt

SEQ ID NO: 14271 - DNA, 20 bp, Artificial Sequence
  Description of Artificial Sequence: Synthetic oligonucleotide
  Target: ATXN2; (-) strand; PAM type: NNNNGHTT; PAM sequence: ACTGGTTT
acaggtatttttttgtttca

SEQ ID NO: 14272 - DNA, 20 bp, Artificial Sequence
  Description of Artificial Sequence: Synthetic oligonucleotide
  Target: ATXN2; (-) strand; PAM type: NNNNGHTT; PAM sequence: TTTTGTTT
acagccgggtacaggtattt

SEQ ID NO: 14273 - DNA, 20 bp, Artificial Sequence
  Description of Artificial Sequence: Synthetic oligonucleotide
  Target: ATXN2; (-) strand; PAM type: NNNNGHTT; PAM sequence: AGGAGCTT
tgccccatgtcaccctctcc

SEQ ID NO: 14274 - DNA, 20 bp, Artificial Sequence
  Description of Artificial Sequence: Synthetic oligonucleotide
  Target: ATXN2; (-) strand; PAM type: NNNNGHTT; PAM sequence: GAGCGTTT
ctcgctgtgccctccacctg

SEQ ID NO: 14275 - DNA, 20 bp, Artificial Sequence
  Description of Artificial Sequence: Synthetic oligonucleotide
  Target: ATXN2; (-) strand; PAM type: NNNNGHTT; PAM sequence: AAGTGTTT
gtgagccaccgcgccaggcc

SEQ ID NO: 14276 - DNA, 20 bp, Artificial Sequence
  Description of Artificial Sequence: Synthetic oligonucleotide
  Target: ATXN2; (-) strand; PAM type: NNNNGHTT; PAM sequence: CTGGGATT
cgcctcggcctcccagagtg

SEQ ID NO: 14277 - DNA, 20 bp, Artificial Sequence
  Description of Artificial Sequence: Synthetic oligonucleotide
  Target: ATXN2; (-) strand; PAM type: NNNNGHTT; PAM sequence: TGGGGTTT
tttcgtatttttagtagcga

SEQ ID NO: 14278 - DNA, 20 bp, Artificial Sequence
  Description of Artificial Sequence: Synthetic oligonucleotide
  Target: ATXN2; (-) strand; PAM type: NNNNGHTT; PAM sequence: AAGCGATT
aacctccgcctcctgggttc

SEQ ID NO: 14279 - DNA, 20 bp, Artificial Sequence
  Description of Artificial Sequence: Synthetic oligonucleotide
  Target: ATXN2; (-) strand; PAM type: NNNNGHTT; PAM sequence: TAAAGTTT
ttatttttattttttttaga

SEQ ID NO: 14280 - DNA, 20 bp, Artificial Sequence
  Description of Artificial Sequence: Synthetic oligonucleotide
  Target: ATXN2; (-) strand; PAM type: NNNNGHTT; PAM sequence: AAGTGATT
ccttgattccaatcagagaa

SEQ ID NO: 14281 - DNA, 20 bp, Artificial Sequence
  Description of Artificial Sequence: Synthetic oligonucleotide
  Target: ATXN2; (-) strand; PAM type: NNNNGHTT; PAM sequence: CCTTGATT
cttaagattgtattctggga

SEQ ID NO: 14282 - DNA, 20 bp, Artificial Sequence
  Description of Artificial Sequence: Synthetic oligonucleotide
  Target: ATXN2; (-) strand; PAM type: NNNNGHTT; PAM sequence: TTAAGATT
acactggccaaaacttgttc

SEQ ID NO: 14283 - DNA, 20 bp, Artificial Sequence
  Description of Artificial Sequence: Synthetic oligonucleotide
  Target: ATXN2; (-) strand; PAM type: NNNNGHTT; PAM sequence: CTGGGATT
ggccactgcctcccaaagtg

SEQ ID NO: 14284 - DNA, 20 bp, Artificial Sequence
  Description of Artificial Sequence: Synthetic oligonucleotide
  Target: ATXN2; (-) strand; PAM type: NNNNGHTT; PAM sequence: CTGGGATT
tgccttggccttccaaagtg

SEQ ID NO: 14285 - DNA, 20 bp, Artificial Sequence
  Description of Artificial Sequence: Synthetic oligonucleotide
  Target: ATXN2; (-) strand; PAM type: NNNNGHTT; PAM sequence: GTCAGCTT
aaacaaactttctcagctat

SEQ ID NO: 14286 - DNA, 20 bp, Artificial Sequence
  Description of Artificial Sequence: Synthetic oligonucleotide
  Target: ATXN2; (-) strand; PAM type: NNNNGHTT; PAM sequence: TTAAGTTT
attatatcttgataaaacta

SEQ ID NO: 14287 - DNA, 20 bp, Artificial Sequence
  Description of Artificial Sequence: Synthetic oligonucleotide
  Target: ATXN2; (-) strand; PAM type: NNNNGHTT; PAM sequence: GTAAGATT
gacacaaaaggctgcatgct

SEQ ID NO: 14288 - DNA, 20 bp, Artificial Sequence
  Description of Artificial Sequence: Synthetic oligonucleotide
  Target: ATXN2; (-) strand; PAM type: NNNNGHTT; PAM sequence: TTGGGATT
catctcggtatcctaaagtg

SEQ ID NO: 14289 - DNA, 20 bp, Artificial Sequence
  Description of Artificial Sequence: Synthetic oligonucleotide
  Target: ATXN2; (-) strand; PAM type: NNNNGHTT; PAM sequence: GCTGGTTT
ggtctctctatgttgcccag

SEQ ID NO: 14290 - DNA, 20 bp, Artificial Sequence
  Description of Artificial Sequence: Synthetic oligonucleotide
  Target: ATXN2; (-) strand; PAM type: NNNNGHTT; PAM sequence: TAAAGTTT
accagctaattttttatttt

SEQ ID NO: 14291 - DNA, 20 bp, Artificial Sequence
  Description of Artificial Sequence: Synthetic oligonucleotide
  Target: ATXN2; (-) strand; PAM type: NNNNGHTT; PAM sequence: CTGGGATT
cacctcggcctcccaaagtg

SEQ ID NO: 14292 - DNA, 20 bp, Artificial Sequence
  Description of Artificial Sequence: Synthetic oligonucleotide
  Target: ATXN2; (-) strand; PAM type: NNNNGHTT; PAM sequence: ACGGGATT
tttttgtatttttagtagag

SEQ ID NO: 14293 - DNA, 20 bp, Artificial Sequence
  Description of Artificial Sequence: Synthetic oligonucleotide
  Target: ATXN2; (-) strand; PAM type: NNNNGHTT; PAM sequence: CTGAGATT
tgcctcagcctcccaagtag

SEQ ID NO: 14294 - DNA, 20 bp, Artificial Sequence
  Description of Artificial Sequence: Synthetic oligonucleotide
  Target: ATXN2; (-) strand; PAM type: NNNNGHTT; PAM sequence: CCAGGCTT
acagagtattgctgtgtcac

SEQ ID NO: 14295 - DNA, 20 bp, Artificial Sequence
  Description of Artificial Sequence: Synthetic oligonucleotide
  Target: ATXN2; (-) strand; PAM type: NNNNGHTT; PAM sequence: TTCTGCTT
ctcctgggctcaagcggtcc

SEQ ID NO: 14296 - DNA, 20 bp, Artificial Sequence
  Description of Artificial Sequence: Synthetic oligonucleotide
  Target: ATXN2; (-) strand; PAM type: NNNNGHTT; PAM sequence: GTGTGTTT
tcttctttgtgtgtgtgtgt

SEQ ID NO: 14297 - DNA, 20 bp, Artificial Sequence
  Description of Artificial Sequence: Synthetic oligonucleotide
  Target: ATXN2; (-) strand; PAM type: NNNNGHTT; PAM sequence: TTTCGTTT
cttaccacatcacccaacaa

SEQ ID NO: 14298 - DNA, 20 bp, Artificial Sequence
  Description of Artificial Sequence: Synthetic oligonucleotide
  Target: ATXN2; (-) strand; PAM type: NNNNGHTT; PAM sequence: GGTAGTTT
cttctgaagtccagagaaaa

SEQ ID NO: 14299 - DNA, 20 bp, Artificial Sequence
  Description of Artificial Sequence: Synthetic oligonucleotide
  Target: ATXN2; (-) strand; PAM type: NNNNGHTT; PAM sequence: TAAAGCTT
cctactctgatattttcata

SEQ ID NO: 14300 - DNA, 20 bp, Artificial Sequence
  Description of Artificial Sequence: Synthetic oligonucleotide
  Target: ATXN2; (-) strand; PAM type: NNNNGHTT; PAM sequence: CTGGGATT
cacctcagtctcccaaagtg

SEQ ID NO: 14301 - DNA, 20 bp, Artificial Sequence
  Description of Artificial Sequence: Synthetic oligonucleotide
  Target: ATXN2; (-) strand; PAM type: NNNNGHTT; PAM sequence: CAGGGTTT
ttttgtatttttaatagaga

SEQ ID NO: 14302 - DNA, 20 bp, Artificial Sequence
  Description of Artificial Sequence: Synthetic oligonucleotide
  Target: ATXN2; (-) strand; PAM type: NNNNGHTT; PAM sequence: CTGGGATT
cgccttggcctcccaaagtg

SEQ ID NO: 14303 - DNA, 20 bp, Artificial Sequence
  Description of Artificial Sequence: Synthetic oligonucleotide
  Target: ATXN2; (-) strand; PAM type: NNNNGHTT; PAM sequence: CGGGGTTT
ttttgtatttttagtagaga

SEQ ID NO: 14304 - DNA, 20 bp, Artificial Sequence
  Description of Artificial Sequence: Synthetic oligonucleotide
  Target: ATXN2; (-) strand; PAM type: NNNNGHTT; PAM sequence: AAGCGATT
aacctctgcctgccaggttc

SEQ ID NO: 14305 - DNA, 20 bp, Artificial Sequence
  Description of Artificial Sequence: Synthetic oligonucleotide
  Target: ATXN2; (-) strand; PAM type: NNNNGHTT; PAM sequence: GGAGGATT
ttgttttaaaattcaggtgg

SEQ ID NO: 14306 - DNA, 20 bp, Artificial Sequence
  Description of Artificial Sequence: Synthetic oligonucleotide
  Target: ATXN2; (-) strand; PAM type: NNNNGHTT; PAM sequence: TATTGTTT
tcgaaaaaaaaaaaaaaaag

SEQ ID NO: 14307 - DNA, 20 bp, Artificial Sequence
  Description of Artificial Sequence: Synthetic oligonucleotide
  Target: ATXN2; (-) strand; PAM type: NNNNGHTT; PAM sequence: GGAGGATT
atactctgaaggctgagatg

SEQ ID NO: 14308 - DNA, 20 bp, Artificial Sequence
  Description of Artificial Sequence: Synthetic oligonucleotide
  Target: ATXN2; (-) strand; PAM type: NNNNGHTT; PAM sequence: CTGAGATT
gaggtggaggttacagtgaa

SEQ ID NO: 14309 - DNA, 20 bp, Artificial Sequence
  Description of Artificial Sequence: Synthetic oligonucleotide
  Target: ATXN2; (+) strand; PAM type: NNNNGHTT; PAM sequence: AGGTGCTT
catcacccatcttatctaac

SEQ ID NO: 14310 - DNA, 20 bp, Artificial Sequence
  Description of Artificial Sequence: Synthetic oligonucleotide
  Target: ATXN2; (+) strand; PAM type: NNNNGHTT; PAM sequence: AGAGGCTT
gctgacactgggtagagggt

SEQ ID NO: 14311 - DNA, 20 bp, Artificial Sequence
  Description of Artificial Sequence: Synthetic oligonucleotide
  Target: ATXN2; (+) strand; PAM type: NNNNGHTT; PAM sequence: CTGGGATT
ttccctttctcccttcctca

SEQ ID NO: 14312 - DNA, 20 bp, Artificial Sequence
  Description of Artificial Sequence: Synthetic oligonucleotide
  Target: ATXN2; (+) strand; PAM type: NNNNGHTT; PAM sequence: GAAAGATT
gatctttccttccttccaga

SEQ ID NO: 14313 - DNA, 20 bp, Artificial Sequence
  Description of Artificial Sequence: Synthetic oligonucleotide
  Target: ATXN2; (+) strand; PAM type: NNNNGHTT; PAM sequence: GCCAGTTT
ggacactgttaactgctcgt

SEQ ID NO: 14314 - DNA, 20 bp, Artificial Sequence
  Description of Artificial Sequence: Synthetic oligonucleotide
  Target: ATXN2; (+) strand; PAM type: NNNNGHTT; PAM sequence: GTAGGTTT
gcctgttgaagggccctcct

SEQ ID NO: 14315 - DNA, 20 bp, Artificial Sequence
  Description of Artificial Sequence: Synthetic oligonucleotide
  Target: ATXN2; (+) strand; PAM type: NNNNGHTT; PAM sequence: CCTGGCTT
ctgtaggtttcatctatcca

SEQ ID NO: 14316 - DNA, 20 bp, Artificial Sequence
  Description of Artificial Sequence: Synthetic oligonucleotide
  Target: ATXN2; (+) strand; PAM type: NNNNGHTT; PAM sequence: TATTGTTT
tatccacctggctttctcct

SEQ ID NO: 14317 - DNA, 20 bp, Artificial Sequence
  Description of Artificial Sequence: Synthetic oligonucleotide
  Target: ATXN2; (+) strand; PAM type: NNNNGHTT; PAM sequence: TCCTGCTT
ccacagatgaccacatctaa

SEQ ID NO: 14318 - DNA, 20 bp, Artificial Sequence
  Description of Artificial Sequence: Synthetic oligonucleotide
  Target: ATXN2; (+) strand; PAM type: NNNNGHTT; PAM sequence: CTCAGCTT
catctaatcctgcttctact

SEQ ID NO: 14319 - DNA, 20 bp, Artificial Sequence
  Description of Artificial Sequence: Synthetic oligonucleotide
  Target: ATXN2; (+) strand; PAM type: NNNNGHTT; PAM sequence: AAATGATT
aggcacaagctgaaggtcaa

SEQ ID NO: 14320 - DNA, 20 bp, Artificial Sequence
  Description of Artificial Sequence: Synthetic oligonucleotide
  Target: ATXN2; (+) strand; PAM type: NNNNGHTT; PAM sequence: AAAGGATT
tacctcagactaatttcttt

SEQ ID NO: 14321 - DNA, 20 bp, Artificial Sequence
  Description of Artificial Sequence: Synthetic oligonucleotide
  Target: ATXN2; (+) strand; PAM type: NNNNGHTT; PAM sequence: CACTGCTT
attcaggttcaaaacttaac

SEQ ID NO: 14322 - DNA, 20 bp, Artificial Sequence
  Description of Artificial Sequence: Synthetic oligonucleotide
  Target: ATXN2; (+) strand; PAM type: NNNNGHTT; PAM sequence: CACTGTTT
aaccactgcttatttcagtg

SEQ ID NO: 14323 - DNA, 20 bp, Artificial Sequence
  Description of Artificial Sequence: Synthetic oligonucleotide
  Target: ATXN2; (+) strand; PAM type: NNNNGHTT; PAM sequence: GCTGGCTT
tttacagtctgagccagcat

SEQ ID NO: 14324 - DNA, 20 bp, Artificial Sequence
  Description of Artificial Sequence: Synthetic oligonucleotide
  Target: ATXN2; (+) strand; PAM type: NNNNGHTT; PAM sequence: ACTGGATT
tggtgccttacgaataaaaa

SEQ ID NO: 14325 - DNA, 20 bp, Artificial Sequence
  Description of Artificial Sequence: Synthetic oligonucleotide
  Target: ATXN2; (+) strand; PAM type: NNNNGHTT; PAM sequence: TCTGGTTT
ttacgaataaaaaactggat

SEQ ID NO: 14326 - DNA, 20 bp, Artificial Sequence
  Description of Artificial Sequence: Synthetic oligonucleotide
  Target: ATXN2; (+) strand; PAM type: NNNNGHTT; PAM sequence: AGCAGCTT
aaaactggattctggtttac

SEQ ID NO: 14327 - DNA, 20 bp, Artificial Sequence
  Description of Artificial Sequence: Synthetic oligonucleotide
  Target: ATXN2; (+) strand; PAM type: NNNNGHTT; PAM sequence: GCTGGCTT
gtaaatccttcagcaacaag

SEQ ID NO: 14328 - DNA, 20 bp, Artificial Sequence
  Description of Artificial Sequence: Synthetic oligonucleotide
  Target: ATXN2; (+) strand; PAM type: NNNNGHTT; PAM sequence: AATGGCTT
ttggtgccctccaagcatct

SEQ ID NO: 14329 - DNA, 20 bp, Artificial Sequence
  Description of Artificial Sequence: Synthetic oligonucleotide
  Target: ATXN2; (+) strand; PAM type: NNNNGHTT; PAM sequence: GTGGGTTT
cttattaaattatcccacaa

SEQ ID NO: 14330 - DNA, 20 bp, Artificial Sequence
  Description of Artificial Sequence: Synthetic oligonucleotide
  Target: ATXN2; (+) strand; PAM type: NNNNGHTT; PAM sequence: TACTGCTT
agtgttctgttctagctggc

SEQ ID NO: 14331 - DNA, 20 bp, Artificial Sequence
  Description of Artificial Sequence: Synthetic oligonucleotide
  Target: ATXN2; (+) strand; PAM type: NNNNGHTT; PAM sequence: ACTGGATT
ttctagctggctactgcttc

SEQ ID NO: 14332 - DNA, 20 bp, Artificial Sequence
  Description of Artificial Sequence: Synthetic oligonucleotide
  Target: ATXN2; (+) strand; PAM type: NNNNGHTT; PAM sequence: AGTGGCTT
acaacccccaggctcacagc

SEQ ID NO: 14333 - DNA, 20 bp, Artificial Sequence
  Description of Artificial Sequence: Synthetic oligonucleotide
  Target: ATXN2; (+) strand; PAM type: NNNNGHTT; PAM sequence: GGGAGTTT
gcagtggcttctaggaaact

SEQ ID NO: 14334 - DNA, 20 bp, Artificial Sequence
  Description of Artificial Sequence: Synthetic oligonucleotide
  Target: ATXN2; (+) strand; PAM type: NNNNGHTT; PAM sequence: ATCAGCTT
ctaggaaactgggagtttag

SEQ ID NO: 14335 - DNA, 20 bp, Artificial Sequence
  Description of Artificial Sequence: Synthetic oligonucleotide
  Target: ATXN2; (+) strand; PAM type: NNNNGHTT; PAM sequence: GTCTGCTT
ctgcctgggaggagggttag

SEQ ID NO: 14336 - DNA, 20 bp, Artificial Sequence
  Description of Artificial Sequence: Synthetic oligonucleotide
  Target: ATXN2; (+) strand; PAM type: NNNNGHTT; PAM sequence: TTTTGCTT
tgtgctccaagaggtcaaat

SEQ ID NO: 14337 - DNA, 20 bp, Artificial Sequence
  Description of Artificial Sequence: Synthetic oligonucleotide
  Target: ATXN2; (+) strand; PAM type: NNNNGHTT; PAM sequence: TGGAGTTT
tcttttttttttttttgaga

SEQ ID NO: 14338 - DNA, 20 bp, Artificial Sequence
  Description of Artificial Sequence: Synthetic oligonucleotide
  Target: ATXN2; (+) strand; PAM type: NNNNGHTT; PAM sequence: AAGCGATT
aacctccaccttcctggttc

SEQ ID NO: 14339 - DNA, 20 bp, Artificial Sequence
  Description of Artificial Sequence: Synthetic oligonucleotide
  Target: ATXN2; (+) strand; PAM type: NNNNGHTT; PAM sequence: CTGGGATT
tgcctcgacctctcaagtag

SEQ ID NO: 14340 - DNA, 20 bp, Artificial Sequence
  Description of Artificial Sequence: Synthetic oligonucleotide
  Target: ATXN2; (+) strand; PAM type: NNNNGHTT; PAM sequence: CAGGGTTT
ttttgtatttttagtagaga

SEQ ID NO: 14341 - DNA, 20 bp, Artificial Sequence
  Description of Artificial Sequence: Synthetic oligonucleotide
  Target: ATXN2; (+) strand; PAM type: NNNNGHTT; PAM sequence: CTGGGATT
cgccttggcctcccaaagtg

SEQ ID NO: 14342 - DNA, 20 bp, Artificial Sequence
  Description of Artificial Sequence: Synthetic oligonucleotide
  Target: ATXN2; (+) strand; PAM type: NNNNGHTT; PAM sequence: GGGTGATT
cttttagtaccaacactctt

SEQ ID NO: 14343 - DNA, 20 bp, Artificial Sequence
  Description of Artificial Sequence: Synthetic oligonucleotide
  Target: ATXN2; (+) strand; PAM type: NNNNGHTT; PAM sequence: TCCAGATT
taaagcagacctgacactga

SEQ ID NO: 14344 - DNA, 20 bp, Artificial Sequence
  Description of Artificial Sequence: Synthetic oligonucleotide
  Target: ATXN2; (+) strand; PAM type: NNNNGHTT; PAM sequence: AGCAGCTT
tctttatttcctcaaagtca

SEQ ID NO: 14345 - DNA, 20 bp, Artificial Sequence
  Description of Artificial Sequence: Synthetic oligonucleotide
  Target: ATXN2; (+) strand; PAM type: NNNNGHTT; PAM sequence: TGAAGTTT
caaaagagtaagtaagagtc

SEQ ID NO: 14346 - DNA, 20 bp, Artificial Sequence
  Description of Artificial Sequence: Synthetic oligonucleotide
  Target: ATXN2; (+) strand; PAM type: NNNNGHTT; PAM sequence: GAAAGCTT
tctgaagtttttttaaagga

SEQ ID NO: 14347 - DNA, 20 bp, Artificial Sequence
  Description of Artificial Sequence: Synthetic oligonucleotide
  Target: ATXN2; (+) strand; PAM type: NNNNGHTT; PAM sequence: TTCAGATT
aacaggctgcaaagtgcaag

SEQ ID NO: 14348 - DNA, 20 bp, Artificial Sequence
  Description of Artificial Sequence: Synthetic oligonucleotide
  Target: ATXN2; (+) strand; PAM type: NNNNGHTT; PAM sequence: CAGAGATT
tgcaagttcagattctgtgg

SEQ ID NO: 14349 - DNA, 20 bp, Artificial Sequence
  Description of Artificial Sequence: Synthetic oligonucleotide
  Target: ATXN2; (+) strand; PAM type: NNNNGHTT; PAM sequence: GACTGCTT
ttggaaggcacccacctcca

SEQ ID NO: 14350 - DNA, 20 bp, Artificial Sequence
  Description of Artificial Sequence: Synthetic oligonucleotide
  Target: ATXN2; (+) strand; PAM type: NNNNGHTT; PAM sequence: TACAGCTT
ctaattacagaccccaccag

SEQ ID NO: 14351 - DNA, 20 bp, Artificial Sequence
  Description of Artificial Sequence: Synthetic oligonucleotide
  Target: ATXN2; (+) strand; PAM type: NNNNGHTT; PAM sequence: TATGGCTT
aattttagaccagcaatcca

SEQ ID NO: 14352 - DNA, 20 bp, Artificial Sequence
  Description of Artificial Sequence: Synthetic oligonucleotide
  Target: ATXN2; (+) strand; PAM type: NNNNGHTT; PAM sequence: AACAGTTT
agagaacactatttttacat

SEQ ID NO: 14353 - DNA, 20 bp, Artificial Sequence
  Description of Artificial Sequence: Synthetic oligonucleotide
  Target: ATXN2; (+) strand; PAM type: NNNNGHTT; PAM sequence: CTGAGATT
gactcttccctgagggttgc

SEQ ID NO: 14354 - DNA, 20 bp, Artificial Sequence
  Description of Artificial Sequence: Synthetic oligonucleotide
  Target: ATXN2; (+) strand; PAM type: NNNNGHTT; PAM sequence: TCATGCTT
gagggttgcctgagattcct

SEQ ID NO: 14355 - DNA, 20 bp, Artificial Sequence
  Description of Artificial Sequence: Synthetic oligonucleotide
  Target: ATXN2; (+) strand; PAM type: NNNNGHTT; PAM sequence: CTGTGTTT
acaaggacacatctgacatc

SEQ ID NO: 14356 - DNA, 20 bp, Artificial Sequence
  Description of Artificial Sequence: Synthetic oligonucleotide
  Target: ATXN2; (+) strand; PAM type: NNNNGHTT; PAM sequence: AGTGGATT
agcacattgtgataacataa

SEQ ID NO: 14357 - DNA, 20 bp, Artificial Sequence
  Description of Artificial Sequence: Synthetic oligonucleotide
  Target: ATXN2; (+) strand; PAM type: NNNNGHTT; PAM sequence: TATTGTTT
gtatttggcaaatttttatg

SEQ ID NO: 14358 - DNA, 20 bp, Artificial Sequence
  Description of Artificial Sequence: Synthetic oligonucleotide
  Target: ATXN2; (+) strand; PAM type: NNNNGHTT; PAM sequence: AAAAGTTT
aaattgctatatgtgaatta

SEQ ID NO: 14359 - DNA, 20 bp, Artificial Sequence
  Description of Artificial Sequence: Synthetic oligonucleotide
  Target: ATXN2; (+) strand; PAM type: NNNNGHTT; PAM sequence: TCTTGATT
gaattaaaaagttttcagaa

SEQ ID NO: 14360 - DNA, 20 bp, Artificial Sequence
  Description of Artificial Sequence: Synthetic oligonucleotide
  Target: ATXN2; (+) strand; PAM type: NNNNGHTT; PAM sequence: AAATGCTT
tgcaatctgggaatactaac

SEQ ID NO: 14361 - DNA, 20 bp, Artificial Sequence
  Description of Artificial Sequence: Synthetic oligonucleotide
  Target: ATXN2; (+) strand; PAM type: NNNNGHTT; PAM sequence: AGCAGCTT
tgagtccatccatgtcaata

SEQ ID NO: 14362 - DNA, 20 bp, Artificial Sequence
  Description of Artificial Sequence: Synthetic oligonucleotide
  Target: ATXN2; (+) strand; PAM type: NNNNGHTT; PAM sequence: TCTGGATT
tcttttcagccttcatgccc

SEQ ID NO: 14363 - DNA, 20 bp, Artificial Sequence
  Description of Artificial Sequence: Synthetic oligonucleotide
  Target: ATXN2; (+) strand; PAM type: NNNNGHTT; PAM sequence: GGAAGCTT
ggttcaggagatattaaaaa

SEQ ID NO: 14364 - DNA, 20 bp, Artificial Sequence
  Description of Artificial Sequence: Synthetic oligonucleotide
  Target: ATXN2; (+) strand; PAM type: NNNNGHTT; PAM sequence: ACCTGCTT
tcaaaatgcacccttagcac

SEQ ID NO: 14365 - DNA, 20 bp, Artificial Sequence
  Description of Artificial Sequence: Synthetic oligonucleotide
  Target: ATXN2; (+) strand; PAM type: NNNNGHTT; PAM sequence: AGTAGCTT
tattaagtatcctacaaaga

SEQ ID NO: 14366 - DNA, 20 bp, Artificial Sequence
  Description of Artificial Sequence: Synthetic oligonucleotide
  Target: ATXN2; (+) strand; PAM type: NNNNGHTT; PAM sequence: ATCAGTTT
tacagacacacactaacttg

SEQ ID NO: 14367 - DNA, 20 bp, Artificial Sequence
  Description of Artificial Sequence: Synthetic oligonucleotide
  Target: ATXN2; (+) strand; PAM type: NNNNGHTT; PAM sequence: TTAAGTTT
ttttattttttaaatttttt

SEQ ID NO: 14368 - DNA, 20 bp, Artificial Sequence
  Description of Artificial Sequence: Synthetic oligonucleotide
  Target: ATXN2; (+) strand; PAM type: NNNNGHTT; PAM sequence: AAAAGTTT
ttttatattatctacaaagt

SEQ ID NO: 14369 - DNA, 20 bp, Artificial Sequence
  Description of Artificial Sequence: Synthetic oligonucleotide
  Target: ATXN2; (+) strand; PAM type: NNNNGHTT; PAM sequence: ACTTGATT
gacagtgatcacctcatcaa

SEQ ID NO: 14370 - DNA, 20 bp, Artificial Sequence
  Description of Artificial Sequence: Synthetic oligonucleotide
  Target: ATXN2; (+) strand; PAM type: NNNNGHTT; PAM sequence: GTCAGTTT
tgatttataaataataatcc

SEQ ID NO: 14371 - DNA, 20 bp, Artificial Sequence
  Description of Artificial Sequence: Synthetic oligonucleotide
  Target: ATXN2; (+) strand; PAM type: NNNNGHTT; PAM sequence: TCAAGTTT
aagaatttactgaaactttg

SEQ ID NO: 14372 - DNA, 20 bp, Artificial Sequence
  Description of Artificial Sequence: Synthetic oligonucleotide
  Target: ATXN2; (+) strand; PAM type: NNNNGHTT; PAM sequence: TCTTGATT
tagtaaaagggcgttccaag

SEQ ID NO: 14373 - DNA, 20 bp, Artificial Sequence
  Description of Artificial Sequence: Synthetic oligonucleotide
  Target: ATXN2; (+) strand; PAM type: NNNNGHTT; PAM sequence: TCCAGTTT
ttattaaaaaataaataact

SEQ ID NO: 14374 - DNA, 20 bp, Artificial Sequence
  Description of Artificial Sequence: Synthetic oligonucleotide
  Target: ATXN2; (+) strand; PAM type: NNNNGHTT; PAM sequence: TCTAGTTT
aaaaacaaaataaatgaaat

SEQ ID NO: 14375 - DNA, 20 bp, Artificial Sequence
  Description of Artificial Sequence: Synthetic oligonucleotide
  Target: ATXN2; (+) strand; PAM type: NNNNGHTT; PAM sequence: CTGTGCTT
ataaatgaaattctagtttt

SEQ ID NO: 14376 - DNA, 20 bp, Artificial Sequence
  Description of Artificial Sequence: Synthetic oligonucleotide
  Target: ATXN2; (+) strand; PAM type: NNNNGHTT; PAM sequence: GTGGGCTT
ccttacaactgctgttggtg

SEQ ID NO: 14377 - DNA, 20 bp, Artificial Sequence
  Description of Artificial Sequence: Synthetic oligonucleotide
  Target: ATXN2; (+) strand; PAM type: NNNNGHTT; PAM sequence: ACATGATT
cagcctagtgtctctgcagc

SEQ ID NO: 14378 - DNA, 20 bp, Artificial Sequence
  Description of Artificial Sequence: Synthetic oligonucleotide
  Target: ATXN2; (+) strand; PAM type: NNNNGHTT; PAM sequence: ATTCGCTT
tgaacaaaactcaaaattga

SEQ ID NO: 14379 - DNA, 20 bp, Artificial Sequence
  Description of Artificial Sequence: Synthetic oligonucleotide
  Target: ATXN2; (+) strand; PAM type: NNNNGHTT; PAM sequence: TATTGCTT
aaatattagccaagcaccag

SEQ ID NO: 14380 - DNA, 20 bp, Artificial Sequence
  Description of Artificial Sequence: Synthetic oligonucleotide
  Target: ATXN2; (+) strand; PAM type: NNNNGHTT; PAM sequence: CAGCGCTT
actcaaagccagtccatcca

SEQ ID NO: 14381 - DNA, 20 bp, Artificial Sequence
  Description of Artificial Sequence: Synthetic oligonucleotide
  Target: ATXN2; (+) strand; PAM type: NNNNGHTT; PAM sequence: TGCTGCTT
caggctgctgttgctgctgc

SEQ ID NO: 14382 - DNA, 20 bp, Artificial Sequence
  Description of Artificial Sequence: Synthetic oligonucleotide
  Target: ATXN2; (+) strand; PAM type: NNNNGHTT; PAM sequence: CGGGGCTT
gtcttgctagttctcaaatg

SEQ ID NO: 14383 - DNA, 20 bp, Artificial Sequence
  Description of Artificial Sequence: Synthetic oligonucleotide
  Target: ATXN2; (+) strand; PAM type: NNNNGHTT; PAM sequence: GAATGCTT
ccattccacctgtgcgagca

SEQ ID NO: 14384 - DNA, 20 bp, Artificial Sequence
  Description of Artificial Sequence: Synthetic oligonucleotide
  Target: ATXN2; (+) strand; PAM type: NNNNGHTT; PAM sequence: TCCGGCTT
ttacgcatacaggcaacatc

SEQ ID NO: 14385 - DNA, 20 bp, Artificial Sequence
  Description of Artificial Sequence: Synthetic oligonucleotide
  Target: ATXN2; (+) strand; PAM type: NNNNGHTT; PAM sequence: AGTAGATT
gttctctggggacaatctct

SEQ ID NO: 14386 - DNA, 20 bp, Artificial Sequence
  Description of Artificial Sequence: Synthetic oligonucleotide
  Target: ATXN2; (+) strand; PAM type: NNNNGHTT; PAM sequence: ACGCGCTT
gattatctattgacctgaag

SEQ ID NO: 14387 - DNA, 20 bp, Artificial Sequence
  Description of Artificial Sequence: Synthetic oligonucleotide
  Target: ATXN2; (+) strand; PAM type: NNNNGHTT; PAM sequence: CAAAGATT
tgtatggggtaagatcttca

SEQ ID NO: 14388 - DNA, 20 bp, Artificial Sequence
  Description of Artificial Sequence: Synthetic oligonucleotide
  Target: ATXN2; (+) strand; PAM type: NNNNGHTT; PAM sequence: GGCAGCTT
gattagacactggatccaag

SEQ ID NO: 14389 - DNA, 20 bp, Artificial Sequence
  Description of Artificial Sequence: Synthetic oligonucleotide
  Target: ATXN2; (+) strand; PAM type: NNNNGHTT; PAM sequence: ACAAGATT
ctttctcaacttaatatcat

SEQ ID NO: 14390 - DNA, 20 bp, Artificial Sequence
  Description of Artificial Sequence: Synthetic oligonucleotide
  Target: ATXN2; (+) strand; PAM type: NNNNGHTT; PAM sequence: TGATGCTT
taatatcatacaagattcaa

SEQ ID NO: 14391 - DNA, 20 bp, Artificial Sequence
  Description of Artificial Sequence: Synthetic oligonucleotide
  Target: ATXN2; (+) strand; PAM type: NNNNGHTT; PAM sequence: GGTAGTTT
ggctgccatgtggggcctga

SEQ ID NO: 14392 - DNA, 20 bp, Artificial Sequence
  Description of Artificial Sequence: Synthetic oligonucleotide
  Target: ATXN2; (+) strand; PAM type: NNNNGHTT; PAM sequence: AACAGATT
acatccctttcaaataggaa

SEQ ID NO: 14393 - DNA, 20 bp, Artificial Sequence
  Description of Artificial Sequence: Synthetic oligonucleotide
  Target: ATXN2; (+) strand; PAM type: NNNNGHTT; PAM sequence: CTCTGCTT
ctgttcatttgcctctctcc

SEQ ID NO: 14394 - DNA, 20 bp, Artificial Sequence
  Description of Artificial Sequence: Synthetic oligonucleotide
  Target: ATXN2; (+) strand; PAM type: NNNNGHTT; PAM sequence: TGGAGTTT
gcaggaggaggaggaggagt

SEQ ID NO: 14395 - DNA, 20 bp, Artificial Sequence
  Description of Artificial Sequence: Synthetic oligonucleotide
  Target: ATXN2; (+) strand; PAM type: NNNNGHTT; PAM sequence: AGGTGATT
cactcactgtcaagttggaa

SEQ ID NO: 14396 - DNA, 20 bp, Artificial Sequence
  Description of Artificial Sequence: Synthetic oligonucleotide
  Target: ATXN2; (+) strand; PAM type: NNNNGHTT; PAM sequence: GCTGGATT
gattttagtcagcccaaaca

SEQ ID NO: 14397 - DNA, 20 bp, Artificial Sequence
  Description of Artificial Sequence: Synthetic oligonucleotide
  Target: ATXN2; (+) strand; PAM type: NNNNGHTT; PAM sequence: CCTTGTTT
ttggcagggccaggaagagc

SEQ ID NO: 14398 - DNA, 20 bp, Artificial Sequence
  Description of Artificial Sequence: Synthetic oligonucleotide
  Target: ATXN2; (+) strand; PAM type: NNNNGHTT; PAM sequence: TGCCGTTT
acgataagccttggatgaaa

SEQ ID NO: 14399 - DNA, 20 bp, Artificial Sequence
  Description of Artificial Sequence: Synthetic oligonucleotide
  Target: ATXN2; (+) strand; PAM type: NNNNGHTT; PAM sequence: TTGAGCTT
caaacgggcacatggcaaat

SEQ ID NO: 14400 - DNA, 20 bp, Artificial Sequence
  Description of Artificial Sequence: Synthetic oligonucleotide
  Target: ATXN2; (+) strand; PAM type: NNNNGHTT; PAM sequence: TGAGGTTT
ctttcagcacaaaaacagag

SEQ ID NO: 14401 - DNA, 20 bp, Artificial Sequence
  Description of Artificial Sequence: Synthetic oligonucleotide
  Target: ATXN2; (+) strand; PAM type: NNNNGHTT; PAM sequence: ACCGGCTT
cgctggcccacacggaccaa

SEQ ID NO: 14402 - DNA, 20 bp, Artificial Sequence
  Description of Artificial Sequence: Synthetic oligonucleotide
  Target: ATXN2; (+) strand; PAM type: NNNNGHTT; PAM sequence: AGCAGCTT
caagcacacctttcacctgt

SEQ ID NO: 14403 - DNA, 20 bp, Artificial Sequence
  Description of Artificial Sequence: Synthetic oligonucleotide
  Target: ATXN2; (+) strand; PAM type: NNNNGHTT; PAM sequence: AAGTGCTT
tacactggaggtgagctcca

SEQ ID NO: 14404 - DNA, 20 bp, Artificial Sequence
  Description of Artificial Sequence: Synthetic oligonucleotide
  Target: ATXN2; (+) strand; PAM type: NNNNGHTT; PAM sequence: GGGTGCTT
aaagaaaaatgggaccacct

SEQ ID NO: 14405 - DNA, 20 bp, Artificial Sequence
  Description of Artificial Sequence: Synthetic oligonucleotide
  Target: ATXN2; (+) strand; PAM type: NNNNGHTT; PAM sequence: TCCAGCTT
aatgggaccacctgggtgct

SEQ ID NO: 14406 - DNA, 20 bp, Artificial Sequence
  Description of Artificial Sequence: Synthetic oligonucleotide
  Target: ATXN2; (+) strand; PAM type: NNNNGHTT; PAM sequence: CCTGGCTT
tgtgaaggccatcatccctg

SEQ ID NO: 14407 - DNA, 20 bp, Artificial Sequence
  Description of Artificial Sequence: Synthetic oligonucleotide
  Target: ATXN2; (+) strand; PAM type: NNNNGHTT; PAM sequence: CAGGGTTT
caggcaaatggcatgacaca

SEQ ID NO: 14408 - DNA, 20 bp, Artificial Sequence
  Description of Artificial Sequence: Synthetic oligonucleotide
  Target: ATXN2; (+) strand; PAM type: NNNNGHTT; PAM sequence: AGCTGCTT
tcctagctgggagagcctct

SEQ ID NO: 14409 - DNA, 20 bp, Artificial Sequence
  Description of Artificial Sequence: Synthetic oligonucleotide
  Target: ATXN2; (+) strand; PAM type: NNNNGHTT; PAM sequence: CTAAGCTT
gccaagggatacccacaaag

SEQ ID NO: 14410 - DNA, 20 bp, Artificial Sequence
  Description of Artificial Sequence: Synthetic oligonucleotide
  Target: ATXN2; (+) strand; PAM type: NNNNGHTT; PAM sequence: GCCTGATT
ctcctttctagggtacagaa

SEQ ID NO: 14411 - DNA, 20 bp, Artificial Sequence
  Description of Artificial Sequence: Synthetic oligonucleotide
  Target: ATXN2; (+) strand; PAM type: NNNNGHTT; PAM sequence: ATTTGATT
ccttatgaactttatgttaa

SEQ ID NO: 14412 - DNA, 20 bp, Artificial Sequence
  Description of Artificial Sequence: Synthetic oligonucleotide
  Target: ATXN2; (+) strand; PAM type: NNNNGHTT; PAM sequence: GCAAGTTT
aaatttgatttttcattact

SEQ ID NO: 14413 - DNA, 20 bp, Artificial Sequence
  Description of Artificial Sequence: Synthetic oligonucleotide
  Target: ATXN2; (+) strand; PAM type: NNNNGHTT; PAM sequence: CAGAGCTT
ttttcattactgcaagtttc

SEQ ID NO: 14414 - DNA, 20 bp, Artificial Sequence
  Description of Artificial Sequence: Synthetic oligonucleotide
  Target: ATXN2; (+) strand; PAM type: NNNNGHTT; PAM sequence: ATGTGATT
attatcaacatgtatcttaa

SEQ ID NO: 14415 - DNA, 20 bp, Artificial Sequence
  Description of Artificial Sequence: Synthetic oligonucleotide
  Target: ATXN2; (+) strand; PAM type: NNNNGHTT; PAM sequence: CGGAGTTT
ttttgtatttttattagaga

SEQ ID NO: 14416 - DNA, 20 bp, Artificial Sequence
  Description of Artificial Sequence: Synthetic oligonucleotide
  Target: ATXN2; (+) strand; PAM type: NNNNGHTT; PAM sequence: GTGGGATT
cgcctcggcctcccaaagtg

SEQ ID NO: 14417 - DNA, 20 bp, Artificial Sequence
  Description of Artificial Sequence: Synthetic oligonucleotide
  Target: ATXN2; (+) strand; PAM type: NNNNGHTT; PAM sequence: ATGTGATT
ccactgcgcccagcctttaa

SEQ ID NO: 14418 - DNA, 20 bp, Artificial Sequence
  Description of Artificial Sequence: Synthetic oligonucleotide
  Target: ATXN2; (+) strand; PAM type: NNNNGHTT; PAM sequence: GTTGGCTT
tgcaggatgacttccaccat

SEQ ID NO: 14419 - DNA, 20 bp, Artificial Sequence
  Description of Artificial Sequence: Synthetic oligonucleotide
  Target: ATXN2; (+) strand; PAM type: NNNNGHTT; PAM sequence: TATTGCTT
cttgaaaaaataagtgtagc

SEQ ID NO: 14420 - DNA, 20 bp, Artificial Sequence
  Description of Artificial Sequence: Synthetic oligonucleotide
  Target: ATXN2; (+) strand; PAM type: NNNNGHTT; PAM sequence: ATTAGTTT
acatatgatattaaaatcaa

SEQ ID NO: 14421 - DNA, 20 bp, Artificial Sequence
  Description of Artificial Sequence: Synthetic oligonucleotide
  Target: ATXN2; (+) strand; PAM type: NNNNGHTT; PAM sequence: CTAGGTTT
gcatttactcttaacggtca

SEQ ID NO: 14422 - DNA, 20 bp, Artificial Sequence
  Description of Artificial Sequence: Synthetic oligonucleotide
  Target: ATXN2; (+) strand; PAM type: NNNNGHTT; PAM sequence: CTCAGTTT
tcacaggagcccttctgcca

SEQ ID NO: 14423 - DNA, 20 bp, Artificial Sequence
  Description of Artificial Sequence: Synthetic oligonucleotide
  Target: ATXN2; (+) strand; PAM type: NNNNGHTT; PAM sequence: CTTTGCTT
cctaatggaggatctcccat

SEQ ID NO: 14424 - DNA, 20 bp, Artificial Sequence
  Description of Artificial Sequence: Synthetic oligonucleotide
  Target: ATXN2; (+) strand; PAM type: NNNNGHTT; PAM sequence: GCCAGTTT
ttcaaaggacaacatgatgg

SEQ ID NO: 14425 - DNA, 20 bp, Artificial Sequence
  Description of Artificial Sequence: Synthetic oligonucleotide
  Target: ATXN2; (+) strand; PAM type: NNNNGHTT; PAM sequence: TTCAGTTT
aaaaccatttcttcatgtct

SEQ ID NO: 14426 - DNA, 20 bp, Artificial Sequence
  Description of Artificial Sequence: Synthetic oligonucleotide
  Target: ATXN2; (+) strand; PAM type: NNNNGHTT; PAM sequence: TTTTGTTT
tttcttcatgtctttcagtt

SEQ ID NO: 14427 - DNA, 20 bp, Artificial Sequence
  Description of Artificial Sequence: Synthetic oligonucleotide
  Target: ATXN2; (+) strand; PAM type: NNNNGHTT; PAM sequence: TTTTGTTT
atgtctttcagttttttgtt

SEQ ID NO: 14428 - DNA, 20 bp, Artificial Sequence
  Description of Artificial Sequence: Synthetic oligonucleotide
  Target: ATXN2; (+) strand; PAM type: NNNNGHTT; PAM sequence: CTGAGATT
tgcctcagcctcccgagtag

SEQ ID NO: 14429 - DNA, 20 bp, Artificial Sequence
  Description of Artificial Sequence: Synthetic oligonucleotide
  Target: ATXN2; (+) strand; PAM type: NNNNGHTT; PAM sequence: TGGGGTTT
ttttgtatttttagtagaga

SEQ ID NO: 14430 - DNA, 20 bp, Artificial Sequence
  Description of Artificial Sequence: Synthetic oligonucleotide
  Target: ATXN2; (+) strand; PAM type: NNNNGHTT; PAM sequence: CTGGGATT
cacttcagcctcccaaagtg

SEQ ID NO: 14431 - DNA, 20 bp, Artificial Sequence
  Description of Artificial Sequence: Synthetic oligonucleotide
  Target: ATXN2; (+) strand; PAM type: NNNNGHTT; PAM sequence: ATGTGCTT
ccaccgtgcctggcctgttc

SEQ ID NO: 14432 - DNA, 20 bp, Artificial Sequence
  Description of Artificial Sequence: Synthetic oligonucleotide
  Target: ATXN2; (+) strand; PAM type: NNNNGHTT; PAM sequence: CACTGCTT
gaagcagagtaggatgtgtt

SEQ ID NO: 14433 - DNA, 20 bp, Artificial Sequence
  Description of Artificial Sequence: Synthetic oligonucleotide
  Target: ATXN2; (+) strand; PAM type: NNNNGHTT; PAM sequence: AAATGATT
gataataagcccatacacag

SEQ ID NO: 14434 - DNA, 20 bp, Artificial Sequence
  Description of Artificial Sequence: Synthetic oligonucleotide
  Target: ATXN2; (+) strand; PAM type: NNNNGHTT; PAM sequence: GACTGATT
gcaaacacagacatatgcag

SEQ ID NO: 14435 - DNA, 20 bp, Artificial Sequence
  Description of Artificial Sequence: Synthetic oligonucleotide
  Target: ATXN2; (+) strand; PAM type: NNNNGHTT; PAM sequence: CACAGCTT
tgattggtgagagaagcaag

SEQ ID NO: 14436 - DNA, 20 bp, Artificial Sequence
  Description of Artificial Sequence: Synthetic oligonucleotide
  Target: ATXN2; (+) strand; PAM type: NNNNGHTT; PAM sequence: TCCAGTTT
ggcattaatattccttcata

SEQ ID NO: 14437 - DNA, 20 bp, Artificial Sequence
  Description of Artificial Sequence: Synthetic oligonucleotide
  Target: ATXN2; (+) strand; PAM type: NNNNGHTT; PAM sequence: AGCAGCTT
atccagtttagactggatac

SEQ ID NO: 14438 - DNA, 20 bp, Artificial Sequence
  Description of Artificial Sequence: Synthetic oligonucleotide
  Target: ATXN2; (+) strand; PAM type: NNNNGHTT; PAM sequence: CTTTGTTT
gtttagactggatacagcag

SEQ ID NO: 14439 - DNA, 20 bp, Artificial Sequence
  Description of Artificial Sequence: Synthetic oligonucleotide
  Target: ATXN2; (+) strand; PAM type: NNNNGHTT; PAM sequence: GAATGTTT
actgtggcaacatagtctct

SEQ ID NO: 14440 - DNA, 20 bp, Artificial Sequence
  Description of Artificial Sequence: Synthetic oligonucleotide
  Target: ATXN2; (+) strand; PAM type: NNNNGHTT; PAM sequence: CTGAGCTT
gtacaaacgatgaagccttc

SEQ ID NO: 14441 - DNA, 20 bp, Artificial Sequence
  Description of Artificial Sequence: Synthetic oligonucleotide
  Target: ATXN2; (+) strand; PAM type: NNNNGHTT; PAM sequence: GGTGGCTT
cagtcctttttttctaactt

SEQ ID NO: 14442 - DNA, 20 bp, Artificial Sequence
  Description of Artificial Sequence: Synthetic oligonucleotide
  Target: ATXN2; (+) strand; PAM type: NNNNGHTT; PAM sequence: TTAAGTTT
ctccatcatcatcatactca

SEQ ID NO: 14443 - DNA, 20 bp, Artificial Sequence
  Description of Artificial Sequence: Synthetic oligonucleotide
  Target: ATXN2; (+) strand; PAM type: NNNNGHTT; PAM sequence: AAAAGATT
tataggcactgacttggtct

SEQ ID NO: 14444 - DNA, 20 bp, Artificial Sequence
  Description of Artificial Sequence: Synthetic oligonucleotide
  Target: ATXN2; (+) strand; PAM type: NNNNGHTT; PAM sequence: CTGAGTTT
atttgatgtaaatttcgaac

SEQ ID NO: 14445 - DNA, 20 bp, Artificial Sequence
  Description of Artificial Sequence: Synthetic oligonucleotide
  Target: ATXN2; (+) strand; PAM type: NNNNGHTT; PAM sequence: ATTTGTTT
ttcattttaaaaatgtattt

SEQ ID NO: 14446 - DNA, 20 bp, Artificial Sequence
  Description of Artificial Sequence: Synthetic oligonucleotide
  Target: ATXN2; (+) strand; PAM type: NNNNGHTT; PAM sequence: AAGCGATT
aacctccgcctcccgggttc

SEQ ID NO: 14447 - DNA, 20 bp, Artificial Sequence
  Description of Artificial Sequence: Synthetic oligonucleotide
  Target: ATXN2; (+) strand; PAM type: NNNNGHTT; PAM sequence: GGCTGATT
aggcaagcatcaccatgcct

SEQ ID NO: 14448 - DNA, 20 bp, Artificial Sequence
  Description of Artificial Sequence: Synthetic oligonucleotide
  Target: ATXN2; (+) strand; PAM type: NNNNGHTT; PAM sequence: ACGGGTTT
tttttgtatttttagtagag

SEQ ID NO: 14449 - DNA, 20 bp, Artificial Sequence
  Description of Artificial Sequence: Synthetic oligonucleotide
  Target: ATXN2; (+) strand; PAM type: NNNNGHTT; PAM sequence: CTGGGATT
cgcctcggcctcccaaagtg

SEQ ID NO: 14450 - DNA, 20 bp, Artificial Sequence
  Description of Artificial Sequence: Synthetic oligonucleotide
  Target: ATXN2; (+) strand; PAM type: NNNNGHTT; PAM sequence: CCATGTTT
gcatgagccactgcgcccgg

SEQ ID NO: 14451 - DNA, 20 bp, Artificial Sequence
  Description of Artificial Sequence: Synthetic oligonucleotide
  Target: ATXN2; (+) strand; PAM type: NNNNGHTT; PAM sequence: GTTTGTTT
gagccactgcgcccggccat

SEQ ID NO: 14452 - DNA, 20 bp, Artificial Sequence
  Description of Artificial Sequence: Synthetic oligonucleotide
  Target: ATXN2; (+) strand; PAM type: NNNNGHTT; PAM sequence: TCCTGCTT
ctcctgggttaaagtgatac

SEQ ID NO: 14453 - DNA, 20 bp, Artificial Sequence
  Description of Artificial Sequence: Synthetic oligonucleotide
  Target: ATXN2; (+) strand; PAM type: NNNNGHTT; PAM sequence: CTGGGATT
ctgcttcagcctctgagtag

SEQ ID NO: 14454 - DNA, 20 bp, Artificial Sequence
  Description of Artificial Sequence: Synthetic oligonucleotide
  Target: ATXN2; (+) strand; PAM type: NNNNGHTT; PAM sequence: CGGGGTTT
ttttgtatttttagtagaga

SEQ ID NO: 14455 - DNA, 20 bp, Artificial Sequence
  Description of Artificial Sequence: Synthetic oligonucleotide
  Target: ATXN2; (+) strand; PAM type: NNNNGHTT; PAM sequence: TTGGGATT
catctcggcctcccaaagtg

SEQ ID NO: 14456 - DNA, 20 bp, Artificial Sequence
  Description of Artificial Sequence: Synthetic oligonucleotide
  Target: ATXN2; (+) strand; PAM type: NNNNGHTT; PAM sequence: TGCAGTTT
gtagctaatacggtggacag

SEQ ID NO: 14457 - DNA, 20 bp, Artificial Sequence
  Description of Artificial Sequence: Synthetic oligonucleotide
  Target: ATXN2; (+) strand; PAM type: NNNNGHTT; PAM sequence: TGTTGTTT
ggtggacagtgcagttttgt

SEQ ID NO: 14458 - DNA, 20 bp, Artificial Sequence
  Description of Artificial Sequence: Synthetic oligonucleotide
  Target: ATXN2; (+) strand; PAM type: NNNNGHTT; PAM sequence: AAGCGATT
aacctctgcctcccgggttc

SEQ ID NO: 14459 - DNA, 20 bp, Artificial Sequence
  Description of Artificial Sequence: Synthetic oligonucleotide
  Target: ATXN2; (+) strand; PAM type: NNNNGHTT; PAM sequence: CAGGGTTT
ttttgtatttttagtagaga

SEQ ID NO: 14460 - DNA, 20 bp, Artificial Sequence
  Description of Artificial Sequence: Synthetic oligonucleotide
  Target: ATXN2; (+) strand; PAM type: NNNNGHTT; PAM sequence: AGAGGTTT
aagatacagtacggaatctc

SEQ ID NO: 14461 - DNA, 20 bp, Artificial Sequence
  Description of Artificial Sequence: Synthetic oligonucleotide
  Target: ATXN2; (+) strand; PAM type: NNNNGHTT; PAM sequence: TTTTGTTT
cagtacggaatctcagaggt

SEQ ID NO: 14462 - DNA, 20 bp, Artificial Sequence
  Description of Artificial Sequence: Synthetic oligonucleotide
  Target: ATXN2; (+) strand; PAM type: NNNNGHTT; PAM sequence: AAAAGTTT
attcaagaaattttgtacta

SEQ ID NO: 14463 - DNA, 20 bp, Artificial Sequence
  Description of Artificial Sequence: Synthetic oligonucleotide
  Target: ATXN2; (+) strand; PAM type: NNNNGHTT; PAM sequence: TTAAGTTT
ttaaaaggcatctctgcaat

SEQ ID NO: 14464 - DNA, 20 bp, Artificial Sequence
  Description of Artificial Sequence: Synthetic oligonucleotide
  Target: ATXN2; (+) strand; PAM type: NNNNGHTT; PAM sequence: TACGGTTT
ccagtatttaaagactataa

SEQ ID NO: 14465 - DNA, 20 bp, Artificial Sequence
  Description of Artificial Sequence: Synthetic oligonucleotide
  Target: ATXN2; (+) strand; PAM type: NNNNGHTT; PAM sequence: ATAGGCTT
cccaagctgagtgaatgtac

SEQ ID NO: 14466 - DNA, 20 bp, Artificial Sequence
  Description of Artificial Sequence: Synthetic oligonucleotide
  Target: ATXN2; (+) strand; PAM type: NNNNGHTT; PAM sequence: CTTTGTTT
gctgagtgaatgtacatagg

SEQ ID NO: 14467 - DNA, 20 bp, Artificial Sequence
  Description of Artificial Sequence: Synthetic oligonucleotide
  Target: ATXN2; (+) strand; PAM type: NNNNGHTT; PAM sequence: CATTGATT
ataccggtaaacttgcaagg

SEQ ID NO: 14468 - DNA, 20 bp, Artificial Sequence
  Description of Artificial Sequence: Synthetic oligonucleotide
  Target: ATXN2; (+) strand; PAM type: NNNNGHTT; PAM sequence: CTTTGTTT
agttaattagaaatatttcc

SEQ ID NO: 14469 - DNA, 20 bp, Artificial Sequence
  Description of Artificial Sequence: Synthetic oligonucleotide
  Target: ATXN2; (+) strand; PAM type: NNNNGHTT; PAM sequence: TCACGCTT
atggagccgggcacggtggc

SEQ ID NO: 14470 - DNA, 20 bp, Artificial Sequence
  Description of Artificial Sequence: Synthetic oligonucleotide
  Target: ATXN2; (+) strand; PAM type: NNNNGHTT; PAM sequence: ACCAGCTT
cctgaggttaggagttcgag

SEQ ID NO: 14471 - DNA, 20 bp, Artificial Sequence
  Description of Artificial Sequence: Synthetic oligonucleotide
  Target: ATXN2; (+) strand; PAM type: NNNNGHTT; PAM sequence: AATAGCTT
tagggagagtggggaaggag

SEQ ID NO: 14472 - DNA, 20 bp, Artificial Sequence
  Description of Artificial Sequence: Synthetic oligonucleotide
  Target: ATXN2; (+) strand; PAM type: NNNNGHTT; PAM sequence: TCCAGCTT
ccgacatcacaccattgcac

SEQ ID NO: 14473 - DNA, 20 bp, Artificial Sequence
  Description of Artificial Sequence: Synthetic oligonucleotide
  Target: ATXN2; (+) strand; PAM type: NNNNGHTT; PAM sequence: AATAGCTT
atttaaaagccaaggaaaaa

SEQ ID NO: 14474 - DNA, 20 bp, Artificial Sequence
  Description of Artificial Sequence: Synthetic oligonucleotide
  Target: ATXN2; (+) strand; PAM type: NNNNGHTT; PAM sequence: AATTGCTT
ctctggaagctgaggcagag

SEQ ID NO: 14475 - DNA, 20 bp, Artificial Sequence
  Description of Artificial Sequence: Synthetic oligonucleotide
  Target: ATXN2; (+) strand; PAM type: NNNNGHTT; PAM sequence: CACTGCTT
ctgacccacacatattattt

SEQ ID NO: 14476 - DNA, 20 bp, Artificial Sequence
  Description of Artificial Sequence: Synthetic oligonucleotide
  Target: ATXN2; (+) strand; PAM type: NNNNGHTT; PAM sequence: TACTGATT
aaagttaattttatttgtaa

SEQ ID NO: 14477 - DNA, 20 bp, Artificial Sequence
  Description of Artificial Sequence: Synthetic oligonucleotide
  Target: ATXN2; (+) strand; PAM type: NNNNGHTT; PAM sequence: TTTAGATT
ctttagtcttcataaaatct

SEQ ID NO: 14478 - DNA, 20 bp, Artificial Sequence
  Description of Artificial Sequence: Synthetic oligonucleotide
  Target: ATXN2; (+) strand; PAM type: NNNNGHTT; PAM sequence: ATATGCTT
gattaaagataatcaaagac

SEQ ID NO: 14479 - DNA, 20 bp, Artificial Sequence
  Description of Artificial Sequence: Synthetic oligonucleotide
  Target: ATXN2; (+) strand; PAM type: NNNNGHTT; PAM sequence: AGAAGTTT
ctttggtccagacctagtcc

SEQ ID NO: 14480 - DNA, 20 bp, Artificial Sequence
  Description of Artificial Sequence: Synthetic oligonucleotide
  Target: ATXN2; (+) strand; PAM type: NNNNGHTT; PAM sequence: TTAAGATT
gtgttccttgacataaatat

SEQ ID NO: 14481 - DNA, 20 bp, Artificial Sequence
  Description of Artificial Sequence: Synthetic oligonucleotide
  Target: ATXN2; (+) strand; PAM type: NNNNGHTT; PAM sequence: ACTAGTTT
aacactaaccacattccaga

SEQ ID NO: 14482 - DNA, 20 bp, Artificial Sequence
  Description of Artificial Sequence: Synthetic oligonucleotide
  Target: ATXN2; (+) strand; PAM type: NNNNGHTT; PAM sequence: GTGTGTTT
caaattaagtacagaaagct

SEQ ID NO: 14483 - DNA, 20 bp, Artificial Sequence
  Description of Artificial Sequence: Synthetic oligonucleotide
  Target: ATXN2; (+) strand; PAM type: NNNNGHTT; PAM sequence: CTAGGTTT
gctgtgtgtttaatttgtaa

SEQ ID NO: 14484 - DNA, 20 bp, Artificial Sequence
  Description of Artificial Sequence: Synthetic oligonucleotide
  Target: ATXN2; (+) strand; PAM type: NNNNGHTT; PAM sequence: AATGGCTT
acttgaccaaaccatcataa

SEQ ID NO: 14485 - DNA, 20 bp, Artificial Sequence
  Description of Artificial Sequence: Synthetic oligonucleotide
  Target: ATXN2; (+) strand; PAM type: NNNNGHTT; PAM sequence: AGCAGATT
agaacagggggaaatgaagc

SEQ ID NO: 14486 - DNA, 20 bp, Artificial Sequence
  Description of Artificial Sequence: Synthetic oligonucleotide
  Target: ATXN2; (+) strand; PAM type: NNNNGHTT; PAM sequence: GTTAGTTT
attaaattagcagcccaact

SEQ ID NO: 14487 - DNA, 20 bp, Artificial Sequence
  Description of Artificial Sequence: Synthetic oligonucleotide
  Target: ATXN2; (+) strand; PAM type: NNNNGHTT; PAM sequence: TAAGGCTT
ggaagttgtgctaaggcaat

SEQ ID NO: 14488 - DNA, 20 bp, Artificial Sequence
  Description of Artificial Sequence: Synthetic oligonucleotide
  Target: ATXN2; (+) strand; PAM type: NNNNGHTT; PAM sequence: TAATGATT
ggcaattaaggcttaggtgt

SEQ ID NO: 14489 - DNA, 20 bp, Artificial Sequence
  Description of Artificial Sequence: Synthetic oligonucleotide
  Target: ATXN2; (+) strand; PAM type: NNNNGHTT; PAM sequence: CATAGTTT
ttacacactacaatcacaga

SEQ ID NO: 14490 - DNA, 20 bp, Artificial Sequence
  Description of Artificial Sequence: Synthetic oligonucleotide
  Target: ATXN2; (+) strand; PAM type: NNNNGHTT; PAM sequence: AAAGGATT
ctttttaaagagcatctatt

SEQ ID NO: 14491 - DNA, 20 bp, Artificial Sequence
  Description of Artificial Sequence: Synthetic oligonucleotide
  Target: ATXN2; (+) strand; PAM type: NNNNGHTT; PAM sequence: ATCAGCTT
atatatgtatgtatgtatgt

SEQ ID NO: 14492 - DNA, 20 bp, Artificial Sequence
  Description of Artificial Sequence: Synthetic oligonucleotide
  Target: ATXN2; (+) strand; PAM type: NNNNGHTT; PAM sequence: CAAAGATT
ccaagtcatggcataattaa

SEQ ID NO: 14493 - DNA, 20 bp, Artificial Sequence
  Description of Artificial Sequence: Synthetic oligonucleotide
  Target: ATXN2; (+) strand; PAM type: NNNNGHTT; PAM sequence: AAAGGATT
tattaatggcacaaatttct

SEQ ID NO: 14494 - DNA, 20 bp, Artificial Sequence
  Description of Artificial Sequence: Synthetic oligonucleotide
  Target: ATXN2; (+) strand; PAM type: NNNNGHTT; PAM sequence: CCATGCTT
gggactacaggtgcgtgcca

SEQ ID NO: 14495 - DNA, 20 bp, Artificial Sequence
  Description of Artificial Sequence: Synthetic oligonucleotide
  Target: ATXN2; (+) strand; PAM type: NNNNGHTT; PAM sequence: TAGGGTTT
ccaccatgctttggtagaga

SEQ ID NO: 14496 - DNA, 20 bp, Artificial Sequence
  Description of Artificial Sequence: Synthetic oligonucleotide
  Target: ATXN2; (+) strand; PAM type: NNNNGHTT; PAM sequence: CTGGGATT
cacctcggcctcccaaagta

SEQ ID NO: 14497 - DNA, 20 bp, Artificial Sequence
  Description of Artificial Sequence: Synthetic oligonucleotide
  Target: ATXN2; (+) strand; PAM type: NNNNGHTT; PAM sequence: TCTTGCTT
tgacctgagaggtcatgatc

SEQ ID NO: 14498 - DNA, 20 bp, Artificial Sequence
  Description of Artificial Sequence: Synthetic oligonucleotide
  Target: ATXN2; (+) strand; PAM type: NNNNGHTT; PAM sequence: GTCTGCTT
agctcaagatatcctgaggg

SEQ ID NO: 14499 - DNA, 20 bp, Artificial Sequence
  Description of Artificial Sequence: Synthetic oligonucleotide
  Target: ATXN2; (+) strand; PAM type: NNNNGHTT; PAM sequence: CTGAGATT
tgtctcagcctccctagtag

SEQ ID NO: 14500 - DNA, 20 bp, Artificial Sequence
  Description of Artificial Sequence: Synthetic oligonucleotide
  Target: ATXN2; (+) strand; PAM type: NNNNGHTT; PAM sequence: GGCTGATT
aggcgcatgccagcatgcat

SEQ ID NO: 14501 - DNA, 20 bp, Artificial Sequence
  Description of Artificial Sequence: Synthetic oligonucleotide
  Target: ATXN2; (+) strand; PAM type: NNNNGHTT; PAM sequence: TGGAGTTT
tttgtattttttagtagaga

SEQ ID NO: 14502 - DNA, 20 bp, Artificial Sequence
  Description of Artificial Sequence: Synthetic oligonucleotide
  Target: ATXN2; (+) strand; PAM type: NNNNGHTT; PAM sequence: CTGGGATT
cgcctcagcctcccaaagca

SEQ ID NO: 14503 - DNA, 20 bp, Artificial Sequence
  Description of Artificial Sequence: Synthetic oligonucleotide
  Target: ATXN2; (+) strand; PAM type: NNNNGHTT; PAM sequence: AAAAGTTT
tttagccatgcacaggactg

SEQ ID NO: 14504 - DNA, 20 bp, Artificial Sequence
  Description of Artificial Sequence: Synthetic oligonucleotide
  Target: ATXN2; (+) strand; PAM type: NNNNGHTT; PAM sequence: TTAAGTTT
tcagaatataaataaacatt

SEQ ID NO: 14505 - DNA, 20 bp, Artificial Sequence
  Description of Artificial Sequence: Synthetic oligonucleotide
  Target: ATXN2; (+) strand; PAM type: NNNNGHTT; PAM sequence: CCAAGCTT
ataaacattttaagtttata

SEQ ID NO: 14506 - DNA, 20 bp, Artificial Sequence
  Description of Artificial Sequence: Synthetic oligonucleotide
  Target: ATXN2; (+) strand; PAM type: NNNNGHTT; PAM sequence: TGTGGCTT
ttttaagtttataccaagct

SEQ ID NO: 14507 - DNA, 20 bp, Artificial Sequence
  Description of Artificial Sequence: Synthetic oligonucleotide
  Target: ATXN2; (+) strand; PAM type: NNNNGHTT; PAM sequence: CCAAGCTT
ataaacattttaaatttata

SEQ ID NO: 14508 - DNA, 20 bp, Artificial Sequence
  Description of Artificial Sequence: Synthetic oligonucleotide
  Target: ATXN2; (+) strand; PAM type: NNNNGHTT; PAM sequence: TGTGGCTT
ttttaaatttataccaagct

SEQ ID NO: 14509 - DNA, 20 bp, Artificial Sequence
  Description of Artificial Sequence: Synthetic oligonucleotide
  Target: ATXN2; (+) strand; PAM type: NNNNGHTT; PAM sequence: GTGTGTTT
caagcttgtggcttgggtgt

SEQ ID NO: 14510 - DNA, 20 bp, Artificial Sequence
  Description of Artificial Sequence: Synthetic oligonucleotide
  Target: ATXN2; (+) strand; PAM type: NNNNGHTT; PAM sequence: AGCTGTTT
gtgtgtgtgtgtgtgtataa

SEQ ID NO: 14511 - DNA, 20 bp, Artificial Sequence
  Description of Artificial Sequence: Synthetic oligonucleotide
  Target: ATXN2; (+) strand; PAM type: NNNNGHTT; PAM sequence: GGAAGTTT
tgtgtgtataaagctgttta

SEQ ID NO: 14512 - DNA, 20 bp, Artificial Sequence
  Description of Artificial Sequence: Synthetic oligonucleotide
  Target: ATXN2; (+) strand; PAM type: NNNNGHTT; PAM sequence: ATTTGCTT
attaggcatttcccagtcac

SEQ ID NO: 14513 - DNA, 20 bp, Artificial Sequence
  Description of Artificial Sequence: Synthetic oligonucleotide
  Target: ATXN2; (+) strand; PAM type: NNNNGHTT; PAM sequence: AATTGATT
acatttgcttggtatgcaaa

SEQ ID NO: 14514 - DNA, 20 bp, Artificial Sequence
  Description of Artificial Sequence: Synthetic oligonucleotide
  Target: ATXN2; (+) strand; PAM type: NNNNGHTT; PAM sequence: AAGTGTTT
cttaacatgtatcctttaaa

SEQ ID NO: 14515 - DNA, 20 bp, Artificial Sequence
  Description of Artificial Sequence: Synthetic oligonucleotide
  Target: ATXN2; (+) strand; PAM type: NNNNGHTT; PAM sequence: AAGGGCTT
ctcactggcaaagtagaaag

SEQ ID NO: 14516 - DNA, 20 bp, Artificial Sequence
  Description of Artificial Sequence: Synthetic oligonucleotide
  Target: ATXN2; (+) strand; PAM type: NNNNGHTT; PAM sequence: ACTTGCTT
ggtgtcaagttgtcatgctg

SEQ ID NO: 14517 - DNA, 20 bp, Artificial Sequence
  Description of Artificial Sequence: Synthetic oligonucleotide
  Target: ATXN2; (+) strand; PAM type: NNNNGHTT; PAM sequence: ACAAGTTT
taccaaaataaaactatttt

SEQ ID NO: 14518 - DNA, 20 bp, Artificial Sequence
  Description of Artificial Sequence: Synthetic oligonucleotide
  Target: ATXN2; (+) strand; PAM type: NNNNGHTT; PAM sequence: GAAAGATT
aatggaaatgtcattatcct

SEQ ID NO: 14519 - DNA, 20 bp, Artificial Sequence
  Description of Artificial Sequence: Synthetic oligonucleotide
  Target: ATXN2; (+) strand; PAM type: NNNNGHTT; PAM sequence: GAGGGATT
taaaaggcagttgtcaggtg

SEQ ID NO: 14520 - DNA, 20 bp, Artificial Sequence
  Description of Artificial Sequence: Synthetic oligonucleotide
  Target: ATXN2; (+) strand; PAM type: NNNNGHTT; PAM sequence: GGATGCTT
ttgtcaggtggagggattat

SEQ ID NO: 14521 - DNA, 20 bp, Artificial Sequence
  Description of Artificial Sequence: Synthetic oligonucleotide
  Target: ATXN2; (+) strand; PAM type: NNNNGHTT; PAM sequence: AAAGGATT
actaccaaaaacaaatcaaa

SEQ ID NO: 14522 - DNA, 20 bp, Artificial Sequence
  Description of Artificial Sequence: Synthetic oligonucleotide
  Target: ATXN2; (+) strand; PAM type: NNNNGHTT; PAM sequence: TACTGTTT
agtcggaaaagttgtattat

SEQ ID NO: 14523 - DNA, 20 bp, Artificial Sequence
  Description of Artificial Sequence: Synthetic oligonucleotide
  Target: ATXN2; (+) strand; PAM type: NNNNGHTT; PAM sequence: GATGGATT
atcaccataaaacaaaatta

SEQ ID NO: 14524 - DNA, 20 bp, Artificial Sequence
  Description of Artificial Sequence: Synthetic oligonucleotide
  Target: ATXN2; (+) strand; PAM type: NNNNGHTT; PAM sequence: AACCGCTT
tcgggaggctgaggcagaaa

SEQ ID NO: 14525 - DNA, 20 bp, Artificial Sequence
  Description of Artificial Sequence: Synthetic oligonucleotide
  Target: ATXN2; (+) strand; PAM type: NNNNGHTT; PAM sequence: GTTAGATT
gggtagaggcaatgatggaa

SEQ ID NO: 14526 - DNA, 20 bp, Artificial Sequence
  Description of Artificial Sequence: Synthetic oligonucleotide
  Target: ATXN2; (+) strand; PAM type: NNNNGHTT; PAM sequence: AACTGCTT
tcaggaggctgaggcaggag

SEQ ID NO: 14527 - DNA, 20 bp, Artificial Sequence
  Description of Artificial Sequence: Synthetic oligonucleotide
  Target: ATXN2; (+) strand; PAM type: NNNNGHTT; PAM sequence: CGGAGTTT
aactgcttgaacccaggagg

SEQ ID NO: 14528 - DNA, 20 bp, Artificial Sequence
  Description of Artificial Sequence: Synthetic oligonucleotide
  Target: ATXN2; (+) strand; PAM type: NNNNGHTT; PAM sequence: TAAGGTTT
aaaaagagacatcaaagaga

SEQ ID NO: 14529 - DNA, 20 bp, Artificial Sequence
  Description of Artificial Sequence: Synthetic oligonucleotide
  Target: ATXN2; (+) strand; PAM type: NNNNGHTT; PAM sequence: TCAGGATT
taaaaatttaaaaacaataa

SEQ ID NO: 14530 - DNA, 20 bp, Artificial Sequence
  Description of Artificial Sequence: Synthetic oligonucleotide
  Target: ATXN2; (+) strand; PAM type: NNNNGHTT; PAM sequence: CTATGTTT
ttttgcagtcattagtggtc

SEQ ID NO: 14531 - DNA, 20 bp, Artificial Sequence
  Description of Artificial Sequence: Synthetic oligonucleotide
  Target: ATXN2; (+) strand; PAM type: NNNNGHTT; PAM sequence: TTCTGTTT
caacatctgggtgcatgttc

SEQ ID NO: 14532 - DNA, 20 bp, Artificial Sequence
  Description of Artificial Sequence: Synthetic oligonucleotide
  Target: ATXN2; (+) strand; PAM type: NNNNGHTT; PAM sequence: AAATGTTT
catgttcttctgtttgcatt

SEQ ID NO: 14533 - DNA, 20 bp, Artificial Sequence
  Description of Artificial Sequence: Synthetic oligonucleotide
  Target: ATXN2; (+) strand; PAM type: NNNNGHTT; PAM sequence: TGTAGCTT
ttttaaaaacctagatatga

SEQ ID NO: 14534 - DNA, 20 bp, Artificial Sequence
  Description of Artificial Sequence: Synthetic oligonucleotide
  Target: ATXN2; (+) strand; PAM type: NNNNGHTT; PAM sequence: GTAAGTTT
tataaaattaacacttctat

SEQ ID NO: 14535 - DNA, 20 bp, Artificial Sequence
  Description of Artificial Sequence: Synthetic oligonucleotide
  Target: ATXN2; (+) strand; PAM type: NNNNGHTT; PAM sequence: TGTAGTTT
acacttctatgtaagtttgt

SEQ ID NO: 14536 - DNA, 20 bp, Artificial Sequence
  Description of Artificial Sequence: Synthetic oligonucleotide
  Target: ATXN2; (+) strand; PAM type: NNNNGHTT; PAM sequence: TTTTGTTT
ttataagaatgtacttcaaa

SEQ ID NO: 14537 - DNA, 20 bp, Artificial Sequence
  Description of Artificial Sequence: Synthetic oligonucleotide
  Target: ATXN2; (+) strand; PAM type: NNNNGHTT; PAM sequence: TAAGGCTT
tttgtttatatttgatataa

SEQ ID NO: 14538 - DNA, 20 bp, Artificial Sequence
  Description of Artificial Sequence: Synthetic oligonucleotide
  Target: ATXN2; (+) strand; PAM type: NNNNGHTT; PAM sequence: TGCAGATT
taataattcaaataaatcac

SEQ ID NO: 14539 - DNA, 20 bp, Artificial Sequence
  Description of Artificial Sequence: Synthetic oligonucleotide
  Target: ATXN2; (+) strand; PAM type: NNNNGHTT; PAM sequence: ACATGCTT
cactgcagatttaatgaaga

SEQ ID NO: 14540 - DNA, 20 bp, Artificial Sequence
  Description of Artificial Sequence: Synthetic oligonucleotide
  Target: ATXN2; (+) strand; PAM type: NNNNGHTT; PAM sequence: AGCAGATT
tttaatgaagaacatgctta

SEQ ID NO: 14541 - DNA, 20 bp, Artificial Sequence
  Description of Artificial Sequence: Synthetic oligonucleotide
  Target: ATXN2; (+) strand; PAM type: NNNNGHTT; PAM sequence: TATGGCTT
catgcttaagcagattaaat

SEQ ID NO: 14542 - DNA, 20 bp, Artificial Sequence
  Description of Artificial Sequence: Synthetic oligonucleotide
  Target: ATXN2; (+) strand; PAM type: NNNNGHTT; PAM sequence: TTATGTTT
tagaacaaaacaattctttc

SEQ ID NO: 14543 - DNA, 20 bp, Artificial Sequence
  Description of Artificial Sequence: Synthetic oligonucleotide
  Target: ATXN2; (+) strand; PAM type: NNNNGHTT; PAM sequence: GCTGGATT
ggtcttgctctgtcacccag

SEQ ID NO: 14544 - DNA, 20 bp, Artificial Sequence
  Description of Artificial Sequence: Synthetic oligonucleotide
  Target: ATXN2; (+) strand; PAM type: NNNNGHTT; PAM sequence: CTCAGCTT
gactcaagtgatcctcccat

SEQ ID NO: 14545 - DNA, 20 bp, Artificial Sequence
  Description of Artificial Sequence: Synthetic oligonucleotide
  Target: ATXN2; (+) strand; PAM type: NNNNGHTT; PAM sequence: CTGGGCTT
acaggcatgtgccaccatga

SEQ ID NO: 14546 - DNA, 20 bp, Artificial Sequence
  Description of Artificial Sequence: Synthetic oligonucleotide
  Target: ATXN2; (+) strand; PAM type: NNNNGHTT; PAM sequence: CTTGGATT
cacttcagcctccccaagtt

SEQ ID NO: 14547 - DNA, 20 bp, Artificial Sequence
  Description of Artificial Sequence: Synthetic oligonucleotide
  Target: ATXN2; (+) strand; PAM type: NNNNGHTT; PAM sequence: TCTTGATT
cttaagcaccacaaagggaa

SEQ ID NO: 14548 - DNA, 20 bp, Artificial Sequence
  Description of Artificial Sequence: Synthetic oligonucleotide
  Target: ATXN2; (+) strand; PAM type: NNNNGHTT; PAM sequence: TTCAGATT
tgtaaactgcaggagagtag

SEQ ID NO: 14549 - DNA, 20 bp, Artificial Sequence
  Description of Artificial Sequence: Synthetic oligonucleotide
  Target: ATXN2; (+) strand; PAM type: NNNNGHTT; PAM sequence: TCCAGATT
ggctctaatgactagttcat

SEQ ID NO: 14550 - DNA, 20 bp, Artificial Sequence
  Description of Artificial Sequence: Synthetic oligonucleotide
  Target: ATXN2; (+) strand; PAM type: NNNNGHTT; PAM sequence: TAGTGCTT
atttcactggacattagatc

SEQ ID NO: 14551 - DNA, 20 bp, Artificial Sequence
  Description of Artificial Sequence: Synthetic oligonucleotide
  Target: ATXN2; (+) strand; PAM type: NNNNGHTT; PAM sequence: CTTTGTTT
actggacattagatctagtg

SEQ ID NO: 14552 - DNA, 20 bp, Artificial Sequence
  Description of Artificial Sequence: Synthetic oligonucleotide
  Target: ATXN2; (+) strand; PAM type: NNNNGHTT; PAM sequence: TTTTGTTT
acattagatctagtgctttg

SEQ ID NO: 14553 - DNA, 20 bp, Artificial Sequence
  Description of Artificial Sequence: Synthetic oligonucleotide
  Target: ATXN2; (+) strand; PAM type: NNNNGHTT; PAM sequence: GGCTGTTT
aacacagtatttaccctata

SEQ ID NO: 14554 - DNA, 20 bp, Artificial Sequence
  Description of Artificial Sequence: Synthetic oligonucleotide
  Target: ATXN2; (+) strand; PAM type: NNNNGHTT; PAM sequence: GAAAGATT
gtgaatgaacacaatgagga

SEQ ID NO: 14555 - DNA, 20 bp, Artificial Sequence
  Description of Artificial Sequence: Synthetic oligonucleotide
  Target: ATXN2; (+) strand; PAM type: NNNNGHTT; PAM sequence: TTTAGCTT
tctccaaatgcaatggaaat

SEQ ID NO: 14556 - DNA, 20 bp, Artificial Sequence
  Description of Artificial Sequence: Synthetic oligonucleotide
  Target: ATXN2; (+) strand; PAM type: NNNNGHTT; PAM sequence: AAAAGTTT
tgcaatggaaattttagctt

SEQ ID NO: 14557 - DNA, 20 bp, Artificial Sequence
  Description of Artificial Sequence: Synthetic oligonucleotide
  Target: ATXN2; (+) strand; PAM type: NNNNGHTT; PAM sequence: ATCTGATT
ttttagcttaaaagtttcag

SEQ ID NO: 14558 - DNA, 20 bp, Artificial Sequence
  Description of Artificial Sequence: Synthetic oligonucleotide
  Target: ATXN2; (+) strand; PAM type: NNNNGHTT; PAM sequence: GTTAGTTT
taaccaaaataataaaccaa

SEQ ID NO: 14559 - DNA, 20 bp, Artificial Sequence
  Description of Artificial Sequence: Synthetic oligonucleotide
  Target: ATXN2; (+) strand; PAM type: NNNNGHTT; PAM sequence: AAATGTTT
acggatgggcctcttgaaaa

SEQ ID NO: 14560 - DNA, 20 bp, Artificial Sequence
  Description of Artificial Sequence: Synthetic oligonucleotide
  Target: ATXN2; (+) strand; PAM type: NNNNGHTT; PAM sequence: AACTGTTT
ggaaaattaagactggactt

SEQ ID NO: 14561 - DNA, 20 bp, Artificial Sequence
  Description of Artificial Sequence: Synthetic oligonucleotide
  Target: ATXN2; (+) strand; PAM type: NNNNGHTT; PAM sequence: GGATGATT
tgggttacaggtgacaggaa

SEQ ID NO: 14562 - DNA, 20 bp, Artificial Sequence
  Description of Artificial Sequence: Synthetic oligonucleotide
  Target: ATXN2; (+) strand; PAM type: NNNNGHTT; PAM sequence: GAAGGTTT
aagtagtaatgtctcaagaa

SEQ ID NO: 14563 - DNA, 20 bp, Artificial Sequence
  Description of Artificial Sequence: Synthetic oligonucleotide
  Target: ATXN2; (+) strand; PAM type: NNNNGHTT; PAM sequence: TTTGGATT
ccaccacacccggccaattt

SEQ ID NO: 14564 - DNA, 20 bp, Artificial Sequence
  Description of Artificial Sequence: Synthetic oligonucleotide
  Target: ATXN2; (+) strand; PAM type: NNNNGHTT; PAM sequence: TGGGGTTT
ttttggatttttagtagaga

SEQ ID NO: 14565 - DNA, 20 bp, Artificial Sequence
  Description of Artificial Sequence: Synthetic oligonucleotide
  Target: ATXN2; (+) strand; PAM type: NNNNGHTT; PAM sequence: CTGGGATT
agccttggcctcccaaagtg

SEQ ID NO: 14566 - DNA, 20 bp, Artificial Sequence
  Description of Artificial Sequence: Synthetic oligonucleotide
  Target: ATXN2; (+) strand; PAM type: NNNNGHTT; PAM sequence: AGAGGCTT
tagtatttcaaaaagttcaa

SEQ ID NO: 14567 - DNA, 20 bp, Artificial Sequence
  Description of Artificial Sequence: Synthetic oligonucleotide
  Target: ATXN2; (+) strand; PAM type: NNNNGHTT; PAM sequence: CTCTGTTT
aagttgatctacacaaattt

SEQ ID NO: 14568 - DNA, 20 bp, Artificial Sequence
  Description of Artificial Sequence: Synthetic oligonucleotide
  Target: ATXN2; (+) strand; PAM type: NNNNGHTT; PAM sequence: ATGGGTTT
tgtttagtcacaaaacgaag

SEQ ID NO: 14569 - DNA, 20 bp, Artificial Sequence
  Description of Artificial Sequence: Synthetic oligonucleotide
  Target: ATXN2; (+) strand; PAM type: NNNNGHTT; PAM sequence: TTTTGCTT
cacaaaacgaagatgggttt

SEQ ID NO: 14570 - DNA, 20 bp, Artificial Sequence
  Description of Artificial Sequence: Synthetic oligonucleotide
  Target: ATXN2; (+) strand; PAM type: NNNNGHTT; PAM sequence: TACTGCTT
ttattattctcacatataaa

SEQ ID NO: 14571 - DNA, 20 bp, Artificial Sequence
  Description of Artificial Sequence: Synthetic oligonucleotide
  Target: ATXN2; (+) strand; PAM type: NNNNGHTT; PAM sequence: CTTAGTTT
attctcacatataaatactg

SEQ ID NO: 14572 - DNA, 20 bp, Artificial Sequence
  Description of Artificial Sequence: Synthetic oligonucleotide
  Target: ATXN2; (+) strand; PAM type: NNNNGHTT; PAM sequence: AAATGTTT
tcagatcaagtagtgaagca

SEQ ID NO: 14573 - DNA, 20 bp, Artificial Sequence
  Description of Artificial Sequence: Synthetic oligonucleotide
  Target: ATXN2; (+) strand; PAM type: NNNNGHTT; PAM sequence: TTATGCTT
tttcatgctggagaacacct

SEQ ID NO: 14574 - DNA, 20 bp, Artificial Sequence
  Description of Artificial Sequence: Synthetic oligonucleotide
  Target: ATXN2; (+) strand; PAM type: NNNNGHTT; PAM sequence: AGATGCTT
aaaggtacctttctccacaa

SEQ ID NO: 14575 - DNA, 20 bp, Artificial Sequence
  Description of Artificial Sequence: Synthetic oligonucleotide
  Target: ATXN2; (+) strand; PAM type: NNNNGHTT; PAM sequence: TTCAGATT
gaaatgggttcatcttttcc

SEQ ID NO: 14576 - DNA, 20 bp, Artificial Sequence
  Description of Artificial Sequence: Synthetic oligonucleotide
  Target: ATXN2; (+) strand; PAM type: NNNNGHTT; PAM sequence: GTATGTTT
tcaggttattcttagataga

SEQ ID NO: 14577 - DNA, 20 bp, Artificial Sequence
  Description of Artificial Sequence: Synthetic oligonucleotide
  Target: ATXN2; (+) strand; PAM type: NNNNGHTT; PAM sequence: AAGTGCTT
cacactggaagagacaaaca

SEQ ID NO: 14578 - DNA, 20 bp, Artificial Sequence
  Description of Artificial Sequence: Synthetic oligonucleotide
  Target: ATXN2; (+) strand; PAM type: NNNNGHTT; PAM sequence: TTAAGATT
tagagccaagcagactttag

SEQ ID NO: 14579 - DNA, 20 bp, Artificial Sequence
  Description of Artificial Sequence: Synthetic oligonucleotide
  Target: ATXN2; (+) strand; PAM type: NNNNGHTT; PAM sequence: CATGGTTT
ttagttaagatttttaactc

SEQ ID NO: 14580 - DNA, 20 bp, Artificial Sequence
  Description of Artificial Sequence: Synthetic oligonucleotide
  Target: ATXN2; (+) strand; PAM type: NNNNGHTT; PAM sequence: TCCAGATT
agatttttaactccatggtt

SEQ ID NO: 14581 - DNA, 20 bp, Artificial Sequence
  Description of Artificial Sequence: Synthetic oligonucleotide
  Target: ATXN2; (+) strand; PAM type: NNNNGHTT; PAM sequence: GGCTGTTT
taaactctcaaatctttctt

SEQ ID NO: 14582 - DNA, 20 bp, Artificial Sequence
  Description of Artificial Sequence: Synthetic oligonucleotide
  Target: ATXN2; (+) strand; PAM type: NNNNGHTT; PAM sequence: AAAAGTTT
gaaaatccctttaccatatt

SEQ ID NO: 14583 - DNA, 20 bp, Artificial Sequence
  Description of Artificial Sequence: Synthetic oligonucleotide
  Target: ATXN2; (+) strand; PAM type: NNNNGHTT; PAM sequence: GGCTGATT
gtggcacatgctgaacaagg

SEQ ID NO: 14584 - DNA, 20 bp, Artificial Sequence
  Description of Artificial Sequence: Synthetic oligonucleotide
  Target: ATXN2; (+) strand; PAM type: NNNNGHTT; PAM sequence: GAATGATT
cacatggtctaggaggctct

SEQ ID NO: 14585 - DNA, 20 bp, Artificial Sequence
  Description of Artificial Sequence: Synthetic oligonucleotide
  Target: ATXN2; (+) strand; PAM type: NNNNGHTT; PAM sequence: TTCTGCTT
ccaaatcccagctgggataa

SEQ ID NO: 14586 - DNA, 20 bp, Artificial Sequence
  Description of Artificial Sequence: Synthetic oligonucleotide
  Target: ATXN2; (+) strand; PAM type: NNNNGHTT; PAM sequence: GTCAGCTT
ttctgcttcatccttcaggt

SEQ ID NO: 14587 - DNA, 20 bp, Artificial Sequence
  Description of Artificial Sequence: Synthetic oligonucleotide
  Target: ATXN2; (+) strand; PAM type: NNNNGHTT; PAM sequence: AATCGCTT
agactctcacagcattatga

SEQ ID NO: 14588 - DNA, 20 bp, Artificial Sequence
  Description of Artificial Sequence: Synthetic oligonucleotide
  Target: ATXN2; (+) strand; PAM type: NNNNGHTT; PAM sequence: CCAGGTTT
acagcaccatgtagcatata

SEQ ID NO: 14589 - DNA, 20 bp, Artificial Sequence
  Description of Artificial Sequence: Synthetic oligonucleotide
  Target: ATXN2; (+) strand; PAM type: NNNNGHTT; PAM sequence: AAAAGATT
ttctaaataatagttctttt

SEQ ID NO: 14590 - DNA, 20 bp, Artificial Sequence
  Description of Artificial Sequence: Synthetic oligonucleotide
  Target: ATXN2; (+) strand; PAM type: NNNNGHTT; PAM sequence: TGAGGTTT
ctcaactgtcatctcccatg

SEQ ID NO: 14591 - DNA, 20 bp, Artificial Sequence
  Description of Artificial Sequence: Synthetic oligonucleotide
  Target: ATXN2; (+) strand; PAM type: NNNNGHTT; PAM sequence: ACCTGTTT
ttacagcactattgtctgtg

SEQ ID NO: 14592 - DNA, 20 bp, Artificial Sequence
  Description of Artificial Sequence: Synthetic oligonucleotide
  Target: ATXN2; (+) strand; PAM type: NNNNGHTT; PAM sequence: GACTGCTT
caggaaaataattgtggaat

SEQ ID NO: 14593 - DNA, 20 bp, Artificial Sequence
  Description of Artificial Sequence: Synthetic oligonucleotide
  Target: ATXN2; (+) strand; PAM type: NNNNGHTT; PAM sequence: AACTGATT
cttgttcataaaatcctaag

SEQ ID NO: 14594 - DNA, 20 bp, Artificial Sequence
  Description of Artificial Sequence: Synthetic oligonucleotide
  Target: ATXN2; (+) strand; PAM type: NNNNGHTT; PAM sequence: GAAAGTTT
acttatcacttttatcaaat

SEQ ID NO: 14595 - DNA, 20 bp, Artificial Sequence
  Description of Artificial Sequence: Synthetic oligonucleotide
  Target: ATXN2; (+) strand; PAM type: NNNNGHTT; PAM sequence: GCCCGATT
cttttatcaaatgaaagttt

SEQ ID NO: 14596 - DNA, 20 bp, Artificial Sequence
  Description of Artificial Sequence: Synthetic oligonucleotide
  Target: ATXN2; (+) strand; PAM type: NNNNGHTT; PAM sequence: CTGAGCTT
agtttgcccgattatgctaa

SEQ ID NO: 14597 - DNA, 20 bp, Artificial Sequence
  Description of Artificial Sequence: Synthetic oligonucleotide
  Target: ATXN2; (+) strand; PAM type: NNNNGHTT; PAM sequence: ATGTGTTT
ggtgctattatttagatatc

SEQ ID NO: 14598 - DNA, 20 bp, Artificial Sequence
  Description of Artificial Sequence: Synthetic oligonucleotide
  Target: ATXN2; (+) strand; PAM type: NNNNGHTT; PAM sequence: TCACGCTT
cccaggccaggcgcagtggc

SEQ ID NO: 14599 - DNA, 20 bp, Artificial Sequence
  Description of Artificial Sequence: Synthetic oligonucleotide
  Target: ATXN2; (+) strand; PAM type: NNNNGHTT; PAM sequence: GACTGCTT
ttaggaggccagggcgagcg

SEQ ID NO: 14600 - DNA, 20 bp, Artificial Sequence
  Description of Artificial Sequence: Synthetic oligonucleotide
  Target: ATXN2; (+) strand; PAM type: NNNNGHTT; PAM sequence: ATGAGTTT
cgagcggactgcttgagctc

SEQ ID NO: 14601 - DNA, 20 bp, Artificial Sequence
  Description of Artificial Sequence: Synthetic oligonucleotide
  Target: ATXN2; (+) strand; PAM type: NNNNGHTT; PAM sequence: AAAGGATT
atatttttatccaatacctc

SEQ ID NO: 14602 - DNA, 20 bp, Artificial Sequence
  Description of Artificial Sequence: Synthetic oligonucleotide
  Target: ATXN2; (+) strand; PAM type: NNNNGHTT; PAM sequence: AAGCGATT
actctctgcctcctgggttc

SEQ ID NO: 14603 - DNA, 20 bp, Artificial Sequence
  Description of Artificial Sequence: Synthetic oligonucleotide
  Target: ATXN2; (+) strand; PAM type: NNNNGHTT; PAM sequence: CGGGGTTT
taaaatatttttagtagaga

SEQ ID NO: 14604 - DNA, 20 bp, Artificial Sequence
  Description of Artificial Sequence: Synthetic oligonucleotide
  Target: ATXN2; (+) strand; PAM type: NNNNGHTT; PAM sequence: GTGGGATT
cacctctgcctcccaaagag

SEQ ID NO: 14605 - DNA, 20 bp, Artificial Sequence
  Description of Artificial Sequence: Synthetic oligonucleotide
  Target: ATXN2; (+) strand; PAM type: NNNNGHTT; PAM sequence: ATAAGTTT
atttcttctcaagttaattt

SEQ ID NO: 14606 - DNA, 20 bp, Artificial Sequence
  Description of Artificial Sequence: Synthetic oligonucleotide
  Target: ATXN2; (+) strand; PAM type: NNNNGHTT; PAM sequence: TTGTGATT
caagttaatttataagttta

SEQ ID NO: 14607 - DNA, 20 bp, Artificial Sequence
  Description of Artificial Sequence: Synthetic oligonucleotide
  Target: ATXN2; (+) strand; PAM type: NNNNGHTT; PAM sequence: GACTGCTT
ttgtgaggctgacacaggca

SEQ ID NO: 14608 - DNA, 20 bp, Artificial Sequence
  Description of Artificial Sequence: Synthetic oligonucleotide
  Target: ATXN2; (+) strand; PAM type: NNNNGHTT; PAM sequence: TGGTGCTT
aaaaattaagccaggcacgg

SEQ ID NO: 14609 - DNA, 20 bp, Artificial Sequence
  Description of Artificial Sequence: Synthetic oligonucleotide
  Target: ATXN2; (+) strand; PAM type: NNNNGHTT; PAM sequence: GGGGGATT
ctacttgggaggctgaggtg

SEQ ID NO: 14610 - DNA, 20 bp, Artificial Sequence
  Description of Artificial Sequence: Synthetic oligonucleotide
  Target: ATXN2; (+) strand; PAM type: NNNNGHTT; PAM sequence: AGAAGTTT
aaaaaaaaaaaaaaaattcc

SEQ ID NO: 14611 - DNA, 20 bp, Artificial Sequence
  Description of Artificial Sequence: Synthetic oligonucleotide
  Target: ATXN2; (+) strand; PAM type: NNNNGHTT; PAM sequence: AAATGATT
gaagactgccttaaaaaggg

SEQ ID NO: 14612 - DNA, 20 bp, Artificial Sequence
  Description of Artificial Sequence: Synthetic oligonucleotide
  Target: ATXN2; (+) strand; PAM type: NNNNGHTT; PAM sequence: GAAAGTTT
aaccaaacagctggatatgg

SEQ ID NO: 14613 - DNA, 20 bp, Artificial Sequence
  Description of Artificial Sequence: Synthetic oligonucleotide
  Target: ATXN2; (+) strand; PAM type: NNNNGHTT; PAM sequence: GACTGATT
actactcctatcaggaaaaa

SEQ ID NO: 14614 - DNA, 20 bp, Artificial Sequence
  Description of Artificial Sequence: Synthetic oligonucleotide
  Target: ATXN2; (+) strand; PAM type: NNNNGHTT; PAM sequence: ATCAGTTT
tcaagccttcattatttact

SEQ ID NO: 14615 - DNA, 20 bp, Artificial Sequence
  Description of Artificial Sequence: Synthetic oligonucleotide
  Target: ATXN2; (+) strand; PAM type: NNNNGHTT; PAM sequence: CAAAGATT
cattatttactatcagttta

SEQ ID NO: 14616 - DNA, 20 bp, Artificial Sequence
  Description of Artificial Sequence: Synthetic oligonucleotide
  Target: ATXN2; (+) strand; PAM type: NNNNGHTT; PAM sequence: GACTGCTT
cttgggagtcaaggcaggca

SEQ ID NO: 14617 - DNA, 20 bp, Artificial Sequence
  Description of Artificial Sequence: Synthetic oligonucleotide
  Target: ATXN2; (+) strand; PAM type: NNNNGHTT; PAM sequence: TCCAGCTT
ctgaaatcatgccactgcac

SEQ ID NO: 14618 - DNA, 20 bp, Artificial Sequence
  Description of Artificial Sequence: Synthetic oligonucleotide
  Target: ATXN2; (+) strand; PAM type: NNNNGHTT; PAM sequence: CTATGATT
gaattcgcagcagcagtgag

SEQ ID NO: 14619 - DNA, 20 bp, Artificial Sequence
  Description of Artificial Sequence: Synthetic oligonucleotide
  Target: ATXN2; (+) strand; PAM type: NNNNGHTT; PAM sequence: ATTTGCTT
aaactgatgcaatgtctaga

SEQ ID NO: 14620 - DNA, 20 bp, Artificial Sequence
  Description of Artificial Sequence: Synthetic oligonucleotide
  Target: ATXN2; (+) strand; PAM type: NNNNGHTT; PAM sequence: CAAAGCTT
tcagaataatccagtggact

SEQ ID NO: 14621 - DNA, 20 bp, Artificial Sequence
  Description of Artificial Sequence: Synthetic oligonucleotide
  Target: ATXN2; (+) strand; PAM type: NNNNGHTT; PAM sequence: CGGAGCTT
aatggcatgaacccaagagg

SEQ ID NO: 14622 - DNA, 20 bp, Artificial Sequence
  Description of Artificial Sequence: Synthetic oligonucleotide
  Target: ATXN2; (+) strand; PAM type: NNNNGHTT; PAM sequence: AATTGCTT
ttgggaggctgaggcaggag

SEQ ID NO: 14623 - DNA, 20 bp, Artificial Sequence
  Description of Artificial Sequence: Synthetic oligonucleotide
  Target: ATXN2; (+) strand; PAM type: NNNNGHTT; PAM sequence: TTGAGATT
gagggggaggttgcagtgag

SEQ ID NO: 14624 - DNA, 20 bp, Artificial Sequence
  Description of Artificial Sequence: Synthetic oligonucleotide
  Target: ATXN2; (+) strand; PAM type: NNNNGHTT; PAM sequence: CCAAGATT
ctccagcctaggtgacagag

SEQ ID NO: 14625 - DNA, 20 bp, Artificial Sequence
  Description of Artificial Sequence: Synthetic oligonucleotide
  Target: ATXN2; (+) strand; PAM type: NNNNGHTT; PAM sequence: AAAAGATT
aattggaacaaattattgta

SEQ ID NO: 14626 - DNA, 20 bp, Artificial Sequence
  Description of Artificial Sequence: Synthetic oligonucleotide
  Target: ATXN2; (+) strand; PAM type: NNNNGHTT; PAM sequence: TTCTGTTT
attgtaaaaagatttatctt

SEQ ID NO: 14627 - DNA, 20 bp, Artificial Sequence
  Description of Artificial Sequence: Synthetic oligonucleotide
  Target: ATXN2; (+) strand; PAM type: NNNNGHTT; PAM sequence: GTTGGTTT
aagatatattttaaagatca

SEQ ID NO: 14628 - DNA, 20 bp, Artificial Sequence
  Description of Artificial Sequence: Synthetic oligonucleotide
  Target: ATXN2; (+) strand; PAM type: NNNNGHTT; PAM sequence: AACTGATT
tcagttggttttaaaaaggc

SEQ ID NO: 14629 - DNA, 20 bp, Artificial Sequence
  Description of Artificial Sequence: Synthetic oligonucleotide
  Target: ATXN2; (+) strand; PAM type: NNNNGHTT; PAM sequence: ATTAGATT
gtggatgagaaggtagtcct

SEQ ID NO: 14630 - DNA, 20 bp, Artificial Sequence
  Description of Artificial Sequence: Synthetic oligonucleotide
  Target: ATXN2; (+) strand; PAM type: NNNNGHTT; PAM sequence: ATCAGTTT
atgataaaatggcatttcat

SEQ ID NO: 14631 - DNA, 20 bp, Artificial Sequence
  Description of Artificial Sequence: Synthetic oligonucleotide
  Target: ATXN2; (+) strand; PAM type: NNNNGHTT; PAM sequence: TGCTGCTT
gtggtacaatcacagctcac

SEQ ID NO: 14632 - DNA, 20 bp, Artificial Sequence
  Description of Artificial Sequence: Synthetic oligonucleotide
  Target: ATXN2; (+) strand; PAM type: NNNNGHTT; PAM sequence: AATTGTTT
ccacacccagcaaattttta

SEQ ID NO: 14633 - DNA, 20 bp, Artificial Sequence
  Description of Artificial Sequence: Synthetic oligonucleotide
  Target: ATXN2; (+) strand; PAM type: NNNNGHTT; PAM sequence: TGGGGTTT
tttaaattgttttgtagata

SEQ ID NO: 14634 - DNA, 20 bp, Artificial Sequence
  Description of Artificial Sequence: Synthetic oligonucleotide
  Target: ATXN2; (+) strand; PAM type: NNNNGHTT; PAM sequence: TCATGATT
gaacataatccaacaaccat

SEQ ID NO: 14635 - DNA, 20 bp, Artificial Sequence
  Description of Artificial Sequence: Synthetic oligonucleotide
  Target: ATXN2; (+) strand; PAM type: NNNNGHTT; PAM sequence: GTATGCTT
aactgaagtaacacctaact

SEQ ID NO: 14636 - DNA, 20 bp, Artificial Sequence
  Description of Artificial Sequence: Synthetic oligonucleotide
  Target: ATXN2; (+) strand; PAM type: NNNNGHTT; PAM sequence: TGGTGATT
aaaacccaaaaacaccaaca

SEQ ID NO: 14637 - DNA, 20 bp, Artificial Sequence
  Description of Artificial Sequence: Synthetic oligonucleotide
  Target: ATXN2; (+) strand; PAM type: NNNNGHTT; PAM sequence: TCATGATT
acaccaacatggtgattaga

SEQ ID NO: 14638 - DNA, 20 bp, Artificial Sequence
  Description of Artificial Sequence: Synthetic oligonucleotide
  Target: ATXN2; (+) strand; PAM type: NNNNGHTT; PAM sequence: GTATGTTT
atggtgattagatcatgatt

SEQ ID NO: 14639 - DNA, 20 bp, Artificial Sequence
  Description of Artificial Sequence: Synthetic oligonucleotide
  Target: ATXN2; (+) strand; PAM type: NNNNGHTT; PAM sequence: GTGGGTTT
ttaaagggctgccagaaaca

SEQ ID NO: 14640 - DNA, 20 bp, Artificial Sequence
  Description of Artificial Sequence: Synthetic oligonucleotide
  Target: ATXN2; (+) strand; PAM type: NNNNGHTT; PAM sequence: GAAAGTTT
tttacgaataaacaaacgtt

SEQ ID NO: 14641 - DNA, 20 bp, Artificial Sequence
  Description of Artificial Sequence: Synthetic oligonucleotide
  Target: ATXN2; (+) strand; PAM type: NNNNGHTT; PAM sequence: TGAAGATT
gcagtatatgatgacctcaa

SEQ ID NO: 14642 - DNA, 20 bp, Artificial Sequence
  Description of Artificial Sequence: Synthetic oligonucleotide
  Target: ATXN2; (+) strand; PAM type: NNNNGHTT; PAM sequence: TAAAGATT
tatttctcccagaactgata

SEQ ID NO: 14643 - DNA, 20 bp, Artificial Sequence
  Description of Artificial Sequence: Synthetic oligonucleotide
  Target: ATXN2; (+) strand; PAM type: NNNNGHTT; PAM sequence: AGCTGATT
agattcagtgcacaatccca

SEQ ID NO: 14644 - DNA, 20 bp, Artificial Sequence
  Description of Artificial Sequence: Synthetic oligonucleotide
  Target: ATXN2; (+) strand; PAM type: NNNNGHTT; PAM sequence: AATCGCTT
tactcgagaggctgaggcag

SEQ ID NO: 14645 - DNA, 20 bp, Artificial Sequence
  Description of Artificial Sequence: Synthetic oligonucleotide
  Target: ATXN2; (+) strand; PAM type: NNNNGHTT; PAM sequence: TCTTGTTT
ctgggtaacaagatcgagac

SEQ ID NO: 14646 - DNA, 20 bp, Artificial Sequence
  Description of Artificial Sequence: Synthetic oligonucleotide
  Target: ATXN2; (+) strand; PAM type: NNNNGHTT; PAM sequence: AAAAGATT
attcataacctagggtacgt

SEQ ID NO: 14647 - DNA, 20 bp, Artificial Sequence
  Description of Artificial Sequence: Synthetic oligonucleotide
  Target: ATXN2; (+) strand; PAM type: NNNNGHTT; PAM sequence: AAAAGCTT
aaaagcatgaaccttaagag

SEQ ID NO: 14648 - DNA, 20 bp, Artificial Sequence
  Description of Artificial Sequence: Synthetic oligonucleotide
  Target: ATXN2; (+) strand; PAM type: NNNNGHTT; PAM sequence: TAAGGCTT
taagagaaaagcttgataaa

SEQ ID NO: 14649 - DNA, 20 bp, Artificial Sequence
  Description of Artificial Sequence: Synthetic oligonucleotide
  Target: ATXN2; (+) strand; PAM type: NNNNGHTT; PAM sequence: AAGCGATT
aaacccccgcaacctcgctc

SEQ ID NO: 14650 - DNA, 20 bp, Artificial Sequence
  Description of Artificial Sequence: Synthetic oligonucleotide
  Target: ATXN2; (+) strand; PAM type: NNNNGHTT; PAM sequence: ATGCGCTT
aagtagctgggaccatagga

SEQ ID NO: 14651 - DNA, 20 bp, Artificial Sequence
  Description of Artificial Sequence: Synthetic oligonucleotide
  Target: ATXN2; (+) strand; PAM type: NNNNGHTT; PAM sequence: CAGGGTTT
cttttttttttttgcaaaga

SEQ ID NO: 14652 - DNA, 20 bp, Artificial Sequence
  Description of Artificial Sequence: Synthetic oligonucleotide
  Target: ATXN2; (+) strand; PAM type: NNNNGHTT; PAM sequence: AATTGCTT
ttgggaggctaaggcgtaag

SEQ ID NO: 14653 - DNA, 20 bp, Artificial Sequence
  Description of Artificial Sequence: Synthetic oligonucleotide
  Target: ATXN2; (+) strand; PAM type: NNNNGHTT; PAM sequence: GTGAGATT
gttccagcctgggcaataga

SEQ ID NO: 14654 - DNA, 20 bp, Artificial Sequence
  Description of Artificial Sequence: Synthetic oligonucleotide
  Target: ATXN2; (+) strand; PAM type: NNNNGHTT; PAM sequence: AAAAGATT
aataaataaataaaatggaa

SEQ ID NO: 14655 - DNA, 20 bp, Artificial Sequence
  Description of Artificial Sequence: Synthetic oligonucleotide
  Target: ATXN2; (+) strand; PAM type: NNNNGHTT; PAM sequence: AGAAGATT
taaaatgacacaatcacttt

SEQ ID NO: 14656 - DNA, 20 bp, Artificial Sequence
  Description of Artificial Sequence: Synthetic oligonucleotide
  Target: ATXN2; (+) strand; PAM type: NNNNGHTT; PAM sequence: GCTAGTTT
cacaatcactttagaagatt

SEQ ID NO: 14657 - DNA, 20 bp, Artificial Sequence
  Description of Artificial Sequence: Synthetic oligonucleotide
  Target: ATXN2; (+) strand; PAM type: NNNNGHTT; PAM sequence: AATTGCTT
ttgggaggctgaggcgggag

SEQ ID NO: 14658 - DNA, 20 bp, Artificial Sequence
  Description of Artificial Sequence: Synthetic oligonucleotide
  Target: ATXN2; (+) strand; PAM type: NNNNGHTT; PAM sequence: AGCAGCTT
acttgtacacaaatgctcac

SEQ ID NO: 14659 - DNA, 20 bp, Artificial Sequence
  Description of Artificial Sequence: Synthetic oligonucleotide
  Target: ATXN2; (+) strand; PAM type: NNNNGHTT; PAM sequence: AGGAGTTT
caggtggatcatttggggtc

SEQ ID NO: 14660 - DNA, 20 bp, Artificial Sequence
  Description of Artificial Sequence: Synthetic oligonucleotide
  Target: ATXN2; (+) strand; PAM type: NNNNGHTT; PAM sequence: CACTGTTT
acatgaaattcaaattacta

SEQ ID NO: 14661 - DNA, 20 bp, Artificial Sequence
  Description of Artificial Sequence: Synthetic oligonucleotide
  Target: ATXN2; (+) strand; PAM type: NNNNGHTT; PAM sequence: CCAAGCTT
cacacatatgaaattatata

SEQ ID NO: 14662 - DNA, 20 bp, Artificial Sequence
  Description of Artificial Sequence: Synthetic oligonucleotide
  Target: ATXN2; (+) strand; PAM type: NNNNGHTT; PAM sequence: GACGGCTT
ttgtccaacttgcgtcctgg

SEQ ID NO: 14663 - DNA, 20 bp, Artificial Sequence
  Description of Artificial Sequence: Synthetic oligonucleotide
  Target: ATXN2; (+) strand; PAM type: NNNNGHTT; PAM sequence: ATAAGTTT
ataaactttcttaaaacatt

SEQ ID NO: 14664 - DNA, 20 bp, Artificial Sequence
  Description of Artificial Sequence: Synthetic oligonucleotide
  Target: ATXN2; (+) strand; PAM type: NNNNGHTT; PAM sequence: TTTTGTTT
ttataagttttgctattttt

SEQ ID NO: 14665 - DNA, 20 bp, Artificial Sequence
  Description of Artificial Sequence: Synthetic oligonucleotide
  Target: ATXN2; (+) strand; PAM type: NNNNGHTT; PAM sequence: AAAAGATT
caatatgacccagggaagcc

SEQ ID NO: 14666 - DNA, 20 bp, Artificial Sequence
  Description of Artificial Sequence: Synthetic oligonucleotide
  Target: ATXN2; (+) strand; PAM type: NNNNGHTT; PAM sequence: CGCTGTTT
gattgaacacctctgttaca

SEQ ID NO: 14667 - DNA, 20 bp, Artificial Sequence
  Description of Artificial Sequence: Synthetic oligonucleotide
  Target: ATXN2; (+) strand; PAM type: NNNNGHTT; PAM sequence: GTTTGATT
gaacacctctgttacacgct

SEQ ID NO: 14668 - DNA, 20 bp, Artificial Sequence
  Description of Artificial Sequence: Synthetic oligonucleotide
  Target: ATXN2; (+) strand; PAM type: NNNNGHTT; PAM sequence: AAAAGATT
tataatgagacgtctccaaa

SEQ ID NO: 14669 - DNA, 20 bp, Artificial Sequence
  Description of Artificial Sequence: Synthetic oligonucleotide
  Target: ATXN2; (+) strand; PAM type: NNNNGHTT; PAM sequence: GGCAGATT
tctaatctatagtaaaagaa

SEQ ID NO: 14670 - DNA, 20 bp, Artificial Sequence
  Description of Artificial Sequence: Synthetic oligonucleotide
  Target: ATXN2; (+) strand; PAM type: NNNNGHTT; PAM sequence: CAATGTTT
acagagaagaggaacaggca

SEQ ID NO: 14671 - DNA, 20 bp, Artificial Sequence
  Description of Artificial Sequence: Synthetic oligonucleotide
  Target: ATXN2; (+) strand; PAM type: NNNNGHTT; PAM sequence: ATTGGATT
agtcatttagaacaagataa

SEQ ID NO: 14672 - DNA, 20 bp, Artificial Sequence
  Description of Artificial Sequence: Synthetic oligonucleotide
  Target: ATXN2; (+) strand; PAM type: NNNNGHTT; PAM sequence: AATCGCTT
tcaggaggctgaggcagggg

SEQ ID NO: 14673 - DNA, 20 bp, Artificial Sequence
  Description of Artificial Sequence: Synthetic oligonucleotide
  Target: ATXN2; (+) strand; PAM type: NNNNGHTT; PAM sequence: AAGAGATT
atacacaaaaattaactcaa

SEQ ID NO: 14674 - DNA, 20 bp, Artificial Sequence
  Description of Artificial Sequence: Synthetic oligonucleotide
  Target: ATXN2; (+) strand; PAM type: NNNNGHTT; PAM sequence: AGGAGTTT
agctaaactataaaaatcat

SEQ ID NO: 14675 - DNA, 20 bp, Artificial Sequence
  Description of Artificial Sequence: Synthetic oligonucleotide
  Target: ATXN2; (+) strand; PAM type: NNNNGHTT; PAM sequence: AGGCGTTT
aaaaatcataggagttttat

SEQ ID NO: 14676 - DNA, 20 bp, Artificial Sequence
  Description of Artificial Sequence: Synthetic oligonucleotide
  Target: ATXN2; (+) strand; PAM type: NNNNGHTT; PAM sequence: CAATGCTT
ctctgtggccttgagttagg

SEQ ID NO: 14677 - DNA, 20 bp, Artificial Sequence
  Description of Artificial Sequence: Synthetic oligonucleotide
  Target: ATXN2; (+) strand; PAM type: NNNNGHTT; PAM sequence: GATCGCTT
tctggaggctgacgcagggg

SEQ ID NO: 14678 - DNA, 20 bp, Artificial Sequence
  Description of Artificial Sequence: Synthetic oligonucleotide
  Target: ATXN2; (+) strand; PAM type: NNNNGHTT; PAM sequence: AATTGCTT
ctgggagggtgaggcaggag

SEQ ID NO: 14679 - DNA, 20 bp, Artificial Sequence
  Description of Artificial Sequence: Synthetic oligonucleotide
  Target: ATXN2; (+) strand; PAM type: NNNNGHTT; PAM sequence: CCGAGATT
gaagcgaaggctgcagtgag

SEQ ID NO: 14680 - DNA, 20 bp, Artificial Sequence
  Description of Artificial Sequence: Synthetic oligonucleotide
  Target: ATXN2; (+) strand; PAM type: NNNNGHTT; PAM sequence: AGCTGCTT
gtagaaatacaaaatgatgc

SEQ ID NO: 14681 - DNA, 20 bp, Artificial Sequence
  Description of Artificial Sequence: Synthetic oligonucleotide
  Target: ATXN2; (+) strand; PAM type: NNNNGHTT; PAM sequence: AAAAGTTT
aaatgatgcagctgctttgg

SEQ ID NO: 14682 - DNA, 20 bp, Artificial Sequence
  Description of Artificial Sequence: Synthetic oligonucleotide
  Target: ATXN2; (+) strand; PAM type: NNNNGHTT; PAM sequence: AAGCGATT
agcctccgcctcccaggttc

SEQ ID NO: 14683 - DNA, 20 bp, Artificial Sequence
  Description of Artificial Sequence: Synthetic oligonucleotide
  Target: ATXN2; (+) strand; PAM type: NNNNGHTT; PAM sequence: CTGGGATT
tgcctcagcctcctgaatag

SEQ ID NO: 14684 - DNA, 20 bp, Artificial Sequence
  Description of Artificial Sequence: Synthetic oligonucleotide
  Target: ATXN2; (+) strand; PAM type: NNNNGHTT; PAM sequence: ATGGGATT
tttttgtatttttagtagag

SEQ ID NO: 14685 - DNA, 20 bp, Artificial Sequence
  Description of Artificial Sequence: Synthetic oligonucleotide
  Target: ATXN2; (+) strand; PAM type: NNNNGHTT; PAM sequence: CTGGGATT
cacctcagcctcccagactg

SEQ ID NO: 14686 - DNA, 20 bp, Artificial Sequence
  Description of Artificial Sequence: Synthetic oligonucleotide
  Target: ATXN2; (+) strand; PAM type: NNNNGHTT; PAM sequence: AATTGTTT
acctgccaccacgctcagct

SEQ ID NO: 14687 - DNA, 20 bp, Artificial Sequence
  Description of Artificial Sequence: Synthetic oligonucleotide
  Target: ATXN2; (+) strand; PAM type: NNNNGHTT; PAM sequence: CACGGTTT
gtttgtatttttagtagaga

SEQ ID NO: 14688 - DNA, 20 bp, Artificial Sequence
  Description of Artificial Sequence: Synthetic oligonucleotide
  Target: ATXN2; (+) strand; PAM type: NNNNGHTT; PAM sequence: GCTGGATT
ccacctcggcctcccaaagt

SEQ ID NO: 14689 - DNA, 20 bp, Artificial Sequence
  Description of Artificial Sequence: Synthetic oligonucleotide
  Target: ATXN2; (+) strand; PAM type: NNNNGHTT; PAM sequence: TCATGCTT
cccatcagatagccaaactg

SEQ ID NO: 14690 - DNA, 20 bp, Artificial Sequence
  Description of Artificial Sequence: Synthetic oligonucleotide
  Target: ATXN2; (+) strand; PAM type: NNNNGHTT; PAM sequence: CATTGTTT
acaacaaaaagttcccattg

SEQ ID NO: 14691 - DNA, 20 bp, Artificial Sequence
  Description of Artificial Sequence: Synthetic oligonucleotide
  Target: ATXN2; (+) strand; PAM type: NNNNGHTT; PAM sequence: ATAAGATT
aatttctaaaggccctcaaa

SEQ ID NO: 14692 - DNA, 20 bp, Artificial Sequence
  Description of Artificial Sequence: Synthetic oligonucleotide
  Target: ATXN2; (+) strand; PAM type: NNNNGHTT; PAM sequence: ATTTGATT
aaataagattaaactctata

SEQ ID NO: 14693 - DNA, 20 bp, Artificial Sequence
  Description of Artificial Sequence: Synthetic oligonucleotide
  Target: ATXN2; (+) strand; PAM type: NNNNGHTT; PAM sequence: AAGAGTTT
atactgagaaaacgaaaatt

SEQ ID NO: 14694 - DNA, 20 bp, Artificial Sequence
  Description of Artificial Sequence: Synthetic oligonucleotide
  Target: ATXN2; (+) strand; PAM type: NNNNGHTT; PAM sequence: GATCGCTT
ttgggaagcagagccaggca

SEQ ID NO: 14695 - DNA, 20 bp, Artificial Sequence
  Description of Artificial Sequence: Synthetic oligonucleotide
  Target: ATXN2; (+) strand; PAM type: NNNNGHTT; PAM sequence: AGGAGTTT
caggcagatcgcttgagccc

SEQ ID NO: 14696 - DNA, 20 bp, Artificial Sequence
  Description of Artificial Sequence: Synthetic oligonucleotide
  Target: ATXN2; (+) strand; PAM type: NNNNGHTT; PAM sequence: GATCGCTT
ccaggggactgagaagggag

SEQ ID NO: 14697 - DNA, 20 bp, Artificial Sequence
  Description of Artificial Sequence: Synthetic oligonucleotide
  Target: ATXN2; (+) strand; PAM type: NNNNGHTT; PAM sequence: TATAGTTT
gtataaattattctactttc

SEQ ID NO: 14698 - DNA, 20 bp, Artificial Sequence
  Description of Artificial Sequence: Synthetic oligonucleotide
  Target: ATXN2; (+) strand; PAM type: NNNNGHTT; PAM sequence: ACGGGTTT
tctttgtatttttagtagag

SEQ ID NO: 14699 - DNA, 20 bp, Artificial Sequence
  Description of Artificial Sequence: Synthetic oligonucleotide
  Target: ATXN2; (+) strand; PAM type: NNNNGHTT; PAM sequence: GATGGTTT
gttttcaccatgttggccag

SEQ ID NO: 14700 - DNA, 20 bp, Artificial Sequence
  Description of Artificial Sequence: Synthetic oligonucleotide
  Target: ATXN2; (+) strand; PAM type: NNNNGHTT; PAM sequence: CTCGGCTT
acctcaagtgatctgcccac

SEQ ID NO: 14701 - DNA, 20 bp, Artificial Sequence
  Description of Artificial Sequence: Synthetic oligonucleotide
  Target: ATXN2; (+) strand; PAM type: NNNNGHTT; PAM sequence: TTGGGCTT
cacctcggcttcccagagtg

SEQ ID NO: 14702 - DNA, 20 bp, Artificial Sequence
  Description of Artificial Sequence: Synthetic oligonucleotide
  Target: ATXN2; (+) strand; PAM type: NNNNGHTT; PAM sequence: AAAAGATT
gtgagccaccacacctggcc

SEQ ID NO: 14703 - DNA, 20 bp, Artificial Sequence
  Description of Artificial Sequence: Synthetic oligonucleotide
  Target: ATXN2; (+) strand; PAM type: NNNNGHTT; PAM sequence: GTGGGATT
gatttccttttaagaaaaat

SEQ ID NO: 14704 - DNA, 20 bp, Artificial Sequence
  Description of Artificial Sequence: Synthetic oligonucleotide
  Target: ATXN2; (+) strand; PAM type: NNNNGHTT; PAM sequence: ACTAGTTT
taaccacacaagcacagaat

SEQ ID NO: 14705 - DNA, 20 bp, Artificial Sequence
  Description of Artificial Sequence: Synthetic oligonucleotide
  Target: ATXN2; (+) strand; PAM type: NNNNGHTT; PAM sequence: CAGGGTTT
tcttatttttctttttgagg

SEQ ID NO: 14706 - DNA, 20 bp, Artificial Sequence
  Description of Artificial Sequence: Synthetic oligonucleotide
  Target: ATXN2; (+) strand; PAM type: NNNNGHTT; PAM sequence: TCTGGTTT
gttccctgcagcctggacct

SEQ ID NO: 14707 - DNA, 20 bp, Artificial Sequence
  Description of Artificial Sequence: Synthetic oligonucleotide
  Target: ATXN2; (+) strand; PAM type: NNNNGHTT; PAM sequence: CTAAGATT
gagcacaccatgacggctgg

SEQ ID NO: 14708 - DNA, 20 bp, Artificial Sequence
  Description of Artificial Sequence: Synthetic oligonucleotide
  Target: ATXN2; (+) strand; PAM type: NNNNGHTT; PAM sequence: ATAGGTTT
tctattttttttttgcagag

SEQ ID NO: 14709 - DNA, 20 bp, Artificial Sequence
  Description of Artificial Sequence: Synthetic oligonucleotide
  Target: ATXN2; (+) strand; PAM type: NNNNGHTT; PAM sequence: CTCTGCTT
ttggttgaagttagttgccc

SEQ ID NO: 14710 - DNA, 20 bp, Artificial Sequence
  Description of Artificial Sequence: Synthetic oligonucleotide
  Target: ATXN2; (+) strand; PAM type: NNNNGHTT; PAM sequence: TCTGGCTT
ccctctgcttcaaaagaaat

SEQ ID NO: 14711 - DNA, 20 bp, Artificial Sequence
  Description of Artificial Sequence: Synthetic oligonucleotide
  Target: ATXN2; (+) strand; PAM type: NNNNGHTT; PAM sequence: TTCAGATT
ccctcttcttcaaatttaag

SEQ ID NO: 14712 - DNA, 20 bp, Artificial Sequence
  Description of Artificial Sequence: Synthetic oligonucleotide
  Target: ATXN2; (+) strand; PAM type: NNNNGHTT; PAM sequence: ATCAGATT
aaatttaagttcagatttaa

SEQ ID NO: 14713 - DNA, 20 bp, Artificial Sequence
  Description of Artificial Sequence: Synthetic oligonucleotide
  Target: ATXN2; (+) strand; PAM type: NNNNGHTT; PAM sequence: AAAAGCTT
ttaaatcagatttcagatca

SEQ ID NO: 14714 - DNA, 20 bp, Artificial Sequence
  Description of Artificial Sequence: Synthetic oligonucleotide
  Target: ATXN2; (+) strand; PAM type: NNNNGHTT; PAM sequence: TCTGGTTT
cactgtgtccagccaattag

SEQ ID NO: 14715 - DNA, 20 bp, Artificial Sequence
  Description of Artificial Sequence: Synthetic oligonucleotide
  Target: ATXN2; (+) strand; PAM type: NNNNGHTT; PAM sequence: TTTTGTTT
ccagccaattagtctggttt

SEQ ID NO: 14716 - DNA, 20 bp, Artificial Sequence
  Description of Artificial Sequence: Synthetic oligonucleotide
  Target: ATXN2; (+) strand; PAM type: NNNNGHTT; PAM sequence: GTTTGTTT
ccaattagtctggttttttt

SEQ ID NO: 14717 - DNA, 20 bp, Artificial Sequence
  Description of Artificial Sequence: Synthetic oligonucleotide
  Target: ATXN2; (+) strand; PAM type: NNNNGHTT; PAM sequence: GTTTGTTT
ttagtctggtttttttgttt

SEQ ID NO: 14718 - DNA, 20 bp, Artificial Sequence
  Description of Artificial Sequence: Synthetic oligonucleotide
  Target: ATXN2; (+) strand; PAM type: NNNNGHTT; PAM sequence: TTTTGTTT
ggtttttttgtttgtttgtt

SEQ ID NO: 14719 - DNA, 20 bp, Artificial Sequence
  Description of Artificial Sequence: Synthetic oligonucleotide
  Target: ATXN2; (+) strand; PAM type: NNNNGHTT; PAM sequence: GTTTGTTT
tttttgtttgtttgtttttt

SEQ ID NO: 14720 - DNA, 20 bp, Artificial Sequence
  Description of Artificial Sequence: Synthetic oligonucleotide
  Target: ATXN2; (+) strand; PAM type: NNNNGHTT; PAM sequence: GTTTGTTT
tgtttgtttgttttttgttt

SEQ ID NO: 14721 - DNA, 20 bp, Artificial Sequence
  Description of Artificial Sequence: Synthetic oligonucleotide
  Target: ATXN2; (+) strand; PAM type: NNNNGHTT; PAM sequence: GTTTGTTT
tgtttgttttttgtttgttt

SEQ ID NO: 14722 - DNA, 20 bp, Artificial Sequence
  Description of Artificial Sequence: Synthetic oligonucleotide
  Target: ATXN2; (+) strand; PAM type: NNNNGHTT; PAM sequence: CTGGGATT
gcctcagccccacctagtag

SEQ ID NO: 14723 - DNA, 20 bp, Artificial Sequence
  Description of Artificial Sequence: Synthetic oligonucleotide
  Target: ATXN2; (+) strand; PAM type: NNNNGHTT; PAM sequence: TGGGGTTT
tttttgtattttagtagaga

SEQ ID NO: 14724 - DNA, 20 bp, Artificial Sequence
  Description of Artificial Sequence: Synthetic oligonucleotide
  Target: ATXN2; (+) strand; PAM type: NNNNGHTT; PAM sequence: CTGGGATT
cacctcggcctcccaaagtg

SEQ ID NO: 14725 - DNA, 20 bp, Artificial Sequence
  Description of Artificial Sequence: Synthetic oligonucleotide
  Target: ATXN2; (+) strand; PAM type: NNNNGHTT; PAM sequence: TTATGTTT
ccaccatgcccagccagtat

SEQ ID NO: 14726 - DNA, 20 bp, Artificial Sequence
  Description of Artificial Sequence: Synthetic oligonucleotide
  Target: ATXN2; (+) strand; PAM type: NNNNGHTT; PAM sequence: CCCTGTTT
actgatgggcattttttctc

SEQ ID NO: 14727 - DNA, 20 bp, Artificial Sequence
  Description of Artificial Sequence: Synthetic oligonucleotide
  Target: ATXN2; (+) strand; PAM type: NNNNGHTT; PAM sequence: GCAGGATT
caaactacaagcaaacacag

SEQ ID NO: 14728 - DNA, 20 bp, Artificial Sequence
  Description of Artificial Sequence: Synthetic oligonucleotide
  Target: ATXN2; (+) strand; PAM type: NNNNGHTT; PAM sequence: CTTGGCTT
cctttacctgctctatatgt

SEQ ID NO: 14729 - DNA, 20 bp, Artificial Sequence
  Description of Artificial Sequence: Synthetic oligonucleotide
  Target: ATXN2; (+) strand; PAM type: NNNNGHTT; PAM sequence: GCTTGATT
tacctgctctatatgtcttg

SEQ ID NO: 14730 - DNA, 20 bp, Artificial Sequence
  Description of Artificial Sequence: Synthetic oligonucleotide
  Target: ATXN2; (+) strand; PAM type: NNNNGHTT; PAM sequence: AAAGGCTT
gcgtcataggtattgggtat

SEQ ID NO: 14731 - DNA, 20 bp, Artificial Sequence
  Description of Artificial Sequence: Synthetic oligonucleotide
  Target: ATXN2; (+) strand; PAM type: NNNNGHTT; PAM sequence: CTTAGTTT
taacaaggtattctgtcact

SEQ ID NO: 14732 - DNA, 20 bp, Artificial Sequence
  Description of Artificial Sequence: Synthetic oligonucleotide
  Target: ATXN2; (+) strand; PAM type: NNNNGHTT; PAM sequence: GAAGGTTT
tgctagagagctaggcatga

SEQ ID NO: 14733 - DNA, 20 bp, Artificial Sequence
  Description of Artificial Sequence: Synthetic oligonucleotide
  Target: ATXN2; (+) strand; PAM type: NNNNGHTT; PAM sequence: TCCTGATT
gagctaggcatgagaaggtt

SEQ ID NO: 14734 - DNA, 20 bp, Artificial Sequence
  Description of Artificial Sequence: Synthetic oligonucleotide
  Target: ATXN2; (+) strand; PAM type: NNNNGHTT; PAM sequence: CTCAGATT
tctttttcacagaaaacatt

SEQ ID NO: 14735 - DNA, 20 bp, Artificial Sequence
  Description of Artificial Sequence: Synthetic oligonucleotide
  Target: ATXN2; (+) strand; PAM type: NNNNGHTT; PAM sequence: GTCTGTTT
cactgaatctctgcatgcct

SEQ ID NO: 14736 - DNA, 20 bp, Artificial Sequence
  Description of Artificial Sequence: Synthetic oligonucleotide
  Target: ATXN2; (+) strand; PAM type: NNNNGHTT; PAM sequence: GAGTGCTT
caagtcactgaaaacctaaa

SEQ ID NO: 14737 - DNA, 20 bp, Artificial Sequence
  Description of Artificial Sequence: Synthetic oligonucleotide
  Target: ATXN2; (+) strand; PAM type: NNNNGHTT; PAM sequence: TTGTGCTT
cccaccatagatgggctagg

SEQ ID NO: 14738 - DNA, 20 bp, Artificial Sequence
  Description of Artificial Sequence: Synthetic oligonucleotide
  Target: ATXN2; (+) strand; PAM type: NNNNGHTT; PAM sequence: GAAGGCTT
gaggtgaagttggggtagta

SEQ ID NO: 14739 - DNA, 20 bp, Artificial Sequence
  Description of Artificial Sequence: Synthetic oligonucleotide
  Target: ATXN2; (+) strand; PAM type: NNNNGHTT; PAM sequence: GACGGATT
aactattattgcaatttaaa

SEQ ID NO: 14740 - DNA, 20 bp, Artificial Sequence
  Description of Artificial Sequence: Synthetic oligonucleotide
  Target: ATXN2; (+) strand; PAM type: NNNNGHTT; PAM sequence: ACTTGCTT
ttcccagtctttctaatttt

SEQ ID NO: 14741 - DNA, 20 bp, Artificial Sequence
  Description of Artificial Sequence: Synthetic oligonucleotide
  Target: ATXN2; (+) strand; PAM type: NNNNGHTT; PAM sequence: AAATGTTT
tcacatttcaataaaagaaa

SEQ ID NO: 14742 - DNA, 20 bp, Artificial Sequence
  Description of Artificial Sequence: Synthetic oligonucleotide
  Target: ATXN2; (+) strand; PAM type: NNNNGHTT; PAM sequence: AAGTGTTT
tatttttaagaaactgatgg

SEQ ID NO: 14743 - DNA, 20 bp, Artificial Sequence
  Description of Artificial Sequence: Synthetic oligonucleotide
  Target: ATXN2; (+) strand; PAM type: NNNNGHTT; PAM sequence: GGGGGATT
agtcatctcttagtatctgt

SEQ ID NO: 14744 - DNA, 20 bp, Artificial Sequence
  Description of Artificial Sequence: Synthetic oligonucleotide
  Target: ATXN2; (+) strand; PAM type: NNNNGHTT; PAM sequence: TCTAGATT
cctatatactttacatcatc

SEQ ID NO: 14745 - DNA, 20 bp, Artificial Sequence
  Description of Artificial Sequence: Synthetic oligonucleotide
  Target: ATXN2; (+) strand; PAM type: NNNNGHTT; PAM sequence: AAATGCTT
tataatacctaaaacaaggt

SEQ ID NO: 14746 - DNA, 20 bp, Artificial Sequence
  Description of Artificial Sequence: Synthetic oligonucleotide
  Target: ATXN2; (+) strand; PAM type: NNNNGHTT; PAM sequence: TATTGTTT
acaaggtaaatgctttactg

SEQ ID NO: 14747 - DNA, 20 bp, Artificial Sequence
  Description of Artificial Sequence: Synthetic oligonucleotide
  Target: ATXN2; (+) strand; PAM type: NNNNGHTT; PAM sequence: TATAGATT
aaacgtctgcatgtgttcag

SEQ ID NO: 14748 - DNA, 20 bp, Artificial Sequence
  Description of Artificial Sequence: Synthetic oligonucleotide
  Target: ATXN2; (+) strand; PAM type: NNNNGHTT; PAM sequence: CTATGTTT
ttcagtatagattatcctaa

SEQ ID NO: 14749 - DNA, 20 bp, Artificial Sequence
  Description of Artificial Sequence: Synthetic oligonucleotide
  Target: ATXN2; (+) strand; PAM type: NNNNGHTT; PAM sequence: CAAAGATT
aattctgggtcagagaaatt

SEQ ID NO: 14750 - DNA, 20 bp, Artificial Sequence
  Description of Artificial Sequence: Synthetic oligonucleotide
  Target: ATXN2; (+) strand; PAM type: NNNNGHTT; PAM sequence: TAATGTTT
acaaaacaaagacctttttt

SEQ ID NO: 14751 - DNA, 20 bp, Artificial Sequence
  Description of Artificial Sequence: Synthetic oligonucleotide
  Target: ATXN2; (+) strand; PAM type: NNNNGHTT; PAM sequence: TTGGGATT
gtgggttgaactcctttgca

SEQ ID NO: 14752 - DNA, 20 bp, Artificial Sequence
  Description of Artificial Sequence: Synthetic oligonucleotide
  Target: ATXN2; (+) strand; PAM type: NNNNGHTT; PAM sequence: TGTTGATT
tcctttgcattgggattcaa

SEQ ID NO: 14753 - DNA, 20 bp, Artificial Sequence
  Description of Artificial Sequence: Synthetic oligonucleotide
  Target: ATXN2; (+) strand; PAM type: NNNNGHTT; PAM sequence: TATAGATT
atttaaaaaaaattgctaaa

SEQ ID NO: 14754 - DNA, 20 bp, Artificial Sequence
  Description of Artificial Sequence: Synthetic oligonucleotide
  Target: ATXN2; (+) strand; PAM type: NNNNGHTT; PAM sequence: AATCGTTT
gttctcactagaagatcact

SEQ ID NO: 14755 - DNA, 20 bp, Artificial Sequence
  Description of Artificial Sequence: Synthetic oligonucleotide
  Target: ATXN2; (+) strand; PAM type: NNNNGHTT; PAM sequence: CCGAGTTT
ctcactgcaacctctgcctc

SEQ ID NO: 14756 - DNA, 20 bp, Artificial Sequence
  Description of Artificial Sequence: Synthetic oligonucleotide
  Target: ATXN2; (+) strand; PAM type: NNNNGHTT; PAM sequence: TCCTGATT
gccattctcttgccttagcc

SEQ ID NO: 14757 - DNA, 20 bp, Artificial Sequence
  Description of Artificial Sequence: Synthetic oligonucleotide
  Target: ATXN2; (+) strand; PAM type: NNNNGHTT; PAM sequence: CTGGGATT
tgccttagcctcctgattag

SEQ ID NO: 14758 - DNA, 20 bp, Artificial Sequence
  Description of Artificial Sequence: Synthetic oligonucleotide
  Target: ATXN2; (+) strand; PAM type: NNNNGHTT; PAM sequence: TGGGGTTT
atatttatttttagtaaaga

SEQ ID NO: 14759 - DNA, 20 bp, Artificial Sequence
  Description of Artificial Sequence: Synthetic oligonucleotide
  Target: ATXN2; (+) strand; PAM type: NNNNGHTT; PAM sequence: CTGGGATT
tgactcagcctcccaaagtg

SEQ ID NO: 14760 - DNA, 20 bp, Artificial Sequence
  Description of Artificial Sequence: Synthetic oligonucleotide
  Target: ATXN2; (+) strand; PAM type: NNNNGHTT; PAM sequence: CAGGGTTT
ttttgtatttttagtacaga

SEQ ID NO: 14761 - DNA, 20 bp, Artificial Sequence
  Description of Artificial Sequence: Synthetic oligonucleotide
  Target: ATXN2; (+) strand; PAM type: NNNNGHTT; PAM sequence: ACCTGCTT
ctcctaacctcaagtaatct

SEQ ID NO: 14762 - DNA, 20 bp, Artificial Sequence
  Description of Artificial Sequence: Synthetic oligonucleotide
  Target: ATXN2; (+) strand; PAM type: NNNNGHTT; PAM sequence: CTGGGATT
tgcttggacctcccagagtg

SEQ ID NO: 14763 - DNA, 20 bp, Artificial Sequence
  Description of Artificial Sequence: Synthetic oligonucleotide
  Target: ATXN2; (+) strand; PAM type: NNNNGHTT; PAM sequence: TTCAGCTT
aataagctgcattccaaaac

SEQ ID NO: 14764 - DNA, 20 bp, Artificial Sequence
  Description of Artificial Sequence: Synthetic oligonucleotide
  Target: ATXN2; (+) strand; PAM type: NNNNGHTT; PAM sequence: ACTGGATT
attccaaaacttcagcttta

SEQ ID NO: 14765 - DNA, 20 bp, Artificial Sequence
  Description of Artificial Sequence: Synthetic oligonucleotide
  Target: ATXN2; (+) strand; PAM type: NNNNGHTT; PAM sequence: GATTGTTT
caaaacttcagctttaactg

SEQ ID NO: 14766 - DNA, 20 bp, Artificial Sequence
  Description of Artificial Sequence: Synthetic oligonucleotide
  Target: ATXN2; (+) strand; PAM type: NNNNGHTT; PAM sequence: CACAGTTT
aatctaaacattaactaaaa

SEQ ID NO: 14767 - DNA, 20 bp, Artificial Sequence
  Description of Artificial Sequence: Synthetic oligonucleotide
  Target: ATXN2; (+) strand; PAM type: NNNNGHTT; PAM sequence: GCATGCTT
gaattccaagtagaagcacc

SEQ ID NO: 14768 - DNA, 20 bp, Artificial Sequence
  Description of Artificial Sequence: Synthetic oligonucleotide
  Target: ATXN2; (+) strand; PAM type: NNNNGHTT; PAM sequence: GGCAGTTT
atgcttctctccttgacagt

SEQ ID NO: 14769 - DNA, 20 bp, Artificial Sequence
  Description of Artificial Sequence: Synthetic oligonucleotide
  Target: ATXN2; (+) strand; PAM type: NNNNGHTT; PAM sequence: CCTTGTTT
aaaacttttcttaatttatg

SEQ ID NO: 14770 - DNA, 20 bp, Artificial Sequence
  Description of Artificial Sequence: Synthetic oligonucleotide
  Target: ATXN2; (+) strand; PAM type: NNNNGHTT; PAM sequence: ATTTGTTT
cctcatttacttaagatgtc

SEQ ID NO: 14771 - DNA, 20 bp, Artificial Sequence
  Description of Artificial Sequence: Synthetic oligonucleotide
  Target: ATXN2; (+) strand; PAM type: NNNNGHTT; PAM sequence: AGCTGTTT
agatgtcatttgtttggact

SEQ ID NO: 14772 - DNA, 20 bp, Artificial Sequence
  Description of Artificial Sequence: Synthetic oligonucleotide
  Target: ATXN2; (+) strand; PAM type: NNNNGHTT; PAM sequence: GATGGATT
taaagtagtctaaaagtcca

SEQ ID NO: 14773 - DNA, 20 bp, Artificial Sequence
  Description of Artificial Sequence: Synthetic oligonucleotide
  Target: ATXN2; (+) strand; PAM type: NNNNGHTT; PAM sequence: CCAGGTTT
gtaacaggatggtctaagtt

SEQ ID NO: 14774 - DNA, 20 bp, Artificial Sequence
  Description of Artificial Sequence: Synthetic oligonucleotide
  Target: ATXN2; (+) strand; PAM type: NNNNGHTT; PAM sequence: TCTTGTTT
tctcttccttatcgtctttc

SEQ ID NO: 14775 - DNA, 20 bp, Artificial Sequence
  Description of Artificial Sequence: Synthetic oligonucleotide
  Target: ATXN2; (+) strand; PAM type: NNNNGHTT; PAM sequence: TTCGGCTT
aaggggaaatgctggggcta

SEQ ID NO: 14776 - DNA, 20 bp, Artificial Sequence
  Description of Artificial Sequence: Synthetic oligonucleotide
  Target: ATXN2; (+) strand; PAM type: NNNNGHTT; PAM sequence: TCTTGATT
attttgtctttgatcaaatc

SEQ ID NO: 14777 - DNA, 20 bp, Artificial Sequence
  Description of Artificial Sequence: Synthetic oligonucleotide
  Target: ATXN2; (+) strand; PAM type: NNNNGHTT; PAM sequence: TTTTGTTT
tgatttttctccctctctat

SEQ ID NO: 14778 - DNA, 20 bp, Artificial Sequence
  Description of Artificial Sequence: Synthetic oligonucleotide
  Target: ATXN2; (+) strand; PAM type: NNNNGHTT; PAM sequence: CATAGATT
tttttgtttagtagttgatc

SEQ ID NO: 14779 - DNA, 20 bp, Artificial Sequence
  Description of Artificial Sequence: Synthetic oligonucleotide
  Target: ATXN2; (+) strand; PAM type: NNNNGHTT; PAM sequence: TAAGGCTT
tacgcatgaaatgttctgaa

SEQ ID NO: 14780 - DNA, 20 bp, Artificial Sequence
  Description of Artificial Sequence: Synthetic oligonucleotide
  Target: ATXN2; (+) strand; PAM type: NNNNGHTT; PAM sequence: TAATGCTT
cttttttcatactttaagag

SEQ ID NO: 14781 - DNA, 20 bp, Artificial Sequence
  Description of Artificial Sequence: Synthetic oligonucleotide
  Target: ATXN2; (+) strand; PAM type: NNNNGHTT; PAM sequence: GAGTGCTT
tctaaagttcaatatttact

SEQ ID NO: 14782 - DNA, 20 bp, Artificial Sequence
  Description of Artificial Sequence: Synthetic oligonucleotide
  Target: ATXN2; (+) strand; PAM type: NNNNGHTT; PAM sequence: AATAGTTT
gctgggtgagaaaaatatga

SEQ ID NO: 14783 - DNA, 20 bp, Artificial Sequence
  Description of Artificial Sequence: Synthetic oligonucleotide
  Target: ATXN2; (+) strand; PAM type: NNNNGHTT; PAM sequence: AAAGGTTT
aaaagcaacctataaaaaag

SEQ ID NO: 14784 - DNA, 20 bp, Artificial Sequence
  Description of Artificial Sequence: Synthetic oligonucleotide
  Target: ATXN2; (+) strand; PAM type: NNNNGHTT; PAM sequence: AGAAGTTT
cagctagtctaaggtgtgaa

SEQ ID NO: 14785 - DNA, 20 bp, Artificial Sequence
  Description of Artificial Sequence: Synthetic oligonucleotide
  Target: ATXN2; (+) strand; PAM type: NNNNGHTT; PAM sequence: GTATGTTT
tagtctaagtaaaaggaaga

SEQ ID NO: 14786 - DNA, 20 bp, Artificial Sequence
  Description of Artificial Sequence: Synthetic oligonucleotide
  Target: ATXN2; (+) strand; PAM type: NNNNGHTT; PAM sequence: GACTGCTT
ttgggaggctgagacaagca

SEQ ID NO: 14787 - DNA, 20 bp, Artificial Sequence
  Description of Artificial Sequence: Synthetic oligonucleotide
  Target: ATXN2; (+) strand; PAM type: NNNNGHTT; PAM sequence: AGGAGTTT
caggtggatcacttgaggtc

SEQ ID NO: 14788 - DNA, 20 bp, Artificial Sequence
  Description of Artificial Sequence: Synthetic oligonucleotide
  Target: ATXN2; (+) strand; PAM type: NNNNGHTT; PAM sequence: AATTGCTT
ttgggaggctgacatatgag

SEQ ID NO: 14789 - DNA, 20 bp, Artificial Sequence
  Description of Artificial Sequence: Synthetic oligonucleotide
  Target: ATXN2; (+) strand; PAM type: NNNNGHTT; PAM sequence: AAAAGTTT
aaaattaaaaaaaaaaaaaa

SEQ ID NO: 14790 - DNA, 20 bp, Artificial Sequence
  Description of Artificial Sequence: Synthetic oligonucleotide
  Target: ATXN2; (+) strand; PAM type: NNNNGHTT; PAM sequence: CTACGTTT
aaaaaaaaagttttaaaaag

SEQ ID NO: 14791 - DNA, 20 bp, Artificial Sequence
  Description of Artificial Sequence: Synthetic oligonucleotide
  Target: ATXN2; (+) strand; PAM type: NNNNGHTT; PAM sequence: TTTGGCTT
taaaaagctacgtttaggac

SEQ ID NO: 14792 - DNA, 20 bp, Artificial Sequence
  Description of Artificial Sequence: Synthetic oligonucleotide
  Target: ATXN2; (+) strand; PAM type: NNNNGHTT; PAM sequence: GGCAGATT
ttaagtagggtagagtactg

SEQ ID NO: 14793 - DNA, 20 bp, Artificial Sequence
  Description of Artificial Sequence: Synthetic oligonucleotide
  Target: ATXN2; (+) strand; PAM type: NNNNGHTT; PAM sequence: AGCAGCTT
tagttcagaaaggtgaacac

SEQ ID NO: 14794 - DNA, 20 bp, Artificial Sequence
  Description of Artificial Sequence: Synthetic oligonucleotide
  Target: ATXN2; (+) strand; PAM type: NNNNGHTT; PAM sequence: GTCAGCTT
tggactaagcgctgggccta

SEQ ID NO: 14795 - DNA, 20 bp, Artificial Sequence
  Description of Artificial Sequence: Synthetic oligonucleotide
  Target: ATXN2; (+) strand; PAM type: NNNNGHTT; PAM sequence: CCCAGTTT
ttaggtaagcgatcacagta

SEQ ID NO: 14796 - DNA, 20 bp, Artificial Sequence
  Description of Artificial Sequence: Synthetic oligonucleotide
  Target: ATXN2; (+) strand; PAM type: NNNNGHTT; PAM sequence: GTGGGATT
ggagagagagagaaatgact

SEQ ID NO: 14797 - DNA, 20 bp, Artificial Sequence
  Description of Artificial Sequence: Synthetic oligonucleotide
  Target: ATXN2; (+) strand; PAM type: NNNNGHTT; PAM sequence: CAGTGATT
cagaggggaattgtccatcc

SEQ ID NO: 14798 - DNA, 20 bp, Artificial Sequence
  Description of Artificial Sequence: Synthetic oligonucleotide
  Target: ATXN2; (+) strand; PAM type: NNNNGHTT; PAM sequence: CTGAGATT
gaggcggaggttgtggtgag

SEQ ID NO: 14799 - DNA, 20 bp, Artificial Sequence
  Description of Artificial Sequence: Synthetic oligonucleotide
  Target: ATXN2; (+) strand; PAM type: NNNNGHTT; PAM sequence: GAGTGCTT
accagctagggtggccaagg

SEQ ID NO: 14800 - DNA, 20 bp, Artificial Sequence
  Description of Artificial Sequence: Synthetic oligonucleotide
  Target: ATXN2; (+) strand; PAM type: NNNNGHTT; PAM sequence: GTAGGATT
aagggaaatacctagtccta

SEQ ID NO: 14801 - DNA, 20 bp, Artificial Sequence
  Description of Artificial Sequence: Synthetic oligonucleotide
  Target: ATXN2; (+) strand; PAM type: NNNNGHTT; PAM sequence: GCCAGCTT
aaggtgccatgtcgtattgt

SEQ ID NO: 14802 - DNA, 20 bp, Artificial Sequence
  Description of Artificial Sequence: Synthetic oligonucleotide
  Target: ATXN2; (+) strand; PAM type: NNNNGHTT; PAM sequence: ACCTGCTT
tggtgtccatggggagaccc

SEQ ID NO: 14803 - DNA, 20 bp, Artificial Sequence
  Description of Artificial Sequence: Synthetic oligonucleotide
  Target: ATXN2; (+) strand; PAM type: NNNNGHTT; PAM sequence: AGCAGATT
gctcagccccagtacaataa

SEQ ID NO: 14804 - DNA, 20 bp, Artificial Sequence
  Description of Artificial Sequence: Synthetic oligonucleotide
  Target: ATXN2; (+) strand; PAM type: NNNNGHTT; PAM sequence: GCAGGATT
aaagtaaagacccagttctt

SEQ ID NO: 14805 - DNA, 20 bp, Artificial Sequence
  Description of Artificial Sequence: Synthetic oligonucleotide
  Target: ATXN2; (+) strand; PAM type: NNNNGHTT; PAM sequence: CAGTGCTT
tccagtgacggtggccatgg

SEQ ID NO: 14806 - DNA, 20 bp, Artificial Sequence
  Description of Artificial Sequence: Synthetic oligonucleotide
  Target: ATXN2; (+) strand; PAM type: NNNNGHTT; PAM sequence: ATTTGTTT
tcagcacaaagagagactcc

SEQ ID NO: 14807 - DNA, 20 bp, Artificial Sequence
  Description of Artificial Sequence: Synthetic oligonucleotide
  Target: ATXN2; (+) strand; PAM type: NNNNGHTT; PAM sequence: AATTGCTT
tcaggaggctgaggcaggag

SEQ ID NO: 14808 - DNA, 20 bp, Artificial Sequence
  Description of Artificial Sequence: Synthetic oligonucleotide
  Target: ATXN2; (+) strand; PAM type: NNNNGHTT; PAM sequence: GAATGCTT
tttcagacagaattcaagct

SEQ ID NO: 14809 - DNA, 20 bp, Artificial Sequence
  Description of Artificial Sequence: Synthetic oligonucleotide
  Target: ATXN2; (+) strand; PAM type: NNNNGHTT; PAM sequence: GTGAGCTT
tcaagcagcagaaaacatta

SEQ ID NO: 14810 - DNA, 20 bp, Artificial Sequence
  Description of Artificial Sequence: Synthetic oligonucleotide
  Target: ATXN2; (+) strand; PAM type: NNNNGHTT; PAM sequence: TCACGCTT
accaagttgggcacgatgac

SEQ ID NO: 14811 - DNA, 20 bp, Artificial Sequence
  Description of Artificial Sequence: Synthetic oligonucleotide
  Target: ATXN2; (+) strand; PAM type: NNNNGHTT; PAM sequence: ACATGCTT
aagtagctgggcgtggtggc

SEQ ID NO: 14812 - DNA, 20 bp, Artificial Sequence
  Description of Artificial Sequence: Synthetic oligonucleotide
  Target: ATXN2; (+) strand; PAM type: NNNNGHTT; PAM sequence: AATCGCTT
ttgggaggctgaggcagaag

SEQ ID NO: 14813 - DNA, 20 bp, Artificial Sequence
  Description of Artificial Sequence: Synthetic oligonucleotide
  Target: ATXN2; (+) strand; PAM type: NNNNGHTT; PAM sequence: AAGCGATT
aacctccgcctcccaggttc

SEQ ID NO: 14814 - DNA, 20 bp, Artificial Sequence
  Description of Artificial Sequence: Synthetic oligonucleotide
  Target: ATXN2; (+) strand; PAM type: NNNNGHTT; PAM sequence: CTAGGATT
tgcctcagcctcctgagtag

SEQ ID NO: 14815 - DNA, 20 bp, Artificial Sequence
  Description of Artificial Sequence: Synthetic oligonucleotide
  Target: ATXN2; (+) strand; PAM type: NNNNGHTT; PAM sequence: CAGAGTTT
ttttgtatttttagtagaga

SEQ ID NO: 14816 - DNA, 20 bp, Artificial Sequence
  Description of Artificial Sequence: Synthetic oligonucleotide
  Target: ATXN2; (+) strand; PAM type: NNNNGHTT; PAM sequence: TTGTGATT
ctggtctcgaactcctaacc

SEQ ID NO: 14817 - DNA, 20 bp, Artificial Sequence
  Description of Artificial Sequence: Synthetic oligonucleotide
  Target: ATXN2; (+) strand; PAM type: NNNNGHTT; PAM sequence: CTGGGATT
cacctttgccttccaaagtg

SEQ ID NO: 14818 - DNA, 20 bp, Artificial Sequence
  Description of Artificial Sequence: Synthetic oligonucleotide
  Target: ATXN2; (+) strand; PAM type: NNNNGHTT; PAM sequence: CAGGGTTT
ttaggcgtgagccactaggc

SEQ ID NO: 14819 - DNA, 20 bp, Artificial Sequence
  Description of Artificial Sequence: Synthetic oligonucleotide
  Target: ATXN2; (+) strand; PAM type: NNNNGHTT; PAM sequence: TTTTGTTT
cgtgagccactaggccaggg

SEQ ID NO: 14820 - DNA, 20 bp, Artificial Sequence
  Description of Artificial Sequence: Synthetic oligonucleotide
  Target: ATXN2; (+) strand; PAM type: NNNNGHTT; PAM sequence: TTTTGTTT
gccactaggccagggttttg

SEQ ID NO: 14821 - DNA, 20 bp, Artificial Sequence
  Description of Artificial Sequence: Synthetic oligonucleotide
  Target: ATXN2; (+) strand; PAM type: NNNNGHTT; PAM sequence: TATTGTTT
cagggttttgttttgttttg

SEQ ID NO: 14822 - DNA, 20 bp, Artificial Sequence
  Description of Artificial Sequence: Synthetic oligonucleotide
  Target: ATXN2; (+) strand; PAM type: NNNNGHTT; PAM sequence: AAGTGATT
aacctgggcctcctgggttc

SEQ ID NO: 14823 - DNA, 20 bp, Artificial Sequence
  Description of Artificial Sequence: Synthetic oligonucleotide
  Target: ATXN2; (+) strand; PAM type: NNNNGHTT; PAM sequence: CTGGGATT
ctgcctcagcctccgagtag

SEQ ID NO: 14824 - DNA, 20 bp, Artificial Sequence
  Description of Artificial Sequence: Synthetic oligonucleotide
  Target: ATXN2; (+) strand; PAM type: NNNNGHTT; PAM sequence: GGGGGTTT
ttttctatttttagtagaga

SEQ ID NO: 14825 - DNA, 20 bp, Artificial Sequence
  Description of Artificial Sequence: Synthetic oligonucleotide
  Target: ATXN2; (+) strand; PAM type: NNNNGHTT; PAM sequence: CTGGGATT
cacctcagcctcccaaagtg

SEQ ID NO: 14826 - DNA, 20 bp, Artificial Sequence
  Description of Artificial Sequence: Synthetic oligonucleotide
  Target: ATXN2; (+) strand; PAM type: NNNNGHTT; PAM sequence: CCTGGCTT
tacacacgtgaaccactgcg

SEQ ID NO: 14827 - DNA, 20 bp, Artificial Sequence
  Description of Artificial Sequence: Synthetic oligonucleotide
  Target: ATXN2; (+) strand; PAM type: NNNNGHTT; PAM sequence: TACAGTTT
cactgcgcctggcttataac

SEQ ID NO: 14828 - DNA, 20 bp, Artificial Sequence
  Description of Artificial Sequence: Synthetic oligonucleotide
  Target: ATXN2; (+) strand; PAM type: NNNNGHTT; PAM sequence: TAGAGTTT
aaaagcgggcagatgaagtg

SEQ ID NO: 14829 - DNA, 20 bp, Artificial Sequence
  Description of Artificial Sequence: Synthetic oligonucleotide
  Target: ATXN2; (+) strand; PAM type: NNNNGHTT; PAM sequence: ATTAGTTT
agatgaagtgtagagttttt

SEQ ID NO: 14830 - DNA, 20 bp, Artificial Sequence
  Description of Artificial Sequence: Synthetic oligonucleotide
  Target: ATXN2; (+) strand; PAM type: NNNNGHTT; PAM sequence: CTTTGCTT
agagtttttattagttttct

SEQ ID NO: 14831 - DNA, 20 bp, Artificial Sequence
  Description of Artificial Sequence: Synthetic oligonucleotide
  Target: ATXN2; (+) strand; PAM type: NNNNGHTT; PAM sequence: GCTTGCTT
tttttattagttttctcttt

SEQ ID NO: 14832 - DNA, 20 bp, Artificial Sequence
  Description of Artificial Sequence: Synthetic oligonucleotide
  Target: ATXN2; (+) strand; PAM type: NNNNGHTT; PAM sequence: GCTTGTTT
tattagttttctctttgctt

SEQ ID NO: 14833 - DNA, 20 bp, Artificial Sequence
  Description of Artificial Sequence: Synthetic oligonucleotide
  Target: ATXN2; (+) strand; PAM type: NNNNGHTT; PAM sequence: CAAAGTTT
tgcttgcttgtttttgcaat

SEQ ID NO: 14834 - DNA, 20 bp, Artificial Sequence
  Description of Artificial Sequence: Synthetic oligonucleotide
  Target: ATXN2; (+) strand; PAM type: NNNNGHTT; PAM sequence: ATTGGTTT
aatcaaagtttcaagttgtc

SEQ ID NO: 14835 - DNA, 20 bp, Artificial Sequence
  Description of Artificial Sequence: Synthetic oligonucleotide
  Target: ATXN2; (+) strand; PAM type: NNNNGHTT; PAM sequence: CTGAGATT
tgcctcagcctcctgagtat

SEQ ID NO: 14836 - DNA, 20 bp, Artificial Sequence
  Description of Artificial Sequence: Synthetic oligonucleotide
  Target: ATXN2; (+) strand; PAM type: NNNNGHTT; PAM sequence: CTAAGTTT
gcacgtgcctccacgcctgg

SEQ ID NO: 14837 - DNA, 20 bp, Artificial Sequence
  Description of Artificial Sequence: Synthetic oligonucleotide
  Target: ATXN2; (+) strand; PAM type: NNNNGHTT; PAM sequence: TGGGGTTT
ttttgtatttttagtagaga

SEQ ID NO: 14838 - DNA, 20 bp, Artificial Sequence
  Description of Artificial Sequence: Synthetic oligonucleotide
  Target: ATXN2; (+) strand; PAM type: NNNNGHTT; PAM sequence: CTGGGATT
cacctcggcctcccaaagtg

SEQ ID NO: 14839 - DNA, 20 bp, Artificial Sequence
  Description of Artificial Sequence: Synthetic oligonucleotide
  Target: ATXN2; (+) strand; PAM type: NNNNGHTT; PAM sequence: AATGGATT
caaaagatacagagtggcta

SEQ ID NO: 14840 - DNA, 20 bp, Artificial Sequence
  Description of Artificial Sequence: Synthetic oligonucleotide
  Target: ATXN2; (+) strand; PAM type: NNNNGHTT; PAM sequence: CTGGGCTT
tgaaaatacaaaaaatttag

SEQ ID NO: 14841 - DNA, 20 bp, Artificial Sequence
  Description of Artificial Sequence: Synthetic oligonucleotide
  Target: ATXN2; (+) strand; PAM type: NNNNGHTT; PAM sequence: AATCGCTT
ttgggaggctgaggcaggag

SEQ ID NO: 14842 - DNA, 20 bp, Artificial Sequence
  Description of Artificial Sequence: Synthetic oligonucleotide
  Target: ATXN2; (+) strand; PAM type: NNNNGHTT; PAM sequence: CTATGCTT
ccagaaaagaacaggagtag

SEQ ID NO: 14843 - DNA, 20 bp, Artificial Sequence
  Description of Artificial Sequence: Synthetic oligonucleotide
  Target: ATXN2; (+) strand; PAM type: NNNNGHTT; PAM sequence: AATAGATT
gagtagctatgcttagataa

SEQ ID NO: 14844 - DNA, 20 bp, Artificial Sequence
  Description of Artificial Sequence: Synthetic oligonucleotide
  Target: ATXN2; (+) strand; PAM type: NNNNGHTT; PAM sequence: AGAAGATT
aagtctataaaaacagacaa

SEQ ID NO: 14845 - DNA, 20 bp, Artificial Sequence
  Description of Artificial Sequence: Synthetic oligonucleotide
  Target: ATXN2; (+) strand; PAM type: NNNNGHTT; PAM sequence: TATGGATT
acacattcttctcctcaaca

SEQ ID NO: 14846 - DNA, 20 bp, Artificial Sequence
  Description of Artificial Sequence: Synthetic oligonucleotide
  Target: ATXN2; (+) strand; PAM type: NNNNGHTT; PAM sequence: TAAAGATT
gttaagccacaaaacaagtc

SEQ ID NO: 14847 - DNA, 20 bp, Artificial Sequence
  Description of Artificial Sequence: Synthetic oligonucleotide
  Target: ATXN2; (+) strand; PAM type: NNNNGHTT; PAM sequence: GGTGGATT
caccttgggaggccgaaata

SEQ ID NO: 14848 - DNA, 20 bp, Artificial Sequence
  Description of Artificial Sequence: Synthetic oligonucleotide
  Target: ATXN2; (+) strand; PAM type: NNNNGHTT; PAM sequence: GATTGCTT
ttgggaggccgaaataggtg

SEQ ID NO: 14849 - DNA, 20 bp, Artificial Sequence
  Description of Artificial Sequence: Synthetic oligonucleotide
  Target: ATXN2; (+) strand; PAM type: NNNNGHTT; PAM sequence: GGAGGATT
ctacttggaaggctaaggtg

SEQ ID NO: 14850 - DNA, 20 bp, Artificial Sequence
  Description of Artificial Sequence: Synthetic oligonucleotide
  Target: ATXN2; (+) strand; PAM type: NNNNGHTT; PAM sequence: GATTGCTT
ttggaaggctaaggtgggag

SEQ ID NO: 14851 - DNA, 20 bp, Artificial Sequence
  Description of Artificial Sequence: Synthetic oligonucleotide
  Target: ATXN2; (+) strand; PAM type: NNNNGHTT; PAM sequence: ATCAGCTT
tctgaggtcaggagttcgag

SEQ ID NO: 14852 - DNA, 20 bp, Artificial Sequence
  Description of Artificial Sequence: Synthetic oligonucleotide
  Target: ATXN2; (+) strand; PAM type: NNNNGHTT; PAM sequence: CACAGCTT
gaaacaaatgaaaatggaaa

SEQ ID NO: 14853 - DNA, 20 bp, Artificial Sequence
  Description of Artificial Sequence: Synthetic oligonucleotide
  Target: ATXN2; (+) strand; PAM type: NNNNGHTT; PAM sequence: GAATGTTT
agtaaaagcaacaataagag

SEQ ID NO: 14854 - DNA, 20 bp, Artificial Sequence
  Description of Artificial Sequence: Synthetic oligonucleotide
  Target: ATXN2; (+) strand; PAM type: NNNNGHTT; PAM sequence: AATTGTTT
aaaagatcaataaaacagta

SEQ ID NO: 14855 - DNA, 20 bp, Artificial Sequence
  Description of Artificial Sequence: Synthetic oligonucleotide
  Target: ATXN2; (+) strand; PAM type: NNNNGHTT; PAM sequence: GATGGCTT
caaagaaaagccatggacct

SEQ ID NO: 14856 - DNA, 20 bp, Artificial Sequence
  Description of Artificial Sequence: Synthetic oligonucleotide
  Target: ATXN2; (+) strand; PAM type: NNNNGHTT; PAM sequence: GTGGGATT
agatcattcatcatgactaa

SEQ ID NO: 14857 - DNA, 20 bp, Artificial Sequence
  Description of Artificial Sequence: Synthetic oligonucleotide
  Target: ATXN2; (+) strand; PAM type: NNNNGHTT; PAM sequence: TTATGATT
acataaaatgccacatcccc

SEQ ID NO: 14858 - DNA, 20 bp, Artificial Sequence
  Description of Artificial Sequence: Synthetic oligonucleotide
  Target: ATXN2; (+) strand; PAM type: NNNNGHTT; PAM sequence: TGGAGCTT
aacggcatgaacccaggagg

SEQ ID NO: 14859 - DNA, 20 bp, Artificial Sequence
  Description of Artificial Sequence: Synthetic oligonucleotide
  Target: ATXN2; (+) strand; PAM type: NNNNGHTT; PAM sequence: AAAGGCTT
tactgaaaagggaaaaactg

SEQ ID NO: 14860 - DNA, 20 bp, Artificial Sequence
  Description of Artificial Sequence: Synthetic oligonucleotide
  Target: ATXN2; (+) strand; PAM type: NNNNGHTT; PAM sequence: CCTTGTTT
aatggaagaagtcaaattat

SEQ ID NO: 14861 - DNA, 20 bp, Artificial Sequence
  Description of Artificial Sequence: Synthetic oligonucleotide
  Target: ATXN2; (+) strand; PAM type: NNNNGHTT; PAM sequence: AAAAGATT
ataaacttaaccaaatgagt

SEQ ID NO: 14862 - DNA, 20 bp, Artificial Sequence
  Description of Artificial Sequence: Synthetic oligonucleotide
  Target: ATXN2; (+) strand; PAM type: NNNNGHTT; PAM sequence: AAGAGATT
tgacacagaaaaaacatgaa

SEQ ID NO: 14863 - DNA, 20 bp, Artificial Sequence
  Description of Artificial Sequence: Synthetic oligonucleotide
  Target: ATXN2; (+) strand; PAM type: NNNNGHTT; PAM sequence: CCATGTTT
aaaaaacatgaaaagagatt

SEQ ID NO: 14864 - DNA, 20 bp, Artificial Sequence
  Description of Artificial Sequence: Synthetic oligonucleotide
  Target: ATXN2; (+) strand; PAM type: NNNNGHTT; PAM sequence: TATGGATT
atgaaaagagattccatgtt

SEQ ID NO: 14865 - DNA, 20 bp, Artificial Sequence
  Description of Artificial Sequence: Synthetic oligonucleotide
  Target: ATXN2; (+) strand; PAM type: NNNNGHTT; PAM sequence: TACAGATT
tgataatactcaaagcaatc

SEQ ID NO: 14866 - DNA, 20 bp, Artificial Sequence
  Description of Artificial Sequence: Synthetic oligonucleotide
  Target: ATXN2; (+) strand; PAM type: NNNNGHTT; PAM sequence: TAAAGATT
aaaatcaaatcaaaatggac

SEQ ID NO: 14867 - DNA, 20 bp, Artificial Sequence
  Description of Artificial Sequence: Synthetic oligonucleotide
  Target: ATXN2; (+) strand; PAM type: NNNNGHTT; PAM sequence: CAAAGATT
cccagggacattactctggg

SEQ ID NO: 14868 - DNA, 20 bp, Artificial Sequence
  Description of Artificial Sequence: Synthetic oligonucleotide
  Target: ATXN2; (+) strand; PAM type: NNNNGHTT; PAM sequence: AAAAGCTT
aatgggatcacatcaagtta

SEQ ID NO: 14869 - DNA, 20 bp, Artificial Sequence
  Description of Artificial Sequence: Synthetic oligonucleotide
  Target: ATXN2; (+) strand; PAM type: NNNNGHTT; PAM sequence: AATTGCTT
atggtggcaggaggcaggag

SEQ ID NO: 14870 - DNA, 20 bp, Artificial Sequence
  Description of Artificial Sequence: Synthetic oligonucleotide
  Target: ATXN2; (+) strand; PAM type: NNNNGHTT; PAM sequence: GGAGGATT
cattttgggaagccaaggtg

SEQ ID NO: 14871 - DNA, 20 bp, Artificial Sequence
  Description of Artificial Sequence: Synthetic oligonucleotide
  Target: ATXN2; (+) strand; PAM type: NNNNGHTT; PAM sequence: GATTGCTT
ttgggaagccaaggtgggag

SEQ ID NO: 14872 - DNA, 20 bp, Artificial Sequence
  Description of Artificial Sequence: Synthetic oligonucleotide
  Target: ATXN2; (+) strand; PAM type: NNNNGHTT; PAM sequence: AATGGCTT
tatcatctcaccccagttaa

SEQ ID NO: 14873 - DNA, 20 bp, Artificial Sequence
  Description of Artificial Sequence: Synthetic oligonucleotide
  Target: ATXN2; (+) strand; PAM type: NNNNGHTT; PAM sequence: ATCAGTTT
ggtatatactcagaaaggaa

SEQ ID NO: 14874 - DNA, 20 bp, Artificial Sequence
  Description of Artificial Sequence: Synthetic oligonucleotide
  Target: ATXN2; (+) strand; PAM type: NNNNGHTT; PAM sequence: CCATGTTT
ttgaaggaatatctgcactc

SEQ ID NO: 14875 - DNA, 20 bp, Artificial Sequence
  Description of Artificial Sequence: Synthetic oligonucleotide
  Target: ATXN2; (+) strand; PAM type: NNNNGHTT; PAM sequence: CCAAGATT
cggcactatatacacaacag

SEQ ID NO: 14876 - DNA, 20 bp, Artificial Sequence
  Description of Artificial Sequence: Synthetic oligonucleotide
  Target: ATXN2; (+) strand; PAM type: NNNNGHTT; PAM sequence: AATAGATT
aaaatgtggtatatatacac

SEQ ID NO: 14877 - DNA, 20 bp, Artificial Sequence
  Description of Artificial Sequence: Synthetic oligonucleotide
  Target: ATXN2; (+) strand; PAM type: NNNNGHTT; PAM sequence: ACTCGTTT
gataaactttgcatattctt

SEQ ID NO: 14878 - DNA, 20 bp, Artificial Sequence
  Description of Artificial Sequence: Synthetic oligonucleotide
  Target: ATXN2; (+) strand; PAM type: NNNNGHTT; PAM sequence: AGGTGATT
tggggagaagaagggaaatg

SEQ ID NO: 14879 - DNA, 20 bp, Artificial Sequence
  Description of Artificial Sequence: Synthetic oligonucleotide
  Target: ATXN2; (+) strand; PAM type: NNNNGHTT; PAM sequence: AAATGATT
cagaaatgaaaaagatatta

SEQ ID NO: 14880 - DNA, 20 bp, Artificial Sequence
  Description of Artificial Sequence: Synthetic oligonucleotide
  Target: ATXN2; (+) strand; PAM type: NNNNGHTT; PAM sequence: ATAAGTTT
tctaaaaataaataaataaa

SEQ ID NO: 14881 - DNA, 20 bp, Artificial Sequence
  Description of Artificial Sequence: Synthetic oligonucleotide
  Target: ATXN2; (+) strand; PAM type: NNNNGHTT; PAM sequence: ATGTGATT
tggataccccatttacccta

SEQ ID NO: 14882 - DNA, 20 bp, Artificial Sequence
  Description of Artificial Sequence: Synthetic oligonucleotide
  Target: ATXN2; (+) strand; PAM type: NNNNGHTT; PAM sequence: TGAGGTTT
gatattagcaaaataagtga

SEQ ID NO: 14883 - DNA, 20 bp, Artificial Sequence
  Description of Artificial Sequence: Synthetic oligonucleotide
  Target: ATXN2; (+) strand; PAM type: NNNNGHTT; PAM sequence: TTAAGTTT
caaaataagtgatgaggttt

SEQ ID NO: 14884 - DNA, 20 bp, Artificial Sequence
  Description of Artificial Sequence: Synthetic oligonucleotide
  Target: ATXN2; (+) strand; PAM type: NNNNGHTT; PAM sequence: AGATGATT
aaaatgctaccactggctga

SEQ ID NO: 14885 - DNA, 20 bp, Artificial Sequence
  Description of Artificial Sequence: Synthetic oligonucleotide
  Target: ATXN2; (+) strand; PAM type: NNNNGHTT; PAM sequence: AATGGTTT
agtataggcaaaccaatttc

SEQ ID NO: 14886 - DNA, 20 bp, Artificial Sequence
  Description of Artificial Sequence: Synthetic oligonucleotide
  Target: ATXN2; (+) strand; PAM type: NNNNGHTT; PAM sequence: GCAAGCTT
ttatgcaactctggcgcatc

SEQ ID NO: 14887 - DNA, 20 bp, Artificial Sequence
  Description of Artificial Sequence: Synthetic oligonucleotide
  Target: ATXN2; (+) strand; PAM type: NNNNGHTT; PAM sequence: CGGAGTTT
atatatattgccaaggactt

SEQ ID NO: 14888 - DNA, 20 bp, Artificial Sequence
  Description of Artificial Sequence: Synthetic oligonucleotide
  Target: ATXN2; (+) strand; PAM type: NNNNGHTT; PAM sequence: TGTTGCTT
ggcaaaaatcagacttttgg

SEQ ID NO: 14889 - DNA, 20 bp, Artificial Sequence
  Description of Artificial Sequence: Synthetic oligonucleotide
  Target: ATXN2; (+) strand; PAM type: NNNNGHTT; PAM sequence: AAGTGATT
aacctccatctcccaggctc

SEQ ID NO: 14890 - DNA, 20 bp, Artificial Sequence
  Description of Artificial Sequence: Synthetic oligonucleotide
  Target: ATXN2; (+) strand; PAM type: NNNNGHTT; PAM sequence: CAGGGTTT
tgtgtatttttttgtagaaa

SEQ ID NO: 14891 - DNA, 20 bp, Artificial Sequence
  Description of Artificial Sequence: Synthetic oligonucleotide
  Target: ATXN2; (+) strand; PAM type: NNNNGHTT; PAM sequence: CTAAGATT
tgtctcagcctcccaaagtg

SEQ ID NO: 14892 - DNA, 20 bp, Artificial Sequence
  Description of Artificial Sequence: Synthetic oligonucleotide
  Target: ATXN2; (+) strand; PAM type: NNNNGHTT; PAM sequence: CGGAGTTT
ttttttcttttttttggaga

SEQ ID NO: 14893 - DNA, 20 bp, Artificial Sequence
  Description of Artificial Sequence: Synthetic oligonucleotide
  Target: ATXN2; (+) strand; PAM type: NNNNGHTT; PAM sequence: CTGGGATT
tgcctcagtcttgcgagtag

SEQ ID NO: 14894 - DNA, 20 bp, Artificial Sequence
  Description of Artificial Sequence: Synthetic oligonucleotide
  Target: ATXN2; (+) strand; PAM type: NNNNGHTT; PAM sequence: TGGGGTTT
ttttgtatttttagtagaga

SEQ ID NO: 14895 - DNA, 20 bp, Artificial Sequence
  Description of Artificial Sequence: Synthetic oligonucleotide
  Target: ATXN2; (+) strand; PAM type: NNNNGHTT; PAM sequence: CTGGGATT
cacctcagcctcccaaagtg

SEQ ID NO: 14896 - DNA, 20 bp, Artificial Sequence
  Description of Artificial Sequence: Synthetic oligonucleotide
  Target: ATXN2; (+) strand; PAM type: NNNNGHTT; PAM sequence: TTTGGCTT
aggttctaaaattaacccat

SEQ ID NO: 14897 - DNA, 20 bp, Artificial Sequence
  Description of Artificial Sequence: Synthetic oligonucleotide
  Target: ATXN2; (+) strand; PAM type: NNNNGHTT; PAM sequence: TGCAGTTT
tacagatatttgtgaacaaa

SEQ ID NO: 14898 - DNA, 20 bp, Artificial Sequence
  Description of Artificial Sequence: Synthetic oligonucleotide
  Target: ATXN2; (+) strand; PAM type: NNNNGHTT; PAM sequence: AGAAGCTT
ttactattcaaagcactgct

SEQ ID NO: 14899 - DNA, 20 bp, Artificial Sequence
  Description of Artificial Sequence: Synthetic oligonucleotide
  Target: ATXN2; (+) strand; PAM type: NNNNGHTT; PAM sequence: GTGAGTTT
ccctcttacttactagccat

SEQ ID NO: 14900 - DNA, 20 bp, Artificial Sequence
  Description of Artificial Sequence: Synthetic oligonucleotide
  Target: ATXN2; (+) strand; PAM type: NNNNGHTT; PAM sequence: GGCAGATT
ttactagccatgtgagtttg

SEQ ID NO: 14901 - DNA, 20 bp, Artificial Sequence
  Description of Artificial Sequence: Synthetic oligonucleotide
  Target: ATXN2; (+) strand; PAM type: NNNNGHTT; PAM sequence: ACTTGCTT
acagtgcagatacaaacaga

SEQ ID NO: 14902 - DNA, 20 bp, Artificial Sequence
  Description of Artificial Sequence: Synthetic oligonucleotide
  Target: ATXN2; (+) strand; PAM type: NNNNGHTT; PAM sequence: ACAAGATT
ttgcttgacagagatgttag

SEQ ID NO: 14903 - DNA, 20 bp, Artificial Sequence
  Description of Artificial Sequence: Synthetic oligonucleotide
  Target: ATXN2; (+) strand; PAM type: NNNNGHTT; PAM sequence: GACAGATT
ctctctttttttttctttga

SEQ ID NO: 14904 - DNA, 20 bp, Artificial Sequence
  Description of Artificial Sequence: Synthetic oligonucleotide
  Target: ATXN2; (+) strand; PAM type: NNNNGHTT; PAM sequence: CCTGGATT
gatcactgcaacctccacct

SEQ ID NO: 14905 - DNA, 20 bp, Artificial Sequence
  Description of Artificial Sequence: Synthetic oligonucleotide
  Target: ATXN2; (+) strand; PAM type: NNNNGHTT; PAM sequence: AAGTGATT
aacctccacctcctggattc

SEQ ID NO: 14906 - DNA, 20 bp, Artificial Sequence
  Description of Artificial Sequence: Synthetic oligonucleotide
  Target: ATXN2; (+) strand; PAM type: NNNNGHTT; PAM sequence: CTGGGATT
tgcctcagcctcctgagtag

SEQ ID NO: 14907 - DNA, 20 bp, Artificial Sequence
  Description of Artificial Sequence: Synthetic oligonucleotide
  Target: ATXN2; (+) strand; PAM type: NNNNGHTT; PAM sequence: TAGGGTTT
ttatatatttttaataaaga

SEQ ID NO: 14908 - DNA, 20 bp, Artificial Sequence
  Description of Artificial Sequence: Synthetic oligonucleotide
  Target: ATXN2; (+) strand; PAM type: NNNNGHTT; PAM sequence: TTAGGATT
cgcctcagcctcccaaagtg

SEQ ID NO: 14909 - DNA, 20 bp, Artificial Sequence
  Description of Artificial Sequence: Synthetic oligonucleotide
  Target: ATXN2; (+) strand; PAM type: NNNNGHTT; PAM sequence: GAAGGTTT
aatttaagtcaagcattaat

SEQ ID NO: 14910 - DNA, 20 bp, Artificial Sequence
  Description of Artificial Sequence: Synthetic oligonucleotide
  Target: ATXN2; (+) strand; PAM type: NNNNGHTT; PAM sequence: AAATGTTT
gaaagttgtgctgatagcta

SEQ ID NO: 14911 - DNA, 20 bp, Artificial Sequence
  Description of Artificial Sequence: Synthetic oligonucleotide
  Target: ATXN2; (+) strand; PAM type: NNNNGHTT; PAM sequence: TAGAGATT
actgccataaggataagaca

SEQ ID NO: 14912 - DNA, 20 bp, Artificial Sequence
  Description of Artificial Sequence: Synthetic oligonucleotide
  Target: ATXN2; (+) strand; PAM type: NNNNGHTT; PAM sequence: TGCGGTTT
ttttgtatttttagtagaca

SEQ ID NO: 14913 - DNA, 20 bp, Artificial Sequence
  Description of Artificial Sequence: Synthetic oligonucleotide
  Target: ATXN2; (+) strand; PAM type: NNNNGHTT; PAM sequence: ACTGGTTT
cggtttcaccatttggtcag

SEQ ID NO: 14914 - DNA, 20 bp, Artificial Sequence
  Description of Artificial Sequence: Synthetic oligonucleotide
  Target: ATXN2; (+) strand; PAM type: NNNNGHTT; PAM sequence: GCCTGCTT
ctcctgacctcatgtgatct

SEQ ID NO: 14915 - DNA, 20 bp, Artificial Sequence
  Description of Artificial Sequence: Synthetic oligonucleotide
  Target: ATXN2; (+) strand; PAM type: NNNNGHTT; PAM sequence: CTGGGATT
tgcttgggactcccaaagtg

SEQ ID NO: 14916 - DNA, 20 bp, Artificial Sequence
  Description of Artificial Sequence: Synthetic oligonucleotide
  Target: ATXN2; (+) strand; PAM type: NNNNGHTT; PAM sequence: ATTTGTTT
tttttaattttttaataaca

SEQ ID NO: 14917 - DNA, 20 bp, Artificial Sequence
  Description of Artificial Sequence: Synthetic oligonucleotide
  Target: ATXN2; (+) strand; PAM type: NNNNGHTT; PAM sequence: AAGTGTTT
tgggcgtgtcacttgagtcc

SEQ ID NO: 14918 - DNA, 20 bp, Artificial Sequence
  Description of Artificial Sequence: Synthetic oligonucleotide
  Target: ATXN2; (+) strand; PAM type: NNNNGHTT; PAM sequence: CCAAGATT
gaggctgaggctgctgtgag

SEQ ID NO: 14919 - DNA, 20 bp, Artificial Sequence
  Description of Artificial Sequence: Synthetic oligonucleotide
  Target: ATXN2; (+) strand; PAM type: NNNNGHTT; PAM sequence: GCGAGATT
cctccagcctaagcaaaaga

SEQ ID NO: 14920 - DNA, 20 bp, Artificial Sequence
  Description of Artificial Sequence: Synthetic oligonucleotide
  Target: ATXN2; (+) strand; PAM type: NNNNGHTT; PAM sequence: TAATGATT
cccagaagagtaataaacct

SEQ ID NO: 14921 - DNA, 20 bp, Artificial Sequence
  Description of Artificial Sequence: Synthetic oligonucleotide
  Target: ATXN2; (+) strand; PAM type: NNNNGHTT; PAM sequence: AAAAGCTT
attttcttagatacgacacc

SEQ ID NO: 14922 - DNA, 20 bp, Artificial Sequence
  Description of Artificial Sequence: Synthetic oligonucleotide
  Target: ATXN2; (+) strand; PAM type: NNNNGHTT; PAM sequence: TTGTGCTT
ttcatcaaaattaaaaattt

SEQ ID NO: 14923 - DNA, 20 bp, Artificial Sequence
  Description of Artificial Sequence: Synthetic oligonucleotide
  Target: ATXN2; (+) strand; PAM type: NNNNGHTT; PAM sequence: TAAAGATT
aactcaatttttaaaatggg

SEQ ID NO: 14924 - DNA, 20 bp, Artificial Sequence
  Description of Artificial Sequence: Synthetic oligonucleotide
  Target: ATXN2; (+) strand; PAM type: NNNNGHTT; PAM sequence: AATAGCTT
atagtgtagatatcttggca

SEQ ID NO: 14925 - DNA, 20 bp, Artificial Sequence
  Description of Artificial Sequence: Synthetic oligonucleotide
  Target: ATXN2; (+) strand; PAM type: NNNNGHTT; PAM sequence: TCATGTTT
acgagaaaaaaactgcacac

SEQ ID NO: 14926 - DNA, 20 bp, Artificial Sequence
  Description of Artificial Sequence: Synthetic oligonucleotide
  Target: ATXN2; (+) strand; PAM type: NNNNGHTT; PAM sequence: AACTGATT
gaacaccacaaatagctaca

SEQ ID NO: 14927 - DNA, 20 bp, Artificial Sequence
  Description of Artificial Sequence: Synthetic oligonucleotide
  Target: ATXN2; (+) strand; PAM type: NNNNGHTT; PAM sequence: AGTAGATT
gcccatccatagagacagaa

SEQ ID NO: 14928 - DNA, 20 bp, Artificial Sequence
  Description of Artificial Sequence: Synthetic oligonucleotide
  Target: ATXN2; (+) strand; PAM type: NNNNGHTT; PAM sequence: GGTTGCTT
gagacagaaagtagattaac

SEQ ID NO: 14929 - DNA, 20 bp, Artificial Sequence
  Description of Artificial Sequence: Synthetic oligonucleotide
  Target: ATXN2; (+) strand; PAM type: NNNNGHTT; PAM sequence: CGGGGTTT
aacgactgctaaactgggca

SEQ ID NO: 14930 - DNA, 20 bp, Artificial Sequence
  Description of Artificial Sequence: Synthetic oligonucleotide
  Target: ATXN2; (+) strand; PAM type: NNNNGHTT; PAM sequence: GTATGTTT
gtttcttttgggggtgaaga

SEQ ID NO: 14931 - DNA, 20 bp, Artificial Sequence
  Description of Artificial Sequence: Synthetic oligonucleotide
  Target: ATXN2; (+) strand; PAM type: NNNNGHTT; PAM sequence: CACTGATT
attgtgaatattttaaaaac

SEQ ID NO: 14932 - DNA, 20 bp, Artificial Sequence
  Description of Artificial Sequence: Synthetic oligonucleotide
  Target: ATXN2; (+) strand; PAM type: NNNNGHTT; PAM sequence: GGTTGATT
ctgatttatacactttaaat

SEQ ID NO: 14933 - DNA, 20 bp, Artificial Sequence
  Description of Artificial Sequence: Synthetic oligonucleotide
  Target: ATXN2; (+) strand; PAM type: NNNNGHTT; PAM sequence: CACTGATT
aattatatctcattaaaaac

SEQ ID NO: 14934 - DNA, 20 bp, Artificial Sequence
  Description of Artificial Sequence: Synthetic oligonucleotide
  Target: ATXN2; (+) strand; PAM type: NNNNGHTT; PAM sequence: AACGGTTT
ccactgatttatacacttta

SEQ ID NO: 14935 - DNA, 20 bp, Artificial Sequence
  Description of Artificial Sequence: Synthetic oligonucleotide
  Target: ATXN2; (+) strand; PAM type: NNNNGHTT; PAM sequence: ACATGCTT
ttataaaaacatgctaattc

SEQ ID NO: 14936 - DNA, 20 bp, Artificial Sequence
  Description of Artificial Sequence: Synthetic oligonucleotide
  Target: ATXN2; (+) strand; PAM type: NNNNGHTT; PAM sequence: AAATGTTT
attcacatgcttcaaagtag

SEQ ID NO: 14937 - DNA, 20 bp, Artificial Sequence
  Description of Artificial Sequence: Synthetic oligonucleotide
  Target: ATXN2; (+) strand; PAM type: NNNNGHTT; PAM sequence: GCCTGATT
cggctcactgcaacctccct

SEQ ID NO: 14938 - DNA, 20 bp, Artificial Sequence
  Description of Artificial Sequence: Synthetic oligonucleotide
  Target: ATXN2; (+) strand; PAM type: NNNNGHTT; PAM sequence: CTGTGATT
tgcctcagcctgcctagtgc

SEQ ID NO: 14939 - DNA, 20 bp, Artificial Sequence
  Description of Artificial Sequence: Synthetic oligonucleotide
  Target: ATXN2; (+) strand; PAM type: NNNNGHTT; PAM sequence: ACTGGTTT
ggcccgcgccgccacgcctg

SEQ ID NO: 14940 - DNA, 20 bp, Artificial Sequence
  Description of Artificial Sequence: Synthetic oligonucleotide
  Target: ATXN2; (+) strand; PAM type: NNNNGHTT; PAM sequence: CGGGGTTT
tcgtatttttttggtggaga

SEQ ID NO: 14941 - DNA, 20 bp, Artificial Sequence
  Description of Artificial Sequence: Synthetic oligonucleotide
  Target: ATXN2; (+) strand; PAM type: NNNNGHTT; PAM sequence: CCGGGATT
agcctcggcctcccgaggtg

SEQ ID NO: 14942 - DNA, 20 bp, Artificial Sequence
  Description of Artificial Sequence: Synthetic oligonucleotide
  Target: ATXN2; (+) strand; PAM type: NNNNGHTT; PAM sequence: CCGAGATT
tgccttggcctcccaaagtg

SEQ ID NO: 14943 - DNA, 20 bp, Artificial Sequence
  Description of Artificial Sequence: Synthetic oligonucleotide
  Target: ATXN2; (+) strand; PAM type: NNNNGHTT; PAM sequence: AACAGCTT
cccgtctgggaggtgtaccc

SEQ ID NO: 14944 - DNA, 20 bp, Artificial Sequence
  Description of Artificial Sequence: Synthetic oligonucleotide
  Target: ATXN2; (+) strand; PAM type: NNNNGHTT; PAM sequence: GGCGGCTT
gaacgggccatgatgacaat

SEQ ID NO: 14945 - DNA, 20 bp, Artificial Sequence
  Description of Artificial Sequence: Synthetic oligonucleotide
  Target: ATXN2; (+) strand; PAM type: NNNNGHTT; PAM sequence: AAAAGATT
gaaaagggggaaaggtgggg

SEQ ID NO: 14946 - DNA, 20 bp, Artificial Sequence
  Description of Artificial Sequence: Synthetic oligonucleotide
  Target: ATXN2; (+) strand; PAM type: NNNNGHTT; PAM sequence: GAAAGATT
ttcattttgttctgtactaa

SEQ ID NO: 14947 - DNA, 20 bp, Artificial Sequence
  Description of Artificial Sequence: Synthetic oligonucleotide
  Target: ATXN2; (+) strand; PAM type: NNNNGHTT; PAM sequence: AATGGATT
tgctgtgtcactcagggtta

SEQ ID NO: 14948 - DNA, 20 bp, Artificial Sequence
  Description of Artificial Sequence: Synthetic oligonucleotide
  Target: ATXN2; (+) strand; PAM type: NNNNGHTT; PAM sequence: ATGTGCTT
tggattaagggcggtgcaag

SEQ ID NO: 14949 - DNA, 20 bp, Artificial Sequence
  Description of Artificial Sequence: Synthetic oligonucleotide
  Target: ATXN2; (+) strand; PAM type: NNNNGHTT; PAM sequence: AGATGCTT
caagatgtgctttgttaaac

SEQ ID NO: 14950 - DNA, 20 bp, Artificial Sequence
  Description of Artificial Sequence: Synthetic oligonucleotide
  Target: ATXN2; (+) strand; PAM type: NNNNGHTT; PAM sequence: TTAAGATT
aaaaagactttatagcaaat

SEQ ID NO: 14951 - DNA, 20 bp, Artificial Sequence
  Description of Artificial Sequence: Synthetic oligonucleotide
  Target: ATXN2; (+) strand; PAM type: NNNNGHTT; PAM sequence: AGGAGTTT
aggaggggcagatacataag

SEQ ID NO: 14952 - DNA, 20 bp, Artificial Sequence
  Description of Artificial Sequence: Synthetic oligonucleotide
  Target: ATXN2; (+) strand; PAM type: NNNNGHTT; PAM sequence: GAATGCTT
agaggagtttaactgtgtta

SEQ ID NO: 14953 - DNA, 20 bp, Artificial Sequence
  Description of Artificial Sequence: Synthetic oligonucleotide
  Target: ATXN2; (+) strand; PAM type: NNNNGHTT; PAM sequence: TATTGTTT
tatcatttgtatgtgttaac

SEQ ID NO: 14954 - DNA, 20 bp, Artificial Sequence
  Description of Artificial Sequence: Synthetic oligonucleotide
  Target: ATXN2; (+) strand; PAM type: NNNNGHTT; PAM sequence: AAGCGATT
aacctctgtctcctgggttc

SEQ ID NO: 14955 - DNA, 20 bp, Artificial Sequence
  Description of Artificial Sequence: Synthetic oligonucleotide
  Target: ATXN2; (+) strand; PAM type: NNNNGHTT; PAM sequence: CTGGGATT
tgcctcagcctgccaagtag

SEQ ID NO: 14956 - DNA, 20 bp, Artificial Sequence
  Description of Artificial Sequence: Synthetic oligonucleotide
  Target: ATXN2; (+) strand; PAM type: NNNNGHTT; PAM sequence: CAGGGTTT
ttttctatttttggtcaaga

SEQ ID NO: 14957 - DNA, 20 bp, Artificial Sequence
  Description of Artificial Sequence: Synthetic oligonucleotide
  Target: ATXN2; (+) strand; PAM type: NNNNGHTT; PAM sequence: CTAGGATT
cacctcggcctcccaaagtg

SEQ ID NO: 14958 - DNA, 20 bp, Artificial Sequence
  Description of Artificial Sequence: Synthetic oligonucleotide
  Target: ATXN2; (+) strand; PAM type: NNNNGHTT; PAM sequence: TTTAGATT
ctttttttaaaaggctggta

SEQ ID NO: 14959 - DNA, 20 bp, Artificial Sequence
  Description of Artificial Sequence: Synthetic oligonucleotide
  Target: ATXN2; (+) strand; PAM type: NNNNGHTT; PAM sequence: CTAAGTTT
agattttcctttctaagaag

SEQ ID NO: 14960 - DNA, 20 bp, Artificial Sequence
  Description of Artificial Sequence: Synthetic oligonucleotide
  Target: ATXN2; (+) strand; PAM type: NNNNGHTT; PAM sequence: AGAAGATT
ttctaagaagctaagtttca

SEQ ID NO: 14961 - DNA, 20 bp, Artificial Sequence
  Description of Artificial Sequence: Synthetic oligonucleotide
  Target: ATXN2; (+) strand; PAM type: NNNNGHTT; PAM sequence: GAAAGATT
gacagagaaataatgttaca

SEQ ID NO: 14962 - DNA, 20 bp, Artificial Sequence
  Description of Artificial Sequence: Synthetic oligonucleotide
  Target: ATXN2; (+) strand; PAM type: NNNNGHTT; PAM sequence: ACTAGATT
gtacatcttccatttgccac

SEQ ID NO: 14963 - DNA, 20 bp, Artificial Sequence
  Description of Artificial Sequence: Synthetic oligonucleotide
  Target: ATXN2; (+) strand; PAM type: NNNNGHTT; PAM sequence: TCTAGCTT
ttggccttgctctactaata

SEQ ID NO: 14964 - DNA, 20 bp, Artificial Sequence
  Description of Artificial Sequence: Synthetic oligonucleotide
  Target: ATXN2; (+) strand; PAM type: NNNNGHTT; PAM sequence: GGTGGTTT
caaatagtaagctgtgctat

SEQ ID NO: 14965 - DNA, 20 bp, Artificial Sequence
  Description of Artificial Sequence: Synthetic oligonucleotide
  Target: ATXN2; (+) strand; PAM type: NNNNGHTT; PAM sequence: TCATGATT
catattgttgttaccaaatc

SEQ ID NO: 14966 - DNA, 20 bp, Artificial Sequence
  Description of Artificial Sequence: Synthetic oligonucleotide
  Target: ATXN2; (+) strand; PAM type: NNNNGHTT; PAM sequence: TTCTGCTT
caaagaccactttaaaaatg

SEQ ID NO: 14967 - DNA, 20 bp, Artificial Sequence
  Description of Artificial Sequence: Synthetic oligonucleotide
  Target: ATXN2; (+) strand; PAM type: NNNNGHTT; PAM sequence: TATGGTTT
aatgttctgctttctacata

SEQ ID NO: 14968 - DNA, 20 bp, Artificial Sequence
  Description of Artificial Sequence: Synthetic oligonucleotide
  Target: ATXN2; (+) strand; PAM type: NNNNGHTT; PAM sequence: TGATGTTT
tgctttctacatatatggtt

SEQ ID NO: 14969 - DNA, 20 bp, Artificial Sequence
  Description of Artificial Sequence: Synthetic oligonucleotide
  Target: ATXN2; (+) strand; PAM type: NNNNGHTT; PAM sequence: TAATGCTT
ataaatagataaatctttag

SEQ ID NO: 14970 - DNA, 20 bp, Artificial Sequence
  Description of Artificial Sequence: Synthetic oligonucleotide
  Target: ATXN2; (+) strand; PAM type: NNNNGHTT; PAM sequence: ATCTGTTT
taaatttctttaaatcatca

SEQ ID NO: 14971 - DNA, 20 bp, Artificial Sequence
  Description of Artificial Sequence: Synthetic oligonucleotide
  Target: ATXN2; (+) strand; PAM type: NNNNGHTT; PAM sequence: ACAGGTTT
aaattaagaactgttaagac

SEQ ID NO: 14972 - DNA, 20 bp, Artificial Sequence
  Description of Artificial Sequence: Synthetic oligonucleotide
  Target: ATXN2; (+) strand; PAM type: NNNNGHTT; PAM sequence: TTTGGATT
aaataatttcaaatattaaa

SEQ ID NO: 14973 - DNA, 20 bp, Artificial Sequence
  Description of Artificial Sequence: Synthetic oligonucleotide
  Target: ATXN2; (+) strand; PAM type: NNNNGHTT; PAM sequence: TTAAGCTT
acttcttcctattcctacag

SEQ ID NO: 14974 - DNA, 20 bp, Artificial Sequence
  Description of Artificial Sequence: Synthetic oligonucleotide
  Target: ATXN2; (+) strand; PAM type: NNNNGHTT; PAM sequence: CTTTGTTT
atgactctttaaactctaac

SEQ ID NO: 14975 - DNA, 20 bp, Artificial Sequence
  Description of Artificial Sequence: Synthetic oligonucleotide
  Target: ATXN2; (+) strand; PAM type: NNNNGHTT; PAM sequence: TTCAGCTT
tttaaactctaacctttgtt

SEQ ID NO: 14976 - DNA, 20 bp, Artificial Sequence
  Description of Artificial Sequence: Synthetic oligonucleotide
  Target: ATXN2; (+) strand; PAM type: NNNNGHTT; PAM sequence: TGATGTTT
tcagcttttgagaagctagg

SEQ ID NO: 14977 - DNA, 20 bp, Artificial Sequence
  Description of Artificial Sequence: Synthetic oligonucleotide
  Target: ATXN2; (+) strand; PAM type: NNNNGHTT; PAM sequence: TTGGGTTT
agaagctaggtgatgtttca

SEQ ID NO: 14978 - DNA, 20 bp, Artificial Sequence
  Description of Artificial Sequence: Synthetic oligonucleotide
  Target: ATXN2; (+) strand; PAM type: NNNNGHTT; PAM sequence: TTTTGATT
aagaaaacactgaacaataa

SEQ ID NO: 14979 - DNA, 20 bp, Artificial Sequence
  Description of Artificial Sequence: Synthetic oligonucleotide
  Target: ATXN2; (+) strand; PAM type: NNNNGHTT; PAM sequence: CTATGTTT
tgaacaataattttgatttc

SEQ ID NO: 14980 - DNA, 20 bp, Artificial Sequence
  Description of Artificial Sequence: Synthetic oligonucleotide
  Target: ATXN2; (+) strand; PAM type: NNNNGHTT; PAM sequence: TAATGCTT
tttcctatgtttttggaaaa

SEQ ID NO: 14981 - DNA, 20 bp, Artificial Sequence
  Description of Artificial Sequence: Synthetic oligonucleotide
  Target: ATXN2; (+) strand; PAM type: NNNNGHTT; PAM sequence: AGAGGCTT
aataatgctttcatttaaac

SEQ ID NO: 14982 - DNA, 20 bp, Artificial Sequence
  Description of Artificial Sequence: Synthetic oligonucleotide
  Target: ATXN2; (+) strand; PAM type: NNNNGHTT; PAM sequence: CTGAGATT
tctaacattcaatttcacag

SEQ ID NO: 14983 - DNA, 20 bp, Artificial Sequence
  Description of Artificial Sequence: Synthetic oligonucleotide
  Target: ATXN2; (+) strand; PAM type: NNNNGHTT; PAM sequence: AACAGCTT
gcagctggaataggcatggc

SEQ ID NO: 14984 - DNA, 20 bp, Artificial Sequence
  Description of Artificial Sequence: Synthetic oligonucleotide
  Target: ATXN2; (+) strand; PAM type: NNNNGHTT; PAM sequence: ACCAGCTT
acagcttcagttggaataat

SEQ ID NO: 14985 - DNA, 20 bp, Artificial Sequence
  Description of Artificial Sequence: Synthetic oligonucleotide
  Target: ATXN2; (+) strand; PAM type: NNNNGHTT; PAM sequence: ATGAGTTT
tgtctgggagacctgggtct

SEQ ID NO: 14986 - DNA, 20 bp, Artificial Sequence
  Description of Artificial Sequence: Synthetic oligonucleotide
  Target: ATXN2; (+) strand; PAM type: NNNNGHTT; PAM sequence: AGAGGCTT
ttcaaatgttacttcctaaa

SEQ ID NO: 14987 - DNA, 20 bp, Artificial Sequence
  Description of Artificial Sequence: Synthetic oligonucleotide
  Target: ATXN2; (+) strand; PAM type: NNNNGHTT; PAM sequence: TCAGGCTT
gttacttcctaaaagaggct

SEQ ID NO: 14988 - DNA, 20 bp, Artificial Sequence
  Description of Artificial Sequence: Synthetic oligonucleotide
  Target: ATXN2; (+) strand; PAM type: NNNNGHTT; PAM sequence: TACTGTTT
gcccttaccctttatcccat

SEQ ID NO: 14989 - DNA, 20 bp, Artificial Sequence
  Description of Artificial Sequence: Synthetic oligonucleotide
  Target: ATXN2; (+) strand; PAM type: NNNNGHTT; PAM sequence: GTATGATT
agcagcaattactaacataa

SEQ ID NO: 14990 - DNA, 20 bp, Artificial Sequence
  Description of Artificial Sequence: Synthetic oligonucleotide
  Target: ATXN2; (+) strand; PAM type: NNNNGHTT; PAM sequence: AAGTGATT
ctctcctaactaaatgtatc

SEQ ID NO: 14991 - DNA, 20 bp, Artificial Sequence
  Description of Artificial Sequence: Synthetic oligonucleotide
  Target: ATXN2; (+) strand; PAM type: NNNNGHTT; PAM sequence: CTGGGATT
tgcctcagcctctggagtag

SEQ ID NO: 14992 - DNA, 20 bp, Artificial Sequence
  Description of Artificial Sequence: Synthetic oligonucleotide
  Target: ATXN2; (+) strand; PAM type: NNNNGHTT; PAM sequence: CGGGGTTT
ttttgtatttttagtagaga

SEQ ID NO: 14993 - DNA, 20 bp, Artificial Sequence
  Description of Artificial Sequence: Synthetic oligonucleotide
  Target: ATXN2; (+) strand; PAM type: NNNNGHTT; PAM sequence: CTGGGATT
taccttggcctcccaaagtg

SEQ ID NO: 14994 - DNA, 20 bp, Artificial Sequence
  Description of Artificial Sequence: Synthetic oligonucleotide
  Target: ATXN2; (+) strand; PAM type: NNNNGHTT; PAM sequence: CAGGGTTT
aaaggggaagataataaaag

SEQ ID NO: 14995 - DNA, 20 bp, Artificial Sequence
  Description of Artificial Sequence: Synthetic oligonucleotide
  Target: ATXN2; (+) strand; PAM type: NNNNGHTT; PAM sequence: ATAGGTTT
gacttccaagtatatatcta

SEQ ID NO: 14996 - DNA, 20 bp, Artificial Sequence
  Description of Artificial Sequence: Synthetic oligonucleotide
  Target: ATXN2; (+) strand; PAM type: NNNNGHTT; PAM sequence: CTCAGATT
ttataaacctaactgcagag

SEQ ID NO: 14997 - DNA, 20 bp, Artificial Sequence
  Description of Artificial Sequence: Synthetic oligonucleotide
  Target: ATXN2; (+) strand; PAM type: NNNNGHTT; PAM sequence: AAAGGTTT
taactgcagagctcagattc

SEQ ID NO: 14998 - DNA, 20 bp, Artificial Sequence
  Description of Artificial Sequence: Synthetic oligonucleotide
  Target: ATXN2; (+) strand; PAM type: NNNNGHTT; PAM sequence: GTTCGATT
tcaaaggtttagagaaaatg

SEQ ID NO: 14999 - DNA, 20 bp, Artificial Sequence
  Description of Artificial Sequence: Synthetic oligonucleotide
  Target: ATXN2; (+) strand; PAM type: NNNNGHTT; PAM sequence: CAGTGTTT
atggttcgattatttcattt

SEQ ID NO: 15000 - DNA, 20 bp, Artificial Sequence
  Description of Artificial Sequence: Synthetic oligonucleotide
  Target: ATXN2; (+) strand; PAM type: NNNNGHTT; PAM sequence: CTATGCTT
ttctgagtgtatctccaaaa

SEQ ID NO: 15001 - DNA, 20 bp, Artificial Sequence
  Description of Artificial Sequence: Synthetic oligonucleotide
  Target: ATXN2; (+) strand; PAM type: NNNNGHTT; PAM sequence: AAAAGATT
cagaccatctaagtaatgtc

SEQ ID NO: 15002 - DNA, 20 bp, Artificial Sequence
  Description of Artificial Sequence: Synthetic oligonucleotide
  Target: ATXN2; (+) strand; PAM type: NNNNGHTT; PAM sequence: AGCAGATT
aagattaacagaatagctga

SEQ ID NO: 15003 - DNA, 20 bp, Artificial Sequence
  Description of Artificial Sequence: Synthetic oligonucleotide
  Target: ATXN2; (+) strand; PAM type: NNNNGHTT; PAM sequence: CTGGGATT
tgcctcagcctcctgagcag

SEQ ID NO: 15004 - DNA, 20 bp, Artificial Sequence
  Description of Artificial Sequence: Synthetic oligonucleotide
  Target: ATXN2; (+) strand; PAM type: NNNNGHTT; PAM sequence: CGACGTTT
ttttgtatttttagtagaga

SEQ ID NO: 15005 - DNA, 20 bp, Artificial Sequence
  Description of Artificial Sequence: Synthetic oligonucleotide
  Target: ATXN2; (+) strand; PAM type: NNNNGHTT; PAM sequence: CTGGGATT
cgcctcagcctccccaagtg

SEQ ID NO: 15006 - DNA, 20 bp, Artificial Sequence
  Description of Artificial Sequence: Synthetic oligonucleotide
  Target: ATXN2; (+) strand; PAM type: NNNNGHTT; PAM sequence: AGAAGATT
cactgcgcctgaccggctga

SEQ ID NO: 15007 - DNA, 20 bp, Artificial Sequence
  Description of Artificial Sequence: Synthetic oligonucleotide
  Target: ATXN2; (+) strand; PAM type: NNNNGHTT; PAM sequence: TTTTGTTT
ctgaagaagatttttaaaat

SEQ ID NO: 15008 - DNA, 20 bp, Artificial Sequence
  Description of Artificial Sequence: Synthetic oligonucleotide
  Target: ATXN2; (+) strand; PAM type: NNNNGHTT; PAM sequence: AACAGATT
agaaatgtatagcaactaaa

SEQ ID NO: 15009 - DNA, 20 bp, Artificial Sequence
  Description of Artificial Sequence: Synthetic oligonucleotide
  Target: ATXN2; (+) strand; PAM type: NNNNGHTT; PAM sequence: CTGAGTTT
taaaaacagatttaacacag

SEQ ID NO: 15010 - DNA, 20 bp, Artificial Sequence
  Description of Artificial Sequence: Synthetic oligonucleotide
  Target: ATXN2; (+) strand; PAM type: NNNNGHTT; PAM sequence: TTTTGTTT
acagatttaacacagctgag

SEQ ID NO: 15011 - DNA, 20 bp, Artificial Sequence
  Description of Artificial Sequence: Synthetic oligonucleotide
  Target: ATXN2; (+) strand; PAM type: NNNNGHTT; PAM sequence: TTTTGTTT
ttaacacagctgagttttgt

SEQ ID NO: 15012 - DNA, 20 bp, Artificial Sequence
  Description of Artificial Sequence: Synthetic oligonucleotide
  Target: ATXN2; (+) strand; PAM type: NNNNGHTT; PAM sequence: TTAAGCTT
tgagttttgtttttgtttcc

SEQ ID NO: 15013 - DNA, 20 bp, Artificial Sequence
  Description of Artificial Sequence: Synthetic oligonucleotide
  Target: ATXN2; (+) strand; PAM type: NNNNGHTT; PAM sequence: TCTTGTTT
tgtttccttaagcttgaaga

SEQ ID NO: 15014 - DNA, 20 bp, Artificial Sequence
  Description of Artificial Sequence: Synthetic oligonucleotide
  Target: ATXN2; (+) strand; PAM type: NNNNGHTT; PAM sequence: TAGAGTTT
cttttttcttttttttgaga

SEQ ID NO: 15015 - DNA, 20 bp, Artificial Sequence
  Description of Artificial Sequence: Synthetic oligonucleotide
  Target: ATXN2; (+) strand; PAM type: NNNNGHTT; PAM sequence: AAATGATT
aaccttcacctcctgggttc

SEQ ID NO: 15016 - DNA, 20 bp, Artificial Sequence
  Description of Artificial Sequence: Synthetic oligonucleotide
  Target: ATXN2; (+) strand; PAM type: NNNNGHTT; PAM sequence: TGGGGTTT
ttttgtatttttagtagaga

SEQ ID NO: 15017 - DNA, 20 bp, Artificial Sequence
  Description of Artificial Sequence: Synthetic oligonucleotide
  Target: ATXN2; (+) strand; PAM type: NNNNGHTT; PAM sequence: CTGGGATT
cacctcagcctcccaaagtg

SEQ ID NO: 15018 - DNA, 20 bp, Artificial Sequence
  Description of Artificial Sequence: Synthetic oligonucleotide
  Target: ATXN2; (+) strand; PAM type: NNNNGHTT; PAM sequence: TCTTGTTT
gagccacagcaactggccga

SEQ ID NO: 15019 - DNA, 20 bp, Artificial Sequence
  Description of Artificial Sequence: Synthetic oligonucleotide
  Target: ATXN2; (+) strand; PAM type: NNNNGHTT; PAM sequence: GACTGATT
tttcttttaaaggttctctg

SEQ ID NO: 15020 - DNA, 20 bp, Artificial Sequence
  Description of Artificial Sequence: Synthetic oligonucleotide
  Target: ATXN2; (+) strand; PAM type: NNNNGHTT; PAM sequence: AAGTGTTT
tggactgattaaaagagaaa

SEQ ID NO: 15021 - DNA, 20 bp, Artificial Sequence
  Description of Artificial Sequence: Synthetic oligonucleotide
  Target: ATXN2; (+) strand; PAM type: NNNNGHTT; PAM sequence: TTTTGTTT
taaaagagaaaaagtgtttt

SEQ ID NO: 15022 - DNA, 20 bp, Artificial Sequence
  Description of Artificial Sequence: Synthetic oligonucleotide
  Target: ATXN2; (+) strand; PAM type: NNNNGHTT; PAM sequence: GTTTGTTT
agagaaaaagtgtttttttt

SEQ ID NO: 15023 - DNA, 20 bp, Artificial Sequence
  Description of Artificial Sequence: Synthetic oligonucleotide
  Target: ATXN2; (+) strand; PAM type: NNNNGHTT; PAM sequence: GTTTGTTT
aaaaagtgttttttttgttt

SEQ ID NO: 15024 - DNA, 20 bp, Artificial Sequence
  Description of Artificial Sequence: Synthetic oligonucleotide
  Target: ATXN2; (+) strand; PAM type: NNNNGHTT; PAM sequence: GTTTGTTT
agtgttttttttgtttgttt

SEQ ID NO: 15025 - DNA, 20 bp, Artificial Sequence
  Description of Artificial Sequence: Synthetic oligonucleotide
  Target: ATXN2; (+) strand; PAM type: NNNNGHTT; PAM sequence: GTTTGTTT
ttttttttgtttgtttgttt

SEQ ID NO: 15026 - DNA, 20 bp, Artificial Sequence
  Description of Artificial Sequence: Synthetic oligonucleotide
  Target: ATXN2; (+) strand; PAM type: NNNNGHTT; PAM sequence: TCTTGCTT
tttaagtattctttgtaagc

SEQ ID NO: 15027 - DNA, 20 bp, Artificial Sequence
  Description of Artificial Sequence: Synthetic oligonucleotide
  Target: ATXN2; (+) strand; PAM type: NNNNGHTT; PAM sequence: GACTGATT
tatgggaacaaagcactaag

SEQ ID NO: 15028 - DNA, 20 bp, Artificial Sequence
  Description of Artificial Sequence: Synthetic oligonucleotide
  Target: ATXN2; (+) strand; PAM type: NNNNGHTT; PAM sequence: TCTAGTTT
attgtaaaatcatgtcaacg

SEQ ID NO: 15029 - DNA, 20 bp, Artificial Sequence
  Description of Artificial Sequence: Synthetic oligonucleotide
  Target: ATXN2; (+) strand; PAM type: NNNNGHTT; PAM sequence: CTCCGCTT
tgatctcagctaactgcaag

SEQ ID NO: 15030 - DNA, 20 bp, Artificial Sequence
  Description of Artificial Sequence: Synthetic oligonucleotide
  Target: ATXN2; (+) strand; PAM type: NNNNGHTT; PAM sequence: CGGGGTTT
ttttgtacttttagtaggga

SEQ ID NO: 15031 - DNA, 20 bp, Artificial Sequence
  Description of Artificial Sequence: Synthetic oligonucleotide
  Target: ATXN2; (+) strand; PAM type: NNNNGHTT; PAM sequence: CTGGGATT
cacctcagcctcccaaagtg

SEQ ID NO: 15032 - DNA, 20 bp, Artificial Sequence
  Description of Artificial Sequence: Synthetic oligonucleotide
  Target: ATXN2; (+) strand; PAM type: NNNNGHTT; PAM sequence: AAATGTTT
ctacaatgtaagccaaaaat

SEQ ID NO: 15033 - DNA, 20 bp, Artificial Sequence
  Description of Artificial Sequence: Synthetic oligonucleotide
  Target: ATXN2; (+) strand; PAM type: NNNNGHTT; PAM sequence: CTGTGTTT
cctccaaatagtgttacata

SEQ ID NO: 15034 - DNA, 20 bp, Artificial Sequence
  Description of Artificial Sequence: Synthetic oligonucleotide
  Target: ATXN2; (+) strand; PAM type: NNNNGHTT; PAM sequence: TATAGTTT
agaggtactttacaaaactt

SEQ ID NO: 15035 - DNA, 20 bp, Artificial Sequence
  Description of Artificial Sequence: Synthetic oligonucleotide
  Target: ATXN2; (+) strand; PAM type: NNNNGHTT; PAM sequence: ACTTGCTT
aacttcagaatgagtgtctg

SEQ ID NO: 15036 - DNA, 20 bp, Artificial Sequence
  Description of Artificial Sequence: Synthetic oligonucleotide
  Target: ATXN2; (+) strand; PAM type: NNNNGHTT; PAM sequence: ATGGGTTT
gtagagcccagaataaaaat

SEQ ID NO: 15037 - DNA, 20 bp, Artificial Sequence
  Description of Artificial Sequence: Synthetic oligonucleotide
  Target: ATXN2; (+) strand; PAM type: NNNNGHTT; PAM sequence: TGGTGATT
aatatgggtttcccaattcc

SEQ ID NO: 15038 - DNA, 20 bp, Artificial Sequence
  Description of Artificial Sequence: Synthetic oligonucleotide
  Target: ATXN2; (+) strand; PAM type: NNNNGHTT; PAM sequence: AGCTGCTT
gtccttgctactggaggagt

SEQ ID NO: 15039 - DNA, 20 bp, Artificial Sequence
  Description of Artificial Sequence: Synthetic oligonucleotide
  Target: ATXN2; (+) strand; PAM type: NNNNGHTT; PAM sequence: CTGTGATT
aacccctcccagcagaaact

SEQ ID NO: 15040 - DNA, 20 bp, Artificial Sequence
  Description of Artificial Sequence: Synthetic oligonucleotide
  Target: ATXN2; (+) strand; PAM type: NNNNGHTT; PAM sequence: TACAGTTT
gcacacacactcactcactc

SEQ ID NO: 15041 - DNA, 20 bp, Artificial Sequence
  Description of Artificial Sequence: Synthetic oligonucleotide
  Target: ATXN2; (+) strand; PAM type: NNNNGHTT; PAM sequence: CAAAGTTT
aattattttgtggaatgcca

SEQ ID NO: 15042 - DNA, 20 bp, Artificial Sequence
  Description of Artificial Sequence: Synthetic oligonucleotide
  Target: ATXN2; (+) strand; PAM type: NNNNGHTT; PAM sequence: ATCTGTTT
ctcttaaaagaactgtagca

SEQ ID NO: 15043 - DNA, 20 bp, Artificial Sequence
  Description of Artificial Sequence: Synthetic oligonucleotide
  Target: ATXN2; (+) strand; PAM type: NNNNGHTT; PAM sequence: TTTAGTTT
ttcttaaatttctctaaaat

SEQ ID NO: 15044 - DNA, 20 bp, Artificial Sequence
  Description of Artificial Sequence: Synthetic oligonucleotide
  Target: ATXN2; (+) strand; PAM type: NNNNGHTT; PAM sequence: CTCGGCTT
catgatcatcaattttaaaa

SEQ ID NO: 15045 - DNA, 20 bp, Artificial Sequence
  Description of Artificial Sequence: Synthetic oligonucleotide
  Target: ATXN2; (+) strand; PAM type: NNNNGHTT; PAM sequence: AGCAGTTT
acagtaagcagtaacctgta

SEQ ID NO: 15046 - DNA, 20 bp, Artificial Sequence
  Description of Artificial Sequence: Synthetic oligonucleotide
  Target: ATXN2; (+) strand; PAM type: NNNNGHTT; PAM sequence: TTAGGCTT
agtaacctgtaagcagtttc

SEQ ID NO: 15047 - DNA, 20 bp, Artificial Sequence
  Description of Artificial Sequence: Synthetic oligonucleotide
  Target: ATXN2; (+) strand; PAM type: NNNNGHTT; PAM sequence: TATTGATT
gaattgtcaaaattctacat

SEQ ID NO: 15048 - DNA, 20 bp, Artificial Sequence
  Description of Artificial Sequence: Synthetic oligonucleotide
  Target: ATXN2; (+) strand; PAM type: NNNNGHTT; PAM sequence: AAGTGATT
aacctctgcctcccaggttc

SEQ ID NO: 15049 - DNA, 20 bp, Artificial Sequence
  Description of Artificial Sequence: Synthetic oligonucleotide
  Target: ATXN2; (+) strand; PAM type: NNNNGHTT; PAM sequence: CGAGGTTT
ctgggtatttttagtagaga

SEQ ID NO: 15050 - DNA, 20 bp, Artificial Sequence
  Description of Artificial Sequence: Synthetic oligonucleotide
  Target: ATXN2; (+) strand; PAM type: NNNNGHTT; PAM sequence: CTGAGATT
tgcctcagcctcccaaagtg

SEQ ID NO: 15051 - DNA, 20 bp, Artificial Sequence
  Description of Artificial Sequence: Synthetic oligonucleotide
  Target: ATXN2; (+) strand; PAM type: NNNNGHTT; PAM sequence: CCTGGCTT
tacaggcgttagccaccatg

SEQ ID NO: 15052 - DNA, 20 bp, Artificial Sequence
  Description of Artificial Sequence: Synthetic oligonucleotide
  Target: ATXN2; (+) strand; PAM type: NNNNGHTT; PAM sequence: TCATGTTT
atgttcacagtcattaatga

SEQ ID NO: 15053 - DNA, 20 bp, Artificial Sequence
  Description of Artificial Sequence: Synthetic oligonucleotide
  Target: ATXN2; (+) strand; PAM type: NNNNGHTT; PAM sequence: CATCGCTT
atatattctcattaaataaa

SEQ ID NO: 15054 - DNA, 20 bp, Artificial Sequence
  Description of Artificial Sequence: Synthetic oligonucleotide
  Target: ATXN2; (+) strand; PAM type: NNNNGHTT; PAM sequence: AGATGCTT
ggaacttgctcttcaaggtt

SEQ ID NO: 15055 - DNA, 20 bp, Artificial Sequence
  Description of Artificial Sequence: Synthetic oligonucleotide
  Target: ATXN2; (+) strand; PAM type: NNNNGHTT; PAM sequence: GCCTGCTT
cagtcaaagtcatatgacct

SEQ ID NO: 15056 - DNA, 20 bp, Artificial Sequence
  Description of Artificial Sequence: Synthetic oligonucleotide
  Target: ATXN2; (+) strand; PAM type: NNNNGHTT; PAM sequence: TACAGTTT
atttatttaaaagtagccaa

SEQ ID NO: 15057 - DNA, 20 bp, Artificial Sequence
  Description of Artificial Sequence: Synthetic oligonucleotide
  Target: ATXN2; (+) strand; PAM type: NNNNGHTT; PAM sequence: ATCAGATT
taactaattttaatgaacaa

SEQ ID NO: 15058 - DNA, 20 bp, Artificial Sequence
  Description of Artificial Sequence: Synthetic oligonucleotide
  Target: ATXN2; (+) strand; PAM type: NNNNGHTT; PAM sequence: TTATGATT
gaactagtatcaaaaggaca

SEQ ID NO: 15059 - DNA, 20 bp, Artificial Sequence
  Description of Artificial Sequence: Synthetic oligonucleotide
  Target: ATXN2; (+) strand; PAM type: NNNNGHTT; PAM sequence: ACAGGTTT
aggacattatgattcagaaa

SEQ ID NO: 15060 - DNA, 20 bp, Artificial Sequence
  Description of Artificial Sequence: Synthetic oligonucleotide
  Target: ATXN2; (+) strand; PAM type: NNNNGHTT; PAM sequence: GATGGATT
tgtatttgatatgtggcaat

SEQ ID NO: 15061 - DNA, 20 bp, Artificial Sequence
  Description of Artificial Sequence: Synthetic oligonucleotide
  Target: ATXN2; (+) strand; PAM type: NNNNGHTT; PAM sequence: ACAAGATT
ccaaatactgaataagaatt

SEQ ID NO: 15062 - DNA, 20 bp, Artificial Sequence
  Description of Artificial Sequence: Synthetic oligonucleotide
  Target: ATXN2; (+) strand; PAM type: NNNNGHTT; PAM sequence: TGTCGTTT
gctaaatattcaaattcata

SEQ ID NO: 15063 - DNA, 20 bp, Artificial Sequence
  Description of Artificial Sequence: Synthetic oligonucleotide
  Target: ATXN2; (+) strand; PAM type: NNNNGHTT; PAM sequence: TCCAGATT
atctcagatcaaggacttct

SEQ ID NO: 15064 - DNA, 20 bp, Artificial Sequence
  Description of Artificial Sequence: Synthetic oligonucleotide
  Target: ATXN2; (+) strand; PAM type: NNNNGHTT; PAM sequence: GTAAGATT
ttaaagcagcctttcactat

SEQ ID NO: 15065 - DNA, 20 bp, Artificial Sequence
  Description of Artificial Sequence: Synthetic oligonucleotide
  Target: ATXN2; (+) strand; PAM type: NNNNGHTT; PAM sequence: CCCTGCTT
aaagacccagaaaacaccat

SEQ ID NO: 15066 - DNA, 20 bp, Artificial Sequence
  Description of Artificial Sequence: Synthetic oligonucleotide
  Target: ATXN2; (+) strand; PAM type: NNNNGHTT; PAM sequence: ATTTGTTT
agactggctgaagaaagttc

SEQ ID NO: 15067 - DNA, 20 bp, Artificial Sequence
  Description of Artificial Sequence: Synthetic oligonucleotide
  Target: ATXN2; (+) strand; PAM type: NNNNGHTT; PAM sequence: GAGAGTTT
cctttttaacaacaattcaa

SEQ ID NO: 15068 - DNA, 20 bp, Artificial Sequence
  Description of Artificial Sequence: Synthetic oligonucleotide
  Target: ATXN2; (+) strand; PAM type: NNNNGHTT; PAM sequence: TATAGCTT
aacaacaattcaagagagtt

SEQ ID NO: 15069 - DNA, 20 bp, Artificial Sequence
  Description of Artificial Sequence: Synthetic oligonucleotide
  Target: ATXN2; (+) strand; PAM type: NNNNGHTT; PAM sequence: AATAGTTT
atgaacaaaaggttaataga

SEQ ID NO: 15070 - DNA, 20 bp, Artificial Sequence
  Description of Artificial Sequence: Synthetic oligonucleotide
  Target: ATXN2; (+) strand; PAM type: NNNNGHTT; PAM sequence: ATGCGTTT
gtattgtaccttctgaagac

SEQ ID NO: 15071 - DNA, 20 bp, Artificial Sequence
  Description of Artificial Sequence: Synthetic oligonucleotide
  Target: ATXN2; (+) strand; PAM type: NNNNGHTT; PAM sequence: AAATGATT
gaaaaaaagtaaaatgacaa

SEQ ID NO: 15072 - DNA, 20 bp, Artificial Sequence
  Description of Artificial Sequence: Synthetic oligonucleotide
  Target: ATXN2; (+) strand; PAM type: NNNNGHTT; PAM sequence: ATTTGATT
ttaaccctttgaggacagtc

SEQ ID NO: 15073 - DNA, 20 bp, Artificial Sequence
  Description of Artificial Sequence: Synthetic oligonucleotide
  Target: ATXN2; (+) strand; PAM type: NNNNGHTT; PAM sequence: ATAAGTTT
ggacagtcatttgatttgtg

SEQ ID NO: 15074 - DNA, 20 bp, Artificial Sequence
  Description of Artificial Sequence: Synthetic oligonucleotide
  Target: ATXN2; (+) strand; PAM type: NNNNGHTT; PAM sequence: TTAAGATT
cacattttactttaacctcc

SEQ ID NO: 15075 - DNA, 20 bp, Artificial Sequence
  Description of Artificial Sequence: Synthetic oligonucleotide
  Target: ATXN2; (+) strand; PAM type: NNNNGHTT; PAM sequence: GTCTGTTT
tttaacctccttaagattaa

SEQ ID NO: 15076 - DNA, 20 bp, Artificial Sequence
  Description of Artificial Sequence: Synthetic oligonucleotide
  Target: ATXN2; (+) strand; PAM type: NNNNGHTT; PAM sequence: TCCTGCTT
gttaagactttgcctattaa

SEQ ID NO: 15077 - DNA, 20 bp, Artificial Sequence
  Description of Artificial Sequence: Synthetic oligonucleotide
  Target: ATXN2; (+) strand; PAM type: NNNNGHTT; PAM sequence: AACTGTTT
cctattaatcctgcttctat

SEQ ID NO: 15078 - DNA, 20 bp, Artificial Sequence
  Description of Artificial Sequence: Synthetic oligonucleotide
  Target: ATXN2; (+) strand; PAM type: NNNNGHTT; PAM sequence: GGTTGTTT
ataactgtttctcagtaact

SEQ ID NO: 15079 - DNA, 20 bp, Artificial Sequence
  Description of Artificial Sequence: Synthetic oligonucleotide
  Target: ATXN2; (+) strand; PAM type: NNNNGHTT; PAM sequence: GTAAGATT
acaataattcctactcagga

SEQ ID NO: 15080 - DNA, 20 bp, Artificial Sequence
  Description of Artificial Sequence: Synthetic oligonucleotide
  Target: ATXN2; (+) strand; PAM type: NNNNGHTT; PAM sequence: ATTAGTTT
ggagtaagattatttactgt

SEQ ID NO: 15081 - DNA, 20 bp, Artificial Sequence
  Description of Artificial Sequence: Synthetic oligonucleotide
  Target: ATXN2; (+) strand; PAM type: NNNNGHTT; PAM sequence: CTATGATT
tgctggttccttacaattat

SEQ ID NO: 15082 - DNA, 20 bp, Artificial Sequence
  Description of Artificial Sequence: Synthetic oligonucleotide
  Target: ATXN2; (+) strand; PAM type: NNNNGHTT; PAM sequence: TCAGGTTT
acaattatctatgattttca

SEQ ID NO: 15083 - DNA, 20 bp, Artificial Sequence
  Description of Artificial Sequence: Synthetic oligonucleotide
  Target: ATXN2; (+) strand; PAM type: NNNNGHTT; PAM sequence: CTCAGTTT
gtttacacttgaacccagaa

SEQ ID NO: 15084 - DNA, 20 bp, Artificial Sequence
  Description of Artificial Sequence: Synthetic oligonucleotide
  Target: ATXN2; (+) strand; PAM type: NNNNGHTT; PAM sequence: TAGAGTTT
gaaataaaacattactcttc

SEQ ID NO: 15085 - DNA, 20 bp, Artificial Sequence
  Description of Artificial Sequence: Synthetic oligonucleotide
  Target: ATXN2; (+) strand; PAM type: NNNNGHTT; PAM sequence: GACTGCTT
agttaaacacttatctaagc

SEQ ID NO: 15086 - DNA, 20 bp, Artificial Sequence
  Description of Artificial Sequence: Synthetic oligonucleotide
  Target: ATXN2; (+) strand; PAM type: NNNNGHTT; PAM sequence: TCAGGTTT
catatatttctcagccccct

SEQ ID NO: 15087 - DNA, 20 bp, Artificial Sequence
  Description of Artificial Sequence: Synthetic oligonucleotide
  Target: ATXN2; (+) strand; PAM type: NNNNGHTT; PAM sequence: TTCTGTTT
caggttttttaactttaaaa

SEQ ID NO: 15088 - DNA, 20 bp, Artificial Sequence
  Description of Artificial Sequence: Synthetic oligonucleotide
  Target: ATXN2; (+) strand; PAM type: NNNNGHTT; PAM sequence: CCCTGATT
atagaactgttgttcagtat

SEQ ID NO: 15089 - DNA, 20 bp, Artificial Sequence
  Description of Artificial Sequence: Synthetic oligonucleotide
  Target: ATXN2; (+) strand; PAM type: NNNNGHTT; PAM sequence: CCTAGATT
aacctacaagatatattcaa

SEQ ID NO: 15090 - DNA, 20 bp, Artificial Sequence
  Description of Artificial Sequence: Synthetic oligonucleotide
  Target: ATXN2; (+) strand; PAM type: NNNNGHTT; PAM sequence: TAAAGATT
agtaaaaaatgtcttcctac

SEQ ID NO: 15091 - DNA, 20 bp, Artificial Sequence
  Description of Artificial Sequence: Synthetic oligonucleotide
  Target: ATXN2; (+) strand; PAM type: NNNNGHTT; PAM sequence: TCAGGTTT
aatgtcttcctactaaagat

SEQ ID NO: 15092 - DNA, 20 bp, Artificial Sequence
  Description of Artificial Sequence: Synthetic oligonucleotide
  Target: ATXN2; (+) strand; PAM type: NNNNGHTT; PAM sequence: GGTTGTTT
acatccacccttagactaag

SEQ ID NO: 15093 - DNA, 20 bp, Artificial Sequence
  Description of Artificial Sequence: Synthetic oligonucleotide
  Target: ATXN2; (+) strand; PAM type: NNNNGHTT; PAM sequence: TGTTGTTT
cttagactaagggttgtttt

SEQ ID NO: 15094 - DNA, 20 bp, Artificial Sequence
  Description of Artificial Sequence: Synthetic oligonucleotide
  Target: ATXN2; (+) strand; PAM type: NNNNGHTT; PAM sequence: CAGTGTTT
gtctaaaaaattttattatc

SEQ ID NO: 15095 - DNA, 20 bp, Artificial Sequence
  Description of Artificial Sequence: Synthetic oligonucleotide
  Target: ATXN2; (+) strand; PAM type: NNNNGHTT; PAM sequence: CAAAGTTT
tttaaaattgagaacctacc

SEQ ID NO: 15096 - DNA, 20 bp, Artificial Sequence
  Description of Artificial Sequence: Synthetic oligonucleotide
  Target: ATXN2; (+) strand; PAM type: NNNNGHTT; PAM sequence: AAGTGTTT
ttccaatttctttatatgtg

SEQ ID NO: 15097 - DNA, 20 bp, Artificial Sequence
  Description of Artificial Sequence: Synthetic oligonucleotide
  Target: ATXN2; (+) strand; PAM type: NNNNGHTT; PAM sequence: AAGTGATT
tatgtgaagtgtttttggcc

SEQ ID NO: 15098 - DNA, 20 bp, Artificial Sequence
  Description of Artificial Sequence: Synthetic oligonucleotide
  Target: ATXN2; (+) strand; PAM type: NNNNGHTT; PAM sequence: CAATGTTT
atatatgtcaatgacatata

SEQ ID NO: 15099 - DNA, 20 bp, Artificial Sequence
  Description of Artificial Sequence: Synthetic oligonucleotide
  Target: ATXN2; (+) strand; PAM type: NNNNGHTT; PAM sequence: GAATGCTT
aaagtcatctagacagaagg

SEQ ID NO: 15100 - DNA, 20 bp, Artificial Sequence
  Description of Artificial Sequence: Synthetic oligonucleotide
  Target: ATXN2; (+) strand; PAM type: NNNNGHTT; PAM sequence: CTTAGATT
acctctggactgtcccttcc

SEQ ID NO: 15101 - DNA, 20 bp, Artificial Sequence
  Description of Artificial Sequence: Synthetic oligonucleotide
  Target: ATXN2; (+) strand; PAM type: NNNNGHTT; PAM sequence: CAAAGTTT
ttagattctgctcctaagca

SEQ ID NO: 15102 - DNA, 20 bp, Artificial Sequence
  Description of Artificial Sequence: Synthetic oligonucleotide
  Target: ATXN2; (+) strand; PAM type: NNNNGHTT; PAM sequence: GGCTGATT
atcccacttgacctctctat

SEQ ID NO: 15103 - DNA, 20 bp, Artificial Sequence
  Description of Artificial Sequence: Synthetic oligonucleotide
  Target: ATXN2; (+) strand; PAM type: NNNNGHTT; PAM sequence: TTTGGTTT
tcttctctcactggctgttc

SEQ ID NO: 15104 - DNA, 20 bp, Artificial Sequence
  Description of Artificial Sequence: Synthetic oligonucleotide
  Target: ATXN2; (+) strand; PAM type: NNNNGHTT; PAM sequence: ACACGTTT
taggtagcaggtatttctca

SEQ ID NO: 15105 - DNA, 20 bp, Artificial Sequence
  Description of Artificial Sequence: Synthetic oligonucleotide
  Target: ATXN2; (+) strand; PAM type: NNNNGHTT; PAM sequence: CACTGTTT
attagctgcacaaacggagt

SEQ ID NO: 15106 - DNA, 20 bp, Artificial Sequence
  Description of Artificial Sequence: Synthetic oligonucleotide
  Target: ATXN2; (+) strand; PAM type: NNNNGHTT; PAM sequence: CCATGTTT
tttttcccctcaaacttgct

SEQ ID NO: 15107 - DNA, 20 bp, Artificial Sequence
  Description of Artificial Sequence: Synthetic oligonucleotide
  Target: ATXN2; (+) strand; PAM type: NNNNGHTT; PAM sequence: CAGGGTTT
tcagccagtcctcaatgccc

SEQ ID NO: 15108 - DNA, 20 bp, Artificial Sequence
  Description of Artificial Sequence: Synthetic oligonucleotide
  Target: ATXN2; (+) strand; PAM type: NNNNGHTT; PAM sequence: CCATGCTT
ctggccaaattttctcatag

SEQ ID NO: 15109 - DNA, 20 bp, Artificial Sequence
  Description of Artificial Sequence: Synthetic oligonucleotide
  Target: ATXN2; (+) strand; PAM type: NNNNGHTT; PAM sequence: CATGGCTT
ttctcatagccatgcttgta

SEQ ID NO: 15110 - DNA, 20 bp, Artificial Sequence
  Description of Artificial Sequence: Synthetic oligonucleotide
  Target: ATXN2; (+) strand; PAM type: NNNNGHTT; PAM sequence: TGAGGTTT
acaaaatgtcacctcctcaa

SEQ ID NO: 15111 - DNA, 20 bp, Artificial Sequence
  Description of Artificial Sequence: Synthetic oligonucleotide
  Target: ATXN2; (+) strand; PAM type: NNNNGHTT; PAM sequence: CTGTGATT
aagcaaatcatattgtactg

SEQ ID NO: 15112 - DNA, 20 bp, Artificial Sequence
  Description of Artificial Sequence: Synthetic oligonucleotide
  Target: ATXN2; (+) strand; PAM type: NNNNGHTT; PAM sequence: CTTGGATT
tttaacaagctcttcaagat

SEQ ID NO: 15113 - DNA, 20 bp, Artificial Sequence
  Description of Artificial Sequence: Synthetic oligonucleotide
  Target: ATXN2; (+) strand; PAM type: NNNNGHTT; PAM sequence: CAGAGCTT
tataccaacacttggctcca

SEQ ID NO: 15114 - DNA, 20 bp, Artificial Sequence
  Description of Artificial Sequence: Synthetic oligonucleotide
  Target: ATXN2; (+) strand; PAM type: NNNNGHTT; PAM sequence: TCATGATT
tgtgtatccaaaatactgca

SEQ ID NO: 15115 - DNA, 20 bp, Artificial Sequence
  Description of Artificial Sequence: Synthetic oligonucleotide
  Target: ATXN2; (+) strand; PAM type: NNNNGHTT; PAM sequence: TAGTGTTT
catgatttcctttaaatacc

SEQ ID NO: 15116 - DNA, 20 bp, Artificial Sequence
  Description of Artificial Sequence: Synthetic oligonucleotide
  Target: ATXN2; (+) strand; PAM type: NNNNGHTT; PAM sequence: TCGAGCTT
tcatcattttccagggccac

SEQ ID NO: 15117 - DNA, 20 bp, Artificial Sequence
  Description of Artificial Sequence: Synthetic oligonucleotide
  Target: ATXN2; (+) strand; PAM type: NNNNGHTT; PAM sequence: ACTGGTTT
tgactcaatttcttctgcta

SEQ ID NO: 15118 - DNA, 20 bp, Artificial Sequence
  Description of Artificial Sequence: Synthetic oligonucleotide
  Target: ATXN2; (+) strand; PAM type: NNNNGHTT; PAM sequence: CCTTGCTT
tcttctgctaactggtttgc

SEQ ID NO: 15119 - DNA, 20 bp, Artificial Sequence
  Description of Artificial Sequence: Synthetic oligonucleotide
  Target: ATXN2; (+) strand; PAM type: NNNNGHTT; PAM sequence: TCCCGTTT
ctaactggtttgcccttgct

SEQ ID NO: 15120 - DNA, 20 bp, Artificial Sequence
  Description of Artificial Sequence: Synthetic oligonucleotide
  Target: ATXN2; (+) strand; PAM type: NNNNGHTT; PAM sequence: CACAGTTT
caaaatgagtcctttaaagc

SEQ ID NO: 15121 - DNA, 20 bp, Artificial Sequence
  Description of Artificial Sequence: Synthetic oligonucleotide
  Target: ATXN2; (+) strand; PAM type: NNNNGHTT; PAM sequence: GAAAGTTT
ctgtcataatcaactactaa

SEQ ID NO: 15122 - DNA, 20 bp, Artificial Sequence
  Description of Artificial Sequence: Synthetic oligonucleotide
  Target: ATXN2; (+) strand; PAM type: NNNNGHTT; PAM sequence: TAGAGTTT
aatcaactactaagaaagtt

SEQ ID NO: 15123 - DNA, 20 bp, Artificial Sequence
  Description of Artificial Sequence: Synthetic oligonucleotide
  Target: ATXN2; (+) strand; PAM type: NNNNGHTT; PAM sequence: AATCGCTT
tcgggaggctgaggcaggag

SEQ ID NO: 15124 - DNA, 20 bp, Artificial Sequence
  Description of Artificial Sequence: Synthetic oligonucleotide
  Target: ATXN2; (+) strand; PAM type: NNNNGHTT; PAM sequence: CCGAGATT
gatgcagaggttgcagtgag

SEQ ID NO: 15125 - DNA, 20 bp, Artificial Sequence
  Description of Artificial Sequence: Synthetic oligonucleotide
  Target: ATXN2; (+) strand; PAM type: NNNNGHTT; PAM sequence: GCGAGATT
cactccagcctggagacaca

SEQ ID NO: 15126 - DNA, 20 bp, Artificial Sequence
  Description of Artificial Sequence: Synthetic oligonucleotide
  Target: ATXN2; (+) strand; PAM type: NNNNGHTT; PAM sequence: ATTTGTTT
aaaaaaaagacaaaaccaaa

SEQ ID NO: 15127 - DNA, 20 bp, Artificial Sequence
  Description of Artificial Sequence: Synthetic oligonucleotide
  Target: ATXN2; (+) strand; PAM type: NNNNGHTT; PAM sequence: AATTGTTT
agagaaaaattatttcatgt

SEQ ID NO: 15128 - DNA, 20 bp, Artificial Sequence
  Description of Artificial Sequence: Synthetic oligonucleotide
  Target: ATXN2; (+) strand; PAM type: NNNNGHTT; PAM sequence: TGAAGCTT
tccattagactagaagaaaa

SEQ ID NO: 15129 - DNA, 20 bp, Artificial Sequence
  Description of Artificial Sequence: Synthetic oligonucleotide
  Target: ATXN2; (+) strand; PAM type: NNNNGHTT; PAM sequence: GCTTGTTT
ttagactagaagaaaatgaa

SEQ ID NO: 15130 - DNA, 20 bp, Artificial Sequence
  Description of Artificial Sequence: Synthetic oligonucleotide
  Target: ATXN2; (+) strand; PAM type: NNNNGHTT; PAM sequence: AAATGTTT
ataggaaaaaatttccttaa

SEQ ID NO: 15131 - DNA, 20 bp, Artificial Sequence
  Description of Artificial Sequence: Synthetic oligonucleotide
  Target: ATXN2; (+) strand; PAM type: NNNNGHTT; PAM sequence: TAAAGTTT
attatttgagcagttatttt

SEQ ID NO: 15132 - DNA, 20 bp, Artificial Sequence
  Description of Artificial Sequence: Synthetic oligonucleotide
  Target: ATXN2; (+) strand; PAM type: NNNNGHTT; PAM sequence: AAGGGATT
atattttacttcttttaaac

SEQ ID NO: 15133 - DNA, 20 bp, Artificial Sequence
  Description of Artificial Sequence: Synthetic oligonucleotide
  Target: ATXN2; (+) strand; PAM type: NNNNGHTT; PAM sequence: GGGTGCTT
gggattccacatggaacaag

SEQ ID NO: 15134 - DNA, 20 bp, Artificial Sequence
  Description of Artificial Sequence: Synthetic oligonucleotide
  Target: ATXN2; (+) strand; PAM type: NNNNGHTT; PAM sequence: CAATGTTT
ttaacagccaaaaatacttc

SEQ ID NO: 15135 - DNA, 20 bp, Artificial Sequence
  Description of Artificial Sequence: Synthetic oligonucleotide
  Target: ATXN2; (+) strand; PAM type: NNNNGHTT; PAM sequence: CAACGCTT
gggagaaagaagggagaagc

SEQ ID NO: 15136 - DNA, 20 bp, Artificial Sequence
  Description of Artificial Sequence: Synthetic oligonucleotide
  Target: ATXN2; (+) strand; PAM type: NNNNGHTT; PAM sequence: CAACGATT
ccaacgctttccctcatatt

SEQ ID NO: 15137 - DNA, 20 bp, Artificial Sequence
  Description of Artificial Sequence: Synthetic oligonucleotide
  Target: ATXN2; (+) strand; PAM type: NNNNGHTT; PAM sequence: CTGGGCTT
actggacaaagtcacaagaa

SEQ ID NO: 15138 - DNA, 20 bp, Artificial Sequence
  Description of Artificial Sequence: Synthetic oligonucleotide
  Target: ATXN2; (+) strand; PAM type: NNNNGHTT; PAM sequence: AATGGTTT
cacaagaactgggctttaga

SEQ ID NO: 15139 - DNA, 20 bp, Artificial Sequence
  Description of Artificial Sequence: Synthetic oligonucleotide
  Target: ATXN2; (+) strand; PAM type: NNNNGHTT; PAM sequence: GCAAGTTT
tgggggggagccaggggcaa

SEQ ID NO: 15140 - DNA, 20 bp, Artificial Sequence
  Description of Artificial Sequence: Synthetic oligonucleotide
  Target: ATXN2; (+) strand; PAM type: NNNNGHTT; PAM sequence: TAATGTTT
ctgcctggataattattctc

SEQ ID NO: 15141 - DNA, 20 bp, Artificial Sequence
  Description of Artificial Sequence: Synthetic oligonucleotide
  Target: ATXN2; (+) strand; PAM type: NNNNGHTT; PAM sequence: TAAGGCTT
gctgatggcaacctcaatgc

SEQ ID NO: 15142 - DNA, 20 bp, Artificial Sequence
  Description of Artificial Sequence: Synthetic oligonucleotide
  Target: ATXN2; (+) strand; PAM type: NNNNGHTT; PAM sequence: GGAGGCTT
aggaaatcacacttacttat

SEQ ID NO: 15143 - DNA, 20 bp, Artificial Sequence
  Description of Artificial Sequence: Synthetic oligonucleotide
  Target: ATXN2; (+) strand; PAM type: NNNNGHTT; PAM sequence: AGGAGATT
ggcaggaggatcacgaagtc

SEQ ID NO: 15144 - DNA, 20 bp, Artificial Sequence
  Description of Artificial Sequence: Synthetic oligonucleotide
  Target: ATXN2; (+) strand; PAM type: NNNNGHTT; PAM sequence: CAGAGCTT
aatggtgtgaacccgggagg

SEQ ID NO: 15145 - DNA, 20 bp, Artificial Sequence
  Description of Artificial Sequence: Synthetic oligonucleotide
  Target: ATXN2; (+) strand; PAM type: NNNNGHTT; PAM sequence: AAGAGTTT
tccatcttaaaagaaaaaaa

SEQ ID NO: 15146 - DNA, 20 bp, Artificial Sequence
  Description of Artificial Sequence: Synthetic oligonucleotide
  Target: ATXN2; (+) strand; PAM type: NNNNGHTT; PAM sequence: CTGAGATT
ggccaaggtgggtggatcac

SEQ ID NO: 15147 - DNA, 20 bp, Artificial Sequence
  Description of Artificial Sequence: Synthetic oligonucleotide
  Target: ATXN2; (+) strand; PAM type: NNNNGHTT; PAM sequence: GGGCGCTT
aattagccagatgtggtggc

SEQ ID NO: 15148 - DNA, 20 bp, Artificial Sequence
  Description of Artificial Sequence: Synthetic oligonucleotide
  Target: ATXN2; (+) strand; PAM type: NNNNGHTT; PAM sequence: AATCGCTT
tcagaaggctgaagcaggag

SEQ ID NO: 15149 - DNA, 20 bp, Artificial Sequence
  Description of Artificial Sequence: Synthetic oligonucleotide
  Target: ATXN2; (+) strand; PAM type: NNNNGHTT; PAM sequence: AGAGGTTT
atcgcttgaacctggaaggc

SEQ ID NO: 15150 - DNA, 20 bp, Artificial Sequence
  Description of Artificial Sequence: Synthetic oligonucleotide
  Target: ATXN2; (+) strand; PAM type: NNNNGHTT; PAM sequence: AAGAGTTT
gagcaagactccgtctcaaa

SEQ ID NO: 15151 - DNA, 20 bp, Artificial Sequence
  Description of Artificial Sequence: Synthetic oligonucleotide
  Target: ATXN2; (+) strand; PAM type: NNNNGHTT; PAM sequence: AATCGCTT
tcaggaggctgaggcaggag

SEQ ID NO: 15152 - DNA, 20 bp, Artificial Sequence
  Description of Artificial Sequence: Synthetic oligonucleotide
  Target: ATXN2; (+) strand; PAM type: NNNNGHTT; PAM sequence: ATGTGCTT
taggatcccagtgttctgca

SEQ ID NO: 15153 - DNA, 20 bp, Artificial Sequence
  Description of Artificial Sequence: Synthetic oligonucleotide
  Target: ATXN2; (+) strand; PAM type: NNNNGHTT; PAM sequence: TAGTGTTT
cattctttttgggagatatg

SEQ ID NO: 15154 - DNA, 20 bp, Artificial Sequence
  Description of Artificial Sequence: Synthetic oligonucleotide
  Target: ATXN2; (+) strand; PAM type: NNNNGHTT; PAM sequence: GCATGTTT
gctatattgatagacactta

SEQ ID NO: 15155 - DNA, 20 bp, Artificial Sequence
  Description of Artificial Sequence: Synthetic oligonucleotide
  Target: ATXN2; (+) strand; PAM type: NNNNGHTT; PAM sequence: AGCTGCTT
tggcgcacgcctatagtccc

SEQ ID NO: 15156 - DNA, 20 bp, Artificial Sequence
  Description of Artificial Sequence: Synthetic oligonucleotide
  Target: ATXN2; (+) strand; PAM type: NNNNGHTT; PAM sequence: GGTGGATT
cactttgggaggctgaggtg

SEQ ID NO: 15157 - DNA, 20 bp, Artificial Sequence
  Description of Artificial Sequence: Synthetic oligonucleotide
  Target: ATXN2; (+) strand; PAM type: NNNNGHTT; PAM sequence: TTTTGATT
aagtgtatgtgcattttaaa

SEQ ID NO: 15158 - DNA, 20 bp, Artificial Sequence
  Description of Artificial Sequence: Synthetic oligonucleotide
  Target: ATXN2; (+) strand; PAM type: NNNNGHTT; PAM sequence: GCCAGATT
tttaaattttgattagcatt

SEQ ID NO: 15159 - DNA, 20 bp, Artificial Sequence
  Description of Artificial Sequence: Synthetic oligonucleotide
  Target: ATXN2; (+) strand; PAM type: NNNNGHTT; PAM sequence: CTCTGTTT
accaatagtgtaaaagaagt

SEQ ID NO: 15160 - DNA, 20 bp, Artificial Sequence
  Description of Artificial Sequence: Synthetic oligonucleotide
  Target: ATXN2; (+) strand; PAM type: NNNNGHTT; PAM sequence: ATATGATT
gaaccattatattaggttat

SEQ ID NO: 15161 - DNA, 20 bp, Artificial Sequence
  Description of Artificial Sequence: Synthetic oligonucleotide
  Target: ATXN2; (+) strand; PAM type: NNNNGHTT; PAM sequence: TAAAGTTT
ttaggttatatatgatttgt

SEQ ID NO: 15162 - DNA, 20 bp, Artificial Sequence
  Description of Artificial Sequence: Synthetic oligonucleotide
  Target: ATXN2; (+) strand; PAM type: NNNNGHTT; PAM sequence: TCCAGTTT
tgacatgttgcctgtgtatg

SEQ ID NO: 15163 - DNA, 20 bp, Artificial Sequence
  Description of Artificial Sequence: Synthetic oligonucleotide
  Target: ATXN2; (+) strand; PAM type: NNNNGHTT; PAM sequence: TCAGGCTT
ttaggtcaaagtaggacatt

SEQ ID NO: 15164 - DNA, 20 bp, Artificial Sequence
  Description of Artificial Sequence: Synthetic oligonucleotide
  Target: ATXN2; (+) strand; PAM type: NNNNGHTT; PAM sequence: GGAAGATT
aaattctctttctactcaat

SEQ ID NO: 15165 - DNA, 20 bp, Artificial Sequence
  Description of Artificial Sequence: Synthetic oligonucleotide
  Target: ATXN2; (+) strand; PAM type: NNNNGHTT; PAM sequence: CTTTGCTT
cactcatttttggcaagaca

SEQ ID NO: 15166 - DNA, 20 bp, Artificial Sequence
  Description of Artificial Sequence: Synthetic oligonucleotide
  Target: ATXN2; (+) strand; PAM type: NNNNGHTT; PAM sequence: ATTTGTTT
agacagagtctttattaagt

SEQ ID NO: 15167 - DNA, 20 bp, Artificial Sequence
  Description of Artificial Sequence: Synthetic oligonucleotide
  Target: ATXN2; (+) strand; PAM type: NNNNGHTT; PAM sequence: TCCTGCTT
ctcctgggctcaagtgatcc

SEQ ID NO: 15168 - DNA, 20 bp, Artificial Sequence
  Description of Artificial Sequence: Synthetic oligonucleotide
  Target: ATXN2; (+) strand; PAM type: NNNNGHTT; PAM sequence: AGGCGTTT
caaaactagtatgtgacaag

SEQ ID NO: 15169 - DNA, 20 bp, Artificial Sequence
  Description of Artificial Sequence: Synthetic oligonucleotide
  Target: ATXN2; (+) strand; PAM type: NNNNGHTT; PAM sequence: TAATGCTT
ttaagaccaagaaatttatg

SEQ ID NO: 15170 - DNA, 20 bp, Artificial Sequence
  Description of Artificial Sequence: Synthetic oligonucleotide
  Target: ATXN2; (+) strand; PAM type: NNNNGHTT; PAM sequence: AGAGGCTT
gacaaccttttcttcagaca

SEQ ID NO: 15171 - DNA, 20 bp, Artificial Sequence
  Description of Artificial Sequence: Synthetic oligonucleotide
  Target: ATXN2; (+) strand; PAM type: NNNNGHTT; PAM sequence: CATGGTTT
caaaacacaccggcatttcc

SEQ ID NO: 15172 - DNA, 20 bp, Artificial Sequence
  Description of Artificial Sequence: Synthetic oligonucleotide
  Target: ATXN2; (+) strand; PAM type: NNNNGHTT; PAM sequence: TCCTGCTT
tccacaagaacagacagtac

SEQ ID NO: 15173 - DNA, 20 bp, Artificial Sequence
  Description of Artificial Sequence: Synthetic oligonucleotide
  Target: ATXN2; (+) strand; PAM type: NNNNGHTT; PAM sequence: TATTGCTT
gacaaacatttttctttata

SEQ ID NO: 15174 - DNA, 20 bp, Artificial Sequence
  Description of Artificial Sequence: Synthetic oligonucleotide
  Target: ATXN2; (+) strand; PAM type: NNNNGHTT; PAM sequence: AATGGTTT
cagtaaaagcatctgcaaag

SEQ ID NO: 15175 - DNA, 20 bp, Artificial Sequence
  Description of Artificial Sequence: Synthetic oligonucleotide
  Target: ATXN2; (+) strand; PAM type: NNNNGHTT; PAM sequence: GAAAGTTT
tgcaaagaatggttttggtt

SEQ ID NO: 15176 - DNA, 20 bp, Artificial Sequence
  Description of Artificial Sequence: Synthetic oligonucleotide
  Target: ATXN2; (+) strand; PAM type: NNNNGHTT; PAM sequence: AATTGTTT
acgaaaaatgaatttcacat

SEQ ID NO: 15177 - DNA, 20 bp, Artificial Sequence
  Description of Artificial Sequence: Synthetic oligonucleotide
  Target: ATXN2; (+) strand; PAM type: NNNNGHTT; PAM sequence: GTATGCTT
atatatagtattcagtaaaa

SEQ ID NO: 15178 - DNA, 20 bp, Artificial Sequence
  Description of Artificial Sequence: Synthetic oligonucleotide
  Target: ATXN2; (+) strand; PAM type: NNNNGHTT; PAM sequence: TCACGTTT
tattcagtaaaagtatgctt

SEQ ID NO: 15179 - DNA, 20 bp, Artificial Sequence
  Description of Artificial Sequence: Synthetic oligonucleotide
  Target: ATXN2; (+) strand; PAM type: NNNNGHTT; PAM sequence: AAGCGATT
aacctctgcctcccgggttc

SEQ ID NO: 15180 - DNA, 20 bp, Artificial Sequence
  Description of Artificial Sequence: Synthetic oligonucleotide
  Target: ATXN2; (+) strand; PAM type: NNNNGHTT; PAM sequence: CGGGGTTT
ttttttgtatttttagtaga

SEQ ID NO: 15181 - DNA, 20 bp, Artificial Sequence
  Description of Artificial Sequence: Synthetic oligonucleotide
  Target: ATXN2; (+) strand; PAM type: NNNNGHTT; PAM sequence: CTGGGATT
caccttggcctcccaaagtg

SEQ ID NO: 15182 - DNA, 20 bp, Artificial Sequence
  Description of Artificial Sequence: Synthetic oligonucleotide
  Target: ATXN2; (+) strand; PAM type: NNNNGHTT; PAM sequence: AATCGTTT
tcgggaggctgaggaaggag

SEQ ID NO: 15183 - DNA, 20 bp, Artificial Sequence
  Description of Artificial Sequence: Synthetic oligonucleotide
  Target: ATXN2; (+) strand; PAM type: NNNNGHTT; PAM sequence: TGGAGCTT
tttttttttcttttttgaga

SEQ ID NO: 15184 - DNA, 20 bp, Artificial Sequence
  Description of Artificial Sequence: Synthetic oligonucleotide
  Target: ATXN2; (+) strand; PAM type: NNNNGHTT; PAM sequence: CTAAGATT
tgcctcagcctcccaagtag

SEQ ID NO: 15185 - DNA, 20 bp, Artificial Sequence
  Description of Artificial Sequence: Synthetic oligonucleotide
  Target: ATXN2; (+) strand; PAM type: NNNNGHTT; PAM sequence: TAATGTTT
cgcccaccaacacgcccagc

SEQ ID NO: 15186 - DNA, 20 bp, Artificial Sequence
  Description of Artificial Sequence: Synthetic oligonucleotide
  Target: ATXN2; (+) strand; PAM type: NNNNGHTT; PAM sequence: CAGGGTTT
gtttgtatttttagcagaga

SEQ ID NO: 15187 - DNA, 20 bp, Artificial Sequence
  Description of Artificial Sequence: Synthetic oligonucleotide
  Target: ATXN2; (+) strand; PAM type: NNNNGHTT; PAM sequence: CTGGGATT
caccttggcctcccaaagtg

SEQ ID NO: 15188 - DNA, 20 bp, Artificial Sequence
  Description of Artificial Sequence: Synthetic oligonucleotide
  Target: ATXN2; (+) strand; PAM type: NNNNGHTT; PAM sequence: TTTTGTTT
tgcccggcctaaaatatctc

SEQ ID NO: 15189 - DNA, 20 bp, Artificial Sequence
  Description of Artificial Sequence: Synthetic oligonucleotide
  Target: ATXN2; (+) strand; PAM type: NNNNGHTT; PAM sequence: TGTGGATT
agtacttgcagccaaatata

SEQ ID NO: 15190 - DNA, 20 bp, Artificial Sequence
  Description of Artificial Sequence: Synthetic oligonucleotide
  Target: ATXN2; (+) strand; PAM type: NNNNGHTT; PAM sequence: TTTTGTTT
tgcagccaaatatatgtgga

SEQ ID NO: 15191 - DNA, 20 bp, Artificial Sequence
  Description of Artificial Sequence: Synthetic oligonucleotide
  Target: ATXN2; (+) strand; PAM type: NNNNGHTT; PAM sequence: AGTGGTTT
tagtaaatgaagccattcta

SEQ ID NO: 15192 - DNA, 20 bp, Artificial Sequence
  Description of Artificial Sequence: Synthetic oligonucleotide
  Target: ATXN2; (+) strand; PAM type: NNNNGHTT; PAM sequence: ACAGGCTT
ctaggaaacgctctgtagat

SEQ ID NO: 15193 - DNA, 20 bp, Artificial Sequence
  Description of Artificial Sequence: Synthetic oligonucleotide
  Target: ATXN2; (+) strand; PAM type: NNNNGHTT; PAM sequence: GATGGATT
ctacaaaagaggttattcca

SEQ ID NO: 15194 - DNA, 20 bp, Artificial Sequence
  Description of Artificial Sequence: Synthetic oligonucleotide
  Target: ATXN2; (+) strand; PAM type: NNNNGHTT; PAM sequence: CAATGCTT
cagatggattttttatttgg

SEQ ID NO: 15195 - DNA, 20 bp, Artificial Sequence
  Description of Artificial Sequence: Synthetic oligonucleotide
  Target: ATXN2; (+) strand; PAM type: NNNNGHTT; PAM sequence: CTGGGCTT
ataaaagcattaatccacct

SEQ ID NO: 15196 - DNA, 20 bp, Artificial Sequence
  Description of Artificial Sequence: Synthetic oligonucleotide
  Target: ATXN2; (+) strand; PAM type: NNNNGHTT; PAM sequence: AAGAGATT
gaattttggaaaatctctct

SEQ ID NO: 15197 - DNA, 20 bp, Artificial Sequence
  Description of Artificial Sequence: Synthetic oligonucleotide
  Target: ATXN2; (+) strand; PAM type: NNNNGHTT; PAM sequence: TGTGGATT
tctacattatcttaaagtta

SEQ ID NO: 15198 - DNA, 20 bp, Artificial Sequence
  Description of Artificial Sequence: Synthetic oligonucleotide
  Target: ATXN2; (+) strand; PAM type: NNNNGHTT; PAM sequence: ACTAGTTT
cctgttaatgtcttaatcat

SEQ ID NO: 15199 - DNA, 20 bp, Artificial Sequence
  Description of Artificial Sequence: Synthetic oligonucleotide
  Target: ATXN2; (+) strand; PAM type: NNNNGHTT; PAM sequence: TTTTGATT
cagtattaaaaacaatactc

SEQ ID NO: 15200 - DNA, 20 bp, Artificial Sequence
  Description of Artificial Sequence: Synthetic oligonucleotide
  Target: ATXN2; (+) strand; PAM type: NNNNGHTT; PAM sequence: TAGAGATT
aaattaaagctcgaagcagc

SEQ ID NO: 15201 - DNA, 20 bp, Artificial Sequence
  Description of Artificial Sequence: Synthetic oligonucleotide
  Target: ATXN2; (+) strand; PAM type: NNNNGHTT; PAM sequence: AACGGATT
gatttttatagaaccatata

SEQ ID NO: 15202 - DNA, 20 bp, Artificial Sequence
  Description of Artificial Sequence: Synthetic oligonucleotide
  Target: ATXN2; (+) strand; PAM type: NNNNGHTT; PAM sequence: AGTAGCTT
gatcccaaatgtacacacaa

SEQ ID NO: 15203 - DNA, 20 bp, Artificial Sequence
  Description of Artificial Sequence: Synthetic oligonucleotide
  Target: ATXN2; (+) strand; PAM type: NNNNGHTT; PAM sequence: ATATGTTT
gtacacacaaagtagcttaa

SEQ ID NO: 15204 - DNA, 20 bp, Artificial Sequence
  Description of Artificial Sequence: Synthetic oligonucleotide
  Target: ATXN2; (+) strand; PAM type: NNNNGHTT; PAM sequence: CCAGGCTT
agcgtctaaaactttaggac

SEQ ID NO: 15205 - DNA, 20 bp, Artificial Sequence
  Description of Artificial Sequence: Synthetic oligonucleotide
  Target: ATXN2; (+) strand; PAM type: NNNNGHTT; PAM sequence: TTCTGTTT
ctacattttaatcttaaatc

SEQ ID NO: 15206 - DNA, 20 bp, Artificial Sequence
  Description of Artificial Sequence: Synthetic oligonucleotide
  Target: ATXN2; (+) strand; PAM type: NNNNGHTT; PAM sequence: TGTCGCTT
tcacaggttatgtagcagtc

SEQ ID NO: 15207 - DNA, 20 bp, Artificial Sequence
  Description of Artificial Sequence: Synthetic oligonucleotide
  Target: ATXN2; (+) strand; PAM type: NNNNGHTT; PAM sequence: GTGTGATT
gggaaggggaaaacacagaa

SEQ ID NO: 15208 - DNA, 20 bp, Artificial Sequence
  Description of Artificial Sequence: Synthetic oligonucleotide
  Target: ATXN2; (+) strand; PAM type: NNNNGHTT; PAM sequence: CTTGGTTT
ttctataaagaatgatattc

SEQ ID NO: 15209 - DNA, 20 bp, Artificial Sequence
  Description of Artificial Sequence: Synthetic oligonucleotide
  Target: ATXN2; (+) strand; PAM type: NNNNGHTT; PAM sequence: TTCTGATT
ataatatccactatcgtaaa

SEQ ID NO: 15210 - DNA, 20 bp, Artificial Sequence
  Description of Artificial Sequence: Synthetic oligonucleotide
  Target: ATXN2; (+) strand; PAM type: NNNNGHTT; PAM sequence: ATTTGTTT
atccactatcgtaaattctg

SEQ ID NO: 15211 - DNA, 20 bp, Artificial Sequence
  Description of Artificial Sequence: Synthetic oligonucleotide
  Target: ATXN2; (+) strand; PAM type: NNNNGHTT; PAM sequence: ACAAGTTT
tgatttgttttacagtggtt

SEQ ID NO: 15212 - DNA, 20 bp, Artificial Sequence
  Description of Artificial Sequence: Synthetic oligonucleotide
  Target: ATXN2; (+) strand; PAM type: NNNNGHTT; PAM sequence: TTTGGATT
tgttttacagtggttacaag

SEQ ID NO: 15213 - DNA, 20 bp, Artificial Sequence
  Description of Artificial Sequence: Synthetic oligonucleotide
  Target: ATXN2; (+) strand; PAM type: NNNNGHTT; PAM sequence: TTTTGTTT
cagtggttacaagtttggat

SEQ ID NO: 15214 - DNA, 20 bp, Artificial Sequence
  Description of Artificial Sequence: Synthetic oligonucleotide
  Target: ATXN2; (+) strand; PAM type: NNNNGHTT; PAM sequence: TTCTGTTT
ttacaagtttggatttttgt

SEQ ID NO: 15215 - DNA, 20 bp, Artificial Sequence
  Description of Artificial Sequence: Synthetic oligonucleotide
  Target: ATXN2; (+) strand; PAM type: NNNNGHTT; PAM sequence: ATTTGTTT
tttctgtttctttaaaaaaa

SEQ ID NO: 15216 - DNA, 20 bp, Artificial Sequence
  Description of Artificial Sequence: Synthetic oligonucleotide
  Target: ATXN2; (+) strand; PAM type: NNNNGHTT; PAM sequence: TTTTGTTT
tttctttaaaaaaaatttgt

SEQ ID NO: 15217 - DNA, 20 bp, Artificial Sequence
  Description of Artificial Sequence: Synthetic oligonucleotide
  Target: ATXN2; (+) strand; PAM type: NNNNGHTT; PAM sequence: TTTTGTTT
taaaaaaaatttgtttttgt

SEQ ID NO: 15218 - DNA, 20 bp, Artificial Sequence
  Description of Artificial Sequence: Synthetic oligonucleotide
  Target: ATXN2; (+) strand; PAM type: NNNNGHTT; PAM sequence: CTGAGATT
cacctcagcctcccaagtcg

SEQ ID NO: 15219 - DNA, 20 bp, Artificial Sequence
  Description of Artificial Sequence: Synthetic oligonucleotide
  Target: ATXN2; (+) strand; PAM type: NNNNGHTT; PAM sequence: TCTGGATT
gagccactatgcccagcaag

SEQ ID NO: 15220 - DNA, 20 bp, Artificial Sequence
  Description of Artificial Sequence: Synthetic oligonucleotide
  Target: ATXN2; (+) strand; PAM type: NNNNGHTT; PAM sequence: CCAGGATT
taaatagtacaatgttgtaa

SEQ ID NO: 15221 - DNA, 20 bp, Artificial Sequence
  Description of Artificial Sequence: Synthetic oligonucleotide
  Target: ATXN2; (+) strand; PAM type: NNNNGHTT; PAM sequence: TGCAGATT
ggcaactgtgggaatttgca

SEQ ID NO: 15222 - DNA, 20 bp, Artificial Sequence
  Description of Artificial Sequence: Synthetic oligonucleotide
  Target: ATXN2; (+) strand; PAM type: NNNNGHTT; PAM sequence: ACCTGTTT
gtgactattagaaaagtgtt

SEQ ID NO: 15223 - DNA, 20 bp, Artificial Sequence
  Description of Artificial Sequence: Synthetic oligonucleotide
  Target: ATXN2; (+) strand; PAM type: NNNNGHTT; PAM sequence: ATTAGTTT
atcagatgagatgataaaga

SEQ ID NO: 15224 - DNA, 20 bp, Artificial Sequence
  Description of Artificial Sequence: Synthetic oligonucleotide
  Target: ATXN2; (+) strand; PAM type: NNNNGHTT; PAM sequence: TTCTGATT
tgggctctcaacaccttctc

SEQ ID NO: 15225 - DNA, 20 bp, Artificial Sequence
  Description of Artificial Sequence: Synthetic oligonucleotide
  Target: ATXN2; (+) strand; PAM type: NNNNGHTT; PAM sequence: TTCAGCTT
cccaggaaacagagtacata

SEQ ID NO: 15226 - DNA, 20 bp, Artificial Sequence
  Description of Artificial Sequence: Synthetic oligonucleotide
  Target: ATXN2; (+) strand; PAM type: NNNNGHTT; PAM sequence: ATCAGATT
tggatgaaataatcattaac

SEQ ID NO: 15227 - DNA, 20 bp, Artificial Sequence
  Description of Artificial Sequence: Synthetic oligonucleotide
  Target: ATXN2; (+) strand; PAM type: NNNNGHTT; PAM sequence: ATGTGCTT
ttaacatcacaaaccctcaa

SEQ ID NO: 15228 - DNA, 20 bp, Artificial Sequence
  Description of Artificial Sequence: Synthetic oligonucleotide
  Target: ATXN2; (+) strand; PAM type: NNNNGHTT; PAM sequence: TATTGTTT
catataaacctaaaaaatca

SEQ ID NO: 15229 - DNA, 20 bp, Artificial Sequence
  Description of Artificial Sequence: Synthetic oligonucleotide
  Target: ATXN2; (+) strand; PAM type: NNNNGHTT; PAM sequence: GACAGTTT
cactttcaacaactttttaa

SEQ ID NO: 15230 - DNA, 20 bp, Artificial Sequence
  Description of Artificial Sequence: Synthetic oligonucleotide
  Target: ATXN2; (+) strand; PAM type: NNNNGHTT; PAM sequence: TATAGATT
tactatataaagtatcagta

SEQ ID NO: 15231 - DNA, 20 bp, Artificial Sequence
  Description of Artificial Sequence: Synthetic oligonucleotide
  Target: ATXN2; (+) strand; PAM type: NNNNGHTT; PAM sequence: TGGGGATT
actcataagtctggacgagg

SEQ ID NO: 15232 - DNA, 20 bp, Artificial Sequence
  Description of Artificial Sequence: Synthetic oligonucleotide
  Target: ATXN2; (+) strand; PAM type: NNNNGHTT; PAM sequence: CTGGGCTT
gttctaaggaacaaaaggct

SEQ ID NO: 15233 - DNA, 20 bp, Artificial Sequence
  Description of Artificial Sequence: Synthetic oligonucleotide
  Target: ATXN2; (+) strand; PAM type: NNNNGHTT; PAM sequence: CAGAGCTT
aatggtgtgaaccagggagg

SEQ ID NO: 15234 - DNA, 20 bp, Artificial Sequence
  Description of Artificial Sequence: Synthetic oligonucleotide
  Target: ATXN2; (+) strand; PAM type: NNNNGHTT; PAM sequence: CTCTGTTT
cctgggtaacaagagcgaaa

SEQ ID NO: 15235 - DNA, 20 bp, Artificial Sequence
  Description of Artificial Sequence: Synthetic oligonucleotide
  Target: ATXN2; (+) strand; PAM type: NNNNGHTT; PAM sequence: AATTGCTT
tcgggaggctgaggcaggcg

SEQ ID NO: 15236 - DNA, 20 bp, Artificial Sequence
  Description of Artificial Sequence: Synthetic oligonucleotide
  Target: ATXN2; (+) strand; PAM type: NNNNGHTT; PAM sequence: AATTGCTT
ggcgaattgcttgaaccttg

SEQ ID NO: 15237 - DNA, 20 bp, Artificial Sequence
  Description of Artificial Sequence: Synthetic oligonucleotide
  Target: ATXN2; (+) strand; PAM type: NNNNGHTT; PAM sequence: CCAAGATT
gaggcggaggttgtagtgag

SEQ ID NO: 15238 - DNA, 20 bp, Artificial Sequence
  Description of Artificial Sequence: Synthetic oligonucleotide
  Target: ATXN2; (+) strand; PAM type: NNNNGHTT; PAM sequence: ACAGGCTT
tctgaattgtacacaagaac

SEQ ID NO: 15239 - DNA, 20 bp, Artificial Sequence
  Description of Artificial Sequence: Synthetic oligonucleotide
  Target: ATXN2; (+) strand; PAM type: NNNNGHTT; PAM sequence: AGGAGATT
agtgggactgggggttagag

SEQ ID NO: 15240 - DNA, 20 bp, Artificial Sequence
  Description of Artificial Sequence: Synthetic oligonucleotide
  Target: ATXN2; (+) strand; PAM type: NNNNGHTT; PAM sequence: TACAGATT
tactactacaccatgtatta

SEQ ID NO: 15241 - DNA, 20 bp, Artificial Sequence
  Description of Artificial Sequence: Synthetic oligonucleotide
  Target: ATXN2; (+) strand; PAM type: NNNNGHTT; PAM sequence: TCTAGATT
aaagaggactgtggggagcc

SEQ ID NO: 15242 - DNA, 20 bp, Artificial Sequence
  Description of Artificial Sequence: Synthetic oligonucleotide
  Target: ATXN2; (+) strand; PAM type: NNNNGHTT; PAM sequence: TAGGGATT
actgtggggagcctctagat

SEQ ID NO: 15243 - DNA, 20 bp, Artificial Sequence
  Description of Artificial Sequence: Synthetic oligonucleotide
  Target: ATXN2; (+) strand; PAM type: NNNNGHTT; PAM sequence: ACAGGTTT
ttaaatattaagatccagta

SEQ ID NO: 15244 - DNA, 20 bp, Artificial Sequence
  Description of Artificial Sequence: Synthetic oligonucleotide
  Target: ATXN2; (+) strand; PAM type: NNNNGHTT; PAM sequence: TCAAGATT
aggccagagcggataccata

SEQ ID NO: 15245 - DNA, 20 bp, Artificial Sequence
  Description of Artificial Sequence: Synthetic oligonucleotide
  Target: ATXN2; (+) strand; PAM type: NNNNGHTT; PAM sequence: TTCTGTTT
gagcggataccatatcaaga

SEQ ID NO: 15246 - DNA, 20 bp, Artificial Sequence
  Description of Artificial Sequence: Synthetic oligonucleotide
  Target: ATXN2; (+) strand; PAM type: NNNNGHTT; PAM sequence: AATCGTTT
tcaggaggctgaggcaggag

SEQ ID NO: 15247 - DNA, 20 bp, Artificial Sequence
  Description of Artificial Sequence: Synthetic oligonucleotide
  Target: ATXN2; (+) strand; PAM type: NNNNGHTT; PAM sequence: AGGTGCTT
tgaaattaactgagttctat

SEQ ID NO: 15248 - DNA, 20 bp, Artificial Sequence
  Description of Artificial Sequence: Synthetic oligonucleotide
  Target: ATXN2; (+) strand; PAM type: NNNNGHTT; PAM sequence: AGTTGTTT
taaatactgctaatactact

SEQ ID NO: 15249 - DNA, 20 bp, Artificial Sequence
  Description of Artificial Sequence: Synthetic oligonucleotide
  Target: ATXN2; (+) strand; PAM type: NNNNGHTT; PAM sequence: ATAGGTTT
tggtcatcaaggctgcagaa

SEQ ID NO: 15250 - DNA, 20 bp, Artificial Sequence
  Description of Artificial Sequence: Synthetic oligonucleotide
  Target: ATXN2; (+) strand; PAM type: NNNNGHTT; PAM sequence: GCTGGATT
tctccagccacacccagcag

SEQ ID NO: 15251 - DNA, 20 bp, Artificial Sequence
  Description of Artificial Sequence: Synthetic oligonucleotide
  Target: ATXN2; (+) strand; PAM type: NNNNGHTT; PAM sequence: CAGAGTTT
caggctggattaggagtaga

SEQ ID NO: 15252 - DNA, 20 bp, Artificial Sequence
  Description of Artificial Sequence: Synthetic oligonucleotide
  Target: ATXN2; (+) strand; PAM type: NNNNGHTT; PAM sequence: TAAAGTTT
gcaagaagagaatagaagtg

SEQ ID NO: 15253 - DNA, 20 bp, Artificial Sequence
  Description of Artificial Sequence: Synthetic oligonucleotide
  Target: ATXN2; (+) strand; PAM type: NNNNGHTT; PAM sequence: CTATGTTT
atggaacagaacttaggagg

SEQ ID NO: 15254 - DNA, 20 bp, Artificial Sequence
  Description of Artificial Sequence: Synthetic oligonucleotide
  Target: ATXN2; (+) strand; PAM type: NNNNGHTT; PAM sequence: GGGGGATT
agttgtccttcagcatctat

SEQ ID NO: 15255 - DNA, 20 bp, Artificial Sequence
  Description of Artificial Sequence: Synthetic oligonucleotide
  Target: ATXN2; (+) strand; PAM type: NNNNGHTT; PAM sequence: GGATGCTT
ctagggataccaaaatccag

SEQ ID NO: 15256 - DNA, 20 bp, Artificial Sequence
  Description of Artificial Sequence: Synthetic oligonucleotide
  Target: ATXN2; (+) strand; PAM type: NNNNGHTT; PAM sequence: TACTGCTT
tgctacggaaatagttgtgg

SEQ ID NO: 15257 - DNA, 20 bp, Artificial Sequence
  Description of Artificial Sequence: Synthetic oligonucleotide
  Target: ATXN2; (+) strand; PAM type: NNNNGHTT; PAM sequence: AGATGCTT
agtctgtacatgttcagtat

SEQ ID NO: 15258 - DNA, 20 bp, Artificial Sequence
  Description of Artificial Sequence: Synthetic oligonucleotide
  Target: ATXN2; (+) strand; PAM type: NNNNGHTT; PAM sequence: TTTTGATT
tacatgttcagtatagatgc

SEQ ID NO: 15259 - DNA, 20 bp, Artificial Sequence
  Description of Artificial Sequence: Synthetic oligonucleotide
  Target: ATXN2; (+) strand; PAM type: NNNNGHTT; PAM sequence: GACAGTTT
aatttttttttttcttttca

SEQ ID NO: 15260 - DNA, 20 bp, Artificial Sequence
  Description of Artificial Sequence: Synthetic oligonucleotide
  Target: ATXN2; (+) strand; PAM type: NNNNGHTT; PAM sequence: AATTGCTT
ctacttctcaggttcaagca

SEQ ID NO: 15261 - DNA, 20 bp, Artificial Sequence
  Description of Artificial Sequence: Synthetic oligonucleotide
  Target: ATXN2; (+) strand; PAM type: NNNNGHTT; PAM sequence: CTGGGATT
tgtctcaacctctcgagtag

SEQ ID NO: 15262 - DNA, 20 bp, Artificial Sequence
  Description of Artificial Sequence: Synthetic oligonucleotide
  Target: ATXN2; (+) strand; PAM type: NNNNGHTT; PAM sequence: TAGGGTTT
ttttgtacttatagtagagc

SEQ ID NO: 15263 - DNA, 20 bp, Artificial Sequence
  Description of Artificial Sequence: Synthetic oligonucleotide
  Target: ATXN2; (+) strand; PAM type: NNNNGHTT; PAM sequence: CCTGGTTT
agaaaaaaaaacagttattc

SEQ ID NO: 15264 - DNA, 20 bp, Artificial Sequence
  Description of Artificial Sequence: Synthetic oligonucleotide
  Target: ATXN2; (+) strand; PAM type: NNNNGHTT; PAM sequence: TTAAGTTT
atataataaatataaataaa

SEQ ID NO: 15265 - DNA, 20 bp, Artificial Sequence
  Description of Artificial Sequence: Synthetic oligonucleotide
  Target: ATXN2; (+) strand; PAM type: NNNNGHTT; PAM sequence: ATTTGTTT
gcatttccttaattctataa

SEQ ID NO: 15266 - DNA, 20 bp, Artificial Sequence
  Description of Artificial Sequence: Synthetic oligonucleotide
  Target: ATXN2; (+) strand; PAM type: NNNNGHTT; PAM sequence: AAAAGTTT
atttgttttctgaactccag

SEQ ID NO: 15267 - DNA, 20 bp, Artificial Sequence
  Description of Artificial Sequence: Synthetic oligonucleotide
  Target: ATXN2; (+) strand; PAM type: NNNNGHTT; PAM sequence: TACTGCTT
ccggtaaaaaagacactaca

SEQ ID NO: 15268 - DNA, 20 bp, Artificial Sequence
  Description of Artificial Sequence: Synthetic oligonucleotide
  Target: ATXN2; (+) strand; PAM type: NNNNGHTT; PAM sequence: GAGTGTTT
acatactgcttcgtgaagat

SEQ ID NO: 15269 - DNA, 20 bp, Artificial Sequence
  Description of Artificial Sequence: Synthetic oligonucleotide
  Target: ATXN2; (+) strand; PAM type: NNNNGHTT; PAM sequence: CCTTGTTT
agctcttcttccaaccaaag

SEQ ID NO: 15270 - DNA, 20 bp, Artificial Sequence
  Description of Artificial Sequence: Synthetic oligonucleotide
  Target: ATXN2; (+) strand; PAM type: NNNNGHTT; PAM sequence: AACAGCTT
tggggaggctgaaatgggag

SEQ ID NO: 15271 - DNA, 20 bp, Artificial Sequence
  Description of Artificial Sequence: Synthetic oligonucleotide
  Target: ATXN2; (+) strand; PAM type: NNNNGHTT; PAM sequence: TAAAGTTT
acataaattaatttaaaatg

SEQ ID NO: 15272 - DNA, 20 bp, Artificial Sequence
  Description of Artificial Sequence: Synthetic oligonucleotide
  Target: ATXN2; (+) strand; PAM type: NNNNGHTT; PAM sequence: GTGGGCTT
agactctaaaaaggacagat

SEQ ID NO: 15273 - DNA, 20 bp, Artificial Sequence
  Description of Artificial Sequence: Synthetic oligonucleotide
  Target: ATXN2; (+) strand; PAM type: NNNNGHTT; PAM sequence: CTTGGTTT
ctaaaaaggacagatgtggg

SEQ ID NO: 15274 - DNA, 20 bp, Artificial Sequence
  Description of Artificial Sequence: Synthetic oligonucleotide
  Target: ATXN2; (+) strand; PAM type: NNNNGHTT; PAM sequence: GGTAGATT
tctaaaactctagttagtaa

SEQ ID NO: 15275 - DNA, 20 bp, Artificial Sequence
  Description of Artificial Sequence: Synthetic oligonucleotide
  Target: ATXN2; (+) strand; PAM type: NNNNGHTT; PAM sequence: TTGGGATT
agtaaggtagattcttcacg

SEQ ID NO: 15276 - DNA, 20 bp, Artificial Sequence
  Description of Artificial Sequence: Synthetic oligonucleotide
  Target: ATXN2; (+) strand; PAM type: NNNNGHTT; PAM sequence: CTCAGCTT
tggtggcgcgcgcctgtcgt

SEQ ID NO: 15277 - DNA, 20 bp, Artificial Sequence
  Description of Artificial Sequence: Synthetic oligonucleotide
  Target: ATXN2; (+) strand; PAM type: NNNNGHTT; PAM sequence: GCCAGCTT
atgtctaacacacagaacat

SEQ ID NO: 15278 - DNA, 20 bp, Artificial Sequence
  Description of Artificial Sequence: Synthetic oligonucleotide
  Target: ATXN2; (+) strand; PAM type: NNNNGHTT; PAM sequence: AGTAGATT
gccagcttagtaggtcaata

SEQ ID NO: 15279 - DNA, 20 bp, Artificial Sequence
  Description of Artificial Sequence: Synthetic oligonucleotide
  Target: ATXN2; (+) strand; PAM type: NNNNGHTT; PAM sequence: CGGAGCTT
aatggcgtgaacccaggagg

SEQ ID NO: 15280 - DNA, 20 bp, Artificial Sequence
  Description of Artificial Sequence: Synthetic oligonucleotide
  Target: ATXN2; (+) strand; PAM type: NNNNGHTT; PAM sequence: TGAAGATT
ctgtaaacaacagtggccac

SEQ ID NO: 15281 - DNA, 20 bp, Artificial Sequence
  Description of Artificial Sequence: Synthetic oligonucleotide
  Target: ATXN2; (+) strand; PAM type: NNNNGHTT; PAM sequence: CCAAGATT
gaatttctttatgtcaatgc

SEQ ID NO: 15282 - DNA, 20 bp, Artificial Sequence
  Description of Artificial Sequence: Synthetic oligonucleotide
  Target: ATXN2; (+) strand; PAM type: NNNNGHTT; PAM sequence: AGTTGTTT
aatgagaaatctggaagaca

SEQ ID NO: 15283 - DNA, 20 bp, Artificial Sequence
  Description of Artificial Sequence: Synthetic oligonucleotide
  Target: ATXN2; (+) strand; PAM type: NNNNGHTT; PAM sequence: AGGAGATT
atctggaagacaagttgttt

SEQ ID NO: 15284 - DNA, 20 bp, Artificial Sequence
  Description of Artificial Sequence: Synthetic oligonucleotide
  Target: ATXN2; (+) strand; PAM type: NNNNGHTT; PAM sequence: ACACGTTT
actgttaaatcttttggtac

SEQ ID NO: 15285 - DNA, 20 bp, Artificial Sequence
  Description of Artificial Sequence: Synthetic oligonucleotide
  Target: ATXN2; (+) strand; PAM type: NNNNGHTT; PAM sequence: GTAGGATT
agaaacctcagacactgcta

SEQ ID NO: 15286 - DNA, 20 bp, Artificial Sequence
  Description of Artificial Sequence: Synthetic oligonucleotide
  Target: ATXN2; (+) strand; PAM type: NNNNGHTT; PAM sequence: GTAGGATT
gctacgttggaaacagctat

SEQ ID NO: 15287 - DNA, 20 bp, Artificial Sequence
  Description of Artificial Sequence: Synthetic oligonucleotide
  Target: ATXN2; (+) strand; PAM type: NNNNGHTT; PAM sequence: CATAGATT
cagttatgtaaaaggttcaa

SEQ ID NO: 15288 - DNA, 20 bp, Artificial Sequence
  Description of Artificial Sequence: Synthetic oligonucleotide
  Target: ATXN2; (+) strand; PAM type: NNNNGHTT; PAM sequence: CGCAGTTT
attgaaaacctatgtccaca

SEQ ID NO: 15289 - DNA, 20 bp, Artificial Sequence
  Description of Artificial Sequence: Synthetic oligonucleotide
  Target: ATXN2; (+) strand; PAM type: NNNNGHTT; PAM sequence: TGAAGTTT
ttttttttttttttttgaga

SEQ ID NO: 15290 - DNA, 20 bp, Artificial Sequence
  Description of Artificial Sequence: Synthetic oligonucleotide
  Target: ATXN2; (+) strand; PAM type: NNNNGHTT; PAM sequence: CTCGGCTT
tgatctcggctcactgtagc

SEQ ID NO: 15291 - DNA, 20 bp, Artificial Sequence
  Description of Artificial Sequence: Synthetic oligonucleotide
  Target: ATXN2; (+) strand; PAM type: NNNNGHTT; PAM sequence: CCCAGCTT
gctcactgtagcctcggctt

SEQ ID NO: 15292 - DNA, 20 bp, Artificial Sequence
  Description of Artificial Sequence: Synthetic oligonucleotide
  Target: ATXN2; (+) strand; PAM type: NNNNGHTT; PAM sequence: AAGTGATT
agcctcggcttcccagcttc

SEQ ID NO: 15293 - DNA, 20 bp, Artificial Sequence
  Description of Artificial Sequence: Synthetic oligonucleotide
  Target: ATXN2; (+) strand; PAM type: NNNNGHTT; PAM sequence: CTGAGATT
tgcctcagcctccctagtag

SEQ ID NO: 15294 - DNA, 20 bp, Artificial Sequence
  Description of Artificial Sequence: Synthetic oligonucleotide
  Target: ATXN2; (+) strand; PAM type: NNNNGHTT; PAM sequence: CAGGGTTT
ttttgtatttttagtagaga

SEQ ID NO: 15295 - DNA, 20 bp, Artificial Sequence
  Description of Artificial Sequence: Synthetic oligonucleotide
  Target: ATXN2; (+) strand; PAM type: NNNNGHTT; PAM sequence: CTGGGATT
agccccagcctcccaaagtg

SEQ ID NO: 15296 - DNA, 20 bp, Artificial Sequence
  Description of Artificial Sequence: Synthetic oligonucleotide
  Target: ATXN2; (+) strand; PAM type: NNNNGHTT; PAM sequence: GCAGGATT
tttaaaagtcactgttcgca

SEQ ID NO: 15297 - DNA, 20 bp, Artificial Sequence
  Description of Artificial Sequence: Synthetic oligonucleotide
  Target: ATXN2; (+) strand; PAM type: NNNNGHTT; PAM sequence: AATCGCTT
tcaagaggctgaggcaggag

SEQ ID NO: 15298 - DNA, 20 bp, Artificial Sequence
  Description of Artificial Sequence: Synthetic oligonucleotide
  Target: ATXN2; (+) strand; PAM type: NNNNGHTT; PAM sequence: CTCTGTTT
gcctgggcgacacagtgaga

SEQ ID NO: 15299 - DNA, 20 bp, Artificial Sequence
  Description of Artificial Sequence: Synthetic oligonucleotide
  Target: ATXN2; (+) strand; PAM type: NNNNGHTT; PAM sequence: ATATGATT
aaaaaaaaaggctatatatt

SEQ ID NO: 15300 - DNA, 20 bp, Artificial Sequence
  Description of Artificial Sequence: Synthetic oligonucleotide
  Target: ATXN2; (+) strand; PAM type: NNNNGHTT; PAM sequence: CAGAGTTT
agaggaactgctaaggggtt

SEQ ID NO: 15301 - DNA, 20 bp, Artificial Sequence
  Description of Artificial Sequence: Synthetic oligonucleotide
  Target: ATXN2; (+) strand; PAM type: NNNNGHTT; PAM sequence: AATTGATT
ttcagggtgatgaaaatgta

SEQ ID NO: 15302 - DNA, 20 bp, Artificial Sequence
  Description of Artificial Sequence: Synthetic oligonucleotide
  Target: ATXN2; (+) strand; PAM type: NNNNGHTT; PAM sequence: CAGAGTTT
caggaggatcatttgaggcc

SEQ ID NO: 15303 - DNA, 20 bp, Artificial Sequence
  Description of Artificial Sequence: Synthetic oligonucleotide
  Target: ATXN2; (+) strand; PAM type: NNNNGHTT; PAM sequence: CCCAGCTT
tggtgatacacatctgcagt

SEQ ID NO: 15304 - DNA, 20 bp, Artificial Sequence
  Description of Artificial Sequence: Synthetic oligonucleotide
  Target: ATXN2; (+) strand; PAM type: NNNNGHTT; PAM sequence: ATGAGTTT
aaggtgaatcacctgaaccc

SEQ ID NO: 15305 - DNA, 20 bp, Artificial Sequence
  Description of Artificial Sequence: Synthetic oligonucleotide
  Target: ATXN2; (+) strand; PAM type: NNNNGHTT; PAM sequence: GAATGATT
attttctccctatctcaaat

SEQ ID NO: 15306 - DNA, 20 bp, Artificial Sequence
  Description of Artificial Sequence: Synthetic oligonucleotide
  Target: ATXN2; (+) strand; PAM type: NNNNGHTT; PAM sequence: TTCTGTTT
ttattttccttactaataca

SEQ ID NO: 15307 - DNA, 20 bp, Artificial Sequence
  Description of Artificial Sequence: Synthetic oligonucleotide
  Target: ATXN2; (+) strand; PAM type: NNNNGHTT; PAM sequence: ATTGGATT
tctgtttgtgagaggtacaa

SEQ ID NO: 15308 - DNA, 20 bp, Artificial Sequence
  Description of Artificial Sequence: Synthetic oligonucleotide
  Target: ATXN2; (+) strand; PAM type: NNNNGHTT; PAM sequence: CTTAGTTT
tataagataaaatacatcat

SEQ ID NO: 15309 - DNA, 20 bp, Artificial Sequence
  Description of Artificial Sequence: Synthetic oligonucleotide
  Target: ATXN2; (+) strand; PAM type: NNNNGHTT; PAM sequence: CTGAGATT
tgccttggcctcccaaagtg

SEQ ID NO: 15310 - DNA, 20 bp, Artificial Sequence
  Description of Artificial Sequence: Synthetic oligonucleotide
  Target: ATXN2; (+) strand; PAM type: NNNNGHTT; PAM sequence: TTATGTTT
actgtacccagccagtaatt

SEQ ID NO: 15311 - DNA, 20 bp, Artificial Sequence
  Description of Artificial Sequence: Synthetic oligonucleotide
  Target: ATXN2; (+) strand; PAM type: NNNNGHTT; PAM sequence: AATTGTTT
aacttaaaatttgaactgaa

SEQ ID NO: 15312 - DNA, 20 bp, Artificial Sequence
  Description of Artificial Sequence: Synthetic oligonucleotide
  Target: ATXN2; (+) strand; PAM type: NNNNGHTT; PAM sequence: ATCAGATT
taaaaaactcaaacttacta

SEQ ID NO: 15313 - DNA, 20 bp, Artificial Sequence
  Description of Artificial Sequence: Synthetic oligonucleotide
  Target: ATXN2; (+) strand; PAM type: NNNNGHTT; PAM sequence: TGAGGTTT
aaatatggaaattcacttca

SEQ ID NO: 15314 - DNA, 20 bp, Artificial Sequence
  Description of Artificial Sequence: Synthetic oligonucleotide
  Target: ATXN2; (+) strand; PAM type: NNNNGHTT; PAM sequence: GACAGATT
tgtatttaaaaaaacaaggt

SEQ ID NO: 15315 - DNA, 20 bp, Artificial Sequence
  Description of Artificial Sequence: Synthetic oligonucleotide
  Target: ATXN2; (+) strand; PAM type: NNNNGHTT; PAM sequence: ACTAGATT
acagattccacgtacgtaat

SEQ ID NO: 15316 - DNA, 20 bp, Artificial Sequence
  Description of Artificial Sequence: Synthetic oligonucleotide
  Target: ATXN2; (+) strand; PAM type: NNNNGHTT; PAM sequence: TGCTGATT
ccacgtacgtaatactagat

SEQ ID NO: 15317 - DNA, 20 bp, Artificial Sequence
  Description of Artificial Sequence: Synthetic oligonucleotide
  Target: ATXN2; (+) strand; PAM type: NNNNGHTT; PAM sequence: AGAAGTTT
tatctcctaaaaagatcaaa

SEQ ID NO: 15318 - DNA, 20 bp, Artificial Sequence
  Description of Artificial Sequence: Synthetic oligonucleotide
  Target: ATXN2; (+) strand; PAM type: NNNNGHTT; PAM sequence: AAAAGATT
aagatcaaaagaagttttag

SEQ ID NO: 15319 - DNA, 20 bp, Artificial Sequence
  Description of Artificial Sequence: Synthetic oligonucleotide
  Target: ATXN2; (+) strand; PAM type: NNNNGHTT; PAM sequence: TACTGTTT
aaaagattccaatacaaaga

SEQ ID NO: 15320 - DNA, 20 bp, Artificial Sequence
  Description of Artificial Sequence: Synthetic oligonucleotide
  Target: ATXN2; (+) strand; PAM type: NNNNGHTT; PAM sequence: TTCTGTTT
atactgtttatgggtgaaca

SEQ ID NO: 15321 - DNA, 20 bp, Artificial Sequence
  Description of Artificial Sequence: Synthetic oligonucleotide
  Target: ATXN2; (+) strand; PAM type: NNNNGHTT; PAM sequence: TTAGGCTT
ttctgttttcattttctcca

SEQ ID NO: 15322 - DNA, 20 bp, Artificial Sequence
  Description of Artificial Sequence: Synthetic oligonucleotide
  Target: ATXN2; (+) strand; PAM type: NNNNGHTT; PAM sequence: GATAGCTT
aattagcctaggcctggtgt

SEQ ID NO: 15323 - DNA, 20 bp, Artificial Sequence
  Description of Artificial Sequence: Synthetic oligonucleotide
  Target: ATXN2; (+) strand; PAM type: NNNNGHTT; PAM sequence: AGAGGATT
actttgggaggctgaggcaa

SEQ ID NO: 15324 - DNA, 20 bp, Artificial Sequence
  Description of Artificial Sequence: Synthetic oligonucleotide
  Target: ATXN2; (+) strand; PAM type: NNNNGHTT; PAM sequence: GATTGCTT
tgggaggctgaggcaaagag

SEQ ID NO: 15325 - DNA, 20 bp, Artificial Sequence
  Description of Artificial Sequence: Synthetic oligonucleotide
  Target: ATXN2; (+) strand; PAM type: NNNNGHTT; PAM sequence: CATCGTTT
taaggagaaatcagtccaat

SEQ ID NO: 15326 - DNA, 20 bp, Artificial Sequence
  Description of Artificial Sequence: Synthetic oligonucleotide
  Target: ATXN2; (+) strand; PAM type: NNNNGHTT; PAM sequence: AGGAGATT
ggcggatggatcacgaggtc

SEQ ID NO: 15327 - DNA, 20 bp, Artificial Sequence
  Description of Artificial Sequence: Synthetic oligonucleotide
  Target: ATXN2; (+) strand; PAM type: NNNNGHTT; PAM sequence: CGGAGCTT
aatggcatgaacccgggagg

SEQ ID NO: 15328 - DNA, 20 bp, Artificial Sequence
  Description of Artificial Sequence: Synthetic oligonucleotide
  Target: ATXN2; (+) strand; PAM type: NNNNGHTT; PAM sequence: AAATGATT
taaaaaaagaaaaaagaaga

SEQ ID NO: 15329 - DNA, 20 bp, Artificial Sequence
  Description of Artificial Sequence: Synthetic oligonucleotide
  Target: ATXN2; (+) strand; PAM type: NNNNGHTT; PAM sequence: TTCTGTTT
tacagctgtacaaatatctt

SEQ ID NO: 15330 - DNA, 20 bp, Artificial Sequence
  Description of Artificial Sequence: Synthetic oligonucleotide
  Target: ATXN2; (+) strand; PAM type: NNNNGHTT; PAM sequence: TATAGATT
ggcaaatatgtaaaacattt

SEQ ID NO: 15331 - DNA, 20 bp, Artificial Sequence
  Description of Artificial Sequence: Synthetic oligonucleotide
  Target: ATXN2; (+) strand; PAM type: NNNNGHTT; PAM sequence: TTCGGATT
tatgtaaaacattttataga

SEQ ID NO: 15332 - DNA, 20 bp, Artificial Sequence
  Description of Artificial Sequence: Synthetic oligonucleotide
  Target: ATXN2; (+) strand; PAM type: NNNNGHTT; PAM sequence: TCTTGCTT
taatttatccacattccttc

SEQ ID NO: 15333 - DNA, 20 bp, Artificial Sequence
  Description of Artificial Sequence: Synthetic oligonucleotide
  Target: ATXN2; (+) strand; PAM type: NNNNGHTT; PAM sequence: ACTAGTTT
attccttctcttgctttatt

SEQ ID NO: 15334 - DNA, 20 bp, Artificial Sequence
  Description of Artificial Sequence: Synthetic oligonucleotide
  Target: ATXN2; (+) strand; PAM type: NNNNGHTT; PAM sequence: GAGAGTTT
tacctattctttacctaata

SEQ ID NO: 15335 - DNA, 20 bp, Artificial Sequence
  Description of Artificial Sequence: Synthetic oligonucleotide
  Target: ATXN2; (+) strand; PAM type: NNNNGHTT; PAM sequence: ACTTGTTT
atagagagtttaagaatgct

SEQ ID NO: 15336 - DNA, 20 bp, Artificial Sequence
  Description of Artificial Sequence: Synthetic oligonucleotide
  Target: ATXN2; (+) strand; PAM type: NNNNGHTT; PAM sequence: AAGTGTTT
accatcccactagcagtgtt

SEQ ID NO: 15337 - DNA, 20 bp, Artificial Sequence
  Description of Artificial Sequence: Synthetic oligonucleotide
  Target: ATXN2; (+) strand; PAM type: NNNNGHTT; PAM sequence: CACTGCTT
gctgatagacaatcatattc

SEQ ID NO: 15338 - DNA, 20 bp, Artificial Sequence
  Description of Artificial Sequence: Synthetic oligonucleotide
  Target: ATXN2; (+) strand; PAM type: NNNNGHTT; PAM sequence: CCCAGTTT
aaaactatttttctactttt

SEQ ID NO: 15339 - DNA, 20 bp, Artificial Sequence
  Description of Artificial Sequence: Synthetic oligonucleotide
  Target: ATXN2; (+) strand; PAM type: NNNNGHTT; PAM sequence: CTGGGATT
tgccttagcctcctgagtag

SEQ ID NO: 15340 - DNA, 20 bp, Artificial Sequence
  Description of Artificial Sequence: Synthetic oligonucleotide
  Target: ATXN2; (+) strand; PAM type: NNNNGHTT; PAM sequence: TGGGGTTT
ttttgtatttttagtagaga

SEQ ID NO: 15341 - DNA, 20 bp, Artificial Sequence
  Description of Artificial Sequence: Synthetic oligonucleotide
  Target: ATXN2; (+) strand; PAM type: NNNNGHTT; PAM sequence: ACCCGCTT
ctcctgacctcaagtgatcc

SEQ ID NO: 15342 - DNA, 20 bp, Artificial Sequence
  Description of Artificial Sequence: Synthetic oligonucleotide
  Target: ATXN2; (+) strand; PAM type: NNNNGHTT; PAM sequence: CTGGGATT
cgctttggcctcccaaagtg

SEQ ID NO: 15343 - DNA, 20 bp, Artificial Sequence
  Description of Artificial Sequence: Synthetic oligonucleotide
  Target: ATXN2; (+) strand; PAM type: NNNNGHTT; PAM sequence: TCATGATT
aaaggtatcgatcttttact

SEQ ID NO: 15344 - DNA, 20 bp, Artificial Sequence
  Description of Artificial Sequence: Synthetic oligonucleotide
  Target: ATXN2; (+) strand; PAM type: NNNNGHTT; PAM sequence: TCATGCTT
tgatttttttgctctggtag

SEQ ID NO: 15345 - DNA, 20 bp, Artificial Sequence
  Description of Artificial Sequence: Synthetic oligonucleotide
  Target: ATXN2; (+) strand; PAM type: NNNNGHTT; PAM sequence: CACAGATT
cactcaaaattaaacaaatt

SEQ ID NO: 15346 - DNA, 20 bp, Artificial Sequence
  Description of Artificial Sequence: Synthetic oligonucleotide
  Target: ATXN2; (+) strand; PAM type: NNNNGHTT; PAM sequence: TGTTGTTT
ttgctccagtgtagtctggg

SEQ ID NO: 15347 - DNA, 20 bp, Artificial Sequence
  Description of Artificial Sequence: Synthetic oligonucleotide
  Target: ATXN2; (+) strand; PAM type: NNNNGHTT; PAM sequence: TTTTGTTT
ccagtgtagtctgggtgttg

SEQ ID NO: 15348 - DNA, 20 bp, Artificial Sequence
  Description of Artificial Sequence: Synthetic oligonucleotide
  Target: ATXN2; (+) strand; PAM type: NNNNGHTT; PAM sequence: CACAGTTT
tgggtgttgttttgtttaat

SEQ ID NO: 15349 - DNA, 20 bp, Artificial Sequence
  Description of Artificial Sequence: Synthetic oligonucleotide
  Target: ATXN2; (+) strand; PAM type: NNNNGHTT; PAM sequence: TTTGGTTT
acagttttctcattaatcta

SEQ ID NO: 15350 - DNA, 20 bp, Artificial Sequence
  Description of Artificial Sequence: Synthetic oligonucleotide
  Target: ATXN2; (+) strand; PAM type: NNNNGHTT; PAM sequence: TTCAGTTT
taataaaatacccacataaa

SEQ ID NO: 15351 - DNA, 20 bp, Artificial Sequence
  Description of Artificial Sequence: Synthetic oligonucleotide
  Target: ATXN2; (+) strand; PAM type: NNNNGHTT; PAM sequence: CAGAGTTT
ttttttttttttttttgaaa

SEQ ID NO: 15352 - DNA, 20 bp, Artificial Sequence
  Description of Artificial Sequence: Synthetic oligonucleotide
  Target: ATXN2; (+) strand; PAM type: NNNNGHTT; PAM sequence: AAGCGATT
aacctccacctcccgagttc

SEQ ID NO: 15353 - DNA, 20 bp, Artificial Sequence
  Description of Artificial Sequence: Synthetic oligonucleotide
  Target: ATXN2; (+) strand; PAM type: NNNNGHTT; PAM sequence: CGGGGTTT
ttttgtatttttagtagaga

SEQ ID NO: 15354 - DNA, 20 bp, Artificial Sequence
  Description of Artificial Sequence: Synthetic oligonucleotide
  Target: ATXN2; (+) strand; PAM type: NNNNGHTT; PAM sequence: TTATGTTT
caccgcacccagctgacaag

SEQ ID NO: 15355 - DNA, 20 bp, Artificial Sequence
  Description of Artificial Sequence: Synthetic oligonucleotide
  Target: ATXN2; (+) strand; PAM type: NNNNGHTT; PAM sequence: ATAAGCTT
ctgttaatacacataatcta

SEQ ID NO: 15356 - DNA, 20 bp, Artificial Sequence
  Description of Artificial Sequence: Synthetic oligonucleotide
  Target: ATXN2; (+) strand; PAM type: NNNNGHTT; PAM sequence: CTCAGCTT
ggttcgagtaattctcctgc

SEQ ID NO: 15357 - DNA, 20 bp, Artificial Sequence
  Description of Artificial Sequence: Synthetic oligonucleotide
  Target: ATXN2; (+) strand; PAM type: NNNNGHTT; PAM sequence: AGATGATT
tggtacctgccaccatgtcc

SEQ ID NO: 15358 - DNA, 20 bp, Artificial Sequence
  Description of Artificial Sequence: Synthetic oligonucleotide
  Target: ATXN2; (+) strand; PAM type: NNNNGHTT; PAM sequence: CAGGGTTT
ttttgtatttttagtagaga

SEQ ID NO: 15359 - DNA, 20 bp, Artificial Sequence
  Description of Artificial Sequence: Synthetic oligonucleotide
  Target: ATXN2; (+) strand; PAM type: NNNNGHTT; PAM sequence: CTGGGATT
cacctcagccttccaaagtg

SEQ ID NO: 15360 - DNA, 20 bp, Artificial Sequence
  Description of Artificial Sequence: Synthetic oligonucleotide
  Target: ATXN2; (+) strand; PAM type: NNNNGHTT; PAM sequence: TAGAGATT
aaaactgaatatattatctt

SEQ ID NO: 15361 - DNA, 20 bp, Artificial Sequence
  Description of Artificial Sequence: Synthetic oligonucleotide
  Target: ATXN2; (+) strand; PAM type: NNNNGHTT; PAM sequence: GCATGTTT
ataattccattcaaagtatg

SEQ ID NO: 15362 - DNA, 20 bp, Artificial Sequence
  Description of Artificial Sequence: Synthetic oligonucleotide
  Target: ATXN2; (+) strand; PAM type: NNNNGHTT; PAM sequence: CTATGCTT
cttcaatttatccccatgtc

SEQ ID NO: 15363 - DNA, 20 bp, Artificial Sequence
  Description of Artificial Sequence: Synthetic oligonucleotide
  Target: ATXN2; (+) strand; PAM type: NNNNGHTT; PAM sequence: TTTTGTTT
tccccatgtcctatgcttat

SEQ ID NO: 15364 - DNA, 20 bp, Artificial Sequence
  Description of Artificial Sequence: Synthetic oligonucleotide
  Target: ATXN2; (+) strand; PAM type: NNNNGHTT; PAM sequence: CCTGGATT
gctcattgcaaactccgtct

SEQ ID NO: 15365 - DNA, 20 bp, Artificial Sequence
  Description of Artificial Sequence: Synthetic oligonucleotide
  Target: ATXN2; (+) strand; PAM type: NNNNGHTT; PAM sequence: AAGCGATT
aaactccgtctcctggattc

SEQ ID NO: 15366 - DNA, 20 bp, Artificial Sequence
  Description of Artificial Sequence: Synthetic oligonucleotide
  Target: ATXN2; (+) strand; PAM type: NNNNGHTT; PAM sequence: CTGGGATT
tgcctcagcctcccaagtag

SEQ ID NO: 15367 - DNA, 20 bp, Artificial Sequence
  Description of Artificial Sequence: Synthetic oligonucleotide
  Target: ATXN2; (+) strand; PAM type: NNNNGHTT; PAM sequence: GCTGGTTT
caggtgatccgccacgcctg

SEQ ID NO: 15368 - DNA, 20 bp, Artificial Sequence
  Description of Artificial Sequence: Synthetic oligonucleotide
  Target: ATXN2; (+) strand; PAM type: NNNNGHTT; PAM sequence: GTTTGTTT
tgatccgccacgcctggctg

SEQ ID NO: 15369 - DNA, 20 bp, Artificial Sequence
  Description of Artificial Sequence: Synthetic oligonucleotide
  Target: ATXN2; (+) strand; PAM type: NNNNGHTT; PAM sequence: TCTTGCTT
ggtttgtttttgagacaagg

SEQ ID NO: 15370 - DNA, 20 bp, Artificial Sequence
  Description of Artificial Sequence: Synthetic oligonucleotide
  Target: ATXN2; (+) strand; PAM type: NNNNGHTT; PAM sequence: CTGGGTTT
cacctcagcccaccaagtag

SEQ ID NO: 15371 - DNA, 20 bp, Artificial Sequence
  Description of Artificial Sequence: Synthetic oligonucleotide
  Target: ATXN2; (+) strand; PAM type: NNNNGHTT; PAM sequence: TGGGGTTT
ttttgtactttttgtagaga

SEQ ID NO: 15372 - DNA, 20 bp, Artificial Sequence
  Description of Artificial Sequence: Synthetic oligonucleotide
  Target: ATXN2; (+) strand; PAM type: NNNNGHTT; PAM sequence: TTTGGATT
cacctggcctatttctacac

SEQ ID NO: 15373 - DNA, 20 bp, Artificial Sequence
  Description of Artificial Sequence: Synthetic oligonucleotide
  Target: ATXN2; (+) strand; PAM type: NNNNGHTT; PAM sequence: TATCGTTT
agtaccacacagtatttttt

SEQ ID NO: 15374 - DNA, 20 bp, Artificial Sequence
  Description of Artificial Sequence: Synthetic oligonucleotide
  Target: ATXN2; (+) strand; PAM type: NNNNGHTT; PAM sequence: AGAGGTTT
ataaaattctattttatgct

SEQ ID NO: 15375 - DNA, 20 bp, Artificial Sequence
  Description of Artificial Sequence: Synthetic oligonucleotide
  Target: ATXN2; (+) strand; PAM type: NNNNGHTT; PAM sequence: TAATGCTT
accatatcttaataaacatg

SEQ ID NO: 15376 - DNA, 20 bp, Artificial Sequence
  Description of Artificial Sequence: Synthetic oligonucleotide
  Target: ATXN2; (+) strand; PAM type: NNNNGHTT; PAM sequence: TTCTGTTT
ctactgtgtaccacgaacta

SEQ ID NO: 15377 - DNA, 20 bp, Artificial Sequence
  Description of Artificial Sequence: Synthetic oligonucleotide
  Target: ATXN2; (+) strand; PAM type: NNNNGHTT; PAM sequence: TTTAGCTT
gtgtaccacgaactattctg

SEQ ID NO: 15378 - DNA, 20 bp, Artificial Sequence
  Description of Artificial Sequence: Synthetic oligonucleotide
  Target: ATXN2; (+) strand; PAM type: NNNNGHTT; PAM sequence: ACCTGTTT
ccattacatagatccgttcc

SEQ ID NO: 15379 - DNA, 20 bp, Artificial Sequence
  Description of Artificial Sequence: Synthetic oligonucleotide
  Target: ATXN2; (+) strand; PAM type: NNNNGHTT; PAM sequence: TACTGCTT
aataagtgccactctccagt

SEQ ID NO: 15380 - DNA, 20 bp, Artificial Sequence
  Description of Artificial Sequence: Synthetic oligonucleotide
  Target: ATXN2; (+) strand; PAM type: NNNNGHTT; PAM sequence: AACAGCTT
acagcaaagttgaggccgta

SEQ ID NO: 15381 - DNA, 20 bp, Artificial Sequence
  Description of Artificial Sequence: Synthetic oligonucleotide
  Target: ATXN2; (+) strand; PAM type: NNNNGHTT; PAM sequence: CCCTGTTT
tcacgccgttcagaagagat

SEQ ID NO: 15382 - DNA, 20 bp, Artificial Sequence
  Description of Artificial Sequence: Synthetic oligonucleotide
  Target: ATXN2; (+) strand; PAM type: NNNNGHTT; PAM sequence: AAATGATT
aacctccaccttctgggttc

SEQ ID NO: 15383 - DNA, 20 bp, Artificial Sequence
  Description of Artificial Sequence: Synthetic oligonucleotide
  Target: ATXN2; (+) strand; PAM type: NNNNGHTT; PAM sequence: CTGGGATT
tgtctcagcctcccgagtag

SEQ ID NO: 15384 - DNA, 20 bp, Artificial Sequence
  Description of Artificial Sequence: Synthetic oligonucleotide
  Target: ATXN2; (+) strand; PAM type: NNNNGHTT; PAM sequence: ACGTGCTT
catttttcttgaatttattc

SEQ ID NO: 15385 - DNA, 20 bp, Artificial Sequence
  Description of Artificial Sequence: Synthetic oligonucleotide
  Target: ATXN2; (+) strand; PAM type: NNNNGHTT; PAM sequence: AAATGCTT
tttgctatctctaactctaa

SEQ ID NO: 15386 - DNA, 20 bp, Artificial Sequence
  Description of Artificial Sequence: Synthetic oligonucleotide
  Target: ATXN2; (+) strand; PAM type: NNNNGHTT; PAM sequence: AGTGGCTT
aattacattagcgtgggcac

SEQ ID NO: 15387 - DNA, 20 bp, Artificial Sequence
  Description of Artificial Sequence: Synthetic oligonucleotide
  Target: ATXN2; (+) strand; PAM type: NNNNGHTT; PAM sequence: AGAGGATT
tcacttttgaaggccaaggt

SEQ ID NO: 15388 - DNA, 20 bp, Artificial Sequence
  Description of Artificial Sequence: Synthetic oligonucleotide
  Target: ATXN2; (+) strand; PAM type: NNNNGHTT; PAM sequence: GATTGCTT
ttttgaaggccaaggtagag

SEQ ID NO: 15389 - DNA, 20 bp, Artificial Sequence
  Description of Artificial Sequence: Synthetic oligonucleotide
  Target: ATXN2; (+) strand; PAM type: NNNNGHTT; PAM sequence: AGTCGCTT
ttgggaggctgaggtgggag

SEQ ID NO: 15390 - DNA, 20 bp, Artificial Sequence
  Description of Artificial Sequence: Synthetic oligonucleotide
  Target: ATXN2; (+) strand; PAM type: NNNNGHTT; PAM sequence: CCCTGTTT
gcctgagtgacagagcatga

SEQ ID NO: 15391 - DNA, 20 bp, Artificial Sequence
  Description of Artificial Sequence: Synthetic oligonucleotide
  Target: ATXN2; (+) strand; PAM type: NNNNGHTT; PAM sequence: TACAGTTT
atttttctagggtgagggta

SEQ ID NO: 15392 - DNA, 20 bp, Artificial Sequence
  Description of Artificial Sequence: Synthetic oligonucleotide
  Target: ATXN2; (+) strand; PAM type: NNNNGHTT; PAM sequence: CACAGTTT
gtatacagtttcactaggta

SEQ ID NO: 15393 - DNA, 20 bp, Artificial Sequence
  Description of Artificial Sequence: Synthetic oligonucleotide
  Target: ATXN2; (+) strand; PAM type: NNNNGHTT; PAM sequence: AATAGATT
ggttctcaaaagggacccaa

SEQ ID NO: 15394 - DNA, 20 bp, Artificial Sequence
  Description of Artificial Sequence: Synthetic oligonucleotide
  Target: ATXN2; (+) strand; PAM type: NNNNGHTT; PAM sequence: TACAGCTT
actatatatgtaagaccact

SEQ ID NO: 15395 - DNA, 20 bp, Artificial Sequence
  Description of Artificial Sequence: Synthetic oligonucleotide
  Target: ATXN2; (+) strand; PAM type: NNNNGHTT; PAM sequence: TAATGCTT
ttttcattctttccataaaa

SEQ ID NO: 15396 - DNA, 20 bp, Artificial Sequence
  Description of Artificial Sequence: Synthetic oligonucleotide
  Target: ATXN2; (+) strand; PAM type: NNNNGHTT; PAM sequence: AAAAGATT
agtgcagcaataaagacaga

SEQ ID NO: 15397 - DNA, 20 bp, Artificial Sequence
  Description of Artificial Sequence: Synthetic oligonucleotide
  Target: ATXN2; (+) strand; PAM type: NNNNGHTT; PAM sequence: TCAGGATT
aggataatggctagaagaat

SEQ ID NO: 15398 - DNA, 20 bp, Artificial Sequence
  Description of Artificial Sequence: Synthetic oligonucleotide
  Target: ATXN2; (+) strand; PAM type: NNNNGHTT; PAM sequence: CGGAGCTT
aatggcgtgaacccgggagg

SEQ ID NO: 15399 - DNA, 20 bp, Artificial Sequence
  Description of Artificial Sequence: Synthetic oligonucleotide
  Target: ATXN2; (+) strand; PAM type: NNNNGHTT; PAM sequence: ATAGGTTT
ttaggatgagcaggaagtga

SEQ ID NO: 15400 - DNA, 20 bp, Artificial Sequence
  Description of Artificial Sequence: Synthetic oligonucleotide
  Target: ATXN2; (+) strand; PAM type: NNNNGHTT; PAM sequence: GAAAGATT
ataggttttcatgctaaagg

SEQ ID NO: 15401 - DNA, 20 bp, Artificial Sequence
  Description of Artificial Sequence: Synthetic oligonucleotide
  Target: ATXN2; (+) strand; PAM type: NNNNGHTT; PAM sequence: GCATGATT
tagaagggagagagtcaagg

SEQ ID NO: 15402 - DNA, 20 bp, Artificial Sequence
  Description of Artificial Sequence: Synthetic oligonucleotide
  Target: ATXN2; (+) strand; PAM type: NNNNGHTT; PAM sequence: GTTGGCTT
gagtcaagggcatgattgaa

SEQ ID NO: 15403 - DNA, 20 bp, Artificial Sequence
  Description of Artificial Sequence: Synthetic oligonucleotide
  Target: ATXN2; (+) strand; PAM type: NNNNGHTT; PAM sequence: AGCAGTTT
gtgggaagactcttaggccc

SEQ ID NO: 15404 - DNA, 20 bp, Artificial Sequence
  Description of Artificial Sequence: Synthetic oligonucleotide
  Target: ATXN2; (+) strand; PAM type: NNNNGHTT; PAM sequence: CTGTGATT
gaagtcgaggctgcagtgag

SEQ ID NO: 15405 - DNA, 20 bp, Artificial Sequence
  Description of Artificial Sequence: Synthetic oligonucleotide
  Target: ATXN2; (+) strand; PAM type: NNNNGHTT; PAM sequence: TTATGATT
cattaaccaaccttcccctt

SEQ ID NO: 15406 - DNA, 20 bp, Artificial Sequence
  Description of Artificial Sequence: Synthetic oligonucleotide
  Target: ATXN2; (+) strand; PAM type: NNNNGHTT; PAM sequence: GTAAGTTT
atcaaagcatgcaattagtt

SEQ ID NO: 15407 - DNA, 20 bp, Artificial Sequence
  Description of Artificial Sequence: Synthetic oligonucleotide
  Target: ATXN2; (+) strand; PAM type: NNNNGHTT; PAM sequence: ATATGATT
agccctaaatgcagcggaaa

SEQ ID NO: 15408 - DNA, 20 bp, Artificial Sequence
  Description of Artificial Sequence: Synthetic oligonucleotide
  Target: ATXN2; (+) strand; PAM type: NNNNGHTT; PAM sequence: TCTGGCTT
gtaaagagacagtcaaattt

SEQ ID NO: 15409 - DNA, 20 bp, Artificial Sequence
  Description of Artificial Sequence: Synthetic oligonucleotide
  Target: ATXN2; (+) strand; PAM type: NNNNGHTT; PAM sequence: AGCAGATT
ataaaatttatttactgatg

SEQ ID NO: 15410 - DNA, 20 bp, Artificial Sequence
  Description of Artificial Sequence: Synthetic oligonucleotide
  Target: ATXN2; (+) strand; PAM type: NNNNGHTT; PAM sequence: AGAAGTTT
aaaagcgactgaaggcccta

SEQ ID NO: 15411 - DNA, 20 bp, Artificial Sequence
  Description of Artificial Sequence: Synthetic oligonucleotide
  Target: ATXN2; (+) strand; PAM type: NNNNGHTT; PAM sequence: AACTGATT
tcaaataaaggataaataca

SEQ ID NO: 15412 - DNA, 20 bp, Artificial Sequence
  Description of Artificial Sequence: Synthetic oligonucleotide
  Target: ATXN2; (+) strand; PAM type: NNNNGHTT; PAM sequence: TTCAGTTT
tcatatgacgtaaaggtact

SEQ ID NO: 15413 - DNA, 20 bp, Artificial Sequence
  Description of Artificial Sequence: Synthetic oligonucleotide
  Target: ATXN2; (+) strand; PAM type: NNNNGHTT; PAM sequence: AAAGGTTT
cactgaccttactcatgtta

SEQ ID NO: 15414 - DNA, 20 bp, Artificial Sequence
  Description of Artificial Sequence: Synthetic oligonucleotide
  Target: ATXN2; (+) strand; PAM type: NNNNGHTT; PAM sequence: GGAGGCTT
cctataatcccagctcctcg

SEQ ID NO: 15415 - DNA, 20 bp, Artificial Sequence
  Description of Artificial Sequence: Synthetic oligonucleotide
  Target: ATXN2; (+) strand; PAM type: NNNNGHTT; PAM sequence: AATTGCTT
tcgggaggcttaggcagaag

SEQ ID NO: 15416 - DNA, 20 bp, Artificial Sequence
  Description of Artificial Sequence: Synthetic oligonucleotide
  Target: ATXN2; (+) strand; PAM type: NNNNGHTT; PAM sequence: AAAGGTTT
gcgagactccgcctcaaaat

SEQ ID NO: 15417 - DNA, 20 bp, Artificial Sequence
  Description of Artificial Sequence: Synthetic oligonucleotide
  Target: ATXN2; (+) strand; PAM type: NNNNGHTT; PAM sequence: TCACGCTT
ccctggctgggcgcggtggc

SEQ ID NO: 15418 - DNA, 20 bp, Artificial Sequence
  Description of Artificial Sequence: Synthetic oligonucleotide
  Target: ATXN2; (+) strand; PAM type: NNNNGHTT; PAM sequence: AATCGCTT
tcgggaggctgagataggag

SEQ ID NO: 15419 - DNA, 20 bp, Artificial Sequence
  Description of Artificial Sequence: Synthetic oligonucleotide
  Target: ATXN2; (+) strand; PAM type: NNNNGHTT; PAM sequence: CGAAGATT
aaggcggaggttgcagtgag

SEQ ID NO: 15420 - DNA, 20 bp, Artificial Sequence
  Description of Artificial Sequence: Synthetic oligonucleotide
  Target: ATXN2; (+) strand; PAM type: NNNNGHTT; PAM sequence: AAAGGTTT
aggaaaacaaaaaagaaaaa

SEQ ID NO: 15421 - DNA, 20 bp, Artificial Sequence
  Description of Artificial Sequence: Synthetic oligonucleotide
  Target: ATXN2; (+) strand; PAM type: NNNNGHTT; PAM sequence: CAAAGATT
ggtttccccaaaaataaagc

SEQ ID NO: 15422 - DNA, 20 bp, Artificial Sequence
  Description of Artificial Sequence: Synthetic oligonucleotide
  Target: ATXN2; (+) strand; PAM type: NNNNGHTT; PAM sequence: TATTGCTT
acataatagtctgcatctta

SEQ ID NO: 15423 - DNA, 20 bp, Artificial Sequence
  Description of Artificial Sequence: Synthetic oligonucleotide
  Target: ATXN2; (+) strand; PAM type: NNNNGHTT; PAM sequence: TTTAGCTT
tttttttttttttttttact

SEQ ID NO: 15424 - DNA, 20 bp, Artificial Sequence
  Description of Artificial Sequence: Synthetic oligonucleotide
  Target: ATXN2; (+) strand; PAM type: NNNNGHTT; PAM sequence: AGGAGCTT
tgggtggatcacctaaggtc

SEQ ID NO: 15425 - DNA, 20 bp, Artificial Sequence
  Description of Artificial Sequence: Synthetic oligonucleotide
  Target: ATXN2; (+) strand; PAM type: NNNNGHTT; PAM sequence: AACTGCTT
tagggaggctgaagcaagat

SEQ ID NO: 15426 - DNA, 20 bp, Artificial Sequence
  Description of Artificial Sequence: Synthetic oligonucleotide
  Target: ATXN2; (+) strand; PAM type: NNNNGHTT; PAM sequence: GCTAGATT
acatgagttagagtagaaaa

SEQ ID NO: 15427 - DNA, 20 bp, Artificial Sequence
  Description of Artificial Sequence: Synthetic oligonucleotide
  Target: ATXN2; (+) strand; PAM type: NNNNGHTT; PAM sequence: GCAAGTTT
agatttgtgtcctcacttta

SEQ ID NO: 15428 - DNA, 20 bp, Artificial Sequence
  Description of Artificial Sequence: Synthetic oligonucleotide
  Target: ATXN2; (+) strand; PAM type: NNNNGHTT; PAM sequence: GCCTGTTT
ttagcaagtttcctaaatat

SEQ ID NO: 15429 - DNA, 20 bp, Artificial Sequence
  Description of Artificial Sequence: Synthetic oligonucleotide
  Target: ATXN2; (+) strand; PAM type: NNNNGHTT; PAM sequence: TGATGATT
tctactacagaaacaacttg

SEQ ID NO: 15430 - DNA, 20 bp, Artificial Sequence
  Description of Artificial Sequence: Synthetic oligonucleotide
  Target: ATXN2; (+) strand; PAM type: NNNNGHTT; PAM sequence: AAGCGATT
aatctctgcctcccgggttc

SEQ ID NO: 15431 - DNA, 20 bp, Artificial Sequence
  Description of Artificial Sequence: Synthetic oligonucleotide
  Target: ATXN2; (+) strand; PAM type: NNNNGHTT; PAM sequence: CTGGGATT
ctcagcctctccccaagtag

SEQ ID NO: 15432 - DNA, 20 bp, Artificial Sequence
  Description of Artificial Sequence: Synthetic oligonucleotide
  Target: ATXN2; (+) strand; PAM type: NNNNGHTT; PAM sequence: CGGGGTTT
ttttacttttttagtaaaga

SEQ ID NO: 15433 - DNA, 20 bp, Artificial Sequence
  Description of Artificial Sequence: Synthetic oligonucleotide
  Target: ATXN2; (+) strand; PAM type: NNNNGHTT; PAM sequence: GTGAGATT
gcccaccttggtctcccaaa

SEQ ID NO: 15434 - DNA, 20 bp, Artificial Sequence
  Description of Artificial Sequence: Synthetic oligonucleotide
  Target: ATXN2; (+) strand; PAM type: NNNNGHTT; PAM sequence: CATTGATT
gtgaacccagcattaagaag

SEQ ID NO: 15435 - DNA, 20 bp, Artificial Sequence
  Description of Artificial Sequence: Synthetic oligonucleotide
  Target: ATXN2; (+) strand; PAM type: NNNNGHTT; PAM sequence: AATCGCTT
tcgggaggctgaggcaggag

SEQ ID NO: 15436 - DNA, 20 bp, Artificial Sequence
  Description of Artificial Sequence: Synthetic oligonucleotide
  Target: ATXN2; (+) strand; PAM type: NNNNGHTT; PAM sequence: AATGGTTT
atgccaattaataattctaa

SEQ ID NO: 15437 - DNA, 20 bp, Artificial Sequence
  Description of Artificial Sequence: Synthetic oligonucleotide
  Target: ATXN2; (+) strand; PAM type: NNNNGHTT; PAM sequence: CTTAGCTT
gcaatttctgcctggatagt

SEQ ID NO: 15438 - DNA, 20 bp, Artificial Sequence
  Description of Artificial Sequence: Synthetic oligonucleotide
  Target: ATXN2; (+) strand; PAM type: NNNNGHTT; PAM sequence: GTAAGTTT
gtataattcactaaaccact

SEQ ID NO: 15439 - DNA, 20 bp, Artificial Sequence
  Description of Artificial Sequence: Synthetic oligonucleotide
  Target: ATXN2; (+) strand; PAM type: NNNNGHTT; PAM sequence: AATCGCTT
tcgggaggctgaggcaagag

SEQ ID NO: 15440 - DNA, 20 bp, Artificial Sequence
  Description of Artificial Sequence: Synthetic oligonucleotide
  Target: ATXN2; (+) strand; PAM type: NNNNGHTT; PAM sequence: GTGAGATT
cccatccccttatgagtaga

SEQ ID NO: 15441 - DNA, 20 bp, Artificial Sequence
  Description of Artificial Sequence: Synthetic oligonucleotide
  Target: ATXN2; (+) strand; PAM type: NNNNGHTT; PAM sequence: ACTTGTTT
aaggtagcagctaaaaaaag

SEQ ID NO: 15442 - DNA, 20 bp, Artificial Sequence
  Description of Artificial Sequence: Synthetic oligonucleotide
  Target: ATXN2; (+) strand; PAM type: NNNNGHTT; PAM sequence: AGAAGATT
atcaaagacaaggacatttg

SEQ ID NO: 15443 - DNA, 20 bp, Artificial Sequence
  Description of Artificial Sequence: Synthetic oligonucleotide
  Target: ATXN2; (+) strand; PAM type: NNNNGHTT; PAM sequence: CTGTGCTT
gaagattcaaaaacagaaca

SEQ ID NO: 15444 - DNA, 20 bp, Artificial Sequence
  Description of Artificial Sequence: Synthetic oligonucleotide
  Target: ATXN2; (+) strand; PAM type: NNNNGHTT; PAM sequence: AACAGCTT
agaatcagcccaacaataaa

SEQ ID NO: 15445 - DNA, 20 bp, Artificial Sequence
  Description of Artificial Sequence: Synthetic oligonucleotide
  Target: ATXN2; (+) strand; PAM type: NNNNGHTT; PAM sequence: TATAGATT
acaataaaaacagcttttgg

SEQ ID NO: 15446 - DNA, 20 bp, Artificial Sequence
  Description of Artificial Sequence: Synthetic oligonucleotide
  Target: ATXN2; (+) strand; PAM type: NNNNGHTT; PAM sequence: ATTAGCTT
tctctacaaaaaatacaaaa

SEQ ID NO: 15447 - DNA, 20 bp, Artificial Sequence
  Description of Artificial Sequence: Synthetic oligonucleotide
  Target: ATXN2; (+) strand; PAM type: NNNNGHTT; PAM sequence: AATCGCTT
tcaggaggctgaggcaggag

SEQ ID NO: 15448 - DNA, 20 bp, Artificial Sequence
  Description of Artificial Sequence: Synthetic oligonucleotide
  Target: ATXN2; (+) strand; PAM type: NNNNGHTT; PAM sequence: TCAGGATT
aaagaatttgagaaccaagt

SEQ ID NO: 15449 - DNA, 20 bp, Artificial Sequence
  Description of Artificial Sequence: Synthetic oligonucleotide
  Target: ATXN2; (+) strand; PAM type: NNNNGHTT; PAM sequence: AATCGCTT
aatttttaatataactacat

SEQ ID NO: 15450 - DNA, 20 bp, Artificial Sequence
  Description of Artificial Sequence: Synthetic oligonucleotide
  Target: ATXN2; (+) strand; PAM type: NNNNGHTT; PAM sequence: AATTGTTT
ctttttcattttcattagac

SEQ ID NO: 15451 - DNA, 20 bp, Artificial Sequence
  Description of Artificial Sequence: Synthetic oligonucleotide
  Target: ATXN2; (+) strand; PAM type: NNNNGHTT; PAM sequence: CTTTGATT
ctttcttccttagccttata

SEQ ID NO: 15452 - DNA, 20 bp, Artificial Sequence
  Description of Artificial Sequence: Synthetic oligonucleotide
  Target: ATXN2; (+) strand; PAM type: NNNNGHTT; PAM sequence: TCCAGATT
gccttatactttgatttctt

SEQ ID NO: 15453 - DNA, 20 bp, Artificial Sequence
  Description of Artificial Sequence: Synthetic oligonucleotide
  Target: ATXN2; (+) strand; PAM type: NNNNGHTT; PAM sequence: AAATGCTT
cttgaccacaaaactgtaga

SEQ ID NO: 15454 - DNA, 20 bp, Artificial Sequence
  Description of Artificial Sequence: Synthetic oligonucleotide
  Target: ATXN2; (+) strand; PAM type: NNNNGHTT; PAM sequence: AATTGTTT
taatttttctctaaagttct

SEQ ID NO: 15455 - DNA, 20 bp, Artificial Sequence
  Description of Artificial Sequence: Synthetic oligonucleotide
  Target: ATXN2; (+) strand; PAM type: NNNNGHTT; PAM sequence: CGGGGTTT
ttttgtatttttagtagaga

SEQ ID NO: 15456 - DNA, 20 bp, Artificial Sequence
  Description of Artificial Sequence: Synthetic oligonucleotide
  Target: ATXN2; (+) strand; PAM type: NNNNGHTT; PAM sequence: CTAAGATT
cgcctcagcctccctaagtg

SEQ ID NO: 15457 - DNA, 20 bp, Artificial Sequence
  Description of Artificial Sequence: Synthetic oligonucleotide
  Target: ATXN2; (+) strand; PAM type: NNNNGHTT; PAM sequence: AAAAGTTT
agcccagatatttctttaaa

SEQ ID NO: 15458 - DNA, 20 bp, Artificial Sequence
  Description of Artificial Sequence: Synthetic oligonucleotide
  Target: ATXN2; (+) strand; PAM type: NNNNGHTT; PAM sequence: CTTTGCTT
tgtaagatcactgtgaaaat

SEQ ID NO: 15459 - DNA, 20 bp, Artificial Sequence
  Description of Artificial Sequence: Synthetic oligonucleotide
  Target: ATXN2; (+) strand; PAM type: NNNNGHTT; PAM sequence: TCACGTTT
aaatactctccattatttct

SEQ ID NO: 15460 - DNA, 20 bp, Artificial Sequence
  Description of Artificial Sequence: Synthetic oligonucleotide
  Target: ATXN2; (+) strand; PAM type: NNNNGHTT; PAM sequence: ACTGGATT
tcttcacgtttcggccccga

SEQ ID NO: 15461 - DNA, 20 bp, Artificial Sequence
  Description of Artificial Sequence: Synthetic oligonucleotide
  Target: ATXN2; (+) strand; PAM type: NNNNGHTT; PAM sequence: AAATGTTT
atttaaaaatcctcatatct

SEQ ID NO: 15462 - DNA, 20 bp, Artificial Sequence
  Description of Artificial Sequence: Synthetic oligonucleotide
  Target: ATXN2; (+) strand; PAM type: NNNNGHTT; PAM sequence: TTTTGTTT
aatcctcatatctaaatgtt

SEQ ID NO: 15463 - DNA, 20 bp, Artificial Sequence
  Description of Artificial Sequence: Synthetic oligonucleotide
  Target: ATXN2; (+) strand; PAM type: NNNNGHTT; PAM sequence: TATGGTTT
atctaaatgttttttgtttc

SEQ ID NO: 15464 - DNA, 20 bp, Artificial Sequence
  Description of Artificial Sequence: Synthetic oligonucleotide
  Target: ATXN2; (+) strand; PAM type: NNNNGHTT; PAM sequence: CAATGCTT
cacatccctctattagctca

SEQ ID NO: 15465 - DNA, 20 bp, Artificial Sequence
  Description of Artificial Sequence: Synthetic oligonucleotide
  Target: ATXN2; (+) strand; PAM type: NNNNGHTT; PAM sequence: CTCTGATT
gcacacacatcaagaagcct

SEQ ID NO: 15466 - DNA, 20 bp, Artificial Sequence
  Description of Artificial Sequence: Synthetic oligonucleotide
  Target: ATXN2; (+) strand; PAM type: NNNNGHTT; PAM sequence: AGTGGCTT
tgagaagtaaaatcattcaa

SEQ ID NO: 15467 - DNA, 20 bp, Artificial Sequence
  Description of Artificial Sequence: Synthetic oligonucleotide
  Target: ATXN2; (+) strand; PAM type: NNNNGHTT; PAM sequence: GTAAGTTT
gtaaaaattaccttcggact

SEQ ID NO: 15468 - DNA, 20 bp, Artificial Sequence
  Description of Artificial Sequence: Synthetic oligonucleotide
  Target: ATXN2; (+) strand; PAM type: NNNNGHTT; PAM sequence: ATTTGTTT
actacccggtcaccagggat

SEQ ID NO: 15469 - DNA, 20 bp, Artificial Sequence
  Description of Artificial Sequence: Synthetic oligonucleotide
  Target: ATXN2; (+) strand; PAM type: NNNNGHTT; PAM sequence: TCAGGCTT
attttactttttatacctca

SEQ ID NO: 15470 - DNA, 20 bp, Artificial Sequence
  Description of Artificial Sequence: Synthetic oligonucleotide
  Target: ATXN2; (+) strand; PAM type: NNNNGHTT; PAM sequence: CAGAGTTT
attcttcaggaggctctact

SEQ ID NO: 15471 - DNA, 20 bp, Artificial Sequence
  Description of Artificial Sequence: Synthetic oligonucleotide
  Target: ATXN2; (+) strand; PAM type: NNNNGHTT; PAM sequence: TATTGTTT
ctatgtaaattgtcatactg

SEQ ID NO: 15472 - DNA, 20 bp, Artificial Sequence
  Description of Artificial Sequence: Synthetic oligonucleotide
  Target: ATXN2; (+) strand; PAM type: NNNNGHTT; PAM sequence: GCTAGTTT
ggcacgtaccaccacgttcg

SEQ ID NO: 15473 - DNA, 20 bp, Artificial Sequence
  Description of Artificial Sequence: Synthetic oligonucleotide
  Target: ATXN2; (+) strand; PAM type: NNNNGHTT; PAM sequence: CTGGGATT
cacctcaaactcccaaagtg

SEQ ID NO: 15474 - DNA, 20 bp, Artificial Sequence
  Description of Artificial Sequence: Synthetic oligonucleotide
  Target: ATXN2; (+) strand; PAM type: NNNNGHTT; PAM sequence: GGCAGTTT
ttactttattctacccccaa

SEQ ID NO: 15475 - DNA, 20 bp, Artificial Sequence
  Description of Artificial Sequence: Synthetic oligonucleotide
  Target: ATXN2; (+) strand; PAM type: NNNNGHTT; PAM sequence: CATAGATT
atgaaccatcctcatatttg

SEQ ID NO: 15476 - DNA, 20 bp, Artificial Sequence
  Description of Artificial Sequence: Synthetic oligonucleotide
  Target: ATXN2; (+) strand; PAM type: NNNNGHTT; PAM sequence: AAATGCTT
aactgaatcttcctcatcta

SEQ ID NO: 15477 - DNA, 20 bp, Artificial Sequence
  Description of Artificial Sequence: Synthetic oligonucleotide
  Target: ATXN2; (+) strand; PAM type: NNNNGHTT; PAM sequence: TGCGGATT
ggaccagaagtattttagac

SEQ ID NO: 15478 - DNA, 20 bp, Artificial Sequence
  Description of Artificial Sequence: Synthetic oligonucleotide
  Target: ATXN2; (+) strand; PAM type: NNNNGHTT; PAM sequence: TTCGGATT
attttagactgcggattttt

SEQ ID NO: 15479 - DNA, 20 bp, Artificial Sequence
  Description of Artificial Sequence: Synthetic oligonucleotide
  Target: ATXN2; (+) strand; PAM type: NNNNGHTT; PAM sequence: TAGTGCTT
ggggatatttgcattatact

SEQ ID NO: 15480 - DNA, 20 bp, Artificial Sequence
  Description of Artificial Sequence: Synthetic oligonucleotide
  Target: ATXN2; (+) strand; PAM type: NNNNGHTT; PAM sequence: TTCCGATT
aatatgaaattttggagcat

SEQ ID NO: 15481 - DNA, 20 bp, Artificial Sequence
  Description of Artificial Sequence: Synthetic oligonucleotide
  Target: ATXN2; (+) strand; PAM type: NNNNGHTT; PAM sequence: TAACGTTT
tttacatttgcatataaagc

SEQ ID NO: 15482 - DNA, 20 bp, Artificial Sequence
  Description of Artificial Sequence: Synthetic oligonucleotide
  Target: ATXN2; (+) strand; PAM type: NNNNGHTT; PAM sequence: AAATGTTT
aacgtttattatttgttgca

SEQ ID NO: 15483 - DNA, 20 bp, Artificial Sequence
  Description of Artificial Sequence: Synthetic oligonucleotide
  Target: ATXN2; (+) strand; PAM type: NNNNGHTT; PAM sequence: TTAGGTTT
atttgttgcaaaatgtttag

SEQ ID NO: 15484 - DNA, 20 bp, Artificial Sequence
  Description of Artificial Sequence: Synthetic oligonucleotide
  Target: ATXN2; (+) strand; PAM type: NNNNGHTT; PAM sequence: GGAAGATT
gatatcttacatgtattaag

SEQ ID NO: 15485 - DNA, 20 bp, Artificial Sequence
  Description of Artificial Sequence: Synthetic oligonucleotide
  Target: ATXN2; (+) strand; PAM type: NNNNGHTT; PAM sequence: TTTTGTTT
ttacatgtattaagggaaga

SEQ ID NO: 15486 - DNA, 20 bp, Artificial Sequence
  Description of Artificial Sequence: Synthetic oligonucleotide
  Target: ATXN2; (+) strand; PAM type: NNNNGHTT; PAM sequence: TTTTGCTT
aagattttgtttatttaata

SEQ ID NO: 15487 - DNA, 20 bp, Artificial Sequence
  Description of Artificial Sequence: Synthetic oligonucleotide
  Target: ATXN2; (+) strand; PAM type: NNNNGHTT; PAM sequence: TCAGGTTT
agaacagaaggaacagaagg

SEQ ID NO: 15488 - DNA, 20 bp, Artificial Sequence
  Description of Artificial Sequence: Synthetic oligonucleotide
  Target: ATXN2; (+) strand; PAM type: NNNNGHTT; PAM sequence: TGGTGTTT
ttatcagtcaaaccaactaa

SEQ ID NO: 15489 - DNA, 20 bp, Artificial Sequence
  Description of Artificial Sequence: Synthetic oligonucleotide
  Target: ATXN2; (+) strand; PAM type: NNNNGHTT; PAM sequence: AAGTGATT
agagaggagggttcactgaa

SEQ ID NO: 15490 - DNA, 20 bp, Artificial Sequence
  Description of Artificial Sequence: Synthetic oligonucleotide
  Target: ATXN2; (+) strand; PAM type: NNNNGHTT; PAM sequence: GAGGGATT
ggttcactgaaaagtgattt

SEQ ID NO: 15491 - DNA, 20 bp, Artificial Sequence
  Description of Artificial Sequence: Synthetic oligonucleotide
  Target: ATXN2; (+) strand; PAM type: NNNNGHTT; PAM sequence: ACTTGATT
gcaatgaaactgttctatta

SEQ ID NO: 15492 - DNA, 20 bp, Artificial Sequence
  Description of Artificial Sequence: Synthetic oligonucleotide
  Target: ATXN2; (+) strand; PAM type: NNNNGHTT; PAM sequence: CACTGATT
cttgattgtggtggtagtta

SEQ ID NO: 15493 - DNA, 20 bp, Artificial Sequence
  Description of Artificial Sequence: Synthetic oligonucleotide
  Target: ATXN2; (+) strand; PAM type: NNNNGHTT; PAM sequence: CAGTGCTT
cagcatatcagcatcagtga

SEQ ID NO: 15494 - DNA, 20 bp, Artificial Sequence
  Description of Artificial Sequence: Synthetic oligonucleotide
  Target: ATXN2; (+) strand; PAM type: NNNNGHTT; PAM sequence: TCCTGATT
taccatatacgtgtatatct

SEQ ID NO: 15495 - DNA, 20 bp, Artificial Sequence
  Description of Artificial Sequence: Synthetic oligonucleotide
  Target: ATXN2; (+) strand; PAM type: NNNNGHTT; PAM sequence: GATAGCTT
gcaaagtctcaaaaatttgt

SEQ ID NO: 15496 - DNA, 20 bp, Artificial Sequence
  Description of Artificial Sequence: Synthetic oligonucleotide
  Target: ATXN2; (+) strand; PAM type: NNNNGHTT; PAM sequence: TATAGTTT
ttcttccatcatgtgggact

SEQ ID NO: 15497 - DNA, 20 bp, Artificial Sequence
  Description of Artificial Sequence: Synthetic oligonucleotide
  Target: ATXN2; (+) strand; PAM type: NNNNGHTT; PAM sequence: GGAGGTTT
tggtgttctacgtatctttt

SEQ ID NO: 15498 - DNA, 20 bp, Artificial Sequence
  Description of Artificial Sequence: Synthetic oligonucleotide
  Target: ATXN2; (+) strand; PAM type: NNNNGHTT; PAM sequence: CTTAGATT
tatcttttggaggtttttca

SEQ ID NO: 15499 - DNA, 20 bp, Artificial Sequence
  Description of Artificial Sequence: Synthetic oligonucleotide
  Target: ATXN2; (+) strand; PAM type: NNNNGHTT; PAM sequence: TATGGTTT
aaaatactatttacaaatga

SEQ ID NO: 15500 - DNA, 20 bp, Artificial Sequence
  Description of Artificial Sequence: Synthetic oligonucleotide
  Target: ATXN2; (+) strand; PAM type: NNNNGHTT; PAM sequence: GGCAGTTT
ggagataactgaatcatggg

SEQ ID NO: 15501 - DNA, 20 bp, Artificial Sequence
  Description of Artificial Sequence: Synthetic oligonucleotide
  Target: ATXN2; (+) strand; PAM type: NNNNGHTT; PAM sequence: GATGGTTT
agtgagttctcaggagatct

SEQ ID NO: 15502 - DNA, 20 bp, Artificial Sequence
  Description of Artificial Sequence: Synthetic oligonucleotide
  Target: ATXN2; (+) strand; PAM type: NNNNGHTT; PAM sequence: AGGGGCTT
ggagatctgatggttttata

SEQ ID NO: 15503 - DNA, 20 bp, Artificial Sequence
  Description of Artificial Sequence: Synthetic oligonucleotide
  Target: ATXN2; (+) strand; PAM type: NNNNGHTT; PAM sequence: CCCTGCTT
atggttttataaggggcttt

SEQ ID NO: 15504 - DNA, 20 bp, Artificial Sequence
  Description of Artificial Sequence: Synthetic oligonucleotide
  Target: ATXN2; (+) strand; PAM type: NNNNGHTT; PAM sequence: ATGTGTTT
ctgtcgctatgtgaagaagg

SEQ ID NO: 15505 - DNA, 20 bp, Artificial Sequence
  Description of Artificial Sequence: Synthetic oligonucleotide
  Target: ATXN2; (+) strand; PAM type: NNNNGHTT; PAM sequence: GTTTGCTT
cgctatgtgaagaaggatgt

SEQ ID NO: 15506 - DNA, 20 bp, Artificial Sequence
  Description of Artificial Sequence: Synthetic oligonucleotide
  Target: ATXN2; (+) strand; PAM type: NNNNGHTT; PAM sequence: CCATGATT
tgtgtttgcttccccttcca

SEQ ID NO: 15507 - DNA, 20 bp, Artificial Sequence
  Description of Artificial Sequence: Synthetic oligonucleotide
  Target: ATXN2; (+) strand; PAM type: NNNNGHTT; PAM sequence: GTAAGTTT
cttccccttccaccatgatt

SEQ ID NO: 15508 - DNA, 20 bp, Artificial Sequence
  Description of Artificial Sequence: Synthetic oligonucleotide
  Target: ATXN2; (+) strand; PAM type: NNNNGHTT; PAM sequence: TCATGTTT
atttggtctgtggttagaga

SEQ ID NO: 15509 - DNA, 20 bp, Artificial Sequence
  Description of Artificial Sequence: Synthetic oligonucleotide
  Target: ATXN2; (+) strand; PAM type: NNNNGHTT; PAM sequence: TACTGTTT
agactgaggcagtcctttgt

SEQ ID NO: 15510 - DNA, 20 bp, Artificial Sequence
  Description of Artificial Sequence: Synthetic oligonucleotide
  Target: ATXN2; (+) strand; PAM type: NNNNGHTT; PAM sequence: AAAAGATT
tgttactgtttcgacctctg

SEQ ID NO: 15511 - DNA, 20 bp, Artificial Sequence
  Description of Artificial Sequence: Synthetic oligonucleotide
  Target: ATXN2; (+) strand; PAM type: NNNNGHTT; PAM sequence: CACTGCTT
taaggatggctctacctatg

SEQ ID NO: 15512 - DNA, 20 bp, Artificial Sequence
  Description of Artificial Sequence: Synthetic oligonucleotide
  Target: ATXN2; (+) strand; PAM type: NNNNGHTT; PAM sequence: CACGGATT
agagctattcagaagcaaaa

SEQ ID NO: 15513 - DNA, 20 bp, Artificial Sequence
  Description of Artificial Sequence: Synthetic oligonucleotide
  Target: ATXN2; (+) strand; PAM type: NNNNGHTT; PAM sequence: TCTTGATT
aagcaaaacacggattatat

SEQ ID NO: 15514 - DNA, 20 bp, Artificial Sequence
  Description of Artificial Sequence: Synthetic oligonucleotide
  Target: ATXN2; (+) strand; PAM type: NNNNGHTT; PAM sequence: ATATGATT
aaaagaaagaaaaacaggtc

SEQ ID NO: 15515 - DNA, 20 bp, Artificial Sequence
  Description of Artificial Sequence: Synthetic oligonucleotide
  Target: ATXN2; (+) strand; PAM type: NNNNGHTT; PAM sequence: TAAAGCTT
ttatagaatataatacaacc

SEQ ID NO: 15516 - DNA, 20 bp, Artificial Sequence
  Description of Artificial Sequence: Synthetic oligonucleotide
  Target: ATXN2; (+) strand; PAM type: NNNNGHTT; PAM sequence: AAAAGATT
cctaaagcttattccactga

SEQ ID NO: 15517 - DNA, 20 bp, Artificial Sequence
  Description of Artificial Sequence: Synthetic oligonucleotide
  Target: ATXN2; (+) strand; PAM type: NNNNGHTT; PAM sequence: CCTAGCTT
cttaacattctgaggccagt

SEQ ID NO: 15518 - DNA, 20 bp, Artificial Sequence
  Description of Artificial Sequence: Synthetic oligonucleotide
  Target: ATXN2; (+) strand; PAM type: NNNNGHTT; PAM sequence: CTAGGATT
ggacttgaattaaatgacat

SEQ ID NO: 15519 - DNA, 20 bp, Artificial Sequence
  Description of Artificial Sequence: Synthetic oligonucleotide
  Target: ATXN2; (+) strand; PAM type: NNNNGHTT; PAM sequence: AACTGTTT
ttctaacattctaattctgt

SEQ ID NO: 15520 - DNA, 20 bp, Artificial Sequence
  Description of Artificial Sequence: Synthetic oligonucleotide
  Target: ATXN2; (+) strand; PAM type: NNNNGHTT; PAM sequence: ATCTGATT
ctggtatttaaaccaggtgt

SEQ ID NO: 15521 - DNA, 20 bp, Artificial Sequence
  Description of Artificial Sequence: Synthetic oligonucleotide
  Target: ATXN2; (+) strand; PAM type: NNNNGHTT; PAM sequence: CTAAGTTT
aggtgtatctgattccacgt

SEQ ID NO: 15522 - DNA, 20 bp, Artificial Sequence
  Description of Artificial Sequence: Synthetic oligonucleotide
  Target: ATXN2; (+) strand; PAM type: NNNNGHTT; PAM sequence: CTATGCTT
tacctcgcctaacaaaaatt

SEQ ID NO: 15523 - DNA, 20 bp, Artificial Sequence
  Description of Artificial Sequence: Synthetic oligonucleotide
  Target: ATXN2; (+) strand; PAM type: NNNNGHTT; PAM sequence: TACAGTTT
tttcaaacatcatttgaatt

SEQ ID NO: 15524 - DNA, 20 bp, Artificial Sequence
  Description of Artificial Sequence: Synthetic oligonucleotide
  Target: ATXN2; (+) strand; PAM type: NNNNGHTT; PAM sequence: TAGTGATT
ataagtcacactgttctttt

SEQ ID NO: 15525 - DNA, 20 bp, Artificial Sequence
  Description of Artificial Sequence: Synthetic oligonucleotide
  Target: ATXN2; (+) strand; PAM type: NNNNGHTT; PAM sequence: AATTGTTT
atctttgactaataaaaagt

SEQ ID NO: 15526 - DNA, 20 bp, Artificial Sequence
  Description of Artificial Sequence: Synthetic oligonucleotide
  Target: ATXN2; (+) strand; PAM type: NNNNGHTT; PAM sequence: TGGAGTTT
aaaaagtaattgtttgacca

SEQ ID NO: 15527 - DNA, 20 bp, Artificial Sequence
  Description of Artificial Sequence: Synthetic oligonucleotide
  Target: ATXN2; (+) strand; PAM type: NNNNGHTT; PAM sequence: TCTTGTTT
aaatccactgaagtctaaat

SEQ ID NO: 15528 - DNA, 20 bp, Artificial Sequence
  Description of Artificial Sequence: Synthetic oligonucleotide
  Target: ATXN2; (+) strand; PAM type: NNNNGHTT; PAM sequence: TTATGCTT
tctttttgtatccattcaag

SEQ ID NO: 15529 - DNA, 20 bp, Artificial Sequence
  Description of Artificial Sequence: Synthetic oligonucleotide
  Target: ATXN2; (+) strand; PAM type: NNNNGHTT; PAM sequence: TTATGATT
tattttagacctaagtatat

SEQ ID NO: 15530 - DNA, 20 bp, Artificial Sequence
  Description of Artificial Sequence: Synthetic oligonucleotide
  Target: ATXN2; (+) strand; PAM type: NNNNGHTT; PAM sequence: TCAGGTTT
tatatttatgattagataga

SEQ ID NO: 15531 - DNA, 20 bp, Artificial Sequence
  Description of Artificial Sequence: Synthetic oligonucleotide
  Target: ATXN2; (+) strand; PAM type: NNNNGHTT; PAM sequence: CTATGCTT
aaacactaatatccaggact

SEQ ID NO: 15532 - DNA, 20 bp, Artificial Sequence
  Description of Artificial Sequence: Synthetic oligonucleotide
  Target: ATXN2; (+) strand; PAM type: NNNNGHTT; PAM sequence: TCATGCTT
tacatgctgaatgtggtagc

SEQ ID NO: 15533 - DNA, 20 bp, Artificial Sequence
  Description of Artificial Sequence: Synthetic oligonucleotide
  Target: ATXN2; (+) strand; PAM type: NNNNGHTT; PAM sequence: CGGAGTTT
caggaggatcacttgagtgc

SEQ ID NO: 15534 - DNA, 20 bp, Artificial Sequence
  Description of Artificial Sequence: Synthetic oligonucleotide
  Target: ATXN2; (+) strand; PAM type: NNNNGHTT; PAM sequence: CCCTGTTT
gtctgggcaacaaagcaaaa

SEQ ID NO: 15535 - DNA, 20 bp, Artificial Sequence
  Description of Artificial Sequence: Synthetic oligonucleotide
  Target: ATXN2; (+) strand; PAM type: NNNNGHTT; PAM sequence: CTGTGATT
gaggtcaagacagcagtgag

SEQ ID NO: 15536 - DNA, 20 bp, Artificial Sequence
  Description of Artificial Sequence: Synthetic oligonucleotide
  Target: ATXN2; (+) strand; PAM type: NNNNGHTT; PAM sequence: TTCTGCTT
taaaaaaaaaaaaaagcacc

SEQ ID NO: 15537 - DNA, 20 bp, Artificial Sequence
  Description of Artificial Sequence: Synthetic oligonucleotide
  Target: ATXN2; (+) strand; PAM type: NNNNGHTT; PAM sequence: TCAAGTTT
atacaataggatagacctaa

SEQ ID NO: 15538 - DNA, 20 bp, Artificial Sequence
  Description of Artificial Sequence: Synthetic oligonucleotide
  Target: ATXN2; (+) strand; PAM type: NNNNGHTT; PAM sequence: ACCAGTTT
ctaatcaagtttacagatct

SEQ ID NO: 15539 - DNA, 20 bp, Artificial Sequence
  Description of Artificial Sequence: Synthetic oligonucleotide
  Target: ATXN2; (+) strand; PAM type: NNNNGHTT; PAM sequence: CACAGTTT
actgataccatgaggttcct

SEQ ID NO: 15540 - DNA, 20 bp, Artificial Sequence
  Description of Artificial Sequence: Synthetic oligonucleotide
  Target: ATXN2; (+) strand; PAM type: NNNNGHTT; PAM sequence: GACAGTTT
gtaaatgcaacataaaaaat

SEQ ID NO: 15541 - DNA, 20 bp, Artificial Sequence
  Description of Artificial Sequence: Synthetic oligonucleotide
  Target: ATXN2; (+) strand; PAM type: NNNNGHTT; PAM sequence: TTTTGTTT
caacataaaaaatgacagtt

SEQ ID NO: 15542 - DNA, 20 bp, Artificial Sequence
  Description of Artificial Sequence: Synthetic oligonucleotide
  Target: ATXN2; (+) strand; PAM type: NNNNGHTT; PAM sequence: CGGGGTTT
ttttgtattcttagtagaga

SEQ ID NO: 15543 - DNA, 20 bp, Artificial Sequence
  Description of Artificial Sequence: Synthetic oligonucleotide
  Target: ATXN2; (+) strand; PAM type: NNNNGHTT; PAM sequence: CTGGGATT
cacctcagcctcccaaagtg

SEQ ID NO: 15544 - DNA, 20 bp, Artificial Sequence
  Description of Artificial Sequence: Synthetic oligonucleotide
  Target: ATXN2; (+) strand; PAM type: NNNNGHTT; PAM sequence: GACGGTTT
taccacgcccggccaaagat

SEQ ID NO: 15545 - DNA, 20 bp, Artificial Sequence
  Description of Artificial Sequence: Synthetic oligonucleotide
  Target: ATXN2; (+) strand; PAM type: NNNNGHTT; PAM sequence: CCCCGTTT
gcctgaccaatatggtgaaa

SEQ ID NO: 15546 - DNA, 20 bp, Artificial Sequence
  Description of Artificial Sequence: Synthetic oligonucleotide
  Target: ATXN2; (+) strand; PAM type: NNNNGHTT; PAM sequence: TGATGCTT
acaaggtatgaaagagttaa

SEQ ID NO: 15547 - DNA, 20 bp, Artificial Sequence
  Description of Artificial Sequence: Synthetic oligonucleotide
  Target: ATXN2; (+) strand; PAM type: NNNNGHTT; PAM sequence: TCTAGTTT
taagtgctaaattgtagttg

SEQ ID NO: 15548 - DNA, 20 bp, Artificial Sequence
  Description of Artificial Sequence: Synthetic oligonucleotide
  Target: ATXN2; (+) strand; PAM type: NNNNGHTT; PAM sequence: TGTGGATT
gagagctgggaggactcctc

SEQ ID NO: 15549 - DNA, 20 bp, Artificial Sequence
  Description of Artificial Sequence: Synthetic oligonucleotide
  Target: ATXN2; (+) strand; PAM type: NNNNGHTT; PAM sequence: AGCAGTTT
ttgatcagatcagtctgtgg

SEQ ID NO: 15550 - DNA, 20 bp, Artificial Sequence
  Description of Artificial Sequence: Synthetic oligonucleotide
  Target: ATXN2; (+) strand; PAM type: NNNNGHTT; PAM sequence: TGCAGATT
caatgcaggccctccatatc

SEQ ID NO: 15551 - DNA, 20 bp, Artificial Sequence
  Description of Artificial Sequence: Synthetic oligonucleotide
  Target: ATXN2; (+) strand; PAM type: NNNNGHTT; PAM sequence: CTCAGATT
atatctgcagatttcacatc

SEQ ID NO: 15552 - DNA, 20 bp, Artificial Sequence
  Description of Artificial Sequence: Synthetic oligonucleotide
  Target: ATXN2; (+) strand; PAM type: NNNNGHTT; PAM sequence: TCGAGATT
acatcctcagattcaatcac

SEQ ID NO: 15553 - DNA, 20 bp, Artificial Sequence
  Description of Artificial Sequence: Synthetic oligonucleotide
  Target: ATXN2; (+) strand; PAM type: NNNNGHTT; PAM sequence: TAGTGTTT
atatataacaactatttacc

SEQ ID NO: 15554 - DNA, 20 bp, Artificial Sequence
  Description of Artificial Sequence: Synthetic oligonucleotide
  Target: ATXN2; (+) strand; PAM type: NNNNGHTT; PAM sequence: TGTAGCTT
cagcatcacctagtaattag

SEQ ID NO: 15555 - DNA, 20 bp, Artificial Sequence
  Description of Artificial Sequence: Synthetic oligonucleotide
  Target: ATXN2; (+) strand; PAM type: NNNNGHTT; PAM sequence: CTGTGATT
acaaagccatgccaaaatca

SEQ ID NO: 15556 - DNA, 20 bp, Artificial Sequence
  Description of Artificial Sequence: Synthetic oligonucleotide
  Target: ATXN2; (+) strand; PAM type: NNNNGHTT; PAM sequence: TCCAGTTT
ttactacattacttaaaatg

SEQ ID NO: 15557 - DNA, 20 bp, Artificial Sequence
  Description of Artificial Sequence: Synthetic oligonucleotide
  Target: ATXN2; (+) strand; PAM type: NNNNGHTT; PAM sequence: AATTGCTT
aaaaagaagtaggcaataga

SEQ ID NO: 15558 - DNA, 20 bp, Artificial Sequence
  Description of Artificial Sequence: Synthetic oligonucleotide
  Target: ATXN2; (+) strand; PAM type: NNNNGHTT; PAM sequence: ACATGTTT
ttcaaaagtggtcactataa

SEQ ID NO: 15559 - DNA, 20 bp, Artificial Sequence
  Description of Artificial Sequence: Synthetic oligonucleotide
  Target: ATXN2; (+) strand; PAM type: NNNNGHTT; PAM sequence: GTATGATT
aattaatgcagtaaaagaag

SEQ ID NO: 15560 - DNA, 20 bp, Artificial Sequence
  Description of Artificial Sequence: Synthetic oligonucleotide
  Target: ATXN2; (+) strand; PAM type: NNNNGHTT; PAM sequence: CGGAGCTT
aatggtgtgaacttgggagg

SEQ ID NO: 15561 - DNA, 20 bp, Artificial Sequence
  Description of Artificial Sequence: Synthetic oligonucleotide
  Target: ATXN2; (+) strand; PAM type: NNNNGHTT; PAM sequence: CCGAGATT
gaggcggagcttgcagtgag

SEQ ID NO: 15562 - DNA, 20 bp, Artificial Sequence
  Description of Artificial Sequence: Synthetic oligonucleotide
  Target: ATXN2; (+) strand; PAM type: NNNNGHTT; PAM sequence: AACGGCTT
ggaggtggctgagggaggag

SEQ ID NO: 15563 - DNA, 20 bp, Artificial Sequence
  Description of Artificial Sequence: Synthetic oligonucleotide
  Target: ATXN2; (+) strand; PAM type: NNNNGHTT; PAM sequence: TCCAGCTT
ccgagatggcaccactgtac

SEQ ID NO: 15564 - DNA, 20 bp, Artificial Sequence
  Description of Artificial Sequence: Synthetic oligonucleotide
  Target: ATXN2; (+) strand; PAM type: NNNNGHTT; PAM sequence: AATTGCTT
ttgggaggctgaggcacaag

SEQ ID NO: 15565 - DNA, 20 bp, Artificial Sequence
  Description of Artificial Sequence: Synthetic oligonucleotide
  Target: ATXN2; (+) strand; PAM type: NNNNGHTT; PAM sequence: TTCTGTTT
gacagagcaagactccgtct

SEQ ID NO: 15566 - DNA, 20 bp, Artificial Sequence
  Description of Artificial Sequence: Synthetic oligonucleotide
  Target: ATXN2; (+) strand; PAM type: NNNNGHTT; PAM sequence: CAGGGTTT
ttttgtatttttagtagaga

SEQ ID NO: 15567 - DNA, 20 bp, Artificial Sequence
  Description of Artificial Sequence: Synthetic oligonucleotide
  Target: ATXN2; (+) strand; PAM type: NNNNGHTT; PAM sequence: CTGGGATT
cacctcggccttccaaagtg

SEQ ID NO: 15568 - DNA, 20 bp, Artificial Sequence
  Description of Artificial Sequence: Synthetic oligonucleotide
  Target: ATXN2; (+) strand; PAM type: NNNNGHTT; PAM sequence: AATAGTTT
tcgcaagaccccatctctaa

SEQ ID NO: 15569 - DNA, 20 bp, Artificial Sequence
  Description of Artificial Sequence: Synthetic oligonucleotide
  Target: ATXN2; (+) strand; PAM type: NNNNGHTT; PAM sequence: AGGAGTTT
tgggaggttcacttgagccc

SEQ ID NO: 15570 - DNA, 20 bp, Artificial Sequence
  Description of Artificial Sequence: Synthetic oligonucleotide
  Target: ATXN2; (+) strand; PAM type: NNNNGHTT; PAM sequence: AACTGCTT
tcgggaggctgacgcaggag

SEQ ID NO: 15571 - DNA, 20 bp, Artificial Sequence
  Description of Artificial Sequence: Synthetic oligonucleotide
  Target: ATXN2; (+) strand; PAM type: NNNNGHTT; PAM sequence: AACTGTTT
ttggtaacaccatagtaaat

SEQ ID NO: 15572 - DNA, 20 bp, Artificial Sequence
  Description of Artificial Sequence: Synthetic oligonucleotide
  Target: ATXN2; (+) strand; PAM type: NNNNGHTT; PAM sequence: AACTGCTT
caagtcataaaagacaaaga

SEQ ID NO: 15573 - DNA, 20 bp, Artificial Sequence
  Description of Artificial Sequence: Synthetic oligonucleotide
  Target: ATXN2; (+) strand; PAM type: NNNNGHTT; PAM sequence: TTTGGATT
ataaaagacaaagaaactgc

SEQ ID NO: 15574 - DNA, 20 bp, Artificial Sequence
  Description of Artificial Sequence: Synthetic oligonucleotide
  Target: ATXN2; (+) strand; PAM type: NNNNGHTT; PAM sequence: CCTGGATT
tgataaccgaaggtaacaat

SEQ ID NO: 15575 - DNA, 20 bp, Artificial Sequence
  Description of Artificial Sequence: Synthetic oligonucleotide
  Target: ATXN2; (+) strand; PAM type: NNNNGHTT; PAM sequence: TGTTGATT
ctggttcttgaccagaaaaa

SEQ ID NO: 15576 - DNA, 20 bp, Artificial Sequence
  Description of Artificial Sequence: Synthetic oligonucleotide
  Target: ATXN2; (+) strand; PAM type: NNNNGHTT; PAM sequence: TGTTGATT
tgaccagaaaaatgttgatt

SEQ ID NO: 15577 - DNA, 20 bp, Artificial Sequence
  Description of Artificial Sequence: Synthetic oligonucleotide
  Target: ATXN2; (+) strand; PAM type: NNNNGHTT; PAM sequence: GATTGTTT
cagaaaaatgttgatttgtt

SEQ ID NO: 15578 - DNA, 20 bp, Artificial Sequence
  Description of Artificial Sequence: Synthetic oligonucleotide
  Target: ATXN2; (+) strand; PAM type: NNNNGHTT; PAM sequence: AACAGTTT
agaaggtctataaacagaat

SEQ ID NO: 15579 - DNA, 20 bp, Artificial Sequence
  Description of Artificial Sequence: Synthetic oligonucleotide
  Target: ATXN2; (+) strand; PAM type: NNNNGHTT; PAM sequence: TGTGGTTT
ccttattttgacaactgtac

SEQ ID NO: 15580 - DNA, 20 bp, Artificial Sequence
  Description of Artificial Sequence: Synthetic oligonucleotide
  Target: ATXN2; (+) strand; PAM type: NNNNGHTT; PAM sequence: ATATGTTT
aaagaggcatcatgtctctc

SEQ ID NO: 15581 - DNA, 20 bp, Artificial Sequence
  Description of Artificial Sequence: Synthetic oligonucleotide
  Target: ATXN2; (+) strand; PAM type: NNNNGHTT; PAM sequence: TTATGTTT
atttttctaaaagtctaaaa

SEQ ID NO: 15582 - DNA, 20 bp, Artificial Sequence
  Description of Artificial Sequence: Synthetic oligonucleotide
  Target: ATXN2; (+) strand; PAM type: NNNNGHTT; PAM sequence: AAATGTTT
tctaaaattatgtttaagta

SEQ ID NO: 15583 - DNA, 20 bp, Artificial Sequence
  Description of Artificial Sequence: Synthetic oligonucleotide
  Target: ATXN2; (+) strand; PAM type: NNNNGHTT; PAM sequence: ATGTGATT
ttaattggagactataagtg

SEQ ID NO: 15584 - DNA, 20 bp, Artificial Sequence
  Description of Artificial Sequence: Synthetic oligonucleotide
  Target: ATXN2; (+) strand; PAM type: NNNNGHTT; PAM sequence: CTTCGATT
catcttttcaggaagtcttc

SEQ ID NO: 15585 - DNA, 20 bp, Artificial Sequence
  Description of Artificial Sequence: Synthetic oligonucleotide
  Target: ATXN2; (+) strand; PAM type: NNNNGHTT; PAM sequence: TGCTGTTT
tatctcaatcaaatatacga

SEQ ID NO: 15586 - DNA, 20 bp, Artificial Sequence
  Description of Artificial Sequence: Synthetic oligonucleotide
  Target: ATXN2; (+) strand; PAM type: NNNNGHTT; PAM sequence: TCCAGTTT
tacgatgctgttttcaactc

SEQ ID NO: 15587 - DNA, 20 bp, Artificial Sequence
  Description of Artificial Sequence: Synthetic oligonucleotide
  Target: ATXN2; (+) strand; PAM type: NNNNGHTT; PAM sequence: TTATGCTT
aggaccatcacctgaccata

SEQ ID NO: 15588 - DNA, 20 bp, Artificial Sequence
  Description of Artificial Sequence: Synthetic oligonucleotide
  Target: ATXN2; (+) strand; PAM type: NNNNGHTT; PAM sequence: CCTTGATT
attgtgtggccaaagaaaca

SEQ ID NO: 15589 - DNA, 20 bp, Artificial Sequence
  Description of Artificial Sequence: Synthetic oligonucleotide
  Target: ATXN2; (+) strand; PAM type: NNNNGHTT; PAM sequence: CCAAGCTT
gacaaatgaaaacctaacaa

SEQ ID NO: 15590 - DNA, 20 bp, Artificial Sequence
  Description of Artificial Sequence: Synthetic oligonucleotide
  Target: ATXN2; (+) strand; PAM type: NNNNGHTT; PAM sequence: ACCTGTTT
tcaggacactacagcccaca

SEQ ID NO: 15591 - DNA, 20 bp, Artificial Sequence
  Description of Artificial Sequence: Synthetic oligonucleotide
  Target: ATXN2; (+) strand; PAM type: NNNNGHTT; PAM sequence: TCTGGCTT
cagcccacaacctgttttgg

SEQ ID NO: 15592 - DNA, 20 bp, Artificial Sequence
  Description of Artificial Sequence: Synthetic oligonucleotide
  Target: ATXN2; (+) strand; PAM type: NNNNGHTT; PAM sequence: GAATGATT
tggtctggcttctgggctaa

SEQ ID NO: 15593 - DNA, 20 bp, Artificial Sequence
  Description of Artificial Sequence: Synthetic oligonucleotide
  Target: ATXN2; (+) strand; PAM type: NNNNGHTT; PAM sequence: AGTTGCTT
tgatttttatgttcctcaag

SEQ ID NO: 15594 - DNA, 20 bp, Artificial Sequence
  Description of Artificial Sequence: Synthetic oligonucleotide
  Target: ATXN2; (+) strand; PAM type: NNNNGHTT; PAM sequence: AAAAGTTT
attacctgagactttacata

SEQ ID NO: 15595 - DNA, 20 bp, Artificial Sequence
  Description of Artificial Sequence: Synthetic oligonucleotide
  Target: ATXN2; (+) strand; PAM type: NNNNGHTT; PAM sequence: GATCGCTT
tcaaaaggctcaggtgagag

SEQ ID NO: 15596 - DNA, 20 bp, Artificial Sequence
  Description of Artificial Sequence: Synthetic oligonucleotide
  Target: ATXN2; (+) strand; PAM type: NNNNGHTT; PAM sequence: AGTTGTTT
ttttaaaaactgaaagataa

SEQ ID NO: 15597 - DNA, 20 bp, Artificial Sequence
  Description of Artificial Sequence: Synthetic oligonucleotide
  Target: ATXN2; (+) strand; PAM type: NNNNGHTT; PAM sequence: CTGGGATT
tacctcagcctcccaaagtg

SEQ ID NO: 15598 - DNA, 20 bp, Artificial Sequence
  Description of Artificial Sequence: Synthetic oligonucleotide
  Target: ATXN2; (+) strand; PAM type: NNNNGHTT; PAM sequence: TGAAGTTT
atagcattaaattattttca

SEQ ID NO: 15599 - DNA, 20 bp, Artificial Sequence
  Description of Artificial Sequence: Synthetic oligonucleotide
  Target: ATXN2; (+) strand; PAM type: NNNNGHTT; PAM sequence: TAATGCTT
tccccatattctcctttaag

SEQ ID NO: 15600 - DNA, 20 bp, Artificial Sequence
  Description of Artificial Sequence: Synthetic oligonucleotide
  Target: ATXN2; (+) strand; PAM type: NNNNGHTT; PAM sequence: TTCTGCTT
tacatgcatacctcatttta

SEQ ID NO: 15601 - DNA, 20 bp, Artificial Sequence
  Description of Artificial Sequence: Synthetic oligonucleotide
  Target: ATXN2; (+) strand; PAM type: NNNNGHTT; PAM sequence: CTTTGCTT
gcatacctcattttattctg

SEQ ID NO: 15602 - DNA, 20 bp, Artificial Sequence
  Description of Artificial Sequence: Synthetic oligonucleotide
  Target: ATXN2; (+) strand; PAM type: NNNNGHTT; PAM sequence: ATCAGATT
atacgttatagtaatctgta

SEQ ID NO: 15603 - DNA, 20 bp, Artificial Sequence
  Description of Artificial Sequence: Synthetic oligonucleotide
  Target: ATXN2; (+) strand; PAM type: NNNNGHTT; PAM sequence: AAAAGATT
aataattgtaaataataaag

SEQ ID NO: 15604 - DNA, 20 bp, Artificial Sequence
  Description of Artificial Sequence: Synthetic oligonucleotide
  Target: ATXN2; (+) strand; PAM type: NNNNGHTT; PAM sequence: CCCTGATT
atcagtaatcgttgatgtta

SEQ ID NO: 15605 - DNA, 20 bp, Artificial Sequence
  Description of Artificial Sequence: Synthetic oligonucleotide
  Target: ATXN2; (+) strand; PAM type: NNNNGHTT; PAM sequence: GTCAGCTT
gactactccacgaaccagca

SEQ ID NO: 15606 - DNA, 20 bp, Artificial Sequence
  Description of Artificial Sequence: Synthetic oligonucleotide
  Target: ATXN2; (+) strand; PAM type: NNNNGHTT; PAM sequence: AATTGCTT
tcagtaagctgaggcacgag

SEQ ID NO: 15607 - DNA, 20 bp, Artificial Sequence
  Description of Artificial Sequence: Synthetic oligonucleotide
  Target: ATXN2; (+) strand; PAM type: NNNNGHTT; PAM sequence: GTGAGATT
actccacgctgggaaacaga

SEQ ID NO: 15608 - DNA, 20 bp, Artificial Sequence
  Description of Artificial Sequence: Synthetic oligonucleotide
  Target: ATXN2; (+) strand; PAM type: NNNNGHTT; PAM sequence: AAATGTTT
atgggaatgtacaaggacat

SEQ ID NO: 15609 - DNA, 20 bp, Artificial Sequence
  Description of Artificial Sequence: Synthetic oligonucleotide
  Target: ATXN2; (+) strand; PAM type: NNNNGHTT; PAM sequence: TGACGTTT
cagggatcaagggataattt

SEQ ID NO: 15610 - DNA, 20 bp, Artificial Sequence
  Description of Artificial Sequence: Synthetic oligonucleotide
  Target: ATXN2; (+) strand; PAM type: NNNNGHTT; PAM sequence: AATTGCTT
tcaggaggctgaggcaggag

SEQ ID NO: 15611 - DNA, 20 bp, Artificial Sequence
  Description of Artificial Sequence: Synthetic oligonucleotide
  Target: ATXN2; (+) strand; PAM type: NNNNGHTT; PAM sequence: AGGAGTTT
gttaaaacatcaacattaac

SEQ ID NO: 15612 - DNA, 20 bp, Artificial Sequence
  Description of Artificial Sequence: Synthetic oligonucleotide
  Target: ATXN2; (+) strand; PAM type: NNNNGHTT; PAM sequence: AATTGCTT
ttaacaggagttttagagga

SEQ ID NO: 15613 - DNA, 20 bp, Artificial Sequence
  Description of Artificial Sequence: Synthetic oligonucleotide
  Target: ATXN2; (+) strand; PAM type: NNNNGHTT; PAM sequence: TAGAGTTT
ctttttttttttttttaaga

SEQ ID NO: 15614 - DNA, 20 bp, Artificial Sequence
  Description of Artificial Sequence: Synthetic oligonucleotide
  Target: ATXN2; (+) strand; PAM type: NNNNGHTT; PAM sequence: AAGCGATT
aacctccacctcccaggttc

SEQ ID NO: 15615 - DNA, 20 bp, Artificial Sequence
  Description of Artificial Sequence: Synthetic oligonucleotide
  Target: ATXN2; (+) strand; PAM type: NNNNGHTT; PAM sequence: CTGGGATT
tgcctcagtctcccaagtag

SEQ ID NO: 15616 - DNA, 20 bp, Artificial Sequence
  Description of Artificial Sequence: Synthetic oligonucleotide
  Target: ATXN2; (+) strand; PAM type: NNNNGHTT; PAM sequence: CGGGGTTT
ttttgtatttttagtagaaa

SEQ ID NO: 15617 - DNA, 20 bp, Artificial Sequence
  Description of Artificial Sequence: Synthetic oligonucleotide
  Target: ATXN2; (+) strand; PAM type: NNNNGHTT; PAM sequence: CCACGTTT
ttagtagaaacggggtttca

SEQ ID NO: 15618 - DNA, 20 bp, Artificial Sequence
  Description of Artificial Sequence: Synthetic oligonucleotide
  Target: ATXN2; (+) strand; PAM type: NNNNGHTT; PAM sequence: CTGGGATT
ctccttggcctcccaaagta

SEQ ID NO: 15619 - DNA, 20 bp, Artificial Sequence
  Description of Artificial Sequence: Synthetic oligonucleotide
  Target: ATXN2; (+) strand; PAM type: NNNNGHTT; PAM sequence: AATTGCTT
gccaccgtgcccaaccagga

SEQ ID NO: 15620 - DNA, 20 bp, Artificial Sequence
  Description of Artificial Sequence: Synthetic oligonucleotide
  Target: ATXN2; (+) strand; PAM type: NNNNGHTT; PAM sequence: GAATGATT
aaattgcttctaatactcat

SEQ ID NO: 15621 - DNA, 20 bp, Artificial Sequence
  Description of Artificial Sequence: Synthetic oligonucleotide
  Target: ATXN2; (+) strand; PAM type: NNNNGHTT; PAM sequence: TGTTGCTT
taaaacttgaatagatgagg

SEQ ID NO: 15622 - DNA, 20 bp, Artificial Sequence
  Description of Artificial Sequence: Synthetic oligonucleotide
  Target: ATXN2; (+) strand; PAM type: NNNNGHTT; PAM sequence: AGTGGTTT
tctcatggataagcaaagaa

SEQ ID NO: 15623 - DNA, 20 bp, Artificial Sequence
  Description of Artificial Sequence: Synthetic oligonucleotide
  Target: ATXN2; (+) strand; PAM type: NNNNGHTT; PAM sequence: AAAAGATT
agcactgttgaaatgacaac

SEQ ID NO: 15624 - DNA, 20 bp, Artificial Sequence
  Description of Artificial Sequence: Synthetic oligonucleotide
  Target: ATXN2; (+) strand; PAM type: NNNNGHTT; PAM sequence: CTGAGATT
aaggcagaggttgcagtaag

SEQ ID NO: 15625 - DNA, 20 bp, Artificial Sequence
  Description of Artificial Sequence: Synthetic oligonucleotide
  Target: ATXN2; (+) strand; PAM type: NNNNGHTT; PAM sequence: AATCGCTT
tcatgaggctgacacaagag

SEQ ID NO: 15626 - DNA, 20 bp, Artificial Sequence
  Description of Artificial Sequence: Synthetic oligonucleotide
  Target: ATXN2; (+) strand; PAM type: NNNNGHTT; PAM sequence: CCGAGATT
gaggcagaggttgcagtggg

SEQ ID NO: 15627 - DNA, 20 bp, Artificial Sequence
  Description of Artificial Sequence: Synthetic oligonucleotide
  Target: ATXN2; (+) strand; PAM type: NNNNGHTT; PAM sequence: GTATGTTT
taaaataaatgtacattttc

SEQ ID NO: 15628 - DNA, 20 bp, Artificial Sequence
  Description of Artificial Sequence: Synthetic oligonucleotide
  Target: ATXN2; (+) strand; PAM type: NNNNGHTT; PAM sequence: TATTGTTT
agaataaaattaccttccat

SEQ ID NO: 15629 - DNA, 20 bp, Artificial Sequence
  Description of Artificial Sequence: Synthetic oligonucleotide
  Target: ATXN2; (+) strand; PAM type: NNNNGHTT; PAM sequence: GGTGGATT
cactttgggaggctgaggca

SEQ ID NO: 15630 - DNA, 20 bp, Artificial Sequence
  Description of Artificial Sequence: Synthetic oligonucleotide
  Target: ATXN2; (+) strand; PAM type: NNNNGHTT; PAM sequence: AATCGCTT
tcaggaggctgaggcaggag

SEQ ID NO: 15631 - DNA, 20 bp, Artificial Sequence
  Description of Artificial Sequence: Synthetic oligonucleotide
  Target: ATXN2; (+) strand; PAM type: NNNNGHTT; PAM sequence: TAGAGCTT
gtcaccatacaatataatta

SEQ ID NO: 15632 - DNA, 20 bp, Artificial Sequence
  Description of Artificial Sequence: Synthetic oligonucleotide
  Target: ATXN2; (+) strand; PAM type: NNNNGHTT; PAM sequence: AGTAGTTT
tcctcctctatatgtccttc

SEQ ID NO: 15633 - DNA, 20 bp, Artificial Sequence
  Description of Artificial Sequence: Synthetic oligonucleotide
  Target: ATXN2; (+) strand; PAM type: NNNNGHTT; PAM sequence: AACAGATT
tatttcaacaagacctgggt

SEQ ID NO: 15634 - DNA, 20 bp, Artificial Sequence
  Description of Artificial Sequence: Synthetic oligonucleotide
  Target: ATXN2; (+) strand; PAM type: NNNNGHTT; PAM sequence: CCAGGTTT
aatcaaaatatttcattgat

SEQ ID NO: 15635 - DNA, 20 bp, Artificial Sequence
  Description of Artificial Sequence: Synthetic oligonucleotide
  Target: ATXN2; (+) strand; PAM type: NNNNGHTT; PAM sequence: ACCCGTTT
gctccccaactattatgtct

SEQ ID NO: 15636 - DNA, 20 bp, Artificial Sequence
  Description of Artificial Sequence: Synthetic oligonucleotide
  Target: ATXN2; (+) strand; PAM type: NNNNGHTT; PAM sequence: TGTTGTTT
tccaatttcagacttcttgt

SEQ ID NO: 15637 - DNA, 20 bp, Artificial Sequence
  Description of Artificial Sequence: Synthetic oligonucleotide
  Target: ATXN2; (+) strand; PAM type: NNNNGHTT; PAM sequence: TAGAGTTT
caacccaaacacagtgaagc

SEQ ID NO: 15638 - DNA, 20 bp, Artificial Sequence
  Description of Artificial Sequence: Synthetic oligonucleotide
  Target: ATXN2; (+) strand; PAM type: NNNNGHTT; PAM sequence: TTTTGTTT
cacagtgaagctagagtttt

SEQ ID NO: 15639 - DNA, 20 bp, Artificial Sequence
  Description of Artificial Sequence: Synthetic oligonucleotide
  Target: ATXN2; (+) strand; PAM type: NNNNGHTT; PAM sequence: TTTTGTTT
tgaagctagagttttttttg

SEQ ID NO: 15640 - DNA, 20 bp, Artificial Sequence
  Description of Artificial Sequence: Synthetic oligonucleotide
  Target: ATXN2; (+) strand; PAM type: NNNNGHTT; PAM sequence: TTTTGTTT
ctagagttttttttgttttg

SEQ ID NO: 15641 - DNA, 20 bp, Artificial Sequence
  Description of Artificial Sequence: Synthetic oligonucleotide
  Target: ATXN2; (+) strand; PAM type: NNNNGHTT; PAM sequence: TTTTGTTT
gttttttttgttttgttttg

SEQ ID NO: 15642 - DNA, 20 bp, Artificial Sequence
  Description of Artificial Sequence: Synthetic oligonucleotide
  Target: ATXN2; (+) strand; PAM type: NNNNGHTT; PAM sequence: TTTTGTTT
ttttgttttgttttgttttg

SEQ ID NO: 15643 - DNA, 20 bp, Artificial Sequence
  Description of Artificial Sequence: Synthetic oligonucleotide
  Target: ATXN2; (+) strand; PAM type: NNNNGHTT; PAM sequence: GCCAGATT
taaattcacacagaacaact

SEQ ID NO: 15644 - DNA, 20 bp, Artificial Sequence
  Description of Artificial Sequence: Synthetic oligonucleotide
  Target: ATXN2; (+) strand; PAM type: NNNNGHTT; PAM sequence: CATTGTTT
gtcatataatcatctaggat

SEQ ID NO: 15645 - DNA, 20 bp, Artificial Sequence
  Description of Artificial Sequence: Synthetic oligonucleotide
  Target: ATXN2; (+) strand; PAM type: NNNNGHTT; PAM sequence: AATTGCTT
caagaactaatatcagcatt

SEQ ID NO: 15646 - DNA, 20 bp, Artificial Sequence
  Description of Artificial Sequence: Synthetic oligonucleotide
  Target: ATXN2; (+) strand; PAM type: NNNNGHTT; PAM sequence: CTGTGTTT
aatcctgtgacttcagctct

SEQ ID NO: 15647 - DNA, 20 bp, Artificial Sequence
  Description of Artificial Sequence: Synthetic oligonucleotide
  Target: ATXN2; (+) strand; PAM type: NNNNGHTT; PAM sequence: CATAGCTT
gtaatattccatacagatcg

SEQ ID NO: 15648 - DNA, 20 bp, Artificial Sequence
  Description of Artificial Sequence: Synthetic oligonucleotide
  Target: ATXN2; (+) strand; PAM type: NNNNGHTT; PAM sequence: AAGTGTTT
acagtgcctggtatgttatt

SEQ ID NO: 15649 - DNA, 20 bp, Artificial Sequence
  Description of Artificial Sequence: Synthetic oligonucleotide
  Target: ATXN2; (+) strand; PAM type: NNNNGHTT; PAM sequence: GAAAGTTT
ggcgaaatctcgtctctaca

SEQ ID NO: 15650 - DNA, 20 bp, Artificial Sequence
  Description of Artificial Sequence: Synthetic oligonucleotide
  Target: ATXN2; (+) strand; PAM type: NNNNGHTT; PAM sequence: TGAAGTTT
ccaccaccacactcttcata

SEQ ID NO: 15651 - DNA, 20 bp, Artificial Sequence
  Description of Artificial Sequence: Synthetic oligonucleotide
  Target: ATXN2; (+) strand; PAM type: NNNNGHTT; PAM sequence: AAAGGCTT
tccctctagagaaagggata

SEQ ID NO: 15652 - DNA, 20 bp, Artificial Sequence
  Description of Artificial Sequence: Synthetic oligonucleotide
  Target: ATXN2; (+) strand; PAM type: NNNNGHTT; PAM sequence: ATACGATT
gtggcagctaagcacttgaa

SEQ ID NO: 15653 - DNA, 20 bp, Artificial Sequence
  Description of Artificial Sequence: Synthetic oligonucleotide
  Target: ATXN2; (+) strand; PAM type: NNNNGHTT; PAM sequence: GAATGCTT
acctctgacttatgcaccaa

SEQ ID NO: 15654 - DNA, 20 bp, Artificial Sequence
  Description of Artificial Sequence: Synthetic oligonucleotide
  Target: ATXN2; (+) strand; PAM type: NNNNGHTT; PAM sequence: ATAAGATT
taaagctgagtgacaggtac

SEQ ID NO: 15655 - DNA, 20 bp, Artificial Sequence
  Description of Artificial Sequence: Synthetic oligonucleotide
  Target: ATXN2; (+) strand; PAM type: NNNNGHTT; PAM sequence: TAGCGTTT
ttacattttaaaaaccttat

SEQ ID NO: 15656 - DNA, 20 bp, Artificial Sequence
  Description of Artificial Sequence: Synthetic oligonucleotide
  Target: ATXN2; (+) strand; PAM type: NNNNGHTT; PAM sequence: ATGTGTTT
actgaaacatattcttccaa

SEQ ID NO: 15657 - DNA, 20 bp, Artificial Sequence
  Description of Artificial Sequence: Synthetic oligonucleotide
  Target: ATXN2; (+) strand; PAM type: NNNNGHTT; PAM sequence: AACTGCTT
ctcttcatggccttactgaa

SEQ ID NO: 15658 - DNA, 20 bp, Artificial Sequence
  Description of Artificial Sequence: Synthetic oligonucleotide
  Target: ATXN2; (+) strand; PAM type: NNNNGHTT; PAM sequence: TAATGTTT
gggtaacctggaagcagaga

SEQ ID NO: 15659 - DNA, 20 bp, Artificial Sequence
  Description of Artificial Sequence: Synthetic oligonucleotide
  Target: ATXN2; (+) strand; PAM type: NNNNGHTT; PAM sequence: TGTAGTTT
tttcaaccttaacttgctgg

SEQ ID NO: 15660 - DNA, 20 bp, Artificial Sequence
  Description of Artificial Sequence: Synthetic oligonucleotide
  Target: ATXN2; (+) strand; PAM type: NNNNGHTT; PAM sequence: ACTGGTTT
aacttgctggtgtagtttct

SEQ ID NO: 15661 - DNA, 20 bp, Artificial Sequence
  Description of Artificial Sequence: Synthetic oligonucleotide
  Target: ATXN2; (+) strand; PAM type: NNNNGHTT; PAM sequence: CATTGCTT
agcacttattacttgccagg

SEQ ID NO: 15662 - DNA, 20 bp, Artificial Sequence
  Description of Artificial Sequence: Synthetic oligonucleotide
  Target: ATXN2; (+) strand; PAM type: NNNNGHTT; PAM sequence: ACATGTTT
ggcattgctttaagcgtgtt

SEQ ID NO: 15663 - DNA, 20 bp, Artificial Sequence
  Description of Artificial Sequence: Synthetic oligonucleotide
  Target: ATXN2; (+) strand; PAM type: NNNNGHTT; PAM sequence: GCAAGCTT
gacaaatcataatctcaaat

SEQ ID NO: 15664 - DNA, 20 bp, Artificial Sequence
  Description of Artificial Sequence: Synthetic oligonucleotide
  Target: ATXN2; (+) strand; PAM type: NNNNGHTT; PAM sequence: TTCAGATT
gcaagcttcaaatcccaaaa

SEQ ID NO: 15665 - DNA, 20 bp, Artificial Sequence
  Description of Artificial Sequence: Synthetic oligonucleotide
  Target: ATXN2; (+) strand; PAM type: NNNNGHTT; PAM sequence: AGGGGATT
ccaaaattcagatttgggaa

SEQ ID NO: 15666 - DNA, 20 bp, Artificial Sequence
  Description of Artificial Sequence: Synthetic oligonucleotide
  Target: ATXN2; (+) strand; PAM type: NNNNGHTT; PAM sequence: GGAAGTTT
agacaaagttaagttctaca

SEQ ID NO: 15667 - DNA, 20 bp, Artificial Sequence
  Description of Artificial Sequence: Synthetic oligonucleotide
  Target: ATXN2; (+) strand; PAM type: NNNNGHTT; PAM sequence: ATTAGTTT
ggaagtttttaattattaga

SEQ ID NO: 15668 - DNA, 20 bp, Artificial Sequence
  Description of Artificial Sequence: Synthetic oligonucleotide
  Target: ATXN2; (+) strand; PAM type: NNNNGHTT; PAM sequence: TCTTGATT
agcagtgaggaaggagacca

SEQ ID NO: 15669 - DNA, 20 bp, Artificial Sequence
  Description of Artificial Sequence: Synthetic oligonucleotide
  Target: ATXN2; (+) strand; PAM type: NNNNGHTT; PAM sequence: CATGGCTT
atgcccatggcctattttca

SEQ ID NO: 15670 - DNA, 20 bp, Artificial Sequence
  Description of Artificial Sequence: Synthetic oligonucleotide
  Target: ATXN2; (+) strand; PAM type: NNNNGHTT; PAM sequence: AAGAGCTT
agaatattttttacactgta

SEQ ID NO: 15671 - DNA, 20 bp, Artificial Sequence
  Description of Artificial Sequence: Synthetic oligonucleotide
  Target: ATXN2; (+) strand; PAM type: NNNNGHTT; PAM sequence: CCAAGATT
gaggcagaggttgcagtgag

SEQ ID NO: 15672 - DNA, 20 bp, Artificial Sequence
  Description of Artificial Sequence: Synthetic oligonucleotide
  Target: ATXN2; (+) strand; PAM type: NNNNGHTT; PAM sequence: AGGGGCTT
tgtctcaaaaaaaaaaaaaa

SEQ ID NO: 15673 - DNA, 20 bp, Artificial Sequence
  Description of Artificial Sequence: Synthetic oligonucleotide
  Target: ATXN2; (+) strand; PAM type: NNNNGHTT; PAM sequence: CGAAGTTT
atttactatctggcccttta

SEQ ID NO: 15674 - DNA, 20 bp, Artificial Sequence
  Description of Artificial Sequence: Synthetic oligonucleotide
  Target: ATXN2; (+) strand; PAM type: NNNNGHTT; PAM sequence: CTTGGATT
ctttacgaagtttgacaggc

SEQ ID NO: 15675 - DNA, 20 bp, Artificial Sequence
  Description of Artificial Sequence: Synthetic oligonucleotide
  Target: ATXN2; (+) strand; PAM type: NNNNGHTT; PAM sequence: GAAAGCTT
aggccttggattaggtcata

SEQ ID NO: 15676 - DNA, 20 bp, Artificial Sequence
  Description of Artificial Sequence: Synthetic oligonucleotide
  Target: ATXN2; (+) strand; PAM type: NNNNGHTT; PAM sequence: TCAGGCTT
agctttgaaggtagactccc

SEQ ID NO: 15677 - DNA, 20 bp, Artificial Sequence
  Description of Artificial Sequence: Synthetic oligonucleotide
  Target: ATXN2; (+) strand; PAM type: NNNNGHTT; PAM sequence: GGGTGATT
ctccctcaggcttgggaata

SEQ ID NO: 15678 - DNA, 20 bp, Artificial Sequence
  Description of Artificial Sequence: Synthetic oligonucleotide
  Target: ATXN2; (+) strand; PAM type: NNNNGHTT; PAM sequence: TATTGTTT
taaaatgtacaacctcctga

SEQ ID NO: 15679 - DNA, 20 bp, Artificial Sequence
  Description of Artificial Sequence: Synthetic oligonucleotide
  Target: ATXN2; (+) strand; PAM type: NNNNGHTT; PAM sequence: TGTTGTTT
aaactaaccatcatttatga

SEQ ID NO: 15680 - DNA, 20 bp, Artificial Sequence
  Description of Artificial Sequence: Synthetic oligonucleotide
  Target: ATXN2; (+) strand; PAM type: NNNNGHTT; PAM sequence: TTTTGATT
aaaaaaattataaacaaact

SEQ ID NO: 15681 - DNA, 20 bp, Artificial Sequence
  Description of Artificial Sequence: Synthetic oligonucleotide
  Target: ATXN2; (+) strand; PAM type: NNNNGHTT; PAM sequence: GGTTGATT
aactgccaggactaaagcat

SEQ ID NO: 15682 - DNA, 20 bp, Artificial Sequence
  Description of Artificial Sequence: Synthetic oligonucleotide
  Target: ATXN2; (+) strand; PAM type: NNNNGHTT; PAM sequence: ACCGGATT
ttttattgctgacaataatc

SEQ ID NO: 15683 - DNA, 20 bp, Artificial Sequence
  Description of Artificial Sequence: Synthetic oligonucleotide
  Target: ATXN2; (+) strand; PAM type: NNNNGHTT; PAM sequence: GATTGTTT
attgctgacaataatcaccg

SEQ ID NO: 15684 - DNA, 20 bp, Artificial Sequence
  Description of Artificial Sequence: Synthetic oligonucleotide
  Target: ATXN2; (+) strand; PAM type: NNNNGHTT; PAM sequence: TCTTGCTT
atttattttttgagacggag

SEQ ID NO: 15685 - DNA, 20 bp, Artificial Sequence
  Description of Artificial Sequence: Synthetic oligonucleotide
  Target: ATXN2; (+) strand; PAM type: NNNNGHTT; PAM sequence: AAGCGATT
aacctccacctcccaggttc

SEQ ID NO: 15686 - DNA, 20 bp, Artificial Sequence
  Description of Artificial Sequence: Synthetic oligonucleotide
  Target: ATXN2; (+) strand; PAM type: NNNNGHTT; PAM sequence: CTGGGATT
tgcctcagcctactgagtag

SEQ ID NO: 15687 - DNA, 20 bp, Artificial Sequence
  Description of Artificial Sequence: Synthetic oligonucleotide
  Target: ATXN2; (+) strand; PAM type: NNNNGHTT; PAM sequence: AGGTGCTT
tactgagtagctgggattac

SEQ ID NO: 15688 - DNA, 20 bp, Artificial Sequence
  Description of Artificial Sequence: Synthetic oligonucleotide
  Target: ATXN2; (+) strand; PAM type: NNNNGHTT; PAM sequence: CGGAGTTT
ttttgtatttttagtagaga

SEQ ID NO: 15689 - DNA, 20 bp, Artificial Sequence
  Description of Artificial Sequence: Synthetic oligonucleotide
  Target: ATXN2; (+) strand; PAM type: NNNNGHTT; PAM sequence: CTGGGATT
cgcctcggcctcccaaactg

SEQ ID NO: 15690 - DNA, 20 bp, Artificial Sequence
  Description of Artificial Sequence: Synthetic oligonucleotide
  Target: ATXN2; (+) strand; PAM type: NNNNGHTT; PAM sequence: CACTGATT
cgactgctcccagccttctt

SEQ ID NO: 15691 - DNA, 20 bp, Artificial Sequence
  Description of Artificial Sequence: Synthetic oligonucleotide
  Target: ATXN2; (+) strand; PAM type: NNNNGHTT; PAM sequence: ACTTGTTT
agccttcttcactgattttt

SEQ ID NO: 15692 - DNA, 20 bp, Artificial Sequence
  Description of Artificial Sequence: Synthetic oligonucleotide
  Target: ATXN2; (+) strand; PAM type: NNNNGHTT; PAM sequence: CTCAGCTT
aatctcacaaggttaaaaat

SEQ ID NO: 15693 - DNA, 20 bp, Artificial Sequence
  Description of Artificial Sequence: Synthetic oligonucleotide
  Target: ATXN2; (+) strand; PAM type: NNNNGHTT; PAM sequence: TAAGGCTT
cctgacaggctgggctgttg

SEQ ID NO: 15694 - DNA, 20 bp, Artificial Sequence
  Description of Artificial Sequence: Synthetic oligonucleotide
  Target: ATXN2; (+) strand; PAM type: NNNNGHTT; PAM sequence: ATGTGTTT
ttcacatcatagatagctaa

SEQ ID NO: 15695 - DNA, 20 bp, Artificial Sequence
  Description of Artificial Sequence: Synthetic oligonucleotide
  Target: ATXN2; (+) strand; PAM type: NNNNGHTT; PAM sequence: AAATGTTT
atgctagtctttattttctg

SEQ ID NO: 15696 - DNA, 20 bp, Artificial Sequence
  Description of Artificial Sequence: Synthetic oligonucleotide
  Target: ATXN2; (+) strand; PAM type: NNNNGHTT; PAM sequence: TTTAGATT
cttatatatttccttaccat

SEQ ID NO: 15697 - DNA, 20 bp, Artificial Sequence
  Description of Artificial Sequence: Synthetic oligonucleotide
  Target: ATXN2; (+) strand; PAM type: NNNNGHTT; PAM sequence: CGGTGATT
tggagacttccggccgggtg

SEQ ID NO: 15698 - DNA, 20 bp, Artificial Sequence
  Description of Artificial Sequence: Synthetic oligonucleotide
  Target: ATXN2; (+) strand; PAM type: NNNNGHTT; PAM sequence: CAGAGCTT
aatggcgtgaacccgagagg

SEQ ID NO: 15699 - DNA, 20 bp, Artificial Sequence
  Description of Artificial Sequence: Synthetic oligonucleotide
  Target: ATXN2; (+) strand; PAM type: NNNNGHTT; PAM sequence: CTGGGTTT
ctcactgcaacctccaattc

SEQ ID NO: 15700 - DNA, 20 bp, Artificial Sequence
  Description of Artificial Sequence: Synthetic oligonucleotide
  Target: ATXN2; (+) strand; PAM type: NNNNGHTT; PAM sequence: CTTGGCTT
agctcaagcgaccctcctcc

SEQ ID NO: 15701 - DNA, 20 bp, Artificial Sequence
  Description of Artificial Sequence: Synthetic oligonucleotide
  Target: ATXN2; (+) strand; PAM type: NNNNGHTT; PAM sequence: TTCCGTTT
ccaaaattcctcattttctt

SEQ ID NO: 15702 - DNA, 20 bp, Artificial Sequence
  Description of Artificial Sequence: Synthetic oligonucleotide
  Target: ATXN2; (+) strand; PAM type: NNNNGHTT; PAM sequence: GGTTGATT
agctagtgactcaagttcct

SEQ ID NO: 15703 - DNA, 20 bp, Artificial Sequence
  Description of Artificial Sequence: Synthetic oligonucleotide
  Target: ATXN2; (+) strand; PAM type: NNNNGHTT; PAM sequence: ACTAGTTT
taacattttttaataccatc

SEQ ID NO: 15704 - DNA, 20 bp, Artificial Sequence
  Description of Artificial Sequence: Synthetic oligonucleotide
  Target: ATXN2; (+) strand; PAM type: NNNNGHTT; PAM sequence: AACAGATT
gggtaaaatgaggacaggat

SEQ ID NO: 15705 - DNA, 20 bp, Artificial Sequence
  Description of Artificial Sequence: Synthetic oligonucleotide
  Target: ATXN2; (+) strand; PAM type: NNNNGHTT; PAM sequence: ATGAGATT
cagggctatgtggtaatcac

SEQ ID NO: 15706 - DNA, 20 bp, Artificial Sequence
  Description of Artificial Sequence: Synthetic oligonucleotide
  Target: ATXN2; (+) strand; PAM type: NNNNGHTT; PAM sequence: TCCTGTTT
gtagcgtccggttcactcaa

SEQ ID NO: 15707 - DNA, 20 bp, Artificial Sequence
  Description of Artificial Sequence: Synthetic oligonucleotide
  Target: ATXN2; (+) strand; PAM type: NNNNGHTT; PAM sequence: GAAAGCTT
aatttttcaagctgaggtca

SEQ ID NO: 15708 - DNA, 20 bp, Artificial Sequence
  Description of Artificial Sequence: Synthetic oligonucleotide
  Target: ATXN2; (+) strand; PAM type: NNNNGHTT; PAM sequence: TCTCGCTT
ctcctgagctcaagcaatcc

SEQ ID NO: 15709 - DNA, 20 bp, Artificial Sequence
  Description of Artificial Sequence: Synthetic oligonucleotide
  Target: ATXN2; (+) strand; PAM type: NNNNGHTT; PAM sequence: TTATGTTT
tttgtagagatggggtcttg

SEQ ID NO: 15710 - DNA, 20 bp, Artificial Sequence
  Description of Artificial Sequence: Synthetic oligonucleotide
  Target: ATXN2; (+) strand; PAM type: NNNNGHTT; PAM sequence: GGAGGTTT
tcagcctccccatgacgtgg

SEQ ID NO: 15711 - DNA, 20 bp, Artificial Sequence
  Description of Artificial Sequence: Synthetic oligonucleotide
  Target: ATXN2; (+) strand; PAM type: NNNNGHTT; PAM sequence: TTCTGATT
gacatgacccaggcccattc

SEQ ID NO: 15712 - DNA, 20 bp, Artificial Sequence
  Description of Artificial Sequence: Synthetic oligonucleotide
  Target: ATXN2; (+) strand; PAM type: NNNNGHTT; PAM sequence: TTTTGTTT
acccaggcccattcttctga

SEQ ID NO: 15713 - DNA, 20 bp, Artificial Sequence
  Description of Artificial Sequence: Synthetic oligonucleotide
  Target: ATXN2; (+) strand; PAM type: NNNNGHTT; PAM sequence: TCAAGATT
ttcatctaaaagaactcctt

SEQ ID NO: 15714 - DNA, 20 bp, Artificial Sequence
  Description of Artificial Sequence: Synthetic oligonucleotide
  Target: ATXN2; (+) strand; PAM type: NNNNGHTT; PAM sequence: TCTGGCTT
ccaaaaagagagagacctca

SEQ ID NO: 15715 - DNA, 20 bp, Artificial Sequence
  Description of Artificial Sequence: Synthetic oligonucleotide
  Target: ATXN2; (+) strand; PAM type: NNNNGHTT; PAM sequence: CCATGCTT
acgtggtatgcctataaatg

SEQ ID NO: 15716 - DNA, 20 bp, Artificial Sequence
  Description of Artificial Sequence: Synthetic oligonucleotide
  Target: ATXN2; (+) strand; PAM type: NNNNGHTT; PAM sequence: TACTGCTT
tacatgacagggtcaactac

SEQ ID NO: 15717 - DNA, 20 bp, Artificial Sequence
  Description of Artificial Sequence: Synthetic oligonucleotide
  Target: ATXN2; (+) strand; PAM type: NNNNGHTT; PAM sequence: AGGAGTTT
taggcggatcacttgagaat

SEQ ID NO: 15718 - DNA, 20 bp, Artificial Sequence
  Description of Artificial Sequence: Synthetic oligonucleotide
  Target: ATXN2; (+) strand; PAM type: NNNNGHTT; PAM sequence: CTAAGATT
gaggcggaggttgcagtgag

SEQ ID NO: 15719 - DNA, 20 bp, Artificial Sequence
  Description of Artificial Sequence: Synthetic oligonucleotide
  Target: ATXN2; (+) strand; PAM type: NNNNGHTT; PAM sequence: AAGAGATT
aacctctgcctcccgggttc

SEQ ID NO: 15720 - DNA, 20 bp, Artificial Sequence
  Description of Artificial Sequence: Synthetic oligonucleotide
  Target: ATXN2; (+) strand; PAM type: NNNNGHTT; PAM sequence: CAGGGTTT
aataaacaaacaaacaaacc

SEQ ID NO: 15721 - DNA, 20 bp, Artificial Sequence
  Description of Artificial Sequence: Synthetic oligonucleotide
  Target: ATXN2; (+) strand; PAM type: NNNNGHTT; PAM sequence: CTGGGATT
cgcctcggcctcccaaagtg

SEQ ID NO: 15722 - DNA, 20 bp, Artificial Sequence
  Description of Artificial Sequence: Synthetic oligonucleotide
  Target: ATXN2; (+) strand; PAM type: NNNNGHTT; PAM sequence: GCATGTTT
cgcaaataaacacatgcacc

SEQ ID NO: 15723 - DNA, 20 bp, Artificial Sequence
  Description of Artificial Sequence: Synthetic oligonucleotide
  Target: ATXN2; (+) strand; PAM type: NNNNGHTT; PAM sequence: CTGGGATT
tgcctcagcctcccgagtag

SEQ ID NO: 15724 - DNA, 20 bp, Artificial Sequence
  Description of Artificial Sequence: Synthetic oligonucleotide
  Target: ATXN2; (+) strand; PAM type: NNNNGHTT; PAM sequence: CGGGGTTT
tttagtatttttagtagaga

SEQ ID NO: 15725 - DNA, 20 bp, Artificial Sequence
  Description of Artificial Sequence: Synthetic oligonucleotide
  Target: ATXN2; (+) strand; PAM type: NNNNGHTT; PAM sequence: CTGGGATT
cgcctcggcctcccaaagtg

SEQ ID NO: 15726 - DNA, 20 bp, Artificial Sequence
  Description of Artificial Sequence: Synthetic oligonucleotide
  Target: ATXN2; (+) strand; PAM type: NNNNGHTT; PAM sequence: GCATGTTT
tgagccaccgggcccggccc

SEQ ID NO: 15727 - DNA, 20 bp, Artificial Sequence
  Description of Artificial Sequence: Synthetic oligonucleotide
  Target: ATXN2; (+) strand; PAM type: NNNNGHTT; PAM sequence: GGAGGATT
ctacgtgggaagctgaggtg

SEQ ID NO: 15728 - DNA, 20 bp, Artificial Sequence
  Description of Artificial Sequence: Synthetic oligonucleotide
  Target: ATXN2; (+) strand; PAM type: NNNNGHTT; PAM sequence: AATCGCTT
tcaggaggttgaggcaggag

SEQ ID NO: 15729 - DNA, 20 bp, Artificial Sequence
  Description of Artificial Sequence: Synthetic oligonucleotide
  Target: ATXN2; (+) strand; PAM type: NNNNGHTT; PAM sequence: CAGTGTTT
tttagtgtatcctaactgtt

SEQ ID NO: 15730 - DNA, 20 bp, Artificial Sequence
  Description of Artificial Sequence: Synthetic oligonucleotide
  Target: ATXN2; (+) strand; PAM type: NNNNGHTT; PAM sequence: CTATGTTT
tgtatttttactcacctttt

SEQ ID NO: 15731 - DNA, 20 bp, Artificial Sequence
  Description of Artificial Sequence: Synthetic oligonucleotide
  Target: ATXN2; (+) strand; PAM type: NNNNGHTT; PAM sequence: ATATGTTT
ctcaccttttctatgtttag

SEQ ID NO: 15732 - DNA, 20 bp, Artificial Sequence
  Description of Artificial Sequence: Synthetic oligonucleotide
  Target: ATXN2; (+) strand; PAM type: NNNNGHTT; PAM sequence: TTTAGATT
cttttctatgtttagatatg

SEQ ID NO: 15733 - DNA, 20 bp, Artificial Sequence
  Description of Artificial Sequence: Synthetic oligonucleotide
  Target: ATXN2; (+) strand; PAM type: NNNNGHTT; PAM sequence: TACAGATT
ttcagtaccgcaacatgcta

SEQ ID NO: 15734 - DNA, 20 bp, Artificial Sequence
  Description of Artificial Sequence: Synthetic oligonucleotide
  Target: ATXN2; (+) strand; PAM type: NNNNGHTT; PAM sequence: CTAGGCTT
gtgtctagtaggtataccat

SEQ ID NO: 15735 - DNA, 20 bp, Artificial Sequence
  Description of Artificial Sequence: Synthetic oligonucleotide
  Target: ATXN2; (+) strand; PAM type: NNNNGHTT; PAM sequence: CATAGTTT
atcattaagcaatgcataaa

SEQ ID NO: 15736 - DNA, 20 bp, Artificial Sequence
  Description of Artificial Sequence: Synthetic oligonucleotide
  Target: ATXN2; (+) strand; PAM type: NNNNGHTT; PAM sequence: AACAGTTT
atatagcagtcactttagca

SEQ ID NO: 15737 - DNA, 20 bp, Artificial Sequence
  Description of Artificial Sequence: Synthetic oligonucleotide
  Target: ATXN2; (+) strand; PAM type: NNNNGHTT; PAM sequence: ACAGGATT
ttaaaattaaataaacactc

SEQ ID NO: 15738 - DNA, 20 bp, Artificial Sequence
  Description of Artificial Sequence: Synthetic oligonucleotide
  Target: ATXN2; (+) strand; PAM type: NNNNGHTT; PAM sequence: ACCAGCTT
acctgtacataaatattcat

SEQ ID NO: 15739 - DNA, 20 bp, Artificial Sequence
  Description of Artificial Sequence: Synthetic oligonucleotide
  Target: ATXN2; (+) strand; PAM type: NNNNGHTT; PAM sequence: CGGAGTTT
atttatttatttttttgaga

SEQ ID NO: 15740 - DNA, 20 bp, Artificial Sequence
  Description of Artificial Sequence: Synthetic oligonucleotide
  Target: ATXN2; (+) strand; PAM type: NNNNGHTT; PAM sequence: AAGCGATT
aacctctgcctcccgggttc

SEQ ID NO: 15741 - DNA, 20 bp, Artificial Sequence
  Description of Artificial Sequence: Synthetic oligonucleotide
  Target: ATXN2; (+) strand; PAM type: NNNNGHTT; PAM sequence: CTAGGATT
tgcctcagcctcctgagtag

SEQ ID NO: 15742 - DNA, 20 bp, Artificial Sequence
  Description of Artificial Sequence: Synthetic oligonucleotide
  Target: ATXN2; (+) strand; PAM type: NNNNGHTT; PAM sequence: TGGGGTTT
ttttgtatttttagtagaga

SEQ ID NO: 15743 - DNA, 20 bp, Artificial Sequence
  Description of Artificial Sequence: Synthetic oligonucleotide
  Target: ATXN2; (+) strand; PAM type: NNNNGHTT; PAM sequence: CTGGGATT
tgcctcggccttccaaaatg

SEQ ID NO: 15744 - DNA, 20 bp, Artificial Sequence
  Description of Artificial Sequence: Synthetic oligonucleotide
  Target: ATXN2; (+) strand; PAM type: NNNNGHTT; PAM sequence: TCCAGCTT
gtgagacatcgcacccggcc

SEQ ID NO: 15745 - DNA, 20 bp, Artificial Sequence
  Description of Artificial Sequence: Synthetic oligonucleotide
  Target: ATXN2; (+) strand; PAM type: NNNNGHTT; PAM sequence: AAGTGATT
aacctcctcctcctgggttc

SEQ ID NO: 15746 - DNA, 20 bp, Artificial Sequence
  Description of Artificial Sequence: Synthetic oligonucleotide
  Target: ATXN2; (+) strand; PAM type: NNNNGHTT; PAM sequence: CTGGGATT
gtctcagcccccccgagtag

SEQ ID NO: 15747 - DNA, 20 bp, Artificial Sequence
  Description of Artificial Sequence: Synthetic oligonucleotide
  Target: ATXN2; (+) strand; PAM type: NNNNGHTT; PAM sequence: CTGGGATT
cacctcagcctcccaaagtg

SEQ ID NO: 15748 - DNA, 20 bp, Artificial Sequence
  Description of Artificial Sequence: Synthetic oligonucleotide
  Target: ATXN2; (+) strand; PAM type: NNNNGHTT; PAM sequence: AAGAGTTT
acactttgggaggccaaggc

SEQ ID NO: 15749 - DNA, 20 bp, Artificial Sequence
  Description of Artificial Sequence: Synthetic oligonucleotide
  Target: ATXN2; (+) strand; PAM type: NNNNGHTT; PAM sequence: AGGAGTTT
caagagtttcacttgagccc

SEQ ID NO: 15750 - DNA, 20 bp, Artificial Sequence
  Description of Artificial Sequence: Synthetic oligonucleotide
  Target: ATXN2; (+) strand; PAM type: NNNNGHTT; PAM sequence: GGATGATT
caagctgaggtgggatgatg

SEQ ID NO: 15751 - DNA, 20 bp, Artificial Sequence
  Description of Artificial Sequence: Synthetic oligonucleotide
  Target: ATXN2; (+) strand; PAM type: NNNNGHTT; PAM sequence: GATTGCTT
ctgaggtgggatgatgggat

SEQ ID NO: 15752 - DNA, 20 bp, Artificial Sequence
  Description of Artificial Sequence: Synthetic oligonucleotide
  Target: ATXN2; (+) strand; PAM type: NNNNGHTT; PAM sequence: GGAAGATT
actccaccctgagcaacaga

SEQ ID NO: 15753 - DNA, 20 bp, Artificial Sequence
  Description of Artificial Sequence: Synthetic oligonucleotide
  Target: ATXN2; (+) strand; PAM type: NNNNGHTT; PAM sequence: AATAGCTT
acttgggaggctgagacagg

SEQ ID NO: 15754 - DNA, 20 bp, Artificial Sequence
  Description of Artificial Sequence: Synthetic oligonucleotide
  Target: ATXN2; (+) strand; PAM type: NNNNGHTT; PAM sequence: CCAAGATT
gaggtggaggttgcaaggag

SEQ ID NO: 15755 - DNA, 20 bp, Artificial Sequence
  Description of Artificial Sequence: Synthetic oligonucleotide
  Target: ATXN2; (+) strand; PAM type: NNNNGHTT; PAM sequence: ATCAGATT
tgtattagaaataaaagtac

SEQ ID NO: 15756 - DNA, 20 bp, Artificial Sequence
  Description of Artificial Sequence: Synthetic oligonucleotide
  Target: ATXN2; (+) strand; PAM type: NNNNGHTT; PAM sequence: CTGGGCTT
acttcatgaactcctgctgc

SEQ ID NO: 15757 - DNA, 20 bp, Artificial Sequence
  Description of Artificial Sequence: Synthetic oligonucleotide
  Target: ATXN2; (+) strand; PAM type: NNNNGHTT; PAM sequence: CCCTGATT
caagtgcctgaacatctggg

SEQ ID NO: 15758 - DNA, 20 bp, Artificial Sequence
  Description of Artificial Sequence: Synthetic oligonucleotide
  Target: ATXN2; (+) strand; PAM type: NNNNGHTT; PAM sequence: ATCTGATT
ggccaggagctctgcccgtg

SEQ ID NO: 15759 - DNA, 20 bp, Artificial Sequence
  Description of Artificial Sequence: Synthetic oligonucleotide
  Target: ATXN2; (+) strand; PAM type: NNNNGHTT; PAM sequence: AGCCGTTT
ccagagccaagttctctatc

SEQ ID NO: 15760 - DNA, 20 bp, Artificial Sequence
  Description of Artificial Sequence: Synthetic oligonucleotide
  Target: ATXN2; (+) strand; PAM type: NNNNGHTT; PAM sequence: ACGTGTTT
aatggcattcaataaactgc

SEQ ID NO: 15761 - DNA, 20 bp, Artificial Sequence
  Description of Artificial Sequence: Synthetic oligonucleotide
  Target: ATXN2; (+) strand; PAM type: NNNNGHTT; PAM sequence: TCTGGTTT
ttcaataaactgcacgtgtt

SEQ ID NO: 15762 - DNA, 20 bp, Artificial Sequence
  Description of Artificial Sequence: Synthetic oligonucleotide
  Target: ATXN2; (+) strand; PAM type: NNNNGHTT; PAM sequence: ATGCGTTT
cagagccattccaactccaa

SEQ ID NO: 15763 - DNA, 20 bp, Artificial Sequence
  Description of Artificial Sequence: Synthetic oligonucleotide
  Target: ATXN2; (+) strand; PAM type: NNNNGHTT; PAM sequence: AGGAGTTT
cgggcagatcacttgagctc

SEQ ID NO: 15764 - DNA, 20 bp, Artificial Sequence
  Description of Artificial Sequence: Synthetic oligonucleotide
  Target: ATXN2; (+) strand; PAM type: NNNNGHTT; PAM sequence: AACTGCTT
tactcaggaggctgaggcag

SEQ ID NO: 15765 - DNA, 20 bp, Artificial Sequence
  Description of Artificial Sequence: Synthetic oligonucleotide
  Target: ATXN2; (+) strand; PAM type: NNNNGHTT; PAM sequence: CTCAGTTT
aaatattaagactttagtat

SEQ ID NO: 15766 - DNA, 20 bp, Artificial Sequence
  Description of Artificial Sequence: Synthetic oligonucleotide
  Target: ATXN2; (+) strand; PAM type: NNNNGHTT; PAM sequence: TTTTGTTT
agactttagtatctcagttt

SEQ ID NO: 15767 - DNA, 20 bp, Artificial Sequence
  Description of Artificial Sequence: Synthetic oligonucleotide
  Target: ATXN2; (+) strand; PAM type: NNNNGHTT; PAM sequence: GTTTGTTT
tttagtatctcagttttttt

SEQ ID NO: 15768 - DNA, 20 bp, Artificial Sequence
  Description of Artificial Sequence: Synthetic oligonucleotide
  Target: ATXN2; (+) strand; PAM type: NNNNGHTT; PAM sequence: GTTTGTTT
gtatctcagtttttttgttt

SEQ ID NO: 15769 - DNA, 20 bp, Artificial Sequence
  Description of Artificial Sequence: Synthetic oligonucleotide
  Target: ATXN2; (+) strand; PAM type: NNNNGHTT; PAM sequence: GTTTGTTT
ctcagtttttttgtttgttt

SEQ ID NO: 15770 - DNA, 20 bp, Artificial Sequence
  Description of Artificial Sequence: Synthetic oligonucleotide
  Target: ATXN2; (+) strand; PAM type: NNNNGHTT; PAM sequence: GTTTGTTT
gtttttttgtttgtttgttt

SEQ ID NO: 15771 - DNA, 20 bp, Artificial Sequence
  Description of Artificial Sequence: Synthetic oligonucleotide
  Target: ATXN2; (+) strand; PAM type: NNNNGHTT; PAM sequence: CTGGGATT
tgcctcagcctcccaagtag

SEQ ID NO: 15772 - DNA, 20 bp, Artificial Sequence
  Description of Artificial Sequence: Synthetic oligonucleotide
  Target: ATXN2; (+) strand; PAM type: NNNNGHTT; PAM sequence: CAGGGTTT
ttttgtatttttagtagaga

SEQ ID NO: 15773 - DNA, 20 bp, Artificial Sequence
  Description of Artificial Sequence: Synthetic oligonucleotide
  Target: ATXN2; (+) strand; PAM type: NNNNGHTT; PAM sequence: CTGGGATT
cgcctcggccttccaaagtg

SEQ ID NO: 15774 - DNA, 20 bp, Artificial Sequence
  Description of Artificial Sequence: Synthetic oligonucleotide
  Target: ATXN2; (+) strand; PAM type: NNNNGHTT; PAM sequence: CTCAGTTT
ccaccgcgcccggccagtat

SEQ ID NO: 15775 - DNA, 20 bp, Artificial Sequence
  Description of Artificial Sequence: Synthetic oligonucleotide
  Target: ATXN2; (+) strand; PAM type: NNNNGHTT; PAM sequence: TTTTGTTT
gccagtatctcagttttttt

SEQ ID NO: 15776 - DNA, 20 bp, Artificial Sequence
  Description of Artificial Sequence: Synthetic oligonucleotide
  Target: ATXN2; (+) strand; PAM type: NNNNGHTT; PAM sequence: GTTTGTTT
gtatctcagttttttttttt

SEQ ID NO: 15777 - DNA, 20 bp, Artificial Sequence
  Description of Artificial Sequence: Synthetic oligonucleotide
  Target: ATXN2; (+) strand; PAM type: NNNNGHTT; PAM sequence: AAGCGATT
aacctccacctcctgggttc

SEQ ID NO: 15778 - DNA, 20 bp, Artificial Sequence
  Description of Artificial Sequence: Synthetic oligonucleotide
  Target: ATXN2; (+) strand; PAM type: NNNNGHTT; PAM sequence: TGAGGTTT
tttttctattttagtagaga

SEQ ID NO: 15779 - DNA, 20 bp, Artificial Sequence
  Description of Artificial Sequence: Synthetic oligonucleotide
  Target: ATXN2; (+) strand; PAM type: NNNNGHTT; PAM sequence: CTGGGATT
cgcctcagcctcccaaagtg

SEQ ID NO: 15780 - DNA, 20 bp, Artificial Sequence
  Description of Artificial Sequence: Synthetic oligonucleotide
  Target: ATXN2; (+) strand; PAM type: NNNNGHTT; PAM sequence: TCCTGCTT
aatagtgaacaaaacaaagt

SEQ ID NO: 15781 - DNA, 20 bp, Artificial Sequence
  Description of Artificial Sequence: Synthetic oligonucleotide
  Target: ATXN2; (+) strand; PAM type: NNNNGHTT; PAM sequence: TAGAGCTT
aaacaaagttcctgctttca

SEQ ID NO: 15782 - DNA, 20 bp, Artificial Sequence
  Description of Artificial Sequence: Synthetic oligonucleotide
  Target: ATXN2; (+) strand; PAM type: NNNNGHTT; PAM sequence: CCATGATT
aaaaaaaaaaaaacagtgaa

SEQ ID NO: 15783 - DNA, 20 bp, Artificial Sequence
  Description of Artificial Sequence: Synthetic oligonucleotide
  Target: ATXN2; (+) strand; PAM type: NNNNGHTT; PAM sequence: TCCAGCTT
aaaaaacagtgaaccatgat

SEQ ID NO: 15784 - DNA, 20 bp, Artificial Sequence
  Description of Artificial Sequence: Synthetic oligonucleotide
  Target: ATXN2; (+) strand; PAM type: NNNNGHTT; PAM sequence: CCTAGCTT
tatttgccaaatctgacaac

SEQ ID NO: 15785 - DNA, 20 bp, Artificial Sequence
  Description of Artificial Sequence: Synthetic oligonucleotide
  Target: ATXN2; (+) strand; PAM type: NNNNGHTT; PAM sequence: CTGCGTTT
actctttctcaatcctttta

SEQ ID NO: 15786 - DNA, 20 bp, Artificial Sequence
  Description of Artificial Sequence: Synthetic oligonucleotide
  Target: ATXN2; (+) strand; PAM type: NNNNGHTT; PAM sequence: GATCGCTT
tcaggaggctgaggtgggag

SEQ ID NO: 15787 - DNA, 20 bp, Artificial Sequence
  Description of Artificial Sequence: Synthetic oligonucleotide
  Target: ATXN2; (+) strand; PAM type: NNNNGHTT; PAM sequence: CAAAGCTT
atatatacattaactcaaac

SEQ ID NO: 15788 - DNA, 20 bp, Artificial Sequence
  Description of Artificial Sequence: Synthetic oligonucleotide
  Target: ATXN2; (+) strand; PAM type: NNNNGHTT; PAM sequence: GGCAGATT
gcactttgggagtcgaggtg

SEQ ID NO: 15789 - DNA, 20 bp, Artificial Sequence
  Description of Artificial Sequence: Synthetic oligonucleotide
  Target: ATXN2; (+) strand; PAM type: NNNNGHTT; PAM sequence: AAATGCTT
attctttttcatttttctaa

SEQ ID NO: 15790 - DNA, 20 bp, Artificial Sequence
  Description of Artificial Sequence: Synthetic oligonucleotide
  Target: ATXN2; (+) strand; PAM type: NNNNGHTT; PAM sequence: ATGTGTTT
atgcttgtcataatccacta

SEQ ID NO: 15791 - DNA, 20 bp, Artificial Sequence
  Description of Artificial Sequence: Synthetic oligonucleotide
  Target: ATXN2; (+) strand; PAM type: NNNNGHTT; PAM sequence: TGCAGATT
tctactaaggggtcatgatc

SEQ ID NO: 15792 - DNA, 20 bp, Artificial Sequence
  Description of Artificial Sequence: Synthetic oligonucleotide
  Target: ATXN2; (+) strand; PAM type: NNNNGHTT; PAM sequence: CCAAGATT
gaggcagaggttgcagtggg

SEQ ID NO: 15793 - DNA, 20 bp, Artificial Sequence
  Description of Artificial Sequence: Synthetic oligonucleotide
  Target: ATXN2; (+) strand; PAM type: NNNNGHTT; PAM sequence: ACAAGATT
actccagcctgggcaacaga

SEQ ID NO: 15794 - DNA, 20 bp, Artificial Sequence
  Description of Artificial Sequence: Synthetic oligonucleotide
  Target: ATXN2; (+) strand; PAM type: NNNNGHTT; PAM sequence: AACTGCTT
actcaggagtcaggcaggag

SEQ ID NO: 15795 - DNA, 20 bp, Artificial Sequence
  Description of Artificial Sequence: Synthetic oligonucleotide
  Target: ATXN2; (+) strand; PAM type: NNNNGHTT; PAM sequence: GTCTGTTT
tatacttgttgagctcttgt

SEQ ID NO: 15796 - DNA, 20 bp, Artificial Sequence
  Description of Artificial Sequence: Synthetic oligonucleotide
  Target: ATXN2; (+) strand; PAM type: NNNNGHTT; PAM sequence: CTTTGCTT
attttagtagttcccaggct

SEQ ID NO: 15797 - DNA, 20 bp, Artificial Sequence
  Description of Artificial Sequence: Synthetic oligonucleotide
  Target: ATXN2; (+) strand; PAM type: NNNNGHTT; PAM sequence: CTTTGTTT
agtagttcccaggctctttg

SEQ ID NO: 15798 - DNA, 20 bp, Artificial Sequence
  Description of Artificial Sequence: Synthetic oligonucleotide
  Target: ATXN2; (+) strand; PAM type: NNNNGHTT; PAM sequence: TGGGGTTT
attaatattttttgttgaga

SEQ ID NO: 15799 - DNA, 20 bp, Artificial Sequence
  Description of Artificial Sequence: Synthetic oligonucleotide
  Target: ATXN2; (+) strand; PAM type: NNNNGHTT; PAM sequence: GCCTGCTT
ctcctgggctcaggtaatct

SEQ ID NO: 15800 - DNA, 20 bp, Artificial Sequence
  Description of Artificial Sequence: Synthetic oligonucleotide
  Target: ATXN2; (+) strand; PAM type: NNNNGHTT; PAM sequence: TTGGGATT
tgcttcagcctcccaaagtg

SEQ ID NO: 15801 - DNA, 20 bp, Artificial Sequence
  Description of Artificial Sequence: Synthetic oligonucleotide
  Target: ATXN2; (+) strand; PAM type: NNNNGHTT; PAM sequence: AAGCGATT
aaccttcacctcccgggttc

SEQ ID NO: 15802 - DNA, 20 bp, Artificial Sequence
  Description of Artificial Sequence: Synthetic oligonucleotide
  Target: ATXN2; (+) strand; PAM type: NNNNGHTT; PAM sequence: CTGGGATT
tgcctcagcctcccaagtag

SEQ ID NO: 15803 - DNA, 20 bp, Artificial Sequence
  Description of Artificial Sequence: Synthetic oligonucleotide
  Target: ATXN2; (+) strand; PAM type: NNNNGHTT; PAM sequence: TCTGGTTT
ggcgcccgcccagccccaag

SEQ ID NO: 15804 - DNA, 20 bp, Artificial Sequence
  Description of Artificial Sequence: Synthetic oligonucleotide
  Target: ATXN2; (+) strand; PAM type: NNNNGHTT; PAM sequence: TGGGGTTT
ttttgtatttttagtagaga

SEQ ID NO: 15805 - DNA, 20 bp, Artificial Sequence
  Description of Artificial Sequence: Synthetic oligonucleotide
  Target: ATXN2; (+) strand; PAM type: NNNNGHTT; PAM sequence: CTGGGATT
ctcctcaacctcccaaagtg

SEQ ID NO: 15806 - DNA, 20 bp, Artificial Sequence
  Description of Artificial Sequence: Synthetic oligonucleotide
  Target: ATXN2; (+) strand; PAM type: NNNNGHTT; PAM sequence: TTCTGTTT
gccaccacgcccggcccttt

SEQ ID NO: 15807 - DNA, 20 bp, Artificial Sequence
  Description of Artificial Sequence: Synthetic oligonucleotide
  Target: ATXN2; (+) strand; PAM type: NNNNGHTT; PAM sequence: CAGGGTTT
tttctgtttttcagtagaga

SEQ ID NO: 15808 - DNA, 20 bp, Artificial Sequence
  Description of Artificial Sequence: Synthetic oligonucleotide
  Target: ATXN2; (+) strand; PAM type: NNNNGHTT; PAM sequence: CTGGGATT
ctccttggcctcccaaagtg

SEQ ID NO: 15809 - DNA, 20 bp, Artificial Sequence
  Description of Artificial Sequence: Synthetic oligonucleotide
  Target: ATXN2; (+) strand; PAM type: NNNNGHTT; PAM sequence: CATTGCTT
aatatatctgcctctgaaaa

SEQ ID NO: 15810 - DNA, 20 bp, Artificial Sequence
  Description of Artificial Sequence: Synthetic oligonucleotide
  Target: ATXN2; (+) strand; PAM type: NNNNGHTT; PAM sequence: GACAGTTT
accagaggctaaagcaggag

SEQ ID NO: 15811 - DNA, 20 bp, Artificial Sequence
  Description of Artificial Sequence: Synthetic oligonucleotide
  Target: ATXN2; (+) strand; PAM type: NNNNGHTT; PAM sequence: TCAAGCTT
ctcccctttctaaaatctgc

SEQ ID NO: 15812 - DNA, 20 bp, Artificial Sequence
  Description of Artificial Sequence: Synthetic oligonucleotide
  Target: ATXN2; (+) strand; PAM type: NNNNGHTT; PAM sequence: TCCTGATT
aaagacatttagtcttcaat

SEQ ID NO: 15813 - DNA, 20 bp, Artificial Sequence
  Description of Artificial Sequence: Synthetic oligonucleotide
  Target: ATXN2; (+) strand; PAM type: NNNNGHTT; PAM sequence: ATGTGTTT
cttcaattcctgatttcgaa

SEQ ID NO: 15814 - DNA, 20 bp, Artificial Sequence
  Description of Artificial Sequence: Synthetic oligonucleotide
  Target: ATXN2; (+) strand; PAM type: NNNNGHTT; PAM sequence: AAATGTTT
aactgcacaaagtccacagc

SEQ ID NO: 15815 - DNA, 20 bp, Artificial Sequence
  Description of Artificial Sequence: Synthetic oligonucleotide
  Target: ATXN2; (+) strand; PAM type: NNNNGHTT; PAM sequence: ACTTGTTT
cccgaaaagaaaaatgcagt

SEQ ID NO: 15816 - DNA, 20 bp, Artificial Sequence
  Description of Artificial Sequence: Synthetic oligonucleotide
  Target: ATXN2; (+) strand; PAM type: NNNNGHTT; PAM sequence: TCAAGATT
ataaaaaactaaaattataa

SEQ ID NO: 15817 - DNA, 20 bp, Artificial Sequence
  Description of Artificial Sequence: Synthetic oligonucleotide
  Target: ATXN2; (+) strand; PAM type: NNNNGHTT; PAM sequence: AAGAGTTT
tgggtggatcatttgaattt

SEQ ID NO: 15818 - DNA, 20 bp, Artificial Sequence
  Description of Artificial Sequence: Synthetic oligonucleotide
  Target: ATXN2; (+) strand; PAM type: NNNNGHTT; PAM sequence: GACTGCTT
tcgggagactgaggtaggag

SEQ ID NO: 15819 - DNA, 20 bp, Artificial Sequence
  Description of Artificial Sequence: Synthetic oligonucleotide
  Target: ATXN2; (+) strand; PAM type: NNNNGHTT; PAM sequence: AATGGTTT
tcaataaagcctctcaaggc

SEQ ID NO: 15820 - DNA, 20 bp, Artificial Sequence
  Description of Artificial Sequence: Synthetic oligonucleotide
  Target: ATXN2; (+) strand; PAM type: NNNNGHTT; PAM sequence: ATGAGTTT
caagcctcataccacaacta

SEQ ID NO: 15821 - DNA, 20 bp, Artificial Sequence
  Description of Artificial Sequence: Synthetic oligonucleotide
  Target: ATXN2; (+) strand; PAM type: NNNNGHTT; PAM sequence: GATGGCTT
ttgggaggctgaggtgggag

SEQ ID NO: 15822 - DNA, 20 bp, Artificial Sequence
  Description of Artificial Sequence: Synthetic oligonucleotide
  Target: ATXN2; (+) strand; PAM type: NNNNGHTT; PAM sequence: AATCGCTT
tcaggaggctgaggcagaaa

SEQ ID NO: 15823 - DNA, 20 bp, Artificial Sequence
  Description of Artificial Sequence: Synthetic oligonucleotide
  Target: ATXN2; (+) strand; PAM type: NNNNGHTT; PAM sequence: ACAAGTTT
agttaaggttaacagctgtg

SEQ ID NO: 15824 - DNA, 20 bp, Artificial Sequence
  Description of Artificial Sequence: Synthetic oligonucleotide
  Target: ATXN2; (+) strand; PAM type: NNNNGHTT; PAM sequence: GGGAGATT
ggcgggcagatcaagaggtc

SEQ ID NO: 15825 - DNA, 20 bp, Artificial Sequence
  Description of Artificial Sequence: Synthetic oligonucleotide
  Target: ATXN2; (+) strand; PAM type: NNNNGHTT; PAM sequence: TGGAGCTT
aatggcatgaacctgggagg

SEQ ID NO: 15826 - DNA, 20 bp, Artificial Sequence
  Description of Artificial Sequence: Synthetic oligonucleotide
  Target: ATXN2; (+) strand; PAM type: NNNNGHTT; PAM sequence: CTGAGATT
gaggtggagcttgcagtgag

SEQ ID NO: 15827 - DNA, 20 bp, Artificial Sequence
  Description of Artificial Sequence: Synthetic oligonucleotide
  Target: ATXN2; (+) strand; PAM type: NNNNGHTT; PAM sequence: GCGAGATT
actctagcctgggcgacaga

SEQ ID NO: 15828 - DNA, 20 bp, Artificial Sequence
  Description of Artificial Sequence: Synthetic oligonucleotide
  Target: ATXN2; (+) strand; PAM type: NNNNGHTT; PAM sequence: AATTGTTT
ttgggaggccaaggagggca

SEQ ID NO: 15829 - DNA, 20 bp, Artificial Sequence
  Description of Artificial Sequence: Synthetic oligonucleotide
  Target: ATXN2; (+) strand; PAM type: NNNNGHTT; PAM sequence: AGTGGCTT
caaacaaaaaagctaggcgc

SEQ ID NO: 15830 - DNA, 20 bp, Artificial Sequence
  Description of Artificial Sequence: Synthetic oligonucleotide
  Target: ATXN2; (+) strand; PAM type: NNNNGHTT; PAM sequence: CCGAGATT
gaagtggaggttacagtgag

SEQ ID NO: 15831 - DNA, 20 bp, Artificial Sequence
  Description of Artificial Sequence: Synthetic oligonucleotide
  Target: ATXN2; (+) strand; PAM type: NNNNGHTT; PAM sequence: CACTGCTT
acagtgagccgagattatgc

SEQ ID NO: 15832 - DNA, 20 bp, Artificial Sequence
  Description of Artificial Sequence: Synthetic oligonucleotide
  Target: ATXN2; (+) strand; PAM type: NNNNGHTT; PAM sequence: CAAGGATT
tctcaaaataaataaataac

SEQ ID NO: 15833 - DNA, 20 bp, Artificial Sequence
  Description of Artificial Sequence: Synthetic oligonucleotide
  Target: ATXN2; (+) strand; PAM type: NNNNGHTT; PAM sequence: TGTAGATT
aaccaaggatttaacattta

SEQ ID NO: 15834 - DNA, 20 bp, Artificial Sequence
  Description of Artificial Sequence: Synthetic oligonucleotide
  Target: ATXN2; (+) strand; PAM type: NNNNGHTT; PAM sequence: AATCGCTT
atgggaggctaaggcaggag

SEQ ID NO: 15835 - DNA, 20 bp, Artificial Sequence
  Description of Artificial Sequence: Synthetic oligonucleotide
  Target: ATXN2; (+) strand; PAM type: NNNNGHTT; PAM sequence: CCGGGTTT
ctcactgcaagctctgcctc

SEQ ID NO: 15836 - DNA, 20 bp, Artificial Sequence
  Description of Artificial Sequence: Synthetic oligonucleotide
  Target: ATXN2; (+) strand; PAM type: NNNNGHTT; PAM sequence: GGGGGTTT
tttttgtatttttagtagag

SEQ ID NO: 15837 - DNA, 20 bp, Artificial Sequence
  Description of Artificial Sequence: Synthetic oligonucleotide
  Target: ATXN2; (+) strand; PAM type: NNNNGHTT; PAM sequence: CTGGGATT
cgcctcggcctcccaaagtg

SEQ ID NO: 15838 - DNA, 20 bp, Artificial Sequence
  Description of Artificial Sequence: Synthetic oligonucleotide
  Target: ATXN2; (+) strand; PAM type: NNNNGHTT; PAM sequence: AACAGTTT
ccaccgtgcccggccggtgg

SEQ ID NO: 15839 - DNA, 20 bp, Artificial Sequence
  Description of Artificial Sequence: Synthetic oligonucleotide
  Target: ATXN2; (+) strand; PAM type: NNNNGHTT; PAM sequence: TTACGTTT
agcatgatcttgtgtatata

SEQ ID NO: 15840 - DNA, 20 bp, Artificial Sequence
  Description of Artificial Sequence: Synthetic oligonucleotide
  Target: ATXN2; (+) strand; PAM type: NNNNGHTT; PAM sequence: AGGAGTTT
caggaggatcacttgagccc

SEQ ID NO: 15841 - DNA, 20 bp, Artificial Sequence
  Description of Artificial Sequence: Synthetic oligonucleotide
  Target: ATXN2; (+) strand; PAM type: NNNNGHTT; PAM sequence: AAATGCTT
tcaggaggctaagacaggag

SEQ ID NO: 15842 - DNA, 20 bp, Artificial Sequence
  Description of Artificial Sequence: Synthetic oligonucleotide
  Target: ATXN2; (+) strand; PAM type: NNNNGHTT; PAM sequence: CATAGATT
acaggagaaatgcttggccc

SEQ ID NO: 15843 - DNA, 20 bp, Artificial Sequence
  Description of Artificial Sequence: Synthetic oligonucleotide
  Target: ATXN2; (+) strand; PAM type: NNNNGHTT; PAM sequence: TATTGCTT
gtgtaataaaatcctacaaa

SEQ ID NO: 15844 - DNA, 20 bp, Artificial Sequence
  Description of Artificial Sequence: Synthetic oligonucleotide
  Target: ATXN2; (+) strand; PAM type: NNNNGHTT; PAM sequence: CAAAGCTT
gggcaagtcccctaatctct

SEQ ID NO: 15845 - DNA, 20 bp, Artificial Sequence
  Description of Artificial Sequence: Synthetic oligonucleotide
  Target: ATXN2; (+) strand; PAM type: NNNNGHTT; PAM sequence: TAGAGTTT
tcccctaatctctcaaagct

SEQ ID NO: 15846 - DNA, 20 bp, Artificial Sequence
  Description of Artificial Sequence: Synthetic oligonucleotide
  Target: ATXN2; (+) strand; PAM type: NNNNGHTT; PAM sequence: TTAAGATT
agagtttttgccttccattt

SEQ ID NO: 15847 - DNA, 20 bp, Artificial Sequence
  Description of Artificial Sequence: Synthetic oligonucleotide
  Target: ATXN2; (+) strand; PAM type: NNNNGHTT; PAM sequence: TTAGGATT
ttgccttccatttttaagat

SEQ ID NO: 15848 - DNA, 20 bp, Artificial Sequence
  Description of Artificial Sequence: Synthetic oligonucleotide
  Target: ATXN2; (+) strand; PAM type: NNNNGHTT; PAM sequence: TACTGTTT
tttgttgttgttgttgttgt

SEQ ID NO: 15849 - DNA, 20 bp, Artificial Sequence
  Description of Artificial Sequence: Synthetic oligonucleotide
  Target: ATXN2; (+) strand; PAM type: NNNNGHTT; PAM sequence: GATCGCTT
ttgggaggccaaggcaggtg

SEQ ID NO: 15850 - DNA, 20 bp, Artificial Sequence
  Description of Artificial Sequence: Synthetic oligonucleotide
  Target: ATXN2; (+) strand; PAM type: NNNNGHTT; PAM sequence: AATCGCTT
tcagaaggctgaggcaggag

SEQ ID NO: 15851 - DNA, 20 bp, Artificial Sequence
  Description of Artificial Sequence: Synthetic oligonucleotide
  Target: ATXN2; (+) strand; PAM type: NNNNGHTT; PAM sequence: CTGAGATT
gaaacagaggttgcagtgag

SEQ ID NO: 15852 - DNA, 20 bp, Artificial Sequence
  Description of Artificial Sequence: Synthetic oligonucleotide
  Target: ATXN2; (+) strand; PAM type: NNNNGHTT; PAM sequence: AATTGCTT
cgggagggctaaggcaggag

SEQ ID NO: 15853 - DNA, 20 bp, Artificial Sequence
  Description of Artificial Sequence: Synthetic oligonucleotide
  Target: ATXN2; (+) strand; PAM type: NNNNGHTT; PAM sequence: AGGAGTTT
caggtggatcacctgaggtc

SEQ ID NO: 15854 - DNA, 20 bp, Artificial Sequence
  Description of Artificial Sequence: Synthetic oligonucleotide
  Target: ATXN2; (+) strand; PAM type: NNNNGHTT; PAM sequence: AACTGTTT
aataggtgtgactgttaata

SEQ ID NO: 15855 - DNA, 20 bp, Artificial Sequence
  Description of Artificial Sequence: Synthetic oligonucleotide
  Target: ATXN2; (+) strand; PAM type: NNNNGHTT; PAM sequence: TAGGGTTT
gaaatagctaaaaaaaaaaa

SEQ ID NO: 15856 - DNA, 20 bp, Artificial Sequence
  Description of Artificial Sequence: Synthetic oligonucleotide
  Target: ATXN2; (+) strand; PAM type: NNNNGHTT; PAM sequence: ATTCGTTT
caatcttctaaaaccttaaa

SEQ ID NO: 15857 - DNA, 20 bp, Artificial Sequence
  Description of Artificial Sequence: Synthetic oligonucleotide
  Target: ATXN2; (+) strand; PAM type: NNNNGHTT; PAM sequence: TTTTGTTT
aaaaaatgagatcctccttt

SEQ ID NO: 15858 - DNA, 20 bp, Artificial Sequence
  Description of Artificial Sequence: Synthetic oligonucleotide
  Target: ATXN2; (+) strand; PAM type: NNNNGHTT; PAM sequence: GTTTGTTT
aatgagatcctccttttttt

SEQ ID NO: 15859 - DNA, 20 bp, Artificial Sequence
  Description of Artificial Sequence: Synthetic oligonucleotide
  Target: ATXN2; (+) strand; PAM type: NNNNGHTT; PAM sequence: GTTTGTTT
agatcctcctttttttgttt

SEQ ID NO: 15860 - DNA, 20 bp, Artificial Sequence
  Description of Artificial Sequence: Synthetic oligonucleotide
  Target: ATXN2; (+) strand; PAM type: NNNNGHTT; PAM sequence: GTTTGTTT
cctcctttttttgtttgttt

SEQ ID NO: 15861 - DNA, 20 bp, Artificial Sequence
  Description of Artificial Sequence: Synthetic oligonucleotide
  Target: ATXN2; (+) strand; PAM type: NNNNGHTT; PAM sequence: CTGGGATT
tccctcagcctcccaagaag

SEQ ID NO: 15862 - DNA, 20 bp, Artificial Sequence
  Description of Artificial Sequence: Synthetic oligonucleotide
  Target: ATXN2; (+) strand; PAM type: NNNNGHTT; PAM sequence: GGGGGTTT
tttgtatttttagtagagat

SEQ ID NO: 15863 - DNA, 20 bp, Artificial Sequence
  Description of Artificial Sequence: Synthetic oligonucleotide
  Target: ATXN2; (+) strand; PAM type: NNNNGHTT; PAM sequence: CTGGGATT
cgcctcagcctcctaaagtg

SEQ ID NO: 15864 - DNA, 20 bp, Artificial Sequence
  Description of Artificial Sequence: Synthetic oligonucleotide
  Target: ATXN2; (+) strand; PAM type: NNNNGHTT; PAM sequence: ACAAGTTT
attagagtaacactgaaaat

SEQ ID NO: 15865 - DNA, 20 bp, Artificial Sequence
  Description of Artificial Sequence: Synthetic oligonucleotide
  Target: ATXN2; (+) strand; PAM type: NNNNGHTT; PAM sequence: CCATGTTT
aaggaacaccatgactgatc

SEQ ID NO: 15866 - DNA, 20 bp, Artificial Sequence
  Description of Artificial Sequence: Synthetic oligonucleotide
  Target: ATXN2; (+) strand; PAM type: NNNNGHTT; PAM sequence: CACTGTTT
catgactgatcccatgtttt

SEQ ID NO: 15867 - DNA, 20 bp, Artificial Sequence
  Description of Artificial Sequence: Synthetic oligonucleotide
  Target: ATXN2; (+) strand; PAM type: NNNNGHTT; PAM sequence: ACAGGCTT
tgtggaatctttaagcaact

SEQ ID NO: 15868 - DNA, 20 bp, Artificial Sequence
  Description of Artificial Sequence: Synthetic oligonucleotide
  Target: ATXN2; (+) strand; PAM type: NNNNGHTT; PAM sequence: GCAAGTTT
aaaagaaaaagaaaaccaaa

SEQ ID NO: 15869 - DNA, 20 bp, Artificial Sequence
  Description of Artificial Sequence: Synthetic oligonucleotide
  Target: ATXN2; (+) strand; PAM type: NNNNGHTT; PAM sequence: AAAAGTTT
caagttttggcccaaactta

SEQ ID NO: 15870 - DNA, 20 bp, Artificial Sequence
  Description of Artificial Sequence: Synthetic oligonucleotide
  Target: ATXN2; (+) strand; PAM type: NNNNGHTT; PAM sequence: ATCTGCTT
ccacactccctataccttta

SEQ ID NO: 15871 - DNA, 20 bp, Artificial Sequence
  Description of Artificial Sequence: Synthetic oligonucleotide
  Target: ATXN2; (+) strand; PAM type: NNNNGHTT; PAM sequence: ATATGTTT
atgtaaactccaaaaggaca

SEQ ID NO: 15872 - DNA, 20 bp, Artificial Sequence
  Description of Artificial Sequence: Synthetic oligonucleotide
  Target: ATXN2; (+) strand; PAM type: NNNNGHTT; PAM sequence: GTTTGCTT
aaactccaaaaggacaatat

SEQ ID NO: 15873 - DNA, 20 bp, Artificial Sequence
  Description of Artificial Sequence: Synthetic oligonucleotide
  Target: ATXN2; (+) strand; PAM type: NNNNGHTT; PAM sequence: CACTGATT
gacaatatgtttgctttatt

SEQ ID NO: 15874 - DNA, 20 bp, Artificial Sequence
  Description of Artificial Sequence: Synthetic oligonucleotide
  Target: ATXN2; (+) strand; PAM type: NNNNGHTT; PAM sequence: AGATGCTT
cccaaaaaccccatgtacat

SEQ ID NO: 15875 - DNA, 20 bp, Artificial Sequence
  Description of Artificial Sequence: Synthetic oligonucleotide
  Target: ATXN2; (+) strand; PAM type: NNNNGHTT; PAM sequence: CTGGGATT
tgcctcagcctcccaagtag

SEQ ID NO: 15876 - DNA, 20 bp, Artificial Sequence
  Description of Artificial Sequence: Synthetic oligonucleotide
  Target: ATXN2; (+) strand; PAM type: NNNNGHTT; PAM sequence: TTAGGTTT
caattctaatgtcatattat

SEQ ID NO: 15877 - DNA, 20 bp, Artificial Sequence
  Description of Artificial Sequence: Synthetic oligonucleotide
  Target: ATXN2; (+) strand; PAM type: NNNNGHTT; PAM sequence: CAAAGCTT
agaaaggttaacaacaacaa

SEQ ID NO: 15878 - DNA, 20 bp, Artificial Sequence
  Description of Artificial Sequence: Synthetic oligonucleotide
  Target: ATXN2; (+) strand; PAM type: NNNNGHTT; PAM sequence: ACAGGTTT
cctcattaataataatggtt

SEQ ID NO: 15879 - DNA, 20 bp, Artificial Sequence
  Description of Artificial Sequence: Synthetic oligonucleotide
  Target: ATXN2; (+) strand; PAM type: NNNNGHTT; PAM sequence: AATCGCTT
tcaagaggctgaggtgggag

SEQ ID NO: 15880 - DNA, 20 bp, Artificial Sequence
  Description of Artificial Sequence: Synthetic oligonucleotide
  Target: ATXN2; (+) strand; PAM type: NNNNGHTT; PAM sequence: GTGAGATT
actccagcctgggcgacaga

SEQ ID NO: 15881 - DNA, 20 bp, Artificial Sequence
  Description of Artificial Sequence: Synthetic oligonucleotide
  Target: ATXN2; (+) strand; PAM type: NNNNGHTT; PAM sequence: ATTAGATT
cacacacacacacacacaaa

SEQ ID NO: 15882 - DNA, 20 bp, Artificial Sequence
  Description of Artificial Sequence: Synthetic oligonucleotide
  Target: ATXN2; (+) strand; PAM type: NNNNGHTT; PAM sequence: TTGTGATT
agtaaaattatgttctaata

SEQ ID NO: 15883 - DNA, 20 bp, Artificial Sequence
  Description of Artificial Sequence: Synthetic oligonucleotide
  Target: ATXN2; (+) strand; PAM type: NNNNGHTT; PAM sequence: AAATGTTT
acacacaaagtcaaattatg

SEQ ID NO: 15884 - DNA, 20 bp, Artificial Sequence
  Description of Artificial Sequence: Synthetic oligonucleotide
  Target: ATXN2; (+) strand; PAM type: NNNNGHTT; PAM sequence: AGGAGATT
gatacgcacaaacctaagtg

SEQ ID NO: 15885 - DNA, 20 bp, Artificial Sequence
  Description of Artificial Sequence: Synthetic oligonucleotide
  Target: ATXN2; (+) strand; PAM type: NNNNGHTT; PAM sequence: AAGTGATT
tatttacaaggaatgcagga

SEQ ID NO: 15886 - DNA, 20 bp, Artificial Sequence
  Description of Artificial Sequence: Synthetic oligonucleotide
  Target: ATXN2; (+) strand; PAM type: NNNNGHTT; PAM sequence: CTTAGTTT
agtcaatgcaacttaataac

SEQ ID NO: 15887 - DNA, 20 bp, Artificial Sequence
  Description of Artificial Sequence: Synthetic oligonucleotide
  Target: ATXN2; (+) strand; PAM type: NNNNGHTT; PAM sequence: TAATGTTT
caacttaataaccttagttt

SEQ ID NO: 15888 - DNA, 20 bp, Artificial Sequence
  Description of Artificial Sequence: Synthetic oligonucleotide
  Target: ATXN2; (+) strand; PAM type: NNNNGHTT; PAM sequence: ACTAGTTT
gaaacgatcacttcatctga

SEQ ID NO: 15889 - DNA, 20 bp, Artificial Sequence
  Description of Artificial Sequence: Synthetic oligonucleotide
  Target: ATXN2; (+) strand; PAM type: NNNNGHTT; PAM sequence: TAGTGTTT
tctgaactagtttggctaag

SEQ ID NO: 15890 - DNA, 20 bp, Artificial Sequence
  Description of Artificial Sequence: Synthetic oligonucleotide
  Target: ATXN2; (+) strand; PAM type: NNNNGHTT; PAM sequence: GGATGCTT
gtttggctaagtagtgtttg

SEQ ID NO: 15891 - DNA, 20 bp, Artificial Sequence
  Description of Artificial Sequence: Synthetic oligonucleotide
  Target: ATXN2; (+) strand; PAM type: NNNNGHTT; PAM sequence: GACTGTTT
gcgtgtaaagtcaaataacc

SEQ ID NO: 15892 - DNA, 20 bp, Artificial Sequence
  Description of Artificial Sequence: Synthetic oligonucleotide
  Target: ATXN2; (+) strand; PAM type: NNNNGHTT; PAM sequence: AGCTGATT
agcagaattccttaaaaacc

SEQ ID NO: 15893 - DNA, 20 bp, Artificial Sequence
  Description of Artificial Sequence: Synthetic oligonucleotide
  Target: ATXN2; (+) strand; PAM type: NNNNGHTT; PAM sequence: ATGTGTTT
ttggaaatgggttgctgaaa

SEQ ID NO: 15894 - DNA, 20 bp, Artificial Sequence
  Description of Artificial Sequence: Synthetic oligonucleotide
  Target: ATXN2; (+) strand; PAM type: NNNNGHTT; PAM sequence: TGACGTTT
cacaatggaatggagtctat

SEQ ID NO: 15895 - DNA, 20 bp, Artificial Sequence
  Description of Artificial Sequence: Synthetic oligonucleotide
  Target: ATXN2; (+) strand; PAM type: NNNNGHTT; PAM sequence: CCCGGCTT
cccccagcccctactacaac

SEQ ID NO: 15896 - DNA, 20 bp, Artificial Sequence
  Description of Artificial Sequence: Synthetic oligonucleotide
  Target: ATXN2; (+) strand; PAM type: NNNNGHTT; PAM sequence: CCACGATT
gccggaggccacatggagcc

SEQ ID NO: 15897 - DNA, 20 bp, Artificial Sequence
  Description of Artificial Sequence: Synthetic oligonucleotide
  Target: ATXN2; (+) strand; PAM type: NNNNGHTT; PAM sequence: TGATGATT
gagagagccccgacagaccc

SEQ ID NO: 15898 - DNA, 20 bp, Artificial Sequence
  Description of Artificial Sequence: Synthetic oligonucleotide
  Target: ATXN2; (+) strand; PAM type: NNNNGHTT; PAM sequence: CCGGGCTT
acgctagaaggccgctgccg

SEQ ID NO: 15899 - DNA, 20 bp, Artificial Sequence
  Description of Artificial Sequence: Synthetic oligonucleotide
  Target: ATXN2; (+) strand; PAM type: NNNNGHTT; PAM sequence: TGGGGCTT
gctgctgctgctgctgctgc

SEQ ID NO: 15900 - DNA, 20 bp, Artificial Sequence
  Description of Artificial Sequence: Synthetic oligonucleotide
  Target: ATXN2; (+) strand; PAM type: NNNNGHTT; PAM sequence: GGTTGCTT
gaggagcgggcggcgcgctg

SEQ ID NO: 15901 - DNA, 20 bp, Artificial Sequence
  Description of Artificial Sequence: Synthetic oligonucleotide
  Target: ATXN2; (+) strand; PAM type: NNNNGHTT; PAM sequence: CCTAGTTT
catcttcacttctgcgggga

SEQ ID NO: 15902 - DNA, 20 bp, Artificial Sequence
  Description of Artificial Sequence: Synthetic oligonucleotide
  Target: ATXN2; (+) strand; PAM type: NNNNGHTT; PAM sequence: GCCAGATT
tgtaaagcacctagaaccct

SEQ ID NO: 15903 - DNA, 20 bp, Artificial Sequence
  Description of Artificial Sequence: Synthetic oligonucleotide
  Target: ATXN2; (+) strand; PAM type: NNNNGHTT; PAM sequence: TGCCGTTT
attcaggggacacagcatcc

SEQ ID NO: 15904 - DNA, 20 bp, Artificial Sequence
  Description of Artificial Sequence: Synthetic oligonucleotide
  Target: ATXN2; (+) strand; PAM type: NNNNGHTT; PAM sequence: ATGAGATT
gaacttctttttcctcattc

SEQ ID NO: 15905 - DNA, 20 bp, Artificial Sequence
  Description of Artificial Sequence: Synthetic oligonucleotide
  Target: ATXN2; (+) strand; PAM type: NNNNGHTT; PAM sequence: ATGGGATT
tgagattctaaaggaaatat

SEQ ID NO: 15906 - DNA, 20 bp, Artificial Sequence
  Description of Artificial Sequence: Synthetic oligonucleotide
  Target: ATXN2; (+) strand; PAM type: NNNNGHTT; PAM sequence: AGAAGTTT
ctttagaccttggacccttt

SEQ ID NO: 15907 - DNA, 20 bp, Artificial Sequence
  Description of Artificial Sequence: Synthetic oligonucleotide
  Target: ATXN2; (+) strand; PAM type: NNNNGHTT; PAM sequence: TATTGTTT
ttttttttgagcagtgaatc

SEQ ID NO: 15908 - DNA, 20 bp, Artificial Sequence
  Description of Artificial Sequence: Synthetic oligonucleotide
  Target: ATXN2; (+) strand; PAM type: NNNNGHTT; PAM sequence: GAATGATT
aagacttagataaacgtgga

SEQ ID NO: 15909 - DNA, 20 bp, Artificial Sequence
  Description of Artificial Sequence: Synthetic oligonucleotide
  Target: ATXN2; (+) strand; PAM type: NNNNGHTT; PAM sequence: AGCAGTTT
acgtggagaatgattgaacc

SEQ ID NO: 15910 - DNA, 20 bp, Artificial Sequence
  Description of Artificial Sequence: Synthetic oligonucleotide
  Target: ATXN2; (+) strand; PAM type: NNNNGHTT; PAM sequence: ATCAGTTT
gtattctgccaatgtaggaa

SEQ ID NO: 15911 - DNA, 20 bp, Artificial Sequence
  Description of Artificial Sequence: Synthetic oligonucleotide
  Target: ATXN2; (+) strand; PAM type: NNNNGHTT; PAM sequence: AATTGCTT
tcgggaggctgatacaggag

SEQ ID NO: 15912 - DNA, 20 bp, Artificial Sequence
  Description of Artificial Sequence: Synthetic oligonucleotide
  Target: ATXN2; (+) strand; PAM type: NNNNGHTT; PAM sequence: AATCGCTT
gcaggatgctgaggcaggag

SEQ ID NO: 15913 - DNA, 20 bp, Artificial Sequence
  Description of Artificial Sequence: Synthetic oligonucleotide
  Target: ATXN2; (+) strand; PAM type: NNNNGHTT; PAM sequence: CTCTGATT
aaaaaaatacaatcactttt

SEQ ID NO: 15914 - DNA, 20 bp, Artificial Sequence
  Description of Artificial Sequence: Synthetic oligonucleotide
  Target: ATXN2; (+) strand; PAM type: NNNNGHTT; PAM sequence: ACAAGTTT
cccagaatacaatcttaaga

SEQ ID NO: 15915 - DNA, 20 bp, Artificial Sequence
  Description of Artificial Sequence: Synthetic oligonucleotide
  Target: ATXN2; (+) strand; PAM type: NNNNGHTT; PAM sequence: CGGTGCTT
aatggtgtgaacctgggagg

SEQ ID NO: 15916 - DNA, 20 bp, Artificial Sequence
  Description of Artificial Sequence: Synthetic oligonucleotide
  Target: ATXN2; (+) strand; PAM type: NNNNGHTT; PAM sequence: GTAAGTTT
tccgtctcaaaaaaaaaata

SEQ ID NO: 15917 - DNA, 20 bp, Artificial Sequence
  Description of Artificial Sequence: Synthetic oligonucleotide
  Target: ATXN2; (+) strand; PAM type: NNNNGHTT; PAM sequence: GAAAGTTT
cctgaagctgacatagctga

SEQ ID NO: 15918 - DNA, 20 bp, Artificial Sequence
  Description of Artificial Sequence: Synthetic oligonucleotide
  Target: ATXN2; (+) strand; PAM type: NNNNGHTT; PAM sequence: GTTTGTTT
aagctgacatagctgagaaa

SEQ ID NO: 15919 - DNA, 20 bp, Artificial Sequence
  Description of Artificial Sequence: Synthetic oligonucleotide
  Target: ATXN2; (+) strand; PAM type: NNNNGHTT; PAM sequence: AATAGTTT
ctaccattgaataaaaactt

SEQ ID NO: 15920 - DNA, 20 bp, Artificial Sequence
  Description of Artificial Sequence: Synthetic oligonucleotide
  Target: ATXN2; (+) strand; PAM type: NNNNGHTT; PAM sequence: TAATGATT
cacctattttgtgtacaatt

SEQ ID NO: 15921 - DNA, 20 bp, Artificial Sequence
  Description of Artificial Sequence: Synthetic oligonucleotide
  Target: ATXN2; (+) strand; PAM type: NNNNGHTT; PAM sequence: GGCAGTTT
aaagatccttcacgatggtg

SEQ ID NO: 15922 - DNA, 20 bp, Artificial Sequence
  Description of Artificial Sequence: Synthetic oligonucleotide
  Target: ATXN2; (+) strand; PAM type: NNNNGHTT; PAM sequence: TATGGATT
actcatctacattttctctc

SEQ ID NO: 15923 - DNA, 20 bp, Artificial Sequence
  Description of Artificial Sequence: Synthetic oligonucleotide
  Target: ATXN2; (+) strand; PAM type: NNNNGHTT; PAM sequence: TCCAGATT
attttctctctatggatttg

SEQ ID NO: 15924 - DNA, 20 bp, Artificial Sequence
  Description of Artificial Sequence: Synthetic oligonucleotide
  Target: ATXN2; (+) strand; PAM type: NNNNGHTT; PAM sequence: TAATGTTT
ctgccttctttcatttgtca

SEQ ID NO: 15925 - DNA, 20 bp, Artificial Sequence
  Description of Artificial Sequence: Synthetic oligonucleotide
  Target: ATXN2; (+) strand; PAM type: NNNNGHTT; PAM sequence: TGAGGTTT
ttcatttgtcataatgtttt

SEQ ID NO: 15926 - DNA, 20 bp, Artificial Sequence
  Description of Artificial Sequence: Synthetic oligonucleotide
  Target: ATXN2; (+) strand; PAM type: NNNNGHTT; PAM sequence: GGATGTTT
tgtgtctactttccaattgt

SEQ ID NO: 15927 - DNA, 20 bp, Artificial Sequence
  Description of Artificial Sequence: Synthetic oligonucleotide
  Target: ATXN2; (+) strand; PAM type: NNNNGHTT; PAM sequence: TTTAGATT
ctactttccaattgtggatg

SEQ ID NO: 15928 - DNA, 20 bp, Artificial Sequence
  Description of Artificial Sequence: Synthetic oligonucleotide
  Target: ATXN2; (+) strand; PAM type: NNNNGHTT; PAM sequence: CTGAGATT
ttatgaaaatgctgctgggg

SEQ ID NO: 15929 - DNA, 20 bp, Artificial Sequence
  Description of Artificial Sequence: Synthetic oligonucleotide
  Target: ATXN2; (+) strand; PAM type: NNNNGHTT; PAM sequence: CGGAGTTT
ggaggatcacttgaataccc

SEQ ID NO: 15930 - DNA, 20 bp, Artificial Sequence
  Description of Artificial Sequence: Synthetic oligonucleotide
  Target: ATXN2; (+) strand; PAM type: NNNNGHTT; PAM sequence: AATTGCTT
ttgggaggctgaggcaggag

SEQ ID NO: 15931 - DNA, 20 bp, Artificial Sequence
  Description of Artificial Sequence: Synthetic oligonucleotide
  Target: ATXN2; (+) strand; PAM type: NNNNGHTT; PAM sequence: CCGAGATT
gaggcggaggttacagtgag

SEQ ID NO: 15932 - DNA, 20 bp, Artificial Sequence
  Description of Artificial Sequence: Synthetic oligonucleotide
  Target: ATXN2; (+) strand; PAM type: NNNNGHTT; PAM sequence: GACCGCTT
tagggaggctgaagcagaag

SEQ ID NO: 15933 - DNA, 20 bp, Artificial Sequence
  Description of Artificial Sequence: Synthetic oligonucleotide
  Target: ATXN2; (+) strand; PAM type: NNNNGHTT; PAM sequence: ATATGTTT
acatatatcttcatgtggat

SEQ ID NO: 15934 - DNA, 20 bp, Artificial Sequence
  Description of Artificial Sequence: Synthetic oligonucleotide
  Target: ATXN2; (+) strand; PAM type: NNNNGHTT; PAM sequence: GTAAGTTT
cgaaattgttgggtgatgtg

SEQ ID NO: 15935 - DNA, 20 bp, Artificial Sequence
  Description of Artificial Sequence: Synthetic oligonucleotide
  Target: ATXN2; (+) strand; PAM type: NNNNGHTT; PAM sequence: GAAGGCTT
taccttttctctggacttca

SEQ ID NO: 15936 - DNA, 20 bp, Artificial Sequence
  Description of Artificial Sequence: Synthetic oligonucleotide
  Target: ATXN2; (+) strand; PAM type: NNNNGHTT; PAM sequence: TTAAGCTT
ttctctggacttcagaaggc

SEQ ID NO: 15937 - DNA, 20 bp, Artificial Sequence
  Description of Artificial Sequence: Synthetic oligonucleotide
  Target: ATXN2; (+) strand; PAM type: NNNNGHTT; PAM sequence: CGGAGCTT
aatggcatgaactcgggagg

SEQ ID NO: 15938 - DNA, 20 bp, Artificial Sequence
  Description of Artificial Sequence: Synthetic oligonucleotide
  Target: ATXN2; (+) strand; PAM type: NNNNGHTT; PAM sequence: AATCGCTT
tcgggaggctgaggcaggag

SEQ ID NO: 15939 - DNA, 20 bp, Artificial Sequence
  Description of Artificial Sequence: Synthetic oligonucleotide
  Target: ATXN2; (+) strand; PAM type: NNNNGHTT; PAM sequence: AAATGATT
gcagcctctatggcggtccc

SEQ ID NO: 15940 - DNA, 20 bp, Artificial Sequence
  Description of Artificial Sequence: Synthetic oligonucleotide
  Target: ATXN2; (+) strand; PAM type: NNNNGHTT; PAM sequence: GTTAGTTT
accacacccagctaattttt

SEQ ID NO: 15941 - DNA, 20 bp, Artificial Sequence
  Description of Artificial Sequence: Synthetic oligonucleotide
  Target: ATXN2; (+) strand; PAM type: NNNNGHTT; PAM sequence: GGGGGATT
agctaatttttgttagtttt

SEQ ID NO: 15942 - DNA, 20 bp, Artificial Sequence
  Description of Artificial Sequence: Synthetic oligonucleotide
  Target: ATXN2; (+) strand; PAM type: NNNNGHTT; PAM sequence: ATTTGTTT
atttttgttagttttggggg

SEQ ID NO: 15943 - DNA, 20 bp, Artificial Sequence
  Description of Artificial Sequence: Synthetic oligonucleotide
  Target: ATXN2; (+) strand; PAM type: NNNNGHTT; PAM sequence: GTTTGTTT
ttgttagttttgggggattt

SEQ ID NO: 15944 - DNA, 20 bp, Artificial Sequence
  Description of Artificial Sequence: Synthetic oligonucleotide
  Target: ATXN2; (+) strand; PAM type: NNNNGHTT; PAM sequence: GTTTGTTT
tagttttgggggatttgttt

SEQ ID NO: 15945 - DNA, 20 bp, Artificial Sequence
  Description of Artificial Sequence: Synthetic oligonucleotide
  Target: ATXN2; (+) strand; PAM type: NNNNGHTT; PAM sequence: CTGGGATT
ccgctcagccttccatgtag

SEQ ID NO: 15946 - DNA, 20 bp, Artificial Sequence
  Description of Artificial Sequence: Synthetic oligonucleotide
  Target: ATXN2; (-) strand; PAM type: NRG; PAM sequence: TGG
agctattggtttacccacct

SEQ ID NO: 15947 - DNA, 20 bp, Artificial Sequence
  Description of Artificial Sequence: Synthetic oligonucleotide
  Target: ATXN2; (-) strand; PAM type: NRG; PAM sequence: TGG
gaagacaatggcctagctat

SEQ ID NO: 15948 - DNA, 20 bp, Artificial Sequence
  Description of Artificial Sequence: Synthetic oligonucleotide
  Target: ATXN2; (-) strand; PAM type: NRG; PAM sequence: TAG
gtacccagaagacaatggcc

SEQ ID NO: 15949 - DNA, 20 bp, Artificial Sequence
  Description of Artificial Sequence: Synthetic oligonucleotide
  Target: ATXN2; (-) strand; PAM type: NRG; PAM sequence: TGG
ccagcgtacccagaagacaa

SEQ ID NO: 15950 - DNA, 20 bp, Artificial Sequence
  Description of Artificial Sequence: Synthetic oligonucleotide
  Target: ATXN2; (-) strand; PAM type: NRG; PAM sequence: AAG
ctgggttccagcgtacccag

SEQ ID NO: 15951 - DNA, 20 bp, Artificial Sequence
  Description of Artificial Sequence: Synthetic oligonucleotide
  Target: ATXN2; (-) strand; PAM type: NRG; PAM sequence: CAG
agtctgggttccagcgtacc

SEQ ID NO: 15952 - DNA, 20 bp, Artificial Sequence
  Description of Artificial Sequence: Synthetic oligonucleotide
  Target: ATXN2; (-) strand; PAM type: NRG; PAM sequence: CAG
cctgggctgagtctgggttc

SEQ ID NO: 15953 - DNA, 20 bp, Artificial Sequence
  Description of Artificial Sequence: Synthetic oligonucleotide
  Target: ATXN2; (-) strand; PAM type: NRG; PAM sequence: GGG
ttatgtcctgggctgagtct

SEQ ID NO: 15954 - DNA, 20 bp, Artificial Sequence
  Description of Artificial Sequence: Synthetic oligonucleotide
  Target: ATXN2; (-) strand; PAM type: NRG; PAM sequence: TGG
cttatgtcctgggctgagtc

SEQ ID NO: 15955 - DNA, 20 bp, Artificial Sequence
  Description of Artificial Sequence: Synthetic oligonucleotide
  Target: ATXN2; (-) strand; PAM type: NRG; PAM sequence: GAG
gctaccttatgtcctgggct

SEQ ID NO: 15956 - DNA, 20 bp, Artificial Sequence
  Description of Artificial Sequence: Synthetic oligonucleotide
  Target: ATXN2; (-) strand; PAM type: NRG; PAM sequence: GGG
agggggctaccttatgtcct

SEQ ID NO: 15957 - DNA, 20 bp, Artificial Sequence
  Description of Artificial Sequence: Synthetic oligonucleotide
  Target: ATXN2; (-) strand; PAM type: NRG; PAM sequence: TGG
cagggggctaccttatgtcc

SEQ ID NO: 15958 - DNA, 20 bp, Artificial Sequence
  Description of Artificial Sequence: Synthetic oligonucleotide
  Target: ATXN2; (-) strand; PAM type: NRG; PAM sequence: GGG
tgggtgatggtggtcgcagg

SEQ ID NO: 15959 - DNA, 20 bp, Artificial Sequence
  Description of Artificial Sequence: Synthetic oligonucleotide
  Target: ATXN2; (-) strand; PAM type: NRG; PAM sequence: GGG
atgggtgatggtggtcgcag

SEQ ID NO: 15960 - DNA, 20 bp, Artificial Sequence
  Description of Artificial Sequence: Synthetic oligonucleotide
  Target: ATXN2; (-) strand; PAM type: NRG; PAM sequence: GGG
gatgggtgatggtggtcgca

SEQ ID NO: 15961 - DNA, 20 bp, Artificial Sequence
  Description of Artificial Sequence: Synthetic oligonucleotide
  Target: ATXN2; (-) strand; PAM type: NRG; PAM sequence: AGG
agatgggtgatggtggtcgc

SEQ ID NO: 15962 - DNA, 20 bp, Artificial Sequence
  Description of Artificial Sequence: Synthetic oligonucleotide
  Target: ATXN2; (-) strand; PAM type: NRG; PAM sequence: CAG
aagatgggtgatggtggtcg

SEQ ID NO: 15963 - DNA, 20 bp, Artificial Sequence
  Description of Artificial Sequence: Synthetic oligonucleotide
  Target: ATXN2; (-) strand; PAM type: NRG; PAM sequence: TGG
ttagataagatgggtgatgg

SEQ ID NO: 15964 - DNA, 20 bp, Artificial Sequence
  Description of Artificial Sequence: Synthetic oligonucleotide
  Target: ATXN2; (-) strand; PAM type: NRG; PAM sequence: TGG
ctgttagataagatgggtga

SEQ ID NO: 15965 - DNA, 20 bp, Artificial Sequence
  Description of Artificial Sequence: Synthetic oligonucleotide
  Target: ATXN2; (-) strand; PAM type: NRG; PAM sequence: GGG
aagcacctgttagataagat

SEQ ID NO: 15966 - DNA, 20 bp, Artificial Sequence
  Description of Artificial Sequence: Synthetic oligonucleotide
  Target: ATXN2; (-) strand; PAM type: NRG; PAM sequence: TGG
gaagcacctgttagataaga

SEQ ID NO: 15967 - DNA, 20 bp, Artificial Sequence
  Description of Artificial Sequence: Synthetic oligonucleotide
  Target: ATXN2; (-) strand; PAM type: NRG; PAM sequence: AAG
aggagaagcacctgttagat

SEQ ID NO: 15968 - DNA, 20 bp, Artificial Sequence
  Description of Artificial Sequence: Synthetic oligonucleotide
  Target: ATXN2; (-) strand; PAM type: NRG; PAM sequence: TAG
cccccaggagaagcacctgt

SEQ ID NO: 15969 - DNA, 20 bp, Artificial Sequence
  Description of Artificial Sequence: Synthetic oligonucleotide
  Target: ATXN2; (-) strand; PAM type: NRG; PAM sequence: AAG
gtccagcagccccccaggag

SEQ ID NO: 15970 - DNA, 20 bp, Artificial Sequence
  Description of Artificial Sequence: Synthetic oligonucleotide
  Target: ATXN2; (-) strand; PAM type: NRG; PAM sequence: GAG
cgggtccagcagccccccag

SEQ ID NO: 15971 - DNA, 20 bp, Artificial Sequence
  Description of Artificial Sequence: Synthetic oligonucleotide
  Target: ATXN2; (-) strand; PAM type: NRG; PAM sequence: AGG
gccgggtccagcagcccccc

SEQ ID NO: 15972 - DNA, 20 bp, Artificial Sequence
  Description of Artificial Sequence: Synthetic oligonucleotide
  Target: ATXN2; (-) strand; PAM type: NRG; PAM sequence: CAG
ggccgggtccagcagccccc

SEQ ID NO: 15973 - DNA, 20 bp, Artificial Sequence
  Description of Artificial Sequence: Synthetic oligonucleotide
  Target: ATXN2; (-) strand; PAM type: NRG; PAM sequence: CAG
ttctggcaggccgggtccag

SEQ ID NO: 15974 - DNA, 20 bp, Artificial Sequence
  Description of Artificial Sequence: Synthetic oligonucleotide
  Target: ATXN2; (-) strand; PAM type: NRG; PAM sequence: CAG
gtcttctggcaggccgggtc

SEQ ID NO: 15975 - DNA, 20 bp, Artificial Sequence
  Description of Artificial Sequence: Synthetic oligonucleotide
  Target: ATXN2; (-) strand; PAM type: NRG; PAM sequence: GGG
ggtccgtcttctggcaggcc

SEQ ID NO: 15976 - DNA, 20 bp, Artificial Sequence
  Description of Artificial Sequence: Synthetic oligonucleotide
  Target: ATXN2; (-) strand; PAM type: NRG; PAM sequence: CGG
tggtccgtcttctggcaggc

SEQ ID NO: 15977 - DNA, 20 bp, Artificial Sequence
  Description of Artificial Sequence: Synthetic oligonucleotide
  Target: ATXN2; (-) strand; PAM type: NRG; PAM sequence: AGG
gaaatggtccgtcttctggc

SEQ ID NO: 15978 - DNA, 20 bp, Artificial Sequence
  Description of Artificial Sequence: Synthetic oligonucleotide
  Target: ATXN2; (-) strand; PAM type: NRG; PAM sequence: CAG
ggaaatggtccgtcttctgg

SEQ ID NO: 15979 - DNA, 20 bp, Artificial Sequence
  Description of Artificial Sequence: Synthetic oligonucleotide
  Target: ATXN2; (-) strand; PAM type: NRG; PAM sequence: TGG
acaggaaatggtccgtcttc

SEQ ID NO: 15980 - DNA, 20 bp, Artificial Sequence
  Description of Artificial Sequence: Synthetic oligonucleotide
  Target: ATXN2; (-) strand; PAM type: NRG; PAM sequence: TGG
aggggtagcaggacaggaaa

SEQ ID NO: 15981 - DNA, 20 bp, Artificial Sequence
  Description of Artificial Sequence: Synthetic oligonucleotide
  Target: ATXN2; (-) strand; PAM type: NRG; PAM sequence: AGG
ggaaccaggggtagcaggac

SEQ ID NO: 15982 - DNA, 20 bp, Artificial Sequence
  Description of Artificial Sequence: Synthetic oligonucleotide
  Target: ATXN2; (-) strand; PAM type: NRG; PAM sequence: CAG
tggaaccaggggtagcagga

SEQ ID NO: 15983 - DNA, 20 bp, Artificial Sequence
  Description of Artificial Sequence: Synthetic oligonucleotide
  Target: ATXN2; (-) strand; PAM type: NRG; PAM sequence: AGG
gccgtggaaccaggggtagc

SEQ ID NO: 15984 - DNA, 20 bp, Artificial Sequence
  Description of Artificial Sequence: Synthetic oligonucleotide
  Target: ATXN2; (-) strand; PAM type: NRG; PAM sequence: CAG
ggccgtggaaccaggggtag

SEQ ID NO: 15985 - DNA, 20 bp, Artificial Sequence
  Description of Artificial Sequence: Synthetic oligonucleotide
  Target: ATXN2; (-) strand; PAM type: NRG; PAM sequence: TAG
tggggccgtggaaccagggg

SEQ ID NO: 15986 - DNA, 20 bp, Artificial Sequence
  Description of Artificial Sequence: Synthetic oligonucleotide
  Target: ATXN2; (-) strand; PAM type: NRG; PAM sequence: GGG
agatggggccgtggaaccag

SEQ ID NO: 15987 - DNA, 20 bp, Artificial Sequence
  Description of Artificial Sequence: Synthetic oligonucleotide
  Target: ATXN2; (-) strand; PAM type: NRG; PAM sequence: GGG
gagatggggccgtggaacca

SEQ ID NO: 15988 - DNA, 20 bp, Artificial Sequence
  Description of Artificial Sequence: Synthetic oligonucleotide
  Target: ATXN2; (-) strand; PAM type: NRG; PAM sequence: AGG
ggagatggggccgtggaacc

SEQ ID NO: 15989 - DNA, 20 bp, Artificial Sequence
  Description of Artificial Sequence: Synthetic oligonucleotide
  Target: ATXN2; (-) strand; PAM type: NRG; PAM sequence: CAG
tggagatggggccgtggaac

SEQ ID NO: 15990 - DNA, 20 bp, Artificial Sequence
  Description of Artificial Sequence: Synthetic oligonucleotide
  Target: ATXN2; (-) strand; PAM type: NRG; PAM sequence: TGG
tcactctggagatggggccg

SEQ ID NO: 15991 - DNA, 20 bp, Artificial Sequence
  Description of Artificial Sequence: Synthetic oligonucleotide
  Target: ATXN2; (-) strand; PAM type: NRG; PAM sequence: GGG
ctgctttcactctggagatg

SEQ ID NO: 15992 - DNA, 20 bp, Artificial Sequence
  Description of Artificial Sequence: Synthetic oligonucleotide
  Target: ATXN2; (-) strand; PAM type: NRG; PAM sequence: GGG
gctgctttcactctggagat

SEQ ID NO: 15993 - DNA, 20 bp, Artificial Sequence
  Description of Artificial Sequence: Synthetic oligonucleotide
  Target: ATXN2; (-) strand; PAM type: NRG; PAM sequence: TGG
agctgctttcactctggaga

SEQ ID NO: 15994 - DNA, 20 bp, Artificial Sequence
  Description of Artificial Sequence: Synthetic oligonucleotide
  Target: ATXN2; (-) strand; PAM type: NRG; PAM sequence: GAG
gctgagctgctttcactctg

SEQ ID NO: 15995 - DNA, 20 bp, Artificial Sequence
  Description of Artificial Sequence: Synthetic oligonucleotide
  Target: ATXN2; (-) strand; PAM type: NRG; PAM sequence: TGG
cagctgagctgctttcactc

SEQ ID NO: 15996 - DNA, 20 bp, Artificial Sequence
  Description of Artificial Sequence: Synthetic oligonucleotide
  Target: ATXN2; (-) strand; PAM type: NRG; PAM sequence: GAG
gccctgcagctgaaccagct

SEQ ID NO: 15997 - DNA, 20 bp, Artificial Sequence
  Description of Artificial Sequence: Synthetic oligonucleotide
  Target: ATXN2; (-) strand; PAM type: NRG; PAM sequence: CAG
tcagggccctgcagctgaac

SEQ ID NO: 15998 - DNA, 20 bp, Artificial Sequence
  Description of Artificial Sequence: Synthetic oligonucleotide
  Target: ATXN2; (-) strand; PAM type: NRG; PAM sequence: CAG
ccatgagcatcagggccctg

SEQ ID NO: 15999 - DNA, 20 bp, Artificial Sequence
  Description of Artificial Sequence: Synthetic oligonucleotide
  Target: ATXN2; (-) strand; PAM type: NRG; PAM sequence: GGG
ggaacactccatgagcatca

SEQ ID NO: 16000 - DNA, 20 bp, Artificial Sequence
  Description of Artificial Sequence: Synthetic oligonucleotide
  Target: ATXN2; (-) strand; PAM type: NRG; PAM sequence: AGG
aggaacactccatgagcatc

SEQ ID NO: 16001 - DNA, 20 bp, Artificial Sequence
  Description of Artificial Sequence: Synthetic oligonucleotide
  Target: ATXN2; (-) strand; PAM type: NRG; PAM sequence: CAG
caggaacactccatgagcat

SEQ ID NO: 16002 - DNA, 20 bp, Artificial Sequence
  Description of Artificial Sequence: Synthetic oligonucleotide
  Target: ATXN2; (-) strand; PAM type: NRG; PAM sequence: GAG
ccgcaccaggaacactccat

SEQ ID NO: 16003 - DNA, 20 bp, Artificial Sequence
  Description of Artificial Sequence: Synthetic oligonucleotide
  Target: ATXN2; (-) strand; PAM type: NRG; PAM sequence: AGG
gcgtctcgctctgccgcacc

SEQ ID NO: 16004 - DNA, 20 bp, Artificial Sequence
  Description of Artificial Sequence: Synthetic oligonucleotide
  Target: ATXN2; (-) strand; PAM type: NRG; PAM sequence: CAG
cgcgtctcgctctgccgcac

SEQ ID NO: 16005 - DNA, 20 bp, Artificial Sequence
  Description of Artificial Sequence: Synthetic oligonucleotide
  Target: ATXN2; (-) strand; PAM type: NRG; PAM sequence: GAG
atcccctgaaagttgaaagt

SEQ ID NO: 16006 - DNA, 20 bp, Artificial Sequence
  Description of Artificial Sequence: Synthetic oligonucleotide
  Target: ATXN2; (-) strand; PAM type: NRG; PAM sequence: AAG
ggctatcccctgaaagttga

SEQ ID NO: 16007 - DNA, 20 bp, Artificial Sequence
  Description of Artificial Sequence: Synthetic oligonucleotide
  Target: ATXN2; (-) strand; PAM type: NRG; PAM sequence: AAG
ataccttggctatcccctga

SEQ ID NO: 16008 - DNA, 20 bp, Artificial Sequence
  Description of Artificial Sequence: Synthetic oligonucleotide
  Target: ATXN2; (-) strand; PAM type: NRG; PAM sequence: TGG
ccccaccccaccccatacct

SEQ ID NO: 16009 - DNA, 20 bp, Artificial Sequence
  Description of Artificial Sequence: Synthetic oligonucleotide
  Target: ATXN2; (-) strand; PAM type: NRG; PAM sequence: CGG
tccagtggagaggggtggca

SEQ ID NO: 16010 - DNA, 20 bp, Artificial Sequence
  Description of Artificial Sequence: Synthetic oligonucleotide
  Target: ATXN2; (-) strand; PAM type: NRG; PAM sequence: TGG
tgaactccagtggagagggg

SEQ ID NO: 16011 - DNA, 20 bp, Artificial Sequence
  Description of Artificial Sequence: Synthetic oligonucleotide
  Target: ATXN2; (-) strand; PAM type: NRG; PAM sequence: GGG
ccctgaactccagtggagag

SEQ ID NO: 16012 - DNA, 20 bp, Artificial Sequence
  Description of Artificial Sequence: Synthetic oligonucleotide
  Target: ATXN2; (-) strand; PAM type: NRG; PAM sequence: GGG
accctgaactccagtggaga

SEQ ID NO: 16013 - DNA, 20 bp, Artificial Sequence
  Description of Artificial Sequence: Synthetic oligonucleotide
  Target: ATXN2; (-) strand; PAM type: NRG; PAM sequence: AGG
gaccctgaactccagtggag

SEQ ID NO: 16014 - DNA, 20 bp, Artificial Sequence
  Description of Artificial Sequence: Synthetic oligonucleotide
  Target: ATXN2; (-) strand; PAM type: NRG; PAM sequence: GAG
ggaccctgaactccagtgga

SEQ ID NO: 16015 - DNA, 20 bp, Artificial Sequence
  Description of Artificial Sequence: Synthetic oligonucleotide
  Target: ATXN2; (-) strand; PAM type: NRG; PAM sequence: GAG
taggaccctgaactccagtg

SEQ ID NO: 16016 - DNA, 20 bp, Artificial Sequence
  Description of Artificial Sequence: Synthetic oligonucleotide
  Target: ATXN2; (-) strand; PAM type: NRG; PAM sequence: TGG
tctaggaccctgaactccag

SEQ ID NO: 16017 - DNA, 20 bp, Artificial Sequence
  Description of Artificial Sequence: Synthetic oligonucleotide
  Target: ATXN2; (-) strand; PAM type: NRG; PAM sequence: CAG
ccctctaggaccctgaactc

SEQ ID NO: 16018 - DNA, 20 bp, Artificial Sequence
  Description of Artificial Sequence: Synthetic oligonucleotide
  Target: ATXN2; (-) strand; PAM type: NRG; PAM sequence: AGG
tgggctcgggctgtccctct

SEQ ID NO: 16019 - DNA, 20 bp, Artificial Sequence
  Description of Artificial Sequence: Synthetic oligonucleotide
  Target: ATXN2; (-) strand; PAM type: NRG; PAM sequence: TAG
gtgggctcgggctgtccctc

SEQ ID NO: 16020 - DNA, 20 bp, Artificial Sequence
  Description of Artificial Sequence: Synthetic oligonucleotide
  Target: ATXN2; (-) strand; PAM type: NRG; PAM sequence: GGG
gaggagaggatggtgggctc

SEQ ID NO: 16021 - DNA, 20 bp, Artificial Sequence
  Description of Artificial Sequence: Synthetic oligonucleotide
  Target: ATXN2; (-) strand; PAM type: NRG; PAM sequence: CGG
ggaggagaggatggtgggct

SEQ ID NO: 16022 - DNA, 20 bp, Artificial Sequence
  Description of Artificial Sequence: Synthetic oligonucleotide
  Target: ATXN2; (-) strand; PAM type: NRG; PAM sequence: GGG
ctgtgggaggagaggatggt

SEQ ID NO: 16023 - DNA, 20 bp, Artificial Sequence
  Description of Artificial Sequence: Synthetic oligonucleotide
  Target: ATXN2; (-) strand; PAM type: NRG; PAM sequence: TGG
gctgtgggaggagaggatgg

SEQ ID NO: 16024 - DNA, 20 bp, Artificial Sequence
  Description of Artificial Sequence: Synthetic oligonucleotide
  Target: ATXN2; (-) strand; PAM type: NRG; PAM sequence: TGG
ggtgctgtgggaggagagga

SEQ ID NO: 16025 - DNA, 20 bp, Artificial Sequence
  Description of Artificial Sequence: Synthetic oligonucleotide
  Target: ATXN2; (-) strand; PAM type: NRG; PAM sequence: AGG
cgcaggtgctgtgggaggag

SEQ ID NO: 16026 - DNA, 20 bp, Artificial Sequence
  Description of Artificial Sequence: Synthetic oligonucleotide
  Target: ATXN2; (-) strand; PAM type: NRG; PAM sequence: GAG
gcgcaggtgctgtgggagga

SEQ ID NO: 16027 - DNA, 20 bp, Artificial Sequence
  Description of Artificial Sequence: Synthetic oligonucleotide
  Target: ATXN2; (-) strand; PAM type: NRG; PAM sequence: GAG
aggcgcaggtgctgtgggag

SEQ ID NO: 16028 - DNA, 20 bp, Artificial Sequence
  Description of Artificial Sequence: Synthetic oligonucleotide
  Target: ATXN2; (-) strand; PAM type: NRG; PAM sequence: AGG
acaggcgcaggtgctgtggg

SEQ ID NO: 16029 - DNA, 20 bp, Artificial Sequence
  Description of Artificial Sequence: Synthetic oligonucleotide
  Target: ATXN2; (-) strand; PAM type: NRG; PAM sequence: GAG
gacaggcgcaggtgctgtgg

SEQ ID NO: 16030 - DNA, 20 bp, Artificial Sequence
  Description of Artificial Sequence: Synthetic oligonucleotide
  Target: ATXN2; (-) strand; PAM type: NRG; PAM sequence: GGG
gcgacaggcgcaggtgctgt

SEQ ID NO: 16031 - DNA, 20 bp, Artificial Sequence
  Description of Artificial Sequence: Synthetic oligonucleotide
  Target: ATXN2; (-) strand; PAM type: NRG; PAM sequence: TGG
agcgacaggcgcaggtgctg

SEQ ID NO: 16032 - DNA, 20 bp, Artificial Sequence
  Description of Artificial Sequence: Synthetic oligonucleotide
  Target: ATXN2; (-) strand; PAM type: NRG; PAM sequence: AGG
gctctgtcagcgacaggcgc

SEQ ID NO: 16033 - DNA, 20 bp, Artificial Sequence
  Description of Artificial Sequence: Synthetic oligonucleotide
  Target: ATXN2; (-) strand; PAM type: NRG; PAM sequence: CAG
cgctctgtcagcgacaggcg

SEQ ID NO: 16034 - DNA, 20 bp, Artificial Sequence
  Description of Artificial Sequence: Synthetic oligonucleotide
  Target: ATXN2; (-) strand; PAM type: NRG; PAM sequence: AGG
ggccccgctctgtcagcgac

SEQ ID NO: 16035 - DNA, 20 bp, Artificial Sequence
  Description of Artificial Sequence: Synthetic oligonucleotide
  Target: ATXN2; (-) strand; PAM type: NRG; PAM sequence: CAG
tggccccgctctgtcagcga

SEQ ID NO: 16036 - DNA, 20 bp, Artificial Sequence
  Description of Artificial Sequence: Synthetic oligonucleotide
  Target: ATXN2; (-) strand; PAM type: NRG; PAM sequence: CAG
cggcactggccccgctctgt

SEQ ID NO: 16037 - DNA, 20 bp, Artificial Sequence
  Description of Artificial Sequence: Synthetic oligonucleotide
  Target: ATXN2; (-) strand; PAM type: NRG; PAM sequence: TGG
ggaggtgctgcacacggcac

SEQ ID NO: 16038 - DNA, 20 bp, Artificial Sequence
  Description of Artificial Sequence: Synthetic oligonucleotide
  Target: ATXN2; (-) strand; PAM type: NRG; PAM sequence: CGG
gaaagtggaggtgctgcaca

SEQ ID NO: 16039 - DNA, 20 bp, Artificial Sequence
  Description of Artificial Sequence: Synthetic oligonucleotide
  Target: ATXN2; (-) strand; PAM type: NRG; PAM sequence: AGG
ccacgaccgagggaaagtgg

SEQ ID NO: 16040 - DNA, 20 bp, Artificial Sequence
  Description of Artificial Sequence: Synthetic oligonucleotide
  Target: ATXN2; (-) strand; PAM type: NRG; PAM sequence: GAG
tccacgaccgagggaaagtg

SEQ ID NO: 16041 - DNA, 20 bp, Artificial Sequence
  Description of Artificial Sequence: Synthetic oligonucleotide
  Target: ATXN2; (-) strand; PAM type: NRG; PAM sequence: TGG
tgtccacgaccgagggaaag

SEQ ID NO: 16042 - DNA, 20 bp, Artificial Sequence
  Description of Artificial Sequence: Synthetic oligonucleotide
  Target: ATXN2; (-) strand; PAM type: NRG; PAM sequence: AAG
gcatgtccacgaccgaggga

SEQ ID NO: 16043 - DNA, 20 bp, Artificial Sequence
  Description of Artificial Sequence: Synthetic oligonucleotide
  Target: ATXN2; (-) strand; PAM type: NRG; PAM sequence: GGG
tggagcatgtccacgaccga

SEQ ID NO: 16044 - DNA, 20 bp, Artificial Sequence
  Description of Artificial Sequence: Synthetic oligonucleotide
  Target: ATXN2; (-) strand; PAM type: NRG; PAM sequence: AGG
gtggagcatgtccacgaccg

SEQ ID NO: 16045 - DNA, 20 bp, Artificial Sequence
  Description of Artificial Sequence: Synthetic oligonucleotide
  Target: ATXN2; (-) strand; PAM type: NRG; PAM sequence: GAG
ggtggagcatgtccacgacc

SEQ ID NO: 16046 - DNA, 20 bp, Artificial Sequence
  Description of Artificial Sequence: Synthetic oligonucleotide
  Target: ATXN2; (-) strand; PAM type: NRG; PAM sequence: GAG
ggcgagcgctggaagtggtg

SEQ ID NO: 16047 - DNA, 20 bp, Artificial Sequence
  Description of Artificial Sequence: Synthetic oligonucleotide
  Target: ATXN2; (-) strand; PAM type: NRG; PAM sequence: TGG
tgggcgagcgctggaagtgg

SEQ ID NO: 16048 - DNA, 20 bp, Artificial Sequence
  Description of Artificial Sequence: Synthetic oligonucleotide
  Target: ATXN2; (-) strand; PAM type: NRG; PAM sequence: TGG
ggatgggcgagcgctggaag

SEQ ID NO: 16049 - DNA, 20 bp, Artificial Sequence
  Description of Artificial Sequence: Synthetic oligonucleotide
  Target: ATXN2; (-) strand; PAM type: NRG; PAM sequence: AAG
gtgggatgggcgagcgctgg

SEQ ID NO: 16050 - DNA, 20 bp, Artificial Sequence
  Description of Artificial Sequence: Synthetic oligonucleotide
  Target: ATXN2; (-) strand; PAM type: NRG; PAM sequence: TGG
cgagtgggatgggcgagcgc

SEQ ID NO: 16051 - DNA, 20 bp, Artificial Sequence
  Description of Artificial Sequence: Synthetic oligonucleotide
  Target: ATXN2; (-) strand; PAM type: NRG; PAM sequence: GAG
cgcactcgagtgggatgggc

SEQ ID NO: 16052 - DNA, 20 bp, Artificial Sequence
  Description of Artificial Sequence: Synthetic oligonucleotide
  Target: ATXN2; (-) strand; PAM type: NRG; PAM sequence: GGG
gcgccgcactcgagtgggat

SEQ ID NO: 16053 - DNA, 20 bp, Artificial Sequence
  Description of Artificial Sequence: Synthetic oligonucleotide
  Target: ATXN2; (-) strand; PAM type: NRG; PAM sequence: TGG
ggcgccgcactcgagtggga

SEQ ID NO: 16054 - DNA, 20 bp, Artificial Sequence
  Description of Artificial Sequence: Synthetic oligonucleotide
  Target: ATXN2; (-) strand; PAM type: NRG; PAM sequence: GGG
aggcggcgccgcactcgagt

SEQ ID NO: 16055 - DNA, 20 bp, Artificial Sequence
  Description of Artificial Sequence: Synthetic oligonucleotide
  Target: ATXN2; (-) strand; PAM type: NRG; PAM sequence: TGG
caggcggcgccgcactcgag

SEQ ID NO: 16056 - DNA, 20 bp, Artificial Sequence
  Description of Artificial Sequence: Synthetic oligonucleotide
  Target: ATXN2; (-) strand; PAM type: NRG; PAM sequence: GAG
tcacaggcggcgccgcactc

SEQ ID NO: 16057 - DNA, 20 bp, Artificial Sequence
  Description of Artificial Sequence: Synthetic oligonucleotide
  Target: ATXN2; (-) strand; PAM type: NRG; PAM sequence: CGG
ggagagccggacatcacagg

SEQ ID NO: 16058 - DNA, 20 bp, Artificial Sequence
  Description of Artificial Sequence: Synthetic oligonucleotide
  Target: ATXN2; (-) strand; PAM type: NRG; PAM sequence: AGG
gctggagagccggacatcac

SEQ ID NO: 16059 - DNA, 20 bp, Artificial Sequence
  Description of Artificial Sequence: Synthetic oligonucleotide
  Target: ATXN2; (-) strand; PAM type: NRG; PAM sequence: CAG
agctggagagccggacatca

SEQ ID NO: 16060 - DNA, 20 bp, Artificial Sequence
  Description of Artificial Sequence: Synthetic oligonucleotide
  Target: ATXN2; (-) strand; PAM type: NRG; PAM sequence: CGG
ctaccacgtagctggagagc

SEQ ID NO: 16061 - DNA, 20 bp, Artificial Sequence
  Description of Artificial Sequence: Synthetic oligonucleotide
  Target: ATXN2; (-) strand; PAM type: NRG; PAM sequence: GAG
acgactaccacgtagctgga

SEQ ID NO: 16062 - DNA, 20 bp, Artificial Sequence
  Description of Artificial Sequence: Synthetic oligonucleotide
  Target: ATXN2; (-) strand; PAM type: NRG; PAM sequence: GAG
agacgactaccacgtagctg

SEQ ID NO: 16063 - DNA, 20 bp, Artificial Sequence
  Description of Artificial Sequence: Synthetic oligonucleotide
  Target: ATXN2; (-) strand; PAM type: NRG; PAM sequence: TGG
ggagacgactaccacgtagc

SEQ ID NO: 16064 - DNA, 20 bp, Artificial Sequence
  Description of Artificial Sequence: Synthetic oligonucleotide
  Target: ATXN2; (-) strand; PAM type: NRG; PAM sequence: TAG
gttgggagacgactaccacg

SEQ ID NO: 16065 - DNA, 20 bp, Artificial Sequence
  Description of Artificial Sequence: Synthetic oligonucleotide
  Target: ATXN2; (-) strand; PAM type: NRG; PAM sequence: GAG
gggtcagacctggtggttgg

SEQ ID NO: 16066 - DNA, 20 bp, Artificial Sequence
  Description of Artificial Sequence: Synthetic oligonucleotide
  Target: ATXN2; (-) strand; PAM type: NRG; PAM sequence: GGG
tagggtcagacctggtggtt

SEQ ID NO: 16067 - DNA, 20 bp, Artificial Sequence
  Description of Artificial Sequence: Synthetic oligonucleotide
  Target: ATXN2; (-) strand; PAM type: NRG; PAM sequence: TGG
gtagggtcagacctggtggt

SEQ ID NO: 16068 - DNA, 20 bp, Artificial Sequence
  Description of Artificial Sequence: Synthetic oligonucleotide
  Target: ATXN2; (-) strand; PAM type: NRG; PAM sequence: TGG
ggcagtagggtcagacctgg

SEQ ID NO: 16069 - DNA, 20 bp, Artificial Sequence
  Description of Artificial Sequence: Synthetic oligonucleotide
  Target: ATXN2; (-) strand; PAM type: NRG; PAM sequence: TGG
aagggcagtagggtcagacc

SEQ ID NO: 16070 - DNA, 20 bp, Artificial Sequence
  Description of Artificial Sequence: Synthetic oligonucleotide
  Target: ATXN2; (-) strand; PAM type: NRG; PAM sequence: CAG
tcagcaaagggcagtagggt

SEQ ID NO: 16071 - DNA, 20 bp, Artificial Sequence
  Description of Artificial Sequence: Synthetic oligonucleotide
  Target: ATXN2; (-) strand; PAM type: NRG; PAM sequence: GGG
cccttcagcaaagggcagta

SEQ ID NO: 16072 - DNA, 20 bp, Artificial Sequence
  Description of Artificial Sequence: Synthetic oligonucleotide
  Target: ATXN2; (-) strand; PAM type: NRG; PAM sequence: AGG
ccccttcagcaaagggcagt

SEQ ID NO: 16073 - DNA, 20 bp, Artificial Sequence
  Description of Artificial Sequence: Synthetic oligonucleotide
  Target: ATXN2; (-) strand; PAM type: NRG; PAM sequence: TAG
cccccttcagcaaagggcag

SEQ ID NO: 16074 - DNA, 20 bp, Artificial Sequence
  Description of Artificial Sequence: Synthetic oligonucleotide
  Target: ATXN2; (-) strand; PAM type: NRG; PAM sequence: CAG
ccacccccttcagcaaaggg

SEQ ID NO: 16075 - DNA, 20 bp, Artificial Sequence
  Description of Artificial Sequence: Synthetic oligonucleotide
  Target: ATXN2; (-) strand; PAM type: NRG; PAM sequence: GGG
cagccacccccttcagcaaa

SEQ ID NO: 16076 - DNA, 20 bp, Artificial Sequence
  Description of Artificial Sequence: Synthetic oligonucleotide
  Target: ATXN2; (-) strand; PAM type: NRG; PAM sequence: AGG
tcagccacccccttcagcaa

SEQ ID NO: 16077 - DNA, 20 bp, Artificial Sequence
  Description of Artificial Sequence: Synthetic oligonucleotide
  Target: ATXN2; (-) strand; PAM type: NRG; PAM sequence: AAG
gtcagccacccccttcagca

SEQ ID NO: 16078 - DNA, 20 bp, Artificial Sequence
  Description of Artificial Sequence: Synthetic oligonucleotide
  Target: ATXN2; (-) strand; PAM type: NRG; PAM sequence: CAG
ccagtgtcagccaccccctt

SEQ ID NO: 16079 - DNA, 20 bp, Artificial Sequence
  Description of Artificial Sequence: Synthetic oligonucleotide
  Target: ATXN2; (-) strand; PAM type: NRG; PAM sequence: CAG
ctctaccctctacccagtgt

SEQ ID NO: 16080 - DNA, 20 bp, Artificial Sequence
  Description of Artificial Sequence: Synthetic oligonucleotide
  Target: ATXN2; (-) strand; PAM type: NRG; PAM sequence: CAG
gcaagcctctaccctctacc

SEQ ID NO: 16081 - DNA, 20 bp, Artificial Sequence
  Description of Artificial Sequence: Synthetic oligonucleotide
  Target: ATXN2; (-) strand; PAM type: NRG; PAM sequence: AAG
tgtacccctgggtctgcagc

SEQ ID NO: 16082 - DNA, 20 bp, Artificial Sequence
  Description of Artificial Sequence: Synthetic oligonucleotide
  Target: ATXN2; (-) strand; PAM type: NRG; PAM sequence: CAG
tacctgtacccctgggtctg

SEQ ID NO: 16083 - DNA, 20 bp, Artificial Sequence
  Description of Artificial Sequence: Synthetic oligonucleotide
  Target: ATXN2; (-) strand; PAM type: NRG; PAM sequence: GGG
aacaagatacctgtacccct

SEQ ID NO: 16084 - DNA, 20 bp, Artificial Sequence
  Description of Artificial Sequence: Synthetic oligonucleotide
  Target: ATXN2; (-) strand; PAM type: NRG; PAM sequence: TGG
gaacaagatacctgtacccc

SEQ ID NO: 16085 - DNA, 20 bp, Artificial Sequence
  Description of Artificial Sequence: Synthetic oligonucleotide
  Target: ATXN2; (-) strand; PAM type: NRG; PAM sequence: AAG
gtgctgacaggacacagaac

SEQ ID NO: 16086 - DNA, 20 bp, Artificial Sequence
  Description of Artificial Sequence: Synthetic oligonucleotide
  Target: ATXN2; (-) strand; PAM type: NRG; PAM sequence: CAG
aggcaagtgctgacaggaca

SEQ ID NO: 16087 - DNA, 20 bp, Artificial Sequence
  Description of Artificial Sequence: Synthetic oligonucleotide
  Target: ATXN2; (-) strand; PAM type: NRG; PAM sequence: AGG
gtcttgaggcaagtgctgac

SEQ ID NO: 16088 - DNA, 20 bp, Artificial Sequence
  Description of Artificial Sequence: Synthetic oligonucleotide
  Target: ATXN2; (-) strand; PAM type: NRG; PAM sequence: CAG
agtcttgaggcaagtgctga

SEQ ID NO: 16089 - DNA, 20 bp, Artificial Sequence
  Description of Artificial Sequence: Synthetic oligonucleotide
  Target: ATXN2; (-) strand; PAM type: NRG; PAM sequence: AAG
cacaccatcagtcttgaggc

SEQ ID NO: 16090 - DNA, 20 bp, Artificial Sequence
  Description of Artificial Sequence: Synthetic oligonucleotide
  Target: ATXN2; (-) strand; PAM type: NRG; PAM sequence: AGG
agaccacaccatcagtcttg

SEQ ID NO: 16091 - DNA, 20 bp, Artificial Sequence
  Description of Artificial Sequence: Synthetic oligonucleotide
  Target: ATXN2; (-) strand; PAM type: NRG; PAM sequence: GAG
gagaccacaccatcagtctt

SEQ ID NO: 16092 - DNA, 20 bp, Artificial Sequence
  Description of Artificial Sequence: Synthetic oligonucleotide
  Target: ATXN2; (-) strand; PAM type: NRG; PAM sequence: CAG
accaagagagaccacaccat

SEQ ID NO: 16093 - DNA, 20 bp, Artificial Sequence
  Description of Artificial Sequence: Synthetic oligonucleotide
  Target: ATXN2; (-) strand; PAM type: NRG; PAM sequence: GAG
cctaggacaagtgaccaaga

SEQ ID NO: 16094 - DNA, 20 bp, Artificial Sequence
  Description of Artificial Sequence: Synthetic oligonucleotide
  Target: ATXN2; (-) strand; PAM type: NRG; PAM sequence: GAG
aacctaggacaagtgaccaa

SEQ ID NO: 16095 - DNA, 20 bp, Artificial Sequence
  Description of Artificial Sequence: Synthetic oligonucleotide
  Target: ATXN2; (-) strand; PAM type: NRG; PAM sequence: AAG
ggaacctaggacaagtgacc

SEQ ID NO: 16096 - DNA, 20 bp, Artificial Sequence
  Description of Artificial Sequence: Synthetic oligonucleotide
  Target: ATXN2; (-) strand; PAM type: NRG; PAM sequence: AAG
gtgttgcaggaacctaggac

SEQ ID NO: 16097 - DNA, 20 bp, Artificial Sequence
  Description of Artificial Sequence: Synthetic oligonucleotide
  Target: ATXN2; (-) strand; PAM type: NRG; PAM sequence: AGG
ggaccgtgttgcaggaacct

SEQ ID NO: 16098 - DNA, 20 bp, Artificial Sequence
  Description of Artificial Sequence: Synthetic oligonucleotide
  Target: ATXN2; (-) strand; PAM type: NRG; PAM sequence: TAG
aggaccgtgttgcaggaacc

SEQ ID NO: 16099 - DNA, 20 bp, Artificial Sequence
  Description of Artificial Sequence: Synthetic oligonucleotide
  Target: ATXN2; (-) strand; PAM type: NRG; PAM sequence: AGG
agggaagaggaccgtgttgc

SEQ ID NO: 16100 - DNA, 20 bp, Artificial Sequence
  Description of Artificial Sequence: Synthetic oligonucleotide
  Target: ATXN2; (-) strand; PAM type: NRG; PAM sequence: CAG
aagggaagaggaccgtgttg

SEQ ID NO: 16101 - DNA, 20 bp, Artificial Sequence
  Description of Artificial Sequence: Synthetic oligonucleotide
  Target: ATXN2; (-) strand; PAM type: NRG; PAM sequence: AGG
gaggaagggagaaagggaag

SEQ ID NO: 16102 - DNA, 20 bp, Artificial Sequence
  Description of Artificial Sequence: Synthetic oligonucleotide
  Target: ATXN2; (-) strand; PAM type: NRG; PAM sequence: GAG
tgaggaagggagaaagggaa

SEQ ID NO: 16103 - DNA, 20 bp, Artificial Sequence
  Description of Artificial Sequence: Synthetic oligonucleotide
  Target: ATXN2; (-) strand; PAM type: NRG; PAM sequence: AAG
agtgaggaagggagaaaggg

SEQ ID NO: 16104 - DNA, 20 bp, Artificial Sequence
  Description of Artificial Sequence: Synthetic oligonucleotide
  Target: ATXN2; (-) strand; PAM type: NRG; PAM sequence: GGG
cccagtgaggaagggagaaa

SEQ ID NO: 16105 - DNA, 20 bp, Artificial Sequence
  Description of Artificial Sequence: Synthetic oligonucleotide
  Target: ATXN2; (-) strand; PAM type: NRG; PAM sequence: AGG
tcccagtgaggaagggagaa

SEQ ID NO: 16106 - DNA, 20 bp, Artificial Sequence
  Description of Artificial Sequence: Synthetic oligonucleotide
  Target: ATXN2; (-) strand; PAM type: NRG; PAM sequence: AAG
atcccagtgaggaagggaga

SEQ ID NO: 16107 - DNA, 20 bp, Artificial Sequence
  Description of Artificial Sequence: Synthetic oligonucleotide
  Target: ATXN2; (-) strand; PAM type: NRG; PAM sequence: GAG
ctgaatcccagtgaggaagg

SEQ ID NO: 16108 - DNA, 20 bp, Artificial Sequence
  Description of Artificial Sequence: Synthetic oligonucleotide
  Target: ATXN2; (-) strand; PAM type: NRG; PAM sequence: GGG
ctctgaatcccagtgaggaa

SEQ ID NO: 16109 - DNA, 20 bp, Artificial Sequence
  Description of Artificial Sequence: Synthetic oligonucleotide
  Target: ATXN2; (-) strand; PAM type: NRG; PAM sequence: AGG
actctgaatcccagtgagga

SEQ ID NO: 16110 - DNA, 20 bp, Artificial Sequence
  Description of Artificial Sequence: Synthetic oligonucleotide
  Target: ATXN2; (-) strand; PAM type: NRG; PAM sequence: AAG
gactctgaatcccagtgagg

SEQ ID NO: 16111 - DNA, 20 bp, Artificial Sequence
  Description of Artificial Sequence: Synthetic oligonucleotide
  Target: ATXN2; (-) strand; PAM type: NRG; PAM sequence: AGG
agggactctgaatcccagtg

SEQ ID NO: 16112 - DNA, 20 bp, Artificial Sequence
  Description of Artificial Sequence: Synthetic oligonucleotide
  Target: ATXN2; (-) strand; PAM type: NRG; PAM sequence: GAG
aagggactctgaatcccagt

SEQ ID NO: 16113 - DNA, 20 bp, Artificial Sequence
  Description of Artificial Sequence: Synthetic oligonucleotide
  Target: ATXN2; (-) strand; PAM type: NRG; PAM sequence: CAG
gaggaagggactctgaatcc

SEQ ID NO: 16114 - DNA, 20 bp, Artificial Sequence
  Description of Artificial Sequence: Synthetic oligonucleotide
  Target: ATXN2; (-) strand; PAM type: NRG; PAM sequence: GGG
ctctgaaccccagtgaggaa

SEQ ID NO: 16115 - DNA, 20 bp, Artificial Sequence
  Description of Artificial Sequence: Synthetic oligonucleotide
  Target: ATXN2; (-) strand; PAM type: NRG; PAM sequence: AGG
actctgaaccccagtgagga

SEQ ID NO: 16116 - DNA, 20 bp, Artificial Sequence
  Description of Artificial Sequence: Synthetic oligonucleotide
  Target: ATXN2; (-) strand; PAM type: NRG; PAM sequence: AAG
aactctgaaccccagtgagg

SEQ ID NO: 16117 - DNA, 20 bp, Artificial Sequence
  Description of Artificial Sequence: Synthetic oligonucleotide
  Target: ATXN2; (-) strand; PAM type: NRG; PAM sequence: AGG
cccaactctgaaccccagtg

SEQ ID NO: 16118 - DNA, 20 bp, Artificial Sequence
  Description of Artificial Sequence: Synthetic oligonucleotide
  Target: ATXN2; (-) strand; PAM type: NRG; PAM sequence: GAG
gcccaactctgaaccccagt

SEQ ID NO: 16119 - DNA, 20 bp, Artificial Sequence
  Description of Artificial Sequence: Synthetic oligonucleotide
  Target: ATXN2; (-) strand; PAM type: NRG; PAM sequence: CAG
gaaggcccaactctgaaccc

SEQ ID NO: 16120 - DNA, 20 bp, Artificial Sequence
  Description of Artificial Sequence: Synthetic oligonucleotide
  Target: ATXN2; (-) strand; PAM type: NRG; PAM sequence: AGG
cagaagaactaaggtgggga

SEQ ID NO: 16121 - DNA, 20 bp, Artificial Sequence
  Description of Artificial Sequence: Synthetic oligonucleotide
  Target: ATXN2; (-) strand; PAM type: NRG; PAM sequence: AAG
ccagaagaactaaggtgggg

SEQ ID NO: 16122 - DNA, 20 bp, Artificial Sequence
  Description of Artificial Sequence: Synthetic oligonucleotide
  Target: ATXN2; (-) strand; PAM type: NRG; PAM sequence: GGG
cagccagaagaactaaggtg

SEQ ID NO: 16123 - DNA, 20 bp, Artificial Sequence
  Description of Artificial Sequence: Synthetic oligonucleotide
  Target: ATXN2; (-) strand; PAM type: NRG; PAM sequence: GGG
acagccagaagaactaaggt

SEQ ID NO: 16124 - DNA, 20 bp, Artificial Sequence
  Description of Artificial Sequence: Synthetic oligonucleotide
  Target: ATXN2; (-) strand; PAM type: NRG; PAM sequence: TGG
gacagccagaagaactaagg

SEQ ID NO: 16125 - DNA, 20 bp, Artificial Sequence
  Description of Artificial Sequence: Synthetic oligonucleotide
  Target: ATXN2; (-) strand; PAM type: NRG; PAM sequence: AGG
ggggacagccagaagaacta

SEQ ID NO: 16126 - DNA, 20 bp, Artificial Sequence
  Description of Artificial Sequence: Synthetic oligonucleotide
  Target: ATXN2; (-) strand; PAM type: NRG; PAM sequence: AAG
cggggacagccagaagaact

SEQ ID NO: 16127 - DNA, 20 bp, Artificial Sequence
  Description of Artificial Sequence: Synthetic oligonucleotide
  Target: ATXN2; (-) strand; PAM type: NRG; PAM sequence: AAG
gagcccccggggacagccag

SEQ ID NO: 16128 - DNA, 20 bp, Artificial Sequence
  Description of Artificial Sequence: Synthetic oligonucleotide
  Target: ATXN2; (-) strand; PAM type: NRG; PAM sequence: CAG
gctgagcccccggggacagc

SEQ ID NO: 16129 - DNA, 20 bp, Artificial Sequence
  Description of Artificial Sequence: Synthetic oligonucleotide
  Target: ATXN2; (-) strand; PAM type: NRG; PAM sequence: CAG
ctgggctgagcccccgggga

SEQ ID NO: 16130 - DNA, 20 bp, Artificial Sequence
  Description of Artificial Sequence: Synthetic oligonucleotide
  Target: ATXN2; (-) strand; PAM type: NRG; PAM sequence: GGG
ccctctgggctgagcccccg

SEQ ID NO: 16131 - DNA, 20 bp, Artificial Sequence
  Description of Artificial Sequence: Synthetic oligonucleotide
  Target: ATXN2; (-) strand; PAM type: NRG; PAM sequence: GGG
accctctgggctgagccccc

SEQ ID NO: 16132 - DNA, 20 bp, Artificial Sequence
  Description of Artificial Sequence: Synthetic oligonucleotide
  Target: ATXN2; (-) strand; PAM type: NRG; PAM sequence: CGG
gaccctctgggctgagcccc

SEQ ID NO: 16133 - DNA, 20 bp, Artificial Sequence
  Description of Artificial Sequence: Synthetic oligonucleotide
  Target: ATXN2; (-) strand; PAM type: NRG; PAM sequence: GAG
cctgggagaccctctgggct

SEQ ID NO: 16134 - DNA, 20 bp, Artificial Sequence
  Description of Artificial Sequence: Synthetic oligonucleotide
  Target: ATXN2; (-) strand; PAM type: NRG; PAM sequence: GGG
atcgccctgggagaccctct

SEQ ID NO: 16135 - DNA, 20 bp, Artificial Sequence
  Description of Artificial Sequence: Synthetic oligonucleotide
  Target: ATXN2; (-) strand; PAM type: NRG; PAM sequence: TGG
gatcgccctgggagaccctc

SEQ ID NO: 16136 - DNA, 20 bp, Artificial Sequence
  Description of Artificial Sequence: Synthetic oligonucleotide
  Target: ATXN2; (-) strand; PAM type: NRG; PAM sequence: GAG
gggggtgaggatcgccctgg

SEQ ID NO: 16137 - DNA, 20 bp, Artificial Sequence
  Description of Artificial Sequence: Synthetic oligonucleotide
  Target: ATXN2; (-) strand; PAM type: NRG; PAM sequence: GGG
cggggggtgaggatcgccct

SEQ ID NO: 16138 - DNA, 20 bp, Artificial Sequence
  Description of Artificial Sequence: Synthetic oligonucleotide
  Target: ATXN2; (-) strand; PAM type: NRG; PAM sequence: TGG
tcggggggtgaggatcgccc

SEQ ID NO: 16139 - DNA, 20 bp, Artificial Sequence
  Description of Artificial Sequence: Synthetic oligonucleotide
  Target: ATXN2; (-) strand; PAM type: NRG; PAM sequence: AGG
gaagatctgctcggggggtg

SEQ ID NO: 16140 - DNA, 20 bp, Artificial Sequence
  Description of Artificial Sequence: Synthetic oligonucleotide
  Target: ATXN2; (-) strand; PAM type: NRG; PAM sequence: GAG
ggaagatctgctcggggggt

SEQ ID NO: 16141 - DNA, 20 bp, Artificial Sequence
  Description of Artificial Sequence: Synthetic oligonucleotide
  Target: ATXN2; (-) strand; PAM type: NRG; PAM sequence: GGG
aggtggaagatctgctcggg

SEQ ID NO: 16142 - DNA, 20 bp, Artificial Sequence
  Description of Artificial Sequence: Synthetic oligonucleotide
  Target: ATXN2; (-) strand; PAM type: NRG; PAM sequence: GGG
caggtggaagatctgctcgg

SEQ ID NO: 16143 - DNA, 20 bp, Artificial Sequence
  Description of Artificial Sequence: Synthetic oligonucleotide
  Target: ATXN2; (-) strand; PAM type: NRG; PAM sequence: GGG
ccaggtggaagatctgctcg

SEQ ID NO: 16144 - DNA, 20 bp, Artificial Sequence
  Description of Artificial Sequence: Synthetic oligonucleotide
  Target: ATXN2; (-) strand; PAM type: NRG; PAM sequence: GGG
accaggtggaagatctgctc

SEQ ID NO: 16145 - DNA, 20 bp, Artificial Sequence
  Description of Artificial Sequence: Synthetic oligonucleotide
  Target: ATXN2; (-) strand; PAM type: NRG; PAM sequence: CGG
caccaggtggaagatctgct

SEQ ID NO: 16146 - DNA, 20 bp, Artificial Sequence
  Description of Artificial Sequence: Synthetic oligonucleotide
  Target: ATXN2; (-) strand; PAM type: NRG; PAM sequence: AAG
cgggcgaaggcaccaggtgg

SEQ ID NO: 16147 - DNA, 20 bp, Artificial Sequence
  Description of Artificial Sequence: Synthetic oligonucleotide
  Target: ATXN2; (-) strand; PAM type: NRG; PAM sequence: TGG
cttcgggcgaaggcaccagg

SEQ ID NO: 16148 - DNA, 20 bp, Artificial Sequence
  Description of Artificial Sequence: Synthetic oligonucleotide
  Target: ATXN2; (-) strand; PAM type: NRG; PAM sequence: AGG
gttcttcgggcgaaggcacc

SEQ ID NO: 16149 - DNA, 20 bp, Artificial Sequence
  Description of Artificial Sequence: Synthetic oligonucleotide
  Target: ATXN2; (-) strand; PAM type: NRG; PAM sequence: CAG
agttcttcgggcgaaggcac

SEQ ID NO: 16150 - DNA, 20 bp, Artificial Sequence
  Description of Artificial Sequence: Synthetic oligonucleotide
  Target: ATXN2; (-) strand; PAM type: NRG; PAM sequence: AGG
ttggccagttcttcgggcga

SEQ ID NO: 16151 - DNA, 20 bp, Artificial Sequence
  Description of Artificial Sequence: Synthetic oligonucleotide
  Target: ATXN2; (-) strand; PAM type: NRG; PAM sequence: AAG
gttggccagttcttcgggcg

SEQ ID NO: 16152 - DNA, 20 bp, Artificial Sequence
  Description of Artificial Sequence: Synthetic oligonucleotide
  Target: ATXN2; (-) strand; PAM type: NRG; PAM sequence: GGG
aggctgttggccagttcttc

SEQ ID NO: 16153 - DNA, 20 bp, Artificial Sequence
  Description of Artificial Sequence: Synthetic oligonucleotide
  Target: ATXN2; (-) strand; PAM type: NRG; PAM sequence: CGG
caggctgttggccagttctt

SEQ ID NO: 16154 - DNA, 20 bp, Artificial Sequence
  Description of Artificial Sequence: Synthetic oligonucleotide
  Target: ATXN2; (-) strand; PAM type: NRG; PAM sequence: CAG
aggtgctgcaggctgttggc

SEQ ID NO: 16155 - DNA, 20 bp, Artificial Sequence
  Description of Artificial Sequence: Synthetic oligonucleotide
  Target: ATXN2; (-) strand; PAM type: NRG; PAM sequence: TGG
ctccaggtgctgcaggctgt

SEQ ID NO: 16156 - DNA, 20 bp, Artificial Sequence
  Description of Artificial Sequence: Synthetic oligonucleotide
  Target: ATXN2; (-) strand; PAM type: NRG; PAM sequence: AGG
gctcatgctccaggtgctgc

SEQ ID NO: 16157 - DNA, 20 bp, Artificial Sequence
  Description of Artificial Sequence: Synthetic oligonucleotide
  Target: ATXN2; (-) strand; PAM type: NRG; PAM sequence: CAG
ggctcatgctccaggtgctg

SEQ ID NO: 16158 - DNA, 20 bp, Artificial Sequence
  Description of Artificial Sequence: Synthetic oligonucleotide
  Target: ATXN2; (-) strand; PAM type: NRG; PAM sequence: AGG
gattcacaggctcatgctcc

SEQ ID NO: 16159 - DNA, 20 bp, Artificial Sequence
  Description of Artificial Sequence: Synthetic oligonucleotide
  Target: ATXN2; (-) strand; PAM type: NRG; PAM sequence: CAG
cgattcacaggctcatgctc

SEQ ID NO: 16160 - DNA, 20 bp, Artificial Sequence
  Description of Artificial Sequence: Synthetic oligonucleotide
  Target: ATXN2; (-) strand; PAM type: NRG; PAM sequence: AGG
gagtcccgggctcgattcac

SEQ ID NO: 16161 - DNA, 20 bp, Artificial Sequence
  Description of Artificial Sequence: Synthetic oligonucleotide
  Target: ATXN2; (-) strand; PAM type: NRG; PAM sequence: CAG
cgagtcccgggctcgattca

SEQ ID NO: 16162 - DNA, 20 bp, Artificial Sequence
  Description of Artificial Sequence: Synthetic oligonucleotide
  Target: ATXN2; (-) strand; PAM type: NRG; PAM sequence: GGG
catttcgtagtccgagtccc

SEQ ID NO: 16163 - DNA, 20 bp, Artificial Sequence
  Description of Artificial Sequence: Synthetic oligonucleotide
  Target: ATXN2; (-) strand; PAM type: NRG; PAM sequence: CGG
ccatttcgtagtccgagtcc

SEQ ID NO: 16164 - DNA, 20 bp, Artificial Sequence
  Description of Artificial Sequence: Synthetic oligonucleotide
  Target: ATXN2; (-) strand; PAM type: NRG; PAM sequence: GAG
atgagtccatttcgtagtcc

SEQ ID NO: 16165 - DNA, 20 bp, Artificial Sequence
  Description of Artificial Sequence: Synthetic oligonucleotide
  Target: ATXN2; (-) strand; PAM type: NRG; PAM sequence: TAG
gggaggatgagtccatttcg

SEQ ID NO: 16166 - DNA, 20 bp, Artificial Sequence
  Description of Artificial Sequence: Synthetic oligonucleotide
  Target: ATXN2; (-) strand; PAM type: NRG; PAM sequence: GAG
gcaggtggctccgggaggat

SEQ ID NO: 16167 - DNA, 20 bp, Artificial Sequence
  Description of Artificial Sequence: Synthetic oligonucleotide
  Target: ATXN2; (-) strand; PAM type: NRG; PAM sequence: AGG
ggcccgcaggtggctccggg

SEQ ID NO: 16168 - DNA, 20 bp, Artificial Sequence
  Description of Artificial Sequence: Synthetic oligonucleotide
  Target: ATXN2; (-) strand; PAM type: NRG; PAM sequence: GAG
tggcccgcaggtggctccgg

SEQ ID NO: 16169 - DNA, 20 bp, Artificial Sequence
  Description of Artificial Sequence: Synthetic oligonucleotide
  Target: ATXN2; (-) strand; PAM type: NRG; PAM sequence: GGG
tatggcccgcaggtggctcc

SEQ ID NO: 16170 - DNA, 20 bp, Artificial Sequence
  Description of Artificial Sequence: Synthetic oligonucleotide
  Target: ATXN2; (-) strand; PAM type: NRG; PAM sequence: CGG
ctatggcccgcaggtggctc

SEQ ID NO: 16171 - DNA, 20 bp, Artificial Sequence
  Description of Artificial Sequence: Synthetic oligonucleotide
  Target: ATXN2; (-) strand; PAM type: NRG; PAM sequence: TGG
gattgtctatggcccgcagg

SEQ ID NO: 16172 - DNA, 20 bp, Artificial Sequence
  Description of Artificial Sequence: Synthetic oligonucleotide
  Target: ATXN2; (-) strand; PAM type: NRG; PAM sequence: AGG
actgattgtctatggcccgc

SEQ ID NO: 16173 - DNA, 20 bp, Artificial Sequence
  Description of Artificial Sequence: Synthetic oligonucleotide
  Target: ATXN2; (-) strand; PAM type: NRG; PAM sequence: CAG
tactgattgtctatggcccg

SEQ ID NO: 16174 - DNA, 20 bp, Artificial Sequence
  Description of Artificial Sequence: Synthetic oligonucleotide
  Target: ATXN2; (-) strand; PAM type: NRG; PAM sequence: TGG
aggtgtgtactgattgtcta

SEQ ID NO: 16175 - DNA, 20 bp, Artificial Sequence
  Description of Artificial Sequence: Synthetic oligonucleotide
  Target: ATXN2; (-) strand; PAM type: NRG; PAM sequence: AGG
gaattcctcactggtcagag

SEQ ID NO: 16176 - DNA, 20 bp, Artificial Sequence
  Description of Artificial Sequence: Synthetic oligonucleotide
  Target: ATXN2; (-) strand; PAM type: NRG; PAM sequence: GAG
ggaattcctcactggtcaga

SEQ ID NO: 16177 - DNA, 20 bp, Artificial Sequence
  Description of Artificial Sequence: Synthetic oligonucleotide
  Target: ATXN2; (-) strand; PAM type: NRG; PAM sequence: GAG
ctggaattcctcactggtca

SEQ ID NO: 16178 - DNA, 20 bp, Artificial Sequence
  Description of Artificial Sequence: Synthetic oligonucleotide
  Target: ATXN2; (-) strand; PAM type: NRG; PAM sequence: CAG
gcctggaattcctcactggt

SEQ ID NO: 16179 - DNA, 20 bp, Artificial Sequence
  Description of Artificial Sequence: Synthetic oligonucleotide
  Target: ATXN2; (-) strand; PAM type: NRG; PAM sequence: TGG
tgaggcctggaattcctcac

SEQ ID NO: 16180 - DNA, 20 bp, Artificial Sequence
  Description of Artificial Sequence: Synthetic oligonucleotide
  Target: ATXN2; (-) strand; PAM type: NRG; PAM sequence: TGG
caagggcagctgttgaggcc

SEQ ID NO: 16181 - DNA, 20 bp, Artificial Sequence
  Description of Artificial Sequence: Synthetic oligonucleotide
  Target: ATXN2; (-) strand; PAM type: NRG; PAM sequence: AGG
ctcctcaagggcagctgttg

SEQ ID NO: 16182 - DNA, 20 bp, Artificial Sequence
  Description of Artificial Sequence: Synthetic oligonucleotide
  Target: ATXN2; (-) strand; PAM type: NRG; PAM sequence: GAG
gctcctcaagggcagctgtt

SEQ ID NO: 16183 - DNA, 20 bp, Artificial Sequence
  Description of Artificial Sequence: Synthetic oligonucleotide
  Target: ATXN2; (-) strand; PAM type: NRG; PAM sequence: CAG
ctgcctgtgctcctcaaggg

SEQ ID NO: 16184 - DNA, 20 bp, Artificial Sequence
  Description of Artificial Sequence: Synthetic oligonucleotide
  Target: ATXN2; (-) strand; PAM type: NRG; PAM sequence: GGG
cttctgcctgtgctcctcaa

SEQ ID NO: 16185 - DNA, 20 bp, Artificial Sequence
  Description of Artificial Sequence: Synthetic oligonucleotide
  Target: ATXN2; (-) strand; PAM type: NRG; PAM sequence: AGG
acttctgcctgtgctcctca

SEQ ID NO: 16186 - DNA, 20 bp, Artificial Sequence
  Description of Artificial Sequence: Synthetic oligonucleotide
  Target: ATXN2; (-) strand; PAM type: NRG; PAM sequence: AAG
cacttctgcctgtgctcctc

SEQ ID NO: 16187 - DNA, 20 bp, Artificial Sequence
  Description of Artificial Sequence: Synthetic oligonucleotide
  Target: ATXN2; (-) strand; PAM type: NRG; PAM sequence: AAG
gaaagatcaattacattcac

SEQ ID NO: 16188 - DNA, 20 bp, Artificial Sequence
  Description of Artificial Sequence: Synthetic oligonucleotide
  Target: ATXN2; (-) strand; PAM type: NRG; PAM sequence: AAG
tctttctctggaaggaagga

SEQ ID NO: 16189 - DNA, 20 bp, Artificial Sequence
  Description of Artificial Sequence: Synthetic oligonucleotide
  Target: ATXN2; (-) strand; PAM type: NRG; PAM sequence: AGG
taaatctttctctggaagga

SEQ ID NO: 16190 - DNA, 20 bp, Artificial Sequence
  Description of Artificial Sequence: Synthetic oligonucleotide
  Target: ATXN2; (-) strand; PAM type: NRG; PAM sequence: AAG
ttaaatctttctctggaagg

SEQ ID NO: 16191 - DNA, 20 bp, Artificial Sequence
  Description of Artificial Sequence: Synthetic oligonucleotide
  Target: ATXN2; (-) strand; PAM type: NRG; PAM sequence: AGG
cccttaaatctttctctgga

SEQ ID NO: 16192 - DNA, 20 bp, Artificial Sequence
  Description of Artificial Sequence: Synthetic oligonucleotide
  Target: ATXN2; (-) strand; PAM type: NRG; PAM sequence: AAG
tcccttaaatctttctctgg

SEQ ID NO: 16193 - DNA, 20 bp, Artificial Sequence
  Description of Artificial Sequence: Synthetic oligonucleotide
  Target: ATXN2; (-) strand; PAM type: NRG; PAM sequence: TGG
gtgtcccttaaatctttctc

SEQ ID NO: 16194 - DNA, 20 bp, Artificial Sequence
  Description of Artificial Sequence: Synthetic oligonucleotide
  Target: ATXN2; (-) strand; PAM type: NRG; PAM sequence: CAG
aaactggcacgagcagttaa

SEQ ID NO: 16195 - DNA, 20 bp, Artificial Sequence
  Description of Artificial Sequence: Synthetic oligonucleotide
  Target: ATXN2; (-) strand; PAM type: NRG; PAM sequence: CAG
cacttccaaactggcacgag

SEQ ID NO: 16196 - DNA, 20 bp, Artificial Sequence
  Description of Artificial Sequence: Synthetic oligonucleotide
  Target: ATXN2; (-) strand; PAM type: NRG; PAM sequence: GAG
ggtcacttccaaactggcac

SEQ ID NO: 16197 - DNA, 20 bp, Artificial Sequence
  Description of Artificial Sequence: Synthetic oligonucleotide
  Target: ATXN2; (-) strand; PAM type: NRG; PAM sequence: TGG
tagaagggtcacttccaaac

SEQ ID NO: 16198 - DNA, 20 bp, Artificial Sequence
  Description of Artificial Sequence: Synthetic oligonucleotide
  Target: ATXN2; (-) strand; PAM type: NRG; PAM sequence: GGG
cttcaacaggcctaatagaa

SEQ ID NO: 16199 - DNA, 20 bp, Artificial Sequence
  Description of Artificial Sequence: Synthetic oligonucleotide
  Target: ATXN2; (-) strand; PAM type: NRG; PAM sequence: AGG
ccttcaacaggcctaataga

SEQ ID NO: 16200 - DNA, 20 bp, Artificial Sequence
  Description of Artificial Sequence: Synthetic oligonucleotide
  Target: ATXN2; (-) strand; PAM type: NRG; PAM sequence: AAG
cccttcaacaggcctaatag

SEQ ID NO: 16201 - DNA, 20 bp, Artificial Sequence
  Description of Artificial Sequence: Synthetic oligonucleotide
  Target: ATXN2; (-) strand; PAM type: NRG; PAM sequence: TAG
gggcccttcaacaggcctaa

SEQ ID NO: 16202 - DNA, 20 bp, Artificial Sequence
  Description of Artificial Sequence: Synthetic oligonucleotide
  Target: ATXN2; (-) strand; PAM type: NRG; PAM sequence: AGG
ctacaggagggcccttcaac

SEQ ID NO: 16203 - DNA, 20 bp, Artificial Sequence
  Description of Artificial Sequence: Synthetic oligonucleotide
  Target: ATXN2; (-) strand; PAM type: NRG; PAM sequence: CAG
cctacaggagggcccttcaa

SEQ ID NO: 16204 - DNA, 20 bp, Artificial Sequence
  Description of Artificial Sequence: Synthetic oligonucleotide
  Target: ATXN2; (-) strand; PAM type: NRG; PAM sequence: GGG
gatagatgaaacctacagga

SEQ ID NO: 16205 - DNA, 20 bp, Artificial Sequence
  Description of Artificial Sequence: Synthetic oligonucleotide
  Target: ATXN2; (-) strand; PAM type: NRG; PAM sequence: AGG
ggatagatgaaacctacagg

SEQ ID NO: 16206 - DNA, 20 bp, Artificial Sequence
  Description of Artificial Sequence: Synthetic oligonucleotide
  Target: ATXN2; (-) strand; PAM type: NRG; PAM sequence: GAG
tggatagatgaaacctacag

SEQ ID NO: 16207 - DNA, 20 bp, Artificial Sequence
  Description of Artificial Sequence: Synthetic oligonucleotide
  Target: ATXN2; (-) strand; PAM type: NRG; PAM sequence: AGG
ggtggatagatgaaacctac

SEQ ID NO: 16208 - DNA, 20 bp, Artificial Sequence
  Description of Artificial Sequence: Synthetic oligonucleotide
  Target: ATXN2; (-) strand; PAM type: NRG; PAM sequence: CAG
aggtggatagatgaaaccta

SEQ ID NO: 16209 - DNA, 20 bp, Artificial Sequence
  Description of Artificial Sequence: Synthetic oligonucleotide
  Target: ATXN2; (-) strand; PAM type: NRG; PAM sequence: TAG
taaggagaaagccaggtgga

SEQ ID NO: 16210 - DNA, 20 bp, Artificial Sequence
  Description of Artificial Sequence: Synthetic oligonucleotide
  Target: ATXN2; (-) strand; PAM type: NRG; PAM sequence: TGG
acaataaggagaaagccagg

SEQ ID NO: 16211 - DNA, 20 bp, Artificial Sequence
  Description of Artificial Sequence: Synthetic oligonucleotide
  Target: ATXN2; (-) strand; PAM type: NRG; PAM sequence: AGG
taaacaataaggagaaagcc

SEQ ID NO: 16212 - DNA, 20 bp, Artificial Sequence
  Description of Artificial Sequence: Synthetic oligonucleotide
  Target: ATXN2; (-) strand; PAM type: NRG; PAM sequence: CAG
gtaaacaataaggagaaagc

SEQ ID NO: 16213 - DNA, 20 bp, Artificial Sequence
  Description of Artificial Sequence: Synthetic oligonucleotide
  Target: ATXN2; (-) strand; PAM type: NRG; PAM sequence: AAG
atctgtaaacaataaggaga

SEQ ID NO: 16214 - DNA, 20 bp, Artificial Sequence
  Description of Artificial Sequence: Synthetic oligonucleotide
  Target: ATXN2; (-) strand; PAM type: NRG; PAM sequence: GAG
ctacatctgtaaacaataag

SEQ ID NO: 16215 - DNA, 20 bp, Artificial Sequence
  Description of Artificial Sequence: Synthetic oligonucleotide
  Target: ATXN2; (-) strand; PAM type: NRG; PAM sequence: AGG
aactacatctgtaaacaata

SEQ ID NO: 16216 - DNA, 20 bp, Artificial Sequence
  Description of Artificial Sequence: Synthetic oligonucleotide
  Target: ATXN2; (-) strand; PAM type: NRG; PAM sequence: AAG
gaactacatctgtaaacaat

SEQ ID NO: 16217 - DNA, 20 bp, Artificial Sequence
  Description of Artificial Sequence: Synthetic oligonucleotide
  Target: ATXN2; (-) strand; PAM type: NRG; PAM sequence: AAG
agctagcggcatcctctaac

SEQ ID NO: 16218 - DNA, 20 bp, Artificial Sequence
  Description of Artificial Sequence: Synthetic oligonucleotide
  Target: ATXN2; (-) strand; PAM type: NRG; PAM sequence: CGG
ggaccccgggcaggagctag

SEQ ID NO: 16219 - DNA, 20 bp, Artificial Sequence
  Description of Artificial Sequence: Synthetic oligonucleotide
  Target: ATXN2; (-) strand; PAM type: NRG; PAM sequence: TAG
tagggaccccgggcaggagc

SEQ ID NO: 16220 - DNA, 20 bp, Artificial Sequence
  Description of Artificial Sequence: Synthetic oligonucleotide
  Target: ATXN2; (-) strand; PAM type: NRG; PAM sequence: GAG
ggcatagggaccccgggcag

SEQ ID NO: 16221 - DNA, 20 bp, Artificial Sequence
  Description of Artificial Sequence: Synthetic oligonucleotide
  Target: ATXN2; (-) strand; PAM type: NRG; PAM sequence: AGG
tgggcatagggaccccgggc

SEQ ID NO: 16222 - DNA, 20 bp, Artificial Sequence
  Description of Artificial Sequence: Synthetic oligonucleotide
  Target: ATXN2; (-) strand; PAM type: NRG; PAM sequence: CAG
ctgggcatagggaccccggg

SEQ ID NO: 16223 - DNA, 20 bp, Artificial Sequence
  Description of Artificial Sequence: Synthetic oligonucleotide
  Target: ATXN2; (-) strand; PAM type: NRG; PAM sequence: GGG
ggactgggcatagggacccc

SEQ ID NO: 16224 - DNA, 20 bp, Artificial Sequence
  Description of Artificial Sequence: Synthetic oligonucleotide
  Target: ATXN2; (-) strand; PAM type: NRG; PAM sequence: CGG
gggactgggcatagggaccc

SEQ ID NO: 16225 - DNA, 20 bp, Artificial Sequence
  Description of Artificial Sequence: Synthetic oligonucleotide
  Target: ATXN2; (-) strand; PAM type: NRG; PAM sequence: GGG
agtaacggggactgggcata

SEQ ID NO: 16226 - DNA, 20 bp, Artificial Sequence
  Description of Artificial Sequence: Synthetic oligonucleotide
  Target: ATXN2; (-) strand; PAM type: NRG; PAM sequence: AGG
gagtaacggggactgggcat

SEQ ID NO: 16227 - DNA, 20 bp, Artificial Sequence
  Description of Artificial Sequence: Synthetic oligonucleotide
  Target: ATXN2; (-) strand; PAM type: NRG; PAM sequence: TAG
agagtaacggggactgggca

SEQ ID NO: 16228 - DNA, 20 bp, Artificial Sequence
  Description of Artificial Sequence: Synthetic oligonucleotide
  Target: ATXN2; (-) strand; PAM type: NRG; PAM sequence: GGG
ctctaagagtaacggggact

SEQ ID NO: 16229 - DNA, 20 bp, Artificial Sequence
  Description of Artificial Sequence: Synthetic oligonucleotide
  Target: ATXN2; (-) strand; PAM type: NRG; PAM sequence: TGG
tctctaagagtaacggggac

SEQ ID NO: 16230 - DNA, 20 bp, Artificial Sequence
  Description of Artificial Sequence: Synthetic oligonucleotide
  Target: ATXN2; (-) strand; PAM type: NRG; PAM sequence: GGG
tcctttctctaagagtaacg

SEQ ID NO: 16231 - DNA, 20 bp, Artificial Sequence
  Description of Artificial Sequence: Synthetic oligonucleotide
  Target: ATXN2; (-) strand; PAM type: NRG; PAM sequence: GGG
ctcctttctctaagagtaac

SEQ ID NO: 16232 - DNA, 20 bp, Artificial Sequence
  Description of Artificial Sequence: Synthetic oligonucleotide
  Target: ATXN2; (-) strand; PAM type: NRG; PAM sequence: CGG
actcctttctctaagagtaa

SEQ ID NO: 16233 - DNA, 20 bp, Artificial Sequence
  Description of Artificial Sequence: Synthetic oligonucleotide
  Target: ATXN2; (-) strand; PAM type: NRG; PAM sequence: GAG
accccaactcctttctctaa

SEQ ID NO: 16234 - DNA, 20 bp, Artificial Sequence
  Description of Artificial Sequence: Synthetic oligonucleotide
  Target: ATXN2; (-) strand; PAM type: NRG; PAM sequence: AAG
tcaccccaactcctttctct

SEQ ID NO: 16235 - DNA, 20 bp, Artificial Sequence
  Description of Artificial Sequence: Synthetic oligonucleotide
  Target: ATXN2; (-) strand; PAM type: NRG; PAM sequence: TGG
caagtttccactgccagctc

SEQ ID NO: 16236 - DNA, 20 bp, Artificial Sequence
  Description of Artificial Sequence: Synthetic oligonucleotide
  Target: ATXN2; (-) strand; PAM type: NRG; PAM sequence: CAG
agagaacaagtttccactgc

SEQ ID NO: 16237 - DNA, 20 bp, Artificial Sequence
  Description of Artificial Sequence: Synthetic oligonucleotide
  Target: ATXN2; (-) strand; PAM type: NRG; PAM sequence: AAG
gtgtcagtgaaaaagagaac

SEQ ID NO: 16238 - DNA, 20 bp, Artificial Sequence
  Description of Artificial Sequence: Synthetic oligonucleotide
  Target: ATXN2; (-) strand; PAM type: NRG; PAM sequence: GAG
gtgacagtgtcagtgaaaaa

SEQ ID NO: 16239 - DNA, 20 bp, Artificial Sequence
  Description of Artificial Sequence: Synthetic oligonucleotide
  Target: ATXN2; (-) strand; PAM type: NRG; PAM sequence: AAG
ctgtgacagtgtcagtgaaa

SEQ ID NO: 16240 - DNA, 20 bp, Artificial Sequence
  Description of Artificial Sequence: Synthetic oligonucleotide
  Target: ATXN2; (-) strand; PAM type: NRG; PAM sequence: CAG
gtcatccgctgtgacagtgt

SEQ ID NO: 16241 - DNA, 20 bp, Artificial Sequence
  Description of Artificial Sequence: Synthetic oligonucleotide
  Target: ATXN2; (-) strand; PAM type: NRG; PAM sequence: CAG
aagtctgtcatccgctgtga

SEQ ID NO: 16242 - DNA, 20 bp, Artificial Sequence
  Description of Artificial Sequence: Synthetic oligonucleotide
  Target: ATXN2; (-) strand; PAM type: NRG; PAM sequence: AAG
ccccccctcctccccgtaga

SEQ ID NO: 16243 - DNA, 20 bp, Artificial Sequence
  Description of Artificial Sequence: Synthetic oligonucleotide
  Target: ATXN2; (-) strand; PAM type: NRG; PAM sequence: TAG
tgatccccccctcctccccg

SEQ ID NO: 16244 - DNA, 20 bp, Artificial Sequence
  Description of Artificial Sequence: Synthetic oligonucleotide
  Target: ATXN2; (-) strand; PAM type: NRG; PAM sequence: GGG
gaaccgcttgttagtgttct

SEQ ID NO: 16245 - DNA, 20 bp, Artificial Sequence
  Description of Artificial Sequence: Synthetic oligonucleotide
  Target: ATXN2; (-) strand; PAM type: NRG; PAM sequence: TGG
agaaccgcttgttagtgttc

SEQ ID NO: 16246 - DNA, 20 bp, Artificial Sequence
  Description of Artificial Sequence: Synthetic oligonucleotide
  Target: ATXN2; (-) strand; PAM type: NRG; PAM sequence: TAG
tagatgggagaaccgcttgt

SEQ ID NO: 16247 - DNA, 20 bp, Artificial Sequence
  Description of Artificial Sequence: Synthetic oligonucleotide
  Target: ATXN2; (-) strand; PAM type: NRG; PAM sequence: GAG
tgtggactgacggtagatgg

SEQ ID NO: 16248 - DNA, 20 bp, Artificial Sequence
  Description of Artificial Sequence: Synthetic oligonucleotide
  Target: ATXN2; (-) strand; PAM type: NRG; PAM sequence: GGG
catgtggactgacggtagat

SEQ ID NO: 16249 - DNA, 20 bp, Artificial Sequence
  Description of Artificial Sequence: Synthetic oligonucleotide
  Target: ATXN2; (-) strand; PAM type: NRG; PAM sequence: TGG
ccatgtggactgacggtaga

SEQ ID NO: 16250 - DNA, 20 bp, Artificial Sequence
  Description of Artificial Sequence: Synthetic oligonucleotide
  Target: ATXN2; (-) strand; PAM type: NRG; PAM sequence: TAG
cctgccatgtggactgacgg

SEQ ID NO: 16251 - DNA, 20 bp, Artificial Sequence
  Description of Artificial Sequence: Synthetic oligonucleotide
  Target: ATXN2; (-) strand; PAM type: NRG; PAM sequence: CGG
agacctgccatgtggactga

SEQ ID NO: 16252 - DNA, 20 bp, Artificial Sequence
  Description of Artificial Sequence: Synthetic oligonucleotide
  Target: ATXN2; (-) strand; PAM type: NRG; PAM sequence: TGG
gacacagcagacctgccatg

SEQ ID NO: 16253 - DNA, 20 bp, Artificial Sequence
  Description of Artificial Sequence: Synthetic oligonucleotide
  Target: ATXN2; (-) strand; PAM type: NRG; PAM sequence: CAG
catctgtggtgtggacacag

SEQ ID NO: 16254 - DNA, 20 bp, Artificial Sequence
  Description of Artificial Sequence: Synthetic oligonucleotide
  Target: ATXN2; (-) strand; PAM type: NRG; PAM sequence: CAG
ggtcatctgtggtgtggaca

SEQ ID NO: 16255 - DNA, 20 bp, Artificial Sequence
  Description of Artificial Sequence: Synthetic oligonucleotide
  Target: ATXN2; (-) strand; PAM type: NRG; PAM sequence: TGG
agatgtggtcatctgtggtg

SEQ ID NO: 16256 - DNA, 20 bp, Artificial Sequence
  Description of Artificial Sequence: Synthetic oligonucleotide
  Target: ATXN2; (-) strand; PAM type: NRG; PAM sequence: TGG
ggattagatgtggtcatctg

SEQ ID NO: 16257 - DNA, 20 bp, Artificial Sequence
  Description of Artificial Sequence: Synthetic oligonucleotide
  Target: ATXN2; (-) strand; PAM type: NRG; PAM sequence: TGG
agtagaagcaggattagatg

SEQ ID NO: 16258 - DNA, 20 bp, Artificial Sequence
  Description of Artificial Sequence: Synthetic oligonucleotide
  Target: ATXN2; (-) strand; PAM type: NRG; PAM sequence: TAG
gctgagagtagaagcaggat

SEQ ID NO: 16259 - DNA, 20 bp, Artificial Sequence
  Description of Artificial Sequence: Synthetic oligonucleotide
  Target: ATXN2; (-) strand; PAM type: NRG; PAM sequence: AGG
ctaaagctgagagtagaagc

SEQ ID NO: 16260 - DNA, 20 bp, Artificial Sequence
  Description of Artificial Sequence: Synthetic oligonucleotide
  Target: ATXN2; (-) strand; PAM type: NRG; PAM sequence: CAG
cctaaagctgagagtagaag

SEQ ID NO: 16261 - DNA, 20 bp, Artificial Sequence
  Description of Artificial Sequence: Synthetic oligonucleotide
  Target: ATXN2; (-) strand; PAM type: NRG; PAM sequence: AAG
tgtcctaaagctgagagtag

SEQ ID NO: 16262 - DNA, 20 bp, Artificial Sequence
  Description of Artificial Sequence: Synthetic oligonucleotide
  Target: ATXN2; (-) strand; PAM type: NRG; PAM sequence: TAG
ttttgtcctaaagctgagag

SEQ ID NO: 16263 - DNA, 20 bp, Artificial Sequence
  Description of Artificial Sequence: Synthetic oligonucleotide
  Target: ATXN2; (-) strand; PAM type: NRG; PAM sequence: GAG
agcttttgtcctaaagctga

SEQ ID NO: 16264 - DNA, 20 bp, Artificial Sequence
  Description of Artificial Sequence: Synthetic oligonucleotide
  Target: ATXN2; (-) strand; PAM type: NRG; PAM sequence: GAG
agagcttttgtcctaaagct

SEQ ID NO: 16265 - DNA, 20 bp, Artificial Sequence
  Description of Artificial Sequence: Synthetic oligonucleotide
  Target: ATXN2; (-) strand; PAM type: NRG; PAM sequence: AAG
ctgacagagcttttgtccta

SEQ ID NO: 16266 - DNA, 20 bp, Artificial Sequence
  Description of Artificial Sequence: Synthetic oligonucleotide
  Target: ATXN2; (-) strand; PAM type: NRG; PAM sequence: GAG
ttcagcttgtgcctctgaca

SEQ ID NO: 16267 - DNA, 20 bp, Artificial Sequence
  Description of Artificial Sequence: Synthetic oligonucleotide
  Target: ATXN2; (-) strand; PAM type: NRG; PAM sequence: CAG
ccttcagcttgtgcctctga

SEQ ID NO: 16268 - DNA, 20 bp, Artificial Sequence
  Description of Artificial Sequence: Synthetic oligonucleotide
  Target: ATXN2; (-) strand; PAM type: NRG; PAM sequence: CAG
tttaaatcatttttgacctt

SEQ ID NO: 16269 - DNA, 20 bp, Artificial Sequence
  Description of Artificial Sequence: Synthetic oligonucleotide
  Target: ATXN2; (-) strand; PAM type: NRG; PAM sequence: AGG
cctttaaagaaattagtctg

SEQ ID NO: 16270 - DNA, 20 bp, Artificial Sequence
  Description of Artificial Sequence: Synthetic oligonucleotide
  Target: ATXN2; (-) strand; PAM type: NRG; PAM sequence: GAG
tcctttaaagaaattagtct

SEQ ID NO: 16271 - DNA, 20 bp, Artificial Sequence
  Description of Artificial Sequence: Synthetic oligonucleotide
  Target: ATXN2; (-) strand; PAM type: NRG; PAM sequence: TAG
cctgaatcctttaaagaaat

SEQ ID NO: 16272 - DNA, 20 bp, Artificial Sequence
  Description of Artificial Sequence: Synthetic oligonucleotide
  Target: ATXN2; (-) strand; PAM type: NRG; PAM sequence: AAG
ttttgaacctgaatccttta

SEQ ID NO: 16273 - DNA, 20 bp, Artificial Sequence
  Description of Artificial Sequence: Synthetic oligonucleotide
  Target: ATXN2; (-) strand; PAM type: NRG; PAM sequence: AAG
cactgaaataagcagtggtt

SEQ ID NO: 16274 - DNA, 20 bp, Artificial Sequence
  Description of Artificial Sequence: Synthetic oligonucleotide
  Target: ATXN2; (-) strand; PAM type: NRG; PAM sequence: TGG
cagtgcactgaaataagcag

SEQ ID NO: 16275 - DNA, 20 bp, Artificial Sequence
  Description of Artificial Sequence: Synthetic oligonucleotide
  Target: ATXN2; (-) strand; PAM type: NRG; PAM sequence: CAG
aaacagtgcactgaaataag

SEQ ID NO: 16276 - DNA, 20 bp, Artificial Sequence
  Description of Artificial Sequence: Synthetic oligonucleotide
  Target: ATXN2; (-) strand; PAM type: NRG; PAM sequence: AAG
ttgaaacagtgcactgaaat

SEQ ID NO: 16277 - DNA, 20 bp, Artificial Sequence
  Description of Artificial Sequence: Synthetic oligonucleotide
  Target: ATXN2; (-) strand; PAM type: NRG; PAM sequence: CAG
agcatgggtgttagttgaaa

SEQ ID NO: 16278 - DNA, 20 bp, Artificial Sequence
  Description of Artificial Sequence: Synthetic oligonucleotide
  Target: ATXN2; (-) strand; PAM type: NRG; PAM sequence: TAG
tacaaaaatagcatgggtgt

SEQ ID NO: 16279 - DNA, 20 bp, Artificial Sequence
  Description of Artificial Sequence: Synthetic oligonucleotide
  Target: ATXN2; (-) strand; PAM type: NRG; PAM sequence: GGG
tctgactacaaaaatagcat

SEQ ID NO: 16280 - DNA, 20 bp, Artificial Sequence
  Description of Artificial Sequence: Synthetic oligonucleotide
  Target: ATXN2; (-) strand; PAM type: NRG; PAM sequence: TGG
ttctgactacaaaaatagca

SEQ ID NO: 16281 - DNA, 20 bp, Artificial Sequence
  Description of Artificial Sequence: Synthetic oligonucleotide
  Target: ATXN2; (-) strand; PAM type: NRG; PAM sequence: TAG
gctgtttctgactacaaaaa

SEQ ID NO: 16282 - DNA, 20 bp, Artificial Sequence
  Description of Artificial Sequence: Synthetic oligonucleotide
  Target: ATXN2; (-) strand; PAM type: NRG; PAM sequence: TAG
taaattaggtagggtttgca

SEQ ID NO: 16283 - DNA, 20 bp, Artificial Sequence
  Description of Artificial Sequence: Synthetic oligonucleotide
  Target: ATXN2; (-) strand; PAM type: NRG; PAM sequence: GGG
ctcagactgtaaattaggta

SEQ ID NO: 16284 - DNA, 20 bp, Artificial Sequence
  Description of Artificial Sequence: Synthetic oligonucleotide
  Target: ATXN2; (-) strand; PAM type: NRG; PAM sequence: AGG
gctcagactgtaaattaggt

SEQ ID NO: 16285 - DNA, 20 bp, Artificial Sequence
  Description of Artificial Sequence: Synthetic oligonucleotide
  Target: ATXN2; (-) strand; PAM type: NRG; PAM sequence: TAG
ggctcagactgtaaattagg

SEQ ID NO: 16286 - DNA, 20 bp, Artificial Sequence
  Description of Artificial Sequence: Synthetic oligonucleotide
  Target: ATXN2; (-) strand; PAM type: NRG; PAM sequence: AGG
gctggctcagactgtaaatt

SEQ ID NO: 16287 - DNA, 20 bp, Artificial Sequence
  Description of Artificial Sequence: Synthetic oligonucleotide
  Target: ATXN2; (-) strand; PAM type: NRG; PAM sequence: TAG
tgctggctcagactgtaaat

SEQ ID NO: 16288 - DNA, 20 bp, Artificial Sequence
  Description of Artificial Sequence: Synthetic oligonucleotide
  Target: ATXN2; (-) strand; PAM type: NRG; PAM sequence: CAG
gacaagccagcatgctggct

SEQ ID NO: 16289 - DNA, 20 bp, Artificial Sequence
  Description of Artificial Sequence: Synthetic oligonucleotide
  Target: ATXN2; (-) strand; PAM type: NRG; PAM sequence: TGG
cagtagacaagccagcatgc

SEQ ID NO: 16290 - DNA, 20 bp, Artificial Sequence
  Description of Artificial Sequence: Synthetic oligonucleotide
  Target: ATXN2; (-) strand; PAM type: NRG; PAM sequence: CAG
cgaggatgcagtagacaagc

SEQ ID NO: 16291 - DNA, 20 bp, Artificial Sequence
  Description of Artificial Sequence: Synthetic oligonucleotide
  Target: ATXN2; (-) strand; PAM type: NRG; PAM sequence: AAG
gtcccgaggatgcagtagac

SEQ ID NO: 16292 - DNA, 20 bp, Artificial Sequence
  Description of Artificial Sequence: Synthetic oligonucleotide
  Target: ATXN2; (-) strand; PAM type: NRG; PAM sequence: TAG
tgactgtcccgaggatgcag

SEQ ID NO: 16293 - DNA, 20 bp, Artificial Sequence
  Description of Artificial Sequence: Synthetic oligonucleotide
  Target: ATXN2; (-) strand; PAM type: NRG; PAM sequence: CAG
aggtgactgtcccgaggatg

SEQ ID NO: 16294 - DNA, 20 bp, Artificial Sequence
  Description of Artificial Sequence: Synthetic oligonucleotide
  Target: ATXN2; (-) strand; PAM type: NRG; PAM sequence: AGG
agtggcaggtgactgtcccg

SEQ ID NO: 16295 - DNA, 20 bp, Artificial Sequence
  Description of Artificial Sequence: Synthetic oligonucleotide
  Target: ATXN2; (-) strand; PAM type: NRG; PAM sequence: GAG
cagtggcaggtgactgtccc

SEQ ID NO: 16296 - DNA, 20 bp, Artificial Sequence
  Description of Artificial Sequence: Synthetic oligonucleotide
  Target: ATXN2; (-) strand; PAM type: NRG; PAM sequence: AGG
gacagtggccactcagtggc

SEQ ID NO: 16297 - DNA, 20 bp, Artificial Sequence
  Description of Artificial Sequence: Synthetic oligonucleotide
  Target: ATXN2; (-) strand; PAM type: NRG; PAM sequence: CAG
ggacagtggccactcagtgg

SEQ ID NO: 16298 - DNA, 20 bp, Artificial Sequence
  Description of Artificial Sequence: Synthetic oligonucleotide
  Target: ATXN2; (-) strand; PAM type: NRG; PAM sequence: TGG
gaaggacagtggccactcag

SEQ ID NO: 16299 - DNA, 20 bp, Artificial Sequence
  Description of Artificial Sequence: Synthetic oligonucleotide
  Target: ATXN2; (-) strand; PAM type: NRG; PAM sequence: CAG
taggaaggacagtggccact

SEQ ID NO: 16300 - DNA, 20 bp, Artificial Sequence
  Description of Artificial Sequence: Synthetic oligonucleotide
  Target: ATXN2; (-) strand; PAM type: NRG; PAM sequence: TGG
ttgacatttaggaaggacag

SEQ ID NO: 16301 - DNA, 20 bp, Artificial Sequence
  Description of Artificial Sequence: Synthetic oligonucleotide
  Target: ATXN2; (-) strand; PAM type: NRG; PAM sequence: CAG
ttcttgacatttaggaagga

SEQ ID NO: 16302 - DNA, 20 bp, Artificial Sequence
  Description of Artificial Sequence: Synthetic oligonucleotide
  Target: ATXN2; (-) strand; PAM type: NRG; PAM sequence: AGG
tcacttcttgacatttagga

SEQ ID NO: 16303 - DNA, 20 bp, Artificial Sequence
  Description of Artificial Sequence: Synthetic oligonucleotide
  Target: ATXN2; (-) strand; PAM type: NRG; PAM sequence: AAG
ttcacttcttgacatttagg

SEQ ID NO: 16304 - DNA, 20 bp, Artificial Sequence
  Description of Artificial Sequence: Synthetic oligonucleotide
  Target: ATXN2; (-) strand; PAM type: NRG; PAM sequence: AGG
tacttcacttcttgacattt

SEQ ID NO: 16305 - DNA, 20 bp, Artificial Sequence
  Description of Artificial Sequence: Synthetic oligonucleotide
  Target: ATXN2; (-) strand; PAM type: NRG; PAM sequence: TAG
atacttcacttcttgacatt

SEQ ID NO: 16306 - DNA, 20 bp, Artificial Sequence
  Description of Artificial Sequence: Synthetic oligonucleotide
  Target: ATXN2; (-) strand; PAM type: NRG; PAM sequence: GGG
ttgcctgaatttccctgaaa

SEQ ID NO: 16307 - DNA, 20 bp, Artificial Sequence
  Description of Artificial Sequence: Synthetic oligonucleotide
  Target: ATXN2; (-) strand; PAM type: NRG; PAM sequence: AGG
attgcctgaatttccctgaa

SEQ ID NO: 16308 - DNA, 20 bp, Artificial Sequence
  Description of Artificial Sequence: Synthetic oligonucleotide
  Target: ATXN2; (-) strand; PAM type: NRG; PAM sequence: AAG
aattgcctgaatttccctga

SEQ ID NO: 16309 - DNA, 20 bp, Artificial Sequence
  Description of Artificial Sequence: Synthetic oligonucleotide
  Target: ATXN2; (-) strand; PAM type: NRG; PAM sequence: CAG
ttcttgccaccctcctattt

SEQ ID NO: 16310 - DNA, 20 bp, Artificial Sequence
  Description of Artificial Sequence: Synthetic oligonucleotide
  Target: ATXN2; (-) strand; PAM type: NRG; PAM sequence: TAG
ttattcgtaaggcaccagga

SEQ ID NO: 16311 - DNA, 20 bp, Artificial Sequence
  Description of Artificial Sequence: Synthetic oligonucleotide
  Target: ATXN2; (-) strand; PAM type: NRG; PAM sequence: AGG
ttttttattcgtaaggcacc

SEQ ID NO: 16312 - DNA, 20 bp, Artificial Sequence
  Description of Artificial Sequence: Synthetic oligonucleotide
  Target: ATXN2; (-) strand; PAM type: NRG; PAM sequence: CAG
gttttttattcgtaaggcac

SEQ ID NO: 16313 - DNA, 20 bp, Artificial Sequence
  Description of Artificial Sequence: Synthetic oligonucleotide
  Target: ATXN2; (-) strand; PAM type: NRG; PAM sequence: AGG
aatccagttttttattcgta

SEQ ID NO: 16314 - DNA, 20 bp, Artificial Sequence
  Description of Artificial Sequence: Synthetic oligonucleotide
  Target: ATXN2; (-) strand; PAM type: NRG; PAM sequence: AAG
gaatccagttttttattcgt

SEQ ID NO: 16315 - DNA, 20 bp, Artificial Sequence
  Description of Artificial Sequence: Synthetic oligonucleotide
  Target: ATXN2; (-) strand; PAM type: NRG; PAM sequence: CAG
agctgctgtaaaccagaatc

SEQ ID NO: 16316 - DNA, 20 bp, Artificial Sequence
  Description of Artificial Sequence: Synthetic oligonucleotide
  Target: ATXN2; (-) strand; PAM type: NRG; PAM sequence: CAG
actgtaaagctgctgtaaac

SEQ ID NO: 16317 - DNA, 20 bp, Artificial Sequence
  Description of Artificial Sequence: Synthetic oligonucleotide
  Target: ATXN2; (-) strand; PAM type: NRG; PAM sequence: AAG
ttaatttaactatcactgta

SEQ ID NO: 16318 - DNA, 20 bp, Artificial Sequence
  Description of Artificial Sequence: Synthetic oligonucleotide
  Target: ATXN2; (-) strand; PAM type: NRG; PAM sequence: CAG
gcttgctcttcccctagccc

SEQ ID NO: 16319 - DNA, 20 bp, Artificial Sequence
  Description of Artificial Sequence: Synthetic oligonucleotide
  Target: ATXN2; (-) strand; PAM type: NRG; PAM sequence: TAG
ctttttgcttgctcttcccc

SEQ ID NO: 16320 - DNA, 20 bp, Artificial Sequence
  Description of Artificial Sequence: Synthetic oligonucleotide
  Target: ATXN2; (-) strand; PAM type: NRG; PAM sequence: GAG
atttactagaaagggcctag

SEQ ID NO: 16321 - DNA, 20 bp, Artificial Sequence
  Description of Artificial Sequence: Synthetic oligonucleotide
  Target: ATXN2; (-) strand; PAM type: NRG; PAM sequence: AGG
ggatttactagaaagggcct

SEQ ID NO: 16322 - DNA, 20 bp, Artificial Sequence
  Description of Artificial Sequence: Synthetic oligonucleotide
  Target: ATXN2; (-) strand; PAM type: NRG; PAM sequence: TAG
aggatttactagaaagggcc

SEQ ID NO: 16323 - DNA, 20 bp, Artificial Sequence
  Description of Artificial Sequence: Synthetic oligonucleotide
  Target: ATXN2; (-) strand; PAM type: NRG; PAM sequence: GGG
gctgaaggatttactagaaa

SEQ ID NO: 16324 - DNA, 20 bp, Artificial Sequence
  Description of Artificial Sequence: Synthetic oligonucleotide
  Target: ATXN2; (-) strand; PAM type: NRG; PAM sequence: AGG
tgctgaaggatttactagaa

SEQ ID NO: 16325 - DNA, 20 bp, Artificial Sequence
  Description of Artificial Sequence: Synthetic oligonucleotide
  Target: ATXN2; (-) strand; PAM type: NRG; PAM sequence: AAG
ttgctgaaggatttactaga

SEQ ID NO: 16326 - DNA, 20 bp, Artificial Sequence
  Description of Artificial Sequence: Synthetic oligonucleotide
  Target: ATXN2; (-) strand; PAM type: NRG; PAM sequence: TAG
cttgttgctgaaggatttac

SEQ ID NO: 16327 - DNA, 20 bp, Artificial Sequence
  Description of Artificial Sequence: Synthetic oligonucleotide
  Target: ATXN2; (-) strand; PAM type: NRG; PAM sequence: AGG
caagccagccttgttgctga

SEQ ID NO: 16328 - DNA, 20 bp, Artificial Sequence
  Description of Artificial Sequence: Synthetic oligonucleotide
  Target: ATXN2; (-) strand; PAM type: NRG; PAM sequence: AAG
ccaagccagccttgttgctg

SEQ ID NO: 16329 - DNA, 20 bp, Artificial Sequence
  Description of Artificial Sequence: Synthetic oligonucleotide
  Target: ATXN2; (-) strand; PAM type: NRG; PAM sequence: CAG
atgcttggagggcaccaagc

SEQ ID NO: 16330 - DNA, 20 bp, Artificial Sequence
  Description of Artificial Sequence: Synthetic oligonucleotide
  Target: ATXN2; (-) strand; PAM type: NRG; PAM sequence: AAG
ttagatgcttggagggcacc

SEQ ID NO: 16331 - DNA, 20 bp, Artificial Sequence
  Description of Artificial Sequence: Synthetic oligonucleotide
  Target: ATXN2; (-) strand; PAM type: NRG; PAM sequence: GGG
taagccattagatgcttgga

SEQ ID NO: 16332 - DNA, 20 bp, Artificial Sequence
  Description of Artificial Sequence: Synthetic oligonucleotide
  Target: ATXN2; (-) strand; PAM type: NRG; PAM sequence: AGG
ataagccattagatgcttgg

SEQ ID NO: 16333 - DNA, 20 bp, Artificial Sequence
  Description of Artificial Sequence: Synthetic oligonucleotide
  Target: ATXN2; (-) strand; PAM type: NRG; PAM sequence: GAG
aataagccattagatgcttg

SEQ ID NO: 16334 - DNA, 20 bp, Artificial Sequence
  Description of Artificial Sequence: Synthetic oligonucleotide
  Target: ATXN2; (-) strand; PAM type: NRG; PAM sequence: TGG
ttaataagccattagatgct

SEQ ID NO: 16335 - DNA, 20 bp, Artificial Sequence
  Description of Artificial Sequence: Synthetic oligonucleotide
  Target: ATXN2; (-) strand; PAM type: NRG; PAM sequence: TAG
gggataatttaataagccat

SEQ ID NO: 16336 - DNA, 20 bp, Artificial Sequence
  Description of Artificial Sequence: Synthetic oligonucleotide
  Target: ATXN2; (-) strand; PAM type: NRG; PAM sequence: AAG
cacttgtgggataatttaat

SEQ ID NO: 16337 - DNA, 20 bp, Artificial Sequence
  Description of Artificial Sequence: Synthetic oligonucleotide
  Target: ATXN2; (-) strand; PAM type: NRG; PAM sequence: GGG
ggagcctaaaacccacttgt

SEQ ID NO: 16338 - DNA, 20 bp, Artificial Sequence
  Description of Artificial Sequence: Synthetic oligonucleotide
  Target: ATXN2; (-) strand; PAM type: NRG; PAM sequence: TGG
aggagcctaaaacccacttg

SEQ ID NO: 16339 - DNA, 20 bp, Artificial Sequence
  Description of Artificial Sequence: Synthetic oligonucleotide
  Target: ATXN2; (-) strand; PAM type: NRG; PAM sequence: GAG
tccattttggctcaaaaaag

SEQ ID NO: 16340 - DNA, 20 bp, Artificial Sequence
  Description of Artificial Sequence: Synthetic oligonucleotide
  Target: ATXN2; (-) strand; PAM type: NRG; PAM sequence: AGG
cttccattttggctcaaaaa

SEQ ID NO: 16341 - DNA, 20 bp, Artificial Sequence
  Description of Artificial Sequence: Synthetic oligonucleotide
  Target: ATXN2; (-) strand; PAM type: NRG; PAM sequence: AAG
gcttccattttggctcaaaa

SEQ ID NO: 16342 - DNA, 20 bp, Artificial Sequence
  Description of Artificial Sequence: Synthetic oligonucleotide
  Target: ATXN2; (-) strand; PAM type: NRG; PAM sequence: TGG
cagattcccagcttccattt

SEQ ID NO: 16343 - DNA, 20 bp, Artificial Sequence
  Description of Artificial Sequence: Synthetic oligonucleotide
  Target: ATXN2; (-) strand; PAM type: NRG; PAM sequence: CAG
tagttatggcaccagattcc

SEQ ID NO: 16344 - DNA, 20 bp, Artificial Sequence
  Description of Artificial Sequence: Synthetic oligonucleotide
  Target: ATXN2; (-) strand; PAM type: NRG; PAM sequence: CAG
tttctcattagttatggcac

SEQ ID NO: 16345 - DNA, 20 bp, Artificial Sequence
  Description of Artificial Sequence: Synthetic oligonucleotide
  Target: ATXN2; (-) strand; PAM type: NRG; PAM sequence: TGG
aaggagtttctcattagtta

SEQ ID NO: 16346 - DNA, 20 bp, Artificial Sequence
  Description of Artificial Sequence: Synthetic oligonucleotide
  Target: ATXN2; (-) strand; PAM type: NRG; PAM sequence: TAG
ctattaaaggagtttctcat

SEQ ID NO: 16347 - DNA, 20 bp, Artificial Sequence
  Description of Artificial Sequence: Synthetic oligonucleotide
  Target: ATXN2; (-) strand; PAM type: NRG; PAM sequence: GAG
ctgattgtgggctattaaag

SEQ ID NO: 16348 - DNA, 20 bp, Artificial Sequence
  Description of Artificial Sequence: Synthetic oligonucleotide
  Target: ATXN2; (-) strand; PAM type: NRG; PAM sequence: AGG
cactgattgtgggctattaa

SEQ ID NO: 16349 - DNA, 20 bp, Artificial Sequence
  Description of Artificial Sequence: Synthetic oligonucleotide
  Target: ATXN2; (-) strand; PAM type: NRG; PAM sequence: AAG
acactgattgtgggctatta

SEQ ID NO: 16350 - DNA, 20 bp, Artificial Sequence
  Description of Artificial Sequence: Synthetic oligonucleotide
  Target: ATXN2; (-) strand; PAM type: NRG; PAM sequence: GGG
tagaacagaacactgattgt

SEQ ID NO: 16351 - DNA, 20 bp, Artificial Sequence
  Description of Artificial Sequence: Synthetic oligonucleotide
  Target: ATXN2; (-) strand; PAM type: NRG; PAM sequence: TGG
ctagaacagaacactgattg

SEQ ID NO: 16352 - DNA, 20 bp, Artificial Sequence
  Description of Artificial Sequence: Synthetic oligonucleotide
  Target: ATXN2; (-) strand; PAM type: NRG; PAM sequence: CAG
gaagcagtagccagctagaa

SEQ ID NO: 16353 - DNA, 20 bp, Artificial Sequence
  Description of Artificial Sequence: Synthetic oligonucleotide
  Target: ATXN2; (-) strand; PAM type: NRG; PAM sequence: TAG
ccagtgaagcagtagccagc

SEQ ID NO: 16354 - DNA, 20 bp, Artificial Sequence
  Description of Artificial Sequence: Synthetic oligonucleotide
  Target: ATXN2; (-) strand; PAM type: NRG; PAM sequence: CAG
caatccagtgaagcagtagc

SEQ ID NO: 16355 - DNA, 20 bp, Artificial Sequence
  Description of Artificial Sequence: Synthetic oligonucleotide
  Target: ATXN2; (-) strand; PAM type: NRG; PAM sequence: TAG
ttctcaatccagtgaagcag

SEQ ID NO: 16356 - DNA, 20 bp, Artificial Sequence
  Description of Artificial Sequence: Synthetic oligonucleotide
  Target: ATXN2; (-) strand; PAM type: NRG; PAM sequence: CAG
agattctcaatccagtgaag

SEQ ID NO: 16357 - DNA, 20 bp, Artificial Sequence
  Description of Artificial Sequence: Synthetic oligonucleotide
  Target: ATXN2; (-) strand; PAM type: NRG; PAM sequence: AAG
gatagattctcaatccagtg

SEQ ID NO: 16358 - DNA, 20 bp, Artificial Sequence
  Description of Artificial Sequence: Synthetic oligonucleotide
  Target: ATXN2; (-) strand; PAM type: NRG; PAM sequence: CAG
agatagatagattctcaatc

SEQ ID NO: 16359 - DNA, 20 bp, Artificial Sequence
  Description of Artificial Sequence: Synthetic oligonucleotide
  Target: ATXN2; (-) strand; PAM type: NRG; PAM sequence: TAG
catgtgtgcaaggagataga

SEQ ID NO: 16360 - DNA, 20 bp, Artificial Sequence
  Description of Artificial Sequence: Synthetic oligonucleotide
  Target: ATXN2; (-) strand; PAM type: NRG; PAM sequence: TAG
tgcccatgtgtgcaaggaga

SEQ ID NO: 16361 - DNA, 20 bp, Artificial Sequence
  Description of Artificial Sequence: Synthetic oligonucleotide
  Target: ATXN2; (-) strand; PAM type: NRG; PAM sequence: GAG
tgtgtgcccatgtgtgcaag

SEQ ID NO: 16362 - DNA, 20 bp, Artificial Sequence
  Description of Artificial Sequence: Synthetic oligonucleotide
  Target: ATXN2; (-) strand; PAM type: NRG; PAM sequence: AGG
tgtgtgtgcccatgtgtgca

SEQ ID NO: 16363 - DNA, 20 bp, Artificial Sequence
  Description of Artificial Sequence: Synthetic oligonucleotide
  Target: ATXN2; (-) strand; PAM type: NRG; PAM sequence: AAG
ttgtgtgtgcccatgtgtgc

SEQ ID NO: 16364 - DNA, 20 bp, Artificial Sequence
  Description of Artificial Sequence: Synthetic oligonucleotide
  Target: ATXN2; (-) strand; PAM type: NRG; PAM sequence: GAG
caggacctccctggatggtg

SEQ ID NO: 16365 - DNA, 20 bp, Artificial Sequence
  Description of Artificial Sequence: Synthetic oligonucleotide
  Target: ATXN2; (-) strand; PAM type: NRG; PAM sequence: TGG
ttcaggacctccctggatgg

SEQ ID NO: 16366 - DNA, 20 bp, Artificial Sequence
  Description of Artificial Sequence: Synthetic oligonucleotide
  Target: ATXN2; (-) strand; PAM type: NRG; PAM sequence: TGG
gacttcaggacctccctgga

SEQ ID NO: 16367 - DNA, 20 bp, Artificial Sequence
  Description of Artificial Sequence: Synthetic oligonucleotide
  Target: ATXN2; (-) strand; PAM type: NRG; PAM sequence: TGG
atttgacttcaggacctccc

SEQ ID NO: 16368 - DNA, 20 bp, Artificial Sequence
  Description of Artificial Sequence: Synthetic oligonucleotide
  Target: ATXN2; (-) strand; PAM type: NRG; PAM sequence: AGG
atagatagagatttgacttc

SEQ ID NO: 16369 - DNA, 20 bp, Artificial Sequence
  Description of Artificial Sequence: Synthetic oligonucleotide
  Target: ATXN2; (-) strand; PAM type: NRG; PAM sequence: CAG
tatagatagagatttgactt

SEQ ID NO: 16370 - DNA, 20 bp, Artificial Sequence
  Description of Artificial Sequence: Synthetic oligonucleotide
  Target: ATXN2; (-) strand; PAM type: NRG; PAM sequence: GAG
ttgtatcacttgtatagata

SEQ ID NO: 16371 - DNA, 20 bp, Artificial Sequence
  Description of Artificial Sequence: Synthetic oligonucleotide
  Target: ATXN2; (-) strand; PAM type: NRG; PAM sequence: TAG
aattgtatcacttgtataga

SEQ ID NO: 16372 - DNA, 20 bp, Artificial Sequence
  Description of Artificial Sequence: Synthetic oligonucleotide
  Target: ATXN2; (-) strand; PAM type: NRG; PAM sequence: TAG
tatgaattgtatcacttgta

SEQ ID NO: 16373 - DNA, 20 bp, Artificial Sequence
  Description of Artificial Sequence: Synthetic oligonucleotide
  Target: ATXN2; (-) strand; PAM type: NRG; PAM sequence: CAG
agacaggttctgggaggagc

SEQ ID NO: 16374 - DNA, 20 bp, Artificial Sequence
  Description of Artificial Sequence: Synthetic oligonucleotide
  Target: ATXN2; (-) strand; PAM type: NRG; PAM sequence: GAG
ctccagacaggttctgggag

SEQ ID NO: 16375 - DNA, 20 bp, Artificial Sequence
  Description of Artificial Sequence: Synthetic oligonucleotide
  Target: ATXN2; (-) strand; PAM type: NRG; PAM sequence: AGG
gcctccagacaggttctggg

SEQ ID NO: 16376 - DNA, 20 bp, Artificial Sequence
  Description of Artificial Sequence: Synthetic oligonucleotide
  Target: ATXN2; (-) strand; PAM type: NRG; PAM sequence: GAG
agcctccagacaggttctgg

SEQ ID NO: 16377 - DNA, 20 bp, Artificial Sequence
  Description of Artificial Sequence: Synthetic oligonucleotide
  Target: ATXN2; (-) strand; PAM type: NRG; PAM sequence: GGG
tgagcctccagacaggttct

SEQ ID NO: 16378 - DNA, 20 bp, Artificial Sequence
  Description of Artificial Sequence: Synthetic oligonucleotide
  Target: ATXN2; (-) strand; PAM type: NRG; PAM sequence: TGG
ctgagcctccagacaggttc

SEQ ID NO: 16379 - DNA, 20 bp, Artificial Sequence
  Description of Artificial Sequence: Synthetic oligonucleotide
  Target: ATXN2; (-) strand; PAM type: NRG; PAM sequence: AGG
ccgtttctgagcctccagac

SEQ ID NO: 16380 - DNA, 20 bp, Artificial Sequence
  Description of Artificial Sequence: Synthetic oligonucleotide
  Target: ATXN2; (-) strand; PAM type: NRG; PAM sequence: CAG
cccgtttctgagcctccaga

SEQ ID NO: 16381 - DNA, 20 bp, Artificial Sequence
  Description of Artificial Sequence: Synthetic oligonucleotide
  Target: ATXN2; (-) strand; PAM type: NRG; PAM sequence: CAG
tgcccccgtttctgagcctc

SEQ ID NO: 16382 - DNA, 20 bp, Artificial Sequence
  Description of Artificial Sequence: Synthetic oligonucleotide
  Target: ATXN2; (-) strand; PAM type: NRG; PAM sequence: GAG
ctgtcactgcccccgtttct

SEQ ID NO: 16383 - DNA, 20 bp, Artificial Sequence
  Description of Artificial Sequence: Synthetic oligonucleotide
  Target: ATXN2; (-) strand; PAM type: NRG; PAM sequence: CAG
gctctgctggcacccaagag

SEQ ID NO: 16384 - DNA, 20 bp, Artificial Sequence
  Description of Artificial Sequence: Synthetic oligonucleotide
  Target: ATXN2; (-) strand; PAM type: NRG; PAM sequence: GAG
atggctctgctggcacccaa

SEQ ID NO: 16385 - DNA, 20 bp, Artificial Sequence
  Description of Artificial Sequence: Synthetic oligonucleotide
  Target: ATXN2; (-) strand; PAM type: NRG; PAM sequence: AAG
gaatggctctgctggcaccc

SEQ ID NO: 16386 - DNA, 20 bp, Artificial Sequence
  Description of Artificial Sequence: Synthetic oligonucleotide
  Target: ATXN2; (-) strand; PAM type: NRG; PAM sequence: TGG
gttgtactgaatggctctgc

SEQ ID NO: 16387 - DNA, 20 bp, Artificial Sequence
  Description of Artificial Sequence: Synthetic oligonucleotide
  Target: ATXN2; (-) strand; PAM type: NRG; PAM sequence: TGG
agcctgggggttgtactgaa

SEQ ID NO: 16388 - DNA, 20 bp, Artificial Sequence
  Description of Artificial Sequence: Synthetic oligonucleotide
  Target: ATXN2; (-) strand; PAM type: NRG; PAM sequence: GGG
agccactgctgtgagcctgg

SEQ ID NO: 16389 - DNA, 20 bp, Artificial Sequence
  Description of Artificial Sequence: Synthetic oligonucleotide
  Target: ATXN2; (-) strand; PAM type: NRG; PAM sequence: GGG
aagccactgctgtgagcctg

SEQ ID NO: 16390 - DNA, 20 bp, Artificial Sequence
  Description of Artificial Sequence: Synthetic oligonucleotide
  Target: ATXN2; (-) strand; PAM type: NRG; PAM sequence: GGG
gaagccactgctgtgagcct

SEQ ID NO: 16391 - DNA, 20 bp, Artificial Sequence
  Description of Artificial Sequence: Synthetic oligonucleotide
  Target: ATXN2; (-) strand; PAM type: NRG; PAM sequence: TGG
agaagccactgctgtgagcc

SEQ ID NO: 16392 - DNA, 20 bp, Artificial Sequence
  Description of Artificial Sequence: Synthetic oligonucleotide
  Target: ATXN2; (-) strand; PAM type: NRG; PAM sequence: GAG
ttcctagaagccactgctgt

SEQ ID NO: 16393 - DNA, 20 bp, Artificial Sequence
  Description of Artificial Sequence: Synthetic oligonucleotide
  Target: ATXN2; (-) strand; PAM type: NRG; PAM sequence: AAG
ctaaactcccagtttcctag

SEQ ID NO: 16394 - DNA, 20 bp, Artificial Sequence
  Description of Artificial Sequence: Synthetic oligonucleotide
  Target: ATXN2; (-) strand; PAM type: NRG; PAM sequence: TAG
gatctaaactcccagtttcc

SEQ ID NO: 16395 - DNA, 20 bp, Artificial Sequence
  Description of Artificial Sequence: Synthetic oligonucleotide
  Target: ATXN2; (-) strand; PAM type: NRG; PAM sequence: CAG
gtaaagctgatctaaactcc

SEQ ID NO: 16396 - DNA, 20 bp, Artificial Sequence
  Description of Artificial Sequence: Synthetic oligonucleotide
  Target: ATXN2; (-) strand; PAM type: NRG; PAM sequence: AAG
ctctgatcgatgtatctgta

SEQ ID NO: 16397 - DNA, 20 bp, Artificial Sequence
  Description of Artificial Sequence: Synthetic oligonucleotide
  Target: ATXN2; (-) strand; PAM type: NRG; PAM sequence: TAG
tttaggctgaggtttcattt

SEQ ID NO: 16398 - DNA, 20 bp, Artificial Sequence
  Description of Artificial Sequence: Synthetic oligonucleotide
  Target: ATXN2; (-) strand; PAM type: NRG; PAM sequence: AGG
gtcctatgagttttaggctg

SEQ ID NO: 16399 - DNA, 20 bp, Artificial Sequence
  Description of Artificial Sequence: Synthetic oligonucleotide
  Target: ATXN2; (-) strand; PAM type: NRG; PAM sequence: GAG
agtcctatgagttttaggct

SEQ ID NO: 16400 - DNA, 20 bp, Artificial Sequence
  Description of Artificial Sequence: Synthetic oligonucleotide
  Target: ATXN2; (-) strand; PAM type: NRG; PAM sequence: AGG
cagtcagtcctatgagtttt

SEQ ID NO: 16401 - DNA, 20 bp, Artificial Sequence
  Description of Artificial Sequence: Synthetic oligonucleotide
  Target: ATXN2; (-) strand; PAM type: NRG; PAM sequence: TAG
gcagtcagtcctatgagttt

SEQ ID NO: 16402 - DNA, 20 bp, Artificial Sequence
  Description of Artificial Sequence: Synthetic oligonucleotide
  Target: ATXN2; (-) strand; PAM type: NRG; PAM sequence: GAG
tcccaggcagtcagtcctat

SEQ ID NO: 16403 - DNA, 20 bp, Artificial Sequence
  Description of Artificial Sequence: Synthetic oligonucleotide
  Target: ATXN2; (-) strand; PAM type: NRG; PAM sequence: CAG
taaccctcctcccaggcagt

SEQ ID NO: 16404 - DNA, 20 bp, Artificial Sequence
  Description of Artificial Sequence: Synthetic oligonucleotide
  Target: ATXN2; (-) strand; PAM type: NRG; PAM sequence: CAG
gacctaaccctcctcccagg

SEQ ID NO: 16405 - DNA, 20 bp, Artificial Sequence
  Description of Artificial Sequence: Synthetic oligonucleotide
  Target: ATXN2; (-) strand; PAM type: NRG; PAM sequence: AGG
gcagacctaaccctcctccc

SEQ ID NO: 16406 - DNA, 20 bp, Artificial Sequence
  Description of Artificial Sequence: Synthetic oligonucleotide
  Target: ATXN2; (-) strand; PAM type: NRG; PAM sequence: CAG
agcagacctaaccctcctcc

SEQ ID NO: 16407 - DNA, 20 bp, Artificial Sequence
  Description of Artificial Sequence: Synthetic oligonucleotide
  Target: ATXN2; (-) strand; PAM type: NRG; PAM sequence: CAG
ctaagtataagtggaagaag

SEQ ID NO: 16408 - DNA, 20 bp, Artificial Sequence
  Description of Artificial Sequence: Synthetic oligonucleotide
  Target: ATXN2; (-) strand; PAM type: NRG; PAM sequence: AAG
agactaagtataagtggaag

SEQ ID NO: 16409 - DNA, 20 bp, Artificial Sequence
  Description of Artificial Sequence: Synthetic oligonucleotide
  Target: ATXN2; (-) strand; PAM type: NRG; PAM sequence: AAG
cagagactaagtataagtgg

SEQ ID NO: 16410 - DNA, 20 bp, Artificial Sequence
  Description of Artificial Sequence: Synthetic oligonucleotide
  Target: ATXN2; (-) strand; PAM type: NRG; PAM sequence: TGG
gcacagagactaagtataag

SEQ ID NO: 16411 - DNA, 20 bp, Artificial Sequence
  Description of Artificial Sequence: Synthetic oligonucleotide
  Target: ATXN2; (-) strand; PAM type: NRG; PAM sequence: AAG
ggagcacagagactaagtat

SEQ ID NO: 16412 - DNA, 20 bp, Artificial Sequence
  Description of Artificial Sequence: Synthetic oligonucleotide
  Target: ATXN2; (-) strand; PAM type: NRG; PAM sequence: AAG
cctcttggagcacagagact

SEQ ID NO: 16413 - DNA, 20 bp, Artificial Sequence
  Description of Artificial Sequence: Synthetic oligonucleotide
  Target: ATXN2; (-) strand; PAM type: NRG; PAM sequence: GAG
atttgacctcttggagcaca

SEQ ID NO: 16414 - DNA, 20 bp, Artificial Sequence
  Description of Artificial Sequence: Synthetic oligonucleotide
  Target: ATXN2; (-) strand; PAM type: NRG; PAM sequence: CAG
aaatttgacctcttggagca

SEQ ID NO: 16415 - DNA, 20 bp, Artificial Sequence
  Description of Artificial Sequence: Synthetic oligonucleotide
  Target: ATXN2; (-) strand; PAM type: NRG; PAM sequence: GAG
agcaaaaatttgacctcttg

SEQ ID NO: 16416 - DNA, 20 bp, Artificial Sequence
  Description of Artificial Sequence: Synthetic oligonucleotide
  Target: ATXN2; (-) strand; PAM type: NRG; PAM sequence: TGG
gaagcaaaaatttgacctct

SEQ ID NO: 16417 - DNA, 20 bp, Artificial Sequence
  Description of Artificial Sequence: Synthetic oligonucleotide
  Target: ATXN2; (-) strand; PAM type: NRG; PAM sequence: AAG
agaccccaaggaaattctag

SEQ ID NO: 16418 - DNA, 20 bp, Artificial Sequence
  Description of Artificial Sequence: Synthetic oligonucleotide
  Target: ATXN2; (-) strand; PAM type: NRG; PAM sequence: TAG
gaaagaccccaaggaaattc

SEQ ID NO: 16419 - DNA, 20 bp, Artificial Sequence
  Description of Artificial Sequence: Synthetic oligonucleotide
  Target: ATXN2; (-) strand; PAM type: NRG; PAM sequence: AGG
ccaccctctgaaagacccca

SEQ ID NO: 16420 - DNA, 20 bp, Artificial Sequence
  Description of Artificial Sequence: Synthetic oligonucleotide
  Target: ATXN2; (-) strand; PAM type: NRG; PAM sequence: AAG
cccaccctctgaaagacccc

SEQ ID NO: 16421 - DNA, 20 bp, Artificial Sequence
  Description of Artificial Sequence: Synthetic oligonucleotide
  Target: ATXN2; (-) strand; PAM type: NRG; PAM sequence: AAG
tttgttcccccaccctctga

SEQ ID NO: 16422 - DNA, 20 bp, Artificial Sequence
  Description of Artificial Sequence: Synthetic oligonucleotide
  Target: ATXN2; (-) strand; PAM type: NRG; PAM sequence: GGG
aaaaaaagaaaagtgcatag

SEQ ID NO: 16423 - DNA, 20 bp, Artificial Sequence
  Description of Artificial Sequence: Synthetic oligonucleotide
  Target: ATXN2; (-) strand; PAM type: NRG; PAM sequence: GGG
aaaaaaaagaaaagtgcata

SEQ ID NO: 16424 - DNA, 20 bp, Artificial Sequence
  Description of Artificial Sequence: Synthetic oligonucleotide
  Target: ATXN2; (-) strand; PAM type: NRG; PAM sequence: AGG
aaaaaaaaagaaaagtgcat

SEQ ID NO: 16425 - DNA, 20 bp, Artificial Sequence
  Description of Artificial Sequence: Synthetic oligonucleotide
  Target: ATXN2; (-) strand; PAM type: NRG; PAM sequence: TAG
aaaaaaaaaagaaaagtgca

SEQ ID NO: 16426 - DNA, 20 bp, Artificial Sequence
  Description of Artificial Sequence: Synthetic oligonucleotide
  Target: ATXN2; (-) strand; PAM type: NRG; PAM sequence: AAG
ctcaaaaaaaaaaaaaagaa

SEQ ID NO: 16427 - DNA, 20 bp, Artificial Sequence
  Description of Artificial Sequence: Synthetic oligonucleotide
  Target: ATXN2; (-) strand; PAM type: NRG; PAM sequence: AAG
tccatctcaaaaaaaaaaaa

SEQ ID NO: 16428 - DNA, 20 bp, Artificial Sequence
  Description of Artificial Sequence: Synthetic oligonucleotide
  Target: ATXN2; (-) strand; PAM type: NRG; PAM sequence: GAG
cactccagcccggttgacaa

SEQ ID NO: 16429 - DNA, 20 bp, Artificial Sequence
  Description of Artificial Sequence: Synthetic oligonucleotide
  Target: ATXN2; (-) strand; PAM type: NRG; PAM sequence: AAG
tgcactccagcccggttgac

SEQ ID NO: 16430 - DNA, 20 bp, Artificial Sequence
  Description of Artificial Sequence: Synthetic oligonucleotide
  Target: ATXN2; (-) strand; PAM type: NRG; PAM sequence: CGG
tgcaccactgcactccagcc

SEQ ID NO: 16431 - DNA, 20 bp, Artificial Sequence
  Description of Artificial Sequence: Synthetic oligonucleotide
  Target: ATXN2; (-) strand; PAM type: NRG; PAM sequence: CAG
aagattgcaccactgcactc

SEQ ID NO: 16432 - DNA, 20 bp, Artificial Sequence
  Description of Artificial Sequence: Synthetic oligonucleotide
  Target: ATXN2; (-) strand; PAM type: NRG; PAM sequence: AAG
ggtggaggttgcagtgagcc

SEQ ID NO: 16433 - DNA, 20 bp, Artificial Sequence
  Description of Artificial Sequence: Synthetic oligonucleotide
  Target: ATXN2; (-) strand; PAM type: NRG; PAM sequence: GAG
aggaaggtggaggttgcagt

SEQ ID NO: 16434 - DNA, 20 bp, Artificial Sequence
  Description of Artificial Sequence: Synthetic oligonucleotide
  Target: ATXN2; (-) strand; PAM type: NRG; PAM sequence: CAG
aaccaggaaggtggaggttg

SEQ ID NO: 16435 - DNA, 20 bp, Artificial Sequence
  Description of Artificial Sequence: Synthetic oligonucleotide
  Target: ATXN2; (-) strand; PAM type: NRG; PAM sequence: AGG
cgcttgaaccaggaaggtgg

SEQ ID NO: 16436 - DNA, 20 bp, Artificial Sequence
  Description of Artificial Sequence: Synthetic oligonucleotide
  Target: ATXN2; (-) strand; PAM type: NRG; PAM sequence: GAG
tcgcttgaaccaggaaggtg

SEQ ID NO: 16437 - DNA, 20 bp, Artificial Sequence
  Description of Artificial Sequence: Synthetic oligonucleotide
  Target: ATXN2; (-) strand; PAM type: NRG; PAM sequence: TGG
aatcgcttgaaccaggaagg

SEQ ID NO: 16438 - DNA, 20 bp, Artificial Sequence
  Description of Artificial Sequence: Synthetic oligonucleotide
  Target: ATXN2; (-) strand; PAM type: NRG; PAM sequence: AGG
cagaatcgcttgaaccagga

SEQ ID NO: 16439 - DNA, 20 bp, Artificial Sequence
  Description of Artificial Sequence: Synthetic oligonucleotide
  Target: ATXN2; (-) strand; PAM type: NRG; PAM sequence: AAG
gcagaatcgcttgaaccagg

SEQ ID NO: 16440 - DNA, 20 bp, Artificial Sequence
  Description of Artificial Sequence: Synthetic oligonucleotide
  Target: ATXN2; (-) strand; PAM type: NRG; PAM sequence: AGG
gaggcagaatcgcttgaacc

SEQ ID NO: 16441 - DNA, 20 bp, Artificial Sequence
  Description of Artificial Sequence: Synthetic oligonucleotide
  Target: ATXN2; (-) strand; PAM type: NRG; PAM sequence: CAG
cgaggcagaatcgcttgaac

SEQ ID NO: 16442 - DNA, 20 bp, Artificial Sequence
  Description of Artificial Sequence: Synthetic oligonucleotide
  Target: ATXN2; (-) strand; PAM type: NRG; PAM sequence: CAG
agctacttgagaggtcgagg

SEQ ID NO: 16443 - DNA, 20 bp, Artificial Sequence
  Description of Artificial Sequence: Synthetic oligonucleotide
  Target: ATXN2; (-) strand; PAM type: NRG; PAM sequence: AGG
cccagctacttgagaggtcg

SEQ ID NO: 16444 - DNA, 20 bp, Artificial Sequence
  Description of Artificial Sequence: Synthetic oligonucleotide
  Target: ATXN2; (-) strand; PAM type: NRG; PAM sequence: GAG
tcccagctacttgagaggtc

SEQ ID NO: 16445 - DNA, 20 bp, Artificial Sequence
  Description of Artificial Sequence: Synthetic oligonucleotide
  Target: ATXN2; (-) strand; PAM type: NRG; PAM sequence: AGG
tgtaatcccagctacttgag

SEQ ID NO: 16446 - DNA, 20 bp, Artificial Sequence
  Description of Artificial Sequence: Synthetic oligonucleotide
  Target: ATXN2; (-) strand; PAM type: NRG; PAM sequence: GAG
ttgtaatcccagctacttga

SEQ ID NO: 16447 - DNA, 20 bp, Artificial Sequence
  Description of Artificial Sequence: Synthetic oligonucleotide
  Target: ATXN2; (-) strand; PAM type: NRG; PAM sequence: GAG
gcttgtaatcccagctactt

SEQ ID NO: 16448 - DNA, 20 bp, Artificial Sequence
  Description of Artificial Sequence: Synthetic oligonucleotide
  Target: ATXN2; (-) strand; PAM type: NRG; PAM sequence: CAG
gtggctggtgcttgtaatcc

SEQ ID NO: 16449 - DNA, 20 bp, Artificial Sequence
  Description of Artificial Sequence: Synthetic oligonucleotide
  Target: ATXN2; (-) strand; PAM type: NRG; PAM sequence: TGG
aattagccaggcatggtggc

SEQ ID NO: 16450 - DNA, 20 bp, Artificial Sequence
  Description of Artificial Sequence: Synthetic oligonucleotide
  Target: ATXN2; (-) strand; PAM type: NRG; PAM sequence: TGG
acaaaattagccaggcatgg

SEQ ID NO: 16451 - DNA, 20 bp, Artificial Sequence
  Description of Artificial Sequence: Synthetic oligonucleotide
  Target: ATXN2; (-) strand; PAM type: NRG; PAM sequence: TGG
aatacaaaattagccaggca

SEQ ID NO: 16452 - DNA, 20 bp, Artificial Sequence
  Description of Artificial Sequence: Synthetic oligonucleotide
  Target: ATXN2; (-) strand; PAM type: NRG; PAM sequence: AGG
ctaaaaatacaaaattagcc

SEQ ID NO: 16453 - DNA, 20 bp, Artificial Sequence
  Description of Artificial Sequence: Synthetic oligonucleotide
  Target: ATXN2; (-) strand; PAM type: NRG; PAM sequence: CAG
actaaaaatacaaaattagc

SEQ ID NO: 16454 - DNA, 20 bp, Artificial Sequence
  Description of Artificial Sequence: Synthetic oligonucleotide
  Target: ATXN2; (-) strand; PAM type: NRG; PAM sequence: TAG
ctctactaaaaatacaaaat

SEQ ID NO: 16455 - DNA, 20 bp, Artificial Sequence
  Description of Artificial Sequence: Synthetic oligonucleotide
  Target: ATXN2; (-) strand; PAM type: NRG; PAM sequence: TGG
cgagaccagcctggccaaca

SEQ ID NO: 16456 - DNA, 20 bp, Artificial Sequence
  Description of Artificial Sequence: Synthetic oligonucleotide
  Target: ATXN2; (-) strand; PAM type: NRG; PAM sequence: TGG
tcagacattcgagaccagcc

SEQ ID NO: 16457 - DNA, 20 bp, Artificial Sequence
  Description of Artificial Sequence: Synthetic oligonucleotide
  Target: ATXN2; (-) strand; PAM type: NRG; PAM sequence: CAG
tgaggtcagacattcgagac

SEQ ID NO: 16458 - DNA, 20 bp, Artificial Sequence
  Description of Artificial Sequence: Synthetic oligonucleotide
  Target: ATXN2; (-) strand; PAM type: NRG; PAM sequence: GAG
tcacctgaggtcagacattc

SEQ ID NO: 16459 - DNA, 20 bp, Artificial Sequence
  Description of Artificial Sequence: Synthetic oligonucleotide
  Target: ATXN2; (-) strand; PAM type: NRG; PAM sequence: CAG
gcgggtggatcacctgaggt

SEQ ID NO: 16460 - DNA, 20 bp, Artificial Sequence
  Description of Artificial Sequence: Synthetic oligonucleotide
  Target: ATXN2; (-) strand; PAM type: NRG; PAM sequence: AGG
caaggcgggtggatcacctg

SEQ ID NO: 16461 - DNA, 20 bp, Artificial Sequence
  Description of Artificial Sequence: Synthetic oligonucleotide
  Target: ATXN2; (-) strand; PAM type: NRG; PAM sequence: GAG
ccaaggcgggtggatcacct

SEQ ID NO: 16462 - DNA, 20 bp, Artificial Sequence
  Description of Artificial Sequence: Synthetic oligonucleotide
  Target: ATXN2; (-) strand; PAM type: NRG; PAM sequence: TGG
ctttgggaggccaaggcggg

SEQ ID NO: 16463 - DNA, 20 bp, Artificial Sequence
  Description of Artificial Sequence: Synthetic oligonucleotide
  Target: ATXN2; (-) strand; PAM type: NRG; PAM sequence: GGG
gcactttgggaggccaaggc

SEQ ID NO: 16464 - DNA, 20 bp, Artificial Sequence
  Description of Artificial Sequence: Synthetic oligonucleotide
  Target: ATXN2; (-) strand; PAM type: NRG; PAM sequence: CGG
agcactttgggaggccaagg

SEQ ID NO: 16465 - DNA, 20 bp, Artificial Sequence
  Description of Artificial Sequence: Synthetic oligonucleotide
  Target: ATXN2; (-) strand; PAM type: NRG; PAM sequence: AGG
cccagcactttgggaggcca

SEQ ID NO: 16466 - DNA, 20 bp, Artificial Sequence
  Description of Artificial Sequence: Synthetic oligonucleotide
  Target: ATXN2; (-) strand; PAM type: NRG; PAM sequence: AAG
tcccagcactttgggaggcc

SEQ ID NO: 16467 - DNA, 20 bp, Artificial Sequence
  Description of Artificial Sequence: Synthetic oligonucleotide
  Target: ATXN2; (-) strand; PAM type: NRG; PAM sequence: AGG
tgtaatcccagcactttggg

SEQ ID NO: 16468 - DNA, 20 bp, Artificial Sequence
  Description of Artificial Sequence: Synthetic oligonucleotide
  Target: ATXN2; (-) strand; PAM type: NRG; PAM sequence: GAG
ctgtaatcccagcactttgg

SEQ ID NO: 16469 - DNA, 20 bp, Artificial Sequence
  Description of Artificial Sequence: Synthetic oligonucleotide
  Target: ATXN2; (-) strand; PAM type: NRG; PAM sequence: GGG
gcctgtaatcccagcacttt

SEQ ID NO: 16470 - DNA, 20 bp, Artificial Sequence
  Description of Artificial Sequence: Synthetic oligonucleotide
  Target: ATXN2; (-) strand; PAM type: NRG; PAM sequence: TGG
cgcctgtaatcccagcactt

SEQ ID NO: 16471 - DNA, 20 bp, Artificial Sequence
  Description of Artificial Sequence: Synthetic oligonucleotide
  Target: ATXN2; (-) strand; PAM type: NRG; PAM sequence: CAG
gtggctcgcgcctgtaatcc

SEQ ID NO: 16472 - DNA, 20 bp, Artificial Sequence
  Description of Artificial Sequence: Synthetic oligonucleotide
  Target: ATXN2; (-) strand; PAM type: NRG; PAM sequence: TGG
gtggtgtaggctgggcgcgg

SEQ ID NO: 16473 - DNA, 20 bp, Artificial Sequence
  Description of Artificial Sequence: Synthetic oligonucleotide
  Target: ATXN2; (-) strand; PAM type: NRG; PAM sequence: CGG
aaagtggtgtaggctgggcg

SEQ ID NO: 16474 - DNA, 20 bp, Artificial Sequence
  Description of Artificial Sequence: Synthetic oligonucleotide
  Target: ATXN2; (-) strand; PAM type: NRG; PAM sequence: GGG
tactaaaagtggtgtaggct

SEQ ID NO: 16475 - DNA, 20 bp, Artificial Sequence
  Description of Artificial Sequence: Synthetic oligonucleotide
  Target: ATXN2; (-) strand; PAM type: NRG; PAM sequence: TGG
gtactaaaagtggtgtaggc

SEQ ID NO: 16476 - DNA, 20 bp, Artificial Sequence
  Description of Artificial Sequence: Synthetic oligonucleotide
  Target: ATXN2; (-) strand; PAM type: NRG; PAM sequence: AGG
gttggtactaaaagtggtgt

SEQ ID NO: 16477 - DNA, 20 bp, Artificial Sequence
  Description of Artificial Sequence: Synthetic oligonucleotide
  Target: ATXN2; (-) strand; PAM type: NRG; PAM sequence: TAG
tgttggtactaaaagtggtg

SEQ ID NO: 16478 - DNA, 20 bp, Artificial Sequence
  Description of Artificial Sequence: Synthetic oligonucleotide
  Target: ATXN2; (-) strand; PAM type: NRG; PAM sequence: TGG
aagagtgttggtactaaaag

SEQ ID NO: 16479 - DNA, 20 bp, Artificial Sequence
  Description of Artificial Sequence: Synthetic oligonucleotide
  Target: ATXN2; (-) strand; PAM type: NRG; PAM sequence: AAG
cccaagagtgttggtactaa

SEQ ID NO: 16480 - DNA, 20 bp, Artificial Sequence
  Description of Artificial Sequence: Synthetic oligonucleotide
  Target: ATXN2; (-) strand; PAM type: NRG; PAM sequence: TGG
atgaaatcacccaagagtgt

SEQ ID NO: 16481 - DNA, 20 bp, Artificial Sequence
  Description of Artificial Sequence: Synthetic oligonucleotide
  Target: ATXN2; (-) strand; PAM type: NRG; PAM sequence: GAG
gggtccatgaaatcacccaa

SEQ ID NO: 16482 - DNA, 20 bp, Artificial Sequence
  Description of Artificial Sequence: Synthetic oligonucleotide
  Target: ATXN2; (-) strand; PAM type: NRG; PAM sequence: AAG
tagggtccatgaaatcaccc

SEQ ID NO: 16483 - DNA, 20 bp, Artificial Sequence
  Description of Artificial Sequence: Synthetic oligonucleotide
  Target: ATXN2; (-) strand; PAM type: NRG; PAM sequence: GGG
tcagtgtcaggtctgcttta

SEQ ID NO: 16484 - DNA, 20 bp, Artificial Sequence
  Description of Artificial Sequence: Synthetic oligonucleotide
  Target: ATXN2; (-) strand; PAM type: NRG; PAM sequence: AGG
atcagtgtcaggtctgcttt

SEQ ID NO: 16485 - DNA, 20 bp, Artificial Sequence
  Description of Artificial Sequence: Synthetic oligonucleotide
  Target: ATXN2; (-) strand; PAM type: NRG; PAM sequence: TAG
gatcagtgtcaggtctgctt

SEQ ID NO: 16486 - DNA, 20 bp, Artificial Sequence
  Description of Artificial Sequence: Synthetic oligonucleotide
  Target: ATXN2; (-) strand; PAM type: NRG; PAM sequence: AGG
tgcaaatctggatcagtgtc

SEQ ID NO: 16487 - DNA, 20 bp, Artificial Sequence
  Description of Artificial Sequence: Synthetic oligonucleotide
  Target: ATXN2; (-) strand; PAM type: NRG; PAM sequence: CAG
ctgcaaatctggatcagtgt

SEQ ID NO: 16488 - DNA, 20 bp, Artificial Sequence
  Description of Artificial Sequence: Synthetic oligonucleotide
  Target: ATXN2; (-) strand; PAM type: NRG; PAM sequence: CAG
aatggactgcaaatctggat

SEQ ID NO: 16489 - DNA, 20 bp, Artificial Sequence
  Description of Artificial Sequence: Synthetic oligonucleotide
  Target: ATXN2; (-) strand; PAM type: NRG; PAM sequence: TGG
ttaaaaatggactgcaaatc

SEQ ID NO: 16490 - DNA, 20 bp, Artificial Sequence
  Description of Artificial Sequence: Synthetic oligonucleotide
  Target: ATXN2; (-) strand; PAM type: NRG; PAM sequence: TGG
aagacaggtgtccttaaaaa

SEQ ID NO: 16491 - DNA, 20 bp, Artificial Sequence
  Description of Artificial Sequence: Synthetic oligonucleotide
  Target: ATXN2; (-) strand; PAM type: NRG; PAM sequence: AGG
gactttgaggaaataaagac

SEQ ID NO: 16492 - DNA, 20 bp, Artificial Sequence
  Description of Artificial Sequence: Synthetic oligonucleotide
  Target: ATXN2; (-) strand; PAM type: NRG; PAM sequence: CAG
tgactttgaggaaataaaga

SEQ ID NO: 16493 - DNA, 20 bp, Artificial Sequence
  Description of Artificial Sequence: Synthetic oligonucleotide
  Target: ATXN2; (-) strand; PAM type: NRG; PAM sequence: AAG
tgcttgactttgaggaaata

SEQ ID NO: 16494 - DNA, 20 bp, Artificial Sequence
  Description of Artificial Sequence: Synthetic oligonucleotide
  Target: ATXN2; (-) strand; PAM type: NRG; PAM sequence: AGG
gagaaagctgcttgactttg

SEQ ID NO: 16495 - DNA, 20 bp, Artificial Sequence
  Description of Artificial Sequence: Synthetic oligonucleotide
  Target: ATXN2; (-) strand; PAM type: NRG; PAM sequence: GAG
agagaaagctgcttgacttt

SEQ ID NO: 16496 - DNA, 20 bp, Artificial Sequence
  Description of Artificial Sequence: Synthetic oligonucleotide
  Target: ATXN2; (-) strand; PAM type: NRG; PAM sequence: AAG
tagcattcattttccagaga

SEQ ID NO: 16497 - DNA, 20 bp, Artificial Sequence
  Description of Artificial Sequence: Synthetic oligonucleotide
  Target: ATXN2; (-) strand; PAM type: NRG; PAM sequence: GAG
taattagcattcattttcca

SEQ ID NO: 16498 - DNA, 20 bp, Artificial Sequence
  Description of Artificial Sequence: Synthetic oligonucleotide
  Target: ATXN2; (-) strand; PAM type: NRG; PAM sequence: CAG
actaattagcattcattttc

SEQ ID NO: 16499 - DNA, 20 bp, Artificial Sequence
  Description of Artificial Sequence: Synthetic oligonucleotide
  Target: ATXN2; (-) strand; PAM type: NRG; PAM sequence: TAG
ctcttttggttcacactaat

SEQ ID NO: 16500 - DNA, 20 bp, Artificial Sequence
  Description of Artificial Sequence: Synthetic oligonucleotide
  Target: ATXN2; (-) strand; PAM type: NRG; PAM sequence: TGG
cagactcttacttactcttt

SEQ ID NO: 16501 - DNA, 20 bp, Artificial Sequence
  Description of Artificial Sequence: Synthetic oligonucleotide
  Target: ATXN2; (-) strand; PAM type: NRG; PAM sequence: CAG
tttctcctttaaaaaaactt

SEQ ID NO: 16502 - DNA, 20 bp, Artificial Sequence
  Description of Artificial Sequence: Synthetic oligonucleotide
  Target: ATXN2; (-) strand; PAM type: NRG; PAM sequence: AAG
gaccagtgactttccataat

SEQ ID NO: 16503 - DNA, 20 bp, Artificial Sequence
  Description of Artificial Sequence: Synthetic oligonucleotide
  Target: ATXN2; (-) strand; PAM type: NRG; PAM sequence: CAG
tcctgtgcggaggggaggac

SEQ ID NO: 16504 - DNA, 20 bp, Artificial Sequence
  Description of Artificial Sequence: Synthetic oligonucleotide
  Target: ATXN2; (-) strand; PAM type: NRG; PAM sequence: AGG
acctttcctgtgcggagggg

SEQ ID NO: 16505 - DNA, 20 bp, Artificial Sequence
  Description of Artificial Sequence: Synthetic oligonucleotide
  Target: ATXN2; (-) strand; PAM type: NRG; PAM sequence: GAG
tacctttcctgtgcggaggg

SEQ ID NO: 16506 - DNA, 20 bp, Artificial Sequence
  Description of Artificial Sequence: Synthetic oligonucleotide
  Target: ATXN2; (-) strand; PAM type: NRG; PAM sequence: GGG
ggtacctttcctgtgcggag

SEQ ID NO: 16507 - DNA, 20 bp, Artificial Sequence
  Description of Artificial Sequence: Synthetic oligonucleotide
  Target: ATXN2; (-) strand; PAM type: NRG; PAM sequence: GGG
gggtacctttcctgtgcgga

SEQ ID NO: 16508 - DNA, 20 bp, Artificial Sequence
  Description of Artificial Sequence: Synthetic oligonucleotide
  Target: ATXN2; (-) strand; PAM type: NRG; PAM sequence: AGG
tgggtacctttcctgtgcgg

SEQ ID NO: 16509 - DNA, 20 bp, Artificial Sequence
  Description of Artificial Sequence: Synthetic oligonucleotide
  Target: ATXN2; (-) strand; PAM type: NRG; PAM sequence: GAG
ctgggtacctttcctgtgcg

SEQ ID NO: 16510 - DNA, 20 bp, Artificial Sequence
  Description of Artificial Sequence: Synthetic oligonucleotide
  Target: ATXN2; (-) strand; PAM type: NRG; PAM sequence: CGG
tactgggtacctttcctgtg

SEQ ID NO: 16511 - DNA, 20 bp, Artificial Sequence
  Description of Artificial Sequence: Synthetic oligonucleotide
  Target: ATXN2; (-) strand; PAM type: NRG; PAM sequence: GGG
aatttggttcattatctact

SEQ ID NO: 16512 - DNA, 20 bp, Artificial Sequence
  Description of Artificial Sequence: Synthetic oligonucleotide
  Target: ATXN2; (-) strand; PAM type: NRG; PAM sequence: TGG
taatttggttcattatctac

SEQ ID NO: 16513 - DNA, 20 bp, Artificial Sequence
  Description of Artificial Sequence: Synthetic oligonucleotide
  Target: ATXN2; (-) strand; PAM type: NRG; PAM sequence: TGG
tggagggagggaacttaatt

SEQ ID NO: 16514 - DNA, 20 bp, Artificial Sequence
  Description of Artificial Sequence: Synthetic oligonucleotide
  Target: ATXN2; (-) strand; PAM type: NRG; PAM sequence: GGG
ttaacttctggctggaggga

SEQ ID NO: 16515 - DNA, 20 bp, Artificial Sequence
  Description of Artificial Sequence: Synthetic oligonucleotide
  Target: ATXN2; (-) strand; PAM type: NRG; PAM sequence: AGG
tttaacttctggctggaggg

SEQ ID NO: 16516 - DNA, 20 bp, Artificial Sequence
  Description of Artificial Sequence: Synthetic oligonucleotide
  Target: ATXN2; (-) strand; PAM type: NRG; PAM sequence: GAG
gtttaacttctggctggagg

SEQ ID NO: 16517 - DNA, 20 bp, Artificial Sequence
  Description of Artificial Sequence: Synthetic oligonucleotide
  Target: ATXN2; (-) strand; PAM type: NRG; PAM sequence: GGG
atgtttaacttctggctgga

SEQ ID NO: 16518 - DNA, 20 bp, Artificial Sequence
  Description of Artificial Sequence: Synthetic oligonucleotide
  Target: ATXN2; (-) strand; PAM type: NRG; PAM sequence: AGG
gatgtttaacttctggctgg

SEQ ID NO: 16519 - DNA, 20 bp, Artificial Sequence
  Description of Artificial Sequence: Synthetic oligonucleotide
  Target: ATXN2; (-) strand; PAM type: NRG; PAM sequence: GAG
agatgtttaacttctggctg

SEQ ID NO: 16520 - DNA, 20 bp, Artificial Sequence
  Description of Artificial Sequence: Synthetic oligonucleotide
  Target: ATXN2; (-) strand; PAM type: NRG; PAM sequence: TGG
ccagatgtttaacttctggc

SEQ ID NO: 16521 - DNA, 20 bp, Artificial Sequence
  Description of Artificial Sequence: Synthetic oligonucleotide
  Target: ATXN2; (-) strand; PAM type: NRG; PAM sequence: TGG
tatcccagatgtttaacttc

SEQ ID NO: 16522 - DNA, 20 bp, Artificial Sequence
  Description of Artificial Sequence: Synthetic oligonucleotide
  Target: ATXN2; (-) strand; PAM type: NRG; PAM sequence: CAG
ggcatgaagacgtcatatcc

SEQ ID NO: 16523 - DNA, 20 bp, Artificial Sequence
  Description of Artificial Sequence: Synthetic oligonucleotide
  Target: ATXN2; (-) strand; PAM type: NRG; PAM sequence: AAG
aaatgagtgcccctggcatg

SEQ ID NO: 16524 - DNA, 20 bp, Artificial Sequence
  Description of Artificial Sequence: Synthetic oligonucleotide
  Target: ATXN2; (-) strand; PAM type: NRG; PAM sequence: TGG
tgctaagaaatgagtgcccc

SEQ ID NO: 16525 - DNA, 20 bp, Artificial Sequence
  Description of Artificial Sequence: Synthetic oligonucleotide
  Target: ATXN2; (-) strand; PAM type: NRG; PAM sequence: GAG
tagagaggctgctaagaaat

SEQ ID NO: 16526 - DNA, 20 bp, Artificial Sequence
  Description of Artificial Sequence: Synthetic oligonucleotide
  Target: ATXN2; (-) strand; PAM type: NRG; PAM sequence: AAG
atgtatgtagagaggctgct

SEQ ID NO: 16527 - DNA, 20 bp, Artificial Sequence
  Description of Artificial Sequence: Synthetic oligonucleotide
  Target: ATXN2; (-) strand; PAM type: NRG; PAM sequence: AGG
cctgagagatgtatgtagag

SEQ ID NO: 16528 - DNA, 20 bp, Artificial Sequence
  Description of Artificial Sequence: Synthetic oligonucleotide
  Target: ATXN2; (-) strand; PAM type: NRG; PAM sequence: GAG
acctgagagatgtatgtaga

SEQ ID NO: 16529 - DNA, 20 bp, Artificial Sequence
  Description of Artificial Sequence: Synthetic oligonucleotide
  Target: ATXN2; (-) strand; PAM type: NRG; PAM sequence: GAG
ccacctgagagatgtatgta

SEQ ID NO: 16530 - DNA, 20 bp, Artificial Sequence
  Description of Artificial Sequence: Synthetic oligonucleotide
  Target: ATXN2; (-) strand; PAM type: NRG; PAM sequence: TAG
caccacctgagagatgtatg

SEQ ID NO: 16531 - DNA, 20 bp, Artificial Sequence
  Description of Artificial Sequence: Synthetic oligonucleotide
  Target: ATXN2; (-) strand; PAM type: NRG; PAM sequence: GAG
tgcctcttggcaccacctga

SEQ ID NO: 16532 - DNA, 20 bp, Artificial Sequence
  Description of Artificial Sequence: Synthetic oligonucleotide
  Target: ATXN2; (-) strand; PAM type: NRG; PAM sequence: GAG
tgtgcctcttggcaccacct

SEQ ID NO: 16533 - DNA, 20 bp, Artificial Sequence
  Description of Artificial Sequence: Synthetic oligonucleotide
  Target: ATXN2; (-) strand; PAM type: NRG; PAM sequence: TGG
gctctacctggtgtgcctct

SEQ ID NO: 16534 - DNA, 20 bp, Artificial Sequence
  Description of Artificial Sequence: Synthetic oligonucleotide
  Target: ATXN2; (-) strand; PAM type: NRG; PAM sequence: TGG
gctgctaagtttgctctacc

SEQ ID NO: 16535 - DNA, 20 bp, Artificial Sequence
  Description of Artificial Sequence: Synthetic oligonucleotide
  Target: ATXN2; (-) strand; PAM type: NRG; PAM sequence: AAG
gcctgttagtcagagctgct

SEQ ID NO: 16536 - DNA, 20 bp, Artificial Sequence
  Description of Artificial Sequence: Synthetic oligonucleotide
  Target: ATXN2; (-) strand; PAM type: NRG; PAM sequence: GAG
actttgcagcctgttagtca

SEQ ID NO: 16537 - DNA, 20 bp, Artificial Sequence
  Description of Artificial Sequence: Synthetic oligonucleotide
  Target: ATXN2; (-) strand; PAM type: NRG; PAM sequence: CAG
gcactttgcagcctgttagt

SEQ ID NO: 16538 - DNA, 20 bp, Artificial Sequence
  Description of Artificial Sequence: Synthetic oligonucleotide
  Target: ATXN2; (-) strand; PAM type: NRG; PAM sequence: TAG
acttgcactttgcagcctgt

SEQ ID NO: 16539 - DNA, 20 bp, Artificial Sequence
  Description of Artificial Sequence: Synthetic oligonucleotide
  Target: ATXN2; (-) strand; PAM type: NRG; PAM sequence: CAG
gaatctgaacttgcactttg

SEQ ID NO: 16540 - DNA, 20 bp, Artificial Sequence
  Description of Artificial Sequence: Synthetic oligonucleotide
  Target: ATXN2; (-) strand; PAM type: NRG; PAM sequence: CAG
tgccttccaaatctctgcca

SEQ ID NO: 16541 - DNA, 20 bp, Artificial Sequence
  Description of Artificial Sequence: Synthetic oligonucleotide
  Target: ATXN2; (-) strand; PAM type: NRG; PAM sequence: GGG
acgggaagcagtctggaggt

SEQ ID NO: 16542 - DNA, 20 bp, Artificial Sequence
  Description of Artificial Sequence: Synthetic oligonucleotide
  Target: ATXN2; (-) strand; PAM type: NRG; PAM sequence: TGG
gacgggaagcagtctggagg

SEQ ID NO: 16543 - DNA, 20 bp, Artificial Sequence
  Description of Artificial Sequence: Synthetic oligonucleotide
  Target: ATXN2; (-) strand; PAM type: NRG; PAM sequence: AGG
ttggacgggaagcagtctgg

SEQ ID NO: 16544 - DNA, 20 bp, Artificial Sequence
  Description of Artificial Sequence: Synthetic oligonucleotide
  Target: ATXN2; (-) strand; PAM type: NRG; PAM sequence: GAG
cttggacgggaagcagtctg

SEQ ID NO: 16545 - DNA, 20 bp, Artificial Sequence
  Description of Artificial Sequence: Synthetic oligonucleotide
  Target: ATXN2; (-) strand; PAM type: NRG; PAM sequence: TGG
aacttggacgggaagcagtc

SEQ ID NO: 16546 - DNA, 20 bp, Artificial Sequence
  Description of Artificial Sequence: Synthetic oligonucleotide
  Target: ATXN2; (-) strand; PAM type: NRG; PAM sequence: CAG
ctggtaacttggacgggaag

SEQ ID NO: 16547 - DNA, 20 bp, Artificial Sequence
  Description of Artificial Sequence: Synthetic oligonucleotide
  Target: ATXN2; (-) strand; PAM type: NRG; PAM sequence: AAG
gtcctggtaacttggacggg

SEQ ID NO: 16548 - DNA, 20 bp, Artificial Sequence
  Description of Artificial Sequence: Synthetic oligonucleotide
  Target: ATXN2; (-) strand; PAM type: NRG; PAM sequence: GGG
gctgtcctggtaacttggac

SEQ ID NO: 16549 - DNA, 20 bp, Artificial Sequence
  Description of Artificial Sequence: Synthetic oligonucleotide
  Target: ATXN2; (-) strand; PAM type: NRG; PAM sequence: CGG
agctgtcctggtaacttgga

SEQ ID NO: 16550 - DNA, 20 bp, Artificial Sequence
  Description of Artificial Sequence: Synthetic oligonucleotide
  Target: ATXN2; (-) strand; PAM type: NRG; PAM sequence: TGG
tttgagctgtcctggtaact

SEQ ID NO: 16551 - DNA, 20 bp, Artificial Sequence
  Description of Artificial Sequence: Synthetic oligonucleotide
  Target: ATXN2; (-) strand; PAM type: NRG; PAM sequence: TGG
agcatgtttttgagctgtcc

SEQ ID NO: 16552 - DNA, 20 bp, Artificial Sequence
  Description of Artificial Sequence: Synthetic oligonucleotide
  Target: ATXN2; (-) strand; PAM type: NRG; PAM sequence: GAG
ttttctgtcagcatgttttt

SEQ ID NO: 16553 - DNA, 20 bp, Artificial Sequence
  Description of Artificial Sequence: Synthetic oligonucleotide
  Target: ATXN2; (-) strand; PAM type: NRG; PAM sequence: CAG
gagccatgggagttttctgt

SEQ ID NO: 16554 - DNA, 20 bp, Artificial Sequence
  Description of Artificial Sequence: Synthetic oligonucleotide
  Target: ATXN2; (-) strand; PAM type: NRG; PAM sequence: GAG
acttcttcctagagccatgg

SEQ ID NO: 16555 - DNA, 20 bp, Artificial Sequence
  Description of Artificial Sequence: Synthetic oligonucleotide
  Target: ATXN2; (-) strand; PAM type: NRG; PAM sequence: GGG
tcacttcttcctagagccat

SEQ ID NO: 16556 - DNA, 20 bp, Artificial Sequence
  Description of Artificial Sequence: Synthetic oligonucleotide
  Target: ATXN2; (-) strand; PAM type: NRG; PAM sequence: TGG
gtcacttcttcctagagcca

SEQ ID NO: 16557 - DNA, 20 bp, Artificial Sequence
  Description of Artificial Sequence: Synthetic oligonucleotide
  Target: ATXN2; (-) strand; PAM type: NRG; PAM sequence: GAG
cttagtgtcacttcttccta

SEQ ID NO: 16558 - DNA, 20 bp, Artificial Sequence
  Description of Artificial Sequence: Synthetic oligonucleotide
  Target: ATXN2; (-) strand; PAM type: NRG; PAM sequence: TAG
ggcttagtgtcacttcttcc

SEQ ID NO: 16559 - DNA, 20 bp, Artificial Sequence
  Description of Artificial Sequence: Synthetic oligonucleotide
  Target: ATXN2; (-) strand; PAM type: NRG; PAM sequence: TAG
cataaagaaaggtgttggct

SEQ ID NO: 16560 - DNA, 20 bp, Artificial Sequence
  Description of Artificial Sequence: Synthetic oligonucleotide
  Target: ATXN2; (-) strand; PAM type: NRG; PAM sequence: TGG
tcccacataaagaaaggtgt

SEQ ID NO: 16561 - DNA, 20 bp, Artificial Sequence
  Description of Artificial Sequence: Synthetic oligonucleotide
  Target: ATXN2; (-) strand; PAM type: NRG; PAM sequence: AGG
ttctgctcccacataaagaa

SEQ ID NO: 16562 - DNA, 20 bp, Artificial Sequence
  Description of Artificial Sequence: Synthetic oligonucleotide
  Target: ATXN2; (-) strand; PAM type: NRG; PAM sequence: AAG
attctgctcccacataaaga

SEQ ID NO: 16563 - DNA, 20 bp, Artificial Sequence
  Description of Artificial Sequence: Synthetic oligonucleotide
  Target: ATXN2; (-) strand; PAM type: NRG; PAM sequence: AAG
gctgattctgctcccacata

SEQ ID NO: 16564 - DNA, 20 bp, Artificial Sequence
  Description of Artificial Sequence: Synthetic oligonucleotide
  Target: ATXN2; (-) strand; PAM type: NRG; PAM sequence: CAG
actgctgcccaccccttcat

SEQ ID NO: 16565 - DNA, 20 bp, Artificial Sequence
  Description of Artificial Sequence: Synthetic oligonucleotide
  Target: ATXN2; (-) strand; PAM type: NRG; PAM sequence: GGG
tgggctagctgcagccagtg

SEQ ID NO: 16566 - DNA, 20 bp, Artificial Sequence
  Description of Artificial Sequence: Synthetic oligonucleotide
  Target: ATXN2; (-) strand; PAM type: NRG; PAM sequence: GGG
gtgggctagctgcagccagt

SEQ ID NO: 16567 - DNA, 20 bp, Artificial Sequence
  Description of Artificial Sequence: Synthetic oligonucleotide
  Target: ATXN2; (-) strand; PAM type: NRG; PAM sequence: TGG
ggtgggctagctgcagccag

SEQ ID NO: 16568 - DNA, 20 bp, Artificial Sequence
  Description of Artificial Sequence: Synthetic oligonucleotide
  Target: ATXN2; (-) strand; PAM type: NRG; PAM sequence: CAG
tatggtgggctagctgcagc

SEQ ID NO: 16569 - DNA, 20 bp, Artificial Sequence
  Description of Artificial Sequence: Synthetic oligonucleotide
  Target: ATXN2; (-) strand; PAM type: NRG; PAM sequence: CAG
tgcctatggtgggctagctg

SEQ ID NO: 16570 - DNA, 20 bp, Artificial Sequence
  Description of Artificial Sequence: Synthetic oligonucleotide
  Target: ATXN2; (-) strand; PAM type: NRG; PAM sequence: TAG
gtgctgtgcctatggtgggc

SEQ ID NO: 16571 - DNA, 20 bp, Artificial Sequence
  Description of Artificial Sequence: Synthetic oligonucleotide
  Target: ATXN2; (-) strand; PAM type: NRG; PAM sequence: GGG
ggatgtgctgtgcctatggt

SEQ ID NO: 16572 - DNA, 20 bp, Artificial Sequence
  Description of Artificial Sequence: Synthetic oligonucleotide
  Target: ATXN2; (-) strand; PAM type: NRG; PAM sequence: TGG
gggatgtgctgtgcctatgg

SEQ ID NO: 16573 - DNA, 20 bp, Artificial Sequence
  Description of Artificial Sequence: Synthetic oligonucleotide
  Target: ATXN2; (-) strand; PAM type: NRG; PAM sequence: TGG
ggtgggatgtgctgtgccta

SEQ ID NO: 16574 - DNA, 20 bp, Artificial Sequence
  Description of Artificial Sequence: Synthetic oligonucleotide
  Target: ATXN2; (-) strand; PAM type: NRG; PAM sequence: GGG
aggactggaaggagagtggt

SEQ ID NO: 16575 - DNA, 20 bp, Artificial Sequence
  Description of Artificial Sequence: Synthetic oligonucleotide
  Target: ATXN2; (-) strand; PAM type: NRG; PAM sequence: TGG
caggactggaaggagagtgg

SEQ ID NO: 16576 - DNA, 20 bp, Artificial Sequence
  Description of Artificial Sequence: Synthetic oligonucleotide
  Target: ATXN2; (-) strand; PAM type: NRG; PAM sequence: TGG
ggtcaggactggaaggagag

SEQ ID NO: 16577 - DNA, 20 bp, Artificial Sequence
  Description of Artificial Sequence: Synthetic oligonucleotide
  Target: ATXN2; (-) strand; PAM type: NRG; PAM sequence: GAG
cctggtcaggactggaagga

SEQ ID NO: 16578 - DNA, 20 bp, Artificial Sequence
  Description of Artificial Sequence: Synthetic oligonucleotide
  Target: ATXN2; (-) strand; PAM type: NRG; PAM sequence: GAG
ggcctggtcaggactggaag

SEQ ID NO: 16579 - DNA, 20 bp, Artificial Sequence
  Description of Artificial Sequence: Synthetic oligonucleotide
  Target: ATXN2; (-) strand; PAM type: NRG; PAM sequence: AGG
ggggcctggtcaggactgga

SEQ ID NO: 16580 - DNA, 20 bp, Artificial Sequence
  Description of Artificial Sequence: Synthetic oligonucleotide
  Target: ATXN2; (-) strand; PAM type: NRG; PAM sequence: AAG
tggggcctggtcaggactgg

SEQ ID NO: 16581 - DNA, 20 bp, Artificial Sequence
  Description of Artificial Sequence: Synthetic oligonucleotide
  Target: ATXN2; (-) strand; PAM type: NRG; PAM sequence: TGG
ggctggggcctggtcaggac

SEQ ID NO: 16582 - DNA, 20 bp, Artificial Sequence
  Description of Artificial Sequence: Synthetic oligonucleotide
  Target: ATXN2; (-) strand; PAM type: NRG; PAM sequence: AGG
ttgccggctggggcctggtc

SEQ ID NO: 16583 - DNA, 20 bp, Artificial Sequence
  Description of Artificial Sequence: Synthetic oligonucleotide
  Target: ATXN2; (-) strand; PAM type: NRG; PAM sequence: CAG
gttgccggctggggcctggt

SEQ ID NO: 16584 - DNA, 20 bp, Artificial Sequence
  Description of Artificial Sequence: Synthetic oligonucleotide
  Target: ATXN2; (-) strand; PAM type: NRG; PAM sequence: TGG
agaagttgccggctggggcc

SEQ ID NO: 16585 - DNA, 20 bp, Artificial Sequence
  Description of Artificial Sequence: Synthetic oligonucleotide
  Target: ATXN2; (-) strand; PAM type: NRG; PAM sequence: GGG
tcggtagaagttgccggctg

SEQ ID NO: 16586 - DNA, 20 bp, Artificial Sequence
  Description of Artificial Sequence: Synthetic oligonucleotide
  Target: ATXN2; (-) strand; PAM type: NRG; PAM sequence: GGG
ctcggtagaagttgccggct

SEQ ID NO: 16587 - DNA, 20 bp, Artificial Sequence
  Description of Artificial Sequence: Synthetic oligonucleotide
  Target: ATXN2; (-) strand; PAM type: NRG; PAM sequence: TGG
tctcggtagaagttgccggc

SEQ ID NO: 16588 - DNA, 20 bp, Artificial Sequence
  Description of Artificial Sequence: Synthetic oligonucleotide
  Target: ATXN2; (-) strand; PAM type: NRG; PAM sequence: CGG
tggctctcggtagaagttgc

SEQ ID NO: 16589 - DNA, 20 bp, Artificial Sequence
  Description of Artificial Sequence: Synthetic oligonucleotide
  Target: ATXN2; (-) strand; PAM type: NRG; PAM sequence: AAG
tgagccatggctctcggtag

SEQ ID NO: 16590 - DNA, 20 bp, Artificial Sequence
  Description of Artificial Sequence: Synthetic oligonucleotide
  Target: ATXN2; (-) strand; PAM type: NRG; PAM sequence: TAG
tgttgagccatggctctcgg

SEQ ID NO: 16591 - DNA, 20 bp, Artificial Sequence
  Description of Artificial Sequence: Synthetic oligonucleotide
  Target: ATXN2; (-) strand; PAM type: NRG; PAM sequence: CGG
tggtgttgagccatggctct

SEQ ID NO: 16592 - DNA, 20 bp, Artificial Sequence
  Description of Artificial Sequence: Synthetic oligonucleotide
  Target: ATXN2; (-) strand; PAM type: NRG; PAM sequence: TGG
tccagtttggtgttgagcca

SEQ ID NO: 16593 - DNA, 20 bp, Artificial Sequence
  Description of Artificial Sequence: Synthetic oligonucleotide
  Target: ATXN2; (-) strand; PAM type: NRG; PAM sequence: GAG
ctactgtccagtttggtgtt

SEQ ID NO: 16594 - DNA, 20 bp, Artificial Sequence
  Description of Artificial Sequence: Synthetic oligonucleotide
  Target: ATXN2; (-) strand; PAM type: NRG; PAM sequence: TGG
atgatgtctactgtccagtt

SEQ ID NO: 16595 - DNA, 20 bp, Artificial Sequence
  Description of Artificial Sequence: Synthetic oligonucleotide
  Target: ATXN2; (-) strand; PAM type: NRG; PAM sequence: CAG
ggatcatgatgtctactgtc

SEQ ID NO: 16596 - DNA, 20 bp, Artificial Sequence
  Description of Artificial Sequence: Synthetic oligonucleotide
  Target: ATXN2; (-) strand; PAM type: NRG; PAM sequence: GGG
tgtaattagagctaactgga

SEQ ID NO: 16597 - DNA, 20 bp, Artificial Sequence
  Description of Artificial Sequence: Synthetic oligonucleotide
  Target: ATXN2; (-) strand; PAM type: NRG; PAM sequence: AGG
ctgtaattagagctaactgg

SEQ ID NO: 16598 - DNA, 20 bp, Artificial Sequence
  Description of Artificial Sequence: Synthetic oligonucleotide
  Target: ATXN2; (-) strand; PAM type: NRG; PAM sequence: GAG
tctgtaattagagctaactg

SEQ ID NO: 16599 - DNA, 20 bp, Artificial Sequence
  Description of Artificial Sequence: Synthetic oligonucleotide
  Target: ATXN2; (-) strand; PAM type: NRG; PAM sequence: TGG
ggtctgtaattagagctaac

SEQ ID NO: 16600 - DNA, 20 bp, Artificial Sequence
  Description of Artificial Sequence: Synthetic oligonucleotide
  Target: ATXN2; (-) strand; PAM type: NRG; PAM sequence: GAG
actggtggggtctgtaatta

SEQ ID NO: 16601 - DNA, 20 bp, Artificial Sequence
  Description of Artificial Sequence: Synthetic oligonucleotide
  Target: ATXN2; (-) strand; PAM type: NRG; PAM sequence: TAG
gtactggtggggtctgtaat

SEQ ID NO: 16602 - DNA, 20 bp, Artificial Sequence
  Description of Artificial Sequence: Synthetic oligonucleotide
  Target: ATXN2; (-) strand; PAM type: NRG; PAM sequence: GGG
gctgtcaagctgtactggtg

SEQ ID NO: 16603 - DNA, 20 bp, Artificial Sequence
  Description of Artificial Sequence: Synthetic oligonucleotide
  Target: ATXN2; (-) strand; PAM type: NRG; PAM sequence: GGG
agctgtcaagctgtactggt

SEQ ID NO: 16604 - DNA, 20 bp, Artificial Sequence
  Description of Artificial Sequence: Synthetic oligonucleotide
  Target: ATXN2; (-) strand; PAM type: NRG; PAM sequence: TGG
gagctgtcaagctgtactgg

SEQ ID NO: 16605 - DNA, 20 bp, Artificial Sequence
  Description of Artificial Sequence: Synthetic oligonucleotide
  Target: ATXN2; (-) strand; PAM type: NRG; PAM sequence: TGG
cgggagctgtcaagctgtac

SEQ ID NO: 16606 - DNA, 20 bp, Artificial Sequence
  Description of Artificial Sequence: Synthetic oligonucleotide
  Target: ATXN2; (-) strand; PAM type: NRG; PAM sequence: AAG
ggatggtgccgggagctgtc

SEQ ID NO: 16607 - DNA, 20 bp, Artificial Sequence
  Description of Artificial Sequence: Synthetic oligonucleotide
  Target: ATXN2; (-) strand; PAM type: NRG; PAM sequence: GAG
gaaggaagggatggtgccgg

SEQ ID NO: 16608 - DNA, 20 bp, Artificial Sequence
  Description of Artificial Sequence: Synthetic oligonucleotide
  Target: ATXN2; (-) strand; PAM type: NRG; PAM sequence: GGG
atgaaggaagggatggtgcc

SEQ ID NO: 16609 - DNA, 20 bp, Artificial Sequence
  Description of Artificial Sequence: Synthetic oligonucleotide
  Target: ATXN2; (-) strand; PAM type: NRG; PAM sequence: CGG
gatgaaggaagggatggtgc

SEQ ID NO: 16610 - DNA, 20 bp, Artificial Sequence
  Description of Artificial Sequence: Synthetic oligonucleotide
  Target: ATXN2; (-) strand; PAM type: NRG; PAM sequence: TGG
aagtcagatgaaggaaggga

SEQ ID NO: 16611 - DNA, 20 bp, Artificial Sequence
  Description of Artificial Sequence: Synthetic oligonucleotide
  Target: ATXN2; (-) strand; PAM type: NRG; PAM sequence: GGG
caataagtcagatgaaggaa

SEQ ID NO: 16612 - DNA, 20 bp, Artificial Sequence
  Description of Artificial Sequence: Synthetic oligonucleotide
  Target: ATXN2; (-) strand; PAM type: NRG; PAM sequence: AGG
tcaataagtcagatgaagga

SEQ ID NO: 16613 - DNA, 20 bp, Artificial Sequence
  Description of Artificial Sequence: Synthetic oligonucleotide
  Target: ATXN2; (-) strand; PAM type: NRG; PAM sequence: AAG
ttcaataagtcagatgaagg

SEQ ID NO: 16614 - DNA, 20 bp, Artificial Sequence
  Description of Artificial Sequence: Synthetic oligonucleotide
  Target: ATXN2; (-) strand; PAM type: NRG; PAM sequence: AGG
aagttcaataagtcagatga

SEQ ID NO: 16615 - DNA, 20 bp, Artificial Sequence
  Description of Artificial Sequence: Synthetic oligonucleotide
  Target: ATXN2; (-) strand; PAM type: NRG; PAM sequence: AAG
aaagttcaataagtcagatg

SEQ ID NO: 16616 - DNA, 20 bp, Artificial Sequence
  Description of Artificial Sequence: Synthetic oligonucleotide
  Target: ATXN2; (-) strand; PAM type: NRG; PAM sequence: CAG
tttgtaaaagttcaataagt

SEQ ID NO: 16617 - DNA, 20 bp, Artificial Sequence
  Description of Artificial Sequence: Synthetic oligonucleotide
  Target: ATXN2; (-) strand; PAM type: NRG; PAM sequence: AAG
ttagtttgtaaaagttcaat

SEQ ID NO: 16618 - DNA, 20 bp, Artificial Sequence
  Description of Artificial Sequence: Synthetic oligonucleotide
  Target: ATXN2; (-) strand; PAM type: NRG; PAM sequence: AAG
tggtgactgttagtttgtaa

SEQ ID NO: 16619 - DNA, 20 bp, Artificial Sequence
  Description of Artificial Sequence: Synthetic oligonucleotide
  Target: ATXN2; (-) strand; PAM type: NRG; PAM sequence: TAG
tctttggtgctggtgactgt

SEQ ID NO: 16620 - DNA, 20 bp, Artificial Sequence
  Description of Artificial Sequence: Synthetic oligonucleotide
  Target: ATXN2; (-) strand; PAM type: NRG; PAM sequence: TGG
ttgacttaattctttggtgc

SEQ ID NO: 16621 - DNA, 20 bp, Artificial Sequence
  Description of Artificial Sequence: Synthetic oligonucleotide
  Target: ATXN2; (-) strand; PAM type: NRG; PAM sequence: TGG
ggttagttgacttaattctt

SEQ ID NO: 16622 - DNA, 20 bp, Artificial Sequence
  Description of Artificial Sequence: Synthetic oligonucleotide
  Target: ATXN2; (-) strand; PAM type: NRG; PAM sequence: TAG
gtctaaaattcaaggcaggt

SEQ ID NO: 16623 - DNA, 20 bp, Artificial Sequence
  Description of Artificial Sequence: Synthetic oligonucleotide
  Target: ATXN2; (-) strand; PAM type: NRG; PAM sequence: AGG
gctggtctaaaattcaaggc

SEQ ID NO: 16624 - DNA, 20 bp, Artificial Sequence
  Description of Artificial Sequence: Synthetic oligonucleotide
  Target: ATXN2; (-) strand; PAM type: NRG; PAM sequence: CAG
tgctggtctaaaattcaagg

SEQ ID NO: 16625 - DNA, 20 bp, Artificial Sequence
  Description of Artificial Sequence: Synthetic oligonucleotide
  Target: ATXN2; (-) strand; PAM type: NRG; PAM sequence: AGG
gattgctggtctaaaattca

SEQ ID NO: 16626 - DNA, 20 bp, Artificial Sequence
  Description of Artificial Sequence: Synthetic oligonucleotide
  Target: ATXN2; (-) strand; PAM type: NRG; PAM sequence: AAG
ggattgctggtctaaaattc

SEQ ID NO: 16627 - DNA, 20 bp, Artificial Sequence
  Description of Artificial Sequence: Synthetic oligonucleotide
  Target: ATXN2; (-) strand; PAM type: NRG; PAM sequence: TGG
gataaagccatatggattgc

SEQ ID NO: 16628 - DNA, 20 bp, Artificial Sequence
  Description of Artificial Sequence: Synthetic oligonucleotide
  Target: ATXN2; (-) strand; PAM type: NRG; PAM sequence: TGG
ttataccagataaagccata

SEQ ID NO: 16629 - DNA, 20 bp, Artificial Sequence
  Description of Artificial Sequence: Synthetic oligonucleotide
  Target: ATXN2; (-) strand; PAM type: NRG; PAM sequence: AAG
cagaagatttataccagata

SEQ ID NO: 16630 - DNA, 20 bp, Artificial Sequence
  Description of Artificial Sequence: Synthetic oligonucleotide
  Target: ATXN2; (-) strand; PAM type: NRG; PAM sequence: CAG
caaaggcagaagatttatac

SEQ ID NO: 16631 - DNA, 20 bp, Artificial Sequence
  Description of Artificial Sequence: Synthetic oligonucleotide
  Target: ATXN2; (-) strand; PAM type: NRG; PAM sequence: AAG
ccagaaatgatcaaaggcag

SEQ ID NO: 16632 - DNA, 20 bp, Artificial Sequence
  Description of Artificial Sequence: Synthetic oligonucleotide
  Target: ATXN2; (-) strand; PAM type: NRG; PAM sequence: CAG
ggtccagaaatgatcaaagg

SEQ ID NO: 16633 - DNA, 20 bp, Artificial Sequence
  Description of Artificial Sequence: Synthetic oligonucleotide
  Target: ATXN2; (-) strand; PAM type: NRG; PAM sequence: AGG
tacggtccagaaatgatcaa

SEQ ID NO: 16634 - DNA, 20 bp, Artificial Sequence
  Description of Artificial Sequence: Synthetic oligonucleotide
  Target: ATXN2; (-) strand; PAM type: NRG; PAM sequence: AAG
ctacggtccagaaatgatca

SEQ ID NO: 16635 - DNA, 20 bp, Artificial Sequence
  Description of Artificial Sequence: Synthetic oligonucleotide
  Target: ATXN2; (-) strand; PAM type: NRG; PAM sequence: CAG
tattcctttttcctacggtc

SEQ ID NO: 16636 - DNA, 20 bp, Artificial Sequence
  Description of Artificial Sequence: Synthetic oligonucleotide
  Target: ATXN2; (-) strand; PAM type: NRG; PAM sequence: CGG
attgctattcctttttccta

SEQ ID NO: 16637 - DNA, 20 bp, Artificial Sequence
  Description of Artificial Sequence: Synthetic oligonucleotide
  Target: ATXN2; (-) strand; PAM type: NRG; PAM sequence: AAG
aaaatagtgttctctggccc

SEQ ID NO: 16638 - DNA, 20 bp, Artificial Sequence
  Description of Artificial Sequence: Synthetic oligonucleotide
  Target: ATXN2; (-) strand; PAM type: NRG; PAM sequence: TGG
tatgtaaaaatagtgttctc

SEQ ID NO: 16639 - DNA, 20 bp, Artificial Sequence
  Description of Artificial Sequence: Synthetic oligonucleotide
  Target: ATXN2; (-) strand; PAM type: NRG; PAM sequence: TAG
aagaaactgttatgtaaaaa

SEQ ID NO: 16640 - DNA, 20 bp, Artificial Sequence
  Description of Artificial Sequence: Synthetic oligonucleotide
  Target: ATXN2; (-) strand; PAM type: NRG; PAM sequence: AAG
caaggccttgactttaggtt

SEQ ID NO: 16641 - DNA, 20 bp, Artificial Sequence
  Description of Artificial Sequence: Synthetic oligonucleotide
  Target: ATXN2; (-) strand; PAM type: NRG; PAM sequence: AGG
gagtccaaggccttgacttt

SEQ ID NO: 16642 - DNA, 20 bp, Artificial Sequence
  Description of Artificial Sequence: Synthetic oligonucleotide
  Target: ATXN2; (-) strand; PAM type: NRG; PAM sequence: TAG
agagtccaaggccttgactt

SEQ ID NO: 16643 - DNA, 20 bp, Artificial Sequence
  Description of Artificial Sequence: Synthetic oligonucleotide
  Target: ATXN2; (-) strand; PAM type: NRG; PAM sequence: AGG
aaccctcagggaagagtcca

SEQ ID NO: 16644 - DNA, 20 bp, Artificial Sequence
  Description of Artificial Sequence: Synthetic oligonucleotide
  Target: ATXN2; (-) strand; PAM type: NRG; PAM sequence: AAG
caaccctcagggaagagtcc

SEQ ID NO: 16645 - DNA, 20 bp, Artificial Sequence
  Description of Artificial Sequence: Synthetic oligonucleotide
  Target: ATXN2; (-) strand; PAM type: NRG; PAM sequence: GAG
ctcaggcaaccctcagggaa

SEQ ID NO: 16646 - DNA, 20 bp, Artificial Sequence
  Description of Artificial Sequence: Synthetic oligonucleotide
  Target: ATXN2; (-) strand; PAM type: NRG; PAM sequence: AAG
atctcaggcaaccctcaggg

SEQ ID NO: 16647 - DNA, 20 bp, Artificial Sequence
  Description of Artificial Sequence: Synthetic oligonucleotide
  Target: ATXN2; (-) strand; PAM type: NRG; PAM sequence: GGG
ggaatctcaggcaaccctca

SEQ ID NO: 16648 - DNA, 20 bp, Artificial Sequence
  Description of Artificial Sequence: Synthetic oligonucleotide
  Target: ATXN2; (-) strand; PAM type: NRG; PAM sequence: AGG
aggaatctcaggcaaccctc

SEQ ID NO: 16649 - DNA, 20 bp, Artificial Sequence
  Description of Artificial Sequence: Synthetic oligonucleotide
  Target: ATXN2; (-) strand; PAM type: NRG; PAM sequence: CAG
aaggaatctcaggcaaccct

SEQ ID NO: 16650 - DNA, 20 bp, Artificial Sequence
  Description of Artificial Sequence: Synthetic oligonucleotide
  Target: ATXN2; (-) strand; PAM type: NRG; PAM sequence: AGG
agaaagcatgaaggaatctc

SEQ ID NO: 16651 - DNA, 20 bp, Artificial Sequence
  Description of Artificial Sequence: Synthetic oligonucleotide
  Target: ATXN2; (-) strand; PAM type: NRG; PAM sequence: CAG
tagaaagcatgaaggaatct

SEQ ID NO: 16652 - DNA, 20 bp, Artificial Sequence
  Description of Artificial Sequence: Synthetic oligonucleotide
  Target: ATXN2; (-) strand; PAM type: NRG; PAM sequence: AGG
gtcctgaatagaaagcatga

SEQ ID NO: 16653 - DNA, 20 bp, Artificial Sequence
  Description of Artificial Sequence: Synthetic oligonucleotide
  Target: ATXN2; (-) strand; PAM type: NRG; PAM sequence: AAG
agtcctgaatagaaagcatg

SEQ ID NO: 16654 - DNA, 20 bp, Artificial Sequence
  Description of Artificial Sequence: Synthetic oligonucleotide
  Target: ATXN2; (-) strand; PAM type: NRG; PAM sequence: AAG
gggacttagtcctgaataga

SEQ ID NO: 16655 - DNA, 20 bp, Artificial Sequence
  Description of Artificial Sequence: Synthetic oligonucleotide
  Target: ATXN2; (-) strand; PAM type: NRG; PAM sequence: TAG
gtaagggacttagtcctgaa

SEQ ID NO: 16656 - DNA, 20 bp, Artificial Sequence
  Description of Artificial Sequence: Synthetic oligonucleotide
  Target: ATXN2; (-) strand; PAM type: NRG; PAM sequence: TAG
cacatttgcagtaagggact

SEQ ID NO: 16657 - DNA, 20 bp, Artificial Sequence
  Description of Artificial Sequence: Synthetic oligonucleotide
  Target: ATXN2; (-) strand; PAM type: NRG; PAM sequence: GGG
agctaacacatttgcagtaa

SEQ ID NO: 16658 - DNA, 20 bp, Artificial Sequence
  Description of Artificial Sequence: Synthetic oligonucleotide
  Target: ATXN2; (-) strand; PAM type: NRG; PAM sequence: AGG
gagctaacacatttgcagta

SEQ ID NO: 16659 - DNA, 20 bp, Artificial Sequence
  Description of Artificial Sequence: Synthetic oligonucleotide
  Target: ATXN2; (-) strand; PAM type: NRG; PAM sequence: AAG
agagctaacacatttgcagt

SEQ ID NO: 16660 - DNA, 20 bp, Artificial Sequence
  Description of Artificial Sequence: Synthetic oligonucleotide
  Target: ATXN2; (-) strand; PAM type: NRG; PAM sequence: CAG
tgttagagctaacacatttg

SEQ ID NO: 16661 - DNA, 20 bp, Artificial Sequence
  Description of Artificial Sequence: Synthetic oligonucleotide
  Target: ATXN2; (-) strand; PAM type: NRG; PAM sequence: GAG
ctagcttgtgggagatgtta

SEQ ID NO: 16662 - DNA, 20 bp, Artificial Sequence
  Description of Artificial Sequence: Synthetic oligonucleotide
  Target: ATXN2; (-) strand; PAM type: NRG; PAM sequence: TAG
ctctagcttgtgggagatgt

SEQ ID NO: 16663 - DNA, 20 bp, Artificial Sequence
  Description of Artificial Sequence: Synthetic oligonucleotide
  Target: ATXN2; (-) strand; PAM type: NRG; PAM sequence: GAG
caagttcctctagcttgtgg

SEQ ID NO: 16664 - DNA, 20 bp, Artificial Sequence
  Description of Artificial Sequence: Synthetic oligonucleotide
  Target: ATXN2; (-) strand; PAM type: NRG; PAM sequence: GGG
cgcaagttcctctagcttgt

SEQ ID NO: 16665 - DNA, 20 bp, Artificial Sequence
  Description of Artificial Sequence: Synthetic oligonucleotide
  Target: ATXN2; (-) strand; PAM type: NRG; PAM sequence: TGG
tcgcaagttcctctagcttg

SEQ ID NO: 16666 - DNA, 20 bp, Artificial Sequence
  Description of Artificial Sequence: Synthetic oligonucleotide
  Target: ATXN2; (-) strand; PAM type: NRG; PAM sequence: TAG
aatatactcgcaagttcctc

SEQ ID NO: 16667 - DNA, 20 bp, Artificial Sequence
  Description of Artificial Sequence: Synthetic oligonucleotide
  Target: ATXN2; (-) strand; PAM type: NRG; PAM sequence: AAG
gtccttgttaatatactcgc

SEQ ID NO: 16668 - DNA, 20 bp, Artificial Sequence
  Description of Artificial Sequence: Synthetic oligonucleotide
  Target: ATXN2; (-) strand; PAM type: NRG; PAM sequence: CAG
tctaaccaaacacaggatgt

SEQ ID NO: 16669 - DNA, 20 bp, Artificial Sequence
  Description of Artificial Sequence: Synthetic oligonucleotide
  Target: ATXN2; (-) strand; PAM type: NRG; PAM sequence: AGG
tgtatattctaaccaaacac

SEQ ID NO: 16670 - DNA, 20 bp, Artificial Sequence
  Description of Artificial Sequence: Synthetic oligonucleotide
  Target: ATXN2; (-) strand; PAM type: NRG; PAM sequence: CAG
ctgtatattctaaccaaaca

SEQ ID NO: 16671 - DNA, 20 bp, Artificial Sequence
  Description of Artificial Sequence: Synthetic oligonucleotide
  Target: ATXN2; (-) strand; PAM type: NRG; PAM sequence: AAG
ccttctgcctataatgatac

SEQ ID NO: 16672 - DNA, 20 bp, Artificial Sequence
  Description of Artificial Sequence: Synthetic oligonucleotide
  Target: ATXN2; (-) strand; PAM type: NRG; PAM sequence: CAG
tcaagaataagttacttgta

SEQ ID NO: 16673 - DNA, 20 bp, Artificial Sequence
  Description of Artificial Sequence: Synthetic oligonucleotide
  Target: ATXN2; (-) strand; PAM type: NRG; PAM sequence: AAG
aatttgcattattcaagaat

SEQ ID NO: 16674 - DNA, 20 bp, Artificial Sequence
  Description of Artificial Sequence: Synthetic oligonucleotide
  Target: ATXN2; (-) strand; PAM type: NRG; PAM sequence: AAG
tagcaaaatttgcattattc

SEQ ID NO: 16675 - DNA, 20 bp, Artificial Sequence
  Description of Artificial Sequence: Synthetic oligonucleotide
  Target: ATXN2; (-) strand; PAM type: NRG; PAM sequence: TAG
atatagcaatttgtacatta

SEQ ID NO: 16676 - DNA, 20 bp, Artificial Sequence
  Description of Artificial Sequence: Synthetic oligonucleotide
  Target: ATXN2; (-) strand; PAM type: NRG; PAM sequence: TAG
aaaactttttaattcacata

SEQ ID NO: 16677 - DNA, 20 bp, Artificial Sequence
  Description of Artificial Sequence: Synthetic oligonucleotide
  Target: ATXN2; (-) strand; PAM type: NRG; PAM sequence: AAG
aaatattatgacagcaaatc

SEQ ID NO: 16678 - DNA, 20 bp, Artificial Sequence
  Description of Artificial Sequence: Synthetic oligonucleotide
  Target: ATXN2; (-) strand; PAM type: NRG; PAM sequence: CAG
agagcctttaaatattatga

SEQ ID NO: 16679 - DNA, 20 bp, Artificial Sequence
  Description of Artificial Sequence: Synthetic oligonucleotide
  Target: ATXN2; (-) strand; PAM type: NRG; PAM sequence: GAG
gagacaccatggtcttaata

SEQ ID NO: 16680 - DNA, 20 bp, Artificial Sequence
  Description of Artificial Sequence: Synthetic oligonucleotide
  Target: ATXN2; (-) strand; PAM type: NRG; PAM sequence: TAG
tagagacaccatggtcttaa

SEQ ID NO: 16681 - DNA, 20 bp, Artificial Sequence
  Description of Artificial Sequence: Synthetic oligonucleotide
  Target: ATXN2; (-) strand; PAM type: NRG; PAM sequence: TGG
aggattttgtagagacacca

SEQ ID NO: 16682 - DNA, 20 bp, Artificial Sequence
  Description of Artificial Sequence: Synthetic oligonucleotide
  Target: ATXN2; (-) strand; PAM type: NRG; PAM sequence: GAG
ggcagggcaaggattttgta

SEQ ID NO: 16683 - DNA, 20 bp, Artificial Sequence
  Description of Artificial Sequence: Synthetic oligonucleotide
  Target: ATXN2; (-) strand; PAM type: NRG; PAM sequence: TAG
tgggcagggcaaggattttg

SEQ ID NO: 16684 - DNA, 20 bp, Artificial Sequence
  Description of Artificial Sequence: Synthetic oligonucleotide
  Target: ATXN2; (-) strand; PAM type: NRG; PAM sequence: AGG
gcgagtatttgggcagggca

SEQ ID NO: 16685 - DNA, 20 bp, Artificial Sequence
  Description of Artificial Sequence: Synthetic oligonucleotide
  Target: ATXN2; (-) strand; PAM type: NRG; PAM sequence: AAG
agcgagtatttgggcagggc

SEQ ID NO: 16686 - DNA, 20 bp, Artificial Sequence
  Description of Artificial Sequence: Synthetic oligonucleotide
  Target: ATXN2; (-) strand; PAM type: NRG; PAM sequence: GGG
gaagagcgagtatttgggca

SEQ ID NO: 16687 - DNA, 20 bp, Artificial Sequence
  Description of Artificial Sequence: Synthetic oligonucleotide
  Target: ATXN2; (-) strand; PAM type: NRG; PAM sequence: AGG
ggaagagcgagtatttgggc

SEQ ID NO: 16688 - DNA, 20 bp, Artificial Sequence
  Description of Artificial Sequence: Synthetic oligonucleotide
  Target: ATXN2; (-) strand; PAM type: NRG; PAM sequence: CAG
gggaagagcgagtatttggg

SEQ ID NO: 16689 - DNA, 20 bp, Artificial Sequence
  Description of Artificial Sequence: Synthetic oligonucleotide
  Target: ATXN2; (-) strand; PAM type: NRG; PAM sequence: GGG
aaagggaagagcgagtattt

SEQ ID NO: 16690 - DNA, 20 bp, Artificial Sequence
  Description of Artificial Sequence: Synthetic oligonucleotide
  Target: ATXN2; (-) strand; PAM type: NRG; PAM sequence: TGG
caaagggaagagcgagtatt

SEQ ID NO: 16691 - DNA, 20 bp, Artificial Sequence
  Description of Artificial Sequence: Synthetic oligonucleotide
  Target: ATXN2; (-) strand; PAM type: NRG; PAM sequence: GAG
gggaggacaaagggaagagc

SEQ ID NO: 16692 - DNA, 20 bp, Artificial Sequence
  Description of Artificial Sequence: Synthetic oligonucleotide
  Target: ATXN2; (-) strand; PAM type: NRG; PAM sequence: GAG
aacggggaggacaaagggaa

SEQ ID NO: 16693 - DNA, 20 bp, Artificial Sequence
  Description of Artificial Sequence: Synthetic oligonucleotide
  Target: ATXN2; (-) strand; PAM type: NRG; PAM sequence: AAG
gcaacggggaggacaaaggg

SEQ ID NO: 16694 - DNA, 20 bp, Artificial Sequence
  Description of Artificial Sequence: Synthetic oligonucleotide
  Target: ATXN2; (-) strand; PAM type: NRG; PAM sequence: GGG
attgcaacggggaggacaaa

SEQ ID NO: 16695 - DNA, 20 bp, Artificial Sequence
  Description of Artificial Sequence: Synthetic oligonucleotide
  Target: ATXN2; (-) strand; PAM type: NRG; PAM sequence: AGG
gattgcaacggggaggacaa

SEQ ID NO: 16696 - DNA, 20 bp, Artificial Sequence
  Description of Artificial Sequence: Synthetic oligonucleotide
  Target: ATXN2; (-) strand; PAM type: NRG; PAM sequence: AAG
agattgcaacggggaggaca

SEQ ID NO: 16697 - DNA, 20 bp, Artificial Sequence
  Description of Artificial Sequence: Synthetic oligonucleotide
  Target: ATXN2; (-) strand; PAM type: NRG; PAM sequence: AGG
attcccagattgcaacgggg

SEQ ID NO: 16698 - DNA, 20 bp, Artificial Sequence
  Description of Artificial Sequence: Synthetic oligonucleotide
  Target: ATXN2; (-) strand; PAM type: NRG; PAM sequence: GAG
tattcccagattgcaacggg

SEQ ID NO: 16699 - DNA, 20 bp, Artificial Sequence
  Description of Artificial Sequence: Synthetic oligonucleotide
  Target: ATXN2; (-) strand; PAM type: NRG; PAM sequence: GGG
agtattcccagattgcaacg

SEQ ID NO: 16700 - DNA, 20 bp, Artificial Sequence
  Description of Artificial Sequence: Synthetic oligonucleotide
  Target: ATXN2; (-) strand; PAM type: NRG; PAM sequence: GGG
tagtattcccagattgcaac

SEQ ID NO: 16701 - DNA, 20 bp, Artificial Sequence
  Description of Artificial Sequence: Synthetic oligonucleotide
  Target: ATXN2; (-) strand; PAM type: NRG; PAM sequence: CGG
ttagtattcccagattgcaa

SEQ ID NO: 16702 - DNA, 20 bp, Artificial Sequence
  Description of Artificial Sequence: Synthetic oligonucleotide
  Target: ATXN2; (-) strand; PAM type: NRG; PAM sequence: CAG
taagcatttgttagtattcc

SEQ ID NO: 16703 - DNA, 20 bp, Artificial Sequence
  Description of Artificial Sequence: Synthetic oligonucleotide
  Target: ATXN2; (-) strand; PAM type: NRG; PAM sequence: TAG
atggactcataagcatttgt

SEQ ID NO: 16704 - DNA, 20 bp, Artificial Sequence
  Description of Artificial Sequence: Synthetic oligonucleotide
  Target: ATXN2; (-) strand; PAM type: NRG; PAM sequence: AAG
attgacatggatggactcat

SEQ ID NO: 16705 - DNA, 20 bp, Artificial Sequence
  Description of Artificial Sequence: Synthetic oligonucleotide
  Target: ATXN2; (-) strand; PAM type: NRG; PAM sequence: TGG
aagctgcttattgacatgga

SEQ ID NO: 16706 - DNA, 20 bp, Artificial Sequence
  Description of Artificial Sequence: Synthetic oligonucleotide
  Target: ATXN2; (-) strand; PAM type: NRG; PAM sequence: TGG
tacaaagctgcttattgaca

SEQ ID NO: 16707 - DNA, 20 bp, Artificial Sequence
  Description of Artificial Sequence: Synthetic oligonucleotide
  Target: ATXN2; (-) strand; PAM type: NRG; PAM sequence: AAG
aaaagatacaaagatgtaca

SEQ ID NO: 16708 - DNA, 20 bp, Artificial Sequence
  Description of Artificial Sequence: Synthetic oligonucleotide
  Target: ATXN2; (-) strand; PAM type: NRG; PAM sequence: AAG
atgaaggctgaaaagataca

SEQ ID NO: 16709 - DNA, 20 bp, Artificial Sequence
  Description of Artificial Sequence: Synthetic oligonucleotide
  Target: ATXN2; (-) strand; PAM type: NRG; PAM sequence: AAG
cagagggcatgaaggctgaa

SEQ ID NO: 16710 - DNA, 20 bp, Artificial Sequence
  Description of Artificial Sequence: Synthetic oligonucleotide
  Target: ATXN2; (-) strand; PAM type: NRG; PAM sequence: AGG
aagaaatccagagggcatga

SEQ ID NO: 16711 - DNA, 20 bp, Artificial Sequence
  Description of Artificial Sequence: Synthetic oligonucleotide
  Target: ATXN2; (-) strand; PAM type: NRG; PAM sequence: AAG
aaagaaatccagagggcatg

SEQ ID NO: 16712 - DNA, 20 bp, Artificial Sequence
  Description of Artificial Sequence: Synthetic oligonucleotide
  Target: ATXN2; (-) strand; PAM type: NRG; PAM sequence: GGG
ttgcaataaagaaatccaga

SEQ ID NO: 16713 - DNA, 20 bp, Artificial Sequence
  Description of Artificial Sequence: Synthetic oligonucleotide
  Target: ATXN2; (-) strand; PAM type: NRG; PAM sequence: AGG
attgcaataaagaaatccag

SEQ ID NO: 16714 - DNA, 20 bp, Artificial Sequence
  Description of Artificial Sequence: Synthetic oligonucleotide
  Target: ATXN2; (-) strand; PAM type: NRG; PAM sequence: GAG
aattgcaataaagaaatcca

SEQ ID NO: 16715 - DNA, 20 bp, Artificial Sequence
  Description of Artificial Sequence: Synthetic oligonucleotide
  Target: ATXN2; (-) strand; PAM type: NRG; PAM sequence: CAG
aaaattgcaataaagaaatc

SEQ ID NO: 16716 - DNA, 20 bp, Artificial Sequence
  Description of Artificial Sequence: Synthetic oligonucleotide
  Target: ATXN2; (-) strand; PAM type: NRG; PAM sequence: AAG
ctcagaaaaaaattgcaata

SEQ ID NO: 16717 - DNA, 20 bp, Artificial Sequence
  Description of Artificial Sequence: Synthetic oligonucleotide
  Target: ATXN2; (-) strand; PAM type: NRG; PAM sequence: CAG
agtagggggcaggagacact

SEQ ID NO: 16718 - DNA, 20 bp, Artificial Sequence
  Description of Artificial Sequence: Synthetic oligonucleotide
  Target: ATXN2; (-) strand; PAM type: NRG; PAM sequence: GAG
actttaccagtagggggcag

SEQ ID NO: 16719 - DNA, 20 bp, Artificial Sequence
  Description of Artificial Sequence: Synthetic oligonucleotide
  Target: ATXN2; (-) strand; PAM type: NRG; PAM sequence: AGG
ctactttaccagtagggggc

SEQ ID NO: 16720 - DNA, 20 bp, Artificial Sequence
  Description of Artificial Sequence: Synthetic oligonucleotide
  Target: ATXN2; (-) strand; PAM type: NRG; PAM sequence: CAG
tctactttaccagtaggggg

SEQ ID NO: 16721 - DNA, 20 bp, Artificial Sequence
  Description of Artificial Sequence: Synthetic oligonucleotide
  Target: ATXN2; (-) strand; PAM type: NRG; PAM sequence: GGG
ttttctactttaccagtagg

SEQ ID NO: 16722 - DNA, 20 bp, Artificial Sequence
  Description of Artificial Sequence: Synthetic oligonucleotide
  Target: ATXN2; (-) strand; PAM type: NRG; PAM sequence: GGG
tttttctactttaccagtag

SEQ ID NO: 16723 - DNA, 20 bp, Artificial Sequence
  Description of Artificial Sequence: Synthetic oligonucleotide
  Target: ATXN2; (-) strand; PAM type: NRG; PAM sequence: GGG
atttttctactttaccagta

SEQ ID NO: 16724 - DNA, 20 bp, Artificial Sequence
  Description of Artificial Sequence: Synthetic oligonucleotide
  Target: ATXN2; (-) strand; PAM type: NRG; PAM sequence: AGG
catttttctactttaccagt

SEQ ID NO: 16725 - DNA, 20 bp, Artificial Sequence
  Description of Artificial Sequence: Synthetic oligonucleotide
  Target: ATXN2; (-) strand; PAM type: NRG; PAM sequence: TAG
gcatttttctactttaccag

SEQ ID NO: 16726 - DNA, 20 bp, Artificial Sequence
  Description of Artificial Sequence: Synthetic oligonucleotide
  Target: ATXN2; (-) strand; PAM type: NRG; PAM sequence: CAG
cgggcatttttctactttac

SEQ ID NO: 16727 - DNA, 20 bp, Artificial Sequence
  Description of Artificial Sequence: Synthetic oligonucleotide
  Target: ATXN2; (-) strand; PAM type: NRG; PAM sequence: GGG
tagctggaagttcccaattc

SEQ ID NO: 16728 - DNA, 20 bp, Artificial Sequence
  Description of Artificial Sequence: Synthetic oligonucleotide
  Target: ATXN2; (-) strand; PAM type: NRG; PAM sequence: CGG
ttagctggaagttcccaatt

SEQ ID NO: 16729 - DNA, 20 bp, Artificial Sequence
  Description of Artificial Sequence: Synthetic oligonucleotide
  Target: ATXN2; (-) strand; PAM type: NRG; PAM sequence: AAG
aaatgagtgtcattagctgg

SEQ ID NO: 16730 - DNA, 20 bp, Artificial Sequence
  Description of Artificial Sequence: Synthetic oligonucleotide
  Target: ATXN2; (-) strand; PAM type: NRG; PAM sequence: TGG
ccaaaatgagtgtcattagc

SEQ ID NO: 16731 - DNA, 20 bp, Artificial Sequence
  Description of Artificial Sequence: Synthetic oligonucleotide
  Target: ATXN2; (-) strand; PAM type: NRG; PAM sequence: TAG
tgaaccaaaatgagtgtcat

SEQ ID NO: 16732 - DNA, 20 bp, Artificial Sequence
  Description of Artificial Sequence: Synthetic oligonucleotide
  Target: ATXN2; (-) strand; PAM type: NRG; PAM sequence: GAG
aatatctcctgaaccaaaat

SEQ ID NO: 16733 - DNA, 20 bp, Artificial Sequence
  Description of Artificial Sequence: Synthetic oligonucleotide
  Target: ATXN2; (-) strand; PAM type: NRG; PAM sequence: AAG
cgggctgacaccgattctgt

SEQ ID NO: 16734 - DNA, 20 bp, Artificial Sequence
  Description of Artificial Sequence: Synthetic oligonucleotide
  Target: ATXN2; (-) strand; PAM type: NRG; PAM sequence: GGG
cactgaaattccacatcctc

SEQ ID NO: 16735 - DNA, 20 bp, Artificial Sequence
  Description of Artificial Sequence: Synthetic oligonucleotide
  Target: ATXN2; (-) strand; PAM type: NRG; PAM sequence: CGG
gcactgaaattccacatcct

SEQ ID NO: 16736 - DNA, 20 bp, Artificial Sequence
  Description of Artificial Sequence: Synthetic oligonucleotide
  Target: ATXN2; (-) strand; PAM type: NRG; PAM sequence: CAG
gaaggttggccagagttggg

SEQ ID NO: 16737 - DNA, 20 bp, Artificial Sequence
  Description of Artificial Sequence: Synthetic oligonucleotide
  Target: ATXN2; (-) strand; PAM type: NRG; PAM sequence: GGG
gaggaaggttggccagagtt

SEQ ID NO: 16738 - DNA, 20 bp, Artificial Sequence
  Description of Artificial Sequence: Synthetic oligonucleotide
  Target: ATXN2; (-) strand; PAM type: NRG; PAM sequence: TGG
ggaggaaggttggccagagt

SEQ ID NO: 16739 - DNA, 20 bp, Artificial Sequence
  Description of Artificial Sequence: Synthetic oligonucleotide
  Target: ATXN2; (-) strand; PAM type: NRG; PAM sequence: GAG
aggaggaggaaggttggcca

SEQ ID NO: 16740 - DNA, 20 bp, Artificial Sequence
  Description of Artificial Sequence: Synthetic oligonucleotide
  Target: ATXN2; (-) strand; PAM type: NRG; PAM sequence: CAG
tcaggaggaggaaggttggc

SEQ ID NO: 16741 - DNA, 20 bp, Artificial Sequence
  Description of Artificial Sequence: Synthetic oligonucleotide
  Target: ATXN2; (-) strand; PAM type: NRG; PAM sequence: TGG
tgcttcaggaggaggaaggt

SEQ ID NO: 16742 - DNA, 20 bp, Artificial Sequence
  Description of Artificial Sequence: Synthetic oligonucleotide
  Target: ATXN2; (-) strand; PAM type: NRG; PAM sequence: AGG
gatctgcttcaggaggagga

SEQ ID NO: 16743 - DNA, 20 bp, Artificial Sequence
  Description of Artificial Sequence: Synthetic oligonucleotide
  Target: ATXN2; (-) strand; PAM type: NRG; PAM sequence: AAG
agatctgcttcaggaggagg

SEQ ID NO: 16744 - DNA, 20 bp, Artificial Sequence
  Description of Artificial Sequence: Synthetic oligonucleotide
  Target: ATXN2; (-) strand; PAM type: NRG; PAM sequence: AGG
tagagatctgcttcaggagg

SEQ ID NO: 16745 - DNA, 20 bp, Artificial Sequence
  Description of Artificial Sequence: Synthetic oligonucleotide
  Target: ATXN2; (-) strand; PAM type: NRG; PAM sequence: GAG
ttagagatctgcttcaggag

SEQ ID NO: 16746 - DNA, 20 bp, Artificial Sequence
  Description of Artificial Sequence: Synthetic oligonucleotide
  Target: ATXN2; (-) strand; PAM type: NRG; PAM sequence: AGG
gattagagatctgcttcagg

SEQ ID NO: 16747 - DNA, 20 bp, Artificial Sequence
  Description of Artificial Sequence: Synthetic oligonucleotide
  Target: ATXN2; (-) strand; PAM type: NRG; PAM sequence: GAG
ggattagagatctgcttcag

SEQ ID NO: 16748 - DNA, 20 bp, Artificial Sequence
  Description of Artificial Sequence: Synthetic oligonucleotide
  Target: ATXN2; (-) strand; PAM type: NRG; PAM sequence: AGG
gtggattagagatctgcttc

SEQ ID NO: 16749 - DNA, 20 bp, Artificial Sequence
  Description of Artificial Sequence: Synthetic oligonucleotide
  Target: ATXN2; (-) strand; PAM type: NRG; PAM sequence: CAG
ggtggattagagatctgctt

SEQ ID NO: 16750 - DNA, 20 bp, Artificial Sequence
  Description of Artificial Sequence: Synthetic oligonucleotide
  Target: ATXN2; (-) strand; PAM type: NRG; PAM sequence: GAG
ctattctctttggtggatta

SEQ ID NO: 16751 - DNA, 20 bp, Artificial Sequence
  Description of Artificial Sequence: Synthetic oligonucleotide
  Target: ATXN2; (-) strand; PAM type: NRG; PAM sequence: TAG
agctattctctttggtggat

SEQ ID NO: 16752 - DNA, 20 bp, Artificial Sequence
  Description of Artificial Sequence: Synthetic oligonucleotide
  Target: ATXN2; (-) strand; PAM type: NRG; PAM sequence: TGG
gactgagctattctctttgg

SEQ ID NO: 16753 - DNA, 20 bp, Artificial Sequence
  Description of Artificial Sequence: Synthetic oligonucleotide
  Target: ATXN2; (-) strand; PAM type: NRG; PAM sequence: TGG
caagactgagctattctctt

SEQ ID NO: 16754 - DNA, 20 bp, Artificial Sequence
  Description of Artificial Sequence: Synthetic oligonucleotide
  Target: ATXN2; (-) strand; PAM type: NRG; PAM sequence: GAG
ctctagaaaaagacaagact

SEQ ID NO: 16755 - DNA, 20 bp, Artificial Sequence
  Description of Artificial Sequence: Synthetic oligonucleotide
  Target: ATXN2; (-) strand; PAM type: NRG; PAM sequence: AAG
aggtatctctagaaaaagac

SEQ ID NO: 16756 - DNA, 20 bp, Artificial Sequence
  Description of Artificial Sequence: Synthetic oligonucleotide
  Target: ATXN2; (-) strand; PAM type: NRG; PAM sequence: AAG
gttcaaggtatctctagaaa

SEQ ID NO: 16757 - DNA, 20 bp, Artificial Sequence
  Description of Artificial Sequence: Synthetic oligonucleotide
  Target: ATXN2; (-) strand; PAM type: NRG; PAM sequence: TAG
gttctggttcaaggtatctc

SEQ ID NO: 16758 - DNA, 20 bp, Artificial Sequence
  Description of Artificial Sequence: Synthetic oligonucleotide
  Target: ATXN2; (-) strand; PAM type: NRG; PAM sequence: AGG
tcacccttagttctggttca

SEQ ID NO: 16759 - DNA, 20 bp, Artificial Sequence
  Description of Artificial Sequence: Synthetic oligonucleotide
  Target: ATXN2; (-) strand; PAM type: NRG; PAM sequence: AAG
ttcacccttagttctggttc

SEQ ID NO: 16760 - DNA, 20 bp, Artificial Sequence
  Description of Artificial Sequence: Synthetic oligonucleotide
  Target: ATXN2; (-) strand; PAM type: NRG; PAM sequence: TGG
ttcttcttcacccttagttc

SEQ ID NO: 16761 - DNA, 20 bp, Artificial Sequence
  Description of Artificial Sequence: Synthetic oligonucleotide
  Target: ATXN2; (-) strand; PAM type: NRG; PAM sequence: TAG
tgatttttcttcttcaccct

SEQ ID NO: 16762 - DNA, 20 bp, Artificial Sequence
  Description of Artificial Sequence: Synthetic oligonucleotide
  Target: ATXN2; (-) strand; PAM type: NRG; PAM sequence: TAG
attttgaatatcccggaagg

SEQ ID NO: 16763 - DNA, 20 bp, Artificial Sequence
  Description of Artificial Sequence: Synthetic oligonucleotide
  Target: ATXN2; (-) strand; PAM type: NRG; PAM sequence: AGG
tgcattttgaatatcccgga

SEQ ID NO: 16764 - DNA, 20 bp, Artificial Sequence
  Description of Artificial Sequence: Synthetic oligonucleotide
  Target: ATXN2; (-) strand; PAM type: NRG; PAM sequence: AAG
gtgcattttgaatatcccgg

SEQ ID NO: 16765 - DNA, 20 bp, Artificial Sequence
  Description of Artificial Sequence: Synthetic oligonucleotide
  Target: ATXN2; (-) strand; PAM type: NRG; PAM sequence: CGG
agggtgcattttgaatatcc

SEQ ID NO: 16766 - DNA, 20 bp, Artificial Sequence
  Description of Artificial Sequence: Synthetic oligonucleotide
  Target: ATXN2; (-) strand; PAM type: NRG; PAM sequence: GGG
tatcaaagcaggtgtgctaa

SEQ ID NO: 16767 - DNA, 20 bp, Artificial Sequence
  Description of Artificial Sequence: Synthetic oligonucleotide
  Target: ATXN2; (-) strand; PAM type: NRG; PAM sequence: AGG
atatcaaagcaggtgtgcta

SEQ ID NO: 16768 - DNA, 20 bp, Artificial Sequence
  Description of Artificial Sequence: Synthetic oligonucleotide
  Target: ATXN2; (-) strand; PAM type: NRG; PAM sequence: AAG
aatatcaaagcaggtgtgct

SEQ ID NO: 16769 - DNA, 20 bp, Artificial Sequence
  Description of Artificial Sequence: Synthetic oligonucleotide
  Target: ATXN2; (-) strand; PAM type: NRG; PAM sequence: AGG
aggatacttaatatcaaagc

SEQ ID NO: 16770 - DNA, 20 bp, Artificial Sequence
  Description of Artificial Sequence: Synthetic oligonucleotide
  Target: ATXN2; (-) strand; PAM type: NRG; PAM sequence: CAG
taggatacttaatatcaaag

SEQ ID NO: 16771 - DNA, 20 bp, Artificial Sequence
  Description of Artificial Sequence: Synthetic oligonucleotide
  Target: ATXN2; (-) strand; PAM type: NRG; PAM sequence: AAG
ttgtaggatacttaatatca

SEQ ID NO: 16772 - DNA, 20 bp, Artificial Sequence
  Description of Artificial Sequence: Synthetic oligonucleotide
  Target: ATXN2; (-) strand; PAM type: NRG; PAM sequence: AGG
tgtataagctacttctttgt

SEQ ID NO: 16773 - DNA, 20 bp, Artificial Sequence
  Description of Artificial Sequence: Synthetic oligonucleotide
  Target: ATXN2; (-) strand; PAM type: NRG; PAM sequence: TAG
ctgtataagctacttctttg

SEQ ID NO: 16774 - DNA, 20 bp, Artificial Sequence
  Description of Artificial Sequence: Synthetic oligonucleotide
  Target: ATXN2; (-) strand; PAM type: NRG; PAM sequence: AAG
aagttagtgtgtgtctgtat

SEQ ID NO: 16775 - DNA, 20 bp, Artificial Sequence
  Description of Artificial Sequence: Synthetic oligonucleotide
  Target: ATXN2; (-) strand; PAM type: NRG; PAM sequence: TAG
gttttaaaaactgatcaagt

SEQ ID NO: 16776 - DNA, 20 bp, Artificial Sequence
  Description of Artificial Sequence: Synthetic oligonucleotide
  Target: ATXN2; (-) strand; PAM type: NRG; PAM sequence: AAG
aaaagttttaaaaactgatc

SEQ ID NO: 16777 - DNA, 20 bp, Artificial Sequence
  Description of Artificial Sequence: Synthetic oligonucleotide
  Target: ATXN2; (-) strand; PAM type: NRG; PAM sequence: AAG
aaaaatttaaaaaataaaaa

SEQ ID NO: 16778 - DNA, 20 bp, Artificial Sequence
  Description of Artificial Sequence: Synthetic oligonucleotide
  Target: ATXN2; (-) strand; PAM type: NRG; PAM sequence: TAG
agggaaaaacttttactttg

SEQ ID NO: 16779 - DNA, 20 bp, Artificial Sequence
  Description of Artificial Sequence: Synthetic oligonucleotide
  Target: ATXN2; (-) strand; PAM type: NRG; PAM sequence: GGG
tggttcaacttttaagttaa

SEQ ID NO: 16780 - DNA, 20 bp, Artificial Sequence
  Description of Artificial Sequence: Synthetic oligonucleotide
  Target: ATXN2; (-) strand; PAM type: NRG; PAM sequence: AGG
gtggttcaacttttaagtta

SEQ ID NO: 16781 - DNA, 20 bp, Artificial Sequence
  Description of Artificial Sequence: Synthetic oligonucleotide
  Target: ATXN2; (-) strand; PAM type: NRG; PAM sequence: AAG
agtggttcaacttttaagtt

SEQ ID NO: 16782 - DNA, 20 bp, Artificial Sequence
  Description of Artificial Sequence: Synthetic oligonucleotide
  Target: ATXN2; (-) strand; PAM type: NRG; PAM sequence: AAG
tctacagtggttcaactttt

SEQ ID NO: 16783 - DNA, 20 bp, Artificial Sequence
  Description of Artificial Sequence: Synthetic oligonucleotide
  Target: ATXN2; (-) strand; PAM type: NRG; PAM sequence: TGG
gaggtgatcactgtctacag

SEQ ID NO: 16784 - DNA, 20 bp, Artificial Sequence
  Description of Artificial Sequence: Synthetic oligonucleotide
  Target: ATXN2; (-) strand; PAM type: NRG; PAM sequence: CAG
gatgaggtgatcactgtcta

SEQ ID NO: 16785 - DNA, 20 bp, Artificial Sequence
  Description of Artificial Sequence: Synthetic oligonucleotide
  Target: ATXN2; (-) strand; PAM type: NRG; PAM sequence: AGG
tttataaatcaagtttgatg

SEQ ID NO: 16786 - DNA, 20 bp, Artificial Sequence
  Description of Artificial Sequence: Synthetic oligonucleotide
  Target: ATXN2; (-) strand; PAM type: NRG; PAM sequence: GAG
atttataaatcaagtttgat

SEQ ID NO: 16787 - DNA, 20 bp, Artificial Sequence
  Description of Artificial Sequence: Synthetic oligonucleotide
  Target: ATXN2; (-) strand; PAM type: NRG; PAM sequence: AAG
cggattattatttataaatc

SEQ ID NO: 16788 - DNA, 20 bp, Artificial Sequence
  Description of Artificial Sequence: Synthetic oligonucleotide
  Target: ATXN2; (-) strand; PAM type: NRG; PAM sequence: CGG
aattcttaccgtcaaactga

SEQ ID NO: 16789 - DNA, 20 bp, Artificial Sequence
  Description of Artificial Sequence: Synthetic oligonucleotide
  Target: ATXN2; (-) strand; PAM type: NRG; PAM sequence: CAG
tactaaacttgacaaagttt

SEQ ID NO: 16790 - DNA, 20 bp, Artificial Sequence
  Description of Artificial Sequence: Synthetic oligonucleotide
  Target: ATXN2; (-) strand; PAM type: NRG; PAM sequence: AAG
cccttttactaaacttgaca

SEQ ID NO: 16791 - DNA, 20 bp, Artificial Sequence
  Description of Artificial Sequence: Synthetic oligonucleotide
  Target: ATXN2; (-) strand; PAM type: NRG; PAM sequence: TGG
aaaaaaaaaaaatcaagact

SEQ ID NO: 16792 - DNA, 20 bp, Artificial Sequence
  Description of Artificial Sequence: Synthetic oligonucleotide
  Target: ATXN2; (-) strand; PAM type: NRG; PAM sequence: AAG
aaaaaaaaaaaaaaaaaatc

SEQ ID NO: 16793 - DNA, 20 bp, Artificial Sequence
  Description of Artificial Sequence: Synthetic oligonucleotide
  Target: ATXN2; (-) strand; PAM type: NRG; PAM sequence: GAG
gctagcaaaagaagtaacaa

SEQ ID NO: 16794 - DNA, 20 bp, Artificial Sequence
  Description of Artificial Sequence: Synthetic oligonucleotide
  Target: ATXN2; (-) strand; PAM type: NRG; PAM sequence: AAG
cagctagcaaaagaagtaac

SEQ ID NO: 16795 - DNA, 20 bp, Artificial Sequence
  Description of Artificial Sequence: Synthetic oligonucleotide
  Target: ATXN2; (-) strand; PAM type: NRG; PAM sequence: AAG
aacacatcagctagcaaaag

SEQ ID NO: 16796 - DNA, 20 bp, Artificial Sequence
  Description of Artificial Sequence: Synthetic oligonucleotide
  Target: ATXN2; (-) strand; PAM type: NRG; PAM sequence: AAG
atgaacacatcagctagcaa

SEQ ID NO: 16797 - DNA, 20 bp, Artificial Sequence
  Description of Artificial Sequence: Synthetic oligonucleotide
  Target: ATXN2; (-) strand; PAM type: NRG; PAM sequence: TAG
aaagtcatgaacacatcagc

SEQ ID NO: 16798 - DNA, 20 bp, Artificial Sequence
  Description of Artificial Sequence: Synthetic oligonucleotide
  Target: ATXN2; (-) strand; PAM type: NRG; PAM sequence: CAG
cttgaaagtcatgaacacat

SEQ ID NO: 16799 - DNA, 20 bp, Artificial Sequence
  Description of Artificial Sequence: Synthetic oligonucleotide
  Target: ATXN2; (-) strand; PAM type: NRG; PAM sequence: AAG
tattttttaataacccttga

SEQ ID NO: 16800 - DNA, 20 bp, Artificial Sequence
  Description of Artificial Sequence: Synthetic oligonucleotide
  Target: ATXN2; (-) strand; PAM type: NRG; PAM sequence: AAG
gctctgcttgccgaaactgg

SEQ ID NO: 16801 - DNA, 20 bp, Artificial Sequence
  Description of Artificial Sequence: Synthetic oligonucleotide
  Target: ATXN2; (-) strand; PAM type: NRG; PAM sequence: TGG
ccagctctgcttgccgaaac

SEQ ID NO: 16802 - DNA, 20 bp, Artificial Sequence
  Description of Artificial Sequence: Synthetic oligonucleotide
  Target: ATXN2; (-) strand; PAM type: NRG; PAM sequence: CAG
tcagagtcccgcaggtaccc

SEQ ID NO: 16803 - DNA, 20 bp, Artificial Sequence
  Description of Artificial Sequence: Synthetic oligonucleotide
  Target: ATXN2; (-) strand; PAM type: NRG; PAM sequence: AGG
atgctgtttcagagtcccgc

SEQ ID NO: 16804 - DNA, 20 bp, Artificial Sequence
  Description of Artificial Sequence: Synthetic oligonucleotide
  Target: ATXN2; (-) strand; PAM type: NRG; PAM sequence: CAG
tatgctgtttcagagtcccg

SEQ ID NO: 16805 - DNA, 20 bp, Artificial Sequence
  Description of Artificial Sequence: Synthetic oligonucleotide
  Target: ATXN2; (-) strand; PAM type: NRG; PAM sequence: GAG
taattccatatgctgtttca

SEQ ID NO: 16806 - DNA, 20 bp, Artificial Sequence
  Description of Artificial Sequence: Synthetic oligonucleotide
  Target: ATXN2; (-) strand; PAM type: NRG; PAM sequence: CAG
cataattccatatgctgttt

SEQ ID NO: 16807 - DNA, 20 bp, Artificial Sequence
  Description of Artificial Sequence: Synthetic oligonucleotide
  Target: ATXN2; (-) strand; PAM type: NRG; PAM sequence: GGG
agaggcatttaggaacttgg

SEQ ID NO: 16808 - DNA, 20 bp, Artificial Sequence
  Description of Artificial Sequence: Synthetic oligonucleotide
  Target: ATXN2; (-) strand; PAM type: NRG; PAM sequence: GGG
tagaggcatttaggaacttg

SEQ ID NO: 16809 - DNA, 20 bp, Artificial Sequence
  Description of Artificial Sequence: Synthetic oligonucleotide
  Target: ATXN2; (-) strand; PAM type: NRG; PAM sequence: GGG
gtagaggcatttaggaactt

SEQ ID NO: 16810 - DNA, 20 bp, Artificial Sequence
  Description of Artificial Sequence: Synthetic oligonucleotide
  Target: ATXN2; (-) strand; PAM type: NRG; PAM sequence: TGG
agtagaggcatttaggaact

SEQ ID NO: 16811 - DNA, 20 bp, Artificial Sequence
  Description of Artificial Sequence: Synthetic oligonucleotide
  Target: ATXN2; (-) strand; PAM type: NRG; PAM sequence: AGG
tggaccgagtagaggcattt

SEQ ID NO: 16812 - DNA, 20 bp, Artificial Sequence
  Description of Artificial Sequence: Synthetic oligonucleotide
  Target: ATXN2; (-) strand; PAM type: NRG; PAM sequence: TAG
ttggaccgagtagaggcatt

SEQ ID NO: 16813 - DNA, 20 bp, Artificial Sequence
  Description of Artificial Sequence: Synthetic oligonucleotide
  Target: ATXN2; (-) strand; PAM type: NRG; PAM sequence: AGG
aagatacttggaccgagtag

SEQ ID NO: 16814 - DNA, 20 bp, Artificial Sequence
  Description of Artificial Sequence: Synthetic oligonucleotide
  Target: ATXN2; (-) strand; PAM type: NRG; PAM sequence: GAG
gaagatacttggaccgagta

SEQ ID NO: 16815 - DNA, 20 bp, Artificial Sequence
  Description of Artificial Sequence: Synthetic oligonucleotide
  Target: ATXN2; (-) strand; PAM type: NRG; PAM sequence: TAG
tggaagatacttggaccgag

SEQ ID NO: 16816 - DNA, 20 bp, Artificial Sequence
  Description of Artificial Sequence: Synthetic oligonucleotide
  Target: ATXN2; (-) strand; PAM type: NRG; PAM sequence: GAG
cagtggaagatacttggacc

SEQ ID NO: 16817 - DNA, 20 bp, Artificial Sequence
  Description of Artificial Sequence: Synthetic oligonucleotide
  Target: ATXN2; (-) strand; PAM type: NRG; PAM sequence: TGG
cacttgcagtggaagatact

SEQ ID NO: 16818 - DNA, 20 bp, Artificial Sequence
  Description of Artificial Sequence: Synthetic oligonucleotide
  Target: ATXN2; (-) strand; PAM type: NRG; PAM sequence: AAG
taacagttcacttgcagtgg

SEQ ID NO: 16819 - DNA, 20 bp, Artificial Sequence
  Description of Artificial Sequence: Synthetic oligonucleotide
  Target: ATXN2; (-) strand; PAM type: NRG; PAM sequence: TGG
tgctaacagttcacttgcag

SEQ ID NO: 16820 - DNA, 20 bp, Artificial Sequence
  Description of Artificial Sequence: Synthetic oligonucleotide
  Target: ATXN2; (-) strand; PAM type: NRG; PAM sequence: CAG
gaatgctaacagttcacttg

SEQ ID NO: 16821 - DNA, 20 bp, Artificial Sequence
  Description of Artificial Sequence: Synthetic oligonucleotide
  Target: ATXN2; (-) strand; PAM type: NRG; PAM sequence: CAG
acatccaataggaatgctaa

SEQ ID NO: 16822 - DNA, 20 bp, Artificial Sequence
  Description of Artificial Sequence: Synthetic oligonucleotide
  Target: ATXN2; (-) strand; PAM type: NRG; PAM sequence: AGG
gatttcttgtaacatccaat

SEQ ID NO: 16823 - DNA, 20 bp, Artificial Sequence
  Description of Artificial Sequence: Synthetic oligonucleotide
  Target: ATXN2; (-) strand; PAM type: NRG; PAM sequence: TAG
tgatttcttgtaacatccaa

SEQ ID NO: 16824 - DNA, 20 bp, Artificial Sequence
  Description of Artificial Sequence: Synthetic oligonucleotide
  Target: ATXN2; (-) strand; PAM type: NRG; PAM sequence: TAG
caactggaagcacagaaaac

SEQ ID NO: 16825 - DNA, 20 bp, Artificial Sequence
  Description of Artificial Sequence: Synthetic oligonucleotide
  Target: ATXN2; (-) strand; PAM type: NRG; PAM sequence: CAG
gcttctaccaactggaagca

SEQ ID NO: 16826 - DNA, 20 bp, Artificial Sequence
  Description of Artificial Sequence: Synthetic oligonucleotide
  Target: ATXN2; (-) strand; PAM type: NRG; PAM sequence: AAG
ctactgcttctaccaactgg

SEQ ID NO: 16827 - DNA, 20 bp, Artificial Sequence
  Description of Artificial Sequence: Synthetic oligonucleotide
  Target: ATXN2; (-) strand; PAM type: NRG; PAM sequence: TGG
cttctactgcttctaccaac

SEQ ID NO: 16828 - DNA, 20 bp, Artificial Sequence
  Description of Artificial Sequence: Synthetic oligonucleotide
  Target: ATXN2; (-) strand; PAM type: NRG; PAM sequence: AGG
gctgccctggaggaaccgaa

SEQ ID NO: 16829 - DNA, 20 bp, Artificial Sequence
  Description of Artificial Sequence: Synthetic oligonucleotide
  Target: ATXN2; (-) strand; PAM type: NRG; PAM sequence: AAG
ggctgccctggaggaaccga

SEQ ID NO: 16830 - DNA, 20 bp, Artificial Sequence
  Description of Artificial Sequence: Synthetic oligonucleotide
  Target: ATXN2; (-) strand; PAM type: NRG; PAM sequence: AGG
cagttgtaaggctgccctgg

SEQ ID NO: 16831 - DNA, 20 bp, Artificial Sequence
  Description of Artificial Sequence: Synthetic oligonucleotide
  Target: ATXN2; (-) strand; PAM type: NRG; PAM sequence: GAG
gcagttgtaaggctgccctg

SEQ ID NO: 16832 - DNA, 20 bp, Artificial Sequence
  Description of Artificial Sequence: Synthetic oligonucleotide
  Target: ATXN2; (-) strand; PAM type: NRG; PAM sequence: TGG
cagcagttgtaaggctgccc

SEQ ID NO: 16833 - DNA, 20 bp, Artificial Sequence
  Description of Artificial Sequence: Synthetic oligonucleotide
  Target: ATXN2; (-) strand; PAM type: NRG; PAM sequence: AGG
caccaccaacagcagttgta

SEQ ID NO: 16834 - DNA, 20 bp, Artificial Sequence
  Description of Artificial Sequence: Synthetic oligonucleotide
  Target: ATXN2; (-) strand; PAM type: NRG; PAM sequence: AAG
ccaccaccaacagcagttgt

SEQ ID NO: 16835 - DNA, 20 bp, Artificial Sequence
  Description of Artificial Sequence: Synthetic oligonucleotide
  Target: ATXN2; (-) strand; PAM type: NRG; PAM sequence: CAG
tacaagcccaccaccaacag

SEQ ID NO: 16836 - DNA, 20 bp, Artificial Sequence
  Description of Artificial Sequence: Synthetic oligonucleotide
  Target: ATXN2; (-) strand; PAM type: NRG; PAM sequence: CAG
cagtacaagcccaccaccaa

SEQ ID NO: 16837 - DNA, 20 bp, Artificial Sequence
  Description of Artificial Sequence: Synthetic oligonucleotide
  Target: ATXN2; (-) strand; PAM type: NRG; PAM sequence: AAG
cgcttttctttttacagtac

SEQ ID NO: 16838 - DNA, 20 bp, Artificial Sequence
  Description of Artificial Sequence: Synthetic oligonucleotide
  Target: ATXN2; (-) strand; PAM type: NRG; PAM sequence: CAG
aatgttcgcttttcttttta

SEQ ID NO: 16839 - DNA, 20 bp, Artificial Sequence
  Description of Artificial Sequence: Synthetic oligonucleotide
  Target: ATXN2; (-) strand; PAM type: NRG; PAM sequence: CAG
aggctgatgtgtggtgttgc

SEQ ID NO: 16840 - DNA, 20 bp, Artificial Sequence
  Description of Artificial Sequence: Synthetic oligonucleotide
  Target: ATXN2; (-) strand; PAM type: NRG; PAM sequence: TGG
agagacactaggctgatgtg

SEQ ID NO: 16841 - DNA, 20 bp, Artificial Sequence
  Description of Artificial Sequence: Synthetic oligonucleotide
  Target: ATXN2; (-) strand; PAM type: NRG; PAM sequence: AGG
tcatgtgctgcagagacact

SEQ ID NO: 16842 - DNA, 20 bp, Artificial Sequence
  Description of Artificial Sequence: Synthetic oligonucleotide
  Target: ATXN2; (-) strand; PAM type: NRG; PAM sequence: TAG
atcatgtgctgcagagacac

SEQ ID NO: 16843 - DNA, 20 bp, Artificial Sequence
  Description of Artificial Sequence: Synthetic oligonucleotide
  Target: ATXN2; (-) strand; PAM type: NRG; PAM sequence: GAG
gtttacaatcatgtgctgca

SEQ ID NO: 16844 - DNA, 20 bp, Artificial Sequence
  Description of Artificial Sequence: Synthetic oligonucleotide
  Target: ATXN2; (-) strand; PAM type: NRG; PAM sequence: CAG
tagtttacaatcatgtgctg

SEQ ID NO: 16845 - DNA, 20 bp, Artificial Sequence
  Description of Artificial Sequence: Synthetic oligonucleotide
  Target: ATXN2; (-) strand; PAM type: NRG; PAM sequence: TAG
ttgttcagctagcacgagga

SEQ ID NO: 16846 - DNA, 20 bp, Artificial Sequence
  Description of Artificial Sequence: Synthetic oligonucleotide
  Target: ATXN2; (-) strand; PAM type: NRG; PAM sequence: AGG
agttttgttcagctagcacg

SEQ ID NO: 16847 - DNA, 20 bp, Artificial Sequence
  Description of Artificial Sequence: Synthetic oligonucleotide
  Target: ATXN2; (-) strand; PAM type: NRG; PAM sequence: GAG
gagttttgttcagctagcac

SEQ ID NO: 16848 - DNA, 20 bp, Artificial Sequence
  Description of Artificial Sequence: Synthetic oligonucleotide
  Target: ATXN2; (-) strand; PAM type: NRG; PAM sequence: TAG
aattttgagttttgttcagc

SEQ ID NO: 16849 - DNA, 20 bp, Artificial Sequence
  Description of Artificial Sequence: Synthetic oligonucleotide
  Target: ATXN2; (-) strand; PAM type: NRG; PAM sequence: CAG
attcaattttgagttttgtt

SEQ ID NO: 16850 - DNA, 20 bp, Artificial Sequence
  Description of Artificial Sequence: Synthetic oligonucleotide
  Target: ATXN2; (-) strand; PAM type: NRG; PAM sequence: GAG
ggaaaagcgaattcaatttt

SEQ ID NO: 16851 - DNA, 20 bp, Artificial Sequence
  Description of Artificial Sequence: Synthetic oligonucleotide
  Target: ATXN2; (-) strand; PAM type: NRG; PAM sequence: AAG
ggtgcagatgggagggggaa

SEQ ID NO: 16852 - DNA, 20 bp, Artificial Sequence
  Description of Artificial Sequence: Synthetic oligonucleotide
  Target: ATXN2; (-) strand; PAM type: NRG; PAM sequence: GGG
actttggtgcagatgggagg

SEQ ID NO: 16853 - DNA, 20 bp, Artificial Sequence
  Description of Artificial Sequence: Synthetic oligonucleotide
  Target: ATXN2; (-) strand; PAM type: NRG; PAM sequence: GGG
cactttggtgcagatgggag

SEQ ID NO: 16854 - DNA, 20 bp, Artificial Sequence
  Description of Artificial Sequence: Synthetic oligonucleotide
  Target: ATXN2; (-) strand; PAM type: NRG; PAM sequence: GGG
ccactttggtgcagatggga

SEQ ID NO: 16855 - DNA, 20 bp, Artificial Sequence
  Description of Artificial Sequence: Synthetic oligonucleotide
  Target: ATXN2; (-) strand; PAM type: NRG; PAM sequence: AGG
cccactttggtgcagatggg

SEQ ID NO: 16856 - DNA, 20 bp, Artificial Sequence
  Description of Artificial Sequence: Synthetic oligonucleotide
  Target: ATXN2; (-) strand; PAM type: NRG; PAM sequence: GAG
ccccactttggtgcagatgg

SEQ ID NO: 16857 - DNA, 20 bp, Artificial Sequence
  Description of Artificial Sequence: Synthetic oligonucleotide
  Target: ATXN2; (-) strand; PAM type: NRG; PAM sequence: GGG
ctccccactttggtgcagat

SEQ ID NO: 16858 - DNA, 20 bp, Artificial Sequence
  Description of Artificial Sequence: Synthetic oligonucleotide
  Target: ATXN2; (-) strand; PAM type: NRG; PAM sequence: TGG
cctccccactttggtgcaga

SEQ ID NO: 16859 - DNA, 20 bp, Artificial Sequence
  Description of Artificial Sequence: Synthetic oligonucleotide
  Target: ATXN2; (-) strand; PAM type: NRG; PAM sequence: CAG
caaccctccccactttggtg

SEQ ID NO: 16860 - DNA, 20 bp, Artificial Sequence
  Description of Artificial Sequence: Synthetic oligonucleotide
  Target: ATXN2; (-) strand; PAM type: NRG; PAM sequence: TGG
ccacccaaccctccccactt

SEQ ID NO: 16861 - DNA, 20 bp, Artificial Sequence
  Description of Artificial Sequence: Synthetic oligonucleotide
  Target: ATXN2; (-) strand; PAM type: NRG; PAM sequence: TGG
gaagtggttttacgtctgac

SEQ ID NO: 16862 - DNA, 20 bp, Artificial Sequence
  Description of Artificial Sequence: Synthetic oligonucleotide
  Target: ATXN2; (-) strand; PAM type: NRG; PAM sequence: TGG
tctgggagttttatctgaag

SEQ ID NO: 16863 - DNA, 20 bp, Artificial Sequence
  Description of Artificial Sequence: Synthetic oligonucleotide
  Target: ATXN2; (-) strand; PAM type: NRG; PAM sequence: AAG
tcttctgggagttttatctg

SEQ ID NO: 16864 - DNA, 20 bp, Artificial Sequence
  Description of Artificial Sequence: Synthetic oligonucleotide
  Target: ATXN2; (-) strand; PAM type: NRG; PAM sequence: GAG
cccatgaacaagtcttctgg

SEQ ID NO: 16865 - DNA, 20 bp, Artificial Sequence
  Description of Artificial Sequence: Synthetic oligonucleotide
  Target: ATXN2; (-) strand; PAM type: NRG; PAM sequence: GGG
accccatgaacaagtcttct

SEQ ID NO: 16866 - DNA, 20 bp, Artificial Sequence
  Description of Artificial Sequence: Synthetic oligonucleotide
  Target: ATXN2; (-) strand; PAM type: NRG; PAM sequence: TGG
taccccatgaacaagtcttc

SEQ ID NO: 16867 - DNA, 20 bp, Artificial Sequence
  Description of Artificial Sequence: Synthetic oligonucleotide
  Target: ATXN2; (-) strand; PAM type: NRG; PAM sequence: AAG
tttttttctaccccatgaac

SEQ ID NO: 16868 - DNA, 20 bp, Artificial Sequence
  Description of Artificial Sequence: Synthetic oligonucleotide
  Target: ATXN2; (-) strand; PAM type: NRG; PAM sequence: AGG
tttggggagggggtttgtta

SEQ ID NO: 16869 - DNA, 20 bp, Artificial Sequence
  Description of Artificial Sequence: Synthetic oligonucleotide
  Target: ATXN2; (-) strand; PAM type: NRG; PAM sequence: AAG
atttggggagggggtttgtt

SEQ ID NO: 16870 - DNA, 20 bp, Artificial Sequence
  Description of Artificial Sequence: Synthetic oligonucleotide
  Target: ATXN2; (-) strand; PAM type: NRG; PAM sequence: GGG
ttggctaatatttggggagg

SEQ ID NO: 16871 - DNA, 20 bp, Artificial Sequence
  Description of Artificial Sequence: Synthetic oligonucleotide
  Target: ATXN2; (-) strand; PAM type: NRG; PAM sequence: GGG
cttggctaatatttggggag

SEQ ID NO: 16872 - DNA, 20 bp, Artificial Sequence
  Description of Artificial Sequence: Synthetic oligonucleotide
  Target: ATXN2; (-) strand; PAM type: NRG; PAM sequence: GGG
gcttggctaatatttgggga

SEQ ID NO: 16873 - DNA, 20 bp, Artificial Sequence
  Description of Artificial Sequence: Synthetic oligonucleotide
  Target: ATXN2; (-) strand; PAM type: NRG; PAM sequence: AGG
tgcttggctaatatttgggg

SEQ ID NO: 16874 - DNA, 20 bp, Artificial Sequence
  Description of Artificial Sequence: Synthetic oligonucleotide
  Target: ATXN2; (-) strand; PAM type: NRG; PAM sequence: GAG
gtgcttggctaatatttggg

SEQ ID NO: 16875 - DNA, 20 bp, Artificial Sequence
  Description of Artificial Sequence: Synthetic oligonucleotide
  Target: ATXN2; (-) strand; PAM type: NRG; PAM sequence: GGG
tggtgcttggctaatatttg

SEQ ID NO: 16876 - DNA, 20 bp, Artificial Sequence
  Description of Artificial Sequence: Synthetic oligonucleotide
  Target: ATXN2; (-) strand; PAM type: NRG; PAM sequence: GGG
ctggtgcttggctaatattt

SEQ ID NO: 16877 - DNA, 20 bp, Artificial Sequence
  Description of Artificial Sequence: Synthetic oligonucleotide
  Target: ATXN2; (-) strand; PAM type: NRG; PAM sequence: TGG
actggtgcttggctaatatt

SEQ ID NO: 16878 - DNA, 20 bp, Artificial Sequence
  Description of Artificial Sequence: Synthetic oligonucleotide
  Target: ATXN2; (-) strand; PAM type: NRG; PAM sequence: TGG
ctgaaagcaatactggtgct

SEQ ID NO: 16879 - DNA, 20 bp, Artificial Sequence
  Description of Artificial Sequence: Synthetic oligonucleotide
  Target: ATXN2; (-) strand; PAM type: NRG; PAM sequence: TGG
tgttattctgaaagcaatac

SEQ ID NO: 16880 - DNA, 20 bp, Artificial Sequence
  Description of Artificial Sequence: Synthetic oligonucleotide
  Target: ATXN2; (-) strand; PAM type: NRG; PAM sequence: AAG
agtctgacctgttattctga

SEQ ID NO: 16881 - DNA, 20 bp, Artificial Sequence
  Description of Artificial Sequence: Synthetic oligonucleotide
  Target: ATXN2; (-) strand; PAM type: NRG; PAM sequence: CAG
gctgccatggcgatacttca

SEQ ID NO: 16882 - DNA, 20 bp, Artificial Sequence
  Description of Artificial Sequence: Synthetic oligonucleotide
  Target: ATXN2; (-) strand; PAM type: NRG; PAM sequence: TGG
ctactacttgatggctgcca

SEQ ID NO: 16883 - DNA, 20 bp, Artificial Sequence
  Description of Artificial Sequence: Synthetic oligonucleotide
  Target: ATXN2; (-) strand; PAM type: NRG; PAM sequence: TGG
gattgtgctctactacttga

SEQ ID NO: 16884 - DNA, 20 bp, Artificial Sequence
  Description of Artificial Sequence: Synthetic oligonucleotide
  Target: ATXN2; (-) strand; PAM type: NRG; PAM sequence: GAG
cccagcccctgaacagggga

SEQ ID NO: 16885 - DNA, 20 bp, Artificial Sequence
  Description of Artificial Sequence: Synthetic oligonucleotide
  Target: ATXN2; (-) strand; PAM type: NRG; PAM sequence: GAG
gccccagcccctgaacaggg

SEQ ID NO: 16886 - DNA, 20 bp, Artificial Sequence
  Description of Artificial Sequence: Synthetic oligonucleotide
  Target: ATXN2; (-) strand; PAM type: NRG; PAM sequence: GGG
tagccccagcccctgaacag

SEQ ID NO: 16887 - DNA, 20 bp, Artificial Sequence
  Description of Artificial Sequence: Synthetic oligonucleotide
  Target: ATXN2; (-) strand; PAM type: NRG; PAM sequence: GGG
ttagccccagcccctgaaca

SEQ ID NO: 16888 - DNA, 20 bp, Artificial Sequence
  Description of Artificial Sequence: Synthetic oligonucleotide
  Target: ATXN2; (-) strand; PAM type: NRG; PAM sequence: AGG
gttagccccagcccctgaac

SEQ ID NO: 16889 - DNA, 20 bp, Artificial Sequence
  Description of Artificial Sequence: Synthetic oligonucleotide
  Target: ATXN2; (-) strand; PAM type: NRG; PAM sequence: CAG
cgttagccccagcccctgaa

SEQ ID NO: 16890 - DNA, 20 bp, Artificial Sequence
  Description of Artificial Sequence: Synthetic oligonucleotide
  Target: ATXN2; (-) strand; PAM type: NRG; PAM sequence: CAG
tttgagtgtagcgttagccc

SEQ ID NO: 16891 - DNA, 20 bp, Artificial Sequence
  Description of Artificial Sequence: Synthetic oligonucleotide
  Target: ATXN2; (-) strand; PAM type: NRG; PAM sequence: TAG
actggctttgagtgtagcgt

SEQ ID NO: 16892 - DNA, 20 bp, Artificial Sequence
  Description of Artificial Sequence: Synthetic oligonucleotide
  Target: ATXN2; (-) strand; PAM type: NRG; PAM sequence: TAG
ggatggactggctttgagtg

SEQ ID NO: 16893 - DNA, 20 bp, Artificial Sequence
  Description of Artificial Sequence: Synthetic oligonucleotide
  Target: ATXN2; (-) strand; PAM type: NRG; PAM sequence: GAG
gctgtggatggactggcttt

SEQ ID NO: 16894 - DNA, 20 bp, Artificial Sequence
  Description of Artificial Sequence: Synthetic oligonucleotide
  Target: ATXN2; (-) strand; PAM type: NRG; PAM sequence: TGG
agaaagcgctgtggatggac

SEQ ID NO: 16895 - DNA, 20 bp, Artificial Sequence
  Description of Artificial Sequence: Synthetic oligonucleotide
  Target: ATXN2; (-) strand; PAM type: NRG; PAM sequence: TGG
tgctgagaaagcgctgtgga

SEQ ID NO: 16896 - DNA, 20 bp, Artificial Sequence
  Description of Artificial Sequence: Synthetic oligonucleotide
  Target: ATXN2; (-) strand; PAM type: NRG; PAM sequence: TGG
atactgctgagaaagcgctg

SEQ ID NO: 16897 - DNA, 20 bp, Artificial Sequence
  Description of Artificial Sequence: Synthetic oligonucleotide
  Target: ATXN2; (-) strand; PAM type: NRG; PAM sequence: AAG
tggagaagatactgctgaga

SEQ ID NO: 16898 - DNA, 20 bp, Artificial Sequence
  Description of Artificial Sequence: Synthetic oligonucleotide
  Target: ATXN2; (-) strand; PAM type: NRG; PAM sequence: GAG
gctctggagaagatactgct

SEQ ID NO: 16899 - DNA, 20 bp, Artificial Sequence
  Description of Artificial Sequence: Synthetic oligonucleotide
  Target: ATXN2; (-) strand; PAM type: NRG; PAM sequence: AAG
gtttgattgtagctctggag

SEQ ID NO: 16900 - DNA, 20 bp, Artificial Sequence
  Description of Artificial Sequence: Synthetic oligonucleotide
  Target: ATXN2; (-) strand; PAM type: NRG; PAM sequence: GAG
agagtttgattgtagctctg

SEQ ID NO: 16901 - DNA, 20 bp, Artificial Sequence
  Description of Artificial Sequence: Synthetic oligonucleotide
  Target: ATXN2; (-) strand; PAM type: NRG; PAM sequence: TGG
gcagagtttgattgtagctc

SEQ ID NO: 16902 - DNA, 20 bp, Artificial Sequence
  Description of Artificial Sequence: Synthetic oligonucleotide
  Target: ATXN2; (-) strand; PAM type: NRG; PAM sequence: TAG
accatggcagagtttgattg

SEQ ID NO: 16903 - DNA, 20 bp, Artificial Sequence
  Description of Artificial Sequence: Synthetic oligonucleotide
  Target: ATXN2; (-) strand; PAM type: NRG; PAM sequence: GAG
ggggggttattaccatggca

SEQ ID NO: 16904 - DNA, 20 bp, Artificial Sequence
  Description of Artificial Sequence: Synthetic oligonucleotide
  Target: ATXN2; (-) strand; PAM type: NRG; PAM sequence: CAG
gtggggggttattaccatgg

SEQ ID NO: 16905 - DNA, 20 bp, Artificial Sequence
  Description of Artificial Sequence: Synthetic oligonucleotide
  Target: ATXN2; (-) strand; PAM type: NRG; PAM sequence: TGG
catgtggggggttattacca

SEQ ID NO: 16906 - DNA, 20 bp, Artificial Sequence
  Description of Artificial Sequence: Synthetic oligonucleotide
  Target: ATXN2; (-) strand; PAM type: NRG; PAM sequence: GGG
ccaaaagtctgacatgtggg

SEQ ID NO: 16907 - DNA, 20 bp, Artificial Sequence
  Description of Artificial Sequence: Synthetic oligonucleotide
  Target: ATXN2; (-) strand; PAM type: NRG; PAM sequence: GGG
cccaaaagtctgacatgtgg

SEQ ID NO: 16908 - DNA, 20 bp, Artificial Sequence
  Description of Artificial Sequence: Synthetic oligonucleotide
  Target: ATXN2; (-) strand; PAM type: NRG; PAM sequence: GGG
tcccaaaagtctgacatgtg

SEQ ID NO: 16909 - DNA, 20 bp, Artificial Sequence
  Description of Artificial Sequence: Synthetic oligonucleotide
  Target: ATXN2; (-) strand; PAM type: NRG; PAM sequence: GGG
gtcccaaaagtctgacatgt

SEQ ID NO: 16910 - DNA, 20 bp, Artificial Sequence
  Description of Artificial Sequence: Synthetic oligonucleotide
  Target: ATXN2; (-) strand; PAM type: NRG; PAM sequence: TGG
agtcccaaaagtctgacatg

SEQ ID NO: 16911 - DNA, 20 bp, Artificial Sequence
  Description of Artificial Sequence: Synthetic oligonucleotide
  Target: ATXN2; (-) strand; PAM type: NRG; PAM sequence: AAG
ttttccttcctgagtcccaa

SEQ ID NO: 16912 - DNA, 20 bp, Artificial Sequence
  Description of Artificial Sequence: Synthetic oligonucleotide
  Target: ATXN2; (-) strand; PAM type: NRG; PAM sequence: GAG
agggcagtgttttccttcct

SEQ ID NO: 16913 - DNA, 20 bp, Artificial Sequence
  Description of Artificial Sequence: Synthetic oligonucleotide
  Target: ATXN2; (-) strand; PAM type: NRG; PAM sequence: CAG
ttatgacaggctggacaggg

SEQ ID NO: 16914 - DNA, 20 bp, Artificial Sequence
  Description of Artificial Sequence: Synthetic oligonucleotide
  Target: ATXN2; (-) strand; PAM type: NRG; PAM sequence: GGG
ttgttatgacaggctggaca

SEQ ID NO: 16915 - DNA, 20 bp, Artificial Sequence
  Description of Artificial Sequence: Synthetic oligonucleotide
  Target: ATXN2; (-) strand; PAM type: NRG; PAM sequence: AGG
cttgttatgacaggctggac

SEQ ID NO: 16916 - DNA, 20 bp, Artificial Sequence
  Description of Artificial Sequence: Synthetic oligonucleotide
  Target: ATXN2; (-) strand; PAM type: NRG; PAM sequence: CAG
ccttgttatgacaggctgga

SEQ ID NO: 16917 - DNA, 20 bp, Artificial Sequence
  Description of Artificial Sequence: Synthetic oligonucleotide
  Target: ATXN2; (-) strand; PAM type: NRG; PAM sequence: TGG
ccttccttgttatgacaggc

SEQ ID NO: 16918 - DNA, 20 bp, Artificial Sequence
  Description of Artificial Sequence: Synthetic oligonucleotide
  Target: ATXN2; (-) strand; PAM type: NRG; PAM sequence: AGG
ttggccttccttgttatgac

SEQ ID NO: 16919 - DNA, 20 bp, Artificial Sequence
  Description of Artificial Sequence: Synthetic oligonucleotide
  Target: ATXN2; (-) strand; PAM type: NRG; PAM sequence: CAG
gttggccttccttgttatga

SEQ ID NO: 16920 - DNA, 20 bp, Artificial Sequence
  Description of Artificial Sequence: Synthetic oligonucleotide
  Target: ATXN2; (-) strand; PAM type: NRG; PAM sequence: TGG
atgcatgcctaggactcagt

SEQ ID NO: 16921 - DNA, 20 bp, Artificial Sequence
  Description of Artificial Sequence: Synthetic oligonucleotide
  Target: ATXN2; (-) strand; PAM type: NRG; PAM sequence: CAG
cctgatgcatgcctaggact

SEQ ID NO: 16922 - DNA, 20 bp, Artificial Sequence
  Description of Artificial Sequence: Synthetic oligonucleotide
  Target: ATXN2; (-) strand; PAM type: NRG; PAM sequence: AGG
cagcagcctgatgcatgcct

SEQ ID NO: 16923 - DNA, 20 bp, Artificial Sequence
  Description of Artificial Sequence: Synthetic oligonucleotide
  Target: ATXN2; (-) strand; PAM type: NRG; PAM sequence: TAG
acagcagcctgatgcatgcc

SEQ ID NO: 16924 - DNA, 20 bp, Artificial Sequence
  Description of Artificial Sequence: Synthetic oligonucleotide
  Target: ATXN2; (-) strand; PAM type: NRG; PAM sequence: CAG
agcagcagcagcagcaacag

SEQ ID NO: 16925 - DNA, 20 bp, Artificial Sequence
  Description of Artificial Sequence: Synthetic oligonucleotide
  Target: ATXN2; (-) strand; PAM type: NRG; PAM sequence: CAG
agaagcagcagcagcagcaa

SEQ ID NO: 16926 - DNA, 20 bp, Artificial Sequence
  Description of Artificial Sequence: Synthetic oligonucleotide
  Target: ATXN2; (-) strand; PAM type: NRG; PAM sequence: CAG
ttgatgagaagcagcagcag

SEQ ID NO: 16927 - DNA, 20 bp, Artificial Sequence
  Description of Artificial Sequence: Synthetic oligonucleotide
  Target: ATXN2; (-) strand; PAM type: NRG; PAM sequence: CAG
ggcttgatgagaagcagcag

SEQ ID NO: 16928 - DNA, 20 bp, Artificial Sequence
  Description of Artificial Sequence: Synthetic oligonucleotide
  Target: ATXN2; (-) strand; PAM type: NRG; PAM sequence: CAG
tttggcttgatgagaagcag

SEQ ID NO: 16929 - DNA, 20 bp, Artificial Sequence
  Description of Artificial Sequence: Synthetic oligonucleotide
  Target: ATXN2; (-) strand; PAM type: NRG; PAM sequence: CAG
ggatttggcttgatgagaag

SEQ ID NO: 16930 - DNA, 20 bp, Artificial Sequence
  Description of Artificial Sequence: Synthetic oligonucleotide
  Target: ATXN2; (-) strand; PAM type: NRG; PAM sequence: AAG
acaggatttggcttgatgag

SEQ ID NO: 16931 - DNA, 20 bp, Artificial Sequence
  Description of Artificial Sequence: Synthetic oligonucleotide
  Target: ATXN2; (-) strand; PAM type: NRG; PAM sequence: GAG
tatacaggatttggcttgat

SEQ ID NO: 16932 - DNA, 20 bp, Artificial Sequence
  Description of Artificial Sequence: Synthetic oligonucleotide
  Target: ATXN2; (-) strand; PAM type: NRG; PAM sequence: TGG
ttctgatggtatacaggatt

SEQ ID NO: 16933 - DNA, 20 bp, Artificial Sequence
  Description of Artificial Sequence: Synthetic oligonucleotide
  Target: ATXN2; (-) strand; PAM type: NRG; PAM sequence: AGG
tgtgtgttctgatggtatac

SEQ ID NO: 16934 - DNA, 20 bp, Artificial Sequence
  Description of Artificial Sequence: Synthetic oligonucleotide
  Target: ATXN2; (-) strand; PAM type: NRG; PAM sequence: CAG
gtgtgtgttctgatggtata

SEQ ID NO: 16935 - DNA, 20 bp, Artificial Sequence
  Description of Artificial Sequence: Synthetic oligonucleotide
  Target: ATXN2; (-) strand; PAM type: NRG; PAM sequence: TGG
cgagtctgtgtgtgttctga

SEQ ID NO: 16936 - DNA, 20 bp, Artificial Sequence
  Description of Artificial Sequence: Synthetic oligonucleotide
  Target: ATXN2; (-) strand; PAM type: NRG; PAM sequence: GAG
gcctgaggcttccgggagcc

SEQ ID NO: 16937 - DNA, 20 bp, Artificial Sequence
  Description of Artificial Sequence: Synthetic oligonucleotide
  Target: ATXN2; (-) strand; PAM type: NRG; PAM sequence: GAG
tcagggcctgaggcttccgg

SEQ ID NO: 16938 - DNA, 20 bp, Artificial Sequence
  Description of Artificial Sequence: Synthetic oligonucleotide
  Target: ATXN2; (-) strand; PAM type: NRG; PAM sequence: GGG
catcagggcctgaggcttcc

SEQ ID NO: 16939 - DNA, 20 bp, Artificial Sequence
  Description of Artificial Sequence: Synthetic oligonucleotide
  Target: ATXN2; (-) strand; PAM type: NRG; PAM sequence: CGG
gcatcagggcctgaggcttc

SEQ ID NO: 16940 - DNA, 20 bp, Artificial Sequence
  Description of Artificial Sequence: Synthetic oligonucleotide
  Target: ATXN2; (-) strand; PAM type: NRG; PAM sequence: AGG
cagttcagcatcagggcctg

SEQ ID NO: 16941 - DNA, 20 bp, Artificial Sequence
  Description of Artificial Sequence: Synthetic oligonucleotide
  Target: ATXN2; (-) strand; PAM type: NRG; PAM sequence: GAG
tcagttcagcatcagggcct

SEQ ID NO: 16942 - DNA, 20 bp, Artificial Sequence
  Description of Artificial Sequence: Synthetic oligonucleotide
  Target: ATXN2; (-) strand; PAM type: NRG; PAM sequence: GGG
tgacgatcagttcagcatca

SEQ ID NO: 16943 - DNA, 20 bp, Artificial Sequence
  Description of Artificial Sequence: Synthetic oligonucleotide
  Target: ATXN2; (-) strand; PAM type: NRG; PAM sequence: AGG
gtgacgatcagttcagcatc

SEQ ID NO: 16944 - DNA, 20 bp, Artificial Sequence
  Description of Artificial Sequence: Synthetic oligonucleotide
  Target: ATXN2; (-) strand; PAM type: NRG; PAM sequence: CAG
tgtgacgatcagttcagcat

SEQ ID NO: 16945 - DNA, 20 bp, Artificial Sequence
  Description of Artificial Sequence: Synthetic oligonucleotide
  Target: ATXN2; (-) strand; PAM type: NRG; PAM sequence: CAG
agggactgtgacgatcagtt

SEQ ID NO: 16946 - DNA, 20 bp, Artificial Sequence
  Description of Artificial Sequence: Synthetic oligonucleotide
  Target: ATXN2; (-) strand; PAM type: NRG; PAM sequence: CAG
acaggagggactgtgacgat

SEQ ID NO: 16947 - DNA, 20 bp, Artificial Sequence
  Description of Artificial Sequence: Synthetic oligonucleotide
  Target: ATXN2; (-) strand; PAM type: NRG; PAM sequence: GGG
gtccaggagtgtgcacagga

SEQ ID NO: 16948 - DNA, 20 bp, Artificial Sequence
  Description of Artificial Sequence: Synthetic oligonucleotide
  Target: ATXN2; (-) strand; PAM type: NRG; PAM sequence: AGG
cgtccaggagtgtgcacagg

SEQ ID NO: 16949 - DNA, 20 bp, Artificial Sequence
  Description of Artificial Sequence: Synthetic oligonucleotide
  Target: ATXN2; (-) strand; PAM type: NRG; PAM sequence: GAG
ccgtccaggagtgtgcacag

SEQ ID NO: 16950 - DNA, 20 bp, Artificial Sequence
  Description of Artificial Sequence: Synthetic oligonucleotide
  Target: ATXN2; (-) strand; PAM type: NRG; PAM sequence: AGG
acccgtccaggagtgtgcac

SEQ ID NO: 16951 - DNA, 20 bp, Artificial Sequence
  Description of Artificial Sequence: Synthetic oligonucleotide
  Target: ATXN2; (-) strand; PAM type: NRG; PAM sequence: CAG
gacccgtccaggagtgtgca

SEQ ID NO: 16952 - DNA, 20 bp, Artificial Sequence
  Description of Artificial Sequence: Synthetic oligonucleotide
  Target: ATXN2; (-) strand; PAM type: NRG; PAM sequence: GAG
aactagcaagacccgtccag

SEQ ID NO: 16953 - DNA, 20 bp, Artificial Sequence
  Description of Artificial Sequence: Synthetic oligonucleotide
  Target: ATXN2; (-) strand; PAM type: NRG; PAM sequence: AGG
agaactagcaagacccgtcc

SEQ ID NO: 16954 - DNA, 20 bp, Artificial Sequence
  Description of Artificial Sequence: Synthetic oligonucleotide
  Target: ATXN2; (-) strand; PAM type: NRG; PAM sequence: CAG
gagaactagcaagacccgtc

SEQ ID NO: 16955 - DNA, 20 bp, Artificial Sequence
  Description of Artificial Sequence: Synthetic oligonucleotide
  Target: ATXN2; (-) strand; PAM type: NRG; PAM sequence: AAG
ccccgcatttgagaactagc

SEQ ID NO: 16956 - DNA, 20 bp, Artificial Sequence
  Description of Artificial Sequence: Synthetic oligonucleotide
  Target: ATXN2; (-) strand; PAM type: NRG; PAM sequence: TAG
caagccccgcatttgagaac

SEQ ID NO: 16957 - DNA, 20 bp, Artificial Sequence
  Description of Artificial Sequence: Synthetic oligonucleotide
  Target: ATXN2; (-) strand; PAM type: NRG; PAM sequence: GAG
gtgcttcaagccccgcattt

SEQ ID NO: 16958 - DNA, 20 bp, Artificial Sequence
  Description of Artificial Sequence: Synthetic oligonucleotide
  Target: ATXN2; (-) strand; PAM type: NRG; PAM sequence: AAG
gcaggcagggccagtgcttc

SEQ ID NO: 16959 - DNA, 20 bp, Artificial Sequence
  Description of Artificial Sequence: Synthetic oligonucleotide
  Target: ATXN2; (-) strand; PAM type: NRG; PAM sequence: CAG
ggtggaatggcaggcagggc

SEQ ID NO: 16960 - DNA, 20 bp, Artificial Sequence
  Description of Artificial Sequence: Synthetic oligonucleotide
  Target: ATXN2; (-) strand; PAM type: NRG; PAM sequence: GGG
cacaggtggaatggcaggca

SEQ ID NO: 16961 - DNA, 20 bp, Artificial Sequence
  Description of Artificial Sequence: Synthetic oligonucleotide
  Target: ATXN2; (-) strand; PAM type: NRG; PAM sequence: AGG
gcacaggtggaatggcaggc

SEQ ID NO: 16962 - DNA, 20 bp, Artificial Sequence
  Description of Artificial Sequence: Synthetic oligonucleotide
  Target: ATXN2; (-) strand; PAM type: NRG; PAM sequence: CAG
cgcacaggtggaatggcagg

SEQ ID NO: 16963 - DNA, 20 bp, Artificial Sequence
  Description of Artificial Sequence: Synthetic oligonucleotide
  Target: ATXN2; (-) strand; PAM type: NRG; PAM sequence: AGG
gctcgcacaggtggaatggc

SEQ ID NO: 16964 - DNA, 20 bp, Artificial Sequence
  Description of Artificial Sequence: Synthetic oligonucleotide
  Target: ATXN2; (-) strand; PAM type: NRG; PAM sequence: CAG
tgctcgcacaggtggaatgg

SEQ ID NO: 16965 - DNA, 20 bp, Artificial Sequence
  Description of Artificial Sequence: Synthetic oligonucleotide
  Target: ATXN2; (-) strand; PAM type: NRG; PAM sequence: TGG
ttctgctcgcacaggtggaa

SEQ ID NO: 16966 - DNA, 20 bp, Artificial Sequence
  Description of Artificial Sequence: Synthetic oligonucleotide
  Target: ATXN2; (-) strand; PAM type: NRG; PAM sequence: TGG
aagcattctgctcgcacagg

SEQ ID NO: 16967 - DNA, 20 bp, Artificial Sequence
  Description of Artificial Sequence: Synthetic oligonucleotide
  Target: ATXN2; (-) strand; PAM type: NRG; PAM sequence: AGG
ccaaagcattctgctcgcac

SEQ ID NO: 16968 - DNA, 20 bp, Artificial Sequence
  Description of Artificial Sequence: Synthetic oligonucleotide
  Target: ATXN2; (-) strand; PAM type: NRG; PAM sequence: CAG
cccaaagcattctgctcgca

SEQ ID NO: 16969 - DNA, 20 bp, Artificial Sequence
  Description of Artificial Sequence: Synthetic oligonucleotide
  Target: ATXN2; (-) strand; PAM type: NRG; PAM sequence: AAG
ggggccgccggggcacccca

SEQ ID NO: 16970 - DNA, 20 bp, Artificial Sequence
  Description of Artificial Sequence: Synthetic oligonucleotide
  Target: ATXN2; (-) strand; PAM type: NRG; PAM sequence: GGG
tgtgtgtgcaggggccgccg

SEQ ID NO: 16971 - DNA, 20 bp, Artificial Sequence
  Description of Artificial Sequence: Synthetic oligonucleotide
  Target: ATXN2; (-) strand; PAM type: NRG; PAM sequence: GGG
gtgtgtgtgcaggggccgcc

SEQ ID NO: 16972 - DNA, 20 bp, Artificial Sequence
  Description of Artificial Sequence: Synthetic oligonucleotide
  Target: ATXN2; (-) strand; PAM type: NRG; PAM sequence: CGG
cgtgtgtgtgcaggggccgc

SEQ ID NO: 16973 - DNA, 20 bp, Artificial Sequence
  Description of Artificial Sequence: Synthetic oligonucleotide
  Target: ATXN2; (-) strand; PAM type: NRG; PAM sequence: GGG
ggtgaggcgtgtgtgtgcag

SEQ ID NO: 16974 - DNA, 20 bp, Artificial Sequence
  Description of Artificial Sequence: Synthetic oligonucleotide
  Target: ATXN2; (-) strand; PAM type: NRG; PAM sequence: GGG
aggtgaggcgtgtgtgtgca

SEQ ID NO: 16975 - DNA, 20 bp, Artificial Sequence
  Description of Artificial Sequence: Synthetic oligonucleotide
  Target: ATXN2; (-) strand; PAM type: NRG; PAM sequence: AGG
caggtgaggcgtgtgtgtgc

SEQ ID NO: 16976 - DNA, 20 bp, Artificial Sequence
  Description of Artificial Sequence: Synthetic oligonucleotide
  Target: ATXN2; (-) strand; PAM type: NRG; PAM sequence: CAG
tcaggtgaggcgtgtgtgtg

SEQ ID NO: 16977 - DNA, 20 bp, Artificial Sequence
  Description of Artificial Sequence: Synthetic oligonucleotide
  Target: ATXN2; (-) strand; PAM type: NRG; PAM sequence: AGG
tatgacgcacccttcaggtg

SEQ ID NO: 16978 - DNA, 20 bp, Artificial Sequence
  Description of Artificial Sequence: Synthetic oligonucleotide
  Target: ATXN2; (-) strand; PAM type: NRG; PAM sequence: GAG
atatgacgcacccttcaggt

SEQ ID NO: 16979 - DNA, 20 bp, Artificial Sequence
  Description of Artificial Sequence: Synthetic oligonucleotide
  Target: ATXN2; (-) strand; PAM type: NRG; PAM sequence: AGG
ccctatatgacgcacccttc

SEQ ID NO: 16980 - DNA, 20 bp, Artificial Sequence
  Description of Artificial Sequence: Synthetic oligonucleotide
  Target: ATXN2; (-) strand; PAM type: NRG; PAM sequence: CAG
cccctatatgacgcaccctt

SEQ ID NO: 16981 - DNA, 20 bp, Artificial Sequence
  Description of Artificial Sequence: Synthetic oligonucleotide
  Target: ATXN2; (-) strand; PAM type: NRG; PAM sequence: CAG
gcccattccagtctcgacaa

SEQ ID NO: 16982 - DNA, 20 bp, Artificial Sequence
  Description of Artificial Sequence: Synthetic oligonucleotide
  Target: ATXN2; (-) strand; PAM type: NRG; PAM sequence: CAG
aagtgcactacagcccattc

SEQ ID NO: 16983 - DNA, 20 bp, Artificial Sequence
  Description of Artificial Sequence: Synthetic oligonucleotide
  Target: ATXN2; (-) strand; PAM type: NRG; PAM sequence: CAG
ccctcgctcaaagtgcacta

SEQ ID NO: 16984 - DNA, 20 bp, Artificial Sequence
  Description of Artificial Sequence: Synthetic oligonucleotide
  Target: ATXN2; (-) strand; PAM type: NRG; PAM sequence: AAG
ccccaggccgccctcgctca

SEQ ID NO: 16985 - DNA, 20 bp, Artificial Sequence
  Description of Artificial Sequence: Synthetic oligonucleotide
  Target: ATXN2; (-) strand; PAM type: NRG; PAM sequence: AGG
acagccacccggcggtcccc

SEQ ID NO: 16986 - DNA, 20 bp, Artificial Sequence
  Description of Artificial Sequence: Synthetic oligonucleotide
  Target: ATXN2; (-) strand; PAM type: NRG; PAM sequence: CAG
cacagccacccggcggtccc

SEQ ID NO: 16987 - DNA, 20 bp, Artificial Sequence
  Description of Artificial Sequence: Synthetic oligonucleotide
  Target: ATXN2; (-) strand; PAM type: NRG; PAM sequence: CGG
atgacgacacagccacccgg

SEQ ID NO: 16988 - DNA, 20 bp, Artificial Sequence
  Description of Artificial Sequence: Synthetic oligonucleotide
  Target: ATXN2; (-) strand; PAM type: NRG; PAM sequence: CGG
ctaatgacgacacagccacc

SEQ ID NO: 16989 - DNA, 20 bp, Artificial Sequence
  Description of Artificial Sequence: Synthetic oligonucleotide
  Target: ATXN2; (-) strand; PAM type: NRG; PAM sequence: CAG
caatgatgctaatgacgaca

SEQ ID NO: 16990 - DNA, 20 bp, Artificial Sequence
  Description of Artificial Sequence: Synthetic oligonucleotide
  Target: ATXN2; (-) strand; PAM type: NRG; PAM sequence: TGG
ggctcatgtacagtcaggaa

SEQ ID NO: 16991 - DNA, 20 bp, Artificial Sequence
  Description of Artificial Sequence: Synthetic oligonucleotide
  Target: ATXN2; (-) strand; PAM type: NRG; PAM sequence: AGG
tttcaggctcatgtacagtc

SEQ ID NO: 16992 - DNA, 20 bp, Artificial Sequence
  Description of Artificial Sequence: Synthetic oligonucleotide
  Target: ATXN2; (-) strand; PAM type: NRG; PAM sequence: CAG
gtttcaggctcatgtacagt

SEQ ID NO: 16993 - DNA, 20 bp, Artificial Sequence
  Description of Artificial Sequence: Synthetic oligonucleotide
  Target: ATXN2; (-) strand; PAM type: NRG; PAM sequence: CAG
ctctgtttcaggctcatgta

SEQ ID NO: 16994 - DNA, 20 bp, Artificial Sequence
  Description of Artificial Sequence: Synthetic oligonucleotide
  Target: ATXN2; (-) strand; PAM type: NRG; PAM sequence: AGG
gtaaaagagctctctgtttc

SEQ ID NO: 16995 - DNA, 20 bp, Artificial Sequence
  Description of Artificial Sequence: Synthetic oligonucleotide
  Target: ATXN2; (-) strand; PAM type: NRG; PAM sequence: CAG
cgtaaaagagctctctgttt

SEQ ID NO: 16996 - DNA, 20 bp, Artificial Sequence
  Description of Artificial Sequence: Synthetic oligonucleotide
  Target: ATXN2; (-) strand; PAM type: NRG; PAM sequence: GAG
tgttgcctgtatgcgtaaaa

SEQ ID NO: 16997 - DNA, 20 bp, Artificial Sequence
  Description of Artificial Sequence: Synthetic oligonucleotide
  Target: ATXN2; (-) strand; PAM type: NRG; PAM sequence: AAG
gatgttgcctgtatgcgtaa

SEQ ID NO: 16998 - DNA, 20 bp, Artificial Sequence
  Description of Artificial Sequence: Synthetic oligonucleotide
  Target: ATXN2; (-) strand; PAM type: NRG; PAM sequence: GAG
ttgacatgttgttgaagccg

SEQ ID NO: 16999 - DNA, 20 bp, Artificial Sequence
  Description of Artificial Sequence: Synthetic oligonucleotide
  Target: ATXN2; (-) strand; PAM type: NRG; PAM sequence: CGG
agttgacatgttgttgaagc

SEQ ID NO: 17000 - DNA, 20 bp, Artificial Sequence
  Description of Artificial Sequence: Synthetic oligonucleotide
  Target: ATXN2; (-) strand; PAM type: NRG; PAM sequence: AAG
acacagttgacatgttgttg

SEQ ID NO: 17001 - DNA, 20 bp, Artificial Sequence
  Description of Artificial Sequence: Synthetic oligonucleotide
  Target: ATXN2; (-) strand; PAM type: NRG; PAM sequence: CAG
ccagcccagtgaaaggaaca

SEQ ID NO: 17002 - DNA, 20 bp, Artificial Sequence
  Description of Artificial Sequence: Synthetic oligonucleotide
  Target: ATXN2; (-) strand; PAM type: NRG; PAM sequence: AGG
gagagtcccagcccagtgaa

SEQ ID NO: 17003 - DNA, 20 bp, Artificial Sequence
  Description of Artificial Sequence: Synthetic oligonucleotide
  Target: ATXN2; (-) strand; PAM type: NRG; PAM sequence: AAG
tgagagtcccagcccagtga

SEQ ID NO: 17004 - DNA, 20 bp, Artificial Sequence
  Description of Artificial Sequence: Synthetic oligonucleotide
  Target: ATXN2; (-) strand; PAM type: NRG; PAM sequence: CAG
ctttcctgagagtcccagcc

SEQ ID NO: 17005 - DNA, 20 bp, Artificial Sequence
  Description of Artificial Sequence: Synthetic oligonucleotide
  Target: ATXN2; (-) strand; PAM type: NRG; PAM sequence: CAG
ttgccctttcctgagagtcc

SEQ ID NO: 17006 - DNA, 20 bp, Artificial Sequence
  Description of Artificial Sequence: Synthetic oligonucleotide
  Target: ATXN2; (-) strand; PAM type: NRG; PAM sequence: GAG
ccaccgttgccctttcctga

SEQ ID NO: 17007 - DNA, 20 bp, Artificial Sequence
  Description of Artificial Sequence: Synthetic oligonucleotide
  Target: ATXN2; (-) strand; PAM type: NRG; PAM sequence: GAG
gcccaccgttgccctttcct

SEQ ID NO: 17008 - DNA, 20 bp, Artificial Sequence
  Description of Artificial Sequence: Synthetic oligonucleotide
  Target: ATXN2; (-) strand; PAM type: NRG; PAM sequence: AGG
gagaacagaactgggccctg

SEQ ID NO: 17009 - DNA, 20 bp, Artificial Sequence
  Description of Artificial Sequence: Synthetic oligonucleotide
  Target: ATXN2; (-) strand; PAM type: NRG; PAM sequence: GAG
agagaacagaactgggccct

SEQ ID NO: 17010 - DNA, 20 bp, Artificial Sequence
  Description of Artificial Sequence: Synthetic oligonucleotide
  Target: ATXN2; (-) strand; PAM type: NRG; PAM sequence: GGG
tgtccccagagaacagaact

SEQ ID NO: 17011 - DNA, 20 bp, Artificial Sequence
  Description of Artificial Sequence: Synthetic oligonucleotide
  Target: ATXN2; (-) strand; PAM type: NRG; PAM sequence: TGG
ttgtccccagagaacagaac

SEQ ID NO: 17012 - DNA, 20 bp, Artificial Sequence
  Description of Artificial Sequence: Synthetic oligonucleotide
  Target: ATXN2; (-) strand; PAM type: NRG; PAM sequence: CAG
tagagattgtccccagagaa

SEQ ID NO: 17013 - DNA, 20 bp, Artificial Sequence
  Description of Artificial Sequence: Synthetic oligonucleotide
  Target: ATXN2; (-) strand; PAM type: NRG; PAM sequence: GAG
tctactagagattgtcccca

SEQ ID NO: 17014 - DNA, 20 bp, Artificial Sequence
  Description of Artificial Sequence: Synthetic oligonucleotide
  Target: ATXN2; (-) strand; PAM type: NRG; PAM sequence: CAG
aatctactagagattgtccc

SEQ ID NO: 17015 - DNA, 20 bp, Artificial Sequence
  Description of Artificial Sequence: Synthetic oligonucleotide
  Target: ATXN2; (-) strand; PAM type: NRG; PAM sequence: GAG
ggtcaatagataatctacta

SEQ ID NO: 17016 - DNA, 20 bp, Artificial Sequence
  Description of Artificial Sequence: Synthetic oligonucleotide
  Target: ATXN2; (-) strand; PAM type: NRG; PAM sequence: TAG
caggtcaatagataatctac

SEQ ID NO: 17017 - DNA, 20 bp, Artificial Sequence
  Description of Artificial Sequence: Synthetic oligonucleotide
  Target: ATXN2; (-) strand; PAM type: NRG; PAM sequence: TAG
gaagcgcgtcttcaggtcaa

SEQ ID NO: 17018 - DNA, 20 bp, Artificial Sequence
  Description of Artificial Sequence: Synthetic oligonucleotide
  Target: ATXN2; (-) strand; PAM type: NRG; PAM sequence: AGG
caaaggtgaagcgcgtcttc

SEQ ID NO: 17019 - DNA, 20 bp, Artificial Sequence
  Description of Artificial Sequence: Synthetic oligonucleotide
  Target: ATXN2; (-) strand; PAM type: NRG; PAM sequence: CAG
ccaaaggtgaagcgcgtctt

SEQ ID NO: 17020 - DNA, 20 bp, Artificial Sequence
  Description of Artificial Sequence: Synthetic oligonucleotide
  Target: ATXN2; (-) strand; PAM type: NRG; PAM sequence: AAG
gcaggatctgcccaaaggtg

SEQ ID NO: 17021 - DNA, 20 bp, Artificial Sequence
  Description of Artificial Sequence: Synthetic oligonucleotide
  Target: ATXN2; (-) strand; PAM type: NRG; PAM sequence: AGG
cccttgcaggatctgcccaa

SEQ ID NO: 17022 - DNA, 20 bp, Artificial Sequence
  Description of Artificial Sequence: Synthetic oligonucleotide
  Target: ATXN2; (-) strand; PAM type: NRG; PAM sequence: AAG
acccttgcaggatctgccca

SEQ ID NO: 17023 - DNA, 20 bp, Artificial Sequence
  Description of Artificial Sequence: Synthetic oligonucleotide
  Target: ATXN2; (-) strand; PAM type: NRG; PAM sequence: AGG
gcctgctccctgacccttgc

SEQ ID NO: 17024 - DNA, 20 bp, Artificial Sequence
  Description of Artificial Sequence: Synthetic oligonucleotide
  Target: ATXN2; (-) strand; PAM type: NRG; PAM sequence: CAG
tgcctgctccctgacccttg

SEQ ID NO: 17025 - DNA, 20 bp, Artificial Sequence
  Description of Artificial Sequence: Synthetic oligonucleotide
  Target: ATXN2; (-) strand; PAM type: NRG; PAM sequence: AGG
cacagccctgacttctaccc

SEQ ID NO: 17026 - DNA, 20 bp, Artificial Sequence
  Description of Artificial Sequence: Synthetic oligonucleotide
  Target: ATXN2; (-) strand; PAM type: NRG; PAM sequence: CAG
gcacagccctgacttctacc

SEQ ID NO: 17027 - DNA, 20 bp, Artificial Sequence
  Description of Artificial Sequence: Synthetic oligonucleotide
  Target: ATXN2; (-) strand; PAM type: NRG; PAM sequence: CAG
tgtcaagggttaggacagca

SEQ ID NO: 17028 - DNA, 20 bp, Artificial Sequence
  Description of Artificial Sequence: Synthetic oligonucleotide
  Target: ATXN2; (-) strand; PAM type: NRG; PAM sequence: CAG
agaaatgtcaagggttagga

SEQ ID NO: 17029 - DNA, 20 bp, Artificial Sequence
  Description of Artificial Sequence: Synthetic oligonucleotide
  Target: ATXN2; (-) strand; PAM type: NRG; PAM sequence: AGG
gatcagaaatgtcaagggtt

SEQ ID NO: 17030 - DNA, 20 bp, Artificial Sequence
  Description of Artificial Sequence: Synthetic oligonucleotide
  Target: ATXN2; (-) strand; PAM type: NRG; PAM sequence: TAG
tgatcagaaatgtcaagggt

SEQ ID NO: 17031 - DNA, 20 bp, Artificial Sequence
  Description of Artificial Sequence: Synthetic oligonucleotide
  Target: ATXN2; (-) strand; PAM type: NRG; PAM sequence: GGG
acaatgatcagaaatgtcaa

SEQ ID NO: 17032 - DNA, 20 bp, Artificial Sequence
  Description of Artificial Sequence: Synthetic oligonucleotide
  Target: ATXN2; (-) strand; PAM type: NRG; PAM sequence: AGG
tacaatgatcagaaatgtca

SEQ ID NO: 17033 - DNA, 20 bp, Artificial Sequence
  Description of Artificial Sequence: Synthetic oligonucleotide
  Target: ATXN2; (-) strand; PAM type: NRG; PAM sequence: AAG
atacaatgatcagaaatgtc

SEQ ID NO: 17034 - DNA, 20 bp, Artificial Sequence
  Description of Artificial Sequence: Synthetic oligonucleotide
  Target: ATXN2; (-) strand; PAM type: NRG; PAM sequence: CAG
catacatagaatacaatgat

SEQ ID NO: 17035 - DNA, 20 bp, Artificial Sequence
  Description of Artificial Sequence: Synthetic oligonucleotide
  Target: ATXN2; (-) strand; PAM type: NRG; PAM sequence: TAG
tgaagatcttaccccataca

SEQ ID NO: 17036 - DNA, 20 bp, Artificial Sequence
  Description of Artificial Sequence: Synthetic oligonucleotide
  Target: ATXN2; (-) strand; PAM type: NRG; PAM sequence: AAG
tccagtgtctaatctttgtg

SEQ ID NO: 17037 - DNA, 20 bp, Artificial Sequence
  Description of Artificial Sequence: Synthetic oligonucleotide
  Target: ATXN2; (-) strand; PAM type: NRG; PAM sequence: CAG
gagaaagctgcccttggatc

SEQ ID NO: 17038 - DNA, 20 bp, Artificial Sequence
  Description of Artificial Sequence: Synthetic oligonucleotide
  Target: ATXN2; (-) strand; PAM type: NRG; PAM sequence: TGG
taagttgagaaagctgccct

SEQ ID NO: 17039 - DNA, 20 bp, Artificial Sequence
  Description of Artificial Sequence: Synthetic oligonucleotide
  Target: ATXN2; (-) strand; PAM type: NRG; PAM sequence: AAG
tgtatgatattaagttgaga

SEQ ID NO: 17040 - DNA, 20 bp, Artificial Sequence
  Description of Artificial Sequence: Synthetic oligonucleotide
  Target: ATXN2; (-) strand; PAM type: NRG; PAM sequence: GAG
atcttgtatgatattaagtt

SEQ ID NO: 17041 - DNA, 20 bp, Artificial Sequence
  Description of Artificial Sequence: Synthetic oligonucleotide
  Target: ATXN2; (-) strand; PAM type: NRG; PAM sequence: AAG
attgaatcttgtatgatatt

SEQ ID NO: 17042 - DNA, 20 bp, Artificial Sequence
  Description of Artificial Sequence: Synthetic oligonucleotide
  Target: ATXN2; (-) strand; PAM type: NRG; PAM sequence: AAG
cacatggcagcctgattctg

SEQ ID NO: 17043 - DNA, 20 bp, Artificial Sequence
  Description of Artificial Sequence: Synthetic oligonucleotide
  Target: ATXN2; (-) strand; PAM type: NRG; PAM sequence: CAG
ctacctcaggccccacatgg

SEQ ID NO: 17044 - DNA, 20 bp, Artificial Sequence
  Description of Artificial Sequence: Synthetic oligonucleotide
  Target: ATXN2; (-) strand; PAM type: NRG; PAM sequence: TGG
aaactacctcaggccccaca

SEQ ID NO: 17045 - DNA, 20 bp, Artificial Sequence
  Description of Artificial Sequence: Synthetic oligonucleotide
  Target: ATXN2; (-) strand; PAM type: NRG; PAM sequence: AGG
gttatctgcaaaactacctc

SEQ ID NO: 17046 - DNA, 20 bp, Artificial Sequence
  Description of Artificial Sequence: Synthetic oligonucleotide
  Target: ATXN2; (-) strand; PAM type: NRG; PAM sequence: CAG
tgttatctgcaaaactacct

SEQ ID NO: 17047 - DNA, 20 bp, Artificial Sequence
  Description of Artificial Sequence: Synthetic oligonucleotide
  Target: ATXN2; (-) strand; PAM type: NRG; PAM sequence: GGG
atctgttttcctatttgaaa

SEQ ID NO: 17048 - DNA, 20 bp, Artificial Sequence
  Description of Artificial Sequence: Synthetic oligonucleotide
  Target: ATXN2; (-) strand; PAM type: NRG; PAM sequence: AGG
aatctgttttcctatttgaa

SEQ ID NO: 17049 - DNA, 20 bp, Artificial Sequence
  Description of Artificial Sequence: Synthetic oligonucleotide
  Target: ATXN2; (-) strand; PAM type: NRG; PAM sequence: AAG
taatctgttttcctatttga

SEQ ID NO: 17050 - DNA, 20 bp, Artificial Sequence
  Description of Artificial Sequence: Synthetic oligonucleotide
  Target: ATXN2; (-) strand; PAM type: NRG; PAM sequence: CAG
attcacatacttgactgtga

SEQ ID NO: 17051 - DNA, 20 bp, Artificial Sequence
  Description of Artificial Sequence: Synthetic oligonucleotide
  Target: ATXN2; (-) strand; PAM type: NRG; PAM sequence: AAG
aggcaaatgaacagaggtcc

SEQ ID NO: 17052 - DNA, 20 bp, Artificial Sequence
  Description of Artificial Sequence: Synthetic oligonucleotide
  Target: ATXN2; (-) strand; PAM type: NRG; PAM sequence: AGG
ggagagaggcaaatgaacag

SEQ ID NO: 17053 - DNA, 20 bp, Artificial Sequence
  Description of Artificial Sequence: Synthetic oligonucleotide
  Target: ATXN2; (-) strand; PAM type: NRG; PAM sequence: GAG
gggagagaggcaaatgaaca

SEQ ID NO: 17054 - DNA, 20 bp, Artificial Sequence
  Description of Artificial Sequence: Synthetic oligonucleotide
  Target: ATXN2; (-) strand; PAM type: NRG; PAM sequence: CAG
gagggagagaggcaaatgaa

SEQ ID NO: 17055 - DNA, 20 bp, Artificial Sequence
  Description of Artificial Sequence: Synthetic oligonucleotide
  Target: ATXN2; (-) strand; PAM type: NRG; PAM sequence: AGG
gaccagaagcagagggagag

SEQ ID NO: 17056 - DNA, 20 bp, Artificial Sequence
  Description of Artificial Sequence: Synthetic oligonucleotide
  Target: ATXN2; (-) strand; PAM type: NRG; PAM sequence: GAG
agaccagaagcagagggaga

SEQ ID NO: 17057 - DNA, 20 bp, Artificial Sequence
  Description of Artificial Sequence: Synthetic oligonucleotide
  Target: ATXN2; (-) strand; PAM type: NRG; PAM sequence: GAG
gcagaccagaagcagaggga

SEQ ID NO: 17058 - DNA, 20 bp, Artificial Sequence
  Description of Artificial Sequence: Synthetic oligonucleotide
  Target: ATXN2; (-) strand; PAM type: NRG; PAM sequence: GAG
gagcagaccagaagcagagg

SEQ ID NO: 17059 - DNA, 20 bp, Artificial Sequence
  Description of Artificial Sequence: Synthetic oligonucleotide
  Target: ATXN2; (-) strand; PAM type: NRG; PAM sequence: GGG
gtgagcagaccagaagcaga

SEQ ID NO: 17060 - DNA, 20 bp, Artificial Sequence
  Description of Artificial Sequence: Synthetic oligonucleotide
  Target: ATXN2; (-) strand; PAM type: NRG; PAM sequence: AGG
ggtgagcagaccagaagcag

SEQ ID NO: 17061 - DNA, 20 bp, Artificial Sequence
  Description of Artificial Sequence: Synthetic oligonucleotide
  Target: ATXN2; (-) strand; PAM type: NRG; PAM sequence: GAG
tggtgagcagaccagaagca

SEQ ID NO: 17062 - DNA, 20 bp, Artificial Sequence
  Description of Artificial Sequence: Synthetic oligonucleotide
  Target: ATXN2; (-) strand; PAM type: NRG; PAM sequence: CAG
cctggtgagcagaccagaag

SEQ ID NO: 17063 - DNA, 20 bp, Artificial Sequence
  Description of Artificial Sequence: Synthetic oligonucleotide
  Target: ATXN2; (-) strand; PAM type: NRG; PAM sequence: AAG
ctgcctggtgagcagaccag

SEQ ID NO: 17064 - DNA, 20 bp, Artificial Sequence
  Description of Artificial Sequence: Synthetic oligonucleotide
  Target: ATXN2; (-) strand; PAM type: NRG; PAM sequence: CAG
tcactgcctggtgagcagac

SEQ ID NO: 17065 - DNA, 20 bp, Artificial Sequence
  Description of Artificial Sequence: Synthetic oligonucleotide
  Target: ATXN2; (-) strand; PAM type: NRG; PAM sequence: CAG
tcttttcactgcctggtgag

SEQ ID NO: 17066 - DNA, 20 bp, Artificial Sequence
  Description of Artificial Sequence: Synthetic oligonucleotide
  Target: ATXN2; (-) strand; PAM type: NRG; PAM sequence: GAG
gtctcttttcactgcctggt

SEQ ID NO: 17067 - DNA, 20 bp, Artificial Sequence
  Description of Artificial Sequence: Synthetic oligonucleotide
  Target: ATXN2; (-) strand; PAM type: NRG; PAM sequence: TGG
aagagtctcttttcactgcc

SEQ ID NO: 17068 - DNA, 20 bp, Artificial Sequence
  Description of Artificial Sequence: Synthetic oligonucleotide
  Target: ATXN2; (-) strand; PAM type: NRG; PAM sequence: GAG
agagagtcacgggggcctaa

SEQ ID NO: 17069 - DNA, 20 bp, Artificial Sequence
  Description of Artificial Sequence: Synthetic oligonucleotide
  Target: ATXN2; (-) strand; PAM type: NRG; PAM sequence: AAG
tgagagagtcacgggggcct

SEQ ID NO: 17070 - DNA, 20 bp, Artificial Sequence
  Description of Artificial Sequence: Synthetic oligonucleotide
  Target: ATXN2; (-) strand; PAM type: NRG; PAM sequence: GGG
tatctctgagagagtcacgg

SEQ ID NO: 17071 - DNA, 20 bp, Artificial Sequence
  Description of Artificial Sequence: Synthetic oligonucleotide
  Target: ATXN2; (-) strand; PAM type: NRG; PAM sequence: GGG
atatctctgagagagtcacg

SEQ ID NO: 17072 - DNA, 20 bp, Artificial Sequence
  Description of Artificial Sequence: Synthetic oligonucleotide
  Target: ATXN2; (-) strand; PAM type: NRG; PAM sequence: GGG
catatctctgagagagtcac

SEQ ID NO: 17073 - DNA, 20 bp, Artificial Sequence
  Description of Artificial Sequence: Synthetic oligonucleotide
  Target: ATXN2; (-) strand; PAM type: NRG; PAM sequence: CGG
gcatatctctgagagagtca

SEQ ID NO: 17074 - DNA, 20 bp, Artificial Sequence
  Description of Artificial Sequence: Synthetic oligonucleotide
  Target: ATXN2; (-) strand; PAM type: NRG; PAM sequence: GAG
ccatcagcatatctctgaga

SEQ ID NO: 17075 - DNA, 20 bp, Artificial Sequence
  Description of Artificial Sequence: Synthetic oligonucleotide
  Target: ATXN2; (-) strand; PAM type: NRG; PAM sequence: GAG
ctccatcagcatatctctga

SEQ ID NO: 17076 - DNA, 20 bp, Artificial Sequence
  Description of Artificial Sequence: Synthetic oligonucleotide
  Target: ATXN2; (-) strand; PAM type: NRG; PAM sequence: GAG
tgctccatcagcatatctct

SEQ ID NO: 17077 - DNA, 20 bp, Artificial Sequence
  Description of Artificial Sequence: Synthetic oligonucleotide
  Target: ATXN2; (-) strand; PAM type: NRG; PAM sequence: CAG
tcctcctcctcctgctccat

SEQ ID NO: 17078 - DNA, 20 bp, Artificial Sequence
  Description of Artificial Sequence: Synthetic oligonucleotide
  Target: ATXN2; (-) strand; PAM type: NRG; PAM sequence: GAG
tactcctttccatctcactg

SEQ ID NO: 17079 - DNA, 20 bp, Artificial Sequence
  Description of Artificial Sequence: Synthetic oligonucleotide
  Target: ATXN2; (-) strand; PAM type: NRG; PAM sequence: TGG
gttactcctttccatctcac

SEQ ID NO: 17080 - DNA, 20 bp, Artificial Sequence
  Description of Artificial Sequence: Synthetic oligonucleotide
  Target: ATXN2; (-) strand; PAM type: NRG; PAM sequence: AGG
gggctggcccagatgacttc

SEQ ID NO: 17081 - DNA, 20 bp, Artificial Sequence
  Description of Artificial Sequence: Synthetic oligonucleotide
  Target: ATXN2; (-) strand; PAM type: NRG; PAM sequence: CAG
tgggctggcccagatgactt

SEQ ID NO: 17082 - DNA, 20 bp, Artificial Sequence
  Description of Artificial Sequence: Synthetic oligonucleotide
  Target: ATXN2; (-) strand; PAM type: NRG; PAM sequence: CAG
acagagacgctgggctggcc

SEQ ID NO: 17083 - DNA, 20 bp, Artificial Sequence
  Description of Artificial Sequence: Synthetic oligonucleotide
  Target: ATXN2; (-) strand; PAM type: NRG; PAM sequence: TGG
ttggtacagagacgctgggc

SEQ ID NO: 17084 - DNA, 20 bp, Artificial Sequence
  Description of Artificial Sequence: Synthetic oligonucleotide
  Target: ATXN2; (-) strand; PAM type: NRG; PAM sequence: GGG
gaacttggtacagagacgct

SEQ ID NO: 17085 - DNA, 20 bp, Artificial Sequence
  Description of Artificial Sequence: Synthetic oligonucleotide
  Target: ATXN2; (-) strand; PAM type: NRG; PAM sequence: TGG
tgaacttggtacagagacgc

SEQ ID NO: 17086 - DNA, 20 bp, Artificial Sequence
  Description of Artificial Sequence: Synthetic oligonucleotide
  Target: ATXN2; (-) strand; PAM type: NRG; PAM sequence: GAG
accaggttgaacttggtaca

SEQ ID NO: 17087 - DNA, 20 bp, Artificial Sequence
  Description of Artificial Sequence: Synthetic oligonucleotide
  Target: ATXN2; (-) strand; PAM type: NRG; PAM sequence: CAG
agaccaggttgaacttggta

SEQ ID NO: 17088 - DNA, 20 bp, Artificial Sequence
  Description of Artificial Sequence: Synthetic oligonucleotide
  Target: ATXN2; (-) strand; PAM type: NRG; PAM sequence: TGG
gagtgagaccaggttgaact

SEQ ID NO: 17089 - DNA, 20 bp, Artificial Sequence
  Description of Artificial Sequence: Synthetic oligonucleotide
  Target: ATXN2; (-) strand; PAM type: NRG; PAM sequence: AGG
acttgacagtgagtgagacc

SEQ ID NO: 17090 - DNA, 20 bp, Artificial Sequence
  Description of Artificial Sequence: Synthetic oligonucleotide
  Target: ATXN2; (-) strand; PAM type: NRG; PAM sequence: CAG
aacttgacagtgagtgagac

SEQ ID NO: 17091 - DNA, 20 bp, Artificial Sequence
  Description of Artificial Sequence: Synthetic oligonucleotide
  Target: ATXN2; (-) strand; PAM type: NRG; PAM sequence: GAG
tttccaacttgacagtgagt

SEQ ID NO: 17092 - DNA, 20 bp, Artificial Sequence
  Description of Artificial Sequence: Synthetic oligonucleotide
  Target: ATXN2; (-) strand; PAM type: NRG; PAM sequence: GAG
cacctttccaacttgacagt

SEQ ID NO: 17093 - DNA, 20 bp, Artificial Sequence
  Description of Artificial Sequence: Synthetic oligonucleotide
  Target: ATXN2; (-) strand; PAM type: NRG; PAM sequence: CAG
aaatcacctttccaacttga

SEQ ID NO: 17094 - DNA, 20 bp, Artificial Sequence
  Description of Artificial Sequence: Synthetic oligonucleotide
  Target: ATXN2; (-) strand; PAM type: NRG; PAM sequence: GGG
gagctggaatccagctgttt

SEQ ID NO: 17095 - DNA, 20 bp, Artificial Sequence
  Description of Artificial Sequence: Synthetic oligonucleotide
  Target: ATXN2; (-) strand; PAM type: NRG; PAM sequence: TGG
agagctggaatccagctgtt

SEQ ID NO: 17096 - DNA, 20 bp, Artificial Sequence
  Description of Artificial Sequence: Synthetic oligonucleotide
  Target: ATXN2; (-) strand; PAM type: NRG; PAM sequence: CAG
ccccctgcagagctggaatc

SEQ ID NO: 17097 - DNA, 20 bp, Artificial Sequence
  Description of Artificial Sequence: Synthetic oligonucleotide
  Target: ATXN2; (-) strand; PAM type: NRG; PAM sequence: TGG
ctgccaaccccctgcagagc

SEQ ID NO: 17098 - DNA, 20 bp, Artificial Sequence
  Description of Artificial Sequence: Synthetic oligonucleotide
  Target: ATXN2; (-) strand; PAM type: NRG; PAM sequence: GAG
ggccctgccaaccccctgca

SEQ ID NO: 17099 - DNA, 20 bp, Artificial Sequence
  Description of Artificial Sequence: Synthetic oligonucleotide
  Target: ATXN2; (-) strand; PAM type: NRG; PAM sequence: CAG
ctggccctgccaaccccctg

SEQ ID NO: 17100 - DNA, 20 bp, Artificial Sequence
  Description of Artificial Sequence: Synthetic oligonucleotide
  Target: ATXN2; (-) strand; PAM type: NRG; PAM sequence: TGG
aaggaaacaagggctcttcc

SEQ ID NO: 17101 - DNA, 20 bp, Artificial Sequence
  Description of Artificial Sequence: Synthetic oligonucleotide
  Target: ATXN2; (-) strand; PAM type: NRG; PAM sequence: GGG
gtgtgggaaaaaggaaacaa

SEQ ID NO: 17102 - DNA, 20 bp, Artificial Sequence
  Description of Artificial Sequence: Synthetic oligonucleotide
  Target: ATXN2; (-) strand; PAM type: NRG; PAM sequence: AGG
agtgtgggaaaaaggaaaca

SEQ ID NO: 17103 - DNA, 20 bp, Artificial Sequence
  Description of Artificial Sequence: Synthetic oligonucleotide
  Target: ATXN2; (-) strand; PAM type: NRG; PAM sequence: AAG
cagtgtgggaaaaaggaaac

SEQ ID NO: 17104 - DNA, 20 bp, Artificial Sequence
  Description of Artificial Sequence: Synthetic oligonucleotide
  Target: ATXN2; (-) strand; PAM type: NRG; PAM sequence: AGG
cagtgcacagtgtgggaaaa

SEQ ID NO: 17105 - DNA, 20 bp, Artificial Sequence
  Description of Artificial Sequence: Synthetic oligonucleotide
  Target: ATXN2; (-) strand; PAM type: NRG; PAM sequence: AAG
acagtgcacagtgtgggaaa

SEQ ID NO: 17106 - DNA, 20 bp, Artificial Sequence
  Description of Artificial Sequence: Synthetic oligonucleotide
  Target: ATXN2; (-) strand; PAM type: NRG; PAM sequence: GGG
tctagaacagtgcacagtgt

SEQ ID NO: 17107 - DNA, 20 bp, Artificial Sequence
  Description of Artificial Sequence: Synthetic oligonucleotide
  Target: ATXN2; (-) strand; PAM type: NRG; PAM sequence: TGG
gtctagaacagtgcacagtg

SEQ ID NO: 17108 - DNA, 20 bp, Artificial Sequence
  Description of Artificial Sequence: Synthetic oligonucleotide
  Target: ATXN2; (-) strand; PAM type: NRG; PAM sequence: CAG
tcgtagtctagaacagtgca

SEQ ID NO: 17109 - DNA, 20 bp, Artificial Sequence
  Description of Artificial Sequence: Synthetic oligonucleotide
  Target: ATXN2; (-) strand; PAM type: NRG; PAM sequence: CAG
aggcttatcgtagtctagaa

SEQ ID NO: 17110 - DNA, 20 bp, Artificial Sequence
  Description of Artificial Sequence: Synthetic oligonucleotide
  Target: ATXN2; (-) strand; PAM type: NRG; PAM sequence: TAG
atccaaggcttatcgtagtc

SEQ ID NO: 17111 - DNA, 20 bp, Artificial Sequence
  Description of Artificial Sequence: Synthetic oligonucleotide
  Target: ATXN2; (-) strand; PAM type: NRG; PAM sequence: TAG
atttcatccaaggcttatcg

SEQ ID NO: 17112 - DNA, 20 bp, Artificial Sequence
  Description of Artificial Sequence: Synthetic oligonucleotide
  Target: ATXN2; (-) strand; PAM type: NRG; PAM sequence: AGG
taaaaacggcatttcatcca

SEQ ID NO: 17113 - DNA, 20 bp, Artificial Sequence
  Description of Artificial Sequence: Synthetic oligonucleotide
  Target: ATXN2; (-) strand; PAM type: NRG; PAM sequence: AAG
gtaaaaacggcatttcatcc

SEQ ID NO: 17114 - DNA, 20 bp, Artificial Sequence
  Description of Artificial Sequence: Synthetic oligonucleotide
  Target: ATXN2; (-) strand; PAM type: NRG; PAM sequence: CGG
tgaatatgtgagagtaaaaa

SEQ ID NO: 17115 - DNA, 20 bp, Artificial Sequence
  Description of Artificial Sequence: Synthetic oligonucleotide
  Target: ATXN2; (-) strand; PAM type: NRG; PAM sequence: GAG
gtgcccgtttgaatatgtga

SEQ ID NO: 17116 - DNA, 20 bp, Artificial Sequence
  Description of Artificial Sequence: Synthetic oligonucleotide
  Target: ATXN2; (-) strand; PAM type: NRG; PAM sequence: GAG
atgtgcccgtttgaatatgt

SEQ ID NO: 17117 - DNA, 20 bp, Artificial Sequence
  Description of Artificial Sequence: Synthetic oligonucleotide
  Target: ATXN2; (-) strand; PAM type: NRG; PAM sequence: AAG
gcaaaaaggttaacacaggg

SEQ ID NO: 17118 - DNA, 20 bp, Artificial Sequence
  Description of Artificial Sequence: Synthetic oligonucleotide
  Target: ATXN2; (-) strand; PAM type: NRG; PAM sequence: GGG
agggcaaaaaggttaacaca

SEQ ID NO: 17119 - DNA, 20 bp, Artificial Sequence
  Description of Artificial Sequence: Synthetic oligonucleotide
  Target: ATXN2; (-) strand; PAM type: NRG; PAM sequence: AGG
aagggcaaaaaggttaacac

SEQ ID NO: 17120 - DNA, 20 bp, Artificial Sequence
  Description of Artificial Sequence: Synthetic oligonucleotide
  Target: ATXN2; (-) strand; PAM type: NRG; PAM sequence: CAG
aaagggcaaaaaggttaaca

SEQ ID NO: 17121 - DNA, 20 bp, Artificial Sequence
  Description of Artificial Sequence: Synthetic oligonucleotide
  Target: ATXN2; (-) strand; PAM type: NRG; PAM sequence: AGG
tttgtgctgaaagggcaaaa

SEQ ID NO: 17122 - DNA, 20 bp, Artificial Sequence
  Description of Artificial Sequence: Synthetic oligonucleotide
  Target: ATXN2; (-) strand; PAM type: NRG; PAM sequence: AAG
ttttgtgctgaaagggcaaa

SEQ ID NO: 17123 - DNA, 20 bp, Artificial Sequence
  Description of Artificial Sequence: Synthetic oligonucleotide
  Target: ATXN2; (-) strand; PAM type: NRG; PAM sequence: GGG
actctgtttttgtgctgaaa

SEQ ID NO: 17124 - DNA, 20 bp, Artificial Sequence
  Description of Artificial Sequence: Synthetic oligonucleotide
  Target: ATXN2; (-) strand; PAM type: NRG; PAM sequence: AGG
cactctgtttttgtgctgaa

SEQ ID NO: 17125 - DNA, 20 bp, Artificial Sequence
  Description of Artificial Sequence: Synthetic oligonucleotide
  Target: ATXN2; (-) strand; PAM type: NRG; PAM sequence: AAG
tcactctgtttttgtgctga

SEQ ID NO: 17126 - DNA, 20 bp, Artificial Sequence
  Description of Artificial Sequence: Synthetic oligonucleotide
  Target: ATXN2; (-) strand; PAM type: NRG; PAM sequence: GGG
gtgaacttacatgtaagtca

SEQ ID NO: 17127 - DNA, 20 bp, Artificial Sequence
  Description of Artificial Sequence: Synthetic oligonucleotide
  Target: ATXN2; (-) strand; PAM type: NRG; PAM sequence: AGG
tgtgaacttacatgtaagtc

SEQ ID NO: 17128 - DNA, 20 bp, Artificial Sequence
  Description of Artificial Sequence: Synthetic oligonucleotide
  Target: ATXN2; (-) strand; PAM type: NRG; PAM sequence: CAG
atgtgaacttacatgtaagt

SEQ ID NO: 17129 - DNA, 20 bp, Artificial Sequence
  Description of Artificial Sequence: Synthetic oligonucleotide
  Target: ATXN2; (-) strand; PAM type: NRG; PAM sequence: AAG
aggcatgtgaacttacatgt

SEQ ID NO: 17130 - DNA, 20 bp, Artificial Sequence
  Description of Artificial Sequence: Synthetic oligonucleotide
  Target: ATXN2; (-) strand; PAM type: NRG; PAM sequence: AGG
ccagaggctggtggctaagt

SEQ ID NO: 17131 - DNA, 20 bp, Artificial Sequence
  Description of Artificial Sequence: Synthetic oligonucleotide
  Target: ATXN2; (-) strand; PAM type: NRG; PAM sequence: TAG
accagaggctggtggctaag

SEQ ID NO: 17132 - DNA, 20 bp, Artificial Sequence
  Description of Artificial Sequence: Synthetic oligonucleotide
  Target: ATXN2; (-) strand; PAM type: NRG; PAM sequence: AAG
tctaccagaggctggtggct

SEQ ID NO: 17133 - DNA, 20 bp, Artificial Sequence
  Description of Artificial Sequence: Synthetic oligonucleotide
  Target: ATXN2; (-) strand; PAM type: NRG; PAM sequence: TGG
aggtgtctaccagaggctgg

SEQ ID NO: 17134 - DNA, 20 bp, Artificial Sequence
  Description of Artificial Sequence: Synthetic oligonucleotide
  Target: ATXN2; (-) strand; PAM type: NRG; PAM sequence: TGG
tgtaggtgtctaccagaggc

SEQ ID NO: 17135 - DNA, 20 bp, Artificial Sequence
  Description of Artificial Sequence: Synthetic oligonucleotide
  Target: ATXN2; (-) strand; PAM type: NRG; PAM sequence: AGG
gtcctgtaggtgtctaccag

SEQ ID NO: 17136 - DNA, 20 bp, Artificial Sequence
  Description of Artificial Sequence: Synthetic oligonucleotide
  Target: ATXN2; (-) strand; PAM type: NRG; PAM sequence: GAG
ggtcctgtaggtgtctacca

SEQ ID NO: 17137 - DNA, 20 bp, Artificial Sequence
  Description of Artificial Sequence: Synthetic oligonucleotide
  Target: ATXN2; (-) strand; PAM type: NRG; PAM sequence: CAG
ggggtcctgtaggtgtctac

SEQ ID NO: 17138 - DNA, 20 bp, Artificial Sequence
  Description of Artificial Sequence: Synthetic oligonucleotide
  Target: ATXN2; (-) strand; PAM type: NRG; PAM sequence: AGG
cataagagctggggtcctgt

SEQ ID NO: 17139 - DNA, 20 bp, Artificial Sequence
  Description of Artificial Sequence: Synthetic oligonucleotide
  Target: ATXN2; (-) strand; PAM type: NRG; PAM sequence: TAG
tcataagagctggggtcctg

SEQ ID NO: 17140 - DNA, 20 bp, Artificial Sequence
  Description of Artificial Sequence: Synthetic oligonucleotide
  Target: ATXN2; (-) strand; PAM type: NRG; PAM sequence: GGG
agtcagcttcataagagctg

SEQ ID NO: 17141 - DNA, 20 bp, Artificial Sequence
  Description of Artificial Sequence: Synthetic oligonucleotide
  Target: ATXN2; (-) strand; PAM type: NRG; PAM sequence: GGG
gagtcagcttcataagagct

SEQ ID NO: 17142 - DNA, 20 bp, Artificial Sequence
  Description of Artificial Sequence: Synthetic oligonucleotide
  Target: ATXN2; (-) strand; PAM type: NRG; PAM sequence: TGG
ggagtcagcttcataagagc

SEQ ID NO: 17143 - DNA, 20 bp, Artificial Sequence
  Description of Artificial Sequence: Synthetic oligonucleotide
  Target: ATXN2; (-) strand; PAM type: NRG; PAM sequence: GAG
tggtggagtcagcttcataa

SEQ ID NO: 17144 - DNA, 20 bp, Artificial Sequence
  Description of Artificial Sequence: Synthetic oligonucleotide
  Target: ATXN2; (-) strand; PAM type: NRG; PAM sequence: AAG
tttggtggagtcagcttcat

SEQ ID NO: 17145 - DNA, 20 bp, Artificial Sequence
  Description of Artificial Sequence: Synthetic oligonucleotide
  Target: ATXN2; (-) strand; PAM type: NRG; PAM sequence: CAG
ccagcgtggtttggtggagt

SEQ ID NO: 17146 - DNA, 20 bp, Artificial Sequence
  Description of Artificial Sequence: Synthetic oligonucleotide
  Target: ATXN2; (-) strand; PAM type: NRG; PAM sequence: GAG
tgggccagcgtggtttggtg

SEQ ID NO: 17147 - DNA, 20 bp, Artificial Sequence
  Description of Artificial Sequence: Synthetic oligonucleotide
  Target: ATXN2; (-) strand; PAM type: NRG; PAM sequence: TGG
tgtgggccagcgtggtttgg

SEQ ID NO: 17148 - DNA, 20 bp, Artificial Sequence
  Description of Artificial Sequence: Synthetic oligonucleotide
  Target: ATXN2; (-) strand; PAM type: NRG; PAM sequence: TGG
ccgtgtgggccagcgtggtt

SEQ ID NO: 17149 - DNA, 20 bp, Artificial Sequence
  Description of Artificial Sequence: Synthetic oligonucleotide
  Target: ATXN2; (-) strand; PAM type: NRG; PAM sequence: TGG
ttggtccgtgtgggccagcg

SEQ ID NO: 17150 - DNA, 20 bp, Artificial Sequence
  Description of Artificial Sequence: Synthetic oligonucleotide
  Target: ATXN2; (-) strand; PAM type: NRG; PAM sequence: CAG
ccggtttggtccgtgtgggc

SEQ ID NO: 17151 - DNA, 20 bp, Artificial Sequence
  Description of Artificial Sequence: Synthetic oligonucleotide
  Target: ATXN2; (-) strand; PAM type: NRG; PAM sequence: GGG
gaagccggtttggtccgtgt

SEQ ID NO: 17152 - DNA, 20 bp, Artificial Sequence
  Description of Artificial Sequence: Synthetic oligonucleotide
  Target: ATXN2; (-) strand; PAM type: NRG; PAM sequence: TGG
ggaagccggtttggtccgtg

SEQ ID NO: 17153 - DNA, 20 bp, Artificial Sequence
  Description of Artificial Sequence: Synthetic oligonucleotide
  Target: ATXN2; (-) strand; PAM type: NRG; PAM sequence: TGG
agtggggagggaagccggtt

SEQ ID NO: 17154 - DNA, 20 bp, Artificial Sequence
  Description of Artificial Sequence: Synthetic oligonucleotide
  Target: ATXN2; (-) strand; PAM type: NRG; PAM sequence: CGG
ttgatagtggggagggaagc

SEQ ID NO: 17155 - DNA, 20 bp, Artificial Sequence
  Description of Artificial Sequence: Synthetic oligonucleotide
  Target: ATXN2; (-) strand; PAM type: NRG; PAM sequence: AAG
ctttttgatagtggggaggg

SEQ ID NO: 17156 - DNA, 20 bp, Artificial Sequence
  Description of Artificial Sequence: Synthetic oligonucleotide
  Target: ATXN2; (-) strand; PAM type: NRG; PAM sequence: GGG
ttgctttttgatagtgggga

SEQ ID NO: 17157 - DNA, 20 bp, Artificial Sequence
  Description of Artificial Sequence: Synthetic oligonucleotide
  Target: ATXN2; (-) strand; PAM type: NRG; PAM sequence: AGG
tttgctttttgatagtgggg

SEQ ID NO: 17158 - DNA, 20 bp, Artificial Sequence
  Description of Artificial Sequence: Synthetic oligonucleotide
  Target: ATXN2; (-) strand; PAM type: NRG; PAM sequence: GAG
atttgctttttgatagtggg

SEQ ID NO: 17159 - DNA, 20 bp, Artificial Sequence
  Description of Artificial Sequence: Synthetic oligonucleotide
  Target: ATXN2; (-) strand; PAM type: NRG; PAM sequence: GGG
tgatttgctttttgatagtg

SEQ ID NO: 17160 - DNA, 20 bp, Artificial Sequence
  Description of Artificial Sequence: Synthetic oligonucleotide
  Target: ATXN2; (-) strand; PAM type: NRG; PAM sequence: GGG
ttgatttgctttttgatagt

SEQ ID NO: 17161 - DNA, 20 bp, Artificial Sequence
  Description of Artificial Sequence: Synthetic oligonucleotide
  Target: ATXN2; (-) strand; PAM type: NRG; PAM sequence: TGG
gttgatttgctttttgatag

SEQ ID NO: 17162 - DNA, 20 bp, Artificial Sequence
  Description of Artificial Sequence: Synthetic oligonucleotide
  Target: ATXN2; (-) strand; PAM type: NRG; PAM sequence: TAG
gcagttgatttgctttttga

SEQ ID NO: 17163 - DNA, 20 bp, Artificial Sequence
  Description of Artificial Sequence: Synthetic oligonucleotide
  Target: ATXN2; (-) strand; PAM type: NRG; PAM sequence: CAG
ttctgtggtgtagcgcactg

SEQ ID NO: 17164 - DNA, 20 bp, Artificial Sequence
  Description of Artificial Sequence: Synthetic oligonucleotide
  Target: ATXN2; (-) strand; PAM type: NRG; PAM sequence: TAG
aaagtttaggttctgtggtg

SEQ ID NO: 17165 - DNA, 20 bp, Artificial Sequence
  Description of Artificial Sequence: Synthetic oligonucleotide
  Target: ATXN2; (-) strand; PAM type: NRG; PAM sequence: TGG
cctgcaaagtttaggttctg

SEQ ID NO: 17166 - DNA, 20 bp, Artificial Sequence
  Description of Artificial Sequence: Synthetic oligonucleotide
  Target: ATXN2; (-) strand; PAM type: NRG; PAM sequence: AGG
gtcctcaccctgcaaagttt

SEQ ID NO: 17167 - DNA, 20 bp, Artificial Sequence
  Description of Artificial Sequence: Synthetic oligonucleotide
  Target: ATXN2; (-) strand; PAM type: NRG; PAM sequence: TAG
cgtcctcaccctgcaaagtt

SEQ ID NO: 17168 - DNA, 20 bp, Artificial Sequence
  Description of Artificial Sequence: Synthetic oligonucleotide
  Target: ATXN2; (-) strand; PAM type: NRG; PAM sequence: AAG
ttgggcgtcctcaccctgca

SEQ ID NO: 17169 - DNA, 20 bp, Artificial Sequence
  Description of Artificial Sequence: Synthetic oligonucleotide
  Target: ATXN2; (-) strand; PAM type: NRG; PAM sequence: GGG
tccacagctctgggaagttt

SEQ ID NO: 17170 - DNA, 20 bp, Artificial Sequence
  Description of Artificial Sequence: Synthetic oligonucleotide
  Target: ATXN2; (-) strand; PAM type: NRG; PAM sequence: TGG
ttccacagctctgggaagtt

SEQ ID NO: 17171 - DNA, 20 bp, Artificial Sequence
  Description of Artificial Sequence: Synthetic oligonucleotide
  Target: ATXN2; (-) strand; PAM type: NRG; PAM sequence: AAG
tagagttccacagctctggg

SEQ ID NO: 17172 - DNA, 20 bp, Artificial Sequence
  Description of Artificial Sequence: Synthetic oligonucleotide
  Target: ATXN2; (-) strand; PAM type: NRG; PAM sequence: GGG
aagtagagttccacagctct

SEQ ID NO: 17173 - DNA, 20 bp, Artificial Sequence
  Description of Artificial Sequence: Synthetic oligonucleotide
  Target: ATXN2; (-) strand; PAM type: NRG; PAM sequence: TGG
taagtagagttccacagctc

SEQ ID NO: 17174 - DNA, 20 bp, Artificial Sequence
  Description of Artificial Sequence: Synthetic oligonucleotide
  Target: ATXN2; (-) strand; PAM type: NRG; PAM sequence: CAG
accttgtaagtagagttcca

SEQ ID NO: 17175 - DNA, 20 bp, Artificial Sequence
  Description of Artificial Sequence: Synthetic oligonucleotide
  Target: ATXN2; (-) strand; PAM type: NRG; PAM sequence: GAG
agaaggctaccttgtaagta

SEQ ID NO: 17176 - DNA, 20 bp, Artificial Sequence
  Description of Artificial Sequence: Synthetic oligonucleotide
  Target: ATXN2; (-) strand; PAM type: NRG; PAM sequence: TAG
tcagaaggctaccttgtaag

SEQ ID NO: 17177 - DNA, 20 bp, Artificial Sequence
  Description of Artificial Sequence: Synthetic oligonucleotide
  Target: ATXN2; (-) strand; PAM type: NRG; PAM sequence: AAG
ctctcagaaggctaccttgt

SEQ ID NO: 17178 - DNA, 20 bp, Artificial Sequence
  Description of Artificial Sequence: Synthetic oligonucleotide
  Target: ATXN2; (-) strand; PAM type: NRG; PAM sequence: AGG
agttggatctatctctcaga

SEQ ID NO: 17179 - DNA, 20 bp, Artificial Sequence
  Description of Artificial Sequence: Synthetic oligonucleotide
  Target: ATXN2; (-) strand; PAM type: NRG; PAM sequence: AAG
cagttggatctatctctcag

SEQ ID NO: 17180 - DNA, 20 bp, Artificial Sequence
  Description of Artificial Sequence: Synthetic oligonucleotide
  Target: ATXN2; (-) strand; PAM type: NRG; PAM sequence: CAG
actcagttggatctatctct

SEQ ID NO: 17181 - DNA, 20 bp, Artificial Sequence
  Description of Artificial Sequence: Synthetic oligonucleotide
  Target: ATXN2; (-) strand; PAM type: NRG; PAM sequence: TGG
ggctagagatgcgactcagt

SEQ ID NO: 17182 - DNA, 20 bp, Artificial Sequence
  Description of Artificial Sequence: Synthetic oligonucleotide
  Target: ATXN2; (-) strand; PAM type: NRG; PAM sequence: CAG
tgtgggctagagatgcgact

SEQ ID NO: 17183 - DNA, 20 bp, Artificial Sequence
  Description of Artificial Sequence: Synthetic oligonucleotide
  Target: ATXN2; (-) strand; PAM type: NRG; PAM sequence: GAG
ctctggcaaggtgtgggcta

SEQ ID NO: 17184 - DNA, 20 bp, Artificial Sequence
  Description of Artificial Sequence: Synthetic oligonucleotide
  Target: ATXN2; (-) strand; PAM type: NRG; PAM sequence: TAG
ggctctggcaaggtgtgggc

SEQ ID NO: 17185 - DNA, 20 bp, Artificial Sequence
  Description of Artificial Sequence: Synthetic oligonucleotide
  Target: ATXN2; (-) strand; PAM type: NRG; PAM sequence: GGG
gtgaggctctggcaaggtgt

SEQ ID NO: 17186 - DNA, 20 bp, Artificial Sequence
  Description of Artificial Sequence: Synthetic oligonucleotide
  Target: ATXN2; (-) strand; PAM type: NRG; PAM sequence: TGG
agtgaggctctggcaaggtg

SEQ ID NO: 17187 - DNA, 20 bp, Artificial Sequence
  Description of Artificial Sequence: Synthetic oligonucleotide
  Target: ATXN2; (-) strand; PAM type: NRG; PAM sequence: AGG
gcgccagtgaggctctggca

SEQ ID NO: 17188 - DNA, 20 bp, Artificial Sequence
  Description of Artificial Sequence: Synthetic oligonucleotide
  Target: ATXN2; (-) strand; PAM type: NRG; PAM sequence: AAG
tgcgccagtgaggctctggc

SEQ ID NO: 17189 - DNA, 20 bp, Artificial Sequence
  Description of Artificial Sequence: Synthetic oligonucleotide
  Target: ATXN2; (-) strand; PAM type: NRG; PAM sequence: TGG
atagtgcgccagtgaggctc

SEQ ID NO: 17190 - DNA, 20 bp, Artificial Sequence
  Description of Artificial Sequence: Synthetic oligonucleotide
  Target: ATXN2; (-) strand; PAM type: NRG; PAM sequence: AGG
tgttaaatagtgcgccagtg

SEQ ID NO: 17191 - DNA, 20 bp, Artificial Sequence
  Description of Artificial Sequence: Synthetic oligonucleotide
  Target: ATXN2; (-) strand; PAM type: NRG; PAM sequence: GAG
ctgttaaatagtgcgccagt

SEQ ID NO: 17192 - DNA, 20 bp, Artificial Sequence
  Description of Artificial Sequence: Synthetic oligonucleotide
  Target: ATXN2; (-) strand; PAM type: NRG; PAM sequence: CAG
tttcctgttaaatagtgcgc

SEQ ID NO: 17193 - DNA, 20 bp, Artificial Sequence
  Description of Artificial Sequence: Synthetic oligonucleotide
  Target: ATXN2; (-) strand; PAM type: NRG; PAM sequence: TAG
gaattccatttcctgttaaa

SEQ ID NO: 17194 - DNA, 20 bp, Artificial Sequence
  Description of Artificial Sequence: Synthetic oligonucleotide
  Target: ATXN2; (-) strand; PAM type: NRG; PAM sequence: GAG
tctctgaggcgggtctaagt

SEQ ID NO: 17195 - DNA, 20 bp, Artificial Sequence
  Description of Artificial Sequence: Synthetic oligonucleotide
  Target: ATXN2; (-) strand; PAM type: NRG; PAM sequence: AAG
gaactctctgaggcgggtct

SEQ ID NO: 17196 - DNA, 20 bp, Artificial Sequence
  Description of Artificial Sequence: Synthetic oligonucleotide
  Target: ATXN2; (-) strand; PAM type: NRG; PAM sequence: GGG
ataacagaactctctgaggc

SEQ ID NO: 17197 - DNA, 20 bp, Artificial Sequence
  Description of Artificial Sequence: Synthetic oligonucleotide
  Target: ATXN2; (-) strand; PAM type: NRG; PAM sequence: CGG
cataacagaactctctgagg

SEQ ID NO: 17198 - DNA, 20 bp, Artificial Sequence
  Description of Artificial Sequence: Synthetic oligonucleotide
  Target: ATXN2; (-) strand; PAM type: NRG; PAM sequence: AGG
tttcataacagaactctctg

SEQ ID NO: 17199 - DNA, 20 bp, Artificial Sequence
  Description of Artificial Sequence: Synthetic oligonucleotide
  Target: ATXN2; (-) strand; PAM type: NRG; PAM sequence: GAG
ctttcataacagaactctct

SEQ ID NO: 17200 - DNA, 20 bp, Artificial Sequence
  Description of Artificial Sequence: Synthetic oligonucleotide
  Target: ATXN2; (-) strand; PAM type: NRG; PAM sequence: CAG
tgtctctgctactttcataa

SEQ ID NO: 17201 - DNA, 20 bp, Artificial Sequence
  Description of Artificial Sequence: Synthetic oligonucleotide
  Target: ATXN2; (-) strand; PAM type: NRG; PAM sequence: TAG
tacgggtgaattggctgtat

SEQ ID NO: 17202 - DNA, 20 bp, Artificial Sequence
  Description of Artificial Sequence: Synthetic oligonucleotide
  Target: ATXN2; (-) strand; PAM type: NRG; PAM sequence: TGG
tggggctgttacgggtgaat

SEQ ID NO: 17203 - DNA, 20 bp, Artificial Sequence
  Description of Artificial Sequence: Synthetic oligonucleotide
  Target: ATXN2; (-) strand; PAM type: NRG; PAM sequence: GGG
gccctccctggggctgttac

SEQ ID NO: 17204 - DNA, 20 bp, Artificial Sequence
  Description of Artificial Sequence: Synthetic oligonucleotide
  Target: ATXN2; (-) strand; PAM type: NRG; PAM sequence: CGG
ggccctccctggggctgtta

SEQ ID NO: 17205 - DNA, 20 bp, Artificial Sequence
  Description of Artificial Sequence: Synthetic oligonucleotide
  Target: ATXN2; (-) strand; PAM type: NRG; PAM sequence: GGG
tggccttgaggccctccctg

SEQ ID NO: 17206 - DNA, 20 bp, Artificial Sequence
  Description of Artificial Sequence: Synthetic oligonucleotide
  Target: ATXN2; (-) strand; PAM type: NRG; PAM sequence: GGG
ctggccttgaggccctccct

SEQ ID NO: 17207 - DNA, 20 bp, Artificial Sequence
  Description of Artificial Sequence: Synthetic oligonucleotide
  Target: ATXN2; (-) strand; PAM type: NRG; PAM sequence: TGG
gctggccttgaggccctccc

SEQ ID NO: 17208 - DNA, 20 bp, Artificial Sequence
  Description of Artificial Sequence: Synthetic oligonucleotide
  Target: ATXN2; (-) strand; PAM type: NRG; PAM sequence: AGG
gggctctaacgctggccttg

SEQ ID NO: 17209 - DNA, 20 bp, Artificial Sequence
  Description of Artificial Sequence: Synthetic oligonucleotide
  Target: ATXN2; (-) strand; PAM type: NRG; PAM sequence: GAG
tgggctctaacgctggcctt

SEQ ID NO: 17210 - DNA, 20 bp, Artificial Sequence
  Description of Artificial Sequence: Synthetic oligonucleotide
  Target: ATXN2; (-) strand; PAM type: NRG; PAM sequence: TGG
ctgaagttgggctctaacgc

SEQ ID NO: 17211 - DNA, 20 bp, Artificial Sequence
  Description of Artificial Sequence: Synthetic oligonucleotide
  Target: ATXN2; (-) strand; PAM type: NRG; PAM sequence: GGG
gaaggagctgcactgaagtt

SEQ ID NO: 17212 - DNA, 20 bp, Artificial Sequence
  Description of Artificial Sequence: Synthetic oligonucleotide
  Target: ATXN2; (-) strand; PAM type: NRG; PAM sequence: TGG
agaaggagctgcactgaagt

SEQ ID NO: 17213 - DNA, 20 bp, Artificial Sequence
  Description of Artificial Sequence: Synthetic oligonucleotide
  Target: ATXN2; (-) strand; PAM type: NRG; PAM sequence: AAG
gaggagaaggagctgcactg

SEQ ID NO: 17214 - DNA, 20 bp, Artificial Sequence
  Description of Artificial Sequence: Synthetic oligonucleotide
  Target: ATXN2; (-) strand; PAM type: NRG; PAM sequence: GAG
attgtcttaatgaggagaag

SEQ ID NO: 17215 - DNA, 20 bp, Artificial Sequence
  Description of Artificial Sequence: Synthetic oligonucleotide
  Target: ATXN2; (-) strand; PAM type: NRG; PAM sequence: AGG
ggattgtcttaatgaggaga

SEQ ID NO: 17216 - DNA, 20 bp, Artificial Sequence
  Description of Artificial Sequence: Synthetic oligonucleotide
  Target: ATXN2; (-) strand; PAM type: NRG; PAM sequence: AAG
gggattgtcttaatgaggag

SEQ ID NO: 17217 - DNA, 20 bp, Artificial Sequence
  Description of Artificial Sequence: Synthetic oligonucleotide
  Target: ATXN2; (-) strand; PAM type: NRG; PAM sequence: GAG
caggggattgtcttaatgag

SEQ ID NO: 17218 - DNA, 20 bp, Artificial Sequence
  Description of Artificial Sequence: Synthetic oligonucleotide
  Target: ATXN2; (-) strand; PAM type: NRG; PAM sequence: AGG
cccaggggattgtcttaatg

SEQ ID NO: 17219 - DNA, 20 bp, Artificial Sequence
  Description of Artificial Sequence: Synthetic oligonucleotide
  Target: ATXN2; (-) strand; PAM type: NRG; PAM sequence: GAG
gcccaggggattgtcttaat

SEQ ID NO: 17220 - DNA, 20 bp, Artificial Sequence
  Description of Artificial Sequence: Synthetic oligonucleotide
  Target: ATXN2; (-) strand; PAM type: NRG; PAM sequence: GGG
ccctgcactccagggcccag

SEQ ID NO: 17221 - DNA, 20 bp, Artificial Sequence
  Description of Artificial Sequence: Synthetic oligonucleotide
  Target: ATXN2; (-) strand; PAM type: NRG; PAM sequence: GGG
tccctgcactccagggccca

SEQ ID NO: 17222 - DNA, 20 bp, Artificial Sequence
  Description of Artificial Sequence: Synthetic oligonucleotide
  Target: ATXN2; (-) strand; PAM type: NRG; PAM sequence: AGG
gtccctgcactccagggccc

SEQ ID NO: 17223 - DNA, 20 bp, Artificial Sequence
  Description of Artificial Sequence: Synthetic oligonucleotide
  Target: ATXN2; (-) strand; PAM type: NRG; PAM sequence: CAG
ggtccctgcactccagggcc

SEQ ID NO: 17224 - DNA, 20 bp, Artificial Sequence
  Description of Artificial Sequence: Synthetic oligonucleotide
  Target: ATXN2; (-) strand; PAM type: NRG; PAM sequence: GGG
acaaaggtccctgcactcca

SEQ ID NO: 17225 - DNA, 20 bp, Artificial Sequence
  Description of Artificial Sequence: Synthetic oligonucleotide
  Target: ATXN2; (-) strand; PAM type: NRG; PAM sequence: AGG
gacaaaggtccctgcactcc

SEQ ID NO: 17226 - DNA, 20 bp, Artificial Sequence
  Description of Artificial Sequence: Synthetic oligonucleotide
  Target: ATXN2; (-) strand; PAM type: NRG; PAM sequence: CAG
tgacaaaggtccctgcactc

SEQ ID NO: 17227 - DNA, 20 bp, Artificial Sequence
  Description of Artificial Sequence: Synthetic oligonucleotide
  Target: ATXN2; (-) strand; PAM type: NRG; PAM sequence: AGG
tctgcatcagctgctgacaa

SEQ ID NO: 17228 - DNA, 20 bp, Artificial Sequence
  Description of Artificial Sequence: Synthetic oligonucleotide
  Target: ATXN2; (-) strand; PAM type: NRG; PAM sequence: AAG
gtctgcatcagctgctgaca

SEQ ID NO: 17229 - DNA, 20 bp, Artificial Sequence
  Description of Artificial Sequence: Synthetic oligonucleotide
  Target: ATXN2; (-) strand; PAM type: NRG; PAM sequence: CAG
tcagtggttgctgtctgcat

SEQ ID NO: 17230 - DNA, 20 bp, Artificial Sequence
  Description of Artificial Sequence: Synthetic oligonucleotide
  Target: ATXN2; (-) strand; PAM type: NRG; PAM sequence: TGG
aggtgtgcttgccatctcag

SEQ ID NO: 17231 - DNA, 20 bp, Artificial Sequence
  Description of Artificial Sequence: Synthetic oligonucleotide
  Target: ATXN2; (-) strand; PAM type: NRG; PAM sequence: CAG
gaaaggtgtgcttgccatct

SEQ ID NO: 17232 - DNA, 20 bp, Artificial Sequence
  Description of Artificial Sequence: Synthetic oligonucleotide
  Target: ATXN2; (-) strand; PAM type: NRG; PAM sequence: AGG
tgtaagctgctacaggtgaa

SEQ ID NO: 17233 - DNA, 20 bp, Artificial Sequence
  Description of Artificial Sequence: Synthetic oligonucleotide
  Target: ATXN2; (-) strand; PAM type: NRG; PAM sequence: AAG
gtgtaagctgctacaggtga

SEQ ID NO: 17234 - DNA, 20 bp, Artificial Sequence
  Description of Artificial Sequence: Synthetic oligonucleotide
  Target: ATXN2; (-) strand; PAM type: NRG; PAM sequence: AGG
cctccagtgtaagctgctac

SEQ ID NO: 17235 - DNA, 20 bp, Artificial Sequence
  Description of Artificial Sequence: Synthetic oligonucleotide
  Target: ATXN2; (-) strand; PAM type: NRG; PAM sequence: CAG
acctccagtgtaagctgcta

SEQ ID NO: 17236 - DNA, 20 bp, Artificial Sequence
  Description of Artificial Sequence: Synthetic oligonucleotide
  Target: ATXN2; (-) strand; PAM type: NRG; PAM sequence: AAG
ttggagctcacctccagtgt

SEQ ID NO: 17237 - DNA, 20 bp, Artificial Sequence
  Description of Artificial Sequence: Synthetic oligonucleotide
  Target: ATXN2; (-) strand; PAM type: NRG; PAM sequence: CAG
agcactttggagctcacctc

SEQ ID NO: 17238 - DNA, 20 bp, Artificial Sequence
  Description of Artificial Sequence: Synthetic oligonucleotide
  Target: ATXN2; (-) strand; PAM type: NRG; PAM sequence: GAG
gcagccctggaagcactttg

SEQ ID NO: 17239 - DNA, 20 bp, Artificial Sequence
  Description of Artificial Sequence: Synthetic oligonucleotide
  Target: ATXN2; (-) strand; PAM type: NRG; PAM sequence: TGG
gagcagccctggaagcactt

SEQ ID NO: 17240 - DNA, 20 bp, Artificial Sequence
  Description of Artificial Sequence: Synthetic oligonucleotide
  Target: ATXN2; (-) strand; PAM type: NRG; PAM sequence: AAG
ttctttaagagcagccctgg

SEQ ID NO: 17241 - DNA, 20 bp, Artificial Sequence
  Description of Artificial Sequence: Synthetic oligonucleotide
  Target: ATXN2; (-) strand; PAM type: NRG; PAM sequence: TGG
tttttctttaagagcagccc

SEQ ID NO: 17242 - DNA, 20 bp, Artificial Sequence
  Description of Artificial Sequence: Synthetic oligonucleotide
  Target: ATXN2; (-) strand; PAM type: NRG; PAM sequence: CAG
gtcccatttttctttaagag

SEQ ID NO: 17243 - DNA, 20 bp, Artificial Sequence
  Description of Artificial Sequence: Synthetic oligonucleotide
  Target: ATXN2; (-) strand; PAM type: NRG; PAM sequence: GAG
gtggtcccatttttctttaa

SEQ ID NO: 17244 - DNA, 20 bp, Artificial Sequence
  Description of Artificial Sequence: Synthetic oligonucleotide
  Target: ATXN2; (-) strand; PAM type: NRG; PAM sequence: AAG
aggtggtcccatttttcttt

SEQ ID NO: 17245 - DNA, 20 bp, Artificial Sequence
  Description of Artificial Sequence: Synthetic oligonucleotide
  Target: ATXN2; (-) strand; PAM type: NRG; PAM sequence: TGG
agaagctggaagcacccagg

SEQ ID NO: 17246 - DNA, 20 bp, Artificial Sequence
  Description of Artificial Sequence: Synthetic oligonucleotide
  Target: ATXN2; (-) strand; PAM type: NRG; PAM sequence: AGG
actagaagctggaagcaccc

SEQ ID NO: 17247 - DNA, 20 bp, Artificial Sequence
  Description of Artificial Sequence: Synthetic oligonucleotide
  Target: ATXN2; (-) strand; PAM type: NRG; PAM sequence: CAG
aactagaagctggaagcacc

SEQ ID NO: 17248 - DNA, 20 bp, Artificial Sequence
  Description of Artificial Sequence: Synthetic oligonucleotide
  Target: ATXN2; (-) strand; PAM type: NRG; PAM sequence: AAG
gcagtgtaactagaagctgg

SEQ ID NO: 17249 - DNA, 20 bp, Artificial Sequence
  Description of Artificial Sequence: Synthetic oligonucleotide
  Target: ATXN2; (-) strand; PAM type: NRG; PAM sequence: TGG
ggtgcagtgtaactagaagc

SEQ ID NO: 17250 - DNA, 20 bp, Artificial Sequence
  Description of Artificial Sequence: Synthetic oligonucleotide
  Target: ATXN2; (-) strand; PAM type: NRG; PAM sequence: AAG
cattggtgcagtgtaactag

SEQ ID NO: 17251 - DNA, 20 bp, Artificial Sequence
  Description of Artificial Sequence: Synthetic oligonucleotide
  Target: ATXN2; (-) strand; PAM type: NRG; PAM sequence: TAG
ggacattggtgcagtgtaac

SEQ ID NO: 17252 - DNA, 20 bp, Artificial Sequence
  Description of Artificial Sequence: Synthetic oligonucleotide
  Target: ATXN2; (-) strand; PAM type: NRG; PAM sequence: CAG
cttggccttggacattggtg

SEQ ID NO: 17253 - DNA, 20 bp, Artificial Sequence
  Description of Artificial Sequence: Synthetic oligonucleotide
  Target: ATXN2; (-) strand; PAM type: NRG; PAM sequence: TGG
gagggcttggccttggacat

SEQ ID NO: 17254 - DNA, 20 bp, Artificial Sequence
  Description of Artificial Sequence: Synthetic oligonucleotide
  Target: ATXN2; (-) strand; PAM type: NRG; PAM sequence: TGG
ctcttgagagggcttggcct

SEQ ID NO: 17255 - DNA, 20 bp, Artificial Sequence
  Description of Artificial Sequence: Synthetic oligonucleotide
  Target: ATXN2; (-) strand; PAM type: NRG; PAM sequence: TGG
gttgtactcttgagagggct

SEQ ID NO: 17256 - DNA, 20 bp, Artificial Sequence
  Description of Artificial Sequence: Synthetic oligonucleotide
  Target: ATXN2; (-) strand; PAM type: NRG; PAM sequence: GGG
cataagttgtactcttgaga

SEQ ID NO: 17257 - DNA, 20 bp, Artificial Sequence
  Description of Artificial Sequence: Synthetic oligonucleotide
  Target: ATXN2; (-) strand; PAM type: NRG; PAM sequence: AGG
ccataagttgtactcttgag

SEQ ID NO: 17258 - DNA, 20 bp, Artificial Sequence
  Description of Artificial Sequence: Synthetic oligonucleotide
  Target: ATXN2; (-) strand; PAM type: NRG; PAM sequence: GAG
accataagttgtactcttga

SEQ ID NO: 17259 - DNA, 20 bp, Artificial Sequence
  Description of Artificial Sequence: Synthetic oligonucleotide
  Target: ATXN2; (-) strand; PAM type: NRG; PAM sequence: GAG
tgaccataagttgtactctt

SEQ ID NO: 17260 - DNA, 20 bp, Artificial Sequence
  Description of Artificial Sequence: Synthetic oligonucleotide
  Target: ATXN2; (-) strand; PAM type: NRG; PAM sequence: AAG
catatatctgctttgaccat

SEQ ID NO: 17261 - DNA, 20 bp, Artificial Sequence
  Description of Artificial Sequence: Synthetic oligonucleotide
  Target: ATXN2; (-) strand; PAM type: NRG; PAM sequence: TGG
atctctccaattgttttccc

SEQ ID NO: 17262 - DNA, 20 bp, Artificial Sequence
  Description of Artificial Sequence: Synthetic oligonucleotide
  Target: ATXN2; (-) strand; PAM type: NRG; PAM sequence: CAG
attgttactcacatgagttc

SEQ ID NO: 17263 - DNA, 20 bp, Artificial Sequence
  Description of Artificial Sequence: Synthetic oligonucleotide
  Target: ATXN2; (-) strand; PAM type: NRG; PAM sequence: GAG
aacttgattgttactcacat

SEQ ID NO: 17264 - DNA, 20 bp, Artificial Sequence
  Description of Artificial Sequence: Synthetic oligonucleotide
  Target: ATXN2; (-) strand; PAM type: NRG; PAM sequence: GGG
gctctccgaagtgactaccg

SEQ ID NO: 17265 - DNA, 20 bp, Artificial Sequence
  Description of Artificial Sequence: Synthetic oligonucleotide
  Target: ATXN2; (-) strand; PAM type: NRG; PAM sequence: GGG
agctctccgaagtgactacc

SEQ ID NO: 17266 - DNA, 20 bp, Artificial Sequence
  Description of Artificial Sequence: Synthetic oligonucleotide
  Target: ATXN2; (-) strand; PAM type: NRG; PAM sequence: CGG
cagctctccgaagtgactac

SEQ ID NO: 17267 - DNA, 20 bp, Artificial Sequence
  Description of Artificial Sequence: Synthetic oligonucleotide
  Target: ATXN2; (-) strand; PAM type: NRG; PAM sequence: AAG
cacagagtctcagctctccg

SEQ ID NO: 17268 - DNA, 20 bp, Artificial Sequence
  Description of Artificial Sequence: Synthetic oligonucleotide
  Target: ATXN2; (-) strand; PAM type: NRG; PAM sequence: CAG
tgatggccttcacagagtct

SEQ ID NO: 17269 - DNA, 20 bp, Artificial Sequence
  Description of Artificial Sequence: Synthetic oligonucleotide
  Target: ATXN2; (-) strand; PAM type: NRG; PAM sequence: GAG
cagggatgatggccttcaca

SEQ ID NO: 17270 - DNA, 20 bp, Artificial Sequence
  Description of Artificial Sequence: Synthetic oligonucleotide
  Target: ATXN2; (-) strand; PAM type: NRG; PAM sequence: CAG
ggcagggatgatggccttca

SEQ ID NO: 17271 - DNA, 20 bp, Artificial Sequence
  Description of Artificial Sequence: Synthetic oligonucleotide
  Target: ATXN2; (-) strand; PAM type: NRG; PAM sequence: TGG
tggaagccaggcagggatga

SEQ ID NO: 17272 - DNA, 20 bp, Artificial Sequence
  Description of Artificial Sequence: Synthetic oligonucleotide
  Target: ATXN2; (-) strand; PAM type: NRG; PAM sequence: GGG
cttaccttggaagccaggca

SEQ ID NO: 17273 - DNA, 20 bp, Artificial Sequence
  Description of Artificial Sequence: Synthetic oligonucleotide
  Target: ATXN2; (-) strand; PAM type: NRG; PAM sequence: AGG
acttaccttggaagccaggc

SEQ ID NO: 17274 - DNA, 20 bp, Artificial Sequence
  Description of Artificial Sequence: Synthetic oligonucleotide
  Target: ATXN2; (-) strand; PAM type: NRG; PAM sequence: CAG
cacttaccttggaagccagg

SEQ ID NO: 17275 - DNA, 20 bp, Artificial Sequence
  Description of Artificial Sequence: Synthetic oligonucleotide
  Target: ATXN2; (-) strand; PAM type: NRG; PAM sequence: AGG
acacacttaccttggaagcc

SEQ ID NO: 17276 - DNA, 20 bp, Artificial Sequence
  Description of Artificial Sequence: Synthetic oligonucleotide
  Target: ATXN2; (-) strand; PAM type: NRG; PAM sequence: CAG
tacacacttaccttggaagc

SEQ ID NO: 17277 - DNA, 20 bp, Artificial Sequence
  Description of Artificial Sequence: Synthetic oligonucleotide
  Target: ATXN2; (-) strand; PAM type: NRG; PAM sequence: AAG
cccctacacacttaccttgg

SEQ ID NO: 17278 - DNA, 20 bp, Artificial Sequence
  Description of Artificial Sequence: Synthetic oligonucleotide
  Target: ATXN2; (-) strand; PAM type: NRG; PAM sequence: TGG
attcccctacacacttacct

SEQ ID NO: 17279 - DNA, 20 bp, Artificial Sequence
  Description of Artificial Sequence: Synthetic oligonucleotide
  Target: ATXN2; (-) strand; PAM type: NRG; PAM sequence: TAG
tctgctttgctatgtctata

SEQ ID NO: 17280 - DNA, 20 bp, Artificial Sequence
  Description of Artificial Sequence: Synthetic oligonucleotide
  Target: ATXN2; (-) strand; PAM type: NRG; PAM sequence: CAG
tttgactctggaatgcaacc

SEQ ID NO: 17281 - DNA, 20 bp, Artificial Sequence
  Description of Artificial Sequence: Synthetic oligonucleotide
  Target: ATXN2; (-) strand; PAM type: NRG; PAM sequence: TGG
cttaaaaatatctttgactc

SEQ ID NO: 17282 - DNA, 20 bp, Artificial Sequence
  Description of Artificial Sequence: Synthetic oligonucleotide
  Target: ATXN2; (-) strand; PAM type: NRG; PAM sequence: GAG
agtcctttagttttccaact

SEQ ID NO: 17283 - DNA, 20 bp, Artificial Sequence
  Description of Artificial Sequence: Synthetic oligonucleotide
  Target: ATXN2; (-) strand; PAM type: NRG; PAM sequence: TAG
gtgctgattggtcagtcctt

SEQ ID NO: 17284 - DNA, 20 bp, Artificial Sequence
  Description of Artificial Sequence: Synthetic oligonucleotide
  Target: ATXN2; (-) strand; PAM type: NRG; PAM sequence: CAG
cagtgaaggtgctgattggt

SEQ ID NO: 17285 - DNA, 20 bp, Artificial Sequence
  Description of Artificial Sequence: Synthetic oligonucleotide
  Target: ATXN2; (-) strand; PAM type: NRG; PAM sequence: TGG
ggatcagtgaaggtgctgat

SEQ ID NO: 17286 - DNA, 20 bp, Artificial Sequence
  Description of Artificial Sequence: Synthetic oligonucleotide
  Target: ATXN2; (-) strand; PAM type: NRG; PAM sequence: AGG
ttttgtcatgggatcagtga

SEQ ID NO: 17287 - DNA, 20 bp, Artificial Sequence
  Description of Artificial Sequence: Synthetic oligonucleotide
  Target: ATXN2; (-) strand; PAM type: NRG; PAM sequence: AAG
gttttgtcatgggatcagtg

SEQ ID NO: 17288 - DNA, 20 bp, Artificial Sequence
  Description of Artificial Sequence: Synthetic oligonucleotide
  Target: ATXN2; (-) strand; PAM type: NRG; PAM sequence: CAG
gtgtggttttgtcatgggat

SEQ ID NO: 17289 - DNA, 20 bp, Artificial Sequence
  Description of Artificial Sequence: Synthetic oligonucleotide
  Target: ATXN2; (-) strand; PAM type: NRG; PAM sequence: GGG
tgtttgtgtggttttgtcat

SEQ ID NO: 17290 - DNA, 20 bp, Artificial Sequence
  Description of Artificial Sequence: Synthetic oligonucleotide
  Target: ATXN2; (-) strand; PAM type: NRG; PAM sequence: TGG
atgtttgtgtggttttgtca

SEQ ID NO: 17291 - DNA, 20 bp, Artificial Sequence
  Description of Artificial Sequence: Synthetic oligonucleotide
  Target: ATXN2; (-) strand; PAM type: NRG; PAM sequence: TGG
gccctaagggaatgtttgtg

SEQ ID NO: 17292 - DNA, 20 bp, Artificial Sequence
  Description of Artificial Sequence: Synthetic oligonucleotide
  Target: ATXN2; (-) strand; PAM type: NRG; PAM sequence: GGG
tacacgtgatctggccctaa

SEQ ID NO: 17293 - DNA, 20 bp, Artificial Sequence
  Description of Artificial Sequence: Synthetic oligonucleotide
  Target: ATXN2; (-) strand; PAM type: NRG; PAM sequence: AGG
atacacgtgatctggcccta

SEQ ID NO: 17294 - DNA, 20 bp, Artificial Sequence
  Description of Artificial Sequence: Synthetic oligonucleotide
  Target: ATXN2; (-) strand; PAM type: NRG; PAM sequence: AAG
aatacacgtgatctggccct

SEQ ID NO: 17295 - DNA, 20 bp, Artificial Sequence
  Description of Artificial Sequence: Synthetic oligonucleotide
  Target: ATXN2; (-) strand; PAM type: NRG; PAM sequence: TGG
cctctcaaatacacgtgatc

SEQ ID NO: 17296 - DNA, 20 bp, Artificial Sequence
  Description of Artificial Sequence: Synthetic oligonucleotide
  Target: ATXN2; (-) strand; PAM type: NRG; PAM sequence: AGG
agctagaggctctcccagct

SEQ ID NO: 17297 - DNA, 20 bp, Artificial Sequence
  Description of Artificial Sequence: Synthetic oligonucleotide
  Target: ATXN2; (-) strand; PAM type: NRG; PAM sequence: TAG
cagctagaggctctcccagc

SEQ ID NO: 17298 - DNA, 20 bp, Artificial Sequence
  Description of Artificial Sequence: Synthetic oligonucleotide
  Target: ATXN2; (-) strand; PAM type: NRG; PAM sequence: CAG
taagcagctagaggctctcc

SEQ ID NO: 17299 - DNA, 20 bp, Artificial Sequence
  Description of Artificial Sequence: Synthetic oligonucleotide
  Target: ATXN2; (-) strand; PAM type: NRG; PAM sequence: AGG
ggttatcagtaagcagctag

SEQ ID NO: 17300 - DNA, 20 bp, Artificial Sequence
  Description of Artificial Sequence: Synthetic oligonucleotide
  Target: ATXN2; (-) strand; PAM type: NRG; PAM sequence: GAG
aggttatcagtaagcagcta

SEQ ID NO: 17301 - DNA, 20 bp, Artificial Sequence
  Description of Artificial Sequence: Synthetic oligonucleotide
  Target: ATXN2; (-) strand; PAM type: NRG; PAM sequence: TAG
gaaggttatcagtaagcagc

SEQ ID NO: 17302 - DNA, 20 bp, Artificial Sequence
  Description of Artificial Sequence: Synthetic oligonucleotide
  Target: ATXN2; (-) strand; PAM type: NRG; PAM sequence: CAG
atgtgaaggttatcagtaag

SEQ ID NO: 17303 - DNA, 20 bp, Artificial Sequence
  Description of Artificial Sequence: Synthetic oligonucleotide
  Target: ATXN2; (-) strand; PAM type: NRG; PAM sequence: AAG
agaatgtgaaggttatcagt

SEQ ID NO: 17304 - DNA, 20 bp, Artificial Sequence
  Description of Artificial Sequence: Synthetic oligonucleotide
  Target: ATXN2; (-) strand; PAM type: NRG; PAM sequence: CAG
aagtagaatgtgaaggttat

SEQ ID NO: 17305 - DNA, 20 bp, Artificial Sequence
  Description of Artificial Sequence: Synthetic oligonucleotide
  Target: ATXN2; (-) strand; PAM type: NRG; PAM sequence: AGG
gaaggccaagtagaatgtga

SEQ ID NO: 17306 - DNA, 20 bp, Artificial Sequence
  Description of Artificial Sequence: Synthetic oligonucleotide
  Target: ATXN2; (-) strand; PAM type: NRG; PAM sequence: AAG
tgaaggccaagtagaatgtg

SEQ ID NO: 17307 - DNA, 20 bp, Artificial Sequence
  Description of Artificial Sequence: Synthetic oligonucleotide
  Target: ATXN2; (-) strand; PAM type: NRG; PAM sequence: TAG
aactttctgtgaaggccaag

SEQ ID NO: 17308 - DNA, 20 bp, Artificial Sequence
  Description of Artificial Sequence: Synthetic oligonucleotide
  Target: ATXN2; (-) strand; PAM type: NRG; PAM sequence: AAG
gccaactttctgtgaaggcc

SEQ ID NO: 17309 - DNA, 20 bp, Artificial Sequence
  Description of Artificial Sequence: Synthetic oligonucleotide
  Target: ATXN2; (-) strand; PAM type: NRG; PAM sequence: AGG
ctttagccaactttctgtga

SEQ ID NO: 17310 - DNA, 20 bp, Artificial Sequence
  Description of Artificial Sequence: Synthetic oligonucleotide
  Target: ATXN2; (-) strand; PAM type: NRG; PAM sequence: AAG
gctttagccaactttctgtg

SEQ ID NO: 17311 - DNA, 20 bp, Artificial Sequence
  Description of Artificial Sequence: Synthetic oligonucleotide
  Target: ATXN2; (-) strand; PAM type: NRG; PAM sequence: TAG
acctcaggtaataccagctt

SEQ ID NO: 17312 - DNA, 20 bp, Artificial Sequence
  Description of Artificial Sequence: Synthetic oligonucleotide
  Target: ATXN2; (-) strand; PAM type: NRG; PAM sequence: CAG
ccacgtacctcaggtaatac

SEQ ID NO: 17313 - DNA, 20 bp, Artificial Sequence
  Description of Artificial Sequence: Synthetic oligonucleotide
  Target: ATXN2; (-) strand; PAM type: NRG; PAM sequence: AGG
ccacatggcccacgtacctc

SEQ ID NO: 17314 - DNA, 20 bp, Artificial Sequence
  Description of Artificial Sequence: Synthetic oligonucleotide
  Target: ATXN2; (-) strand; PAM type: NRG; PAM sequence: CAG
cccacatggcccacgtacct

SEQ ID NO: 17315 - DNA, 20 bp, Artificial Sequence
  Description of Artificial Sequence: Synthetic oligonucleotide
  Target: ATXN2; (-) strand; PAM type: NRG; PAM sequence: TGG
gtataccaacccaccccaca

SEQ ID NO: 17316 - DNA, 20 bp, Artificial Sequence
  Description of Artificial Sequence: Synthetic oligonucleotide
  Target: ATXN2; (-) strand; PAM type: NRG; PAM sequence: CGG
ccatccttctcacgttcagc

SEQ ID NO: 17317 - DNA, 20 bp, Artificial Sequence
  Description of Artificial Sequence: Synthetic oligonucleotide
  Target: ATXN2; (-) strand; PAM type: NRG; PAM sequence: CAG
cgatccatccttctcacgtt

SEQ ID NO: 17318 - DNA, 20 bp, Artificial Sequence
  Description of Artificial Sequence: Synthetic oligonucleotide
  Target: ATXN2; (-) strand; PAM type: NRG; PAM sequence: CAG
atagtttcccagcagcacaa

SEQ ID NO: 17319 - DNA, 20 bp, Artificial Sequence
  Description of Artificial Sequence: Synthetic oligonucleotide
  Target: ATXN2; (-) strand; PAM type: NRG; PAM sequence: CAG
gccacagaatagtttcccag

SEQ ID NO: 17320 - DNA, 20 bp, Artificial Sequence
  Description of Artificial Sequence: Synthetic oligonucleotide
  Target: ATXN2; (-) strand; PAM type: NRG; PAM sequence: CAG
gtcgccacagaatagtttcc

SEQ ID NO: 17321 - DNA, 20 bp, Artificial Sequence
  Description of Artificial Sequence: Synthetic oligonucleotide
  Target: ATXN2; (-) strand; PAM type: NRG; PAM sequence: TAG
aacacgcagtcgccacagaa

SEQ ID NO: 17322 - DNA, 20 bp, Artificial Sequence
  Description of Artificial Sequence: Synthetic oligonucleotide
  Target: ATXN2; (-) strand; PAM type: NRG; PAM sequence: CAG
cctccaacacgcagtcgcca

SEQ ID NO: 17323 - DNA, 20 bp, Artificial Sequence
  Description of Artificial Sequence: Synthetic oligonucleotide
  Target: ATXN2; (-) strand; PAM type: NRG; PAM sequence: CAG
tgacacctgcctccaacacg

SEQ ID NO: 17324 - DNA, 20 bp, Artificial Sequence
  Description of Artificial Sequence: Synthetic oligonucleotide
  Target: ATXN2; (-) strand; PAM type: NRG; PAM sequence: GGG
agtcagccatttaccacgcg

SEQ ID NO: 17325 - DNA, 20 bp, Artificial Sequence
  Description of Artificial Sequence: Synthetic oligonucleotide
  Target: ATXN2; (-) strand; PAM type: NRG; PAM sequence: GGG
cagtcagccatttaccacgc

SEQ ID NO: 17326 - DNA, 20 bp, Artificial Sequence
  Description of Artificial Sequence: Synthetic oligonucleotide
  Target: ATXN2; (-) strand; PAM type: NRG; PAM sequence: CGG
gcagtcagccatttaccacg

SEQ ID NO: 17327 - DNA, 20 bp, Artificial Sequence
  Description of Artificial Sequence: Synthetic oligonucleotide
  Target: ATXN2; (-) strand; PAM type: NRG; PAM sequence: CAG
ggccagtccacagcagcagt

SEQ ID NO: 17328 - DNA, 20 bp, Artificial Sequence
  Description of Artificial Sequence: Synthetic oligonucleotide
  Target: ATXN2; (-) strand; PAM type: NRG; PAM sequence: CAG
atctggccagtccacagcag

SEQ ID NO: 17329 - DNA, 20 bp, Artificial Sequence
  Description of Artificial Sequence: Synthetic oligonucleotide
  Target: ATXN2; (-) strand; PAM type: NRG; PAM sequence: CAG
tccatctggccagtccacag

SEQ ID NO: 17330 - DNA, 20 bp, Artificial Sequence
  Description of Artificial Sequence: Synthetic oligonucleotide
  Target: ATXN2; (-) strand; PAM type: NRG; PAM sequence: CAG
ctctccatctggccagtcca

SEQ ID NO: 17331 - DNA, 20 bp, Artificial Sequence
  Description of Artificial Sequence: Synthetic oligonucleotide
  Target: ATXN2; (-) strand; PAM type: NRG; PAM sequence: CAG
gcccaggctctccatctggc

SEQ ID NO: 17332 - DNA, 20 bp, Artificial Sequence
  Description of Artificial Sequence: Synthetic oligonucleotide
  Target: ATXN2; (-) strand; PAM type: NRG; PAM sequence: TGG
ggccgcccaggctctccatc

SEQ ID NO: 17333 - DNA, 20 bp, Artificial Sequence
  Description of Artificial Sequence: Synthetic oligonucleotide
  Target: ATXN2; (-) strand; PAM type: NRG; PAM sequence: AGG
ccatcagcaccaggccgccc

SEQ ID NO: 17334 - DNA, 20 bp, Artificial Sequence
  Description of Artificial Sequence: Synthetic oligonucleotide
  Target: ATXN2; (-) strand; PAM type: NRG; PAM sequence: CAG
accatcagcaccaggccgcc

SEQ ID NO: 17335 - DNA, 20 bp, Artificial Sequence
  Description of Artificial Sequence: Synthetic oligonucleotide
  Target: ATXN2; (-) strand; PAM type: NRG; PAM sequence: AGG
tttgcagcaccatcagcacc

SEQ ID NO: 17336 - DNA, 20 bp, Artificial Sequence
  Description of Artificial Sequence: Synthetic oligonucleotide
  Target: ATXN2; (-) strand; PAM type: NRG; PAM sequence: CAG
ctttgcagcaccatcagcac

SEQ ID NO: 17337 - DNA, 20 bp, Artificial Sequence
  Description of Artificial Sequence: Synthetic oligonucleotide
  Target: ATXN2; (-) strand; PAM type: NRG; PAM sequence: CAG
ctgtcgctttgcagcaccat

SEQ ID NO: 17338 - DNA, 20 bp, Artificial Sequence
  Description of Artificial Sequence: Synthetic oligonucleotide
  Target: ATXN2; (-) strand; PAM type: NRG; PAM sequence: CAG
aattctttcctgtcgctttg

SEQ ID NO: 17339 - DNA, 20 bp, Artificial Sequence
  Description of Artificial Sequence: Synthetic oligonucleotide
  Target: ATXN2; (-) strand; PAM type: NRG; PAM sequence: AAG
ttggctgcttttcattaaag

SEQ ID NO: 17340 - DNA, 20 bp, Artificial Sequence
  Description of Artificial Sequence: Synthetic oligonucleotide
  Target: ATXN2; (-) strand; PAM type: NRG; PAM sequence: AAG
cccttggctgcttttcatta

SEQ ID NO: 17341 - DNA, 20 bp, Artificial Sequence
  Description of Artificial Sequence: Synthetic oligonucleotide
  Target: ATXN2; (-) strand; PAM type: NRG; PAM sequence: TGG
ttagctttgtgggtatccct

SEQ ID NO: 17342 - DNA, 20 bp, Artificial Sequence
  Description of Artificial Sequence: Synthetic oligonucleotide
  Target: ATXN2; (-) strand; PAM type: NRG; PAM sequence: GGG
tgtgcaaagcttagctttgt

SEQ ID NO: 17343 - DNA, 20 bp, Artificial Sequence
  Description of Artificial Sequence: Synthetic oligonucleotide
  Target: ATXN2; (-) strand; PAM type: NRG; PAM sequence: TGG
gtgtgcaaagcttagctttg

SEQ ID NO: 17344 - DNA, 20 bp, Artificial Sequence
  Description of Artificial Sequence: Synthetic oligonucleotide
  Target: ATXN2; (-) strand; PAM type: NRG; PAM sequence: TAG
aggcccaagtgtgcaaagct

SEQ ID NO: 17345 - DNA, 20 bp, Artificial Sequence
  Description of Artificial Sequence: Synthetic oligonucleotide
  Target: ATXN2; (-) strand; PAM type: NRG; PAM sequence: AAG
atcataggcccaagtgtgca

SEQ ID NO: 17346 - DNA, 20 bp, Artificial Sequence
  Description of Artificial Sequence: Synthetic oligonucleotide
  Target: ATXN2; (-) strand; PAM type: NRG; PAM sequence: AAG
gtgaccctcatcataggccc

SEQ ID NO: 17347 - DNA, 20 bp, Artificial Sequence
  Description of Artificial Sequence: Synthetic oligonucleotide
  Target: ATXN2; (-) strand; PAM type: NRG; PAM sequence: AGG
tttccagtgaccctcatcat

SEQ ID NO: 17348 - DNA, 20 bp, Artificial Sequence
  Description of Artificial Sequence: Synthetic oligonucleotide
  Target: ATXN2; (-) strand; PAM type: NRG; PAM sequence: TAG
ctttccagtgaccctcatca

SEQ ID NO: 17349 - DNA, 20 bp, Artificial Sequence
  Description of Artificial Sequence: Synthetic oligonucleotide
  Target: ATXN2; (-) strand; PAM type: NRG; PAM sequence: CAG
gtacattctcctgtactttc

SEQ ID NO: 17350 - DNA, 20 bp, Artificial Sequence
  Description of Artificial Sequence: Synthetic oligonucleotide
  Target: ATXN2; (-) strand; PAM type: NRG; PAM sequence: CAG
gtccagatgggaggcacctc

SEQ ID NO: 17351 - DNA, 20 bp, Artificial Sequence
  Description of Artificial Sequence: Synthetic oligonucleotide
  Target: ATXN2; (-) strand; PAM type: NRG; PAM sequence: AGG
aaaggagttgtccagatggg

SEQ ID NO: 17352 - DNA, 20 bp, Artificial Sequence
  Description of Artificial Sequence: Synthetic oligonucleotide
  Target: ATXN2; (-) strand; PAM type: NRG; PAM sequence: GAG
gaaaggagttgtccagatgg

SEQ ID NO: 17353 - DNA, 20 bp, Artificial Sequence
  Description of Artificial Sequence: Synthetic oligonucleotide
  Target: ATXN2; (-) strand; PAM type: NRG; PAM sequence: GGG
tagaaaggagttgtccagat

SEQ ID NO: 17354 - DNA, 20 bp, Artificial Sequence
  Description of Artificial Sequence: Synthetic oligonucleotide
  Target: ATXN2; (-) strand; PAM type: NRG; PAM sequence: TGG
ctagaaaggagttgtccaga

SEQ ID NO: 17355 - DNA, 20 bp, Artificial Sequence
  Description of Artificial Sequence: Synthetic oligonucleotide
  Target: ATXN2; (-) strand; PAM type: NRG; PAM sequence: CAG
taccctagaaaggagttgtc

SEQ ID NO: 17356 - DNA, 20 bp, Artificial Sequence
  Description of Artificial Sequence: Synthetic oligonucleotide
  Target: ATXN2; (-) strand; PAM type: NRG; PAM sequence: GAG
ggcttctgtaccctagaaag

SEQ ID NO: 17357 - DNA, 20 bp, Artificial Sequence
  Description of Artificial Sequence: Synthetic oligonucleotide
  Target: ATXN2; (-) strand; PAM type: NRG; PAM sequence: AGG
caggcttctgtaccctagaa

SEQ ID NO: 17358 - DNA, 20 bp, Artificial Sequence
  Description of Artificial Sequence: Synthetic oligonucleotide
  Target: ATXN2; (-) strand; PAM type: NRG; PAM sequence: AAG
tcaggcttctgtaccctaga

SEQ ID NO: 17359 - DNA, 20 bp, Artificial Sequence
  Description of Artificial Sequence: Synthetic oligonucleotide
  Target: ATXN2; (-) strand; PAM type: NRG; PAM sequence: TAG
agaatcaggcttctgtaccc

SEQ ID NO: 17360 - DNA, 20 bp, Artificial Sequence
  Description of Artificial Sequence: Synthetic oligonucleotide
  Target: ATXN2; (-) strand; PAM type: NRG; PAM sequence: AGG
taactgccagactgagaatc

SEQ ID NO: 17361 - DNA, 20 bp, Artificial Sequence
  Description of Artificial Sequence: Synthetic oligonucleotide
  Target: ATXN2; (-) strand; PAM type: NRG; PAM sequence: CAG
ctaactgccagactgagaat

SEQ ID NO: 17362 - DNA, 20 bp, Artificial Sequence
  Description of Artificial Sequence: Synthetic oligonucleotide
  Target: ATXN2; (-) strand; PAM type: NRG; PAM sequence: GAG
aagtttctaactgccagact

SEQ ID NO: 17363 - DNA, 20 bp, Artificial Sequence
  Description of Artificial Sequence: Synthetic oligonucleotide
  Target: ATXN2; (-) strand; PAM type: NRG; PAM sequence: CAG
gctcagaagtttctaactgc

SEQ ID NO: 17364 - DNA, 20 bp, Artificial Sequence
  Description of Artificial Sequence: Synthetic oligonucleotide
  Target: ATXN2; (-) strand; PAM type: NRG; PAM sequence: AAG
actttagtatgtatgctcag

SEQ ID NO: 17365 - DNA, 20 bp, Artificial Sequence
  Description of Artificial Sequence: Synthetic oligonucleotide
  Target: ATXN2; (-) strand; PAM type: NRG; PAM sequence: CAG
ttgactttagtatgtatgct

SEQ ID NO: 17366 - DNA, 20 bp, Artificial Sequence
  Description of Artificial Sequence: Synthetic oligonucleotide
  Target: ATXN2; (-) strand; PAM type: NRG; PAM sequence: TAG
gcagtagtcttttttgactt

SEQ ID NO: 17367 - DNA, 20 bp, Artificial Sequence
  Description of Artificial Sequence: Synthetic oligonucleotide
  Target: ATXN2; (-) strand; PAM type: NRG; PAM sequence: TAG
ctatcagttccctggggcag

SEQ ID NO: 17368 - DNA, 20 bp, Artificial Sequence
  Description of Artificial Sequence: Synthetic oligonucleotide
  Target: ATXN2; (-) strand; PAM type: NRG; PAM sequence: CAG
tatctatcagttccctgggg

SEQ ID NO: 17369 - DNA, 20 bp, Artificial Sequence
  Description of Artificial Sequence: Synthetic oligonucleotide
  Target: ATXN2; (-) strand; PAM type: NRG; PAM sequence: GGG
tgatatctatcagttccctg

SEQ ID NO: 17370 - DNA, 20 bp, Artificial Sequence
  Description of Artificial Sequence: Synthetic oligonucleotide
  Target: ATXN2; (-) strand; PAM type: NRG; PAM sequence: GGG
ttgatatctatcagttccct

SEQ ID NO: 17371 - DNA, 20 bp, Artificial Sequence
  Description of Artificial Sequence: Synthetic oligonucleotide
  Target: ATXN2; (-) strand; PAM type: NRG; PAM sequence: TGG
tttgatatctatcagttccc

SEQ ID NO: 17372 - DNA, 20 bp, Artificial Sequence
  Description of Artificial Sequence: Synthetic oligonucleotide
  Target: ATXN2; (-) strand; PAM type: NRG; PAM sequence: CAG
aagatgtctttgatatctat

SEQ ID NO: 17373 - DNA, 20 bp, Artificial Sequence
  Description of Artificial Sequence: Synthetic oligonucleotide
  Target: ATXN2; (-) strand; PAM type: NRG; PAM sequence: AAG
tttgctaatggaggcagtta

SEQ ID NO: 17374 - DNA, 20 bp, Artificial Sequence
  Description of Artificial Sequence: Synthetic oligonucleotide
  Target: ATXN2; (-) strand; PAM type: NRG; PAM sequence: CAG
attatgtttgctaatggagg

SEQ ID NO: 17375 - DNA, 20 bp, Artificial Sequence
  Description of Artificial Sequence: Synthetic oligonucleotide
  Target: ATXN2; (-) strand; PAM type: NRG; PAM sequence: AGG
tgaattatgtttgctaatgg

SEQ ID NO: 17376 - DNA, 20 bp, Artificial Sequence
  Description of Artificial Sequence: Synthetic oligonucleotide
  Target: ATXN2; (-) strand; PAM type: NRG; PAM sequence: GAG
ttgaattatgtttgctaatg

SEQ ID NO: 17377 - DNA, 20 bp, Artificial Sequence
  Description of Artificial Sequence: Synthetic oligonucleotide
  Target: ATXN2; (-) strand; PAM type: NRG; PAM sequence: TGG
tcttgaattatgtttgctaa

SEQ ID NO: 17378 - DNA, 20 bp, Artificial Sequence
  Description of Artificial Sequence: Synthetic oligonucleotide
  Target: ATXN2; (-) strand; PAM type: NRG; PAM sequence: GAG
tgatgaggttattttcctat

SEQ ID NO: 17379 - DNA, 20 bp, Artificial Sequence
  Description of Artificial Sequence: Synthetic oligonucleotide
  Target: ATXN2; (-) strand; PAM type: NRG; PAM sequence: AGG
tttctaaggtttatgtgatg

SEQ ID NO: 17380 - DNA, 20 bp, Artificial Sequence
  Description of Artificial Sequence: Synthetic oligonucleotide
  Target: ATXN2; (-) strand; PAM type: NRG; PAM sequence: GAG
atttctaaggtttatgtgat

SEQ ID NO: 17381 - DNA, 20 bp, Artificial Sequence
  Description of Artificial Sequence: Synthetic oligonucleotide
  Target: ATXN2; (-) strand; PAM type: NRG; PAM sequence: AGG
ttgggactttttaatttcta

SEQ ID NO: 17382 - DNA, 20 bp, Artificial Sequence
  Description of Artificial Sequence: Synthetic oligonucleotide
  Target: ATXN2; (-) strand; PAM type: NRG; PAM sequence: AAG
cttgggactttttaatttct

SEQ ID NO: 17383 - DNA, 20 bp, Artificial Sequence
  Description of Artificial Sequence: Synthetic oligonucleotide
  Target: ATXN2; (-) strand; PAM type: NRG; PAM sequence: GGG
aggcaaattcctatttgctt

SEQ ID NO: 17384 - DNA, 20 bp, Artificial Sequence
  Description of Artificial Sequence: Synthetic oligonucleotide
  Target: ATXN2; (-) strand; PAM type: NRG; PAM sequence: TGG
aaggcaaattcctatttgct

SEQ ID NO: 17385 - DNA, 20 bp, Artificial Sequence
  Description of Artificial Sequence: Synthetic oligonucleotide
  Target: ATXN2; (-) strand; PAM type: NRG; PAM sequence: AGG
aatttaacataaagttcata

SEQ ID NO: 17386 - DNA, 20 bp, Artificial Sequence
  Description of Artificial Sequence: Synthetic oligonucleotide
  Target: ATXN2; (-) strand; PAM type: NRG; PAM sequence: AAG
aaatttaacataaagttcat

SEQ ID NO: 17387 - DNA, 20 bp, Artificial Sequence
  Description of Artificial Sequence: Synthetic oligonucleotide
  Target: ATXN2; (-) strand; PAM type: NRG; PAM sequence: AAG
gaaaaatcaaatttaacata

SEQ ID NO: 17388 - DNA, 20 bp, Artificial Sequence
  Description of Artificial Sequence: Synthetic oligonucleotide
  Target: ATXN2; (-) strand; PAM type: NRG; PAM sequence: CAG
ggataagctctggaaacttg

SEQ ID NO: 17389 - DNA, 20 bp, Artificial Sequence
  Description of Artificial Sequence: Synthetic oligonucleotide
  Target: ATXN2; (-) strand; PAM type: NRG; PAM sequence: TGG
taaggtgattggataagctc

SEQ ID NO: 17390 - DNA, 20 bp, Artificial Sequence
  Description of Artificial Sequence: Synthetic oligonucleotide
  Target: ATXN2; (-) strand; PAM type: NRG; PAM sequence: AAG
tgataataaggtgattggat

SEQ ID NO: 17391 - DNA, 20 bp, Artificial Sequence
  Description of Artificial Sequence: Synthetic oligonucleotide
  Target: ATXN2; (-) strand; PAM type: NRG; PAM sequence: TGG
catgttgataataaggtgat

SEQ ID NO: 17392 - DNA, 20 bp, Artificial Sequence
  Description of Artificial Sequence: Synthetic oligonucleotide
  Target: ATXN2; (-) strand; PAM type: NRG; PAM sequence: AGG
taagatacatgttgataata

SEQ ID NO: 17393 - DNA, 20 bp, Artificial Sequence
  Description of Artificial Sequence: Synthetic oligonucleotide
  Target: ATXN2; (-) strand; PAM type: NRG; PAM sequence: AAG
ttaagatacatgttgataat

SEQ ID NO: 17394 - DNA, 20 bp, Artificial Sequence
  Description of Artificial Sequence: Synthetic oligonucleotide
  Target: ATXN2; (-) strand; PAM type: NRG; PAM sequence: AAG
aattaaaaaaaatcacattt

SEQ ID NO: 17395 - DNA, 20 bp, Artificial Sequence
  Description of Artificial Sequence: Synthetic oligonucleotide
  Target: ATXN2; (-) strand; PAM type: NRG; PAM sequence: GAG
actccagcttggacaacagc

SEQ ID NO: 17396 - DNA, 20 bp, Artificial Sequence
  Description of Artificial Sequence: Synthetic oligonucleotide
  Target: ATXN2; (-) strand; PAM type: NRG; PAM sequence: CAG
ctgcactccagcttggacaa

SEQ ID NO: 17397 - DNA, 20 bp, Artificial Sequence
  Description of Artificial Sequence: Synthetic oligonucleotide
  Target: ATXN2; (-) strand; PAM type: NRG; PAM sequence: TGG
cgcgccactgcactccagct

SEQ ID NO: 17398 - DNA, 20 bp, Artificial Sequence
  Description of Artificial Sequence: Synthetic oligonucleotide
  Target: ATXN2; (-) strand; PAM type: NRG; PAM sequence: CAG
gagatcgcgccactgcactc

SEQ ID NO: 17399 - DNA, 20 bp, Artificial Sequence
  Description of Artificial Sequence: Synthetic oligonucleotide
  Target: ATXN2; (-) strand; PAM type: NRG; PAM sequence: GAG
ggcggagcttgcagtgagca

SEQ ID NO: 17400 - DNA, 20 bp, Artificial Sequence
  Description of Artificial Sequence: Synthetic oligonucleotide
  Target: ATXN2; (-) strand; PAM type: NRG; PAM sequence: CAG
gaggcggagcttgcagtgag

SEQ ID NO: 17401 - DNA, 20 bp, Artificial Sequence
  Description of Artificial Sequence: Synthetic oligonucleotide
  Target: ATXN2; (-) strand; PAM type: NRG; PAM sequence: GAG
cgggaggcggagcttgcagt

SEQ ID NO: 17402 - DNA, 20 bp, Artificial Sequence
  Description of Artificial Sequence: Synthetic oligonucleotide
  Target: ATXN2; (-) strand; PAM type: NRG; PAM sequence: CAG
aacccgggaggcggagcttg

SEQ ID NO: 17403 - DNA, 20 bp, Artificial Sequence
  Description of Artificial Sequence: Synthetic oligonucleotide
  Target: ATXN2; (-) strand; PAM type: NRG; PAM sequence: GAG
tggcgtgaacccgggaggcg

SEQ ID NO: 17404 - DNA, 20 bp, Artificial Sequence
  Description of Artificial Sequence: Synthetic oligonucleotide
  Target: ATXN2; (-) strand; PAM type: NRG; PAM sequence: CGG
aatggcgtgaacccgggagg

SEQ ID NO: 17405 - DNA, 20 bp, Artificial Sequence
  Description of Artificial Sequence: Synthetic oligonucleotide
  Target: ATXN2; (-) strand; PAM type: NRG; PAM sequence: AGG
gagaatggcgtgaacccggg

SEQ ID NO: 17406 - DNA, 20 bp, Artificial Sequence
  Description of Artificial Sequence: Synthetic oligonucleotide
  Target: ATXN2; (-) strand; PAM type: NRG; PAM sequence: GAG
ggagaatggcgtgaacccgg

SEQ ID NO: 17407 - DNA, 20 bp, Artificial Sequence
  Description of Artificial Sequence: Synthetic oligonucleotide
  Target: ATXN2; (-) strand; PAM type: NRG; PAM sequence: GGG
aaggagaatggcgtgaaccc

SEQ ID NO: 17408 - DNA, 20 bp, Artificial Sequence
  Description of Artificial Sequence: Synthetic oligonucleotide
  Target: ATXN2; (-) strand; PAM type: NRG; PAM sequence: CGG
gaaggagaatggcgtgaacc

SEQ ID NO: 17409 - DNA, 20 bp, Artificial Sequence
  Description of Artificial Sequence: Synthetic oligonucleotide
  Target: ATXN2; (-) strand; PAM type: NRG; PAM sequence: TGG
gggaggctgaggaaggagaa

SEQ ID NO: 17410 - DNA, 20 bp, Artificial Sequence
  Description of Artificial Sequence: Synthetic oligonucleotide
  Target: ATXN2; (-) strand; PAM type: NRG; PAM sequence: GAG
ttctcgggaggctgaggaag

SEQ ID NO: 17411 - DNA, 20 bp, Artificial Sequence
  Description of Artificial Sequence: Synthetic oligonucleotide
  Target: ATXN2; (-) strand; PAM type: NRG; PAM sequence: AGG
gcttctcgggaggctgagga

SEQ ID NO: 17412 - DNA, 20 bp, Artificial Sequence
  Description of Artificial Sequence: Synthetic oligonucleotide
  Target: ATXN2; (-) strand; PAM type: NRG; PAM sequence: AAG
agcttctcgggaggctgagg

SEQ ID NO: 17413 - DNA, 20 bp, Artificial Sequence
  Description of Artificial Sequence: Synthetic oligonucleotide
  Target: ATXN2; (-) strand; PAM type: NRG; PAM sequence: AGG
cccagcttctcgggaggctg

SEQ ID NO: 17414 - DNA, 20 bp, Artificial Sequence
  Description of Artificial Sequence: Synthetic oligonucleotide
  Target: ATXN2; (-) strand; PAM type: NRG; PAM sequence: GAG
tcccagcttctcgggaggct

SEQ ID NO: 17415 - DNA, 20 bp, Artificial Sequence
  Description of Artificial Sequence: Synthetic oligonucleotide
  Target: ATXN2; (-) strand; PAM type: NRG; PAM sequence: AGG
tgtagtcccagcttctcggg

SEQ ID NO: 17416 - DNA, 20 bp, Artificial Sequence
  Description of Artificial Sequence: Synthetic oligonucleotide
  Target: ATXN2; (-) strand; PAM type: NRG; PAM sequence: GAG
ctgtagtcccagcttctcgg

SEQ ID NO: 17417 - DNA, 20 bp, Artificial Sequence
  Description of Artificial Sequence: Synthetic oligonucleotide
  Target: ATXN2; (-) strand; PAM type: NRG; PAM sequence: GGG
gcctgtagtcccagcttctc

SEQ ID NO: 17418 - DNA, 20 bp, Artificial Sequence
  Description of Artificial Sequence: Synthetic oligonucleotide
  Target: ATXN2; (-) strand; PAM type: NRG; PAM sequence: CGG
cgcctgtagtcccagcttct

SEQ ID NO: 17419 - DNA, 20 bp, Artificial Sequence
  Description of Artificial Sequence: Synthetic oligonucleotide
  Target: ATXN2; (-) strand; PAM type: NRG; PAM sequence: CAG
gtggtgggcgcctgtagtcc

SEQ ID NO: 17420 - DNA, 20 bp, Artificial Sequence
  Description of Artificial Sequence: Synthetic oligonucleotide
  Target: ATXN2; (-) strand; PAM type: NRG; PAM sequence: TAG
ggcgtggtggtgggcgcctg

SEQ ID NO: 17421 - DNA, 20 bp, Artificial Sequence
  Description of Artificial Sequence: Synthetic oligonucleotide
  Target: ATXN2; (-) strand; PAM type: NRG; PAM sequence: GGG
aattagccgggcgtggtggt

SEQ ID NO: 17422 - DNA, 20 bp, Artificial Sequence
  Description of Artificial Sequence: Synthetic oligonucleotide
  Target: ATXN2; (-) strand; PAM type: NRG; PAM sequence: TGG
aaattagccgggcgtggtgg

SEQ ID NO: 17423 - DNA, 20 bp, Artificial Sequence
  Description of Artificial Sequence: Synthetic oligonucleotide
  Target: ATXN2; (-) strand; PAM type: NRG; PAM sequence: TGG
aaaaaattagccgggcgtgg

SEQ ID NO: 17424 - DNA, 20 bp, Artificial Sequence
  Description of Artificial Sequence: Synthetic oligonucleotide
  Target: ATXN2; (-) strand; PAM type: NRG; PAM sequence: TGG
acaaaaaaattagccgggcg

SEQ ID NO: 17425 - DNA, 20 bp, Artificial Sequence
  Description of Artificial Sequence: Synthetic oligonucleotide
  Target: ATXN2; (-) strand; PAM type: NRG; PAM sequence: GGG
aaaatacaaaaaaattagcc

SEQ ID NO: 17426 - DNA, 20 bp, Artificial Sequence
  Description of Artificial Sequence: Synthetic oligonucleotide
  Target: ATXN2; (-) strand; PAM type: NRG; PAM sequence: CGG
aaaaatacaaaaaaattagc

SEQ ID NO: 17427 - DNA, 20 bp, Artificial Sequence
  Description of Artificial Sequence: Synthetic oligonucleotide
  Target: ATXN2; (-) strand; PAM type: NRG; PAM sequence: TAG
taataaaaatacaaaaaaat

SEQ ID NO: 17428 - DNA, 20 bp, Artificial Sequence
  Description of Artificial Sequence: Synthetic oligonucleotide
  Target: ATXN2; (-) strand; PAM type: NRG; PAM sequence: TGG
tcaggagattgagaccatcc

SEQ ID NO: 17429 - DNA, 20 bp, Artificial Sequence
  Description of Artificial Sequence: Synthetic oligonucleotide
  Target: ATXN2; (-) strand; PAM type: NRG; PAM sequence: GAG
gatcacgaggtcaggagatt

SEQ ID NO: 17430 - DNA, 20 bp, Artificial Sequence
  Description of Artificial Sequence: Synthetic oligonucleotide
  Target: ATXN2; (-) strand; PAM type: NRG; PAM sequence: GAG
cgggtggatcacgaggtcag

SEQ ID NO: 17431 - DNA, 20 bp, Artificial Sequence
  Description of Artificial Sequence: Synthetic oligonucleotide
  Target: ATXN2; (-) strand; PAM type: NRG; PAM sequence: AGG
ggcgggtggatcacgaggtc

SEQ ID NO: 17432 - DNA, 20 bp, Artificial Sequence
  Description of Artificial Sequence: Synthetic oligonucleotide
  Target: ATXN2; (-) strand; PAM type: NRG; PAM sequence: CAG
aggcgggtggatcacgaggt

SEQ ID NO: 17433 - DNA, 20 bp, Artificial Sequence
  Description of Artificial Sequence: Synthetic oligonucleotide
  Target: ATXN2; (-) strand; PAM type: NRG; PAM sequence: AGG
gccgaggcgggtggatcacg

SEQ ID NO: 17434 - DNA, 20 bp, Artificial Sequence
  Description of Artificial Sequence: Synthetic oligonucleotide
  Target: ATXN2; (-) strand; PAM type: NRG; PAM sequence: GAG
ggccgaggcgggtggatcac

SEQ ID NO: 17435 - DNA, 20 bp, Artificial Sequence
  Description of Artificial Sequence: Synthetic oligonucleotide
  Target: ATXN2; (-) strand; PAM type: NRG; PAM sequence: TGG
ctttgggaggccgaggcggg

SEQ ID NO: 17436 - DNA, 20 bp, Artificial Sequence
  Description of Artificial Sequence: Synthetic oligonucleotide
  Target: ATXN2; (-) strand; PAM type: NRG; PAM sequence: GGG
ccactttgggaggccgaggc

SEQ ID NO: 17437 - DNA, 20 bp, Artificial Sequence
  Description of Artificial Sequence: Synthetic oligonucleotide
  Target: ATXN2; (-) strand; PAM type: NRG; PAM sequence: CGG
accactttgggaggccgagg

SEQ ID NO: 17438 - DNA, 20 bp, Artificial Sequence
  Description of Artificial Sequence: Synthetic oligonucleotide
  Target: ATXN2; (-) strand; PAM type: NRG; PAM sequence: AGG
cccaccactttgggaggccg

SEQ ID NO: 17439 - DNA, 20 bp, Artificial Sequence
  Description of Artificial Sequence: Synthetic oligonucleotide
  Target: ATXN2; (-) strand; PAM type: NRG; PAM sequence: GAG
tcccaccactttgggaggcc

SEQ ID NO: 17440 - DNA, 20 bp, Artificial Sequence
  Description of Artificial Sequence: Synthetic oligonucleotide
  Target: ATXN2; (-) strand; PAM type: NRG; PAM sequence: AGG
tgtaatcccaccactttggg

SEQ ID NO: 17441 - DNA, 20 bp, Artificial Sequence
  Description of Artificial Sequence: Synthetic oligonucleotide
  Target: ATXN2; (-) strand; PAM type: NRG; PAM sequence: GAG
ctgtaatcccaccactttgg

SEQ ID NO: 17442 - DNA, 20 bp, Artificial Sequence
  Description of Artificial Sequence: Synthetic oligonucleotide
  Target: ATXN2; (-) strand; PAM type: NRG; PAM sequence: GGG
gcctgtaatcccaccacttt

SEQ ID NO: 17443 - DNA, 20 bp, Artificial Sequence
  Description of Artificial Sequence: Synthetic oligonucleotide
  Target: ATXN2; (-) strand; PAM type: NRG; PAM sequence: TGG
cgcctgtaatcccaccactt

SEQ ID NO: 17444 - DNA, 20 bp, Artificial Sequence
  Description of Artificial Sequence: Synthetic oligonucleotide
  Target: ATXN2; (-) strand; PAM type: NRG; PAM sequence: TGG
catttaaaggctgggcgcag

SEQ ID NO: 17445 - DNA, 20 bp, Artificial Sequence
  Description of Artificial Sequence: Synthetic oligonucleotide
  Target: ATXN2; (-) strand; PAM type: NRG; PAM sequence: CAG
tcacatttaaaggctgggcg

SEQ ID NO: 17446 - DNA, 20 bp, Artificial Sequence
  Description of Artificial Sequence: Synthetic oligonucleotide
  Target: ATXN2; (-) strand; PAM type: NRG; PAM sequence: GGG
aagaatcacatttaaaggct

SEQ ID NO: 17447 - DNA, 20 bp, Artificial Sequence
  Description of Artificial Sequence: Synthetic oligonucleotide
  Target: ATXN2; (-) strand; PAM type: NRG; PAM sequence: TGG
taagaatcacatttaaaggc

SEQ ID NO: 17448 - DNA, 20 bp, Artificial Sequence
  Description of Artificial Sequence: Synthetic oligonucleotide
  Target: ATXN2; (-) strand; PAM type: NRG; PAM sequence: AGG
gttttaagaatcacatttaa

SEQ ID NO: 17449 - DNA, 20 bp, Artificial Sequence
  Description of Artificial Sequence: Synthetic oligonucleotide
  Target: ATXN2; (-) strand; PAM type: NRG; PAM sequence: AAG
ggttttaagaatcacattta

SEQ ID NO: 17450 - DNA, 20 bp, Artificial Sequence
  Description of Artificial Sequence: Synthetic oligonucleotide
  Target: ATXN2; (-) strand; PAM type: NRG; PAM sequence: AAG
gcccctggggtggtggtttt

SEQ ID NO: 17451 - DNA, 20 bp, Artificial Sequence
  Description of Artificial Sequence: Synthetic oligonucleotide
  Target: ATXN2; (-) strand; PAM type: NRG; PAM sequence: TGG
cagctgtgcccctggggtgg

SEQ ID NO: 17452 - DNA, 20 bp, Artificial Sequence
  Description of Artificial Sequence: Synthetic oligonucleotide
  Target: ATXN2; (-) strand; PAM type: NRG; PAM sequence: TGG
atacagctgtgcccctgggg

SEQ ID NO: 17453 - DNA, 20 bp, Artificial Sequence
  Description of Artificial Sequence: Synthetic oligonucleotide
  Target: ATXN2; (-) strand; PAM type: NRG; PAM sequence: GGG
tggatacagctgtgcccctg

SEQ ID NO: 17454 - DNA, 20 bp, Artificial Sequence
  Description of Artificial Sequence: Synthetic oligonucleotide
  Target: ATXN2; (-) strand; PAM type: NRG; PAM sequence: GGG
atggatacagctgtgcccct

SEQ ID NO: 17455 - DNA, 20 bp, Artificial Sequence
  Description of Artificial Sequence: Synthetic oligonucleotide
  Target: ATXN2; (-) strand; PAM type: NRG; PAM sequence: TGG
gatggatacagctgtgcccc

SEQ ID NO: 17456 - DNA, 20 bp, Artificial Sequence
  Description of Artificial Sequence: Synthetic oligonucleotide
  Target: ATXN2; (-) strand; PAM type: NRG; PAM sequence: CAG
caccctcgtgaagatggata

SEQ ID NO: 17457 - DNA, 20 bp, Artificial Sequence
  Description of Artificial Sequence: Synthetic oligonucleotide
  Target: ATXN2; (-) strand; PAM type: NRG; PAM sequence: TGG
catgtccaccctcgtgaaga

SEQ ID NO: 17458 - DNA, 20 bp, Artificial Sequence
  Description of Artificial Sequence: Synthetic oligonucleotide
  Target: ATXN2; (-) strand; PAM type: NRG; PAM sequence: AAG
atggcatgtccaccctcgtg

SEQ ID NO: 17459 - DNA, 20 bp, Artificial Sequence
  Description of Artificial Sequence: Synthetic oligonucleotide
  Target: ATXN2; (-) strand; PAM type: NRG; PAM sequence: TGG
tatcgcatcgtcagaacaca

SEQ ID NO: 17460 - DNA, 20 bp, Artificial Sequence
  Description of Artificial Sequence: Synthetic oligonucleotide
  Target: ATXN2; (-) strand; PAM type: NRG; PAM sequence: CAG
ggtgccaggtatcgcatcgt

SEQ ID NO: 17461 - DNA, 20 bp, Artificial Sequence
  Description of Artificial Sequence: Synthetic oligonucleotide
  Target: ATXN2; (-) strand; PAM type: NRG; PAM sequence: AGG
gagtgctttcttcaggtgcc

SEQ ID NO: 17462 - DNA, 20 bp, Artificial Sequence
  Description of Artificial Sequence: Synthetic oligonucleotide
  Target: ATXN2; (-) strand; PAM type: NRG; PAM sequence: CAG
tgagtgctttcttcaggtgc

SEQ ID NO: 17463 - DNA, 20 bp, Artificial Sequence
  Description of Artificial Sequence: Synthetic oligonucleotide
  Target: ATXN2; (-) strand; PAM type: NRG; PAM sequence: AGG
agtatctgagtgctttcttc

SEQ ID NO: 17464 - DNA, 20 bp, Artificial Sequence
  Description of Artificial Sequence: Synthetic oligonucleotide
  Target: ATXN2; (-) strand; PAM type: NRG; PAM sequence: CAG
tagtatctgagtgctttctt

SEQ ID NO: 17465 - DNA, 20 bp, Artificial Sequence
  Description of Artificial Sequence: Synthetic oligonucleotide
  Target: ATXN2; (-) strand; PAM type: NRG; PAM sequence: GAG
gcttctttatcctagtatct

SEQ ID NO: 17466 - DNA, 20 bp, Artificial Sequence
  Description of Artificial Sequence: Synthetic oligonucleotide
  Target: ATXN2; (-) strand; PAM type: NRG; PAM sequence: TAG
atggagtggcttctttatcc

SEQ ID NO: 17467 - DNA, 20 bp, Artificial Sequence
  Description of Artificial Sequence: Synthetic oligonucleotide
  Target: ATXN2; (-) strand; PAM type: NRG; PAM sequence: TGG
actcagaggtctgcatggag

SEQ ID NO: 17468 - DNA, 20 bp, Artificial Sequence
  Description of Artificial Sequence: Synthetic oligonucleotide
  Target: ATXN2; (-) strand; PAM type: NRG; PAM sequence: GAG
gcaactcagaggtctgcatg

SEQ ID NO: 17469 - DNA, 20 bp, Artificial Sequence
  Description of Artificial Sequence: Synthetic oligonucleotide
  Target: ATXN2; (-) strand; PAM type: NRG; PAM sequence: TGG
gggcaactcagaggtctgca

SEQ ID NO: 17470 - DNA, 20 bp, Artificial Sequence
  Description of Artificial Sequence: Synthetic oligonucleotide
  Target: ATXN2; (-) strand; PAM type: NRG; PAM sequence: AGG
ttcaggtaagggcaactcag

SEQ ID NO: 17471 - DNA, 20 bp, Artificial Sequence
  Description of Artificial Sequence: Synthetic oligonucleotide
  Target: ATXN2; (-) strand; PAM type: NRG; PAM sequence: GAG
gttcaggtaagggcaactca

SEQ ID NO: 17472 - DNA, 20 bp, Artificial Sequence
  Description of Artificial Sequence: Synthetic oligonucleotide
  Target: ATXN2; (-) strand; PAM type: NRG; PAM sequence: CAG
ctgttcaggtaagggcaact

SEQ ID NO: 17473 - DNA, 20 bp, Artificial Sequence
  Description of Artificial Sequence: Synthetic oligonucleotide
  Target: ATXN2; (-) strand; PAM type: NRG; PAM sequence: GGG
acccagtcctgttcaggtaa

SEQ ID NO: 17474 - DNA, 20 bp, Artificial Sequence
  Description of Artificial Sequence: Synthetic oligonucleotide
  Target: ATXN2; (-) strand; PAM type: NRG; PAM sequence: AGG
cacccagtcctgttcaggta

SEQ ID NO: 17475 - DNA, 20 bp, Artificial Sequence
  Description of Artificial Sequence: Synthetic oligonucleotide
  Target: ATXN2; (-) strand; PAM type: NRG; PAM sequence: AAG
gcacccagtcctgttcaggt

SEQ ID NO: 17476 - DNA, 20 bp, Artificial Sequence
  Description of Artificial Sequence: Synthetic oligonucleotide
  Target: ATXN2; (-) strand; PAM type: NRG; PAM sequence: AGG
tcctgcacccagtcctgttc

SEQ ID NO: 17477 - DNA, 20 bp, Artificial Sequence
  Description of Artificial Sequence: Synthetic oligonucleotide
  Target: ATXN2; (-) strand; PAM type: NRG; PAM sequence: CAG
atcctgcacccagtcctgtt

SEQ ID NO: 17478 - DNA, 20 bp, Artificial Sequence
  Description of Artificial Sequence: Synthetic oligonucleotide
  Target: ATXN2; (-) strand; PAM type: NRG; PAM sequence: CAG
ggtggaagtcatcctgcacc

SEQ ID NO: 17479 - DNA, 20 bp, Artificial Sequence
  Description of Artificial Sequence: Synthetic oligonucleotide
  Target: ATXN2; (-) strand; PAM type: NRG; PAM sequence: AAG
cagcaaagccaacatggtgg

SEQ ID NO: 17480 - DNA, 20 bp, Artificial Sequence
  Description of Artificial Sequence: Synthetic oligonucleotide
  Target: ATXN2; (-) strand; PAM type: NRG; PAM sequence: TGG
cagcagcaaagccaacatgg

SEQ ID NO: 17481 - DNA, 20 bp, Artificial Sequence
  Description of Artificial Sequence: Synthetic oligonucleotide
  Target: ATXN2; (-) strand; PAM type: NRG; PAM sequence: TGG
ggacagcagcaaagccaaca

SEQ ID NO: 17482 - DNA, 20 bp, Artificial Sequence
  Description of Artificial Sequence: Synthetic oligonucleotide
  Target: ATXN2; (-) strand; PAM type: NRG; PAM sequence: AAG
acccccactggacagcagca

SEQ ID NO: 17483 - DNA, 20 bp, Artificial Sequence
  Description of Artificial Sequence: Synthetic oligonucleotide
  Target: ATXN2; (-) strand; PAM type: NRG; PAM sequence: CAG
cagctacccccactggacag

SEQ ID NO: 17484 - DNA, 20 bp, Artificial Sequence
  Description of Artificial Sequence: Synthetic oligonucleotide
  Target: ATXN2; (-) strand; PAM type: NRG; PAM sequence: CAG
cttcagctacccccactgga

SEQ ID NO: 17485 - DNA, 20 bp, Artificial Sequence
  Description of Artificial Sequence: Synthetic oligonucleotide
  Target: ATXN2; (-) strand; PAM type: NRG; PAM sequence: TGG
cagccttcagctacccccac

SEQ ID NO: 17486 - DNA, 20 bp, Artificial Sequence
  Description of Artificial Sequence: Synthetic oligonucleotide
  Target: ATXN2; (-) strand; PAM type: NRG; PAM sequence: CAG
tactccacaccctcagcctt

SEQ ID NO: 17487 - DNA, 20 bp, Artificial Sequence
  Description of Artificial Sequence: Synthetic oligonucleotide
  Target: ATXN2; (-) strand; PAM type: NRG; PAM sequence: CAG
acccacatactccacaccct

SEQ ID NO: 17488 - DNA, 20 bp, Artificial Sequence
  Description of Artificial Sequence: Synthetic oligonucleotide
  Target: ATXN2; (-) strand; PAM type: NRG; PAM sequence: CAG
ccacgggctcccttgctcag

SEQ ID NO: 17489 - DNA, 20 bp, Artificial Sequence
  Description of Artificial Sequence: Synthetic oligonucleotide
  Target: ATXN2; (-) strand; PAM type: NRG; PAM sequence: CAG
tttccacgggctcccttgct

SEQ ID NO: 17490 - DNA, 20 bp, Artificial Sequence
  Description of Artificial Sequence: Synthetic oligonucleotide
  Target: ATXN2; (-) strand; PAM type: NRG; PAM sequence: GGG
tctttcactttagtttccac

SEQ ID NO: 17491 - DNA, 20 bp, Artificial Sequence
  Description of Artificial Sequence: Synthetic oligonucleotide
  Target: ATXN2; (-) strand; PAM type: NRG; PAM sequence: CGG
ttctttcactttagtttcca

SEQ ID NO: 17492 - DNA, 20 bp, Artificial Sequence
  Description of Artificial Sequence: Synthetic oligonucleotide
  Target: ATXN2; (-) strand; PAM type: NRG; PAM sequence: TAG
tgctcctttttctttcactt

SEQ ID NO: 17493 - DNA, 20 bp, Artificial Sequence
  Description of Artificial Sequence: Synthetic oligonucleotide
  Target: ATXN2; (-) strand; PAM type: NRG; PAM sequence: CGG
cgatggaggttgtcagacat

SEQ ID NO: 17494 - DNA, 20 bp, Artificial Sequence
  Description of Artificial Sequence: Synthetic oligonucleotide
  Target: ATXN2; (-) strand; PAM type: NRG; PAM sequence: CAG
agaggagcgatggaggttgt

SEQ ID NO: 17495 - DNA, 20 bp, Artificial Sequence
  Description of Artificial Sequence: Synthetic oligonucleotide
  Target: ATXN2; (-) strand; PAM type: NRG; PAM sequence: AGG
gaagtgtagaggagcgatgg

SEQ ID NO: 17496 - DNA, 20 bp, Artificial Sequence
  Description of Artificial Sequence: Synthetic oligonucleotide
  Target: ATXN2; (-) strand; PAM type: NRG; PAM sequence: GAG
tgaagtgtagaggagcgatg

SEQ ID NO: 17497 - DNA, 20 bp, Artificial Sequence
  Description of Artificial Sequence: Synthetic oligonucleotide
  Target: ATXN2; (-) strand; PAM type: NRG; PAM sequence: TGG
gatgaagtgtagaggagcga

SEQ ID NO: 17498 - DNA, 20 bp, Artificial Sequence
  Description of Artificial Sequence: Synthetic oligonucleotide
  Target: ATXN2; (-) strand; PAM type: NRG; PAM sequence: GAG
tcagttgatgaagtgtagag

SEQ ID NO: 17499 - DNA, 20 bp, Artificial Sequence
  Description of Artificial Sequence: Synthetic oligonucleotide
  Target: ATXN2; (-) strand; PAM type: NRG; PAM sequence: AGG
gttcagttgatgaagtgtag

SEQ ID NO: 17500 - DNA, 20 bp, Artificial Sequence
  Description of Artificial Sequence: Synthetic oligonucleotide
  Target: ATXN2; (-) strand; PAM type: NRG; PAM sequence: GAG
agttcagttgatgaagtgta

SEQ ID NO: 17501 - DNA, 20 bp, Artificial Sequence
  Description of Artificial Sequence: Synthetic oligonucleotide
  Target: ATXN2; (-) strand; PAM type: NRG; PAM sequence: TAG
aaagttcagttgatgaagtg

SEQ ID NO: 17502 - DNA, 20 bp, Artificial Sequence
  Description of Artificial Sequence: Synthetic oligonucleotide
  Target: ATXN2; (-) strand; PAM type: NRG; PAM sequence: AAG
tcaagaaagttcagttgatg

SEQ ID NO: 17503 - DNA, 20 bp, Artificial Sequence
  Description of Artificial Sequence: Synthetic oligonucleotide
  Target: ATXN2; (-) strand; PAM type: NRG; PAM sequence: CAG
ttgtaaccatcaagaaagtt

SEQ ID NO: 17504 - DNA, 20 bp, Artificial Sequence
  Description of Artificial Sequence: Synthetic oligonucleotide
  Target: ATXN2; (-) strand; PAM type: NRG; PAM sequence: AAG
atgcattgtaaccatcaaga

SEQ ID NO: 17505 - DNA, 20 bp, Artificial Sequence
  Description of Artificial Sequence: Synthetic oligonucleotide
  Target: ATXN2; (-) strand; PAM type: NRG; PAM sequence: AAG
agttatgcattgtaaccatc

SEQ ID NO: 17506 - DNA, 20 bp, Artificial Sequence
  Description of Artificial Sequence: Synthetic oligonucleotide
  Target: ATXN2; (-) strand; PAM type: NRG; PAM sequence: GAG
atagaaattggtagtggcgt

SEQ ID NO: 17507 - DNA, 20 bp, Artificial Sequence
  Description of Artificial Sequence: Synthetic oligonucleotide
  Target: ATXN2; (-) strand; PAM type: NRG; PAM sequence: TGG
tcatctatagaaattggtag

SEQ ID NO: 17508 - DNA, 20 bp, Artificial Sequence
  Description of Artificial Sequence: Synthetic oligonucleotide
  Target: ATXN2; (-) strand; PAM type: NRG; PAM sequence: TAG
gagtcatctatagaaattgg

SEQ ID NO: 17509 - DNA, 20 bp, Artificial Sequence
  Description of Artificial Sequence: Synthetic oligonucleotide
  Target: ATXN2; (-) strand; PAM type: NRG; PAM sequence: TGG
atggagtcatctatagaaat

SEQ ID NO: 17510 - DNA, 20 bp, Artificial Sequence
  Description of Artificial Sequence: Synthetic oligonucleotide
  Target: ATXN2; (-) strand; PAM type: NRG; PAM sequence: TAG
ggtttaaatggagtcatcta

SEQ ID NO: 17511 - DNA, 20 bp, Artificial Sequence
  Description of Artificial Sequence: Synthetic oligonucleotide
  Target: ATXN2; (-) strand; PAM type: NRG; PAM sequence: GAG
gacaatggatggtttaaatg

SEQ ID NO: 17512 - DNA, 20 bp, Artificial Sequence
  Description of Artificial Sequence: Synthetic oligonucleotide
  Target: ATXN2; (-) strand; PAM type: NRG; PAM sequence: TGG
aagacaatggatggtttaaa

SEQ ID NO: 17513 - DNA, 20 bp, Artificial Sequence
  Description of Artificial Sequence: Synthetic oligonucleotide
  Target: ATXN2; (-) strand; PAM type: NRG; PAM sequence: TGG
tattttttcaagacaatgga

SEQ ID NO: 17514 - DNA, 20 bp, Artificial Sequence
  Description of Artificial Sequence: Synthetic oligonucleotide
  Target: ATXN2; (-) strand; PAM type: NRG; PAM sequence: TGG
cacttattttttcaagacaa

SEQ ID NO: 17515 - DNA, 20 bp, Artificial Sequence
  Description of Artificial Sequence: Synthetic oligonucleotide
  Target: ATXN2; (-) strand; PAM type: NRG; PAM sequence: AAG
atagctacacttattttttc

SEQ ID NO: 17516 - DNA, 20 bp, Artificial Sequence
  Description of Artificial Sequence: Synthetic oligonucleotide
  Target: ATXN2; (-) strand; PAM type: NRG; PAM sequence: TAG
aatgctagtctgttaagcaa

SEQ ID NO: 17517 - DNA, 20 bp, Artificial Sequence
  Description of Artificial Sequence: Synthetic oligonucleotide
  Target: ATXN2; (-) strand; PAM type: NRG; PAM sequence: AAG
gaaccaaatgctagtctgtt

SEQ ID NO: 17518 - DNA, 20 bp, Artificial Sequence
  Description of Artificial Sequence: Synthetic oligonucleotide
  Target: ATXN2; (-) strand; PAM type: NRG; PAM sequence: TAG
gtattatatgaaccaaatgc

SEQ ID NO: 17519 - DNA, 20 bp, Artificial Sequence
  Description of Artificial Sequence: Synthetic oligonucleotide
  Target: ATXN2; (-) strand; PAM type: NRG; PAM sequence: GAG
tgattttaatatcatatgta

SEQ ID NO: 17520 - DNA, 20 bp, Artificial Sequence
  Description of Artificial Sequence: Synthetic oligonucleotide
  Target: ATXN2; (-) strand; PAM type: NRG; PAM sequence: TAG
tttgattttaatatcatatg

SEQ ID NO: 17521 - DNA, 20 bp, Artificial Sequence
  Description of Artificial Sequence: Synthetic oligonucleotide
  Target: ATXN2; (-) strand; PAM type: NRG; PAM sequence: GAG
gaaaacctagtgaccgttaa

SEQ ID NO: 17522 - DNA, 20 bp, Artificial Sequence
  Description of Artificial Sequence: Synthetic oligonucleotide
  Target: ATXN2; (-) strand; PAM type: NRG; PAM sequence: AAG
gggaaaacctagtgaccgtt

SEQ ID NO: 17523 - DNA, 20 bp, Artificial Sequence
  Description of Artificial Sequence: Synthetic oligonucleotide
  Target: ATXN2; (-) strand; PAM type: NRG; PAM sequence: TAG
gttgcctttttgggaaaacc

SEQ ID NO: 17524 - DNA, 20 bp, Artificial Sequence
  Description of Artificial Sequence: Synthetic oligonucleotide
  Target: ATXN2; (-) strand; PAM type: NRG; PAM sequence: GGG
tgccttcaagttgccttttt

SEQ ID NO: 17525 - DNA, 20 bp, Artificial Sequence
  Description of Artificial Sequence: Synthetic oligonucleotide
  Target: ATXN2; (-) strand; PAM type: NRG; PAM sequence: TGG
atgccttcaagttgcctttt

SEQ ID NO: 17526 - DNA, 20 bp, Artificial Sequence
  Description of Artificial Sequence: Synthetic oligonucleotide
  Target: ATXN2; (-) strand; PAM type: NRG; PAM sequence: AAG
tagtttctgcctatgccttc

SEQ ID NO: 17527 - DNA, 20 bp, Artificial Sequence
  Description of Artificial Sequence: Synthetic oligonucleotide
  Target: ATXN2; (-) strand; PAM type: NRG; PAM sequence: TAG
ctaaaatgcacttgtttgag

SEQ ID NO: 17528 - DNA, 20 bp, Artificial Sequence
  Description of Artificial Sequence: Synthetic oligonucleotide
  Target: ATXN2; (-) strand; PAM type: NRG; PAM sequence: GAG
cacctaaaatgcacttgttt

SEQ ID NO: 17529 - DNA, 20 bp, Artificial Sequence
  Description of Artificial Sequence: Synthetic oligonucleotide
  Target: ATXN2; (-) strand; PAM type: NRG; PAM sequence: GAG
gatgatggccttgagctaaa

SEQ ID NO: 17530 - DNA, 20 bp, Artificial Sequence
  Description of Artificial Sequence: Synthetic oligonucleotide
  Target: ATXN2; (-) strand; PAM type: NRG; PAM sequence: AAG
ctgatgatggccttgagcta

SEQ ID NO: 17531 - DNA, 20 bp, Artificial Sequence
  Description of Artificial Sequence: Synthetic oligonucleotide
  Target: ATXN2; (-) strand; PAM type: NRG; PAM sequence: GAG
gttagcctgatgatggcctt

SEQ ID NO: 17532 - DNA, 20 bp, Artificial Sequence
  Description of Artificial Sequence: Synthetic oligonucleotide
  Target: ATXN2; (-) strand; PAM type: NRG; PAM sequence: TGG
tggtgaggttagcctgatga

SEQ ID NO: 17533 - DNA, 20 bp, Artificial Sequence
  Description of Artificial Sequence: Synthetic oligonucleotide
  Target: ATXN2; (-) strand; PAM type: NRG; PAM sequence: TAG
gggcagtagcatggtgaggt

SEQ ID NO: 17534 - DNA, 20 bp, Artificial Sequence
  Description of Artificial Sequence: Synthetic oligonucleotide
  Target: ATXN2; (-) strand; PAM type: NRG; PAM sequence: AGG
tccagggcagtagcatggtg

SEQ ID NO: 17535 - DNA, 20 bp, Artificial Sequence
  Description of Artificial Sequence: Synthetic oligonucleotide
  Target: ATXN2; (-) strand; PAM type: NRG; PAM sequence: GAG
ctccagggcagtagcatggt

SEQ ID NO: 17536 - DNA, 20 bp, Artificial Sequence
  Description of Artificial Sequence: Synthetic oligonucleotide
  Target: ATXN2; (-) strand; PAM type: NRG; PAM sequence: TGG
attgctccagggcagtagca

SEQ ID NO: 17537 - DNA, 20 bp, Artificial Sequence
  Description of Artificial Sequence: Synthetic oligonucleotide
  Target: ATXN2; (-) strand; PAM type: NRG; PAM sequence: TAG
aggacattgctccagggcag

SEQ ID NO: 17538 - DNA, 20 bp, Artificial Sequence
  Description of Artificial Sequence: Synthetic oligonucleotide
  Target: ATXN2; (-) strand; PAM type: NRG; PAM sequence: CAG
ctcaggacattgctccaggg

SEQ ID NO: 17539 - DNA, 20 bp, Artificial Sequence
  Description of Artificial Sequence: Synthetic oligonucleotide
  Target: ATXN2; (-) strand; PAM type: NRG; PAM sequence: GGG
gccctcaggacattgctcca

SEQ ID NO: 17540 - DNA, 20 bp, Artificial Sequence
  Description of Artificial Sequence: Synthetic oligonucleotide
  Target: ATXN2; (-) strand; PAM type: NRG; PAM sequence: AGG
tgccctcaggacattgctcc

SEQ ID NO: 17541 - DNA, 20 bp, Artificial Sequence
  Description of Artificial Sequence: Synthetic oligonucleotide
  Target: ATXN2; (-) strand; PAM type: NRG; PAM sequence: CAG
gtgccctcaggacattgctc

SEQ ID NO: 17542 - DNA, 20 bp, Artificial Sequence
  Description of Artificial Sequence: Synthetic oligonucleotide
  Target: ATXN2; (-) strand; PAM type: NRG; PAM sequence: AGG
ccaatatagtctgtgccctc

SEQ ID NO: 17543 - DNA, 20 bp, Artificial Sequence
  Description of Artificial Sequence: Synthetic oligonucleotide
  Target: ATXN2; (-) strand; PAM type: NRG; PAM sequence: CAG
cccaatatagtctgtgccct

SEQ ID NO: 17544 - DNA, 20 bp, Artificial Sequence
  Description of Artificial Sequence: Synthetic oligonucleotide
  Target: ATXN2; (-) strand; PAM type: NRG; PAM sequence: TAG
atcccccaccacacccaata

SEQ ID NO: 17545 - DNA, 20 bp, Artificial Sequence
  Description of Artificial Sequence: Synthetic oligonucleotide
  Target: ATXN2; (-) strand; PAM type: NRG; PAM sequence: CAG
gccttgccacataccataca

SEQ ID NO: 17546 - DNA, 20 bp, Artificial Sequence
  Description of Artificial Sequence: Synthetic oligonucleotide
  Target: ATXN2; (-) strand; PAM type: NRG; PAM sequence: TGG
cggccctgatgatagatccc

SEQ ID NO: 17547 - DNA, 20 bp, Artificial Sequence
  Description of Artificial Sequence: Synthetic oligonucleotide
  Target: ATXN2; (-) strand; PAM type: NRG; PAM sequence: TAG
tggtccttcggccctgatga

SEQ ID NO: 17548 - DNA, 20 bp, Artificial Sequence
  Description of Artificial Sequence: Synthetic oligonucleotide
  Target: ATXN2; (-) strand; PAM type: NRG; PAM sequence: CGG
tgagagagactgtggtcctt

SEQ ID NO: 17549 - DNA, 20 bp, Artificial Sequence
  Description of Artificial Sequence: Synthetic oligonucleotide
  Target: ATXN2; (-) strand; PAM type: NRG; PAM sequence: TGG
tgattagctgagagagactg

SEQ ID NO: 17550 - DNA, 20 bp, Artificial Sequence
  Description of Artificial Sequence: Synthetic oligonucleotide
  Target: ATXN2; (-) strand; PAM type: NRG; PAM sequence: GAG
gctcctgtgattagctgaga

SEQ ID NO: 17551 - DNA, 20 bp, Artificial Sequence
  Description of Artificial Sequence: Synthetic oligonucleotide
  Target: ATXN2; (-) strand; PAM type: NRG; PAM sequence: GAG
gggctcctgtgattagctga

SEQ ID NO: 17552 - DNA, 20 bp, Artificial Sequence
  Description of Artificial Sequence: Synthetic oligonucleotide
  Target: ATXN2; (-) strand; PAM type: NRG; PAM sequence: GAG
aagggctcctgtgattagct

SEQ ID NO: 17553 - DNA, 20 bp, Artificial Sequence
  Description of Artificial Sequence: Synthetic oligonucleotide
  Target: ATXN2; (-) strand; PAM type: NRG; PAM sequence: TAG
ggcagaagggctcctgtgat

SEQ ID NO: 17554 - DNA, 20 bp, Artificial Sequence
  Description of Artificial Sequence: Synthetic oligonucleotide
  Target: ATXN2; (-) strand; PAM type: NRG; PAM sequence: GGG
aagtaaactgagtggcagaa

SEQ ID NO: 17555 - DNA, 20 bp, Artificial Sequence
  Description of Artificial Sequence: Synthetic oligonucleotide
  Target: ATXN2; (-) strand; PAM type: NRG; PAM sequence: AGG
aaagtaaactgagtggcaga

SEQ ID NO: 17556 - DNA, 20 bp, Artificial Sequence
  Description of Artificial Sequence: Synthetic oligonucleotide
  Target: ATXN2; (-) strand; PAM type: NRG; PAM sequence: AAG
gaaagtaaactgagtggcag

SEQ ID NO: 17557 - DNA, 20 bp, Artificial Sequence
  Description of Artificial Sequence: Synthetic oligonucleotide
  Target: ATXN2; (-) strand; PAM type: NRG; PAM sequence: CAG
tgggaaagtaaactgagtgg

SEQ ID NO: 17558 - DNA, 20 bp, Artificial Sequence
  Description of Artificial Sequence: Synthetic oligonucleotide
  Target: ATXN2; (-) strand; PAM type: NRG; PAM sequence: TGG
gcttgggaaagtaaactgag

SEQ ID NO: 17559 - DNA, 20 bp, Artificial Sequence
  Description of Artificial Sequence: Synthetic oligonucleotide
  Target: ATXN2; (-) strand; PAM type: NRG; PAM sequence: GAG
agggcttgggaaagtaaact

SEQ ID NO: 17560 - DNA, 20 bp, Artificial Sequence
  Description of Artificial Sequence: Synthetic oligonucleotide
  Target: ATXN2; (-) strand; PAM type: NRG; PAM sequence: AAG
tcctccattagggcttggga

SEQ ID NO: 17561 - DNA, 20 bp, Artificial Sequence
  Description of Artificial Sequence: Synthetic oligonucleotide
  Target: ATXN2; (-) strand; PAM type: NRG; PAM sequence: GGG
gagatcctccattagggctt

SEQ ID NO: 17562 - DNA, 20 bp, Artificial Sequence
  Description of Artificial Sequence: Synthetic oligonucleotide
  Target: ATXN2; (-) strand; PAM type: NRG; PAM sequence: TGG
ggagatcctccattagggct

SEQ ID NO: 17563 - DNA, 20 bp, Artificial Sequence
  Description of Artificial Sequence: Synthetic oligonucleotide
  Target: ATXN2; (-) strand; PAM type: NRG; PAM sequence: GGG
agatgggagatcctccatta

SEQ ID NO: 17564 - DNA, 20 bp, Artificial Sequence
  Description of Artificial Sequence: Synthetic oligonucleotide
  Target: ATXN2; (-) strand; PAM type: NRG; PAM sequence: AGG
aagatgggagatcctccatt

SEQ ID NO: 17565 - DNA, 20 bp, Artificial Sequence
  Description of Artificial Sequence: Synthetic oligonucleotide
  Target: ATXN2; (-) strand; PAM type: NRG; PAM sequence: TAG
aaagatgggagatcctccat

SEQ ID NO: 17566 - DNA, 20 bp, Artificial Sequence
  Description of Artificial Sequence: Synthetic oligonucleotide
  Target: ATXN2; (-) strand; PAM type: NRG; PAM sequence: GAG
atttcataaagcaaagatgg

SEQ ID NO: 17567 - DNA, 20 bp, Artificial Sequence
  Description of Artificial Sequence: Synthetic oligonucleotide
  Target: ATXN2; (-) strand; PAM type: NRG; PAM sequence: GGG
ttatttcataaagcaaagat

SEQ ID NO: 17568 - DNA, 20 bp, Artificial Sequence
  Description of Artificial Sequence: Synthetic oligonucleotide
  Target: ATXN2; (-) strand; PAM type: NRG; PAM sequence: TGG
tttatttcataaagcaaaga

SEQ ID NO: 17569 - DNA, 20 bp, Artificial Sequence
  Description of Artificial Sequence: Synthetic oligonucleotide
  Target: ATXN2; (-) strand; PAM type: NRG; PAM sequence: AAG
tatatttatttcataaagca

SEQ ID NO: 17570 - DNA, 20 bp, Artificial Sequence
  Description of Artificial Sequence: Synthetic oligonucleotide
  Target: ATXN2; (-) strand; PAM type: NRG; PAM sequence: AAG
ttttctatatttatttcata

SEQ ID NO: 17571 - DNA, 20 bp, Artificial Sequence
  Description of Artificial Sequence: Synthetic oligonucleotide
  Target: ATXN2; (-) strand; PAM type: NRG; PAM sequence: GAG
gggctggggcactcagaagg

SEQ ID NO: 17572 - DNA, 20 bp, Artificial Sequence
  Description of Artificial Sequence: Synthetic oligonucleotide
  Target: ATXN2; (-) strand; PAM type: NRG; PAM sequence: GGG
aagggctggggcactcagaa

SEQ ID NO: 17573 - DNA, 20 bp, Artificial Sequence
  Description of Artificial Sequence: Synthetic oligonucleotide
  Target: ATXN2; (-) strand; PAM type: NRG; PAM sequence: AGG
aaagggctggggcactcaga

SEQ ID NO: 17574 - DNA, 20 bp, Artificial Sequence
  Description of Artificial Sequence: Synthetic oligonucleotide
  Target: ATXN2; (-) strand; PAM type: NRG; PAM sequence: AAG
caaagggctggggcactcag

SEQ ID NO: 17575 - DNA, 20 bp, Artificial Sequence
  Description of Artificial Sequence: Synthetic oligonucleotide
  Target: ATXN2; (-) strand; PAM type: NRG; PAM sequence: CAG
ttccaaagggctggggcact

SEQ ID NO: 17576 - DNA, 20 bp, Artificial Sequence
  Description of Artificial Sequence: Synthetic oligonucleotide
  Target: ATXN2; (-) strand; PAM type: NRG; PAM sequence: GGG
aatttctttccaaagggctg

SEQ ID NO: 17577 - DNA, 20 bp, Artificial Sequence
  Description of Artificial Sequence: Synthetic oligonucleotide
  Target: ATXN2; (-) strand; PAM type: NRG; PAM sequence: GGG
aaatttctttccaaagggct

SEQ ID NO: 17578 - DNA, 20 bp, Artificial Sequence
  Description of Artificial Sequence: Synthetic oligonucleotide
  Target: ATXN2; (-) strand; PAM type: NRG; PAM sequence: TGG
taaatttctttccaaagggc

SEQ ID NO: 17579 - DNA, 20 bp, Artificial Sequence
  Description of Artificial Sequence: Synthetic oligonucleotide
  Target: ATXN2; (-) strand; PAM type: NRG; PAM sequence: GGG
ctagtaaatttctttccaaa

SEQ ID NO: 17580 - DNA, 20 bp, Artificial Sequence
  Description of Artificial Sequence: Synthetic oligonucleotide
  Target: ATXN2; (-) strand; PAM type: NRG; PAM sequence: AGG
tctagtaaatttctttccaa

SEQ ID NO: 17581 - DNA, 20 bp, Artificial Sequence
  Description of Artificial Sequence: Synthetic oligonucleotide
  Target: ATXN2; (-) strand; PAM type: NRG; PAM sequence: AAG
gtctagtaaatttctttcca

SEQ ID NO: 17582 - DNA, 20 bp, Artificial Sequence
  Description of Artificial Sequence: Synthetic oligonucleotide
  Target: ATXN2; (-) strand; PAM type: NRG; PAM sequence: TAG
gttgtcctttgaagttagtc

SEQ ID NO: 17583 - DNA, 20 bp, Artificial Sequence
  Description of Artificial Sequence: Synthetic oligonucleotide
  Target: ATXN2; (-) strand; PAM type: NRG; PAM sequence: TAG
atcatgttgtcctttgaagt

SEQ ID NO: 17584 - DNA, 20 bp, Artificial Sequence
  Description of Artificial Sequence: Synthetic oligonucleotide
  Target: ATXN2; (-) strand; PAM type: NRG; PAM sequence: AAG
gcccatcatgttgtcctttg

SEQ ID NO: 17585 - DNA, 20 bp, Artificial Sequence
  Description of Artificial Sequence: Synthetic oligonucleotide
  Target: ATXN2; (-) strand; PAM type: NRG; PAM sequence: TGG
atctttattttgatttaaac

SEQ ID NO: 17586 - DNA, 20 bp, Artificial Sequence
  Description of Artificial Sequence: Synthetic oligonucleotide
  Target: ATXN2; (-) strand; PAM type: NRG; PAM sequence: CAG
attcacaaagaactggcttt

SEQ ID NO: 17587 - DNA, 20 bp, Artificial Sequence
  Description of Artificial Sequence: Synthetic oligonucleotide
  Target: ATXN2; (-) strand; PAM type: NRG; PAM sequence: TGG
cgctgagattcacaaagaac

SEQ ID NO: 17588 - DNA, 20 bp, Artificial Sequence
  Description of Artificial Sequence: Synthetic oligonucleotide
  Target: ATXN2; (-) strand; PAM type: NRG; PAM sequence: AAG
ggcccacgctgagattcaca

SEQ ID NO: 17589 - DNA, 20 bp, Artificial Sequence
  Description of Artificial Sequence: Synthetic oligonucleotide
  Target: ATXN2; (-) strand; PAM type: NRG; PAM sequence: GAG
accaaggtttggcccacgct

SEQ ID NO: 17590 - DNA, 20 bp, Artificial Sequence
  Description of Artificial Sequence: Synthetic oligonucleotide
  Target: ATXN2; (-) strand; PAM type: NRG; PAM sequence: TGG
atggtttttgtaccaaggtt

SEQ ID NO: 17591 - DNA, 20 bp, Artificial Sequence
  Description of Artificial Sequence: Synthetic oligonucleotide
  Target: ATXN2; (-) strand; PAM type: NRG; PAM sequence: AGG
aagaaatggtttttgtacca

SEQ ID NO: 17592 - DNA, 20 bp, Artificial Sequence
  Description of Artificial Sequence: Synthetic oligonucleotide
  Target: ATXN2; (-) strand; PAM type: NRG; PAM sequence: AAG
gaagaaatggtttttgtacc

SEQ ID NO: 17593 - DNA, 20 bp, Artificial Sequence
  Description of Artificial Sequence: Synthetic oligonucleotide
  Target: ATXN2; (-) strand; PAM type: NRG; PAM sequence: TGG
aactgaaagacatgaagaaa

SEQ ID NO: 17594 - DNA, 20 bp, Artificial Sequence
  Description of Artificial Sequence: Synthetic oligonucleotide
  Target: ATXN2; (-) strand; PAM type: NRG; PAM sequence: AAG
acaaaaaactgaaagacatg

SEQ ID NO: 17595 - DNA, 20 bp, Artificial Sequence
  Description of Artificial Sequence: Synthetic oligonucleotide
  Target: ATXN2; (-) strand; PAM type: NRG; PAM sequence: AAG
aacaaaaaacaaaaaactga

SEQ ID NO: 17596 - DNA, 20 bp, Artificial Sequence
  Description of Artificial Sequence: Synthetic oligonucleotide
  Target: ATXN2; (-) strand; PAM type: NRG; PAM sequence: GAG
gcctgggcaacagagtgagt

SEQ ID NO: 17597 - DNA, 20 bp, Artificial Sequence
  Description of Artificial Sequence: Synthetic oligonucleotide
  Target: ATXN2; (-) strand; PAM type: NRG; PAM sequence: GAG
gtgagcctgggcaacagagt

SEQ ID NO: 17598 - DNA, 20 bp, Artificial Sequence
  Description of Artificial Sequence: Synthetic oligonucleotide
  Target: ATXN2; (-) strand; PAM type: NRG; PAM sequence: GAG
tgcagtgagcctgggcaaca

SEQ ID NO: 17599 - DNA, 20 bp, Artificial Sequence
  Description of Artificial Sequence: Synthetic oligonucleotide
  Target: ATXN2; (-) strand; PAM type: NRG; PAM sequence: CAG
gttgcagtgagcctgggcaa

SEQ ID NO: 17600 - DNA, 20 bp, Artificial Sequence
  Description of Artificial Sequence: Synthetic oligonucleotide
  Target: ATXN2; (-) strand; PAM type: NRG; PAM sequence: GGG
gcagaggttgcagtgagcct

SEQ ID NO: 17601 - DNA, 20 bp, Artificial Sequence
  Description of Artificial Sequence: Synthetic oligonucleotide
  Target: ATXN2; (-) strand; PAM type: NRG; PAM sequence: TGG
ggcagaggttgcagtgagcc

SEQ ID NO: 17602 - DNA, 20 bp, Artificial Sequence
  Description of Artificial Sequence: Synthetic oligonucleotide
  Target: ATXN2; (-) strand; PAM type: NRG; PAM sequence: GAG
tgggaggcagaggttgcagt

SEQ ID NO: 17603 - DNA, 20 bp, Artificial Sequence
  Description of Artificial Sequence: Synthetic oligonucleotide
  Target: ATXN2; (-) strand; PAM type: NRG; PAM sequence: CAG
aacctgggaggcagaggttg

SEQ ID NO: 17604 - DNA, 20 bp, Artificial Sequence
  Description of Artificial Sequence: Synthetic oligonucleotide
  Target: ATXN2; (-) strand; PAM type: NRG; PAM sequence: AGG
tgcttgaacctgggaggcag

SEQ ID NO: 17605 - DNA, 20 bp, Artificial Sequence
  Description of Artificial Sequence: Synthetic oligonucleotide
  Target: ATXN2; (-) strand; PAM type: NRG; PAM sequence: GAG
ttgcttgaacctgggaggca

SEQ ID NO: 17606 - DNA, 20 bp, Artificial Sequence
  Description of Artificial Sequence: Synthetic oligonucleotide
  Target: ATXN2; (-) strand; PAM type: NRG; PAM sequence: CAG
aattgcttgaacctgggagg

SEQ ID NO: 17607 - DNA, 20 bp, Artificial Sequence
  Description of Artificial Sequence: Synthetic oligonucleotide
  Target: ATXN2; (-) strand; PAM type: NRG; PAM sequence: AGG
gagaattgcttgaacctggg

SEQ ID NO: 17608 - DNA, 20 bp, Artificial Sequence
  Description of Artificial Sequence: Synthetic oligonucleotide
  Target: ATXN2; (-) strand; PAM type: NRG; PAM sequence: GAG
ggagaattgcttgaacctgg

SEQ ID NO: 17609 - DNA, 20 bp, Artificial Sequence
  Description of Artificial Sequence: Synthetic oligonucleotide
  Target: ATXN2; (-) strand; PAM type: NRG; PAM sequence: GGG
caggagaattgcttgaacct

SEQ ID NO: 17610 - DNA, 20 bp, Artificial Sequence
  Description of Artificial Sequence: Synthetic oligonucleotide
  Target: ATXN2; (-) strand; PAM type: NRG; PAM sequence: TGG
gcaggagaattgcttgaacc

SEQ ID NO: 17611 - DNA, 20 bp, Artificial Sequence
  Description of Artificial Sequence: Synthetic oligonucleotide
  Target: ATXN2; (-) strand; PAM type: NRG; PAM sequence: GAG
tactcgggaggctgaggcag

SEQ ID NO: 17612 - DNA, 20 bp, Artificial Sequence
  Description of Artificial Sequence: Synthetic oligonucleotide
  Target: ATXN2; (-) strand; PAM type: NRG; PAM sequence: AGG
gctactcgggaggctgaggc

SEQ ID NO: 17613 - DNA, 20 bp, Artificial Sequence
  Description of Artificial Sequence: Synthetic oligonucleotide
  Target: ATXN2; (-) strand; PAM type: NRG; PAM sequence: CAG
agctactcgggaggctgagg

SEQ ID NO: 17614 - DNA, 20 bp, Artificial Sequence
  Description of Artificial Sequence: Synthetic oligonucleotide
  Target: ATXN2; (-) strand; PAM type: NRG; PAM sequence: AGG
ctcagctactcgggaggctg

SEQ ID NO: 17615 - DNA, 20 bp, Artificial Sequence
  Description of Artificial Sequence: Synthetic oligonucleotide
  Target: ATXN2; (-) strand; PAM type: NRG; PAM sequence: GAG
tctcagctactcgggaggct

SEQ ID NO: 17616 - DNA, 20 bp, Artificial Sequence
  Description of Artificial Sequence: Synthetic oligonucleotide
  Target: ATXN2; (-) strand; PAM type: NRG; PAM sequence: AGG
tgtaatctcagctactcggg

SEQ ID NO: 17617 - DNA, 20 bp, Artificial Sequence
  Description of Artificial Sequence: Synthetic oligonucleotide
  Target: ATXN2; (-) strand; PAM type: NRG; PAM sequence: GAG
ctgtaatctcagctactcgg

SEQ ID NO: 17618 - DNA, 20 bp, Artificial Sequence
  Description of Artificial Sequence: Synthetic oligonucleotide
  Target: ATXN2; (-) strand; PAM type: NRG; PAM sequence: GGG
gcctgtaatctcagctactc

SEQ ID NO: 17619 - DNA, 20 bp, Artificial Sequence
  Description of Artificial Sequence: Synthetic oligonucleotide
  Target: ATXN2; (-) strand; PAM type: NRG; PAM sequence: CGG
tgcctgtaatctcagctact

SEQ ID NO: 17620 - DNA, 20 bp, Artificial Sequence
  Description of Artificial Sequence: Synthetic oligonucleotide
  Target: ATXN2; (-) strand; PAM type: NRG; PAM sequence: CAG
gtggcacatgcctgtaatct

SEQ ID NO: 17621 - DNA, 20 bp, Artificial Sequence
  Description of Artificial Sequence: Synthetic oligonucleotide
  Target: ATXN2; (-) strand; PAM type: NRG; PAM sequence: TGG
caaaaattagctgggcgtgg

SEQ ID NO: 17622 - DNA, 20 bp, Artificial Sequence
  Description of Artificial Sequence: Synthetic oligonucleotide
  Target: ATXN2; (-) strand; PAM type: NRG; PAM sequence: TGG
atacaaaaattagctgggcg

SEQ ID NO: 17623 - DNA, 20 bp, Artificial Sequence
  Description of Artificial Sequence: Synthetic oligonucleotide
  Target: ATXN2; (-) strand; PAM type: NRG; PAM sequence: GGG
taaaaatacaaaaattagct

SEQ ID NO: 17624 - DNA, 20 bp, Artificial Sequence
  Description of Artificial Sequence: Synthetic oligonucleotide
  Target: ATXN2; (-) strand; PAM type: NRG; PAM sequence: TGG
ctaaaaatacaaaaattagc

SEQ ID NO: 17625 - DNA, 20 bp, Artificial Sequence
  Description of Artificial Sequence: Synthetic oligonucleotide
  Target: ATXN2; (-) strand; PAM type: NRG; PAM sequence: TAG
tctactaaaaatacaaaaat

SEQ ID NO: 17626 - DNA, 20 bp, Artificial Sequence
  Description of Artificial Sequence: Synthetic oligonucleotide
  Target: ATXN2; (-) strand; PAM type: NRG; PAM sequence: TGG
tgagatcagcctggccagca

SEQ ID NO: 17627 - DNA, 20 bp, Artificial Sequence
  Description of Artificial Sequence: Synthetic oligonucleotide
  Target: ATXN2; (-) strand; PAM type: NRG; PAM sequence: CAG
gagtttgagatcagcctggc

SEQ ID NO: 17628 - DNA, 20 bp, Artificial Sequence
  Description of Artificial Sequence: Synthetic oligonucleotide
  Target: ATXN2; (-) strand; PAM type: NRG; PAM sequence: TGG
tcaggagtttgagatcagcc

SEQ ID NO: 17629 - DNA, 20 bp, Artificial Sequence
  Description of Artificial Sequence: Synthetic oligonucleotide
  Target: ATXN2; (-) strand; PAM type: NRG; PAM sequence: CAG
tgaggtcaggagtttgagat

SEQ ID NO: 17630 - DNA, 20 bp, Artificial Sequence
  Description of Artificial Sequence: Synthetic oligonucleotide
  Target: ATXN2; (-) strand; PAM type: NRG; PAM sequence: GAG
tcatttgaggtcaggagttt

SEQ ID NO: 17631 - DNA, 20 bp, Artificial Sequence
  Description of Artificial Sequence: Synthetic oligonucleotide
  Target: ATXN2; (-) strand; PAM type: NRG; PAM sequence: GAG
ggcggatcatttgaggtcag

SEQ ID NO: 17632 - DNA, 20 bp, Artificial Sequence
  Description of Artificial Sequence: Synthetic oligonucleotide
  Target: ATXN2; (-) strand; PAM type: NRG; PAM sequence: AGG
tgggcggatcatttgaggtc

SEQ ID NO: 17633 - DNA, 20 bp, Artificial Sequence
  Description of Artificial Sequence: Synthetic oligonucleotide
  Target: ATXN2; (-) strand; PAM type: NRG; PAM sequence: CAG
gtgggcggatcatttgaggt

SEQ ID NO: 17634 - DNA, 20 bp, Artificial Sequence
  Description of Artificial Sequence: Synthetic oligonucleotide
  Target: ATXN2; (-) strand; PAM type: NRG; PAM sequence: AGG
tgaagtgggcggatcatttg

SEQ ID NO: 17635 - DNA, 20 bp, Artificial Sequence
  Description of Artificial Sequence: Synthetic oligonucleotide
  Target: ATXN2; (-) strand; PAM type: NRG; PAM sequence: GAG
ctgaagtgggcggatcattt

SEQ ID NO: 17636 - DNA, 20 bp, Artificial Sequence
  Description of Artificial Sequence: Synthetic oligonucleotide
  Target: ATXN2; (-) strand; PAM type: NRG; PAM sequence: CGG
ctttgggaggctgaagtggg

SEQ ID NO: 17637 - DNA, 20 bp, Artificial Sequence
  Description of Artificial Sequence: Synthetic oligonucleotide
  Target: ATXN2; (-) strand; PAM type: NRG; PAM sequence: GGG
gcactttgggaggctgaagt

SEQ ID NO: 17638 - DNA, 20 bp, Artificial Sequence
  Description of Artificial Sequence: Synthetic oligonucleotide
  Target: ATXN2; (-) strand; PAM type: NRG; PAM sequence: TGG
agcactttgggaggctgaag

SEQ ID NO: 17639 - DNA, 20 bp, Artificial Sequence
  Description of Artificial Sequence: Synthetic oligonucleotide
  Target: ATXN2; (-) strand; PAM type: NRG; PAM sequence: AAG
cccagcactttgggaggctg

SEQ ID NO: 17640 - DNA, 20 bp, Artificial Sequence
  Description of Artificial Sequence: Synthetic oligonucleotide
  Target: ATXN2; (-) strand; PAM type: NRG; PAM sequence: AGG
tgtaatcccagcactttggg

SEQ ID NO: 17641 - DNA, 20 bp, Artificial Sequence
  Description of Artificial Sequence: Synthetic oligonucleotide
  Target: ATXN2; (-) strand; PAM type: NRG; PAM sequence: GAG
ctgtaatcccagcactttgg

SEQ ID NO: 17642 - DNA, 20 bp, Artificial Sequence
  Description of Artificial Sequence: Synthetic oligonucleotide
  Target: ATXN2; (-) strand; PAM type: NRG; PAM sequence: GGG
gtctgtaatcccagcacttt

SEQ ID NO: 17643 - DNA, 20 bp, Artificial Sequence
  Description of Artificial Sequence: Synthetic oligonucleotide
  Target: ATXN2; (-) strand; PAM type: NRG; PAM sequence: TGG
cgtctgtaatcccagcactt

SEQ ID NO: 17644 - DNA, 20 bp, Artificial Sequence
  Description of Artificial Sequence: Synthetic oligonucleotide
  Target: ATXN2; (-) strand; PAM type: NRG; PAM sequence: CAG
gtggctcacgtctgtaatcc

SEQ ID NO: 17645 - DNA, 20 bp, Artificial Sequence
  Description of Artificial Sequence: Synthetic oligonucleotide
  Target: ATXN2; (-) strand; PAM type: NRG; PAM sequence: TGG
catgaacaggccaggcacgg

SEQ ID NO: 17646 - DNA, 20 bp, Artificial Sequence
  Description of Artificial Sequence: Synthetic oligonucleotide
  Target: ATXN2; (-) strand; PAM type: NRG; PAM sequence: CGG
gcacatgaacaggccaggca

SEQ ID NO: 17647 - DNA, 20 bp, Artificial Sequence
  Description of Artificial Sequence: Synthetic oligonucleotide
  Target: ATXN2; (-) strand; PAM type: NRG; PAM sequence: AGG
ttgaagcacatgaacaggcc

SEQ ID NO: 17648 - DNA, 20 bp, Artificial Sequence
  Description of Artificial Sequence: Synthetic oligonucleotide
  Target: ATXN2; (-) strand; PAM type: NRG; PAM sequence: CAG
tttgaagcacatgaacaggc

SEQ ID NO: 17649 - DNA, 20 bp, Artificial Sequence
  Description of Artificial Sequence: Synthetic oligonucleotide
  Target: ATXN2; (-) strand; PAM type: NRG; PAM sequence: AGG
tgtttttgaagcacatgaac

SEQ ID NO: 17650 - DNA, 20 bp, Artificial Sequence
  Description of Artificial Sequence: Synthetic oligonucleotide
  Target: ATXN2; (-) strand; PAM type: NRG; PAM sequence: CAG
ctgtttttgaagcacatgaa

SEQ ID NO: 17651 - DNA, 20 bp, Artificial Sequence
  Description of Artificial Sequence: Synthetic oligonucleotide
  Target: ATXN2; (-) strand; PAM type: NRG; PAM sequence: AAG
ttctcaacttactgtttttg

SEQ ID NO: 17652 - DNA, 20 bp, Artificial Sequence
  Description of Artificial Sequence: Synthetic oligonucleotide
  Target: ATXN2; (-) strand; PAM type: NRG; PAM sequence: CAG
ctgtccatagtcactggaag

SEQ ID NO: 17653 - DNA, 20 bp, Artificial Sequence
  Description of Artificial Sequence: Synthetic oligonucleotide
  Target: ATXN2; (-) strand; PAM type: NRG; PAM sequence: AAG
gtgctgtccatagtcactgg

SEQ ID NO: 17654 - DNA, 20 bp, Artificial Sequence
  Description of Artificial Sequence: Synthetic oligonucleotide
  Target: ATXN2; (-) strand; PAM type: NRG; PAM sequence: TGG
ggtgtgctgtccatagtcac

SEQ ID NO: 17655 - DNA, 20 bp, Artificial Sequence
  Description of Artificial Sequence: Synthetic oligonucleotide
  Target: ATXN2; (-) strand; PAM type: NRG; PAM sequence: TAG
tatcatcggtgtgctgtcca

SEQ ID NO: 17656 - DNA, 20 bp, Artificial Sequence
  Description of Artificial Sequence: Synthetic oligonucleotide
  Target: ATXN2; (-) strand; PAM type: NRG; PAM sequence: CGG
ggaggttagttttttatcat

SEQ ID NO: 17657 - DNA, 20 bp, Artificial Sequence
  Description of Artificial Sequence: Synthetic oligonucleotide
  Target: ATXN2; (-) strand; PAM type: NRG; PAM sequence: TAG
gctcattgcctcgtggaggt

SEQ ID NO: 17658 - DNA, 20 bp, Artificial Sequence
  Description of Artificial Sequence: Synthetic oligonucleotide
  Target: ATXN2; (-) strand; PAM type: NRG; PAM sequence: AGG
ctcagctcattgcctcgtgg

SEQ ID NO: 17659 - DNA, 20 bp, Artificial Sequence
  Description of Artificial Sequence: Synthetic oligonucleotide
  Target: ATXN2; (-) strand; PAM type: NRG; PAM sequence: GAG
tctcagctcattgcctcgtg

SEQ ID NO: 17660 - DNA, 20 bp, Artificial Sequence
  Description of Artificial Sequence: Synthetic oligonucleotide
  Target: ATXN2; (-) strand; PAM type: NRG; PAM sequence: TGG
attctcagctcattgcctcg

SEQ ID NO: 17661 - DNA, 20 bp, Artificial Sequence
  Description of Artificial Sequence: Synthetic oligonucleotide
  Target: ATXN2; (-) strand; PAM type: NRG; PAM sequence: CAG
tcttgagaacgctctattct

SEQ ID NO: 17662 - DNA, 20 bp, Artificial Sequence
  Description of Artificial Sequence: Synthetic oligonucleotide
  Target: ATXN2; (-) strand; PAM type: NRG; PAM sequence: GAG
taccttgctagagttgtctt

SEQ ID NO: 17663 - DNA, 20 bp, Artificial Sequence
  Description of Artificial Sequence: Synthetic oligonucleotide
  Target: ATXN2; (-) strand; PAM type: NRG; PAM sequence: GAG
ctgggaactataccttgcta

SEQ ID NO: 17664 - DNA, 20 bp, Artificial Sequence
  Description of Artificial Sequence: Synthetic oligonucleotide
  Target: ATXN2; (-) strand; PAM type: NRG; PAM sequence: TAG
ggctgggaactataccttgc

SEQ ID NO: 17665 - DNA, 20 bp, Artificial Sequence
  Description of Artificial Sequence: Synthetic oligonucleotide
  Target: ATXN2; (-) strand; PAM type: NRG; PAM sequence: GGG
ttgtttctcaagagagggct

SEQ ID NO: 17666 - DNA, 20 bp, Artificial Sequence
  Description of Artificial Sequence: Synthetic oligonucleotide
  Target: ATXN2; (-) strand; PAM type: NRG; PAM sequence: TGG
tttgtttctcaagagagggc

SEQ ID NO: 17667 - DNA, 20 bp, Artificial Sequence
  Description of Artificial Sequence: Synthetic oligonucleotide
  Target: ATXN2; (-) strand; PAM type: NRG; PAM sequence: GGG
aggatttgtttctcaagaga

SEQ ID NO: 17668 - DNA, 20 bp, Artificial Sequence
  Description of Artificial Sequence: Synthetic oligonucleotide
  Target: ATXN2; (-) strand; PAM type: NRG; PAM sequence: AGG
taggatttgtttctcaagag

SEQ ID NO: 17669 - DNA, 20 bp, Artificial Sequence
  Description of Artificial Sequence: Synthetic oligonucleotide
  Target: ATXN2; (-) strand; PAM type: NRG; PAM sequence: GAG
ttaggatttgtttctcaaga

SEQ ID NO: 17670 - DNA, 20 bp, Artificial Sequence
  Description of Artificial Sequence: Synthetic oligonucleotide
  Target: ATXN2; (-) strand; PAM type: NRG; PAM sequence: GAG
ttttaggatttgtttctcaa

SEQ ID NO: 17671 - DNA, 20 bp, Artificial Sequence
  Description of Artificial Sequence: Synthetic oligonucleotide
  Target: ATXN2; (-) strand; PAM type: NRG; PAM sequence: AAG
gattttaggatttgtttctc

SEQ ID NO: 17672 - DNA, 20 bp, Artificial Sequence
  Description of Artificial Sequence: Synthetic oligonucleotide
  Target: ATXN2; (-) strand; PAM type: NRG; PAM sequence: AGG
ttattatcttgagggatttt

SEQ ID NO: 17673 - DNA, 20 bp, Artificial Sequence
  Description of Artificial Sequence: Synthetic oligonucleotide
  Target: ATXN2; (-) strand; PAM type: NRG; PAM sequence: TAG
cttattatcttgagggattt

SEQ ID NO: 17674 - DNA, 20 bp, Artificial Sequence
  Description of Artificial Sequence: Synthetic oligonucleotide
  Target: ATXN2; (-) strand; PAM type: NRG; PAM sequence: GGG
gtatgggcttattatcttga

SEQ ID NO: 17675 - DNA, 20 bp, Artificial Sequence
  Description of Artificial Sequence: Synthetic oligonucleotide
  Target: ATXN2; (-) strand; PAM type: NRG; PAM sequence: AGG
tgtatgggcttattatcttg

SEQ ID NO: 17676 - DNA, 20 bp, Artificial Sequence
  Description of Artificial Sequence: Synthetic oligonucleotide
  Target: ATXN2; (-) strand; PAM type: NRG; PAM sequence: GAG
gtgtatgggcttattatctt

SEQ ID NO: 17677 - DNA, 20 bp, Artificial Sequence
  Description of Artificial Sequence: Synthetic oligonucleotide
  Target: ATXN2; (-) strand; PAM type: NRG; PAM sequence: GGG
ttggaatcatttctgtgtat

SEQ ID NO: 17678 - DNA, 20 bp, Artificial Sequence
  Description of Artificial Sequence: Synthetic oligonucleotide
  Target: ATXN2; (-) strand; PAM type: NRG; PAM sequence: TGG
tttggaatcatttctgtgta

SEQ ID NO: 17679 - DNA, 20 bp, Artificial Sequence
  Description of Artificial Sequence: Synthetic oligonucleotide
  Target: ATXN2; (-) strand; PAM type: NRG; PAM sequence: TGG
aagaatgtggggaactattt

SEQ ID NO: 17680 - DNA, 20 bp, Artificial Sequence
  Description of Artificial Sequence: Synthetic oligonucleotide
  Target: ATXN2; (-) strand; PAM type: NRG; PAM sequence: GGG
cacgttatatgaagaatgtg

SEQ ID NO: 17681 - DNA, 20 bp, Artificial Sequence
  Description of Artificial Sequence: Synthetic oligonucleotide
  Target: ATXN2; (-) strand; PAM type: NRG; PAM sequence: GGG
acacgttatatgaagaatgt

SEQ ID NO: 17682 - DNA, 20 bp, Artificial Sequence
  Description of Artificial Sequence: Synthetic oligonucleotide
  Target: ATXN2; (-) strand; PAM type: NRG; PAM sequence: TGG
aacacgttatatgaagaatg

SEQ ID NO: 17683 - DNA, 20 bp, Artificial Sequence
  Description of Artificial Sequence: Synthetic oligonucleotide
  Target: ATXN2; (-) strand; PAM type: NRG; PAM sequence: AAG
gtttgctaacacgttatatg

SEQ ID NO: 17684 - DNA, 20 bp, Artificial Sequence
  Description of Artificial Sequence: Synthetic oligonucleotide
  Target: ATXN2; (-) strand; PAM type: NRG; PAM sequence: CAG
tgcttgcttctctcaccaat

SEQ ID NO: 17685 - DNA, 20 bp, Artificial Sequence
  Description of Artificial Sequence: Synthetic oligonucleotide
  Target: ATXN2; (-) strand; PAM type: NRG; PAM sequence: AAG
aactagggtgcctcttccca

SEQ ID NO: 17686 - DNA, 20 bp, Artificial Sequence
  Description of Artificial Sequence: Synthetic oligonucleotide
  Target: ATXN2; (-) strand; PAM type: NRG; PAM sequence: GGG
ctaccagactgctggaacta

SEQ ID NO: 17687 - DNA, 20 bp, Artificial Sequence
  Description of Artificial Sequence: Synthetic oligonucleotide
  Target: ATXN2; (-) strand; PAM type: NRG; PAM sequence: AGG
cctaccagactgctggaact

SEQ ID NO: 17688 - DNA, 20 bp, Artificial Sequence
  Description of Artificial Sequence: Synthetic oligonucleotide
  Target: ATXN2; (-) strand; PAM type: NRG; PAM sequence: TAG
gcctaccagactgctggaac

SEQ ID NO: 17689 - DNA, 20 bp, Artificial Sequence
  Description of Artificial Sequence: Synthetic oligonucleotide
  Target: ATXN2; (-) strand; PAM type: NRG; PAM sequence: TGG
agccttgcctaccagactgc

SEQ ID NO: 17690 - DNA, 20 bp, Artificial Sequence
  Description of Artificial Sequence: Synthetic oligonucleotide
  Target: ATXN2; (-) strand; PAM type: NRG; PAM sequence: CAG
gactcggcagccttgcctac

SEQ ID NO: 17691 - DNA, 20 bp, Artificial Sequence
  Description of Artificial Sequence: Synthetic oligonucleotide
  Target: ATXN2; (-) strand; PAM type: NRG; PAM sequence: CAG
cgtctatgctggtgactcgg

SEQ ID NO: 17692 - DNA, 20 bp, Artificial Sequence
  Description of Artificial Sequence: Synthetic oligonucleotide
  Target: ATXN2; (-) strand; PAM type: NRG; PAM sequence: CGG
agccgtctatgctggtgact

SEQ ID NO: 17693 - DNA, 20 bp, Artificial Sequence
  Description of Artificial Sequence: Synthetic oligonucleotide
  Target: ATXN2; (-) strand; PAM type: NRG; PAM sequence: TGG
atacccagagccgtctatgc

SEQ ID NO: 17694 - DNA, 20 bp, Artificial Sequence
  Description of Artificial Sequence: Synthetic oligonucleotide
  Target: ATXN2; (-) strand; PAM type: NRG; PAM sequence: GAG
atttacgtggaatataccca

SEQ ID NO: 17695 - DNA, 20 bp, Artificial Sequence
  Description of Artificial Sequence: Synthetic oligonucleotide
  Target: ATXN2; (-) strand; PAM type: NRG; PAM sequence: CAG
ccatttacgtggaatatacc

SEQ ID NO: 17696 - DNA, 20 bp, Artificial Sequence
  Description of Artificial Sequence: Synthetic oligonucleotide
  Target: ATXN2; (-) strand; PAM type: NRG; PAM sequence: TGG
ccctctgcacaccatttacg

SEQ ID NO: 17697 - DNA, 20 bp, Artificial Sequence
  Description of Artificial Sequence: Synthetic oligonucleotide
  Target: ATXN2; (-) strand; PAM type: NRG; PAM sequence: TAG
atagaactgctccatgtgcc

SEQ ID NO: 17698 - DNA, 20 bp, Artificial Sequence
  Description of Artificial Sequence: Synthetic oligonucleotide
  Target: ATXN2; (-) strand; PAM type: NRG; PAM sequence: TAG
ccctacaacacctaggatta

SEQ ID NO: 17699 - DNA, 20 bp, Artificial Sequence
  Description of Artificial Sequence: Synthetic oligonucleotide
  Target: ATXN2; (-) strand; PAM type: NRG; PAM sequence: AGG
cccttagccctacaacacct

SEQ ID NO: 17700 - DNA, 20 bp, Artificial Sequence
  Description of Artificial Sequence: Synthetic oligonucleotide
  Target: ATXN2; (-) strand; PAM type: NRG; PAM sequence: TAG
gcccttagccctacaacacc

SEQ ID NO: 17701 - DNA, 20 bp, Artificial Sequence
  Description of Artificial Sequence: Synthetic oligonucleotide
  Target: ATXN2; (-) strand; PAM type: NRG; PAM sequence: TAG
gctggagagttggtggccct

SEQ ID NO: 17702 - DNA, 20 bp, Artificial Sequence
  Description of Artificial Sequence: Synthetic oligonucleotide
  Target: ATXN2; (-) strand; PAM type: NRG; PAM sequence: TGG
tgttagggctggagagttgg

SEQ ID NO: 17703 - DNA, 20 bp, Artificial Sequence
  Description of Artificial Sequence: Synthetic oligonucleotide
  Target: ATXN2; (-) strand; PAM type: NRG; PAM sequence: TGG
aactgttagggctggagagt

SEQ ID NO: 17704 - DNA, 20 bp, Artificial Sequence
  Description of Artificial Sequence: Synthetic oligonucleotide
  Target: ATXN2; (-) strand; PAM type: NRG; PAM sequence: GAG
acgtaactgttagggctgga

SEQ ID NO: 17705 - DNA, 20 bp, Artificial Sequence
  Description of Artificial Sequence: Synthetic oligonucleotide
  Target: ATXN2; (-) strand; PAM type: NRG; PAM sequence: GAG
agacgtaactgttagggctg

SEQ ID NO: 17706 - DNA, 20 bp, Artificial Sequence
  Description of Artificial Sequence: Synthetic oligonucleotide
  Target: ATXN2; (-) strand; PAM type: NRG; PAM sequence: TGG
ggagacgtaactgttagggc

SEQ ID NO: 17707 - DNA, 20 bp, Artificial Sequence
  Description of Artificial Sequence: Synthetic oligonucleotide
  Target: ATXN2; (-) strand; PAM type: NRG; PAM sequence: GGG
agctggagacgtaactgtta

SEQ ID NO: 17708 - DNA, 20 bp, Artificial Sequence
  Description of Artificial Sequence: Synthetic oligonucleotide
  Target: ATXN2; (-) strand; PAM type: NRG; PAM sequence: AGG
cagctggagacgtaactgtt

SEQ ID NO: 17709 - DNA, 20 bp, Artificial Sequence
  Description of Artificial Sequence: Synthetic oligonucleotide
  Target: ATXN2; (-) strand; PAM type: NRG; PAM sequence: TAG
gcagctggagacgtaactgt

SEQ ID NO: 17710 - DNA, 20 bp, Artificial Sequence
  Description of Artificial Sequence: Synthetic oligonucleotide
  Target: ATXN2; (-) strand; PAM type: NRG; PAM sequence: GAG
aagagatagctttgcagctg

SEQ ID NO: 17711 - DNA, 20 bp, Artificial Sequence
  Description of Artificial Sequence: Synthetic oligonucleotide
  Target: ATXN2; (-) strand; PAM type: NRG; PAM sequence: TGG
ctaagagatagctttgcagc

SEQ ID NO: 17712 - DNA, 20 bp, Artificial Sequence
  Description of Artificial Sequence: Synthetic oligonucleotide
  Target: ATXN2; (-) strand; PAM type: NRG; PAM sequence: CAG
cctgctaagagatagctttg

SEQ ID NO: 17713 - DNA, 20 bp, Artificial Sequence
  Description of Artificial Sequence: Synthetic oligonucleotide
  Target: ATXN2; (-) strand; PAM type: NRG; PAM sequence: TAG
ccctttcccctgctaagaga

SEQ ID NO: 17714 - DNA, 20 bp, Artificial Sequence
  Description of Artificial Sequence: Synthetic oligonucleotide
  Target: ATXN2; (-) strand; PAM type: NRG; PAM sequence: GAG
cttgccctttcccctgctaa

SEQ ID NO: 17715 - DNA, 20 bp, Artificial Sequence
  Description of Artificial Sequence: Synthetic oligonucleotide
  Target: ATXN2; (-) strand; PAM type: NRG; PAM sequence: AAG
gccttgccctttcccctgct

SEQ ID NO: 17716 - DNA, 20 bp, Artificial Sequence
  Description of Artificial Sequence: Synthetic oligonucleotide
  Target: ATXN2; (-) strand; PAM type: NRG; PAM sequence: TGG
tgcacaggtgatcctagaac

SEQ ID NO: 17717 - DNA, 20 bp, Artificial Sequence
  Description of Artificial Sequence: Synthetic oligonucleotide
  Target: ATXN2; (-) strand; PAM type: NRG; PAM sequence: TAG
agtggatgcacaggtgatcc

SEQ ID NO: 17718 - DNA, 20 bp, Artificial Sequence
  Description of Artificial Sequence: Synthetic oligonucleotide
  Target: ATXN2; (-) strand; PAM type: NRG; PAM sequence: AGG
ggcattggcagtggatgcac

SEQ ID NO: 17719 - DNA, 20 bp, Artificial Sequence
  Description of Artificial Sequence: Synthetic oligonucleotide
  Target: ATXN2; (-) strand; PAM type: NRG; PAM sequence: CAG
tggcattggcagtggatgca

SEQ ID NO: 17720 - DNA, 20 bp, Artificial Sequence
  Description of Artificial Sequence: Synthetic oligonucleotide
  Target: ATXN2; (-) strand; PAM type: NRG; PAM sequence: TGG
gccagctgtggcattggcag

SEQ ID NO: 17721 - DNA, 20 bp, Artificial Sequence
  Description of Artificial Sequence: Synthetic oligonucleotide
  Target: ATXN2; (-) strand; PAM type: NRG; PAM sequence: CAG
aatgccagctgtggcattgg

SEQ ID NO: 17722 - DNA, 20 bp, Artificial Sequence
  Description of Artificial Sequence: Synthetic oligonucleotide
  Target: ATXN2; (-) strand; PAM type: NRG; PAM sequence: TGG
attaatgccagctgtggcat

SEQ ID NO: 17723 - DNA, 20 bp, Artificial Sequence
  Description of Artificial Sequence: Synthetic oligonucleotide
  Target: ATXN2; (-) strand; PAM type: NRG; PAM sequence: TGG
aggaatattaatgccagctg

SEQ ID NO: 17724 - DNA, 20 bp, Artificial Sequence
  Description of Artificial Sequence: Synthetic oligonucleotide
  Target: ATXN2; (-) strand; PAM type: NRG; PAM sequence: CAG
atatgaaggaatattaatgc

SEQ ID NO: 17725 - DNA, 20 bp, Artificial Sequence
  Description of Artificial Sequence: Synthetic oligonucleotide
  Target: ATXN2; (-) strand; PAM type: NRG; PAM sequence: AGG
ccagtctaaactggatatga

SEQ ID NO: 17726 - DNA, 20 bp, Artificial Sequence
  Description of Artificial Sequence: Synthetic oligonucleotide
  Target: ATXN2; (-) strand; PAM type: NRG; PAM sequence: AAG
tccagtctaaactggatatg

SEQ ID NO: 17727 - DNA, 20 bp, Artificial Sequence
  Description of Artificial Sequence: Synthetic oligonucleotide
  Target: ATXN2; (-) strand; PAM type: NRG; PAM sequence: TGG
ctgctgtatccagtctaaac

SEQ ID NO: 17728 - DNA, 20 bp, Artificial Sequence
  Description of Artificial Sequence: Synthetic oligonucleotide
  Target: ATXN2; (-) strand; PAM type: NRG; PAM sequence: CAG
ataaacaaagctgctgtatc

SEQ ID NO: 17729 - DNA, 20 bp, Artificial Sequence
  Description of Artificial Sequence: Synthetic oligonucleotide
  Target: ATXN2; (-) strand; PAM type: NRG; PAM sequence: AAG
attttcccagtgtataaaca

SEQ ID NO: 17730 - DNA, 20 bp, Artificial Sequence
  Description of Artificial Sequence: Synthetic oligonucleotide
  Target: ATXN2; (-) strand; PAM type: NRG; PAM sequence: CAG
tacagtctggaaaattttcc

SEQ ID NO: 17731 - DNA, 20 bp, Artificial Sequence
  Description of Artificial Sequence: Synthetic oligonucleotide
  Target: ATXN2; (-) strand; PAM type: NRG; PAM sequence: TGG
atatgttaattcctacagtc

SEQ ID NO: 17732 - DNA, 20 bp, Artificial Sequence
  Description of Artificial Sequence: Synthetic oligonucleotide
  Target: ATXN2; (-) strand; PAM type: NRG; PAM sequence: CAG
ctggcatatgttaattccta

SEQ ID NO: 17733 - DNA, 20 bp, Artificial Sequence
  Description of Artificial Sequence: Synthetic oligonucleotide
  Target: ATXN2; (-) strand; PAM type: NRG; PAM sequence: TGG
gttttcttgttaaaatattc

SEQ ID NO: 17734 - DNA, 20 bp, Artificial Sequence
  Description of Artificial Sequence: Synthetic oligonucleotide
  Target: ATXN2; (-) strand; PAM type: NRG; PAM sequence: CAG
attcagagactatgttgcca

SEQ ID NO: 17735 - DNA, 20 bp, Artificial Sequence
  Description of Artificial Sequence: Synthetic oligonucleotide
  Target: ATXN2; (-) strand; PAM type: NRG; PAM sequence: GAG
actactcttaaaaacattca

SEQ ID NO: 17736 - DNA, 20 bp, Artificial Sequence
  Description of Artificial Sequence: Synthetic oligonucleotide
  Target: ATXN2; (-) strand; PAM type: NRG; PAM sequence: CAG
tcactactcttaaaaacatt

SEQ ID NO: 17737 - DNA, 20 bp, Artificial Sequence
  Description of Artificial Sequence: Synthetic oligonucleotide
  Target: ATXN2; (-) strand; PAM type: NRG; PAM sequence: AAG
tcatttgttctagctcccag

SEQ ID NO: 17738 - DNA, 20 bp, Artificial Sequence
  Description of Artificial Sequence: Synthetic oligonucleotide
  Target: ATXN2; (-) strand; PAM type: NRG; PAM sequence: CAG
acatcatttgttctagctcc

SEQ ID NO: 17739 - DNA, 20 bp, Artificial Sequence
  Description of Artificial Sequence: Synthetic oligonucleotide
  Target: ATXN2; (-) strand; PAM type: NRG; PAM sequence: TAG
cgtttgtacatcatttgttc

SEQ ID NO: 17740 - DNA, 20 bp, Artificial Sequence
  Description of Artificial Sequence: Synthetic oligonucleotide
  Target: ATXN2; (-) strand; PAM type: NRG; PAM sequence: AGG
tgggactgtgaagctcagga

SEQ ID NO: 17741 - DNA, 20 bp, Artificial Sequence
  Description of Artificial Sequence: Synthetic oligonucleotide
  Target: ATXN2; (-) strand; PAM type: NRG; PAM sequence: AAG
atgggactgtgaagctcagg

SEQ ID NO: 17742 - DNA, 20 bp, Artificial Sequence
  Description of Artificial Sequence: Synthetic oligonucleotide
  Target: ATXN2; (-) strand; PAM type: NRG; PAM sequence: AGG
cttatgggactgtgaagctc

SEQ ID NO: 17743 - DNA, 20 bp, Artificial Sequence
  Description of Artificial Sequence: Synthetic oligonucleotide
  Target: ATXN2; (-) strand; PAM type: NRG; PAM sequence: CAG
acttatgggactgtgaagct

SEQ ID NO: 17744 - DNA, 20 bp, Artificial Sequence
  Description of Artificial Sequence: Synthetic oligonucleotide
  Target: ATXN2; (-) strand; PAM type: NRG; PAM sequence: AAG
tatagacttatgggactgtg

SEQ ID NO: 17745 - DNA, 20 bp, Artificial Sequence
  Description of Artificial Sequence: Synthetic oligonucleotide
  Target: ATXN2; (-) strand; PAM type: NRG; PAM sequence: GGG
ggactgtcttatagacttat

SEQ ID NO: 17746 - DNA, 20 bp, Artificial Sequence
  Description of Artificial Sequence: Synthetic oligonucleotide
  Target: ATXN2; (-) strand; PAM type: NRG; PAM sequence: TGG
aggactgtcttatagactta

SEQ ID NO: 17747 - DNA, 20 bp, Artificial Sequence
  Description of Artificial Sequence: Synthetic oligonucleotide
  Target: ATXN2; (-) strand; PAM type: NRG; PAM sequence: TAG
agaaaaaaaggactgtctta

SEQ ID NO: 17748 - DNA, 20 bp, Artificial Sequence
  Description of Artificial Sequence: Synthetic oligonucleotide
  Target: ATXN2; (-) strand; PAM type: NRG; PAM sequence: AGG
agccaccaagttagaaaaaa

SEQ ID NO: 17749 - DNA, 20 bp, Artificial Sequence
  Description of Artificial Sequence: Synthetic oligonucleotide
  Target: ATXN2; (-) strand; PAM type: NRG; PAM sequence: AAG
aagccaccaagttagaaaaa

SEQ ID NO: 17750 - DNA, 20 bp, Artificial Sequence
  Description of Artificial Sequence: Synthetic oligonucleotide
  Target: ATXN2; (-) strand; PAM type: NRG; PAM sequence: TAG
ctgttaataagccaccaagt

SEQ ID NO: 17751 - DNA, 20 bp, Artificial Sequence
  Description of Artificial Sequence: Synthetic oligonucleotide
  Target: ATXN2; (-) strand; PAM type: NRG; PAM sequence: AAG
gggcctgttaataagccacc

SEQ ID NO: 17752 - DNA, 20 bp, Artificial Sequence
  Description of Artificial Sequence: Synthetic oligonucleotide
  Target: ATXN2; (-) strand; PAM type: NRG; PAM sequence: AAG
atgatggagggcctgttaat

SEQ ID NO: 17753 - DNA, 20 bp, Artificial Sequence
  Description of Artificial Sequence: Synthetic oligonucleotide
  Target: ATXN2; (-) strand; PAM type: NRG; PAM sequence: GGG
atgagtatgatgatgatgga

SEQ ID NO: 17754 - DNA, 20 bp, Artificial Sequence
  Description of Artificial Sequence: Synthetic oligonucleotide
  Target: ATXN2; (-) strand; PAM type: NRG; PAM sequence: AGG
aatgagtatgatgatgatgg

SEQ ID NO: 17755 - DNA, 20 bp, Artificial Sequence
  Description of Artificial Sequence: Synthetic oligonucleotide
  Target: ATXN2; (-) strand; PAM type: NRG; PAM sequence: GAG
taatgagtatgatgatgatg

SEQ ID NO: 17756 - DNA, 20 bp, Artificial Sequence
  Description of Artificial Sequence: Synthetic oligonucleotide
  Target: ATXN2; (-) strand; PAM type: NRG; PAM sequence: TGG
cttaatgagtatgatgatga

SEQ ID NO: 17757 - DNA, 20 bp, Artificial Sequence
  Description of Artificial Sequence: Synthetic oligonucleotide
  Target: ATXN2; (-) strand; PAM type: NRG; PAM sequence: GAG
gagctggaagtaaacttaat

SEQ ID NO: 17758 - DNA, 20 bp, Artificial Sequence
  Description of Artificial Sequence: Synthetic oligonucleotide
  Target: ATXN2; (-) strand; PAM type: NRG; PAM sequence: AAG
atacaacttggaggagctgg

SEQ ID NO: 17759 - DNA, 20 bp, Artificial Sequence
  Description of Artificial Sequence: Synthetic oligonucleotide
  Target: ATXN2; (-) strand; PAM type: NRG; PAM sequence: TGG
cctatacaacttggaggagc

SEQ ID NO: 17760 - DNA, 20 bp, Artificial Sequence
  Description of Artificial Sequence: Synthetic oligonucleotide
  Target: ATXN2; (-) strand; PAM type: NRG; PAM sequence: GAG
agtgcctatacaacttggag

SEQ ID NO: 17761 - DNA, 20 bp, Artificial Sequence
  Description of Artificial Sequence: Synthetic oligonucleotide
  Target: ATXN2; (-) strand; PAM type: NRG; PAM sequence: AGG
tcagtgcctatacaacttgg

SEQ ID NO: 17762 - DNA, 20 bp, Artificial Sequence
  Description of Artificial Sequence: Synthetic oligonucleotide
  Target: ATXN2; (-) strand; PAM type: NRG; PAM sequence: GAG
gtcagtgcctatacaacttg

SEQ ID NO: 17763 - DNA, 20 bp, Artificial Sequence
  Description of Artificial Sequence: Synthetic oligonucleotide
  Target: ATXN2; (-) strand; PAM type: NRG; PAM sequence: TGG
aagtcagtgcctatacaact

SEQ ID NO: 17764 - DNA, 20 bp, Artificial Sequence
  Description of Artificial Sequence: Synthetic oligonucleotide
  Target: ATXN2; (-) strand; PAM type: NRG; PAM sequence: CAG
tcaaatcttttagaccaagt

SEQ ID NO: 17765 - DNA, 20 bp, Artificial Sequence
  Description of Artificial Sequence: Synthetic oligonucleotide
  Target: ATXN2; (-) strand; PAM type: NRG; PAM sequence: AAG
tacatcaaatcttttagacc

SEQ ID NO: 17766 - DNA, 20 bp, Artificial Sequence
  Description of Artificial Sequence: Synthetic oligonucleotide
  Target: ATXN2; (-) strand; PAM type: NRG; PAM sequence: TAG
gaaatttacatcaaatcttt

SEQ ID NO: 17767 - DNA, 20 bp, Artificial Sequence
  Description of Artificial Sequence: Synthetic oligonucleotide
  Target: ATXN2; (-) strand; PAM type: NRG; PAM sequence: AGG
tttacaagtacaacaaactc

SEQ ID NO: 17768 - DNA, 20 bp, Artificial Sequence
  Description of Artificial Sequence: Synthetic oligonucleotide
  Target: ATXN2; (-) strand; PAM type: NRG; PAM sequence: CAG
ttttacaagtacaacaaact

SEQ ID NO: 17769 - DNA, 20 bp, Artificial Sequence
  Description of Artificial Sequence: Synthetic oligonucleotide
  Target: ATXN2; (-) strand; PAM type: NRG; PAM sequence: AAG
aatgaacgtaagatttttac

SEQ ID NO: 17770 - DNA, 20 bp, Artificial Sequence
  Description of Artificial Sequence: Synthetic oligonucleotide
  Target: ATXN2; (-) strand; PAM type: NRG; PAM sequence: AAG
tacatttttaaaatgaacgt

SEQ ID NO: 17771 - DNA, 20 bp, Artificial Sequence
  Description of Artificial Sequence: Synthetic oligonucleotide
  Target: ATXN2; (-) strand; PAM type: NRG; PAM sequence: GAG
tccagcctgggcaacagagc

SEQ ID NO: 17772 - DNA, 20 bp, Artificial Sequence
  Description of Artificial Sequence: Synthetic oligonucleotide
  Target: ATXN2; (-) strand; PAM type: NRG; PAM sequence: GAG
gcactccagcctgggcaaca

SEQ ID NO: 17773 - DNA, 20 bp, Artificial Sequence
  Description of Artificial Sequence: Synthetic oligonucleotide
  Target: ATXN2; (-) strand; PAM type: NRG; PAM sequence: CAG
ctgcactccagcctgggcaa

SEQ ID NO: 17774 - DNA, 20 bp, Artificial Sequence
  Description of Artificial Sequence: Synthetic oligonucleotide
  Target: ATXN2; (-) strand; PAM type: NRG; PAM sequence: GGG
gtgcccctgcactccagcct

SEQ ID NO: 17775 - DNA, 20 bp, Artificial Sequence
  Description of Artificial Sequence: Synthetic oligonucleotide
  Target: ATXN2; (-) strand; PAM type: NRG; PAM sequence: TGG
ggtgcccctgcactccagcc

SEQ ID NO: 17776 - DNA, 20 bp, Artificial Sequence
  Description of Artificial Sequence: Synthetic oligonucleotide
  Target: ATXN2; (-) strand; PAM type: NRG; PAM sequence: CAG
gagatggtgcccctgcactc

SEQ ID NO: 17777 - DNA, 20 bp, Artificial Sequence
  Description of Artificial Sequence: Synthetic oligonucleotide
  Target: ATXN2; (-) strand; PAM type: NRG; PAM sequence: TGG
gaggttgcagtgagccgaga

SEQ ID NO: 17778 - DNA, 20 bp, Artificial Sequence
  Description of Artificial Sequence: Synthetic oligonucleotide
  Target: ATXN2; (-) strand; PAM type: NRG; PAM sequence: GAG
ggcggaggttgcagtgagcc

SEQ ID NO: 17779 - DNA, 20 bp, Artificial Sequence
  Description of Artificial Sequence: Synthetic oligonucleotide
  Target: ATXN2; (-) strand; PAM type: NRG; PAM sequence: GAG
cgggaggcggaggttgcagt

SEQ ID NO: 17780 - DNA, 20 bp, Artificial Sequence
  Description of Artificial Sequence: Synthetic oligonucleotide
  Target: ATXN2; (-) strand; PAM type: NRG; PAM sequence: CAG
aacccgggaggcggaggttg

SEQ ID NO: 17781 - DNA, 20 bp, Artificial Sequence
  Description of Artificial Sequence: Synthetic oligonucleotide
  Target: ATXN2; (-) strand; PAM type: NRG; PAM sequence: AGG
cgcttgaacccgggaggcgg

SEQ ID NO: 17782 - DNA, 20 bp, Artificial Sequence
  Description of Artificial Sequence: Synthetic oligonucleotide
  Target: ATXN2; (-) strand; PAM type: NRG; PAM sequence: GAG
tcgcttgaacccgggaggcg

SEQ ID NO: 17783 - DNA, 20 bp, Artificial Sequence
  Description of Artificial Sequence: Synthetic oligonucleotide
  Target: ATXN2; (-) strand; PAM type: NRG; PAM sequence: CGG
aatcgcttgaacccgggagg

SEQ ID NO: 17784 - DNA, 20 bp, Artificial Sequence
  Description of Artificial Sequence: Synthetic oligonucleotide
  Target: ATXN2; (-) strand; PAM type: NRG; PAM sequence: AGG
gagaatcgcttgaacccggg

SEQ ID NO: 17785 - DNA, 20 bp, Artificial Sequence
  Description of Artificial Sequence: Synthetic oligonucleotide
  Target: ATXN2; (-) strand; PAM type: NRG; PAM sequence: GAG
ggagaatcgcttgaacccgg

SEQ ID NO: 17786 - DNA, 20 bp, Artificial Sequence
  Description of Artificial Sequence: Synthetic oligonucleotide
  Target: ATXN2; (-) strand; PAM type: NRG; PAM sequence: GGG
caggagaatcgcttgaaccc

SEQ ID NO: 17787 - DNA, 20 bp, Artificial Sequence
  Description of Artificial Sequence: Synthetic oligonucleotide
  Target: ATXN2; (-) strand; PAM type: NRG; PAM sequence: CGG
gcaggagaatcgcttgaacc

SEQ ID NO: 17788 - DNA, 20 bp, Artificial Sequence
  Description of Artificial Sequence: Synthetic oligonucleotide
  Target: ATXN2; (-) strand; PAM type: NRG; PAM sequence: GAG
tactcggcaggctgaggcag

SEQ ID NO: 17789 - DNA, 20 bp, Artificial Sequence
  Description of Artificial Sequence: Synthetic oligonucleotide
  Target: ATXN2; (-) strand; PAM type: NRG; PAM sequence: AGG
gctactcggcaggctgaggc

SEQ ID NO: 17790 - DNA, 20 bp, Artificial Sequence
  Description of Artificial Sequence: Synthetic oligonucleotide
  Target: ATXN2; (-) strand; PAM type: NRG; PAM sequence: CAG
agctactcggcaggctgagg

SEQ ID NO: 17791 - DNA, 20 bp, Artificial Sequence
  Description of Artificial Sequence: Synthetic oligonucleotide
  Target: ATXN2; (-) strand; PAM type: NRG; PAM sequence: AGG
tccagctactcggcaggctg

SEQ ID NO: 17792 - DNA, 20 bp, Artificial Sequence
  Description of Artificial Sequence: Synthetic oligonucleotide
  Target: ATXN2; (-) strand; PAM type: NRG; PAM sequence: GAG
ttccagctactcggcaggct

SEQ ID NO: 17793 - DNA, 20 bp, Artificial Sequence
  Description of Artificial Sequence: Synthetic oligonucleotide
  Target: ATXN2; (-) strand; PAM type: NRG; PAM sequence: AGG
tatagttccagctactcggc

SEQ ID NO: 17794 - DNA, 20 bp, Artificial Sequence
  Description of Artificial Sequence: Synthetic oligonucleotide
  Target: ATXN2; (-) strand; PAM type: NRG; PAM sequence: CAG
ctatagttccagctactcgg

SEQ ID NO: 17795 - DNA, 20 bp, Artificial Sequence
  Description of Artificial Sequence: Synthetic oligonucleotide
  Target: ATXN2; (-) strand; PAM type: NRG; PAM sequence: CGG
tgcctatagttccagctact

SEQ ID NO: 17796 - DNA, 20 bp, Artificial Sequence
  Description of Artificial Sequence: Synthetic oligonucleotide
  Target: ATXN2; (-) strand; PAM type: NRG; PAM sequence: CAG
gtgatgcttgcctatagttc

SEQ ID NO: 17797 - DNA, 20 bp, Artificial Sequence
  Description of Artificial Sequence: Synthetic oligonucleotide
  Target: ATXN2; (-) strand; PAM type: NRG; PAM sequence: TAG
ggcatggtgatgcttgccta

SEQ ID NO: 17798 - DNA, 20 bp, Artificial Sequence
  Description of Artificial Sequence: Synthetic oligonucleotide
  Target: ATXN2; (-) strand; PAM type: NRG; PAM sequence: TGG
atacaaaaatcagccaggca

SEQ ID NO: 17799 - DNA, 20 bp, Artificial Sequence
  Description of Artificial Sequence: Synthetic oligonucleotide
  Target: ATXN2; (-) strand; PAM type: NRG; PAM sequence: AGG
taaaaatacaaaaatcagcc

SEQ ID NO: 17800 - DNA, 20 bp, Artificial Sequence
  Description of Artificial Sequence: Synthetic oligonucleotide
  Target: ATXN2; (-) strand; PAM type: NRG; PAM sequence: CAG
ctaaaaatacaaaaatcagc

SEQ ID NO: 17801 - DNA, 20 bp, Artificial Sequence
  Description of Artificial Sequence: Synthetic oligonucleotide
  Target: ATXN2; (-) strand; PAM type: NRG; PAM sequence: CAG
tctactaaaaatacaaaaat

SEQ ID NO: 17802 - DNA, 20 bp, Artificial Sequence
  Description of Artificial Sequence: Synthetic oligonucleotide
  Target: ATXN2; (-) strand; PAM type: NRG; PAM sequence: TGG
cgagaccagcctggccaaca

SEQ ID NO: 17803 - DNA, 20 bp, Artificial Sequence
  Description of Artificial Sequence: Synthetic oligonucleotide
  Target: ATXN2; (-) strand; PAM type: NRG; PAM sequence: TGG
ccagtagttcgagaccagcc

SEQ ID NO: 17804 - DNA, 20 bp, Artificial Sequence
  Description of Artificial Sequence: Synthetic oligonucleotide
  Target: ATXN2; (-) strand; PAM type: NRG; PAM sequence: CAG
tgaggccagtagttcgagac

SEQ ID NO: 17805 - DNA, 20 bp, Artificial Sequence
  Description of Artificial Sequence: Synthetic oligonucleotide
  Target: ATXN2; (-) strand; PAM type: NRG; PAM sequence: GAG
tcacttgaggccagtagttc

SEQ ID NO: 17806 - DNA, 20 bp, Artificial Sequence
  Description of Artificial Sequence: Synthetic oligonucleotide
  Target: ATXN2; (-) strand; PAM type: NRG; PAM sequence: TAG
gatggatcacttgaggccag

SEQ ID NO: 17807 - DNA, 20 bp, Artificial Sequence
  Description of Artificial Sequence: Synthetic oligonucleotide
  Target: ATXN2; (-) strand; PAM type: NRG; PAM sequence: CAG
gcggatggatcacttgaggc

SEQ ID NO: 17808 - DNA, 20 bp, Artificial Sequence
  Description of Artificial Sequence: Synthetic oligonucleotide
  Target: ATXN2; (-) strand; PAM type: NRG; PAM sequence: AGG
cgaggcggatggatcacttg

SEQ ID NO: 17809 - DNA, 20 bp, Artificial Sequence
  Description of Artificial Sequence: Synthetic oligonucleotide
  Target: ATXN2; (-) strand; PAM type: NRG; PAM sequence: GAG
ccgaggcggatggatcactt

SEQ ID NO: 17810 - DNA, 20 bp, Artificial Sequence
  Description of Artificial Sequence: Synthetic oligonucleotide
  Target: ATXN2; (-) strand; PAM type: NRG; PAM sequence: TGG
ctttgggaggccgaggcgga

SEQ ID NO: 17811 - DNA, 20 bp, Artificial Sequence
  Description of Artificial Sequence: Synthetic oligonucleotide
  Target: ATXN2; (-) strand; PAM type: NRG; PAM sequence: CGG
agcactttgggaggccgagg

SEQ ID NO: 17812 - DNA, 20 bp, Artificial Sequence
  Description of Artificial Sequence: Synthetic oligonucleotide
  Target: ATXN2; (-) strand; PAM type: NRG; PAM sequence: AGG
cccagcactttgggaggccg

SEQ ID NO: 17813 - DNA, 20 bp, Artificial Sequence
  Description of Artificial Sequence: Synthetic oligonucleotide
  Target: ATXN2; (-) strand; PAM type: NRG; PAM sequence: GAG
tcccagcactttgggaggcc

SEQ ID NO: 17814 - DNA, 20 bp, Artificial Sequence
  Description of Artificial Sequence: Synthetic oligonucleotide
  Target: ATXN2; (-) strand; PAM type: NRG; PAM sequence: AGG
tgtaatcccagcactttggg

SEQ ID NO: 17815 - DNA, 20 bp, Artificial Sequence
  Description of Artificial Sequence: Synthetic oligonucleotide
  Target: ATXN2; (-) strand; PAM type: NRG; PAM sequence: GAG
ctgtaatcccagcactttgg

SEQ ID NO: 17816 - DNA, 20 bp, Artificial Sequence
  Description of Artificial Sequence: Synthetic oligonucleotide
  Target: ATXN2; (-) strand; PAM type: NRG; PAM sequence: GGG
gcctgtaatcccagcacttt

SEQ ID NO: 17817 - DNA, 20 bp, Artificial Sequence
  Description of Artificial Sequence: Synthetic oligonucleotide
  Target: ATXN2; (-) strand; PAM type: NRG; PAM sequence: TGG
tgcctgtaatcccagcactt

SEQ ID NO: 17818 - DNA, 20 bp, Artificial Sequence
  Description of Artificial Sequence: Synthetic oligonucleotide
  Target: ATXN2; (-) strand; PAM type: NRG; PAM sequence: CAG
gtggctcatgcctgtaatcc

SEQ ID NO: 17819 - DNA, 20 bp, Artificial Sequence
  Description of Artificial Sequence: Synthetic oligonucleotide
  Target: ATXN2; (-) strand; PAM type: NRG; PAM sequence: TGG
acaaacatggccgggcgcag

SEQ ID NO: 17820 - DNA, 20 bp, Artificial Sequence
  Description of Artificial Sequence: Synthetic oligonucleotide
  Target: ATXN2; (-) strand; PAM type: NRG; PAM sequence: CAG
taaacaaacatggccgggcg

SEQ ID NO: 17821 - DNA, 20 bp, Artificial Sequence
  Description of Artificial Sequence: Synthetic oligonucleotide
  Target: ATXN2; (-) strand; PAM type: NRG; PAM sequence: GGG
aaaaataaacaaacatggcc

SEQ ID NO: 17822 - DNA, 20 bp, Artificial Sequence
  Description of Artificial Sequence: Synthetic oligonucleotide
  Target: ATXN2; (-) strand; PAM type: NRG; PAM sequence: CGG
caaaaataaacaaacatggc

SEQ ID NO: 17823 - DNA, 20 bp, Artificial Sequence
  Description of Artificial Sequence: Synthetic oligonucleotide
  Target: ATXN2; (-) strand; PAM type: NRG; PAM sequence: TGG
gtctcaaaaataaacaaaca

SEQ ID NO: 17824 - DNA, 20 bp, Artificial Sequence
  Description of Artificial Sequence: Synthetic oligonucleotide
  Target: ATXN2; (-) strand; PAM type: NRG; PAM sequence: GGG
gcctgggtgacagcaagact

SEQ ID NO: 17825 - DNA, 20 bp, Artificial Sequence
  Description of Artificial Sequence: Synthetic oligonucleotide
  Target: ATXN2; (-) strand; PAM type: NRG; PAM sequence: TGG
agcctgggtgacagcaagac

SEQ ID NO: 17826 - DNA, 20 bp, Artificial Sequence
  Description of Artificial Sequence: Synthetic oligonucleotide
  Target: ATXN2; (-) strand; PAM type: NRG; PAM sequence: AAG
actccagcctgggtgacagc

SEQ ID NO: 17827 - DNA, 20 bp, Artificial Sequence
  Description of Artificial Sequence: Synthetic oligonucleotide
  Target: ATXN2; (-) strand; PAM type: NRG; PAM sequence: CAG
ctgcactccagcctgggtga

SEQ ID NO: 17828 - DNA, 20 bp, Artificial Sequence
  Description of Artificial Sequence: Synthetic oligonucleotide
  Target: ATXN2; (-) strand; PAM type: NRG; PAM sequence: GGG
gctccactgcactccagcct

SEQ ID NO: 17829 - DNA, 20 bp, Artificial Sequence
  Description of Artificial Sequence: Synthetic oligonucleotide
  Target: ATXN2; (-) strand; PAM type: NRG; PAM sequence: TGG
cgctccactgcactccagcc

SEQ ID NO: 17830 - DNA, 20 bp, Artificial Sequence
  Description of Artificial Sequence: Synthetic oligonucleotide
  Target: ATXN2; (-) strand; PAM type: NRG; PAM sequence: CAG
gagatcgctccactgcactc

SEQ ID NO: 17831 - DNA, 20 bp, Artificial Sequence
  Description of Artificial Sequence: Synthetic oligonucleotide
  Target: ATXN2; (-) strand; PAM type: NRG; PAM sequence: GAG
ggcggaggctgcagtgagcc

SEQ ID NO: 17832 - DNA, 20 bp, Artificial Sequence
  Description of Artificial Sequence: Synthetic oligonucleotide
  Target: ATXN2; (-) strand; PAM type: NRG; PAM sequence: GAG
caggaggcggaggctgcagt

SEQ ID NO: 17833 - DNA, 20 bp, Artificial Sequence
  Description of Artificial Sequence: Synthetic oligonucleotide
  Target: ATXN2; (-) strand; PAM type: NRG; PAM sequence: CAG
aacccaggaggcggaggctg

SEQ ID NO: 17834 - DNA, 20 bp, Artificial Sequence
  Description of Artificial Sequence: Synthetic oligonucleotide
  Target: ATXN2; (-) strand; PAM type: NRG; PAM sequence: AGG
cactttaacccaggaggcgg

SEQ ID NO: 17835 - DNA, 20 bp, Artificial Sequence
  Description of Artificial Sequence: Synthetic oligonucleotide
  Target: ATXN2; (-) strand; PAM type: NRG; PAM sequence: GAG
tcactttaacccaggaggcg

SEQ ID NO: 17836 - DNA, 20 bp, Artificial Sequence
  Description of Artificial Sequence: Synthetic oligonucleotide
  Target: ATXN2; (-) strand; PAM type: NRG; PAM sequence: CGG
tatcactttaacccaggagg

SEQ ID NO: 17837 - DNA, 20 bp, Artificial Sequence
  Description of Artificial Sequence: Synthetic oligonucleotide
  Target: ATXN2; (-) strand; PAM type: NRG; PAM sequence: AGG
gagtatcactttaacccagg

SEQ ID NO: 17838 - DNA, 20 bp, Artificial Sequence
  Description of Artificial Sequence: Synthetic oligonucleotide
  Target: ATXN2; (-) strand; PAM type: NRG; PAM sequence: GAG
ggagtatcactttaacccag

SEQ ID NO: 17839 - DNA, 20 bp, Artificial Sequence
  Description of Artificial Sequence: Synthetic oligonucleotide
  Target: ATXN2; (-) strand; PAM type: NRG; PAM sequence: AGG
caggagtatcactttaaccc

SEQ ID NO: 17840 - DNA, 20 bp, Artificial Sequence
  Description of Artificial Sequence: Synthetic oligonucleotide
  Target: ATXN2; (-) strand; PAM type: NRG; PAM sequence: CAG
gcaggagtatcactttaacc

SEQ ID NO: 17841 - DNA, 20 bp, Artificial Sequence
  Description of Artificial Sequence: Synthetic oligonucleotide
  Target: ATXN2; (-) strand; PAM type: NRG; PAM sequence: GAG
ctactcagaggctgaagcag

SEQ ID NO: 17842 - DNA, 20 bp, Artificial Sequence
  Description of Artificial Sequence: Synthetic oligonucleotide
  Target: ATXN2; (-) strand; PAM type: NRG; PAM sequence: AGG
agctactcagaggctgaagc

SEQ ID NO: 17843 - DNA, 20 bp, Artificial Sequence
  Description of Artificial Sequence: Synthetic oligonucleotide
  Target: ATXN2; (-) strand; PAM type: NRG; PAM sequence: CAG
cagctactcagaggctgaag

SEQ ID NO: 17844 - DNA, 20 bp, Artificial Sequence
  Description of Artificial Sequence: Synthetic oligonucleotide
  Target: ATXN2; (-) strand; PAM type: NRG; PAM sequence: AAG
tcccagctactcagaggctg

SEQ ID NO: 17845 - DNA, 20 bp, Artificial Sequence
  Description of Artificial Sequence: Synthetic oligonucleotide
  Target: ATXN2; (-) strand; PAM type: NRG; PAM sequence: AGG
aggtaatcccagctactcag

SEQ ID NO: 17846 - DNA, 20 bp, Artificial Sequence
  Description of Artificial Sequence: Synthetic oligonucleotide
  Target: ATXN2; (-) strand; PAM type: NRG; PAM sequence: GAG
caggtaatcccagctactca

SEQ ID NO: 17847 - DNA, 20 bp, Artificial Sequence
  Description of Artificial Sequence: Synthetic oligonucleotide
  Target: ATXN2; (-) strand; PAM type: NRG; PAM sequence: CAG
gccaggtaatcccagctact

SEQ ID NO: 17848 - DNA, 20 bp, Artificial Sequence
  Description of Artificial Sequence: Synthetic oligonucleotide
  Target: ATXN2; (-) strand; PAM type: NRG; PAM sequence: CAG
aaaaattagccaggtaatcc

SEQ ID NO: 17849 - DNA, 20 bp, Artificial Sequence
  Description of Artificial Sequence: Synthetic oligonucleotide
  Target: ATXN2; (-) strand; PAM type: NRG; PAM sequence: AGG
taaaaatacaaaaattagcc

SEQ ID NO: 17850 - DNA, 20 bp, Artificial Sequence
  Description of Artificial Sequence: Synthetic oligonucleotide
  Target: ATXN2; (-) strand; PAM type: NRG; PAM sequence: CAG
ctaaaaatacaaaaattagc

SEQ ID NO: 17851 - DNA, 20 bp, Artificial Sequence
  Description of Artificial Sequence: Synthetic oligonucleotide
  Target: ATXN2; (-) strand; PAM type: NRG; PAM sequence: TAG
tctactaaaaatacaaaaat

SEQ ID NO: 17852 - DNA, 20 bp, Artificial Sequence
  Description of Artificial Sequence: Synthetic oligonucleotide
  Target: ATXN2; (-) strand; PAM type: NRG; PAM sequence: TGG
tgagaccagcctggccaaca

SEQ ID NO: 17853 - DNA, 20 bp, Artificial Sequence
  Description of Artificial Sequence: Synthetic oligonucleotide
  Target: ATXN2; (-) strand; PAM type: NRG; PAM sequence: TGG
ccaggagtttgagaccagcc

SEQ ID NO: 17854 - DNA, 20 bp, Artificial Sequence
  Description of Artificial Sequence: Synthetic oligonucleotide
  Target: ATXN2; (-) strand; PAM type: NRG; PAM sequence: CAG
tgaggccaggagtttgagac

SEQ ID NO: 17855 - DNA, 20 bp, Artificial Sequence
  Description of Artificial Sequence: Synthetic oligonucleotide
  Target: ATXN2; (-) strand; PAM type: NRG; PAM sequence: GAG
tcacttgaggccaggagttt

SEQ ID NO: 17856 - DNA, 20 bp, Artificial Sequence
  Description of Artificial Sequence: Synthetic oligonucleotide
  Target: ATXN2; (-) strand; PAM type: NRG; PAM sequence: GAG
gacggatcacttgaggccag

SEQ ID NO: 17857 - DNA, 20 bp, Artificial Sequence
  Description of Artificial Sequence: Synthetic oligonucleotide
  Target: ATXN2; (-) strand; PAM type: NRG; PAM sequence: AGG
tggacggatcacttgaggcc

SEQ ID NO: 17858 - DNA, 20 bp, Artificial Sequence
  Description of Artificial Sequence: Synthetic oligonucleotide
  Target: ATXN2; (-) strand; PAM type: NRG; PAM sequence: CAG
atggacggatcacttgaggc

SEQ ID NO: 17859 - DNA, 20 bp, Artificial Sequence
  Description of Artificial Sequence: Synthetic oligonucleotide
  Target: ATXN2; (-) strand; PAM type: NRG; PAM sequence: AGG
cgagatggacggatcacttg

SEQ ID NO: 17860 - DNA, 20 bp, Artificial Sequence
  Description of Artificial Sequence: Synthetic oligonucleotide
  Target: ATXN2; (-) strand; PAM type: NRG; PAM sequence: GAG
ccgagatggacggatcactt

SEQ ID NO: 17861 - DNA, 20 bp, Artificial Sequence
  Description of Artificial Sequence: Synthetic oligonucleotide
  Target: ATXN2; (-) strand; PAM type: NRG; PAM sequence: CGG
ctttgggaggccgagatgga

SEQ ID NO: 17862 - DNA, 20 bp, Artificial Sequence
  Description of Artificial Sequence: Synthetic oligonucleotide
  Target: ATXN2; (-) strand; PAM type: NRG; PAM sequence: TGG
aacactttgggaggccgaga

SEQ ID NO: 17863 - DNA, 20 bp, Artificial Sequence
  Description of Artificial Sequence: Synthetic oligonucleotide
  Target: ATXN2; (-) strand; PAM type: NRG; PAM sequence: GAG
tcccaacactttgggaggcc

SEQ ID NO: 17864 - DNA, 20 bp, Artificial Sequence
  Description of Artificial Sequence: Synthetic oligonucleotide
  Target: ATXN2; (-) strand; PAM type: NRG; PAM sequence: AGG
tgtaatcccaacactttggg

SEQ ID NO: 17865 - DNA, 20 bp, Artificial Sequence
  Description of Artificial Sequence: Synthetic oligonucleotide
  Target: ATXN2; (-) strand; PAM type: NRG; PAM sequence: GAG
ctgtaatcccaacactttgg

SEQ ID NO: 17866 - DNA, 20 bp, Artificial Sequence
  Description of Artificial Sequence: Synthetic oligonucleotide
  Target: ATXN2; (-) strand; PAM type: NRG; PAM sequence: GGG
acctgtaatcccaacacttt

SEQ ID NO: 17867 - DNA, 20 bp, Artificial Sequence
  Description of Artificial Sequence: Synthetic oligonucleotide
  Target: ATXN2; (-) strand; PAM type: NRG; PAM sequence: TGG
cacctgtaatcccaacactt

SEQ ID NO: 17868 - DNA, 20 bp, Artificial Sequence
  Description of Artificial Sequence: Synthetic oligonucleotide
  Target: ATXN2; (-) strand; PAM type: NRG; PAM sequence: CAG
ataaatttttaggccgggtg

SEQ ID NO: 17869 - DNA, 20 bp, Artificial Sequence
  Description of Artificial Sequence: Synthetic oligonucleotide
  Target: ATXN2; (-) strand; PAM type: NRG; PAM sequence: GGG
caaaaataaatttttaggcc

SEQ ID NO: 17870 - DNA, 20 bp, Artificial Sequence
  Description of Artificial Sequence: Synthetic oligonucleotide
  Target: ATXN2; (-) strand; PAM type: NRG; PAM sequence: CGG
tcaaaaataaatttttaggc

SEQ ID NO: 17871 - DNA, 20 bp, Artificial Sequence
  Description of Artificial Sequence: Synthetic oligonucleotide
  Target: ATXN2; (-) strand; PAM type: NRG; PAM sequence: AGG
ttattcaaaaataaattttt

SEQ ID NO: 17872 - DNA, 20 bp, Artificial Sequence
  Description of Artificial Sequence: Synthetic oligonucleotide
  Target: ATXN2; (-) strand; PAM type: NRG; PAM sequence: TAG
attattcaaaaataaatttt

SEQ ID NO: 17873 - DNA, 20 bp, Artificial Sequence
  Description of Artificial Sequence: Synthetic oligonucleotide
  Target: ATXN2; (-) strand; PAM type: NRG; PAM sequence: TGG
attagctacttagctacatg

SEQ ID NO: 17874 - DNA, 20 bp, Artificial Sequence
  Description of Artificial Sequence: Synthetic oligonucleotide
  Target: ATXN2; (-) strand; PAM type: NRG; PAM sequence: TAG
tgtccaccgtattagctact

SEQ ID NO: 17875 - DNA, 20 bp, Artificial Sequence
  Description of Artificial Sequence: Synthetic oligonucleotide
  Target: ATXN2; (-) strand; PAM type: NRG; PAM sequence: TAG
aactgcactgtccaccgtat

SEQ ID NO: 17876 - DNA, 20 bp, Artificial Sequence
  Description of Artificial Sequence: Synthetic oligonucleotide
  Target: ATXN2; (-) strand; PAM type: NRG; PAM sequence: GAG
tccaccctgggcaacagagc

SEQ ID NO: 17877 - DNA, 20 bp, Artificial Sequence
  Description of Artificial Sequence: Synthetic oligonucleotide
  Target: ATXN2; (-) strand; PAM type: NRG; PAM sequence: GAG
gcactccaccctgggcaaca

SEQ ID NO: 17878 - DNA, 20 bp, Artificial Sequence
  Description of Artificial Sequence: Synthetic oligonucleotide
  Target: ATXN2; (-) strand; PAM type: NRG; PAM sequence: CAG
ctgcactccaccctgggcaa

SEQ ID NO: 17879 - DNA, 20 bp, Artificial Sequence
  Description of Artificial Sequence: Synthetic oligonucleotide
  Target: ATXN2; (-) strand; PAM type: NRG; PAM sequence: GGG
acgccactgcactccaccct

SEQ ID NO: 17880 - DNA, 20 bp, Artificial Sequence
  Description of Artificial Sequence: Synthetic oligonucleotide
  Target: ATXN2; (-) strand; PAM type: NRG; PAM sequence: TGG
cacgccactgcactccaccc

SEQ ID NO: 17881 - DNA, 20 bp, Artificial Sequence
  Description of Artificial Sequence: Synthetic oligonucleotide
  Target: ATXN2; (-) strand; PAM type: NRG; PAM sequence: GAG
cgggaggcagaggttgcggt

SEQ ID NO: 17882 - DNA, 20 bp, Artificial Sequence
  Description of Artificial Sequence: Synthetic oligonucleotide
  Target: ATXN2; (-) strand; PAM type: NRG; PAM sequence: CGG
aacccgggaggcagaggttg

SEQ ID NO: 17883 - DNA, 20 bp, Artificial Sequence
  Description of Artificial Sequence: Synthetic oligonucleotide
  Target: ATXN2; (-) strand; PAM type: NRG; PAM sequence: AGG
cgcttgaacccgggaggcag

SEQ ID NO: 17884 - DNA, 20 bp, Artificial Sequence
  Description of Artificial Sequence: Synthetic oligonucleotide
  Target: ATXN2; (-) strand; PAM type: NRG; PAM sequence: GAG
tcgcttgaacccgggaggca

SEQ ID NO: 17885 - DNA, 20 bp, Artificial Sequence
  Description of Artificial Sequence: Synthetic oligonucleotide
  Target: ATXN2; (-) strand; PAM type: NRG; PAM sequence: CAG
aatcgcttgaacccgggagg

SEQ ID NO: 17886 - DNA, 20 bp, Artificial Sequence
  Description of Artificial Sequence: Synthetic oligonucleotide
  Target: ATXN2; (-) strand; PAM type: NRG; PAM sequence: AGG
gagaatcgcttgaacccggg

SEQ ID NO: 17887 - DNA, 20 bp, Artificial Sequence
  Description of Artificial Sequence: Synthetic oligonucleotide
  Target: ATXN2; (-) strand; PAM type: NRG; PAM sequence: GAG
ggagaatcgcttgaacccgg

SEQ ID NO: 17888 - DNA, 20 bp, Artificial Sequence
  Description of Artificial Sequence: Synthetic oligonucleotide
  Target: ATXN2; (-) strand; PAM type: NRG; PAM sequence: GGG
caggagaatcgcttgaaccc

SEQ ID NO: 17889 - DNA, 20 bp, Artificial Sequence
  Description of Artificial Sequence: Synthetic oligonucleotide
  Target: ATXN2; (-) strand; PAM type: NRG; PAM sequence: CGG
acaggagaatcgcttgaacc

SEQ ID NO: 17890 - DNA, 20 bp, Artificial Sequence
  Description of Artificial Sequence: Synthetic oligonucleotide
  Target: ATXN2; (-) strand; PAM type: NRG; PAM sequence: GAG
tactcaggaggctgacacag

SEQ ID NO: 17891 - DNA, 20 bp, Artificial Sequence
  Description of Artificial Sequence: Synthetic oligonucleotide
  Target: ATXN2; (-) strand; PAM type: NRG; PAM sequence: AGG
gctactcaggaggctgacac

SEQ ID NO: 17892 - DNA, 20 bp, Artificial Sequence
  Description of Artificial Sequence: Synthetic oligonucleotide
  Target: ATXN2; (-) strand; PAM type: NRG; PAM sequence: CAG
agctactcaggaggctgaca

SEQ ID NO: 17893 - DNA, 20 bp, Artificial Sequence
  Description of Artificial Sequence: Synthetic oligonucleotide
  Target: ATXN2; (-) strand; PAM type: NRG; PAM sequence: AGG
tgtagtcctagctactcagg

SEQ ID NO: 17894 - DNA, 20 bp, Artificial Sequence
  Description of Artificial Sequence: Synthetic oligonucleotide
  Target: ATXN2; (-) strand; PAM type: NRG; PAM sequence: GAG
ctgtagtcctagctactcag

SEQ ID NO: 17895 - DNA, 20 bp, Artificial Sequence
  Description of Artificial Sequence: Synthetic oligonucleotide
  Target: ATXN2; (-) strand; PAM type: NRG; PAM sequence: AGG
gcctgtagtcctagctactc

SEQ ID NO: 17896 - DNA, 20 bp, Artificial Sequence
  Description of Artificial Sequence: Synthetic oligonucleotide
  Target: ATXN2; (-) strand; PAM type: NRG; PAM sequence: CAG
cgcctgtagtcctagctact

SEQ ID NO: 17897 - DNA, 20 bp, Artificial Sequence
  Description of Artificial Sequence: Synthetic oligonucleotide
  Target: ATXN2; (-) strand; PAM type: NRG; PAM sequence: TAG
gccaggcgcgcctgtagtcc

SEQ ID NO: 17898 - DNA, 20 bp, Artificial Sequence
  Description of Artificial Sequence: Synthetic oligonucleotide
  Target: ATXN2; (-) strand; PAM type: NRG; PAM sequence: TAG
aagttagccaggcgcgcctg

SEQ ID NO: 17899 - DNA, 20 bp, Artificial Sequence
  Description of Artificial Sequence: Synthetic oligonucleotide
  Target: ATXN2; (-) strand; PAM type: NRG; PAM sequence: AGG
aaaatacaaaaaagttagcc

SEQ ID NO: 17900 - DNA, 20 bp, Artificial Sequence
  Description of Artificial Sequence: Synthetic oligonucleotide
  Target: ATXN2; (-) strand; PAM type: NRG; PAM sequence: CAG
aaaaatacaaaaaagttagc

SEQ ID NO: 17901 - DNA, 20 bp, Artificial Sequence
  Description of Artificial Sequence: Synthetic oligonucleotide
  Target: ATXN2; (-) strand; PAM type: NRG; PAM sequence: TAG
tactaaaaatacaaaaaagt

SEQ ID NO: 17902 - DNA, 20 bp, Artificial Sequence
  Description of Artificial Sequence: Synthetic oligonucleotide
  Target: ATXN2; (-) strand; PAM type: NRG; PAM sequence: AAG
tctctactaaaaatacaaaa

SEQ ID NO: 17903 - DNA, 20 bp, Artificial Sequence
  Description of Artificial Sequence: Synthetic oligonucleotide
  Target: ATXN2; (-) strand; PAM type: NRG; PAM sequence: TGG
caagaccagccagaccaaca

SEQ ID NO: 17904 - DNA, 20 bp, Artificial Sequence
  Description of Artificial Sequence: Synthetic oligonucleotide
  Target: ATXN2; (-) strand; PAM type: NRG; PAM sequence: CAG
gtcaggagttcaagaccagc

SEQ ID NO: 17905 - DNA, 20 bp, Artificial Sequence
  Description of Artificial Sequence: Synthetic oligonucleotide
  Target: ATXN2; (-) strand; PAM type: NRG; PAM sequence: CAG
tgaggtcaggagttcaagac

SEQ ID NO: 17906 - DNA, 20 bp, Artificial Sequence
  Description of Artificial Sequence: Synthetic oligonucleotide
  Target: ATXN2; (-) strand; PAM type: NRG; PAM sequence: AAG
tcacctgaggtcaggagttc

SEQ ID NO: 17907 - DNA, 20 bp, Artificial Sequence
  Description of Artificial Sequence: Synthetic oligonucleotide
  Target: ATXN2; (-) strand; PAM type: NRG; PAM sequence: GAG
agtggatcacctgaggtcag

SEQ ID NO: 17908 - DNA, 20 bp, Artificial Sequence
  Description of Artificial Sequence: Synthetic oligonucleotide
  Target: ATXN2; (-) strand; PAM type: NRG; PAM sequence: AGG
caagtggatcacctgaggtc

SEQ ID NO: 17909 - DNA, 20 bp, Artificial Sequence
  Description of Artificial Sequence: Synthetic oligonucleotide
  Target: ATXN2; (-) strand; PAM type: NRG; PAM sequence: CAG
acaagtggatcacctgaggt

SEQ ID NO: 17910 - DNA, 20 bp, Artificial Sequence
  Description of Artificial Sequence: Synthetic oligonucleotide
  Target: ATXN2; (-) strand; PAM type: NRG; PAM sequence: AGG
caagacaagtggatcacctg

SEQ ID NO: 17911 - DNA, 20 bp, Artificial Sequence
  Description of Artificial Sequence: Synthetic oligonucleotide
  Target: ATXN2; (-) strand; PAM type: NRG; PAM sequence: GAG
ccaagacaagtggatcacct

SEQ ID NO: 17912 - DNA, 20 bp, Artificial Sequence
  Description of Artificial Sequence: Synthetic oligonucleotide
  Target: ATXN2; (-) strand; PAM type: NRG; PAM sequence: TGG
ctttgggaggccaagacaag

SEQ ID NO: 17913 - DNA, 20 bp, Artificial Sequence
  Description of Artificial Sequence: Synthetic oligonucleotide
  Target: ATXN2; (-) strand; PAM type: NRG; PAM sequence: AAG
gcactttgggaggccaagac

SEQ ID NO: 17914 - DNA, 20 bp, Artificial Sequence
  Description of Artificial Sequence: Synthetic oligonucleotide
  Target: ATXN2; (-) strand; PAM type: NRG; PAM sequence: AAG
tcccagcactttgggaggcc

SEQ ID NO: 17915 - DNA, 20 bp, Artificial Sequence
  Description of Artificial Sequence: Synthetic oligonucleotide
  Target: ATXN2; (-) strand; PAM type: NRG; PAM sequence: AGG
tgtagtcccagcactttggg

SEQ ID NO: 17916 - DNA, 20 bp, Artificial Sequence
  Description of Artificial Sequence: Synthetic oligonucleotide
  Target: ATXN2; (-) strand; PAM type: NRG; PAM sequence: GAG
ctgtagtcccagcactttgg

SEQ ID NO: 17917 - DNA, 20 bp, Artificial Sequence
  Description of Artificial Sequence: Synthetic oligonucleotide
  Target: ATXN2; (-) strand; PAM type: NRG; PAM sequence: GGG
gcctgtagtcccagcacttt

SEQ ID NO: 17918 - DNA, 20 bp, Artificial Sequence
  Description of Artificial Sequence: Synthetic oligonucleotide
  Target: ATXN2; (-) strand; PAM type: NRG; PAM sequence: TGG
cgcctgtagtcccagcactt

SEQ ID NO: 17919 - DNA, 20 bp, Artificial Sequence
  Description of Artificial Sequence: Synthetic oligonucleotide
  Target: ATXN2; (-) strand; PAM type: NRG; PAM sequence: CAG
gtggctcacgcctgtagtcc

SEQ ID NO: 17920 - DNA, 20 bp, Artificial Sequence
  Description of Artificial Sequence: Synthetic oligonucleotide
  Target: ATXN2; (-) strand; PAM type: NRG; PAM sequence: TAG
ggcgcggtggctcacgcctg

SEQ ID NO: 17921 - DNA, 20 bp, Artificial Sequence
  Description of Artificial Sequence: Synthetic oligonucleotide
  Target: ATXN2; (-) strand; PAM type: NRG; PAM sequence: TGG
cattttgtggctgggcgcgg

SEQ ID NO: 17922 - DNA, 20 bp, Artificial Sequence
  Description of Artificial Sequence: Synthetic oligonucleotide
  Target: ATXN2; (-) strand; PAM type: NRG; PAM sequence: CGG
gaacattttgtggctgggcg

SEQ ID NO: 17923 - DNA, 20 bp, Artificial Sequence
  Description of Artificial Sequence: Synthetic oligonucleotide
  Target: ATXN2; (-) strand; PAM type: NRG; PAM sequence: GGG
cagtagaacattttgtggct

SEQ ID NO: 17924 - DNA, 20 bp, Artificial Sequence
  Description of Artificial Sequence: Synthetic oligonucleotide
  Target: ATXN2; (-) strand; PAM type: NRG; PAM sequence: TGG
ccagtagaacattttgtggc

SEQ ID NO: 17925 - DNA, 20 bp, Artificial Sequence
  Description of Artificial Sequence: Synthetic oligonucleotide
  Target: ATXN2; (-) strand; PAM type: NRG; PAM sequence: TGG
ctatccagtagaacattttg

SEQ ID NO: 17926 - DNA, 20 bp, Artificial Sequence
  Description of Artificial Sequence: Synthetic oligonucleotide
  Target: ATXN2; (-) strand; PAM type: NRG; PAM sequence: TAG
ctgtagacatcactatccag

SEQ ID NO: 17927 - DNA, 20 bp, Artificial Sequence
  Description of Artificial Sequence: Synthetic oligonucleotide
  Target: ATXN2; (-) strand; PAM type: NRG; PAM sequence: CAG
caactgtagacatcactatc

SEQ ID NO: 17928 - DNA, 20 bp, Artificial Sequence
  Description of Artificial Sequence: Synthetic oligonucleotide
  Target: ATXN2; (-) strand; PAM type: NRG; PAM sequence: TAG
taggggaccatggacaactg

SEQ ID NO: 17929 - DNA, 20 bp, Artificial Sequence
  Description of Artificial Sequence: Synthetic oligonucleotide
  Target: ATXN2; (-) strand; PAM type: NRG; PAM sequence: TGG
ggtttaacagtaggggacca

SEQ ID NO: 17930 - DNA, 20 bp, Artificial Sequence
  Description of Artificial Sequence: Synthetic oligonucleotide
  Target: ATXN2; (-) strand; PAM type: NRG; PAM sequence: GGG
tgctaatggtttaacagtag

SEQ ID NO: 17931 - DNA, 20 bp, Artificial Sequence
  Description of Artificial Sequence: Synthetic oligonucleotide
  Target: ATXN2; (-) strand; PAM type: NRG; PAM sequence: GGG
gtgctaatggtttaacagta

SEQ ID NO: 17932 - DNA, 20 bp, Artificial Sequence
  Description of Artificial Sequence: Synthetic oligonucleotide
  Target: ATXN2; (-) strand; PAM type: NRG; PAM sequence: AGG
agtgctaatggtttaacagt

SEQ ID NO: 17933 - DNA, 20 bp, Artificial Sequence
  Description of Artificial Sequence: Synthetic oligonucleotide
  Target: ATXN2; (-) strand; PAM type: NRG; PAM sequence: TAG
tagtgctaatggtttaacag

SEQ ID NO: 17934 - DNA, 20 bp, Artificial Sequence
  Description of Artificial Sequence: Synthetic oligonucleotide
  Target: ATXN2; (-) strand; PAM type: NRG; PAM sequence: CAG
ggttagtgctaatggtttaa

SEQ ID NO: 17935 - DNA, 20 bp, Artificial Sequence
  Description of Artificial Sequence: Synthetic oligonucleotide
  Target: ATXN2; (-) strand; PAM type: NRG; PAM sequence: TGG
gcggtaggggttagtgctaa

SEQ ID NO: 17936 - DNA, 20 bp, Artificial Sequence
  Description of Artificial Sequence: Synthetic oligonucleotide
  Target: ATXN2; (-) strand; PAM type: NRG; PAM sequence: TAG
gctggggtggcggtaggggt

SEQ ID NO: 17937 - DNA, 20 bp, Artificial Sequence
  Description of Artificial Sequence: Synthetic oligonucleotide
  Target: ATXN2; (-) strand; PAM type: NRG; PAM sequence: GGG
agaggctggggtggcggtag

SEQ ID NO: 17938 - DNA, 20 bp, Artificial Sequence
  Description of Artificial Sequence: Synthetic oligonucleotide
  Target: ATXN2; (-) strand; PAM type: NRG; PAM sequence: GGG
aagaggctggggtggcggta

SEQ ID NO: 17939 - DNA, 20 bp, Artificial Sequence
  Description of Artificial Sequence: Synthetic oligonucleotide
  Target: ATXN2; (-) strand; PAM type: NRG; PAM sequence: AGG
taagaggctggggtggcggt

SEQ ID NO: 17940 - DNA, 20 bp, Artificial Sequence
  Description of Artificial Sequence: Synthetic oligonucleotide
  Target: ATXN2; (-) strand; PAM type: NRG; PAM sequence: TAG
ttaagaggctggggtggcgg

SEQ ID NO: 17941 - DNA, 20 bp, Artificial Sequence
  Description of Artificial Sequence: Synthetic oligonucleotide
  Target: ATXN2; (-) strand; PAM type: NRG; PAM sequence: CGG
tttttaagaggctggggtgg

SEQ ID NO: 17942 - DNA, 20 bp, Artificial Sequence
  Description of Artificial Sequence: Synthetic oligonucleotide
  Target: ATXN2; (-) strand; PAM type: NRG; PAM sequence: TGG
acatttttaagaggctgggg

SEQ ID NO: 17943 - DNA, 20 bp, Artificial Sequence
  Description of Artificial Sequence: Synthetic oligonucleotide
  Target: ATXN2; (-) strand; PAM type: NRG; PAM sequence: GGG
atgacatttttaagaggctg

SEQ ID NO: 17944 - DNA, 20 bp, Artificial Sequence
  Description of Artificial Sequence: Synthetic oligonucleotide
  Target: ATXN2; (-) strand; PAM type: NRG; PAM sequence: GGG
aatgacatttttaagaggct

SEQ ID NO: 17945 - DNA, 20 bp, Artificial Sequence
  Description of Artificial Sequence: Synthetic oligonucleotide
  Target: ATXN2; (-) strand; PAM type: NRG; PAM sequence: TGG
aaatgacatttttaagaggc

SEQ ID NO: 17946 - DNA, 20 bp, Artificial Sequence
  Description of Artificial Sequence: Synthetic oligonucleotide
  Target: ATXN2; (-) strand; PAM type: NRG; PAM sequence: AGG
ttacaaatgacatttttaag

SEQ ID NO: 17947 - DNA, 20 bp, Artificial Sequence
  Description of Artificial Sequence: Synthetic oligonucleotide
  Target: ATXN2; (-) strand; PAM type: NRG; PAM sequence: GAG
gttacaaatgacatttttaa

SEQ ID NO: 17948 - DNA, 20 bp, Artificial Sequence
  Description of Artificial Sequence: Synthetic oligonucleotide
  Target: ATXN2; (-) strand; PAM type: NRG; PAM sequence: AAG
ttgttacaaatgacattttt

SEQ ID NO: 17949 - DNA, 20 bp, Artificial Sequence
  Description of Artificial Sequence: Synthetic oligonucleotide
  Target: ATXN2; (-) strand; PAM type: NRG; PAM sequence: TAG
tgcttttccttagacagatt

SEQ ID NO: 17950 - DNA, 20 bp, Artificial Sequence
  Description of Artificial Sequence: Synthetic oligonucleotide
  Target: ATXN2; (-) strand; PAM type: NRG; PAM sequence: CAG
gggaattgcttttccttaga

SEQ ID NO: 17951 - DNA, 20 bp, Artificial Sequence
  Description of Artificial Sequence: Synthetic oligonucleotide
  Target: ATXN2; (-) strand; PAM type: NRG; PAM sequence: TAG
atttgggaattgcttttcct

SEQ ID NO: 17952 - DNA, 20 bp, Artificial Sequence
  Description of Artificial Sequence: Synthetic oligonucleotide
  Target: ATXN2; (-) strand; PAM type: NRG; PAM sequence: GGG
atgaacagaatttgggattt

SEQ ID NO: 17953 - DNA, 20 bp, Artificial Sequence
  Description of Artificial Sequence: Synthetic oligonucleotide
  Target: ATXN2; (-) strand; PAM type: NRG; PAM sequence: TGG
catgaacagaatttgggatt

SEQ ID NO: 17954 - DNA, 20 bp, Artificial Sequence
  Description of Artificial Sequence: Synthetic oligonucleotide
  Target: ATXN2; (-) strand; PAM type: NRG; PAM sequence: GGG
aacctccatgaacagaattt

SEQ ID NO: 17955 - DNA, 20 bp, Artificial Sequence
  Description of Artificial Sequence: Synthetic oligonucleotide
  Target: ATXN2; (-) strand; PAM type: NRG; PAM sequence: TGG
gaacctccatgaacagaatt

SEQ ID NO: 17956 - DNA, 20 bp, Artificial Sequence
  Description of Artificial Sequence: Synthetic oligonucleotide
  Target: ATXN2; (-) strand; PAM type: NRG; PAM sequence: CAG
tctttatgaacctccatgaa

SEQ ID NO: 17957 - DNA, 20 bp, Artificial Sequence
  Description of Artificial Sequence: Synthetic oligonucleotide
  Target: ATXN2; (-) strand; PAM type: NRG; PAM sequence: GAG
aaaaaaaaacaaaaacctct

SEQ ID NO: 17958 - DNA, 20 bp, Artificial Sequence
  Description of Artificial Sequence: Synthetic oligonucleotide
  Target: ATXN2; (-) strand; PAM type: NRG; PAM sequence: AAG
caaaatttcttgaataaata

SEQ ID NO: 17959 - DNA, 20 bp, Artificial Sequence
  Description of Artificial Sequence: Synthetic oligonucleotide
  Target: ATXN2; (-) strand; PAM type: NRG; PAM sequence: TAG
aagtgaaatttcaaactttt

SEQ ID NO: 17960 - DNA, 20 bp, Artificial Sequence
  Description of Artificial Sequence: Synthetic oligonucleotide
  Target: ATXN2; (-) strand; PAM type: NRG; PAM sequence: AAG
tttgcttagaaggtatttaa

SEQ ID NO: 17961 - DNA, 20 bp, Artificial Sequence
  Description of Artificial Sequence: Synthetic oligonucleotide
  Target: ATXN2; (-) strand; PAM type: NRG; PAM sequence: AGG
ttcttaatactttgcttaga

SEQ ID NO: 17962 - DNA, 20 bp, Artificial Sequence
  Description of Artificial Sequence: Synthetic oligonucleotide
  Target: ATXN2; (-) strand; PAM type: NRG; PAM sequence: AAG
attcttaatactttgcttag

SEQ ID NO: 17963 - DNA, 20 bp, Artificial Sequence
  Description of Artificial Sequence: Synthetic oligonucleotide
  Target: ATXN2; (-) strand; PAM type: NRG; PAM sequence: TAG
aatattcttaatactttgct

SEQ ID NO: 17964 - DNA, 20 bp, Artificial Sequence
  Description of Artificial Sequence: Synthetic oligonucleotide
  Target: ATXN2; (-) strand; PAM type: NRG; PAM sequence: GGG
cttaaattatgagatttcat

SEQ ID NO: 17965 - DNA, 20 bp, Artificial Sequence
  Description of Artificial Sequence: Synthetic oligonucleotide
  Target: ATXN2; (-) strand; PAM type: NRG; PAM sequence: TGG
acttaaattatgagatttca

SEQ ID NO: 17966 - DNA, 20 bp, Artificial Sequence
  Description of Artificial Sequence: Synthetic oligonucleotide
  Target: ATXN2; (-) strand; PAM type: NRG; PAM sequence: GAG
tgatgaataacttaaattat

SEQ ID NO: 17967 - DNA, 20 bp, Artificial Sequence
  Description of Artificial Sequence: Synthetic oligonucleotide
  Target: ATXN2; (-) strand; PAM type: NRG; PAM sequence: CAG
ttaagatttttacatttttc

SEQ ID NO: 17968 - DNA, 20 bp, Artificial Sequence
  Description of Artificial Sequence: Synthetic oligonucleotide
  Target: ATXN2; (-) strand; PAM type: NRG; PAM sequence: AAG
ttttctcttcaaatgatttt

SEQ ID NO: 17969 - DNA, 20 bp, Artificial Sequence
  Description of Artificial Sequence: Synthetic oligonucleotide
  Target: ATXN2; (-) strand; PAM type: NRG; PAM sequence: TAG
agatgccttttaaaaatgca

SEQ ID NO: 17970 - DNA, 20 bp, Artificial Sequence
  Description of Artificial Sequence: Synthetic oligonucleotide
  Target: ATXN2; (-) strand; PAM type: NRG; PAM sequence: GAG
actggtaaacttaaattgca

SEQ ID NO: 17971 - DNA, 20 bp, Artificial Sequence
  Description of Artificial Sequence: Synthetic oligonucleotide
  Target: ATXN2; (-) strand; PAM type: NRG; PAM sequence: CAG
atactggtaaacttaaattg

SEQ ID NO: 17972 - DNA, 20 bp, Artificial Sequence
  Description of Artificial Sequence: Synthetic oligonucleotide
  Target: ATXN2; (-) strand; PAM type: NRG; PAM sequence: TGG
gtattatagtctttaaatac

SEQ ID NO: 17973 - DNA, 20 bp, Artificial Sequence
  Description of Artificial Sequence: Synthetic oligonucleotide
  Target: ATXN2; (-) strand; PAM type: NRG; PAM sequence: TAG
tagattagaaaaccgtatta

SEQ ID NO: 17974 - DNA, 20 bp, Artificial Sequence
  Description of Artificial Sequence: Synthetic oligonucleotide
  Target: ATXN2; (-) strand; PAM type: NRG; PAM sequence: TAG
catgcaaattagctatagat

SEQ ID NO: 17975 - DNA, 20 bp, Artificial Sequence
  Description of Artificial Sequence: Synthetic oligonucleotide
  Target: ATXN2; (-) strand; PAM type: NRG; PAM sequence: TAG
ctatgcatgcaaattagcta

SEQ ID NO: 17976 - DNA, 20 bp, Artificial Sequence
  Description of Artificial Sequence: Synthetic oligonucleotide
  Target: ATXN2; (-) strand; PAM type: NRG; PAM sequence: TAG
tttgtgctatgcatgcaaat

SEQ ID NO: 17977 - DNA, 20 bp, Artificial Sequence
  Description of Artificial Sequence: Synthetic oligonucleotide
  Target: ATXN2; (-) strand; PAM type: NRG; PAM sequence: GGG
tatgtacattcactcagctt

SEQ ID NO: 17978 - DNA, 20 bp, Artificial Sequence
  Description of Artificial Sequence: Synthetic oligonucleotide
  Target: ATXN2; (-) strand; PAM type: NRG; PAM sequence: TGG
ctatgtacattcactcagct

SEQ ID NO: 17979 - DNA, 20 bp, Artificial Sequence
  Description of Artificial Sequence: Synthetic oligonucleotide
  Target: ATXN2; (-) strand; PAM type: NRG; PAM sequence: CAG
aaagcctatgtacattcact

SEQ ID NO: 17980 - DNA, 20 bp, Artificial Sequence
  Description of Artificial Sequence: Synthetic oligonucleotide
  Target: ATXN2; (-) strand; PAM type: NRG; PAM sequence: AAG
tgtttttgtttttttaaaca

SEQ ID NO: 17981 - DNA, 20 bp, Artificial Sequence
  Description of Artificial Sequence: Synthetic oligonucleotide
  Target: ATXN2; (-) strand; PAM type: NRG; PAM sequence: AGG
accggtatttaggtagggaa

SEQ ID NO: 17982 - DNA, 20 bp, Artificial Sequence
  Description of Artificial Sequence: Synthetic oligonucleotide
  Target: ATXN2; (-) strand; PAM type: NRG; PAM sequence: AAG
taccggtatttaggtaggga

SEQ ID NO: 17983 - DNA, 20 bp, Artificial Sequence
  Description of Artificial Sequence: Synthetic oligonucleotide
  Target: ATXN2; (-) strand; PAM type: NRG; PAM sequence: GGG
agtttaccggtatttaggta

SEQ ID NO: 17984 - DNA, 20 bp, Artificial Sequence
  Description of Artificial Sequence: Synthetic oligonucleotide
  Target: ATXN2; (-) strand; PAM type: NRG; PAM sequence: AGG
aagtttaccggtatttaggt

SEQ ID NO: 17985 - DNA, 20 bp, Artificial Sequence
  Description of Artificial Sequence: Synthetic oligonucleotide
  Target: ATXN2; (-) strand; PAM type: NRG; PAM sequence: TAG
caagtttaccggtatttagg

SEQ ID NO: 17986 - DNA, 20 bp, Artificial Sequence
  Description of Artificial Sequence: Synthetic oligonucleotide
  Target: ATXN2; (-) strand; PAM type: NRG; PAM sequence: AGG
ttgcaagtttaccggtattt

SEQ ID NO: 17987 - DNA, 20 bp, Artificial Sequence
  Description of Artificial Sequence: Synthetic oligonucleotide
  Target: ATXN2; (-) strand; PAM type: NRG; PAM sequence: TAG
cttgcaagtttaccggtatt

SEQ ID NO: 17988 - DNA, 20 bp, Artificial Sequence
  Description of Artificial Sequence: Synthetic oligonucleotide
  Target: ATXN2; (-) strand; PAM type: NRG; PAM sequence: CGG
tcaatgccttgcaagtttac

SEQ ID NO: 17989 - DNA, 20 bp, Artificial Sequence
  Description of Artificial Sequence: Synthetic oligonucleotide
  Target: ATXN2; (-) strand; PAM type: NRG; PAM sequence: AAG
gtttttaatcaatgccttgc

SEQ ID NO: 17990 - DNA, 20 bp, Artificial Sequence
  Description of Artificial Sequence: Synthetic oligonucleotide
  Target: ATXN2; (-) strand; PAM type: NRG; PAM sequence: TGG
catattttacacatcctttg

SEQ ID NO: 17991 - DNA, 20 bp, Artificial Sequence
  Description of Artificial Sequence: Synthetic oligonucleotide
  Target: ATXN2; (-) strand; PAM type: NRG; PAM sequence: GGG
agctagaacaaaaaaacaaa

SEQ ID NO: 17992 - DNA, 20 bp, Artificial Sequence
  Description of Artificial Sequence: Synthetic oligonucleotide
  Target: ATXN2; (-) strand; PAM type: NRG; PAM sequence: AGG
gagctagaacaaaaaaacaa

SEQ ID NO: 17993 - DNA, 20 bp, Artificial Sequence
  Description of Artificial Sequence: Synthetic oligonucleotide
  Target: ATXN2; (-) strand; PAM type: NRG; PAM sequence: AAG
tgagctagaacaaaaaaaca

SEQ ID NO: 17994 - DNA, 20 bp, Artificial Sequence
  Description of Artificial Sequence: Synthetic oligonucleotide
  Target: ATXN2; (-) strand; PAM type: NRG; PAM sequence: TAG
ttctttcagatcttttgagc

SEQ ID NO: 17995 - DNA, 20 bp, Artificial Sequence
  Description of Artificial Sequence: Synthetic oligonucleotide
  Target: ATXN2; (-) strand; PAM type: NRG; PAM sequence: GAG
gtacttctttcagatctttt

SEQ ID NO: 17996 - DNA, 20 bp, Artificial Sequence
  Description of Artificial Sequence: Synthetic oligonucleotide
  Target: ATXN2; (-) strand; PAM type: NRG; PAM sequence: CAG
cctgattaaggtacttcttt

SEQ ID NO: 17997 - DNA, 20 bp, Artificial Sequence
  Description of Artificial Sequence: Synthetic oligonucleotide
  Target: ATXN2; (-) strand; PAM type: NRG; PAM sequence: AGG
aggaaaagaattcctgatta

SEQ ID NO: 17998 - DNA, 20 bp, Artificial Sequence
  Description of Artificial Sequence: Synthetic oligonucleotide
  Target: ATXN2; (-) strand; PAM type: NRG; PAM sequence: AAG
gaggaaaagaattcctgatt

SEQ ID NO: 17999 - DNA, 20 bp, Artificial Sequence
  Description of Artificial Sequence: Synthetic oligonucleotide
  Target: ATXN2; (-) strand; PAM type: NRG; PAM sequence: AAG
atttcaaattcaaggaggaa

SEQ ID NO: 18000 - DNA, 20 bp, Artificial Sequence
  Description of Artificial Sequence: Synthetic oligonucleotide
  Target: ATXN2; (-) strand; PAM type: NRG; PAM sequence: AGG
tcccaatttcaaattcaagg

SEQ ID NO: 18001 - DNA, 20 bp, Artificial Sequence
  Description of Artificial Sequence: Synthetic oligonucleotide
  Target: ATXN2; (-) strand; PAM type: NRG; PAM sequence: GAG
ctcccaatttcaaattcaag

SEQ ID NO: 18002 - DNA, 20 bp, Artificial Sequence
  Description of Artificial Sequence: Synthetic oligonucleotide
  Target: ATXN2; (-) strand; PAM type: NRG; PAM sequence: AGG
ttctcccaatttcaaattca

SEQ ID NO: 18003 - DNA, 20 bp, Artificial Sequence
  Description of Artificial Sequence: Synthetic oligonucleotide
  Target: ATXN2; (-) strand; PAM type: NRG; PAM sequence: AAG
tttctcccaatttcaaattc

SEQ ID NO: 18004 - DNA, 20 bp, Artificial Sequence
  Description of Artificial Sequence: Synthetic oligonucleotide
  Target: ATXN2; (-) strand; PAM type: NRG; PAM sequence: CGG
caagcgtgagccaccgtgcc

SEQ ID NO: 18005 - DNA, 20 bp, Artificial Sequence
  Description of Artificial Sequence: Synthetic oligonucleotide
  Target: ATXN2; (-) strand; PAM type: NRG; PAM sequence: GAG
aatgctgggattacaagcgt

SEQ ID NO: 18006 - DNA, 20 bp, Artificial Sequence
  Description of Artificial Sequence: Synthetic oligonucleotide
  Target: ATXN2; (-) strand; PAM type: NRG; PAM sequence: AAG
tcccaaaatgctgggattac

SEQ ID NO: 18007 - DNA, 20 bp, Artificial Sequence
  Description of Artificial Sequence: Synthetic oligonucleotide
  Target: ATXN2; (-) strand; PAM type: NRG; PAM sequence: GGG
cctcggcctcccaaaatgct

SEQ ID NO: 18008 - DNA, 20 bp, Artificial Sequence
  Description of Artificial Sequence: Synthetic oligonucleotide
  Target: ATXN2; (-) strand; PAM type: NRG; PAM sequence: TGG
gcctcggcctcccaaaatgc

SEQ ID NO: 18009 - DNA, 20 bp, Artificial Sequence
  Description of Artificial Sequence: Synthetic oligonucleotide
  Target: ATXN2; (-) strand; PAM type: NRG; PAM sequence: CGG
ctcaggtgatccgcccgcct

SEQ ID NO: 18010 - DNA, 20 bp, Artificial Sequence
  Description of Artificial Sequence: Synthetic oligonucleotide
  Target: ATXN2; (-) strand; PAM type: NRG; PAM sequence: AGG
ggtctcgaactcctaacctc

SEQ ID NO: 18011 - DNA, 20 bp, Artificial Sequence
  Description of Artificial Sequence: Synthetic oligonucleotide
  Target: ATXN2; (-) strand; PAM type: NRG; PAM sequence: CAG
tggtctcgaactcctaacct

SEQ ID NO: 18012 - DNA, 20 bp, Artificial Sequence
  Description of Artificial Sequence: Synthetic oligonucleotide
  Target: ATXN2; (-) strand; PAM type: NRG; PAM sequence: TGG
tttcgccgtgttggccaagc

SEQ ID NO: 18013 - DNA, 20 bp, Artificial Sequence
  Description of Artificial Sequence: Synthetic oligonucleotide
  Target: ATXN2; (-) strand; PAM type: NRG; PAM sequence: AAG
agggtttcgccgtgttggcc

SEQ ID NO: 18014 - DNA, 20 bp, Artificial Sequence
  Description of Artificial Sequence: Synthetic oligonucleotide
  Target: ATXN2; (-) strand; PAM type: NRG; PAM sequence: TGG
gagacagggtttcgccgtgt

SEQ ID NO: 18015 - DNA, 20 bp, Artificial Sequence
  Description of Artificial Sequence: Synthetic oligonucleotide
  Target: ATXN2; (-) strand; PAM type: NRG; PAM sequence: GGG
ttgtatttttagtagagaca

SEQ ID NO: 18016 - DNA, 20 bp, Artificial Sequence
  Description of Artificial Sequence: Synthetic oligonucleotide
  Target: ATXN2; (-) strand; PAM type: NRG; PAM sequence: AGG
tttgtatttttagtagagac

SEQ ID NO: 18017 - DNA, 20 bp, Artificial Sequence
  Description of Artificial Sequence: Synthetic oligonucleotide
  Target: ATXN2; (-) strand; PAM type: NRG; PAM sequence: CAG
ttttgtatttttagtagaga

SEQ ID NO: 18018 - DNA, 20 bp, Artificial Sequence
  Description of Artificial Sequence: Synthetic oligonucleotide
  Target: ATXN2; (-) strand; PAM type: NRG; PAM sequence: GAG
taatttttgtatttttagta

SEQ ID NO: 18019 - DNA, 20 bp, Artificial Sequence
  Description of Artificial Sequence: Synthetic oligonucleotide
  Target: ATXN2; (-) strand; PAM type: NRG; PAM sequence: TAG
gctaatttttgtatttttag

SEQ ID NO: 18020 - DNA, 20 bp, Artificial Sequence
  Description of Artificial Sequence: Synthetic oligonucleotide
  Target: ATXN2; (-) strand; PAM type: NRG; PAM sequence: TAG
ccagctaatttttgtatttt

SEQ ID NO: 18021 - DNA, 20 bp, Artificial Sequence
  Description of Artificial Sequence: Synthetic oligonucleotide
  Target: ATXN2; (-) strand; PAM type: NRG; PAM sequence: CAG
caggtgcctgccaccacgcc

SEQ ID NO: 18022 - DNA, 20 bp, Artificial Sequence
  Description of Artificial Sequence: Synthetic oligonucleotide
  Target: ATXN2; (-) strand; PAM type: NRG; PAM sequence: AGG
tccctagtagctgtgattac

SEQ ID NO: 18023 - DNA, 20 bp, Artificial Sequence
  Description of Artificial Sequence: Synthetic oligonucleotide
  Target: ATXN2; (-) strand; PAM type: NRG; PAM sequence: CAG
ctccctagtagctgtgatta

SEQ ID NO: 18024 - DNA, 20 bp, Artificial Sequence
  Description of Artificial Sequence: Synthetic oligonucleotide
  Target: ATXN2; (-) strand; PAM type: NRG; PAM sequence: TAG
tccttccccactctccctag

SEQ ID NO: 18025 - DNA, 20 bp, Artificial Sequence
  Description of Artificial Sequence: Synthetic oligonucleotide
  Target: ATXN2; (-) strand; PAM type: NRG; PAM sequence: TAG
ttctccttccccactctccc

SEQ ID NO: 18026 - DNA, 20 bp, Artificial Sequence
  Description of Artificial Sequence: Synthetic oligonucleotide
  Target: ATXN2; (-) strand; PAM type: NRG; PAM sequence: AAG
aacctccacctcccgggttc

SEQ ID NO: 18027 - DNA, 20 bp, Artificial Sequence
  Description of Artificial Sequence: Synthetic oligonucleotide
  Target: ATXN2; (-) strand; PAM type: NRG; PAM sequence: GGG
cactgcaacctccacctccc

SEQ ID NO: 18028 - DNA, 20 bp, Artificial Sequence
  Description of Artificial Sequence: Synthetic oligonucleotide
  Target: ATXN2; (-) strand; PAM type: NRG; PAM sequence: CGG
tcactgcaacctccacctcc

SEQ ID NO: 18029 - DNA, 20 bp, Artificial Sequence
  Description of Artificial Sequence: Synthetic oligonucleotide
  Target: ATXN2; (-) strand; PAM type: NRG; PAM sequence: CGG
ggagtgcaatggtgtgatgt

SEQ ID NO: 18030 - DNA, 20 bp, Artificial Sequence
  Description of Artificial Sequence: Synthetic oligonucleotide
  Target: ATXN2; (-) strand; PAM type: NRG; PAM sequence: TGG
ttgcccaagctggagtgcaa

SEQ ID NO: 18031 - DNA, 20 bp, Artificial Sequence
  Description of Artificial Sequence: Synthetic oligonucleotide
  Target: ATXN2; (-) strand; PAM type: NRG; PAM sequence: GAG
cgctcttgttgcccaagctg

SEQ ID NO: 18032 - DNA, 20 bp, Artificial Sequence
  Description of Artificial Sequence: Synthetic oligonucleotide
  Target: ATXN2; (-) strand; PAM type: NRG; PAM sequence: TGG
ttcgctcttgttgcccaagc

SEQ ID NO: 18033 - DNA, 20 bp, Artificial Sequence
  Description of Artificial Sequence: Synthetic oligonucleotide
  Target: ATXN2; (-) strand; PAM type: NRG; PAM sequence: AAG
gagtttcgctcttgttgccc

SEQ ID NO: 18034 - DNA, 20 bp, Artificial Sequence
  Description of Artificial Sequence: Synthetic oligonucleotide
  Target: ATXN2; (-) strand; PAM type: NRG; PAM sequence: GAG
ttattttattttttgagacg

SEQ ID NO: 18035 - DNA, 20 bp, Artificial Sequence
  Description of Artificial Sequence: Synthetic oligonucleotide
  Target: ATXN2; (-) strand; PAM type: NRG; PAM sequence: CGG
gtttattttattttttgaga

SEQ ID NO: 18036 - DNA, 20 bp, Artificial Sequence
  Description of Artificial Sequence: Synthetic oligonucleotide
  Target: ATXN2; (-) strand; PAM type: NRG; PAM sequence: GAG
atttgtttattttatttttt

SEQ ID NO: 18037 - DNA, 20 bp, Artificial Sequence
  Description of Artificial Sequence: Synthetic oligonucleotide
  Target: ATXN2; (-) strand; PAM type: NRG; PAM sequence: AAG
ctagtattgatttaaagtat

SEQ ID NO: 18038 - DNA, 20 bp, Artificial Sequence
  Description of Artificial Sequence: Synthetic oligonucleotide
  Target: ATXN2; (-) strand; PAM type: NRG; PAM sequence: AAG
ttgttactagtattgattta

SEQ ID NO: 18039 - DNA, 20 bp, Artificial Sequence
  Description of Artificial Sequence: Synthetic oligonucleotide
  Target: ATXN2; (-) strand; PAM type: NRG; PAM sequence: TAG
ccgaactgtatttttgttac

SEQ ID NO: 18040 - DNA, 20 bp, Artificial Sequence
  Description of Artificial Sequence: Synthetic oligonucleotide
  Target: ATXN2; (-) strand; PAM type: NRG; PAM sequence: AGG
gtcacttaactggcctatca

SEQ ID NO: 18041 - DNA, 20 bp, Artificial Sequence
  Description of Artificial Sequence: Synthetic oligonucleotide
  Target: ATXN2; (-) strand; PAM type: NRG; PAM sequence: AAG
tgtcacttaactggcctatc

SEQ ID NO: 18042 - DNA, 20 bp, Artificial Sequence
  Description of Artificial Sequence: Synthetic oligonucleotide
  Target: ATXN2; (-) strand; PAM type: NRG; PAM sequence: TGG
ttgtgtcactgtcacttaac

SEQ ID NO: 18043 - DNA, 20 bp, Artificial Sequence
  Description of Artificial Sequence: Synthetic oligonucleotide
  Target: ATXN2; (-) strand; PAM type: NRG; PAM sequence: TGG
ttccaagctatttttttcct

SEQ ID NO: 18044 - DNA, 20 bp, Artificial Sequence
  Description of Artificial Sequence: Synthetic oligonucleotide
  Target: ATXN2; (-) strand; PAM type: NRG; PAM sequence: AAG
ttttgtctctcttgtcttcc

SEQ ID NO: 18045 - DNA, 20 bp, Artificial Sequence
  Description of Artificial Sequence: Synthetic oligonucleotide
  Target: ATXN2; (-) strand; PAM type: NRG; PAM sequence: TGG
tgatcacctacctcggcccc

SEQ ID NO: 18046 - DNA, 20 bp, Artificial Sequence
  Description of Artificial Sequence: Synthetic oligonucleotide
  Target: ATXN2; (-) strand; PAM type: NRG; PAM sequence: CGG
gacctcgtgatcacctacct

SEQ ID NO: 18047 - DNA, 20 bp, Artificial Sequence
  Description of Artificial Sequence: Synthetic oligonucleotide
  Target: ATXN2; (-) strand; PAM type: NRG; PAM sequence: TGG
tttcaccatcttggccaggc

SEQ ID NO: 18048 - DNA, 20 bp, Artificial Sequence
  Description of Artificial Sequence: Synthetic oligonucleotide
  Target: ATXN2; (-) strand; PAM type: NRG; PAM sequence: AGG
agggtttcaccatcttggcc

SEQ ID NO: 18049 - DNA, 20 bp, Artificial Sequence
  Description of Artificial Sequence: Synthetic oligonucleotide
  Target: ATXN2; (-) strand; PAM type: NRG; PAM sequence: CAG
cagggtttcaccatcttggc

SEQ ID NO: 18050 - DNA, 20 bp, Artificial Sequence
  Description of Artificial Sequence: Synthetic oligonucleotide
  Target: ATXN2; (-) strand; PAM type: NRG; PAM sequence: TGG
gagacagggtttcaccatct

SEQ ID NO: 18051 - DNA, 20 bp, Artificial Sequence
  Description of Artificial Sequence: Synthetic oligonucleotide
  Target: ATXN2; (-) strand; PAM type: NRG; PAM sequence: GGG
ttgtatttttagtagagaca

SEQ ID NO: 18052 - DNA, 20 bp, Artificial Sequence
  Description of Artificial Sequence: Synthetic oligonucleotide
  Target: ATXN2; (-) strand; PAM type: NRG; PAM sequence: AGG
tttgtatttttagtagagac

SEQ ID NO: 18053 - DNA, 20 bp, Artificial Sequence
  Description of Artificial Sequence: Synthetic oligonucleotide
  Target: ATXN2; (-) strand; PAM type: NRG; PAM sequence: CAG
ttttgtatttttagtagaga

SEQ ID NO: 18054 - DNA, 20 bp, Artificial Sequence
  Description of Artificial Sequence: Synthetic oligonucleotide
  Target: ATXN2; (-) strand; PAM type: NRG; PAM sequence: GAG
ttttttttgtatttttagta

SEQ ID NO: 18055 - DNA, 20 bp, Artificial Sequence
  Description of Artificial Sequence: Synthetic oligonucleotide
  Target: ATXN2; (-) strand; PAM type: NRG; PAM sequence: TAG
aattttttttgtatttttag

SEQ ID NO: 18056 - DNA, 20 bp, Artificial Sequence
  Description of Artificial Sequence: Synthetic oligonucleotide
  Target: ATXN2; (-) strand; PAM type: NRG; PAM sequence: TAG
gctaattttttttgtatttt

SEQ ID NO: 18057 - DNA, 20 bp, Artificial Sequence
  Description of Artificial Sequence: Synthetic oligonucleotide
  Target: ATXN2; (-) strand; PAM type: NRG; PAM sequence: CAG
caggcgcctgctgccacacc

SEQ ID NO: 18058 - DNA, 20 bp, Artificial Sequence
  Description of Artificial Sequence: Synthetic oligonucleotide
  Target: ATXN2; (-) strand; PAM type: NRG; PAM sequence: AGG
tccagagtagctgggattac

SEQ ID NO: 18059 - DNA, 20 bp, Artificial Sequence
  Description of Artificial Sequence: Synthetic oligonucleotide
  Target: ATXN2; (-) strand; PAM type: NRG; PAM sequence: CAG
ttccagagtagctgggatta

SEQ ID NO: 18060 - DNA, 20 bp, Artificial Sequence
  Description of Artificial Sequence: Synthetic oligonucleotide
  Target: ATXN2; (-) strand; PAM type: NRG; PAM sequence: GGG
cctcagcttccagagtagct

SEQ ID NO: 18061 - DNA, 20 bp, Artificial Sequence
  Description of Artificial Sequence: Synthetic oligonucleotide
  Target: ATXN2; (-) strand; PAM type: NRG; PAM sequence: TGG
gcctcagcttccagagtagc

SEQ ID NO: 18062 - DNA, 20 bp, Artificial Sequence
  Description of Artificial Sequence: Synthetic oligonucleotide
  Target: ATXN2; (-) strand; PAM type: NRG; PAM sequence: TAG
ctctgcctcagcttccagag

SEQ ID NO: 18063 - DNA, 20 bp, Artificial Sequence
  Description of Artificial Sequence: Synthetic oligonucleotide
  Target: ATXN2; (-) strand; PAM type: NRG; PAM sequence: GAG
attctctgcctcagcttcca

SEQ ID NO: 18064 - DNA, 20 bp, Artificial Sequence
  Description of Artificial Sequence: Synthetic oligonucleotide
  Target: ATXN2; (-) strand; PAM type: NRG; PAM sequence: CAG
caattctctgcctcagcttc

SEQ ID NO: 18065 - DNA, 20 bp, Artificial Sequence
  Description of Artificial Sequence: Synthetic oligonucleotide
  Target: ATXN2; (-) strand; PAM type: NRG; PAM sequence: CAG
gttcaagcaattctctgcct

SEQ ID NO: 18066 - DNA, 20 bp, Artificial Sequence
  Description of Artificial Sequence: Synthetic oligonucleotide
  Target: ATXN2; (-) strand; PAM type: NRG; PAM sequence: AAG
aacctccgcctcctaggttc

SEQ ID NO: 18067 - DNA, 20 bp, Artificial Sequence
  Description of Artificial Sequence: Synthetic oligonucleotide
  Target: ATXN2; (-) strand; PAM type: NRG; PAM sequence: AGG
cactgcaacctccgcctcct

SEQ ID NO: 18068 - DNA, 20 bp, Artificial Sequence
  Description of Artificial Sequence: Synthetic oligonucleotide
  Target: ATXN2; (-) strand; PAM type: NRG; PAM sequence: TAG
tcactgcaacctccgcctcc

SEQ ID NO: 18069 - DNA, 20 bp, Artificial Sequence
  Description of Artificial Sequence: Synthetic oligonucleotide
  Target: ATXN2; (-) strand; PAM type: NRG; PAM sequence: CGG
ggagtgcagtggtgcgatct

SEQ ID NO: 18070 - DNA, 20 bp, Artificial Sequence
  Description of Artificial Sequence: Synthetic oligonucleotide
  Target: ATXN2; (-) strand; PAM type: NRG; PAM sequence: TGG
tcgtccaggctggagtgcag

SEQ ID NO: 18071 - DNA, 20 bp, Artificial Sequence
  Description of Artificial Sequence: Synthetic oligonucleotide
  Target: ATXN2; (-) strand; PAM type: NRG; PAM sequence: CAG
ctgtcgtccaggctggagtg

SEQ ID NO: 18072 - DNA, 20 bp, Artificial Sequence
  Description of Artificial Sequence: Synthetic oligonucleotide
  Target: ATXN2; (-) strand; PAM type: NRG; PAM sequence: GAG
tcactctgtcgtccaggctg

SEQ ID NO: 18073 - DNA, 20 bp, Artificial Sequence
  Description of Artificial Sequence: Synthetic oligonucleotide
  Target: ATXN2; (-) strand; PAM type: NRG; PAM sequence: TGG
tctcactctgtcgtccaggc

SEQ ID NO: 18074 - DNA, 20 bp, Artificial Sequence
  Description of Artificial Sequence: Synthetic oligonucleotide
  Target: ATXN2; (-) strand; PAM type: NRG; PAM sequence: AGG
ggagtctcactctgtcgtcc

SEQ ID NO: 18075 - DNA, 20 bp, Artificial Sequence
  Description of Artificial Sequence: Synthetic oligonucleotide
  Target: ATXN2; (-) strand; PAM type: NRG; PAM sequence: CAG
tggagtctcactctgtcgtc

SEQ ID NO: 18076 - DNA, 20 bp, Artificial Sequence
  Description of Artificial Sequence: Synthetic oligonucleotide
  Target: ATXN2; (-) strand; PAM type: NRG; PAM sequence: GAG
tttttttttcttttgagatg

SEQ ID NO: 18077 - DNA, 20 bp, Artificial Sequence
  Description of Artificial Sequence: Synthetic oligonucleotide
  Target: ATXN2; (-) strand; PAM type: NRG; PAM sequence: TGG
tttttttttttcttttgaga

SEQ ID NO: 18078 - DNA, 20 bp, Artificial Sequence
  Description of Artificial Sequence: Synthetic oligonucleotide
  Target: ATXN2; (-) strand; PAM type: NRG; PAM sequence: GAG
tttttttttttttttctttt

SEQ ID NO: 18079 - DNA, 20 bp, Artificial Sequence
  Description of Artificial Sequence: Synthetic oligonucleotide
  Target: ATXN2; (-) strand; PAM type: NRG; PAM sequence: TGG
tttccttctttaccttatct

SEQ ID NO: 18080 - DNA, 20 bp, Artificial Sequence
  Description of Artificial Sequence: Synthetic oligonucleotide
  Target: ATXN2; (-) strand; PAM type: NRG; PAM sequence: CAG
gtgaaataatatgtgtgggt

SEQ ID NO: 18081 - DNA, 20 bp, Artificial Sequence
  Description of Artificial Sequence: Synthetic oligonucleotide
  Target: ATXN2; (-) strand; PAM type: NRG; PAM sequence: GGG
agcagtgaaataatatgtgt

SEQ ID NO: 18082 - DNA, 20 bp, Artificial Sequence
  Description of Artificial Sequence: Synthetic oligonucleotide
  Target: ATXN2; (-) strand; PAM type: NRG; PAM sequence: TGG
aagcagtgaaataatatgtg

SEQ ID NO: 18083 - DNA, 20 bp, Artificial Sequence
  Description of Artificial Sequence: Synthetic oligonucleotide
  Target: ATXN2; (-) strand; PAM type: NRG; PAM sequence: CAG
atgagcatatataacaaaag

SEQ ID NO: 18084 - DNA, 20 bp, Artificial Sequence
  Description of Artificial Sequence: Synthetic oligonucleotide
  Target: ATXN2; (-) strand; PAM type: NRG; PAM sequence: AAG
agaatgagcatatataacaa

SEQ ID NO: 18085 - DNA, 20 bp, Artificial Sequence
  Description of Artificial Sequence: Synthetic oligonucleotide
  Target: ATXN2; (-) strand; PAM type: NRG; PAM sequence: GAG
ctgggatctttagccagaat

SEQ ID NO: 18086 - DNA, 20 bp, Artificial Sequence
  Description of Artificial Sequence: Synthetic oligonucleotide
  Target: ATXN2; (-) strand; PAM type: NRG; PAM sequence: CAG
acctctctgggatctttagc

SEQ ID NO: 18087 - DNA, 20 bp, Artificial Sequence
  Description of Artificial Sequence: Synthetic oligonucleotide
  Target: ATXN2; (-) strand; PAM type: NRG; PAM sequence: TAG
tttaacctctctgggatctt

SEQ ID NO: 18088 - DNA, 20 bp, Artificial Sequence
  Description of Artificial Sequence: Synthetic oligonucleotide
  Target: ATXN2; (-) strand; PAM type: NRG; PAM sequence: GGG
actttatttttaacctctct

SEQ ID NO: 18089 - DNA, 20 bp, Artificial Sequence
  Description of Artificial Sequence: Synthetic oligonucleotide
  Target: ATXN2; (-) strand; PAM type: NRG; PAM sequence: TGG
aactttatttttaacctctc

SEQ ID NO: 18090 - DNA, 20 bp, Artificial Sequence
  Description of Artificial Sequence: Synthetic oligonucleotide
  Target: ATXN2; (-) strand; PAM type: NRG; PAM sequence: CAG
agtttaactgatgaataaat

SEQ ID NO: 18091 - DNA, 20 bp, Artificial Sequence
  Description of Artificial Sequence: Synthetic oligonucleotide
  Target: ATXN2; (-) strand; PAM type: NRG; PAM sequence: AAG
gactaaagttttataaatag

SEQ ID NO: 18092 - DNA, 20 bp, Artificial Sequence
  Description of Artificial Sequence: Synthetic oligonucleotide
  Target: ATXN2; (-) strand; PAM type: NRG; PAM sequence: TAG
gaagactaaagttttataaa

SEQ ID NO: 18093 - DNA, 20 bp, Artificial Sequence
  Description of Artificial Sequence: Synthetic oligonucleotide
  Target: ATXN2; (-) strand; PAM type: NRG; PAM sequence: AAG
aaaagattttatgaagacta

SEQ ID NO: 18094 - DNA, 20 bp, Artificial Sequence
  Description of Artificial Sequence: Synthetic oligonucleotide
  Target: ATXN2; (-) strand; PAM type: NRG; PAM sequence: AAG
ttaatctaaaagattttatg

SEQ ID NO: 18095 - DNA, 20 bp, Artificial Sequence
  Description of Artificial Sequence: Synthetic oligonucleotide
  Target: ATXN2; (-) strand; PAM type: NRG; PAM sequence: AAG
tttgattatctttaatctaa

SEQ ID NO: 18096 - DNA, 20 bp, Artificial Sequence
  Description of Artificial Sequence: Synthetic oligonucleotide
  Target: ATXN2; (-) strand; PAM type: NRG; PAM sequence: AAG
ggactaggtctggaccaaag

SEQ ID NO: 18097 - DNA, 20 bp, Artificial Sequence
  Description of Artificial Sequence: Synthetic oligonucleotide
  Target: ATXN2; (-) strand; PAM type: NRG; PAM sequence: AAG
tctggactaggtctggacca

SEQ ID NO: 18098 - DNA, 20 bp, Artificial Sequence
  Description of Artificial Sequence: Synthetic oligonucleotide
  Target: ATXN2; (-) strand; PAM type: NRG; PAM sequence: TGG
ggaaacttctggactaggtc

SEQ ID NO: 18099 - DNA, 20 bp, Artificial Sequence
  Description of Artificial Sequence: Synthetic oligonucleotide
  Target: ATXN2; (-) strand; PAM type: NRG; PAM sequence: AGG
gagtgggaaacttctggact

SEQ ID NO: 18100 - DNA, 20 bp, Artificial Sequence
  Description of Artificial Sequence: Synthetic oligonucleotide
  Target: ATXN2; (-) strand; PAM type: NRG; PAM sequence: TAG
tgagtgggaaacttctggac

SEQ ID NO: 18101 - DNA, 20 bp, Artificial Sequence
  Description of Artificial Sequence: Synthetic oligonucleotide
  Target: ATXN2; (-) strand; PAM type: NRG; PAM sequence: TGG
aacactgagtgggaaacttc

SEQ ID NO: 18102 - DNA, 20 bp, Artificial Sequence
  Description of Artificial Sequence: Synthetic oligonucleotide
  Target: ATXN2; (-) strand; PAM type: NRG; PAM sequence: GGG
tatgtcaaggaacactgagt

SEQ ID NO: 18103 - DNA, 20 bp, Artificial Sequence
  Description of Artificial Sequence: Synthetic oligonucleotide
  Target: ATXN2; (-) strand; PAM type: NRG; PAM sequence: TGG
ttatgtcaaggaacactgag

SEQ ID NO: 18104 - DNA, 20 bp, Artificial Sequence
  Description of Artificial Sequence: Synthetic oligonucleotide
  Target: ATXN2; (-) strand; PAM type: NRG; PAM sequence: GAG
tatttatgtcaaggaacact

SEQ ID NO: 18105 - DNA, 20 bp, Artificial Sequence
  Description of Artificial Sequence: Synthetic oligonucleotide
  Target: ATXN2; (-) strand; PAM type: NRG; PAM sequence: AGG
aatcttaaatatttatgtca

SEQ ID NO: 18106 - DNA, 20 bp, Artificial Sequence
  Description of Artificial Sequence: Synthetic oligonucleotide
  Target: ATXN2; (-) strand; PAM type: NRG; PAM sequence: AAG
gaatcttaaatatttatgtc

SEQ ID NO: 18107 - DNA, 20 bp, Artificial Sequence
  Description of Artificial Sequence: Synthetic oligonucleotide
  Target: ATXN2; (-) strand; PAM type: NRG; PAM sequence: TAG
tttttgactgatcatatgtt

SEQ ID NO: 18108 - DNA, 20 bp, Artificial Sequence
  Description of Artificial Sequence: Synthetic oligonucleotide
  Target: ATXN2; (-) strand; PAM type: NRG; PAM sequence: AGG
gaatgtggttagtgttatta

SEQ ID NO: 18109 - DNA, 20 bp, Artificial Sequence
  Description of Artificial Sequence: Synthetic oligonucleotide
  Target: ATXN2; (-) strand; PAM type: NRG; PAM sequence: AAG
ggaatgtggttagtgttatt

SEQ ID NO: 18110 - DNA, 20 bp, Artificial Sequence
  Description of Artificial Sequence: Synthetic oligonucleotide
  Target: ATXN2; (-) strand; PAM type: NRG; PAM sequence: TAG
aactagttctggaatgtggt

SEQ ID NO: 18111 - DNA, 20 bp, Artificial Sequence
  Description of Artificial Sequence: Synthetic oligonucleotide
  Target: ATXN2; (-) strand; PAM type: NRG; PAM sequence: TGG
aggaaactagttctggaatg

SEQ ID NO: 18112 - DNA, 20 bp, Artificial Sequence
  Description of Artificial Sequence: Synthetic oligonucleotide
  Target: ATXN2; (-) strand; PAM type: NRG; PAM sequence: TGG
acagctgaggaaactagttc

SEQ ID NO: 18113 - DNA, 20 bp, Artificial Sequence
  Description of Artificial Sequence: Synthetic oligonucleotide
  Target: ATXN2; (-) strand; PAM type: NRG; PAM sequence: TAG
gagatcacagctgaggaaac

SEQ ID NO: 18114 - DNA, 20 bp, Artificial Sequence
  Description of Artificial Sequence: Synthetic oligonucleotide
  Target: ATXN2; (-) strand; PAM type: NRG; PAM sequence: AGG
cttcagtgagatcacagctg

SEQ ID NO: 18115 - DNA, 20 bp, Artificial Sequence
  Description of Artificial Sequence: Synthetic oligonucleotide
  Target: ATXN2; (-) strand; PAM type: NRG; PAM sequence: GAG
gcttcagtgagatcacagct

SEQ ID NO: 18116 - DNA, 20 bp, Artificial Sequence
  Description of Artificial Sequence: Synthetic oligonucleotide
  Target: ATXN2; (-) strand; PAM type: NRG; PAM sequence: CAG
aatttgcttcagtgagatca

SEQ ID NO: 18117 - DNA, 20 bp, Artificial Sequence
  Description of Artificial Sequence: Synthetic oligonucleotide
  Target: ATXN2; (-) strand; PAM type: NRG; PAM sequence: GAG
tgtacttaatttgcttcagt

SEQ ID NO: 18118 - DNA, 20 bp, Artificial Sequence
  Description of Artificial Sequence: Synthetic oligonucleotide
  Target: ATXN2; (-) strand; PAM type: NRG; PAM sequence: CAG
tttctgtacttaatttgctt

SEQ ID NO: 18119 - DNA, 20 bp, Artificial Sequence
  Description of Artificial Sequence: Synthetic oligonucleotide
  Target: ATXN2; (-) strand; PAM type: NRG; PAM sequence: CAG
ctagttacaaattaaacaca

SEQ ID NO: 18120 - DNA, 20 bp, Artificial Sequence
  Description of Artificial Sequence: Synthetic oligonucleotide
  Target: ATXN2; (-) strand; PAM type: NRG; PAM sequence: TAG
aaagtcaaaatgacaaaacc

SEQ ID NO: 18121 - DNA, 20 bp, Artificial Sequence
  Description of Artificial Sequence: Synthetic oligonucleotide
  Target: ATXN2; (-) strand; PAM type: NRG; PAM sequence: AAG
tcttatgacttgtgcatcca

SEQ ID NO: 18122 - DNA, 20 bp, Artificial Sequence
  Description of Artificial Sequence: Synthetic oligonucleotide
  Target: ATXN2; (-) strand; PAM type: NRG; PAM sequence: TGG
ttttataagttttgcaatgc

SEQ ID NO: 18123 - DNA, 20 bp, Artificial Sequence
  Description of Artificial Sequence: Synthetic oligonucleotide
  Target: ATXN2; (-) strand; PAM type: NRG; PAM sequence: AAG
aagattttgttttgttttat

SEQ ID NO: 18124 - DNA, 20 bp, Artificial Sequence
  Description of Artificial Sequence: Synthetic oligonucleotide
  Target: ATXN2; (-) strand; PAM type: NRG; PAM sequence: AAG
acatcagatttacaagttgg

SEQ ID NO: 18125 - DNA, 20 bp, Artificial Sequence
  Description of Artificial Sequence: Synthetic oligonucleotide
  Target: ATXN2; (-) strand; PAM type: NRG; PAM sequence: TGG
ttaacatcagatttacaagt

SEQ ID NO: 18126 - DNA, 20 bp, Artificial Sequence
  Description of Artificial Sequence: Synthetic oligonucleotide
  Target: ATXN2; (-) strand; PAM type: NRG; PAM sequence: AAG
gaatttaacatcagatttac

SEQ ID NO: 18127 - DNA, 20 bp, Artificial Sequence
  Description of Artificial Sequence: Synthetic oligonucleotide
  Target: ATXN2; (-) strand; PAM type: NRG; PAM sequence: CAG
cctttttctgaatttaacat

SEQ ID NO: 18128 - DNA, 20 bp, Artificial Sequence
  Description of Artificial Sequence: Synthetic oligonucleotide
  Target: ATXN2; (-) strand; PAM type: NRG; PAM sequence: GAG
tgccttttattcccctttta

SEQ ID NO: 18129 - DNA, 20 bp, Artificial Sequence
  Description of Artificial Sequence: Synthetic oligonucleotide
  Target: ATXN2; (-) strand; PAM type: NRG; PAM sequence: TAG
gttgccttttattccccttt

SEQ ID NO: 18130 - DNA, 20 bp, Artificial Sequence
  Description of Artificial Sequence: Synthetic oligonucleotide
  Target: ATXN2; (-) strand; PAM type: NRG; PAM sequence: AAG
cattttatgatggtttggtc

SEQ ID NO: 18131 - DNA, 20 bp, Artificial Sequence
  Description of Artificial Sequence: Synthetic oligonucleotide
  Target: ATXN2; (-) strand; PAM type: NRG; PAM sequence: TGG
taagccattttatgatggtt

SEQ ID NO: 18132 - DNA, 20 bp, Artificial Sequence
  Description of Artificial Sequence: Synthetic oligonucleotide
  Target: ATXN2; (-) strand; PAM type: NRG; PAM sequence: TGG
tgttctaagccattttatga

SEQ ID NO: 18133 - DNA, 20 bp, Artificial Sequence
  Description of Artificial Sequence: Synthetic oligonucleotide
  Target: ATXN2; (-) strand; PAM type: NRG; PAM sequence: AAG
gcttcatttccccctgttct

SEQ ID NO: 18134 - DNA, 20 bp, Artificial Sequence
  Description of Artificial Sequence: Synthetic oligonucleotide
  Target: ATXN2; (-) strand; PAM type: NRG; PAM sequence: GGG
tttaaaagaaactaacagtt

SEQ ID NO: 18135 - DNA, 20 bp, Artificial Sequence
  Description of Artificial Sequence: Synthetic oligonucleotide
  Target: ATXN2; (-) strand; PAM type: NRG; PAM sequence: TGG
ttttaaaagaaactaacagt

SEQ ID NO: 18136 - DNA, 20 bp, Artificial Sequence
  Description of Artificial Sequence: Synthetic oligonucleotide
  Target: ATXN2; (-) strand; PAM type: NRG; PAM sequence: CAG
tactttttaaaagaaactaa

SEQ ID NO: 18137 - DNA, 20 bp, Artificial Sequence
  Description of Artificial Sequence: Synthetic oligonucleotide
  Target: ATXN2; (-) strand; PAM type: NRG; PAM sequence: AAG
ggagtatcagtactttttaa

SEQ ID NO: 18138 - DNA, 20 bp, Artificial Sequence
  Description of Artificial Sequence: Synthetic oligonucleotide
  Target: ATXN2; (-) strand; PAM type: NRG; PAM sequence: CAG
cttcccctaaaagggagtat

SEQ ID NO: 18139 - DNA, 20 bp, Artificial Sequence
  Description of Artificial Sequence: Synthetic oligonucleotide
  Target: ATXN2; (-) strand; PAM type: NRG; PAM sequence: GAG
gcacaacttcccctaaaagg

SEQ ID NO: 18140 - DNA, 20 bp, Artificial Sequence
  Description of Artificial Sequence: Synthetic oligonucleotide
  Target: ATXN2; (-) strand; PAM type: NRG; PAM sequence: GGG
tagcacaacttcccctaaaa

SEQ ID NO: 18141 - DNA, 20 bp, Artificial Sequence
  Description of Artificial Sequence: Synthetic oligonucleotide
  Target: ATXN2; (-) strand; PAM type: NRG; PAM sequence: AGG
ttagcacaacttcccctaaa

SEQ ID NO: 18142 - DNA, 20 bp, Artificial Sequence
  Description of Artificial Sequence: Synthetic oligonucleotide
  Target: ATXN2; (-) strand; PAM type: NRG; PAM sequence: AAG
cttagcacaacttcccctaa

SEQ ID NO: 18143 - DNA, 20 bp, Artificial Sequence
  Description of Artificial Sequence: Synthetic oligonucleotide
  Target: ATXN2; (-) strand; PAM type: NRG; PAM sequence: TAG
cacctaagccttaattgcct

SEQ ID NO: 18144 - DNA, 20 bp, Artificial Sequence
  Description of Artificial Sequence: Synthetic oligonucleotide
  Target: ATXN2; (-) strand; PAM type: NRG; PAM sequence: AAG
gtccttaatcattaacacct

SEQ ID NO: 18145 - DNA, 20 bp, Artificial Sequence
  Description of Artificial Sequence: Synthetic oligonucleotide
  Target: ATXN2; (-) strand; PAM type: NRG; PAM sequence: AGG
gttttcctggtaagtagcta

SEQ ID NO: 18146 - DNA, 20 bp, Artificial Sequence
  Description of Artificial Sequence: Synthetic oligonucleotide
  Target: ATXN2; (-) strand; PAM type: NRG; PAM sequence: AAG
tgttttcctggtaagtagct

SEQ ID NO: 18147 - DNA, 20 bp, Artificial Sequence
  Description of Artificial Sequence: Synthetic oligonucleotide
  Target: ATXN2; (-) strand; PAM type: NRG; PAM sequence: TAG
ggtgttgttttcctggtaag

SEQ ID NO: 18148 - DNA, 20 bp, Artificial Sequence
  Description of Artificial Sequence: Synthetic oligonucleotide
  Target: ATXN2; (-) strand; PAM type: NRG; PAM sequence: AAG
tttggtgttgttttcctggt

SEQ ID NO: 18149 - DNA, 20 bp, Artificial Sequence
  Description of Artificial Sequence: Synthetic oligonucleotide
  Target: ATXN2; (-) strand; PAM type: NRG; PAM sequence: TGG
gtagtttggtgttgttttcc

SEQ ID NO: 18150 - DNA, 20 bp, Artificial Sequence
  Description of Artificial Sequence: Synthetic oligonucleotide
  Target: ATXN2; (-) strand; PAM type: NRG; PAM sequence: TGG
tactgtctctgttagtagtt

SEQ ID NO: 18151 - DNA, 20 bp, Artificial Sequence
  Description of Artificial Sequence: Synthetic oligonucleotide
  Target: ATXN2; (-) strand; PAM type: NRG; PAM sequence: TAG
catcttactgtctctgttag

SEQ ID NO: 18152 - DNA, 20 bp, Artificial Sequence
  Description of Artificial Sequence: Synthetic oligonucleotide
  Target: ATXN2; (-) strand; PAM type: NRG; PAM sequence: TAG
caccatcttactgtctctgt

SEQ ID NO: 18153 - DNA, 20 bp, Artificial Sequence
  Description of Artificial Sequence: Synthetic oligonucleotide
  Target: ATXN2; (-) strand; PAM type: NRG; PAM sequence: TAG
tcaatttgaggtctcaaatg

SEQ ID NO: 18154 - DNA, 20 bp, Artificial Sequence
  Description of Artificial Sequence: Synthetic oligonucleotide
  Target: ATXN2; (-) strand; PAM type: NRG; PAM sequence: AGG
tttattatgtactcaatttg

SEQ ID NO: 18155 - DNA, 20 bp, Artificial Sequence
  Description of Artificial Sequence: Synthetic oligonucleotide
  Target: ATXN2; (-) strand; PAM type: NRG; PAM sequence: GAG
ttttattatgtactcaattt

SEQ ID NO: 18156 - DNA, 20 bp, Artificial Sequence
  Description of Artificial Sequence: Synthetic oligonucleotide
  Target: ATXN2; (-) strand; PAM type: NRG; PAM sequence: AGG
tgtagtgtgtaaaagatagt

SEQ ID NO: 18157 - DNA, 20 bp, Artificial Sequence
  Description of Artificial Sequence: Synthetic oligonucleotide
  Target: ATXN2; (-) strand; PAM type: NRG; PAM sequence: TAG
ttgtagtgtgtaaaagatag

SEQ ID NO: 18158 - DNA, 20 bp, Artificial Sequence
  Description of Artificial Sequence: Synthetic oligonucleotide
  Target: ATXN2; (-) strand; PAM type: NRG; PAM sequence: TAG
tgattgtagtgtgtaaaaga

SEQ ID NO: 18159 - DNA, 20 bp, Artificial Sequence
  Description of Artificial Sequence: Synthetic oligonucleotide
  Target: ATXN2; (-) strand; PAM type: NRG; PAM sequence: AAG
tctgtgattgtagtgtgtaa

SEQ ID NO: 18160 - DNA, 20 bp, Artificial Sequence
  Description of Artificial Sequence: Synthetic oligonucleotide
  Target: ATXN2; (-) strand; PAM type: NRG; PAM sequence: TAG
ggaaactatgtctgtgattg

SEQ ID NO: 18161 - DNA, 20 bp, Artificial Sequence
  Description of Artificial Sequence: Synthetic oligonucleotide
  Target: ATXN2; (-) strand; PAM type: NRG; PAM sequence: GGG
gtatgtatatactattaaag

SEQ ID NO: 18162 - DNA, 20 bp, Artificial Sequence
  Description of Artificial Sequence: Synthetic oligonucleotide
  Target: ATXN2; (-) strand; PAM type: NRG; PAM sequence: GGG
tgtatgtatatactattaaa

SEQ ID NO: 18163 - DNA, 20 bp, Artificial Sequence
  Description of Artificial Sequence: Synthetic oligonucleotide
  Target: ATXN2; (-) strand; PAM type: NRG; PAM sequence: AGG
ctgtatgtatatactattaa

SEQ ID NO: 18164 - DNA, 20 bp, Artificial Sequence
  Description of Artificial Sequence: Synthetic oligonucleotide
  Target: ATXN2; (-) strand; PAM type: NRG; PAM sequence: AAG
gctgtatgtatatactatta

SEQ ID NO: 18165 - DNA, 20 bp, Artificial Sequence
  Description of Artificial Sequence: Synthetic oligonucleotide
  Target: ATXN2; (-) strand; PAM type: NRG; PAM sequence: GAG
aatagatgctctttaaaaag

SEQ ID NO: 18166 - DNA, 20 bp, Artificial Sequence
  Description of Artificial Sequence: Synthetic oligonucleotide
  Target: ATXN2; (-) strand; PAM type: NRG; PAM sequence: AGG
ttaatagatgctctttaaaa

SEQ ID NO: 18167 - DNA, 20 bp, Artificial Sequence
  Description of Artificial Sequence: Synthetic oligonucleotide
  Target: ATXN2; (-) strand; PAM type: NRG; PAM sequence: AAG
tttaatagatgctctttaaa

SEQ ID NO: 18168 - DNA, 20 bp, Artificial Sequence
  Description of Artificial Sequence: Synthetic oligonucleotide
  Target: ATXN2; (-) strand; PAM type: NRG; PAM sequence: TAG
tgttaaatttaatcctttaa

SEQ ID NO: 18169 - DNA, 20 bp, Artificial Sequence
  Description of Artificial Sequence: Synthetic oligonucleotide
  Target: ATXN2; (-) strand; PAM type: NRG; PAM sequence: AGG
tatataatttatttggtgct

SEQ ID NO: 18170 - DNA, 20 bp, Artificial Sequence
  Description of Artificial Sequence: Synthetic oligonucleotide
  Target: ATXN2; (-) strand; PAM type: NRG; PAM sequence: TAG
atatataatttatttggtgc

SEQ ID NO: 18171 - DNA, 20 bp, Artificial Sequence
  Description of Artificial Sequence: Synthetic oligonucleotide
  Target: ATXN2; (-) strand; PAM type: NRG; PAM sequence: TGG
gtgtgtatatataatttatt

SEQ ID NO: 18172 - DNA, 20 bp, Artificial Sequence
  Description of Artificial Sequence: Synthetic oligonucleotide
  Target: ATXN2; (-) strand; PAM type: NRG; PAM sequence: AAG
atgacttggtatccaaaaat

SEQ ID NO: 18173 - DNA, 20 bp, Artificial Sequence
  Description of Artificial Sequence: Synthetic oligonucleotide
  Target: ATXN2; (-) strand; PAM type: NRG; PAM sequence: TGG
ttgttaattatgccatgact

SEQ ID NO: 18174 - DNA, 20 bp, Artificial Sequence
  Description of Artificial Sequence: Synthetic oligonucleotide
  Target: ATXN2; (-) strand; PAM type: NRG; PAM sequence: TAG
gactctactaaatgccatat

SEQ ID NO: 18175 - DNA, 20 bp, Artificial Sequence
  Description of Artificial Sequence: Synthetic oligonucleotide
  Target: ATXN2; (-) strand; PAM type: NRG; PAM sequence: GGG
gcacattttgagttattttg

SEQ ID NO: 18176 - DNA, 20 bp, Artificial Sequence
  Description of Artificial Sequence: Synthetic oligonucleotide
  Target: ATXN2; (-) strand; PAM type: NRG; PAM sequence: GGG
ggcacattttgagttatttt

SEQ ID NO: 18177 - DNA, 20 bp, Artificial Sequence
  Description of Artificial Sequence: Synthetic oligonucleotide
  Target: ATXN2; (-) strand; PAM type: NRG; PAM sequence: TGG
aggcacattttgagttattt

SEQ ID NO: 18178 - DNA, 20 bp, Artificial Sequence
  Description of Artificial Sequence: Synthetic oligonucleotide
  Target: ATXN2; (-) strand; PAM type: NRG; PAM sequence: GAG
ttttatgttaggcacatttt

SEQ ID NO: 18179 - DNA, 20 bp, Artificial Sequence
  Description of Artificial Sequence: Synthetic oligonucleotide
  Target: ATXN2; (-) strand; PAM type: NRG; PAM sequence: AGG
aaggattcaaattttatgtt

SEQ ID NO: 18180 - DNA, 20 bp, Artificial Sequence
  Description of Artificial Sequence: Synthetic oligonucleotide
  Target: ATXN2; (-) strand; PAM type: NRG; PAM sequence: TAG
taaggattcaaattttatgt

SEQ ID NO: 18181 - DNA, 20 bp, Artificial Sequence
  Description of Artificial Sequence: Synthetic oligonucleotide
  Target: ATXN2; (-) strand; PAM type: NRG; PAM sequence: AGG
ttgtgttctagaggatatta

SEQ ID NO: 18182 - DNA, 20 bp, Artificial Sequence
  Description of Artificial Sequence: Synthetic oligonucleotide
  Target: ATXN2; (-) strand; PAM type: NRG; PAM sequence: AAG
gttgtgttctagaggatatt

SEQ ID NO: 18183 - DNA, 20 bp, Artificial Sequence
  Description of Artificial Sequence: Synthetic oligonucleotide
  Target: ATXN2; (-) strand; PAM type: NRG; PAM sequence: AGG
tatgaaatgttgtgttctag

SEQ ID NO: 18184 - DNA, 20 bp, Artificial Sequence
  Description of Artificial Sequence: Synthetic oligonucleotide
  Target: ATXN2; (-) strand; PAM type: NRG; PAM sequence: GAG
gtatgaaatgttgtgttcta

SEQ ID NO: 18185 - DNA, 20 bp, Artificial Sequence
  Description of Artificial Sequence: Synthetic oligonucleotide
  Target: ATXN2; (-) strand; PAM type: NRG; PAM sequence: TAG
ttgtatgaaatgttgtgttc

SEQ ID NO: 18186 - DNA, 20 bp, Artificial Sequence
  Description of Artificial Sequence: Synthetic oligonucleotide
  Target: ATXN2; (-) strand; PAM type: NRG; PAM sequence: TAG
taatatttgtagaaatcctt

SEQ ID NO: 18187 - DNA, 20 bp, Artificial Sequence
  Description of Artificial Sequence: Synthetic oligonucleotide
  Target: ATXN2; (-) strand; PAM type: NRG; PAM sequence: TAG
ggaaggagtactaatatttg

SEQ ID NO: 18188 - DNA, 20 bp, Artificial Sequence
  Description of Artificial Sequence: Synthetic oligonucleotide
  Target: ATXN2; (-) strand; PAM type: NRG; PAM sequence: GAG
tttggtatttaaataggaag

SEQ ID NO: 18189 - DNA, 20 bp, Artificial Sequence
  Description of Artificial Sequence: Synthetic oligonucleotide
  Target: ATXN2; (-) strand; PAM type: NRG; PAM sequence: AGG
actttggtatttaaatagga

SEQ ID NO: 18190 - DNA, 20 bp, Artificial Sequence
  Description of Artificial Sequence: Synthetic oligonucleotide
  Target: ATXN2; (-) strand; PAM type: NRG; PAM sequence: AAG
gactttggtatttaaatagg

SEQ ID NO: 18191 - DNA, 20 bp, Artificial Sequence
  Description of Artificial Sequence: Synthetic oligonucleotide
  Target: ATXN2; (-) strand; PAM type: NRG; PAM sequence: AGG
ttggactttggtatttaaat

SEQ ID NO: 18192 - DNA, 20 bp, Artificial Sequence
  Description of Artificial Sequence: Synthetic oligonucleotide
  Target: ATXN2; (-) strand; PAM type: NRG; PAM sequence: TAG
cttggactttggtatttaaa

SEQ ID NO: 18193 - DNA, 20 bp, Artificial Sequence
  Description of Artificial Sequence: Synthetic oligonucleotide
  Target: ATXN2; (-) strand; PAM type: NRG; PAM sequence: TGG
ataaggctagtcttggactt

SEQ ID NO: 18194 - DNA, 20 bp, Artificial Sequence
  Description of Artificial Sequence: Synthetic oligonucleotide
  Target: ATXN2; (-) strand; PAM type: NRG; PAM sequence: TGG
aataaaaataaggctagtct

SEQ ID NO: 18195 - DNA, 20 bp, Artificial Sequence
  Description of Artificial Sequence: Synthetic oligonucleotide
  Target: ATXN2; (-) strand; PAM type: NRG; PAM sequence: TAG
ataaaaaataaaaataaggc

SEQ ID NO: 18196 - DNA, 20 bp, Artificial Sequence
  Description of Artificial Sequence: Synthetic oligonucleotide
  Target: ATXN2; (-) strand; PAM type: NRG; PAM sequence: AGG
caaaataaaaaataaaaata

SEQ ID NO: 18197 - DNA, 20 bp, Artificial Sequence
  Description of Artificial Sequence: Synthetic oligonucleotide
  Target: ATXN2; (-) strand; PAM type: NRG; PAM sequence: AAG
tcaaaataaaaaataaaaat

SEQ ID NO: 18198 - DNA, 20 bp, Artificial Sequence
  Description of Artificial Sequence: Synthetic oligonucleotide
  Target: ATXN2; (-) strand; PAM type: NRG; PAM sequence: GAG
tcaggcctgggcaacagaga

SEQ ID NO: 18199 - DNA, 20 bp, Artificial Sequence
  Description of Artificial Sequence: Synthetic oligonucleotide
  Target: ATXN2; (-) strand; PAM type: NRG; PAM sequence: GAG
actcaggcctgggcaacaga

SEQ ID NO: 18200 - DNA, 20 bp, Artificial Sequence
  Description of Artificial Sequence: Synthetic oligonucleotide
  Target: ATXN2; (-) strand; PAM type: NRG; PAM sequence: GAG
gcactcaggcctgggcaaca

SEQ ID NO: 18201 - DNA, 20 bp, Artificial Sequence
  Description of Artificial Sequence: Synthetic oligonucleotide
  Target: ATXN2; (-) strand; PAM type: NRG; PAM sequence: CAG
ctgcactcaggcctgggcaa

SEQ ID NO: 18202 - DNA, 20 bp, Artificial Sequence
  Description of Artificial Sequence: Synthetic oligonucleotide
  Target: ATXN2; (-) strand; PAM type: NRG; PAM sequence: GGG
gtaccactgcactcaggcct

SEQ ID NO: 18203 - DNA, 20 bp, Artificial Sequence
  Description of Artificial Sequence: Synthetic oligonucleotide
  Target: ATXN2; (-) strand; PAM type: NRG; PAM sequence: TGG
tgtaccactgcactcaggcc

SEQ ID NO: 18204 - DNA, 20 bp, Artificial Sequence
  Description of Artificial Sequence: Synthetic oligonucleotide
  Target: ATXN2; (-) strand; PAM type: NRG; PAM sequence: AGG
gagattgtaccactgcactc

SEQ ID NO: 18205 - DNA, 20 bp, Artificial Sequence
  Description of Artificial Sequence: Synthetic oligonucleotide
  Target: ATXN2; (-) strand; PAM type: NRG; PAM sequence: CAG
tgagattgtaccactgcact

SEQ ID NO: 18206 - DNA, 20 bp, Artificial Sequence
  Description of Artificial Sequence: Synthetic oligonucleotide
  Target: ATXN2; (-) strand; PAM type: NRG; PAM sequence: GAG
ggtggaggttgcagtgagct

SEQ ID NO: 18207 - DNA, 20 bp, Artificial Sequence
  Description of Artificial Sequence: Synthetic oligonucleotide
  Target: ATXN2; (-) strand; PAM type: NRG; PAM sequence: GAG
ctggaggtggaggttgcagt

SEQ ID NO: 18208 - DNA, 20 bp, Artificial Sequence
  Description of Artificial Sequence: Synthetic oligonucleotide
  Target: ATXN2; (-) strand; PAM type: NRG; PAM sequence: CAG
aaccctggaggtggaggttg

SEQ ID NO: 18209 - DNA, 20 bp, Artificial Sequence
  Description of Artificial Sequence: Synthetic oligonucleotide
  Target: ATXN2; (-) strand; PAM type: NRG; PAM sequence: AGG
tccatgaaccctggaggtgg

SEQ ID NO: 18210 - DNA, 20 bp, Artificial Sequence
  Description of Artificial Sequence: Synthetic oligonucleotide
  Target: ATXN2; (-) strand; PAM type: NRG; PAM sequence: GAG
ttccatgaaccctggaggtg

SEQ ID NO: 18211 - DNA, 20 bp, Artificial Sequence
  Description of Artificial Sequence: Synthetic oligonucleotide
  Target: ATXN2; (-) strand; PAM type: NRG; PAM sequence: TGG
agttccatgaaccctggagg

SEQ ID NO: 18212 - DNA, 20 bp, Artificial Sequence
  Description of Artificial Sequence: Synthetic oligonucleotide
  Target: ATXN2; (-) strand; PAM type: NRG; PAM sequence: AGG
aagagttccatgaaccctgg

SEQ ID NO: 18213 - DNA, 20 bp, Artificial Sequence
  Description of Artificial Sequence: Synthetic oligonucleotide
  Target: ATXN2; (-) strand; PAM type: NRG; PAM sequence: GAG
caagagttccatgaaccctg

SEQ ID NO: 18214 - DNA, 20 bp, Artificial Sequence
  Description of Artificial Sequence: Synthetic oligonucleotide
  Target: ATXN2; (-) strand; PAM type: NRG; PAM sequence: TGG
cacaagagttccatgaaccc

SEQ ID NO: 18215 - DNA, 20 bp, Artificial Sequence
  Description of Artificial Sequence: Synthetic oligonucleotide
  Target: ATXN2; (-) strand; PAM type: NRG; PAM sequence: GAG
cttgggaggcggaggcacaa

SEQ ID NO: 18216 - DNA, 20 bp, Artificial Sequence
  Description of Artificial Sequence: Synthetic oligonucleotide
  Target: ATXN2; (-) strand; PAM type: NRG; PAM sequence: AAG
tacttgggaggcggaggcac

SEQ ID NO: 18217 - DNA, 20 bp, Artificial Sequence
  Description of Artificial Sequence: Synthetic oligonucleotide
  Target: ATXN2; (-) strand; PAM type: NRG; PAM sequence: AGG
cccagctacttgggaggcgg

SEQ ID NO: 18218 - DNA, 20 bp, Artificial Sequence
  Description of Artificial Sequence: Synthetic oligonucleotide
  Target: ATXN2; (-) strand; PAM type: NRG; PAM sequence: GAG
tcccagctacttgggaggcg

SEQ ID NO: 18219 - DNA, 20 bp, Artificial Sequence
  Description of Artificial Sequence: Synthetic oligonucleotide
  Target: ATXN2; (-) strand; PAM type: NRG; PAM sequence: CGG
agtcccagctacttgggagg

SEQ ID NO: 18220 - DNA, 20 bp, Artificial Sequence
  Description of Artificial Sequence: Synthetic oligonucleotide
  Target: ATXN2; (-) strand; PAM type: NRG; PAM sequence: AGG
tgtagtcccagctacttggg

SEQ ID NO: 18221 - DNA, 20 bp, Artificial Sequence
  Description of Artificial Sequence: Synthetic oligonucleotide
  Target: ATXN2; (-) strand; PAM type: NRG; PAM sequence: GAG
ctgtagtcccagctacttgg

SEQ ID NO: 18222 - DNA, 20 bp, Artificial Sequence
  Description of Artificial Sequence: Synthetic oligonucleotide
  Target: ATXN2; (-) strand; PAM type: NRG; PAM sequence: GGG
acctgtagtcccagctactt

SEQ ID NO: 18223 - DNA, 20 bp, Artificial Sequence
  Description of Artificial Sequence: Synthetic oligonucleotide
  Target: ATXN2; (-) strand; PAM type: NRG; PAM sequence: TGG
cacctgtagtcccagctact

SEQ ID NO: 18224 - DNA, 20 bp, Artificial Sequence
  Description of Artificial Sequence: Synthetic oligonucleotide
  Target: ATXN2; (-) strand; PAM type: NRG; PAM sequence: CAG
gtggcacgcacctgtagtcc

SEQ ID NO: 18225 - DNA, 20 bp, Artificial Sequence
  Description of Artificial Sequence: Synthetic oligonucleotide
  Target: ATXN2; (-) strand; PAM type: NRG; PAM sequence: TAG
agcatggtggcacgcacctg

SEQ ID NO: 18226 - DNA, 20 bp, Artificial Sequence
  Description of Artificial Sequence: Synthetic oligonucleotide
  Target: ATXN2; (-) strand; PAM type: NRG; PAM sequence: TGG
ctatctctaccaaagcatgg

SEQ ID NO: 18227 - DNA, 20 bp, Artificial Sequence
  Description of Artificial Sequence: Synthetic oligonucleotide
  Target: ATXN2; (-) strand; PAM type: NRG; PAM sequence: TGG
accctatctctaccaaagca

SEQ ID NO: 18228 - DNA, 20 bp, Artificial Sequence
  Description of Artificial Sequence: Synthetic oligonucleotide
  Target: ATXN2; (-) strand; PAM type: NRG; PAM sequence: AAG
gtgaaaccctatctctacca

SEQ ID NO: 18229 - DNA, 20 bp, Artificial Sequence
  Description of Artificial Sequence: Synthetic oligonucleotide
  Target: ATXN2; (-) strand; PAM type: NRG; PAM sequence: TGG
cgagaacagcctggccaaca

SEQ ID NO: 18230 - DNA, 20 bp, Artificial Sequence
  Description of Artificial Sequence: Synthetic oligonucleotide
  Target: ATXN2; (-) strand; PAM type: NRG; PAM sequence: TGG
ccaggagttcgagaacagcc

SEQ ID NO: 18231 - DNA, 20 bp, Artificial Sequence
  Description of Artificial Sequence: Synthetic oligonucleotide
  Target: ATXN2; (-) strand; PAM type: NRG; PAM sequence: CAG
tgaggccaggagttcgagaa

SEQ ID NO: 18232 - DNA, 20 bp, Artificial Sequence
  Description of Artificial Sequence: Synthetic oligonucleotide
  Target: ATXN2; (-) strand; PAM type: NRG; PAM sequence: GAG
ttgcttgaggccaggagttc

SEQ ID NO: 18233 - DNA, 20 bp, Artificial Sequence
  Description of Artificial Sequence: Synthetic oligonucleotide
  Target: ATXN2; (-) strand; PAM type: NRG; PAM sequence: GAG
ggtggattgcttgaggccag

SEQ ID NO: 18234 - DNA, 20 bp, Artificial Sequence
  Description of Artificial Sequence: Synthetic oligonucleotide
  Target: ATXN2; (-) strand; PAM type: NRG; PAM sequence: AGG
tgggtggattgcttgaggcc

SEQ ID NO: 18235 - DNA, 20 bp, Artificial Sequence
  Description of Artificial Sequence: Synthetic oligonucleotide
  Target: ATXN2; (-) strand; PAM type: NRG; PAM sequence: CAG
gtgggtggattgcttgaggc

SEQ ID NO: 18236 - DNA, 20 bp, Artificial Sequence
  Description of Artificial Sequence: Synthetic oligonucleotide
  Target: ATXN2; (-) strand; PAM type: NRG; PAM sequence: AGG
cgaggtgggtggattgcttg

SEQ ID NO: 18237 - DNA, 20 bp, Artificial Sequence
  Description of Artificial Sequence: Synthetic oligonucleotide
  Target: ATXN2; (-) strand; PAM type: NRG; PAM sequence: GAG
ccgaggtgggtggattgctt

SEQ ID NO: 18238 - DNA, 20 bp, Artificial Sequence
  Description of Artificial Sequence: Synthetic oligonucleotide
  Target: ATXN2; (-) strand; PAM type: NRG; PAM sequence: TGG
ctttgggaggccgaggtggg

SEQ ID NO: 18239 - DNA, 20 bp, Artificial Sequence
  Description of Artificial Sequence: Synthetic oligonucleotide
  Target: ATXN2; (-) strand; PAM type: NRG; PAM sequence: GGG
gtactttgggaggccgaggt

SEQ ID NO: 18240 - DNA, 20 bp, Artificial Sequence
  Description of Artificial Sequence: Synthetic oligonucleotide
  Target: ATXN2; (-) strand; PAM type: NRG; PAM sequence: TGG
agtactttgggaggccgagg

SEQ ID NO: 18241 - DNA, 20 bp, Artificial Sequence
  Description of Artificial Sequence: Synthetic oligonucleotide
  Target: ATXN2; (-) strand; PAM type: NRG; PAM sequence: AGG
cccagtactttgggaggccg

SEQ ID NO: 18242 - DNA, 20 bp, Artificial Sequence
  Description of Artificial Sequence: Synthetic oligonucleotide
  Target: ATXN2; (-) strand; PAM type: NRG; PAM sequence: GAG
tcccagtactttgggaggcc

SEQ ID NO: 18243 - DNA, 20 bp, Artificial Sequence
  Description of Artificial Sequence: Synthetic oligonucleotide
  Target: ATXN2; (-) strand; PAM type: NRG; PAM sequence: AGG
tgtaatcccagtactttggg

SEQ ID NO: 18244 - DNA, 20 bp, Artificial Sequence
  Description of Artificial Sequence: Synthetic oligonucleotide
  Target: ATXN2; (-) strand; PAM type: NRG; PAM sequence: GAG
ctgtaatcccagtactttgg

SEQ ID NO: 18245 - DNA, 20 bp, Artificial Sequence
  Description of Artificial Sequence: Synthetic oligonucleotide
  Target: ATXN2; (-) strand; PAM type: NRG; PAM sequence: GGG
gcctgtaatcccagtacttt

SEQ ID NO: 18246 - DNA, 20 bp, Artificial Sequence
  Description of Artificial Sequence: Synthetic oligonucleotide
  Target: ATXN2; (-) strand; PAM type: NRG; PAM sequence: TGG
cgcctgtaatcccagtactt

SEQ ID NO: 18247 - DNA, 20 bp, Artificial Sequence
  Description of Artificial Sequence: Synthetic oligonucleotide
  Target: ATXN2; (-) strand; PAM type: NRG; PAM sequence: CAG
gtggctcacgcctgtaatcc

SEQ ID NO: 18248 - DNA, 20 bp, Artificial Sequence
  Description of Artificial Sequence: Synthetic oligonucleotide
  Target: ATXN2; (-) strand; PAM type: NRG; PAM sequence: TGG
aaaataagggccggacgtgg

SEQ ID NO: 18249 - DNA, 20 bp, Artificial Sequence
  Description of Artificial Sequence: Synthetic oligonucleotide
  Target: ATXN2; (-) strand; PAM type: NRG; PAM sequence: TGG
gtaaaaataagggccggacg

SEQ ID NO: 18250 - DNA, 20 bp, Artificial Sequence
  Description of Artificial Sequence: Synthetic oligonucleotide
  Target: ATXN2; (-) strand; PAM type: NRG; PAM sequence: CGG
caatttgtaaaaataagggc

SEQ ID NO: 18251 - DNA, 20 bp, Artificial Sequence
  Description of Artificial Sequence: Synthetic oligonucleotide
  Target: ATXN2; (-) strand; PAM type: NRG; PAM sequence: GGG
agggcaatttgtaaaaataa

SEQ ID NO: 18252 - DNA, 20 bp, Artificial Sequence
  Description of Artificial Sequence: Synthetic oligonucleotide
  Target: ATXN2; (-) strand; PAM type: NRG; PAM sequence: AGG
tagggcaatttgtaaaaata

SEQ ID NO: 18253 - DNA, 20 bp, Artificial Sequence
  Description of Artificial Sequence: Synthetic oligonucleotide
  Target: ATXN2; (-) strand; PAM type: NRG; PAM sequence: AAG
gtagggcaatttgtaaaaat

SEQ ID NO: 18254 - DNA, 20 bp, Artificial Sequence
  Description of Artificial Sequence: Synthetic oligonucleotide
  Target: ATXN2; (-) strand; PAM type: NRG; PAM sequence: GGG
gtacatttttcctatttgta

SEQ ID NO: 18255 - DNA, 20 bp, Artificial Sequence
  Description of Artificial Sequence: Synthetic oligonucleotide
  Target: ATXN2; (-) strand; PAM type: NRG; PAM sequence: AGG
ggtacatttttcctatttgt

SEQ ID NO: 18256 - DNA, 20 bp, Artificial Sequence
  Description of Artificial Sequence: Synthetic oligonucleotide
  Target: ATXN2; (-) strand; PAM type: NRG; PAM sequence: TAG
aggtacatttttcctatttg

SEQ ID NO: 18257 - DNA, 20 bp, Artificial Sequence
  Description of Artificial Sequence: Synthetic oligonucleotide
  Target: ATXN2; (-) strand; PAM type: NRG; PAM sequence: AGG
cttctggaaatgaactttta

SEQ ID NO: 18258 - DNA, 20 bp, Artificial Sequence
  Description of Artificial Sequence: Synthetic oligonucleotide
  Target: ATXN2; (-) strand; PAM type: NRG; PAM sequence: AAG
tcttctggaaatgaactttt

SEQ ID NO: 18259 - DNA, 20 bp, Artificial Sequence
  Description of Artificial Sequence: Synthetic oligonucleotide
  Target: ATXN2; (-) strand; PAM type: NRG; PAM sequence: TGG
gtctgggcagagctttcttc

SEQ ID NO: 18260 - DNA, 20 bp, Artificial Sequence
  Description of Artificial Sequence: Synthetic oligonucleotide
  Target: ATXN2; (-) strand; PAM type: NRG; PAM sequence: GAG
tcatggagaaagtctgggca

SEQ ID NO: 18261 - DNA, 20 bp, Artificial Sequence
  Description of Artificial Sequence: Synthetic oligonucleotide
  Target: ATXN2; (-) strand; PAM type: NRG; PAM sequence: CAG
cttcatggagaaagtctggg

SEQ ID NO: 18262 - DNA, 20 bp, Artificial Sequence
  Description of Artificial Sequence: Synthetic oligonucleotide
  Target: ATXN2; (-) strand; PAM type: NRG; PAM sequence: GGG
ctccttcatggagaaagtct

SEQ ID NO: 18263 - DNA, 20 bp, Artificial Sequence
  Description of Artificial Sequence: Synthetic oligonucleotide
  Target: ATXN2; (-) strand; PAM type: NRG; PAM sequence: TGG
gctccttcatggagaaagtc

SEQ ID NO: 18264 - DNA, 20 bp, Artificial Sequence
  Description of Artificial Sequence: Synthetic oligonucleotide
  Target: ATXN2; (-) strand; PAM type: NRG; PAM sequence: AAG
tagttgctccttcatggaga

SEQ ID NO: 18265 - DNA, 20 bp, Artificial Sequence
  Description of Artificial Sequence: Synthetic oligonucleotide
  Target: ATXN2; (-) strand; PAM type: NRG; PAM sequence: GAG
gaaatagttgctccttcatg

SEQ ID NO: 18266 - DNA, 20 bp, Artificial Sequence
  Description of Artificial Sequence: Synthetic oligonucleotide
  Target: ATXN2; (-) strand; PAM type: NRG; PAM sequence: TGG
cagaaatagttgctccttca

SEQ ID NO: 18267 - DNA, 20 bp, Artificial Sequence
  Description of Artificial Sequence: Synthetic oligonucleotide
  Target: ATXN2; (-) strand; PAM type: NRG; PAM sequence: TAG
cctggcaaaaagtacagaaa

SEQ ID NO: 18268 - DNA, 20 bp, Artificial Sequence
  Description of Artificial Sequence: Synthetic oligonucleotide
  Target: ATXN2; (-) strand; PAM type: NRG; PAM sequence: CAG
tccccacctggcaaaaagta

SEQ ID NO: 18269 - DNA, 20 bp, Artificial Sequence
  Description of Artificial Sequence: Synthetic oligonucleotide
  Target: ATXN2; (-) strand; PAM type: NRG; PAM sequence: AAG
ccctctccccacctggcaaa

SEQ ID NO: 18270 - DNA, 20 bp, Artificial Sequence
  Description of Artificial Sequence: Synthetic oligonucleotide
  Target: ATXN2; (-) strand; PAM type: NRG; PAM sequence: TGG
acaggtcccctctccccacc

SEQ ID NO: 18271 - DNA, 20 bp, Artificial Sequence
  Description of Artificial Sequence: Synthetic oligonucleotide
  Target: ATXN2; (-) strand; PAM type: NRG; PAM sequence: AGG
gtcattatcttggacagcac

SEQ ID NO: 18272 - DNA, 20 bp, Artificial Sequence
  Description of Artificial Sequence: Synthetic oligonucleotide
  Target: ATXN2; (-) strand; PAM type: NRG; PAM sequence: CAG
ggtcattatcttggacagca

SEQ ID NO: 18273 - DNA, 20 bp, Artificial Sequence
  Description of Artificial Sequence: Synthetic oligonucleotide
  Target: ATXN2; (-) strand; PAM type: NRG; PAM sequence: CAG
tctcaggtcattatcttgga

SEQ ID NO: 18274 - DNA, 20 bp, Artificial Sequence
  Description of Artificial Sequence: Synthetic oligonucleotide
  Target: ATXN2; (-) strand; PAM type: NRG; PAM sequence: TGG
gacctctcaggtcattatct

SEQ ID NO: 18275 - DNA, 20 bp, Artificial Sequence
  Description of Artificial Sequence: Synthetic oligonucleotide
  Target: ATXN2; (-) strand; PAM type: NRG; PAM sequence: AGG
gcaagagatcatgacctctc

SEQ ID NO: 18276 - DNA, 20 bp, Artificial Sequence
  Description of Artificial Sequence: Synthetic oligonucleotide
  Target: ATXN2; (-) strand; PAM type: NRG; PAM sequence: CAG
agcaagagatcatgacctct

SEQ ID NO: 18277 - DNA, 20 bp, Artificial Sequence
  Description of Artificial Sequence: Synthetic oligonucleotide
  Target: ATXN2; (-) strand; PAM type: NRG; PAM sequence: GAG
gatatcttgagcttaagcaa

SEQ ID NO: 18278 - DNA, 20 bp, Artificial Sequence
  Description of Artificial Sequence: Synthetic oligonucleotide
  Target: ATXN2; (-) strand; PAM type: NRG; PAM sequence: AAG
aggatatcttgagcttaagc

SEQ ID NO: 18279 - DNA, 20 bp, Artificial Sequence
  Description of Artificial Sequence: Synthetic oligonucleotide
  Target: ATXN2; (-) strand; PAM type: NRG; PAM sequence: AAG
cctcaggatatcttgagctt

SEQ ID NO: 18280 - DNA, 20 bp, Artificial Sequence
  Description of Artificial Sequence: Synthetic oligonucleotide
  Target: ATXN2; (-) strand; PAM type: NRG; PAM sequence: GAG
cagacccctcaggatatctt

SEQ ID NO: 18281 - DNA, 20 bp, Artificial Sequence
  Description of Artificial Sequence: Synthetic oligonucleotide
  Target: ATXN2; (-) strand; PAM type: NRG; PAM sequence: AGG
attcaggaagcagacccctc

SEQ ID NO: 18282 - DNA, 20 bp, Artificial Sequence
  Description of Artificial Sequence: Synthetic oligonucleotide
  Target: ATXN2; (-) strand; PAM type: NRG; PAM sequence: CAG
tattcaggaagcagacccct

SEQ ID NO: 18283 - DNA, 20 bp, Artificial Sequence
  Description of Artificial Sequence: Synthetic oligonucleotide
  Target: ATXN2; (-) strand; PAM type: NRG; PAM sequence: CAG
aaaataaaatattcaggaag

SEQ ID NO: 18284 - DNA, 20 bp, Artificial Sequence
  Description of Artificial Sequence: Synthetic oligonucleotide
  Target: ATXN2; (-) strand; PAM type: NRG; PAM sequence: AAG
caaaaaataaaatattcagg

SEQ ID NO: 18285 - DNA, 20 bp, Artificial Sequence
  Description of Artificial Sequence: Synthetic oligonucleotide
  Target: ATXN2; (-) strand; PAM type: NRG; PAM sequence: AGG
tctcaaaaaataaaatattc

SEQ ID NO: 18286 - DNA, 20 bp, Artificial Sequence
  Description of Artificial Sequence: Synthetic oligonucleotide
  Target: ATXN2; (-) strand; PAM type: NRG; PAM sequence: CAG
gtctcaaaaaataaaatatt

SEQ ID NO: 18287 - DNA, 20 bp, Artificial Sequence
  Description of Artificial Sequence: Synthetic oligonucleotide
  Target: ATXN2; (-) strand; PAM type: NRG; PAM sequence: GAG
ccactccagcctgggtggca

SEQ ID NO: 18288 - DNA, 20 bp, Artificial Sequence
  Description of Artificial Sequence: Synthetic oligonucleotide
  Target: ATXN2; (-) strand; PAM type: NRG; PAM sequence: CAG
ctccactccagcctgggtgg

SEQ ID NO: 18289 - DNA, 20 bp, Artificial Sequence
  Description of Artificial Sequence: Synthetic oligonucleotide
  Target: ATXN2; (-) strand; PAM type: NRG; PAM sequence: TGG
ccactccactccagcctggg

SEQ ID NO: 18290 - DNA, 20 bp, Artificial Sequence
  Description of Artificial Sequence: Synthetic oligonucleotide
  Target: ATXN2; (-) strand; PAM type: NRG; PAM sequence: GGG
gtgccactccactccagcct

SEQ ID NO: 18291 - DNA, 20 bp, Artificial Sequence
  Description of Artificial Sequence: Synthetic oligonucleotide
  Target: ATXN2; (-) strand; PAM type: NRG; PAM sequence: TGG
cgtgccactccactccagcc

SEQ ID NO: 18292 - DNA, 20 bp, Artificial Sequence
  Description of Artificial Sequence: Synthetic oligonucleotide
  Target: ATXN2; (-) strand; PAM type: NRG; PAM sequence: CAG
gaagtcgtgccactccactc

SEQ ID NO: 18293 - DNA, 20 bp, Artificial Sequence
  Description of Artificial Sequence: Synthetic oligonucleotide
  Target: ATXN2; (-) strand; PAM type: NRG; PAM sequence: AAG
gcagaggttgcagtgagccg

SEQ ID NO: 18294 - DNA, 20 bp, Artificial Sequence
  Description of Artificial Sequence: Synthetic oligonucleotide
  Target: ATXN2; (-) strand; PAM type: NRG; PAM sequence: GAG
tgggaggcagaggttgcagt

SEQ ID NO: 18295 - DNA, 20 bp, Artificial Sequence
  Description of Artificial Sequence: Synthetic oligonucleotide
  Target: ATXN2; (-) strand; PAM type: NRG; PAM sequence: CAG
aacttgggaggcagaggttg

SEQ ID NO: 18296 - DNA, 20 bp, Artificial Sequence
  Description of Artificial Sequence: Synthetic oligonucleotide
  Target: ATXN2; (-) strand; PAM type: NRG; PAM sequence: AGG
tgcttgaacttgggaggcag

SEQ ID NO: 18297 - DNA, 20 bp, Artificial Sequence
  Description of Artificial Sequence: Synthetic oligonucleotide
  Target: ATXN2; (-) strand; PAM type: NRG; PAM sequence: GAG
ttgcttgaacttgggaggca

SEQ ID NO: 18298 - DNA, 20 bp, Artificial Sequence
  Description of Artificial Sequence: Synthetic oligonucleotide
  Target: ATXN2; (-) strand; PAM type: NRG; PAM sequence: CAG
aattgcttgaacttgggagg

SEQ ID NO: 18299 - DNA, 20 bp, Artificial Sequence
  Description of Artificial Sequence: Synthetic oligonucleotide
  Target: ATXN2; (-) strand; PAM type: NRG; PAM sequence: AGG
gagaattgcttgaacttggg

SEQ ID NO: 18300 - DNA, 20 bp, Artificial Sequence
  Description of Artificial Sequence: Synthetic oligonucleotide
  Target: ATXN2; (-) strand; PAM type: NRG; PAM sequence: GAG
ggagaattgcttgaacttgg

SEQ ID NO: 18301 - DNA, 20 bp, Artificial Sequence
  Description of Artificial Sequence: Synthetic oligonucleotide
  Target: ATXN2; (-) strand; PAM type: NRG; PAM sequence: GGG
caggagaattgcttgaactt

SEQ ID NO: 18302 - DNA, 20 bp, Artificial Sequence
  Description of Artificial Sequence: Synthetic oligonucleotide
  Target: ATXN2; (-) strand; PAM type: NRG; PAM sequence: TGG
acaggagaattgcttgaact

SEQ ID NO: 18303 - DNA, 20 bp, Artificial Sequence
  Description of Artificial Sequence: Synthetic oligonucleotide
  Target: ATXN2; (-) strand; PAM type: NRG; PAM sequence: GAG
tactagggaggctgagacag

SEQ ID NO: 18304 - DNA, 20 bp, Artificial Sequence
  Description of Artificial Sequence: Synthetic oligonucleotide
  Target: ATXN2; (-) strand; PAM type: NRG; PAM sequence: AGG
gctactagggaggctgagac

SEQ ID NO: 18305 - DNA, 20 bp, Artificial Sequence
  Description of Artificial Sequence: Synthetic oligonucleotide
  Target: ATXN2; (-) strand; PAM type: NRG; PAM sequence: CAG
agctactagggaggctgaga

SEQ ID NO: 18306 - DNA, 20 bp, Artificial Sequence
  Description of Artificial Sequence: Synthetic oligonucleotide
  Target: ATXN2; (-) strand; PAM type: NRG; PAM sequence: GAG
tctcagctactagggaggct

SEQ ID NO: 18307 - DNA, 20 bp, Artificial Sequence
  Description of Artificial Sequence: Synthetic oligonucleotide
  Target: ATXN2; (-) strand; PAM type: NRG; PAM sequence: AGG
tataatctcagctactaggg

SEQ ID NO: 18308 - DNA, 20 bp, Artificial Sequence
  Description of Artificial Sequence: Synthetic oligonucleotide
  Target: ATXN2; (-) strand; PAM type: NRG; PAM sequence: GAG
ctataatctcagctactagg

SEQ ID NO: 18309 - DNA, 20 bp, Artificial Sequence
  Description of Artificial Sequence: Synthetic oligonucleotide
  Target: ATXN2; (-) strand; PAM type: NRG; PAM sequence: GGG
gcctataatctcagctacta

SEQ ID NO: 18310 - DNA, 20 bp, Artificial Sequence
  Description of Artificial Sequence: Synthetic oligonucleotide
  Target: ATXN2; (-) strand; PAM type: NRG; PAM sequence: AGG
cgcctataatctcagctact

SEQ ID NO: 18311 - DNA, 20 bp, Artificial Sequence
  Description of Artificial Sequence: Synthetic oligonucleotide
  Target: ATXN2; (-) strand; PAM type: NRG; PAM sequence: TAG
gcgcctataatctcagctac

SEQ ID NO: 18312 - DNA, 20 bp, Artificial Sequence
  Description of Artificial Sequence: Synthetic oligonucleotide
  Target: ATXN2; (-) strand; PAM type: NRG; PAM sequence: CAG
ctggcatgcgcctataatct

SEQ ID NO: 18313 - DNA, 20 bp, Artificial Sequence
  Description of Artificial Sequence: Synthetic oligonucleotide
  Target: ATXN2; (-) strand; PAM type: NRG; PAM sequence: TGG
caaaaatcagccatgcatgc

SEQ ID NO: 18314 - DNA, 20 bp, Artificial Sequence
  Description of Artificial Sequence: Synthetic oligonucleotide
  Target: ATXN2; (-) strand; PAM type: NRG; PAM sequence: CAG
ctactaaaaaatacaaaaat

SEQ ID NO: 18315 - DNA, 20 bp, Artificial Sequence
  Description of Artificial Sequence: Synthetic oligonucleotide
  Target: ATXN2; (-) strand; PAM type: NRG; PAM sequence: TGG
caagaccagcctagccaaca

SEQ ID NO: 18316 - DNA, 20 bp, Artificial Sequence
  Description of Artificial Sequence: Synthetic oligonucleotide
  Target: ATXN2; (-) strand; PAM type: NRG; PAM sequence: TAG
tcagcagttcaagaccagcc

SEQ ID NO: 18317 - DNA, 20 bp, Artificial Sequence
  Description of Artificial Sequence: Synthetic oligonucleotide
  Target: ATXN2; (-) strand; PAM type: NRG; PAM sequence: CAG
tgaggtcagcagttcaagac

SEQ ID NO: 18318 - DNA, 20 bp, Artificial Sequence
  Description of Artificial Sequence: Synthetic oligonucleotide
  Target: ATXN2; (-) strand; PAM type: NRG; PAM sequence: AAG
tcatctgaggtcagcagttc

SEQ ID NO: 18319 - DNA, 20 bp, Artificial Sequence
  Description of Artificial Sequence: Synthetic oligonucleotide
  Target: ATXN2; (-) strand; PAM type: NRG; PAM sequence: CAG
ggtggatcatctgaggtcag

SEQ ID NO: 18320 - DNA, 20 bp, Artificial Sequence
  Description of Artificial Sequence: Synthetic oligonucleotide
  Target: ATXN2; (-) strand; PAM type: NRG; PAM sequence: CAG
gcgggtggatcatctgaggt

SEQ ID NO: 18321 - DNA, 20 bp, Artificial Sequence
  Description of Artificial Sequence: Synthetic oligonucleotide
  Target: ATXN2; (-) strand; PAM type: NRG; PAM sequence: AGG
tgaggcgggtggatcatctg

SEQ ID NO: 18322 - DNA, 20 bp, Artificial Sequence
  Description of Artificial Sequence: Synthetic oligonucleotide
  Target: ATXN2; (-) strand; PAM type: NRG; PAM sequence: GAG
ctgaggcgggtggatcatct

SEQ ID NO: 18323 - DNA, 20 bp, Artificial Sequence
  Description of Artificial Sequence: Synthetic oligonucleotide
  Target: ATXN2; (-) strand; PAM type: NRG; PAM sequence: TGG
ctttgggaggctgaggcggg

SEQ ID NO: 18324 - DNA, 20 bp, Artificial Sequence
  Description of Artificial Sequence: Synthetic oligonucleotide
  Target: ATXN2; (-) strand; PAM type: NRG; PAM sequence: GGG
gtgctttgggaggctgaggc

SEQ ID NO: 18325 - DNA, 20 bp, Artificial Sequence
  Description of Artificial Sequence: Synthetic oligonucleotide
  Target: ATXN2; (-) strand; PAM type: NRG; PAM sequence: CGG
agtgctttgggaggctgagg

SEQ ID NO: 18326 - DNA, 20 bp, Artificial Sequence
  Description of Artificial Sequence: Synthetic oligonucleotide
  Target: ATXN2; (-) strand; PAM type: NRG; PAM sequence: AGG
cccagtgctttgggaggctg

SEQ ID NO: 18327 - DNA, 20 bp, Artificial Sequence
  Description of Artificial Sequence: Synthetic oligonucleotide
  Target: ATXN2; (-) strand; PAM type: NRG; PAM sequence: GAG
tcccagtgctttgggaggct

SEQ ID NO: 18328 - DNA, 20 bp, Artificial Sequence
  Description of Artificial Sequence: Synthetic oligonucleotide
  Target: ATXN2; (-) strand; PAM type: NRG; PAM sequence: AGG
tgtaatcccagtgctttggg

SEQ ID NO: 18329 - DNA, 20 bp, Artificial Sequence
  Description of Artificial Sequence: Synthetic oligonucleotide
  Target: ATXN2; (-) strand; PAM type: NRG; PAM sequence: GAG
ctgtaatcccagtgctttgg

SEQ ID NO: 18330 - DNA, 20 bp, Artificial Sequence
  Description of Artificial Sequence: Synthetic oligonucleotide
  Target: ATXN2; (-) strand; PAM type: NRG; PAM sequence: GGG
acctgtaatcccagtgcttt

SEQ ID NO: 18331 - DNA, 20 bp, Artificial Sequence
  Description of Artificial Sequence: Synthetic oligonucleotide
  Target: ATXN2; (-) strand; PAM type: NRG; PAM sequence: TGG
cacctgtaatcccagtgctt

SEQ ID NO: 18332 - DNA, 20 bp, Artificial Sequence
  Description of Artificial Sequence: Synthetic oligonucleotide
  Target: ATXN2; (-) strand; PAM type: NRG; PAM sequence: CAG
gtggctcacacctgtaatcc

SEQ ID NO: 18333 - DNA, 20 bp, Artificial Sequence
  Description of Artificial Sequence: Synthetic oligonucleotide
  Target: ATXN2; (-) strand; PAM type: NRG; PAM sequence: TGG
tcaggaagggccaggcacgg

SEQ ID NO: 18334 - DNA, 20 bp, Artificial Sequence
  Description of Artificial Sequence: Synthetic oligonucleotide
  Target: ATXN2; (-) strand; PAM type: NRG; PAM sequence: CGG
tactcaggaagggccaggca

SEQ ID NO: 18335 - DNA, 20 bp, Artificial Sequence
  Description of Artificial Sequence: Synthetic oligonucleotide
  Target: ATXN2; (-) strand; PAM type: NRG; PAM sequence: AGG
taaaatactcaggaagggcc

SEQ ID NO: 18336 - DNA, 20 bp, Artificial Sequence
  Description of Artificial Sequence: Synthetic oligonucleotide
  Target: ATXN2; (-) strand; PAM type: NRG; PAM sequence: CAG
ttaaaatactcaggaagggc

SEQ ID NO: 18337 - DNA, 20 bp, Artificial Sequence
  Description of Artificial Sequence: Synthetic oligonucleotide
  Target: ATXN2; (-) strand; PAM type: NRG; PAM sequence: GGG
aggtttaaaatactcaggaa

SEQ ID NO: 18338 - DNA, 20 bp, Artificial Sequence
  Description of Artificial Sequence: Synthetic oligonucleotide
  Target: ATXN2; (-) strand; PAM type: NRG; PAM sequence: AGG
aaggtttaaaatactcagga

SEQ ID NO: 18339 - DNA, 20 bp, Artificial Sequence
  Description of Artificial Sequence: Synthetic oligonucleotide
  Target: ATXN2; (-) strand; PAM type: NRG; PAM sequence: AAG
aaaggtttaaaatactcagg

SEQ ID NO: 18340 - DNA, 20 bp, Artificial Sequence
  Description of Artificial Sequence: Synthetic oligonucleotide
  Target: ATXN2; (-) strand; PAM type: NRG; PAM sequence: AGG
gctaaaggtttaaaatactc

SEQ ID NO: 18341 - DNA, 20 bp, Artificial Sequence
  Description of Artificial Sequence: Synthetic oligonucleotide
  Target: ATXN2; (-) strand; PAM type: NRG; PAM sequence: CAG
ggctaaaggtttaaaatact

SEQ ID NO: 18342 - DNA, 20 bp, Artificial Sequence
  Description of Artificial Sequence: Synthetic oligonucleotide
  Target: ATXN2; (-) strand; PAM type: NRG; PAM sequence: AGG
tcagtcctgtgcatggctaa

SEQ ID NO: 18343 - DNA, 20 bp, Artificial Sequence
  Description of Artificial Sequence: Synthetic oligonucleotide
  Target: ATXN2; (-) strand; PAM type: NRG; PAM sequence: AAG
ttcagtcctgtgcatggcta

SEQ ID NO: 18344 - DNA, 20 bp, Artificial Sequence
  Description of Artificial Sequence: Synthetic oligonucleotide
  Target: ATXN2; (-) strand; PAM type: NRG; PAM sequence: TGG
aaacttttcagtcctgtgca

SEQ ID NO: 18345 - DNA, 20 bp, Artificial Sequence
  Description of Artificial Sequence: Synthetic oligonucleotide
  Target: ATXN2; (-) strand; PAM type: NRG; PAM sequence: CAG
atactaagggaaaaactttt

SEQ ID NO: 18346 - DNA, 20 bp, Artificial Sequence
  Description of Artificial Sequence: Synthetic oligonucleotide
  Target: ATXN2; (-) strand; PAM type: NRG; PAM sequence: GGG
taggattgatgaaatactaa

SEQ ID NO: 18347 - DNA, 20 bp, Artificial Sequence
  Description of Artificial Sequence: Synthetic oligonucleotide
  Target: ATXN2; (-) strand; PAM type: NRG; PAM sequence: AGG
ataggattgatgaaatacta

SEQ ID NO: 18348 - DNA, 20 bp, Artificial Sequence
  Description of Artificial Sequence: Synthetic oligonucleotide
  Target: ATXN2; (-) strand; PAM type: NRG; PAM sequence: AAG
aataggattgatgaaatact

SEQ ID NO: 18349 - DNA, 20 bp, Artificial Sequence
  Description of Artificial Sequence: Synthetic oligonucleotide
  Target: ATXN2; (-) strand; PAM type: NRG; PAM sequence: AGG
accaggatttttaattgaat

SEQ ID NO: 18350 - DNA, 20 bp, Artificial Sequence
  Description of Artificial Sequence: Synthetic oligonucleotide
  Target: ATXN2; (-) strand; PAM type: NRG; PAM sequence: TAG
taccaggatttttaattgaa

SEQ ID NO: 18351 - DNA, 20 bp, Artificial Sequence
  Description of Artificial Sequence: Synthetic oligonucleotide
  Target: ATXN2; (-) strand; PAM type: NRG; PAM sequence: AGG
agatgaaatttatgcctacc

SEQ ID NO: 18352 - DNA, 20 bp, Artificial Sequence
  Description of Artificial Sequence: Synthetic oligonucleotide
  Target: ATXN2; (-) strand; PAM type: NRG; PAM sequence: CAG
aagatgaaatttatgcctac

SEQ ID NO: 18353 - DNA, 20 bp, Artificial Sequence
  Description of Artificial Sequence: Synthetic oligonucleotide
  Target: ATXN2; (-) strand; PAM type: NRG; PAM sequence: AAG
atgtttatttatattctgat

SEQ ID NO: 18354 - DNA, 20 bp, Artificial Sequence
  Description of Artificial Sequence: Synthetic oligonucleotide
  Target: ATXN2; (-) strand; PAM type: NRG; PAM sequence: TGG
cacaccccaagccacaagct

SEQ ID NO: 18355 - DNA, 20 bp, Artificial Sequence
  Description of Artificial Sequence: Synthetic oligonucleotide
  Target: ATXN2; (-) strand; PAM type: NRG; PAM sequence: AAG
acacacacaccccaagccac

SEQ ID NO: 18356 - DNA, 20 bp, Artificial Sequence
  Description of Artificial Sequence: Synthetic oligonucleotide
  Target: ATXN2; (-) strand; PAM type: NRG; PAM sequence: AAG
cacacacacacacacacccc

SEQ ID NO: 18357 - DNA, 20 bp, Artificial Sequence
  Description of Artificial Sequence: Synthetic oligonucleotide
  Target: ATXN2; (-) strand; PAM type: NRG; PAM sequence: TGG
acacacccaagccacaagct

SEQ ID NO: 18358 - DNA, 20 bp, Artificial Sequence
  Description of Artificial Sequence: Synthetic oligonucleotide
  Target: ATXN2; (-) strand; PAM type: NRG; PAM sequence: AAG
aacacacacacccaagccac

SEQ ID NO: 18359 - DNA, 20 bp, Artificial Sequence
  Description of Artificial Sequence: Synthetic oligonucleotide
  Target: ATXN2; (-) strand; PAM type: NRG; PAM sequence: AAG
acacacaaacacacacaccc

SEQ ID NO: 18360 - DNA, 20 bp, Artificial Sequence
  Description of Artificial Sequence: Synthetic oligonucleotide
  Target: ATXN2; (-) strand; PAM type: NRG; PAM sequence: CAG
tgttagagaaacttcctaaa

SEQ ID NO: 18361 - DNA, 20 bp, Artificial Sequence
  Description of Artificial Sequence: Synthetic oligonucleotide
  Target: ATXN2; (-) strand; PAM type: NRG; PAM sequence: GAG
gcctaatattttccttgtta

SEQ ID NO: 18362 - DNA, 20 bp, Artificial Sequence
  Description of Artificial Sequence: Synthetic oligonucleotide
  Target: ATXN2; (-) strand; PAM type: NRG; PAM sequence: TAG
atgcctaatattttccttgt

SEQ ID NO: 18363 - DNA, 20 bp, Artificial Sequence
  Description of Artificial Sequence: Synthetic oligonucleotide
  Target: ATXN2; (-) strand; PAM type: NRG; PAM sequence: GGG
cataccaagcaaatgtgact

SEQ ID NO: 18364 - DNA, 20 bp, Artificial Sequence
  Description of Artificial Sequence: Synthetic oligonucleotide
  Target: ATXN2; (-) strand; PAM type: NRG; PAM sequence: TGG
gcataccaagcaaatgtgac

SEQ ID NO: 18365 - DNA, 20 bp, Artificial Sequence
  Description of Artificial Sequence: Synthetic oligonucleotide
  Target: ATXN2; (-) strand; PAM type: NRG; PAM sequence: AAG
gaaatcaatttttgcatacc

SEQ ID NO: 18366 - DNA, 20 bp, Artificial Sequence
  Description of Artificial Sequence: Synthetic oligonucleotide
  Target: ATXN2; (-) strand; PAM type: NRG; PAM sequence: CAG
aatgaaaaatggagttgttt

SEQ ID NO: 18367 - DNA, 20 bp, Artificial Sequence
  Description of Artificial Sequence: Synthetic oligonucleotide
  Target: ATXN2; (-) strand; PAM type: NRG; PAM sequence: GAG
gctggagttaatgaaaaatg

SEQ ID NO: 18368 - DNA, 20 bp, Artificial Sequence
  Description of Artificial Sequence: Synthetic oligonucleotide
  Target: ATXN2; (-) strand; PAM type: NRG; PAM sequence: TGG
aggctggagttaatgaaaaa

SEQ ID NO: 18369 - DNA, 20 bp, Artificial Sequence
  Description of Artificial Sequence: Synthetic oligonucleotide
  Target: ATXN2; (-) strand; PAM type: NRG; PAM sequence: GAG
tacccaatttaagaaggctg

SEQ ID NO: 18370 - DNA, 20 bp, Artificial Sequence
  Description of Artificial Sequence: Synthetic oligonucleotide
  Target: ATXN2; (-) strand; PAM type: NRG; PAM sequence: TGG
aatacccaatttaagaaggc

SEQ ID NO: 18371 - DNA, 20 bp, Artificial Sequence
  Description of Artificial Sequence: Synthetic oligonucleotide
  Target: ATXN2; (-) strand; PAM type: NRG; PAM sequence: AGG
tggaaatacccaatttaaga

SEQ ID NO: 18372 - DNA, 20 bp, Artificial Sequence
  Description of Artificial Sequence: Synthetic oligonucleotide
  Target: ATXN2; (-) strand; PAM type: NRG; PAM sequence: AAG
atggaaatacccaatttaag

SEQ ID NO: 18373 - DNA, 20 bp, Artificial Sequence
  Description of Artificial Sequence: Synthetic oligonucleotide
  Target: ATXN2; (-) strand; PAM type: NRG; PAM sequence: AAG
aaaatggaaatacccaattt

SEQ ID NO: 18374 - DNA, 20 bp, Artificial Sequence
  Description of Artificial Sequence: Synthetic oligonucleotide
  Target: ATXN2; (-) strand; PAM type: NRG; PAM sequence: TGG
aaataattcagtttttaaaa

SEQ ID NO: 18375 - DNA, 20 bp, Artificial Sequence
  Description of Artificial Sequence: Synthetic oligonucleotide
  Target: ATXN2; (-) strand; PAM type: NRG; PAM sequence: CAG
acttatatatataaataatt

SEQ ID NO: 18376 - DNA, 20 bp, Artificial Sequence
  Description of Artificial Sequence: Synthetic oligonucleotide
  Target: ATXN2; (-) strand; PAM type: NRG; PAM sequence: AAG
tgtgccagtcaaattattga

SEQ ID NO: 18377 - DNA, 20 bp, Artificial Sequence
  Description of Artificial Sequence: Synthetic oligonucleotide
  Target: ATXN2; (-) strand; PAM type: NRG; PAM sequence: CAG
gaacaatattttccttgtgc

SEQ ID NO: 18378 - DNA, 20 bp, Artificial Sequence
  Description of Artificial Sequence: Synthetic oligonucleotide
  Target: ATXN2; (-) strand; PAM type: NRG; PAM sequence: TAG
aaggatacatgttaagggag

SEQ ID NO: 18379 - DNA, 20 bp, Artificial Sequence
  Description of Artificial Sequence: Synthetic oligonucleotide
  Target: ATXN2; (-) strand; PAM type: NRG; PAM sequence: GAG
ttaaaggatacatgttaagg

SEQ ID NO: 18380 - DNA, 20 bp, Artificial Sequence
  Description of Artificial Sequence: Synthetic oligonucleotide
  Target: ATXN2; (-) strand; PAM type: NRG; PAM sequence: GGG
ttttaaaggatacatgttaa

SEQ ID NO: 18381 - DNA, 20 bp, Artificial Sequence
  Description of Artificial Sequence: Synthetic oligonucleotide
  Target: ATXN2; (-) strand; PAM type: NRG; PAM sequence: AGG
tttttaaaggatacatgtta

SEQ ID NO: 18382 - DNA, 20 bp, Artificial Sequence
  Description of Artificial Sequence: Synthetic oligonucleotide
  Target: ATXN2; (-) strand; PAM type: NRG; PAM sequence: AAG
ctttttaaaggatacatgtt

SEQ ID NO: 18383 - DNA, 20 bp, Artificial Sequence
  Description of Artificial Sequence: Synthetic oligonucleotide
  Target: ATXN2; (-) strand; PAM type: NRG; PAM sequence: AGG
tacagtaaaacactttttaa

SEQ ID NO: 18384 - DNA, 20 bp, Artificial Sequence
  Description of Artificial Sequence: Synthetic oligonucleotide
  Target: ATXN2; (-) strand; PAM type: NRG; PAM sequence: AAG
gtacagtaaaacacttttta

SEQ ID NO: 18385 - DNA, 20 bp, Artificial Sequence
  Description of Artificial Sequence: Synthetic oligonucleotide
  Target: ATXN2; (-) strand; PAM type: NRG; PAM sequence: CAG
tatactaatttttaattgta

SEQ ID NO: 18386 - DNA, 20 bp, Artificial Sequence
  Description of Artificial Sequence: Synthetic oligonucleotide
  Target: ATXN2; (-) strand; PAM type: NRG; PAM sequence: GGG
ttctactttgccagtgagtt

SEQ ID NO: 18387 - DNA, 20 bp, Artificial Sequence
  Description of Artificial Sequence: Synthetic oligonucleotide
  Target: ATXN2; (-) strand; PAM type: NRG; PAM sequence: TGG
tttctactttgccagtgagt

SEQ ID NO: 18388 - DNA, 20 bp, Artificial Sequence
  Description of Artificial Sequence: Synthetic oligonucleotide
  Target: ATXN2; (-) strand; PAM type: NRG; PAM sequence: GAG
cttctttctactttgccagt

SEQ ID NO: 18389 - DNA, 20 bp, Artificial Sequence
  Description of Artificial Sequence: Synthetic oligonucleotide
  Target: ATXN2; (-) strand; PAM type: NRG; PAM sequence: CAG
agcccttctttctactttgc

SEQ ID NO: 18390 - DNA, 20 bp, Artificial Sequence
  Description of Artificial Sequence: Synthetic oligonucleotide
  Target: ATXN2; (-) strand; PAM type: NRG; PAM sequence: AAG
ttaccatacaacaaggagac

SEQ ID NO: 18391 - DNA, 20 bp, Artificial Sequence
  Description of Artificial Sequence: Synthetic oligonucleotide
  Target: ATXN2; (-) strand; PAM type: NRG; PAM sequence: GAG
ccaaattaccatacaacaag

SEQ ID NO: 18392 - DNA, 20 bp, Artificial Sequence
  Description of Artificial Sequence: Synthetic oligonucleotide
  Target: ATXN2; (-) strand; PAM type: NRG; PAM sequence: AGG
tcccaaattaccatacaaca

SEQ ID NO: 18393 - DNA, 20 bp, Artificial Sequence
  Description of Artificial Sequence: Synthetic oligonucleotide
  Target: ATXN2; (-) strand; PAM type: NRG; PAM sequence: AAG
gtcccaaattaccatacaac

SEQ ID NO: 18394 - DNA, 20 bp, Artificial Sequence
  Description of Artificial Sequence: Synthetic oligonucleotide
  Target: ATXN2; (-) strand; PAM type: NRG; PAM sequence: CAG
acctttctatttcccaaatt

SEQ ID NO: 18395 - DNA, 20 bp, Artificial Sequence
  Description of Artificial Sequence: Synthetic oligonucleotide
  Target: ATXN2; (-) strand; PAM type: NRG; PAM sequence: AGG
tggaaaatgcacacctcaaa

SEQ ID NO: 18396 - DNA, 20 bp, Artificial Sequence
  Description of Artificial Sequence: Synthetic oligonucleotide
  Target: ATXN2; (-) strand; PAM type: NRG; PAM sequence: AAG
ttggaaaatgcacacctcaa

SEQ ID NO: 18397 - DNA, 20 bp, Artificial Sequence
  Description of Artificial Sequence: Synthetic oligonucleotide
  Target: ATXN2; (-) strand; PAM type: NRG; PAM sequence: TGG
gtcaacctttccagaaaatt

SEQ ID NO: 18398 - DNA, 20 bp, Artificial Sequence
  Description of Artificial Sequence: Synthetic oligonucleotide
  Target: ATXN2; (-) strand; PAM type: NRG; PAM sequence: CAG
tactaatatgtcaacctttc

SEQ ID NO: 18399 - DNA, 20 bp, Artificial Sequence
  Description of Artificial Sequence: Synthetic oligonucleotide
  Target: ATXN2; (-) strand; PAM type: NRG; PAM sequence: AAG
gaattatgcatgaatacaaa

SEQ ID NO: 18400 - DNA, 20 bp, Artificial Sequence
  Description of Artificial Sequence: Synthetic oligonucleotide
  Target: ATXN2; (-) strand; PAM type: NRG; PAM sequence: AAG
aaattctgtagcagtgttta

SEQ ID NO: 18401 - DNA, 20 bp, Artificial Sequence
  Description of Artificial Sequence: Synthetic oligonucleotide
  Target: ATXN2; (-) strand; PAM type: NRG; PAM sequence: CAG
tttcttttaaaattctgtag

SEQ ID NO: 18402 - DNA, 20 bp, Artificial Sequence
  Description of Artificial Sequence: Synthetic oligonucleotide
  Target: ATXN2; (-) strand; PAM type: NRG; PAM sequence: TAG
tcctttcttttaaaattctg

SEQ ID NO: 18403 - DNA, 20 bp, Artificial Sequence
  Description of Artificial Sequence: Synthetic oligonucleotide
  Target: ATXN2; (-) strand; PAM type: NRG; PAM sequence: TAG
aagaacagtgtcttccggtt

SEQ ID NO: 18404 - DNA, 20 bp, Artificial Sequence
  Description of Artificial Sequence: Synthetic oligonucleotide
  Target: ATXN2; (-) strand; PAM type: NRG; PAM sequence: CGG
tacagaagaacagtgtcttc

SEQ ID NO: 18405 - DNA, 20 bp, Artificial Sequence
  Description of Artificial Sequence: Synthetic oligonucleotide
  Target: ATXN2; (-) strand; PAM type: NRG; PAM sequence: CAG
gacacctaagtacagaagaa

SEQ ID NO: 18406 - DNA, 20 bp, Artificial Sequence
  Description of Artificial Sequence: Synthetic oligonucleotide
  Target: ATXN2; (-) strand; PAM type: NRG; PAM sequence: AAG
aacttgacacctaagtacag

SEQ ID NO: 18407 - DNA, 20 bp, Artificial Sequence
  Description of Artificial Sequence: Synthetic oligonucleotide
  Target: ATXN2; (-) strand; PAM type: NRG; PAM sequence: CAG
gacaacttgacacctaagta

SEQ ID NO: 18408 - DNA, 20 bp, Artificial Sequence
  Description of Artificial Sequence: Synthetic oligonucleotide
  Target: ATXN2; (-) strand; PAM type: NRG; PAM sequence: AAG
agcatgacaacttgacacct

SEQ ID NO: 18409 - DNA, 20 bp, Artificial Sequence
  Description of Artificial Sequence: Synthetic oligonucleotide
  Target: ATXN2; (-) strand; PAM type: NRG; PAM sequence: CAG
ccttttacttttaagcaagt

SEQ ID NO: 18410 - DNA, 20 bp, Artificial Sequence
  Description of Artificial Sequence: Synthetic oligonucleotide
  Target: ATXN2; (-) strand; PAM type: NRG; PAM sequence: AAG
tattccttttacttttaagc

SEQ ID NO: 18411 - DNA, 20 bp, Artificial Sequence
  Description of Artificial Sequence: Synthetic oligonucleotide
  Target: ATXN2; (-) strand; PAM type: NRG; PAM sequence: AAG
attttattccttttactttt

SEQ ID NO: 18412 - DNA, 20 bp, Artificial Sequence
  Description of Artificial Sequence: Synthetic oligonucleotide
  Target: ATXN2; (-) strand; PAM type: NRG; PAM sequence: TAG
tgccatgttggtgtttttat

SEQ ID NO: 18413 - DNA, 20 bp, Artificial Sequence
  Description of Artificial Sequence: Synthetic oligonucleotide
  Target: ATXN2; (-) strand; PAM type: NRG; PAM sequence: TGG
tgttcagtagaatgccatgt

SEQ ID NO: 18414 - DNA, 20 bp, Artificial Sequence
  Description of Artificial Sequence: Synthetic oligonucleotide
  Target: ATXN2; (-) strand; PAM type: NRG; PAM sequence: TAG
tttatatcaaggttgttcag

SEQ ID NO: 18415 - DNA, 20 bp, Artificial Sequence
  Description of Artificial Sequence: Synthetic oligonucleotide
  Target: ATXN2; (-) strand; PAM type: NRG; PAM sequence: CAG
tgatttatatcaaggttgtt

SEQ ID NO: 18416 - DNA, 20 bp, Artificial Sequence
  Description of Artificial Sequence: Synthetic oligonucleotide
  Target: ATXN2; (-) strand; PAM type: NRG; PAM sequence: AGG
ttggtacatgatttatatca

SEQ ID NO: 18417 - DNA, 20 bp, Artificial Sequence
  Description of Artificial Sequence: Synthetic oligonucleotide
  Target: ATXN2; (-) strand; PAM type: NRG; PAM sequence: AAG
tttggtacatgatttatatc

SEQ ID NO: 18418 - DNA, 20 bp, Artificial Sequence
  Description of Artificial Sequence: Synthetic oligonucleotide
  Target: ATXN2; (-) strand; PAM type: NRG; PAM sequence: TGG
cttgtaaaatagttttattt

SEQ ID NO: 18419 - DNA, 20 bp, Artificial Sequence
  Description of Artificial Sequence: Synthetic oligonucleotide
  Target: ATXN2; (-) strand; PAM type: NRG; PAM sequence: TAG
attgaattaaacttgtaaaa

SEQ ID NO: 18420 - DNA, 20 bp, Artificial Sequence
  Description of Artificial Sequence: Synthetic oligonucleotide
  Target: ATXN2; (-) strand; PAM type: NRG; PAM sequence: TAG
caggataatgacatttccat

SEQ ID NO: 18421 - DNA, 20 bp, Artificial Sequence
  Description of Artificial Sequence: Synthetic oligonucleotide
  Target: ATXN2; (-) strand; PAM type: NRG; PAM sequence: AGG
ccattactagataatctttc

SEQ ID NO: 18422 - DNA, 20 bp, Artificial Sequence
  Description of Artificial Sequence: Synthetic oligonucleotide
  Target: ATXN2; (-) strand; PAM type: NRG; PAM sequence: CAG
tccattactagataatcttt

SEQ ID NO: 18423 - DNA, 20 bp, Artificial Sequence
  Description of Artificial Sequence: Synthetic oligonucleotide
  Target: ATXN2; (-) strand; PAM type: NRG; PAM sequence: TAG
taaatttttggatccattac

SEQ ID NO: 18424 - DNA, 20 bp, Artificial Sequence
  Description of Artificial Sequence: Synthetic oligonucleotide
  Target: ATXN2; (-) strand; PAM type: NRG; PAM sequence: TGG
ttgctatgatcctaaatttt

SEQ ID NO: 18425 - DNA, 20 bp, Artificial Sequence
  Description of Artificial Sequence: Synthetic oligonucleotide
  Target: ATXN2; (-) strand; PAM type: NRG; PAM sequence: AAG
ttatgtagacatgttttaat

SEQ ID NO: 18426 - DNA, 20 bp, Artificial Sequence
  Description of Artificial Sequence: Synthetic oligonucleotide
  Target: ATXN2; (-) strand; PAM type: NRG; PAM sequence: TAG
aaataccctacccctttatg

SEQ ID NO: 18427 - DNA, 20 bp, Artificial Sequence
  Description of Artificial Sequence: Synthetic oligonucleotide
  Target: ATXN2; (-) strand; PAM type: NRG; PAM sequence: AGG
attttgatgtgtatccttcc

SEQ ID NO: 18428 - DNA, 20 bp, Artificial Sequence
  Description of Artificial Sequence: Synthetic oligonucleotide
  Target: ATXN2; (-) strand; PAM type: NRG; PAM sequence: CAG
cattttgatgtgtatccttc

SEQ ID NO: 18429 - DNA, 20 bp, Artificial Sequence
  Description of Artificial Sequence: Synthetic oligonucleotide
  Target: ATXN2; (-) strand; PAM type: NRG; PAM sequence: AAG
ttaaaaaaaaaaaaaatgaa

SEQ ID NO: 18430 - DNA, 20 bp, Artificial Sequence
  Description of Artificial Sequence: Synthetic oligonucleotide
  Target: ATXN2; (-) strand; PAM type: NRG; PAM sequence: AAG
ataagtaagaaaatatagtt

SEQ ID NO: 18431 - DNA, 20 bp, Artificial Sequence
  Description of Artificial Sequence: Synthetic oligonucleotide
  Target: ATXN2; (-) strand; PAM type: NRG; PAM sequence: TAG
tgcagataagtaagaaaata

SEQ ID NO: 18432 - DNA, 20 bp, Artificial Sequence
  Description of Artificial Sequence: Synthetic oligonucleotide
  Target: ATXN2; (-) strand; PAM type: NRG; PAM sequence: AAG
gtagtttaatgcagataagt

SEQ ID NO: 18433 - DNA, 20 bp, Artificial Sequence
  Description of Artificial Sequence: Synthetic oligonucleotide
  Target: ATXN2; (-) strand; PAM type: NRG; PAM sequence: AAG
tttggtagtttaatgcagat

SEQ ID NO: 18434 - DNA, 20 bp, Artificial Sequence
  Description of Artificial Sequence: Synthetic oligonucleotide
  Target: ATXN2; (-) strand; PAM type: NRG; PAM sequence: CAG
ttgtttttggtagtttaatg

SEQ ID NO: 18435 - DNA, 20 bp, Artificial Sequence
  Description of Artificial Sequence: Synthetic oligonucleotide
  Target: ATXN2; (-) strand; PAM type: NRG; PAM sequence: TAG
cttttttgatttgtttttgg

SEQ ID NO: 18436 - DNA, 20 bp, Artificial Sequence
  Description of Artificial Sequence: Synthetic oligonucleotide
  Target: ATXN2; (-) strand; PAM type: NRG; PAM sequence: TGG
atccttttttgatttgtttt

SEQ ID NO: 18437 - DNA, 20 bp, Artificial Sequence
  Description of Artificial Sequence: Synthetic oligonucleotide
  Target: ATXN2; (-) strand; PAM type: NRG; PAM sequence: CAG
ccattaggaagaattagatc

SEQ ID NO: 18438 - DNA, 20 bp, Artificial Sequence
  Description of Artificial Sequence: Synthetic oligonucleotide
  Target: ATXN2; (-) strand; PAM type: NRG; PAM sequence: TAG
ctagagccattaggaagaat

SEQ ID NO: 18439 - DNA, 20 bp, Artificial Sequence
  Description of Artificial Sequence: Synthetic oligonucleotide
  Target: ATXN2; (-) strand; PAM type: NRG; PAM sequence: AAG
gactaactagagccattagg

SEQ ID NO: 18440 - DNA, 20 bp, Artificial Sequence
  Description of Artificial Sequence: Synthetic oligonucleotide
  Target: ATXN2; (-) strand; PAM type: NRG; PAM sequence: AGG
tccgactaactagagccatt

SEQ ID NO: 18441 - DNA, 20 bp, Artificial Sequence
  Description of Artificial Sequence: Synthetic oligonucleotide
  Target: ATXN2; (-) strand; PAM type: NRG; PAM sequence: TAG
ttccgactaactagagccat

SEQ ID NO: 18442 - DNA, 20 bp, Artificial Sequence
  Description of Artificial Sequence: Synthetic oligonucleotide
  Target: ATXN2; (-) strand; PAM type: NRG; PAM sequence: GAG
acaacttttccgactaacta

SEQ ID NO: 18443 - DNA, 20 bp, Artificial Sequence
  Description of Artificial Sequence: Synthetic oligonucleotide
  Target: ATXN2; (-) strand; PAM type: NRG; PAM sequence: TAG
atacaacttttccgactaac

SEQ ID NO: 18444 - DNA, 20 bp, Artificial Sequence
  Description of Artificial Sequence: Synthetic oligonucleotide
  Target: ATXN2; (-) strand; PAM type: NRG; PAM sequence: CAG
atgcttttacctttcagaaa

SEQ ID NO: 18445 - DNA, 20 bp, Artificial Sequence
  Description of Artificial Sequence: Synthetic oligonucleotide
  Target: ATXN2; (-) strand; PAM type: NRG; PAM sequence: CAG
atggtgatgcttttaccttt

SEQ ID NO: 18446 - DNA, 20 bp, Artificial Sequence
  Description of Artificial Sequence: Synthetic oligonucleotide
  Target: ATXN2; (-) strand; PAM type: NRG; PAM sequence: TGG
atccatctaattttgtttta

SEQ ID NO: 18447 - DNA, 20 bp, Artificial Sequence
  Description of Artificial Sequence: Synthetic oligonucleotide
  Target: ATXN2; (-) strand; PAM type: NRG; PAM sequence: CAG
cagatgtgagccaccacgcc

SEQ ID NO: 18448 - DNA, 20 bp, Artificial Sequence
  Description of Artificial Sequence: Synthetic oligonucleotide
  Target: ATXN2; (-) strand; PAM type: NRG; PAM sequence: GAG
agtgctgggattacagatgt

SEQ ID NO: 18449 - DNA, 20 bp, Artificial Sequence
  Description of Artificial Sequence: Synthetic oligonucleotide
  Target: ATXN2; (-) strand; PAM type: NRG; PAM sequence: CAG
ctcccaaagtgctgggatta

SEQ ID NO: 18450 - DNA, 20 bp, Artificial Sequence
  Description of Artificial Sequence: Synthetic oligonucleotide
  Target: ATXN2; (-) strand; PAM type: NRG; PAM sequence: GGG
cctaggcctcccaaagtgct

SEQ ID NO: 18451 - DNA, 20 bp, Artificial Sequence
  Description of Artificial Sequence: Synthetic oligonucleotide
  Target: ATXN2; (-) strand; PAM type: NRG; PAM sequence: TGG
gcctaggcctcccaaagtgc

SEQ ID NO: 18452 - DNA, 20 bp, Artificial Sequence
  Description of Artificial Sequence: Synthetic oligonucleotide
  Target: ATXN2; (-) strand; PAM type: NRG; PAM sequence: AAG
ttgtctgcctaggcctccca

SEQ ID NO: 18453 - DNA, 20 bp, Artificial Sequence
  Description of Artificial Sequence: Synthetic oligonucleotide
  Target: ATXN2; (-) strand; PAM type: NRG; PAM sequence: AGG
accttgtgatttgtctgcct

SEQ ID NO: 18454 - DNA, 20 bp, Artificial Sequence
  Description of Artificial Sequence: Synthetic oligonucleotide
  Target: ATXN2; (-) strand; PAM type: NRG; PAM sequence: TAG
gaccttgtgatttgtctgcc

SEQ ID NO: 18455 - DNA, 20 bp, Artificial Sequence
  Description of Artificial Sequence: Synthetic oligonucleotide
  Target: ATXN2; (-) strand; PAM type: NRG; PAM sequence: AGG
ggggtttcaccgtcttggcc

SEQ ID NO: 18456 - DNA, 20 bp, Artificial Sequence
  Description of Artificial Sequence: Synthetic oligonucleotide
  Target: ATXN2; (-) strand; PAM type: NRG; PAM sequence: CAG
cggggtttcaccgtcttggc

SEQ ID NO: 18457 - DNA, 20 bp, Artificial Sequence
  Description of Artificial Sequence: Synthetic oligonucleotide
  Target: ATXN2; (-) strand; PAM type: NRG; PAM sequence: TGG
gagacggggtttcaccgtct

SEQ ID NO: 18458 - DNA, 20 bp, Artificial Sequence
  Description of Artificial Sequence: Synthetic oligonucleotide
  Target: ATXN2; (-) strand; PAM type: NRG; PAM sequence: GGG
ttgtatttttagtagagacg

SEQ ID NO: 18459 - DNA, 20 bp, Artificial Sequence
  Description of Artificial Sequence: Synthetic oligonucleotide
  Target: ATXN2; (-) strand; PAM type: NRG; PAM sequence: GGG
tttgtatttttagtagagac

SEQ ID NO: 18460 - DNA, 20 bp, Artificial Sequence
  Description of Artificial Sequence: Synthetic oligonucleotide
  Target: ATXN2; (-) strand; PAM type: NRG; PAM sequence: CGG
ttttgtatttttagtagaga

SEQ ID NO: 18461 - DNA, 20 bp, Artificial Sequence
  Description of Artificial Sequence: Synthetic oligonucleotide
  Target: ATXN2; (-) strand; PAM type: NRG; PAM sequence: GAG
caatttttgtatttttagta

SEQ ID NO: 18462 - DNA, 20 bp, Artificial Sequence
  Description of Artificial Sequence: Synthetic oligonucleotide
  Target: ATXN2; (-) strand; PAM type: NRG; PAM sequence: TAG
gccaatttttgtatttttag

SEQ ID NO: 18463 - DNA, 20 bp, Artificial Sequence
  Description of Artificial Sequence: Synthetic oligonucleotide
  Target: ATXN2; (-) strand; PAM type: NRG; PAM sequence: TAG
ccggccaatttttgtatttt

SEQ ID NO: 18464 - DNA, 20 bp, Artificial Sequence
  Description of Artificial Sequence: Synthetic oligonucleotide
  Target: ATXN2; (-) strand; PAM type: NRG; PAM sequence: CGG
caggtgtgcgccaccacgac

SEQ ID NO: 18465 - DNA, 20 bp, Artificial Sequence
  Description of Artificial Sequence: Synthetic oligonucleotide
  Target: ATXN2; (-) strand; PAM type: NRG; PAM sequence: AGG
tcccgagtaggtgggactac

SEQ ID NO: 18466 - DNA, 20 bp, Artificial Sequence
  Description of Artificial Sequence: Synthetic oligonucleotide
  Target: ATXN2; (-) strand; PAM type: NRG; PAM sequence: CAG
ctcccgagtaggtgggacta

SEQ ID NO: 18467 - DNA, 20 bp, Artificial Sequence
  Description of Artificial Sequence: Synthetic oligonucleotide
  Target: ATXN2; (-) strand; PAM type: NRG; PAM sequence: GGG
cctcagcctcccgagtaggt

SEQ ID NO: 18468 - DNA, 20 bp, Artificial Sequence
  Description of Artificial Sequence: Synthetic oligonucleotide
  Target: ATXN2; (-) strand; PAM type: NRG; PAM sequence: TGG
gcctcagcctcccgagtagg

SEQ ID NO: 18469 - DNA, 20 bp, Artificial Sequence
  Description of Artificial Sequence: Synthetic oligonucleotide
  Target: ATXN2; (-) strand; PAM type: NRG; PAM sequence: AGG
tctgcctcagcctcccgagt

SEQ ID NO: 18470 - DNA, 20 bp, Artificial Sequence
  Description of Artificial Sequence: Synthetic oligonucleotide
  Target: ATXN2; (-) strand; PAM type: NRG; PAM sequence: TAG
ttctgcctcagcctcccgag

SEQ ID NO: 18471 - DNA, 20 bp, Artificial Sequence
  Description of Artificial Sequence: Synthetic oligonucleotide
  Target: ATXN2; (-) strand; PAM type: NRG; PAM sequence: GAG
tttttctgcctcagcctccc

SEQ ID NO: 18472 - DNA, 20 bp, Artificial Sequence
  Description of Artificial Sequence: Synthetic oligonucleotide
  Target: ATXN2; (-) strand; PAM type: NRG; PAM sequence: CAG
ttcaagcggtttttctgcct

SEQ ID NO: 18473 - DNA, 20 bp, Artificial Sequence
  Description of Artificial Sequence: Synthetic oligonucleotide
  Target: ATXN2; (-) strand; PAM type: NRG; PAM sequence: CGG
atctgcctcccaggttcaag

SEQ ID NO: 18474 - DNA, 20 bp, Artificial Sequence
  Description of Artificial Sequence: Synthetic oligonucleotide
  Target: ATXN2; (-) strand; PAM type: NRG; PAM sequence: AAG
aacatctgcctcccaggttc

SEQ ID NO: 18475 - DNA, 20 bp, Artificial Sequence
  Description of Artificial Sequence: Synthetic oligonucleotide
  Target: ATXN2; (-) strand; PAM type: NRG; PAM sequence: AGG
cactgcaacatctgcctccc

SEQ ID NO: 18476 - DNA, 20 bp, Artificial Sequence
  Description of Artificial Sequence: Synthetic oligonucleotide
  Target: ATXN2; (-) strand; PAM type: NRG; PAM sequence: CAG
tcactgcaacatctgcctcc

SEQ ID NO: 18477 - DNA, 20 bp, Artificial Sequence
  Description of Artificial Sequence: Synthetic oligonucleotide
  Target: ATXN2; (-) strand; PAM type: NRG; PAM sequence: CAG
gaagtgcagcggtgcgatct

SEQ ID NO: 18478 - DNA, 20 bp, Artificial Sequence
  Description of Artificial Sequence: Synthetic oligonucleotide
  Target: ATXN2; (-) strand; PAM type: NRG; PAM sequence: CGG
tcacccattctgaagtgcag

SEQ ID NO: 18479 - DNA, 20 bp, Artificial Sequence
  Description of Artificial Sequence: Synthetic oligonucleotide
  Target: ATXN2; (-) strand; PAM type: NRG; PAM sequence: CAG
ctgtcacccattctgaagtg

SEQ ID NO: 18480 - DNA, 20 bp, Artificial Sequence
  Description of Artificial Sequence: Synthetic oligonucleotide
  Target: ATXN2; (-) strand; PAM type: NRG; PAM sequence: AAG
tcactctgtcacccattctg

SEQ ID NO: 18481 - DNA, 20 bp, Artificial Sequence
  Description of Artificial Sequence: Synthetic oligonucleotide
  Target: ATXN2; (-) strand; PAM type: NRG; PAM sequence: TAG
ttttttttttttttttgagg

SEQ ID NO: 18482 - DNA, 20 bp, Artificial Sequence
  Description of Artificial Sequence: Synthetic oligonucleotide
  Target: ATXN2; (-) strand; PAM type: NRG; PAM sequence: AGG
tttttttttttttttttttg

SEQ ID NO: 18483 - DNA, 20 bp, Artificial Sequence
  Description of Artificial Sequence: Synthetic oligonucleotide
  Target: ATXN2; (-) strand; PAM type: NRG; PAM sequence: GAG
tttttttttttttttttttt

SEQ ID NO: 18484 - DNA, 20 bp, Artificial Sequence
  Description of Artificial Sequence: Synthetic oligonucleotide
  Target: ATXN2; (-) strand; PAM type: NRG; PAM sequence: AAG
tctaccccatcccttctaag

SEQ ID NO: 18485 - DNA, 20 bp, Artificial Sequence
  Description of Artificial Sequence: Synthetic oligonucleotide
  Target: ATXN2; (-) strand; PAM type: NRG; PAM sequence: AAG
gcctctaccccatcccttct

SEQ ID NO: 18486 - DNA, 20 bp, Artificial Sequence
  Description of Artificial Sequence: Synthetic oligonucleotide
  Target: ATXN2; (-) strand; PAM type: NRG; PAM sequence: CGG
acaggcgtgagccactgccc

SEQ ID NO: 18487 - DNA, 20 bp, Artificial Sequence
  Description of Artificial Sequence: Synthetic oligonucleotide
  Target: ATXN2; (-) strand; PAM type: NRG; PAM sequence: GAG
agtgctgggattacaggcgt

SEQ ID NO: 18488 - DNA, 20 bp, Artificial Sequence
  Description of Artificial Sequence: Synthetic oligonucleotide
  Target: ATXN2; (-) strand; PAM type: NRG; PAM sequence: AGG
tcccaaagtgctgggattac

SEQ ID NO: 18489 - DNA, 20 bp, Artificial Sequence
  Description of Artificial Sequence: Synthetic oligonucleotide
  Target: ATXN2; (-) strand; PAM type: NRG; PAM sequence: CAG
ctcccaaagtgctgggatta

SEQ ID NO: 18490 - DNA, 20 bp, Artificial Sequence
  Description of Artificial Sequence: Synthetic oligonucleotide
  Target: ATXN2; (-) strand; PAM type: NRG; PAM sequence: GGG
cctcagcctcccaaagtgct

SEQ ID NO: 18491 - DNA, 20 bp, Artificial Sequence
  Description of Artificial Sequence: Synthetic oligonucleotide
  Target: ATXN2; (-) strand; PAM type: NRG; PAM sequence: TGG
acctcagcctcccaaagtgc

SEQ ID NO: 18492 - DNA, 20 bp, Artificial Sequence
  Description of Artificial Sequence: Synthetic oligonucleotide
  Target: ATXN2; (-) strand; PAM type: NRG; PAM sequence: AAG
ccacccacctcagcctccca

SEQ ID NO: 18493 - DNA, 20 bp, Artificial Sequence
  Description of Artificial Sequence: Synthetic oligonucleotide
  Target: ATXN2; (-) strand; PAM type: NRG; PAM sequence: CAG
ctcaggtgatccacccacct

SEQ ID NO: 18494 - DNA, 20 bp, Artificial Sequence
  Description of Artificial Sequence: Synthetic oligonucleotide
  Target: ATXN2; (-) strand; PAM type: NRG; PAM sequence: AGG
ggtcttgaattcccgacctc

SEQ ID NO: 18495 - DNA, 20 bp, Artificial Sequence
  Description of Artificial Sequence: Synthetic oligonucleotide
  Target: ATXN2; (-) strand; PAM type: NRG; PAM sequence: CAG
tggtcttgaattcccgacct

SEQ ID NO: 18496 - DNA, 20 bp, Artificial Sequence
  Description of Artificial Sequence: Synthetic oligonucleotide
  Target: ATXN2; (-) strand; PAM type: NRG; PAM sequence: TGG
tttcaccatgttggtcaggc

SEQ ID NO: 18497 - DNA, 20 bp, Artificial Sequence
  Description of Artificial Sequence: Synthetic oligonucleotide
  Target: ATXN2; (-) strand; PAM type: NRG; PAM sequence: AGG
agggtttcaccatgttggtc

SEQ ID NO: 18498 - DNA, 20 bp, Artificial Sequence
  Description of Artificial Sequence: Synthetic oligonucleotide
  Target: ATXN2; (-) strand; PAM type: NRG; PAM sequence: CAG
cagggtttcaccatgttggt

SEQ ID NO: 18499 - DNA, 20 bp, Artificial Sequence
  Description of Artificial Sequence: Synthetic oligonucleotide
  Target: ATXN2; (-) strand; PAM type: NRG; PAM sequence: TGG
gagacagggtttcaccatgt

SEQ ID NO: 18500 - DNA, 20 bp, Artificial Sequence
  Description of Artificial Sequence: Synthetic oligonucleotide
  Target: ATXN2; (-) strand; PAM type: NRG; PAM sequence: GGG
ttgtgtttttagtagagaca

SEQ ID NO: 18501 - DNA, 20 bp, Artificial Sequence
  Description of Artificial Sequence: Synthetic oligonucleotide
  Target: ATXN2; (-) strand; PAM type: NRG; PAM sequence: AGG
tttgtgtttttagtagagac

SEQ ID NO: 18502 - DNA, 20 bp, Artificial Sequence
  Description of Artificial Sequence: Synthetic oligonucleotide
  Target: ATXN2; (-) strand; PAM type: NRG; PAM sequence: CAG
ttttgtgtttttagtagaga

SEQ ID NO: 18503 - DNA, 20 bp, Artificial Sequence
  Description of Artificial Sequence: Synthetic oligonucleotide
  Target: ATXN2; (-) strand; PAM type: NRG; PAM sequence: GAG
taatttttgtgtttttagta

SEQ ID NO: 18504 - DNA, 20 bp, Artificial Sequence
  Description of Artificial Sequence: Synthetic oligonucleotide
  Target: ATXN2; (-) strand; PAM type: NRG; PAM sequence: TAG
gctaatttttgtgtttttag

SEQ ID NO: 18505 - DNA, 20 bp, Artificial Sequence
  Description of Artificial Sequence: Synthetic oligonucleotide
  Target: ATXN2; (-) strand; PAM type: NRG; PAM sequence: TAG
ctggctaatttttgtgtttt

SEQ ID NO: 18506 - DNA, 20 bp, Artificial Sequence
  Description of Artificial Sequence: Synthetic oligonucleotide
  Target: ATXN2; (-) strand; PAM type: NRG; PAM sequence: TGG
caggtgcccgccaccacacc

SEQ ID NO: 18507 - DNA, 20 bp, Artificial Sequence
  Description of Artificial Sequence: Synthetic oligonucleotide
  Target: ATXN2; (-) strand; PAM type: NRG; PAM sequence: AGG
tcctgagtagctgggactac

SEQ ID NO: 18508 - DNA, 20 bp, Artificial Sequence
  Description of Artificial Sequence: Synthetic oligonucleotide
  Target: ATXN2; (-) strand; PAM type: NRG; PAM sequence: CAG
ctcctgagtagctgggacta

SEQ ID NO: 18509 - DNA, 20 bp, Artificial Sequence
  Description of Artificial Sequence: Synthetic oligonucleotide
  Target: ATXN2; (-) strand; PAM type: NRG; PAM sequence: GGG
cctcagcctcctgagtagct

SEQ ID NO: 18510 - DNA, 20 bp, Artificial Sequence
  Description of Artificial Sequence: Synthetic oligonucleotide
  Target: ATXN2; (-) strand; PAM type: NRG; PAM sequence: TGG
gcctcagcctcctgagtagc

SEQ ID NO: 18511 - DNA, 20 bp, Artificial Sequence
  Description of Artificial Sequence: Synthetic oligonucleotide
  Target: ATXN2; (-) strand; PAM type: NRG; PAM sequence: TAG
tcctgcctcagcctcctgag

SEQ ID NO: 18512 - DNA, 20 bp, Artificial Sequence
  Description of Artificial Sequence: Synthetic oligonucleotide
  Target: ATXN2; (-) strand; PAM type: NRG; PAM sequence: GAG
ttctcctgcctcagcctcct

SEQ ID NO: 18513 - DNA, 20 bp, Artificial Sequence
  Description of Artificial Sequence: Synthetic oligonucleotide
  Target: ATXN2; (-) strand; PAM type: NRG; PAM sequence: CAG
ttcaagcagttctcctgcct

SEQ ID NO: 18514 - DNA, 20 bp, Artificial Sequence
  Description of Artificial Sequence: Synthetic oligonucleotide
  Target: ATXN2; (-) strand; PAM type: NRG; PAM sequence: CAG
ctccgcctcctgggttcaag

SEQ ID NO: 18515 - DNA, 20 bp, Artificial Sequence
  Description of Artificial Sequence: Synthetic oligonucleotide
  Target: ATXN2; (-) strand; PAM type: NRG; PAM sequence: AAG
aaactccgcctcctgggttc

SEQ ID NO: 18516 - DNA, 20 bp, Artificial Sequence
  Description of Artificial Sequence: Synthetic oligonucleotide
  Target: ATXN2; (-) strand; PAM type: NRG; PAM sequence: GGG
ccctgcaaactccgcctcct

SEQ ID NO: 18517 - DNA, 20 bp, Artificial Sequence
  Description of Artificial Sequence: Synthetic oligonucleotide
  Target: ATXN2; (-) strand; PAM type: NRG; PAM sequence: TGG
tccctgcaaactccgcctcc

SEQ ID NO: 18518 - DNA, 20 bp, Artificial Sequence
  Description of Artificial Sequence: Synthetic oligonucleotide
  Target: ATXN2; (-) strand; PAM type: NRG; PAM sequence: CAG
ggagtgcagtggcgcgatct

SEQ ID NO: 18519 - DNA, 20 bp, Artificial Sequence
  Description of Artificial Sequence: Synthetic oligonucleotide
  Target: ATXN2; (-) strand; PAM type: NRG; PAM sequence: TGG
ccacccaggctggagtgcag

SEQ ID NO: 18520 - DNA, 20 bp, Artificial Sequence
  Description of Artificial Sequence: Synthetic oligonucleotide
  Target: ATXN2; (-) strand; PAM type: NRG; PAM sequence: CAG
ctgccacccaggctggagtg

SEQ ID NO: 18521 - DNA, 20 bp, Artificial Sequence
  Description of Artificial Sequence: Synthetic oligonucleotide
  Target: ATXN2; (-) strand; PAM type: NRG; PAM sequence: GAG
tccctctgccacccaggctg

SEQ ID NO: 18522 - DNA, 20 bp, Artificial Sequence
  Description of Artificial Sequence: Synthetic oligonucleotide
  Target: ATXN2; (-) strand; PAM type: NRG; PAM sequence: TGG
tctccctctgccacccaggc

SEQ ID NO: 18523 - DNA, 20 bp, Artificial Sequence
  Description of Artificial Sequence: Synthetic oligonucleotide
  Target: ATXN2; (-) strand; PAM type: NRG; PAM sequence: AGG
ggagtctccctctgccaccc

SEQ ID NO: 18524 - DNA, 20 bp, Artificial Sequence
  Description of Artificial Sequence: Synthetic oligonucleotide
  Target: ATXN2; (-) strand; PAM type: NRG; PAM sequence: CAG
aggagtctccctctgccacc

SEQ ID NO: 18525 - DNA, 20 bp, Artificial Sequence
  Description of Artificial Sequence: Synthetic oligonucleotide
  Target: ATXN2; (-) strand; PAM type: NRG; PAM sequence: GAG
tttttttaatttttgagaag

SEQ ID NO: 18526 - DNA, 20 bp, Artificial Sequence
  Description of Artificial Sequence: Synthetic oligonucleotide
  Target: ATXN2; (-) strand; PAM type: NRG; PAM sequence: AGG
tttttttttaatttttgaga

SEQ ID NO: 18527 - DNA, 20 bp, Artificial Sequence
  Description of Artificial Sequence: Synthetic oligonucleotide
  Target: ATXN2; (-) strand; PAM type: NRG; PAM sequence: AAG
ttttttttttaatttttgag

SEQ ID NO: 18528 - DNA, 20 bp, Artificial Sequence
  Description of Artificial Sequence: Synthetic oligonucleotide
  Target: ATXN2; (-) strand; PAM type: NRG; PAM sequence: GAG
ttattttttttttaattttt

SEQ ID NO: 18529 - DNA, 20 bp, Artificial Sequence
  Description of Artificial Sequence: Synthetic oligonucleotide
  Target: ATXN2; (-) strand; PAM type: NRG; PAM sequence: CAG
caggcgtgagccactgtgcc

SEQ ID NO: 18530 - DNA, 20 bp, Artificial Sequence
  Description of Artificial Sequence: Synthetic oligonucleotide
  Target: ATXN2; (-) strand; PAM type: NRG; PAM sequence: GAG
agtgctgggattacaggcgt

SEQ ID NO: 18531 - DNA, 20 bp, Artificial Sequence
  Description of Artificial Sequence: Synthetic oligonucleotide
  Target: ATXN2; (-) strand; PAM type: NRG; PAM sequence: AGG
tcccaaagtgctgggattac

SEQ ID NO: 18532 - DNA, 20 bp, Artificial Sequence
  Description of Artificial Sequence: Synthetic oligonucleotide
  Target: ATXN2; (-) strand; PAM type: NRG; PAM sequence: CAG
ctcccaaagtgctgggatta

SEQ ID NO: 18533 - DNA, 20 bp, Artificial Sequence
  Description of Artificial Sequence: Synthetic oligonucleotide
  Target: ATXN2; (-) strand; PAM type: NRG; PAM sequence: GGG
cctcagcctcccaaagtgct

SEQ ID NO: 18534 - DNA, 20 bp, Artificial Sequence
  Description of Artificial Sequence: Synthetic oligonucleotide
  Target: ATXN2; (-) strand; PAM type: NRG; PAM sequence: TGG
gcctcagcctcccaaagtgc

SEQ ID NO: 18535 - DNA, 20 bp, Artificial Sequence
  Description of Artificial Sequence: Synthetic oligonucleotide
  Target: ATXN2; (-) strand; PAM type: NRG; PAM sequence: AAG
ccgcctgcctcagcctccca

SEQ ID NO: 18536 - DNA, 20 bp, Artificial Sequence
  Description of Artificial Sequence: Synthetic oligonucleotide
  Target: ATXN2; (-) strand; PAM type: NRG; PAM sequence: CAG
acctcgtgatccgcctgcct

SEQ ID NO: 18537 - DNA, 20 bp, Artificial Sequence
  Description of Artificial Sequence: Synthetic oligonucleotide
  Target: ATXN2; (-) strand; PAM type: NRG; PAM sequence: TGG
tttcactgtgttagccagga

SEQ ID NO: 18538 - DNA, 20 bp, Artificial Sequence
  Description of Artificial Sequence: Synthetic oligonucleotide
  Target: ATXN2; (-) strand; PAM type: NRG; PAM sequence: AGG
ggggtttcactgtgttagcc

SEQ ID NO: 18539 - DNA, 20 bp, Artificial Sequence
  Description of Artificial Sequence: Synthetic oligonucleotide
  Target: ATXN2; (-) strand; PAM type: NRG; PAM sequence: CAG
tggggtttcactgtgttagc

SEQ ID NO: 18540 - DNA, 20 bp, Artificial Sequence
  Description of Artificial Sequence: Synthetic oligonucleotide
  Target: ATXN2; (-) strand; PAM type: NRG; PAM sequence: TAG
gagatggggtttcactgtgt

SEQ ID NO: 18541 - DNA, 20 bp, Artificial Sequence
  Description of Artificial Sequence: Synthetic oligonucleotide
  Target: ATXN2; (-) strand; PAM type: NRG; PAM sequence: GGG
tattttgtttagtagagatg

SEQ ID NO: 18542 - DNA, 20 bp, Artificial Sequence
  Description of Artificial Sequence: Synthetic oligonucleotide
  Target: ATXN2; (-) strand; PAM type: NRG; PAM sequence: GGG
gtattttgtttagtagagat

SEQ ID NO: 18543 - DNA, 20 bp, Artificial Sequence
  Description of Artificial Sequence: Synthetic oligonucleotide
  Target: ATXN2; (-) strand; PAM type: NRG; PAM sequence: TGG
tgtattttgtttagtagaga

SEQ ID NO: 18544 - DNA, 20 bp, Artificial Sequence
  Description of Artificial Sequence: Synthetic oligonucleotide
  Target: ATXN2; (-) strand; PAM type: NRG; PAM sequence: GAG
tttttgtattttgtttagta

SEQ ID NO: 18545 - DNA, 20 bp, Artificial Sequence
  Description of Artificial Sequence: Synthetic oligonucleotide
  Target: ATXN2; (-) strand; PAM type: NRG; PAM sequence: TAG
attttttgtattttgtttag

SEQ ID NO: 18546 - DNA, 20 bp, Artificial Sequence
  Description of Artificial Sequence: Synthetic oligonucleotide
  Target: ATXN2; (-) strand; PAM type: NRG; PAM sequence: TAG
ctaattttttgtattttgtt

SEQ ID NO: 18547 - DNA, 20 bp, Artificial Sequence
  Description of Artificial Sequence: Synthetic oligonucleotide
  Target: ATXN2; (-) strand; PAM type: NRG; PAM sequence: CGG
caggcgcccgccaccatgcc

SEQ ID NO: 18548 - DNA, 20 bp, Artificial Sequence
  Description of Artificial Sequence: Synthetic oligonucleotide
  Target: ATXN2; (-) strand; PAM type: NRG; PAM sequence: AGG
tcccgagtagctaggactac

SEQ ID NO: 18549 - DNA, 20 bp, Artificial Sequence
  Description of Artificial Sequence: Synthetic oligonucleotide
  Target: ATXN2; (-) strand; PAM type: NRG; PAM sequence: CAG
ctcccgagtagctaggacta

SEQ ID NO: 18550 - DNA, 20 bp, Artificial Sequence
  Description of Artificial Sequence: Synthetic oligonucleotide
  Target: ATXN2; (-) strand; PAM type: NRG; PAM sequence: AGG
cctcagcctcccgagtagct

SEQ ID NO: 18551 - DNA, 20 bp, Artificial Sequence
  Description of Artificial Sequence: Synthetic oligonucleotide
  Target: ATXN2; (-) strand; PAM type: NRG; PAM sequence: TAG
acctcagcctcccgagtagc

SEQ ID NO: 18552 - DNA, 20 bp, Artificial Sequence
  Description of Artificial Sequence: Synthetic oligonucleotide
  Target: ATXN2; (-) strand; PAM type: NRG; PAM sequence: TAG
tcctacctcagcctcccgag

SEQ ID NO: 18553 - DNA, 20 bp, Artificial Sequence
  Description of Artificial Sequence: Synthetic oligonucleotide
  Target: ATXN2; (-) strand; PAM type: NRG; PAM sequence: GAG
ttctcctacctcagcctccc

SEQ ID NO: 18554 - DNA, 20 bp, Artificial Sequence
  Description of Artificial Sequence: Synthetic oligonucleotide
  Target: ATXN2; (-) strand; PAM type: NRG; PAM sequence: CAG
ttcacgccattctcctacct

SEQ ID NO: 18555 - DNA, 20 bp, Artificial Sequence
  Description of Artificial Sequence: Synthetic oligonucleotide
  Target: ATXN2; (-) strand; PAM type: NRG; PAM sequence: CAG
ggagtgcagtggcgtgatct

SEQ ID NO: 18556 - DNA, 20 bp, Artificial Sequence
  Description of Artificial Sequence: Synthetic oligonucleotide
  Target: ATXN2; (-) strand; PAM type: NRG; PAM sequence: TGG
tcgcccaggctggagtgcag

SEQ ID NO: 18557 - DNA, 20 bp, Artificial Sequence
  Description of Artificial Sequence: Synthetic oligonucleotide
  Target: ATXN2; (-) strand; PAM type: NRG; PAM sequence: CAG
ctgtcgcccaggctggagtg

SEQ ID NO: 18558 - DNA, 20 bp, Artificial Sequence
  Description of Artificial Sequence: Synthetic oligonucleotide
  Target: ATXN2; (-) strand; PAM type: NRG; PAM sequence: GAG
tctccctgtcgcccaggctg

SEQ ID NO: 18559 - DNA, 20 bp, Artificial Sequence
  Description of Artificial Sequence: Synthetic oligonucleotide
  Target: ATXN2; (-) strand; PAM type: NRG; PAM sequence: TGG
tctctccctgtcgcccaggc

SEQ ID NO: 18560 - DNA, 20 bp, Artificial Sequence
  Description of Artificial Sequence: Synthetic oligonucleotide
  Target: ATXN2; (-) strand; PAM type: NRG; PAM sequence: AGG
ggagtctctccctgtcgccc

SEQ ID NO: 18561 - DNA, 20 bp, Artificial Sequence
  Description of Artificial Sequence: Synthetic oligonucleotide
  Target: ATXN2; (-) strand; PAM type: NRG; PAM sequence: CAG
tggagtctctccctgtcgcc

SEQ ID NO: 18562 - DNA, 20 bp, Artificial Sequence
  Description of Artificial Sequence: Synthetic oligonucleotide
  Target: ATXN2; (-) strand; PAM type: NRG; PAM sequence: GAG
atgtctctttttttgagatg

SEQ ID NO: 18563 - DNA, 20 bp, Artificial Sequence
  Description of Artificial Sequence: Synthetic oligonucleotide
  Target: ATXN2; (-) strand; PAM type: NRG; PAM sequence: TGG
tgatgtctctttttttgaga

SEQ ID NO: 18564 - DNA, 20 bp, Artificial Sequence
  Description of Artificial Sequence: Synthetic oligonucleotide
  Target: ATXN2; (-) strand; PAM type: NRG; PAM sequence: GAG
tctttgatgtctcttttttt

SEQ ID NO: 18565 - DNA, 20 bp, Artificial Sequence
  Description of Artificial Sequence: Synthetic oligonucleotide
  Target: ATXN2; (-) strand; PAM type: NRG; PAM sequence: GGG
ctttctagctatcttagaaa

SEQ ID NO: 18566 - DNA, 20 bp, Artificial Sequence
  Description of Artificial Sequence: Synthetic oligonucleotide
  Target: ATXN2; (-) strand; PAM type: NRG; PAM sequence: AGG
tctttctagctatcttagaa

SEQ ID NO: 18567 - DNA, 20 bp, Artificial Sequence
  Description of Artificial Sequence: Synthetic oligonucleotide
  Target: ATXN2; (-) strand; PAM type: NRG; PAM sequence: AAG
ctctttctagctatcttaga

SEQ ID NO: 18568 - DNA, 20 bp, Artificial Sequence
  Description of Artificial Sequence: Synthetic oligonucleotide
  Target: ATXN2; (-) strand; PAM type: NRG; PAM sequence: TAG
tgacctctttctagctatct

SEQ ID NO: 18569 - DNA, 20 bp, Artificial Sequence
  Description of Artificial Sequence: Synthetic oligonucleotide
  Target: ATXN2; (-) strand; PAM type: NRG; PAM sequence: TAG
tattgaccttgacctctttc

SEQ ID NO: 18570 - DNA, 20 bp, Artificial Sequence
  Description of Artificial Sequence: Synthetic oligonucleotide
  Target: ATXN2; (-) strand; PAM type: NRG; PAM sequence: AAG
ataattattttattctaaaa

SEQ ID NO: 18571 - DNA, 20 bp, Artificial Sequence
  Description of Artificial Sequence: Synthetic oligonucleotide
  Target: ATXN2; (-) strand; PAM type: NRG; PAM sequence: AGG
gaacagttaaatgataaaat

SEQ ID NO: 18572 - DNA, 20 bp, Artificial Sequence
  Description of Artificial Sequence: Synthetic oligonucleotide
  Target: ATXN2; (-) strand; PAM type: NRG; PAM sequence: TAG
tgaacagttaaatgataaaa

SEQ ID NO: 18573 - DNA, 20 bp, Artificial Sequence
  Description of Artificial Sequence: Synthetic oligonucleotide
  Target: ATXN2; (-) strand; PAM type: NRG; PAM sequence: CAG
catatgctaacattactgaa

SEQ ID NO: 18574 - DNA, 20 bp, Artificial Sequence
  Description of Artificial Sequence: Synthetic oligonucleotide
  Target: ATXN2; (-) strand; PAM type: NRG; PAM sequence: TAG
gattattgtttttaaatttt

SEQ ID NO: 18575 - DNA, 20 bp, Artificial Sequence
  Description of Artificial Sequence: Synthetic oligonucleotide
  Target: ATXN2; (-) strand; PAM type: NRG; PAM sequence: AGG
gccaaaggcattgaaaacat

SEQ ID NO: 18576 - DNA, 20 bp, Artificial Sequence
  Description of Artificial Sequence: Synthetic oligonucleotide
  Target: ATXN2; (-) strand; PAM type: NRG; PAM sequence: TAG
agccaaaggcattgaaaaca

SEQ ID NO: 18577 - DNA, 20 bp, Artificial Sequence
  Description of Artificial Sequence: Synthetic oligonucleotide
  Target: ATXN2; (-) strand; PAM type: NRG; PAM sequence: AGG
attgttatagccatagccaa

SEQ ID NO: 18578 - DNA, 20 bp, Artificial Sequence
  Description of Artificial Sequence: Synthetic oligonucleotide
  Target: ATXN2; (-) strand; PAM type: NRG; PAM sequence: AAG
aattgttatagccatagcca

SEQ ID NO: 18579 - DNA, 20 bp, Artificial Sequence
  Description of Artificial Sequence: Synthetic oligonucleotide
  Target: ATXN2; (-) strand; PAM type: NRG; PAM sequence: TAG
ttcattaattgttatagcca

SEQ ID NO: 18580 - DNA, 20 bp, Artificial Sequence
  Description of Artificial Sequence: Synthetic oligonucleotide
  Target: ATXN2; (-) strand; PAM type: NRG; PAM sequence: TAG
ttctcattcattaattgtta

SEQ ID NO: 18581 - DNA, 20 bp, Artificial Sequence
  Description of Artificial Sequence: Synthetic oligonucleotide
  Target: ATXN2; (-) strand; PAM type: NRG; PAM sequence: TGG
aagaacatgcacccagatgt

SEQ ID NO: 18582 - DNA, 20 bp, Artificial Sequence
  Description of Artificial Sequence: Synthetic oligonucleotide
  Target: ATXN2; (-) strand; PAM type: NRG; PAM sequence: CAG
caaacagaagaacatgcacc

SEQ ID NO: 18583 - DNA, 20 bp, Artificial Sequence
  Description of Artificial Sequence: Synthetic oligonucleotide
  Target: ATXN2; (-) strand; PAM type: NRG; PAM sequence: AAG
aaaacatttaatgcaaacag

SEQ ID NO: 18584 - DNA, 20 bp, Artificial Sequence
  Description of Artificial Sequence: Synthetic oligonucleotide
  Target: ATXN2; (-) strand; PAM type: NRG; PAM sequence: CAG
tttaaaacatttaatgcaaa

SEQ ID NO: 18585 - DNA, 20 bp, Artificial Sequence
  Description of Artificial Sequence: Synthetic oligonucleotide
  Target: ATXN2; (-) strand; PAM type: NRG; PAM sequence: AGG
ttttaagctacatcatatct

SEQ ID NO: 18586 - DNA, 20 bp, Artificial Sequence
  Description of Artificial Sequence: Synthetic oligonucleotide
  Target: ATXN2; (-) strand; PAM type: NRG; PAM sequence: TAG
tttttaagctacatcatatc

SEQ ID NO: 18587 - DNA, 20 bp, Artificial Sequence
  Description of Artificial Sequence: Synthetic oligonucleotide
  Target: ATXN2; (-) strand; PAM type: NRG; PAM sequence: AAG
tgaattgtgcttttcttttt

SEQ ID NO: 18588 - DNA, 20 bp, Artificial Sequence
  Description of Artificial Sequence: Synthetic oligonucleotide
  Target: ATXN2; (-) strand; PAM type: NRG; PAM sequence: GAG
tcaaaggaaccaaatacttt

SEQ ID NO: 18589 - DNA, 20 bp, Artificial Sequence
  Description of Artificial Sequence: Synthetic oligonucleotide
  Target: ATXN2; (-) strand; PAM type: NRG; PAM sequence: AGG
attgtcataaattttctcaa

SEQ ID NO: 18590 - DNA, 20 bp, Artificial Sequence
  Description of Artificial Sequence: Synthetic oligonucleotide
  Target: ATXN2; (-) strand; PAM type: NRG; PAM sequence: AAG
tattgtcataaattttctca

SEQ ID NO: 18591 - DNA, 20 bp, Artificial Sequence
  Description of Artificial Sequence: Synthetic oligonucleotide
  Target: ATXN2; (-) strand; PAM type: NRG; PAM sequence: AAG
actacaacaaacttacatag

SEQ ID NO: 18592 - DNA, 20 bp, Artificial Sequence
  Description of Artificial Sequence: Synthetic oligonucleotide
  Target: ATXN2; (-) strand; PAM type: NRG; PAM sequence: TAG
taaactacaacaaacttaca

SEQ ID NO: 18593 - DNA, 20 bp, Artificial Sequence
  Description of Artificial Sequence: Synthetic oligonucleotide
  Target: ATXN2; (-) strand; PAM type: NRG; PAM sequence: AAG
tcaaatataaacaaaatttg

SEQ ID NO: 18594 - DNA, 20 bp, Artificial Sequence
  Description of Artificial Sequence: Synthetic oligonucleotide
  Target: ATXN2; (-) strand; PAM type: NRG; PAM sequence: AAG
tttgaattattagactttca

SEQ ID NO: 18595 - DNA, 20 bp, Artificial Sequence
  Description of Artificial Sequence: Synthetic oligonucleotide
  Target: ATXN2; (-) strand; PAM type: NRG; PAM sequence: TAG
cagtgatttatttgaattat

SEQ ID NO: 18596 - DNA, 20 bp, Artificial Sequence
  Description of Artificial Sequence: Synthetic oligonucleotide
  Target: ATXN2; (-) strand; PAM type: NRG; PAM sequence: CAG
catgttcttcattaaatctg

SEQ ID NO: 18597 - DNA, 20 bp, Artificial Sequence
  Description of Artificial Sequence: Synthetic oligonucleotide
  Target: ATXN2; (-) strand; PAM type: NRG; PAM sequence: AAG
agccataatttaatctgctt

SEQ ID NO: 18598 - DNA, 20 bp, Artificial Sequence
  Description of Artificial Sequence: Synthetic oligonucleotide
  Target: ATXN2; (-) strand; PAM type: NRG; PAM sequence: AAG
gttttgttctatgccatcat

SEQ ID NO: 18599 - DNA, 20 bp, Artificial Sequence
  Description of Artificial Sequence: Synthetic oligonucleotide
  Target: ATXN2; (-) strand; PAM type: NRG; PAM sequence: AAG
aaaaaaaagaaaacataaga

SEQ ID NO: 18600 - DNA, 20 bp, Artificial Sequence
  Description of Artificial Sequence: Synthetic oligonucleotide
  Target: ATXN2; (-) strand; PAM type: NRG; PAM sequence: AAG
atttaaaaaaaagaaaacat

SEQ ID NO: 18601 - DNA, 20 bp, Artificial Sequence
  Description of Artificial Sequence: Synthetic oligonucleotide
  Target: ATXN2; (-) strand; PAM type: NRG; PAM sequence: AAG
ccctgtctctatttaaaaaa

SEQ ID NO: 18602 - DNA, 20 bp, Artificial Sequence
  Description of Artificial Sequence: Synthetic oligonucleotide
  Target: ATXN2; (-) strand; PAM type: NRG; PAM sequence: AAG
tccagcctgggtgacagagc

SEQ ID NO: 18603 - DNA, 20 bp, Artificial Sequence
  Description of Artificial Sequence: Synthetic oligonucleotide
  Target: ATXN2; (-) strand; PAM type: NRG; PAM sequence: GAG
gtaatccagcctgggtgaca

SEQ ID NO: 18604 - DNA, 20 bp, Artificial Sequence
  Description of Artificial Sequence: Synthetic oligonucleotide
  Target: ATXN2; (-) strand; PAM type: NRG; PAM sequence: CAG
ctgtaatccagcctgggtga

SEQ ID NO: 18605 - DNA, 20 bp, Artificial Sequence
  Description of Artificial Sequence: Synthetic oligonucleotide
  Target: ATXN2; (-) strand; PAM type: NRG; PAM sequence: GGG
gcaccactgtaatccagcct

SEQ ID NO: 18606 - DNA, 20 bp, Artificial Sequence
  Description of Artificial Sequence: Synthetic oligonucleotide
  Target: ATXN2; (-) strand; PAM type: NRG; PAM sequence: TGG
ggcaccactgtaatccagcc

SEQ ID NO: 18607 - DNA, 20 bp, Artificial Sequence
  Description of Artificial Sequence: Synthetic oligonucleotide
  Target: ATXN2; (-) strand; PAM type: NRG; PAM sequence: CAG
atcatggcaccactgtaatc

SEQ ID NO: 18608 - DNA, 20 bp, Artificial Sequence
  Description of Artificial Sequence: Synthetic oligonucleotide
  Target: ATXN2; (-) strand; PAM type: NRG; PAM sequence: TGG
gaggctacagtgagctatca

SEQ ID NO: 18609 - DNA, 20 bp, Artificial Sequence
  Description of Artificial Sequence: Synthetic oligonucleotide
  Target: ATXN2; (-) strand; PAM type: NRG; PAM sequence: GAG
caggactttgaggctacagt

SEQ ID NO: 18610 - DNA, 20 bp, Artificial Sequence
  Description of Artificial Sequence: Synthetic oligonucleotide
  Target: ATXN2; (-) strand; PAM type: NRG; PAM sequence: CAG
agtccaggactttgaggcta

SEQ ID NO: 18611 - DNA, 20 bp, Artificial Sequence
  Description of Artificial Sequence: Synthetic oligonucleotide
  Target: ATXN2; (-) strand; PAM type: NRG; PAM sequence: AGG
cacttgagtccaggactttg

SEQ ID NO: 18612 - DNA, 20 bp, Artificial Sequence
  Description of Artificial Sequence: Synthetic oligonucleotide
  Target: ATXN2; (-) strand; PAM type: NRG; PAM sequence: GAG
tcacttgagtccaggacttt

SEQ ID NO: 18613 - DNA, 20 bp, Artificial Sequence
  Description of Artificial Sequence: Synthetic oligonucleotide
  Target: ATXN2; (-) strand; PAM type: NRG; PAM sequence: AGG
tgggaggatcacttgagtcc

SEQ ID NO: 18614 - DNA, 20 bp, Artificial Sequence
  Description of Artificial Sequence: Synthetic oligonucleotide
  Target: ATXN2; (-) strand; PAM type: NRG; PAM sequence: CAG
atgggaggatcacttgagtc

SEQ ID NO: 18615 - DNA, 20 bp, Artificial Sequence
  Description of Artificial Sequence: Synthetic oligonucleotide
  Target: ATXN2; (-) strand; PAM type: NRG; PAM sequence: GAG
ctgagatgggaggatcactt

SEQ ID NO: 18616 - DNA, 20 bp, Artificial Sequence
  Description of Artificial Sequence: Synthetic oligonucleotide
  Target: ATXN2; (-) strand; PAM type: NRG; PAM sequence: AGG
acacaggaagctgagatggg

SEQ ID NO: 18617 - DNA, 20 bp, Artificial Sequence
  Description of Artificial Sequence: Synthetic oligonucleotide
  Target: ATXN2; (-) strand; PAM type: NRG; PAM sequence: GAG
tacacaggaagctgagatgg

SEQ ID NO: 18618 - DNA, 20 bp, Artificial Sequence
  Description of Artificial Sequence: Synthetic oligonucleotide
  Target: ATXN2; (-) strand; PAM type: NRG; PAM sequence: GGG
cctacacaggaagctgagat

SEQ ID NO: 18619 - DNA, 20 bp, Artificial Sequence
  Description of Artificial Sequence: Synthetic oligonucleotide
  Target: ATXN2; (-) strand; PAM type: NRG; PAM sequence: TGG
acctacacaggaagctgaga

SEQ ID NO: 18620 - DNA, 20 bp, Artificial Sequence
  Description of Artificial Sequence: Synthetic oligonucleotide
  Target: ATXN2; (-) strand; PAM type: NRG; PAM sequence: GAG
tcccacctacacaggaagct

SEQ ID NO: 18621 - DNA, 20 bp, Artificial Sequence
  Description of Artificial Sequence: Synthetic oligonucleotide
  Target: ATXN2; (-) strand; PAM type: NRG; PAM sequence: AAG
tgtagtcccacctacacagg

SEQ ID NO: 18622 - DNA, 20 bp, Artificial Sequence
  Description of Artificial Sequence: Synthetic oligonucleotide
  Target: ATXN2; (-) strand; PAM type: NRG; PAM sequence: AGG
gcctgtagtcccacctacac

SEQ ID NO: 18623 - DNA, 20 bp, Artificial Sequence
  Description of Artificial Sequence: Synthetic oligonucleotide
  Target: ATXN2; (-) strand; PAM type: NRG; PAM sequence: CAG
tgcctgtagtcccacctaca

SEQ ID NO: 18624 - DNA, 20 bp, Artificial Sequence
  Description of Artificial Sequence: Synthetic oligonucleotide
  Target: ATXN2; (-) strand; PAM type: NRG; PAM sequence: TAG
gtcatggtggcacatgcctg

SEQ ID NO: 18625 - DNA, 20 bp, Artificial Sequence
  Description of Artificial Sequence: Synthetic oligonucleotide
  Target: ATXN2; (-) strand; PAM type: NRG; PAM sequence: TGG
aaaaaaaagcccagtcatgg

SEQ ID NO: 18626 - DNA, 20 bp, Artificial Sequence
  Description of Artificial Sequence: Synthetic oligonucleotide
  Target: ATXN2; (-) strand; PAM type: NRG; PAM sequence: TGG
aaaaaaaaaaagcccagtca

SEQ ID NO: 18627 - DNA, 20 bp, Artificial Sequence
  Description of Artificial Sequence: Synthetic oligonucleotide
  Target: ATXN2; (-) strand; PAM type: NRG; PAM sequence: CAG
aaaaaaaaaaaaaaaaagcc

SEQ ID NO: 18628 - DNA, 20 bp, Artificial Sequence
  Description of Artificial Sequence: Synthetic oligonucleotide
  Target: ATXN2; (-) strand; PAM type: NRG; PAM sequence: AAG
aaaaaaaaaaaaaaaaaaaa

SEQ ID NO: 18629 - DNA, 20 bp, Artificial Sequence
  Description of Artificial Sequence: Synthetic oligonucleotide
  Target: ATXN2; (-) strand; PAM type: NRG; PAM sequence: GAG
accagtctaggcaagatggc

SEQ ID NO: 18630 - DNA, 20 bp, Artificial Sequence
  Description of Artificial Sequence: Synthetic oligonucleotide
  Target: ATXN2; (-) strand; PAM type: NRG; PAM sequence: TGG
caagaccagtctaggcaaga

SEQ ID NO: 18631 - DNA, 20 bp, Artificial Sequence
  Description of Artificial Sequence: Synthetic oligonucleotide
  Target: ATXN2; (-) strand; PAM type: NRG; PAM sequence: AAG
tgttcaagaccagtctaggc

SEQ ID NO: 18632 - DNA, 20 bp, Artificial Sequence
  Description of Artificial Sequence: Synthetic oligonucleotide
  Target: ATXN2; (-) strand; PAM type: NRG; PAM sequence: AGG
caggtgttcaagaccagtct

SEQ ID NO: 18633 - DNA, 20 bp, Artificial Sequence
  Description of Artificial Sequence: Synthetic oligonucleotide
  Target: ATXN2; (-) strand; PAM type: NRG; PAM sequence: TAG
ccaggtgttcaagaccagtc

SEQ ID NO: 18634 - DNA, 20 bp, Artificial Sequence
  Description of Artificial Sequence: Synthetic oligonucleotide
  Target: ATXN2; (-) strand; PAM type: NRG; PAM sequence: CAG
ttagcccaggtgttcaagac

SEQ ID NO: 18635 - DNA, 20 bp, Artificial Sequence
  Description of Artificial Sequence: Synthetic oligonucleotide
  Target: ATXN2; (-) strand; PAM type: NRG; PAM sequence: AAG
atcgcttagcccaggtgttc

SEQ ID NO: 18636 - DNA, 20 bp, Artificial Sequence
  Description of Artificial Sequence: Synthetic oligonucleotide
  Target: ATXN2; (-) strand; PAM type: NRG; PAM sequence: AGG
agtggaggatcgcttagccc

SEQ ID NO: 18637 - DNA, 20 bp, Artificial Sequence
  Description of Artificial Sequence: Synthetic oligonucleotide
  Target: ATXN2; (-) strand; PAM type: NRG; PAM sequence: CAG
aagtggaggatcgcttagcc

SEQ ID NO: 18638 - DNA, 20 bp, Artificial Sequence
  Description of Artificial Sequence: Synthetic oligonucleotide
  Target: ATXN2; (-) strand; PAM type: NRG; PAM sequence: TAG
ggctgaagtggaggatcgct

SEQ ID NO: 18639 - DNA, 20 bp, Artificial Sequence
  Description of Artificial Sequence: Synthetic oligonucleotide
  Target: ATXN2; (-) strand; PAM type: NRG; PAM sequence: AGG
acttggggaggctgaagtgg

SEQ ID NO: 18640 - DNA, 20 bp, Artificial Sequence
  Description of Artificial Sequence: Synthetic oligonucleotide
  Target: ATXN2; (-) strand; PAM type: NRG; PAM sequence: GAG
aacttggggaggctgaagtg

SEQ ID NO: 18641 - DNA, 20 bp, Artificial Sequence
  Description of Artificial Sequence: Synthetic oligonucleotide
  Target: ATXN2; (-) strand; PAM type: NRG; PAM sequence: TGG
agaacttggggaggctgaag

SEQ ID NO: 18642 - DNA, 20 bp, Artificial Sequence
  Description of Artificial Sequence: Synthetic oligonucleotide
  Target: ATXN2; (-) strand; PAM type: NRG; PAM sequence: AAG
ccaagaacttggggaggctg

SEQ ID NO: 18643 - DNA, 20 bp, Artificial Sequence
  Description of Artificial Sequence: Synthetic oligonucleotide
  Target: ATXN2; (-) strand; PAM type: NRG; PAM sequence: AGG
tgtaatccaagaacttgggg

SEQ ID NO: 18644 - DNA, 20 bp, Artificial Sequence
  Description of Artificial Sequence: Synthetic oligonucleotide
  Target: ATXN2; (-) strand; PAM type: NRG; PAM sequence: GAG
ctgtaatccaagaacttggg

SEQ ID NO: 18645 - DNA, 20 bp, Artificial Sequence
  Description of Artificial Sequence: Synthetic oligonucleotide
  Target: ATXN2; (-) strand; PAM type: NRG; PAM sequence: GGG
acctgtaatccaagaacttg

SEQ ID NO: 18646 - DNA, 20 bp, Artificial Sequence
  Description of Artificial Sequence: Synthetic oligonucleotide
  Target: ATXN2; (-) strand; PAM type: NRG; PAM sequence: GGG
cacctgtaatccaagaactt

SEQ ID NO: 18647 - DNA, 20 bp, Artificial Sequence
  Description of Artificial Sequence: Synthetic oligonucleotide
  Target: ATXN2; (-) strand; PAM type: NRG; PAM sequence: TGG
acacctgtaatccaagaact

SEQ ID NO: 18648 - DNA, 20 bp, Artificial Sequence
  Description of Artificial Sequence: Synthetic oligonucleotide
  Target: ATXN2; (-) strand; PAM type: NRG; PAM sequence: AAG
gtggctgacacctgtaatcc

SEQ ID NO: 18649 - DNA, 20 bp, Artificial Sequence
  Description of Artificial Sequence: Synthetic oligonucleotide
  Target: ATXN2; (-) strand; PAM type: NRG; PAM sequence: TGG
acactaggagctgggcatgg

SEQ ID NO: 18650 - DNA, 20 bp, Artificial Sequence
  Description of Artificial Sequence: Synthetic oligonucleotide
  Target: ATXN2; (-) strand; PAM type: NRG; PAM sequence: TGG
aggacactaggagctgggca

SEQ ID NO: 18651 - DNA, 20 bp, Artificial Sequence
  Description of Artificial Sequence: Synthetic oligonucleotide
  Target: ATXN2; (-) strand; PAM type: NRG; PAM sequence: GGG
taaaaaggacactaggagct

SEQ ID NO: 18652 - DNA, 20 bp, Artificial Sequence
  Description of Artificial Sequence: Synthetic oligonucleotide
  Target: ATXN2; (-) strand; PAM type: NRG; PAM sequence: TGG
ctaaaaaggacactaggagc

SEQ ID NO: 18653 - DNA, 20 bp, Artificial Sequence
  Description of Artificial Sequence: Synthetic oligonucleotide
  Target: ATXN2; (-) strand; PAM type: NRG; PAM sequence: GAG
gaccctaaaaaggacactag

SEQ ID NO: 18654 - DNA, 20 bp, Artificial Sequence
  Description of Artificial Sequence: Synthetic oligonucleotide
  Target: ATXN2; (-) strand; PAM type: NRG; PAM sequence: AGG
aagaccctaaaaaggacact

SEQ ID NO: 18655 - DNA, 20 bp, Artificial Sequence
  Description of Artificial Sequence: Synthetic oligonucleotide
  Target: ATXN2; (-) strand; PAM type: NRG; PAM sequence: TAG
taagaccctaaaaaggacac

SEQ ID NO: 18656 - DNA, 20 bp, Artificial Sequence
  Description of Artificial Sequence: Synthetic oligonucleotide
  Target: ATXN2; (-) strand; PAM type: NRG; PAM sequence: AGG
tggtgcttaagaccctaaaa

SEQ ID NO: 18657 - DNA, 20 bp, Artificial Sequence
  Description of Artificial Sequence: Synthetic oligonucleotide
  Target: ATXN2; (-) strand; PAM type: NRG; PAM sequence: AAG
gtggtgcttaagaccctaaa

SEQ ID NO: 18658 - DNA, 20 bp, Artificial Sequence
  Description of Artificial Sequence: Synthetic oligonucleotide
  Target: ATXN2; (-) strand; PAM type: NRG; PAM sequence: AAG
agattccctttgtggtgctt

SEQ ID NO: 18659 - DNA, 20 bp, Artificial Sequence
  Description of Artificial Sequence: Synthetic oligonucleotide
  Target: ATXN2; (-) strand; PAM type: NRG; PAM sequence: TGG
gttaatcaagattccctttg

SEQ ID NO: 18660 - DNA, 20 bp, Artificial Sequence
  Description of Artificial Sequence: Synthetic oligonucleotide
  Target: ATXN2; (-) strand; PAM type: NRG; PAM sequence: AAG
gtgattgtcactagttaatc

SEQ ID NO: 18661 - DNA, 20 bp, Artificial Sequence
  Description of Artificial Sequence: Synthetic oligonucleotide
  Target: ATXN2; (-) strand; PAM type: NRG; PAM sequence: TAG
ggacttgttgtgattgtcac

SEQ ID NO: 18662 - DNA, 20 bp, Artificial Sequence
  Description of Artificial Sequence: Synthetic oligonucleotide
  Target: ATXN2; (-) strand; PAM type: NRG; PAM sequence: TGG
gcaggctaggagcaaggctg

SEQ ID NO: 18663 - DNA, 20 bp, Artificial Sequence
  Description of Artificial Sequence: Synthetic oligonucleotide
  Target: ATXN2; (-) strand; PAM type: NRG; PAM sequence: AGG
atggaggcaggctaggagca

SEQ ID NO: 18664 - DNA, 20 bp, Artificial Sequence
  Description of Artificial Sequence: Synthetic oligonucleotide
  Target: ATXN2; (-) strand; PAM type: NRG; PAM sequence: AAG
tatggaggcaggctaggagc

SEQ ID NO: 18665 - DNA, 20 bp, Artificial Sequence
  Description of Artificial Sequence: Synthetic oligonucleotide
  Target: ATXN2; (-) strand; PAM type: NRG; PAM sequence: GAG
tctgtatggaggcaggctag

SEQ ID NO: 18666 - DNA, 20 bp, Artificial Sequence
  Description of Artificial Sequence: Synthetic oligonucleotide
  Target: ATXN2; (-) strand; PAM type: NRG; PAM sequence: AGG
tgtctgtatggaggcaggct

SEQ ID NO: 18667 - DNA, 20 bp, Artificial Sequence
  Description of Artificial Sequence: Synthetic oligonucleotide
  Target: ATXN2; (-) strand; PAM type: NRG; PAM sequence: TAG
ctgtctgtatggaggcaggc

SEQ ID NO: 18668 - DNA, 20 bp, Artificial Sequence
  Description of Artificial Sequence: Synthetic oligonucleotide
  Target: ATXN2; (-) strand; PAM type: NRG; PAM sequence: AGG
attgctgtctgtatggaggc

SEQ ID NO: 18669 - DNA, 20 bp, Artificial Sequence
  Description of Artificial Sequence: Synthetic oligonucleotide
  Target: ATXN2; (-) strand; PAM type: NRG; PAM sequence: CAG
aattgctgtctgtatggagg

SEQ ID NO: 18670 - DNA, 20 bp, Artificial Sequence
  Description of Artificial Sequence: Synthetic oligonucleotide
  Target: ATXN2; (-) strand; PAM type: NRG; PAM sequence: AGG
tttaattgctgtctgtatgg

SEQ ID NO: 18671 - DNA, 20 bp, Artificial Sequence
  Description of Artificial Sequence: Synthetic oligonucleotide
  Target: ATXN2; (-) strand; PAM type: NRG; PAM sequence: GAG
atttaattgctgtctgtatg

SEQ ID NO: 18672 - DNA, 20 bp, Artificial Sequence
  Description of Artificial Sequence: Synthetic oligonucleotide
  Target: ATXN2; (-) strand; PAM type: NRG; PAM sequence: TGG
gtatttaattgctgtctgta

SEQ ID NO: 18673 - DNA, 20 bp, Artificial Sequence
  Description of Artificial Sequence: Synthetic oligonucleotide
  Target: ATXN2; (-) strand; PAM type: NRG; PAM sequence: TGG
tctcctgcagtttacacagg

SEQ ID NO: 18674 - DNA, 20 bp, Artificial Sequence
  Description of Artificial Sequence: Synthetic oligonucleotide
  Target: ATXN2; (-) strand; PAM type: NRG; PAM sequence: AGG
tactctcctgcagtttacac

SEQ ID NO: 18675 - DNA, 20 bp, Artificial Sequence
  Description of Artificial Sequence: Synthetic oligonucleotide
  Target: ATXN2; (-) strand; PAM type: NRG; PAM sequence: CAG
ctactctcctgcagtttaca

SEQ ID NO: 18676 - DNA, 20 bp, Artificial Sequence
  Description of Artificial Sequence: Synthetic oligonucleotide
  Target: ATXN2; (-) strand; PAM type: NRG; PAM sequence: CAG
aaatctgaactactctcctg

SEQ ID NO: 18677 - DNA, 20 bp, Artificial Sequence
  Description of Artificial Sequence: Synthetic oligonucleotide
  Target: ATXN2; (-) strand; PAM type: NRG; PAM sequence: CAG
catgccaggaaaaagttact

SEQ ID NO: 18678 - DNA, 20 bp, Artificial Sequence
  Description of Artificial Sequence: Synthetic oligonucleotide
  Target: ATXN2; (-) strand; PAM type: NRG; PAM sequence: AAG
ggttctttcatgccaggaaa

SEQ ID NO: 18679 - DNA, 20 bp, Artificial Sequence
  Description of Artificial Sequence: Synthetic oligonucleotide
  Target: ATXN2; (-) strand; PAM type: NRG; PAM sequence: AGG
agagccggttctttcatgcc

SEQ ID NO: 18680 - DNA, 20 bp, Artificial Sequence
  Description of Artificial Sequence: Synthetic oligonucleotide
  Target: ATXN2; (-) strand; PAM type: NRG; PAM sequence: CAG
tagagccggttctttcatgc

SEQ ID NO: 18681 - DNA, 20 bp, Artificial Sequence
  Description of Artificial Sequence: Synthetic oligonucleotide
  Target: ATXN2; (-) strand; PAM type: NRG; PAM sequence: CGG
aatgaactagtcattagagc

SEQ ID NO: 18682 - DNA, 20 bp, Artificial Sequence
  Description of Artificial Sequence: Synthetic oligonucleotide
  Target: ATXN2; (-) strand; PAM type: NRG; PAM sequence: GAG
ctggaatgaactagtcatta

SEQ ID NO: 18683 - DNA, 20 bp, Artificial Sequence
  Description of Artificial Sequence: Synthetic oligonucleotide
  Target: ATXN2; (-) strand; PAM type: NRG; PAM sequence: TAG
atctggaatgaactagtcat

SEQ ID NO: 18684 - DNA, 20 bp, Artificial Sequence
  Description of Artificial Sequence: Synthetic oligonucleotide
  Target: ATXN2; (-) strand; PAM type: NRG; PAM sequence: TAG
cagtgaaatctggaatgaac

SEQ ID NO: 18685 - DNA, 20 bp, Artificial Sequence
  Description of Artificial Sequence: Synthetic oligonucleotide
  Target: ATXN2; (-) strand; PAM type: NRG; PAM sequence: TGG
atctaatgtccagtgaaatc

SEQ ID NO: 18686 - DNA, 20 bp, Artificial Sequence
  Description of Artificial Sequence: Synthetic oligonucleotide
  Target: ATXN2; (-) strand; PAM type: NRG; PAM sequence: CAG
aaagcactagatctaatgtc

SEQ ID NO: 18687 - DNA, 20 bp, Artificial Sequence
  Description of Artificial Sequence: Synthetic oligonucleotide
  Target: ATXN2; (-) strand; PAM type: NRG; PAM sequence: TAG
ttgcaaacaaaacaaagcac

SEQ ID NO: 18688 - DNA, 20 bp, Artificial Sequence
  Description of Artificial Sequence: Synthetic oligonucleotide
  Target: ATXN2; (-) strand; PAM type: NRG; PAM sequence: AAG
gaaatgttgcaaacaaaaca

SEQ ID NO: 18689 - DNA, 20 bp, Artificial Sequence
  Description of Artificial Sequence: Synthetic oligonucleotide
  Target: ATXN2; (-) strand; PAM type: NRG; PAM sequence: AGG
ccatttatgtgtgggcaaat

SEQ ID NO: 18690 - DNA, 20 bp, Artificial Sequence
  Description of Artificial Sequence: Synthetic oligonucleotide
  Target: ATXN2; (-) strand; PAM type: NRG; PAM sequence: TAG
tccatttatgtgtgggcaaa

SEQ ID NO: 18691 - DNA, 20 bp, Artificial Sequence
  Description of Artificial Sequence: Synthetic oligonucleotide
  Target: ATXN2; (-) strand; PAM type: NRG; PAM sequence: GGG
cccaaagtccatttatgtgt

SEQ ID NO: 18692 - DNA, 20 bp, Artificial Sequence
  Description of Artificial Sequence: Synthetic oligonucleotide
  Target: ATXN2; (-) strand; PAM type: NRG; PAM sequence: TGG
ccccaaagtccatttatgtg

SEQ ID NO: 18693 - DNA, 20 bp, Artificial Sequence
  Description of Artificial Sequence: Synthetic oligonucleotide
  Target: ATXN2; (-) strand; PAM type: NRG; PAM sequence: AAG
cagtggggccttagacccca

SEQ ID NO: 18694 - DNA, 20 bp, Artificial Sequence
  Description of Artificial Sequence: Synthetic oligonucleotide
  Target: ATXN2; (-) strand; PAM type: NRG; PAM sequence: TAG
tttgaagagcagtggggcct

SEQ ID NO: 18695 - DNA, 20 bp, Artificial Sequence
  Description of Artificial Sequence: Synthetic oligonucleotide
  Target: ATXN2; (-) strand; PAM type: NRG; PAM sequence: GGG
tgtccatttgaagagcagtg

SEQ ID NO: 18696 - DNA, 20 bp, Artificial Sequence
  Description of Artificial Sequence: Synthetic oligonucleotide
  Target: ATXN2; (-) strand; PAM type: NRG; PAM sequence: GGG
atgtccatttgaagagcagt

SEQ ID NO: 18697 - DNA, 20 bp, Artificial Sequence
  Description of Artificial Sequence: Synthetic oligonucleotide
  Target: ATXN2; (-) strand; PAM type: NRG; PAM sequence: TGG
catgtccatttgaagagcag

SEQ ID NO: 18698 - DNA, 20 bp, Artificial Sequence
  Description of Artificial Sequence: Synthetic oligonucleotide
  Target: ATXN2; (-) strand; PAM type: NRG; PAM sequence: CAG
gaacatgtccatttgaagag

SEQ ID NO: 18699 - DNA, 20 bp, Artificial Sequence
  Description of Artificial Sequence: Synthetic oligonucleotide
  Target: ATXN2; (-) strand; PAM type: NRG; PAM sequence: GAG
ctagaacatgtccatttgaa

SEQ ID NO: 18700 - DNA, 20 bp, Artificial Sequence
  Description of Artificial Sequence: Synthetic oligonucleotide
  Target: ATXN2; (-) strand; PAM type: NRG; PAM sequence: AAG
tcctagaacatgtccatttg

SEQ ID NO: 18701 - DNA, 20 bp, Artificial Sequence
  Description of Artificial Sequence: Synthetic oligonucleotide
  Target: ATXN2; (-) strand; PAM type: NRG; PAM sequence: TAG
tgattttcataactacttcc

SEQ ID NO: 18702 - DNA, 20 bp, Artificial Sequence
  Description of Artificial Sequence: Synthetic oligonucleotide
  Target: ATXN2; (-) strand; PAM type: NRG; PAM sequence: CAG
taaatactgtgtttgaggta

SEQ ID NO: 18703 - DNA, 20 bp, Artificial Sequence
  Description of Artificial Sequence: Synthetic oligonucleotide
  Target: ATXN2; (-) strand; PAM type: NRG; PAM sequence: AGG
tagggtaaatactgtgtttg

SEQ ID NO: 18704 - DNA, 20 bp, Artificial Sequence
  Description of Artificial Sequence: Synthetic oligonucleotide
  Target: ATXN2; (-) strand; PAM type: NRG; PAM sequence: GAG
atagggtaaatactgtgttt

SEQ ID NO: 18705 - DNA, 20 bp, Artificial Sequence
  Description of Artificial Sequence: Synthetic oligonucleotide
  Target: ATXN2; (-) strand; PAM type: NRG; PAM sequence: GGG
tggttttgaaacagcctata

SEQ ID NO: 18706 - DNA, 20 bp, Artificial Sequence
  Description of Artificial Sequence: Synthetic oligonucleotide
  Target: ATXN2; (-) strand; PAM type: NRG; PAM sequence: AGG
ttggttttgaaacagcctat

SEQ ID NO: 18707 - DNA, 20 bp, Artificial Sequence
  Description of Artificial Sequence: Synthetic oligonucleotide
  Target: ATXN2; (-) strand; PAM type: NRG; PAM sequence: TAG
attggttttgaaacagccta

SEQ ID NO: 18708 - DNA, 20 bp, Artificial Sequence
  Description of Artificial Sequence: Synthetic oligonucleotide
  Target: ATXN2; (-) strand; PAM type: NRG; PAM sequence: CAG
aatgttcattggttttgaaa

SEQ ID NO: 18709 - DNA, 20 bp, Artificial Sequence
  Description of Artificial Sequence: Synthetic oligonucleotide
  Target: ATXN2; (-) strand; PAM type: NRG; PAM sequence: TGG
tcttttggatgaatgttcat

SEQ ID NO: 18710 - DNA, 20 bp, Artificial Sequence
  Description of Artificial Sequence: Synthetic oligonucleotide
  Target: ATXN2; (-) strand; PAM type: NRG; PAM sequence: TGG
caacatctggcttcatcttt

SEQ ID NO: 18711 - DNA, 20 bp, Artificial Sequence
  Description of Artificial Sequence: Synthetic oligonucleotide
  Target: ATXN2; (-) strand; PAM type: NRG; PAM sequence: TGG
gttcattcactgccaacatc

SEQ ID NO: 18712 - DNA, 20 bp, Artificial Sequence
  Description of Artificial Sequence: Synthetic oligonucleotide
  Target: ATXN2; (-) strand; PAM type: NRG; PAM sequence: GAG
agcaataatactgtaatgtt

SEQ ID NO: 18713 - DNA, 20 bp, Artificial Sequence
  Description of Artificial Sequence: Synthetic oligonucleotide
  Target: ATXN2; (-) strand; PAM type: NRG; PAM sequence: TAG
tgcatgcttttgagacattg

SEQ ID NO: 18714 - DNA, 20 bp, Artificial Sequence
  Description of Artificial Sequence: Synthetic oligonucleotide
  Target: ATXN2; (-) strand; PAM type: NRG; PAM sequence: GAG
atttgtgtatgcatgctttt

SEQ ID NO: 18715 - DNA, 20 bp, Artificial Sequence
  Description of Artificial Sequence: Synthetic oligonucleotide
  Target: ATXN2; (-) strand; PAM type: NRG; PAM sequence: TAG
tttccattgcatttggagag

SEQ ID NO: 18716 - DNA, 20 bp, Artificial Sequence
  Description of Artificial Sequence: Synthetic oligonucleotide
  Target: ATXN2; (-) strand; PAM type: NRG; PAM sequence: GAG
aaatttccattgcatttgga

SEQ ID NO: 18717 - DNA, 20 bp, Artificial Sequence
  Description of Artificial Sequence: Synthetic oligonucleotide
  Target: ATXN2; (-) strand; PAM type: NRG; PAM sequence: GAG
taaaatttccattgcatttg

SEQ ID NO: 18718 - DNA, 20 bp, Artificial Sequence
  Description of Artificial Sequence: Synthetic oligonucleotide
  Target: ATXN2; (-) strand; PAM type: NRG; PAM sequence: TGG
gctaaaatttccattgcatt

SEQ ID NO: 18719 - DNA, 20 bp, Artificial Sequence
  Description of Artificial Sequence: Synthetic oligonucleotide
  Target: ATXN2; (-) strand; PAM type: NRG; PAM sequence: AAG
gaatcagatctgaaactttt

SEQ ID NO: 18720 - DNA, 20 bp, Artificial Sequence
  Description of Artificial Sequence: Synthetic oligonucleotide
  Target: ATXN2; (-) strand; PAM type: NRG; PAM sequence: CAG
tggcatactccccttggaat

SEQ ID NO: 18721 - DNA, 20 bp, Artificial Sequence
  Description of Artificial Sequence: Synthetic oligonucleotide
  Target: ATXN2; (-) strand; PAM type: NRG; PAM sequence: TGG
attttctggcatactcccct

SEQ ID NO: 18722 - DNA, 20 bp, Artificial Sequence
  Description of Artificial Sequence: Synthetic oligonucleotide
  Target: ATXN2; (-) strand; PAM type: NRG; PAM sequence: TGG
atctctttccttccattttc

SEQ ID NO: 18723 - DNA, 20 bp, Artificial Sequence
  Description of Artificial Sequence: Synthetic oligonucleotide
  Target: ATXN2; (-) strand; PAM type: NRG; PAM sequence: AAG
atcatgatttaacaagtgga

SEQ ID NO: 18724 - DNA, 20 bp, Artificial Sequence
  Description of Artificial Sequence: Synthetic oligonucleotide
  Target: ATXN2; (-) strand; PAM type: NRG; PAM sequence: TGG
atacatcatgatttaacaag

SEQ ID NO: 18725 - DNA, 20 bp, Artificial Sequence
  Description of Artificial Sequence: Synthetic oligonucleotide
  Target: ATXN2; (-) strand; PAM type: NRG; PAM sequence: AAG
tgaatacatcatgatttaac

SEQ ID NO: 18726 - DNA, 20 bp, Artificial Sequence
  Description of Artificial Sequence: Synthetic oligonucleotide
  Target: ATXN2; (-) strand; PAM type: NRG; PAM sequence: TGG
tatgattgtttatacatttc

SEQ ID NO: 18727 - DNA, 20 bp, Artificial Sequence
  Description of Artificial Sequence: Synthetic oligonucleotide
  Target: ATXN2; (-) strand; PAM type: NRG; PAM sequence: AAG
ttgctaaaggcttaggttaa

SEQ ID NO: 18728 - DNA, 20 bp, Artificial Sequence
  Description of Artificial Sequence: Synthetic oligonucleotide
  Target: ATXN2; (-) strand; PAM type: NRG; PAM sequence: AGG
ttcctgtttgctaaaggctt

SEQ ID NO: 18729 - DNA, 20 bp, Artificial Sequence
  Description of Artificial Sequence: Synthetic oligonucleotide
  Target: ATXN2; (-) strand; PAM type: NRG; PAM sequence: TAG
tttcctgtttgctaaaggct

SEQ ID NO: 18730 - DNA, 20 bp, Artificial Sequence
  Description of Artificial Sequence: Synthetic oligonucleotide
  Target: ATXN2; (-) strand; PAM type: NRG; PAM sequence: AGG
acaattttcctgtttgctaa

SEQ ID NO: 18731 - DNA, 20 bp, Artificial Sequence
  Description of Artificial Sequence: Synthetic oligonucleotide
  Target: ATXN2; (-) strand; PAM type: NRG; PAM sequence: AAG
aacaattttcctgtttgcta

SEQ ID NO: 18732 - DNA, 20 bp, Artificial Sequence
  Description of Artificial Sequence: Synthetic oligonucleotide
  Target: ATXN2; (-) strand; PAM type: NRG; PAM sequence: TGG
gcacgattgatttatcatgc

SEQ ID NO: 18733 - DNA, 20 bp, Artificial Sequence
  Description of Artificial Sequence: Synthetic oligonucleotide
  Target: ATXN2; (-) strand; PAM type: NRG; PAM sequence: AGG
gggactgaatatgcgtgcaa

SEQ ID NO: 18734 - DNA, 20 bp, Artificial Sequence
  Description of Artificial Sequence: Synthetic oligonucleotide
  Target: ATXN2; (-) strand; PAM type: NRG; PAM sequence: AAG
ggggactgaatatgcgtgca

SEQ ID NO: 18735 - DNA, 20 bp, Artificial Sequence
  Description of Artificial Sequence: Synthetic oligonucleotide
  Target: ATXN2; (-) strand; PAM type: NRG; PAM sequence: GGG
tgtctttagttgtcttaacg

SEQ ID NO: 18736 - DNA, 20 bp, Artificial Sequence
  Description of Artificial Sequence: Synthetic oligonucleotide
  Target: ATXN2; (-) strand; PAM type: NRG; PAM sequence: GGG
ttgtctttagttgtcttaac

SEQ ID NO: 18737 - DNA, 20 bp, Artificial Sequence
  Description of Artificial Sequence: Synthetic oligonucleotide
  Target: ATXN2; (-) strand; PAM type: NRG; PAM sequence: CGG
cttgtctttagttgtcttaa

SEQ ID NO: 18738 - DNA, 20 bp, Artificial Sequence
  Description of Artificial Sequence: Synthetic oligonucleotide
  Target: ATXN2; (-) strand; PAM type: NRG; PAM sequence: TAG
cccgtcatttgacttgtctt

SEQ ID NO: 18739 - DNA, 20 bp, Artificial Sequence
  Description of Artificial Sequence: Synthetic oligonucleotide
  Target: ATXN2; (-) strand; PAM type: NRG; PAM sequence: TGG
actaacttggtttattattt

SEQ ID NO: 18740 - DNA, 20 bp, Artificial Sequence
  Description of Artificial Sequence: Synthetic oligonucleotide
  Target: ATXN2; (-) strand; PAM type: NRG; PAM sequence: TGG
aagatactgacaaactaact

SEQ ID NO: 18741 - DNA, 20 bp, Artificial Sequence
  Description of Artificial Sequence: Synthetic oligonucleotide
  Target: ATXN2; (-) strand; PAM type: NRG; PAM sequence: AAG
catccgtaatttaattgtaa

SEQ ID NO: 18742 - DNA, 20 bp, Artificial Sequence
  Description of Artificial Sequence: Synthetic oligonucleotide
  Target: ATXN2; (-) strand; PAM type: NRG; PAM sequence: AGG
tggaaaacatttttttcaag

SEQ ID NO: 18743 - DNA, 20 bp, Artificial Sequence
  Description of Artificial Sequence: Synthetic oligonucleotide
  Target: ATXN2; (-) strand; PAM type: NRG; PAM sequence: GAG
ttggaaaacatttttttcaa

SEQ ID NO: 18744 - DNA, 20 bp, Artificial Sequence
  Description of Artificial Sequence: Synthetic oligonucleotide
  Target: ATXN2; (-) strand; PAM type: NRG; PAM sequence: AAG
ttttggaaaacatttttttc

SEQ ID NO: 18745 - DNA, 20 bp, Artificial Sequence
  Description of Artificial Sequence: Synthetic oligonucleotide
  Target: ATXN2; (-) strand; PAM type: NRG; PAM sequence: TGG
attgtgtgattgctacattt

SEQ ID NO: 18746 - DNA, 20 bp, Artificial Sequence
  Description of Artificial Sequence: Synthetic oligonucleotide
  Target: ATXN2; (-) strand; PAM type: NRG; PAM sequence: TGG
tcactttcaattttgtattg

SEQ ID NO: 18747 - DNA, 20 bp, Artificial Sequence
  Description of Artificial Sequence: Synthetic oligonucleotide
  Target: ATXN2; (-) strand; PAM type: NRG; PAM sequence: CAG
ttttataaaacagttaagtc

SEQ ID NO: 18748 - DNA, 20 bp, Artificial Sequence
  Description of Artificial Sequence: Synthetic oligonucleotide
  Target: ATXN2; (-) strand; PAM type: NRG; PAM sequence: AAG
tttagttttataaaacagtt

SEQ ID NO: 18749 - DNA, 20 bp, Artificial Sequence
  Description of Artificial Sequence: Synthetic oligonucleotide
  Target: ATXN2; (-) strand; PAM type: NRG; PAM sequence: CAG
aggtgtttagttttataaaa

SEQ ID NO: 18750 - DNA, 20 bp, Artificial Sequence
  Description of Artificial Sequence: Synthetic oligonucleotide
  Target: ATXN2; (-) strand; PAM type: NRG; PAM sequence: TAG
tgtatatgatcaaaggtgtt

SEQ ID NO: 18751 - DNA, 20 bp, Artificial Sequence
  Description of Artificial Sequence: Synthetic oligonucleotide
  Target: ATXN2; (-) strand; PAM type: NRG; PAM sequence: AGG
aggaatttgtatatgatcaa

SEQ ID NO: 18752 - DNA, 20 bp, Artificial Sequence
  Description of Artificial Sequence: Synthetic oligonucleotide
  Target: ATXN2; (-) strand; PAM type: NRG; PAM sequence: AAG
taggaatttgtatatgatca

SEQ ID NO: 18753 - DNA, 20 bp, Artificial Sequence
  Description of Artificial Sequence: Synthetic oligonucleotide
  Target: ATXN2; (-) strand; PAM type: NRG; PAM sequence: AGG
cacaaaggctcactgctgat

SEQ ID NO: 18754 - DNA, 20 bp, Artificial Sequence
  Description of Artificial Sequence: Synthetic oligonucleotide
  Target: ATXN2; (-) strand; PAM type: NRG; PAM sequence: TAG
ccacaaaggctcactgctga

SEQ ID NO: 18755 - DNA, 20 bp, Artificial Sequence
  Description of Artificial Sequence: Synthetic oligonucleotide
  Target: ATXN2; (-) strand; PAM type: NRG; PAM sequence: AGG
gaggttcttgtctgccacaa

SEQ ID NO: 18756 - DNA, 20 bp, Artificial Sequence
  Description of Artificial Sequence: Synthetic oligonucleotide
  Target: ATXN2; (-) strand; PAM type: NRG; PAM sequence: AAG
ggaggttcttgtctgccaca

SEQ ID NO: 18757 - DNA, 20 bp, Artificial Sequence
  Description of Artificial Sequence: Synthetic oligonucleotide
  Target: ATXN2; (-) strand; PAM type: NRG; PAM sequence: AGG
agcttatgctttcttcctgg

SEQ ID NO: 18758 - DNA, 20 bp, Artificial Sequence
  Description of Artificial Sequence: Synthetic oligonucleotide
  Target: ATXN2; (-) strand; PAM type: NRG; PAM sequence: GAG
cagcttatgctttcttcctg

SEQ ID NO: 18759 - DNA, 20 bp, Artificial Sequence
  Description of Artificial Sequence: Synthetic oligonucleotide
  Target: ATXN2; (-) strand; PAM type: NRG; PAM sequence: TGG
cacagcttatgctttcttcc

SEQ ID NO: 18760 - DNA, 20 bp, Artificial Sequence
  Description of Artificial Sequence: Synthetic oligonucleotide
  Target: ATXN2; (-) strand; PAM type: NRG; PAM sequence: CAG
ttcctgtcacctgtaaccca

SEQ ID NO: 18761 - DNA, 20 bp, Artificial Sequence
  Description of Artificial Sequence: Synthetic oligonucleotide
  Target: ATXN2; (-) strand; PAM type: NRG; PAM sequence: CAG
tgagaataggacttgggcag

SEQ ID NO: 18762 - DNA, 20 bp, Artificial Sequence
  Description of Artificial Sequence: Synthetic oligonucleotide
  Target: ATXN2; (-) strand; PAM type: NRG; PAM sequence: CAG
taatgagaataggacttggg

SEQ ID NO: 18763 - DNA, 20 bp, Artificial Sequence
  Description of Artificial Sequence: Synthetic oligonucleotide
  Target: ATXN2; (-) strand; PAM type: NRG; PAM sequence: GGG
ggttaatgagaataggactt

SEQ ID NO: 18764 - DNA, 20 bp, Artificial Sequence
  Description of Artificial Sequence: Synthetic oligonucleotide
  Target: ATXN2; (-) strand; PAM type: NRG; PAM sequence: TGG
aggttaatgagaataggact

SEQ ID NO: 18765 - DNA, 20 bp, Artificial Sequence
  Description of Artificial Sequence: Synthetic oligonucleotide
  Target: ATXN2; (-) strand; PAM type: NRG; PAM sequence: AGG
ttccgtaggttaatgagaat

SEQ ID NO: 18766 - DNA, 20 bp, Artificial Sequence
  Description of Artificial Sequence: Synthetic oligonucleotide
  Target: ATXN2; (-) strand; PAM type: NRG; PAM sequence: TAG
attccgtaggttaatgagaa

SEQ ID NO: 18767 - DNA, 20 bp, Artificial Sequence
  Description of Artificial Sequence: Synthetic oligonucleotide
  Target: ATXN2; (-) strand; PAM type: NRG; PAM sequence: GAG
ttaacattccgtaggttaat

SEQ ID NO: 18768 - DNA, 20 bp, Artificial Sequence
  Description of Artificial Sequence: Synthetic oligonucleotide
  Target: ATXN2; (-) strand; PAM type: NRG; PAM sequence: AGG
taaaagttttaacattccgt

SEQ ID NO: 18769 - DNA, 20 bp, Artificial Sequence
  Description of Artificial Sequence: Synthetic oligonucleotide
  Target: ATXN2; (-) strand; PAM type: NRG; PAM sequence: TAG
ataaaagttttaacattccg

SEQ ID NO: 18770 - DNA, 20 bp, Artificial Sequence
  Description of Artificial Sequence: Synthetic oligonucleotide
  Target: ATXN2; (-) strand; PAM type: NRG; PAM sequence: AAG
ctgtcctttttgaagaataa

SEQ ID NO: 18771 - DNA, 20 bp, Artificial Sequence
  Description of Artificial Sequence: Synthetic oligonucleotide
  Target: ATXN2; (-) strand; PAM type: NRG; PAM sequence: AAG
taccacctctgtcctttttg

SEQ ID NO: 18772 - DNA, 20 bp, Artificial Sequence
  Description of Artificial Sequence: Synthetic oligonucleotide
  Target: ATXN2; (-) strand; PAM type: NRG; PAM sequence: GAG
ttctggcaaaccttcttctt

SEQ ID NO: 18773 - DNA, 20 bp, Artificial Sequence
  Description of Artificial Sequence: Synthetic oligonucleotide
  Target: ATXN2; (-) strand; PAM type: NRG; PAM sequence: TGG
aaaaagaatttacagatttc

SEQ ID NO: 18774 - DNA, 20 bp, Artificial Sequence
  Description of Artificial Sequence: Synthetic oligonucleotide
  Target: ATXN2; (-) strand; PAM type: NRG; PAM sequence: CAG
aaaaaaaaaaaaagaattta

SEQ ID NO: 18775 - DNA, 20 bp, Artificial Sequence
  Description of Artificial Sequence: Synthetic oligonucleotide
  Target: ATXN2; (-) strand; PAM type: NRG; PAM sequence: AAG
caaaaaaaaaaaaaaaaaaa

SEQ ID NO: 18776 - DNA, 20 bp, Artificial Sequence
  Description of Artificial Sequence: Synthetic oligonucleotide
  Target: ATXN2; (-) strand; PAM type: NRG; PAM sequence: GAG
tctagcctgagcgacagagt

SEQ ID NO: 18777 - DNA, 20 bp, Artificial Sequence
  Description of Artificial Sequence: Synthetic oligonucleotide
  Target: ATXN2; (-) strand; PAM type: NRG; PAM sequence: GAG
acactctagcctgagcgaca

SEQ ID NO: 18778 - DNA, 20 bp, Artificial Sequence
  Description of Artificial Sequence: Synthetic oligonucleotide
  Target: ATXN2; (-) strand; PAM type: NRG; PAM sequence: CAG
ctacactctagcctgagcga

SEQ ID NO: 18779 - DNA, 20 bp, Artificial Sequence
  Description of Artificial Sequence: Synthetic oligonucleotide
  Target: ATXN2; (-) strand; PAM type: NRG; PAM sequence: GAG
gcgccactacactctagcct

SEQ ID NO: 18780 - DNA, 20 bp, Artificial Sequence
  Description of Artificial Sequence: Synthetic oligonucleotide
  Target: ATXN2; (-) strand; PAM type: NRG; PAM sequence: TAG
gagatcgcgccactacactc

SEQ ID NO: 18781 - DNA, 20 bp, Artificial Sequence
  Description of Artificial Sequence: Synthetic oligonucleotide
  Target: ATXN2; (-) strand; PAM type: NRG; PAM sequence: GAG
ggcagaggttgcagtgagcc

SEQ ID NO: 18782 - DNA, 20 bp, Artificial Sequence
  Description of Artificial Sequence: Synthetic oligonucleotide
  Target: ATXN2; (-) strand; PAM type: NRG; PAM sequence: GAG
cgggaggcagaggttgcagt

SEQ ID NO: 18783 - DNA, 20 bp, Artificial Sequence
  Description of Artificial Sequence: Synthetic oligonucleotide
  Target: ATXN2; (-) strand; PAM type: NRG; PAM sequence: CAG
aacccgggaggcagaggttg

SEQ ID NO: 18784 - DNA, 20 bp, Artificial Sequence
  Description of Artificial Sequence: Synthetic oligonucleotide
  Target: ATXN2; (-) strand; PAM type: NRG; PAM sequence: AGG
tgcttgaacccgggaggcag

SEQ ID NO: 18785 - DNA, 20 bp, Artificial Sequence
  Description of Artificial Sequence: Synthetic oligonucleotide
  Target: ATXN2; (-) strand; PAM type: NRG; PAM sequence: GAG
ttgcttgaacccgggaggca

SEQ ID NO: 18786 - DNA, 20 bp, Artificial Sequence
  Description of Artificial Sequence: Synthetic oligonucleotide
  Target: ATXN2; (-) strand; PAM type: NRG; PAM sequence: CAG
aattgcttgaacccgggagg

SEQ ID NO: 18787 - DNA, 20 bp, Artificial Sequence
  Description of Artificial Sequence: Synthetic oligonucleotide
  Target: ATXN2; (-) strand; PAM type: NRG; PAM sequence: AGG
cagaattgcttgaacccggg

SEQ ID NO: 18788 - DNA, 20 bp, Artificial Sequence
  Description of Artificial Sequence: Synthetic oligonucleotide
  Target: ATXN2; (-) strand; PAM type: NRG; PAM sequence: GAG
acagaattgcttgaacccgg

SEQ ID NO: 18789 - DNA, 20 bp, Artificial Sequence
  Description of Artificial Sequence: Synthetic oligonucleotide
  Target: ATXN2; (-) strand; PAM type: NRG; PAM sequence: GGG
caacagaattgcttgaaccc

SEQ ID NO: 18790 - DNA, 20 bp, Artificial Sequence
  Description of Artificial Sequence: Synthetic oligonucleotide
  Target: ATXN2; (-) strand; PAM type: NRG; PAM sequence: CGG
gcaacagaattgcttgaacc

SEQ ID NO: 18791 - DNA, 20 bp, Artificial Sequence
  Description of Artificial Sequence: Synthetic oligonucleotide
  Target: ATXN2; (-) strand; PAM type: NRG; PAM sequence: CAG
tacttcggaggctgaggcaa

SEQ ID NO: 18792 - DNA, 20 bp, Artificial Sequence
  Description of Artificial Sequence: Synthetic oligonucleotide
  Target: ATXN2; (-) strand; PAM type: NRG; PAM sequence: AGG
cccggctacttcggaggctg

SEQ ID NO: 18793 - DNA, 20 bp, Artificial Sequence
  Description of Artificial Sequence: Synthetic oligonucleotide
  Target: ATXN2; (-) strand; PAM type: NRG; PAM sequence: GAG
tcccggctacttcggaggct

SEQ ID NO: 18794 - DNA, 20 bp, Artificial Sequence
  Description of Artificial Sequence: Synthetic oligonucleotide
  Target: ATXN2; (-) strand; PAM type: NRG; PAM sequence: AGG
tgtagtcccggctacttcgg

SEQ ID NO: 18795 - DNA, 20 bp, Artificial Sequence
  Description of Artificial Sequence: Synthetic oligonucleotide
  Target: ATXN2; (-) strand; PAM type: NRG; PAM sequence: GAG
ctgtagtcccggctacttcg

SEQ ID NO: 18796 - DNA, 20 bp, Artificial Sequence
  Description of Artificial Sequence: Synthetic oligonucleotide
  Target: ATXN2; (-) strand; PAM type: NRG; PAM sequence: CGG
gcctgtagtcccggctactt

SEQ ID NO: 18797 - DNA, 20 bp, Artificial Sequence
  Description of Artificial Sequence: Synthetic oligonucleotide
  Target: ATXN2; (-) strand; PAM type: NRG; PAM sequence: CGG
gtggcatgtgcctgtagtcc

SEQ ID NO: 18798 - DNA, 20 bp, Artificial Sequence
  Description of Artificial Sequence: Synthetic oligonucleotide
  Target: ATXN2; (-) strand; PAM type: NRG; PAM sequence: TAG
ggtgtggtggcatgtgcctg

SEQ ID NO: 18799 - DNA, 20 bp, Artificial Sequence
  Description of Artificial Sequence: Synthetic oligonucleotide
  Target: ATXN2; (-) strand; PAM type: NRG; PAM sequence: TGG
aaaaaattggccgggtgtgg

SEQ ID NO: 18800 - DNA, 20 bp, Artificial Sequence
  Description of Artificial Sequence: Synthetic oligonucleotide
  Target: ATXN2; (-) strand; PAM type: NRG; PAM sequence: TGG
tccaaaaaattggccgggtg

SEQ ID NO: 18801 - DNA, 20 bp, Artificial Sequence
  Description of Artificial Sequence: Synthetic oligonucleotide
  Target: ATXN2; (-) strand; PAM type: NRG; PAM sequence: GGG
aaaaatccaaaaaattggcc

SEQ ID NO: 18802 - DNA, 20 bp, Artificial Sequence
  Description of Artificial Sequence: Synthetic oligonucleotide
  Target: ATXN2; (-) strand; PAM type: NRG; PAM sequence: CGG
taaaaatccaaaaaattggc

SEQ ID NO: 18803 - DNA, 20 bp, Artificial Sequence
  Description of Artificial Sequence: Synthetic oligonucleotide
  Target: ATXN2; (-) strand; PAM type: NRG; PAM sequence: TGG
ctactaaaaatccaaaaaat

SEQ ID NO: 18804 - DNA, 20 bp, Artificial Sequence
  Description of Artificial Sequence: Synthetic oligonucleotide
  Target: ATXN2; (-) strand; PAM type: NRG; PAM sequence: TGG
cgagaccagcctggccaaca

SEQ ID NO: 18805 - DNA, 20 bp, Artificial Sequence
  Description of Artificial Sequence: Synthetic oligonucleotide
  Target: ATXN2; (-) strand; PAM type: NRG; PAM sequence: TGG
tcaggagatcgagaccagcc

SEQ ID NO: 18806 - DNA, 20 bp, Artificial Sequence
  Description of Artificial Sequence: Synthetic oligonucleotide
  Target: ATXN2; (-) strand; PAM type: NRG; PAM sequence: CAG
tgaggtcaggagatcgagac

SEQ ID NO: 18807 - DNA, 20 bp, Artificial Sequence
  Description of Artificial Sequence: Synthetic oligonucleotide
  Target: ATXN2; (-) strand; PAM type: NRG; PAM sequence: GAG
gatcatgaggtcaggagatc

SEQ ID NO: 18808 - DNA, 20 bp, Artificial Sequence
  Description of Artificial Sequence: Synthetic oligonucleotide
  Target: ATXN2; (-) strand; PAM type: NRG; PAM sequence: GAG
ctggcggatcatgaggtcag

SEQ ID NO: 18809 - DNA, 20 bp, Artificial Sequence
  Description of Artificial Sequence: Synthetic oligonucleotide
  Target: ATXN2; (-) strand; PAM type: NRG; PAM sequence: AGG
ggctggcggatcatgaggtc

SEQ ID NO: 18810 - DNA, 20 bp, Artificial Sequence
  Description of Artificial Sequence: Synthetic oligonucleotide
  Target: ATXN2; (-) strand; PAM type: NRG; PAM sequence: CAG
aggctggcggatcatgaggt

SEQ ID NO: 18811 - DNA, 20 bp, Artificial Sequence
  Description of Artificial Sequence: Synthetic oligonucleotide
  Target: ATXN2; (-) strand; PAM type: NRG; PAM sequence: AGG
gccaaggctggcggatcatg

SEQ ID NO: 18812 - DNA, 20 bp, Artificial Sequence
  Description of Artificial Sequence: Synthetic oligonucleotide
  Target: ATXN2; (-) strand; PAM type: NRG; PAM sequence: GAG
ggccaaggctggcggatcat

SEQ ID NO: 18813 - DNA, 20 bp, Artificial Sequence
  Description of Artificial Sequence: Synthetic oligonucleotide
  Target: ATXN2; (-) strand; PAM type: NRG; PAM sequence: CGG
ctttgggaggccaaggctgg

SEQ ID NO: 18814 - DNA, 20 bp, Artificial Sequence
  Description of Artificial Sequence: Synthetic oligonucleotide
  Target: ATXN2; (-) strand; PAM type: NRG; PAM sequence: TGG
gcactttgggaggccaaggc

SEQ ID NO: 18815 - DNA, 20 bp, Artificial Sequence
  Description of Artificial Sequence: Synthetic oligonucleotide
  Target: ATXN2; (-) strand; PAM type: NRG; PAM sequence: AGG
cccagcactttgggaggcca

SEQ ID NO: 18816 - DNA, 20 bp, Artificial Sequence
  Description of Artificial Sequence: Synthetic oligonucleotide
  Target: ATXN2; (-) strand; PAM type: NRG; PAM sequence: AAG
tcccagcactttgggaggcc

SEQ ID NO: 18817 - DNA, 20 bp, Artificial Sequence
  Description of Artificial Sequence: Synthetic oligonucleotide
  Target: ATXN2; (-) strand; PAM type: NRG; PAM sequence: AGG
tgtaatcccagcactttggg

SEQ ID NO: 18818 - DNA, 20 bp, Artificial Sequence
  Description of Artificial Sequence: Synthetic oligonucleotide
  Target: ATXN2; (-) strand; PAM type: NRG; PAM sequence: GAG
ctgtaatcccagcactttgg

SEQ ID NO: 18819 - DNA, 20 bp, Artificial Sequence
  Description of Artificial Sequence: Synthetic oligonucleotide
  Target: ATXN2; (-) strand; PAM type: NRG; PAM sequence: GGG
gcctgtaatcccagcacttt

SEQ ID NO: 18820 - DNA, 20 bp, Artificial Sequence
  Description of Artificial Sequence: Synthetic oligonucleotide
  Target: ATXN2; (-) strand; PAM type: NRG; PAM sequence: TGG
cgcctgtaatcccagcactt

SEQ ID NO: 18821 - DNA, 20 bp, Artificial Sequence
  Description of Artificial Sequence: Synthetic oligonucleotide
  Target: ATXN2; (-) strand; PAM type: NRG; PAM sequence: CAG
gtggctcacgcctgtaatcc

SEQ ID NO: 18822 - DNA, 20 bp, Artificial Sequence
  Description of Artificial Sequence: Synthetic oligonucleotide
  Target: ATXN2; (-) strand; PAM type: NRG; PAM sequence: TGG
aatttataggctgggcgcag

SEQ ID NO: 18823 - DNA, 20 bp, Artificial Sequence
  Description of Artificial Sequence: Synthetic oligonucleotide
  Target: ATXN2; (-) strand; PAM type: NRG; PAM sequence: CAG
aagaatttataggctgggcg

SEQ ID NO: 18824 - DNA, 20 bp, Artificial Sequence
  Description of Artificial Sequence: Synthetic oligonucleotide
  Target: ATXN2; (-) strand; PAM type: NRG; PAM sequence: GGG
tatttaagaatttataggct

SEQ ID NO: 18825 - DNA, 20 bp, Artificial Sequence
  Description of Artificial Sequence: Synthetic oligonucleotide
  Target: ATXN2; (-) strand; PAM type: NRG; PAM sequence: TGG
ttatttaagaatttataggc

SEQ ID NO: 18826 - DNA, 20 bp, Artificial Sequence
  Description of Artificial Sequence: Synthetic oligonucleotide
  Target: ATXN2; (-) strand; PAM type: NRG; PAM sequence: AGG
tgagttatttaagaatttat

SEQ ID NO: 18827 - DNA, 20 bp, Artificial Sequence
  Description of Artificial Sequence: Synthetic oligonucleotide
  Target: ATXN2; (-) strand; PAM type: NRG; PAM sequence: TAG
ttgagttatttaagaattta

SEQ ID NO: 18828 - DNA, 20 bp, Artificial Sequence
  Description of Artificial Sequence: Synthetic oligonucleotide
  Target: ATXN2; (-) strand; PAM type: NRG; PAM sequence: AAG
taggcaaaattgagttattt

SEQ ID NO: 18829 - DNA, 20 bp, Artificial Sequence
  Description of Artificial Sequence: Synthetic oligonucleotide
  Target: ATXN2; (-) strand; PAM type: NRG; PAM sequence: GAG
gagtatgtttaggcaaaatt

SEQ ID NO: 18830 - DNA, 20 bp, Artificial Sequence
  Description of Artificial Sequence: Synthetic oligonucleotide
  Target: ATXN2; (-) strand; PAM type: NRG; PAM sequence: AGG
tgtcctgaacgagtatgttt

SEQ ID NO: 18831 - DNA, 20 bp, Artificial Sequence
  Description of Artificial Sequence: Synthetic oligonucleotide
  Target: ATXN2; (-) strand; PAM type: NRG; PAM sequence: TAG
atgtcctgaacgagtatgtt

SEQ ID NO: 18832 - DNA, 20 bp, Artificial Sequence
  Description of Artificial Sequence: Synthetic oligonucleotide
  Target: ATXN2; (-) strand; PAM type: NRG; PAM sequence: GAG
taagtttagatgtcctgaac

SEQ ID NO: 18833 - DNA, 20 bp, Artificial Sequence
  Description of Artificial Sequence: Synthetic oligonucleotide
  Target: ATXN2; (-) strand; PAM type: NRG; PAM sequence: TAG
aaatttttattttttaagtt

SEQ ID NO: 18834 - DNA, 20 bp, Artificial Sequence
  Description of Artificial Sequence: Synthetic oligonucleotide
  Target: ATXN2; (-) strand; PAM type: NRG; PAM sequence: AAG
atataaaatttttatttttt

SEQ ID NO: 18835 - DNA, 20 bp, Artificial Sequence
  Description of Artificial Sequence: Synthetic oligonucleotide
  Target: ATXN2; (-) strand; PAM type: NRG; PAM sequence: AAG
tttgaactttttgaaatact

SEQ ID NO: 18836 - DNA, 20 bp, Artificial Sequence
  Description of Artificial Sequence: Synthetic oligonucleotide
  Target: ATXN2; (-) strand; PAM type: NRG; PAM sequence: AAG
acatgggcatttcattttta

SEQ ID NO: 18837 - DNA, 20 bp, Artificial Sequence
  Description of Artificial Sequence: Synthetic oligonucleotide
  Target: ATXN2; (-) strand; PAM type: NRG; PAM sequence: GGG
atggttacatgtaactacat

SEQ ID NO: 18838 - DNA, 20 bp, Artificial Sequence
  Description of Artificial Sequence: Synthetic oligonucleotide
  Target: ATXN2; (-) strand; PAM type: NRG; PAM sequence: TGG
tatggttacatgtaactaca

SEQ ID NO: 18839 - DNA, 20 bp, Artificial Sequence
  Description of Artificial Sequence: Synthetic oligonucleotide
  Target: ATXN2; (-) strand; PAM type: NRG; PAM sequence: TGG
ctgctatgagaatgagatta

SEQ ID NO: 18840 - DNA, 20 bp, Artificial Sequence
  Description of Artificial Sequence: Synthetic oligonucleotide
  Target: ATXN2; (-) strand; PAM type: NRG; PAM sequence: GAG
aagtgtactgctatgagaat

SEQ ID NO: 18841 - DNA, 20 bp, Artificial Sequence
  Description of Artificial Sequence: Synthetic oligonucleotide
  Target: ATXN2; (-) strand; PAM type: NRG; PAM sequence: GAG
gttgaaaagtgtactgctat

SEQ ID NO: 18842 - DNA, 20 bp, Artificial Sequence
  Description of Artificial Sequence: Synthetic oligonucleotide
  Target: ATXN2; (-) strand; PAM type: NRG; PAM sequence: AAG
ggtttattcatacagttgaa

SEQ ID NO: 18843 - DNA, 20 bp, Artificial Sequence
  Description of Artificial Sequence: Synthetic oligonucleotide
  Target: ATXN2; (-) strand; PAM type: NRG; PAM sequence: CAG
ataattttggtttattcata

SEQ ID NO: 18844 - DNA, 20 bp, Artificial Sequence
  Description of Artificial Sequence: Synthetic oligonucleotide
  Target: ATXN2; (-) strand; PAM type: NRG; PAM sequence: TGG
tttggagtaggggataattt

SEQ ID NO: 18845 - DNA, 20 bp, Artificial Sequence
  Description of Artificial Sequence: Synthetic oligonucleotide
  Target: ATXN2; (-) strand; PAM type: NRG; PAM sequence: GGG
tttttggttgtttggagtag

SEQ ID NO: 18846 - DNA, 20 bp, Artificial Sequence
  Description of Artificial Sequence: Synthetic oligonucleotide
  Target: ATXN2; (-) strand; PAM type: NRG; PAM sequence: GGG
gtttttggttgtttggagta

SEQ ID NO: 18847 - DNA, 20 bp, Artificial Sequence
  Description of Artificial Sequence: Synthetic oligonucleotide
  Target: ATXN2; (-) strand; PAM type: NRG; PAM sequence: AGG
cgtttttggttgtttggagt

SEQ ID NO: 18848 - DNA, 20 bp, Artificial Sequence
  Description of Artificial Sequence: Synthetic oligonucleotide
  Target: ATXN2; (-) strand; PAM type: NRG; PAM sequence: TAG
gcgtttttggttgtttggag

SEQ ID NO: 18849 - DNA, 20 bp, Artificial Sequence
  Description of Artificial Sequence: Synthetic oligonucleotide
  Target: ATXN2; (-) strand; PAM type: NRG; PAM sequence: GAG
tttgcgtttttggttgtttg

SEQ ID NO: 18850 - DNA, 20 bp, Artificial Sequence
  Description of Artificial Sequence: Synthetic oligonucleotide
  Target: ATXN2; (-) strand; PAM type: NRG; PAM sequence: TGG
tatttgcgtttttggttgtt

SEQ ID NO: 18851 - DNA, 20 bp, Artificial Sequence
  Description of Artificial Sequence: Synthetic oligonucleotide
  Target: ATXN2; (-) strand; PAM type: NRG; PAM sequence: TGG
agttttcctatttgcgtttt

SEQ ID NO: 18852 - DNA, 20 bp, Artificial Sequence
  Description of Artificial Sequence: Synthetic oligonucleotide
  Target: ATXN2; (-) strand; PAM type: NRG; PAM sequence: TAG
agaactaccgtagtgtcgtt

SEQ ID NO: 18853 - DNA, 20 bp, Artificial Sequence
  Description of Artificial Sequence: Synthetic oligonucleotide
  Target: ATXN2; (-) strand; PAM type: NRG; PAM sequence: TAG
aatatttctgagaactaccg

SEQ ID NO: 18854 - DNA, 20 bp, Artificial Sequence
  Description of Artificial Sequence: Synthetic oligonucleotide
  Target: ATXN2; (-) strand; PAM type: NRG; PAM sequence: GAG
gttttgttctgaatatttct

SEQ ID NO: 18855 - DNA, 20 bp, Artificial Sequence
  Description of Artificial Sequence: Synthetic oligonucleotide
  Target: ATXN2; (-) strand; PAM type: NRG; PAM sequence: AAG
taaatagtactgatttcatt

SEQ ID NO: 18856 - DNA, 20 bp, Artificial Sequence
  Description of Artificial Sequence: Synthetic oligonucleotide
  Target: ATXN2; (-) strand; PAM type: NRG; PAM sequence: TAG
tttcagaatatgtttttaaa

SEQ ID NO: 18857 - DNA, 20 bp, Artificial Sequence
  Description of Artificial Sequence: Synthetic oligonucleotide
  Target: ATXN2; (-) strand; PAM type: NRG; PAM sequence: CAG
ggattgcttcaaatgttttt

SEQ ID NO: 18858 - DNA, 20 bp, Artificial Sequence
  Description of Artificial Sequence: Synthetic oligonucleotide
  Target: ATXN2; (-) strand; PAM type: NRG; PAM sequence: TGG
atcttatgatacagaattaa

SEQ ID NO: 18859 - DNA, 20 bp, Artificial Sequence
  Description of Artificial Sequence: Synthetic oligonucleotide
  Target: ATXN2; (-) strand; PAM type: NRG; PAM sequence: CAG
catttgtatatcttatgata

SEQ ID NO: 18860 - DNA, 20 bp, Artificial Sequence
  Description of Artificial Sequence: Synthetic oligonucleotide
  Target: ATXN2; (-) strand; PAM type: NRG; PAM sequence: TAG
tgtctaaagtaccaaaataa

SEQ ID NO: 18861 - DNA, 20 bp, Artificial Sequence
  Description of Artificial Sequence: Synthetic oligonucleotide
  Target: ATXN2; (-) strand; PAM type: NRG; PAM sequence: AAG
atcaacttagcagctgtcta

SEQ ID NO: 18862 - DNA, 20 bp, Artificial Sequence
  Description of Artificial Sequence: Synthetic oligonucleotide
  Target: ATXN2; (-) strand; PAM type: NRG; PAM sequence: CAG
atttgtgtagatcaacttag

SEQ ID NO: 18863 - DNA, 20 bp, Artificial Sequence
  Description of Artificial Sequence: Synthetic oligonucleotide
  Target: ATXN2; (-) strand; PAM type: NRG; PAM sequence: TAG
gaaatttgtgtagatcaact

SEQ ID NO: 18864 - DNA, 20 bp, Artificial Sequence
  Description of Artificial Sequence: Synthetic oligonucleotide
  Target: ATXN2; (-) strand; PAM type: NRG; PAM sequence: TAG
actaaacagagaaatttgtg

SEQ ID NO: 18865 - DNA, 20 bp, Artificial Sequence
  Description of Artificial Sequence: Synthetic oligonucleotide
  Target: ATXN2; (-) strand; PAM type: NRG; PAM sequence: GAG
cttcgttttgtgactaaaca

SEQ ID NO: 18866 - DNA, 20 bp, Artificial Sequence
  Description of Artificial Sequence: Synthetic oligonucleotide
  Target: ATXN2; (-) strand; PAM type: NRG; PAM sequence: CAG
atcttcgttttgtgactaaa

SEQ ID NO: 18867 - DNA, 20 bp, Artificial Sequence
  Description of Artificial Sequence: Synthetic oligonucleotide
  Target: ATXN2; (-) strand; PAM type: NRG; PAM sequence: AAG
tatttatatgtgagaataat

SEQ ID NO: 18868 - DNA, 20 bp, Artificial Sequence
  Description of Artificial Sequence: Synthetic oligonucleotide
  Target: ATXN2; (-) strand; PAM type: NRG; PAM sequence: GAG
actaagcagtatttatatgt

SEQ ID NO: 18869 - DNA, 20 bp, Artificial Sequence
  Description of Artificial Sequence: Synthetic oligonucleotide
  Target: ATXN2; (-) strand; PAM type: NRG; PAM sequence: CAG
gtattttatgtaaaactaag

SEQ ID NO: 18870 - DNA, 20 bp, Artificial Sequence
  Description of Artificial Sequence: Synthetic oligonucleotide
  Target: ATXN2; (-) strand; PAM type: NRG; PAM sequence: AAG
gaagtattttatgtaaaact

SEQ ID NO: 18871 - DNA, 20 bp, Artificial Sequence
  Description of Artificial Sequence: Synthetic oligonucleotide
  Target: ATXN2; (-) strand; PAM type: NRG; PAM sequence: AAG
aatgctgaaatgaaaatgag

SEQ ID NO: 18872 - DNA, 20 bp, Artificial Sequence
  Description of Artificial Sequence: Synthetic oligonucleotide
  Target: ATXN2; (-) strand; PAM type: NRG; PAM sequence: GAG
cagaatgctgaaatgaaaat

SEQ ID NO: 18873 - DNA, 20 bp, Artificial Sequence
  Description of Artificial Sequence: Synthetic oligonucleotide
  Target: ATXN2; (-) strand; PAM type: NRG; PAM sequence: CAG
ttaaatataaccaatgtgaa

SEQ ID NO: 18874 - DNA, 20 bp, Artificial Sequence
  Description of Artificial Sequence: Synthetic oligonucleotide
  Target: ATXN2; (-) strand; PAM type: NRG; PAM sequence: GAG
attagatatattttagacat

SEQ ID NO: 18875 - DNA, 20 bp, Artificial Sequence
  Description of Artificial Sequence: Synthetic oligonucleotide
  Target: ATXN2; (-) strand; PAM type: NRG; PAM sequence: TAG
atgtcatattagatatattt

SEQ ID NO: 18876 - DNA, 20 bp, Artificial Sequence
  Description of Artificial Sequence: Synthetic oligonucleotide
  Target: ATXN2; (-) strand; PAM type: NRG; PAM sequence: TAG
ggttgaatattatgtcatat

SEQ ID NO: 18877 - DNA, 20 bp, Artificial Sequence
  Description of Artificial Sequence: Synthetic oligonucleotide
  Target: ATXN2; (-) strand; PAM type: NRG; PAM sequence: TGG
tacatcatgctgtattttaa

SEQ ID NO: 18878 - DNA, 20 bp, Artificial Sequence
  Description of Artificial Sequence: Synthetic oligonucleotide
  Target: ATXN2; (-) strand; PAM type: NRG; PAM sequence: TGG
ctacttgatctgagggtcac

SEQ ID NO: 18879 - DNA, 20 bp, Artificial Sequence
  Description of Artificial Sequence: Synthetic oligonucleotide
  Target: ATXN2; (-) strand; PAM type: NRG; PAM sequence: GGG
tgcttcactacttgatctga

SEQ ID NO: 18880 - DNA, 20 bp, Artificial Sequence
  Description of Artificial Sequence: Synthetic oligonucleotide
  Target: ATXN2; (-) strand; PAM type: NRG; PAM sequence: AGG
ttgcttcactacttgatctg

SEQ ID NO: 18881 - DNA, 20 bp, Artificial Sequence
  Description of Artificial Sequence: Synthetic oligonucleotide
  Target: ATXN2; (-) strand; PAM type: NRG; PAM sequence: GAG
tttgcttcactacttgatct

SEQ ID NO: 18882 - DNA, 20 bp, Artificial Sequence
  Description of Artificial Sequence: Synthetic oligonucleotide
  Target: ATXN2; (-) strand; PAM type: NRG; PAM sequence: CAG
aaaagcataaaggtgttctc

SEQ ID NO: 18883 - DNA, 20 bp, Artificial Sequence
  Description of Artificial Sequence: Synthetic oligonucleotide
  Target: ATXN2; (-) strand; PAM type: NRG; PAM sequence: AGG
ttataataataaaagcataa

SEQ ID NO: 18884 - DNA, 20 bp, Artificial Sequence
  Description of Artificial Sequence: Synthetic oligonucleotide
  Target: ATXN2; (-) strand; PAM type: NRG; PAM sequence: AAG
tttataataataaaagcata

SEQ ID NO: 18885 - DNA, 20 bp, Artificial Sequence
  Description of Artificial Sequence: Synthetic oligonucleotide
  Target: ATXN2; (-) strand; PAM type: NRG; PAM sequence: AAG
agagaattttataataataa

SEQ ID NO: 18886 - DNA, 20 bp, Artificial Sequence
  Description of Artificial Sequence: Synthetic oligonucleotide
  Target: ATXN2; (-) strand; PAM type: NRG; PAM sequence: GAG
atcctgcctacgacatgcaa

SEQ ID NO: 18887 - DNA, 20 bp, Artificial Sequence
  Description of Artificial Sequence: Synthetic oligonucleotide
  Target: ATXN2; (-) strand; PAM type: NRG; PAM sequence: AAG
atatcctgcctacgacatgc

SEQ ID NO: 18888 - DNA, 20 bp, Artificial Sequence
  Description of Artificial Sequence: Synthetic oligonucleotide
  Target: ATXN2; (-) strand; PAM type: NRG; PAM sequence: TGG
tcctcatcaatattatgctt

SEQ ID NO: 18889 - DNA, 20 bp, Artificial Sequence
  Description of Artificial Sequence: Synthetic oligonucleotide
  Target: ATXN2; (-) strand; PAM type: NRG; PAM sequence: AGG
caaagcatctttgtggagaa

SEQ ID NO: 18890 - DNA, 20 bp, Artificial Sequence
  Description of Artificial Sequence: Synthetic oligonucleotide
  Target: ATXN2; (-) strand; PAM type: NRG; PAM sequence: AAG
gcaaagcatctttgtggaga

SEQ ID NO: 18891 - DNA, 20 bp, Artificial Sequence
  Description of Artificial Sequence: Synthetic oligonucleotide
  Target: ATXN2; (-) strand; PAM type: NRG; PAM sequence: GAG
aatggcaaagcatctttgtg

SEQ ID NO: 18892 - DNA, 20 bp, Artificial Sequence
  Description of Artificial Sequence: Synthetic oligonucleotide
  Target: ATXN2; (-) strand; PAM type: NRG; PAM sequence: TGG
ataatggcaaagcatctttg

SEQ ID NO: 18893 - DNA, 20 bp, Artificial Sequence
  Description of Artificial Sequence: Synthetic oligonucleotide
  Target: ATXN2; (-) strand; PAM type: NRG; PAM sequence: AAG
taatgatgtatataatggca

SEQ ID NO: 18894 - DNA, 20 bp, Artificial Sequence
  Description of Artificial Sequence: Synthetic oligonucleotide
  Target: ATXN2; (-) strand; PAM type: NRG; PAM sequence: TGG
aaatgtaatgatgtatataa

SEQ ID NO: 18895 - DNA, 20 bp, Artificial Sequence
  Description of Artificial Sequence: Synthetic oligonucleotide
  Target: ATXN2; (-) strand; PAM type: NRG; PAM sequence: CAG
ctacttctgtacctggtctt

SEQ ID NO: 18896 - DNA, 20 bp, Artificial Sequence
  Description of Artificial Sequence: Synthetic oligonucleotide
  Target: ATXN2; (-) strand; PAM type: NRG; PAM sequence: TGG
atagtttctacttctgtacc

SEQ ID NO: 18897 - DNA, 20 bp, Artificial Sequence
  Description of Artificial Sequence: Synthetic oligonucleotide
  Target: ATXN2; (-) strand; PAM type: NRG; PAM sequence: TAG
gctttataacttttggcaaa

SEQ ID NO: 18898 - DNA, 20 bp, Artificial Sequence
  Description of Artificial Sequence: Synthetic oligonucleotide
  Target: ATXN2; (-) strand; PAM type: NRG; PAM sequence: TGG
ctgacttgctttataacttt

SEQ ID NO: 18899 - DNA, 20 bp, Artificial Sequence
  Description of Artificial Sequence: Synthetic oligonucleotide
  Target: ATXN2; (-) strand; PAM type: NRG; PAM sequence: AAG
gggtcaagaatctgaaggaa

SEQ ID NO: 18900 - DNA, 20 bp, Artificial Sequence
  Description of Artificial Sequence: Synthetic oligonucleotide
  Target: ATXN2; (-) strand; PAM type: NRG; PAM sequence: AGG
attgagggtcaagaatctga

SEQ ID NO: 18901 - DNA, 20 bp, Artificial Sequence
  Description of Artificial Sequence: Synthetic oligonucleotide
  Target: ATXN2; (-) strand; PAM type: NRG; PAM sequence: AAG
cattgagggtcaagaatctg

SEQ ID NO: 18902 - DNA, 20 bp, Artificial Sequence
  Description of Artificial Sequence: Synthetic oligonucleotide
  Target: ATXN2; (-) strand; PAM type: NRG; PAM sequence: AAG
cttttatgacattgagggtc

SEQ ID NO: 18903 - DNA, 20 bp, Artificial Sequence
  Description of Artificial Sequence: Synthetic oligonucleotide
  Target: ATXN2; (-) strand; PAM type: NRG; PAM sequence: GGG
ctgaccttttatgacattga

SEQ ID NO: 18904 - DNA, 20 bp, Artificial Sequence
  Description of Artificial Sequence: Synthetic oligonucleotide
  Target: ATXN2; (-) strand; PAM type: NRG; PAM sequence: AGG
cctgaccttttatgacattg

SEQ ID NO: 18905 - DNA, 20 bp, Artificial Sequence
  Description of Artificial Sequence: Synthetic oligonucleotide
  Target: ATXN2; (-) strand; PAM type: NRG; PAM sequence: GAG
acctgaccttttatgacatt

SEQ ID NO: 18906 - DNA, 20 bp, Artificial Sequence
  Description of Artificial Sequence: Synthetic oligonucleotide
  Target: ATXN2; (-) strand; PAM type: NRG; PAM sequence: AAG
tctgaaaacatactctatct

SEQ ID NO: 18907 - DNA, 20 bp, Artificial Sequence
  Description of Artificial Sequence: Synthetic oligonucleotide
  Target: ATXN2; (-) strand; PAM type: NRG; PAM sequence: AAG
tgtgtgactcttcttaattt

SEQ ID NO: 18908 - DNA, 20 bp, Artificial Sequence
  Description of Artificial Sequence: Synthetic oligonucleotide
  Target: ATXN2; (-) strand; PAM type: NRG; PAM sequence: CAG
agcactttgtttgtctcttc

SEQ ID NO: 18909 - DNA, 20 bp, Artificial Sequence
  Description of Artificial Sequence: Synthetic oligonucleotide
  Target: ATXN2; (-) strand; PAM type: NRG; PAM sequence: AAG
cgcatgcgatgtatggtagg

SEQ ID NO: 18910 - DNA, 20 bp, Artificial Sequence
  Description of Artificial Sequence: Synthetic oligonucleotide
  Target: ATXN2; (-) strand; PAM type: NRG; PAM sequence: AGG
agacgcatgcgatgtatggt

SEQ ID NO: 18911 - DNA, 20 bp, Artificial Sequence
  Description of Artificial Sequence: Synthetic oligonucleotide
  Target: ATXN2; (-) strand; PAM type: NRG; PAM sequence: TAG
cagacgcatgcgatgtatgg

SEQ ID NO: 18912 - DNA, 20 bp, Artificial Sequence
  Description of Artificial Sequence: Synthetic oligonucleotide
  Target: ATXN2; (-) strand; PAM type: NRG; PAM sequence: TGG
gagcagacgcatgcgatgta

SEQ ID NO: 18913 - DNA, 20 bp, Artificial Sequence
  Description of Artificial Sequence: Synthetic oligonucleotide
  Target: ATXN2; (-) strand; PAM type: NRG; PAM sequence: CAG
ctcagtacggggctcatgag

SEQ ID NO: 18914 - DNA, 20 bp, Artificial Sequence
  Description of Artificial Sequence: Synthetic oligonucleotide
  Target: ATXN2; (-) strand; PAM type: NRG; PAM sequence: GAG
caactcagtacggggctcat

SEQ ID NO: 18915 - DNA, 20 bp, Artificial Sequence
  Description of Artificial Sequence: Synthetic oligonucleotide
  Target: ATXN2; (-) strand; PAM type: NRG; PAM sequence: GGG
ttcttcagcaactcagtacg

SEQ ID NO: 18916 - DNA, 20 bp, Artificial Sequence
  Description of Artificial Sequence: Synthetic oligonucleotide
  Target: ATXN2; (-) strand; PAM type: NRG; PAM sequence: GGG
cttcttcagcaactcagtac

SEQ ID NO: 18917 - DNA, 20 bp, Artificial Sequence
  Description of Artificial Sequence: Synthetic oligonucleotide
  Target: ATXN2; (-) strand; PAM type: NRG; PAM sequence: CGG
tcttcttcagcaactcagta

SEQ ID NO: 18918 - DNA, 20 bp, Artificial Sequence
  Description of Artificial Sequence: Synthetic oligonucleotide
  Target: ATXN2; (-) strand; PAM type: NRG; PAM sequence: CAG
tagtatcttcttcagcaact

SEQ ID NO: 18919 - DNA, 20 bp, Artificial Sequence
  Description of Artificial Sequence: Synthetic oligonucleotide
  Target: ATXN2; (-) strand; PAM type: NRG; PAM sequence: CAG
gcctggtttagtatcttctt

SEQ ID NO: 18920 - DNA, 20 bp, Artificial Sequence
  Description of Artificial Sequence: Synthetic oligonucleotide
  Target: ATXN2; (-) strand; PAM type: NRG; PAM sequence: TAG
aacacacgcccagcctggtt

SEQ ID NO: 18921 - DNA, 20 bp, Artificial Sequence
  Description of Artificial Sequence: Synthetic oligonucleotide
  Target: ATXN2; (-) strand; PAM type: NRG; PAM sequence: TGG
ccaccaacacacgcccagcc

SEQ ID NO: 18922 - DNA, 20 bp, Artificial Sequence
  Description of Artificial Sequence: Synthetic oligonucleotide
  Target: ATXN2; (-) strand; PAM type: NRG; PAM sequence: CAG
tggcaccaccaacacacgcc

SEQ ID NO: 18923 - DNA, 20 bp, Artificial Sequence
  Description of Artificial Sequence: Synthetic oligonucleotide
  Target: ATXN2; (-) strand; PAM type: NRG; PAM sequence: TGG
acagggtaatgctagaatga

SEQ ID NO: 18924 - DNA, 20 bp, Artificial Sequence
  Description of Artificial Sequence: Synthetic oligonucleotide
  Target: ATXN2; (-) strand; PAM type: NRG; PAM sequence: TAG
cctgtaatacagggtaatgc

SEQ ID NO: 18925 - DNA, 20 bp, Artificial Sequence
  Description of Artificial Sequence: Synthetic oligonucleotide
  Target: ATXN2; (-) strand; PAM type: NRG; PAM sequence: GGG
gtctatagtcctgtaataca

SEQ ID NO: 18926 - DNA, 20 bp, Artificial Sequence
  Description of Artificial Sequence: Synthetic oligonucleotide
  Target: ATXN2; (-) strand; PAM type: NRG; PAM sequence: AGG
tgtctatagtcctgtaatac

SEQ ID NO: 18927 - DNA, 20 bp, Artificial Sequence
  Description of Artificial Sequence: Synthetic oligonucleotide
  Target: ATXN2; (-) strand; PAM type: NRG; PAM sequence: CAG
atgtctatagtcctgtaata

SEQ ID NO: 18928 - DNA, 20 bp, Artificial Sequence
  Description of Artificial Sequence: Synthetic oligonucleotide
  Target: ATXN2; (-) strand; PAM type: NRG; PAM sequence: TAG
acacagcatcctcatgtcta

SEQ ID NO: 18929 - DNA, 20 bp, Artificial Sequence
  Description of Artificial Sequence: Synthetic oligonucleotide
  Target: ATXN2; (-) strand; PAM type: NRG; PAM sequence: CAG
ctttattttttgtttgaaca

SEQ ID NO: 18930 - DNA, 20 bp, Artificial Sequence
  Description of Artificial Sequence: Synthetic oligonucleotide
  Target: ATXN2; (-) strand; PAM type: NRG; PAM sequence: CAG
agtctgcttggctctatttg

SEQ ID NO: 18931 - DNA, 20 bp, Artificial Sequence
  Description of Artificial Sequence: Synthetic oligonucleotide
  Target: ATXN2; (-) strand; PAM type: NRG; PAM sequence: TGG
aatcttaactaaagtctgct

SEQ ID NO: 18932 - DNA, 20 bp, Artificial Sequence
  Description of Artificial Sequence: Synthetic oligonucleotide
  Target: ATXN2; (-) strand; PAM type: NRG; PAM sequence: AAG
ggagttaaaaatcttaacta

SEQ ID NO: 18933 - DNA, 20 bp, Artificial Sequence
  Description of Artificial Sequence: Synthetic oligonucleotide
  Target: ATXN2; (-) strand; PAM type: NRG; PAM sequence: GAG
ctggaaatctggaaaccatg

SEQ ID NO: 18934 - DNA, 20 bp, Artificial Sequence
  Description of Artificial Sequence: Synthetic oligonucleotide
  Target: ATXN2; (-) strand; PAM type: NRG; PAM sequence: TGG
ttctggaaatctggaaacca

SEQ ID NO: 18935 - DNA, 20 bp, Artificial Sequence
  Description of Artificial Sequence: Synthetic oligonucleotide
  Target: ATXN2; (-) strand; PAM type: NRG; PAM sequence: TGG
tacagctgtttctggaaatc

SEQ ID NO: 18936 - DNA, 20 bp, Artificial Sequence
  Description of Artificial Sequence: Synthetic oligonucleotide
  Target: ATXN2; (-) strand; PAM type: NRG; PAM sequence: TGG
tgagagtttacagctgtttc

SEQ ID NO: 18937 - DNA, 20 bp, Artificial Sequence
  Description of Artificial Sequence: Synthetic oligonucleotide
  Target: ATXN2; (-) strand; PAM type: NRG; PAM sequence: CAG
aagaaagatttgagagttta

SEQ ID NO: 18938 - DNA, 20 bp, Artificial Sequence
  Description of Artificial Sequence: Synthetic oligonucleotide
  Target: ATXN2; (-) strand; PAM type: NRG; PAM sequence: GAG
aacagccaagaaagatttga

SEQ ID NO: 18939 - DNA, 20 bp, Artificial Sequence
  Description of Artificial Sequence: Synthetic oligonucleotide
  Target: ATXN2; (-) strand; PAM type: NRG; PAM sequence: GAG
gaaacagccaagaaagattt

SEQ ID NO: 18940 - DNA, 20 bp, Artificial Sequence
  Description of Artificial Sequence: Synthetic oligonucleotide
  Target: ATXN2; (-) strand; PAM type: NRG; PAM sequence: AAG
ttcagaggaaacagccaaga

SEQ ID NO: 18941 - DNA, 20 bp, Artificial Sequence
  Description of Artificial Sequence: Synthetic oligonucleotide
  Target: ATXN2; (-) strand; PAM type: NRG; PAM sequence: AAG
gaggttcagaggaaacagcc

SEQ ID NO: 18942 - DNA, 20 bp, Artificial Sequence
  Description of Artificial Sequence: Synthetic oligonucleotide
  Target: ATXN2; (-) strand; PAM type: NRG; PAM sequence: CAG
tgtaagaggttcagaggaaa

SEQ ID NO: 18943 - DNA, 20 bp, Artificial Sequence
  Description of Artificial Sequence: Synthetic oligonucleotide
  Target: ATXN2; (-) strand; PAM type: NRG; PAM sequence: AGG
gatgattgtaagaggttcag

SEQ ID NO: 18944 - DNA, 20 bp, Artificial Sequence
  Description of Artificial Sequence: Synthetic oligonucleotide
  Target: ATXN2; (-) strand; PAM type: NRG; PAM sequence: GAG
tgatgattgtaagaggttca

SEQ ID NO: 18945 - DNA, 20 bp, Artificial Sequence
  Description of Artificial Sequence: Synthetic oligonucleotide
  Target: ATXN2; (-) strand; PAM type: NRG; PAM sequence: CAG
actgatgattgtaagaggtt

SEQ ID NO: 18946 - DNA, 20 bp, Artificial Sequence
  Description of Artificial Sequence: Synthetic oligonucleotide
  Target: ATXN2; (-) strand; PAM type: NRG; PAM sequence: AGG
aggttactgatgattgtaag

SEQ ID NO: 18947 - DNA, 20 bp, Artificial Sequence
  Description of Artificial Sequence: Synthetic oligonucleotide
  Target: ATXN2; (-) strand; PAM type: NRG; PAM sequence: GAG
aaggttactgatgattgtaa

SEQ ID NO: 18948 - DNA, 20 bp, Artificial Sequence
  Description of Artificial Sequence: Synthetic oligonucleotide
  Target: ATXN2; (-) strand; PAM type: NRG; PAM sequence: AAG
cgaaggttactgatgattgt

SEQ ID NO: 18949 - DNA, 20 bp, Artificial Sequence
  Description of Artificial Sequence: Synthetic oligonucleotide
  Target: ATXN2; (-) strand; PAM type: NRG; PAM sequence: AGG
ccttttcaatatatattcga

SEQ ID NO: 18950 - DNA, 20 bp, Artificial Sequence
  Description of Artificial Sequence: Synthetic oligonucleotide
  Target: ATXN2; (-) strand; PAM type: NRG; PAM sequence: AAG
cccttttcaatatatattcg

SEQ ID NO: 18951 - DNA, 20 bp, Artificial Sequence
  Description of Artificial Sequence: Synthetic oligonucleotide
  Target: ATXN2; (-) strand; PAM type: NRG; PAM sequence: GGG
ggtagatagctaaggacttg

SEQ ID NO: 18952 - DNA, 20 bp, Artificial Sequence
  Description of Artificial Sequence: Synthetic oligonucleotide
  Target: ATXN2; (-) strand; PAM type: NRG; PAM sequence: GGG
gggtagatagctaaggactt

SEQ ID NO: 18953 - DNA, 20 bp, Artificial Sequence
  Description of Artificial Sequence: Synthetic oligonucleotide
  Target: ATXN2; (-) strand; PAM type: NRG; PAM sequence: TGG
agggtagatagctaaggact

SEQ ID NO: 18954 - DNA, 20 bp, Artificial Sequence
  Description of Artificial Sequence: Synthetic oligonucleotide
  Target: ATXN2; (-) strand; PAM type: NRG; PAM sequence: AGG
gatggtagggtagatagcta

SEQ ID NO: 18955 - DNA, 20 bp, Artificial Sequence
  Description of Artificial Sequence: Synthetic oligonucleotide
  Target: ATXN2; (-) strand; PAM type: NRG; PAM sequence: AAG
tgatggtagggtagatagct

SEQ ID NO: 18956 - DNA, 20 bp, Artificial Sequence
  Description of Artificial Sequence: Synthetic oligonucleotide
  Target: ATXN2; (-) strand; PAM type: NRG; PAM sequence: TAG
ttgtgtgatggtagggtaga

SEQ ID NO: 18957 - DNA, 20 bp, Artificial Sequence
  Description of Artificial Sequence: Synthetic oligonucleotide
  Target: ATXN2; (-) strand; PAM type: NRG; PAM sequence: TAG
gcttttgtgtgatggtaggg

SEQ ID NO: 18958 - DNA, 20 bp, Artificial Sequence
  Description of Artificial Sequence: Synthetic oligonucleotide
  Target: ATXN2; (-) strand; PAM type: NRG; PAM sequence: GGG
tttgcttttgtgtgatggta

SEQ ID NO: 18959 - DNA, 20 bp, Artificial Sequence
  Description of Artificial Sequence: Synthetic oligonucleotide
  Target: ATXN2; (-) strand; PAM type: NRG; PAM sequence: AGG
ttttgcttttgtgtgatggt

SEQ ID NO: 18960 - DNA, 20 bp, Artificial Sequence
  Description of Artificial Sequence: Synthetic oligonucleotide
  Target: ATXN2; (-) strand; PAM type: NRG; PAM sequence: TAG
tttttgcttttgtgtgatgg

SEQ ID NO: 18961 - DNA, 20 bp, Artificial Sequence
  Description of Artificial Sequence: Synthetic oligonucleotide
  Target: ATXN2; (-) strand; PAM type: NRG; PAM sequence: TGG
taatttttgcttttgtgtga

SEQ ID NO: 18962 - DNA, 20 bp, Artificial Sequence
  Description of Artificial Sequence: Synthetic oligonucleotide
  Target: ATXN2; (-) strand; PAM type: NRG; PAM sequence: GGG
aaaacttttaatatggtaaa

SEQ ID NO: 18963 - DNA, 20 bp, Artificial Sequence
  Description of Artificial Sequence: Synthetic oligonucleotide
  Target: ATXN2; (-) strand; PAM type: NRG; PAM sequence: AGG
aaaaacttttaatatggtaa

SEQ ID NO: 18964 - DNA, 20 bp, Artificial Sequence
  Description of Artificial Sequence: Synthetic oligonucleotide
  Target: ATXN2; (-) strand; PAM type: NRG; PAM sequence: AAG
aaaaaacttttaatatggta

SEQ ID NO: 18965 - DNA, 20 bp, Artificial Sequence
  Description of Artificial Sequence: Synthetic oligonucleotide
  Target: ATXN2; (-) strand; PAM type: NRG; PAM sequence: TGG
atataaaaaaacttttaata

SEQ ID NO: 18966 - DNA, 20 bp, Artificial Sequence
  Description of Artificial Sequence: Synthetic oligonucleotide
  Target: ATXN2; (-) strand; PAM type: NRG; PAM sequence: AGG
agtctcaggtaaggctggta

SEQ ID NO: 18967 - DNA, 20 bp, Artificial Sequence
  Description of Artificial Sequence: Synthetic oligonucleotide
  Target: ATXN2; (-) strand; PAM type: NRG; PAM sequence: AAG
cagtctcaggtaaggctggt

SEQ ID NO: 18968 - DNA, 20 bp, Artificial Sequence
  Description of Artificial Sequence: Synthetic oligonucleotide
  Target: ATXN2; (-) strand; PAM type: NRG; PAM sequence: TGG
ttatcagtctcaggtaaggc

SEQ ID NO: 18969 - DNA, 20 bp, Artificial Sequence
  Description of Artificial Sequence: Synthetic oligonucleotide
  Target: ATXN2; (-) strand; PAM type: NRG; PAM sequence: AGG
cacattatcagtctcaggta

SEQ ID NO: 18970 - DNA, 20 bp, Artificial Sequence
  Description of Artificial Sequence: Synthetic oligonucleotide
  Target: ATXN2; (-) strand; PAM type: NRG; PAM sequence: AAG
ccacattatcagtctcaggt

SEQ ID NO: 18971 - DNA, 20 bp, Artificial Sequence
  Description of Artificial Sequence: Synthetic oligonucleotide
  Target: ATXN2; (-) strand; PAM type: NRG; PAM sequence: AGG
tgtgccacattatcagtctc

SEQ ID NO: 18972 - DNA, 20 bp, Artificial Sequence
  Description of Artificial Sequence: Synthetic oligonucleotide
  Target: ATXN2; (-) strand; PAM type: NRG; PAM sequence: CAG
atgtgccacattatcagtct

SEQ ID NO: 18973 - DNA, 20 bp, Artificial Sequence
  Description of Artificial Sequence: Synthetic oligonucleotide
  Target: ATXN2; (-) strand; PAM type: NRG; PAM sequence: CAG
ttcagcatgtgccacattat

SEQ ID NO: 18974 - DNA, 20 bp, Artificial Sequence
  Description of Artificial Sequence: Synthetic oligonucleotide
  Target: ATXN2; (-) strand; PAM type: NRG; PAM sequence: CAG
tcccaaatcagccccttgtt

SEQ ID NO: 18975 - DNA, 20 bp, Artificial Sequence
  Description of Artificial Sequence: Synthetic oligonucleotide
  Target: ATXN2; (-) strand; PAM type: NRG; PAM sequence: CAG
gtcctcagcagttcccaaat

SEQ ID NO: 18976 - DNA, 20 bp, Artificial Sequence
  Description of Artificial Sequence: Synthetic oligonucleotide
  Target: ATXN2; (-) strand; PAM type: NRG; PAM sequence: CAG
atgttgcctacagtcctcag

SEQ ID NO: 18977 - DNA, 20 bp, Artificial Sequence
  Description of Artificial Sequence: Synthetic oligonucleotide
  Target: ATXN2; (-) strand; PAM type: NRG; PAM sequence: CAG
aatatgttgcctacagtcct

SEQ ID NO: 18978 - DNA, 20 bp, Artificial Sequence
  Description of Artificial Sequence: Synthetic oligonucleotide
  Target: ATXN2; (-) strand; PAM type: NRG; PAM sequence: CAG
tccacgcaatatgttgccta

SEQ ID NO: 18979 - DNA, 20 bp, Artificial Sequence
  Description of Artificial Sequence: Synthetic oligonucleotide
  Target: ATXN2; (-) strand; PAM type: NRG; PAM sequence: CAG
accgattgcagccaccccac

SEQ ID NO: 18980 - DNA, 20 bp, Artificial Sequence
  Description of Artificial Sequence: Synthetic oligonucleotide
  Target: ATXN2; (-) strand; PAM type: NRG; PAM sequence: CAG
agcagcgggcccaccgattg

SEQ ID NO: 18981 - DNA, 20 bp, Artificial Sequence
  Description of Artificial Sequence: Synthetic oligonucleotide
  Target: ATXN2; (-) strand; PAM type: NRG; PAM sequence: GGG
atgcacccagcgtcagcagc

SEQ ID NO: 18982 - DNA, 20 bp, Artificial Sequence
  Description of Artificial Sequence: Synthetic oligonucleotide
  Target: ATXN2; (-) strand; PAM type: NRG; PAM sequence: CGG
gatgcacccagcgtcagcag

SEQ ID NO: 18983 - DNA, 20 bp, Artificial Sequence
  Description of Artificial Sequence: Synthetic oligonucleotide
  Target: ATXN2; (-) strand; PAM type: NRG; PAM sequence: CAG
catgatgcacccagcgtcag

SEQ ID NO: 18984 - DNA, 20 bp, Artificial Sequence
  Description of Artificial Sequence: Synthetic oligonucleotide
  Target: ATXN2; (-) strand; PAM type: NRG; PAM sequence: CAG
tgccatgatgcacccagcgt

SEQ ID NO: 18985 - DNA, 20 bp, Artificial Sequence
  Description of Artificial Sequence: Synthetic oligonucleotide
  Target: ATXN2; (-) strand; PAM type: NRG; PAM sequence: CAG
tcagagtgccatgatgcacc

SEQ ID NO: 18986 - DNA, 20 bp, Artificial Sequence
  Description of Artificial Sequence: Synthetic oligonucleotide
  Target: ATXN2; (-) strand; PAM type: NRG; PAM sequence: GAG
cggcaagaccagcatcatca

SEQ ID NO: 18987 - DNA, 20 bp, Artificial Sequence
  Description of Artificial Sequence: Synthetic oligonucleotide
  Target: ATXN2; (-) strand; PAM type: NRG; PAM sequence: CAG
agcggcaagaccagcatcat

SEQ ID NO: 18988 - DNA, 20 bp, Artificial Sequence
  Description of Artificial Sequence: Synthetic oligonucleotide
  Target: ATXN2; (-) strand; PAM type: NRG; PAM sequence: CAG
tgccccaacagcggcaagac

SEQ ID NO: 18989 - DNA, 20 bp, Artificial Sequence
  Description of Artificial Sequence: Synthetic oligonucleotide
  Target: ATXN2; (-) strand; PAM type: NRG; PAM sequence: AAG
aaatatgccccaacagcggc

SEQ ID NO: 18990 - DNA, 20 bp, Artificial Sequence
  Description of Artificial Sequence: Synthetic oligonucleotide
  Target: ATXN2; (-) strand; PAM type: NRG; PAM sequence: CGG
taccaaatatgccccaacag

SEQ ID NO: 18991 - DNA, 20 bp, Artificial Sequence
  Description of Artificial Sequence: Synthetic oligonucleotide
  Target: ATXN2; (-) strand; PAM type: NRG; PAM sequence: CAG
cagtaccaaatatgccccaa

SEQ ID NO: 18992 - DNA, 20 bp, Artificial Sequence
  Description of Artificial Sequence: Synthetic oligonucleotide
  Target: ATXN2; (-) strand; PAM type: NRG; PAM sequence: CAG
gcagtctgcttttttttctg

SEQ ID NO: 18993 - DNA, 20 bp, Artificial Sequence
  Description of Artificial Sequence: Synthetic oligonucleotide
  Target: ATXN2; (-) strand; PAM type: NRG; PAM sequence: CAG
tggagatactgtttaatagg

SEQ ID NO: 18994 - DNA, 20 bp, Artificial Sequence
  Description of Artificial Sequence: Synthetic oligonucleotide
  Target: ATXN2; (-) strand; PAM type: NRG; PAM sequence: AGG
ctgtggagatactgtttaat

SEQ ID NO: 18995 - DNA, 20 bp, Artificial Sequence
  Description of Artificial Sequence: Synthetic oligonucleotide
  Target: ATXN2; (-) strand; PAM type: NRG; PAM sequence: TAG
gctgtggagatactgtttaa

SEQ ID NO: 18996 - DNA, 20 bp, Artificial Sequence
  Description of Artificial Sequence: Synthetic oligonucleotide
  Target: ATXN2; (-) strand; PAM type: NRG; PAM sequence: GAG
aacacatgtattatgctgtg

SEQ ID NO: 18997 - DNA, 20 bp, Artificial Sequence
  Description of Artificial Sequence: Synthetic oligonucleotide
  Target: ATXN2; (-) strand; PAM type: NRG; PAM sequence: TGG
tgaacacatgtattatgctg

SEQ ID NO: 18998 - DNA, 20 bp, Artificial Sequence
  Description of Artificial Sequence: Synthetic oligonucleotide
  Target: ATXN2; (-) strand; PAM type: NRG; PAM sequence: TAG
tcaaatcattcagagcctcc

SEQ ID NO: 18999 - DNA, 20 bp, Artificial Sequence
  Description of Artificial Sequence: Synthetic oligonucleotide
  Target: ATXN2; (-) strand; PAM type: NRG; PAM sequence: GAG
attcagggtcaaatcattca

SEQ ID NO: 19000 - DNA, 20 bp, Artificial Sequence
  Description of Artificial Sequence: Synthetic oligonucleotide
  Target: ATXN2; (-) strand; PAM type: NRG; PAM sequence: CAG
agattcagggtcaaatcatt

SEQ ID NO: 19001 - DNA, 20 bp, Artificial Sequence
  Description of Artificial Sequence: Synthetic oligonucleotide
  Target: ATXN2; (-) strand; PAM type: NRG; PAM sequence: GGG
gcatcagagacgcagattca

SEQ ID NO: 19002 - DNA, 20 bp, Artificial Sequence
  Description of Artificial Sequence: Synthetic oligonucleotide
  Target: ATXN2; (-) strand; PAM type: NRG; PAM sequence: AGG
ggcatcagagacgcagattc

SEQ ID NO: 19003 - DNA, 20 bp, Artificial Sequence
  Description of Artificial Sequence: Synthetic oligonucleotide
  Target: ATXN2; (-) strand; PAM type: NRG; PAM sequence: CAG
tggcatcagagacgcagatt

SEQ ID NO: 19004 - DNA, 20 bp, Artificial Sequence
  Description of Artificial Sequence: Synthetic oligonucleotide
  Target: ATXN2; (-) strand; PAM type: NRG; PAM sequence: CAG
atgagatggcatcagagacg

SEQ ID NO: 19005 - DNA, 20 bp, Artificial Sequence
  Description of Artificial Sequence: Synthetic oligonucleotide
  Target: ATXN2; (-) strand; PAM type: NRG; PAM sequence: GAG
agtggtatgagatggcatca

SEQ ID NO: 19006 - DNA, 20 bp, Artificial Sequence
  Description of Artificial Sequence: Synthetic oligonucleotide
  Target: ATXN2; (-) strand; PAM type: NRG; PAM sequence: CAG
ggagtggtatgagatggcat

SEQ ID NO: 19007 - DNA, 20 bp, Artificial Sequence
  Description of Artificial Sequence: Synthetic oligonucleotide
  Target: ATXN2; (-) strand; PAM type: NRG; PAM sequence: TGG
gaagtgggagtggtatgaga

SEQ ID NO: 19008 - DNA, 20 bp, Artificial Sequence
  Description of Artificial Sequence: Synthetic oligonucleotide
  Target: ATXN2; (-) strand; PAM type: NRG; PAM sequence: GAG
ggcagaagtgggagtggtat

SEQ ID NO: 19009 - DNA, 20 bp, Artificial Sequence
  Description of Artificial Sequence: Synthetic oligonucleotide
  Target: ATXN2; (-) strand; PAM type: NRG; PAM sequence: TGG
cagagtggcagaagtgggag

SEQ ID NO: 19010 - DNA, 20 bp, Artificial Sequence
  Description of Artificial Sequence: Synthetic oligonucleotide
  Target: ATXN2; (-) strand; PAM type: NRG; PAM sequence: GAG
acccagagtggcagaagtgg

SEQ ID NO: 19011 - DNA, 20 bp, Artificial Sequence
  Description of Artificial Sequence: Synthetic oligonucleotide
  Target: ATXN2; (-) strand; PAM type: NRG; PAM sequence: GGG
taacccagagtggcagaagt

SEQ ID NO: 19012 - DNA, 20 bp, Artificial Sequence
  Description of Artificial Sequence: Synthetic oligonucleotide
  Target: ATXN2; (-) strand; PAM type: NRG; PAM sequence: TGG
ataacccagagtggcagaag

SEQ ID NO: 19013 - DNA, 20 bp, Artificial Sequence
  Description of Artificial Sequence: Synthetic oligonucleotide
  Target: ATXN2; (-) strand; PAM type: NRG; PAM sequence: AAG
aaaataacccagagtggcag

SEQ ID NO: 19014 - DNA, 20 bp, Artificial Sequence
  Description of Artificial Sequence: Synthetic oligonucleotide
  Target: ATXN2; (-) strand; PAM type: NRG; PAM sequence: CAG
aggaaaataacccagagtgg

SEQ ID NO: 19015 - DNA, 20 bp, Artificial Sequence
  Description of Artificial Sequence: Synthetic oligonucleotide
  Target: ATXN2; (-) strand; PAM type: NRG; PAM sequence: TGG
gataggaaaataacccagag

SEQ ID NO: 19016 - DNA, 20 bp, Artificial Sequence
  Description of Artificial Sequence: Synthetic oligonucleotide
  Target: ATXN2; (-) strand; PAM type: NRG; PAM sequence: GAG
catgataggaaaataaccca

SEQ ID NO: 19017 - DNA, 20 bp, Artificial Sequence
  Description of Artificial Sequence: Synthetic oligonucleotide
  Target: ATXN2; (-) strand; PAM type: NRG; PAM sequence: CAG
tgcatgataggaaaataacc

SEQ ID NO: 19018 - DNA, 20 bp, Artificial Sequence
  Description of Artificial Sequence: Synthetic oligonucleotide
  Target: ATXN2; (-) strand; PAM type: NRG; PAM sequence: AGG
tgaggactagcatgcatgat

SEQ ID NO: 19019 - DNA, 20 bp, Artificial Sequence
  Description of Artificial Sequence: Synthetic oligonucleotide
  Target: ATXN2; (-) strand; PAM type: NRG; PAM sequence: TAG
ctgaggactagcatgcatga

SEQ ID NO: 19020 - DNA, 20 bp, Artificial Sequence
  Description of Artificial Sequence: Synthetic oligonucleotide
  Target: ATXN2; (-) strand; PAM type: NRG; PAM sequence: TAG
tggtgtttgaggctgaggac

SEQ ID NO: 19021 - DNA, 20 bp, Artificial Sequence
  Description of Artificial Sequence: Synthetic oligonucleotide
  Target: ATXN2; (-) strand; PAM type: NRG; PAM sequence: AGG
ggaactggtgtttgaggctg

SEQ ID NO: 19022 - DNA, 20 bp, Artificial Sequence
  Description of Artificial Sequence: Synthetic oligonucleotide
  Target: ATXN2; (-) strand; PAM type: NRG; PAM sequence: GAG
gggaactggtgtttgaggct

SEQ ID NO: 19023 - DNA, 20 bp, Artificial Sequence
  Description of Artificial Sequence: Synthetic oligonucleotide
  Target: ATXN2; (-) strand; PAM type: NRG; PAM sequence: AGG
gatttgggaactggtgtttg

SEQ ID NO: 19024 - DNA, 20 bp, Artificial Sequence
  Description of Artificial Sequence: Synthetic oligonucleotide
  Target: ATXN2; (-) strand; PAM type: NRG; PAM sequence: GAG
ggatttgggaactggtgttt

SEQ ID NO: 19025 - DNA, 20 bp, Artificial Sequence
  Description of Artificial Sequence: Synthetic oligonucleotide
  Target: ATXN2; (-) strand; PAM type: NRG; PAM sequence: TGG
cccagctgggatttgggaac

SEQ ID NO: 19026 - DNA, 20 bp, Artificial Sequence
  Description of Artificial Sequence: Synthetic oligonucleotide
  Target: ATXN2; (-) strand; PAM type: NRG; PAM sequence: GGG
aattatcccagctgggattt

SEQ ID NO: 19027 - DNA, 20 bp, Artificial Sequence
  Description of Artificial Sequence: Synthetic oligonucleotide
  Target: ATXN2; (-) strand; PAM type: NRG; PAM sequence: TGG
gaattatcccagctgggatt

SEQ ID NO: 19028 - DNA, 20 bp, Artificial Sequence
  Description of Artificial Sequence: Synthetic oligonucleotide
  Target: ATXN2; (-) strand; PAM type: NRG; PAM sequence: GGG
gaagcagaattatcccagct

SEQ ID NO: 19029 - DNA, 20 bp, Artificial Sequence
  Description of Artificial Sequence: Synthetic oligonucleotide
  Target: ATXN2; (-) strand; PAM type: NRG; PAM sequence: TGG
tgaagcagaattatcccagc

SEQ ID NO: 19030 - DNA, 20 bp, Artificial Sequence
  Description of Artificial Sequence: Synthetic oligonucleotide
  Target: ATXN2; (-) strand; PAM type: NRG; PAM sequence: CAG
aggatgaagcagaattatcc

SEQ ID NO: 19031 - DNA, 20 bp, Artificial Sequence
  Description of Artificial Sequence: Synthetic oligonucleotide
  Target: ATXN2; (-) strand; PAM type: NRG; PAM sequence: CAG
ctgacacctgaaggatgaag

SEQ ID NO: 19032 - DNA, 20 bp, Artificial Sequence
  Description of Artificial Sequence: Synthetic oligonucleotide
  Target: ATXN2; (-) strand; PAM type: NRG; PAM sequence: AAG
aagctgacacctgaaggatg

SEQ ID NO: 19033 - DNA, 20 bp, Artificial Sequence
  Description of Artificial Sequence: Synthetic oligonucleotide
  Target: ATXN2; (-) strand; PAM type: NRG; PAM sequence: AGG
gctttcaagctgacacctga

SEQ ID NO: 19034 - DNA, 20 bp, Artificial Sequence
  Description of Artificial Sequence: Synthetic oligonucleotide
  Target: ATXN2; (-) strand; PAM type: NRG; PAM sequence: AAG
tgctttcaagctgacacctg

SEQ ID NO: 19035 - DNA, 20 bp, Artificial Sequence
  Description of Artificial Sequence: Synthetic oligonucleotide
  Target: ATXN2; (-) strand; PAM type: NRG; PAM sequence: AAG
cctctgaggaagttgctttc

SEQ ID NO: 19036 - DNA, 20 bp, Artificial Sequence
  Description of Artificial Sequence: Synthetic oligonucleotide
  Target: ATXN2; (-) strand; PAM type: NRG; PAM sequence: AAG
gagagaaagtccctctgagg

SEQ ID NO: 19037 - DNA, 20 bp, Artificial Sequence
  Description of Artificial Sequence: Synthetic oligonucleotide
  Target: ATXN2; (-) strand; PAM type: NRG; PAM sequence: AGG
catgagagaaagtccctctg

SEQ ID NO: 19038 - DNA, 20 bp, Artificial Sequence
  Description of Artificial Sequence: Synthetic oligonucleotide
  Target: ATXN2; (-) strand; PAM type: NRG; PAM sequence: GAG
ccatgagagaaagtccctct

SEQ ID NO: 19039 - DNA, 20 bp, Artificial Sequence
  Description of Artificial Sequence: Synthetic oligonucleotide
  Target: ATXN2; (-) strand; PAM type: NRG; PAM sequence: AAG
agtctgagggccatgagaga

SEQ ID NO: 19040 - DNA, 20 bp, Artificial Sequence
  Description of Artificial Sequence: Synthetic oligonucleotide
  Target: ATXN2; (-) strand; PAM type: NRG; PAM sequence: GAG
atcaagtctgagggccatga

SEQ ID NO: 19041 - DNA, 20 bp, Artificial Sequence
  Description of Artificial Sequence: Synthetic oligonucleotide
  Target: ATXN2; (-) strand; PAM type: NRG; PAM sequence: GAG
tgatcaagtctgagggccat

SEQ ID NO: 19042 - DNA, 20 bp, Artificial Sequence
  Description of Artificial Sequence: Synthetic oligonucleotide
  Target: ATXN2; (-) strand; PAM type: NRG; PAM sequence: GGG
agggacttgatcaagtctga

SEQ ID NO: 19043 - DNA, 20 bp, Artificial Sequence
  Description of Artificial Sequence: Synthetic oligonucleotide
  Target: ATXN2; (-) strand; PAM type: NRG; PAM sequence: AGG
cagggacttgatcaagtctg

SEQ ID NO: 19044 - DNA, 20 bp, Artificial Sequence
  Description of Artificial Sequence: Synthetic oligonucleotide
  Target: ATXN2; (-) strand; PAM type: NRG; PAM sequence: GAG
acagggacttgatcaagtct

SEQ ID NO: 19045 - DNA, 20 bp, Artificial Sequence
  Description of Artificial Sequence: Synthetic oligonucleotide
  Target: ATXN2; (-) strand; PAM type: NRG; PAM sequence: AAG
tctgttacagggacttgatc

SEQ ID NO: 19046 - DNA, 20 bp, Artificial Sequence
  Description of Artificial Sequence: Synthetic oligonucleotide
  Target: ATXN2; (-) strand; PAM type: NRG; PAM sequence: GGG
tgctgtgagagtctgttaca

SEQ ID NO: 19047 - DNA, 20 bp, Artificial Sequence
  Description of Artificial Sequence: Synthetic oligonucleotide
  Target: ATXN2; (-) strand; PAM type: NRG; PAM sequence: AGG
atgctgtgagagtctgttac

SEQ ID NO: 19048 - DNA, 20 bp, Artificial Sequence
  Description of Artificial Sequence: Synthetic oligonucleotide
  Target: ATXN2; (-) strand; PAM type: NRG; PAM sequence: CAG
aatgctgtgagagtctgtta

SEQ ID NO: 19049 - DNA, 20 bp, Artificial Sequence
  Description of Artificial Sequence: Synthetic oligonucleotide
  Target: ATXN2; (-) strand; PAM type: NRG; PAM sequence: GAG
gcgatttcataatgctgtga

SEQ ID NO: 19050 - DNA, 20 bp, Artificial Sequence
  Description of Artificial Sequence: Synthetic oligonucleotide
  Target: ATXN2; (-) strand; PAM type: NRG; PAM sequence: GAG
aagcgatttcataatgctgt

SEQ ID NO: 19051 - DNA, 20 bp, Artificial Sequence
  Description of Artificial Sequence: Synthetic oligonucleotide
  Target: ATXN2; (-) strand; PAM type: NRG; PAM sequence: AAG
cccagaaaataccatatgag

SEQ ID NO: 19052 - DNA, 20 bp, Artificial Sequence
  Description of Artificial Sequence: Synthetic oligonucleotide
  Target: ATXN2; (-) strand; PAM type: NRG; PAM sequence: GAG
cgtcccagaaaataccatat

SEQ ID NO: 19053 - DNA, 20 bp, Artificial Sequence
  Description of Artificial Sequence: Synthetic oligonucleotide
  Target: ATXN2; (-) strand; PAM type: NRG; PAM sequence: CAG
aatgaatgcagtgcccgtcc

SEQ ID NO: 19054 - DNA, 20 bp, Artificial Sequence
  Description of Artificial Sequence: Synthetic oligonucleotide
  Target: ATXN2; (-) strand; PAM type: NRG; PAM sequence: CAG
tgtttttctcaaaatgaatg

SEQ ID NO: 19055 - DNA, 20 bp, Artificial Sequence
  Description of Artificial Sequence: Synthetic oligonucleotide
  Target: ATXN2; (-) strand; PAM type: NRG; PAM sequence: TGG
ttggatctgttttggctctt

SEQ ID NO: 19056 - DNA, 20 bp, Artificial Sequence
  Description of Artificial Sequence: Synthetic oligonucleotide
  Target: ATXN2; (-) strand; PAM type: NRG; PAM sequence: TGG
agttagtgttggatctgttt

SEQ ID NO: 19057 - DNA, 20 bp, Artificial Sequence
  Description of Artificial Sequence: Synthetic oligonucleotide
  Target: ATXN2; (-) strand; PAM type: NRG; PAM sequence: TGG
ggaagatagaaagttagtgt

SEQ ID NO: 19058 - DNA, 20 bp, Artificial Sequence
  Description of Artificial Sequence: Synthetic oligonucleotide
  Target: ATXN2; (-) strand; PAM type: NRG; PAM sequence: TAG
aattaaggaagatagaaagt

SEQ ID NO: 19059 - DNA, 20 bp, Artificial Sequence
  Description of Artificial Sequence: Synthetic oligonucleotide
  Target: ATXN2; (-) strand; PAM type: NRG; PAM sequence: AAG
tggaaattaaggaagataga

SEQ ID NO: 19060 - DNA, 20 bp, Artificial Sequence
  Description of Artificial Sequence: Synthetic oligonucleotide
  Target: ATXN2; (-) strand; PAM type: NRG; PAM sequence: TAG
tggttggaaattaaggaaga

SEQ ID NO: 19061 - DNA, 20 bp, Artificial Sequence
  Description of Artificial Sequence: Synthetic oligonucleotide
  Target: ATXN2; (-) strand; PAM type: NRG; PAM sequence: AAG
tcagtggttggaaattaagg

SEQ ID NO: 19062 - DNA, 20 bp, Artificial Sequence
  Description of Artificial Sequence: Synthetic oligonucleotide
  Target: ATXN2; (-) strand; PAM type: NRG; PAM sequence: AGG
gattcagtggttggaaatta

SEQ ID NO: 19063 - DNA, 20 bp, Artificial Sequence
  Description of Artificial Sequence: Synthetic oligonucleotide
  Target: ATXN2; (-) strand; PAM type: NRG; PAM sequence: AAG
ggattcagtggttggaaatt

SEQ ID NO: 19064 - DNA, 20 bp, Artificial Sequence
  Description of Artificial Sequence: Synthetic oligonucleotide
  Target: ATXN2; (-) strand; PAM type: NRG; PAM sequence: TGG
tgttacaaggattcagtggt

SEQ ID NO: 19065 - DNA, 20 bp, Artificial Sequence
  Description of Artificial Sequence: Synthetic oligonucleotide
  Target: ATXN2; (-) strand; PAM type: NRG; PAM sequence: TGG
gaagtgttacaaggattcag

SEQ ID NO: 19066 - DNA, 20 bp, Artificial Sequence
  Description of Artificial Sequence: Synthetic oligonucleotide
  Target: ATXN2; (-) strand; PAM type: NRG; PAM sequence: CAG
tgggaagtgttacaaggatt

SEQ ID NO: 19067 - DNA, 20 bp, Artificial Sequence
  Description of Artificial Sequence: Synthetic oligonucleotide
  Target: ATXN2; (-) strand; PAM type: NRG; PAM sequence: AGG
aaagaatgggaagtgttaca

SEQ ID NO: 19068 - DNA, 20 bp, Artificial Sequence
  Description of Artificial Sequence: Synthetic oligonucleotide
  Target: ATXN2; (-) strand; PAM type: NRG; PAM sequence: AAG
gaaagaatgggaagtgttac

SEQ ID NO: 19069 - DNA, 20 bp, Artificial Sequence
  Description of Artificial Sequence: Synthetic oligonucleotide
  Target: ATXN2; (-) strand; PAM type: NRG; PAM sequence: AAG
tgggtttgagaaagaatggg

SEQ ID NO: 19070 - DNA, 20 bp, Artificial Sequence
  Description of Artificial Sequence: Synthetic oligonucleotide
  Target: ATXN2; (-) strand; PAM type: NRG; PAM sequence: GGG
tactgggtttgagaaagaat

SEQ ID NO: 19071 - DNA, 20 bp, Artificial Sequence
  Description of Artificial Sequence: Synthetic oligonucleotide
  Target: ATXN2; (-) strand; PAM type: NRG; PAM sequence: TGG
atactgggtttgagaaagaa

SEQ ID NO: 19072 - DNA, 20 bp, Artificial Sequence
  Description of Artificial Sequence: Synthetic oligonucleotide
  Target: ATXN2; (-) strand; PAM type: NRG; PAM sequence: AAG
gtgttatactgggtttgaga

SEQ ID NO: 19073 - DNA, 20 bp, Artificial Sequence
  Description of Artificial Sequence: Synthetic oligonucleotide
  Target: ATXN2; (-) strand; PAM type: NRG; PAM sequence: GAG
tgctgtgttatactgggttt

SEQ ID NO: 19074 - DNA, 20 bp, Artificial Sequence
  Description of Artificial Sequence: Synthetic oligonucleotide
  Target: ATXN2; (-) strand; PAM type: NRG; PAM sequence: GGG
acatggtgctgtgttatact

SEQ ID NO: 19075 - DNA, 20 bp, Artificial Sequence
  Description of Artificial Sequence: Synthetic oligonucleotide
  Target: ATXN2; (-) strand; PAM type: NRG; PAM sequence: TGG
tacatggtgctgtgttatac

SEQ ID NO: 19076 - DNA, 20 bp, Artificial Sequence
  Description of Artificial Sequence: Synthetic oligonucleotide
  Target: ATXN2; (-) strand; PAM type: NRG; PAM sequence: TGG
gaaacctggtatatgctaca

SEQ ID NO: 19077 - DNA, 20 bp, Artificial Sequence
  Description of Artificial Sequence: Synthetic oligonucleotide
  Target: ATXN2; (-) strand; PAM type: NRG; PAM sequence: TGG
agaactattatttagaaacc

SEQ ID NO: 19078 - DNA, 20 bp, Artificial Sequence
  Description of Artificial Sequence: Synthetic oligonucleotide
  Target: ATXN2; (-) strand; PAM type: NRG; PAM sequence: TAG
cttttaaaagaactattatt

SEQ ID NO: 19079 - DNA, 20 bp, Artificial Sequence
  Description of Artificial Sequence: Synthetic oligonucleotide
  Target: ATXN2; (-) strand; PAM type: NRG; PAM sequence: AAG
gacataaagtaatcttttaa

SEQ ID NO: 19080 - DNA, 20 bp, Artificial Sequence
  Description of Artificial Sequence: Synthetic oligonucleotide
  Target: ATXN2; (-) strand; PAM type: NRG; PAM sequence: AAG
gtggattaagataagacata

SEQ ID NO: 19081 - DNA, 20 bp, Artificial Sequence
  Description of Artificial Sequence: Synthetic oligonucleotide
  Target: ATXN2; (-) strand; PAM type: NRG; PAM sequence: AAG
ccacctgtgtggattaagat

SEQ ID NO: 19082 - DNA, 20 bp, Artificial Sequence
  Description of Artificial Sequence: Synthetic oligonucleotide
  Target: ATXN2; (-) strand; PAM type: NRG; PAM sequence: AAG
gcagaccacctgtgtggatt

SEQ ID NO: 19083 - DNA, 20 bp, Artificial Sequence
  Description of Artificial Sequence: Synthetic oligonucleotide
  Target: ATXN2; (-) strand; PAM type: NRG; PAM sequence: TGG
ttacatgcagaccacctgtg

SEQ ID NO: 19084 - DNA, 20 bp, Artificial Sequence
  Description of Artificial Sequence: Synthetic oligonucleotide
  Target: ATXN2; (-) strand; PAM type: NRG; PAM sequence: CAG
cagggcgaggcccttacatg

SEQ ID NO: 19085 - DNA, 20 bp, Artificial Sequence
  Description of Artificial Sequence: Synthetic oligonucleotide
  Target: ATXN2; (-) strand; PAM type: NRG; PAM sequence: AGG
actagagttgtaacagggcg

SEQ ID NO: 19086 - DNA, 20 bp, Artificial Sequence
  Description of Artificial Sequence: Synthetic oligonucleotide
  Target: ATXN2; (-) strand; PAM type: NRG; PAM sequence: GAG
aactagagttgtaacagggc

SEQ ID NO: 19087 - DNA, 20 bp, Artificial Sequence
  Description of Artificial Sequence: Synthetic oligonucleotide
  Target: ATXN2; (-) strand; PAM type: NRG; PAM sequence: GGG
tcttaactagagttgtaaca

SEQ ID NO: 19088 - DNA, 20 bp, Artificial Sequence
  Description of Artificial Sequence: Synthetic oligonucleotide
  Target: ATXN2; (-) strand; PAM type: NRG; PAM sequence: AGG
ttcttaactagagttgtaac

SEQ ID NO: 19089 - DNA, 20 bp, Artificial Sequence
  Description of Artificial Sequence: Synthetic oligonucleotide
  Target: ATXN2; (-) strand; PAM type: NRG; PAM sequence: CAG
attcttaactagagttgtaa

SEQ ID NO: 19090 - DNA, 20 bp, Artificial Sequence
  Description of Artificial Sequence: Synthetic oligonucleotide
  Target: ATXN2; (-) strand; PAM type: NRG; PAM sequence: GAG
ttgagctgaattcttaacta

SEQ ID NO: 19091 - DNA, 20 bp, Artificial Sequence
  Description of Artificial Sequence: Synthetic oligonucleotide
  Target: ATXN2; (-) strand; PAM type: NRG; PAM sequence: TAG
agttgagctgaattcttaac

SEQ ID NO: 19092 - DNA, 20 bp, Artificial Sequence
  Description of Artificial Sequence: Synthetic oligonucleotide
  Target: ATXN2; (-) strand; PAM type: NRG; PAM sequence: GAG
tcacatgggagatgacagtt

SEQ ID NO: 19093 - DNA, 20 bp, Artificial Sequence
  Description of Artificial Sequence: Synthetic oligonucleotide
  Target: ATXN2; (-) strand; PAM type: NRG; PAM sequence: CAG
aaacctcacatgggagatga

SEQ ID NO: 19094 - DNA, 20 bp, Artificial Sequence
  Description of Artificial Sequence: Synthetic oligonucleotide
  Target: ATXN2; (-) strand; PAM type: NRG; PAM sequence: GAG
tggaaaaaaacctcacatgg

SEQ ID NO: 19095 - DNA, 20 bp, Artificial Sequence
  Description of Artificial Sequence: Synthetic oligonucleotide
  Target: ATXN2; (-) strand; PAM type: NRG; PAM sequence: GGG
actggaaaaaaacctcacat

SEQ ID NO: 19096 - DNA, 20 bp, Artificial Sequence
  Description of Artificial Sequence: Synthetic oligonucleotide
  Target: ATXN2; (-) strand; PAM type: NRG; PAM sequence: TGG
aactggaaaaaaacctcaca

SEQ ID NO: 19097 - DNA, 20 bp, Artificial Sequence
  Description of Artificial Sequence: Synthetic oligonucleotide
  Target: ATXN2; (-) strand; PAM type: NRG; PAM sequence: TGG
ctagctcgtgctggaggaac

SEQ ID NO: 19098 - DNA, 20 bp, Artificial Sequence
  Description of Artificial Sequence: Synthetic oligonucleotide
  Target: ATXN2; (-) strand; PAM type: NRG; PAM sequence: AGG
aagtagctagctcgtgctgg

SEQ ID NO: 19099 - DNA, 20 bp, Artificial Sequence
  Description of Artificial Sequence: Synthetic oligonucleotide
  Target: ATXN2; (-) strand; PAM type: NRG; PAM sequence: GAG
gaagtagctagctcgtgctg

SEQ ID NO: 19100 - DNA, 20 bp, Artificial Sequence
  Description of Artificial Sequence: Synthetic oligonucleotide
  Target: ATXN2; (-) strand; PAM type: NRG; PAM sequence: TGG
gggaagtagctagctcgtgc

SEQ ID NO: 19101 - DNA, 20 bp, Artificial Sequence
  Description of Artificial Sequence: Synthetic oligonucleotide
  Target: ATXN2; (-) strand; PAM type: NRG; PAM sequence: TAG
agaggcacatgggaagtagc

SEQ ID NO: 19102 - DNA, 20 bp, Artificial Sequence
  Description of Artificial Sequence: Synthetic oligonucleotide
  Target: ATXN2; (-) strand; PAM type: NRG; PAM sequence: TAG
ggaaagaggcacatgggaag

SEQ ID NO: 19103 - DNA, 20 bp, Artificial Sequence
  Description of Artificial Sequence: Synthetic oligonucleotide
  Target: ATXN2; (-) strand; PAM type: NRG; PAM sequence: AAG
tgaggaaagaggcacatggg

SEQ ID NO: 19104 - DNA, 20 bp, Artificial Sequence
  Description of Artificial Sequence: Synthetic oligonucleotide
  Target: ATXN2; (-) strand; PAM type: NRG; PAM sequence: GGG
gtgtgaggaaagaggcacat

SEQ ID NO: 19105 - DNA, 20 bp, Artificial Sequence
  Description of Artificial Sequence: Synthetic oligonucleotide
  Target: ATXN2; (-) strand; PAM type: NRG; PAM sequence: TGG
tgtgtgaggaaagaggcaca

SEQ ID NO: 19106 - DNA, 20 bp, Artificial Sequence
  Description of Artificial Sequence: Synthetic oligonucleotide
  Target: ATXN2; (-) strand; PAM type: NRG; PAM sequence: AGG
taagaaatgtgtgaggaaag

SEQ ID NO: 19107 - DNA, 20 bp, Artificial Sequence
  Description of Artificial Sequence: Synthetic oligonucleotide
  Target: ATXN2; (-) strand; PAM type: NRG; PAM sequence: GAG
gtaagaaatgtgtgaggaaa

SEQ ID NO: 19108 - DNA, 20 bp, Artificial Sequence
  Description of Artificial Sequence: Synthetic oligonucleotide
  Target: ATXN2; (-) strand; PAM type: NRG; PAM sequence: AAG
ctgtaagaaatgtgtgagga

SEQ ID NO: 19109 - DNA, 20 bp, Artificial Sequence
  Description of Artificial Sequence: Synthetic oligonucleotide
  Target: ATXN2; (-) strand; PAM type: NRG; PAM sequence: AGG
agtgctgtaagaaatgtgtg

SEQ ID NO: 19110 - DNA, 20 bp, Artificial Sequence
  Description of Artificial Sequence: Synthetic oligonucleotide
  Target: ATXN2; (-) strand; PAM type: NRG; PAM sequence: GAG
tagtgctgtaagaaatgtgt

SEQ ID NO: 19111 - DNA, 20 bp, Artificial Sequence
  Description of Artificial Sequence: Synthetic oligonucleotide
  Target: ATXN2; (-) strand; PAM type: NRG; PAM sequence: AAG
gtcacagacaatagtgctgt

SEQ ID NO: 19112 - DNA, 20 bp, Artificial Sequence
  Description of Artificial Sequence: Synthetic oligonucleotide
  Target: ATXN2; (-) strand; PAM type: NRG; PAM sequence: TAG
cagaaacaggtcacagacaa

SEQ ID NO: 19113 - DNA, 20 bp, Artificial Sequence
  Description of Artificial Sequence: Synthetic oligonucleotide
  Target: ATXN2; (-) strand; PAM type: NRG; PAM sequence: CAG
gccacaccagaaacaggtca

SEQ ID NO: 19114 - DNA, 20 bp, Artificial Sequence
  Description of Artificial Sequence: Synthetic oligonucleotide
  Target: ATXN2; (-) strand; PAM type: NRG; PAM sequence: AGG
gttaatgccacaccagaaac

SEQ ID NO: 19115 - DNA, 20 bp, Artificial Sequence
  Description of Artificial Sequence: Synthetic oligonucleotide
  Target: ATXN2; (-) strand; PAM type: NRG; PAM sequence: CAG
ggttaatgccacaccagaaa

SEQ ID NO: 19116 - DNA, 20 bp, Artificial Sequence
  Description of Artificial Sequence: Synthetic oligonucleotide
  Target: ATXN2; (-) strand; PAM type: NRG; PAM sequence: CAG
tggcttggttaatgccacac

SEQ ID NO: 19117 - DNA, 20 bp, Artificial Sequence
  Description of Artificial Sequence: Synthetic oligonucleotide
  Target: ATXN2; (-) strand; PAM type: NRG; PAM sequence: TGG
attattttcctgaagtggct

SEQ ID NO: 19118 - DNA, 20 bp, Artificial Sequence
  Description of Artificial Sequence: Synthetic oligonucleotide
  Target: ATXN2; (-) strand; PAM type: NRG; PAM sequence: TGG
ccacaattattttcctgaag

SEQ ID NO: 19119 - DNA, 20 bp, Artificial Sequence
  Description of Artificial Sequence: Synthetic oligonucleotide
  Target: ATXN2; (-) strand; PAM type: NRG; PAM sequence: AAG
attccacaattattttcctg

SEQ ID NO: 19120 - DNA, 20 bp, Artificial Sequence
  Description of Artificial Sequence: Synthetic oligonucleotide
  Target: ATXN2; (-) strand; PAM type: NRG; PAM sequence: CAG
gccttatacctagttgtaag

SEQ ID NO: 19121 - DNA, 20 bp, Artificial Sequence
  Description of Artificial Sequence: Synthetic oligonucleotide
  Target: ATXN2; (-) strand; PAM type: NRG; PAM sequence: AAG
tgtgccttatacctagttgt

SEQ ID NO: 19122 - DNA, 20 bp, Artificial Sequence
  Description of Artificial Sequence: Synthetic oligonucleotide
  Target: ATXN2; (-) strand; PAM type: NRG; PAM sequence: TAG
tattctttgtgccttatacc

SEQ ID NO: 19123 - DNA, 20 bp, Artificial Sequence
  Description of Artificial Sequence: Synthetic oligonucleotide
  Target: ATXN2; (-) strand; PAM type: NRG; PAM sequence: AAG
gttcttaggattttatgaac

SEQ ID NO: 19124 - DNA, 20 bp, Artificial Sequence
  Description of Artificial Sequence: Synthetic oligonucleotide
  Target: ATXN2; (-) strand; PAM type: NRG; PAM sequence: AGG
taattatataatcagttctt

SEQ ID NO: 19125 - DNA, 20 bp, Artificial Sequence
  Description of Artificial Sequence: Synthetic oligonucleotide
  Target: ATXN2; (-) strand; PAM type: NRG; PAM sequence: TAG
ttaattatataatcagttct

SEQ ID NO: 19126 - DNA, 20 bp, Artificial Sequence
  Description of Artificial Sequence: Synthetic oligonucleotide
  Target: ATXN2; (-) strand; PAM type: NRG; PAM sequence: CAG
tttgcagttaattatataat

SEQ ID NO: 19127 - DNA, 20 bp, Artificial Sequence
  Description of Artificial Sequence: Synthetic oligonucleotide
  Target: ATXN2; (-) strand; PAM type: NRG; PAM sequence: CAG
aatgtttagccacaaatttg

SEQ ID NO: 19128 - DNA, 20 bp, Artificial Sequence
  Description of Artificial Sequence: Synthetic oligonucleotide
  Target: ATXN2; (-) strand; PAM type: NRG; PAM sequence: TAG
agcaacagttagtgaatgtt

SEQ ID NO: 19129 - DNA, 20 bp, Artificial Sequence
  Description of Artificial Sequence: Synthetic oligonucleotide
  Target: ATXN2; (-) strand; PAM type: NRG; PAM sequence: TAG
tcccaaatttcagcaacagt

SEQ ID NO: 19130 - DNA, 20 bp, Artificial Sequence
  Description of Artificial Sequence: Synthetic oligonucleotide
  Target: ATXN2; (-) strand; PAM type: NRG; PAM sequence: CAG
gctctcccaaatttcagcaa

SEQ ID NO: 19131 - DNA, 20 bp, Artificial Sequence
  Description of Artificial Sequence: Synthetic oligonucleotide
  Target: ATXN2; (-) strand; PAM type: NRG; PAM sequence: CAG
taactagctctcccaaattt

SEQ ID NO: 19132 - DNA, 20 bp, Artificial Sequence
  Description of Artificial Sequence: Synthetic oligonucleotide
  Target: ATXN2; (-) strand; PAM type: NRG; PAM sequence: TAG
tagataaaataatatgtaac

SEQ ID NO: 19133 - DNA, 20 bp, Artificial Sequence
  Description of Artificial Sequence: Synthetic oligonucleotide
  Target: ATXN2; (-) strand; PAM type: NRG; PAM sequence: TAG
ttcaggtttgctttcctaca

SEQ ID NO: 19134 - DNA, 20 bp, Artificial Sequence
  Description of Artificial Sequence: Synthetic oligonucleotide
  Target: ATXN2; (-) strand; PAM type: NRG; PAM sequence: AGG
taaaatataaaaaaatgttc

SEQ ID NO: 19135 - DNA, 20 bp, Artificial Sequence
  Description of Artificial Sequence: Synthetic oligonucleotide
  Target: ATXN2; (-) strand; PAM type: NRG; PAM sequence: CAG
ataaaatataaaaaaatgtt

SEQ ID NO: 19136 - DNA, 20 bp, Artificial Sequence
  Description of Artificial Sequence: Synthetic oligonucleotide
  Target: ATXN2; (-) strand; PAM type: NRG; PAM sequence: AAG
gtttttaaatacgtgcatcc

SEQ ID NO: 19137 - DNA, 20 bp, Artificial Sequence
  Description of Artificial Sequence: Synthetic oligonucleotide
  Target: ATXN2; (-) strand; PAM type: NRG; PAM sequence: TGG
ttttgtttaccagaaggagg

SEQ ID NO: 19138 - DNA, 20 bp, Artificial Sequence
  Description of Artificial Sequence: Synthetic oligonucleotide
  Target: ATXN2; (-) strand; PAM type: NRG; PAM sequence: AGG
cttttttgtttaccagaagg

SEQ ID NO: 19139 - DNA, 20 bp, Artificial Sequence
  Description of Artificial Sequence: Synthetic oligonucleotide
  Target: ATXN2; (-) strand; PAM type: NRG; PAM sequence: GAG
gcttttttgtttaccagaag

SEQ ID NO: 19140 - DNA, 20 bp, Artificial Sequence
  Description of Artificial Sequence: Synthetic oligonucleotide
  Target: ATXN2; (-) strand; PAM type: NRG; PAM sequence: AGG
tggcttttttgtttaccaga

SEQ ID NO: 19141 - DNA, 20 bp, Artificial Sequence
  Description of Artificial Sequence: Synthetic oligonucleotide
  Target: ATXN2; (-) strand; PAM type: NRG; PAM sequence: AAG
gtggcttttttgtttaccag

SEQ ID NO: 19142 - DNA, 20 bp, Artificial Sequence
  Description of Artificial Sequence: Synthetic oligonucleotide
  Target: ATXN2; (-) strand; PAM type: NRG; PAM sequence: CAG
tcagtggcttttttgtttac

SEQ ID NO: 19143 - DNA, 20 bp, Artificial Sequence
  Description of Artificial Sequence: Synthetic oligonucleotide
  Target: ATXN2; (-) strand; PAM type: NRG; PAM sequence: TGG
aagtgataagtagttttcag

SEQ ID NO: 19144 - DNA, 20 bp, Artificial Sequence
  Description of Artificial Sequence: Synthetic oligonucleotide
  Target: ATXN2; (-) strand; PAM type: NRG; PAM sequence: CAG
taaaagtgataagtagtttt

SEQ ID NO: 19145 - DNA, 20 bp, Artificial Sequence
  Description of Artificial Sequence: Synthetic oligonucleotide
  Target: ATXN2; (-) strand; PAM type: NRG; PAM sequence: TAG
catttgataaaagtgataag

SEQ ID NO: 19146 - DNA, 20 bp, Artificial Sequence
  Description of Artificial Sequence: Synthetic oligonucleotide
  Target: ATXN2; (-) strand; PAM type: NRG; PAM sequence: AAG
tttcatttgataaaagtgat

SEQ ID NO: 19147 - DNA, 20 bp, Artificial Sequence
  Description of Artificial Sequence: Synthetic oligonucleotide
  Target: ATXN2; (-) strand; PAM type: NRG; PAM sequence: AAG
ggcaaactttcatttgataa

SEQ ID NO: 19148 - DNA, 20 bp, Artificial Sequence
  Description of Artificial Sequence: Synthetic oligonucleotide
  Target: ATXN2; (-) strand; PAM type: NRG; PAM sequence: GGG
taagctcagttagcataatc

SEQ ID NO: 19149 - DNA, 20 bp, Artificial Sequence
  Description of Artificial Sequence: Synthetic oligonucleotide
  Target: ATXN2; (-) strand; PAM type: NRG; PAM sequence: CGG
ttaagctcagttagcataat

SEQ ID NO: 19150 - DNA, 20 bp, Artificial Sequence
  Description of Artificial Sequence: Synthetic oligonucleotide
  Target: ATXN2; (-) strand; PAM type: NRG; PAM sequence: TAG
gtgaatagtttaagctcagt

SEQ ID NO: 19151 - DNA, 20 bp, Artificial Sequence
  Description of Artificial Sequence: Synthetic oligonucleotide
  Target: ATXN2; (-) strand; PAM type: NRG; PAM sequence: CAG
aatagtgaatagtttaagct

SEQ ID NO: 19152 - DNA, 20 bp, Artificial Sequence
  Description of Artificial Sequence: Synthetic oligonucleotide
  Target: ATXN2; (-) strand; PAM type: NRG; PAM sequence: AAG
gtaataatagtgaatagttt

SEQ ID NO: 19153 - DNA, 20 bp, Artificial Sequence
  Description of Artificial Sequence: Synthetic oligonucleotide
  Target: ATXN2; (-) strand; PAM type: NRG; PAM sequence: TAG
aacaaagtaataatagtgaa

SEQ ID NO: 19154 - DNA, 20 bp, Artificial Sequence
  Description of Artificial Sequence: Synthetic oligonucleotide
  Target: ATXN2; (-) strand; PAM type: NRG; PAM sequence: TAG
aataagtaacaaagtaataa

SEQ ID NO: 19155 - DNA, 20 bp, Artificial Sequence
  Description of Artificial Sequence: Synthetic oligonucleotide
  Target: ATXN2; (-) strand; PAM type: NRG; PAM sequence: AAG
caggaaggtaataagtaaca

SEQ ID NO: 19156 - DNA, 20 bp, Artificial Sequence
  Description of Artificial Sequence: Synthetic oligonucleotide
  Target: ATXN2; (-) strand; PAM type: NRG; PAM sequence: AAG
taaatatacaggaaggtaat

SEQ ID NO: 19157 - DNA, 20 bp, Artificial Sequence
  Description of Artificial Sequence: Synthetic oligonucleotide
  Target: ATXN2; (-) strand; PAM type: NRG; PAM sequence: AGG
tattttttaaatatacagga

SEQ ID NO: 19158 - DNA, 20 bp, Artificial Sequence
  Description of Artificial Sequence: Synthetic oligonucleotide
  Target: ATXN2; (-) strand; PAM type: NRG; PAM sequence: AAG
ttattttttaaatatacagg

SEQ ID NO: 19159 - DNA, 20 bp, Artificial Sequence
  Description of Artificial Sequence: Synthetic oligonucleotide
  Target: ATXN2; (-) strand; PAM type: NRG; PAM sequence: AGG
taattattttttaaatatac

SEQ ID NO: 19160 - DNA, 20 bp, Artificial Sequence
  Description of Artificial Sequence: Synthetic oligonucleotide
  Target: ATXN2; (-) strand; PAM type: NRG; PAM sequence: CAG
ttaattattttttaaatata

SEQ ID NO: 19161 - DNA, 20 bp, Artificial Sequence
  Description of Artificial Sequence: Synthetic oligonucleotide
  Target: ATXN2; (-) strand; PAM type: NRG; PAM sequence: TAG
agcaccatagtatacttgac

SEQ ID NO: 19162 - DNA, 20 bp, Artificial Sequence
  Description of Artificial Sequence: Synthetic oligonucleotide
  Target: ATXN2; (-) strand; PAM type: NRG; PAM sequence: TAG
atatctaaataatagcacca

SEQ ID NO: 19163 - DNA, 20 bp, Artificial Sequence
  Description of Artificial Sequence: Synthetic oligonucleotide
  Target: ATXN2; (-) strand; PAM type: NRG; PAM sequence: TAG
aacacatgatatctaaataa

SEQ ID NO: 19164 - DNA, 20 bp, Artificial Sequence
  Description of Artificial Sequence: Synthetic oligonucleotide
  Target: ATXN2; (-) strand; PAM type: NRG; PAM sequence: GAG
ttttaacatgagaattagtg

SEQ ID NO: 19165 - DNA, 20 bp, Artificial Sequence
  Description of Artificial Sequence: Synthetic oligonucleotide
  Target: ATXN2; (-) strand; PAM type: NRG; PAM sequence: TGG
tgttttaacatgagaattag

SEQ ID NO: 19166 - DNA, 20 bp, Artificial Sequence
  Description of Artificial Sequence: Synthetic oligonucleotide
  Target: ATXN2; (-) strand; PAM type: NRG; PAM sequence: TAG
tcatgttttaacatgagaat

SEQ ID NO: 19167 - DNA, 20 bp, Artificial Sequence
  Description of Artificial Sequence: Synthetic oligonucleotide
  Target: ATXN2; (-) strand; PAM type: NRG; PAM sequence: GAG
tggggatcatgttttaacat

SEQ ID NO: 19168 - DNA, 20 bp, Artificial Sequence
  Description of Artificial Sequence: Synthetic oligonucleotide
  Target: ATXN2; (-) strand; PAM type: NRG; PAM sequence: GGG
gagccactgcgcctggcctg

SEQ ID NO: 19169 - DNA, 20 bp, Artificial Sequence
  Description of Artificial Sequence: Synthetic oligonucleotide
  Target: ATXN2; (-) strand; PAM type: NRG; PAM sequence: GGG
tgagccactgcgcctggcct

SEQ ID NO: 19170 - DNA, 20 bp, Artificial Sequence
  Description of Artificial Sequence: Synthetic oligonucleotide
  Target: ATXN2; (-) strand; PAM type: NRG; PAM sequence: TGG
gtgagccactgcgcctggcc

SEQ ID NO: 19171 - DNA, 20 bp, Artificial Sequence
  Description of Artificial Sequence: Synthetic oligonucleotide
  Target: ATXN2; (-) strand; PAM type: NRG; PAM sequence: TGG
taagcgtgagccactgcgcc

SEQ ID NO: 19172 - DNA, 20 bp, Artificial Sequence
  Description of Artificial Sequence: Synthetic oligonucleotide
  Target: ATXN2; (-) strand; PAM type: NRG; PAM sequence: GAG
agtgtagggattataagcgt

SEQ ID NO: 19173 - DNA, 20 bp, Artificial Sequence
  Description of Artificial Sequence: Synthetic oligonucleotide
  Target: ATXN2; (-) strand; PAM type: NRG; PAM sequence: AAG
tcctaaagtgtagggattat

SEQ ID NO: 19174 - DNA, 20 bp, Artificial Sequence
  Description of Artificial Sequence: Synthetic oligonucleotide
  Target: ATXN2; (-) strand; PAM type: NRG; PAM sequence: GGG
ccctggcctcctaaagtgta

SEQ ID NO: 19175 - DNA, 20 bp, Artificial Sequence
  Description of Artificial Sequence: Synthetic oligonucleotide
  Target: ATXN2; (-) strand; PAM type: NRG; PAM sequence: AGG
gccctggcctcctaaagtgt

SEQ ID NO: 19176 - DNA, 20 bp, Artificial Sequence
  Description of Artificial Sequence: Synthetic oligonucleotide
  Target: ATXN2; (-) strand; PAM type: NRG; PAM sequence: TAG
cgccctggcctcctaaagtg

SEQ ID NO: 19177 - DNA, 20 bp, Artificial Sequence
  Description of Artificial Sequence: Synthetic oligonucleotide
  Target: ATXN2; (-) strand; PAM type: NRG; PAM sequence: AAG
ccgctcgccctggcctccta

SEQ ID NO: 19178 - DNA, 20 bp, Artificial Sequence
  Description of Artificial Sequence: Synthetic oligonucleotide
  Target: ATXN2; (-) strand; PAM type: NRG; PAM sequence: TGG
ctcaagcagtccgctcgccc

SEQ ID NO: 19179 - DNA, 20 bp, Artificial Sequence
  Description of Artificial Sequence: Synthetic oligonucleotide
  Target: ATXN2; (-) strand; PAM type: NRG; PAM sequence: CAG
cccaaactcatgagctcaag

SEQ ID NO: 19180 - DNA, 20 bp, Artificial Sequence
  Description of Artificial Sequence: Synthetic oligonucleotide
  Target: ATXN2; (-) strand; PAM type: NRG; PAM sequence: AAG
ggtcccaaactcatgagctc

SEQ ID NO: 19181 - DNA, 20 bp, Artificial Sequence
  Description of Artificial Sequence: Synthetic oligonucleotide
  Target: ATXN2; (-) strand; PAM type: NRG; PAM sequence: GAG
cagggtggtcccaaactcat

SEQ ID NO: 19182 - DNA, 20 bp, Artificial Sequence
  Description of Artificial Sequence: Synthetic oligonucleotide
  Target: ATXN2; (-) strand; PAM type: NRG; PAM sequence: TGG
tctccccatgttgcccaggg

SEQ ID NO: 19183 - DNA, 20 bp, Artificial Sequence
  Description of Artificial Sequence: Synthetic oligonucleotide
  Target: ATXN2; (-) strand; PAM type: NRG; PAM sequence: GGG
gtgtctccccatgttgccca

SEQ ID NO: 19184 - DNA, 20 bp, Artificial Sequence
  Description of Artificial Sequence: Synthetic oligonucleotide
  Target: ATXN2; (-) strand; PAM type: NRG; PAM sequence: AGG
agtgtctccccatgttgccc

SEQ ID NO: 19185 - DNA, 20 bp, Artificial Sequence
  Description of Artificial Sequence: Synthetic oligonucleotide
  Target: ATXN2; (-) strand; PAM type: NRG; PAM sequence: CAG
cagtgtctccccatgttgcc

SEQ ID NO: 19186 - DNA, 20 bp, Artificial Sequence
  Description of Artificial Sequence: Synthetic oligonucleotide
  Target: ATXN2; (-) strand; PAM type: NRG; PAM sequence: CAG
ttttgtattttttgtggagg

SEQ ID NO: 19187 - DNA, 20 bp, Artificial Sequence
  Description of Artificial Sequence: Synthetic oligonucleotide
  Target: ATXN2; (-) strand; PAM type: NRG; PAM sequence: AGG
tatttttgtattttttgtgg

SEQ ID NO: 19188 - DNA, 20 bp, Artificial Sequence
  Description of Artificial Sequence: Synthetic oligonucleotide
  Target: ATXN2; (-) strand; PAM type: NRG; PAM sequence: GAG
atatttttgtattttttgtg

SEQ ID NO: 19189 - DNA, 20 bp, Artificial Sequence
  Description of Artificial Sequence: Synthetic oligonucleotide
  Target: ATXN2; (-) strand; PAM type: NRG; PAM sequence: TGG
taatatttttgtattttttg

SEQ ID NO: 19190 - DNA, 20 bp, Artificial Sequence
  Description of Artificial Sequence: Synthetic oligonucleotide
  Target: ATXN2; (-) strand; PAM type: NRG; PAM sequence: TGG
tagatgcacagcaccgcagc

SEQ ID NO: 19191 - DNA, 20 bp, Artificial Sequence
  Description of Artificial Sequence: Synthetic oligonucleotide
  Target: ATXN2; (-) strand; PAM type: NRG; PAM sequence: CAG
accatagatgcacagcaccg

SEQ ID NO: 19192 - DNA, 20 bp, Artificial Sequence
  Description of Artificial Sequence: Synthetic oligonucleotide
  Target: ATXN2; (-) strand; PAM type: NRG; PAM sequence: CAG
tagctgggaccatagatgca

SEQ ID NO: 19193 - DNA, 20 bp, Artificial Sequence
  Description of Artificial Sequence: Synthetic oligonucleotide
  Target: ATXN2; (-) strand; PAM type: NRG; PAM sequence: TAG
ctcctgagtagctgggacca

SEQ ID NO: 19194 - DNA, 20 bp, Artificial Sequence
  Description of Artificial Sequence: Synthetic oligonucleotide
  Target: ATXN2; (-) strand; PAM type: NRG; PAM sequence: GGG
cctcagcctcctgagtagct

SEQ ID NO: 19195 - DNA, 20 bp, Artificial Sequence
  Description of Artificial Sequence: Synthetic oligonucleotide
  Target: ATXN2; (-) strand; PAM type: NRG; PAM sequence: TGG
acctcagcctcctgagtagc

SEQ ID NO: 19196 - DNA, 20 bp, Artificial Sequence
  Description of Artificial Sequence: Synthetic oligonucleotide
  Target: ATXN2; (-) strand; PAM type: NRG; PAM sequence: TAG
tcccacctcagcctcctgag

SEQ ID NO: 19197 - DNA, 20 bp, Artificial Sequence
  Description of Artificial Sequence: Synthetic oligonucleotide
  Target: ATXN2; (-) strand; PAM type: NRG; PAM sequence: GAG
tcctcccacctcagcctcct

SEQ ID NO: 19198 - DNA, 20 bp, Artificial Sequence
  Description of Artificial Sequence: Synthetic oligonucleotide
  Target: ATXN2; (-) strand; PAM type: NRG; PAM sequence: CAG
ctgaaaagttcctcccacct

SEQ ID NO: 19199 - DNA, 20 bp, Artificial Sequence
  Description of Artificial Sequence: Synthetic oligonucleotide
  Target: ATXN2; (-) strand; PAM type: NRG; PAM sequence: AAG
catctgcctccctggctgaa

SEQ ID NO: 19200 - DNA, 20 bp, Artificial Sequence
  Description of Artificial Sequence: Synthetic oligonucleotide
  Target: ATXN2; (-) strand; PAM type: NRG; PAM sequence: TGG
taccgcggcatctgcctccc

SEQ ID NO: 19201 - DNA, 20 bp, Artificial Sequence
  Description of Artificial Sequence: Synthetic oligonucleotide
  Target: ATXN2; (-) strand; PAM type: NRG; PAM sequence: CGG
ggtgcagttacggcttaccg

SEQ ID NO: 19202 - DNA, 20 bp, Artificial Sequence
  Description of Artificial Sequence: Synthetic oligonucleotide
  Target: ATXN2; (-) strand; PAM type: NRG; PAM sequence: CGG
ggagtgcagtggtgcagtta

SEQ ID NO: 19203 - DNA, 20 bp, Artificial Sequence
  Description of Artificial Sequence: Synthetic oligonucleotide
  Target: ATXN2; (-) strand; PAM type: NRG; PAM sequence: CAG
gaggctggagtgcagtggtg

SEQ ID NO: 19204 - DNA, 20 bp, Artificial Sequence
  Description of Artificial Sequence: Synthetic oligonucleotide
  Target: ATXN2; (-) strand; PAM type: NRG; PAM sequence: TGG
tcgccgaggctggagtgcag

SEQ ID NO: 19205 - DNA, 20 bp, Artificial Sequence
  Description of Artificial Sequence: Synthetic oligonucleotide
  Target: ATXN2; (-) strand; PAM type: NRG; PAM sequence: CAG
tcttcgccgaggctggagtg

SEQ ID NO: 19206 - DNA, 20 bp, Artificial Sequence
  Description of Artificial Sequence: Synthetic oligonucleotide
  Target: ATXN2; (-) strand; PAM type: NRG; PAM sequence: GAG
tcacttcttcgccgaggctg

SEQ ID NO: 19207 - DNA, 20 bp, Artificial Sequence
  Description of Artificial Sequence: Synthetic oligonucleotide
  Target: ATXN2; (-) strand; PAM type: NRG; PAM sequence: TGG
tctcacttcttcgccgaggc

SEQ ID NO: 19208 - DNA, 20 bp, Artificial Sequence
  Description of Artificial Sequence: Synthetic oligonucleotide
  Target: ATXN2; (-) strand; PAM type: NRG; PAM sequence: AGG
agggtctcacttcttcgccg

SEQ ID NO: 19209 - DNA, 20 bp, Artificial Sequence
  Description of Artificial Sequence: Synthetic oligonucleotide
  Target: ATXN2; (-) strand; PAM type: NRG; PAM sequence: GAG
cagggtctcacttcttcgcc

SEQ ID NO: 19210 - DNA, 20 bp, Artificial Sequence
  Description of Artificial Sequence: Synthetic oligonucleotide
  Target: ATXN2; (-) strand; PAM type: NRG; PAM sequence: GGG
ccctccccttttttgagaca

SEQ ID NO: 19211 - DNA, 20 bp, Artificial Sequence
  Description of Artificial Sequence: Synthetic oligonucleotide
  Target: ATXN2; (-) strand; PAM type: NRG; PAM sequence: AGG
accctccccttttttgagac

SEQ ID NO: 19212 - DNA, 20 bp, Artificial Sequence
  Description of Artificial Sequence: Synthetic oligonucleotide
  Target: ATXN2; (-) strand; PAM type: NRG; PAM sequence: CAG
taccctccccttttttgaga

SEQ ID NO: 19213 - DNA, 20 bp, Artificial Sequence
  Description of Artificial Sequence: Synthetic oligonucleotide
  Target: ATXN2; (-) strand; PAM type: NRG; PAM sequence: GAG
cccctaccctcccctttttt

SEQ ID NO: 19214 - DNA, 20 bp, Artificial Sequence
  Description of Artificial Sequence: Synthetic oligonucleotide
  Target: ATXN2; (-) strand; PAM type: NRG; PAM sequence: TGG
aacaggcagagtcaagggct

SEQ ID NO: 19215 - DNA, 20 bp, Artificial Sequence
  Description of Artificial Sequence: Synthetic oligonucleotide
  Target: ATXN2; (-) strand; PAM type: NRG; PAM sequence: GGG
caaataacaggcagagtcaa

SEQ ID NO: 19216 - DNA, 20 bp, Artificial Sequence
  Description of Artificial Sequence: Synthetic oligonucleotide
  Target: ATXN2; (-) strand; PAM type: NRG; PAM sequence: AGG
tcaaataacaggcagagtca

SEQ ID NO: 19217 - DNA, 20 bp, Artificial Sequence
  Description of Artificial Sequence: Synthetic oligonucleotide
  Target: ATXN2; (-) strand; PAM type: NRG; PAM sequence: AAG
ttcaaataacaggcagagtc

SEQ ID NO: 19218 - DNA, 20 bp, Artificial Sequence
  Description of Artificial Sequence: Synthetic oligonucleotide
  Target: ATXN2; (-) strand; PAM type: NRG; PAM sequence: GAG
catttttcaaataacaggca

SEQ ID NO: 19219 - DNA, 20 bp, Artificial Sequence
  Description of Artificial Sequence: Synthetic oligonucleotide
  Target: ATXN2; (-) strand; PAM type: NRG; PAM sequence: CAG
agcatttttcaaataacagg

SEQ ID NO: 19220 - DNA, 20 bp, Artificial Sequence
  Description of Artificial Sequence: Synthetic oligonucleotide
  Target: ATXN2; (-) strand; PAM type: NRG; PAM sequence: AGG
tttagcatttttcaaataac

SEQ ID NO: 19221 - DNA, 20 bp, Artificial Sequence
  Description of Artificial Sequence: Synthetic oligonucleotide
  Target: ATXN2; (-) strand; PAM type: NRG; PAM sequence: CAG
ttttagcatttttcaaataa

SEQ ID NO: 19222 - DNA, 20 bp, Artificial Sequence
  Description of Artificial Sequence: Synthetic oligonucleotide
  Target: ATXN2; (-) strand; PAM type: NRG; PAM sequence: TAG
gtattggataaaaatatttt

SEQ ID NO: 19223 - DNA, 20 bp, Artificial Sequence
  Description of Artificial Sequence: Synthetic oligonucleotide
  Target: ATXN2; (-) strand; PAM type: NRG; PAM sequence: TGG
attccaatcctttgaggtat

SEQ ID NO: 19224 - DNA, 20 bp, Artificial Sequence
  Description of Artificial Sequence: Synthetic oligonucleotide
  Target: ATXN2; (-) strand; PAM type: NRG; PAM sequence: AGG
tactaaattccaatcctttg

SEQ ID NO: 19225 - DNA, 20 bp, Artificial Sequence
  Description of Artificial Sequence: Synthetic oligonucleotide
  Target: ATXN2; (-) strand; PAM type: NRG; PAM sequence: GAG
ttactaaattccaatccttt

SEQ ID NO: 19226 - DNA, 20 bp, Artificial Sequence
  Description of Artificial Sequence: Synthetic oligonucleotide
  Target: ATXN2; (-) strand; PAM type: NRG; PAM sequence: TAG
ggctattgctgtttatatgt

SEQ ID NO: 19227 - DNA, 20 bp, Artificial Sequence
  Description of Artificial Sequence: Synthetic oligonucleotide
  Target: ATXN2; (-) strand; PAM type: NRG; PAM sequence: AGG
ttatgaagtaccatatatga

SEQ ID NO: 19228 - DNA, 20 bp, Artificial Sequence
  Description of Artificial Sequence: Synthetic oligonucleotide
  Target: ATXN2; (-) strand; PAM type: NRG; PAM sequence: AAG
cttatgaagtaccatatatg

SEQ ID NO: 19229 - DNA, 20 bp, Artificial Sequence
  Description of Artificial Sequence: Synthetic oligonucleotide
  Target: ATXN2; (-) strand; PAM type: NRG; PAM sequence: AAG
cttctaagtaattacttatg

SEQ ID NO: 19230 - DNA, 20 bp, Artificial Sequence
  Description of Artificial Sequence: Synthetic oligonucleotide
  Target: ATXN2; (-) strand; PAM type: NRG; PAM sequence: AAG
tctcttccattgcatcttct

SEQ ID NO: 19231 - DNA, 20 bp, Artificial Sequence
  Description of Artificial Sequence: Synthetic oligonucleotide
  Target: ATXN2; (-) strand; PAM type: NRG; PAM sequence: GGG
tttaatgttagtgtaaccca

SEQ ID NO: 19232 - DNA, 20 bp, Artificial Sequence
  Description of Artificial Sequence: Synthetic oligonucleotide
  Target: ATXN2; (-) strand; PAM type: NRG; PAM sequence: AGG
ttttaatgttagtgtaaccc

SEQ ID NO: 19233 - DNA, 20 bp, Artificial Sequence
  Description of Artificial Sequence: Synthetic oligonucleotide
  Target: ATXN2; (-) strand; PAM type: NRG; PAM sequence: CAG
tttttaatgttagtgtaacc

SEQ ID NO: 19234 - DNA, 20 bp, Artificial Sequence
  Description of Artificial Sequence: Synthetic oligonucleotide
  Target: ATXN2; (-) strand; PAM type: NRG; PAM sequence: TAG
ggtaggttcttttttaatgt

SEQ ID NO: 19235 - DNA, 20 bp, Artificial Sequence
  Description of Artificial Sequence: Synthetic oligonucleotide
  Target: ATXN2; (-) strand; PAM type: NRG; PAM sequence: AGG
tttcagtgtatgccttaggt

SEQ ID NO: 19236 - DNA, 20 bp, Artificial Sequence
  Description of Artificial Sequence: Synthetic oligonucleotide
  Target: ATXN2; (-) strand; PAM type: NRG; PAM sequence: TAG
ttttcagtgtatgccttagg

SEQ ID NO: 19237 - DNA, 20 bp, Artificial Sequence
  Description of Artificial Sequence: Synthetic oligonucleotide
  Target: ATXN2; (-) strand; PAM type: NRG; PAM sequence: AGG
tttttttcagtgtatgcctt

SEQ ID NO: 19238 - DNA, 20 bp, Artificial Sequence
  Description of Artificial Sequence: Synthetic oligonucleotide
  Target: ATXN2; (-) strand; PAM type: NRG; PAM sequence: TAG
atttttttcagtgtatgcct

SEQ ID NO: 19239 - DNA, 20 bp, Artificial Sequence
  Description of Artificial Sequence: Synthetic oligonucleotide
  Target: ATXN2; (-) strand; PAM type: NRG; PAM sequence: CAG
aaggttttgtacattttttt

SEQ ID NO: 19240 - DNA, 20 bp, Artificial Sequence
  Description of Artificial Sequence: Synthetic oligonucleotide
  Target: ATXN2; (-) strand; PAM type: NRG; PAM sequence: AGG
aaaaataaagtttatcttta

SEQ ID NO: 19241 - DNA, 20 bp, Artificial Sequence
  Description of Artificial Sequence: Synthetic oligonucleotide
  Target: ATXN2; (-) strand; PAM type: NRG; PAM sequence: AAG
taaaaataaagtttatcttt

SEQ ID NO: 19242 - DNA, 20 bp, Artificial Sequence
  Description of Artificial Sequence: Synthetic oligonucleotide
  Target: ATXN2; (-) strand; PAM type: NRG; PAM sequence: AAG
aaaataaataaataaaaata

SEQ ID NO: 19243 - DNA, 20 bp, Artificial Sequence
  Description of Artificial Sequence: Synthetic oligonucleotide
  Target: ATXN2; (-) strand; PAM type: NRG; PAM sequence: AAG
ccgagcgacactctgtctca

SEQ ID NO: 19244 - DNA, 20 bp, Artificial Sequence
  Description of Artificial Sequence: Synthetic oligonucleotide
  Target: ATXN2; (-) strand; PAM type: NRG; PAM sequence: GAG
gcactccagcttgggcaacc

SEQ ID NO: 19245 - DNA, 20 bp, Artificial Sequence
  Description of Artificial Sequence: Synthetic oligonucleotide
  Target: ATXN2; (-) strand; PAM type: NRG; PAM sequence: GGG
gcaccactgcactccagctt

SEQ ID NO: 19246 - DNA, 20 bp, Artificial Sequence
  Description of Artificial Sequence: Synthetic oligonucleotide
  Target: ATXN2; (-) strand; PAM type: NRG; PAM sequence: TGG
tgcaccactgcactccagct

SEQ ID NO: 19247 - DNA, 20 bp, Artificial Sequence
  Description of Artificial Sequence: Synthetic oligonucleotide
  Target: ATXN2; (-) strand; PAM type: NRG; PAM sequence: CAG
aagattgcaccactgcactc

SEQ ID NO: 19248 - DNA, 20 bp, Artificial Sequence
  Description of Artificial Sequence: Synthetic oligonucleotide
  Target: ATXN2; (-) strand; PAM type: NRG; PAM sequence: AAG
ggcagagagtgcagtgagtc

SEQ ID NO: 19249 - DNA, 20 bp, Artificial Sequence
  Description of Artificial Sequence: Synthetic oligonucleotide
  Target: ATXN2; (-) strand; PAM type: NRG; PAM sequence: GAG
caggaggcagagagtgcagt

SEQ ID NO: 19250 - DNA, 20 bp, Artificial Sequence
  Description of Artificial Sequence: Synthetic oligonucleotide
  Target: ATXN2; (-) strand; PAM type: NRG; PAM sequence: CAG
aacccaggaggcagagagtg

SEQ ID NO: 19251 - DNA, 20 bp, Artificial Sequence
  Description of Artificial Sequence: Synthetic oligonucleotide
  Target: ATXN2; (-) strand; PAM type: NRG; PAM sequence: GAG
gcttgaacccaggaggcaga

SEQ ID NO: 19252 - DNA, 20 bp, Artificial Sequence
  Description of Artificial Sequence: Synthetic oligonucleotide
  Target: ATXN2; (-) strand; PAM type: NRG; PAM sequence: GAG
tcgcttgaacccaggaggca

SEQ ID NO: 19253 - DNA, 20 bp, Artificial Sequence
  Description of Artificial Sequence: Synthetic oligonucleotide
  Target: ATXN2; (-) strand; PAM type: NRG; PAM sequence: CAG
aatcgcttgaacccaggagg

SEQ ID NO: 19254 - DNA, 20 bp, Artificial Sequence
  Description of Artificial Sequence: Synthetic oligonucleotide
  Target: ATXN2; (-) strand; PAM type: NRG; PAM sequence: AGG
gagaatcgcttgaacccagg

SEQ ID NO: 19255 - DNA, 20 bp, Artificial Sequence
  Description of Artificial Sequence: Synthetic oligonucleotide
  Target: ATXN2; (-) strand; PAM type: NRG; PAM sequence: GAG
ggagaatcgcttgaacccag

SEQ ID NO: 19256 - DNA, 20 bp, Artificial Sequence
  Description of Artificial Sequence: Synthetic oligonucleotide
  Target: ATXN2; (-) strand; PAM type: NRG; PAM sequence: AGG
taggagaatcgcttgaaccc

SEQ ID NO: 19257 - DNA, 20 bp, Artificial Sequence
  Description of Artificial Sequence: Synthetic oligonucleotide
  Target: ATXN2; (-) strand; PAM type: NRG; PAM sequence: CAG
gtaggagaatcgcttgaacc

SEQ ID NO: 19258 - DNA, 20 bp, Artificial Sequence
  Description of Artificial Sequence: Synthetic oligonucleotide
  Target: ATXN2; (-) strand; PAM type: NRG; PAM sequence: GAG
tactctggaggctgaggtag

SEQ ID NO: 19259 - DNA, 20 bp, Artificial Sequence
  Description of Artificial Sequence: Synthetic oligonucleotide
  Target: ATXN2; (-) strand; PAM type: NRG; PAM sequence: AGG
gctactctggaggctgaggt

SEQ ID NO: 19260 - DNA, 20 bp, Artificial Sequence
  Description of Artificial Sequence: Synthetic oligonucleotide
  Target: ATXN2; (-) strand; PAM type: NRG; PAM sequence: TAG
agctactctggaggctgagg

SEQ ID NO: 19261 - DNA, 20 bp, Artificial Sequence
  Description of Artificial Sequence: Synthetic oligonucleotide
  Target: ATXN2; (-) strand; PAM type: NRG; PAM sequence: AGG
cccagctactctggaggctg

SEQ ID NO: 19262 - DNA, 20 bp, Artificial Sequence
  Description of Artificial Sequence: Synthetic oligonucleotide
  Target: ATXN2; (-) strand; PAM type: NRG; PAM sequence: GAG
tcccagctactctggaggct

SEQ ID NO: 19263 - DNA, 20 bp, Artificial Sequence
  Description of Artificial Sequence: Synthetic oligonucleotide
  Target: ATXN2; (-) strand; PAM type: NRG; PAM sequence: AGG
tgtagtcccagctactctgg

SEQ ID NO: 19264 - DNA, 20 bp, Artificial Sequence
  Description of Artificial Sequence: Synthetic oligonucleotide
  Target: ATXN2; (-) strand; PAM type: NRG; PAM sequence: GAG
ctgtagtcccagctactctg

SEQ ID NO: 19265 - DNA, 20 bp, Artificial Sequence
  Description of Artificial Sequence: Synthetic oligonucleotide
  Target: ATXN2; (-) strand; PAM type: NRG; PAM sequence: TGG
acctgtagtcccagctactc

SEQ ID NO: 19266 - DNA, 20 bp, Artificial Sequence
  Description of Artificial Sequence: Synthetic oligonucleotide
  Target: ATXN2; (-) strand; PAM type: NRG; PAM sequence: CAG
gtggtgtgcacctgtagtcc

SEQ ID NO: 19267 - DNA, 20 bp, Artificial Sequence
  Description of Artificial Sequence: Synthetic oligonucleotide
  Target: ATXN2; (-) strand; PAM type: NRG; PAM sequence: TAG
ctgggtgtggtgtgcacctg

SEQ ID NO: 19268 - DNA, 20 bp, Artificial Sequence
  Description of Artificial Sequence: Synthetic oligonucleotide
  Target: ATXN2; (-) strand; PAM type: NRG; PAM sequence: TGG
aaaaaagtattagctgggtg

SEQ ID NO: 19269 - DNA, 20 bp, Artificial Sequence
  Description of Artificial Sequence: Synthetic oligonucleotide
  Target: ATXN2; (-) strand; PAM type: NRG; PAM sequence: GGG
ttttaaaaaaagtattagct

SEQ ID NO: 19270 - DNA, 20 bp, Artificial Sequence
  Description of Artificial Sequence: Synthetic oligonucleotide
  Target: ATXN2; (-) strand; PAM type: NRG; PAM sequence: TGG
attttaaaaaaagtattagc

SEQ ID NO: 19271 - DNA, 20 bp, Artificial Sequence
  Description of Artificial Sequence: Synthetic oligonucleotide
  Target: ATXN2; (-) strand; PAM type: NRG; PAM sequence: TAG
aaatattttaaaaaaagtat

SEQ ID NO: 19272 - DNA, 20 bp, Artificial Sequence
  Description of Artificial Sequence: Synthetic oligonucleotide
  Target: ATXN2; (-) strand; PAM type: NRG; PAM sequence: AAG
tactaaaaatattttaaaaa

SEQ ID NO: 19273 - DNA, 20 bp, Artificial Sequence
  Description of Artificial Sequence: Synthetic oligonucleotide
  Target: ATXN2; (-) strand; PAM type: NRG; PAM sequence: TGG
cgagaccagcctggccaaca

SEQ ID NO: 19274 - DNA, 20 bp, Artificial Sequence
  Description of Artificial Sequence: Synthetic oligonucleotide
  Target: ATXN2; (-) strand; PAM type: NRG; PAM sequence: TGG
tctggagttcgagaccagcc

SEQ ID NO: 19275 - DNA, 20 bp, Artificial Sequence
  Description of Artificial Sequence: Synthetic oligonucleotide
  Target: ATXN2; (-) strand; PAM type: NRG; PAM sequence: CAG
tgaggtctggagttcgagac

SEQ ID NO: 19276 - DNA, 20 bp, Artificial Sequence
  Description of Artificial Sequence: Synthetic oligonucleotide
  Target: ATXN2; (-) strand; PAM type: NRG; PAM sequence: GAG
tcacctgaggtctggagttc

SEQ ID NO: 19277 - DNA, 20 bp, Artificial Sequence
  Description of Artificial Sequence: Synthetic oligonucleotide
  Target: ATXN2; (-) strand; PAM type: NRG; PAM sequence: GAG
ggcagatcacctgaggtctg

SEQ ID NO: 19278 - DNA, 20 bp, Artificial Sequence
  Description of Artificial Sequence: Synthetic oligonucleotide
  Target: ATXN2; (-) strand; PAM type: NRG; PAM sequence: TGG
tgggcagatcacctgaggtc

SEQ ID NO: 19279 - DNA, 20 bp, Artificial Sequence
  Description of Artificial Sequence: Synthetic oligonucleotide
  Target: ATXN2; (-) strand; PAM type: NRG; PAM sequence: AGG
agaggtgggcagatcacctg

SEQ ID NO: 19280 - DNA, 20 bp, Artificial Sequence
  Description of Artificial Sequence: Synthetic oligonucleotide
  Target: ATXN2; (-) strand; PAM type: NRG; PAM sequence: GAG
cagaggtgggcagatcacct

SEQ ID NO: 19281 - DNA, 20 bp, Artificial Sequence
  Description of Artificial Sequence: Synthetic oligonucleotide
  Target: ATXN2; (-) strand; PAM type: NRG; PAM sequence: CAG
ctttgggaggcagaggtggg

SEQ ID NO: 19282 - DNA, 20 bp, Artificial Sequence
  Description of Artificial Sequence: Synthetic oligonucleotide
  Target: ATXN2; (-) strand; PAM type: NRG; PAM sequence: GGG
cctctttgggaggcagaggt

SEQ ID NO: 19283 - DNA, 20 bp, Artificial Sequence
  Description of Artificial Sequence: Synthetic oligonucleotide
  Target: ATXN2; (-) strand; PAM type: NRG; PAM sequence: TGG
acctctttgggaggcagagg

SEQ ID NO: 19284 - DNA, 20 bp, Artificial Sequence
  Description of Artificial Sequence: Synthetic oligonucleotide
  Target: ATXN2; (-) strand; PAM type: NRG; PAM sequence: AGG
cccacctctttgggaggcag

SEQ ID NO: 19285 - DNA, 20 bp, Artificial Sequence
  Description of Artificial Sequence: Synthetic oligonucleotide
  Target: ATXN2; (-) strand; PAM type: NRG; PAM sequence: GAG
tcccacctctttgggaggca

SEQ ID NO: 19286 - DNA, 20 bp, Artificial Sequence
  Description of Artificial Sequence: Synthetic oligonucleotide
  Target: ATXN2; (-) strand; PAM type: NRG; PAM sequence: CAG
aatcccacctctttgggagg

SEQ ID NO: 19287 - DNA, 20 bp, Artificial Sequence
  Description of Artificial Sequence: Synthetic oligonucleotide
  Target: ATXN2; (-) strand; PAM type: NRG; PAM sequence: AGG
tgtaatcccacctctttggg

SEQ ID NO: 19288 - DNA, 20 bp, Artificial Sequence
  Description of Artificial Sequence: Synthetic oligonucleotide
  Target: ATXN2; (-) strand; PAM type: NRG; PAM sequence: GAG
ctgtaatcccacctctttgg

SEQ ID NO: 19289 - DNA, 20 bp, Artificial Sequence
  Description of Artificial Sequence: Synthetic oligonucleotide
  Target: ATXN2; (-) strand; PAM type: NRG; PAM sequence: GGG
gcctgtaatcccacctcttt

SEQ ID NO: 19290 - DNA, 20 bp, Artificial Sequence
  Description of Artificial Sequence: Synthetic oligonucleotide
  Target: ATXN2; (-) strand; PAM type: NRG; PAM sequence: TGG
cgcctgtaatcccacctctt

SEQ ID NO: 19291 - DNA, 20 bp, Artificial Sequence
  Description of Artificial Sequence: Synthetic oligonucleotide
  Target: ATXN2; (-) strand; PAM type: NRG; PAM sequence: TGG
ttatccttggctggatgcag

SEQ ID NO: 19292 - DNA, 20 bp, Artificial Sequence
  Description of Artificial Sequence: Synthetic oligonucleotide
  Target: ATXN2; (-) strand; PAM type: NRG; PAM sequence: CAG
agtttatccttggctggatg

SEQ ID NO: 19293 - DNA, 20 bp, Artificial Sequence
  Description of Artificial Sequence: Synthetic oligonucleotide
  Target: ATXN2; (-) strand; PAM type: NRG; PAM sequence: TGG
tattaaagtttatccttggc

SEQ ID NO: 19294 - DNA, 20 bp, Artificial Sequence
  Description of Artificial Sequence: Synthetic oligonucleotide
  Target: ATXN2; (-) strand; PAM type: NRG; PAM sequence: TGG
agcatattaaagtttatcct

SEQ ID NO: 19295 - DNA, 20 bp, Artificial Sequence
  Description of Artificial Sequence: Synthetic oligonucleotide
  Target: ATXN2; (-) strand; PAM type: NRG; PAM sequence: AAG
ataccttcaatagcatatta

SEQ ID NO: 19296 - DNA, 20 bp, Artificial Sequence
  Description of Artificial Sequence: Synthetic oligonucleotide
  Target: ATXN2; (-) strand; PAM type: NRG; PAM sequence: TAG
agaacaaagtataccttcaa

SEQ ID NO: 19297 - DNA, 20 bp, Artificial Sequence
  Description of Artificial Sequence: Synthetic oligonucleotide
  Target: ATXN2; (-) strand; PAM type: NRG; PAM sequence: AAG
agtcttcctgttcaagaaca

SEQ ID NO: 19298 - DNA, 20 bp, Artificial Sequence
  Description of Artificial Sequence: Synthetic oligonucleotide
  Target: ATXN2; (-) strand; PAM type: NRG; PAM sequence: AAG
gatgttgagtcttcctgttc

SEQ ID NO: 19299 - DNA, 20 bp, Artificial Sequence
  Description of Artificial Sequence: Synthetic oligonucleotide
  Target: ATXN2; (-) strand; PAM type: NRG; PAM sequence: GAG
attgatgtcttcatgatgtt

SEQ ID NO: 19300 - DNA, 20 bp, Artificial Sequence
  Description of Artificial Sequence: Synthetic oligonucleotide
  Target: ATXN2; (-) strand; PAM type: NRG; PAM sequence: AAG
aacttataaattaacttgag

SEQ ID NO: 19301 - DNA, 20 bp, Artificial Sequence
  Description of Artificial Sequence: Synthetic oligonucleotide
  Target: ATXN2; (-) strand; PAM type: NRG; PAM sequence: GAG
ataaacttataaattaactt

SEQ ID NO: 19302 - DNA, 20 bp, Artificial Sequence
  Description of Artificial Sequence: Synthetic oligonucleotide
  Target: ATXN2; (-) strand; PAM type: NRG; PAM sequence: CAG
catgagccaccatggcaggc

SEQ ID NO: 19303 - DNA, 20 bp, Artificial Sequence
  Description of Artificial Sequence: Synthetic oligonucleotide
  Target: ATXN2; (-) strand; PAM type: NRG; PAM sequence: AGG
caggcatgagccaccatggc

SEQ ID NO: 19304 - DNA, 20 bp, Artificial Sequence
  Description of Artificial Sequence: Synthetic oligonucleotide
  Target: ATXN2; (-) strand; PAM type: NRG; PAM sequence: CAG
acaggcatgagccaccatgg

SEQ ID NO: 19305 - DNA, 20 bp, Artificial Sequence
  Description of Artificial Sequence: Synthetic oligonucleotide
  Target: ATXN2; (-) strand; PAM type: NRG; PAM sequence: TGG
actacaggcatgagccacca

SEQ ID NO: 19306 - DNA, 20 bp, Artificial Sequence
  Description of Artificial Sequence: Synthetic oligonucleotide
  Target: ATXN2; (-) strand; PAM type: NRG; PAM sequence: GAG
agtggtgggactacaggcat

SEQ ID NO: 19307 - DNA, 20 bp, Artificial Sequence
  Description of Artificial Sequence: Synthetic oligonucleotide
  Target: ATXN2; (-) strand; PAM type: NRG; PAM sequence: AGG
tcacaaagtggtgggactac

SEQ ID NO: 19308 - DNA, 20 bp, Artificial Sequence
  Description of Artificial Sequence: Synthetic oligonucleotide
  Target: ATXN2; (-) strand; PAM type: NRG; PAM sequence: CAG
ctcacaaagtggtgggacta

SEQ ID NO: 19309 - DNA, 20 bp, Artificial Sequence
  Description of Artificial Sequence: Synthetic oligonucleotide
  Target: ATXN2; (-) strand; PAM type: NRG; PAM sequence: GGG
tgtcagcctcacaaagtggt

SEQ ID NO: 19310 - DNA, 20 bp, Artificial Sequence
  Description of Artificial Sequence: Synthetic oligonucleotide
  Target: ATXN2; (-) strand; PAM type: NRG; PAM sequence: TGG
gtgtcagcctcacaaagtgg

SEQ ID NO: 19311 - DNA, 20 bp, Artificial Sequence
  Description of Artificial Sequence: Synthetic oligonucleotide
  Target: ATXN2; (-) strand; PAM type: NRG; PAM sequence: TGG
cctgtgtcagcctcacaaag

SEQ ID NO: 19312 - DNA, 20 bp, Artificial Sequence
  Description of Artificial Sequence: Synthetic oligonucleotide
  Target: ATXN2; (-) strand; PAM type: NRG; PAM sequence: AAG
ctgcctgtgtcagcctcaca

SEQ ID NO: 19313 - DNA, 20 bp, Artificial Sequence
  Description of Artificial Sequence: Synthetic oligonucleotide
  Target: ATXN2; (-) strand; PAM type: NRG; PAM sequence: CAG
ctcaagcagtctgcctgtgt

SEQ ID NO: 19314 - DNA, 20 bp, Artificial Sequence
  Description of Artificial Sequence: Synthetic oligonucleotide
  Target: ATXN2; (-) strand; PAM type: NRG; PAM sequence: CAG
gtcgaactcctgagctcaag

SEQ ID NO: 19315 - DNA, 20 bp, Artificial Sequence
  Description of Artificial Sequence: Synthetic oligonucleotide
  Target: ATXN2; (-) strand; PAM type: NRG; PAM sequence: AAG
ggtgtcgaactcctgagctc

SEQ ID NO: 19316 - DNA, 20 bp, Artificial Sequence
  Description of Artificial Sequence: Synthetic oligonucleotide
  Target: ATXN2; (-) strand; PAM type: NRG; PAM sequence: GAG
caggctggtgtcgaactcct

SEQ ID NO: 19317 - DNA, 20 bp, Artificial Sequence
  Description of Artificial Sequence: Synthetic oligonucleotide
  Target: ATXN2; (-) strand; PAM type: NRG; PAM sequence: TGG
tttcaccatgttgcccaggc

SEQ ID NO: 19318 - DNA, 20 bp, Artificial Sequence
  Description of Artificial Sequence: Synthetic oligonucleotide
  Target: ATXN2; (-) strand; PAM type: NRG; PAM sequence: AGG
agggtttcaccatgttgccc

SEQ ID NO: 19319 - DNA, 20 bp, Artificial Sequence
  Description of Artificial Sequence: Synthetic oligonucleotide
  Target: ATXN2; (-) strand; PAM type: NRG; PAM sequence: CAG
cagggtttcaccatgttgcc

SEQ ID NO: 19320 - DNA, 20 bp, Artificial Sequence
  Description of Artificial Sequence: Synthetic oligonucleotide
  Target: ATXN2; (-) strand; PAM type: NRG; PAM sequence: GGG
ttgtatattttgcagagaca

SEQ ID NO: 19321 - DNA, 20 bp, Artificial Sequence
  Description of Artificial Sequence: Synthetic oligonucleotide
  Target: ATXN2; (-) strand; PAM type: NRG; PAM sequence: AGG
tttgtatattttgcagagac

SEQ ID NO: 19322 - DNA, 20 bp, Artificial Sequence
  Description of Artificial Sequence: Synthetic oligonucleotide
  Target: ATXN2; (-) strand; PAM type: NRG; PAM sequence: CAG
ttttgtatattttgcagaga

SEQ ID NO: 19323 - DNA, 20 bp, Artificial Sequence
  Description of Artificial Sequence: Synthetic oligonucleotide
  Target: ATXN2; (-) strand; PAM type: NRG; PAM sequence: GAG
taatttttgtatattttgca

SEQ ID NO: 19324 - DNA, 20 bp, Artificial Sequence
  Description of Artificial Sequence: Synthetic oligonucleotide
  Target: ATXN2; (-) strand; PAM type: NRG; PAM sequence: CAG
cttaatttttgtatattttg

SEQ ID NO: 19325 - DNA, 20 bp, Artificial Sequence
  Description of Artificial Sequence: Synthetic oligonucleotide
  Target: ATXN2; (-) strand; PAM type: NRG; PAM sequence: TGG
caggcaagcaccaccgtgcc

SEQ ID NO: 19326 - DNA, 20 bp, Artificial Sequence
  Description of Artificial Sequence: Synthetic oligonucleotide
  Target: ATXN2; (-) strand; PAM type: NRG; PAM sequence: AAG
aagtagctgggactacaggc

SEQ ID NO: 19327 - DNA, 20 bp, Artificial Sequence
  Description of Artificial Sequence: Synthetic oligonucleotide
  Target: ATXN2; (-) strand; PAM type: NRG; PAM sequence: AGG
tcccaagtagctgggactac

SEQ ID NO: 19328 - DNA, 20 bp, Artificial Sequence
  Description of Artificial Sequence: Synthetic oligonucleotide
  Target: ATXN2; (-) strand; PAM type: NRG; PAM sequence: CAG
ctcccaagtagctgggacta

SEQ ID NO: 19329 - DNA, 20 bp, Artificial Sequence
  Description of Artificial Sequence: Synthetic oligonucleotide
  Target: ATXN2; (-) strand; PAM type: NRG; PAM sequence: GGG
cctcagcctcccaagtagct

SEQ ID NO: 19330 - DNA, 20 bp, Artificial Sequence
  Description of Artificial Sequence: Synthetic oligonucleotide
  Target: ATXN2; (-) strand; PAM type: NRG; PAM sequence: TGG
acctcagcctcccaagtagc

SEQ ID NO: 19331 - DNA, 20 bp, Artificial Sequence
  Description of Artificial Sequence: Synthetic oligonucleotide
  Target: ATXN2; (-) strand; PAM type: NRG; PAM sequence: TAG
ccccacctcagcctcccaag

SEQ ID NO: 19332 - DNA, 20 bp, Artificial Sequence
  Description of Artificial Sequence: Synthetic oligonucleotide
  Target: ATXN2; (-) strand; PAM type: NRG; PAM sequence: AAG
tccccccacctcagcctccc

SEQ ID NO: 19333 - DNA, 20 bp, Artificial Sequence
  Description of Artificial Sequence: Synthetic oligonucleotide
  Target: ATXN2; (-) strand; PAM type: NRG; PAM sequence: CAG
ctaaggcaatccccccacct

SEQ ID NO: 19334 - DNA, 20 bp, Artificial Sequence
  Description of Artificial Sequence: Synthetic oligonucleotide
  Target: ATXN2; (-) strand; PAM type: NRG; PAM sequence: AGG
agcctcaacttcccgagcta

SEQ ID NO: 19335 - DNA, 20 bp, Artificial Sequence
  Description of Artificial Sequence: Synthetic oligonucleotide
  Target: ATXN2; (-) strand; PAM type: NRG; PAM sequence: AAG
cagcctcaacttcccgagct

SEQ ID NO: 19336 - DNA, 20 bp, Artificial Sequence
  Description of Artificial Sequence: Synthetic oligonucleotide
  Target: ATXN2; (-) strand; PAM type: NRG; PAM sequence: GAG
tactgcagcctcaacttccc

SEQ ID NO: 19337 - DNA, 20 bp, Artificial Sequence
  Description of Artificial Sequence: Synthetic oligonucleotide
  Target: ATXN2; (-) strand; PAM type: NRG; PAM sequence: CAG
gggatgatctgggcatactg

SEQ ID NO: 19338 - DNA, 20 bp, Artificial Sequence
  Description of Artificial Sequence: Synthetic oligonucleotide
  Target: ATXN2; (-) strand; PAM type: NRG; PAM sequence: GGG
ggagtgcagtgggatgatct

SEQ ID NO: 19339 - DNA, 20 bp, Artificial Sequence
  Description of Artificial Sequence: Synthetic oligonucleotide
  Target: ATXN2; (-) strand; PAM type: NRG; PAM sequence: TGG
tggagtgcagtgggatgatc

SEQ ID NO: 19340 - DNA, 20 bp, Artificial Sequence
  Description of Artificial Sequence: Synthetic oligonucleotide
  Target: ATXN2; (-) strand; PAM type: NRG; PAM sequence: GGG
tacctaggctggagtgcagt

SEQ ID NO: 19341 - DNA, 20 bp, Artificial Sequence
  Description of Artificial Sequence: Synthetic oligonucleotide
  Target: ATXN2; (-) strand; PAM type: NRG; PAM sequence: TGG
ttacctaggctggagtgcag

SEQ ID NO: 19342 - DNA, 20 bp, Artificial Sequence
  Description of Artificial Sequence: Synthetic oligonucleotide
  Target: ATXN2; (-) strand; PAM type: NRG; PAM sequence: CAG
ctgttacctaggctggagtg

SEQ ID NO: 19343 - DNA, 20 bp, Artificial Sequence
  Description of Artificial Sequence: Synthetic oligonucleotide
  Target: ATXN2; (-) strand; PAM type: NRG; PAM sequence: GAG
tggctctgttacctaggctg

SEQ ID NO: 19344 - DNA, 20 bp, Artificial Sequence
  Description of Artificial Sequence: Synthetic oligonucleotide
  Target: ATXN2; (-) strand; PAM type: NRG; PAM sequence: TGG
tctggctctgttacctaggc

SEQ ID NO: 19345 - DNA, 20 bp, Artificial Sequence
  Description of Artificial Sequence: Synthetic oligonucleotide
  Target: ATXN2; (-) strand; PAM type: NRG; PAM sequence: AGG
aaggtctggctctgttacct

SEQ ID NO: 19346 - DNA, 20 bp, Artificial Sequence
  Description of Artificial Sequence: Synthetic oligonucleotide
  Target: ATXN2; (-) strand; PAM type: NRG; PAM sequence: TAG
caaggtctggctctgttacc

SEQ ID NO: 19347 - DNA, 20 bp, Artificial Sequence
  Description of Artificial Sequence: Synthetic oligonucleotide
  Target: ATXN2; (-) strand; PAM type: NRG; PAM sequence: TGG
aattttttggagacaaggtc

SEQ ID NO: 19348 - DNA, 20 bp, Artificial Sequence
  Description of Artificial Sequence: Synthetic oligonucleotide
  Target: ATXN2; (-) strand; PAM type: NRG; PAM sequence: AGG
tttttaattttttggagaca

SEQ ID NO: 19349 - DNA, 20 bp, Artificial Sequence
  Description of Artificial Sequence: Synthetic oligonucleotide
  Target: ATXN2; (-) strand; PAM type: NRG; PAM sequence: AAG
ttttttaattttttggagac

SEQ ID NO: 19350 - DNA, 20 bp, Artificial Sequence
  Description of Artificial Sequence: Synthetic oligonucleotide
  Target: ATXN2; (-) strand; PAM type: NRG; PAM sequence: GAG
tttttttttttaattttttg

SEQ ID NO: 19351 - DNA, 20 bp, Artificial Sequence
  Description of Artificial Sequence: Synthetic oligonucleotide
  Target: ATXN2; (-) strand; PAM type: NRG; PAM sequence: TGG
tttttttttttttaattttt

SEQ ID NO: 19352 - DNA, 20 bp, Artificial Sequence
  Description of Artificial Sequence: Synthetic oligonucleotide
  Target: ATXN2; (-) strand; PAM type: NRG; PAM sequence: TGG
ttactatcagtataaacttc

SEQ ID NO: 19353 - DNA, 20 bp, Artificial Sequence
  Description of Artificial Sequence: Synthetic oligonucleotide
  Target: ATXN2; (-) strand; PAM type: NRG; PAM sequence: CAG
ttgtcgttggttcttactat

SEQ ID NO: 19354 - DNA, 20 bp, Artificial Sequence
  Description of Artificial Sequence: Synthetic oligonucleotide
  Target: ATXN2; (-) strand; PAM type: NRG; PAM sequence: TGG
tgaggtggtttttttgtcgt

SEQ ID NO: 19355 - DNA, 20 bp, Artificial Sequence
  Description of Artificial Sequence: Synthetic oligonucleotide
  Target: ATXN2; (-) strand; PAM type: NRG; PAM sequence: TGG
tccaaaggtaaccagtgagg

SEQ ID NO: 19356 - DNA, 20 bp, Artificial Sequence
  Description of Artificial Sequence: Synthetic oligonucleotide
  Target: ATXN2; (-) strand; PAM type: NRG; PAM sequence: AGG
tcctccaaaggtaaccagtg

SEQ ID NO: 19357 - DNA, 20 bp, Artificial Sequence
  Description of Artificial Sequence: Synthetic oligonucleotide
  Target: ATXN2; (-) strand; PAM type: NRG; PAM sequence: GAG
atcctccaaaggtaaccagt

SEQ ID NO: 19358 - DNA, 20 bp, Artificial Sequence
  Description of Artificial Sequence: Synthetic oligonucleotide
  Target: ATXN2; (-) strand; PAM type: NRG; PAM sequence: CAG
tgttatcctccaaaggtaac

SEQ ID NO: 19359 - DNA, 20 bp, Artificial Sequence
  Description of Artificial Sequence: Synthetic oligonucleotide
  Target: ATXN2; (-) strand; PAM type: NRG; PAM sequence: AGG
ggttttctgttatcctccaa

SEQ ID NO: 19360 - DNA, 20 bp, Artificial Sequence
  Description of Artificial Sequence: Synthetic oligonucleotide
  Target: ATXN2; (-) strand; PAM type: NRG; PAM sequence: AAG
tggttttctgttatcctcca

SEQ ID NO: 19361 - DNA, 20 bp, Artificial Sequence
  Description of Artificial Sequence: Synthetic oligonucleotide
  Target: ATXN2; (-) strand; PAM type: NRG; PAM sequence: TGG
cagtcttcaaaataatgagt

SEQ ID NO: 19362 - DNA, 20 bp, Artificial Sequence
  Description of Artificial Sequence: Synthetic oligonucleotide
  Target: ATXN2; (-) strand; PAM type: NRG; PAM sequence: GAG
aaggcagtcttcaaaataat

SEQ ID NO: 19363 - DNA, 20 bp, Artificial Sequence
  Description of Artificial Sequence: Synthetic oligonucleotide
  Target: ATXN2; (-) strand; PAM type: NRG; PAM sequence: CAG
aatcatttccctttttaagg

SEQ ID NO: 19364 - DNA, 20 bp, Artificial Sequence
  Description of Artificial Sequence: Synthetic oligonucleotide
  Target: ATXN2; (-) strand; PAM type: NRG; PAM sequence: AGG
gttaatcatttcccttttta

SEQ ID NO: 19365 - DNA, 20 bp, Artificial Sequence
  Description of Artificial Sequence: Synthetic oligonucleotide
  Target: ATXN2; (-) strand; PAM type: NRG; PAM sequence: AAG
tgttaatcatttcccttttt

SEQ ID NO: 19366 - DNA, 20 bp, Artificial Sequence
  Description of Artificial Sequence: Synthetic oligonucleotide
  Target: ATXN2; (-) strand; PAM type: NRG; PAM sequence: AAG
aggtatagctttcttaggaa

SEQ ID NO: 19367 - DNA, 20 bp, Artificial Sequence
  Description of Artificial Sequence: Synthetic oligonucleotide
  Target: ATXN2; (-) strand; PAM type: NRG; PAM sequence: AGG
ccctgaggtatagctttctt

SEQ ID NO: 19368 - DNA, 20 bp, Artificial Sequence
  Description of Artificial Sequence: Synthetic oligonucleotide
  Target: ATXN2; (-) strand; PAM type: NRG; PAM sequence: TAG
accctgaggtatagctttct

SEQ ID NO: 19369 - DNA, 20 bp, Artificial Sequence
  Description of Artificial Sequence: Synthetic oligonucleotide
  Target: ATXN2; (-) strand; PAM type: NRG; PAM sequence: TAG
tgtttggttaccctgaggta

SEQ ID NO: 19370 - DNA, 20 bp, Artificial Sequence
  Description of Artificial Sequence: Synthetic oligonucleotide
  Target: ATXN2; (-) strand; PAM type: NRG; PAM sequence: AGG
ccagctgtttggttaccctg

SEQ ID NO: 19371 - DNA, 20 bp, Artificial Sequence
  Description of Artificial Sequence: Synthetic oligonucleotide
  Target: ATXN2; (-) strand; PAM type: NRG; PAM sequence: GAG
tccagctgtttggttaccct

SEQ ID NO: 19372 - DNA, 20 bp, Artificial Sequence
  Description of Artificial Sequence: Synthetic oligonucleotide
  Target: ATXN2; (-) strand; PAM type: NRG; PAM sequence: TGG
ctttcccatatccagctgtt

SEQ ID NO: 19373 - DNA, 20 bp, Artificial Sequence
  Description of Artificial Sequence: Synthetic oligonucleotide
  Target: ATXN2; (-) strand; PAM type: NRG; PAM sequence: CAG
aagaaaaactttcccatatc

SEQ ID NO: 19374 - DNA, 20 bp, Artificial Sequence
  Description of Artificial Sequence: Synthetic oligonucleotide
  Target: ATXN2; (-) strand; PAM type: NRG; PAM sequence: AAG
ttgcctggaatatttctata

SEQ ID NO: 19375 - DNA, 20 bp, Artificial Sequence
  Description of Artificial Sequence: Synthetic oligonucleotide
  Target: ATXN2; (-) strand; PAM type: NRG; PAM sequence: TGG
tcccttcttcaattattgcc

SEQ ID NO: 19376 - DNA, 20 bp, Artificial Sequence
  Description of Artificial Sequence: Synthetic oligonucleotide
  Target: ATXN2; (-) strand; PAM type: NRG; PAM sequence: TGG
tttccttaggggttgtaaaa

SEQ ID NO: 19377 - DNA, 20 bp, Artificial Sequence
  Description of Artificial Sequence: Synthetic oligonucleotide
  Target: ATXN2; (-) strand; PAM type: NRG; PAM sequence: GGG
aagatcagttatttccttag

SEQ ID NO: 19378 - DNA, 20 bp, Artificial Sequence
  Description of Artificial Sequence: Synthetic oligonucleotide
  Target: ATXN2; (-) strand; PAM type: NRG; PAM sequence: GGG
caagatcagttatttcctta

SEQ ID NO: 19379 - DNA, 20 bp, Artificial Sequence
  Description of Artificial Sequence: Synthetic oligonucleotide
  Target: ATXN2; (-) strand; PAM type: NRG; PAM sequence: AGG
ccaagatcagttatttcctt

SEQ ID NO: 19380 - DNA, 20 bp, Artificial Sequence
  Description of Artificial Sequence: Synthetic oligonucleotide
  Target: ATXN2; (-) strand; PAM type: NRG; PAM sequence: TAG
cccaagatcagttatttcct

SEQ ID NO: 19381 - DNA, 20 bp, Artificial Sequence
  Description of Artificial Sequence: Synthetic oligonucleotide
  Target: ATXN2; (-) strand; PAM type: NRG; PAM sequence: CAG
ataattgtctagcccaagat

SEQ ID NO: 19382 - DNA, 20 bp, Artificial Sequence
  Description of Artificial Sequence: Synthetic oligonucleotide
  Target: ATXN2; (-) strand; PAM type: NRG; PAM sequence: AAG
tgatgataattgtctagccc

SEQ ID NO: 19383 - DNA, 20 bp, Artificial Sequence
  Description of Artificial Sequence: Synthetic oligonucleotide
  Target: ATXN2; (-) strand; PAM type: NRG; PAM sequence: TAG
agccattgatgataattgtc

SEQ ID NO: 19384 - DNA, 20 bp, Artificial Sequence
  Description of Artificial Sequence: Synthetic oligonucleotide
  Target: ATXN2; (-) strand; PAM type: NRG; PAM sequence: CAG
ttttttggtgtgttttttag

SEQ ID NO: 19385 - DNA, 20 bp, Artificial Sequence
  Description of Artificial Sequence: Synthetic oligonucleotide
  Target: ATXN2; (-) strand; PAM type: NRG; PAM sequence: TAG
aatttttttggtgtgttttt

SEQ ID NO: 19386 - DNA, 20 bp, Artificial Sequence
  Description of Artificial Sequence: Synthetic oligonucleotide
  Target: ATXN2; (-) strand; PAM type: NRG; PAM sequence: TGG
ctttagcgccttaatttttt

SEQ ID NO: 19387 - DNA, 20 bp, Artificial Sequence
  Description of Artificial Sequence: Synthetic oligonucleotide
  Target: ATXN2; (-) strand; PAM type: NRG; PAM sequence: TAG
caggagataatatgtccctt

SEQ ID NO: 19388 - DNA, 20 bp, Artificial Sequence
  Description of Artificial Sequence: Synthetic oligonucleotide
  Target: ATXN2; (-) strand; PAM type: NRG; PAM sequence: GAG
tagatgttttatctatccag

SEQ ID NO: 19389 - DNA, 20 bp, Artificial Sequence
  Description of Artificial Sequence: Synthetic oligonucleotide
  Target: ATXN2; (-) strand; PAM type: NRG; PAM sequence: AGG
cctagatgttttatctatcc

SEQ ID NO: 19390 - DNA, 20 bp, Artificial Sequence
  Description of Artificial Sequence: Synthetic oligonucleotide
  Target: ATXN2; (-) strand; PAM type: NRG; PAM sequence: CAG
tcctagatgttttatctatc

SEQ ID NO: 19391 - DNA, 20 bp, Artificial Sequence
  Description of Artificial Sequence: Synthetic oligonucleotide
  Target: ATXN2; (-) strand; PAM type: NRG; PAM sequence: TAG
aggagtagtcagtgagttcc

SEQ ID NO: 19392 - DNA, 20 bp, Artificial Sequence
  Description of Artificial Sequence: Synthetic oligonucleotide
  Target: ATXN2; (-) strand; PAM type: NRG; PAM sequence: GAG
tcctgataggagtagtcagt

SEQ ID NO: 19393 - DNA, 20 bp, Artificial Sequence
  Description of Artificial Sequence: Synthetic oligonucleotide
  Target: ATXN2; (-) strand; PAM type: NRG; PAM sequence: CAG
tttttcctgataggagtagt

SEQ ID NO: 19394 - DNA, 20 bp, Artificial Sequence
  Description of Artificial Sequence: Synthetic oligonucleotide
  Target: ATXN2; (-) strand; PAM type: NRG; PAM sequence: TAG
agtctttttcctgataggag

SEQ ID NO: 19395 - DNA, 20 bp, Artificial Sequence
  Description of Artificial Sequence: Synthetic oligonucleotide
  Target: ATXN2; (-) strand; PAM type: NRG; PAM sequence: GAG
atcagtctttttcctgatag

SEQ ID NO: 19396 - DNA, 20 bp, Artificial Sequence
  Description of Artificial Sequence: Synthetic oligonucleotide
  Target: ATXN2; (-) strand; PAM type: NRG; PAM sequence: AGG
taatcagtctttttcctgat

SEQ ID NO: 19397 - DNA, 20 bp, Artificial Sequence
  Description of Artificial Sequence: Synthetic oligonucleotide
  Target: ATXN2; (-) strand; PAM type: NRG; PAM sequence: TAG
gtaatcagtctttttcctga

SEQ ID NO: 19398 - DNA, 20 bp, Artificial Sequence
  Description of Artificial Sequence: Synthetic oligonucleotide
  Target: ATXN2; (-) strand; PAM type: NRG; PAM sequence: CAG
tcagtgaggagtcatgtaat

SEQ ID NO: 19399 - DNA, 20 bp, Artificial Sequence
  Description of Artificial Sequence: Synthetic oligonucleotide
  Target: ATXN2; (-) strand; PAM type: NRG; PAM sequence: GAG
atgtgtgtactttcagtgag

SEQ ID NO: 19400 - DNA, 20 bp, Artificial Sequence
  Description of Artificial Sequence: Synthetic oligonucleotide
  Target: ATXN2; (-) strand; PAM type: NRG; PAM sequence: AGG
agatgtgtgtactttcagtg

SEQ ID NO: 19401 - DNA, 20 bp, Artificial Sequence
  Description of Artificial Sequence: Synthetic oligonucleotide
  Target: ATXN2; (-) strand; PAM type: NRG; PAM sequence: GAG
cagatgtgtgtactttcagt

SEQ ID NO: 19402 - DNA, 20 bp, Artificial Sequence
  Description of Artificial Sequence: Synthetic oligonucleotide
  Target: ATXN2; (-) strand; PAM type: NRG; PAM sequence: CAG
ttcacagatgtgtgtacttt

SEQ ID NO: 19403 - DNA, 20 bp, Artificial Sequence
  Description of Artificial Sequence: Synthetic oligonucleotide
  Target: ATXN2; (-) strand; PAM type: NRG; PAM sequence: CAG
tttttttccccaatgtttca

SEQ ID NO: 19404 - DNA, 20 bp, Artificial Sequence
  Description of Artificial Sequence: Synthetic oligonucleotide
  Target: ATXN2; (-) strand; PAM type: NRG; PAM sequence: GGG
aatgaaggcttgatcagatt

SEQ ID NO: 19405 - DNA, 20 bp, Artificial Sequence
  Description of Artificial Sequence: Synthetic oligonucleotide
  Target: ATXN2; (-) strand; PAM type: NRG; PAM sequence: TGG
taatgaaggcttgatcagat

SEQ ID NO: 19406 - DNA, 20 bp, Artificial Sequence
  Description of Artificial Sequence: Synthetic oligonucleotide
  Target: ATXN2; (-) strand; PAM type: NRG; PAM sequence: CAG
gtaaataatgaaggcttgat

SEQ ID NO: 19407 - DNA, 20 bp, Artificial Sequence
  Description of Artificial Sequence: Synthetic oligonucleotide
  Target: ATXN2; (-) strand; PAM type: NRG; PAM sequence: AGG
aaactgatagtaaataatga

SEQ ID NO: 19408 - DNA, 20 bp, Artificial Sequence
  Description of Artificial Sequence: Synthetic oligonucleotide
  Target: ATXN2; (-) strand; PAM type: NRG; PAM sequence: AAG
taaactgatagtaaataatg

SEQ ID NO: 19409 - DNA, 20 bp, Artificial Sequence
  Description of Artificial Sequence: Synthetic oligonucleotide
  Target: ATXN2; (-) strand; PAM type: NRG; PAM sequence: TAG
ctgtaatctttgtaaactga

SEQ ID NO: 19410 - DNA, 20 bp, Artificial Sequence
  Description of Artificial Sequence: Synthetic oligonucleotide
  Target: ATXN2; (-) strand; PAM type: NRG; PAM sequence: TAG
ccctgtgttgatatttaaag

SEQ ID NO: 19411 - DNA, 20 bp, Artificial Sequence
  Description of Artificial Sequence: Synthetic oligonucleotide
  Target: ATXN2; (-) strand; PAM type: NRG; PAM sequence: AAG
tatccctgtgttgatattta

SEQ ID NO: 19412 - DNA, 20 bp, Artificial Sequence
  Description of Artificial Sequence: Synthetic oligonucleotide
  Target: ATXN2; (-) strand; PAM type: NRG; PAM sequence: CAG
gtttttgtcttgttcatatc

SEQ ID NO: 19413 - DNA, 20 bp, Artificial Sequence
  Description of Artificial Sequence: Synthetic oligonucleotide
  Target: ATXN2; (-) strand; PAM type: NRG; PAM sequence: TAG
tttaattacagtttttccct

SEQ ID NO: 19414 - DNA, 20 bp, Artificial Sequence
  Description of Artificial Sequence: Synthetic oligonucleotide
  Target: ATXN2; (-) strand; PAM type: NRG; PAM sequence: CAG
agccctcacagttttaatta

SEQ ID NO: 19415 - DNA, 20 bp, Artificial Sequence
  Description of Artificial Sequence: Synthetic oligonucleotide
  Target: ATXN2; (-) strand; PAM type: NRG; PAM sequence: CAG
gccactgcactcagccctca

SEQ ID NO: 19416 - DNA, 20 bp, Artificial Sequence
  Description of Artificial Sequence: Synthetic oligonucleotide
  Target: ATXN2; (-) strand; PAM type: NRG; PAM sequence: CAG
caggcatgagccactgcact

SEQ ID NO: 19417 - DNA, 20 bp, Artificial Sequence
  Description of Artificial Sequence: Synthetic oligonucleotide
  Target: ATXN2; (-) strand; PAM type: NRG; PAM sequence: GAG
ggtgccaggattacaggcat

SEQ ID NO: 19418 - DNA, 20 bp, Artificial Sequence
  Description of Artificial Sequence: Synthetic oligonucleotide
  Target: ATXN2; (-) strand; PAM type: NRG; PAM sequence: AGG
tcccaaggtgccaggattac

SEQ ID NO: 19419 - DNA, 20 bp, Artificial Sequence
  Description of Artificial Sequence: Synthetic oligonucleotide
  Target: ATXN2; (-) strand; PAM type: NRG; PAM sequence: CAG
ctcccaaggtgccaggatta

SEQ ID NO: 19420 - DNA, 20 bp, Artificial Sequence
  Description of Artificial Sequence: Synthetic oligonucleotide
  Target: ATXN2; (-) strand; PAM type: NRG; PAM sequence: AGG
gccttgactcccaaggtgcc

SEQ ID NO: 19421 - DNA, 20 bp, Artificial Sequence
  Description of Artificial Sequence: Synthetic oligonucleotide
  Target: ATXN2; (-) strand; PAM type: NRG; PAM sequence: CAG
tgccttgactcccaaggtgc

SEQ ID NO: 19422 - DNA, 20 bp, Artificial Sequence
  Description of Artificial Sequence: Synthetic oligonucleotide
  Target: ATXN2; (-) strand; PAM type: NRG; PAM sequence: AGG
tctgcctgccttgactccca

SEQ ID NO: 19423 - DNA, 20 bp, Artificial Sequence
  Description of Artificial Sequence: Synthetic oligonucleotide
  Target: ATXN2; (-) strand; PAM type: NRG; PAM sequence: AAG
gtctgcctgccttgactccc

SEQ ID NO: 19424 - DNA, 20 bp, Artificial Sequence
  Description of Artificial Sequence: Synthetic oligonucleotide
  Target: ATXN2; (-) strand; PAM type: NRG; PAM sequence: CAG
ttcgaattcctgagctcaag

SEQ ID NO: 19425 - DNA, 20 bp, Artificial Sequence
  Description of Artificial Sequence: Synthetic oligonucleotide
  Target: ATXN2; (-) strand; PAM type: NRG; PAM sequence: AAG
ggtttcgaattcctgagctc

SEQ ID NO: 19426 - DNA, 20 bp, Artificial Sequence
  Description of Artificial Sequence: Synthetic oligonucleotide
  Target: ATXN2; (-) strand; PAM type: NRG; PAM sequence: GAG
agacagggtttcgaattcct

SEQ ID NO: 19427 - DNA, 20 bp, Artificial Sequence
  Description of Artificial Sequence: Synthetic oligonucleotide
  Target: ATXN2; (-) strand; PAM type: NRG; PAM sequence: GGG
ttgtattttttgtagagaca

SEQ ID NO: 19428 - DNA, 20 bp, Artificial Sequence
  Description of Artificial Sequence: Synthetic oligonucleotide
  Target: ATXN2; (-) strand; PAM type: NRG; PAM sequence: AGG
tttgtattttttgtagagac

SEQ ID NO: 19429 - DNA, 20 bp, Artificial Sequence
  Description of Artificial Sequence: Synthetic oligonucleotide
  Target: ATXN2; (-) strand; PAM type: NRG; PAM sequence: CAG
ttttgtattttttgtagaga

SEQ ID NO: 19430 - DNA, 20 bp, Artificial Sequence
  Description of Artificial Sequence: Synthetic oligonucleotide
  Target: ATXN2; (-) strand; PAM type: NRG; PAM sequence: GAG
taatttttgtattttttgta

SEQ ID NO: 19431 - DNA, 20 bp, Artificial Sequence
  Description of Artificial Sequence: Synthetic oligonucleotide
  Target: ATXN2; (-) strand; PAM type: NRG; PAM sequence: TAG
gctaatttttgtattttttg

SEQ ID NO: 19432 - DNA, 20 bp, Artificial Sequence
  Description of Artificial Sequence: Synthetic oligonucleotide
  Target: ATXN2; (-) strand; PAM type: NRG; PAM sequence: TGG
aaggtgcgcgccaccatacc

SEQ ID NO: 19433 - DNA, 20 bp, Artificial Sequence
  Description of Artificial Sequence: Synthetic oligonucleotide
  Target: ATXN2; (-) strand; PAM type: NRG; PAM sequence: AGG
tcccaagtagctgggactaa

SEQ ID NO: 19434 - DNA, 20 bp, Artificial Sequence
  Description of Artificial Sequence: Synthetic oligonucleotide
  Target: ATXN2; (-) strand; PAM type: NRG; PAM sequence: AAG
ctcccaagtagctgggacta

SEQ ID NO: 19435 - DNA, 20 bp, Artificial Sequence
  Description of Artificial Sequence: Synthetic oligonucleotide
  Target: ATXN2; (-) strand; PAM type: NRG; PAM sequence: GGG
cctcaacctcccaagtagct

SEQ ID NO: 19436 - DNA, 20 bp, Artificial Sequence
  Description of Artificial Sequence: Synthetic oligonucleotide
  Target: ATXN2; (-) strand; PAM type: NRG; PAM sequence: TGG
acctcaacctcccaagtagc

SEQ ID NO: 19437 - DNA, 20 bp, Artificial Sequence
  Description of Artificial Sequence: Synthetic oligonucleotide
  Target: ATXN2; (-) strand; PAM type: NRG; PAM sequence: TAG
tcccacctcaacctcccaag

SEQ ID NO: 19438 - DNA, 20 bp, Artificial Sequence
  Description of Artificial Sequence: Synthetic oligonucleotide
  Target: ATXN2; (-) strand; PAM type: NRG; PAM sequence: AAG
tcctcccacctcaacctccc

SEQ ID NO: 19439 - DNA, 20 bp, Artificial Sequence
  Description of Artificial Sequence: Synthetic oligonucleotide
  Target: ATXN2; (-) strand; PAM type: NRG; PAM sequence: TGG
ctctaccaattgggcttagg

SEQ ID NO: 19440 - DNA, 20 bp, Artificial Sequence
  Description of Artificial Sequence: Synthetic oligonucleotide
  Target: ATXN2; (-) strand; PAM type: NRG; PAM sequence: AGG
agtctctaccaattgggctt

SEQ ID NO: 19441 - DNA, 20 bp, Artificial Sequence
  Description of Artificial Sequence: Synthetic oligonucleotide
  Target: ATXN2; (-) strand; PAM type: NRG; PAM sequence: TAG
cagtctctaccaattgggct

SEQ ID NO: 19442 - DNA, 20 bp, Artificial Sequence
  Description of Artificial Sequence: Synthetic oligonucleotide
  Target: ATXN2; (-) strand; PAM type: NRG; PAM sequence: GGG
cagtgcagtctctaccaatt

SEQ ID NO: 19443 - DNA, 20 bp, Artificial Sequence
  Description of Artificial Sequence: Synthetic oligonucleotide
  Target: ATXN2; (-) strand; PAM type: NRG; PAM sequence: TGG
tcagtgcagtctctaccaat

SEQ ID NO: 19444 - DNA, 20 bp, Artificial Sequence
  Description of Artificial Sequence: Synthetic oligonucleotide
  Target: ATXN2; (-) strand; PAM type: NRG; PAM sequence: CAG
ggcatgatttcagctcagtg

SEQ ID NO: 19445 - DNA, 20 bp, Artificial Sequence
  Description of Artificial Sequence: Synthetic oligonucleotide
  Target: ATXN2; (-) strand; PAM type: NRG; PAM sequence: CAG
gcagtggcatgatttcagct

SEQ ID NO: 19446 - DNA, 20 bp, Artificial Sequence
  Description of Artificial Sequence: Synthetic oligonucleotide
  Target: ATXN2; (-) strand; PAM type: NRG; PAM sequence: CAG
ggagtgcagtggcatgattt

SEQ ID NO: 19447 - DNA, 20 bp, Artificial Sequence
  Description of Artificial Sequence: Synthetic oligonucleotide
  Target: ATXN2; (-) strand; PAM type: NRG; PAM sequence: TGG
tcacccaagctggagtgcag

SEQ ID NO: 19448 - DNA, 20 bp, Artificial Sequence
  Description of Artificial Sequence: Synthetic oligonucleotide
  Target: ATXN2; (-) strand; PAM type: NRG; PAM sequence: CAG
ctgtcacccaagctggagtg

SEQ ID NO: 19449 - DNA, 20 bp, Artificial Sequence
  Description of Artificial Sequence: Synthetic oligonucleotide
  Target: ATXN2; (-) strand; PAM type: NRG; PAM sequence: GAG
taactctgtcacccaagctg

SEQ ID NO: 19450 - DNA, 20 bp, Artificial Sequence
  Description of Artificial Sequence: Synthetic oligonucleotide
  Target: ATXN2; (-) strand; PAM type: NRG; PAM sequence: TGG
tctaactctgtcacccaagc

SEQ ID NO: 19451 - DNA, 20 bp, Artificial Sequence
  Description of Artificial Sequence: Synthetic oligonucleotide
  Target: ATXN2; (-) strand; PAM type: NRG; PAM sequence: AAG
agtgtctaactctgtcaccc

SEQ ID NO: 19452 - DNA, 20 bp, Artificial Sequence
  Description of Artificial Sequence: Synthetic oligonucleotide
  Target: ATXN2; (-) strand; PAM type: NRG; PAM sequence: CAG
tgtttgtttgttttttgaga

SEQ ID NO: 19453 - DNA, 20 bp, Artificial Sequence
  Description of Artificial Sequence: Synthetic oligonucleotide
  Target: ATXN2; (-) strand; PAM type: NRG; PAM sequence: GAG
tttttgtttgtttgtttttt

SEQ ID NO: 19454 - DNA, 20 bp, Artificial Sequence
  Description of Artificial Sequence: Synthetic oligonucleotide
  Target: ATXN2; (-) strand; PAM type: NRG; PAM sequence: AGG
atcacacccagccaagtcat

SEQ ID NO: 19455 - DNA, 20 bp, Artificial Sequence
  Description of Artificial Sequence: Synthetic oligonucleotide
  Target: ATXN2; (-) strand; PAM type: NRG; PAM sequence: TAG
catcacacccagccaagtca

SEQ ID NO: 19456 - DNA, 20 bp, Artificial Sequence
  Description of Artificial Sequence: Synthetic oligonucleotide
  Target: ATXN2; (-) strand; PAM type: NRG; PAM sequence: AAG
atgagccatcacacccagcc

SEQ ID NO: 19457 - DNA, 20 bp, Artificial Sequence
  Description of Artificial Sequence: Synthetic oligonucleotide
  Target: ATXN2; (-) strand; PAM type: NRG; PAM sequence: CAG
gctggatgagccatcacacc

SEQ ID NO: 19458 - DNA, 20 bp, Artificial Sequence
  Description of Artificial Sequence: Synthetic oligonucleotide
  Target: ATXN2; (-) strand; PAM type: NRG; PAM sequence: GAG
cactttaggaggtgctggat

SEQ ID NO: 19459 - DNA, 20 bp, Artificial Sequence
  Description of Artificial Sequence: Synthetic oligonucleotide
  Target: ATXN2; (-) strand; PAM type: NRG; PAM sequence: TGG
gccagcactttaggaggtgc

SEQ ID NO: 19460 - DNA, 20 bp, Artificial Sequence
  Description of Artificial Sequence: Synthetic oligonucleotide
  Target: ATXN2; (-) strand; PAM type: NRG; PAM sequence: AGG
ttacaggccagcactttagg

SEQ ID NO: 19461 - DNA, 20 bp, Artificial Sequence
  Description of Artificial Sequence: Synthetic oligonucleotide
  Target: ATXN2; (-) strand; PAM type: NRG; PAM sequence: GAG
attacaggccagcactttag

SEQ ID NO: 19462 - DNA, 20 bp, Artificial Sequence
  Description of Artificial Sequence: Synthetic oligonucleotide
  Target: ATXN2; (-) strand; PAM type: NRG; PAM sequence: AGG
ggattacaggccagcacttt

SEQ ID NO: 19463 - DNA, 20 bp, Artificial Sequence
  Description of Artificial Sequence: Synthetic oligonucleotide
  Target: ATXN2; (-) strand; PAM type: NRG; PAM sequence: TAG
aggattacaggccagcactt

SEQ ID NO: 19464 - DNA, 20 bp, Artificial Sequence
  Description of Artificial Sequence: Synthetic oligonucleotide
  Target: ATXN2; (-) strand; PAM type: NRG; PAM sequence: CAG
aaagtgctaggattacaggc

SEQ ID NO: 19465 - DNA, 20 bp, Artificial Sequence
  Description of Artificial Sequence: Synthetic oligonucleotide
  Target: ATXN2; (-) strand; PAM type: NRG; PAM sequence: AGG
tcctaaagtgctaggattac

SEQ ID NO: 19466 - DNA, 20 bp, Artificial Sequence
  Description of Artificial Sequence: Synthetic oligonucleotide
  Target: ATXN2; (-) strand; PAM type: NRG; PAM sequence: CAG
ctcctaaagtgctaggatta

SEQ ID NO: 19467 - DNA, 20 bp, Artificial Sequence
  Description of Artificial Sequence: Synthetic oligonucleotide
  Target: ATXN2; (-) strand; PAM type: NRG; PAM sequence: AGG
cctcagcctcctaaagtgct

SEQ ID NO: 19468 - DNA, 20 bp, Artificial Sequence
  Description of Artificial Sequence: Synthetic oligonucleotide
  Target: ATXN2; (-) strand; PAM type: NRG; PAM sequence: TAG
acctcagcctcctaaagtgc

SEQ ID NO: 19469 - DNA, 20 bp, Artificial Sequence
  Description of Artificial Sequence: Synthetic oligonucleotide
  Target: ATXN2; (-) strand; PAM type: NRG; PAM sequence: AAG
ctttctacctcagcctccta

SEQ ID NO: 19470 - DNA, 20 bp, Artificial Sequence
  Description of Artificial Sequence: Synthetic oligonucleotide
  Target: ATXN2; (-) strand; PAM type: NRG; PAM sequence: CAG
cttaagttatctttctacct

SEQ ID NO: 19471 - DNA, 20 bp, Artificial Sequence
  Description of Artificial Sequence: Synthetic oligonucleotide
  Target: ATXN2; (-) strand; PAM type: NRG; PAM sequence: AAG
agtcctaaattccagggctt

SEQ ID NO: 19472 - DNA, 20 bp, Artificial Sequence
  Description of Artificial Sequence: Synthetic oligonucleotide
  Target: ATXN2; (-) strand; PAM type: NRG; PAM sequence: GGG
caggctagtcctaaattcca

SEQ ID NO: 19473 - DNA, 20 bp, Artificial Sequence
  Description of Artificial Sequence: Synthetic oligonucleotide
  Target: ATXN2; (-) strand; PAM type: NRG; PAM sequence: AGG
ccaggctagtcctaaattcc

SEQ ID NO: 19474 - DNA, 20 bp, Artificial Sequence
  Description of Artificial Sequence: Synthetic oligonucleotide
  Target: ATXN2; (-) strand; PAM type: NRG; PAM sequence: CAG
cccaggctagtcctaaattc

SEQ ID NO: 19475 - DNA, 20 bp, Artificial Sequence
  Description of Artificial Sequence: Synthetic oligonucleotide
  Target: ATXN2; (-) strand; PAM type: NRG; PAM sequence: TAG
tctttctatcttgcccaggc

SEQ ID NO: 19476 - DNA, 20 bp, Artificial Sequence
  Description of Artificial Sequence: Synthetic oligonucleotide
  Target: ATXN2; (-) strand; PAM type: NRG; PAM sequence: AGG
accatctttctatcttgccc

SEQ ID NO: 19477 - DNA, 20 bp, Artificial Sequence
  Description of Artificial Sequence: Synthetic oligonucleotide
  Target: ATXN2; (-) strand; PAM type: NRG; PAM sequence: CAG
caccatctttctatcttgcc

SEQ ID NO: 19478 - DNA, 20 bp, Artificial Sequence
  Description of Artificial Sequence: Synthetic oligonucleotide
  Target: ATXN2; (-) strand; PAM type: NRG; PAM sequence: GAG
ttttgtttttttttgagaca

SEQ ID NO: 19479 - DNA, 20 bp, Artificial Sequence
  Description of Artificial Sequence: Synthetic oligonucleotide
  Target: ATXN2; (-) strand; PAM type: NRG; PAM sequence: CAG
ttttttgtttttttttgaga

SEQ ID NO: 19480 - DNA, 20 bp, Artificial Sequence
  Description of Artificial Sequence: Synthetic oligonucleotide
  Target: ATXN2; (-) strand; PAM type: NRG; PAM sequence: GAG
tttgttttttgttttttttt

SEQ ID NO: 19481 - DNA, 20 bp, Artificial Sequence
  Description of Artificial Sequence: Synthetic oligonucleotide
  Target: ATXN2; (-) strand; PAM type: NRG; PAM sequence: CAG
acaggcacatgccaccttgc

SEQ ID NO: 19482 - DNA, 20 bp, Artificial Sequence
  Description of Artificial Sequence: Synthetic oligonucleotide
  Target: ATXN2; (-) strand; PAM type: NRG; PAM sequence: AGG
tctcaagtaactgtgactac

SEQ ID NO: 19483 - DNA, 20 bp, Artificial Sequence
  Description of Artificial Sequence: Synthetic oligonucleotide
  Target: ATXN2; (-) strand; PAM type: NRG; PAM sequence: CAG
ctctcaagtaactgtgacta

SEQ ID NO: 19484 - DNA, 20 bp, Artificial Sequence
  Description of Artificial Sequence: Synthetic oligonucleotide
  Target: ATXN2; (-) strand; PAM type: NRG; PAM sequence: AAG
tcctccctcctcagcctctc

SEQ ID NO: 19485 - DNA, 20 bp, Artificial Sequence
  Description of Artificial Sequence: Synthetic oligonucleotide
  Target: ATXN2; (-) strand; PAM type: NRG; PAM sequence: CAG
ctcaaaggatcctccctcct

SEQ ID NO: 19486 - DNA, 20 bp, Artificial Sequence
  Description of Artificial Sequence: Synthetic oligonucleotide
  Target: ATXN2; (-) strand; PAM type: NRG; PAM sequence: AGG
ctgcgaattcctggtctcaa

SEQ ID NO: 19487 - DNA, 20 bp, Artificial Sequence
  Description of Artificial Sequence: Synthetic oligonucleotide
  Target: ATXN2; (-) strand; PAM type: NRG; PAM sequence: AAG
gctgcgaattcctggtctca

SEQ ID NO: 19488 - DNA, 20 bp, Artificial Sequence
  Description of Artificial Sequence: Synthetic oligonucleotide
  Target: ATXN2; (-) strand; PAM type: NRG; PAM sequence: TGG
tcactgctgctgcgaattcc

SEQ ID NO: 19489 - DNA, 20 bp, Artificial Sequence
  Description of Artificial Sequence: Synthetic oligonucleotide
  Target: ATXN2; (-) strand; PAM type: NRG; PAM sequence: TAG
ggagtgcagtagtgcaatca

SEQ ID NO: 19490 - DNA, 20 bp, Artificial Sequence
  Description of Artificial Sequence: Synthetic oligonucleotide
  Target: ATXN2; (-) strand; PAM type: NRG; PAM sequence: TAG
tgcccaggcttggagtgcag

SEQ ID NO: 19491 - DNA, 20 bp, Artificial Sequence
  Description of Artificial Sequence: Synthetic oligonucleotide
  Target: ATXN2; (-) strand; PAM type: NRG; PAM sequence: CAG
tgttgcccaggcttggagtg

SEQ ID NO: 19492 - DNA, 20 bp, Artificial Sequence
  Description of Artificial Sequence: Synthetic oligonucleotide
  Target: ATXN2; (-) strand; PAM type: NRG; PAM sequence: GAG
ggctttgttgcccaggcttg

SEQ ID NO: 19493 - DNA, 20 bp, Artificial Sequence
  Description of Artificial Sequence: Synthetic oligonucleotide
  Target: ATXN2; (-) strand; PAM type: NRG; PAM sequence: TGG
ctggctttgttgcccaggct

SEQ ID NO: 19494 - DNA, 20 bp, Artificial Sequence
  Description of Artificial Sequence: Synthetic oligonucleotide
  Target: ATXN2; (-) strand; PAM type: NRG; PAM sequence: AGG
ggggtctggctttgttgccc

SEQ ID NO: 19495 - DNA, 20 bp, Artificial Sequence
  Description of Artificial Sequence: Synthetic oligonucleotide
  Target: ATXN2; (-) strand; PAM type: NRG; PAM sequence: CAG
tggggtctggctttgttgcc

SEQ ID NO: 19496 - DNA, 20 bp, Artificial Sequence
  Description of Artificial Sequence: Synthetic oligonucleotide
  Target: ATXN2; (-) strand; PAM type: NRG; PAM sequence: TGG
tttgtttttgagatggggtc

SEQ ID NO: 19497 - DNA, 20 bp, Artificial Sequence
  Description of Artificial Sequence: Synthetic oligonucleotide
  Target: ATXN2; (-) strand; PAM type: NRG; PAM sequence: GGG
tgttttttgtttttgagatg

SEQ ID NO: 19498 - DNA, 20 bp, Artificial Sequence
  Description of Artificial Sequence: Synthetic oligonucleotide
  Target: ATXN2; (-) strand; PAM type: NRG; PAM sequence: GGG
ttgttttttgtttttgagat

SEQ ID NO: 19499 - DNA, 20 bp, Artificial Sequence
  Description of Artificial Sequence: Synthetic oligonucleotide
  Target: ATXN2; (-) strand; PAM type: NRG; PAM sequence: TGG
tttgttttttgtttttgaga

SEQ ID NO: 19500 - DNA, 20 bp, Artificial Sequence
  Description of Artificial Sequence: Synthetic oligonucleotide
  Target: ATXN2; (-) strand; PAM type: NRG; PAM sequence: GAG
tggttttgttttttgttttt

SEQ ID NO: 19501 - DNA, 20 bp, Artificial Sequence
  Description of Artificial Sequence: Synthetic oligonucleotide
  Target: ATXN2; (-) strand; PAM type: NRG; PAM sequence: TGG
gtgtatctttaagttggttt

SEQ ID NO: 19502 - DNA, 20 bp, Artificial Sequence
  Description of Artificial Sequence: Synthetic oligonucleotide
  Target: ATXN2; (-) strand; PAM type: NRG; PAM sequence: TGG
tttagtgtgtatctttaagt

SEQ ID NO: 19503 - DNA, 20 bp, Artificial Sequence
  Description of Artificial Sequence: Synthetic oligonucleotide
  Target: ATXN2; (-) strand; PAM type: NRG; PAM sequence: AAG
acattttagtgtgtatcttt

SEQ ID NO: 19504 - DNA, 20 bp, Artificial Sequence
  Description of Artificial Sequence: Synthetic oligonucleotide
  Target: ATXN2; (-) strand; PAM type: NRG; PAM sequence: TAG
cagtttatccaccaacattt

SEQ ID NO: 19505 - DNA, 20 bp, Artificial Sequence
  Description of Artificial Sequence: Synthetic oligonucleotide
  Target: ATXN2; (-) strand; PAM type: NRG; PAM sequence: CAG
gcaaattctagacattgcat

SEQ ID NO: 19506 - DNA, 20 bp, Artificial Sequence
  Description of Artificial Sequence: Synthetic oligonucleotide
  Target: ATXN2; (-) strand; PAM type: NRG; PAM sequence: TAG
gattattctgaagcaaattc

SEQ ID NO: 19507 - DNA, 20 bp, Artificial Sequence
  Description of Artificial Sequence: Synthetic oligonucleotide
  Target: ATXN2; (-) strand; PAM type: NRG; PAM sequence: AAG
gagtccactggattattctg

SEQ ID NO: 19508 - DNA, 20 bp, Artificial Sequence
  Description of Artificial Sequence: Synthetic oligonucleotide
  Target: ATXN2; (-) strand; PAM type: NRG; PAM sequence: TGG
cttaaaagctttgagtccac

SEQ ID NO: 19509 - DNA, 20 bp, Artificial Sequence
  Description of Artificial Sequence: Synthetic oligonucleotide
  Target: ATXN2; (-) strand; PAM type: NRG; PAM sequence: GAG
cattgtctcttaaaagcttt

SEQ ID NO: 19510 - DNA, 20 bp, Artificial Sequence
  Description of Artificial Sequence: Synthetic oligonucleotide
  Target: ATXN2; (-) strand; PAM type: NRG; PAM sequence: AAG
ccctacccattgtctcttaa

SEQ ID NO: 19511 - DNA, 20 bp, Artificial Sequence
  Description of Artificial Sequence: Synthetic oligonucleotide
  Target: ATXN2; (-) strand; PAM type: NRG; PAM sequence: CAG
gagacattaataacctaggc

SEQ ID NO: 19512 - DNA, 20 bp, Artificial Sequence
  Description of Artificial Sequence: Synthetic oligonucleotide
  Target: ATXN2; (-) strand; PAM type: NRG; PAM sequence: AGG
tattgagacattaataacct

SEQ ID NO: 19513 - DNA, 20 bp, Artificial Sequence
  Description of Artificial Sequence: Synthetic oligonucleotide
  Target: ATXN2; (-) strand; PAM type: NRG; PAM sequence: TAG
gtattgagacattaataacc

SEQ ID NO: 19514 - DNA, 20 bp, Artificial Sequence
  Description of Artificial Sequence: Synthetic oligonucleotide
  Target: ATXN2; (-) strand; PAM type: NRG; PAM sequence: GAG
ctttttattacgaatgtatt

SEQ ID NO: 19515 - DNA, 20 bp, Artificial Sequence
  Description of Artificial Sequence: Synthetic oligonucleotide
  Target: ATXN2; (-) strand; PAM type: NRG; PAM sequence: CGG
agccatcgctctcagccttg

SEQ ID NO: 19516 - DNA, 20 bp, Artificial Sequence
  Description of Artificial Sequence: Synthetic oligonucleotide
  Target: ATXN2; (-) strand; PAM type: NRG; PAM sequence: CAG
caggtgtgagccatcgctct

SEQ ID NO: 19517 - DNA, 20 bp, Artificial Sequence
  Description of Artificial Sequence: Synthetic oligonucleotide
  Target: ATXN2; (-) strand; PAM type: NRG; PAM sequence: GAG
agtgctgggattacaggtgt

SEQ ID NO: 19518 - DNA, 20 bp, Artificial Sequence
  Description of Artificial Sequence: Synthetic oligonucleotide
  Target: ATXN2; (-) strand; PAM type: NRG; PAM sequence: AGG
tcccaaagtgctgggattac

SEQ ID NO: 19519 - DNA, 20 bp, Artificial Sequence
  Description of Artificial Sequence: Synthetic oligonucleotide
  Target: ATXN2; (-) strand; PAM type: NRG; PAM sequence: CAG
ctcccaaagtgctgggatta

SEQ ID NO: 19520 - DNA, 20 bp, Artificial Sequence
  Description of Artificial Sequence: Synthetic oligonucleotide
  Target: ATXN2; (-) strand; PAM type: NRG; PAM sequence: GGG
cctcggcctcccaaagtgct

SEQ ID NO: 19521 - DNA, 20 bp, Artificial Sequence
  Description of Artificial Sequence: Synthetic oligonucleotide
  Target: ATXN2; (-) strand; PAM type: NRG; PAM sequence: TGG
gcctcggcctcccaaagtgc

SEQ ID NO: 19522 - DNA, 20 bp, Artificial Sequence
  Description of Artificial Sequence: Synthetic oligonucleotide
  Target: ATXN2; (-) strand; PAM type: NRG; PAM sequence: AAG
ccacccgcctcggcctccca

SEQ ID NO: 19523 - DNA, 20 bp, Artificial Sequence
  Description of Artificial Sequence: Synthetic oligonucleotide
  Target: ATXN2; (-) strand; PAM type: NRG; PAM sequence: CGG
ctcaaatgatccacccgcct

SEQ ID NO: 19524 - DNA, 20 bp, Artificial Sequence
  Description of Artificial Sequence: Synthetic oligonucleotide
  Target: ATXN2; (-) strand; PAM type: NRG; PAM sequence: CGG
tttcaccatgttggccagcc

SEQ ID NO: 19525 - DNA, 20 bp, Artificial Sequence
  Description of Artificial Sequence: Synthetic oligonucleotide
  Target: ATXN2; (-) strand; PAM type: NRG; PAM sequence: CAG
tggggtttcaccatgttggc

SEQ ID NO: 19526 - DNA, 20 bp, Artificial Sequence
  Description of Artificial Sequence: Synthetic oligonucleotide
  Target: ATXN2; (-) strand; PAM type: NRG; PAM sequence: TGG
gagatggggtttcaccatgt

SEQ ID NO: 19527 - DNA, 20 bp, Artificial Sequence
  Description of Artificial Sequence: Synthetic oligonucleotide
  Target: ATXN2; (-) strand; PAM type: NRG; PAM sequence: GGG
ttgtatttttaatagagatg

SEQ ID NO: 19528 - DNA, 20 bp, Artificial Sequence
  Description of Artificial Sequence: Synthetic oligonucleotide
  Target: ATXN2; (-) strand; PAM type: NRG; PAM sequence: GGG
cttgtatttttaatagagat

SEQ ID NO: 19529 - DNA, 20 bp, Artificial Sequence
  Description of Artificial Sequence: Synthetic oligonucleotide
  Target: ATXN2; (-) strand; PAM type: NRG; PAM sequence: TGG
ccttgtatttttaatagaga

SEQ ID NO: 19530 - DNA, 20 bp, Artificial Sequence
  Description of Artificial Sequence: Synthetic oligonucleotide
  Target: ATXN2; (-) strand; PAM type: NRG; PAM sequence: GAG
ccggccttgtatttttaata

SEQ ID NO: 19531 - DNA, 20 bp, Artificial Sequence
  Description of Artificial Sequence: Synthetic oligonucleotide
  Target: ATXN2; (-) strand; PAM type: NRG; PAM sequence: TAG
gcccggccttgtatttttaa

SEQ ID NO: 19532 - DNA, 20 bp, Artificial Sequence
  Description of Artificial Sequence: Synthetic oligonucleotide
  Target: ATXN2; (-) strand; PAM type: NRG; PAM sequence: CGG
caggtgtgagccactgcgcc

SEQ ID NO: 19533 - DNA, 20 bp, Artificial Sequence
  Description of Artificial Sequence: Synthetic oligonucleotide
  Target: ATXN2; (-) strand; PAM type: NRG; PAM sequence: GAG
agtgctgggattacaggtgt

SEQ ID NO: 19534 - DNA, 20 bp, Artificial Sequence
  Description of Artificial Sequence: Synthetic oligonucleotide
  Target: ATXN2; (-) strand; PAM type: NRG; PAM sequence: AGG
tcccaaagtgctgggattac

SEQ ID NO: 19535 - DNA, 20 bp, Artificial Sequence
  Description of Artificial Sequence: Synthetic oligonucleotide
  Target: ATXN2; (-) strand; PAM type: NRG; PAM sequence: CAG
ctcccaaagtgctgggatta

SEQ ID NO: 19536 - DNA, 20 bp, Artificial Sequence
  Description of Artificial Sequence: Synthetic oligonucleotide
  Target: ATXN2; (-) strand; PAM type: NRG; PAM sequence: GGG
cctcggcctcccaaagtgct

SEQ ID NO: 19537 - DNA, 20 bp, Artificial Sequence
  Description of Artificial Sequence: Synthetic oligonucleotide
  Target: ATXN2; (-) strand; PAM type: NRG; PAM sequence: TGG
gcctcggcctcccaaagtgc

SEQ ID NO: 19538 - DNA, 20 bp, Artificial Sequence
  Description of Artificial Sequence: Synthetic oligonucleotide
  Target: ATXN2; (-) strand; PAM type: NRG; PAM sequence: AAG
ccgcccgcctcggcctccca

SEQ ID NO: 19539 - DNA, 20 bp, Artificial Sequence
  Description of Artificial Sequence: Synthetic oligonucleotide
  Target: ATXN2; (-) strand; PAM type: NRG; PAM sequence: CGG
acctcgtgatccgcccgcct

SEQ ID NO: 19540 - DNA, 20 bp, Artificial Sequence
  Description of Artificial Sequence: Synthetic oligonucleotide
  Target: ATXN2; (-) strand; PAM type: NRG; PAM sequence: TGG
tttcaccgtgttagccagga

SEQ ID NO: 19541 - DNA, 20 bp, Artificial Sequence
  Description of Artificial Sequence: Synthetic oligonucleotide
  Target: ATXN2; (-) strand; PAM type: NRG; PAM sequence: AGG
agggtttcaccgtgttagcc

SEQ ID NO: 19542 - DNA, 20 bp, Artificial Sequence
  Description of Artificial Sequence: Synthetic oligonucleotide
  Target: ATXN2; (-) strand; PAM type: NRG; PAM sequence: CAG
cagggtttcaccgtgttagc

SEQ ID NO: 19543 - DNA, 20 bp, Artificial Sequence
  Description of Artificial Sequence: Synthetic oligonucleotide
  Target: ATXN2; (-) strand; PAM type: NRG; PAM sequence: TAG
gagacagggtttcaccgtgt

SEQ ID NO: 19544 - DNA, 20 bp, Artificial Sequence
  Description of Artificial Sequence: Synthetic oligonucleotide
  Target: ATXN2; (-) strand; PAM type: NRG; PAM sequence: GGG
ttgtatttttagtagagaca

SEQ ID NO: 19545 - DNA, 20 bp, Artificial Sequence
  Description of Artificial Sequence: Synthetic oligonucleotide
  Target: ATXN2; (-) strand; PAM type: NRG; PAM sequence: AGG
tttgtatttttagtagagac

SEQ ID NO: 19546 - DNA, 20 bp, Artificial Sequence
  Description of Artificial Sequence: Synthetic oligonucleotide
  Target: ATXN2; (-) strand; PAM type: NRG; PAM sequence: CAG
ttttgtatttttagtagaga

SEQ ID NO: 19547 - DNA, 20 bp, Artificial Sequence
  Description of Artificial Sequence: Synthetic oligonucleotide
  Target: ATXN2; (-) strand; PAM type: NRG; PAM sequence: GAG
atttttttgtatttttagta

SEQ ID NO: 19548 - DNA, 20 bp, Artificial Sequence
  Description of Artificial Sequence: Synthetic oligonucleotide
  Target: ATXN2; (-) strand; PAM type: NRG; PAM sequence: TAG
taatttttttgtatttttag

SEQ ID NO: 19549 - DNA, 20 bp, Artificial Sequence
  Description of Artificial Sequence: Synthetic oligonucleotide
  Target: ATXN2; (-) strand; PAM type: NRG; PAM sequence: TAG
ggctaatttttttgtatttt

SEQ ID NO: 19550 - DNA, 20 bp, Artificial Sequence
  Description of Artificial Sequence: Synthetic oligonucleotide
  Target: ATXN2; (-) strand; PAM type: NRG; PAM sequence: CGG
cattcgcccgccaccacacc

SEQ ID NO: 19551 - DNA, 20 bp, Artificial Sequence
  Description of Artificial Sequence: Synthetic oligonucleotide
  Target: ATXN2; (-) strand; PAM type: NRG; PAM sequence: GGG
cctcagcctcctgagtagct

SEQ ID NO: 19552 - DNA, 20 bp, Artificial Sequence
  Description of Artificial Sequence: Synthetic oligonucleotide
  Target: ATXN2; (-) strand; PAM type: NRG; PAM sequence: TGG
gcctcagcctcctgagtagc

SEQ ID NO: 19553 - DNA, 20 bp, Artificial Sequence
  Description of Artificial Sequence: Synthetic oligonucleotide
  Target: ATXN2; (-) strand; PAM type: NRG; PAM sequence: TAG
tcctgcctcagcctcctgag

SEQ ID NO: 19554 - DNA, 20 bp, Artificial Sequence
  Description of Artificial Sequence: Synthetic oligonucleotide
  Target: ATXN2; (-) strand; PAM type: NRG; PAM sequence: GAG
ttctcctgcctcagcctcct

SEQ ID NO: 19555 - DNA, 20 bp, Artificial Sequence
  Description of Artificial Sequence: Synthetic oligonucleotide
  Target: ATXN2; (-) strand; PAM type: NRG; PAM sequence: CAG
ttcatgccattctcctgcct

SEQ ID NO: 19556 - DNA, 20 bp, Artificial Sequence
  Description of Artificial Sequence: Synthetic oligonucleotide
  Target: ATXN2; (-) strand; PAM type: NRG; PAM sequence: GGG
cactgcaagctccgcctctt

SEQ ID NO: 19557 - DNA, 20 bp, Artificial Sequence
  Description of Artificial Sequence: Synthetic oligonucleotide
  Target: ATXN2; (-) strand; PAM type: NRG; PAM sequence: TGG
tcactgcaagctccgcctct

SEQ ID NO: 19558 - DNA, 20 bp, Artificial Sequence
  Description of Artificial Sequence: Synthetic oligonucleotide
  Target: ATXN2; (-) strand; PAM type: NRG; PAM sequence: AAG
atgcgatctcggctcactgc

SEQ ID NO: 19559 - DNA, 20 bp, Artificial Sequence
  Description of Artificial Sequence: Synthetic oligonucleotide
  Target: ATXN2; (-) strand; PAM type: NRG; PAM sequence: CGG
ggagtgcagtgatgcgatct

SEQ ID NO: 19560 - DNA, 20 bp, Artificial Sequence
  Description of Artificial Sequence: Synthetic oligonucleotide
  Target: ATXN2; (-) strand; PAM type: NRG; PAM sequence: CAG
ctgttgcccaggctggagtg

SEQ ID NO: 19561 - DNA, 20 bp, Artificial Sequence
  Description of Artificial Sequence: Synthetic oligonucleotide
  Target: ATXN2; (-) strand; PAM type: NRG; PAM sequence: GAG
tcgctctgttgcccaggctg

SEQ ID NO: 19562 - DNA, 20 bp, Artificial Sequence
  Description of Artificial Sequence: Synthetic oligonucleotide
  Target: ATXN2; (-) strand; PAM type: NRG; PAM sequence: TGG
tctcgctctgttgcccaggc

SEQ ID NO: 19563 - DNA, 20 bp, Artificial Sequence
  Description of Artificial Sequence: Synthetic oligonucleotide
  Target: ATXN2; (-) strand; PAM type: NRG; PAM sequence: AGG
agagtctcgctctgttgccc

SEQ ID NO: 19564 - DNA, 20 bp, Artificial Sequence
  Description of Artificial Sequence: Synthetic oligonucleotide
  Target: ATXN2; (-) strand; PAM type: NRG; PAM sequence: CAG
cagagtctcgctctgttgcc

SEQ ID NO: 19565 - DNA, 20 bp, Artificial Sequence
  Description of Artificial Sequence: Synthetic oligonucleotide
  Target: ATXN2; (-) strand; PAM type: NRG; PAM sequence: GAG
agccttttttttttgagaca

SEQ ID NO: 19566 - DNA, 20 bp, Artificial Sequence
  Description of Artificial Sequence: Synthetic oligonucleotide
  Target: ATXN2; (-) strand; PAM type: NRG; PAM sequence: CAG
ccagccttttttttttgaga

SEQ ID NO: 19567 - DNA, 20 bp, Artificial Sequence
  Description of Artificial Sequence: Synthetic oligonucleotide
  Target: ATXN2; (-) strand; PAM type: NRG; PAM sequence: GAG
tagcccagcctttttttttt

SEQ ID NO: 19568 - DNA, 20 bp, Artificial Sequence
  Description of Artificial Sequence: Synthetic oligonucleotide
  Target: ATXN2; (-) strand; PAM type: NRG; PAM sequence: CAG
cctcagcctcccaagtagcc

SEQ ID NO: 19569 - DNA, 20 bp, Artificial Sequence
  Description of Artificial Sequence: Synthetic oligonucleotide
  Target: ATXN2; (-) strand; PAM type: NRG; PAM sequence: TAG
tcctgcctcagcctcccaag

SEQ ID NO: 19570 - DNA, 20 bp, Artificial Sequence
  Description of Artificial Sequence: Synthetic oligonucleotide
  Target: ATXN2; (-) strand; PAM type: NRG; PAM sequence: AAG
ttctcctgcctcagcctccc

SEQ ID NO: 19571 - DNA, 20 bp, Artificial Sequence
  Description of Artificial Sequence: Synthetic oligonucleotide
  Target: ATXN2; (-) strand; PAM type: NRG; PAM sequence: CAG
ttcaagcaattctcctgcct

SEQ ID NO: 19572 - DNA, 20 bp, Artificial Sequence
  Description of Artificial Sequence: Synthetic oligonucleotide
  Target: ATXN2; (-) strand; PAM type: NRG; PAM sequence: AAG
aacctccccctctggggttc

SEQ ID NO: 19573 - DNA, 20 bp, Artificial Sequence
  Description of Artificial Sequence: Synthetic oligonucleotide
  Target: ATXN2; (-) strand; PAM type: NRG; PAM sequence: GGG
cactgcaacctccccctctg

SEQ ID NO: 19574 - DNA, 20 bp, Artificial Sequence
  Description of Artificial Sequence: Synthetic oligonucleotide
  Target: ATXN2; (-) strand; PAM type: NRG; PAM sequence: GGG
tcactgcaacctccccctct

SEQ ID NO: 19575 - DNA, 20 bp, Artificial Sequence
  Description of Artificial Sequence: Synthetic oligonucleotide
  Target: ATXN2; (-) strand; PAM type: NRG; PAM sequence: TGG
ctcactgcaacctccccctc

SEQ ID NO: 19576 - DNA, 20 bp, Artificial Sequence
  Description of Artificial Sequence: Synthetic oligonucleotide
  Target: ATXN2; (-) strand; PAM type: NRG; PAM sequence: TGG
tcacctaggctggagtacag

SEQ ID NO: 19577 - DNA, 20 bp, Artificial Sequence
  Description of Artificial Sequence: Synthetic oligonucleotide
  Target: ATXN2; (-) strand; PAM type: NRG; PAM sequence: CAG
ctgtcacctaggctggagta

SEQ ID NO: 19578 - DNA, 20 bp, Artificial Sequence
  Description of Artificial Sequence: Synthetic oligonucleotide
  Target: ATXN2; (-) strand; PAM type: NRG; PAM sequence: GAG
tggctctgtcacctaggctg

SEQ ID NO: 19579 - DNA, 20 bp, Artificial Sequence
  Description of Artificial Sequence: Synthetic oligonucleotide
  Target: ATXN2; (-) strand; PAM type: NRG; PAM sequence: TGG
cttggctctgtcacctaggc

SEQ ID NO: 19580 - DNA, 20 bp, Artificial Sequence
  Description of Artificial Sequence: Synthetic oligonucleotide
  Target: ATXN2; (-) strand; PAM type: NRG; PAM sequence: AGG
gaatcttggctctgtcacct

SEQ ID NO: 19581 - DNA, 20 bp, Artificial Sequence
  Description of Artificial Sequence: Synthetic oligonucleotide
  Target: ATXN2; (-) strand; PAM type: NRG; PAM sequence: TAG
ggaatcttggctctgtcacc

SEQ ID NO: 19582 - DNA, 20 bp, Artificial Sequence
  Description of Artificial Sequence: Synthetic oligonucleotide
  Target: ATXN2; (-) strand; PAM type: NRG; PAM sequence: TGG
ttttttttgagatggaatct

SEQ ID NO: 19583 - DNA, 20 bp, Artificial Sequence
  Description of Artificial Sequence: Synthetic oligonucleotide
  Target: ATXN2; (-) strand; PAM type: NRG; PAM sequence: TGG
ttttttttttttttttgaga

SEQ ID NO: 19584 - DNA, 20 bp, Artificial Sequence
  Description of Artificial Sequence: Synthetic oligonucleotide
  Target: ATXN2; (-) strand; PAM type: NRG; PAM sequence: GAG
aacttttttttttttttttt

SEQ ID NO: 19585 - DNA, 20 bp, Artificial Sequence
  Description of Artificial Sequence: Synthetic oligonucleotide
  Target: ATXN2; (-) strand; PAM type: NRG; PAM sequence: TGG
tttttaattgtttcatattg

SEQ ID NO: 19586 - DNA, 20 bp, Artificial Sequence
  Description of Artificial Sequence: Synthetic oligonucleotide
  Target: ATXN2; (-) strand; PAM type: NRG; PAM sequence: AAG
ttggatttgtttatatgttg

SEQ ID NO: 19587 - DNA, 20 bp, Artificial Sequence
  Description of Artificial Sequence: Synthetic oligonucleotide
  Target: ATXN2; (-) strand; PAM type: NRG; PAM sequence: TGG
tccaagtcaggcttgcaatt

SEQ ID NO: 19588 - DNA, 20 bp, Artificial Sequence
  Description of Artificial Sequence: Synthetic oligonucleotide
  Target: ATXN2; (-) strand; PAM type: NRG; PAM sequence: AGG
ttccaattagggtccaagtc

SEQ ID NO: 19589 - DNA, 20 bp, Artificial Sequence
  Description of Artificial Sequence: Synthetic oligonucleotide
  Target: ATXN2; (-) strand; PAM type: NRG; PAM sequence: CAG
gttccaattagggtccaagt

SEQ ID NO: 19590 - DNA, 20 bp, Artificial Sequence
  Description of Artificial Sequence: Synthetic oligonucleotide
  Target: ATXN2; (-) strand; PAM type: NRG; PAM sequence: AAG
atttgttccaattagggtcc

SEQ ID NO: 19591 - DNA, 20 bp, Artificial Sequence
  Description of Artificial Sequence: Synthetic oligonucleotide
  Target: ATXN2; (-) strand; PAM type: NRG; PAM sequence: GGG
acaataatttgttccaatta

SEQ ID NO: 19592 - DNA, 20 bp, Artificial Sequence
  Description of Artificial Sequence: Synthetic oligonucleotide
  Target: ATXN2; (-) strand; PAM type: NRG; PAM sequence: AGG
tacaataatttgttccaatt

SEQ ID NO: 19593 - DNA, 20 bp, Artificial Sequence
  Description of Artificial Sequence: Synthetic oligonucleotide
  Target: ATXN2; (-) strand; PAM type: NRG; PAM sequence: TAG
ttacaataatttgttccaat

SEQ ID NO: 19594 - DNA, 20 bp, Artificial Sequence
  Description of Artificial Sequence: Synthetic oligonucleotide
  Target: ATXN2; (-) strand; PAM type: NRG; PAM sequence: AAG
aaaaaaaaaaagaaacagaa

SEQ ID NO: 19595 - DNA, 20 bp, Artificial Sequence
  Description of Artificial Sequence: Synthetic oligonucleotide
  Target: ATXN2; (-) strand; PAM type: NRG; PAM sequence: CAG
aaaaaaaaaaaaaaaagaaa

SEQ ID NO: 19596 - DNA, 20 bp, Artificial Sequence
  Description of Artificial Sequence: Synthetic oligonucleotide
  Target: ATXN2; (-) strand; PAM type: NRG; PAM sequence: AAG
ttaaaaaaaaaaaaaaaaaa

SEQ ID NO: 19597 - DNA, 20 bp, Artificial Sequence
  Description of Artificial Sequence: Synthetic oligonucleotide
  Target: ATXN2; (-) strand; PAM type: NRG; PAM sequence: AAG
tccagcctgggtgacagagc

SEQ ID NO: 19598 - DNA, 20 bp, Artificial Sequence
  Description of Artificial Sequence: Synthetic oligonucleotide
  Target: ATXN2; (-) strand; PAM type: NRG; PAM sequence: GAG
gtactccagcctgggtgaca

SEQ ID NO: 19599 - DNA, 20 bp, Artificial Sequence
  Description of Artificial Sequence: Synthetic oligonucleotide
  Target: ATXN2; (-) strand; PAM type: NRG; PAM sequence: CAG
ctgtactccagcctgggtga

SEQ ID NO: 19600 - DNA, 20 bp, Artificial Sequence
  Description of Artificial Sequence: Synthetic oligonucleotide
  Target: ATXN2; (-) strand; PAM type: NRG; PAM sequence: GGG
gcgcacctgtactccagcct

SEQ ID NO: 19601 - DNA, 20 bp, Artificial Sequence
  Description of Artificial Sequence: Synthetic oligonucleotide
  Target: ATXN2; (-) strand; PAM type: NRG; PAM sequence: TGG
tgcgcacctgtactccagcc

SEQ ID NO: 19602 - DNA, 20 bp, Artificial Sequence
  Description of Artificial Sequence: Synthetic oligonucleotide
  Target: ATXN2; (-) strand; PAM type: NRG; PAM sequence: CAG
gagattgcgcacctgtactc

SEQ ID NO: 19603 - DNA, 20 bp, Artificial Sequence
  Description of Artificial Sequence: Synthetic oligonucleotide
  Target: ATXN2; (-) strand; PAM type: NRG; PAM sequence: GAG
gcggaagttgtagttgagtt

SEQ ID NO: 19604 - DNA, 20 bp, Artificial Sequence
  Description of Artificial Sequence: Synthetic oligonucleotide
  Target: ATXN2; (-) strand; PAM type: NRG; PAM sequence: GAG
aggaggcggaagttgtagtt

SEQ ID NO: 19605 - DNA, 20 bp, Artificial Sequence
  Description of Artificial Sequence: Synthetic oligonucleotide
  Target: ATXN2; (-) strand; PAM type: NRG; PAM sequence: TAG
aacccaggaggcggaagttg

SEQ ID NO: 19606 - DNA, 20 bp, Artificial Sequence
  Description of Artificial Sequence: Synthetic oligonucleotide
  Target: ATXN2; (-) strand; PAM type: NRG; PAM sequence: AAG
tgcttgaacccaggaggcgg

SEQ ID NO: 19607 - DNA, 20 bp, Artificial Sequence
  Description of Artificial Sequence: Synthetic oligonucleotide
  Target: ATXN2; (-) strand; PAM type: NRG; PAM sequence: CGG
aattgcttgaacccaggagg

SEQ ID NO: 19608 - DNA, 20 bp, Artificial Sequence
  Description of Artificial Sequence: Synthetic oligonucleotide
  Target: ATXN2; (-) strand; PAM type: NRG; PAM sequence: AGG
aagaattgcttgaacccagg

SEQ ID NO: 19609 - DNA, 20 bp, Artificial Sequence
  Description of Artificial Sequence: Synthetic oligonucleotide
  Target: ATXN2; (-) strand; PAM type: NRG; PAM sequence: GAG
gaagaattgcttgaacccag

SEQ ID NO: 19610 - DNA, 20 bp, Artificial Sequence
  Description of Artificial Sequence: Synthetic oligonucleotide
  Target: ATXN2; (-) strand; PAM type: NRG; PAM sequence: AGG
cagaagaattgcttgaaccc

SEQ ID NO: 19611 - DNA, 20 bp, Artificial Sequence
  Description of Artificial Sequence: Synthetic oligonucleotide
  Target: ATXN2; (-) strand; PAM type: NRG; PAM sequence: CAG
gcagaagaattgcttgaacc

SEQ ID NO: 19612 - DNA, 20 bp, Artificial Sequence
  Description of Artificial Sequence: Synthetic oligonucleotide
  Target: ATXN2; (-) strand; PAM type: NRG; PAM sequence: AAG
tacttgggagactgaggcag

SEQ ID NO: 19613 - DNA, 20 bp, Artificial Sequence
  Description of Artificial Sequence: Synthetic oligonucleotide
  Target: ATXN2; (-) strand; PAM type: NRG; PAM sequence: CAG
agctacttgggagactgagg

SEQ ID NO: 19614 - DNA, 20 bp, Artificial Sequence
  Description of Artificial Sequence: Synthetic oligonucleotide
  Target: ATXN2; (-) strand; PAM type: NRG; PAM sequence: AGG
tctagctacttgggagactg

SEQ ID NO: 19615 - DNA, 20 bp, Artificial Sequence
  Description of Artificial Sequence: Synthetic oligonucleotide
  Target: ATXN2; (-) strand; PAM type: NRG; PAM sequence: GAG
ttctagctacttgggagact

SEQ ID NO: 19616 - DNA, 20 bp, Artificial Sequence
  Description of Artificial Sequence: Synthetic oligonucleotide
  Target: ATXN2; (-) strand; PAM type: NRG; PAM sequence: GAG
ctgtaattctagctacttgg

SEQ ID NO: 19617 - DNA, 20 bp, Artificial Sequence
  Description of Artificial Sequence: Synthetic oligonucleotide
  Target: ATXN2; (-) strand; PAM type: NRG; PAM sequence: GGG
acctgtaattctagctactt

SEQ ID NO: 19618 - DNA, 20 bp, Artificial Sequence
  Description of Artificial Sequence: Synthetic oligonucleotide
  Target: ATXN2; (-) strand; PAM type: NRG; PAM sequence: TGG
cacctgtaattctagctact

SEQ ID NO: 19619 - DNA, 20 bp, Artificial Sequence
  Description of Artificial Sequence: Synthetic oligonucleotide
  Target: ATXN2; (-) strand; PAM type: NRG; PAM sequence: TAG
gtggcaggcacctgtaattc

SEQ ID NO: 19620 - DNA, 20 bp, Artificial Sequence
  Description of Artificial Sequence: Synthetic oligonucleotide
  Target: ATXN2; (-) strand; PAM type: NRG; PAM sequence: AGG
tcttggctgggcccggtggc

SEQ ID NO: 19621 - DNA, 20 bp, Artificial Sequence
  Description of Artificial Sequence: Synthetic oligonucleotide
  Target: ATXN2; (-) strand; PAM type: NRG; PAM sequence: CAG
atcttggctgggcccggtgg

SEQ ID NO: 19622 - DNA, 20 bp, Artificial Sequence
  Description of Artificial Sequence: Synthetic oligonucleotide
  Target: ATXN2; (-) strand; PAM type: NRG; PAM sequence: TGG
tatatcttggctgggcccgg

SEQ ID NO: 19623 - DNA, 20 bp, Artificial Sequence
  Description of Artificial Sequence: Synthetic oligonucleotide
  Target: ATXN2; (-) strand; PAM type: NRG; PAM sequence: CGG
aaatatatcttggctgggcc

SEQ ID NO: 19624 - DNA, 20 bp, Artificial Sequence
  Description of Artificial Sequence: Synthetic oligonucleotide
  Target: ATXN2; (-) strand; PAM type: NRG; PAM sequence: GGG
ctttaaaatatatcttggct

SEQ ID NO: 19625 - DNA, 20 bp, Artificial Sequence
  Description of Artificial Sequence: Synthetic oligonucleotide
  Target: ATXN2; (-) strand; PAM type: NRG; PAM sequence: TGG
tctttaaaatatatcttggc

SEQ ID NO: 19626 - DNA, 20 bp, Artificial Sequence
  Description of Artificial Sequence: Synthetic oligonucleotide
  Target: ATXN2; (-) strand; PAM type: NRG; PAM sequence: TGG
ctgatctttaaaatatatct

SEQ ID NO: 19627 - DNA, 20 bp, Artificial Sequence
  Description of Artificial Sequence: Synthetic oligonucleotide
  Target: ATXN2; (-) strand; PAM type: NRG; PAM sequence: CAG
taacttactactaaaaaaat

SEQ ID NO: 19628 - DNA, 20 bp, Artificial Sequence
  Description of Artificial Sequence: Synthetic oligonucleotide
  Target: ATXN2; (-) strand; PAM type: NRG; PAM sequence: CAG
ccaacattgatttttttttt

SEQ ID NO: 19629 - DNA, 20 bp, Artificial Sequence
  Description of Artificial Sequence: Synthetic oligonucleotide
  Target: ATXN2; (-) strand; PAM type: NRG; PAM sequence: AGG
ctctgcttcactaatctaat

SEQ ID NO: 19630 - DNA, 20 bp, Artificial Sequence
  Description of Artificial Sequence: Synthetic oligonucleotide
  Target: ATXN2; (-) strand; PAM type: NRG; PAM sequence: TAG
actctgcttcactaatctaa

SEQ ID NO: 19631 - DNA, 20 bp, Artificial Sequence
  Description of Artificial Sequence: Synthetic oligonucleotide
  Target: ATXN2; (-) strand; PAM type: NRG; PAM sequence: TGG
tttgtggttgaatttgtttc

SEQ ID NO: 19632 - DNA, 20 bp, Artificial Sequence
  Description of Artificial Sequence: Synthetic oligonucleotide
  Target: ATXN2; (-) strand; PAM type: NRG; PAM sequence: TGG
atataacaagtgtctttttg

SEQ ID NO: 19633 - DNA, 20 bp, Artificial Sequence
  Description of Artificial Sequence: Synthetic oligonucleotide
  Target: ATXN2; (-) strand; PAM type: NRG; PAM sequence: AAG
atgccattttatcatataac

SEQ ID NO: 19634 - DNA, 20 bp, Artificial Sequence
  Description of Artificial Sequence: Synthetic oligonucleotide
  Target: ATXN2; (-) strand; PAM type: NRG; PAM sequence: TGG
ataataatgtaattccatta

SEQ ID NO: 19635 - DNA, 20 bp, Artificial Sequence
  Description of Artificial Sequence: Synthetic oligonucleotide
  Target: ATXN2; (-) strand; PAM type: NRG; PAM sequence: TAG
tatgcgtgcgcatagatgga

SEQ ID NO: 19636 - DNA, 20 bp, Artificial Sequence
  Description of Artificial Sequence: Synthetic oligonucleotide
  Target: ATXN2; (-) strand; PAM type: NRG; PAM sequence: TGG
tgtgtatgcgtgcgcataga

SEQ ID NO: 19637 - DNA, 20 bp, Artificial Sequence
  Description of Artificial Sequence: Synthetic oligonucleotide
  Target: ATXN2; (-) strand; PAM type: NRG; PAM sequence: TAG
tgtgtgtgtatgcgtgcgca

SEQ ID NO: 19638 - DNA, 20 bp, Artificial Sequence
  Description of Artificial Sequence: Synthetic oligonucleotide
  Target: ATXN2; (-) strand; PAM type: NRG; PAM sequence: AAG
agaaggagaccctgtattta

SEQ ID NO: 19639 - DNA, 20 bp, Artificial Sequence
  Description of Artificial Sequence: Synthetic oligonucleotide
  Target: ATXN2; (-) strand; PAM type: NRG; PAM sequence: GAG
tccagcctgggtgacagaag

SEQ ID NO: 19640 - DNA, 20 bp, Artificial Sequence
  Description of Artificial Sequence: Synthetic oligonucleotide
  Target: ATXN2; (-) strand; PAM type: NRG; PAM sequence: AGG
actccagcctgggtgacaga

SEQ ID NO: 19641 - DNA, 20 bp, Artificial Sequence
  Description of Artificial Sequence: Synthetic oligonucleotide
  Target: ATXN2; (-) strand; PAM type: NRG; PAM sequence: AAG
tactccagcctgggtgacag

SEQ ID NO: 19642 - DNA, 20 bp, Artificial Sequence
  Description of Artificial Sequence: Synthetic oligonucleotide
  Target: ATXN2; (-) strand; PAM type: NRG; PAM sequence: CAG
ctgtactccagcctgggtga

SEQ ID NO: 19643 - DNA, 20 bp, Artificial Sequence
  Description of Artificial Sequence: Synthetic oligonucleotide
  Target: ATXN2; (-) strand; PAM type: NRG; PAM sequence: GGG
gtaccactgtactccagcct

SEQ ID NO: 19644 - DNA, 20 bp, Artificial Sequence
  Description of Artificial Sequence: Synthetic oligonucleotide
  Target: ATXN2; (-) strand; PAM type: NRG; PAM sequence: TGG
tgtaccactgtactccagcc

SEQ ID NO: 19645 - DNA, 20 bp, Artificial Sequence
  Description of Artificial Sequence: Synthetic oligonucleotide
  Target: ATXN2; (-) strand; PAM type: NRG; PAM sequence: CAG
gtgattgtaccactgtactc

SEQ ID NO: 19646 - DNA, 20 bp, Artificial Sequence
  Description of Artificial Sequence: Synthetic oligonucleotide
  Target: ATXN2; (-) strand; PAM type: NRG; PAM sequence: GAG
cagtagtttaaagcagcagt

SEQ ID NO: 19647 - DNA, 20 bp, Artificial Sequence
  Description of Artificial Sequence: Synthetic oligonucleotide
  Target: ATXN2; (-) strand; PAM type: NRG; PAM sequence: CAG
agcccagtagtttaaagcag

SEQ ID NO: 19648 - DNA, 20 bp, Artificial Sequence
  Description of Artificial Sequence: Synthetic oligonucleotide
  Target: ATXN2; (-) strand; PAM type: NRG; PAM sequence: CAG
ttgagcccagtagtttaaag

SEQ ID NO: 19649 - DNA, 20 bp, Artificial Sequence
  Description of Artificial Sequence: Synthetic oligonucleotide
  Target: ATXN2; (-) strand; PAM type: NRG; PAM sequence: AAG
tgcttgagcccagtagttta

SEQ ID NO: 19650 - DNA, 20 bp, Artificial Sequence
  Description of Artificial Sequence: Synthetic oligonucleotide
  Target: ATXN2; (-) strand; PAM type: NRG; PAM sequence: TAG
ggagaattgcttgagcccag

SEQ ID NO: 19651 - DNA, 20 bp, Artificial Sequence
  Description of Artificial Sequence: Synthetic oligonucleotide
  Target: ATXN2; (-) strand; PAM type: NRG; PAM sequence: CAG
gaaggagaattgcttgagcc

SEQ ID NO: 19652 - DNA, 20 bp, Artificial Sequence
  Description of Artificial Sequence: Synthetic oligonucleotide
  Target: ATXN2; (-) strand; PAM type: NRG; PAM sequence: GAG
ctgaggaaggagaattgctt

SEQ ID NO: 19653 - DNA, 20 bp, Artificial Sequence
  Description of Artificial Sequence: Synthetic oligonucleotide
  Target: ATXN2; (-) strand; PAM type: NRG; PAM sequence: GAG
tacttgagaggctgaggaag

SEQ ID NO: 19654 - DNA, 20 bp, Artificial Sequence
  Description of Artificial Sequence: Synthetic oligonucleotide
  Target: ATXN2; (-) strand; PAM type: NRG; PAM sequence: AGG
actacttgagaggctgagga

SEQ ID NO: 19655 - DNA, 20 bp, Artificial Sequence
  Description of Artificial Sequence: Synthetic oligonucleotide
  Target: ATXN2; (-) strand; PAM type: NRG; PAM sequence: AAG
aactacttgagaggctgagg

SEQ ID NO: 19656 - DNA, 20 bp, Artificial Sequence
  Description of Artificial Sequence: Synthetic oligonucleotide
  Target: ATXN2; (-) strand; PAM type: NRG; PAM sequence: AGG
cctaactacttgagaggctg

SEQ ID NO: 19657 - DNA, 20 bp, Artificial Sequence
  Description of Artificial Sequence: Synthetic oligonucleotide
  Target: ATXN2; (-) strand; PAM type: NRG; PAM sequence: GAG
tcctaactacttgagaggct

SEQ ID NO: 19658 - DNA, 20 bp, Artificial Sequence
  Description of Artificial Sequence: Synthetic oligonucleotide
  Target: ATXN2; (-) strand; PAM type: NRG; PAM sequence: AGG
tgtagtcctaactacttgag

SEQ ID NO: 19659 - DNA, 20 bp, Artificial Sequence
  Description of Artificial Sequence: Synthetic oligonucleotide
  Target: ATXN2; (-) strand; PAM type: NRG; PAM sequence: GAG
ctgtagtcctaactacttga

SEQ ID NO: 19660 - DNA, 20 bp, Artificial Sequence
  Description of Artificial Sequence: Synthetic oligonucleotide
  Target: ATXN2; (-) strand; PAM type: NRG; PAM sequence: GAG
acctgtagtcctaactactt

SEQ ID NO: 19661 - DNA, 20 bp, Artificial Sequence
  Description of Artificial Sequence: Synthetic oligonucleotide
  Target: ATXN2; (-) strand; PAM type: NRG; PAM sequence: TAG
ggtgtggtggcacacacctg

SEQ ID NO: 19662 - DNA, 20 bp, Artificial Sequence
  Description of Artificial Sequence: Synthetic oligonucleotide
  Target: ATXN2; (-) strand; PAM type: NRG; PAM sequence: TGG
taaaaatttgctgggtgtgg

SEQ ID NO: 19663 - DNA, 20 bp, Artificial Sequence
  Description of Artificial Sequence: Synthetic oligonucleotide
  Target: ATXN2; (-) strand; PAM type: NRG; PAM sequence: TGG
atttaaaaatttgctgggtg

SEQ ID NO: 19664 - DNA, 20 bp, Artificial Sequence
  Description of Artificial Sequence: Synthetic oligonucleotide
  Target: ATXN2; (-) strand; PAM type: NRG; PAM sequence: GGG
aaacaatttaaaaatttgct

SEQ ID NO: 19665 - DNA, 20 bp, Artificial Sequence
  Description of Artificial Sequence: Synthetic oligonucleotide
  Target: ATXN2; (-) strand; PAM type: NRG; PAM sequence: TGG
aaaacaatttaaaaatttgc

SEQ ID NO: 19666 - DNA, 20 bp, Artificial Sequence
  Description of Artificial Sequence: Synthetic oligonucleotide
  Target: ATXN2; (-) strand; PAM type: NRG; PAM sequence: AGG
aagaccaacctgggtgatgt

SEQ ID NO: 19667 - DNA, 20 bp, Artificial Sequence
  Description of Artificial Sequence: Synthetic oligonucleotide
  Target: ATXN2; (-) strand; PAM type: NRG; PAM sequence: TAG
caagaccaacctgggtgatg

SEQ ID NO: 19668 - DNA, 20 bp, Artificial Sequence
  Description of Artificial Sequence: Synthetic oligonucleotide
  Target: ATXN2; (-) strand; PAM type: NRG; PAM sequence: GGG
caggagttcaagaccaacct

SEQ ID NO: 19669 - DNA, 20 bp, Artificial Sequence
  Description of Artificial Sequence: Synthetic oligonucleotide
  Target: ATXN2; (-) strand; PAM type: NRG; PAM sequence: TGG
ccaggagttcaagaccaacc

SEQ ID NO: 19670 - DNA, 20 bp, Artificial Sequence
  Description of Artificial Sequence: Synthetic oligonucleotide
  Target: ATXN2; (-) strand; PAM type: NRG; PAM sequence: AAG
tcgcttgaggccaggagttc

SEQ ID NO: 19671 - DNA, 20 bp, Artificial Sequence
  Description of Artificial Sequence: Synthetic oligonucleotide
  Target: ATXN2; (-) strand; PAM type: NRG; PAM sequence: GAG
ggaggatcgcttgaggccag

SEQ ID NO: 19672 - DNA, 20 bp, Artificial Sequence
  Description of Artificial Sequence: Synthetic oligonucleotide
  Target: ATXN2; (-) strand; PAM type: NRG; PAM sequence: AGG
caggaggatcgcttgaggcc

SEQ ID NO: 19673 - DNA, 20 bp, Artificial Sequence
  Description of Artificial Sequence: Synthetic oligonucleotide
  Target: ATXN2; (-) strand; PAM type: NRG; PAM sequence: CAG
gcaggaggatcgcttgaggc

SEQ ID NO: 19674 - DNA, 20 bp, Artificial Sequence
  Description of Artificial Sequence: Synthetic oligonucleotide
  Target: ATXN2; (-) strand; PAM type: NRG; PAM sequence: AGG
caaggcaggaggatcgcttg

SEQ ID NO: 19675 - DNA, 20 bp, Artificial Sequence
  Description of Artificial Sequence: Synthetic oligonucleotide
  Target: ATXN2; (-) strand; PAM type: NRG; PAM sequence: GAG
ccaaggcaggaggatcgctt

SEQ ID NO: 19676 - DNA, 20 bp, Artificial Sequence
  Description of Artificial Sequence: Synthetic oligonucleotide
  Target: ATXN2; (-) strand; PAM type: NRG; PAM sequence: AGG
ctttgggaggccaaggcagg

SEQ ID NO: 19677 - DNA, 20 bp, Artificial Sequence
  Description of Artificial Sequence: Synthetic oligonucleotide
  Target: ATXN2; (-) strand; PAM type: NRG; PAM sequence: GAG
gctttgggaggccaaggcag

SEQ ID NO: 19678 - DNA, 20 bp, Artificial Sequence
  Description of Artificial Sequence: Synthetic oligonucleotide
  Target: ATXN2; (-) strand; PAM type: NRG; PAM sequence: AGG
gagctttgggaggccaaggc

SEQ ID NO: 19679 - DNA, 20 bp, Artificial Sequence
  Description of Artificial Sequence: Synthetic oligonucleotide
  Target: ATXN2; (-) strand; PAM type: NRG; PAM sequence: CAG
agagctttgggaggccaagg

SEQ ID NO: 19680 - DNA, 20 bp, Artificial Sequence
  Description of Artificial Sequence: Synthetic oligonucleotide
  Target: ATXN2; (-) strand; PAM type: NRG; PAM sequence: AGG
ctcagagctttgggaggcca

SEQ ID NO: 19681 - DNA, 20 bp, Artificial Sequence
  Description of Artificial Sequence: Synthetic oligonucleotide
  Target: ATXN2; (-) strand; PAM type: NRG; PAM sequence: AAG
cctcagagctttgggaggcc

SEQ ID NO: 19682 - DNA, 20 bp, Artificial Sequence
  Description of Artificial Sequence: Synthetic oligonucleotide
  Target: ATXN2; (-) strand; PAM type: NRG; PAM sequence: AGG
tgtaacctcagagctttggg

SEQ ID NO: 19683 - DNA, 20 bp, Artificial Sequence
  Description of Artificial Sequence: Synthetic oligonucleotide
  Target: ATXN2; (-) strand; PAM type: NRG; PAM sequence: GAG
ctgtaacctcagagctttgg

SEQ ID NO: 19684 - DNA, 20 bp, Artificial Sequence
  Description of Artificial Sequence: Synthetic oligonucleotide
  Target: ATXN2; (-) strand; PAM type: NRG; PAM sequence: GGG
acctgtaacctcagagcttt

SEQ ID NO: 19685 - DNA, 20 bp, Artificial Sequence
  Description of Artificial Sequence: Synthetic oligonucleotide
  Target: ATXN2; (-) strand; PAM type: NRG; PAM sequence: TGG
tacctgtaacctcagagctt

SEQ ID NO: 19686 - DNA, 20 bp, Artificial Sequence
  Description of Artificial Sequence: Synthetic oligonucleotide
  Target: ATXN2; (-) strand; PAM type: NRG; PAM sequence: GAG
ggctcatacctgtaacctca

SEQ ID NO: 19687 - DNA, 20 bp, Artificial Sequence
  Description of Artificial Sequence: Synthetic oligonucleotide
  Target: ATXN2; (-) strand; PAM type: NRG; PAM sequence: CAG
gtggctcatacctgtaacct

SEQ ID NO: 19688 - DNA, 20 bp, Artificial Sequence
  Description of Artificial Sequence: Synthetic oligonucleotide
  Target: ATXN2; (-) strand; PAM type: NRG; PAM sequence: TGG
atcatattgaccaggaacag

SEQ ID NO: 19689 - DNA, 20 bp, Artificial Sequence
  Description of Artificial Sequence: Synthetic oligonucleotide
  Target: ATXN2; (-) strand; PAM type: NRG; PAM sequence: CAG
tatatcatattgaccaggaa

SEQ ID NO: 19690 - DNA, 20 bp, Artificial Sequence
  Description of Artificial Sequence: Synthetic oligonucleotide
  Target: ATXN2; (-) strand; PAM type: NRG; PAM sequence: AGG
ctaagtatatcatattgacc

SEQ ID NO: 19691 - DNA, 20 bp, Artificial Sequence
  Description of Artificial Sequence: Synthetic oligonucleotide
  Target: ATXN2; (-) strand; PAM type: NRG; PAM sequence: CAG
actaagtatatcatattgac

SEQ ID NO: 19692 - DNA, 20 bp, Artificial Sequence
  Description of Artificial Sequence: Synthetic oligonucleotide
  Target: ATXN2; (-) strand; PAM type: NRG; PAM sequence: AAG
tcaaatacttatcatctact

SEQ ID NO: 19693 - DNA, 20 bp, Artificial Sequence
  Description of Artificial Sequence: Synthetic oligonucleotide
  Target: ATXN2; (-) strand; PAM type: NRG; PAM sequence: TGG
ttttaatcatgaatggttgt

SEQ ID NO: 19694 - DNA, 20 bp, Artificial Sequence
  Description of Artificial Sequence: Synthetic oligonucleotide
  Target: ATXN2; (-) strand; PAM type: NRG; PAM sequence: TGG
gttttctttttaatcatgaa

SEQ ID NO: 19695 - DNA, 20 bp, Artificial Sequence
  Description of Artificial Sequence: Synthetic oligonucleotide
  Target: ATXN2; (-) strand; PAM type: NRG; PAM sequence: GGG
agttcctaatttgcagaggt

SEQ ID NO: 19696 - DNA, 20 bp, Artificial Sequence
  Description of Artificial Sequence: Synthetic oligonucleotide
  Target: ATXN2; (-) strand; PAM type: NRG; PAM sequence: TGG
cagttcctaatttgcagagg

SEQ ID NO: 19697 - DNA, 20 bp, Artificial Sequence
  Description of Artificial Sequence: Synthetic oligonucleotide
  Target: ATXN2; (-) strand; PAM type: NRG; PAM sequence: AGG
cttcagttcctaatttgcag

SEQ ID NO: 19698 - DNA, 20 bp, Artificial Sequence
  Description of Artificial Sequence: Synthetic oligonucleotide
  Target: ATXN2; (-) strand; PAM type: NRG; PAM sequence: GAG
acttcagttcctaatttgca

SEQ ID NO: 19699 - DNA, 20 bp, Artificial Sequence
  Description of Artificial Sequence: Synthetic oligonucleotide
  Target: ATXN2; (-) strand; PAM type: NRG; PAM sequence: CAG
ttacttcagttcctaatttg

SEQ ID NO: 19700 - DNA, 20 bp, Artificial Sequence
  Description of Artificial Sequence: Synthetic oligonucleotide
  Target: ATXN2; (-) strand; PAM type: NRG; PAM sequence: CAG
catacagttaggtgttactt

SEQ ID NO: 19701 - DNA, 20 bp, Artificial Sequence
  Description of Artificial Sequence: Synthetic oligonucleotide
  Target: ATXN2; (-) strand; PAM type: NRG; PAM sequence: AGG
tcactattaagcatacagtt

SEQ ID NO: 19702 - DNA, 20 bp, Artificial Sequence
  Description of Artificial Sequence: Synthetic oligonucleotide
  Target: ATXN2; (-) strand; PAM type: NRG; PAM sequence: TAG
ttcactattaagcatacagt

SEQ ID NO: 19703 - DNA, 20 bp, Artificial Sequence
  Description of Artificial Sequence: Synthetic oligonucleotide
  Target: ATXN2; (-) strand; PAM type: NRG; PAM sequence: CAG
gtctttcactattaagcata

SEQ ID NO: 19704 - DNA, 20 bp, Artificial Sequence
  Description of Artificial Sequence: Synthetic oligonucleotide
  Target: ATXN2; (-) strand; PAM type: NRG; PAM sequence: AAG
agacattgtctttcactatt

SEQ ID NO: 19705 - DNA, 20 bp, Artificial Sequence
  Description of Artificial Sequence: Synthetic oligonucleotide
  Target: ATXN2; (-) strand; PAM type: NRG; PAM sequence: GAG
atgctcccatttttaggggt

SEQ ID NO: 19706 - DNA, 20 bp, Artificial Sequence
  Description of Artificial Sequence: Synthetic oligonucleotide
  Target: ATXN2; (-) strand; PAM type: NRG; PAM sequence: GGG
tgccatgctcccatttttag

SEQ ID NO: 19707 - DNA, 20 bp, Artificial Sequence
  Description of Artificial Sequence: Synthetic oligonucleotide
  Target: ATXN2; (-) strand; PAM type: NRG; PAM sequence: GGG
ttgccatgctcccattttta

SEQ ID NO: 19708 - DNA, 20 bp, Artificial Sequence
  Description of Artificial Sequence: Synthetic oligonucleotide
  Target: ATXN2; (-) strand; PAM type: NRG; PAM sequence: AGG
tttgccatgctcccattttt

SEQ ID NO: 19709 - DNA, 20 bp, Artificial Sequence
  Description of Artificial Sequence: Synthetic oligonucleotide
  Target: ATXN2; (-) strand; PAM type: NRG; PAM sequence: TAG
ttttgccatgctcccatttt

SEQ ID NO: 19710 - DNA, 20 bp, Artificial Sequence
  Description of Artificial Sequence: Synthetic oligonucleotide
  Target: ATXN2; (-) strand; PAM type: NRG; PAM sequence: GAG
tgcattactgaaaaaggcat

SEQ ID NO: 19711 - DNA, 20 bp, Artificial Sequence
  Description of Artificial Sequence: Synthetic oligonucleotide
  Target: ATXN2; (-) strand; PAM type: NRG; PAM sequence: AGG
tactggtgcattactgaaaa

SEQ ID NO: 19712 - DNA, 20 bp, Artificial Sequence
  Description of Artificial Sequence: Synthetic oligonucleotide
  Target: ATXN2; (-) strand; PAM type: NRG; PAM sequence: AAG
gtactggtgcattactgaaa

SEQ ID NO: 19713 - DNA, 20 bp, Artificial Sequence
  Description of Artificial Sequence: Synthetic oligonucleotide
  Target: ATXN2; (-) strand; PAM type: NRG; PAM sequence: TGG
ttttttttgtcttattgtac

SEQ ID NO: 19714 - DNA, 20 bp, Artificial Sequence
  Description of Artificial Sequence: Synthetic oligonucleotide
  Target: ATXN2; (-) strand; PAM type: NRG; PAM sequence: GGG
atcaccatgttggtgttttt

SEQ ID NO: 19715 - DNA, 20 bp, Artificial Sequence
  Description of Artificial Sequence: Synthetic oligonucleotide
  Target: ATXN2; (-) strand; PAM type: NRG; PAM sequence: TGG
aatcaccatgttggtgtttt

SEQ ID NO: 19716 - DNA, 20 bp, Artificial Sequence
  Description of Artificial Sequence: Synthetic oligonucleotide
  Target: ATXN2; (-) strand; PAM type: NRG; PAM sequence: TGG
tcatgatctaatcaccatgt

SEQ ID NO: 19717 - DNA, 20 bp, Artificial Sequence
  Description of Artificial Sequence: Synthetic oligonucleotide
  Target: ATXN2; (-) strand; PAM type: NRG; PAM sequence: AAG
actgtttctggcagcccttt

SEQ ID NO: 19718 - DNA, 20 bp, Artificial Sequence
  Description of Artificial Sequence: Synthetic oligonucleotide
  Target: ATXN2; (-) strand; PAM type: NRG; PAM sequence: CAG
ggtaaacccactgtttctgg

SEQ ID NO: 19719 - DNA, 20 bp, Artificial Sequence
  Description of Artificial Sequence: Synthetic oligonucleotide
  Target: ATXN2; (-) strand; PAM type: NRG; PAM sequence: TGG
gttggtaaacccactgtttc

SEQ ID NO: 19720 - DNA, 20 bp, Artificial Sequence
  Description of Artificial Sequence: Synthetic oligonucleotide
  Target: ATXN2; (-) strand; PAM type: NRG; PAM sequence: TGG
gaccttgtgtcttgatgtgt

SEQ ID NO: 19721 - DNA, 20 bp, Artificial Sequence
  Description of Artificial Sequence: Synthetic oligonucleotide
  Target: ATXN2; (-) strand; PAM type: NRG; PAM sequence: GAG
cgtttgtttattcgtaaata

SEQ ID NO: 19722 - DNA, 20 bp, Artificial Sequence
  Description of Artificial Sequence: Synthetic oligonucleotide
  Target: ATXN2; (-) strand; PAM type: NRG; PAM sequence: TAG
aacgtttgtttattcgtaaa

SEQ ID NO: 19723 - DNA, 20 bp, Artificial Sequence
  Description of Artificial Sequence: Synthetic oligonucleotide
  Target: ATXN2; (-) strand; PAM type: NRG; PAM sequence: GAG
catctgttttgtgctgttgt

SEQ ID NO: 19724 - DNA, 20 bp, Artificial Sequence
  Description of Artificial Sequence: Synthetic oligonucleotide
  Target: ATXN2; (-) strand; PAM type: NRG; PAM sequence: CAG
ttttctagttttctttgtat

SEQ ID NO: 19725 - DNA, 20 bp, Artificial Sequence
  Description of Artificial Sequence: Synthetic oligonucleotide
  Target: ATXN2; (-) strand; PAM type: NRG; PAM sequence: TAG
taagtttcaccagtgttttc

SEQ ID NO: 19726 - DNA, 20 bp, Artificial Sequence
  Description of Artificial Sequence: Synthetic oligonucleotide
  Target: ATXN2; (-) strand; PAM type: NRG; PAM sequence: CAG
atttaagtcttaagtttcac

SEQ ID NO: 19727 - DNA, 20 bp, Artificial Sequence
  Description of Artificial Sequence: Synthetic oligonucleotide
  Target: ATXN2; (-) strand; PAM type: NRG; PAM sequence: AAG
gctccatttatttaagtctt

SEQ ID NO: 19728 - DNA, 20 bp, Artificial Sequence
  Description of Artificial Sequence: Synthetic oligonucleotide
  Target: ATXN2; (-) strand; PAM type: NRG; PAM sequence: AAG
atatactgctccatttattt

SEQ ID NO: 19729 - DNA, 20 bp, Artificial Sequence
  Description of Artificial Sequence: Synthetic oligonucleotide
  Target: ATXN2; (-) strand; PAM type: NRG; PAM sequence: AGG
acaatatggaatcttcattg

SEQ ID NO: 19730 - DNA, 20 bp, Artificial Sequence
  Description of Artificial Sequence: Synthetic oligonucleotide
  Target: ATXN2; (-) strand; PAM type: NRG; PAM sequence: GAG
aacaatatggaatcttcatt

SEQ ID NO: 19731 - DNA, 20 bp, Artificial Sequence
  Description of Artificial Sequence: Synthetic oligonucleotide
  Target: ATXN2; (-) strand; PAM type: NRG; PAM sequence: TGG
ggagaaatatcttaacaata

SEQ ID NO: 19732 - DNA, 20 bp, Artificial Sequence
  Description of Artificial Sequence: Synthetic oligonucleotide
  Target: ATXN2; (-) strand; PAM type: NRG; PAM sequence: GAG
aatctttatatcagttctgg

SEQ ID NO: 19733 - DNA, 20 bp, Artificial Sequence
  Description of Artificial Sequence: Synthetic oligonucleotide
  Target: ATXN2; (-) strand; PAM type: NRG; PAM sequence: GGG
tgaatctttatatcagttct

SEQ ID NO: 19734 - DNA, 20 bp, Artificial Sequence
  Description of Artificial Sequence: Synthetic oligonucleotide
  Target: ATXN2; (-) strand; PAM type: NRG; PAM sequence: TGG
ctgaatctttatatcagttc

SEQ ID NO: 19735 - DNA, 20 bp, Artificial Sequence
  Description of Artificial Sequence: Synthetic oligonucleotide
  Target: ATXN2; (-) strand; PAM type: NRG; PAM sequence: CAG
tgtgcactgaatctttatat

SEQ ID NO: 19736 - DNA, 20 bp, Artificial Sequence
  Description of Artificial Sequence: Synthetic oligonucleotide
  Target: ATXN2; (-) strand; PAM type: NRG; PAM sequence: GGG
ataaattttagaatcagctt

SEQ ID NO: 19737 - DNA, 20 bp, Artificial Sequence
  Description of Artificial Sequence: Synthetic oligonucleotide
  Target: ATXN2; (-) strand; PAM type: NRG; PAM sequence: TGG
aataaattttagaatcagct

SEQ ID NO: 19738 - DNA, 20 bp, Artificial Sequence
  Description of Artificial Sequence: Synthetic oligonucleotide
  Target: ATXN2; (-) strand; PAM type: NRG; PAM sequence: CAG
ttgcaaataaattttagaat

SEQ ID NO: 19739 - DNA, 20 bp, Artificial Sequence
  Description of Artificial Sequence: Synthetic oligonucleotide
  Target: ATXN2; (-) strand; PAM type: NRG; PAM sequence: TAG
ttgaatttgcaaataaattt

SEQ ID NO: 19740 - DNA, 20 bp, Artificial Sequence
  Description of Artificial Sequence: Synthetic oligonucleotide
  Target: ATXN2; (-) strand; PAM type: NRG; PAM sequence: CAG
ttaagttcatatgagtctcc

SEQ ID NO: 19741 - DNA, 20 bp, Artificial Sequence
  Description of Artificial Sequence: Synthetic oligonucleotide
  Target: ATXN2; (-) strand; PAM type: NRG; PAM sequence: GAG
accaacctttaagttcatat

SEQ ID NO: 19742 - DNA, 20 bp, Artificial Sequence
  Description of Artificial Sequence: Synthetic oligonucleotide
  Target: ATXN2; (-) strand; PAM type: NRG; PAM sequence: AAG
ttactttgtaaccaaccttt

SEQ ID NO: 19743 - DNA, 20 bp, Artificial Sequence
  Description of Artificial Sequence: Synthetic oligonucleotide
  Target: ATXN2; (-) strand; PAM type: NRG; PAM sequence: CAG
catagtagctttattgaatt

SEQ ID NO: 19744 - DNA, 20 bp, Artificial Sequence
  Description of Artificial Sequence: Synthetic oligonucleotide
  Target: ATXN2; (-) strand; PAM type: NRG; PAM sequence: TAG
gccactgcgcccagccatag

SEQ ID NO: 19745 - DNA, 20 bp, Artificial Sequence
  Description of Artificial Sequence: Synthetic oligonucleotide
  Target: ATXN2; (-) strand; PAM type: NRG; PAM sequence: TAG
tgagccactgcgcccagcca

SEQ ID NO: 19746 - DNA, 20 bp, Artificial Sequence
  Description of Artificial Sequence: Synthetic oligonucleotide
  Target: ATXN2; (-) strand; PAM type: NRG; PAM sequence: CAG
caggcatgagccactgcgcc

SEQ ID NO: 19747 - DNA, 20 bp, Artificial Sequence
  Description of Artificial Sequence: Synthetic oligonucleotide
  Target: ATXN2; (-) strand; PAM type: NRG; PAM sequence: GAG
agttctgggattacaggcat

SEQ ID NO: 19748 - DNA, 20 bp, Artificial Sequence
  Description of Artificial Sequence: Synthetic oligonucleotide
  Target: ATXN2; (-) strand; PAM type: NRG; PAM sequence: AGG
tcccaaagttctgggattac

SEQ ID NO: 19749 - DNA, 20 bp, Artificial Sequence
  Description of Artificial Sequence: Synthetic oligonucleotide
  Target: ATXN2; (-) strand; PAM type: NRG; PAM sequence: CAG
ctcccaaagttctgggatta

SEQ ID NO: 19750 - DNA, 20 bp, Artificial Sequence
  Description of Artificial Sequence: Synthetic oligonucleotide
  Target: ATXN2; (-) strand; PAM type: NRG; PAM sequence: GGG
tctcagcctcccaaagttct

SEQ ID NO: 19751 - DNA, 20 bp, Artificial Sequence
  Description of Artificial Sequence: Synthetic oligonucleotide
  Target: ATXN2; (-) strand; PAM type: NRG; PAM sequence: TGG
atctcagcctcccaaagttc

SEQ ID NO: 19752 - DNA, 20 bp, Artificial Sequence
  Description of Artificial Sequence: Synthetic oligonucleotide
  Target: ATXN2; (-) strand; PAM type: NRG; PAM sequence: AAG
ctgctcatctcagcctccca

SEQ ID NO: 19753 - DNA, 20 bp, Artificial Sequence
  Description of Artificial Sequence: Synthetic oligonucleotide
  Target: ATXN2; (-) strand; PAM type: NRG; PAM sequence: CAG
ctcaggtgatctgctcatct

SEQ ID NO: 19754 - DNA, 20 bp, Artificial Sequence
  Description of Artificial Sequence: Synthetic oligonucleotide
  Target: ATXN2; (-) strand; PAM type: NRG; PAM sequence: AGG
agtctcgaactcctgacctc

SEQ ID NO: 19755 - DNA, 20 bp, Artificial Sequence
  Description of Artificial Sequence: Synthetic oligonucleotide
  Target: ATXN2; (-) strand; PAM type: NRG; PAM sequence: CAG
tagtctcgaactcctgacct

SEQ ID NO: 19756 - DNA, 20 bp, Artificial Sequence
  Description of Artificial Sequence: Synthetic oligonucleotide
  Target: ATXN2; (-) strand; PAM type: NRG; PAM sequence: TAG
tctcaccatgttggccaggc

SEQ ID NO: 19757 - DNA, 20 bp, Artificial Sequence
  Description of Artificial Sequence: Synthetic oligonucleotide
  Target: ATXN2; (-) strand; PAM type: NRG; PAM sequence: AGG
agggtctcaccatgttggcc

SEQ ID NO: 19758 - DNA, 20 bp, Artificial Sequence
  Description of Artificial Sequence: Synthetic oligonucleotide
  Target: ATXN2; (-) strand; PAM type: NRG; PAM sequence: CAG
cagggtctcaccatgttggc

SEQ ID NO: 19759 - DNA, 20 bp, Artificial Sequence
  Description of Artificial Sequence: Synthetic oligonucleotide
  Target: ATXN2; (-) strand; PAM type: NRG; PAM sequence: TGG
gagacagggtctcaccatgt

SEQ ID NO: 19760 - DNA, 20 bp, Artificial Sequence
  Description of Artificial Sequence: Synthetic oligonucleotide
  Target: ATXN2; (-) strand; PAM type: NRG; PAM sequence: GGG
ttttttttttagtagagaca

SEQ ID NO: 19761 - DNA, 20 bp, Artificial Sequence
  Description of Artificial Sequence: Synthetic oligonucleotide
  Target: ATXN2; (-) strand; PAM type: NRG; PAM sequence: AGG
tttttttttttagtagagac

SEQ ID NO: 19762 - DNA, 20 bp, Artificial Sequence
  Description of Artificial Sequence: Synthetic oligonucleotide
  Target: ATXN2; (-) strand; PAM type: NRG; PAM sequence: CAG
ttttttttttttagtagaga

SEQ ID NO: 19763 - DNA, 20 bp, Artificial Sequence
  Description of Artificial Sequence: Synthetic oligonucleotide
  Target: ATXN2; (-) strand; PAM type: NRG; PAM sequence: GAG
ttttttttttttttttagta

SEQ ID NO: 19764 - DNA, 20 bp, Artificial Sequence
  Description of Artificial Sequence: Synthetic oligonucleotide
  Target: ATXN2; (-) strand; PAM type: NRG; PAM sequence: TAG
ttttttttttttttttttag

SEQ ID NO: 19765 - DNA, 20 bp, Artificial Sequence
  Description of Artificial Sequence: Synthetic oligonucleotide
  Target: ATXN2; (-) strand; PAM type: NRG; PAM sequence: TAG
attttttttttttttttttt

SEQ ID NO: 19766 - DNA, 20 bp, Artificial Sequence
  Description of Artificial Sequence: Synthetic oligonucleotide
  Target: ATXN2; (-) strand; PAM type: NRG; PAM sequence: CAG
caggtgcccgccactacacc

SEQ ID NO: 19767 - DNA, 20 bp, Artificial Sequence
  Description of Artificial Sequence: Synthetic oligonucleotide
  Target: ATXN2; (-) strand; PAM type: NRG; PAM sequence: AGG
tctcgagtagctaggattac

SEQ ID NO: 19768 - DNA, 20 bp, Artificial Sequence
  Description of Artificial Sequence: Synthetic oligonucleotide
  Target: ATXN2; (-) strand; PAM type: NRG; PAM sequence: CAG
ctctcgagtagctaggatta

SEQ ID NO: 19769 - DNA, 20 bp, Artificial Sequence
  Description of Artificial Sequence: Synthetic oligonucleotide
  Target: ATXN2; (-) strand; PAM type: NRG; PAM sequence: AGG
cctcagcctctcgagtagct

SEQ ID NO: 19770 - DNA, 20 bp, Artificial Sequence
  Description of Artificial Sequence: Synthetic oligonucleotide
  Target: ATXN2; (-) strand; PAM type: NRG; PAM sequence: TAG
gcctcagcctctcgagtagc

SEQ ID NO: 19771 - DNA, 20 bp, Artificial Sequence
  Description of Artificial Sequence: Synthetic oligonucleotide
  Target: ATXN2; (-) strand; PAM type: NRG; PAM sequence: TAG
ttctgcctcagcctctcgag

SEQ ID NO: 19772 - DNA, 20 bp, Artificial Sequence
  Description of Artificial Sequence: Synthetic oligonucleotide
  Target: ATXN2; (-) strand; PAM type: NRG; PAM sequence: GAG
cgattctgcctcagcctctc

SEQ ID NO: 19773 - DNA, 20 bp, Artificial Sequence
  Description of Artificial Sequence: Synthetic oligonucleotide
  Target: ATXN2; (-) strand; PAM type: NRG; PAM sequence: CAG
agggtcaagcgattctgcct

SEQ ID NO: 19774 - DNA, 20 bp, Artificial Sequence
  Description of Artificial Sequence: Synthetic oligonucleotide
  Target: ATXN2; (-) strand; PAM type: NRG; PAM sequence: AAG
aacctccacttcccagggtc

SEQ ID NO: 19775 - DNA, 20 bp, Artificial Sequence
  Description of Artificial Sequence: Synthetic oligonucleotide
  Target: ATXN2; (-) strand; PAM type: NRG; PAM sequence: GGG
actgcaacctccacttccca

SEQ ID NO: 19776 - DNA, 20 bp, Artificial Sequence
  Description of Artificial Sequence: Synthetic oligonucleotide
  Target: ATXN2; (-) strand; PAM type: NRG; PAM sequence: AGG
cactgcaacctccacttccc

SEQ ID NO: 19777 - DNA, 20 bp, Artificial Sequence
  Description of Artificial Sequence: Synthetic oligonucleotide
  Target: ATXN2; (-) strand; PAM type: NRG; PAM sequence: CAG
tcactgcaacctccacttcc

SEQ ID NO: 19778 - DNA, 20 bp, Artificial Sequence
  Description of Artificial Sequence: Synthetic oligonucleotide
  Target: ATXN2; (-) strand; PAM type: NRG; PAM sequence: TGG
ggagtgcagtagtgtgacct

SEQ ID NO: 19779 - DNA, 20 bp, Artificial Sequence
  Description of Artificial Sequence: Synthetic oligonucleotide
  Target: ATXN2; (-) strand; PAM type: NRG; PAM sequence: TAG
ttacccaggctggagtgcag

SEQ ID NO: 19780 - DNA, 20 bp, Artificial Sequence
  Description of Artificial Sequence: Synthetic oligonucleotide
  Target: ATXN2; (-) strand; PAM type: NRG; PAM sequence: CAG
ttgttacccaggctggagtg

SEQ ID NO: 19781 - DNA, 20 bp, Artificial Sequence
  Description of Artificial Sequence: Synthetic oligonucleotide
  Target: ATXN2; (-) strand; PAM type: NRG; PAM sequence: GAG
cgatcttgttacccaggctg

SEQ ID NO: 19782 - DNA, 20 bp, Artificial Sequence
  Description of Artificial Sequence: Synthetic oligonucleotide
  Target: ATXN2; (-) strand; PAM type: NRG; PAM sequence: TGG
ctcgatcttgttacccaggc

SEQ ID NO: 19783 - DNA, 20 bp, Artificial Sequence
  Description of Artificial Sequence: Synthetic oligonucleotide
  Target: ATXN2; (-) strand; PAM type: NRG; PAM sequence: AGG
gagtctcgatcttgttaccc

SEQ ID NO: 19784 - DNA, 20 bp, Artificial Sequence
  Description of Artificial Sequence: Synthetic oligonucleotide
  Target: ATXN2; (-) strand; PAM type: NRG; PAM sequence: CAG
agagtctcgatcttgttacc

SEQ ID NO: 19785 - DNA, 20 bp, Artificial Sequence
  Description of Artificial Sequence: Synthetic oligonucleotide
  Target: ATXN2; (-) strand; PAM type: NRG; PAM sequence: GAG
tttttctgttcttgaaacaa

SEQ ID NO: 19786 - DNA, 20 bp, Artificial Sequence
  Description of Artificial Sequence: Synthetic oligonucleotide
  Target: ATXN2; (-) strand; PAM type: NRG; PAM sequence: AAG
tttttttctgttcttgaaac

SEQ ID NO: 19787 - DNA, 20 bp, Artificial Sequence
  Description of Artificial Sequence: Synthetic oligonucleotide
  Target: ATXN2; (-) strand; PAM type: NRG; PAM sequence: TGG
cagcctctgttttccattgg

SEQ ID NO: 19788 - DNA, 20 bp, Artificial Sequence
  Description of Artificial Sequence: Synthetic oligonucleotide
  Target: ATXN2; (-) strand; PAM type: NRG; PAM sequence: TGG
caccagcctctgttttccat

SEQ ID NO: 19789 - DNA, 20 bp, Artificial Sequence
  Description of Artificial Sequence: Synthetic oligonucleotide
  Target: ATXN2; (-) strand; PAM type: NRG; PAM sequence: CAG
ttactcggtttctctggcac

SEQ ID NO: 19790 - DNA, 20 bp, Artificial Sequence
  Description of Artificial Sequence: Synthetic oligonucleotide
  Target: ATXN2; (-) strand; PAM type: NRG; PAM sequence: TGG
aaatatttactcggtttctc

SEQ ID NO: 19791 - DNA, 20 bp, Artificial Sequence
  Description of Artificial Sequence: Synthetic oligonucleotide
  Target: ATXN2; (-) strand; PAM type: NRG; PAM sequence: CGG
ctccaccataaatatttact

SEQ ID NO: 19792 - DNA, 20 bp, Artificial Sequence
  Description of Artificial Sequence: Synthetic oligonucleotide
  Target: ATXN2; (-) strand; PAM type: NRG; PAM sequence: TAG
tagggtgtgatgtaaaggtc

SEQ ID NO: 19793 - DNA, 20 bp, Artificial Sequence
  Description of Artificial Sequence: Synthetic oligonucleotide
  Target: ATXN2; (-) strand; PAM type: NRG; PAM sequence: AGG
ttgtgtagggtgtgatgtaa

SEQ ID NO: 19794 - DNA, 20 bp, Artificial Sequence
  Description of Artificial Sequence: Synthetic oligonucleotide
  Target: ATXN2; (-) strand; PAM type: NRG; PAM sequence: AAG
tttgtgtagggtgtgatgta

SEQ ID NO: 19795 - DNA, 20 bp, Artificial Sequence
  Description of Artificial Sequence: Synthetic oligonucleotide
  Target: ATXN2; (-) strand; PAM type: NRG; PAM sequence: GGG
ttcaggttaggttttgtgta

SEQ ID NO: 19796 - DNA, 20 bp, Artificial Sequence
  Description of Artificial Sequence: Synthetic oligonucleotide
  Target: ATXN2; (-) strand; PAM type: NRG; PAM sequence: AGG
tttcaggttaggttttgtgt

SEQ ID NO: 19797 - DNA, 20 bp, Artificial Sequence
  Description of Artificial Sequence: Synthetic oligonucleotide
  Target: ATXN2; (-) strand; PAM type: NRG; PAM sequence: TAG
atttcaggttaggttttgtg

SEQ ID NO: 19798 - DNA, 20 bp, Artificial Sequence
  Description of Artificial Sequence: Synthetic oligonucleotide
  Target: ATXN2; (-) strand; PAM type: NRG; PAM sequence: AGG
tatatggttgatttcaggtt

SEQ ID NO: 19799 - DNA, 20 bp, Artificial Sequence
  Description of Artificial Sequence: Synthetic oligonucleotide
  Target: ATXN2; (-) strand; PAM type: NRG; PAM sequence: TAG
gtatatggttgatttcaggt

SEQ ID NO: 19800 - DNA, 20 bp, Artificial Sequence
  Description of Artificial Sequence: Synthetic oligonucleotide
  Target: ATXN2; (-) strand; PAM type: NRG; PAM sequence: AGG
ttaggtatatggttgatttc

SEQ ID NO: 19801 - DNA, 20 bp, Artificial Sequence
  Description of Artificial Sequence: Synthetic oligonucleotide
  Target: ATXN2; (-) strand; PAM type: NRG; PAM sequence: CAG
gttaggtatatggttgattt

SEQ ID NO: 19802 - DNA, 20 bp, Artificial Sequence
  Description of Artificial Sequence: Synthetic oligonucleotide
  Target: ATXN2; (-) strand; PAM type: NRG; PAM sequence: TGG
tgtttttatggttaggtata

SEQ ID NO: 19803 - DNA, 20 bp, Artificial Sequence
  Description of Artificial Sequence: Synthetic oligonucleotide
  Target: ATXN2; (-) strand; PAM type: NRG; PAM sequence: AGG
ttatgaatgtttttatggtt

SEQ ID NO: 19804 - DNA, 20 bp, Artificial Sequence
  Description of Artificial Sequence: Synthetic oligonucleotide
  Target: ATXN2; (-) strand; PAM type: NRG; PAM sequence: TAG
gttatgaatgtttttatggt

SEQ ID NO: 19805 - DNA, 20 bp, Artificial Sequence
  Description of Artificial Sequence: Synthetic oligonucleotide
  Target: ATXN2; (-) strand; PAM type: NRG; PAM sequence: TGG
ctaggttatgaatgttttta

SEQ ID NO: 19806 - DNA, 20 bp, Artificial Sequence
  Description of Artificial Sequence: Synthetic oligonucleotide
  Target: ATXN2; (-) strand; PAM type: NRG; PAM sequence: AGG
agaaatcttttacgtaccct

SEQ ID NO: 19807 - DNA, 20 bp, Artificial Sequence
  Description of Artificial Sequence: Synthetic oligonucleotide
  Target: ATXN2; (-) strand; PAM type: NRG; PAM sequence: TAG
aagaaatcttttacgtaccc

SEQ ID NO: 19808 - DNA, 20 bp, Artificial Sequence
  Description of Artificial Sequence: Synthetic oligonucleotide
  Target: ATXN2; (-) strand; PAM type: NRG; PAM sequence: AAG
atgcttttttgtatcataat

SEQ ID NO: 19809 - DNA, 20 bp, Artificial Sequence
  Description of Artificial Sequence: Synthetic oligonucleotide
  Target: ATXN2; (-) strand; PAM type: NRG; PAM sequence: AGG
tttatcaagcttttctctta

SEQ ID NO: 19810 - DNA, 20 bp, Artificial Sequence
  Description of Artificial Sequence: Synthetic oligonucleotide
  Target: ATXN2; (-) strand; PAM type: NRG; PAM sequence: AAG
atttatcaagcttttctctt

SEQ ID NO: 19811 - DNA, 20 bp, Artificial Sequence
  Description of Artificial Sequence: Synthetic oligonucleotide
  Target: ATXN2; (-) strand; PAM type: NRG; PAM sequence: AAG
ttaatgaagccttatttatc

SEQ ID NO: 19812 - DNA, 20 bp, Artificial Sequence
  Description of Artificial Sequence: Synthetic oligonucleotide
  Target: ATXN2; (-) strand; PAM type: NRG; PAM sequence: AAG
cagtattgttaattttaatg

SEQ ID NO: 19813 - DNA, 20 bp, Artificial Sequence
  Description of Artificial Sequence: Synthetic oligonucleotide
  Target: ATXN2; (-) strand; PAM type: NRG; PAM sequence: CAG
tgcggttttttttgaagagc

SEQ ID NO: 19814 - DNA, 20 bp, Artificial Sequence
  Description of Artificial Sequence: Synthetic oligonucleotide
  Target: ATXN2; (-) strand; PAM type: NRG; PAM sequence: GAG
agtctgcggttttttttgaa

SEQ ID NO: 19815 - DNA, 20 bp, Artificial Sequence
  Description of Artificial Sequence: Synthetic oligonucleotide
  Target: ATXN2; (-) strand; PAM type: NRG; PAM sequence: AAG
ccagtctgcggttttttttg

SEQ ID NO: 19816 - DNA, 20 bp, Artificial Sequence
  Description of Artificial Sequence: Synthetic oligonucleotide
  Target: ATXN2; (-) strand; PAM type: NRG; PAM sequence: CGG
gaatattttctcccagtctg

SEQ ID NO: 19817 - DNA, 20 bp, Artificial Sequence
  Description of Artificial Sequence: Synthetic oligonucleotide
  Target: ATXN2; (-) strand; PAM type: NRG; PAM sequence: CAG
atattgtgaatattttctcc

SEQ ID NO: 19818 - DNA, 20 bp, Artificial Sequence
  Description of Artificial Sequence: Synthetic oligonucleotide
  Target: ATXN2; (-) strand; PAM type: NRG; PAM sequence: CAG
tctggttacaagtcctttct

SEQ ID NO: 19819 - DNA, 20 bp, Artificial Sequence
  Description of Artificial Sequence: Synthetic oligonucleotide
  Target: ATXN2; (-) strand; PAM type: NRG; PAM sequence: AAG
tatttatatattctggttac

SEQ ID NO: 19820 - DNA, 20 bp, Artificial Sequence
  Description of Artificial Sequence: Synthetic oligonucleotide
  Target: ATXN2; (-) strand; PAM type: NRG; PAM sequence: TGG
tttaagttatttatatattc

SEQ ID NO: 19821 - DNA, 20 bp, Artificial Sequence
  Description of Artificial Sequence: Synthetic oligonucleotide
  Target: ATXN2; (-) strand; PAM type: NRG; PAM sequence: AAG
tacttttagtaaattatttt

SEQ ID NO: 19822 - DNA, 20 bp, Artificial Sequence
  Description of Artificial Sequence: Synthetic oligonucleotide
  Target: ATXN2; (-) strand; PAM type: NRG; PAM sequence: TAG
gaaaataaagttactacttt

SEQ ID NO: 19823 - DNA, 20 bp, Artificial Sequence
  Description of Artificial Sequence: Synthetic oligonucleotide
  Target: ATXN2; (-) strand; PAM type: NRG; PAM sequence: AAG
cttttcttactgtgaaaata

SEQ ID NO: 19824 - DNA, 20 bp, Artificial Sequence
  Description of Artificial Sequence: Synthetic oligonucleotide
  Target: ATXN2; (-) strand; PAM type: NRG; PAM sequence: AAG
ctcacaaaaaaaagaaaaaa

SEQ ID NO: 19825 - DNA, 20 bp, Artificial Sequence
  Description of Artificial Sequence: Synthetic oligonucleotide
  Target: ATXN2; (-) strand; PAM type: NRG; PAM sequence: AAG
agaccctgtctcacaaaaaa

SEQ ID NO: 19826 - DNA, 20 bp, Artificial Sequence
  Description of Artificial Sequence: Synthetic oligonucleotide
  Target: ATXN2; (-) strand; PAM type: NRG; PAM sequence: CAG
tccagcctgggcaatagagc

SEQ ID NO: 19827 - DNA, 20 bp, Artificial Sequence
  Description of Artificial Sequence: Synthetic oligonucleotide
  Target: ATXN2; (-) strand; PAM type: NRG; PAM sequence: GAG
gcactccagcctgggcaata

SEQ ID NO: 19828 - DNA, 20 bp, Artificial Sequence
  Description of Artificial Sequence: Synthetic oligonucleotide
  Target: ATXN2; (-) strand; PAM type: NRG; PAM sequence: TAG
ctgcactccagcctgggcaa

SEQ ID NO: 19829 - DNA, 20 bp, Artificial Sequence
  Description of Artificial Sequence: Synthetic oligonucleotide
  Target: ATXN2; (-) strand; PAM type: NRG; PAM sequence: GGG
gcactactgcactccagcct

SEQ ID NO: 19830 - DNA, 20 bp, Artificial Sequence
  Description of Artificial Sequence: Synthetic oligonucleotide
  Target: ATXN2; (-) strand; PAM type: NRG; PAM sequence: TGG
tgcactactgcactccagcc

SEQ ID NO: 19831 - DNA, 20 bp, Artificial Sequence
  Description of Artificial Sequence: Synthetic oligonucleotide
  Target: ATXN2; (-) strand; PAM type: NRG; PAM sequence: CAG
gagattgcactactgcactc

SEQ ID NO: 19832 - DNA, 20 bp, Artificial Sequence
  Description of Artificial Sequence: Synthetic oligonucleotide
  Target: ATXN2; (-) strand; PAM type: NRG; PAM sequence: GAG
gatcgaggttgcagtgagct

SEQ ID NO: 19833 - DNA, 20 bp, Artificial Sequence
  Description of Artificial Sequence: Synthetic oligonucleotide
  Target: ATXN2; (-) strand; PAM type: NRG; PAM sequence: GAG
ggggtgatcgaggttgcagt

SEQ ID NO: 19834 - DNA, 20 bp, Artificial Sequence
  Description of Artificial Sequence: Synthetic oligonucleotide
  Target: ATXN2; (-) strand; PAM type: NRG; PAM sequence: CAG
tggaggggtgatcgaggttg

SEQ ID NO: 19835 - DNA, 20 bp, Artificial Sequence
  Description of Artificial Sequence: Synthetic oligonucleotide
  Target: ATXN2; (-) strand; PAM type: NRG; PAM sequence: AGG
gggcgatggaggggtgatcg

SEQ ID NO: 19836 - DNA, 20 bp, Artificial Sequence
  Description of Artificial Sequence: Synthetic oligonucleotide
  Target: ATXN2; (-) strand; PAM type: NRG; PAM sequence: GAG
agggcgatggaggggtgatc

SEQ ID NO: 19837 - DNA, 20 bp, Artificial Sequence
  Description of Artificial Sequence: Synthetic oligonucleotide
  Target: ATXN2; (-) strand; PAM type: NRG; PAM sequence: GGG
gggtttggagggcgatggag

SEQ ID NO: 19838 - DNA, 20 bp, Artificial Sequence
  Description of Artificial Sequence: Synthetic oligonucleotide
  Target: ATXN2; (-) strand; PAM type: NRG; PAM sequence: GGG
ggggtttggagggcgatgga

SEQ ID NO: 19839 - DNA, 20 bp, Artificial Sequence
  Description of Artificial Sequence: Synthetic oligonucleotide
  Target: ATXN2; (-) strand; PAM type: NRG; PAM sequence: AGG
gggggtttggagggcgatgg

SEQ ID NO: 19840 - DNA, 20 bp, Artificial Sequence
  Description of Artificial Sequence: Synthetic oligonucleotide
  Target: ATXN2; (-) strand; PAM type: NRG; PAM sequence: GAG
cgggggtttggagggcgatg

SEQ ID NO: 19841 - DNA, 20 bp, Artificial Sequence
  Description of Artificial Sequence: Synthetic oligonucleotide
  Target: ATXN2; (-) strand; PAM type: NRG; PAM sequence: TGG
tgcgggggtttggagggcga

SEQ ID NO: 19842 - DNA, 20 bp, Artificial Sequence
  Description of Artificial Sequence: Synthetic oligonucleotide
  Target: ATXN2; (-) strand; PAM type: NRG; PAM sequence: GGG
cgaggttgcgggggtttgga

SEQ ID NO: 19843 - DNA, 20 bp, Artificial Sequence
  Description of Artificial Sequence: Synthetic oligonucleotide
  Target: ATXN2; (-) strand; PAM type: NRG; PAM sequence: AGG
gcgaggttgcgggggtttgg

SEQ ID NO: 19844 - DNA, 20 bp, Artificial Sequence
  Description of Artificial Sequence: Synthetic oligonucleotide
  Target: ATXN2; (-) strand; PAM type: NRG; PAM sequence: GAG
agcgaggttgcgggggtttg

SEQ ID NO: 19845 - DNA, 20 bp, Artificial Sequence
  Description of Artificial Sequence: Synthetic oligonucleotide
  Target: ATXN2; (-) strand; PAM type: NRG; PAM sequence: TGG
tgagcgaggttgcgggggtt

SEQ ID NO: 19846 - DNA, 20 bp, Artificial Sequence
  Description of Artificial Sequence: Synthetic oligonucleotide
  Target: ATXN2; (-) strand; PAM type: NRG; PAM sequence: GGG
tcgcttgagcgaggttgcgg

SEQ ID NO: 19847 - DNA, 20 bp, Artificial Sequence
  Description of Artificial Sequence: Synthetic oligonucleotide
  Target: ATXN2; (-) strand; PAM type: NRG; PAM sequence: GGG
atcgcttgagcgaggttgcg

SEQ ID NO: 19848 - DNA, 20 bp, Artificial Sequence
  Description of Artificial Sequence: Synthetic oligonucleotide
  Target: ATXN2; (-) strand; PAM type: NRG; PAM sequence: GGG
aatcgcttgagcgaggttgc

SEQ ID NO: 19849 - DNA, 20 bp, Artificial Sequence
  Description of Artificial Sequence: Synthetic oligonucleotide
  Target: ATXN2; (-) strand; PAM type: NRG; PAM sequence: CGG
caatcgcttgagcgaggttg

SEQ ID NO: 19850 - DNA, 20 bp, Artificial Sequence
  Description of Artificial Sequence: Synthetic oligonucleotide
  Target: ATXN2; (-) strand; PAM type: NRG; PAM sequence: AGG
gtgggacaatcgcttgagcg

SEQ ID NO: 19851 - DNA, 20 bp, Artificial Sequence
  Description of Artificial Sequence: Synthetic oligonucleotide
  Target: ATXN2; (-) strand; PAM type: NRG; PAM sequence: GAG
ggtgggacaatcgcttgagc

SEQ ID NO: 19852 - DNA, 20 bp, Artificial Sequence
  Description of Artificial Sequence: Synthetic oligonucleotide
  Target: ATXN2; (-) strand; PAM type: NRG; PAM sequence: GAG
ctgaggtgggacaatcgctt

SEQ ID NO: 19853 - DNA, 20 bp, Artificial Sequence
  Description of Artificial Sequence: Synthetic oligonucleotide
  Target: ATXN2; (-) strand; PAM type: NRG; PAM sequence: GGG
gctacttggggggctgaggt

SEQ ID NO: 19854 - DNA, 20 bp, Artificial Sequence
  Description of Artificial Sequence: Synthetic oligonucleotide
  Target: ATXN2; (-) strand; PAM type: NRG; PAM sequence: TGG
agctacttggggggctgagg

SEQ ID NO: 19855 - DNA, 20 bp, Artificial Sequence
  Description of Artificial Sequence: Synthetic oligonucleotide
  Target: ATXN2; (-) strand; PAM type: NRG; PAM sequence: AGG
cccagctacttggggggctg

SEQ ID NO: 19856 - DNA, 20 bp, Artificial Sequence
  Description of Artificial Sequence: Synthetic oligonucleotide
  Target: ATXN2; (-) strand; PAM type: NRG; PAM sequence: GAG
tcccagctacttggggggct

SEQ ID NO: 19857 - DNA, 20 bp, Artificial Sequence
  Description of Artificial Sequence: Synthetic oligonucleotide
  Target: ATXN2; (-) strand; PAM type: NRG; PAM sequence: GGG
tatggtcccagctacttggg

SEQ ID NO: 19858 - DNA, 20 bp, Artificial Sequence
  Description of Artificial Sequence: Synthetic oligonucleotide
  Target: ATXN2; (-) strand; PAM type: NRG; PAM sequence: GGG
ctatggtcccagctacttgg

SEQ ID NO: 19859 - DNA, 20 bp, Artificial Sequence
  Description of Artificial Sequence: Synthetic oligonucleotide
  Target: ATXN2; (-) strand; PAM type: NRG; PAM sequence: GGG
cctatggtcccagctacttg

SEQ ID NO: 19860 - DNA, 20 bp, Artificial Sequence
  Description of Artificial Sequence: Synthetic oligonucleotide
  Target: ATXN2; (-) strand; PAM type: NRG; PAM sequence: GGG
tcctatggtcccagctactt

SEQ ID NO: 19861 - DNA, 20 bp, Artificial Sequence
  Description of Artificial Sequence: Synthetic oligonucleotide
  Target: ATXN2; (-) strand; PAM type: NRG; PAM sequence: TGG
ttcctatggtcccagctact

SEQ ID NO: 19862 - DNA, 20 bp, Artificial Sequence
  Description of Artificial Sequence: Synthetic oligonucleotide
  Target: ATXN2; (-) strand; PAM type: NRG; PAM sequence: CAG
gaagcgcattcctatggtcc

SEQ ID NO: 19863 - DNA, 20 bp, Artificial Sequence
  Description of Artificial Sequence: Synthetic oligonucleotide
  Target: ATXN2; (-) strand; PAM type: NRG; PAM sequence: TGG
ggcacagaagcgcattccta

SEQ ID NO: 19864 - DNA, 20 bp, Artificial Sequence
  Description of Artificial Sequence: Synthetic oligonucleotide
  Target: ATXN2; (-) strand; PAM type: NRG; PAM sequence: AAG
gaaaaattagccaggcacag

SEQ ID NO: 19865 - DNA, 20 bp, Artificial Sequence
  Description of Artificial Sequence: Synthetic oligonucleotide
  Target: ATXN2; (-) strand; PAM type: NRG; PAM sequence: CAG
aaagaaaaattagccaggca

SEQ ID NO: 19866 - DNA, 20 bp, Artificial Sequence
  Description of Artificial Sequence: Synthetic oligonucleotide
  Target: ATXN2; (-) strand; PAM type: NRG; PAM sequence: AGG
agaaaaaagaaaaattagcc

SEQ ID NO: 19867 - DNA, 20 bp, Artificial Sequence
  Description of Artificial Sequence: Synthetic oligonucleotide
  Target: ATXN2; (-) strand; PAM type: NRG; PAM sequence: CAG
aagaaaaaagaaaaattagc

SEQ ID NO: 19868 - DNA, 20 bp, Artificial Sequence
  Description of Artificial Sequence: Synthetic oligonucleotide
  Target: ATXN2; (-) strand; PAM type: NRG; PAM sequence: TAG
aaaaaagaaaaaagaaaaat

SEQ ID NO: 19869 - DNA, 20 bp, Artificial Sequence
  Description of Artificial Sequence: Synthetic oligonucleotide
  Target: ATXN2; (-) strand; PAM type: NRG; PAM sequence: AAG
tgcaaaaaaaaaaaagaaaa

SEQ ID NO: 19870 - DNA, 20 bp, Artificial Sequence
  Description of Artificial Sequence: Synthetic oligonucleotide
  Target: ATXN2; (-) strand; PAM type: NRG; PAM sequence: AAG
ctgtctttgcaaaaaaaaaa

SEQ ID NO: 19871 - DNA, 20 bp, Artificial Sequence
  Description of Artificial Sequence: Synthetic oligonucleotide
  Target: ATXN2; (-) strand; PAM type: NRG; PAM sequence: AGG
aacagtttgagaccagcctg

SEQ ID NO: 19872 - DNA, 20 bp, Artificial Sequence
  Description of Artificial Sequence: Synthetic oligonucleotide
  Target: ATXN2; (-) strand; PAM type: NRG; PAM sequence: GAG
caacagtttgagaccagcct

SEQ ID NO: 19873 - DNA, 20 bp, Artificial Sequence
  Description of Artificial Sequence: Synthetic oligonucleotide
  Target: ATXN2; (-) strand; PAM type: NRG; PAM sequence: CAG
ttgagccaacagtttgagac

SEQ ID NO: 19874 - DNA, 20 bp, Artificial Sequence
  Description of Artificial Sequence: Synthetic oligonucleotide
  Target: ATXN2; (-) strand; PAM type: NRG; PAM sequence: GAG
atcatttgagccaacagttt

SEQ ID NO: 19875 - DNA, 20 bp, Artificial Sequence
  Description of Artificial Sequence: Synthetic oligonucleotide
  Target: ATXN2; (-) strand; PAM type: NRG; PAM sequence: CAG
ggatggatcatttgagccaa

SEQ ID NO: 19876 - DNA, 20 bp, Artificial Sequence
  Description of Artificial Sequence: Synthetic oligonucleotide
  Target: ATXN2; (-) strand; PAM type: NRG; PAM sequence: GAG
ccaacctggatggatcattt

SEQ ID NO: 19877 - DNA, 20 bp, Artificial Sequence
  Description of Artificial Sequence: Synthetic oligonucleotide
  Target: ATXN2; (-) strand; PAM type: NRG; PAM sequence: TGG
ctttgggaggccaacctgga

SEQ ID NO: 19878 - DNA, 20 bp, Artificial Sequence
  Description of Artificial Sequence: Synthetic oligonucleotide
  Target: ATXN2; (-) strand; PAM type: NRG; PAM sequence: TGG
agcactttgggaggccaacc

SEQ ID NO: 19879 - DNA, 20 bp, Artificial Sequence
  Description of Artificial Sequence: Synthetic oligonucleotide
  Target: ATXN2; (-) strand; PAM type: NRG; PAM sequence: AGG
tgtaattccagcactttggg

SEQ ID NO: 19880 - DNA, 20 bp, Artificial Sequence
  Description of Artificial Sequence: Synthetic oligonucleotide
  Target: ATXN2; (-) strand; PAM type: NRG; PAM sequence: GAG
ctgtaattccagcactttgg

SEQ ID NO: 19881 - DNA, 20 bp, Artificial Sequence
  Description of Artificial Sequence: Synthetic oligonucleotide
  Target: ATXN2; (-) strand; PAM type: NRG; PAM sequence: GGG
gcctgtaattccagcacttt

SEQ ID NO: 19882 - DNA, 20 bp, Artificial Sequence
  Description of Artificial Sequence: Synthetic oligonucleotide
  Target: ATXN2; (-) strand; PAM type: NRG; PAM sequence: TGG
cgcctgtaattccagcactt

SEQ ID NO: 19883 - DNA, 20 bp, Artificial Sequence
  Description of Artificial Sequence: Synthetic oligonucleotide
  Target: ATXN2; (-) strand; PAM type: NRG; PAM sequence: CAG
ctggctcacgcctgtaattc

SEQ ID NO: 19884 - DNA, 20 bp, Artificial Sequence
  Description of Artificial Sequence: Synthetic oligonucleotide
  Target: ATXN2; (-) strand; PAM type: NRG; PAM sequence: TGG
atgtttctgcctgggtgcac

SEQ ID NO: 19885 - DNA, 20 bp, Artificial Sequence
  Description of Artificial Sequence: Synthetic oligonucleotide
  Target: ATXN2; (-) strand; PAM type: NRG; PAM sequence: GGG
ttgtctcaatgtttctgcct

SEQ ID NO: 19886 - DNA, 20 bp, Artificial Sequence
  Description of Artificial Sequence: Synthetic oligonucleotide
  Target: ATXN2; (-) strand; PAM type: NRG; PAM sequence: TGG
tttgtctcaatgtttctgcc

SEQ ID NO: 19887 - DNA, 20 bp, Artificial Sequence
  Description of Artificial Sequence: Synthetic oligonucleotide
  Target: ATXN2; (-) strand; PAM type: NRG; PAM sequence: GAG
agtgctgagattacaggtgt

SEQ ID NO: 19888 - DNA, 20 bp, Artificial Sequence
  Description of Artificial Sequence: Synthetic oligonucleotide
  Target: ATXN2; (-) strand; PAM type: NRG; PAM sequence: AGG
tcccaaagtgctgagattac

SEQ ID NO: 19889 - DNA, 20 bp, Artificial Sequence
  Description of Artificial Sequence: Synthetic oligonucleotide
  Target: ATXN2; (-) strand; PAM type: NRG; PAM sequence: CAG
ctcccaaagtgctgagatta

SEQ ID NO: 19890 - DNA, 20 bp, Artificial Sequence
  Description of Artificial Sequence: Synthetic oligonucleotide
  Target: ATXN2; (-) strand; PAM type: NRG; PAM sequence: GAG
cctcggcctcccaaagtgct

SEQ ID NO: 19891 - DNA, 20 bp, Artificial Sequence
  Description of Artificial Sequence: Synthetic oligonucleotide
  Target: ATXN2; (-) strand; PAM type: NRG; PAM sequence: AAG
ctacctgcctcggcctccca

SEQ ID NO: 19892 - DNA, 20 bp, Artificial Sequence
  Description of Artificial Sequence: Synthetic oligonucleotide
  Target: ATXN2; (-) strand; PAM type: NRG; PAM sequence: CGG
ctcaggtgatctacctgcct

SEQ ID NO: 19893 - DNA, 20 bp, Artificial Sequence
  Description of Artificial Sequence: Synthetic oligonucleotide
  Target: ATXN2; (-) strand; PAM type: NRG; PAM sequence: AGG
ggtctctaactcctgacctc

SEQ ID NO: 19894 - DNA, 20 bp, Artificial Sequence
  Description of Artificial Sequence: Synthetic oligonucleotide
  Target: ATXN2; (-) strand; PAM type: NRG; PAM sequence: CAG
tggtctctaactcctgacct

SEQ ID NO: 19895 - DNA, 20 bp, Artificial Sequence
  Description of Artificial Sequence: Synthetic oligonucleotide
  Target: ATXN2; (-) strand; PAM type: NRG; PAM sequence: TGG
tttcaccatgttggtcatgc

SEQ ID NO: 19896 - DNA, 20 bp, Artificial Sequence
  Description of Artificial Sequence: Synthetic oligonucleotide
  Target: ATXN2; (-) strand; PAM type: NRG; PAM sequence: TGG
taggtggggtttcaccatgt

SEQ ID NO: 19897 - DNA, 20 bp, Artificial Sequence
  Description of Artificial Sequence: Synthetic oligonucleotide
  Target: ATXN2; (-) strand; PAM type: NRG; PAM sequence: GGG
ttgtatttttagtgtaggtg

SEQ ID NO: 19898 - DNA, 20 bp, Artificial Sequence
  Description of Artificial Sequence: Synthetic oligonucleotide
  Target: ATXN2; (-) strand; PAM type: NRG; PAM sequence: GGG
tttgtatttttagtgtaggt

SEQ ID NO: 19899 - DNA, 20 bp, Artificial Sequence
  Description of Artificial Sequence: Synthetic oligonucleotide
  Target: ATXN2; (-) strand; PAM type: NRG; PAM sequence: TGG
ttttgtatttttagtgtagg

SEQ ID NO: 19900 - DNA, 20 bp, Artificial Sequence
  Description of Artificial Sequence: Synthetic oligonucleotide
  Target: ATXN2; (-) strand; PAM type: NRG; PAM sequence: AGG
taattttgtatttttagtgt

SEQ ID NO: 19901 - DNA, 20 bp, Artificial Sequence
  Description of Artificial Sequence: Synthetic oligonucleotide
  Target: ATXN2; (-) strand; PAM type: NRG; PAM sequence: TAG
ctaattttgtatttttagtg

SEQ ID NO: 19902 - DNA, 20 bp, Artificial Sequence
  Description of Artificial Sequence: Synthetic oligonucleotide
  Target: ATXN2; (-) strand; PAM type: NRG; PAM sequence: TAG
cctggctaattttgtatttt

SEQ ID NO: 19903 - DNA, 20 bp, Artificial Sequence
  Description of Artificial Sequence: Synthetic oligonucleotide
  Target: ATXN2; (-) strand; PAM type: NRG; PAM sequence: TGG
caggcatgcgccaccatgcc

SEQ ID NO: 19904 - DNA, 20 bp, Artificial Sequence
  Description of Artificial Sequence: Synthetic oligonucleotide
  Target: ATXN2; (-) strand; PAM type: NRG; PAM sequence: AGG
tcccaagtagctgggattac

SEQ ID NO: 19905 - DNA, 20 bp, Artificial Sequence
  Description of Artificial Sequence: Synthetic oligonucleotide
  Target: ATXN2; (-) strand; PAM type: NRG; PAM sequence: CAG
ctcccaagtagctgggatta

SEQ ID NO: 19906 - DNA, 20 bp, Artificial Sequence
  Description of Artificial Sequence: Synthetic oligonucleotide
  Target: ATXN2; (-) strand; PAM type: NRG; PAM sequence: GGG
ccttagcctcccaagtagct

SEQ ID NO: 19907 - DNA, 20 bp, Artificial Sequence
  Description of Artificial Sequence: Synthetic oligonucleotide
  Target: ATXN2; (-) strand; PAM type: NRG; PAM sequence: TGG
gccttagcctcccaagtagc

SEQ ID NO: 19908 - DNA, 20 bp, Artificial Sequence
  Description of Artificial Sequence: Synthetic oligonucleotide
  Target: ATXN2; (-) strand; PAM type: NRG; PAM sequence: TAG
ttacgccttagcctcccaag

SEQ ID NO: 19909 - DNA, 20 bp, Artificial Sequence
  Description of Artificial Sequence: Synthetic oligonucleotide
  Target: ATXN2; (-) strand; PAM type: NRG; PAM sequence: AAG
ttcttacgccttagcctccc

SEQ ID NO: 19910 - DNA, 20 bp, Artificial Sequence
  Description of Artificial Sequence: Synthetic oligonucleotide
  Target: ATXN2; (-) strand; PAM type: NRG; PAM sequence: TAG
ttcaagcaattcttacgcct

SEQ ID NO: 19911 - DNA, 20 bp, Artificial Sequence
  Description of Artificial Sequence: Synthetic oligonucleotide
  Target: ATXN2; (-) strand; PAM type: NRG; PAM sequence: AAG
aacctccgcctcccaggttc

SEQ ID NO: 19912 - DNA, 20 bp, Artificial Sequence
  Description of Artificial Sequence: Synthetic oligonucleotide
  Target: ATXN2; (-) strand; PAM type: NRG; PAM sequence: AGG
cactgcaacctccgcctccc

SEQ ID NO: 19913 - DNA, 20 bp, Artificial Sequence
  Description of Artificial Sequence: Synthetic oligonucleotide
  Target: ATXN2; (-) strand; PAM type: NRG; PAM sequence: CAG
tcactgcaacctccgcctcc

SEQ ID NO: 19914 - DNA, 20 bp, Artificial Sequence
  Description of Artificial Sequence: Synthetic oligonucleotide
  Target: ATXN2; (-) strand; PAM type: NRG; PAM sequence: TGG
ggaacgcagtggtgccatct

SEQ ID NO: 19915 - DNA, 20 bp, Artificial Sequence
  Description of Artificial Sequence: Synthetic oligonucleotide
  Target: ATXN2; (-) strand; PAM type: NRG; PAM sequence: TGG
ttgcccaggctggaacgcag

SEQ ID NO: 19916 - DNA, 20 bp, Artificial Sequence
  Description of Artificial Sequence: Synthetic oligonucleotide
  Target: ATXN2; (-) strand; PAM type: NRG; PAM sequence: CAG
ctattgcccaggctggaacg

SEQ ID NO: 19917 - DNA, 20 bp, Artificial Sequence
  Description of Artificial Sequence: Synthetic oligonucleotide
  Target: ATXN2; (-) strand; PAM type: NRG; PAM sequence: TGG
tctcactctattgcccaggc

SEQ ID NO: 19918 - DNA, 20 bp, Artificial Sequence
  Description of Artificial Sequence: Synthetic oligonucleotide
  Target: ATXN2; (-) strand; PAM type: NRG; PAM sequence: AGG
ggaatctcactctattgccc

SEQ ID NO: 19919 - DNA, 20 bp, Artificial Sequence
  Description of Artificial Sequence: Synthetic oligonucleotide
  Target: ATXN2; (-) strand; PAM type: NRG; PAM sequence: CAG
tggaatctcactctattgcc

SEQ ID NO: 19920 - DNA, 20 bp, Artificial Sequence
  Description of Artificial Sequence: Synthetic oligonucleotide
  Target: ATXN2; (-) strand; PAM type: NRG; PAM sequence: TGG
ttatttatttatttatttga

SEQ ID NO: 19921 - DNA, 20 bp, Artificial Sequence
  Description of Artificial Sequence: Synthetic oligonucleotide
  Target: ATXN2; (-) strand; PAM type: NRG; PAM sequence: TGG
gtcaacctttttttagtaaa

SEQ ID NO: 19922 - DNA, 20 bp, Artificial Sequence
  Description of Artificial Sequence: Synthetic oligonucleotide
  Target: ATXN2; (-) strand; PAM type: NRG; PAM sequence: TAG
ttcagctgtcaacctttttt

SEQ ID NO: 19923 - DNA, 20 bp, Artificial Sequence
  Description of Artificial Sequence: Synthetic oligonucleotide
  Target: ATXN2; (-) strand; PAM type: NRG; PAM sequence: CAG
atcatgtgtgtgtttgtttt

SEQ ID NO: 19924 - DNA, 20 bp, Artificial Sequence
  Description of Artificial Sequence: Synthetic oligonucleotide
  Target: ATXN2; (-) strand; PAM type: NRG; PAM sequence: GAG
tctgatgatgactgatccag

SEQ ID NO: 19925 - DNA, 20 bp, Artificial Sequence
  Description of Artificial Sequence: Synthetic oligonucleotide
  Target: ATXN2; (-) strand; PAM type: NRG; PAM sequence: AGG
tctctgatgatgactgatcc

SEQ ID NO: 19926 - DNA, 20 bp, Artificial Sequence
  Description of Artificial Sequence: Synthetic oligonucleotide
  Target: ATXN2; (-) strand; PAM type: NRG; PAM sequence: CAG
ttctctgatgatgactgatc

SEQ ID NO: 19927 - DNA, 20 bp, Artificial Sequence
  Description of Artificial Sequence: Synthetic oligonucleotide
  Target: ATXN2; (-) strand; PAM type: NRG; PAM sequence: TGG
caggtctaatgggtgtctta

SEQ ID NO: 19928 - DNA, 20 bp, Artificial Sequence
  Description of Artificial Sequence: Synthetic oligonucleotide
  Target: ATXN2; (-) strand; PAM type: NRG; PAM sequence: GGG
ttaatttcaacaggtctaat

SEQ ID NO: 19929 - DNA, 20 bp, Artificial Sequence
  Description of Artificial Sequence: Synthetic oligonucleotide
  Target: ATXN2; (-) strand; PAM type: NRG; PAM sequence: TGG
tttaatttcaacaggtctaa

SEQ ID NO: 19930 - DNA, 20 bp, Artificial Sequence
  Description of Artificial Sequence: Synthetic oligonucleotide
  Target: ATXN2; (-) strand; PAM type: NRG; PAM sequence: AGG
gttatctttttaatttcaac

SEQ ID NO: 19931 - DNA, 20 bp, Artificial Sequence
  Description of Artificial Sequence: Synthetic oligonucleotide
  Target: ATXN2; (-) strand; PAM type: NRG; PAM sequence: CAG
tgttatctttttaatttcaa

SEQ ID NO: 19932 - DNA, 20 bp, Artificial Sequence
  Description of Artificial Sequence: Synthetic oligonucleotide
  Target: ATXN2; (-) strand; PAM type: NRG; PAM sequence: TGG
tctgcatccttgccaacact

SEQ ID NO: 19933 - DNA, 20 bp, Artificial Sequence
  Description of Artificial Sequence: Synthetic oligonucleotide
  Target: ATXN2; (-) strand; PAM type: NRG; PAM sequence: AGG
aactgatcaggtacatgtgt

SEQ ID NO: 19934 - DNA, 20 bp, Artificial Sequence
  Description of Artificial Sequence: Synthetic oligonucleotide
  Target: ATXN2; (-) strand; PAM type: NRG; PAM sequence: TAG
caactgatcaggtacatgtg

SEQ ID NO: 19935 - DNA, 20 bp, Artificial Sequence
  Description of Artificial Sequence: Synthetic oligonucleotide
  Target: ATXN2; (-) strand; PAM type: NRG; PAM sequence: AGG
attttacattccaactgatc

SEQ ID NO: 19936 - DNA, 20 bp, Artificial Sequence
  Description of Artificial Sequence: Synthetic oligonucleotide
  Target: ATXN2; (-) strand; PAM type: NRG; PAM sequence: CAG
cattttacattccaactgat

SEQ ID NO: 19937 - DNA, 20 bp, Artificial Sequence
  Description of Artificial Sequence: Synthetic oligonucleotide
  Target: ATXN2; (-) strand; PAM type: NRG; PAM sequence: AAG
aagaaactagcaatcttcta

SEQ ID NO: 19938 - DNA, 20 bp, Artificial Sequence
  Description of Artificial Sequence: Synthetic oligonucleotide
  Target: ATXN2; (-) strand; PAM type: NRG; PAM sequence: TAG
tatttcaattaataagaaac

SEQ ID NO: 19939 - DNA, 20 bp, Artificial Sequence
  Description of Artificial Sequence: Synthetic oligonucleotide
  Target: ATXN2; (-) strand; PAM type: NRG; PAM sequence: AAG
aaatacatatttcaattaat

SEQ ID NO: 19940 - DNA, 20 bp, Artificial Sequence
  Description of Artificial Sequence: Synthetic oligonucleotide
  Target: ATXN2; (-) strand; PAM type: NRG; PAM sequence: TGG
gtgagccaccacacactgcc

SEQ ID NO: 19941 - DNA, 20 bp, Artificial Sequence
  Description of Artificial Sequence: Synthetic oligonucleotide
  Target: ATXN2; (-) strand; PAM type: NRG; PAM sequence: GAG
agtgttgggattacagatgt

SEQ ID NO: 19942 - DNA, 20 bp, Artificial Sequence
  Description of Artificial Sequence: Synthetic oligonucleotide
  Target: ATXN2; (-) strand; PAM type: NRG; PAM sequence: CAG
ctcccaaagtgttgggatta

SEQ ID NO: 19943 - DNA, 20 bp, Artificial Sequence
  Description of Artificial Sequence: Synthetic oligonucleotide
  Target: ATXN2; (-) strand; PAM type: NRG; PAM sequence: GGG
ccccagcctcccaaagtgtt

SEQ ID NO: 19944 - DNA, 20 bp, Artificial Sequence
  Description of Artificial Sequence: Synthetic oligonucleotide
  Target: ATXN2; (-) strand; PAM type: NRG; PAM sequence: TGG
gccccagcctcccaaagtgt

SEQ ID NO: 19945 - DNA, 20 bp, Artificial Sequence
  Description of Artificial Sequence: Synthetic oligonucleotide
  Target: ATXN2; (-) strand; PAM type: NRG; PAM sequence: AAG
ccacccgccccagcctccca

SEQ ID NO: 19946 - DNA, 20 bp, Artificial Sequence
  Description of Artificial Sequence: Synthetic oligonucleotide
  Target: ATXN2; (-) strand; PAM type: NRG; PAM sequence: CAG
cacaagtgatccacccgccc

SEQ ID NO: 19947 - DNA, 20 bp, Artificial Sequence
  Description of Artificial Sequence: Synthetic oligonucleotide
  Target: ATXN2; (-) strand; PAM type: NRG; PAM sequence: AAG
ggtctcgaactcctgaccac

SEQ ID NO: 19948 - DNA, 20 bp, Artificial Sequence
  Description of Artificial Sequence: Synthetic oligonucleotide
  Target: ATXN2; (-) strand; PAM type: NRG; PAM sequence: TGG
tttcaccacgttggccaggc

SEQ ID NO: 19949 - DNA, 20 bp, Artificial Sequence
  Description of Artificial Sequence: Synthetic oligonucleotide
  Target: ATXN2; (-) strand; PAM type: NRG; PAM sequence: AGG
ggggtttcaccacgttggcc

SEQ ID NO: 19950 - DNA, 20 bp, Artificial Sequence
  Description of Artificial Sequence: Synthetic oligonucleotide
  Target: ATXN2; (-) strand; PAM type: NRG; PAM sequence: CAG
cggggtttcaccacgttggc

SEQ ID NO: 19951 - DNA, 20 bp, Artificial Sequence
  Description of Artificial Sequence: Synthetic oligonucleotide
  Target: ATXN2; (-) strand; PAM type: NRG; PAM sequence: TGG
gagacggggtttcaccacgt

SEQ ID NO: 19952 - DNA, 20 bp, Artificial Sequence
  Description of Artificial Sequence: Synthetic oligonucleotide
  Target: ATXN2; (-) strand; PAM type: NRG; PAM sequence: GGG
ttgtatttttagtagagacg

SEQ ID NO: 19953 - DNA, 20 bp, Artificial Sequence
  Description of Artificial Sequence: Synthetic oligonucleotide
  Target: ATXN2; (-) strand; PAM type: NRG; PAM sequence: GGG
tttgtatttttagtagagac

SEQ ID NO: 19954 - DNA, 20 bp, Artificial Sequence
  Description of Artificial Sequence: Synthetic oligonucleotide
  Target: ATXN2; (-) strand; PAM type: NRG; PAM sequence: CGG
ttttgtatttttagtagaga

SEQ ID NO: 19955 - DNA, 20 bp, Artificial Sequence
  Description of Artificial Sequence: Synthetic oligonucleotide
  Target: ATXN2; (-) strand; PAM type: NRG; PAM sequence: GAG
atttttttgtatttttagta

SEQ ID NO: 19956 - DNA, 20 bp, Artificial Sequence
  Description of Artificial Sequence: Synthetic oligonucleotide
  Target: ATXN2; (-) strand; PAM type: NRG; PAM sequence: TAG
taatttttttgtatttttag

SEQ ID NO: 19957 - DNA, 20 bp, Artificial Sequence
  Description of Artificial Sequence: Synthetic oligonucleotide
  Target: ATXN2; (-) strand; PAM type: NRG; PAM sequence: TAG
ggctaatttttttgtatttt

SEQ ID NO: 19958 - DNA, 20 bp, Artificial Sequence
  Description of Artificial Sequence: Synthetic oligonucleotide
  Target: ATXN2; (-) strand; PAM type: NRG; PAM sequence: TGG
caggcgcgcaccaccatgcc

SEQ ID NO: 19959 - DNA, 20 bp, Artificial Sequence
  Description of Artificial Sequence: Synthetic oligonucleotide
  Target: ATXN2; (-) strand; PAM type: NRG; PAM sequence: AGG
tcccaagtagctgggattac

SEQ ID NO: 19960 - DNA, 20 bp, Artificial Sequence
  Description of Artificial Sequence: Synthetic oligonucleotide
  Target: ATXN2; (-) strand; PAM type: NRG; PAM sequence: CAG
ctcccaagtagctgggatta

SEQ ID NO: 19961 - DNA, 20 bp, Artificial Sequence
  Description of Artificial Sequence: Synthetic oligonucleotide
  Target: ATXN2; (-) strand; PAM type: NRG; PAM sequence: GGG
cctcagcctcccaagtagct

SEQ ID NO: 19962 - DNA, 20 bp, Artificial Sequence
  Description of Artificial Sequence: Synthetic oligonucleotide
  Target: ATXN2; (-) strand; PAM type: NRG; PAM sequence: TGG
gcctcagcctcccaagtagc

SEQ ID NO: 19963 - DNA, 20 bp, Artificial Sequence
  Description of Artificial Sequence: Synthetic oligonucleotide
  Target: ATXN2; (-) strand; PAM type: NRG; PAM sequence: TAG
tcccgcctcagcctcccaag

SEQ ID NO: 19964 - DNA, 20 bp, Artificial Sequence
  Description of Artificial Sequence: Synthetic oligonucleotide
  Target: ATXN2; (-) strand; PAM type: NRG; PAM sequence: AAG
ttctcccgcctcagcctccc

SEQ ID NO: 19965 - DNA, 20 bp, Artificial Sequence
  Description of Artificial Sequence: Synthetic oligonucleotide
  Target: ATXN2; (-) strand; PAM type: NRG; PAM sequence: CAG
ttcaagcaattctcccgcct

SEQ ID NO: 19966 - DNA, 20 bp, Artificial Sequence
  Description of Artificial Sequence: Synthetic oligonucleotide
  Target: ATXN2; (-) strand; PAM type: NRG; PAM sequence: AAG
aacctccctgtcccgggttc

SEQ ID NO: 19967 - DNA, 20 bp, Artificial Sequence
  Description of Artificial Sequence: Synthetic oligonucleotide
  Target: ATXN2; (-) strand; PAM type: NRG; PAM sequence: GGG
catggcaacctccctgtccc

SEQ ID NO: 19968 - DNA, 20 bp, Artificial Sequence
  Description of Artificial Sequence: Synthetic oligonucleotide
  Target: ATXN2; (-) strand; PAM type: NRG; PAM sequence: CGG
tcatggcaacctccctgtcc

SEQ ID NO: 19969 - DNA, 20 bp, Artificial Sequence
  Description of Artificial Sequence: Synthetic oligonucleotide
  Target: ATXN2; (-) strand; PAM type: NRG; PAM sequence: TGG
agtggcgtgatttcagctca

SEQ ID NO: 19970 - DNA, 20 bp, Artificial Sequence
  Description of Artificial Sequence: Synthetic oligonucleotide
  Target: ATXN2; (-) strand; PAM type: NRG; PAM sequence: CAG
ggagttcagtggcgtgattt

SEQ ID NO: 19971 - DNA, 20 bp, Artificial Sequence
  Description of Artificial Sequence: Synthetic oligonucleotide
  Target: ATXN2; (-) strand; PAM type: NRG; PAM sequence: TGG
ttgcccaggctggagttcag

SEQ ID NO: 19972 - DNA, 20 bp, Artificial Sequence
  Description of Artificial Sequence: Synthetic oligonucleotide
  Target: ATXN2; (-) strand; PAM type: NRG; PAM sequence: CAG
ctgttgcccaggctggagtt

SEQ ID NO: 19973 - DNA, 20 bp, Artificial Sequence
  Description of Artificial Sequence: Synthetic oligonucleotide
  Target: ATXN2; (-) strand; PAM type: NRG; PAM sequence: GAG
tcactctgttgcccaggctg

SEQ ID NO: 19974 - DNA, 20 bp, Artificial Sequence
  Description of Artificial Sequence: Synthetic oligonucleotide
  Target: ATXN2; (-) strand; PAM type: NRG; PAM sequence: TGG
tctcactctgttgcccaggc

SEQ ID NO: 19975 - DNA, 20 bp, Artificial Sequence
  Description of Artificial Sequence: Synthetic oligonucleotide
  Target: ATXN2; (-) strand; PAM type: NRG; PAM sequence: AGG
gaagtctcactctgttgccc

SEQ ID NO: 19976 - DNA, 20 bp, Artificial Sequence
  Description of Artificial Sequence: Synthetic oligonucleotide
  Target: ATXN2; (-) strand; PAM type: NRG; PAM sequence: CAG
tgaagtctcactctgttgcc

SEQ ID NO: 19977 - DNA, 20 bp, Artificial Sequence
  Description of Artificial Sequence: Synthetic oligonucleotide
  Target: ATXN2; (-) strand; PAM type: NRG; PAM sequence: AAG
tatttattttttttgagatg

SEQ ID NO: 19978 - DNA, 20 bp, Artificial Sequence
  Description of Artificial Sequence: Synthetic oligonucleotide
  Target: ATXN2; (-) strand; PAM type: NRG; PAM sequence: GAG
tttatttatttatttttttt

SEQ ID NO: 19979 - DNA, 20 bp, Artificial Sequence
  Description of Artificial Sequence: Synthetic oligonucleotide
  Target: ATXN2; (-) strand; PAM type: NRG; PAM sequence: AAG
tggaattgctgaggtatggt

SEQ ID NO: 19980 - DNA, 20 bp, Artificial Sequence
  Description of Artificial Sequence: Synthetic oligonucleotide
  Target: ATXN2; (-) strand; PAM type: NRG; PAM sequence: TGG
gaattggaattgctgaggta

SEQ ID NO: 19981 - DNA, 20 bp, Artificial Sequence
  Description of Artificial Sequence: Synthetic oligonucleotide
  Target: ATXN2; (-) strand; PAM type: NRG; PAM sequence: AGG
acctagaattggaattgctg

SEQ ID NO: 19982 - DNA, 20 bp, Artificial Sequence
  Description of Artificial Sequence: Synthetic oligonucleotide
  Target: ATXN2; (-) strand; PAM type: NRG; PAM sequence: GAG
tacctagaattggaattgct

SEQ ID NO: 19983 - DNA, 20 bp, Artificial Sequence
  Description of Artificial Sequence: Synthetic oligonucleotide
  Target: ATXN2; (-) strand; PAM type: NRG; PAM sequence: TGG
tttagttaaatacctagaat

SEQ ID NO: 19984 - DNA, 20 bp, Artificial Sequence
  Description of Artificial Sequence: Synthetic oligonucleotide
  Target: ATXN2; (-) strand; PAM type: NRG; PAM sequence: TAG
atttcttttagttaaatacc

SEQ ID NO: 19985 - DNA, 20 bp, Artificial Sequence
  Description of Artificial Sequence: Synthetic oligonucleotide
  Target: ATXN2; (-) strand; PAM type: NRG; PAM sequence: TAG
gtttgtgtttttatttcttt

SEQ ID NO: 19986 - DNA, 20 bp, Artificial Sequence
  Description of Artificial Sequence: Synthetic oligonucleotide
  Target: ATXN2; (-) strand; PAM type: NRG; PAM sequence: AAG
tgctgtgagcatttgtgtac

SEQ ID NO: 19987 - DNA, 20 bp, Artificial Sequence
  Description of Artificial Sequence: Synthetic oligonucleotide
  Target: ATXN2; (-) strand; PAM type: NRG; PAM sequence: GAG
attatgaatgaagctgctgt

SEQ ID NO: 19988 - DNA, 20 bp, Artificial Sequence
  Description of Artificial Sequence: Synthetic oligonucleotide
  Target: ATXN2; (-) strand; PAM type: NRG; PAM sequence: AAG
gcttttggctattatgaatg

SEQ ID NO: 19989 - DNA, 20 bp, Artificial Sequence
  Description of Artificial Sequence: Synthetic oligonucleotide
  Target: ATXN2; (-) strand; PAM type: NRG; PAM sequence: TGG
tttgagttattgccagcttt

SEQ ID NO: 19990 - DNA, 20 bp, Artificial Sequence
  Description of Artificial Sequence: Synthetic oligonucleotide
  Target: ATXN2; (-) strand; PAM type: NRG; PAM sequence: CAG
atgggcatttgagttattgc

SEQ ID NO: 19991 - DNA, 20 bp, Artificial Sequence
  Description of Artificial Sequence: Synthetic oligonucleotide
  Target: ATXN2; (-) strand; PAM type: NRG; PAM sequence: GAG
ttactagtcgatgggcattt

SEQ ID NO: 19992 - DNA, 20 bp, Artificial Sequence
  Description of Artificial Sequence: Synthetic oligonucleotide
  Target: ATXN2; (-) strand; PAM type: NRG; PAM sequence: GGG
tttacccattactagtcgat

SEQ ID NO: 19993 - DNA, 20 bp, Artificial Sequence
  Description of Artificial Sequence: Synthetic oligonucleotide
  Target: ATXN2; (-) strand; PAM type: NRG; PAM sequence: TGG
atttacccattactagtcga

SEQ ID NO: 19994 - DNA, 20 bp, Artificial Sequence
  Description of Artificial Sequence: Synthetic oligonucleotide
  Target: ATXN2; (-) strand; PAM type: NRG; PAM sequence: TAG
acagttaatttacccattac

SEQ ID NO: 19995 - DNA, 20 bp, Artificial Sequence
  Description of Artificial Sequence: Synthetic oligonucleotide
  Target: ATXN2; (-) strand; PAM type: NRG; PAM sequence: CAG
ttcattttatgattatacca

SEQ ID NO: 19996 - DNA, 20 bp, Artificial Sequence
  Description of Artificial Sequence: Synthetic oligonucleotide
  Target: ATXN2; (-) strand; PAM type: NRG; PAM sequence: TAG
tattcctttttattgctggg

SEQ ID NO: 19997 - DNA, 20 bp, Artificial Sequence
  Description of Artificial Sequence: Synthetic oligonucleotide
  Target: ATXN2; (-) strand; PAM type: NRG; PAM sequence: GGG
gcttattcctttttattgct

SEQ ID NO: 19998 - DNA, 20 bp, Artificial Sequence
  Description of Artificial Sequence: Synthetic oligonucleotide
  Target: ATXN2; (-) strand; PAM type: NRG; PAM sequence: TGG
agcttattcctttttattgc

SEQ ID NO: 19999 - DNA, 20 bp, Artificial Sequence
  Description of Artificial Sequence: Synthetic oligonucleotide
  Target: ATXN2; (-) strand; PAM type: NRG; PAM sequence: CAG
tgtgagtcaccgtgcccagc

SEQ ID NO: 20000 - DNA, 20 bp, Artificial Sequence
  Description of Artificial Sequence: Synthetic oligonucleotide
  Target: ATXN2; (-) strand; PAM type: NRG; PAM sequence: CAG
caggtgtgagtcaccgtgcc

SEQ ID NO: 20001 - DNA, 20 bp, Artificial Sequence
  Description of Artificial Sequence: Synthetic oligonucleotide
  Target: ATXN2; (-) strand; PAM type: NRG; PAM sequence: GAG
agtgctgggattacaggtgt

SEQ ID NO: 20002 - DNA, 20 bp, Artificial Sequence
  Description of Artificial Sequence: Synthetic oligonucleotide
  Target: ATXN2; (-) strand; PAM type: NRG; PAM sequence: AGG
tcccaaagtgctgggattac

SEQ ID NO: 20003 - DNA, 20 bp, Artificial Sequence
  Description of Artificial Sequence: Synthetic oligonucleotide
  Target: ATXN2; (-) strand; PAM type: NRG; PAM sequence: CAG
ctcccaaagtgctgggatta

SEQ ID NO: 20004 - DNA, 20 bp, Artificial Sequence
  Description of Artificial Sequence: Synthetic oligonucleotide
  Target: ATXN2; (-) strand; PAM type: NRG; PAM sequence: GGG
ccttggcctcccaaagtgct

SEQ ID NO: 20005 - DNA, 20 bp, Artificial Sequence
  Description of Artificial Sequence: Synthetic oligonucleotide
  Target: ATXN2; (-) strand; PAM type: NRG; PAM sequence: TGG
gccttggcctcccaaagtgc

SEQ ID NO: 20006 - DNA, 20 bp, Artificial Sequence
  Description of Artificial Sequence: Synthetic oligonucleotide
  Target: ATXN2; (-) strand; PAM type: NRG; PAM sequence: AAG
ccacctgccttggcctccca

SEQ ID NO: 20007 - DNA, 20 bp, Artificial Sequence
  Description of Artificial Sequence: Synthetic oligonucleotide
  Target: ATXN2; (-) strand; PAM type: NRG; PAM sequence: TGG
cccaaatgatccacctgcct

SEQ ID NO: 20008 - DNA, 20 bp, Artificial Sequence
  Description of Artificial Sequence: Synthetic oligonucleotide
  Target: ATXN2; (-) strand; PAM type: NRG; PAM sequence: TGG
tttcaccatgttggccaggc

SEQ ID NO: 20009 - DNA, 20 bp, Artificial Sequence
  Description of Artificial Sequence: Synthetic oligonucleotide
  Target: ATXN2; (-) strand; PAM type: NRG; PAM sequence: AGG
gggatttcaccatgttggcc

SEQ ID NO: 20010 - DNA, 20 bp, Artificial Sequence
  Description of Artificial Sequence: Synthetic oligonucleotide
  Target: ATXN2; (-) strand; PAM type: NRG; PAM sequence: CAG
cgggatttcaccatgttggc

SEQ ID NO: 20011 - DNA, 20 bp, Artificial Sequence
  Description of Artificial Sequence: Synthetic oligonucleotide
  Target: ATXN2; (-) strand; PAM type: NRG; PAM sequence: TGG
gagacgggatttcaccatgt

SEQ ID NO: 20012 - DNA, 20 bp, Artificial Sequence
  Description of Artificial Sequence: Synthetic oligonucleotide
  Target: ATXN2; (-) strand; PAM type: NRG; PAM sequence: GGG
tttttttttttagcagagac

SEQ ID NO: 20013 - DNA, 20 bp, Artificial Sequence
  Description of Artificial Sequence: Synthetic oligonucleotide
  Target: ATXN2; (-) strand; PAM type: NRG; PAM sequence: CGG
ttttttttttttagcagaga

SEQ ID NO: 20014 - DNA, 20 bp, Artificial Sequence
  Description of Artificial Sequence: Synthetic oligonucleotide
  Target: ATXN2; (-) strand; PAM type: NRG; PAM sequence: GAG
ttttttttttttttttagca

SEQ ID NO: 20015 - DNA, 20 bp, Artificial Sequence
  Description of Artificial Sequence: Synthetic oligonucleotide
  Target: ATXN2; (-) strand; PAM type: NRG; PAM sequence: CAG
ttttttttttttttttttag

SEQ ID NO: 20016 - DNA, 20 bp, Artificial Sequence
  Description of Artificial Sequence: Synthetic oligonucleotide
  Target: ATXN2; (-) strand; PAM type: NRG; PAM sequence: TAG
tttttttttttttttttttt

SEQ ID NO: 20017 - DNA, 20 bp, Artificial Sequence
  Description of Artificial Sequence: Synthetic oligonucleotide
  Target: ATXN2; (-) strand; PAM type: NRG; PAM sequence: TGG
caggcacgtgccaccacacc

SEQ ID NO: 20018 - DNA, 20 bp, Artificial Sequence
  Description of Artificial Sequence: Synthetic oligonucleotide
  Target: ATXN2; (-) strand; PAM type: NRG; PAM sequence: AGG
tcccaagtagctgggattac

SEQ ID NO: 20019 - DNA, 20 bp, Artificial Sequence
  Description of Artificial Sequence: Synthetic oligonucleotide
  Target: ATXN2; (-) strand; PAM type: NRG; PAM sequence: CAG
ctcccaagtagctgggatta

SEQ ID NO: 20020 - DNA, 20 bp, Artificial Sequence
  Description of Artificial Sequence: Synthetic oligonucleotide
  Target: ATXN2; (-) strand; PAM type: NRG; PAM sequence: GGG
cctcagcctcccaagtagct

SEQ ID NO: 20021 - DNA, 20 bp, Artificial Sequence
  Description of Artificial Sequence: Synthetic oligonucleotide
  Target: ATXN2; (-) strand; PAM type: NRG; PAM sequence: TGG
gcctcagcctcccaagtagc

SEQ ID NO: 20022 - DNA, 20 bp, Artificial Sequence
  Description of Artificial Sequence: Synthetic oligonucleotide
  Target: ATXN2; (-) strand; PAM type: NRG; PAM sequence: TAG
cactgcctcagcctcccaag

SEQ ID NO: 20023 - DNA, 20 bp, Artificial Sequence
  Description of Artificial Sequence: Synthetic oligonucleotide
  Target: ATXN2; (-) strand; PAM type: NRG; PAM sequence: AAG
ttccactgcctcagcctccc

SEQ ID NO: 20024 - DNA, 20 bp, Artificial Sequence
  Description of Artificial Sequence: Synthetic oligonucleotide
  Target: ATXN2; (-) strand; PAM type: NRG; PAM sequence: CAG
ggtctgcaattccactgcct

SEQ ID NO: 20025 - DNA, 20 bp, Artificial Sequence
  Description of Artificial Sequence: Synthetic oligonucleotide
  Target: ATXN2; (-) strand; PAM type: NRG; PAM sequence: TGG
cttgttctgtgtcccagaat

SEQ ID NO: 20026 - DNA, 20 bp, Artificial Sequence
  Description of Artificial Sequence: Synthetic oligonucleotide
  Target: ATXN2; (-) strand; PAM type: NRG; PAM sequence: CAG
tggagtcttgttctgtgtcc

SEQ ID NO: 20027 - DNA, 20 bp, Artificial Sequence
  Description of Artificial Sequence: Synthetic oligonucleotide
  Target: ATXN2; (-) strand; PAM type: NRG; PAM sequence: GAG
gtttgtttgtttttgagatg

SEQ ID NO: 20028 - DNA, 20 bp, Artificial Sequence
  Description of Artificial Sequence: Synthetic oligonucleotide
  Target: ATXN2; (-) strand; PAM type: NRG; PAM sequence: TGG
ttgtttgtttgtttttgaga

SEQ ID NO: 20029 - DNA, 20 bp, Artificial Sequence
  Description of Artificial Sequence: Synthetic oligonucleotide
  Target: ATXN2; (-) strand; PAM type: NRG; PAM sequence: GAG
ttgtttgtttgtttgttttt

SEQ ID NO: 20030 - DNA, 20 bp, Artificial Sequence
  Description of Artificial Sequence: Synthetic oligonucleotide
  Target: ATXN2; (-) strand; PAM type: NRG; PAM sequence: CAG
tttgaatttcatgttagtat

SEQ ID NO: 20031 - DNA, 20 bp, Artificial Sequence
  Description of Artificial Sequence: Synthetic oligonucleotide
  Target: ATXN2; (-) strand; PAM type: NRG; PAM sequence: TAG
tagtaatttgaatttcatgt

SEQ ID NO: 20032 - DNA, 20 bp, Artificial Sequence
  Description of Artificial Sequence: Synthetic oligonucleotide
  Target: ATXN2; (-) strand; PAM type: NRG; PAM sequence: TAG
tatgtgtgtcctaaacagtg

SEQ ID NO: 20033 - DNA, 20 bp, Artificial Sequence
  Description of Artificial Sequence: Synthetic oligonucleotide
  Target: ATXN2; (-) strand; PAM type: NRG; PAM sequence: CAG
tttcatatgtgtgtcctaaa

SEQ ID NO: 20034 - DNA, 20 bp, Artificial Sequence
  Description of Artificial Sequence: Synthetic oligonucleotide
  Target: ATXN2; (-) strand; PAM type: NRG; PAM sequence: TGG
ggacgcaagttggacaagct

SEQ ID NO: 20035 - DNA, 20 bp, Artificial Sequence
  Description of Artificial Sequence: Synthetic oligonucleotide
  Target: ATXN2; (-) strand; PAM type: NRG; PAM sequence: AAG
tcccaggacgcaagttggac

SEQ ID NO: 20036 - DNA, 20 bp, Artificial Sequence
  Description of Artificial Sequence: Synthetic oligonucleotide
  Target: ATXN2; (-) strand; PAM type: NRG; PAM sequence: TGG
agccgtcccaggacgcaagt

SEQ ID NO: 20037 - DNA, 20 bp, Artificial Sequence
  Description of Artificial Sequence: Synthetic oligonucleotide
  Target: ATXN2; (-) strand; PAM type: NRG; PAM sequence: AAG
tcaaagccgtcccaggacgc

SEQ ID NO: 20038 - DNA, 20 bp, Artificial Sequence
  Description of Artificial Sequence: Synthetic oligonucleotide
  Target: ATXN2; (-) strand; PAM type: NRG; PAM sequence: AGG
gccacattcaaagccgtccc

SEQ ID NO: 20039 - DNA, 20 bp, Artificial Sequence
  Description of Artificial Sequence: Synthetic oligonucleotide
  Target: ATXN2; (-) strand; PAM type: NRG; PAM sequence: CAG
ggccacattcaaagccgtcc

SEQ ID NO: 20040 - DNA, 20 bp, Artificial Sequence
  Description of Artificial Sequence: Synthetic oligonucleotide
  Target: ATXN2; (-) strand; PAM type: NRG; PAM sequence: AAG
tttgtgttgggccacattca

SEQ ID NO: 20041 - DNA, 20 bp, Artificial Sequence
  Description of Artificial Sequence: Synthetic oligonucleotide
  Target: ATXN2; (-) strand; PAM type: NRG; PAM sequence: GGG
aaagtttatgaatttgtgtt

SEQ ID NO: 20042 - DNA, 20 bp, Artificial Sequence
  Description of Artificial Sequence: Synthetic oligonucleotide
  Target: ATXN2; (-) strand; PAM type: NRG; PAM sequence: TGG
gaaagtttatgaatttgtgt

SEQ ID NO: 20043 - DNA, 20 bp, Artificial Sequence
  Description of Artificial Sequence: Synthetic oligonucleotide
  Target: ATXN2; (-) strand; PAM type: NRG; PAM sequence: AAG
aaacttataatgttttaaga

SEQ ID NO: 20044 - DNA, 20 bp, Artificial Sequence
  Description of Artificial Sequence: Synthetic oligonucleotide
  Target: ATXN2; (-) strand; PAM type: NRG; PAM sequence: AAG
agcaaaacttataatgtttt

SEQ ID NO: 20045 - DNA, 20 bp, Artificial Sequence
  Description of Artificial Sequence: Synthetic oligonucleotide
  Target: ATXN2; (-) strand; PAM type: NRG; PAM sequence: TAG
atgaacaaaacaaaaaaaaa

SEQ ID NO: 20046 - DNA, 20 bp, Artificial Sequence
  Description of Artificial Sequence: Synthetic oligonucleotide
  Target: ATXN2; (-) strand; PAM type: NRG; PAM sequence: TAG
aaatacagtaacactaatga

SEQ ID NO: 20047 - DNA, 20 bp, Artificial Sequence
  Description of Artificial Sequence: Synthetic oligonucleotide
  Target: ATXN2; (-) strand; PAM type: NRG; PAM sequence: CAG
gttgggccacacataaaata

SEQ ID NO: 20048 - DNA, 20 bp, Artificial Sequence
  Description of Artificial Sequence: Synthetic oligonucleotide
  Target: ATXN2; (-) strand; PAM type: NRG; PAM sequence: GGG
attggaagaagaattgtgtt

SEQ ID NO: 20049 - DNA, 20 bp, Artificial Sequence
  Description of Artificial Sequence: Synthetic oligonucleotide
  Target: ATXN2; (-) strand; PAM type: NRG; PAM sequence: TGG
tattggaagaagaattgtgt

SEQ ID NO: 20050 - DNA, 20 bp, Artificial Sequence
  Description of Artificial Sequence: Synthetic oligonucleotide
  Target: ATXN2; (-) strand; PAM type: NRG; PAM sequence: AAG
tccctgggtcatattggaag

SEQ ID NO: 20051 - DNA, 20 bp, Artificial Sequence
  Description of Artificial Sequence: Synthetic oligonucleotide
  Target: ATXN2; (-) strand; PAM type: NRG; PAM sequence: AAG
gcttccctgggtcatattgg

SEQ ID NO: 20052 - DNA, 20 bp, Artificial Sequence
  Description of Artificial Sequence: Synthetic oligonucleotide
  Target: ATXN2; (-) strand; PAM type: NRG; PAM sequence: TGG
ttggcttccctgggtcatat

SEQ ID NO: 20053 - DNA, 20 bp, Artificial Sequence
  Description of Artificial Sequence: Synthetic oligonucleotide
  Target: ATXN2; (-) strand; PAM type: NRG; PAM sequence: GGG
ttcaatcttttggcttccct

SEQ ID NO: 20054 - DNA, 20 bp, Artificial Sequence
  Description of Artificial Sequence: Synthetic oligonucleotide
  Target: ATXN2; (-) strand; PAM type: NRG; PAM sequence: TGG
gttcaatcttttggcttccc

SEQ ID NO: 20055 - DNA, 20 bp, Artificial Sequence
  Description of Artificial Sequence: Synthetic oligonucleotide
  Target: ATXN2; (-) strand; PAM type: NRG; PAM sequence: TGG
aacagaggtgttcaatcttt

SEQ ID NO: 20056 - DNA, 20 bp, Artificial Sequence
  Description of Artificial Sequence: Synthetic oligonucleotide
  Target: ATXN2; (-) strand; PAM type: NRG; PAM sequence: AGG
aatcaaacagcgtgtaacag

SEQ ID NO: 20057 - DNA, 20 bp, Artificial Sequence
  Description of Artificial Sequence: Synthetic oligonucleotide
  Target: ATXN2; (-) strand; PAM type: NRG; PAM sequence: GAG
gaatcaaacagcgtgtaaca

SEQ ID NO: 20058 - DNA, 20 bp, Artificial Sequence
  Description of Artificial Sequence: Synthetic oligonucleotide
  Target: ATXN2; (-) strand; PAM type: NRG; PAM sequence: CAG
tggaatcaaacagcgtgtaa

SEQ ID NO: 20059 - DNA, 20 bp, Artificial Sequence
  Description of Artificial Sequence: Synthetic oligonucleotide
  Target: ATXN2; (-) strand; PAM type: NRG; PAM sequence: CAG
ttttaataaatggaatcaaa

SEQ ID NO: 20060 - DNA, 20 bp, Artificial Sequence
  Description of Artificial Sequence: Synthetic oligonucleotide
  Target: ATXN2; (-) strand; PAM type: NRG; PAM sequence: TGG
ttttttttttttttaataaa

SEQ ID NO: 20061 - DNA, 20 bp, Artificial Sequence
  Description of Artificial Sequence: Synthetic oligonucleotide
  Target: ATXN2; (-) strand; PAM type: NRG; PAM sequence: TAG
gagccacctcagccagcccc

SEQ ID NO: 20062 - DNA, 20 bp, Artificial Sequence
  Description of Artificial Sequence: Synthetic oligonucleotide
  Target: ATXN2; (-) strand; PAM type: NRG; PAM sequence: CAG
cagatgtgagccacctcagc

SEQ ID NO: 20063 - DNA, 20 bp, Artificial Sequence
  Description of Artificial Sequence: Synthetic oligonucleotide
  Target: ATXN2; (-) strand; PAM type: NRG; PAM sequence: CAG
attacagatgtgagccacct

SEQ ID NO: 20064 - DNA, 20 bp, Artificial Sequence
  Description of Artificial Sequence: Synthetic oligonucleotide
  Target: ATXN2; (-) strand; PAM type: NRG; PAM sequence: GAG
agtgctaggattacagatgt

SEQ ID NO: 20065 - DNA, 20 bp, Artificial Sequence
  Description of Artificial Sequence: Synthetic oligonucleotide
  Target: ATXN2; (-) strand; PAM type: NRG; PAM sequence: CAG
ctcccagagtgctaggatta

SEQ ID NO: 20066 - DNA, 20 bp, Artificial Sequence
  Description of Artificial Sequence: Synthetic oligonucleotide
  Target: ATXN2; (-) strand; PAM type: NRG; PAM sequence: AGG
cctcagcctcccagagtgct

SEQ ID NO: 20067 - DNA, 20 bp, Artificial Sequence
  Description of Artificial Sequence: Synthetic oligonucleotide
  Target: ATXN2; (-) strand; PAM type: NRG; PAM sequence: TAG
acctcagcctcccagagtgc

SEQ ID NO: 20068 - DNA, 20 bp, Artificial Sequence
  Description of Artificial Sequence: Synthetic oligonucleotide
  Target: ATXN2; (-) strand; PAM type: NRG; PAM sequence: GAG
gagctcacctcagcctccca

SEQ ID NO: 20069 - DNA, 20 bp, Artificial Sequence
  Description of Artificial Sequence: Synthetic oligonucleotide
  Target: ATXN2; (-) strand; PAM type: NRG; PAM sequence: CAG
ttgagctcacctcagcctcc

SEQ ID NO: 20070 - DNA, 20 bp, Artificial Sequence
  Description of Artificial Sequence: Synthetic oligonucleotide
  Target: ATXN2; (-) strand; PAM type: NRG; PAM sequence: CAG
tcgaactcttgagctcacct

SEQ ID NO: 20071 - DNA, 20 bp, Artificial Sequence
  Description of Artificial Sequence: Synthetic oligonucleotide
  Target: ATXN2; (-) strand; PAM type: NRG; PAM sequence: GAG
caggttggtctcgaactctt

SEQ ID NO: 20072 - DNA, 20 bp, Artificial Sequence
  Description of Artificial Sequence: Synthetic oligonucleotide
  Target: ATXN2; (-) strand; PAM type: NRG; PAM sequence: TGG
tctcattatattgcccaggt

SEQ ID NO: 20073 - DNA, 20 bp, Artificial Sequence
  Description of Artificial Sequence: Synthetic oligonucleotide
  Target: ATXN2; (-) strand; PAM type: NRG; PAM sequence: AGG
gacgtctcattatattgccc

SEQ ID NO: 20074 - DNA, 20 bp, Artificial Sequence
  Description of Artificial Sequence: Synthetic oligonucleotide
  Target: ATXN2; (-) strand; PAM type: NRG; PAM sequence: CAG
agacgtctcattatattgcc

SEQ ID NO: 20075 - DNA, 20 bp, Artificial Sequence
  Description of Artificial Sequence: Synthetic oligonucleotide
  Target: ATXN2; (-) strand; PAM type: NRG; PAM sequence: GAG
cgtaaaaaaatctttttttg

SEQ ID NO: 20076 - DNA, 20 bp, Artificial Sequence
  Description of Artificial Sequence: Synthetic oligonucleotide
  Target: ATXN2; (-) strand; PAM type: NRG; PAM sequence: TGG
tacgtaaaaaaatctttttt

SEQ ID NO: 20077 - DNA, 20 bp, Artificial Sequence
  Description of Artificial Sequence: Synthetic oligonucleotide
  Target: ATXN2; (-) strand; PAM type: NRG; PAM sequence: AGG
ttctttttttttttttgatt

SEQ ID NO: 20078 - DNA, 20 bp, Artificial Sequence
  Description of Artificial Sequence: Synthetic oligonucleotide
  Target: ATXN2; (-) strand; PAM type: NRG; PAM sequence: TAG
tttctttttttttttttgat

SEQ ID NO: 20079 - DNA, 20 bp, Artificial Sequence
  Description of Artificial Sequence: Synthetic oligonucleotide
  Target: ATXN2; (-) strand; PAM type: NRG; PAM sequence: TAG
tagattagatttatcctctt

SEQ ID NO: 20080 - DNA, 20 bp, Artificial Sequence
  Description of Artificial Sequence: Synthetic oligonucleotide
  Target: ATXN2; (-) strand; PAM type: NRG; PAM sequence: TAG
tgccttcttttactatagat

SEQ ID NO: 20081 - DNA, 20 bp, Artificial Sequence
  Description of Artificial Sequence: Synthetic oligonucleotide
  Target: ATXN2; (-) strand; PAM type: NRG; PAM sequence: TAG
taatctgccttcttttacta

SEQ ID NO: 20082 - DNA, 20 bp, Artificial Sequence
  Description of Artificial Sequence: Synthetic oligonucleotide
  Target: ATXN2; (-) strand; PAM type: NRG; PAM sequence: CAG
taccactagctccagttaac

SEQ ID NO: 20083 - DNA, 20 bp, Artificial Sequence
  Description of Artificial Sequence: Synthetic oligonucleotide
  Target: ATXN2; (-) strand; PAM type: NRG; PAM sequence: CAG
tactttattaccactagctc

SEQ ID NO: 20084 - DNA, 20 bp, Artificial Sequence
  Description of Artificial Sequence: Synthetic oligonucleotide
  Target: ATXN2; (-) strand; PAM type: NRG; PAM sequence: TAG
caactgtactttattaccac

SEQ ID NO: 20085 - DNA, 20 bp, Artificial Sequence
  Description of Artificial Sequence: Synthetic oligonucleotide
  Target: ATXN2; (-) strand; PAM type: NRG; PAM sequence: TGG
acttgcttcatcagtgaaga

SEQ ID NO: 20086 - DNA, 20 bp, Artificial Sequence
  Description of Artificial Sequence: Synthetic oligonucleotide
  Target: ATXN2; (-) strand; PAM type: NRG; PAM sequence: AAG
aactacttgcttcatcagtg

SEQ ID NO: 20087 - DNA, 20 bp, Artificial Sequence
  Description of Artificial Sequence: Synthetic oligonucleotide
  Target: ATXN2; (-) strand; PAM type: NRG; PAM sequence: CAG
catgtaactacttgcttcat

SEQ ID NO: 20088 - DNA, 20 bp, Artificial Sequence
  Description of Artificial Sequence: Synthetic oligonucleotide
  Target: ATXN2; (-) strand; PAM type: NRG; PAM sequence: GAG
ttttatgtttacattttaat

SEQ ID NO: 20089 - DNA, 20 bp, Artificial Sequence
  Description of Artificial Sequence: Synthetic oligonucleotide
  Target: ATXN2; (-) strand; PAM type: NRG; PAM sequence: AAG
ttagtctgtaatttacatac

SEQ ID NO: 20090 - DNA, 20 bp, Artificial Sequence
  Description of Artificial Sequence: Synthetic oligonucleotide
  Target: ATXN2; (-) strand; PAM type: NRG; PAM sequence: TAG
aatgttttaaccagttttat

SEQ ID NO: 20091 - DNA, 20 bp, Artificial Sequence
  Description of Artificial Sequence: Synthetic oligonucleotide
  Target: ATXN2; (-) strand; PAM type: NRG; PAM sequence: CAG
actatccaaaatgttttaac

SEQ ID NO: 20092 - DNA, 20 bp, Artificial Sequence
  Description of Artificial Sequence: Synthetic oligonucleotide
  Target: ATXN2; (-) strand; PAM type: NRG; PAM sequence: AAG
taattttagaatttatctta

SEQ ID NO: 20093 - DNA, 20 bp, Artificial Sequence
  Description of Artificial Sequence: Synthetic oligonucleotide
  Target: ATXN2; (-) strand; PAM type: NRG; PAM sequence: TAG
ccattatgcctggctaattt

SEQ ID NO: 20094 - DNA, 20 bp, Artificial Sequence
  Description of Artificial Sequence: Synthetic oligonucleotide
  Target: ATXN2; (-) strand; PAM type: NRG; PAM sequence: TGG
ccagcctgtaccattatgcc

SEQ ID NO: 20095 - DNA, 20 bp, Artificial Sequence
  Description of Artificial Sequence: Synthetic oligonucleotide
  Target: ATXN2; (-) strand; PAM type: NRG; PAM sequence: CAG
tgagctcaggagtttgagac

SEQ ID NO: 20096 - DNA, 20 bp, Artificial Sequence
  Description of Artificial Sequence: Synthetic oligonucleotide
  Target: ATXN2; (-) strand; PAM type: NRG; PAM sequence: GAG
tcacttgagctcaggagttt

SEQ ID NO: 20097 - DNA, 20 bp, Artificial Sequence
  Description of Artificial Sequence: Synthetic oligonucleotide
  Target: ATXN2; (-) strand; PAM type: NRG; PAM sequence: GAG
ggaggatcacttgagctcag

SEQ ID NO: 20098 - DNA, 20 bp, Artificial Sequence
  Description of Artificial Sequence: Synthetic oligonucleotide
  Target: ATXN2; (-) strand; PAM type: NRG; PAM sequence: AGG
tgggaggatcacttgagctc

SEQ ID NO: 20099 - DNA, 20 bp, Artificial Sequence
  Description of Artificial Sequence: Synthetic oligonucleotide
  Target: ATXN2; (-) strand; PAM type: NRG; PAM sequence: CAG
gtgggaggatcacttgagct

SEQ ID NO: 20100 - DNA, 20 bp, Artificial Sequence
  Description of Artificial Sequence: Synthetic oligonucleotide
  Target: ATXN2; (-) strand; PAM type: NRG; PAM sequence: GAG
ctgaggtgggaggatcactt

SEQ ID NO: 20101 - DNA, 20 bp, Artificial Sequence
  Description of Artificial Sequence: Synthetic oligonucleotide
  Target: ATXN2; (-) strand; PAM type: NRG; PAM sequence: AGG
ggctgagaggctgaggtggg

SEQ ID NO: 20102 - DNA, 20 bp, Artificial Sequence
  Description of Artificial Sequence: Synthetic oligonucleotide
  Target: ATXN2; (-) strand; PAM type: NRG; PAM sequence: GAG
aggctgagaggctgaggtgg

SEQ ID NO: 20103 - DNA, 20 bp, Artificial Sequence
  Description of Artificial Sequence: Synthetic oligonucleotide
  Target: ATXN2; (-) strand; PAM type: NRG; PAM sequence: GGG
ggaggctgagaggctgaggt

SEQ ID NO: 20104 - DNA, 20 bp, Artificial Sequence
  Description of Artificial Sequence: Synthetic oligonucleotide
  Target: ATXN2; (-) strand; PAM type: NRG; PAM sequence: TGG
gggaggctgagaggctgagg

SEQ ID NO: 20105 - DNA, 20 bp, Artificial Sequence
  Description of Artificial Sequence: Synthetic oligonucleotide
  Target: ATXN2; (-) strand; PAM type: NRG; PAM sequence: AGG
cctgggaggctgagaggctg

SEQ ID NO: 20106 - DNA, 20 bp, Artificial Sequence
  Description of Artificial Sequence: Synthetic oligonucleotide
  Target: ATXN2; (-) strand; PAM type: NRG; PAM sequence: GAG
ccctgggaggctgagaggct

SEQ ID NO: 20107 - DNA, 20 bp, Artificial Sequence
  Description of Artificial Sequence: Synthetic oligonucleotide
  Target: ATXN2; (-) strand; PAM type: NRG; PAM sequence: AGG
tggcaccctgggaggctgag

SEQ ID NO: 20108 - DNA, 20 bp, Artificial Sequence
  Description of Artificial Sequence: Synthetic oligonucleotide
  Target: ATXN2; (-) strand; PAM type: NRG; PAM sequence: GAG
ctggcaccctgggaggctga

SEQ ID NO: 20109 - DNA, 20 bp, Artificial Sequence
  Description of Artificial Sequence: Synthetic oligonucleotide
  Target: ATXN2; (-) strand; PAM type: NRG; PAM sequence: GAG
tcctggcaccctgggaggct

SEQ ID NO: 20110 - DNA, 20 bp, Artificial Sequence
  Description of Artificial Sequence: Synthetic oligonucleotide
  Target: ATXN2; (-) strand; PAM type: NRG; PAM sequence: AGG
ctgtctcctggcaccctggg

SEQ ID NO: 20111 - DNA, 20 bp, Artificial Sequence
  Description of Artificial Sequence: Synthetic oligonucleotide
  Target: ATXN2; (-) strand; PAM type: NRG; PAM sequence: GAG
cctgtctcctggcaccctgg

SEQ ID NO: 20112 - DNA, 20 bp, Artificial Sequence
  Description of Artificial Sequence: Synthetic oligonucleotide
  Target: ATXN2; (-) strand; PAM type: NRG; PAM sequence: GGG
tgcctgtctcctggcaccct

SEQ ID NO: 20113 - DNA, 20 bp, Artificial Sequence
  Description of Artificial Sequence: Synthetic oligonucleotide
  Target: ATXN2; (-) strand; PAM type: NRG; PAM sequence: TGG
ctgcctgtctcctggcaccc

SEQ ID NO: 20114 - DNA, 20 bp, Artificial Sequence
  Description of Artificial Sequence: Synthetic oligonucleotide
  Target: ATXN2; (-) strand; PAM type: NRG; PAM sequence: TGG
ctcgtgatctgcctgtctcc

SEQ ID NO: 20115 - DNA, 20 bp, Artificial Sequence
  Description of Artificial Sequence: Synthetic oligonucleotide
  Target: ATXN2; (-) strand; PAM type: NRG; PAM sequence: TGG
ttttaccgtgttggtcaggc

SEQ ID NO: 20116 - DNA, 20 bp, Artificial Sequence
  Description of Artificial Sequence: Synthetic oligonucleotide
  Target: ATXN2; (-) strand; PAM type: NRG; PAM sequence: AGG
ggggttttaccgtgttggtc

SEQ ID NO: 20117 - DNA, 20 bp, Artificial Sequence
  Description of Artificial Sequence: Synthetic oligonucleotide
  Target: ATXN2; (-) strand; PAM type: NRG; PAM sequence: CAG
cggggttttaccgtgttggt

SEQ ID NO: 20118 - DNA, 20 bp, Artificial Sequence
  Description of Artificial Sequence: Synthetic oligonucleotide
  Target: ATXN2; (-) strand; PAM type: NRG; PAM sequence: TGG
gagacggggttttaccgtgt

SEQ ID NO: 20119 - DNA, 20 bp, Artificial Sequence
  Description of Artificial Sequence: Synthetic oligonucleotide
  Target: ATXN2; (-) strand; PAM type: NRG; PAM sequence: GGG
ttgtatttttagtagagacg

SEQ ID NO: 20120 - DNA, 20 bp, Artificial Sequence
  Description of Artificial Sequence: Synthetic oligonucleotide
  Target: ATXN2; (-) strand; PAM type: NRG; PAM sequence: GGG
tttgtatttttagtagagac

SEQ ID NO: 20121 - DNA, 20 bp, Artificial Sequence
  Description of Artificial Sequence: Synthetic oligonucleotide
  Target: ATXN2; (-) strand; PAM type: NRG; PAM sequence: CGG
ttttgtatttttagtagaga

SEQ ID NO: 20122 - DNA, 20 bp, Artificial Sequence
  Description of Artificial Sequence: Synthetic oligonucleotide
  Target: ATXN2; (-) strand; PAM type: NRG; PAM sequence: GAG
taatttttgtatttttagta

SEQ ID NO: 20123 - DNA, 20 bp, Artificial Sequence
  Description of Artificial Sequence: Synthetic oligonucleotide
  Target: ATXN2; (-) strand; PAM type: NRG; PAM sequence: TAG
gctaatttttgtatttttag

SEQ ID NO: 20124 - DNA, 20 bp, Artificial Sequence
  Description of Artificial Sequence: Synthetic oligonucleotide
  Target: ATXN2; (-) strand; PAM type: NRG; PAM sequence: TAG
ccagctaatttttgtatttt

SEQ ID NO: 20125 - DNA, 20 bp, Artificial Sequence
  Description of Artificial Sequence: Synthetic oligonucleotide
  Target: ATXN2; (-) strand; PAM type: NRG; PAM sequence: CAG
caggggtgcgccaccacacc

SEQ ID NO: 20126 - DNA, 20 bp, Artificial Sequence
  Description of Artificial Sequence: Synthetic oligonucleotide
  Target: ATXN2; (-) strand; PAM type: NRG; PAM sequence: GGG
ctgagtagctggaattacag

SEQ ID NO: 20127 - DNA, 20 bp, Artificial Sequence
  Description of Artificial Sequence: Synthetic oligonucleotide
  Target: ATXN2; (-) strand; PAM type: NRG; PAM sequence: GGG
cctgagtagctggaattaca

SEQ ID NO: 20128 - DNA, 20 bp, Artificial Sequence
  Description of Artificial Sequence: Synthetic oligonucleotide
  Target: ATXN2; (-) strand; PAM type: NRG; PAM sequence: AGG
tcctgagtagctggaattac

SEQ ID NO: 20129 - DNA, 20 bp, Artificial Sequence
  Description of Artificial Sequence: Synthetic oligonucleotide
  Target: ATXN2; (-) strand; PAM type: NRG; PAM sequence: CAG
ctcctgagtagctggaatta

SEQ ID NO: 20130 - DNA, 20 bp, Artificial Sequence
  Description of Artificial Sequence: Synthetic oligonucleotide
  Target: ATXN2; (-) strand; PAM type: NRG; PAM sequence: TGG
gcctcagcctcctgagtagc

SEQ ID NO: 20131 - DNA, 20 bp, Artificial Sequence
  Description of Artificial Sequence: Synthetic oligonucleotide
  Target: ATXN2; (-) strand; PAM type: NRG; PAM sequence: TAG
ccctgcctcagcctcctgag

SEQ ID NO: 20132 - DNA, 20 bp, Artificial Sequence
  Description of Artificial Sequence: Synthetic oligonucleotide
  Target: ATXN2; (-) strand; PAM type: NRG; PAM sequence: GAG
ttcccctgcctcagcctcct

SEQ ID NO: 20133 - DNA, 20 bp, Artificial Sequence
  Description of Artificial Sequence: Synthetic oligonucleotide
  Target: ATXN2; (-) strand; PAM type: NRG; PAM sequence: CAG
ttcaagcgattcccctgcct

SEQ ID NO: 20134 - DNA, 20 bp, Artificial Sequence
  Description of Artificial Sequence: Synthetic oligonucleotide
  Target: ATXN2; (-) strand; PAM type: NRG; PAM sequence: AAG
aacctccgcctctcagattc

SEQ ID NO: 20135 - DNA, 20 bp, Artificial Sequence
  Description of Artificial Sequence: Synthetic oligonucleotide
  Target: ATXN2; (-) strand; PAM type: NRG; PAM sequence: CAG
tcactgcaacctccgcctct

SEQ ID NO: 20136 - DNA, 20 bp, Artificial Sequence
  Description of Artificial Sequence: Synthetic oligonucleotide
  Target: ATXN2; (-) strand; PAM type: NRG; PAM sequence: TAG
ctgatggagtggcgctaact

SEQ ID NO: 20137 - DNA, 20 bp, Artificial Sequence
  Description of Artificial Sequence: Synthetic oligonucleotide
  Target: ATXN2; (-) strand; PAM type: NRG; PAM sequence: TGG
ggagtgtcgctctgatggag

SEQ ID NO: 20138 - DNA, 20 bp, Artificial Sequence
  Description of Artificial Sequence: Synthetic oligonucleotide
  Target: ATXN2; (-) strand; PAM type: NRG; PAM sequence: GAG
gatggagtgtcgctctgatg

SEQ ID NO: 20139 - DNA, 20 bp, Artificial Sequence
  Description of Artificial Sequence: Synthetic oligonucleotide
  Target: ATXN2; (-) strand; PAM type: NRG; PAM sequence: TGG
gagatggagtgtcgctctga

SEQ ID NO: 20140 - DNA, 20 bp, Artificial Sequence
  Description of Artificial Sequence: Synthetic oligonucleotide
  Target: ATXN2; (-) strand; PAM type: NRG; PAM sequence: GAG
gtttatttatttttgagatg

SEQ ID NO: 20141 - DNA, 20 bp, Artificial Sequence
  Description of Artificial Sequence: Synthetic oligonucleotide
  Target: ATXN2; (-) strand; PAM type: NRG; PAM sequence: TGG
ttgtttatttatttttgaga

SEQ ID NO: 20142 - DNA, 20 bp, Artificial Sequence
  Description of Artificial Sequence: Synthetic oligonucleotide
  Target: ATXN2; (-) strand; PAM type: NRG; PAM sequence: GAG
ttgtttgtttatttattttt

SEQ ID NO: 20143 - DNA, 20 bp, Artificial Sequence
  Description of Artificial Sequence: Synthetic oligonucleotide
  Target: ATXN2; (-) strand; PAM type: NRG; PAM sequence: AAG
tccccacctcatttgttgaa

SEQ ID NO: 20144 - DNA, 20 bp, Artificial Sequence
  Description of Artificial Sequence: Synthetic oligonucleotide
  Target: ATXN2; (-) strand; PAM type: NRG; PAM sequence: TGG
caggtttttccttttgcttg

SEQ ID NO: 20145 - DNA, 20 bp, Artificial Sequence
  Description of Artificial Sequence: Synthetic oligonucleotide
  Target: ATXN2; (-) strand; PAM type: NRG; PAM sequence: AGG
tgagatgagagtagtggtcc

SEQ ID NO: 20146 - DNA, 20 bp, Artificial Sequence
  Description of Artificial Sequence: Synthetic oligonucleotide
  Target: ATXN2; (-) strand; PAM type: NRG; PAM sequence: CAG
atgagatgagagtagtggtc

SEQ ID NO: 20147 - DNA, 20 bp, Artificial Sequence
  Description of Artificial Sequence: Synthetic oligonucleotide
  Target: ATXN2; (-) strand; PAM type: NRG; PAM sequence: TGG
tgtgtatgagatgagagtag

SEQ ID NO: 20148 - DNA, 20 bp, Artificial Sequence
  Description of Artificial Sequence: Synthetic oligonucleotide
  Target: ATXN2; (-) strand; PAM type: NRG; PAM sequence: TAG
ttttgtgtatgagatgagag

SEQ ID NO: 20149 - DNA, 20 bp, Artificial Sequence
  Description of Artificial Sequence: Synthetic oligonucleotide
  Target: ATXN2; (-) strand; PAM type: NRG; PAM sequence: GAG
aatttttgtgtatgagatga

SEQ ID NO: 20150 - DNA, 20 bp, Artificial Sequence
  Description of Artificial Sequence: Synthetic oligonucleotide
  Target: ATXN2; (-) strand; PAM type: NRG; PAM sequence: GAG
ttaatttttgtgtatgagat

SEQ ID NO: 20151 - DNA, 20 bp, Artificial Sequence
  Description of Artificial Sequence: Synthetic oligonucleotide
  Target: ATXN2; (-) strand; PAM type: NRG; PAM sequence: GAG
ttgagttaatttttgtgtat

SEQ ID NO: 20152 - DNA, 20 bp, Artificial Sequence
  Description of Artificial Sequence: Synthetic oligonucleotide
  Target: ATXN2; (-) strand; PAM type: NRG; PAM sequence: GAG
ttaagtctacaatctctttt

SEQ ID NO: 20153 - DNA, 20 bp, Artificial Sequence
  Description of Artificial Sequence: Synthetic oligonucleotide
  Target: ATXN2; (-) strand; PAM type: NRG; PAM sequence: AAG
tagtttagctcttaacattt

SEQ ID NO: 20154 - DNA, 20 bp, Artificial Sequence
  Description of Artificial Sequence: Synthetic oligonucleotide
  Target: ATXN2; (-) strand; PAM type: NRG; PAM sequence: TAG
ctcctatgatttttatagtt

SEQ ID NO: 20155 - DNA, 20 bp, Artificial Sequence
  Description of Artificial Sequence: Synthetic oligonucleotide
  Target: ATXN2; (-) strand; PAM type: NRG; PAM sequence: TAG
taaaactcctatgattttta

SEQ ID NO: 20156 - DNA, 20 bp, Artificial Sequence
  Description of Artificial Sequence: Synthetic oligonucleotide
  Target: ATXN2; (-) strand; PAM type: NRG; PAM sequence: GAG
ttgcctaactcaaggccaca

SEQ ID NO: 20157 - DNA, 20 bp, Artificial Sequence
  Description of Artificial Sequence: Synthetic oligonucleotide
  Target: ATXN2; (-) strand; PAM type: NRG; PAM sequence: CAG
cattgcctaactcaaggcca

SEQ ID NO: 20158 - DNA, 20 bp, Artificial Sequence
  Description of Artificial Sequence: Synthetic oligonucleotide
  Target: ATXN2; (-) strand; PAM type: NRG; PAM sequence: AGG
acaaagcattgcctaactca

SEQ ID NO: 20159 - DNA, 20 bp, Artificial Sequence
  Description of Artificial Sequence: Synthetic oligonucleotide
  Target: ATXN2; (-) strand; PAM type: NRG; PAM sequence: AAG
gacaaagcattgcctaactc

SEQ ID NO: 20160 - DNA, 20 bp, Artificial Sequence
  Description of Artificial Sequence: Synthetic oligonucleotide
  Target: ATXN2; (-) strand; PAM type: NRG; PAM sequence: AAG
tcctgatgtcatatcagaca

SEQ ID NO: 20161 - DNA, 20 bp, Artificial Sequence
  Description of Artificial Sequence: Synthetic oligonucleotide
  Target: ATXN2; (-) strand; PAM type: NRG; PAM sequence: CAG
tgttgctcctgatgtcatat

SEQ ID NO: 20162 - DNA, 20 bp, Artificial Sequence
  Description of Artificial Sequence: Synthetic oligonucleotide
  Target: ATXN2; (-) strand; PAM type: NRG; PAM sequence: AAG
cacagtttttaattttgatg

SEQ ID NO: 20163 - DNA, 20 bp, Artificial Sequence
  Description of Artificial Sequence: Synthetic oligonucleotide
  Target: ATXN2; (-) strand; PAM type: NRG; PAM sequence: CAG
tgatggtgttctttgtaaca

SEQ ID NO: 20164 - DNA, 20 bp, Artificial Sequence
  Description of Artificial Sequence: Synthetic oligonucleotide
  Target: ATXN2; (-) strand; PAM type: NRG; PAM sequence: TGG
ttatctttttacttgcttga

SEQ ID NO: 20165 - DNA, 20 bp, Artificial Sequence
  Description of Artificial Sequence: Synthetic oligonucleotide
  Target: ATXN2; (-) strand; PAM type: NRG; PAM sequence: AGG
aaccaccatgccctgactat

SEQ ID NO: 20166 - DNA, 20 bp, Artificial Sequence
  Description of Artificial Sequence: Synthetic oligonucleotide
  Target: ATXN2; (-) strand; PAM type: NRG; PAM sequence: TAG
gaaccaccatgccctgacta

SEQ ID NO: 20167 - DNA, 20 bp, Artificial Sequence
  Description of Artificial Sequence: Synthetic oligonucleotide
  Target: ATXN2; (-) strand; PAM type: NRG; PAM sequence: TAG
ttcccaaagtgctgagattt

SEQ ID NO: 20168 - DNA, 20 bp, Artificial Sequence
  Description of Artificial Sequence: Synthetic oligonucleotide
  Target: ATXN2; (-) strand; PAM type: NRG; PAM sequence: GAG
cctcaccttcccaaagtgct

SEQ ID NO: 20169 - DNA, 20 bp, Artificial Sequence
  Description of Artificial Sequence: Synthetic oligonucleotide
  Target: ATXN2; (-) strand; PAM type: NRG; PAM sequence: AAG
ccgcctgcctcaccttccca

SEQ ID NO: 20170 - DNA, 20 bp, Artificial Sequence
  Description of Artificial Sequence: Synthetic oligonucleotide
  Target: ATXN2; (-) strand; PAM type: NRG; PAM sequence: TGG
tttcaccatgttggccaggc

SEQ ID NO: 20171 - DNA, 20 bp, Artificial Sequence
  Description of Artificial Sequence: Synthetic oligonucleotide
  Target: ATXN2; (-) strand; PAM type: NRG; PAM sequence: AGG
ggaatttcaccatgttggcc

SEQ ID NO: 20172 - DNA, 20 bp, Artificial Sequence
  Description of Artificial Sequence: Synthetic oligonucleotide
  Target: ATXN2; (-) strand; PAM type: NRG; PAM sequence: CAG
tggaatttcaccatgttggc

SEQ ID NO: 20173 - DNA, 20 bp, Artificial Sequence
  Description of Artificial Sequence: Synthetic oligonucleotide
  Target: ATXN2; (-) strand; PAM type: NRG; PAM sequence: TGG
gagatggaatttcaccatgt

SEQ ID NO: 20174 - DNA, 20 bp, Artificial Sequence
  Description of Artificial Sequence: Synthetic oligonucleotide
  Target: ATXN2; (-) strand; PAM type: NRG; PAM sequence: TGG
ttttgtatttttagtagaga

SEQ ID NO: 20175 - DNA, 20 bp, Artificial Sequence
  Description of Artificial Sequence: Synthetic oligonucleotide
  Target: ATXN2; (-) strand; PAM type: NRG; PAM sequence: GAG
ccatttttgtatttttagta

SEQ ID NO: 20176 - DNA, 20 bp, Artificial Sequence
  Description of Artificial Sequence: Synthetic oligonucleotide
  Target: ATXN2; (-) strand; PAM type: NRG; PAM sequence: TAG
gcccatttttgtatttttag

SEQ ID NO: 20177 - DNA, 20 bp, Artificial Sequence
  Description of Artificial Sequence: Synthetic oligonucleotide
  Target: ATXN2; (-) strand; PAM type: NRG; PAM sequence: TAG
tcggcccatttttgtatttt

SEQ ID NO: 20178 - DNA, 20 bp, Artificial Sequence
  Description of Artificial Sequence: Synthetic oligonucleotide
  Target: ATXN2; (-) strand; PAM type: NRG; PAM sequence: CGG
taggcgtgcaccaccgcgct

SEQ ID NO: 20179 - DNA, 20 bp, Artificial Sequence
  Description of Artificial Sequence: Synthetic oligonucleotide
  Target: ATXN2; (-) strand; PAM type: NRG; PAM sequence: AGG
tccagagtagctggggttat

SEQ ID NO: 20180 - DNA, 20 bp, Artificial Sequence
  Description of Artificial Sequence: Synthetic oligonucleotide
  Target: ATXN2; (-) strand; PAM type: NRG; PAM sequence: TAG
ctccagagtagctggggtta

SEQ ID NO: 20181 - DNA, 20 bp, Artificial Sequence
  Description of Artificial Sequence: Synthetic oligonucleotide
  Target: ATXN2; (-) strand; PAM type: NRG; PAM sequence: GGG
gtcagcctccagagtagctg

SEQ ID NO: 20182 - DNA, 20 bp, Artificial Sequence
  Description of Artificial Sequence: Synthetic oligonucleotide
  Target: ATXN2; (-) strand; PAM type: NRG; PAM sequence: GGG
cgtcagcctccagagtagct

SEQ ID NO: 20183 - DNA, 20 bp, Artificial Sequence
  Description of Artificial Sequence: Synthetic oligonucleotide
  Target: ATXN2; (-) strand; PAM type: NRG; PAM sequence: TGG
gcgtcagcctccagagtagc

SEQ ID NO: 20184 - DNA, 20 bp, Artificial Sequence
  Description of Artificial Sequence: Synthetic oligonucleotide
  Target: ATXN2; (-) strand; PAM type: NRG; PAM sequence: TAG
ccctgcgtcagcctccagag

SEQ ID NO: 20185 - DNA, 20 bp, Artificial Sequence
  Description of Artificial Sequence: Synthetic oligonucleotide
  Target: ATXN2; (-) strand; PAM type: NRG; PAM sequence: GAG
tccccctgcgtcagcctcca

SEQ ID NO: 20186 - DNA, 20 bp, Artificial Sequence
  Description of Artificial Sequence: Synthetic oligonucleotide
  Target: ATXN2; (-) strand; PAM type: NRG; PAM sequence: CAG
gatccccctgcgtcagcctc

SEQ ID NO: 20187 - DNA, 20 bp, Artificial Sequence
  Description of Artificial Sequence: Synthetic oligonucleotide
  Target: ATXN2; (-) strand; PAM type: NRG; PAM sequence: CAG
ctcaagcgatccccctgcgt

SEQ ID NO: 20188 - DNA, 20 bp, Artificial Sequence
  Description of Artificial Sequence: Synthetic oligonucleotide
  Target: ATXN2; (-) strand; PAM type: NRG; PAM sequence: AAG
ggtctcgaattcctgagctc

SEQ ID NO: 20189 - DNA, 20 bp, Artificial Sequence
  Description of Artificial Sequence: Synthetic oligonucleotide
  Target: ATXN2; (-) strand; PAM type: NRG; PAM sequence: GAG
caggctggtctcgaattcct

SEQ ID NO: 20190 - DNA, 20 bp, Artificial Sequence
  Description of Artificial Sequence: Synthetic oligonucleotide
  Target: ATXN2; (-) strand; PAM type: NRG; PAM sequence: TGG
cttctccgtgcttcccaggc

SEQ ID NO: 20191 - DNA, 20 bp, Artificial Sequence
  Description of Artificial Sequence: Synthetic oligonucleotide
  Target: ATXN2; (-) strand; PAM type: NRG; PAM sequence: AGG
ggagcttctccgtgcttccc

SEQ ID NO: 20192 - DNA, 20 bp, Artificial Sequence
  Description of Artificial Sequence: Synthetic oligonucleotide
  Target: ATXN2; (-) strand; PAM type: NRG; PAM sequence: CAG
tggagcttctccgtgcttcc

SEQ ID NO: 20193 - DNA, 20 bp, Artificial Sequence
  Description of Artificial Sequence: Synthetic oligonucleotide
  Target: ATXN2; (-) strand; PAM type: NRG; PAM sequence: GAG
ttatattttttgtagagatg

SEQ ID NO: 20194 - DNA, 20 bp, Artificial Sequence
  Description of Artificial Sequence: Synthetic oligonucleotide
  Target: ATXN2; (-) strand; PAM type: NRG; PAM sequence: TGG
ttttatattttttgtagaga

SEQ ID NO: 20195 - DNA, 20 bp, Artificial Sequence
  Description of Artificial Sequence: Synthetic oligonucleotide
  Target: ATXN2; (-) strand; PAM type: NRG; PAM sequence: GAG
taatttttatattttttgta

SEQ ID NO: 20196 - DNA, 20 bp, Artificial Sequence
  Description of Artificial Sequence: Synthetic oligonucleotide
  Target: ATXN2; (-) strand; PAM type: NRG; PAM sequence: TAG
gctaatttttatattttttg

SEQ ID NO: 20197 - DNA, 20 bp, Artificial Sequence
  Description of Artificial Sequence: Synthetic oligonucleotide
  Target: ATXN2; (-) strand; PAM type: NRG; PAM sequence: AGG
caggcatacgccaccacacc

SEQ ID NO: 20198 - DNA, 20 bp, Artificial Sequence
  Description of Artificial Sequence: Synthetic oligonucleotide
  Target: ATXN2; (-) strand; PAM type: NRG; PAM sequence: CAG
gcaggcatacgccaccacac

SEQ ID NO: 20199 - DNA, 20 bp, Artificial Sequence
  Description of Artificial Sequence: Synthetic oligonucleotide
  Target: ATXN2; (-) strand; PAM type: NRG; PAM sequence: AGG
tcccagatagctggggctgc

SEQ ID NO: 20200 - DNA, 20 bp, Artificial Sequence
  Description of Artificial Sequence: Synthetic oligonucleotide
  Target: ATXN2; (-) strand; PAM type: NRG; PAM sequence: CAG
ctcccagatagctggggctg

SEQ ID NO: 20201 - DNA, 20 bp, Artificial Sequence
  Description of Artificial Sequence: Synthetic oligonucleotide
  Target: ATXN2; (-) strand; PAM type: NRG; PAM sequence: GGG
ctcaccctcccagatagctg

SEQ ID NO: 20202 - DNA, 20 bp, Artificial Sequence
  Description of Artificial Sequence: Synthetic oligonucleotide
  Target: ATXN2; (-) strand; PAM type: NRG; PAM sequence: GGG
cctcaccctcccagatagct

SEQ ID NO: 20203 - DNA, 20 bp, Artificial Sequence
  Description of Artificial Sequence: Synthetic oligonucleotide
  Target: ATXN2; (-) strand; PAM type: NRG; PAM sequence: TGG
gcctcaccctcccagatagc

SEQ ID NO: 20204 - DNA, 20 bp, Artificial Sequence
  Description of Artificial Sequence: Synthetic oligonucleotide
  Target: ATXN2; (-) strand; PAM type: NRG; PAM sequence: TAG
tcctgcctcaccctcccaga

SEQ ID NO: 20205 - DNA, 20 bp, Artificial Sequence
  Description of Artificial Sequence: Synthetic oligonucleotide
  Target: ATXN2; (-) strand; PAM type: NRG; PAM sequence: CAG
attctcctgcctcaccctcc

SEQ ID NO: 20206 - DNA, 20 bp, Artificial Sequence
  Description of Artificial Sequence: Synthetic oligonucleotide
  Target: ATXN2; (-) strand; PAM type: NRG; PAM sequence: AAG
agccttcgcttcctgggttc

SEQ ID NO: 20207 - DNA, 20 bp, Artificial Sequence
  Description of Artificial Sequence: Synthetic oligonucleotide
  Target: ATXN2; (-) strand; PAM type: NRG; PAM sequence: GGG
cactgcagccttcgcttcct

SEQ ID NO: 20208 - DNA, 20 bp, Artificial Sequence
  Description of Artificial Sequence: Synthetic oligonucleotide
  Target: ATXN2; (-) strand; PAM type: NRG; PAM sequence: TGG
tcactgcagccttcgcttcc

SEQ ID NO: 20209 - DNA, 20 bp, Artificial Sequence
  Description of Artificial Sequence: Synthetic oligonucleotide
  Target: ATXN2; (-) strand; PAM type: NRG; PAM sequence: CAG
ggcacaatctcggctcactg

SEQ ID NO: 20210 - DNA, 20 bp, Artificial Sequence
  Description of Artificial Sequence: Synthetic oligonucleotide
  Target: ATXN2; (-) strand; PAM type: NRG; PAM sequence: CGG
ggagcacagtggcacaatct

SEQ ID NO: 20211 - DNA, 20 bp, Artificial Sequence
  Description of Artificial Sequence: Synthetic oligonucleotide
  Target: ATXN2; (-) strand; PAM type: NRG; PAM sequence: TGG
gtgcccaggctggagcacag

SEQ ID NO: 20212 - DNA, 20 bp, Artificial Sequence
  Description of Artificial Sequence: Synthetic oligonucleotide
  Target: ATXN2; (-) strand; PAM type: NRG; PAM sequence: CAG
atcgtgcccaggctggagca

SEQ ID NO: 20213 - DNA, 20 bp, Artificial Sequence
  Description of Artificial Sequence: Synthetic oligonucleotide
  Target: ATXN2; (-) strand; PAM type: NRG; PAM sequence: GAG
ttgagatcgtgcccaggctg

SEQ ID NO: 20214 - DNA, 20 bp, Artificial Sequence
  Description of Artificial Sequence: Synthetic oligonucleotide
  Target: ATXN2; (-) strand; PAM type: NRG; PAM sequence: TGG
ttttgagatcgtgcccaggc

SEQ ID NO: 20215 - DNA, 20 bp, Artificial Sequence
  Description of Artificial Sequence: Synthetic oligonucleotide
  Target: ATXN2; (-) strand; PAM type: NRG; PAM sequence: AGG
attgttttgagatcgtgccc

SEQ ID NO: 20216 - DNA, 20 bp, Artificial Sequence
  Description of Artificial Sequence: Synthetic oligonucleotide
  Target: ATXN2; (-) strand; PAM type: NRG; PAM sequence: CAG
tattgttttgagatcgtgcc

SEQ ID NO: 20217 - DNA, 20 bp, Artificial Sequence
  Description of Artificial Sequence: Synthetic oligonucleotide
  Target: ATXN2; (-) strand; PAM type: NRG; PAM sequence: GAG
ttgtttttttgtattgtttt

SEQ ID NO: 20218 - DNA, 20 bp, Artificial Sequence
  Description of Artificial Sequence: Synthetic oligonucleotide
  Target: ATXN2; (-) strand; PAM type: NRG; PAM sequence: TGG
gtggttatgaagtgtcattg

SEQ ID NO: 20219 - DNA, 20 bp, Artificial Sequence
  Description of Artificial Sequence: Synthetic oligonucleotide
  Target: ATXN2; (-) strand; PAM type: NRG; PAM sequence: AAG
tgtccattctagtggttatg

SEQ ID NO: 20220 - DNA, 20 bp, Artificial Sequence
  Description of Artificial Sequence: Synthetic oligonucleotide
  Target: ATXN2; (-) strand; PAM type: NRG; PAM sequence: TGG
ttgggttatgtccattctag

SEQ ID NO: 20221 - DNA, 20 bp, Artificial Sequence
  Description of Artificial Sequence: Synthetic oligonucleotide
  Target: ATXN2; (-) strand; PAM type: NRG; PAM sequence: TAG
ggtttgggttatgtccattc

SEQ ID NO: 20222 - DNA, 20 bp, Artificial Sequence
  Description of Artificial Sequence: Synthetic oligonucleotide
  Target: ATXN2; (-) strand; PAM type: NRG; PAM sequence: GGG
aaccgatatgtctttggttt

SEQ ID NO: 20223 - DNA, 20 bp, Artificial Sequence
  Description of Artificial Sequence: Synthetic oligonucleotide
  Target: ATXN2; (-) strand; PAM type: NRG; PAM sequence: TGG
taaccgatatgtctttggtt

SEQ ID NO: 20224 - DNA, 20 bp, Artificial Sequence
  Description of Artificial Sequence: Synthetic oligonucleotide
  Target: ATXN2; (-) strand; PAM type: NRG; PAM sequence: TGG
ataaataaccgatatgtctt

SEQ ID NO: 20225 - DNA, 20 bp, Artificial Sequence
  Description of Artificial Sequence: Synthetic oligonucleotide
  Target: ATXN2; (-) strand; PAM type: NRG; PAM sequence: CAG
ccagtaatgtacaagtgttc

SEQ ID NO: 20226 - DNA, 20 bp, Artificial Sequence
  Description of Artificial Sequence: Synthetic oligonucleotide
  Target: ATXN2; (-) strand; PAM type: NRG; PAM sequence: AAG
tatttctaccagtaatgtac

SEQ ID NO: 20227 - DNA, 20 bp, Artificial Sequence
  Description of Artificial Sequence: Synthetic oligonucleotide
  Target: ATXN2; (-) strand; PAM type: NRG; PAM sequence: CAG
gcatcattttgtatttctac

SEQ ID NO: 20228 - DNA, 20 bp, Artificial Sequence
  Description of Artificial Sequence: Synthetic oligonucleotide
  Target: ATXN2; (-) strand; PAM type: NRG; PAM sequence: CAG
actgccaaacttttccaaag

SEQ ID NO: 20229 - DNA, 20 bp, Artificial Sequence
  Description of Artificial Sequence: Synthetic oligonucleotide
  Target: ATXN2; (-) strand; PAM type: NRG; PAM sequence: AAG
ggaactgccaaacttttcca

SEQ ID NO: 20230 - DNA, 20 bp, Artificial Sequence
  Description of Artificial Sequence: Synthetic oligonucleotide
  Target: ATXN2; (-) strand; PAM type: NRG; PAM sequence: TGG
ctaaagtagaaatgctgtga

SEQ ID NO: 20231 - DNA, 20 bp, Artificial Sequence
  Description of Artificial Sequence: Synthetic oligonucleotide
  Target: ATXN2; (-) strand; PAM type: NRG; PAM sequence: TAG
gattttcatttctcctaaag

SEQ ID NO: 20232 - DNA, 20 bp, Artificial Sequence
  Description of Artificial Sequence: Synthetic oligonucleotide
  Target: ATXN2; (-) strand; PAM type: NRG; PAM sequence: AAG
ttagattttcatttctccta

SEQ ID NO: 20233 - DNA, 20 bp, Artificial Sequence
  Description of Artificial Sequence: Synthetic oligonucleotide
  Target: ATXN2; (-) strand; PAM type: NRG; PAM sequence: TAG
aattttttttcatgtggcct

SEQ ID NO: 20234 - DNA, 20 bp, Artificial Sequence
  Description of Artificial Sequence: Synthetic oligonucleotide
  Target: ATXN2; (-) strand; PAM type: NRG; PAM sequence: TGG
aaataaaattttttttcatg

SEQ ID NO: 20235 - DNA, 20 bp, Artificial Sequence
  Description of Artificial Sequence: Synthetic oligonucleotide
  Target: ATXN2; (-) strand; PAM type: NRG; PAM sequence: GAG
cccagcctgagtgaaagagt

SEQ ID NO: 20236 - DNA, 20 bp, Artificial Sequence
  Description of Artificial Sequence: Synthetic oligonucleotide
  Target: ATXN2; (-) strand; PAM type: NRG; PAM sequence: GAG
gcaccccagcctgagtgaaa

SEQ ID NO: 20237 - DNA, 20 bp, Artificial Sequence
  Description of Artificial Sequence: Synthetic oligonucleotide
  Target: ATXN2; (-) strand; PAM type: NRG; PAM sequence: AAG
ctgcaccccagcctgagtga

SEQ ID NO: 20238 - DNA, 20 bp, Artificial Sequence
  Description of Artificial Sequence: Synthetic oligonucleotide
  Target: ATXN2; (-) strand; PAM type: NRG; PAM sequence: GAG
acaccactgcaccccagcct

SEQ ID NO: 20239 - DNA, 20 bp, Artificial Sequence
  Description of Artificial Sequence: Synthetic oligonucleotide
  Target: ATXN2; (-) strand; PAM type: NRG; PAM sequence: CAG
gagatcacaccactgcaccc

SEQ ID NO: 20240 - DNA, 20 bp, Artificial Sequence
  Description of Artificial Sequence: Synthetic oligonucleotide
  Target: ATXN2; (-) strand; PAM type: NRG; PAM sequence: GAG
ggcggaggctgcagtgagct

SEQ ID NO: 20241 - DNA, 20 bp, Artificial Sequence
  Description of Artificial Sequence: Synthetic oligonucleotide
  Target: ATXN2; (-) strand; PAM type: NRG; PAM sequence: GAG
tgggaggcggaggctgcagt

SEQ ID NO: 20242 - DNA, 20 bp, Artificial Sequence
  Description of Artificial Sequence: Synthetic oligonucleotide
  Target: ATXN2; (-) strand; PAM type: NRG; PAM sequence: CAG
aacctgggaggcggaggctg

SEQ ID NO: 20243 - DNA, 20 bp, Artificial Sequence
  Description of Artificial Sequence: Synthetic oligonucleotide
  Target: ATXN2; (-) strand; PAM type: NRG; PAM sequence: AGG
cgcttgaacctgggaggcgg

SEQ ID NO: 20244 - DNA, 20 bp, Artificial Sequence
  Description of Artificial Sequence: Synthetic oligonucleotide
  Target: ATXN2; (-) strand; PAM type: NRG; PAM sequence: GAG
tcgcttgaacctgggaggcg

SEQ ID NO: 20245 - DNA, 20 bp, Artificial Sequence
  Description of Artificial Sequence: Synthetic oligonucleotide
  Target: ATXN2; (-) strand; PAM type: NRG; PAM sequence: CGG
aatcgcttgaacctgggagg

SEQ ID NO: 20246 - DNA, 20 bp, Artificial Sequence
  Description of Artificial Sequence: Synthetic oligonucleotide
  Target: ATXN2; (-) strand; PAM type: NRG; PAM sequence: AGG
cagaatcgcttgaacctggg

SEQ ID NO: 20247 - DNA, 20 bp, Artificial Sequence
  Description of Artificial Sequence: Synthetic oligonucleotide
  Target: ATXN2; (-) strand; PAM type: NRG; PAM sequence: GAG
tcagaatcgcttgaacctgg

SEQ ID NO: 20248 - DNA, 20 bp, Artificial Sequence
  Description of Artificial Sequence: Synthetic oligonucleotide
  Target: ATXN2; (-) strand; PAM type: NRG; PAM sequence: GGG
catcagaatcgcttgaacct

SEQ ID NO: 20249 - DNA, 20 bp, Artificial Sequence
  Description of Artificial Sequence: Synthetic oligonucleotide
  Target: ATXN2; (-) strand; PAM type: NRG; PAM sequence: TGG
gcatcagaatcgcttgaacc

SEQ ID NO: 20250 - DNA, 20 bp, Artificial Sequence
  Description of Artificial Sequence: Synthetic oligonucleotide
  Target: ATXN2; (-) strand; PAM type: NRG; PAM sequence: CAG
ggaggctgaggcaggagcat

SEQ ID NO: 20251 - DNA, 20 bp, Artificial Sequence
  Description of Artificial Sequence: Synthetic oligonucleotide
  Target: ATXN2; (-) strand; PAM type: NRG; PAM sequence: GAG
tattcaggaggctgaggcag

SEQ ID NO: 20252 - DNA, 20 bp, Artificial Sequence
  Description of Artificial Sequence: Synthetic oligonucleotide
  Target: ATXN2; (-) strand; PAM type: NRG; PAM sequence: AGG
gctattcaggaggctgaggc

SEQ ID NO: 20253 - DNA, 20 bp, Artificial Sequence
  Description of Artificial Sequence: Synthetic oligonucleotide
  Target: ATXN2; (-) strand; PAM type: NRG; PAM sequence: CAG
agctattcaggaggctgagg

SEQ ID NO: 20254 - DNA, 20 bp, Artificial Sequence
  Description of Artificial Sequence: Synthetic oligonucleotide
  Target: ATXN2; (-) strand; PAM type: NRG; PAM sequence: AGG
cccagctattcaggaggctg

SEQ ID NO: 20255 - DNA, 20 bp, Artificial Sequence
  Description of Artificial Sequence: Synthetic oligonucleotide
  Target: ATXN2; (-) strand; PAM type: NRG; PAM sequence: GAG
tcccagctattcaggaggct

SEQ ID NO: 20256 - DNA, 20 bp, Artificial Sequence
  Description of Artificial Sequence: Synthetic oligonucleotide
  Target: ATXN2; (-) strand; PAM type: NRG; PAM sequence: AGG
tataatcccagctattcagg

SEQ ID NO: 20257 - DNA, 20 bp, Artificial Sequence
  Description of Artificial Sequence: Synthetic oligonucleotide
  Target: ATXN2; (-) strand; PAM type: NRG; PAM sequence: GAG
ctataatcccagctattcag

SEQ ID NO: 20258 - DNA, 20 bp, Artificial Sequence
  Description of Artificial Sequence: Synthetic oligonucleotide
  Target: ATXN2; (-) strand; PAM type: NRG; PAM sequence: AGG
acctataatcccagctattc

SEQ ID NO: 20259 - DNA, 20 bp, Artificial Sequence
  Description of Artificial Sequence: Synthetic oligonucleotide
  Target: ATXN2; (-) strand; PAM type: NRG; PAM sequence: CAG
cacctataatcccagctatt

SEQ ID NO: 20260 - DNA, 20 bp, Artificial Sequence
  Description of Artificial Sequence: Synthetic oligonucleotide
  Target: ATXN2; (-) strand; PAM type: NRG; PAM sequence: CAG
gtagcgtgcacctataatcc

SEQ ID NO: 20261 - DNA, 20 bp, Artificial Sequence
  Description of Artificial Sequence: Synthetic oligonucleotide
  Target: ATXN2; (-) strand; PAM type: NRG; PAM sequence: TAG
caaaaattacactggcatgg

SEQ ID NO: 20262 - DNA, 20 bp, Artificial Sequence
  Description of Artificial Sequence: Synthetic oligonucleotide
  Target: ATXN2; (-) strand; PAM type: NRG; PAM sequence: TGG
atacaaaaattacactggca

SEQ ID NO: 20263 - DNA, 20 bp, Artificial Sequence
  Description of Artificial Sequence: Synthetic oligonucleotide
  Target: ATXN2; (-) strand; PAM type: NRG; PAM sequence: TGG
taaaaatacaaaaattacac

SEQ ID NO: 20264 - DNA, 20 bp, Artificial Sequence
  Description of Artificial Sequence: Synthetic oligonucleotide
  Target: ATXN2; (-) strand; PAM type: NRG; PAM sequence: TGG
tgagaccagcctggccaaca

SEQ ID NO: 20265 - DNA, 20 bp, Artificial Sequence
  Description of Artificial Sequence: Synthetic oligonucleotide
  Target: ATXN2; (-) strand; PAM type: NRG; PAM sequence: TGG
tcaggagtttgagaccagcc

SEQ ID NO: 20266 - DNA, 20 bp, Artificial Sequence
  Description of Artificial Sequence: Synthetic oligonucleotide
  Target: ATXN2; (-) strand; PAM type: NRG; PAM sequence: CAG
tgaggtcaggagtttgagac

SEQ ID NO: 20267 - DNA, 20 bp, Artificial Sequence
  Description of Artificial Sequence: Synthetic oligonucleotide
  Target: ATXN2; (-) strand; PAM type: NRG; PAM sequence: GAG
tgacttgaggtcaggagttt

SEQ ID NO: 20268 - DNA, 20 bp, Artificial Sequence
  Description of Artificial Sequence: Synthetic oligonucleotide
  Target: ATXN2; (-) strand; PAM type: NRG; PAM sequence: GAG
ggcagatgacttgaggtcag

SEQ ID NO: 20269 - DNA, 20 bp, Artificial Sequence
  Description of Artificial Sequence: Synthetic oligonucleotide
  Target: ATXN2; (-) strand; PAM type: NRG; PAM sequence: AGG
tgggcagatgacttgaggtc

SEQ ID NO: 20270 - DNA, 20 bp, Artificial Sequence
  Description of Artificial Sequence: Synthetic oligonucleotide
  Target: ATXN2; (-) strand; PAM type: NRG; PAM sequence: CAG
gtgggcagatgacttgaggt

SEQ ID NO: 20271 - DNA, 20 bp, Artificial Sequence
  Description of Artificial Sequence: Synthetic oligonucleotide
  Target: ATXN2; (-) strand; PAM type: NRG; PAM sequence: AGG
tgaggtgggcagatgacttg

SEQ ID NO: 20272 - DNA, 20 bp, Artificial Sequence
  Description of Artificial Sequence: Synthetic oligonucleotide
  Target: ATXN2; (-) strand; PAM type: NRG; PAM sequence: GAG
ctgaggtgggcagatgactt

SEQ ID NO: 20273 - DNA, 20 bp, Artificial Sequence
  Description of Artificial Sequence: Synthetic oligonucleotide
  Target: ATXN2; (-) strand; PAM type: NRG; PAM sequence: CAG
gtctgggaggctgaggtggg

SEQ ID NO: 20274 - DNA, 20 bp, Artificial Sequence
  Description of Artificial Sequence: Synthetic oligonucleotide
  Target: ATXN2; (-) strand; PAM type: NRG; PAM sequence: GGG
gcagtctgggaggctgaggt

SEQ ID NO: 20275 - DNA, 20 bp, Artificial Sequence
  Description of Artificial Sequence: Synthetic oligonucleotide
  Target: ATXN2; (-) strand; PAM type: NRG; PAM sequence: TGG
agcagtctgggaggctgagg

SEQ ID NO: 20276 - DNA, 20 bp, Artificial Sequence
  Description of Artificial Sequence: Synthetic oligonucleotide
  Target: ATXN2; (-) strand; PAM type: NRG; PAM sequence: AGG
cccagcagtctgggaggctg

SEQ ID NO: 20277 - DNA, 20 bp, Artificial Sequence
  Description of Artificial Sequence: Synthetic oligonucleotide
  Target: ATXN2; (-) strand; PAM type: NRG; PAM sequence: GAG
tcccagcagtctgggaggct

SEQ ID NO: 20278 - DNA, 20 bp, Artificial Sequence
  Description of Artificial Sequence: Synthetic oligonucleotide
  Target: ATXN2; (-) strand; PAM type: NRG; PAM sequence: AGG
tataatcccagcagtctggg

SEQ ID NO: 20279 - DNA, 20 bp, Artificial Sequence
  Description of Artificial Sequence: Synthetic oligonucleotide
  Target: ATXN2; (-) strand; PAM type: NRG; PAM sequence: GAG
ctataatcccagcagtctgg

SEQ ID NO: 20280 - DNA, 20 bp, Artificial Sequence
  Description of Artificial Sequence: Synthetic oligonucleotide
  Target: ATXN2; (-) strand; PAM type: NRG; PAM sequence: GGG
gcctataatcccagcagtct

SEQ ID NO: 20281 - DNA, 20 bp, Artificial Sequence
  Description of Artificial Sequence: Synthetic oligonucleotide
  Target: ATXN2; (-) strand; PAM type: NRG; PAM sequence: TGG
tgcctataatcccagcagtc

SEQ ID NO: 20282 - DNA, 20 bp, Artificial Sequence
  Description of Artificial Sequence: Synthetic oligonucleotide
  Target: ATXN2; (-) strand; PAM type: NRG; PAM sequence: CAG
gctcatgcctataatcccag

SEQ ID NO: 20283 - DNA, 20 bp, Artificial Sequence
  Description of Artificial Sequence: Synthetic oligonucleotide
  Target: ATXN2; (-) strand; PAM type: NRG; PAM sequence: CAG
gtggctcatgcctataatcc

SEQ ID NO: 20284 - DNA, 20 bp, Artificial Sequence
  Description of Artificial Sequence: Synthetic oligonucleotide
  Target: ATXN2; (-) strand; PAM type: NRG; PAM sequence: TGG
tcatatgaggctgggagcag

SEQ ID NO: 20285 - DNA, 20 bp, Artificial Sequence
  Description of Artificial Sequence: Synthetic oligonucleotide
  Target: ATXN2; (-) strand; PAM type: NRG; PAM sequence: CAG
ttttcatatgaggctgggag

SEQ ID NO: 20286 - DNA, 20 bp, Artificial Sequence
  Description of Artificial Sequence: Synthetic oligonucleotide
  Target: ATXN2; (-) strand; PAM type: NRG; PAM sequence: GAG
aaattttcatatgaggctgg

SEQ ID NO: 20287 - DNA, 20 bp, Artificial Sequence
  Description of Artificial Sequence: Synthetic oligonucleotide
  Target: ATXN2; (-) strand; PAM type: NRG; PAM sequence: GGG
acaaattttcatatgaggct

SEQ ID NO: 20288 - DNA, 20 bp, Artificial Sequence
  Description of Artificial Sequence: Synthetic oligonucleotide
  Target: ATXN2; (-) strand; PAM type: NRG; PAM sequence: TGG
tacaaattttcatatgaggc

SEQ ID NO: 20289 - DNA, 20 bp, Artificial Sequence
  Description of Artificial Sequence: Synthetic oligonucleotide
  Target: ATXN2; (-) strand; PAM type: NRG; PAM sequence: AGG
catgtacaaattttcatatg

SEQ ID NO: 20290 - DNA, 20 bp, Artificial Sequence
  Description of Artificial Sequence: Synthetic oligonucleotide
  Target: ATXN2; (-) strand; PAM type: NRG; PAM sequence: GAG
tcatgtacaaattttcatat

SEQ ID NO: 20291 - DNA, 20 bp, Artificial Sequence
  Description of Artificial Sequence: Synthetic oligonucleotide
  Target: ATXN2; (-) strand; PAM type: NRG; PAM sequence: TGG
ggcaatgagtaatgcttttg

SEQ ID NO: 20292 - DNA, 20 bp, Artificial Sequence
  Description of Artificial Sequence: Synthetic oligonucleotide
  Target: ATXN2; (-) strand; PAM type: NRG; PAM sequence: GAG
tatttcctttttctggcaat

SEQ ID NO: 20293 - DNA, 20 bp, Artificial Sequence
  Description of Artificial Sequence: Synthetic oligonucleotide
  Target: ATXN2; (-) strand; PAM type: NRG; PAM sequence: TGG
tttggattatttcctttttc

SEQ ID NO: 20294 - DNA, 20 bp, Artificial Sequence
  Description of Artificial Sequence: Synthetic oligonucleotide
  Target: ATXN2; (-) strand; PAM type: NRG; PAM sequence: TGG
atcatcagttgatgaacatt

SEQ ID NO: 20295 - DNA, 20 bp, Artificial Sequence
  Description of Artificial Sequence: Synthetic oligonucleotide
  Target: ATXN2; (-) strand; PAM type: NRG; PAM sequence: CAG
ataccacttttacctatcat

SEQ ID NO: 20296 - DNA, 20 bp, Artificial Sequence
  Description of Artificial Sequence: Synthetic oligonucleotide
  Target: ATXN2; (-) strand; PAM type: NRG; PAM sequence: TGG
caggtgtgagccactgctcc

SEQ ID NO: 20297 - DNA, 20 bp, Artificial Sequence
  Description of Artificial Sequence: Synthetic oligonucleotide
  Target: ATXN2; (-) strand; PAM type: NRG; PAM sequence: GAG
agtgctgggattacaggtgt

SEQ ID NO: 20298 - DNA, 20 bp, Artificial Sequence
  Description of Artificial Sequence: Synthetic oligonucleotide
  Target: ATXN2; (-) strand; PAM type: NRG; PAM sequence: AGG
tcccaaagtgctgggattac

SEQ ID NO: 20299 - DNA, 20 bp, Artificial Sequence
  Description of Artificial Sequence: Synthetic oligonucleotide
  Target: ATXN2; (-) strand; PAM type: NRG; PAM sequence: CAG
ctcccaaagtgctgggatta

SEQ ID NO: 20300 - DNA, 20 bp, Artificial Sequence
  Description of Artificial Sequence: Synthetic oligonucleotide
  Target: ATXN2; (-) strand; PAM type: NRG; PAM sequence: GGG
cctcggcctcccaaagtgct

SEQ ID NO: 20301 - DNA, 20 bp, Artificial Sequence
  Description of Artificial Sequence: Synthetic oligonucleotide
  Target: ATXN2; (-) strand; PAM type: NRG; PAM sequence: TGG
ccctcggcctcccaaagtgc

SEQ ID NO: 20302 - DNA, 20 bp, Artificial Sequence
  Description of Artificial Sequence: Synthetic oligonucleotide
  Target: ATXN2; (-) strand; PAM type: NRG; PAM sequence: AAG
ccacctccctcggcctccca

SEQ ID NO: 20303 - DNA, 20 bp, Artificial Sequence
  Description of Artificial Sequence: Synthetic oligonucleotide
  Target: ATXN2; (-) strand; PAM type: NRG; PAM sequence: CGG
ctcaagtgatccacctccct

SEQ ID NO: 20304 - DNA, 20 bp, Artificial Sequence
  Description of Artificial Sequence: Synthetic oligonucleotide
  Target: ATXN2; (-) strand; PAM type: NRG; PAM sequence: AAG
ggtcttgaactcctggcctc

SEQ ID NO: 20305 - DNA, 20 bp, Artificial Sequence
  Description of Artificial Sequence: Synthetic oligonucleotide
  Target: ATXN2; (-) strand; PAM type: NRG; PAM sequence: TGG
ccgggctggtcttgaactcc

SEQ ID NO: 20306 - DNA, 20 bp, Artificial Sequence
  Description of Artificial Sequence: Synthetic oligonucleotide
  Target: ATXN2; (-) strand; PAM type: NRG; PAM sequence: TGG
ctttgccatgttggccgggc

SEQ ID NO: 20307 - DNA, 20 bp, Artificial Sequence
  Description of Artificial Sequence: Synthetic oligonucleotide
  Target: ATXN2; (-) strand; PAM type: NRG; PAM sequence: GGG
agggctttgccatgttggcc

SEQ ID NO: 20308 - DNA, 20 bp, Artificial Sequence
  Description of Artificial Sequence: Synthetic oligonucleotide
  Target: ATXN2; (-) strand; PAM type: NRG; PAM sequence: CGG
aagggctttgccatgttggc

SEQ ID NO: 20309 - DNA, 20 bp, Artificial Sequence
  Description of Artificial Sequence: Synthetic oligonucleotide
  Target: ATXN2; (-) strand; PAM type: NRG; PAM sequence: TGG
gagaaagggctttgccatgt

SEQ ID NO: 20310 - DNA, 20 bp, Artificial Sequence
  Description of Artificial Sequence: Synthetic oligonucleotide
  Target: ATXN2; (-) strand; PAM type: NRG; PAM sequence: GGG
aaaaaaaaatagtagagaaa

SEQ ID NO: 20311 - DNA, 20 bp, Artificial Sequence
  Description of Artificial Sequence: Synthetic oligonucleotide
  Target: ATXN2; (-) strand; PAM type: NRG; PAM sequence: AGG
aaaaaaaaaatagtagagaa

SEQ ID NO: 20312 - DNA, 20 bp, Artificial Sequence
  Description of Artificial Sequence: Synthetic oligonucleotide
  Target: ATXN2; (-) strand; PAM type: NRG; PAM sequence: AAG
aaaaaaaaaaatagtagaga

SEQ ID NO: 20313 - DNA, 20 bp, Artificial Sequence
  Description of Artificial Sequence: Synthetic oligonucleotide
  Target: ATXN2; (-) strand; PAM type: NRG; PAM sequence: GAG
aaaaaaaaaaaaaaatagta

SEQ ID NO: 20314 - DNA, 20 bp, Artificial Sequence
  Description of Artificial Sequence: Synthetic oligonucleotide
  Target: ATXN2; (-) strand; PAM type: NRG; PAM sequence: TAG
aaaaaaaaaaaaaaaaatag

SEQ ID NO: 20315 - DNA, 20 bp, Artificial Sequence
  Description of Artificial Sequence: Synthetic oligonucleotide
  Target: ATXN2; (-) strand; PAM type: NRG; PAM sequence: TAG
aaaaaaaaaaaaaaaaaaaa

SEQ ID NO: 20316 - DNA, 20 bp, Artificial Sequence
  Description of Artificial Sequence: Synthetic oligonucleotide
  Target: ATXN2; (-) strand; PAM type: NRG; PAM sequence: GAG
tccagcctgggtgacagagc

SEQ ID NO: 20317 - DNA, 20 bp, Artificial Sequence
  Description of Artificial Sequence: Synthetic oligonucleotide
  Target: ATXN2; (-) strand; PAM type: NRG; PAM sequence: GAG
gcactccagcctgggtgaca

SEQ ID NO: 20318 - DNA, 20 bp, Artificial Sequence
  Description of Artificial Sequence: Synthetic oligonucleotide
  Target: ATXN2; (-) strand; PAM type: NRG; PAM sequence: CAG
ctgcactccagcctgggtga

SEQ ID NO: 20319 - DNA, 20 bp, Artificial Sequence
  Description of Artificial Sequence: Synthetic oligonucleotide
  Target: ATXN2; (-) strand; PAM type: NRG; PAM sequence: GGG
gtgccactgcactccagcct

SEQ ID NO: 20320 - DNA, 20 bp, Artificial Sequence
  Description of Artificial Sequence: Synthetic oligonucleotide
  Target: ATXN2; (-) strand; PAM type: NRG; PAM sequence: TGG
ggtgccactgcactccagcc

SEQ ID NO: 20321 - DNA, 20 bp, Artificial Sequence
  Description of Artificial Sequence: Synthetic oligonucleotide
  Target: ATXN2; (-) strand; PAM type: NRG; PAM sequence: CAG
gagatggtgccactgcactc

SEQ ID NO: 20322 - DNA, 20 bp, Artificial Sequence
  Description of Artificial Sequence: Synthetic oligonucleotide
  Target: ATXN2; (-) strand; PAM type: NRG; PAM sequence: TGG
gagctggcagtgagctgaga

SEQ ID NO: 20323 - DNA, 20 bp, Artificial Sequence
  Description of Artificial Sequence: Synthetic oligonucleotide
  Target: ATXN2; (-) strand; PAM type: NRG; PAM sequence: GAG
ggcagagctggcagtgagct

SEQ ID NO: 20324 - DNA, 20 bp, Artificial Sequence
  Description of Artificial Sequence: Synthetic oligonucleotide
  Target: ATXN2; (-) strand; PAM type: NRG; PAM sequence: GAG
tgggaggcagagctggcagt

SEQ ID NO: 20325 - DNA, 20 bp, Artificial Sequence
  Description of Artificial Sequence: Synthetic oligonucleotide
  Target: ATXN2; (-) strand; PAM type: NRG; PAM sequence: CAG
aacctgggaggcagagctgg

SEQ ID NO: 20326 - DNA, 20 bp, Artificial Sequence
  Description of Artificial Sequence: Synthetic oligonucleotide
  Target: ATXN2; (-) strand; PAM type: NRG; PAM sequence: TGG
atgaacctgggaggcagagc

SEQ ID NO: 20327 - DNA, 20 bp, Artificial Sequence
  Description of Artificial Sequence: Synthetic oligonucleotide
  Target: ATXN2; (-) strand; PAM type: NRG; PAM sequence: GAG
tggcatgaacctgggaggca

SEQ ID NO: 20328 - DNA, 20 bp, Artificial Sequence
  Description of Artificial Sequence: Synthetic oligonucleotide
  Target: ATXN2; (-) strand; PAM type: NRG; PAM sequence: CAG
aatggcatgaacctgggagg

SEQ ID NO: 20329 - DNA, 20 bp, Artificial Sequence
  Description of Artificial Sequence: Synthetic oligonucleotide
  Target: ATXN2; (-) strand; PAM type: NRG; PAM sequence: AGG
gagaatggcatgaacctggg

SEQ ID NO: 20330 - DNA, 20 bp, Artificial Sequence
  Description of Artificial Sequence: Synthetic oligonucleotide
  Target: ATXN2; (-) strand; PAM type: NRG; PAM sequence: GAG
ggagaatggcatgaacctgg

SEQ ID NO: 20331 - DNA, 20 bp, Artificial Sequence
  Description of Artificial Sequence: Synthetic oligonucleotide
  Target: ATXN2; (-) strand; PAM type: NRG; PAM sequence: GGG
caggagaatggcatgaacct

SEQ ID NO: 20332 - DNA, 20 bp, Artificial Sequence
  Description of Artificial Sequence: Synthetic oligonucleotide
  Target: ATXN2; (-) strand; PAM type: NRG; PAM sequence: TGG
gcaggagaatggcatgaacc

SEQ ID NO: 20333 - DNA, 20 bp, Artificial Sequence
  Description of Artificial Sequence: Synthetic oligonucleotide
  Target: ATXN2; (-) strand; PAM type: NRG; PAM sequence: TGG
gggaggctgaggcaggagaa

SEQ ID NO: 20334 - DNA, 20 bp, Artificial Sequence
  Description of Artificial Sequence: Synthetic oligonucleotide
  Target: ATXN2; (-) strand; PAM type: NRG; PAM sequence: GAG
tactcgggaggctgaggcag

SEQ ID NO: 20335 - DNA, 20 bp, Artificial Sequence
  Description of Artificial Sequence: Synthetic oligonucleotide
  Target: ATXN2; (-) strand; PAM type: NRG; PAM sequence: AGG
gctactcgggaggctgaggc

SEQ ID NO: 20336 - DNA, 20 bp, Artificial Sequence
  Description of Artificial Sequence: Synthetic oligonucleotide
  Target: ATXN2; (-) strand; PAM type: NRG; PAM sequence: CAG
agctactcgggaggctgagg

SEQ ID NO: 20337 - DNA, 20 bp, Artificial Sequence
  Description of Artificial Sequence: Synthetic oligonucleotide
  Target: ATXN2; (-) strand; PAM type: NRG; PAM sequence: AGG
cccagctactcgggaggctg

SEQ ID NO: 20338 - DNA, 20 bp, Artificial Sequence
  Description of Artificial Sequence: Synthetic oligonucleotide
  Target: ATXN2; (-) strand; PAM type: NRG; PAM sequence: GAG
tcccagctactcgggaggct

SEQ ID NO: 20339 - DNA, 20 bp, Artificial Sequence
  Description of Artificial Sequence: Synthetic oligonucleotide
  Target: ATXN2; (-) strand; PAM type: NRG; PAM sequence: AGG
tatagtcccagctactcggg

SEQ ID NO: 20340 - DNA, 20 bp, Artificial Sequence
  Description of Artificial Sequence: Synthetic oligonucleotide
  Target: ATXN2; (-) strand; PAM type: NRG; PAM sequence: GAG
ctatagtcccagctactcgg

SEQ ID NO: 20341 - DNA, 20 bp, Artificial Sequence
  Description of Artificial Sequence: Synthetic oligonucleotide
  Target: ATXN2; (-) strand; PAM type: NRG; PAM sequence: GGG
gcctatagtcccagctactc

SEQ ID NO: 20342 - DNA, 20 bp, Artificial Sequence
  Description of Artificial Sequence: Synthetic oligonucleotide
  Target: ATXN2; (-) strand; PAM type: NRG; PAM sequence: CGG
tgcctatagtcccagctact

SEQ ID NO: 20343 - DNA, 20 bp, Artificial Sequence
  Description of Artificial Sequence: Synthetic oligonucleotide
  Target: ATXN2; (-) strand; PAM type: NRG; PAM sequence: CAG
gtggcaggtgcctatagtcc

SEQ ID NO: 20344 - DNA, 20 bp, Artificial Sequence
  Description of Artificial Sequence: Synthetic oligonucleotide
  Target: ATXN2; (-) strand; PAM type: NRG; PAM sequence: TAG
agcgtggtggcaggtgccta

SEQ ID NO: 20345 - DNA, 20 bp, Artificial Sequence
  Description of Artificial Sequence: Synthetic oligonucleotide
  Target: ATXN2; (-) strand; PAM type: NRG; PAM sequence: AGG
aattagctgagcgtggtggc

SEQ ID NO: 20346 - DNA, 20 bp, Artificial Sequence
  Description of Artificial Sequence: Synthetic oligonucleotide
  Target: ATXN2; (-) strand; PAM type: NRG; PAM sequence: CAG
caattagctgagcgtggtgg

SEQ ID NO: 20347 - DNA, 20 bp, Artificial Sequence
  Description of Artificial Sequence: Synthetic oligonucleotide
  Target: ATXN2; (-) strand; PAM type: NRG; PAM sequence: TGG
aaacaattagctgagcgtgg

SEQ ID NO: 20348 - DNA, 20 bp, Artificial Sequence
  Description of Artificial Sequence: Synthetic oligonucleotide
  Target: ATXN2; (-) strand; PAM type: NRG; PAM sequence: TGG
tacaaacaattagctgagcg

SEQ ID NO: 20349 - DNA, 20 bp, Artificial Sequence
  Description of Artificial Sequence: Synthetic oligonucleotide
  Target: ATXN2; (-) strand; PAM type: NRG; PAM sequence: GAG
aaaaatacaaacaattagct

SEQ ID NO: 20350 - DNA, 20 bp, Artificial Sequence
  Description of Artificial Sequence: Synthetic oligonucleotide
  Target: ATXN2; (-) strand; PAM type: NRG; PAM sequence: TAG
ctactaaaaatacaaacaat

SEQ ID NO: 20351 - DNA, 20 bp, Artificial Sequence
  Description of Artificial Sequence: Synthetic oligonucleotide
  Target: ATXN2; (-) strand; PAM type: NRG; PAM sequence: CAG
caagaccatcctggctaata

SEQ ID NO: 20352 - DNA, 20 bp, Artificial Sequence
  Description of Artificial Sequence: Synthetic oligonucleotide
  Target: ATXN2; (-) strand; PAM type: NRG; PAM sequence: TGG
tcaggagatcaagaccatcc

SEQ ID NO: 20353 - DNA, 20 bp, Artificial Sequence
  Description of Artificial Sequence: Synthetic oligonucleotide
  Target: ATXN2; (-) strand; PAM type: NRG; PAM sequence: AAG
gatcacgaggtcaggagatc

SEQ ID NO: 20354 - DNA, 20 bp, Artificial Sequence
  Description of Artificial Sequence: Synthetic oligonucleotide
  Target: ATXN2; (-) strand; PAM type: NRG; PAM sequence: GAG
tgggcagatcacgaggtcag

SEQ ID NO: 20355 - DNA, 20 bp, Artificial Sequence
  Description of Artificial Sequence: Synthetic oligonucleotide
  Target: ATXN2; (-) strand; PAM type: NRG; PAM sequence: AGG
ggtgggcagatcacgaggtc

SEQ ID NO: 20356 - DNA, 20 bp, Artificial Sequence
  Description of Artificial Sequence: Synthetic oligonucleotide
  Target: ATXN2; (-) strand; PAM type: NRG; PAM sequence: CAG
aggtgggcagatcacgaggt

SEQ ID NO: 20357 - DNA, 20 bp, Artificial Sequence
  Description of Artificial Sequence: Synthetic oligonucleotide
  Target: ATXN2; (-) strand; PAM type: NRG; PAM sequence: AGG
gccgaggtgggcagatcacg

SEQ ID NO: 20358 - DNA, 20 bp, Artificial Sequence
  Description of Artificial Sequence: Synthetic oligonucleotide
  Target: ATXN2; (-) strand; PAM type: NRG; PAM sequence: GAG
ggccgaggtgggcagatcac

SEQ ID NO: 20359 - DNA, 20 bp, Artificial Sequence
  Description of Artificial Sequence: Synthetic oligonucleotide
  Target: ATXN2; (-) strand; PAM type: NRG; PAM sequence: CAG
ctttgggaggccgaggtggg

SEQ ID NO: 20360 - DNA, 20 bp, Artificial Sequence
  Description of Artificial Sequence: Synthetic oligonucleotide
  Target: ATXN2; (-) strand; PAM type: NRG; PAM sequence: GGG
gcactttgggaggccgaggt

SEQ ID NO: 20361 - DNA, 20 bp, Artificial Sequence
  Description of Artificial Sequence: Synthetic oligonucleotide
  Target: ATXN2; (-) strand; PAM type: NRG; PAM sequence: TGG
agcactttgggaggccgagg

SEQ ID NO: 20362 - DNA, 20 bp, Artificial Sequence
  Description of Artificial Sequence: Synthetic oligonucleotide
  Target: ATXN2; (-) strand; PAM type: NRG; PAM sequence: AGG
tccagcactttgggaggccg

SEQ ID NO: 20363 - DNA, 20 bp, Artificial Sequence
  Description of Artificial Sequence: Synthetic oligonucleotide
  Target: ATXN2; (-) strand; PAM type: NRG; PAM sequence: GAG
atccagcactttgggaggcc

SEQ ID NO: 20364 - DNA, 20 bp, Artificial Sequence
  Description of Artificial Sequence: Synthetic oligonucleotide
  Target: ATXN2; (-) strand; PAM type: NRG; PAM sequence: AGG
ctgtaatccagcactttggg

SEQ ID NO: 20365 - DNA, 20 bp, Artificial Sequence
  Description of Artificial Sequence: Synthetic oligonucleotide
  Target: ATXN2; (-) strand; PAM type: NRG; PAM sequence: GAG
cctgtaatccagcactttgg

SEQ ID NO: 20366 - DNA, 20 bp, Artificial Sequence
  Description of Artificial Sequence: Synthetic oligonucleotide
  Target: ATXN2; (-) strand; PAM type: NRG; PAM sequence: GGG
cgcctgtaatccagcacttt

SEQ ID NO: 20367 - DNA, 20 bp, Artificial Sequence
  Description of Artificial Sequence: Synthetic oligonucleotide
  Target: ATXN2; (-) strand; PAM type: NRG; PAM sequence: TGG
acgcctgtaatccagcactt

SEQ ID NO: 20368 - DNA, 20 bp, Artificial Sequence
  Description of Artificial Sequence: Synthetic oligonucleotide
  Target: ATXN2; (-) strand; PAM type: NRG; PAM sequence: CAG
ggtggctcacgcctgtaatc

SEQ ID NO: 20369 - DNA, 20 bp, Artificial Sequence
  Description of Artificial Sequence: Synthetic oligonucleotide
  Target: ATXN2; (-) strand; PAM type: NRG; PAM sequence: TGG
tactcagagtctgggcacgg

SEQ ID NO: 20370 - DNA, 20 bp, Artificial Sequence
  Description of Artificial Sequence: Synthetic oligonucleotide
  Target: ATXN2; (-) strand; PAM type: NRG; PAM sequence: CGG
atatactcagagtctgggca

SEQ ID NO: 20371 - DNA, 20 bp, Artificial Sequence
  Description of Artificial Sequence: Synthetic oligonucleotide
  Target: ATXN2; (-) strand; PAM type: NRG; PAM sequence: GGG
aaatgatatactcagagtct

SEQ ID NO: 20372 - DNA, 20 bp, Artificial Sequence
  Description of Artificial Sequence: Synthetic oligonucleotide
  Target: ATXN2; (-) strand; PAM type: NRG; PAM sequence: TGG
gaaatgatatactcagagtc

SEQ ID NO: 20373 - DNA, 20 bp, Artificial Sequence
  Description of Artificial Sequence: Synthetic oligonucleotide
  Target: ATXN2; (-) strand; PAM type: NRG; PAM sequence: GAG
taatagaaatgatatactca

SEQ ID NO: 20374 - DNA, 20 bp, Artificial Sequence
  Description of Artificial Sequence: Synthetic oligonucleotide
  Target: ATXN2; (-) strand; PAM type: NRG; PAM sequence: CAG
tttaatagaaatgatatact

SEQ ID NO: 20375 - DNA, 20 bp, Artificial Sequence
  Description of Artificial Sequence: Synthetic oligonucleotide
  Target: ATXN2; (-) strand; PAM type: NRG; PAM sequence: TAG
aggaggtactgtctttttaa

SEQ ID NO: 20376 - DNA, 20 bp, Artificial Sequence
  Description of Artificial Sequence: Synthetic oligonucleotide
  Target: ATXN2; (-) strand; PAM type: NRG; PAM sequence: AGG
agtcacattctaacttcagg

SEQ ID NO: 20377 - DNA, 20 bp, Artificial Sequence
  Description of Artificial Sequence: Synthetic oligonucleotide
  Target: ATXN2; (-) strand; PAM type: NRG; PAM sequence: GAG
gagtcacattctaacttcag

SEQ ID NO: 20378 - DNA, 20 bp, Artificial Sequence
  Description of Artificial Sequence: Synthetic oligonucleotide
  Target: ATXN2; (-) strand; PAM type: NRG; PAM sequence: AGG
gagagtcacattctaacttc

SEQ ID NO: 20379 - DNA, 20 bp, Artificial Sequence
  Description of Artificial Sequence: Synthetic oligonucleotide
  Target: ATXN2; (-) strand; PAM type: NRG; PAM sequence: CAG
ggagagtcacattctaactt

SEQ ID NO: 20380 - DNA, 20 bp, Artificial Sequence
  Description of Artificial Sequence: Synthetic oligonucleotide
  Target: ATXN2; (-) strand; PAM type: NRG; PAM sequence: GAG
agtttggctatctgatggga

SEQ ID NO: 20381 - DNA, 20 bp, Artificial Sequence
  Description of Artificial Sequence: Synthetic oligonucleotide
  Target: ATXN2; (-) strand; PAM type: NRG; PAM sequence: GAG
acagtttggctatctgatgg

SEQ ID NO: 20382 - DNA, 20 bp, Artificial Sequence
  Description of Artificial Sequence: Synthetic oligonucleotide
  Target: ATXN2; (-) strand; PAM type: NRG; PAM sequence: GGG
tgacagtttggctatctgat

SEQ ID NO: 20383 - DNA, 20 bp, Artificial Sequence
  Description of Artificial Sequence: Synthetic oligonucleotide
  Target: ATXN2; (-) strand; PAM type: NRG; PAM sequence: TGG
atgacagtttggctatctga

SEQ ID NO: 20384 - DNA, 20 bp, Artificial Sequence
  Description of Artificial Sequence: Synthetic oligonucleotide
  Target: ATXN2; (-) strand; PAM type: NRG; PAM sequence: TGG
taagagcaagcatgacagtt

SEQ ID NO: 20385 - DNA, 20 bp, Artificial Sequence
  Description of Artificial Sequence: Synthetic oligonucleotide
  Target: ATXN2; (-) strand; PAM type: NRG; PAM sequence: CAG
tgtagtaagagcaagcatga

SEQ ID NO: 20386 - DNA, 20 bp, Artificial Sequence
  Description of Artificial Sequence: Synthetic oligonucleotide
  Target: ATXN2; (-) strand; PAM type: NRG; PAM sequence: AAG
aaggttactgtagtaagagc

SEQ ID NO: 20387 - DNA, 20 bp, Artificial Sequence
  Description of Artificial Sequence: Synthetic oligonucleotide
  Target: ATXN2; (-) strand; PAM type: NRG; PAM sequence: GAG
ataaaaggttactgtagtaa

SEQ ID NO: 20388 - DNA, 20 bp, Artificial Sequence
  Description of Artificial Sequence: Synthetic oligonucleotide
  Target: ATXN2; (-) strand; PAM type: NRG; PAM sequence: AAG
atataaaaggttactgtagt

SEQ ID NO: 20389 - DNA, 20 bp, Artificial Sequence
  Description of Artificial Sequence: Synthetic oligonucleotide
  Target: ATXN2; (-) strand; PAM type: NRG; PAM sequence: TAG
taaaatataaaaggttactg

SEQ ID NO: 20390 - DNA, 20 bp, Artificial Sequence
  Description of Artificial Sequence: Synthetic oligonucleotide
  Target: ATXN2; (-) strand; PAM type: NRG; PAM sequence: AGG
tgttgtcattaaaatataaa

SEQ ID NO: 20391 - DNA, 20 bp, Artificial Sequence
  Description of Artificial Sequence: Synthetic oligonucleotide
  Target: ATXN2; (-) strand; PAM type: NRG; PAM sequence: AAG
ttgttgtcattaaaatataa

SEQ ID NO: 20392 - DNA, 20 bp, Artificial Sequence
  Description of Artificial Sequence: Synthetic oligonucleotide
  Target: ATXN2; (-) strand; PAM type: NRG; PAM sequence: GGG
attacttaaaacaatgcaat

SEQ ID NO: 20393 - DNA, 20 bp, Artificial Sequence
  Description of Artificial Sequence: Synthetic oligonucleotide
  Target: ATXN2; (-) strand; PAM type: NRG; PAM sequence: TGG
gattacttaaaacaatgcaa

SEQ ID NO: 20394 - DNA, 20 bp, Artificial Sequence
  Description of Artificial Sequence: Synthetic oligonucleotide
  Target: ATXN2; (-) strand; PAM type: NRG; PAM sequence: TAG
tcatgtatcaccagcaggtg

SEQ ID NO: 20395 - DNA, 20 bp, Artificial Sequence
  Description of Artificial Sequence: Synthetic oligonucleotide
  Target: ATXN2; (-) strand; PAM type: NRG; PAM sequence: AGG
ggtgttcatgtatcaccagc

SEQ ID NO: 20396 - DNA, 20 bp, Artificial Sequence
  Description of Artificial Sequence: Synthetic oligonucleotide
  Target: ATXN2; (-) strand; PAM type: NRG; PAM sequence: CAG
aggtgttcatgtatcaccag

SEQ ID NO: 20397 - DNA, 20 bp, Artificial Sequence
  Description of Artificial Sequence: Synthetic oligonucleotide
  Target: ATXN2; (-) strand; PAM type: NRG; PAM sequence: CAG
ttaaggtgttcatgtatcac

SEQ ID NO: 20398 - DNA, 20 bp, Artificial Sequence
  Description of Artificial Sequence: Synthetic oligonucleotide
  Target: ATXN2; (-) strand; PAM type: NRG; PAM sequence: AGG
gccattttaatgtagtgtta

SEQ ID NO: 20399 - DNA, 20 bp, Artificial Sequence
  Description of Artificial Sequence: Synthetic oligonucleotide
  Target: ATXN2; (-) strand; PAM type: NRG; PAM sequence: AAG
tgccattttaatgtagtgtt

SEQ ID NO: 20400 - DNA, 20 bp, Artificial Sequence
  Description of Artificial Sequence: Synthetic oligonucleotide
  Target: ATXN2; (-) strand; PAM type: NRG; PAM sequence: TAG
tttttactgccattttaatg

SEQ ID NO: 20401 - DNA, 20 bp, Artificial Sequence
  Description of Artificial Sequence: Synthetic oligonucleotide
  Target: ATXN2; (-) strand; PAM type: NRG; PAM sequence: GGG
agaaattctgagaagaaagt

SEQ ID NO: 20402 - DNA, 20 bp, Artificial Sequence
  Description of Artificial Sequence: Synthetic oligonucleotide
  Target: ATXN2; (-) strand; PAM type: NRG; PAM sequence: TGG
tagaaattctgagaagaaag

SEQ ID NO: 20403 - DNA, 20 bp, Artificial Sequence
  Description of Artificial Sequence: Synthetic oligonucleotide
  Target: ATXN2; (-) strand; PAM type: NRG; PAM sequence: AAG
ctttagaaattctgagaaga

SEQ ID NO: 20404 - DNA, 20 bp, Artificial Sequence
  Description of Artificial Sequence: Synthetic oligonucleotide
  Target: ATXN2; (-) strand; PAM type: NRG; PAM sequence: AAG
gggcctttagaaattctgag

SEQ ID NO: 20405 - DNA, 20 bp, Artificial Sequence
  Description of Artificial Sequence: Synthetic oligonucleotide
  Target: ATXN2; (-) strand; PAM type: NRG; PAM sequence: GAG
tgagggcctttagaaattct

SEQ ID NO: 20406 - DNA, 20 bp, Artificial Sequence
  Description of Artificial Sequence: Synthetic oligonucleotide
  Target: ATXN2; (-) strand; PAM type: NRG; PAM sequence: TAG
aatcttattttgagggcctt

SEQ ID NO: 20407 - DNA, 20 bp, Artificial Sequence
  Description of Artificial Sequence: Synthetic oligonucleotide
  Target: ATXN2; (-) strand; PAM type: NRG; PAM sequence: GGG
agagtttaatcttattttga

SEQ ID NO: 20408 - DNA, 20 bp, Artificial Sequence
  Description of Artificial Sequence: Synthetic oligonucleotide
  Target: ATXN2; (-) strand; PAM type: NRG; PAM sequence: AGG
tagagtttaatcttattttg

SEQ ID NO: 20409 - DNA, 20 bp, Artificial Sequence
  Description of Artificial Sequence: Synthetic oligonucleotide
  Target: ATXN2; (-) strand; PAM type: NRG; PAM sequence: GAG
atagagtttaatcttatttt

SEQ ID NO: 20410 - DNA, 20 bp, Artificial Sequence
  Description of Artificial Sequence: Synthetic oligonucleotide
  Target: ATXN2; (-) strand; PAM type: NRG; PAM sequence: GAG
aataatgtaatcaaattata

SEQ ID NO: 20411 - DNA, 20 bp, Artificial Sequence
  Description of Artificial Sequence: Synthetic oligonucleotide
  Target: ATXN2; (-) strand; PAM type: NRG; PAM sequence: TAG
gaaataatgtaatcaaatta

SEQ ID NO: 20412 - DNA, 20 bp, Artificial Sequence
  Description of Artificial Sequence: Synthetic oligonucleotide
  Target: ATXN2; (-) strand; PAM type: NRG; PAM sequence: AAG
ggaacatatgaacctgttga

SEQ ID NO: 20413 - DNA, 20 bp, Artificial Sequence
  Description of Artificial Sequence: Synthetic oligonucleotide
  Target: ATXN2; (-) strand; PAM type: NRG; PAM sequence: TGG
attttttttttttttagcct

SEQ ID NO: 20414 - DNA, 20 bp, Artificial Sequence
  Description of Artificial Sequence: Synthetic oligonucleotide
  Target: ATXN2; (-) strand; PAM type: NRG; PAM sequence: TAG
tatgctattttttttttttt

SEQ ID NO: 20415 - DNA, 20 bp, Artificial Sequence
  Description of Artificial Sequence: Synthetic oligonucleotide
  Target: ATXN2; (-) strand; PAM type: NRG; PAM sequence: CAG
actcttaattttcgttttct

SEQ ID NO: 20416 - DNA, 20 bp, Artificial Sequence
  Description of Artificial Sequence: Synthetic oligonucleotide
  Target: ATXN2; (-) strand; PAM type: NRG; PAM sequence: TAG
ttgacctaattgtgatttca

SEQ ID NO: 20417 - DNA, 20 bp, Artificial Sequence
  Description of Artificial Sequence: Synthetic oligonucleotide
  Target: ATXN2; (-) strand; PAM type: NRG; PAM sequence: CAG
cttcccaaagtgcctgcgcc

SEQ ID NO: 20418 - DNA, 20 bp, Artificial Sequence
  Description of Artificial Sequence: Synthetic oligonucleotide
  Target: ATXN2; (-) strand; PAM type: NRG; PAM sequence: AAG
ctgcctggctctgcttccca

SEQ ID NO: 20419 - DNA, 20 bp, Artificial Sequence
  Description of Artificial Sequence: Synthetic oligonucleotide
  Target: ATXN2; (-) strand; PAM type: NRG; PAM sequence: TGG
ctgggctcaagcgatctgcc

SEQ ID NO: 20420 - DNA, 20 bp, Artificial Sequence
  Description of Artificial Sequence: Synthetic oligonucleotide
  Target: ATXN2; (-) strand; PAM type: NRG; PAM sequence: AAG
ggtctcaaactcctgggctc

SEQ ID NO: 20421 - DNA, 20 bp, Artificial Sequence
  Description of Artificial Sequence: Synthetic oligonucleotide
  Target: ATXN2; (-) strand; PAM type: NRG; PAM sequence: GGG
taggctggtctcaaactcct

SEQ ID NO: 20422 - DNA, 20 bp, Artificial Sequence
  Description of Artificial Sequence: Synthetic oligonucleotide
  Target: ATXN2; (-) strand; PAM type: NRG; PAM sequence: TGG
ctaggctggtctcaaactcc

SEQ ID NO: 20423 - DNA, 20 bp, Artificial Sequence
  Description of Artificial Sequence: Synthetic oligonucleotide
  Target: ATXN2; (-) strand; PAM type: NRG; PAM sequence: TGG
ttttgccatgttgcctaggc

SEQ ID NO: 20424 - DNA, 20 bp, Artificial Sequence
  Description of Artificial Sequence: Synthetic oligonucleotide
  Target: ATXN2; (-) strand; PAM type: NRG; PAM sequence: AGG
tgggttttgccatgttgcct

SEQ ID NO: 20425 - DNA, 20 bp, Artificial Sequence
  Description of Artificial Sequence: Synthetic oligonucleotide
  Target: ATXN2; (-) strand; PAM type: NRG; PAM sequence: TAG
atgggttttgccatgttgcc

SEQ ID NO: 20426 - DNA, 20 bp, Artificial Sequence
  Description of Artificial Sequence: Synthetic oligonucleotide
  Target: ATXN2; (-) strand; PAM type: NRG; PAM sequence: GGG
tttgtattttttgtagagat

SEQ ID NO: 20427 - DNA, 20 bp, Artificial Sequence
  Description of Artificial Sequence: Synthetic oligonucleotide
  Target: ATXN2; (-) strand; PAM type: NRG; PAM sequence: TGG
ttttgtattttttgtagaga

SEQ ID NO: 20428 - DNA, 20 bp, Artificial Sequence
  Description of Artificial Sequence: Synthetic oligonucleotide
  Target: ATXN2; (-) strand; PAM type: NRG; PAM sequence: GAG
taatttttgtattttttgta

SEQ ID NO: 20429 - DNA, 20 bp, Artificial Sequence
  Description of Artificial Sequence: Synthetic oligonucleotide
  Target: ATXN2; (-) strand; PAM type: NRG; PAM sequence: TAG
gctaatttttgtattttttg

SEQ ID NO: 20430 - DNA, 20 bp, Artificial Sequence
  Description of Artificial Sequence: Synthetic oligonucleotide
  Target: ATXN2; (-) strand; PAM type: NRG; PAM sequence: TAG
caggtgcacaccaccacacc

SEQ ID NO: 20431 - DNA, 20 bp, Artificial Sequence
  Description of Artificial Sequence: Synthetic oligonucleotide
  Target: ATXN2; (-) strand; PAM type: NRG; PAM sequence: AGG
ccctggatagcgggggctac

SEQ ID NO: 20432 - DNA, 20 bp, Artificial Sequence
  Description of Artificial Sequence: Synthetic oligonucleotide
  Target: ATXN2; (-) strand; PAM type: NRG; PAM sequence: CAG
cccctggatagcgggggcta

SEQ ID NO: 20433 - DNA, 20 bp, Artificial Sequence
  Description of Artificial Sequence: Synthetic oligonucleotide
  Target: ATXN2; (-) strand; PAM type: NRG; PAM sequence: GGG
ctcagtcccctggatagcgg

SEQ ID NO: 20434 - DNA, 20 bp, Artificial Sequence
  Description of Artificial Sequence: Synthetic oligonucleotide
  Target: ATXN2; (-) strand; PAM type: NRG; PAM sequence: GGG
tctcagtcccctggatagcg

SEQ ID NO: 20435 - DNA, 20 bp, Artificial Sequence
  Description of Artificial Sequence: Synthetic oligonucleotide
  Target: ATXN2; (-) strand; PAM type: NRG; PAM sequence: GGG
ttctcagtcccctggatagc

SEQ ID NO: 20436 - DNA, 20 bp, Artificial Sequence
  Description of Artificial Sequence: Synthetic oligonucleotide
  Target: ATXN2; (-) strand; PAM type: NRG; PAM sequence: CGG
cttctcagtcccctggatag

SEQ ID NO: 20437 - DNA, 20 bp, Artificial Sequence
  Description of Artificial Sequence: Synthetic oligonucleotide
  Target: ATXN2; (-) strand; PAM type: NRG; PAM sequence: TAG
tcccttctcagtcccctgga

SEQ ID NO: 20438 - DNA, 20 bp, Artificial Sequence
  Description of Artificial Sequence: Synthetic oligonucleotide
  Target: ATXN2; (-) strand; PAM type: NRG; PAM sequence: TGG
atcctcccttctcagtcccc

SEQ ID NO: 20439 - DNA, 20 bp, Artificial Sequence
  Description of Artificial Sequence: Synthetic oligonucleotide
  Target: ATXN2; (-) strand; PAM type: NRG; PAM sequence: CAG
ctcaagcgatcctcccttct

SEQ ID NO: 20440 - DNA, 20 bp, Artificial Sequence
  Description of Artificial Sequence: Synthetic oligonucleotide
  Target: ATXN2; (-) strand; PAM type: NRG; PAM sequence: AAG
agccttgacctcctgggctc

SEQ ID NO: 20441 - DNA, 20 bp, Artificial Sequence
  Description of Artificial Sequence: Synthetic oligonucleotide
  Target: ATXN2; (-) strand; PAM type: NRG; PAM sequence: GGG
caatgcagccttgacctcct

SEQ ID NO: 20442 - DNA, 20 bp, Artificial Sequence
  Description of Artificial Sequence: Synthetic oligonucleotide
  Target: ATXN2; (-) strand; PAM type: NRG; PAM sequence: TGG
tcaatgcagccttgacctcc

SEQ ID NO: 20443 - DNA, 20 bp, Artificial Sequence
  Description of Artificial Sequence: Synthetic oligonucleotide
  Target: ATXN2; (-) strand; PAM type: NRG; PAM sequence: CAG
ggcgctatcatggctcaatg

SEQ ID NO: 20444 - DNA, 20 bp, Artificial Sequence
  Description of Artificial Sequence: Synthetic oligonucleotide
  Target: ATXN2; (-) strand; PAM type: NRG; PAM sequence: TGG
ggaacgcagtggcgctatca

SEQ ID NO: 20445 - DNA, 20 bp, Artificial Sequence
  Description of Artificial Sequence: Synthetic oligonucleotide
  Target: ATXN2; (-) strand; PAM type: NRG; PAM sequence: TGG
ctgctgaggctggaacgcag

SEQ ID NO: 20446 - DNA, 20 bp, Artificial Sequence
  Description of Artificial Sequence: Synthetic oligonucleotide
  Target: ATXN2; (-) strand; PAM type: NRG; PAM sequence: CAG
ttgctgctgaggctggaacg

SEQ ID NO: 20447 - DNA, 20 bp, Artificial Sequence
  Description of Artificial Sequence: Synthetic oligonucleotide
  Target: ATXN2; (-) strand; PAM type: NRG; PAM sequence: TGG
tcttgctttgctgctgaggc

SEQ ID NO: 20448 - DNA, 20 bp, Artificial Sequence
  Description of Artificial Sequence: Synthetic oligonucleotide
  Target: ATXN2; (-) strand; PAM type: NRG; PAM sequence: AGG
agggtcttgctttgctgctg

SEQ ID NO: 20449 - DNA, 20 bp, Artificial Sequence
  Description of Artificial Sequence: Synthetic oligonucleotide
  Target: ATXN2; (-) strand; PAM type: NRG; PAM sequence: GAG
cagggtcttgctttgctgct

SEQ ID NO: 20450 - DNA, 20 bp, Artificial Sequence
  Description of Artificial Sequence: Synthetic oligonucleotide
  Target: ATXN2; (-) strand; PAM type: NRG; PAM sequence: GGG
gtgtgtatgtgtttgataca

SEQ ID NO: 20451 - DNA, 20 bp, Artificial Sequence
  Description of Artificial Sequence: Synthetic oligonucleotide
  Target: ATXN2; (-) strand; PAM type: NRG; PAM sequence: AGG
tgtgtgtatgtgtttgatac

SEQ ID NO: 20452 - DNA, 20 bp, Artificial Sequence
  Description of Artificial Sequence: Synthetic oligonucleotide
  Target: ATXN2; (-) strand; PAM type: NRG; PAM sequence: CAG
gtgtgtgtatgtgtttgata

SEQ ID NO: 20453 - DNA, 20 bp, Artificial Sequence
  Description of Artificial Sequence: Synthetic oligonucleotide
  Target: ATXN2; (-) strand; PAM type: NRG; PAM sequence: GGG
tttcctcaatgtgttttttt

SEQ ID NO: 20454 - DNA, 20 bp, Artificial Sequence
  Description of Artificial Sequence: Synthetic oligonucleotide
  Target: ATXN2; (-) strand; PAM type: NRG; PAM sequence: TGG
atttcctcaatgtgtttttt

SEQ ID NO: 20455 - DNA, 20 bp, Artificial Sequence
  Description of Artificial Sequence: Synthetic oligonucleotide
  Target: ATXN2; (-) strand; PAM type: NRG; PAM sequence: AAG
ttcatttttcctgaattaat

SEQ ID NO: 20456 - DNA, 20 bp, Artificial Sequence
  Description of Artificial Sequence: Synthetic oligonucleotide
  Target: ATXN2; (-) strand; PAM type: NRG; PAM sequence: AAG
ataattgcctttctgacata

SEQ ID NO: 20457 - DNA, 20 bp, Artificial Sequence
  Description of Artificial Sequence: Synthetic oligonucleotide
  Target: ATXN2; (-) strand; PAM type: NRG; PAM sequence: CAG
tatacagaaaagacatttct

SEQ ID NO: 20458 - DNA, 20 bp, Artificial Sequence
  Description of Artificial Sequence: Synthetic oligonucleotide
  Target: ATXN2; (-) strand; PAM type: NRG; PAM sequence: AAG
gtagaataatttatacagaa

SEQ ID NO: 20459 - DNA, 20 bp, Artificial Sequence
  Description of Artificial Sequence: Synthetic oligonucleotide
  Target: ATXN2; (-) strand; PAM type: NRG; PAM sequence: CAG
agaaagtagaataatttata

SEQ ID NO: 20460 - DNA, 20 bp, Artificial Sequence
  Description of Artificial Sequence: Synthetic oligonucleotide
  Target: ATXN2; (-) strand; PAM type: NRG; PAM sequence: TAG
agttgagaaactatagaaag

SEQ ID NO: 20461 - DNA, 20 bp, Artificial Sequence
  Description of Artificial Sequence: Synthetic oligonucleotide
  Target: ATXN2; (-) strand; PAM type: NRG; PAM sequence: AAG
atcagttgagaaactataga

SEQ ID NO: 20462 - DNA, 20 bp, Artificial Sequence
  Description of Artificial Sequence: Synthetic oligonucleotide
  Target: ATXN2; (-) strand; PAM type: NRG; PAM sequence: TAG
tgctatcagttgagaaacta

SEQ ID NO: 20463 - DNA, 20 bp, Artificial Sequence
  Description of Artificial Sequence: Synthetic oligonucleotide
  Target: ATXN2; (-) strand; PAM type: NRG; PAM sequence: GAG
gtgattaactgctatcagtt

SEQ ID NO: 20464 - DNA, 20 bp, Artificial Sequence
  Description of Artificial Sequence: Synthetic oligonucleotide
  Target: ATXN2; (-) strand; PAM type: NRG; PAM sequence: CAG
ttagagtgattaactgctat

SEQ ID NO: 20465 - DNA, 20 bp, Artificial Sequence
  Description of Artificial Sequence: Synthetic oligonucleotide
  Target: ATXN2; (-) strand; PAM type: NRG; PAM sequence: GAG
tttgccaaccagttaattta

SEQ ID NO: 20466 - DNA, 20 bp, Artificial Sequence
  Description of Artificial Sequence: Synthetic oligonucleotide
  Target: ATXN2; (-) strand; PAM type: NRG; PAM sequence: TAG
tttttgccaaccagttaatt

SEQ ID NO: 20467 - DNA, 20 bp, Artificial Sequence
  Description of Artificial Sequence: Synthetic oligonucleotide
  Target: ATXN2; (-) strand; PAM type: NRG; PAM sequence: CAG
agggttttttttttgccaac

SEQ ID NO: 20468 - DNA, 20 bp, Artificial Sequence
  Description of Artificial Sequence: Synthetic oligonucleotide
  Target: ATXN2; (-) strand; PAM type: NRG; PAM sequence: GGG
taatgttggaaaatgctaaa

SEQ ID NO: 20469 - DNA, 20 bp, Artificial Sequence
  Description of Artificial Sequence: Synthetic oligonucleotide
  Target: ATXN2; (-) strand; PAM type: NRG; PAM sequence: AGG
ttaatgttggaaaatgctaa

SEQ ID NO: 20470 - DNA, 20 bp, Artificial Sequence
  Description of Artificial Sequence: Synthetic oligonucleotide
  Target: ATXN2; (-) strand; PAM type: NRG; PAM sequence: AAG
tttaatgttggaaaatgcta

SEQ ID NO: 20471 - DNA, 20 bp, Artificial Sequence
  Description of Artificial Sequence: Synthetic oligonucleotide
  Target: ATXN2; (-) strand; PAM type: NRG; PAM sequence: TGG
aaaaagagttcttttaatgt

SEQ ID NO: 20472 - DNA, 20 bp, Artificial Sequence
  Description of Artificial Sequence: Synthetic oligonucleotide
  Target: ATXN2; (-) strand; PAM type: NRG; PAM sequence: GAG
aaaaaaaaaaaaaaaaaaaa

SEQ ID NO: 20473 - DNA, 20 bp, Artificial Sequence
  Description of Artificial Sequence: Synthetic oligonucleotide
  Target: ATXN2; (-) strand; PAM type: NRG; PAM sequence: AAG
caaaaaaaaaaaaaaaaaaa

SEQ ID NO: 20474 - DNA, 20 bp, Artificial Sequence
  Description of Artificial Sequence: Synthetic oligonucleotide
  Target: ATXN2; (-) strand; PAM type: NRG; PAM sequence: GAG
gcgtgcctgggtgacagagc

SEQ ID NO: 20475 - DNA, 20 bp, Artificial Sequence
  Description of Artificial Sequence: Synthetic oligonucleotide
  Target: ATXN2; (-) strand; PAM type: NRG; PAM sequence: GAG
tggtgcgtgcctgggtgaca

SEQ ID NO: 20476 - DNA, 20 bp, Artificial Sequence
  Description of Artificial Sequence: Synthetic oligonucleotide
  Target: ATXN2; (-) strand; PAM type: NRG; PAM sequence: CAG
ggtggtgcgtgcctgggtga

SEQ ID NO: 20477 - DNA, 20 bp, Artificial Sequence
  Description of Artificial Sequence: Synthetic oligonucleotide
  Target: ATXN2; (-) strand; PAM type: NRG; PAM sequence: GGG
gggcatggtggtgcgtgcct

SEQ ID NO: 20478 - DNA, 20 bp, Artificial Sequence
  Description of Artificial Sequence: Synthetic oligonucleotide
  Target: ATXN2; (-) strand; PAM type: NRG; PAM sequence: TGG
tgggcatggtggtgcgtgcc

SEQ ID NO: 20479 - DNA, 20 bp, Artificial Sequence
  Description of Artificial Sequence: Synthetic oligonucleotide
  Target: ATXN2; (-) strand; PAM type: NRG; PAM sequence: TGG
caaagatcagctgggcatgg

SEQ ID NO: 20480 - DNA, 20 bp, Artificial Sequence
  Description of Artificial Sequence: Synthetic oligonucleotide
  Target: ATXN2; (-) strand; PAM type: NRG; PAM sequence: TGG
atacaaagatcagctgggca

SEQ ID NO: 20481 - DNA, 20 bp, Artificial Sequence
  Description of Artificial Sequence: Synthetic oligonucleotide
  Target: ATXN2; (-) strand; PAM type: NRG; PAM sequence: GGG
taaaaatacaaagatcagct

SEQ ID NO: 20482 - DNA, 20 bp, Artificial Sequence
  Description of Artificial Sequence: Synthetic oligonucleotide
  Target: ATXN2; (-) strand; PAM type: NRG; PAM sequence: TGG
ctaaaaatacaaagatcagc

SEQ ID NO: 20483 - DNA, 20 bp, Artificial Sequence
  Description of Artificial Sequence: Synthetic oligonucleotide
  Target: ATXN2; (-) strand; PAM type: NRG; PAM sequence: CAG
tctactaaaaatacaaagat

SEQ ID NO: 20484 - DNA, 20 bp, Artificial Sequence
  Description of Artificial Sequence: Synthetic oligonucleotide
  Target: ATXN2; (-) strand; PAM type: NRG; PAM sequence: AAG
ccgtctctactaaaaataca

SEQ ID NO: 20485 - DNA, 20 bp, Artificial Sequence
  Description of Artificial Sequence: Synthetic oligonucleotide
  Target: ATXN2; (-) strand; PAM type: NRG; PAM sequence: TGG
caaaaccatcctggccaaca

SEQ ID NO: 20486 - DNA, 20 bp, Artificial Sequence
  Description of Artificial Sequence: Synthetic oligonucleotide
  Target: ATXN2; (-) strand; PAM type: NRG; PAM sequence: TGG
tcaggagtacaaaaccatcc

SEQ ID NO: 20487 - DNA, 20 bp, Artificial Sequence
  Description of Artificial Sequence: Synthetic oligonucleotide
  Target: ATXN2; (-) strand; PAM type: NRG; PAM sequence: GAG
ggcagatcacttgaggtcag

SEQ ID NO: 20488 - DNA, 20 bp, Artificial Sequence
  Description of Artificial Sequence: Synthetic oligonucleotide
  Target: ATXN2; (-) strand; PAM type: NRG; PAM sequence: AGG
tgggcagatcacttgaggtc

SEQ ID NO: 20489 - DNA, 20 bp, Artificial Sequence
  Description of Artificial Sequence: Synthetic oligonucleotide
  Target: ATXN2; (-) strand; PAM type: NRG; PAM sequence: CAG
gtgggcagatcacttgaggt

SEQ ID NO: 20490 - DNA, 20 bp, Artificial Sequence
  Description of Artificial Sequence: Synthetic oligonucleotide
  Target: ATXN2; (-) strand; PAM type: NRG; PAM sequence: AGG
cgaggtgggcagatcacttg

SEQ ID NO: 20491 - DNA, 20 bp, Artificial Sequence
  Description of Artificial Sequence: Synthetic oligonucleotide
  Target: ATXN2; (-) strand; PAM type: NRG; PAM sequence: GAG
ccgaggtgggcagatcactt

SEQ ID NO: 20492 - DNA, 20 bp, Artificial Sequence
  Description of Artificial Sequence: Synthetic oligonucleotide
  Target: ATXN2; (-) strand; PAM type: NRG; PAM sequence: CAG
ctctgggaagccgaggtggg

SEQ ID NO: 20493 - DNA, 20 bp, Artificial Sequence
  Description of Artificial Sequence: Synthetic oligonucleotide
  Target: ATXN2; (-) strand; PAM type: NRG; PAM sequence: GGG
acactctgggaagccgaggt

SEQ ID NO: 20494 - DNA, 20 bp, Artificial Sequence
  Description of Artificial Sequence: Synthetic oligonucleotide
  Target: ATXN2; (-) strand; PAM type: NRG; PAM sequence: TGG
aacactctgggaagccgagg

SEQ ID NO: 20495 - DNA, 20 bp, Artificial Sequence
  Description of Artificial Sequence: Synthetic oligonucleotide
  Target: ATXN2; (-) strand; PAM type: NRG; PAM sequence: AGG
cccaacactctgggaagccg

SEQ ID NO: 20496 - DNA, 20 bp, Artificial Sequence
  Description of Artificial Sequence: Synthetic oligonucleotide
  Target: ATXN2; (-) strand; PAM type: NRG; PAM sequence: GAG
gcccaacactctgggaagcc

SEQ ID NO: 20497 - DNA, 20 bp, Artificial Sequence
  Description of Artificial Sequence: Synthetic oligonucleotide
  Target: ATXN2; (-) strand; PAM type: NRG; PAM sequence: AAG
tgtaagcccaacactctggg

SEQ ID NO: 20498 - DNA, 20 bp, Artificial Sequence
  Description of Artificial Sequence: Synthetic oligonucleotide
  Target: ATXN2; (-) strand; PAM type: NRG; PAM sequence: GGG
atctgtaagcccaacactct

SEQ ID NO: 20499 - DNA, 20 bp, Artificial Sequence
  Description of Artificial Sequence: Synthetic oligonucleotide
  Target: ATXN2; (-) strand; PAM type: NRG; PAM sequence: TGG
catctgtaagcccaacactc

SEQ ID NO: 20500 - DNA, 20 bp, Artificial Sequence
  Description of Artificial Sequence: Synthetic oligonucleotide
  Target: ATXN2; (-) strand; PAM type: NRG; PAM sequence: AAG
gtgtggtggctcacatctgt

SEQ ID NO: 20501 - DNA, 20 bp, Artificial Sequence
  Description of Artificial Sequence: Synthetic oligonucleotide
  Target: ATXN2; (-) strand; PAM type: NRG; PAM sequence: TGG
aatcttttggccaggtgtgg

SEQ ID NO: 20502 - DNA, 20 bp, Artificial Sequence
  Description of Artificial Sequence: Synthetic oligonucleotide
  Target: ATXN2; (-) strand; PAM type: NRG; PAM sequence: TGG
ggaaatcttttggccaggtg

SEQ ID NO: 20503 - DNA, 20 bp, Artificial Sequence
  Description of Artificial Sequence: Synthetic oligonucleotide
  Target: ATXN2; (-) strand; PAM type: NRG; PAM sequence: AGG
taaaaggaaatcttttggcc

SEQ ID NO: 20504 - DNA, 20 bp, Artificial Sequence
  Description of Artificial Sequence: Synthetic oligonucleotide
  Target: ATXN2; (-) strand; PAM type: NRG; PAM sequence: CAG
ttaaaaggaaatcttttggc

SEQ ID NO: 20505 - DNA, 20 bp, Artificial Sequence
  Description of Artificial Sequence: Synthetic oligonucleotide
  Target: ATXN2; (-) strand; PAM type: NRG; PAM sequence: TGG
tttcttaaaaggaaatcttt

SEQ ID NO: 20506 - DNA, 20 bp, Artificial Sequence
  Description of Artificial Sequence: Synthetic oligonucleotide
  Target: ATXN2; (-) strand; PAM type: NRG; PAM sequence: AGG
aatcccacatttttcttaaa

SEQ ID NO: 20507 - DNA, 20 bp, Artificial Sequence
  Description of Artificial Sequence: Synthetic oligonucleotide
  Target: ATXN2; (-) strand; PAM type: NRG; PAM sequence: AAG
aaatcccacatttttcttaa

SEQ ID NO: 20508 - DNA, 20 bp, Artificial Sequence
  Description of Artificial Sequence: Synthetic oligonucleotide
  Target: ATXN2; (-) strand; PAM type: NRG; PAM sequence: TAG
gtgtggttaaagagccttcg

SEQ ID NO: 20509 - DNA, 20 bp, Artificial Sequence
  Description of Artificial Sequence: Synthetic oligonucleotide
  Target: ATXN2; (-) strand; PAM type: NRG; PAM sequence: GAG
tctgtgcttgtgtggttaaa

SEQ ID NO: 20510 - DNA, 20 bp, Artificial Sequence
  Description of Artificial Sequence: Synthetic oligonucleotide
  Target: ATXN2; (-) strand; PAM type: NRG; PAM sequence: AAG
attctgtgcttgtgtggtta

SEQ ID NO: 20511 - DNA, 20 bp, Artificial Sequence
  Description of Artificial Sequence: Synthetic oligonucleotide
  Target: ATXN2; (-) strand; PAM type: NRG; PAM sequence: TGG
actagtattctgtgcttgtg

SEQ ID NO: 20512 - DNA, 20 bp, Artificial Sequence
  Description of Artificial Sequence: Synthetic oligonucleotide
  Target: ATXN2; (-) strand; PAM type: NRG; PAM sequence: TAG
tataatgtagttgcataaac

SEQ ID NO: 20513 - DNA, 20 bp, Artificial Sequence
  Description of Artificial Sequence: Synthetic oligonucleotide
  Target: ATXN2; (-) strand; PAM type: NRG; PAM sequence: TAG
tagggagttgtcgtataatg

SEQ ID NO: 20514 - DNA, 20 bp, Artificial Sequence
  Description of Artificial Sequence: Synthetic oligonucleotide
  Target: ATXN2; (-) strand; PAM type: NRG; PAM sequence: GAG
gtttctgcattaaaattagg

SEQ ID NO: 20515 - DNA, 20 bp, Artificial Sequence
  Description of Artificial Sequence: Synthetic oligonucleotide
  Target: ATXN2; (-) strand; PAM type: NRG; PAM sequence: GGG
atgtttctgcattaaaatta

SEQ ID NO: 20516 - DNA, 20 bp, Artificial Sequence
  Description of Artificial Sequence: Synthetic oligonucleotide
  Target: ATXN2; (-) strand; PAM type: NRG; PAM sequence: AGG
gatgtttctgcattaaaatt

SEQ ID NO: 20517 - DNA, 20 bp, Artificial Sequence
  Description of Artificial Sequence: Synthetic oligonucleotide
  Target: ATXN2; (-) strand; PAM type: NRG; PAM sequence: TAG
ggatgtttctgcattaaaat

SEQ ID NO: 20518 - DNA, 20 bp, Artificial Sequence
  Description of Artificial Sequence: Synthetic oligonucleotide
  Target: ATXN2; (-) strand; PAM type: NRG; PAM sequence: TGG
cctcaaaaagaaaaataaga

SEQ ID NO: 20519 - DNA, 20 bp, Artificial Sequence
  Description of Artificial Sequence: Synthetic oligonucleotide
  Target: ATXN2; (-) strand; PAM type: NRG; PAM sequence: AAG
cctgcctcaaaaagaaaaat

SEQ ID NO: 20520 - DNA, 20 bp, Artificial Sequence
  Description of Artificial Sequence: Synthetic oligonucleotide
  Target: ATXN2; (-) strand; PAM type: NRG; PAM sequence: AAG
gagcgaaaccctgcctcaaa

SEQ ID NO: 20521 - DNA, 20 bp, Artificial Sequence
  Description of Artificial Sequence: Synthetic oligonucleotide
  Target: ATXN2; (-) strand; PAM type: NRG; PAM sequence: GAG
gggctccagcttgggtgaaa

SEQ ID NO: 20522 - DNA, 20 bp, Artificial Sequence
  Description of Artificial Sequence: Synthetic oligonucleotide
  Target: ATXN2; (-) strand; PAM type: NRG; PAM sequence: AAG
ctgggctccagcttgggtga

SEQ ID NO: 20523 - DNA, 20 bp, Artificial Sequence
  Description of Artificial Sequence: Synthetic oligonucleotide
  Target: ATXN2; (-) strand; PAM type: NRG; PAM sequence: GGG
gcaccactgggctccagctt

SEQ ID NO: 20524 - DNA, 20 bp, Artificial Sequence
  Description of Artificial Sequence: Synthetic oligonucleotide
  Target: ATXN2; (-) strand; PAM type: NRG; PAM sequence: TGG
tgcaccactgggctccagct

SEQ ID NO: 20525 - DNA, 20 bp, Artificial Sequence
  Description of Artificial Sequence: Synthetic oligonucleotide
  Target: ATXN2; (-) strand; PAM type: NRG; PAM sequence: CAG
gtgactgcaccactgggctc

SEQ ID NO: 20526 - DNA, 20 bp, Artificial Sequence
  Description of Artificial Sequence: Synthetic oligonucleotide
  Target: ATXN2; (-) strand; PAM type: NRG; PAM sequence: GGG
ggaactgtgactgcaccact

SEQ ID NO: 20527 - DNA, 20 bp, Artificial Sequence
  Description of Artificial Sequence: Synthetic oligonucleotide
  Target: ATXN2; (-) strand; PAM type: NRG; PAM sequence: TGG
gggaactgtgactgcaccac

SEQ ID NO: 20528 - DNA, 20 bp, Artificial Sequence
  Description of Artificial Sequence: Synthetic oligonucleotide
  Target: ATXN2; (-) strand; PAM type: NRG; PAM sequence: GGG
accagaaggtccaggctgca

SEQ ID NO: 20529 - DNA, 20 bp, Artificial Sequence
  Description of Artificial Sequence: Synthetic oligonucleotide
  Target: ATXN2; (-) strand; PAM type: NRG; PAM sequence: AGG
aaccagaaggtccaggctgc

SEQ ID NO: 20530 - DNA, 20 bp, Artificial Sequence
  Description of Artificial Sequence: Synthetic oligonucleotide
  Target: ATXN2; (-) strand; PAM type: NRG; PAM sequence: CAG
aaaccagaaggtccaggctg

SEQ ID NO: 20531 - DNA, 20 bp, Artificial Sequence
  Description of Artificial Sequence: Synthetic oligonucleotide
  Target: ATXN2; (-) strand; PAM type: NRG; PAM sequence: AGG
caattgaaaccagaaggtcc

SEQ ID NO: 20532 - DNA, 20 bp, Artificial Sequence
  Description of Artificial Sequence: Synthetic oligonucleotide
  Target: ATXN2; (-) strand; PAM type: NRG; PAM sequence: CAG
tcaattgaaaccagaaggtc

SEQ ID NO: 20533 - DNA, 20 bp, Artificial Sequence
  Description of Artificial Sequence: Synthetic oligonucleotide
  Target: ATXN2; (-) strand; PAM type: NRG; PAM sequence: AGG
gaggatcaattgaaaccaga

SEQ ID NO: 20534 - DNA, 20 bp, Artificial Sequence
  Description of Artificial Sequence: Synthetic oligonucleotide
  Target: ATXN2; (-) strand; PAM type: NRG; PAM sequence: AAG
ggaggatcaattgaaaccag

SEQ ID NO: 20535 - DNA, 20 bp, Artificial Sequence
  Description of Artificial Sequence: Synthetic oligonucleotide
  Target: ATXN2; (-) strand; PAM type: NRG; PAM sequence: CAG
gtgggaggatcaattgaaac

SEQ ID NO: 20536 - DNA, 20 bp, Artificial Sequence
  Description of Artificial Sequence: Synthetic oligonucleotide
  Target: ATXN2; (-) strand; PAM type: NRG; PAM sequence: AGG
acttgggagactgaggtggg

SEQ ID NO: 20537 - DNA, 20 bp, Artificial Sequence
  Description of Artificial Sequence: Synthetic oligonucleotide
  Target: ATXN2; (-) strand; PAM type: NRG; PAM sequence: GAG
tacttgggagactgaggtgg

SEQ ID NO: 20538 - DNA, 20 bp, Artificial Sequence
  Description of Artificial Sequence: Synthetic oligonucleotide
  Target: ATXN2; (-) strand; PAM type: NRG; PAM sequence: GGG
gctacttgggagactgaggt

SEQ ID NO: 20539 - DNA, 20 bp, Artificial Sequence
  Description of Artificial Sequence: Synthetic oligonucleotide
  Target: ATXN2; (-) strand; PAM type: NRG; PAM sequence: TGG
agctacttgggagactgagg

SEQ ID NO: 20540 - DNA, 20 bp, Artificial Sequence
  Description of Artificial Sequence: Synthetic oligonucleotide
  Target: ATXN2; (-) strand; PAM type: NRG; PAM sequence: AGG
cctagctacttgggagactg

SEQ ID NO: 20541 - DNA, 20 bp, Artificial Sequence
  Description of Artificial Sequence: Synthetic oligonucleotide
  Target: ATXN2; (-) strand; PAM type: NRG; PAM sequence: GAG
tcctagctacttgggagact

SEQ ID NO: 20542 - DNA, 20 bp, Artificial Sequence
  Description of Artificial Sequence: Synthetic oligonucleotide
  Target: ATXN2; (-) strand; PAM type: NRG; PAM sequence: GAG
ctgtagtcctagctacttgg

SEQ ID NO: 20543 - DNA, 20 bp, Artificial Sequence
  Description of Artificial Sequence: Synthetic oligonucleotide
  Target: ATXN2; (-) strand; PAM type: NRG; PAM sequence: GGG
tcctgtagtcctagctactt

SEQ ID NO: 20544 - DNA, 20 bp, Artificial Sequence
  Description of Artificial Sequence: Synthetic oligonucleotide
  Target: ATXN2; (-) strand; PAM type: NRG; PAM sequence: TGG
ctcctgtagtcctagctact

SEQ ID NO: 20545 - DNA, 20 bp, Artificial Sequence
  Description of Artificial Sequence: Synthetic oligonucleotide
  Target: ATXN2; (-) strand; PAM type: NRG; PAM sequence: TAG
atggtgtgctcctgtagtcc

SEQ ID NO: 20546 - DNA, 20 bp, Artificial Sequence
  Description of Artificial Sequence: Synthetic oligonucleotide
  Target: ATXN2; (-) strand; PAM type: NRG; PAM sequence: TAG
gccgtcatggtgtgctcctg

SEQ ID NO: 20547 - DNA, 20 bp, Artificial Sequence
  Description of Artificial Sequence: Synthetic oligonucleotide
  Target: ATXN2; (-) strand; PAM type: NRG; PAM sequence: TGG
gaaatcttagccagccgtca

SEQ ID NO: 20548 - DNA, 20 bp, Artificial Sequence
  Description of Artificial Sequence: Synthetic oligonucleotide
  Target: ATXN2; (-) strand; PAM type: NRG; PAM sequence: CAG
aaaaaaatagaaatcttagc

SEQ ID NO: 20549 - DNA, 20 bp, Artificial Sequence
  Description of Artificial Sequence: Synthetic oligonucleotide
  Target: ATXN2; (-) strand; PAM type: NRG; PAM sequence: TAG
caaaaaaaaaatagaaatct

SEQ ID NO: 20550 - DNA, 20 bp, Artificial Sequence
  Description of Artificial Sequence: Synthetic oligonucleotide
  Target: ATXN2; (-) strand; PAM type: NRG; PAM sequence: TAG
ctatctctgcaaaaaaaaaa

SEQ ID NO: 20551 - DNA, 20 bp, Artificial Sequence
  Description of Artificial Sequence: Synthetic oligonucleotide
  Target: ATXN2; (-) strand; PAM type: NRG; PAM sequence: TGG
taagaccagcctgggcaaca

SEQ ID NO: 20552 - DNA, 20 bp, Artificial Sequence
  Description of Artificial Sequence: Synthetic oligonucleotide
  Target: ATXN2; (-) strand; PAM type: NRG; PAM sequence: GGG
gggagttttaagaccagcct

SEQ ID NO: 20553 - DNA, 20 bp, Artificial Sequence
  Description of Artificial Sequence: Synthetic oligonucleotide
  Target: ATXN2; (-) strand; PAM type: NRG; PAM sequence: TGG
cgggagttttaagaccagcc

SEQ ID NO: 20554 - DNA, 20 bp, Artificial Sequence
  Description of Artificial Sequence: Synthetic oligonucleotide
  Target: ATXN2; (-) strand; PAM type: NRG; PAM sequence: CAG
atgaccgggagttttaagac

SEQ ID NO: 20555 - DNA, 20 bp, Artificial Sequence
  Description of Artificial Sequence: Synthetic oligonucleotide
  Target: ATXN2; (-) strand; PAM type: NRG; PAM sequence: AAG
atcacatgaccgggagtttt

SEQ ID NO: 20556 - DNA, 20 bp, Artificial Sequence
  Description of Artificial Sequence: Synthetic oligonucleotide
  Target: ATXN2; (-) strand; PAM type: NRG; PAM sequence: GAG
tgggcagatcacatgaccgg

SEQ ID NO: 20557 - DNA, 20 bp, Artificial Sequence
  Description of Artificial Sequence: Synthetic oligonucleotide
  Target: ATXN2; (-) strand; PAM type: NRG; PAM sequence: GGG
ggtgggcagatcacatgacc

SEQ ID NO: 20558 - DNA, 20 bp, Artificial Sequence
  Description of Artificial Sequence: Synthetic oligonucleotide
  Target: ATXN2; (-) strand; PAM type: NRG; PAM sequence: CGG
aggtgggcagatcacatgac

SEQ ID NO: 20559 - DNA, 20 bp, Artificial Sequence
  Description of Artificial Sequence: Synthetic oligonucleotide
  Target: ATXN2; (-) strand; PAM type: NRG; PAM sequence: CAG
ctttgagaggctgaggtggg

SEQ ID NO: 20560 - DNA, 20 bp, Artificial Sequence
  Description of Artificial Sequence: Synthetic oligonucleotide
  Target: ATXN2; (-) strand; PAM type: NRG; PAM sequence: GGG
gcactttgagaggctgaggt

SEQ ID NO: 20561 - DNA, 20 bp, Artificial Sequence
  Description of Artificial Sequence: Synthetic oligonucleotide
  Target: ATXN2; (-) strand; PAM type: NRG; PAM sequence: TGG
agcactttgagaggctgagg

SEQ ID NO: 20562 - DNA, 20 bp, Artificial Sequence
  Description of Artificial Sequence: Synthetic oligonucleotide
  Target: ATXN2; (-) strand; PAM type: NRG; PAM sequence: AGG
tccagcactttgagaggctg

SEQ ID NO: 20563 - DNA, 20 bp, Artificial Sequence
  Description of Artificial Sequence: Synthetic oligonucleotide
  Target: ATXN2; (-) strand; PAM type: NRG; PAM sequence: GAG
ttccagcactttgagaggct

SEQ ID NO: 20564 - DNA, 20 bp, Artificial Sequence
  Description of Artificial Sequence: Synthetic oligonucleotide
  Target: ATXN2; (-) strand; PAM type: NRG; PAM sequence: AGG
tgtaattccagcactttgag

SEQ ID NO: 20565 - DNA, 20 bp, Artificial Sequence
  Description of Artificial Sequence: Synthetic oligonucleotide
  Target: ATXN2; (-) strand; PAM type: NRG; PAM sequence: GAG
gtgtaattccagcactttga

SEQ ID NO: 20566 - DNA, 20 bp, Artificial Sequence
  Description of Artificial Sequence: Synthetic oligonucleotide
  Target: ATXN2; (-) strand; PAM type: NRG; PAM sequence: GAG
acgtgtaattccagcacttt

SEQ ID NO: 20567 - DNA, 20 bp, Artificial Sequence
  Description of Artificial Sequence: Synthetic oligonucleotide
  Target: ATXN2; (-) strand; PAM type: NRG; PAM sequence: CAG
tggtggctcacgtgtaattc

SEQ ID NO: 20568 - DNA, 20 bp, Artificial Sequence
  Description of Artificial Sequence: Synthetic oligonucleotide
  Target: ATXN2; (-) strand; PAM type: NRG; PAM sequence: TGG
gatgtttcggctaggcttgg

SEQ ID NO: 20569 - DNA, 20 bp, Artificial Sequence
  Description of Artificial Sequence: Synthetic oligonucleotide
  Target: ATXN2; (-) strand; PAM type: NRG; PAM sequence: TGG
aaggatgtttcggctaggct

SEQ ID NO: 20570 - DNA, 20 bp, Artificial Sequence
  Description of Artificial Sequence: Synthetic oligonucleotide
  Target: ATXN2; (-) strand; PAM type: NRG; PAM sequence: AGG
attagaaggatgtttcggct

SEQ ID NO: 20571 - DNA, 20 bp, Artificial Sequence
  Description of Artificial Sequence: Synthetic oligonucleotide
  Target: ATXN2; (-) strand; PAM type: NRG; PAM sequence: TAG
tattagaaggatgtttcggc

SEQ ID NO: 20572 - DNA, 20 bp, Artificial Sequence
  Description of Artificial Sequence: Synthetic oligonucleotide
  Target: ATXN2; (-) strand; PAM type: NRG; PAM sequence: CGG
atcctattagaaggatgttt

SEQ ID NO: 20573 - DNA, 20 bp, Artificial Sequence
  Description of Artificial Sequence: Synthetic oligonucleotide
  Target: ATXN2; (-) strand; PAM type: NRG; PAM sequence: AGG
aatgttaagatcctattaga

SEQ ID NO: 20574 - DNA, 20 bp, Artificial Sequence
  Description of Artificial Sequence: Synthetic oligonucleotide
  Target: ATXN2; (-) strand; PAM type: NRG; PAM sequence: AAG
caatgttaagatcctattag

SEQ ID NO: 20575 - DNA, 20 bp, Artificial Sequence
  Description of Artificial Sequence: Synthetic oligonucleotide
  Target: ATXN2; (-) strand; PAM type: NRG; PAM sequence: TAG
aaccaatgttaagatcctat

SEQ ID NO: 20576 - DNA, 20 bp, Artificial Sequence
  Description of Artificial Sequence: Synthetic oligonucleotide
  Target: ATXN2; (-) strand; PAM type: NRG; PAM sequence: AAG
aactaacttcaaccaatgtt

SEQ ID NO: 20577 - DNA, 20 bp, Artificial Sequence
  Description of Artificial Sequence: Synthetic oligonucleotide
  Target: ATXN2; (-) strand; PAM type: NRG; PAM sequence: GGG
gaatttcttttgaagcagag

SEQ ID NO: 20578 - DNA, 20 bp, Artificial Sequence
  Description of Artificial Sequence: Synthetic oligonucleotide
  Target: ATXN2; (-) strand; PAM type: NRG; PAM sequence: GGG
agaatttcttttgaagcaga

SEQ ID NO: 20579 - DNA, 20 bp, Artificial Sequence
  Description of Artificial Sequence: Synthetic oligonucleotide
  Target: ATXN2; (-) strand; PAM type: NRG; PAM sequence: AGG
cagaatttcttttgaagcag

SEQ ID NO: 20580 - DNA, 20 bp, Artificial Sequence
  Description of Artificial Sequence: Synthetic oligonucleotide
  Target: ATXN2; (-) strand; PAM type: NRG; PAM sequence: GAG
ccagaatttcttttgaagca

SEQ ID NO: 20581 - DNA, 20 bp, Artificial Sequence
  Description of Artificial Sequence: Synthetic oligonucleotide
  Target: ATXN2; (-) strand; PAM type: NRG; PAM sequence: CAG
agccagaatttcttttgaag

SEQ ID NO: 20582 - DNA, 20 bp, Artificial Sequence
  Description of Artificial Sequence: Synthetic oligonucleotide
  Target: ATXN2; (-) strand; PAM type: NRG; PAM sequence: AAG
caaagccagaatttcttttg

SEQ ID NO: 20583 - DNA, 20 bp, Artificial Sequence
  Description of Artificial Sequence: Synthetic oligonucleotide
  Target: ATXN2; (-) strand; PAM type: NRG; PAM sequence: CAG
tacagttatttccccaaagc

SEQ ID NO: 20584 - DNA, 20 bp, Artificial Sequence
  Description of Artificial Sequence: Synthetic oligonucleotide
  Target: ATXN2; (-) strand; PAM type: NRG; PAM sequence: AAG
tacctacagttatttcccca

SEQ ID NO: 20585 - DNA, 20 bp, Artificial Sequence
  Description of Artificial Sequence: Synthetic oligonucleotide
  Target: ATXN2; (-) strand; PAM type: NRG; PAM sequence: CAG
ccttgctttatatataccta

SEQ ID NO: 20586 - DNA, 20 bp, Artificial Sequence
  Description of Artificial Sequence: Synthetic oligonucleotide
  Target: ATXN2; (-) strand; PAM type: NRG; PAM sequence: TAG
ggtttgctagattaatttac

SEQ ID NO: 20587 - DNA, 20 bp, Artificial Sequence
  Description of Artificial Sequence: Synthetic oligonucleotide
  Target: ATXN2; (-) strand; PAM type: NRG; PAM sequence: TAG
atttgaagaagagggtttgc

SEQ ID NO: 20588 - DNA, 20 bp, Artificial Sequence
  Description of Artificial Sequence: Synthetic oligonucleotide
  Target: ATXN2; (-) strand; PAM type: NRG; PAM sequence: GGG
gaacttaaatttgaagaaga

SEQ ID NO: 20589 - DNA, 20 bp, Artificial Sequence
  Description of Artificial Sequence: Synthetic oligonucleotide
  Target: ATXN2; (-) strand; PAM type: NRG; PAM sequence: AGG
tgaacttaaatttgaagaag

SEQ ID NO: 20590 - DNA, 20 bp, Artificial Sequence
  Description of Artificial Sequence: Synthetic oligonucleotide
  Target: ATXN2; (-) strand; PAM type: NRG; PAM sequence: GAG
ctgaacttaaatttgaagaa

SEQ ID NO: 20591 - DNA, 20 bp, Artificial Sequence
  Description of Artificial Sequence: Synthetic oligonucleotide
  Target: ATXN2; (-) strand; PAM type: NRG; PAM sequence: AAG
atctgaacttaaatttgaag

SEQ ID NO: 20592 - DNA, 20 bp, Artificial Sequence
  Description of Artificial Sequence: Synthetic oligonucleotide
  Target: ATXN2; (-) strand; PAM type: NRG; PAM sequence: AAG
taaatctgaacttaaatttg

SEQ ID NO: 20593 - DNA, 20 bp, Artificial Sequence
  Description of Artificial Sequence: Synthetic oligonucleotide
  Target: ATXN2; (-) strand; PAM type: NRG; PAM sequence: AAG
aaaaaaaaaagttaattcca

SEQ ID NO: 20594 - DNA, 20 bp, Artificial Sequence
  Description of Artificial Sequence: Synthetic oligonucleotide
  Target: ATXN2; (-) strand; PAM type: NRG; PAM sequence: AAG
tatctcaaaaaaaaaaaaaa

SEQ ID NO: 20595 - DNA, 20 bp, Artificial Sequence
  Description of Artificial Sequence: Synthetic oligonucleotide
  Target: ATXN2; (-) strand; PAM type: NRG; PAM sequence: GAG
agcagcatgggcaatatagt

SEQ ID NO: 20596 - DNA, 20 bp, Artificial Sequence
  Description of Artificial Sequence: Synthetic oligonucleotide
  Target: ATXN2; (-) strand; PAM type: NRG; PAM sequence: TAG
cgagagcagcatgggcaata

SEQ ID NO: 20597 - DNA, 20 bp, Artificial Sequence
  Description of Artificial Sequence: Synthetic oligonucleotide
  Target: ATXN2; (-) strand; PAM type: NRG; PAM sequence: GGG
catgagttcgagagcagcat

SEQ ID NO: 20598 - DNA, 20 bp, Artificial Sequence
  Description of Artificial Sequence: Synthetic oligonucleotide
  Target: ATXN2; (-) strand; PAM type: NRG; PAM sequence: TGG
ccatgagttcgagagcagca

SEQ ID NO: 20599 - DNA, 20 bp, Artificial Sequence
  Description of Artificial Sequence: Synthetic oligonucleotide
  Target: ATXN2; (-) strand; PAM type: NRG; PAM sequence: CAG
tgaacccatgagttcgagag

SEQ ID NO: 20600 - DNA, 20 bp, Artificial Sequence
  Description of Artificial Sequence: Synthetic oligonucleotide
  Target: ATXN2; (-) strand; PAM type: NRG; PAM sequence: GAG
acttgaacccatgagttcga

SEQ ID NO: 20601 - DNA, 20 bp, Artificial Sequence
  Description of Artificial Sequence: Synthetic oligonucleotide
  Target: ATXN2; (-) strand; PAM type: NRG; PAM sequence: GAG
tgacttgaacccatgagttc

SEQ ID NO: 20602 - DNA, 20 bp, Artificial Sequence
  Description of Artificial Sequence: Synthetic oligonucleotide
  Target: ATXN2; (-) strand; PAM type: NRG; PAM sequence: GAG
ggaggatgacttgaacccat

SEQ ID NO: 20603 - DNA, 20 bp, Artificial Sequence
  Description of Artificial Sequence: Synthetic oligonucleotide
  Target: ATXN2; (-) strand; PAM type: NRG; PAM sequence: AGG
atgcctgatatcccagctgg

SEQ ID NO: 20604 - DNA, 20 bp, Artificial Sequence
  Description of Artificial Sequence: Synthetic oligonucleotide
  Target: ATXN2; (-) strand; PAM type: NRG; PAM sequence: GAG
catgcctgatatcccagctg

SEQ ID NO: 20605 - DNA, 20 bp, Artificial Sequence
  Description of Artificial Sequence: Synthetic oligonucleotide
  Target: ATXN2; (-) strand; PAM type: NRG; PAM sequence: TGG
tccatgcctgatatcccagc

SEQ ID NO: 20606 - DNA, 20 bp, Artificial Sequence
  Description of Artificial Sequence: Synthetic oligonucleotide
  Target: ATXN2; (-) strand; PAM type: NRG; PAM sequence: CAG
tggctccatgcctgatatcc

SEQ ID NO: 20607 - DNA, 20 bp, Artificial Sequence
  Description of Artificial Sequence: Synthetic oligonucleotide
  Target: ATXN2; (-) strand; PAM type: NRG; PAM sequence: TGG
gactaattggctggacacag

SEQ ID NO: 20608 - DNA, 20 bp, Artificial Sequence
  Description of Artificial Sequence: Synthetic oligonucleotide
  Target: ATXN2; (-) strand; PAM type: NRG; PAM sequence: CAG
ccagactaattggctggaca

SEQ ID NO: 20609 - DNA, 20 bp, Artificial Sequence
  Description of Artificial Sequence: Synthetic oligonucleotide
  Target: ATXN2; (-) strand; PAM type: NRG; PAM sequence: TGG
aaaaaaccagactaattggc

SEQ ID NO: 20610 - DNA, 20 bp, Artificial Sequence
  Description of Artificial Sequence: Synthetic oligonucleotide
  Target: ATXN2; (-) strand; PAM type: NRG; PAM sequence: TGG
aacaaaaaaaccagactaat

SEQ ID NO: 20611 - DNA, 20 bp, Artificial Sequence
  Description of Artificial Sequence: Synthetic oligonucleotide
  Target: ATXN2; (-) strand; PAM type: NRG; PAM sequence: CAG
aaacaaacaaacaaaaaaac

SEQ ID NO: 20612 - DNA, 20 bp, Artificial Sequence
  Description of Artificial Sequence: Synthetic oligonucleotide
  Target: ATXN2; (-) strand; PAM type: NRG; PAM sequence: GAG
ttcagcctgggcaacagagt

SEQ ID NO: 20613 - DNA, 20 bp, Artificial Sequence
  Description of Artificial Sequence: Synthetic oligonucleotide
  Target: ATXN2; (-) strand; PAM type: NRG; PAM sequence: GAG
gcacttcagcctgggcaaca

SEQ ID NO: 20614 - DNA, 20 bp, Artificial Sequence
  Description of Artificial Sequence: Synthetic oligonucleotide
  Target: ATXN2; (-) strand; PAM type: NRG; PAM sequence: CAG
ctgcacttcagcctgggcaa

SEQ ID NO: 20615 - DNA, 20 bp, Artificial Sequence
  Description of Artificial Sequence: Synthetic oligonucleotide
  Target: ATXN2; (-) strand; PAM type: NRG; PAM sequence: GGG
gtgccactgcacttcagcct

SEQ ID NO: 20616 - DNA, 20 bp, Artificial Sequence
  Description of Artificial Sequence: Synthetic oligonucleotide
  Target: ATXN2; (-) strand; PAM type: NRG; PAM sequence: TGG
cgtgccactgcacttcagcc

SEQ ID NO: 20617 - DNA, 20 bp, Artificial Sequence
  Description of Artificial Sequence: Synthetic oligonucleotide
  Target: ATXN2; (-) strand; PAM type: NRG; PAM sequence: CAG
aagatcgtgccactgcactt

SEQ ID NO: 20618 - DNA, 20 bp, Artificial Sequence
  Description of Artificial Sequence: Synthetic oligonucleotide
  Target: ATXN2; (-) strand; PAM type: NRG; PAM sequence: AAG
ggcaggggttgcagtgagcc

SEQ ID NO: 20619 - DNA, 20 bp, Artificial Sequence
  Description of Artificial Sequence: Synthetic oligonucleotide
  Target: ATXN2; (-) strand; PAM type: NRG; PAM sequence: GAG
cgggaggcaggggttgcagt

SEQ ID NO: 20620 - DNA, 20 bp, Artificial Sequence
  Description of Artificial Sequence: Synthetic oligonucleotide
  Target: ATXN2; (-) strand; PAM type: NRG; PAM sequence: CAG
aacccgggaggcaggggttg

SEQ ID NO: 20621 - DNA, 20 bp, Artificial Sequence
  Description of Artificial Sequence: Synthetic oligonucleotide
  Target: ATXN2; (-) strand; PAM type: NRG; PAM sequence: GGG
tgcttgaacccgggaggcag

SEQ ID NO: 20622 - DNA, 20 bp, Artificial Sequence
  Description of Artificial Sequence: Synthetic oligonucleotide
  Target: ATXN2; (-) strand; PAM type: NRG; PAM sequence: GGG
ttgcttgaacccgggaggca

SEQ ID NO: 20623 - DNA, 20 bp, Artificial Sequence
  Description of Artificial Sequence: Synthetic oligonucleotide
  Target: ATXN2; (-) strand; PAM type: NRG; PAM sequence: AGG
attgcttgaacccgggaggc

SEQ ID NO: 20624 - DNA, 20 bp, Artificial Sequence
  Description of Artificial Sequence: Synthetic oligonucleotide
  Target: ATXN2; (-) strand; PAM type: NRG; PAM sequence: CAG
aattgcttgaacccgggagg

SEQ ID NO: 20625 - DNA, 20 bp, Artificial Sequence
  Description of Artificial Sequence: Synthetic oligonucleotide
  Target: ATXN2; (-) strand; PAM type: NRG; PAM sequence: AGG
gagaattgcttgaacccggg

SEQ ID NO: 20626 - DNA, 20 bp, Artificial Sequence
  Description of Artificial Sequence: Synthetic oligonucleotide
  Target: ATXN2; (-) strand; PAM type: NRG; PAM sequence: GAG
ggagaattgcttgaacccgg

SEQ ID NO: 20627 - DNA, 20 bp, Artificial Sequence
  Description of Artificial Sequence: Synthetic oligonucleotide
  Target: ATXN2; (-) strand; PAM type: NRG; PAM sequence: GGG
caggagaattgcttgaaccc

SEQ ID NO: 20628 - DNA, 20 bp, Artificial Sequence
  Description of Artificial Sequence: Synthetic oligonucleotide
  Target: ATXN2; (-) strand; PAM type: NRG; PAM sequence: CGG
gcaggagaattgcttgaacc

SEQ ID NO: 20629 - DNA, 20 bp, Artificial Sequence
  Description of Artificial Sequence: Synthetic oligonucleotide
  Target: ATXN2; (-) strand; PAM type: NRG; PAM sequence: GAG
actaggtggggctgaggcag

SEQ ID NO: 20630 - DNA, 20 bp, Artificial Sequence
  Description of Artificial Sequence: Synthetic oligonucleotide
  Target: ATXN2; (-) strand; PAM type: NRG; PAM sequence: AGG
ctactaggtggggctgaggc

SEQ ID NO: 20631 - DNA, 20 bp, Artificial Sequence
  Description of Artificial Sequence: Synthetic oligonucleotide
  Target: ATXN2; (-) strand; PAM type: NRG; PAM sequence: CAG
gctactaggtggggctgagg

SEQ ID NO: 20632 - DNA, 20 bp, Artificial Sequence
  Description of Artificial Sequence: Synthetic oligonucleotide
  Target: ATXN2; (-) strand; PAM type: NRG; PAM sequence: AGG
ccagctactaggtggggctg

SEQ ID NO: 20633 - DNA, 20 bp, Artificial Sequence
  Description of Artificial Sequence: Synthetic oligonucleotide
  Target: ATXN2; (-) strand; PAM type: NRG; PAM sequence: GAG
cccagctactaggtggggct

SEQ ID NO: 20634 - DNA, 20 bp, Artificial Sequence
  Description of Artificial Sequence: Synthetic oligonucleotide
  Target: ATXN2; (-) strand; PAM type: NRG; PAM sequence: GGG
gtaatcccagctactaggtg

SEQ ID NO: 20635 - DNA, 20 bp, Artificial Sequence
  Description of Artificial Sequence: Synthetic oligonucleotide
  Target: ATXN2; (-) strand; PAM type: NRG; PAM sequence: GGG
tgtaatcccagctactaggt

SEQ ID NO: 20636 - DNA, 20 bp, Artificial Sequence
  Description of Artificial Sequence: Synthetic oligonucleotide
  Target: ATXN2; (-) strand; PAM type: NRG; PAM sequence: TGG
ctgtaatcccagctactagg

SEQ ID NO: 20637 - DNA, 20 bp, Artificial Sequence
  Description of Artificial Sequence: Synthetic oligonucleotide
  Target: ATXN2; (-) strand; PAM type: NRG; PAM sequence: AGG
cgcctgtaatcccagctact

SEQ ID NO: 20638 - DNA, 20 bp, Artificial Sequence
  Description of Artificial Sequence: Synthetic oligonucleotide
  Target: ATXN2; (-) strand; PAM type: NRG; PAM sequence: TAG
ccgcctgtaatcccagctac

SEQ ID NO: 20639 - DNA, 20 bp, Artificial Sequence
  Description of Artificial Sequence: Synthetic oligonucleotide
  Target: ATXN2; (-) strand; PAM type: NRG; PAM sequence: CAG
gcacctgccgcctgtaatcc

SEQ ID NO: 20640 - DNA, 20 bp, Artificial Sequence
  Description of Artificial Sequence: Synthetic oligonucleotide
  Target: ATXN2; (-) strand; PAM type: NRG; PAM sequence: TGG
caaaaattagccggacatgg

SEQ ID NO: 20641 - DNA, 20 bp, Artificial Sequence
  Description of Artificial Sequence: Synthetic oligonucleotide
  Target: ATXN2; (-) strand; PAM type: NRG; PAM sequence: TGG
atacaaaaattagccggaca

SEQ ID NO: 20642 - DNA, 20 bp, Artificial Sequence
  Description of Artificial Sequence: Synthetic oligonucleotide
  Target: ATXN2; (-) strand; PAM type: NRG; PAM sequence: CGG
actaaaatacaaaaattagc

SEQ ID NO: 20643 - DNA, 20 bp, Artificial Sequence
  Description of Artificial Sequence: Synthetic oligonucleotide
  Target: ATXN2; (-) strand; PAM type: NRG; PAM sequence: TAG
ctctactaaaatacaaaaat

SEQ ID NO: 20644 - DNA, 20 bp, Artificial Sequence
  Description of Artificial Sequence: Synthetic oligonucleotide
  Target: ATXN2; (-) strand; PAM type: NRG; PAM sequence: TGG
tgagaccagcctggccaaca

SEQ ID NO: 20645 - DNA, 20 bp, Artificial Sequence
  Description of Artificial Sequence: Synthetic oligonucleotide
  Target: ATXN2; (-) strand; PAM type: NRG; PAM sequence: TGG
tcagtagtttgagaccagcc

SEQ ID NO: 20646 - DNA, 20 bp, Artificial Sequence
  Description of Artificial Sequence: Synthetic oligonucleotide
  Target: ATXN2; (-) strand; PAM type: NRG; PAM sequence: CAG
tgaggtcagtagtttgagac

SEQ ID NO: 20647 - DNA, 20 bp, Artificial Sequence
  Description of Artificial Sequence: Synthetic oligonucleotide
  Target: ATXN2; (-) strand; PAM type: NRG; PAM sequence: GAG
tcacctgaggtcagtagttt

SEQ ID NO: 20648 - DNA, 20 bp, Artificial Sequence
  Description of Artificial Sequence: Synthetic oligonucleotide
  Target: ATXN2; (-) strand; PAM type: NRG; PAM sequence: TAG
ggtgtatcacctgaggtcag

SEQ ID NO: 20649 - DNA, 20 bp, Artificial Sequence
  Description of Artificial Sequence: Synthetic oligonucleotide
  Target: ATXN2; (-) strand; PAM type: NRG; PAM sequence: CAG
gtgggtgtatcacctgaggt

SEQ ID NO: 20650 - DNA, 20 bp, Artificial Sequence
  Description of Artificial Sequence: Synthetic oligonucleotide
  Target: ATXN2; (-) strand; PAM type: NRG; PAM sequence: AGG
cgaggtgggtgtatcacctg

SEQ ID NO: 20651 - DNA, 20 bp, Artificial Sequence
  Description of Artificial Sequence: Synthetic oligonucleotide
  Target: ATXN2; (-) strand; PAM type: NRG; PAM sequence: GAG
ccgaggtgggtgtatcacct

SEQ ID NO: 20652 - DNA, 20 bp, Artificial Sequence
  Description of Artificial Sequence: Synthetic oligonucleotide
  Target: ATXN2; (-) strand; PAM type: NRG; PAM sequence: GGG
gcactttgggaggccgaggt

SEQ ID NO: 20653 - DNA, 20 bp, Artificial Sequence
  Description of Artificial Sequence: Synthetic oligonucleotide
  Target: ATXN2; (-) strand; PAM type: NRG; PAM sequence: TGG
agcactttgggaggccgagg

SEQ ID NO: 20654 - DNA, 20 bp, Artificial Sequence
  Description of Artificial Sequence: Synthetic oligonucleotide
  Target: ATXN2; (-) strand; PAM type: NRG; PAM sequence: AGG
cccagcactttgggaggccg

SEQ ID NO: 20655 - DNA, 20 bp, Artificial Sequence
  Description of Artificial Sequence: Synthetic oligonucleotide
  Target: ATXN2; (-) strand; PAM type: NRG; PAM sequence: GAG
tcccagcactttgggaggcc

SEQ ID NO: 20656 - DNA, 20 bp, Artificial Sequence
  Description of Artificial Sequence: Synthetic oligonucleotide
  Target: ATXN2; (-) strand; PAM type: NRG; PAM sequence: AGG
tgtaatcccagcactttggg

SEQ ID NO: 20657 - DNA, 20 bp, Artificial Sequence
  Description of Artificial Sequence: Synthetic oligonucleotide
  Target: ATXN2; (-) strand; PAM type: NRG; PAM sequence: GAG
ctgtaatcccagcactttgg

SEQ ID NO: 20658 - DNA, 20 bp, Artificial Sequence
  Description of Artificial Sequence: Synthetic oligonucleotide
  Target: ATXN2; (-) strand; PAM type: NRG; PAM sequence: GGG
gcctgtaatcccagcacttt

SEQ ID NO: 20659 - DNA, 20 bp, Artificial Sequence
  Description of Artificial Sequence: Synthetic oligonucleotide
  Target: ATXN2; (-) strand; PAM type: NRG; PAM sequence: TGG
tgcctgtaatcccagcactt

SEQ ID NO: 20660 - DNA, 20 bp, Artificial Sequence
  Description of Artificial Sequence: Synthetic oligonucleotide
  Target: ATXN2; (-) strand; PAM type: NRG; PAM sequence: CAG
gtggcttatgcctgtaatcc

SEQ ID NO: 20661 - DNA, 20 bp, Artificial Sequence
  Description of Artificial Sequence: Synthetic oligonucleotide
  Target: ATXN2; (-) strand; PAM type: NRG; PAM sequence: TGG
taaatactggctgggcatgg

SEQ ID NO: 20662 - DNA, 20 bp, Artificial Sequence
  Description of Artificial Sequence: Synthetic oligonucleotide
  Target: ATXN2; (-) strand; PAM type: NRG; PAM sequence: TGG
acataaatactggctgggca

SEQ ID NO: 20663 - DNA, 20 bp, Artificial Sequence
  Description of Artificial Sequence: Synthetic oligonucleotide
  Target: ATXN2; (-) strand; PAM type: NRG; PAM sequence: GGG
ctcaaacataaatactggct

SEQ ID NO: 20664 - DNA, 20 bp, Artificial Sequence
  Description of Artificial Sequence: Synthetic oligonucleotide
  Target: ATXN2; (-) strand; PAM type: NRG; PAM sequence: TGG
tctcaaacataaatactggc

SEQ ID NO: 20665 - DNA, 20 bp, Artificial Sequence
  Description of Artificial Sequence: Synthetic oligonucleotide
  Target: ATXN2; (-) strand; PAM type: NRG; PAM sequence: TGG
cccgtctcaaacataaatac

SEQ ID NO: 20666 - DNA, 20 bp, Artificial Sequence
  Description of Artificial Sequence: Synthetic oligonucleotide
  Target: ATXN2; (-) strand; PAM type: NRG; PAM sequence: GAG
tccagcctgggcgacagagt

SEQ ID NO: 20667 - DNA, 20 bp, Artificial Sequence
  Description of Artificial Sequence: Synthetic oligonucleotide
  Target: ATXN2; (-) strand; PAM type: NRG; PAM sequence: GAG
gccctccagcctgggcgaca

SEQ ID NO: 20668 - DNA, 20 bp, Artificial Sequence
  Description of Artificial Sequence: Synthetic oligonucleotide
  Target: ATXN2; (-) strand; PAM type: NRG; PAM sequence: CAG
ctgccctccagcctgggcga

SEQ ID NO: 20669 - DNA, 20 bp, Artificial Sequence
  Description of Artificial Sequence: Synthetic oligonucleotide
  Target: ATXN2; (-) strand; PAM type: NRG; PAM sequence: GGG
atgccactgccctccagcct

SEQ ID NO: 20670 - DNA, 20 bp, Artificial Sequence
  Description of Artificial Sequence: Synthetic oligonucleotide
  Target: ATXN2; (-) strand; PAM type: NRG; PAM sequence: TGG
tatgccactgccctccagcc

SEQ ID NO: 20671 - DNA, 20 bp, Artificial Sequence
  Description of Artificial Sequence: Synthetic oligonucleotide
  Target: ATXN2; (-) strand; PAM type: NRG; PAM sequence: CAG
gtgattatgccactgccctc

SEQ ID NO: 20672 - DNA, 20 bp, Artificial Sequence
  Description of Artificial Sequence: Synthetic oligonucleotide
  Target: ATXN2; (-) strand; PAM type: NRG; PAM sequence: GAG
caggaagtagaggctgcagt

SEQ ID NO: 20673 - DNA, 20 bp, Artificial Sequence
  Description of Artificial Sequence: Synthetic oligonucleotide
  Target: ATXN2; (-) strand; PAM type: NRG; PAM sequence: CAG
agcccaggaagtagaggctg

SEQ ID NO: 20674 - DNA, 20 bp, Artificial Sequence
  Description of Artificial Sequence: Synthetic oligonucleotide
  Target: ATXN2; (-) strand; PAM type: NRG; PAM sequence: AGG
cacttgagcccaggaagtag

SEQ ID NO: 20675 - DNA, 20 bp, Artificial Sequence
  Description of Artificial Sequence: Synthetic oligonucleotide
  Target: ATXN2; (-) strand; PAM type: NRG; PAM sequence: GAG
tcacttgagcccaggaagta

SEQ ID NO: 20676 - DNA, 20 bp, Artificial Sequence
  Description of Artificial Sequence: Synthetic oligonucleotide
  Target: ATXN2; (-) strand; PAM type: NRG; PAM sequence: TAG
gatcacttgagcccaggaag

SEQ ID NO: 20677 - DNA, 20 bp, Artificial Sequence
  Description of Artificial Sequence: Synthetic oligonucleotide
  Target: ATXN2; (-) strand; PAM type: NRG; PAM sequence: AAG
gaggatcacttgagcccagg

SEQ ID NO: 20678 - DNA, 20 bp, Artificial Sequence
  Description of Artificial Sequence: Synthetic oligonucleotide
  Target: ATXN2; (-) strand; PAM type: NRG; PAM sequence: AGG
cgagaggatcacttgagccc

SEQ ID NO: 20679 - DNA, 20 bp, Artificial Sequence
  Description of Artificial Sequence: Synthetic oligonucleotide
  Target: ATXN2; (-) strand; PAM type: NRG; PAM sequence: CAG
gcgagaggatcacttgagcc

SEQ ID NO: 20680 - DNA, 20 bp, Artificial Sequence
  Description of Artificial Sequence: Synthetic oligonucleotide
  Target: ATXN2; (-) strand; PAM type: NRG; PAM sequence: GAG
ctgaggcgagaggatcactt

SEQ ID NO: 20681 - DNA, 20 bp, Artificial Sequence
  Description of Artificial Sequence: Synthetic oligonucleotide
  Target: ATXN2; (-) strand; PAM type: NRG; PAM sequence: AGG
gtttgggggactgaggcgag

SEQ ID NO: 20682 - DNA, 20 bp, Artificial Sequence
  Description of Artificial Sequence: Synthetic oligonucleotide
  Target: ATXN2; (-) strand; PAM type: NRG; PAM sequence: GAG
tgtttgggggactgaggcga

SEQ ID NO: 20683 - DNA, 20 bp, Artificial Sequence
  Description of Artificial Sequence: Synthetic oligonucleotide
  Target: ATXN2; (-) strand; PAM type: NRG; PAM sequence: GAG
gctgtttgggggactgaggc

SEQ ID NO: 20684 - DNA, 20 bp, Artificial Sequence
  Description of Artificial Sequence: Synthetic oligonucleotide
  Target: ATXN2; (-) strand; PAM type: NRG; PAM sequence: AGG
cccagctgtttgggggactg

SEQ ID NO: 20685 - DNA, 20 bp, Artificial Sequence
  Description of Artificial Sequence: Synthetic oligonucleotide
  Target: ATXN2; (-) strand; PAM type: NRG; PAM sequence: GAG
ccccagctgtttgggggact

SEQ ID NO: 20686 - DNA, 20 bp, Artificial Sequence
  Description of Artificial Sequence: Synthetic oligonucleotide
  Target: ATXN2; (-) strand; PAM type: NRG; PAM sequence: GGG
ctgtagccccagctgtttgg

SEQ ID NO: 20687 - DNA, 20 bp, Artificial Sequence
  Description of Artificial Sequence: Synthetic oligonucleotide
  Target: ATXN2; (-) strand; PAM type: NRG; PAM sequence: GGG
cctgtagccccagctgtttg

SEQ ID NO: 20688 - DNA, 20 bp, Artificial Sequence
  Description of Artificial Sequence: Synthetic oligonucleotide
  Target: ATXN2; (-) strand; PAM type: NRG; PAM sequence: GGG
gcctgtagccccagctgttt

SEQ ID NO: 20689 - DNA, 20 bp, Artificial Sequence
  Description of Artificial Sequence: Synthetic oligonucleotide
  Target: ATXN2; (-) strand; PAM type: NRG; PAM sequence: TGG
tgcctgtagccccagctgtt

SEQ ID NO: 20690 - DNA, 20 bp, Artificial Sequence
  Description of Artificial Sequence: Synthetic oligonucleotide
  Target: ATXN2; (-) strand; PAM type: NRG; PAM sequence: CAG
gtggcatatgcctgtagccc

SEQ ID NO: 20691 - DNA, 20 bp, Artificial Sequence
  Description of Artificial Sequence: Synthetic oligonucleotide
  Target: ATXN2; (-) strand; PAM type: NRG; PAM sequence: TAG
ggcatggtggcatatgcctg

SEQ ID NO: 20692 - DNA, 20 bp, Artificial Sequence
  Description of Artificial Sequence: Synthetic oligonucleotide
  Target: ATXN2; (-) strand; PAM type: NRG; PAM sequence: TGG
aaaaaattagctgggcatgg

SEQ ID NO: 20693 - DNA, 20 bp, Artificial Sequence
  Description of Artificial Sequence: Synthetic oligonucleotide
  Target: ATXN2; (-) strand; PAM type: NRG; PAM sequence: TGG
tcaaaaaaattagctgggca

SEQ ID NO: 20694 - DNA, 20 bp, Artificial Sequence
  Description of Artificial Sequence: Synthetic oligonucleotide
  Target: ATXN2; (-) strand; PAM type: NRG; PAM sequence: GGG
aaaattcaaaaaaattagct

SEQ ID NO: 20695 - DNA, 20 bp, Artificial Sequence
  Description of Artificial Sequence: Synthetic oligonucleotide
  Target: ATXN2; (-) strand; PAM type: NRG; PAM sequence: TGG
taaaattcaaaaaaattagc

SEQ ID NO: 20696 - DNA, 20 bp, Artificial Sequence
  Description of Artificial Sequence: Synthetic oligonucleotide
  Target: ATXN2; (-) strand; PAM type: NRG; PAM sequence: TAG
ctactaaaattcaaaaaaat

SEQ ID NO: 20697 - DNA, 20 bp, Artificial Sequence
  Description of Artificial Sequence: Synthetic oligonucleotide
  Target: ATXN2; (-) strand; PAM type: NRG; PAM sequence: GAG
caagatcagcctggacaaca

SEQ ID NO: 20698 - DNA, 20 bp, Artificial Sequence
  Description of Artificial Sequence: Synthetic oligonucleotide
  Target: ATXN2; (-) strand; PAM type: NRG; PAM sequence: CAG
cccaagatcagcctggacaa

SEQ ID NO: 20699 - DNA, 20 bp, Artificial Sequence
  Description of Artificial Sequence: Synthetic oligonucleotide
  Target: ATXN2; (-) strand; PAM type: NRG; PAM sequence: TGG
tcaggagcccaagatcagcc

SEQ ID NO: 20700 - DNA, 20 bp, Artificial Sequence
  Description of Artificial Sequence: Synthetic oligonucleotide
  Target: ATXN2; (-) strand; PAM type: NRG; PAM sequence: CAG
tgagctcaggagcccaagat

SEQ ID NO: 20701 - DNA, 20 bp, Artificial Sequence
  Description of Artificial Sequence: Synthetic oligonucleotide
  Target: ATXN2; (-) strand; PAM type: NRG; PAM sequence: AAG
ttgcttgagctcaggagccc

SEQ ID NO: 20702 - DNA, 20 bp, Artificial Sequence
  Description of Artificial Sequence: Synthetic oligonucleotide
  Target: ATXN2; (-) strand; PAM type: NRG; PAM sequence: GAG
ggaggattgcttgagctcag

SEQ ID NO: 20703 - DNA, 20 bp, Artificial Sequence
  Description of Artificial Sequence: Synthetic oligonucleotide
  Target: ATXN2; (-) strand; PAM type: NRG; PAM sequence: AGG
caggaggattgcttgagctc

SEQ ID NO: 20704 - DNA, 20 bp, Artificial Sequence
  Description of Artificial Sequence: Synthetic oligonucleotide
  Target: ATXN2; (-) strand; PAM type: NRG; PAM sequence: CAG
gcaggaggattgcttgagct

SEQ ID NO: 20705 - DNA, 20 bp, Artificial Sequence
  Description of Artificial Sequence: Synthetic oligonucleotide
  Target: ATXN2; (-) strand; PAM type: NRG; PAM sequence: GAG
ccaaggcaggaggattgctt

SEQ ID NO: 20706 - DNA, 20 bp, Artificial Sequence
  Description of Artificial Sequence: Synthetic oligonucleotide
  Target: ATXN2; (-) strand; PAM type: NRG; PAM sequence: AGG
ctttgggaggccaaggcagg

SEQ ID NO: 20707 - DNA, 20 bp, Artificial Sequence
  Description of Artificial Sequence: Synthetic oligonucleotide
  Target: ATXN2; (-) strand; PAM type: NRG; PAM sequence: GAG
actttgggaggccaaggcag

SEQ ID NO: 20708 - DNA, 20 bp, Artificial Sequence
  Description of Artificial Sequence: Synthetic oligonucleotide
  Target: ATXN2; (-) strand; PAM type: NRG; PAM sequence: AGG
gcactttgggaggccaaggc

SEQ ID NO: 20709 - DNA, 20 bp, Artificial Sequence
  Description of Artificial Sequence: Synthetic oligonucleotide
  Target: ATXN2; (-) strand; PAM type: NRG; PAM sequence: CAG
agcactttgggaggccaagg

SEQ ID NO: 20710 - DNA, 20 bp, Artificial Sequence
  Description of Artificial Sequence: Synthetic oligonucleotide
  Target: ATXN2; (-) strand; PAM type: NRG; PAM sequence: AGG
tttagcactttgggaggcca

SEQ ID NO: 20711 - DNA, 20 bp, Artificial Sequence
  Description of Artificial Sequence: Synthetic oligonucleotide
  Target: ATXN2; (-) strand; PAM type: NRG; PAM sequence: AAG
ttttagcactttgggaggcc

SEQ ID NO: 20712 - DNA, 20 bp, Artificial Sequence
  Description of Artificial Sequence: Synthetic oligonucleotide
  Target: ATXN2; (-) strand; PAM type: NRG; PAM sequence: AGG
tgtaattttagcactttggg

SEQ ID NO: 20713 - DNA, 20 bp, Artificial Sequence
  Description of Artificial Sequence: Synthetic oligonucleotide
  Target: ATXN2; (-) strand; PAM type: NRG; PAM sequence: GAG
ctgtaattttagcactttgg

SEQ ID NO: 20714 - DNA, 20 bp, Artificial Sequence
  Description of Artificial Sequence: Synthetic oligonucleotide
  Target: ATXN2; (-) strand; PAM type: NRG; PAM sequence: GGG
acctgtaattttagcacttt

SEQ ID NO: 20715 - DNA, 20 bp, Artificial Sequence
  Description of Artificial Sequence: Synthetic oligonucleotide
  Target: ATXN2; (-) strand; PAM type: NRG; PAM sequence: TGG
cacctgtaattttagcactt

SEQ ID NO: 20716 - DNA, 20 bp, Artificial Sequence
  Description of Artificial Sequence: Synthetic oligonucleotide
  Target: ATXN2; (-) strand; PAM type: NRG; PAM sequence: TAG
atggctcacacctgtaattt

SEQ ID NO: 20717 - DNA, 20 bp, Artificial Sequence
  Description of Artificial Sequence: Synthetic oligonucleotide
  Target: ATXN2; (-) strand; PAM type: NRG; PAM sequence: TGG
taattggaggcctggtgtga

SEQ ID NO: 20718 - DNA, 20 bp, Artificial Sequence
  Description of Artificial Sequence: Synthetic oligonucleotide
  Target: ATXN2; (-) strand; PAM type: NRG; PAM sequence: TGG
aaaaagagtaattggaggcc

SEQ ID NO: 20719 - DNA, 20 bp, Artificial Sequence
  Description of Artificial Sequence: Synthetic oligonucleotide
  Target: ATXN2; (-) strand; PAM type: NRG; PAM sequence: AGG
tcttcaaaaagagtaattgg

SEQ ID NO: 20720 - DNA, 20 bp, Artificial Sequence
  Description of Artificial Sequence: Synthetic oligonucleotide
  Target: ATXN2; (-) strand; PAM type: NRG; PAM sequence: GAG
ctcttcaaaaagagtaattg

SEQ ID NO: 20721 - DNA, 20 bp, Artificial Sequence
  Description of Artificial Sequence: Synthetic oligonucleotide
  Target: ATXN2; (-) strand; PAM type: NRG; PAM sequence: TGG
tcctcttcaaaaagagtaat

SEQ ID NO: 20722 - DNA, 20 bp, Artificial Sequence
  Description of Artificial Sequence: Synthetic oligonucleotide
  Target: ATXN2; (-) strand; PAM type: NRG; PAM sequence: GAG
tatagtatcctcttcaaaaa

SEQ ID NO: 20723 - DNA, 20 bp, Artificial Sequence
  Description of Artificial Sequence: Synthetic oligonucleotide
  Target: ATXN2; (-) strand; PAM type: NRG; PAM sequence: AAG
tatatagtatcctcttcaaa

SEQ ID NO: 20724 - DNA, 20 bp, Artificial Sequence
  Description of Artificial Sequence: Synthetic oligonucleotide
  Target: ATXN2; (-) strand; PAM type: NRG; PAM sequence: TAG
gcccatcagttgtgattata

SEQ ID NO: 20725 - DNA, 20 bp, Artificial Sequence
  Description of Artificial Sequence: Synthetic oligonucleotide
  Target: ATXN2; (-) strand; PAM type: NRG; PAM sequence: CAG
aggggagaaaaaatgcccat

SEQ ID NO: 20726 - DNA, 20 bp, Artificial Sequence
  Description of Artificial Sequence: Synthetic oligonucleotide
  Target: ATXN2; (-) strand; PAM type: NRG; PAM sequence: GAG
ttttatgaagaaaaacaggg

SEQ ID NO: 20727 - DNA, 20 bp, Artificial Sequence
  Description of Artificial Sequence: Synthetic oligonucleotide
  Target: ATXN2; (-) strand; PAM type: NRG; PAM sequence: GGG
gattttatgaagaaaaacag

SEQ ID NO: 20728 - DNA, 20 bp, Artificial Sequence
  Description of Artificial Sequence: Synthetic oligonucleotide
  Target: ATXN2; (-) strand; PAM type: NRG; PAM sequence: GGG
ggattttatgaagaaaaaca

SEQ ID NO: 20729 - DNA, 20 bp, Artificial Sequence
  Description of Artificial Sequence: Synthetic oligonucleotide
  Target: ATXN2; (-) strand; PAM type: NRG; PAM sequence: AGG
tggattttatgaagaaaaac

SEQ ID NO: 20730 - DNA, 20 bp, Artificial Sequence
  Description of Artificial Sequence: Synthetic oligonucleotide
  Target: ATXN2; (-) strand; PAM type: NRG; PAM sequence: CAG
atggattttatgaagaaaaa

SEQ ID NO: 20731 - DNA, 20 bp, Artificial Sequence
  Description of Artificial Sequence: Synthetic oligonucleotide
  Target: ATXN2; (-) strand; PAM type: NRG; PAM sequence: AAG
atattcacatggattttatg

SEQ ID NO: 20732 - DNA, 20 bp, Artificial Sequence
  Description of Artificial Sequence: Synthetic oligonucleotide
  Target: ATXN2; (-) strand; PAM type: NRG; PAM sequence: TGG
acattacatagatattcaca

SEQ ID NO: 20733 - DNA, 20 bp, Artificial Sequence
  Description of Artificial Sequence: Synthetic oligonucleotide
  Target: ATXN2; (-) strand; PAM type: NRG; PAM sequence: TAG
ttttgatgaacaacattaca

SEQ ID NO: 20734 - DNA, 20 bp, Artificial Sequence
  Description of Artificial Sequence: Synthetic oligonucleotide
  Target: ATXN2; (-) strand; PAM type: NRG; PAM sequence: TGG
tttttgatgaggctatgcat

SEQ ID NO: 20735 - DNA, 20 bp, Artificial Sequence
  Description of Artificial Sequence: Synthetic oligonucleotide
  Target: ATXN2; (-) strand; PAM type: NRG; PAM sequence: AGG
ttagctctgactttttgatg

SEQ ID NO: 20736 - DNA, 20 bp, Artificial Sequence
  Description of Artificial Sequence: Synthetic oligonucleotide
  Target: ATXN2; (-) strand; PAM type: NRG; PAM sequence: GAG
tttagctctgactttttgat

SEQ ID NO: 20737 - DNA, 20 bp, Artificial Sequence
  Description of Artificial Sequence: Synthetic oligonucleotide
  Target: ATXN2; (-) strand; PAM type: NRG; PAM sequence: TAG
atgaataaatagttgtagtt

SEQ ID NO: 20738 - DNA, 20 bp, Artificial Sequence
  Description of Artificial Sequence: Synthetic oligonucleotide
  Target: ATXN2; (-) strand; PAM type: NRG; PAM sequence: TAG
ttataatgaataaatagttg

SEQ ID NO: 20739 - DNA, 20 bp, Artificial Sequence
  Description of Artificial Sequence: Synthetic oligonucleotide
  Target: ATXN2; (-) strand; PAM type: NRG; PAM sequence: TAG
ctaagtttataatgaataaa

SEQ ID NO: 20740 - DNA, 20 bp, Artificial Sequence
  Description of Artificial Sequence: Synthetic oligonucleotide
  Target: ATXN2; (-) strand; PAM type: NRG; PAM sequence: AAG
gctgcatgaattgagtaact

SEQ ID NO: 20741 - DNA, 20 bp, Artificial Sequence
  Description of Artificial Sequence: Synthetic oligonucleotide
  Target: ATXN2; (-) strand; PAM type: NRG; PAM sequence: GAG
gtttgcatgctgcatgaatt

SEQ ID NO: 20742 - DNA, 20 bp, Artificial Sequence
  Description of Artificial Sequence: Synthetic oligonucleotide
  Target: ATXN2; (-) strand; PAM type: NRG; PAM sequence: TAG
atcctgcctgtgtttgcttg

SEQ ID NO: 20743 - DNA, 20 bp, Artificial Sequence
  Description of Artificial Sequence: Synthetic oligonucleotide
  Target: ATXN2; (-) strand; PAM type: NRG; PAM sequence: GAG
catatagagcaggtaaaggt

SEQ ID NO: 20744 - DNA, 20 bp, Artificial Sequence
  Description of Artificial Sequence: Synthetic oligonucleotide
  Target: ATXN2; (-) strand; PAM type: NRG; PAM sequence: AGG
aagacatatagagcaggtaa

SEQ ID NO: 20745 - DNA, 20 bp, Artificial Sequence
  Description of Artificial Sequence: Synthetic oligonucleotide
  Target: ATXN2; (-) strand; PAM type: NRG; PAM sequence: AAG
caagacatatagagcaggta

SEQ ID NO: 20746 - DNA, 20 bp, Artificial Sequence
  Description of Artificial Sequence: Synthetic oligonucleotide
  Target: ATXN2; (-) strand; PAM type: NRG; PAM sequence: AGG
caagccaagacatatagagc

SEQ ID NO: 20747 - DNA, 20 bp, Artificial Sequence
  Description of Artificial Sequence: Synthetic oligonucleotide
  Target: ATXN2; (-) strand; PAM type: NRG; PAM sequence: CAG
tcaagccaagacatatagag

SEQ ID NO: 20748 - DNA, 20 bp, Artificial Sequence
  Description of Artificial Sequence: Synthetic oligonucleotide
  Target: ATXN2; (-) strand; PAM type: NRG; PAM sequence: GAG
gaatcaagccaagacatata

SEQ ID NO: 20749 - DNA, 20 bp, Artificial Sequence
  Description of Artificial Sequence: Synthetic oligonucleotide
  Target: ATXN2; (-) strand; PAM type: NRG; PAM sequence: TAG
gtgaatcaagccaagacata

SEQ ID NO: 20750 - DNA, 20 bp, Artificial Sequence
  Description of Artificial Sequence: Synthetic oligonucleotide
  Target: ATXN2; (-) strand; PAM type: NRG; PAM sequence: AAG
ccatgccagtgaatcaagcc

SEQ ID NO: 20751 - DNA, 20 bp, Artificial Sequence
  Description of Artificial Sequence: Synthetic oligonucleotide
  Target: ATXN2; (-) strand; PAM type: NRG; PAM sequence: AAG
gacgcccatgccagtgaatc

SEQ ID NO: 20752 - DNA, 20 bp, Artificial Sequence
  Description of Artificial Sequence: Synthetic oligonucleotide
  Target: ATXN2; (-) strand; PAM type: NRG; PAM sequence: CAG
aatacctatgacgcccatgc

SEQ ID NO: 20753 - DNA, 20 bp, Artificial Sequence
  Description of Artificial Sequence: Synthetic oligonucleotide
  Target: ATXN2; (-) strand; PAM type: NRG; PAM sequence: AAG
attttttttttaattctctc

SEQ ID NO: 20754 - DNA, 20 bp, Artificial Sequence
  Description of Artificial Sequence: Synthetic oligonucleotide
  Target: ATXN2; (-) strand; PAM type: NRG; PAM sequence: AGG
gaataccttgttattatcat

SEQ ID NO: 20755 - DNA, 20 bp, Artificial Sequence
  Description of Artificial Sequence: Synthetic oligonucleotide
  Target: ATXN2; (-) strand; PAM type: NRG; PAM sequence: TAG
agaataccttgttattatca

SEQ ID NO: 20756 - DNA, 20 bp, Artificial Sequence
  Description of Artificial Sequence: Synthetic oligonucleotide
  Target: ATXN2; (-) strand; PAM type: NRG; PAM sequence: CAG
caatataaaactaagagtga

SEQ ID NO: 20757 - DNA, 20 bp, Artificial Sequence
  Description of Artificial Sequence: Synthetic oligonucleotide
  Target: ATXN2; (-) strand; PAM type: NRG; PAM sequence: GAG
ctctagcaatataaaactaa

SEQ ID NO: 20758 - DNA, 20 bp, Artificial Sequence
  Description of Artificial Sequence: Synthetic oligonucleotide
  Target: ATXN2; (-) strand; PAM type: NRG; PAM sequence: AAG
ctctctagcaatataaaact

SEQ ID NO: 20759 - DNA, 20 bp, Artificial Sequence
  Description of Artificial Sequence: Synthetic oligonucleotide
  Target: ATXN2; (-) strand; PAM type: NRG; PAM sequence: TAG
ccttctcatgcctagctctc

SEQ ID NO: 20760 - DNA, 20 bp, Artificial Sequence
  Description of Artificial Sequence: Synthetic oligonucleotide
  Target: ATXN2; (-) strand; PAM type: NRG; PAM sequence: TAG
tcaggaaaccttctcatgcc

SEQ ID NO: 20761 - DNA, 20 bp, Artificial Sequence
  Description of Artificial Sequence: Synthetic oligonucleotide
  Target: ATXN2; (-) strand; PAM type: NRG; PAM sequence: AGG
ttaatgactaatggagaatc

SEQ ID NO: 20762 - DNA, 20 bp, Artificial Sequence
  Description of Artificial Sequence: Synthetic oligonucleotide
  Target: ATXN2; (-) strand; PAM type: NRG; PAM sequence: CAG
tttaatgactaatggagaat

SEQ ID NO: 20763 - DNA, 20 bp, Artificial Sequence
  Description of Artificial Sequence: Synthetic oligonucleotide
  Target: ATXN2; (-) strand; PAM type: NRG; PAM sequence: GAG
taattttttaatgactaatg

SEQ ID NO: 20764 - DNA, 20 bp, Artificial Sequence
  Description of Artificial Sequence: Synthetic oligonucleotide
  Target: ATXN2; (-) strand; PAM type: NRG; PAM sequence: TGG
tctaattttttaatgactaa

SEQ ID NO: 20765 - DNA, 20 bp, Artificial Sequence
  Description of Artificial Sequence: Synthetic oligonucleotide
  Target: ATXN2; (-) strand; PAM type: NRG; PAM sequence: GGG
ggtttgttccttttagctgt

SEQ ID NO: 20766 - DNA, 20 bp, Artificial Sequence
  Description of Artificial Sequence: Synthetic oligonucleotide
  Target: ATXN2; (-) strand; PAM type: NRG; PAM sequence: TGG
gggtttgttccttttagctg

SEQ ID NO: 20767 - DNA, 20 bp, Artificial Sequence
  Description of Artificial Sequence: Synthetic oligonucleotide
  Target: ATXN2; (-) strand; PAM type: NRG; PAM sequence: TAG
agtttggggtttgttccttt

SEQ ID NO: 20768 - DNA, 20 bp, Artificial Sequence
  Description of Artificial Sequence: Synthetic oligonucleotide
  Target: ATXN2; (-) strand; PAM type: NRG; PAM sequence: GGG
tttagatttactgtagtttg

SEQ ID NO: 20769 - DNA, 20 bp, Artificial Sequence
  Description of Artificial Sequence: Synthetic oligonucleotide
  Target: ATXN2; (-) strand; PAM type: NRG; PAM sequence: GGG
gtttagatttactgtagttt

SEQ ID NO: 20770 - DNA, 20 bp, Artificial Sequence
  Description of Artificial Sequence: Synthetic oligonucleotide
  Target: ATXN2; (-) strand; PAM type: NRG; PAM sequence: TGG
ggtttagatttactgtagtt

SEQ ID NO: 20771 - DNA, 20 bp, Artificial Sequence
  Description of Artificial Sequence: Synthetic oligonucleotide
  Target: ATXN2; (-) strand; PAM type: NRG; PAM sequence: TAG
aagatggtttagatttactg

SEQ ID NO: 20772 - DNA, 20 bp, Artificial Sequence
  Description of Artificial Sequence: Synthetic oligonucleotide
  Target: ATXN2; (-) strand; PAM type: NRG; PAM sequence: TAG
tttctgtgaaaaagatggtt

SEQ ID NO: 20773 - DNA, 20 bp, Artificial Sequence
  Description of Artificial Sequence: Synthetic oligonucleotide
  Target: ATXN2; (-) strand; PAM type: NRG; PAM sequence: TGG
aatgttttctgtgaaaaaga

SEQ ID NO: 20774 - DNA, 20 bp, Artificial Sequence
  Description of Artificial Sequence: Synthetic oligonucleotide
  Target: ATXN2; (-) strand; PAM type: NRG; PAM sequence: AAG
tgagaatgttttctgtgaaa

SEQ ID NO: 20775 - DNA, 20 bp, Artificial Sequence
  Description of Artificial Sequence: Synthetic oligonucleotide
  Target: ATXN2; (-) strand; PAM type: NRG; PAM sequence: GAG
aagtatgaggacctaaatct

SEQ ID NO: 20776 - DNA, 20 bp, Artificial Sequence
  Description of Artificial Sequence: Synthetic oligonucleotide
  Target: ATXN2; (-) strand; PAM type: NRG; PAM sequence: AGG
tcagtgtgttgttaagtatg

SEQ ID NO: 20777 - DNA, 20 bp, Artificial Sequence
  Description of Artificial Sequence: Synthetic oligonucleotide
  Target: ATXN2; (-) strand; PAM type: NRG; PAM sequence: GAG
ttcagtgtgttgttaagtat

SEQ ID NO: 20778 - DNA, 20 bp, Artificial Sequence
  Description of Artificial Sequence: Synthetic oligonucleotide
  Target: ATXN2; (-) strand; PAM type: NRG; PAM sequence: AAG
cagagattcagtgtgttgtt

SEQ ID NO: 20779 - DNA, 20 bp, Artificial Sequence
  Description of Artificial Sequence: Synthetic oligonucleotide
  Target: ATXN2; (-) strand; PAM type: NRG; PAM sequence: CAG
cagacaggcatgcagagatt

SEQ ID NO: 20780 - DNA, 20 bp, Artificial Sequence
  Description of Artificial Sequence: Synthetic oligonucleotide
  Target: ATXN2; (-) strand; PAM type: NRG; PAM sequence: GAG
ttgaaacagacaggcatgca

SEQ ID NO: 20781 - DNA, 20 bp, Artificial Sequence
  Description of Artificial Sequence: Synthetic oligonucleotide
  Target: ATXN2; (-) strand; PAM type: NRG; PAM sequence: CAG
atttgaaacagacaggcatg

SEQ ID NO: 20782 - DNA, 20 bp, Artificial Sequence
  Description of Artificial Sequence: Synthetic oligonucleotide
  Target: ATXN2; (-) strand; PAM type: NRG; PAM sequence: AGG
catatgcatttgaaacagac

SEQ ID NO: 20783 - DNA, 20 bp, Artificial Sequence
  Description of Artificial Sequence: Synthetic oligonucleotide
  Target: ATXN2; (-) strand; PAM type: NRG; PAM sequence: CAG
gcatatgcatttgaaacaga

SEQ ID NO: 20784 - DNA, 20 bp, Artificial Sequence
  Description of Artificial Sequence: Synthetic oligonucleotide
  Target: ATXN2; (-) strand; PAM type: NRG; PAM sequence: CAG
ttatgcatatgcatttgaaa

SEQ ID NO: 20785 - DNA, 20 bp, Artificial Sequence
  Description of Artificial Sequence: Synthetic oligonucleotide
  Target: ATXN2; (-) strand; PAM type: NRG; PAM sequence: TGG
tcagtgacttgagggtgtga

SEQ ID NO: 20786 - DNA, 20 bp, Artificial Sequence
  Description of Artificial Sequence: Synthetic oligonucleotide
  Target: ATXN2; (-) strand; PAM type: NRG; PAM sequence: GGG
ttaggttttcagtgacttga

SEQ ID NO: 20787 - DNA, 20 bp, Artificial Sequence
  Description of Artificial Sequence: Synthetic oligonucleotide
  Target: ATXN2; (-) strand; PAM type: NRG; PAM sequence: AGG
tttaggttttcagtgacttg

SEQ ID NO: 20788 - DNA, 20 bp, Artificial Sequence
  Description of Artificial Sequence: Synthetic oligonucleotide
  Target: ATXN2; (-) strand; PAM type: NRG; PAM sequence: GAG
ctttaggttttcagtgactt

SEQ ID NO: 20789 - DNA, 20 bp, Artificial Sequence
  Description of Artificial Sequence: Synthetic oligonucleotide
  Target: ATXN2; (-) strand; PAM type: NRG; PAM sequence: CAG
ccaagcactctttaggtttt

SEQ ID NO: 20790 - DNA, 20 bp, Artificial Sequence
  Description of Artificial Sequence: Synthetic oligonucleotide
  Target: ATXN2; (-) strand; PAM type: NRG; PAM sequence: AGG
tctgacaccaagcactcttt

SEQ ID NO: 20791 - DNA, 20 bp, Artificial Sequence
  Description of Artificial Sequence: Synthetic oligonucleotide
  Target: ATXN2; (-) strand; PAM type: NRG; PAM sequence: TAG
atctgacaccaagcactctt

SEQ ID NO: 20792 - DNA, 20 bp, Artificial Sequence
  Description of Artificial Sequence: Synthetic oligonucleotide
  Target: ATXN2; (-) strand; PAM type: NRG; PAM sequence: AAG
aattgtttgtatctgacacc

SEQ ID NO: 20793 - DNA, 20 bp, Artificial Sequence
  Description of Artificial Sequence: Synthetic oligonucleotide
  Target: ATXN2; (-) strand; PAM type: NRG; PAM sequence: TAG
catagaatttgatgttcact

SEQ ID NO: 20794 - DNA, 20 bp, Artificial Sequence
  Description of Artificial Sequence: Synthetic oligonucleotide
  Target: ATXN2; (-) strand; PAM type: NRG; PAM sequence: TAG
ccaggcgtgcaagtaagtca

SEQ ID NO: 20795 - DNA, 20 bp, Artificial Sequence
  Description of Artificial Sequence: Synthetic oligonucleotide
  Target: ATXN2; (-) strand; PAM type: NRG; PAM sequence: AAG
gtgagcccaggcgtgcaagt

SEQ ID NO: 20796 - DNA, 20 bp, Artificial Sequence
  Description of Artificial Sequence: Synthetic oligonucleotide
  Target: ATXN2; (-) strand; PAM type: NRG; PAM sequence: AAG
cccagtgagcccaggcgtgc

SEQ ID NO: 20797 - DNA, 20 bp, Artificial Sequence
  Description of Artificial Sequence: Synthetic oligonucleotide
  Target: ATXN2; (-) strand; PAM type: NRG; PAM sequence: AGG
tatccagtcccagtgagccc

SEQ ID NO: 20798 - DNA, 20 bp, Artificial Sequence
  Description of Artificial Sequence: Synthetic oligonucleotide
  Target: ATXN2; (-) strand; PAM type: NRG; PAM sequence: CAG
gtatccagtcccagtgagcc

SEQ ID NO: 20799 - DNA, 20 bp, Artificial Sequence
  Description of Artificial Sequence: Synthetic oligonucleotide
  Target: ATXN2; (-) strand; PAM type: NRG; PAM sequence: GAG
atgatgtatccagtcccagt

SEQ ID NO: 20800 - DNA, 20 bp, Artificial Sequence
  Description of Artificial Sequence: Synthetic oligonucleotide
  Target: ATXN2; (-) strand; PAM type: NRG; PAM sequence: CAG
aaatatgatgtatccagtcc

SEQ ID NO: 20801 - DNA, 20 bp, Artificial Sequence
  Description of Artificial Sequence: Synthetic oligonucleotide
  Target: ATXN2; (-) strand; PAM type: NRG; PAM sequence: CAG
tgcaccaaatatgatgtatc

SEQ ID NO: 20802 - DNA, 20 bp, Artificial Sequence
  Description of Artificial Sequence: Synthetic oligonucleotide
  Target: ATXN2; (-) strand; PAM type: NRG; PAM sequence: CAG
agccaactccagtttatact

SEQ ID NO: 20803 - DNA, 20 bp, Artificial Sequence
  Description of Artificial Sequence: Synthetic oligonucleotide
  Target: ATXN2; (-) strand; PAM type: NRG; PAM sequence: CAG
gggtcatcaacagccaactc

SEQ ID NO: 20804 - DNA, 20 bp, Artificial Sequence
  Description of Artificial Sequence: Synthetic oligonucleotide
  Target: ATXN2; (-) strand; PAM type: NRG; PAM sequence: CAG
catctatggtgggtcatcaa

SEQ ID NO: 20805 - DNA, 20 bp, Artificial Sequence
  Description of Artificial Sequence: Synthetic oligonucleotide
  Target: ATXN2; (-) strand; PAM type: NRG; PAM sequence: GGG
caacctagcccatctatggt

SEQ ID NO: 20806 - DNA, 20 bp, Artificial Sequence
  Description of Artificial Sequence: Synthetic oligonucleotide
  Target: ATXN2; (-) strand; PAM type: NRG; PAM sequence: TGG
acaacctagcccatctatgg

SEQ ID NO: 20807 - DNA, 20 bp, Artificial Sequence
  Description of Artificial Sequence: Synthetic oligonucleotide
  Target: ATXN2; (-) strand; PAM type: NRG; PAM sequence: TGG
agcacaacctagcccatcta

SEQ ID NO: 20808 - DNA, 20 bp, Artificial Sequence
  Description of Artificial Sequence: Synthetic oligonucleotide
  Target: ATXN2; (-) strand; PAM type: NRG; PAM sequence: TAG
cctcggcctcaagcacaacc

SEQ ID NO: 20809 - DNA, 20 bp, Artificial Sequence
  Description of Artificial Sequence: Synthetic oligonucleotide
  Target: ATXN2; (-) strand; PAM type: NRG; PAM sequence: AAG
cccaacttcacctcggcctc

SEQ ID NO: 20810 - DNA, 20 bp, Artificial Sequence
  Description of Artificial Sequence: Synthetic oligonucleotide
  Target: ATXN2; (-) strand; PAM type: NRG; PAM sequence: CGG
ctactaccccaacttcacct

SEQ ID NO: 20811 - DNA, 20 bp, Artificial Sequence
  Description of Artificial Sequence: Synthetic oligonucleotide
  Target: ATXN2; (-) strand; PAM type: NRG; PAM sequence: AAG
tattgttgtttttgtagcca

SEQ ID NO: 20812 - DNA, 20 bp, Artificial Sequence
  Description of Artificial Sequence: Synthetic oligonucleotide
  Target: ATXN2; (-) strand; PAM type: NRG; PAM sequence: TAG
tgaatttattgttgtttttg

SEQ ID NO: 20813 - DNA, 20 bp, Artificial Sequence
  Description of Artificial Sequence: Synthetic oligonucleotide
  Target: ATXN2; (-) strand; PAM type: NRG; PAM sequence: GAG
aatagttcatctgttacctt

SEQ ID NO: 20814 - DNA, 20 bp, Artificial Sequence
  Description of Artificial Sequence: Synthetic oligonucleotide
  Target: ATXN2; (-) strand; PAM type: NRG; PAM sequence: TAG
ccgtctttaaattgcaataa

SEQ ID NO: 20815 - DNA, 20 bp, Artificial Sequence
  Description of Artificial Sequence: Synthetic oligonucleotide
  Target: ATXN2; (-) strand; PAM type: NRG; PAM sequence: GGG
caagtaaaattagaaagact

SEQ ID NO: 20816 - DNA, 20 bp, Artificial Sequence
  Description of Artificial Sequence: Synthetic oligonucleotide
  Target: ATXN2; (-) strand; PAM type: NRG; PAM sequence: TGG
gcaagtaaaattagaaagac

SEQ ID NO: 20817 - DNA, 20 bp, Artificial Sequence
  Description of Artificial Sequence: Synthetic oligonucleotide
  Target: ATXN2; (-) strand; PAM type: NRG; PAM sequence: AAG
ttaaagcaagtaaaattaga

SEQ ID NO: 20818 - DNA, 20 bp, Artificial Sequence
  Description of Artificial Sequence: Synthetic oligonucleotide
  Target: ATXN2; (-) strand; PAM type: NRG; PAM sequence: TAG
atagttaaagcaagtaaaat

SEQ ID NO: 20819 - DNA, 20 bp, Artificial Sequence
  Description of Artificial Sequence: Synthetic oligonucleotide
  Target: ATXN2; (-) strand; PAM type: NRG; PAM sequence: AAG
aaaagggacatagttaaagc

SEQ ID NO: 20820 - DNA, 20 bp, Artificial Sequence
  Description of Artificial Sequence: Synthetic oligonucleotide
  Target: ATXN2; (-) strand; PAM type: NRG; PAM sequence: AAG
caataaaagggacatagtta

SEQ ID NO: 20821 - DNA, 20 bp, Artificial Sequence
  Description of Artificial Sequence: Synthetic oligonucleotide
  Target: ATXN2; (-) strand; PAM type: NRG; PAM sequence: TAG
tgttttcaataaaagggaca

SEQ ID NO: 20822 - DNA, 20 bp, Artificial Sequence
  Description of Artificial Sequence: Synthetic oligonucleotide
  Target: ATXN2; (-) strand; PAM type: NRG; PAM sequence: GGG
tgtttttgttttcaataaaa

SEQ ID NO: 20823 - DNA, 20 bp, Artificial Sequence
  Description of Artificial Sequence: Synthetic oligonucleotide
  Target: ATXN2; (-) strand; PAM type: NRG; PAM sequence: AGG
gtgtttttgttttcaataaa

SEQ ID NO: 20824 - DNA, 20 bp, Artificial Sequence
  Description of Artificial Sequence: Synthetic oligonucleotide
  Target: ATXN2; (-) strand; PAM type: NRG; PAM sequence: AAG
tgtgtttttgttttcaataa

SEQ ID NO: 20825 - DNA, 20 bp, Artificial Sequence
  Description of Artificial Sequence: Synthetic oligonucleotide
  Target: ATXN2; (-) strand; PAM type: NRG; PAM sequence: AAG
tttttaattgacaaagtttt

SEQ ID NO: 20826 - DNA, 20 bp, Artificial Sequence
  Description of Artificial Sequence: Synthetic oligonucleotide
  Target: ATXN2; (-) strand; PAM type: NRG; PAM sequence: AAG
ttaatattttttaattgaca

SEQ ID NO: 20827 - DNA, 20 bp, Artificial Sequence
  Description of Artificial Sequence: Synthetic oligonucleotide
  Target: ATXN2; (-) strand; PAM type: NRG; PAM sequence: TAG
ttccatcagtttcttaaaaa

SEQ ID NO: 20828 - DNA, 20 bp, Artificial Sequence
  Description of Artificial Sequence: Synthetic oligonucleotide
  Target: ATXN2; (-) strand; PAM type: NRG; PAM sequence: CAG
atttttaaaaacacttccat

SEQ ID NO: 20829 - DNA, 20 bp, Artificial Sequence
  Description of Artificial Sequence: Synthetic oligonucleotide
  Target: ATXN2; (-) strand; PAM type: NRG; PAM sequence: AAG
tattcgactgagatcataag

SEQ ID NO: 20830 - DNA, 20 bp, Artificial Sequence
  Description of Artificial Sequence: Synthetic oligonucleotide
  Target: ATXN2; (-) strand; PAM type: NRG; PAM sequence: AAG
tattattcgactgagatcat

SEQ ID NO: 20831 - DNA, 20 bp, Artificial Sequence
  Description of Artificial Sequence: Synthetic oligonucleotide
  Target: ATXN2; (-) strand; PAM type: NRG; PAM sequence: GAG
actattgttattattcgact

SEQ ID NO: 20832 - DNA, 20 bp, Artificial Sequence
  Description of Artificial Sequence: Synthetic oligonucleotide
  Target: ATXN2; (-) strand; PAM type: NRG; PAM sequence: GAG
caatcccccacagatactaa

SEQ ID NO: 20833 - DNA, 20 bp, Artificial Sequence
  Description of Artificial Sequence: Synthetic oligonucleotide
  Target: ATXN2; (-) strand; PAM type: NRG; PAM sequence: AAG
accaatcccccacagatact

SEQ ID NO: 20834 - DNA, 20 bp, Artificial Sequence
  Description of Artificial Sequence: Synthetic oligonucleotide
  Target: ATXN2; (-) strand; PAM type: NRG; PAM sequence: CAG
gtactgtaaccaatccccca

SEQ ID NO: 20835 - DNA, 20 bp, Artificial Sequence
  Description of Artificial Sequence: Synthetic oligonucleotide
  Target: ATXN2; (-) strand; PAM type: NRG; PAM sequence: GGG
aagactttggtatcttcaca

SEQ ID NO: 20836 - DNA, 20 bp, Artificial Sequence
  Description of Artificial Sequence: Synthetic oligonucleotide
  Target: ATXN2; (-) strand; PAM type: NRG; PAM sequence: AGG
caagactttggtatcttcac

SEQ ID NO: 20837 - DNA, 20 bp, Artificial Sequence
  Description of Artificial Sequence: Synthetic oligonucleotide
  Target: ATXN2; (-) strand; PAM type: NRG; PAM sequence: CAG
ccaagactttggtatcttca

SEQ ID NO: 20838 - DNA, 20 bp, Artificial Sequence
  Description of Artificial Sequence: Synthetic oligonucleotide
  Target: ATXN2; (-) strand; PAM type: NRG; PAM sequence: TGG
acttgagcattccaagactt

SEQ ID NO: 20839 - DNA, 20 bp, Artificial Sequence
  Description of Artificial Sequence: Synthetic oligonucleotide
  Target: ATXN2; (-) strand; PAM type: NRG; PAM sequence: AAG
gtaagggacttgagcattcc

SEQ ID NO: 20840 - DNA, 20 bp, Artificial Sequence
  Description of Artificial Sequence: Synthetic oligonucleotide
  Target: ATXN2; (-) strand; PAM type: NRG; PAM sequence: GAG
tgattttatgtaagggactt

SEQ ID NO: 20841 - DNA, 20 bp, Artificial Sequence
  Description of Artificial Sequence: Synthetic oligonucleotide
  Target: ATXN2; (-) strand; PAM type: NRG; PAM sequence: GGG
tactacatgattttatgtaa

SEQ ID NO: 20842 - DNA, 20 bp, Artificial Sequence
  Description of Artificial Sequence: Synthetic oligonucleotide
  Target: ATXN2; (-) strand; PAM type: NRG; PAM sequence: AGG
atactacatgattttatgta

SEQ ID NO: 20843 - DNA, 20 bp, Artificial Sequence
  Description of Artificial Sequence: Synthetic oligonucleotide
  Target: ATXN2; (-) strand; PAM type: NRG; PAM sequence: AAG
aatactacatgattttatgt

SEQ ID NO: 20844 - DNA, 20 bp, Artificial Sequence
  Description of Artificial Sequence: Synthetic oligonucleotide
  Target: ATXN2; (-) strand; PAM type: NRG; PAM sequence: AGG
gtatataggaggatatgcat

SEQ ID NO: 20845 - DNA, 20 bp, Artificial Sequence
  Description of Artificial Sequence: Synthetic oligonucleotide
  Target: ATXN2; (-) strand; PAM type: NRG; PAM sequence: TAG
agtatataggaggatatgca

SEQ ID NO: 20846 - DNA, 20 bp, Artificial Sequence
  Description of Artificial Sequence: Synthetic oligonucleotide
  Target: ATXN2; (-) strand; PAM type: NRG; PAM sequence: AGG
gatgatgtaaagtatatagg

SEQ ID NO: 20847 - DNA, 20 bp, Artificial Sequence
  Description of Artificial Sequence: Synthetic oligonucleotide
  Target: ATXN2; (-) strand; PAM type: NRG; PAM sequence: GAG
agatgatgtaaagtatatag

SEQ ID NO: 20848 - DNA, 20 bp, Artificial Sequence
  Description of Artificial Sequence: Synthetic oligonucleotide
  Target: ATXN2; (-) strand; PAM type: NRG; PAM sequence: AGG
agagatgatgtaaagtatat

SEQ ID NO: 20849 - DNA, 20 bp, Artificial Sequence
  Description of Artificial Sequence: Synthetic oligonucleotide
  Target: ATXN2; (-) strand; PAM type: NRG; PAM sequence: TAG
tagagatgatgtaaagtata

SEQ ID NO: 20850 - DNA, 20 bp, Artificial Sequence
  Description of Artificial Sequence: Synthetic oligonucleotide
  Target: ATXN2; (-) strand; PAM type: NRG; PAM sequence: AAG
aataatctagagatgatgta

SEQ ID NO: 20851 - DNA, 20 bp, Artificial Sequence
  Description of Artificial Sequence: Synthetic oligonucleotide
  Target: ATXN2; (-) strand; PAM type: NRG; PAM sequence: GAG
taggtattataaataatcta

SEQ ID NO: 20852 - DNA, 20 bp, Artificial Sequence
  Description of Artificial Sequence: Synthetic oligonucleotide
  Target: ATXN2; (-) strand; PAM type: NRG; PAM sequence: TAG
tttaggtattataaataatc

SEQ ID NO: 20853 - DNA, 20 bp, Artificial Sequence
  Description of Artificial Sequence: Synthetic oligonucleotide
  Target: ATXN2; (-) strand; PAM type: NRG; PAM sequence: AGG
taaagcatttaccttgtttt

SEQ ID NO: 20854 - DNA, 20 bp, Artificial Sequence
  Description of Artificial Sequence: Synthetic oligonucleotide
  Target: ATXN2; (-) strand; PAM type: NRG; PAM sequence: TAG
gtaaagcatttaccttgttt

SEQ ID NO: 20855 - DNA, 20 bp, Artificial Sequence
  Description of Artificial Sequence: Synthetic oligonucleotide
  Target: ATXN2; (-) strand; PAM type: NRG; PAM sequence: AAG
tattccaaaacaatacagta

SEQ ID NO: 20856 - DNA, 20 bp, Artificial Sequence
  Description of Artificial Sequence: Synthetic oligonucleotide
  Target: ATXN2; (-) strand; PAM type: NRG; PAM sequence: CAG
gtcattattccaaaacaata

SEQ ID NO: 20857 - DNA, 20 bp, Artificial Sequence
  Description of Artificial Sequence: Synthetic oligonucleotide
  Target: ATXN2; (-) strand; PAM type: NRG; PAM sequence: CAG
taatctatactgaacacatg

SEQ ID NO: 20858 - DNA, 20 bp, Artificial Sequence
  Description of Artificial Sequence: Synthetic oligonucleotide
  Target: ATXN2; (-) strand; PAM type: NRG; PAM sequence: AGG
catggatcaaaaacatagtt

SEQ ID NO: 20859 - DNA, 20 bp, Artificial Sequence
  Description of Artificial Sequence: Synthetic oligonucleotide
  Target: ATXN2; (-) strand; PAM type: NRG; PAM sequence: TAG
ccatggatcaaaaacatagt

SEQ ID NO: 20860 - DNA, 20 bp, Artificial Sequence
  Description of Artificial Sequence: Synthetic oligonucleotide
  Target: ATXN2; (-) strand; PAM type: NRG; PAM sequence: TAG
ccaaccatggatcaaaaaca

SEQ ID NO: 20861 - DNA, 20 bp, Artificial Sequence
  Description of Artificial Sequence: Synthetic oligonucleotide
  Target: ATXN2; (-) strand; PAM type: NRG; PAM sequence: TGG
tcactggattcaaccaacca

SEQ ID NO: 20862 - DNA, 20 bp, Artificial Sequence
  Description of Artificial Sequence: Synthetic oligonucleotide
  Target: ATXN2; (-) strand; PAM type: NRG; PAM sequence: TGG
acctgagggttttgcatcac

SEQ ID NO: 20863 - DNA, 20 bp, Artificial Sequence
  Description of Artificial Sequence: Synthetic oligonucleotide
  Target: ATXN2; (-) strand; PAM type: NRG; PAM sequence: GGG
gatacgtcctctgcacctga

SEQ ID NO: 20864 - DNA, 20 bp, Artificial Sequence
  Description of Artificial Sequence: Synthetic oligonucleotide
  Target: ATXN2; (-) strand; PAM type: NRG; PAM sequence: AGG
agatacgtcctctgcacctg

SEQ ID NO: 20865 - DNA, 20 bp, Artificial Sequence
  Description of Artificial Sequence: Synthetic oligonucleotide
  Target: ATXN2; (-) strand; PAM type: NRG; PAM sequence: GAG
tagatacgtcctctgcacct

SEQ ID NO: 20866 - DNA, 20 bp, Artificial Sequence
  Description of Artificial Sequence: Synthetic oligonucleotide
  Target: ATXN2; (-) strand; PAM type: NRG; PAM sequence: TAG
tagctaggctgtcaggttta

SEQ ID NO: 20867 - DNA, 20 bp, Artificial Sequence
  Description of Artificial Sequence: Synthetic oligonucleotide
  Target: ATXN2; (-) strand; PAM type: NRG; PAM sequence: AGG
ggttggctagctaggctgtc

SEQ ID NO: 20868 - DNA, 20 bp, Artificial Sequence
  Description of Artificial Sequence: Synthetic oligonucleotide
  Target: ATXN2; (-) strand; PAM type: NRG; PAM sequence: CAG
tggttggctagctaggctgt

SEQ ID NO: 20869 - DNA, 20 bp, Artificial Sequence
  Description of Artificial Sequence: Synthetic oligonucleotide
  Target: ATXN2; (-) strand; PAM type: NRG; PAM sequence: AGG
ttgacgatggttggctagct

SEQ ID NO: 20870 - DNA, 20 bp, Artificial Sequence
  Description of Artificial Sequence: Synthetic oligonucleotide
  Target: ATXN2; (-) strand; PAM type: NRG; PAM sequence: TAG
tttgacgatggttggctagc

SEQ ID NO: 20871 - DNA, 20 bp, Artificial Sequence
  Description of Artificial Sequence: Synthetic oligonucleotide
  Target: ATXN2; (-) strand; PAM type: NRG; PAM sequence: TAG
agaatttgacgatggttggc

SEQ ID NO: 20872 - DNA, 20 bp, Artificial Sequence
  Description of Artificial Sequence: Synthetic oligonucleotide
  Target: ATXN2; (-) strand; PAM type: NRG; PAM sequence: TGG
acccagaatttgacgatggt

SEQ ID NO: 20873 - DNA, 20 bp, Artificial Sequence
  Description of Artificial Sequence: Synthetic oligonucleotide
  Target: ATXN2; (-) strand; PAM type: NRG; PAM sequence: TGG
tctgacccagaatttgacga

SEQ ID NO: 20874 - DNA, 20 bp, Artificial Sequence
  Description of Artificial Sequence: Synthetic oligonucleotide
  Target: ATXN2; (-) strand; PAM type: NRG; PAM sequence: CAG
atctttgaatttctctgacc

SEQ ID NO: 20875 - DNA, 20 bp, Artificial Sequence
  Description of Artificial Sequence: Synthetic oligonucleotide
  Target: ATXN2; (-) strand; PAM type: NRG; PAM sequence: GGG
catcaattagatgtgatctt

SEQ ID NO: 20876 - DNA, 20 bp, Artificial Sequence
  Description of Artificial Sequence: Synthetic oligonucleotide
  Target: ATXN2; (-) strand; PAM type: NRG; PAM sequence: TGG
tcatcaattagatgtgatct

SEQ ID NO: 20877 - DNA, 20 bp, Artificial Sequence
  Description of Artificial Sequence: Synthetic oligonucleotide
  Target: ATXN2; (-) strand; PAM type: NRG; PAM sequence: TAG
gtctttgttttgtcatcaat

SEQ ID NO: 20878 - DNA, 20 bp, Artificial Sequence
  Description of Artificial Sequence: Synthetic oligonucleotide
  Target: ATXN2; (-) strand; PAM type: NRG; PAM sequence: AGG
actttttaaacattaaaaaa

SEQ ID NO: 20879 - DNA, 20 bp, Artificial Sequence
  Description of Artificial Sequence: Synthetic oligonucleotide
  Target: ATXN2; (-) strand; PAM type: NRG; PAM sequence: AAG
tactttttaaacattaaaaa

SEQ ID NO: 20880 - DNA, 20 bp, Artificial Sequence
  Description of Artificial Sequence: Synthetic oligonucleotide
  Target: ATXN2; (-) strand; PAM type: NRG; PAM sequence: TGG
ccttctttcttttttttaca

SEQ ID NO: 20881 - DNA, 20 bp, Artificial Sequence
  Description of Artificial Sequence: Synthetic oligonucleotide
  Target: ATXN2; (-) strand; PAM type: NRG; PAM sequence: TAG
ctgccatctgaattttgttt

SEQ ID NO: 20882 - DNA, 20 bp, Artificial Sequence
  Description of Artificial Sequence: Synthetic oligonucleotide
  Target: ATXN2; (-) strand; PAM type: NRG; PAM sequence: TAG
aaaagaaaaattattagtaa

SEQ ID NO: 20883 - DNA, 20 bp, Artificial Sequence
  Description of Artificial Sequence: Synthetic oligonucleotide
  Target: ATXN2; (-) strand; PAM type: NRG; PAM sequence: TAG
cccaaaaaaagaaaaattat

SEQ ID NO: 20884 - DNA, 20 bp, Artificial Sequence
  Description of Artificial Sequence: Synthetic oligonucleotide
  Target: ATXN2; (-) strand; PAM type: NRG; PAM sequence: AAG
aggttatctagtcccaaaaa

SEQ ID NO: 20885 - DNA, 20 bp, Artificial Sequence
  Description of Artificial Sequence: Synthetic oligonucleotide
  Target: ATXN2; (-) strand; PAM type: NRG; PAM sequence: TAG
ttactttctttgaggttatc

SEQ ID NO: 20886 - DNA, 20 bp, Artificial Sequence
  Description of Artificial Sequence: Synthetic oligonucleotide
  Target: ATXN2; (-) strand; PAM type: NRG; PAM sequence: AGG
taggtttattactttctttg

SEQ ID NO: 20887 - DNA, 20 bp, Artificial Sequence
  Description of Artificial Sequence: Synthetic oligonucleotide
  Target: ATXN2; (-) strand; PAM type: NRG; PAM sequence: GAG
gtaggtttattactttcttt

SEQ ID NO: 20888 - DNA, 20 bp, Artificial Sequence
  Description of Artificial Sequence: Synthetic oligonucleotide
  Target: ATXN2; (-) strand; PAM type: NRG; PAM sequence: AGG
ccacgttccttctctcaggt

SEQ ID NO: 20889 - DNA, 20 bp, Artificial Sequence
  Description of Artificial Sequence: Synthetic oligonucleotide
  Target: ATXN2; (-) strand; PAM type: NRG; PAM sequence: TAG
cccacgttccttctctcagg

SEQ ID NO: 20890 - DNA, 20 bp, Artificial Sequence
  Description of Artificial Sequence: Synthetic oligonucleotide
  Target: ATXN2; (-) strand; PAM type: NRG; PAM sequence: AGG
caacccacgttccttctctc

SEQ ID NO: 20891 - DNA, 20 bp, Artificial Sequence
  Description of Artificial Sequence: Synthetic oligonucleotide
  Target: ATXN2; (-) strand; PAM type: NRG; PAM sequence: CAG
tcaacccacgttccttctct

SEQ ID NO: 20892 - DNA, 20 bp, Artificial Sequence
  Description of Artificial Sequence: Synthetic oligonucleotide
  Target: ATXN2; (-) strand; PAM type: NRG; PAM sequence: GAG
cattgaatcccaatgcaaag

SEQ ID NO: 20893 - DNA, 20 bp, Artificial Sequence
  Description of Artificial Sequence: Synthetic oligonucleotide
  Target: ATXN2; (-) strand; PAM type: NRG; PAM sequence: AGG
aacattgaatcccaatgcaa

SEQ ID NO: 20894 - DNA, 20 bp, Artificial Sequence
  Description of Artificial Sequence: Synthetic oligonucleotide
  Target: ATXN2; (-) strand; PAM type: NRG; PAM sequence: AAG
caacattgaatcccaatgca

SEQ ID NO: 20895 - DNA, 20 bp, Artificial Sequence
  Description of Artificial Sequence: Synthetic oligonucleotide
  Target: ATXN2; (-) strand; PAM type: NRG; PAM sequence: AGG
atattttttttaggcaagtt

SEQ ID NO: 20896 - DNA, 20 bp, Artificial Sequence
  Description of Artificial Sequence: Synthetic oligonucleotide
  Target: ATXN2; (-) strand; PAM type: NRG; PAM sequence: TAG
tatattttttttaggcaagt

SEQ ID NO: 20897 - DNA, 20 bp, Artificial Sequence
  Description of Artificial Sequence: Synthetic oligonucleotide
  Target: ATXN2; (-) strand; PAM type: NRG; PAM sequence: AAG
cctttatattttttttaggc

SEQ ID NO: 20898 - DNA, 20 bp, Artificial Sequence
  Description of Artificial Sequence: Synthetic oligonucleotide
  Target: ATXN2; (-) strand; PAM type: NRG; PAM sequence: AGG
ctggcctttatatttttttt

SEQ ID NO: 20899 - DNA, 20 bp, Artificial Sequence
  Description of Artificial Sequence: Synthetic oligonucleotide
  Target: ATXN2; (-) strand; PAM type: NRG; PAM sequence: TAG
actggcctttatattttttt

SEQ ID NO: 20900 - DNA, 20 bp, Artificial Sequence
  Description of Artificial Sequence: Synthetic oligonucleotide
  Target: ATXN2; (-) strand; PAM type: NRG; PAM sequence: TGG
aaagtccatgtagatttcac

SEQ ID NO: 20901 - DNA, 20 bp, Artificial Sequence
  Description of Artificial Sequence: Synthetic oligonucleotide
  Target: ATXN2; (-) strand; PAM type: NRG; PAM sequence: TAG
agagcaacgtaaagtccatg

SEQ ID NO: 20902 - DNA, 20 bp, Artificial Sequence
  Description of Artificial Sequence: Synthetic oligonucleotide
  Target: ATXN2; (-) strand; PAM type: NRG; PAM sequence: AAG
gaagattttagagcaacgta

SEQ ID NO: 20903 - DNA, 20 bp, Artificial Sequence
  Description of Artificial Sequence: Synthetic oligonucleotide
  Target: ATXN2; (-) strand; PAM type: NRG; PAM sequence: GAG
gtcaggtatggaagatttta

SEQ ID NO: 20904 - DNA, 20 bp, Artificial Sequence
  Description of Artificial Sequence: Synthetic oligonucleotide
  Target: ATXN2; (-) strand; PAM type: NRG; PAM sequence: TAG
ttgtcaggtatggaagattt

SEQ ID NO: 20905 - DNA, 20 bp, Artificial Sequence
  Description of Artificial Sequence: Synthetic oligonucleotide
  Target: ATXN2; (-) strand; PAM type: NRG; PAM sequence: AAG
ttttaaattgtcaggtatgg

SEQ ID NO: 20906 - DNA, 20 bp, Artificial Sequence
  Description of Artificial Sequence: Synthetic oligonucleotide
  Target: ATXN2; (-) strand; PAM type: NRG; PAM sequence: TGG
tttttttaaattgtcaggta

SEQ ID NO: 20907 - DNA, 20 bp, Artificial Sequence
  Description of Artificial Sequence: Synthetic oligonucleotide
  Target: ATXN2; (-) strand; PAM type: NRG; PAM sequence: AGG
gcaattttttttaaattgtc

SEQ ID NO: 20908 - DNA, 20 bp, Artificial Sequence
  Description of Artificial Sequence: Synthetic oligonucleotide
  Target: ATXN2; (-) strand; PAM type: NRG; PAM sequence: CAG
agcaattttttttaaattgt

SEQ ID NO: 20909 - DNA, 20 bp, Artificial Sequence
  Description of Artificial Sequence: Synthetic oligonucleotide
  Target: ATXN2; (-) strand; PAM type: NRG; PAM sequence: TAG
gaacagtttaaatctatatt

SEQ ID NO: 20910 - DNA, 20 bp, Artificial Sequence
  Description of Artificial Sequence: Synthetic oligonucleotide
  Target: ATXN2; (-) strand; PAM type: NRG; PAM sequence: CAG
tagtgatcttctagtgagaa

SEQ ID NO: 20911 - DNA, 20 bp, Artificial Sequence
  Description of Artificial Sequence: Synthetic oligonucleotide
  Target: ATXN2; (-) strand; PAM type: NRG; PAM sequence: GAG
acgattagtgatcttctagt

SEQ ID NO: 20912 - DNA, 20 bp, Artificial Sequence
  Description of Artificial Sequence: Synthetic oligonucleotide
  Target: ATXN2; (-) strand; PAM type: NRG; PAM sequence: TAG
aaaaacgattagtgatcttc

SEQ ID NO: 20913 - DNA, 20 bp, Artificial Sequence
  Description of Artificial Sequence: Synthetic oligonucleotide
  Target: ATXN2; (-) strand; PAM type: NRG; PAM sequence: TAG
tatgtttcaataaaaacgat

SEQ ID NO: 20914 - DNA, 20 bp, Artificial Sequence
  Description of Artificial Sequence: Synthetic oligonucleotide
  Target: ATXN2; (-) strand; PAM type: NRG; PAM sequence: AAG
gattaaggaatgggcaatat

SEQ ID NO: 20915 - DNA, 20 bp, Artificial Sequence
  Description of Artificial Sequence: Synthetic oligonucleotide
  Target: ATXN2; (-) strand; PAM type: NRG; PAM sequence: GGG
tctttaagggattaaggaat

SEQ ID NO: 20916 - DNA, 20 bp, Artificial Sequence
  Description of Artificial Sequence: Synthetic oligonucleotide
  Target: ATXN2; (-) strand; PAM type: NRG; PAM sequence: TGG
ttctttaagggattaaggaa

SEQ ID NO: 20917 - DNA, 20 bp, Artificial Sequence
  Description of Artificial Sequence: Synthetic oligonucleotide
  Target: ATXN2; (-) strand; PAM type: NRG; PAM sequence: AGG
ctgtattctttaagggatta

SEQ ID NO: 20918 - DNA, 20 bp, Artificial Sequence
  Description of Artificial Sequence: Synthetic oligonucleotide
  Target: ATXN2; (-) strand; PAM type: NRG; PAM sequence: AAG
gctgtattctttaagggatt

SEQ ID NO: 20919 - DNA, 20 bp, Artificial Sequence
  Description of Artificial Sequence: Synthetic oligonucleotide
  Target: ATXN2; (-) strand; PAM type: NRG; PAM sequence: GGG
tttatggctgtattctttaa

SEQ ID NO: 20920 - DNA, 20 bp, Artificial Sequence
  Description of Artificial Sequence: Synthetic oligonucleotide
  Target: ATXN2; (-) strand; PAM type: NRG; PAM sequence: AGG
ttttatggctgtattcttta

SEQ ID NO: 20921 - DNA, 20 bp, Artificial Sequence
  Description of Artificial Sequence: Synthetic oligonucleotide
  Target: ATXN2; (-) strand; PAM type: NRG; PAM sequence: AAG
cttttatggctgtattcttt

SEQ ID NO: 20922 - DNA, 20 bp, Artificial Sequence
  Description of Artificial Sequence: Synthetic oligonucleotide
  Target: ATXN2; (-) strand; PAM type: NRG; PAM sequence: TGG
tttaaaaaattgttctttta

SEQ ID NO: 20923 - DNA, 20 bp, Artificial Sequence
  Description of Artificial Sequence: Synthetic oligonucleotide
  Target: ATXN2; (-) strand; PAM type: NRG; PAM sequence: CAG
aggaacggttgtatattact

SEQ ID NO: 20924 - DNA, 20 bp, Artificial Sequence
  Description of Artificial Sequence: Synthetic oligonucleotide
  Target: ATXN2; (-) strand; PAM type: NRG; PAM sequence: CGG
ttgattgcctttgagaggaa

SEQ ID NO: 20925 - DNA, 20 bp, Artificial Sequence
  Description of Artificial Sequence: Synthetic oligonucleotide
  Target: ATXN2; (-) strand; PAM type: NRG; PAM sequence: AGG
attttttgattgcctttgag

SEQ ID NO: 20926 - DNA, 20 bp, Artificial Sequence
  Description of Artificial Sequence: Synthetic oligonucleotide
  Target: ATXN2; (-) strand; PAM type: NRG; PAM sequence: GAG
tattttttgattgcctttga

SEQ ID NO: 20927 - DNA, 20 bp, Artificial Sequence
  Description of Artificial Sequence: Synthetic oligonucleotide
  Target: ATXN2; (-) strand; PAM type: NRG; PAM sequence: GAG
agtattttttgattgccttt

SEQ ID NO: 20928 - DNA, 20 bp, Artificial Sequence
  Description of Artificial Sequence: Synthetic oligonucleotide
  Target: ATXN2; (-) strand; PAM type: NRG; PAM sequence: AAG
ctctgtgaaggaaaaaaaaa

SEQ ID NO: 20929 - DNA, 20 bp, Artificial Sequence
  Description of Artificial Sequence: Synthetic oligonucleotide
  Target: ATXN2; (-) strand; PAM type: NRG; PAM sequence: AGG
aacagagtgggactctgtga

SEQ ID NO: 20930 - DNA, 20 bp, Artificial Sequence
  Description of Artificial Sequence: Synthetic oligonucleotide
  Target: ATXN2; (-) strand; PAM type: NRG; PAM sequence: AAG
caacagagtgggactctgtg

SEQ ID NO: 20931 - DNA, 20 bp, Artificial Sequence
  Description of Artificial Sequence: Synthetic oligonucleotide
  Target: ATXN2; (-) strand; PAM type: NRG; PAM sequence: GGG
tccaacctgagcaacagagt

SEQ ID NO: 20932 - DNA, 20 bp, Artificial Sequence
  Description of Artificial Sequence: Synthetic oligonucleotide
  Target: ATXN2; (-) strand; PAM type: NRG; PAM sequence: TGG
ctccaacctgagcaacagag

SEQ ID NO: 20933 - DNA, 20 bp, Artificial Sequence
  Description of Artificial Sequence: Synthetic oligonucleotide
  Target: ATXN2; (-) strand; PAM type: NRG; PAM sequence: GAG
gcactccaacctgagcaaca

SEQ ID NO: 20934 - DNA, 20 bp, Artificial Sequence
  Description of Artificial Sequence: Synthetic oligonucleotide
  Target: ATXN2; (-) strand; PAM type: NRG; PAM sequence: CAG
ctgcactccaacctgagcaa

SEQ ID NO: 20935 - DNA, 20 bp, Artificial Sequence
  Description of Artificial Sequence: Synthetic oligonucleotide
  Target: ATXN2; (-) strand; PAM type: NRG; PAM sequence: GAG
gcactgctgcactccaacct

SEQ ID NO: 20936 - DNA, 20 bp, Artificial Sequence
  Description of Artificial Sequence: Synthetic oligonucleotide
  Target: ATXN2; (-) strand; PAM type: NRG; PAM sequence: AAG
ggcagaggttgcagtgagcc

SEQ ID NO: 20937 - DNA, 20 bp, Artificial Sequence
  Description of Artificial Sequence: Synthetic oligonucleotide
  Target: ATXN2; (-) strand; PAM type: NRG; PAM sequence: GAG
cgggaggcagaggttgcagt

SEQ ID NO: 20938 - DNA, 20 bp, Artificial Sequence
  Description of Artificial Sequence: Synthetic oligonucleotide
  Target: ATXN2; (-) strand; PAM type: NRG; PAM sequence: CAG
aactcgggaggcagaggttg

SEQ ID NO: 20939 - DNA, 20 bp, Artificial Sequence
  Description of Artificial Sequence: Synthetic oligonucleotide
  Target: ATXN2; (-) strand; PAM type: NRG; PAM sequence: AGG
ggcttaaactcgggaggcag

SEQ ID NO: 20940 - DNA, 20 bp, Artificial Sequence
  Description of Artificial Sequence: Synthetic oligonucleotide
  Target: ATXN2; (-) strand; PAM type: NRG; PAM sequence: GAG
tggcttaaactcgggaggca

SEQ ID NO: 20941 - DNA, 20 bp, Artificial Sequence
  Description of Artificial Sequence: Synthetic oligonucleotide
  Target: ATXN2; (-) strand; PAM type: NRG; PAM sequence: CAG
aatggcttaaactcgggagg

SEQ ID NO: 20942 - DNA, 20 bp, Artificial Sequence
  Description of Artificial Sequence: Synthetic oligonucleotide
  Target: ATXN2; (-) strand; PAM type: NRG; PAM sequence: AGG
gagaatggcttaaactcggg

SEQ ID NO: 20943 - DNA, 20 bp, Artificial Sequence
  Description of Artificial Sequence: Synthetic oligonucleotide
  Target: ATXN2; (-) strand; PAM type: NRG; PAM sequence: GAG
agagaatggcttaaactcgg

SEQ ID NO: 20944 - DNA, 20 bp, Artificial Sequence
  Description of Artificial Sequence: Synthetic oligonucleotide
  Target: ATXN2; (-) strand; PAM type: NRG; PAM sequence: GGG
caagagaatggcttaaactc

SEQ ID NO: 20945 - DNA, 20 bp, Artificial Sequence
  Description of Artificial Sequence: Synthetic oligonucleotide
  Target: ATXN2; (-) strand; PAM type: NRG; PAM sequence: CGG
gcaagagaatggcttaaact

SEQ ID NO: 20946 - DNA, 20 bp, Artificial Sequence
  Description of Artificial Sequence: Synthetic oligonucleotide
  Target: ATXN2; (-) strand; PAM type: NRG; PAM sequence: TGG
aggaggctaaggcaagagaa

SEQ ID NO: 20947 - DNA, 20 bp, Artificial Sequence
  Description of Artificial Sequence: Synthetic oligonucleotide
  Target: ATXN2; (-) strand; PAM type: NRG; PAM sequence: GAG
taatcaggaggctaaggcaa

SEQ ID NO: 20948 - DNA, 20 bp, Artificial Sequence
  Description of Artificial Sequence: Synthetic oligonucleotide
  Target: ATXN2; (-) strand; PAM type: NRG; PAM sequence: AAG
gctaatcaggaggctaaggc

SEQ ID NO: 20949 - DNA, 20 bp, Artificial Sequence
  Description of Artificial Sequence: Synthetic oligonucleotide
  Target: ATXN2; (-) strand; PAM type: NRG; PAM sequence: AGG
cccagctaatcaggaggcta

SEQ ID NO: 20950 - DNA, 20 bp, Artificial Sequence
  Description of Artificial Sequence: Synthetic oligonucleotide
  Target: ATXN2; (-) strand; PAM type: NRG; PAM sequence: AAG
tcccagctaatcaggaggct

SEQ ID NO: 20951 - DNA, 20 bp, Artificial Sequence
  Description of Artificial Sequence: Synthetic oligonucleotide
  Target: ATXN2; (-) strand; PAM type: NRG; PAM sequence: AGG
tgtaatcccagctaatcagg

SEQ ID NO: 20952 - DNA, 20 bp, Artificial Sequence
  Description of Artificial Sequence: Synthetic oligonucleotide
  Target: ATXN2; (-) strand; PAM type: NRG; PAM sequence: GAG
ctgtaatcccagctaatcag

SEQ ID NO: 20953 - DNA, 20 bp, Artificial Sequence
  Description of Artificial Sequence: Synthetic oligonucleotide
  Target: ATXN2; (-) strand; PAM type: NRG; PAM sequence: AGG
tcctgtaatcccagctaatc

SEQ ID NO: 20954 - DNA, 20 bp, Artificial Sequence
  Description of Artificial Sequence: Synthetic oligonucleotide
  Target: ATXN2; (-) strand; PAM type: NRG; PAM sequence: CAG
ctcctgtaatcccagctaat

SEQ ID NO: 20955 - DNA, 20 bp, Artificial Sequence
  Description of Artificial Sequence: Synthetic oligonucleotide
  Target: ATXN2; (-) strand; PAM type: NRG; PAM sequence: CAG
gtggcagtctcctgtaatcc

SEQ ID NO: 20956 - DNA, 20 bp, Artificial Sequence
  Description of Artificial Sequence: Synthetic oligonucleotide
  Target: ATXN2; (-) strand; PAM type: NRG; PAM sequence: CAG
aaattagctgggcgtggtgg

SEQ ID NO: 20957 - DNA, 20 bp, Artificial Sequence
  Description of Artificial Sequence: Synthetic oligonucleotide
  Target: ATXN2; (-) strand; PAM type: NRG; PAM sequence: TGG
aaaaaattagctgggcgtgg

SEQ ID NO: 20958 - DNA, 20 bp, Artificial Sequence
  Description of Artificial Sequence: Synthetic oligonucleotide
  Target: ATXN2; (-) strand; PAM type: NRG; PAM sequence: TGG
taaaaaaaattagctgggcg

SEQ ID NO: 20959 - DNA, 20 bp, Artificial Sequence
  Description of Artificial Sequence: Synthetic oligonucleotide
  Target: ATXN2; (-) strand; PAM type: NRG; PAM sequence: GGG
aatattaaaaaaaattagct

SEQ ID NO: 20960 - DNA, 20 bp, Artificial Sequence
  Description of Artificial Sequence: Synthetic oligonucleotide
  Target: ATXN2; (-) strand; PAM type: NRG; PAM sequence: TGG
aaatattaaaaaaaattagc

SEQ ID NO: 20961 - DNA, 20 bp, Artificial Sequence
  Description of Artificial Sequence: Synthetic oligonucleotide
  Target: ATXN2; (-) strand; PAM type: NRG; PAM sequence: TAG
aaataaatattaaaaaaaat

SEQ ID NO: 20962 - DNA, 20 bp, Artificial Sequence
  Description of Artificial Sequence: Synthetic oligonucleotide
  Target: ATXN2; (-) strand; PAM type: NRG; PAM sequence: TGG
taaggtcagcgtggccaaaa

SEQ ID NO: 20963 - DNA, 20 bp, Artificial Sequence
  Description of Artificial Sequence: Synthetic oligonucleotide
  Target: ATXN2; (-) strand; PAM type: NRG; PAM sequence: TGG
cagatcacttaaggtcagcg

SEQ ID NO: 20964 - DNA, 20 bp, Artificial Sequence
  Description of Artificial Sequence: Synthetic oligonucleotide
  Target: ATXN2; (-) strand; PAM type: NRG; PAM sequence: CAG
tcaggcagatcacttaaggt

SEQ ID NO: 20965 - DNA, 20 bp, Artificial Sequence
  Description of Artificial Sequence: Synthetic oligonucleotide
  Target: ATXN2; (-) strand; PAM type: NRG; PAM sequence: AGG
tgagtcaggcagatcactta

SEQ ID NO: 20966 - DNA, 20 bp, Artificial Sequence
  Description of Artificial Sequence: Synthetic oligonucleotide
  Target: ATXN2; (-) strand; PAM type: NRG; PAM sequence: AAG
ctgagtcaggcagatcactt

SEQ ID NO: 20967 - DNA, 20 bp, Artificial Sequence
  Description of Artificial Sequence: Synthetic oligonucleotide
  Target: ATXN2; (-) strand; PAM type: NRG; PAM sequence: CAG
ctttgggaggctgagtcagg

SEQ ID NO: 20968 - DNA, 20 bp, Artificial Sequence
  Description of Artificial Sequence: Synthetic oligonucleotide
  Target: ATXN2; (-) strand; PAM type: NRG; PAM sequence: AGG
gcactttgggaggctgagtc

SEQ ID NO: 20969 - DNA, 20 bp, Artificial Sequence
  Description of Artificial Sequence: Synthetic oligonucleotide
  Target: ATXN2; (-) strand; PAM type: NRG; PAM sequence: CAG
agcactttgggaggctgagt

SEQ ID NO: 20970 - DNA, 20 bp, Artificial Sequence
  Description of Artificial Sequence: Synthetic oligonucleotide
  Target: ATXN2; (-) strand; PAM type: NRG; PAM sequence: GAG
tcccagcactttgggaggct

SEQ ID NO: 20971 - DNA, 20 bp, Artificial Sequence
  Description of Artificial Sequence: Synthetic oligonucleotide
  Target: ATXN2; (-) strand; PAM type: NRG; PAM sequence: AGG
tgtaatcccagcactttggg

SEQ ID NO: 20972 - DNA, 20 bp, Artificial Sequence
  Description of Artificial Sequence: Synthetic oligonucleotide
  Target: ATXN2; (-) strand; PAM type: NRG; PAM sequence: GAG
ctgtaatcccagcactttgg

SEQ ID NO: 20973 - DNA, 20 bp, Artificial Sequence
  Description of Artificial Sequence: Synthetic oligonucleotide
  Target: ATXN2; (-) strand; PAM type: NRG; PAM sequence: GGG
acctgtaatcccagcacttt

SEQ ID NO: 20974 - DNA, 20 bp, Artificial Sequence
  Description of Artificial Sequence: Synthetic oligonucleotide
  Target: ATXN2; (-) strand; PAM type: NRG; PAM sequence: TGG
tacctgtaatcccagcactt

SEQ ID NO: 20975 - DNA, 20 bp, Artificial Sequence
  Description of Artificial Sequence: Synthetic oligonucleotide
  Target: ATXN2; (-) strand; PAM type: NRG; PAM sequence: CAG
gtagctcatacctgtaatcc

SEQ ID NO: 20976 - DNA, 20 bp, Artificial Sequence
  Description of Artificial Sequence: Synthetic oligonucleotide
  Target: ATXN2; (-) strand; PAM type: NRG; PAM sequence: TAG
tgttgattggccaggcgtgg

SEQ ID NO: 20977 - DNA, 20 bp, Artificial Sequence
  Description of Artificial Sequence: Synthetic oligonucleotide
  Target: ATXN2; (-) strand; PAM type: NRG; PAM sequence: TGG
gtttgttgattggccaggcg

SEQ ID NO: 20978 - DNA, 20 bp, Artificial Sequence
  Description of Artificial Sequence: Synthetic oligonucleotide
  Target: ATXN2; (-) strand; PAM type: NRG; PAM sequence: AGG
caagtgtttgttgattggcc

SEQ ID NO: 20979 - DNA, 20 bp, Artificial Sequence
  Description of Artificial Sequence: Synthetic oligonucleotide
  Target: ATXN2; (-) strand; PAM type: NRG; PAM sequence: CAG
tcaagtgtttgttgattggc

SEQ ID NO: 20980 - DNA, 20 bp, Artificial Sequence
  Description of Artificial Sequence: Synthetic oligonucleotide
  Target: ATXN2; (-) strand; PAM type: NRG; PAM sequence: TGG
cagctcaagtgtttgttgat

SEQ ID NO: 20981 - DNA, 20 bp, Artificial Sequence
  Description of Artificial Sequence: Synthetic oligonucleotide
  Target: ATXN2; (-) strand; PAM type: NRG; PAM sequence: AAG
agctactgtcttttcagctc

SEQ ID NO: 20982 - DNA, 20 bp, Artificial Sequence
  Description of Artificial Sequence: Synthetic oligonucleotide
  Target: ATXN2; (-) strand; PAM type: NRG; PAM sequence: CAG
ataagtagctactgtctttt

SEQ ID NO: 20983 - DNA, 20 bp, Artificial Sequence
  Description of Artificial Sequence: Synthetic oligonucleotide
  Target: ATXN2; (-) strand; PAM type: NRG; PAM sequence: TAG
ttttaaggatatttcataag

SEQ ID NO: 20984 - DNA, 20 bp, Artificial Sequence
  Description of Artificial Sequence: Synthetic oligonucleotide
  Target: ATXN2; (-) strand; PAM type: NRG; PAM sequence: AAG
tgcttttaaggatatttcat

SEQ ID NO: 20985 - DNA, 20 bp, Artificial Sequence
  Description of Artificial Sequence: Synthetic oligonucleotide
  Target: ATXN2; (-) strand; PAM type: NRG; PAM sequence: AGG
tatgttaagaattgctttta

SEQ ID NO: 20986 - DNA, 20 bp, Artificial Sequence
  Description of Artificial Sequence: Synthetic oligonucleotide
  Target: ATXN2; (-) strand; PAM type: NRG; PAM sequence: AAG
ttatgttaagaattgctttt

SEQ ID NO: 20987 - DNA, 20 bp, Artificial Sequence
  Description of Artificial Sequence: Synthetic oligonucleotide
  Target: ATXN2; (-) strand; PAM type: NRG; PAM sequence: AAG
taaaaggatactgttatgtt

SEQ ID NO: 20988 - DNA, 20 bp, Artificial Sequence
  Description of Artificial Sequence: Synthetic oligonucleotide
  Target: ATXN2; (-) strand; PAM type: NRG; PAM sequence: AGG
taaataaataaataaataaa

SEQ ID NO: 20989 - DNA, 20 bp, Artificial Sequence
  Description of Artificial Sequence: Synthetic oligonucleotide
  Target: ATXN2; (-) strand; PAM type: NRG; PAM sequence: AAG
ataaataaataaataaataa

SEQ ID NO: 20990 - DNA, 20 bp, Artificial Sequence
  Description of Artificial Sequence: Synthetic oligonucleotide
  Target: ATXN2; (-) strand; PAM type: NRG; PAM sequence: GAG
tccagcctgggtgacagagc

SEQ ID NO: 20991 - DNA, 20 bp, Artificial Sequence
  Description of Artificial Sequence: Synthetic oligonucleotide
  Target: ATXN2; (-) strand; PAM type: NRG; PAM sequence: GAG
gcactccagcctgggtgaca

SEQ ID NO: 20992 - DNA, 20 bp, Artificial Sequence
  Description of Artificial Sequence: Synthetic oligonucleotide
  Target: ATXN2; (-) strand; PAM type: NRG; PAM sequence: CAG
ctgcactccagcctgggtga

SEQ ID NO: 20993 - DNA, 20 bp, Artificial Sequence
  Description of Artificial Sequence: Synthetic oligonucleotide
  Target: ATXN2; (-) strand; PAM type: NRG; PAM sequence: GGG
atgccactgcactccagcct

SEQ ID NO: 20994 - DNA, 20 bp, Artificial Sequence
  Description of Artificial Sequence: Synthetic oligonucleotide
  Target: ATXN2; (-) strand; PAM type: NRG; PAM sequence: TGG
catgccactgcactccagcc

SEQ ID NO: 20995 - DNA, 20 bp, Artificial Sequence
  Description of Artificial Sequence: Synthetic oligonucleotide
  Target: ATXN2; (-) strand; PAM type: NRG; PAM sequence: CAG
gagatcatgccactgcactc

SEQ ID NO: 20996 - DNA, 20 bp, Artificial Sequence
  Description of Artificial Sequence: Synthetic oligonucleotide
  Target: ATXN2; (-) strand; PAM type: NRG; PAM sequence: GAG
ggtggaggctgcagtgagcc

SEQ ID NO: 20997 - DNA, 20 bp, Artificial Sequence
  Description of Artificial Sequence: Synthetic oligonucleotide
  Target: ATXN2; (-) strand; PAM type: NRG; PAM sequence: GAG
cagaaggtggaggctgcagt

SEQ ID NO: 20998 - DNA, 20 bp, Artificial Sequence
  Description of Artificial Sequence: Synthetic oligonucleotide
  Target: ATXN2; (-) strand; PAM type: NRG; PAM sequence: CAG
aacccagaaggtggaggctg

SEQ ID NO: 20999 - DNA, 20 bp, Artificial Sequence
  Description of Artificial Sequence: Synthetic oligonucleotide
  Target: ATXN2; (-) strand; PAM type: NRG; PAM sequence: AGG
tgcttgaacccagaaggtgg

SEQ ID NO: 21000 - DNA, 20 bp, Artificial Sequence
  Description of Artificial Sequence: Synthetic oligonucleotide
  Target: ATXN2; (-) strand; PAM type: NRG; PAM sequence: GAG
ttgcttgaacccagaaggtg

SEQ ID NO: 21001 - DNA, 20 bp, Artificial Sequence
  Description of Artificial Sequence: Synthetic oligonucleotide
  Target: ATXN2; (-) strand; PAM type: NRG; PAM sequence: TGG
aattgcttgaacccagaagg

SEQ ID NO: 21002 - DNA, 20 bp, Artificial Sequence
  Description of Artificial Sequence: Synthetic oligonucleotide
  Target: ATXN2; (-) strand; PAM type: NRG; PAM sequence: AGG
gagaattgcttgaacccaga

SEQ ID NO: 21003 - DNA, 20 bp, Artificial Sequence
  Description of Artificial Sequence: Synthetic oligonucleotide
  Target: ATXN2; (-) strand; PAM type: NRG; PAM sequence: AAG
ggagaattgcttgaacccag

SEQ ID NO: 21004 - DNA, 20 bp, Artificial Sequence
  Description of Artificial Sequence: Synthetic oligonucleotide
  Target: ATXN2; (-) strand; PAM type: NRG; PAM sequence: CAG
gcaggagaattgcttgaacc

SEQ ID NO: 21005 - DNA, 20 bp, Artificial Sequence
  Description of Artificial Sequence: Synthetic oligonucleotide
  Target: ATXN2; (-) strand; PAM type: NRG; PAM sequence: GAG
tactcgggaggctgaggcag

SEQ ID NO: 21006 - DNA, 20 bp, Artificial Sequence
  Description of Artificial Sequence: Synthetic oligonucleotide
  Target: ATXN2; (-) strand; PAM type: NRG; PAM sequence: AGG
gctactcgggaggctgaggc

SEQ ID NO: 21007 - DNA, 20 bp, Artificial Sequence
  Description of Artificial Sequence: Synthetic oligonucleotide
  Target: ATXN2; (-) strand; PAM type: NRG; PAM sequence: CAG
agctactcgggaggctgagg

SEQ ID NO: 21008 - DNA, 20 bp, Artificial Sequence
  Description of Artificial Sequence: Synthetic oligonucleotide
  Target: ATXN2; (-) strand; PAM type: NRG; PAM sequence: AGG
cccagctactcgggaggctg

SEQ ID NO: 21009 - DNA, 20 bp, Artificial Sequence
  Description of Artificial Sequence: Synthetic oligonucleotide
  Target: ATXN2; (-) strand; PAM type: NRG; PAM sequence: GAG
tcccagctactcgggaggct

SEQ ID NO: 21010 - DNA, 20 bp, Artificial Sequence
  Description of Artificial Sequence: Synthetic oligonucleotide
  Target: ATXN2; (-) strand; PAM type: NRG; PAM sequence: AGG
ctgtatcccagctactcggg

SEQ ID NO: 21011 - DNA, 20 bp, Artificial Sequence
  Description of Artificial Sequence: Synthetic oligonucleotide
  Target: ATXN2; (-) strand; PAM type: NRG; PAM sequence: GAG
cctgtatcccagctactcgg

SEQ ID NO: 21012 - DNA, 20 bp, Artificial Sequence
  Description of Artificial Sequence: Synthetic oligonucleotide
  Target: ATXN2; (-) strand; PAM type: NRG; PAM sequence: GGG
tgcctgtatcccagctactc

SEQ ID NO: 21013 - DNA, 20 bp, Artificial Sequence
  Description of Artificial Sequence: Synthetic oligonucleotide
  Target: ATXN2; (-) strand; PAM type: NRG; PAM sequence: CGG
gtgcctgtatcccagctact

SEQ ID NO: 21014 - DNA, 20 bp, Artificial Sequence
  Description of Artificial Sequence: Synthetic oligonucleotide
  Target: ATXN2; (-) strand; PAM type: NRG; PAM sequence: CAG
ggtggtaggtgcctgtatcc

SEQ ID NO: 21015 - DNA, 20 bp, Artificial Sequence
  Description of Artificial Sequence: Synthetic oligonucleotide
  Target: ATXN2; (-) strand; PAM type: NRG; PAM sequence: AGG
aattagccaggcatggtggt

SEQ ID NO: 21016 - DNA, 20 bp, Artificial Sequence
  Description of Artificial Sequence: Synthetic oligonucleotide
  Target: ATXN2; (-) strand; PAM type: NRG; PAM sequence: TAG
aaattagccaggcatggtgg

SEQ ID NO: 21017 - DNA, 20 bp, Artificial Sequence
  Description of Artificial Sequence: Synthetic oligonucleotide
  Target: ATXN2; (-) strand; PAM type: NRG; PAM sequence: TGG
caaaaattagccaggcatgg

SEQ ID NO: 21018 - DNA, 20 bp, Artificial Sequence
  Description of Artificial Sequence: Synthetic oligonucleotide
  Target: ATXN2; (-) strand; PAM type: NRG; PAM sequence: TGG
atacaaaaattagccaggca

SEQ ID NO: 21019 - DNA, 20 bp, Artificial Sequence
  Description of Artificial Sequence: Synthetic oligonucleotide
  Target: ATXN2; (-) strand; PAM type: NRG; PAM sequence: AGG
taaaaatacaaaaattagcc

SEQ ID NO: 21020 - DNA, 20 bp, Artificial Sequence
  Description of Artificial Sequence: Synthetic oligonucleotide
  Target: ATXN2; (-) strand; PAM type: NRG; PAM sequence: CAG
ctaaaaatacaaaaattagc

SEQ ID NO: 21021 - DNA, 20 bp, Artificial Sequence
  Description of Artificial Sequence: Synthetic oligonucleotide
  Target: ATXN2; (-) strand; PAM type: NRG; PAM sequence: TAG
tgtactaaaaatacaaaaat

SEQ ID NO: 21022 - DNA, 20 bp, Artificial Sequence
  Description of Artificial Sequence: Synthetic oligonucleotide
  Target: ATXN2; (-) strand; PAM type: NRG; PAM sequence: TGG
ttaggagttgaagaccagcc

SEQ ID NO: 21023 - DNA, 20 bp, Artificial Sequence
  Description of Artificial Sequence: Synthetic oligonucleotide
  Target: ATXN2; (-) strand; PAM type: NRG; PAM sequence: CAG
tgaggttaggagttgaagac

SEQ ID NO: 21024 - DNA, 20 bp, Artificial Sequence
  Description of Artificial Sequence: Synthetic oligonucleotide
  Target: ATXN2; (-) strand; PAM type: NRG; PAM sequence: AAG
ttacttgaggttaggagttg

SEQ ID NO: 21025 - DNA, 20 bp, Artificial Sequence
  Description of Artificial Sequence: Synthetic oligonucleotide
  Target: ATXN2; (-) strand; PAM type: NRG; PAM sequence: GAG
ggtagattacttgaggttag

SEQ ID NO: 21026 - DNA, 20 bp, Artificial Sequence
  Description of Artificial Sequence: Synthetic oligonucleotide
  Target: ATXN2; (-) strand; PAM type: NRG; PAM sequence: AGG
caggtagattacttgaggtt

SEQ ID NO: 21027 - DNA, 20 bp, Artificial Sequence
  Description of Artificial Sequence: Synthetic oligonucleotide
  Target: ATXN2; (-) strand; PAM type: NRG; PAM sequence: TAG
gcaggtagattacttgaggt

SEQ ID NO: 21028 - DNA, 20 bp, Artificial Sequence
  Description of Artificial Sequence: Synthetic oligonucleotide
  Target: ATXN2; (-) strand; PAM type: NRG; PAM sequence: AGG
ccaagcaggtagattacttg

SEQ ID NO: 21029 - DNA, 20 bp, Artificial Sequence
  Description of Artificial Sequence: Synthetic oligonucleotide
  Target: ATXN2; (-) strand; PAM type: NRG; PAM sequence: GAG
tccaagcaggtagattactt

SEQ ID NO: 21030 - DNA, 20 bp, Artificial Sequence
  Description of Artificial Sequence: Synthetic oligonucleotide
  Target: ATXN2; (-) strand; PAM type: NRG; PAM sequence: TAG
ctctgggaggtccaagcagg

SEQ ID NO: 21031 - DNA, 20 bp, Artificial Sequence
  Description of Artificial Sequence: Synthetic oligonucleotide
  Target: ATXN2; (-) strand; PAM type: NRG; PAM sequence: AGG
gcactctgggaggtccaagc

SEQ ID NO: 21032 - DNA, 20 bp, Artificial Sequence
  Description of Artificial Sequence: Synthetic oligonucleotide
  Target: ATXN2; (-) strand; PAM type: NRG; PAM sequence: CAG
agcactctgggaggtccaag

SEQ ID NO: 21033 - DNA, 20 bp, Artificial Sequence
  Description of Artificial Sequence: Synthetic oligonucleotide
  Target: ATXN2; (-) strand; PAM type: NRG; PAM sequence: AAG
cccagcactctgggaggtcc

SEQ ID NO: 21034 - DNA, 20 bp, Artificial Sequence
  Description of Artificial Sequence: Synthetic oligonucleotide
  Target: ATXN2; (-) strand; PAM type: NRG; PAM sequence: AGG
tataatcccagcactctggg

SEQ ID NO: 21035 - DNA, 20 bp, Artificial Sequence
  Description of Artificial Sequence: Synthetic oligonucleotide
  Target: ATXN2; (-) strand; PAM type: NRG; PAM sequence: GAG
ctataatcccagcactctgg

SEQ ID NO: 21036 - DNA, 20 bp, Artificial Sequence
  Description of Artificial Sequence: Synthetic oligonucleotide
  Target: ATXN2; (-) strand; PAM type: NRG; PAM sequence: GGG
acctataatcccagcactct

SEQ ID NO: 21037 - DNA, 20 bp, Artificial Sequence
  Description of Artificial Sequence: Synthetic oligonucleotide
  Target: ATXN2; (-) strand; PAM type: NRG; PAM sequence: TGG
tacctataatcccagcactc

SEQ ID NO: 21038 - DNA, 20 bp, Artificial Sequence
  Description of Artificial Sequence: Synthetic oligonucleotide
  Target: ATXN2; (-) strand; PAM type: NRG; PAM sequence: CAG
gtagctcatacctataatcc

SEQ ID NO: 21039 - DNA, 20 bp, Artificial Sequence
  Description of Artificial Sequence: Synthetic oligonucleotide
  Target: ATXN2; (-) strand; PAM type: NRG; PAM sequence: TAG
aatattggtatgttgactgg

SEQ ID NO: 21040 - DNA, 20 bp, Artificial Sequence
  Description of Artificial Sequence: Synthetic oligonucleotide
  Target: ATXN2; (-) strand; PAM type: NRG; PAM sequence: TGG
tagaatattggtatgttgac

SEQ ID NO: 21041 - DNA, 20 bp, Artificial Sequence
  Description of Artificial Sequence: Synthetic oligonucleotide
  Target: ATXN2; (-) strand; PAM type: NRG; PAM sequence: TGG
attactgcatgctagaatat

SEQ ID NO: 21042 - DNA, 20 bp, Artificial Sequence
  Description of Artificial Sequence: Synthetic oligonucleotide
  Target: ATXN2; (-) strand; PAM type: NRG; PAM sequence: TAG
acataagaattactgcatgc

SEQ ID NO: 21043 - DNA, 20 bp, Artificial Sequence
  Description of Artificial Sequence: Synthetic oligonucleotide
  Target: ATXN2; (-) strand; PAM type: NRG; PAM sequence: AAG
tgtaaaatatcttctcacat

SEQ ID NO: 21044 - DNA, 20 bp, Artificial Sequence
  Description of Artificial Sequence: Synthetic oligonucleotide
  Target: ATXN2; (-) strand; PAM type: NRG; PAM sequence: AGG
ttacagccatgactttttcc

SEQ ID NO: 21045 - DNA, 20 bp, Artificial Sequence
  Description of Artificial Sequence: Synthetic oligonucleotide
  Target: ATXN2; (-) strand; PAM type: NRG; PAM sequence: CAG
tttacagccatgactttttc

SEQ ID NO: 21046 - DNA, 20 bp, Artificial Sequence
  Description of Artificial Sequence: Synthetic oligonucleotide
  Target: ATXN2; (-) strand; PAM type: NRG; PAM sequence: CAG
tttgaggcaattttttttta

SEQ ID NO: 21047 - DNA, 20 bp, Artificial Sequence
  Description of Artificial Sequence: Synthetic oligonucleotide
  Target: ATXN2; (-) strand; PAM type: NRG; PAM sequence: AGG
gactgcttattcttgatttg

SEQ ID NO: 21048 - DNA, 20 bp, Artificial Sequence
  Description of Artificial Sequence: Synthetic oligonucleotide
  Target: ATXN2; (-) strand; PAM type: NRG; PAM sequence: GAG
ggactgcttattcttgattt

SEQ ID NO: 21049 - DNA, 20 bp, Artificial Sequence
  Description of Artificial Sequence: Synthetic oligonucleotide
  Target: ATXN2; (-) strand; PAM type: NRG; PAM sequence: GGG
tgcagcttattgataaattg

SEQ ID NO: 21050 - DNA, 20 bp, Artificial Sequence
  Description of Artificial Sequence: Synthetic oligonucleotide
  Target: ATXN2; (-) strand; PAM type: NRG; PAM sequence: GGG
atgcagcttattgataaatt

SEQ ID NO: 21051 - DNA, 20 bp, Artificial Sequence
  Description of Artificial Sequence: Synthetic oligonucleotide
  Target: ATXN2; (-) strand; PAM type: NRG; PAM sequence: TGG
aatgcagcttattgataaat

SEQ ID NO: 21052 - DNA, 20 bp, Artificial Sequence
  Description of Artificial Sequence: Synthetic oligonucleotide
  Target: ATXN2; (-) strand; PAM type: NRG; PAM sequence: CAG
aaagctgaagttttggaatg

SEQ ID NO: 21053 - DNA, 20 bp, Artificial Sequence
  Description of Artificial Sequence: Synthetic oligonucleotide
  Target: ATXN2; (-) strand; PAM type: NRG; PAM sequence: TGG
tccagttaaagctgaagttt

SEQ ID NO: 21054 - DNA, 20 bp, Artificial Sequence
  Description of Artificial Sequence: Synthetic oligonucleotide
  Target: ATXN2; (-) strand; PAM type: NRG; PAM sequence: AAG
aaacaatccagttaaagctg

SEQ ID NO: 21055 - DNA, 20 bp, Artificial Sequence
  Description of Artificial Sequence: Synthetic oligonucleotide
  Target: ATXN2; (-) strand; PAM type: NRG; PAM sequence: AAG
ggtaccaaacaatccagtta

SEQ ID NO: 21056 - DNA, 20 bp, Artificial Sequence
  Description of Artificial Sequence: Synthetic oligonucleotide
  Target: ATXN2; (-) strand; PAM type: NRG; PAM sequence: CAG
tgtttgggtaccaaacaatc

SEQ ID NO: 21057 - DNA, 20 bp, Artificial Sequence
  Description of Artificial Sequence: Synthetic oligonucleotide
  Target: ATXN2; (-) strand; PAM type: NRG; PAM sequence: GGG
taccattgacttaggtgttt

SEQ ID NO: 21058 - DNA, 20 bp, Artificial Sequence
  Description of Artificial Sequence: Synthetic oligonucleotide
  Target: ATXN2; (-) strand; PAM type: NRG; PAM sequence: TGG
ctaccattgacttaggtgtt

SEQ ID NO: 21059 - DNA, 20 bp, Artificial Sequence
  Description of Artificial Sequence: Synthetic oligonucleotide
  Target: ATXN2; (-) strand; PAM type: NRG; PAM sequence: AGG
aacttaactaccattgactt

SEQ ID NO: 21060 - DNA, 20 bp, Artificial Sequence
  Description of Artificial Sequence: Synthetic oligonucleotide
  Target: ATXN2; (-) strand; PAM type: NRG; PAM sequence: TAG
gaacttaactaccattgact

SEQ ID NO: 21061 - DNA, 20 bp, Artificial Sequence
  Description of Artificial Sequence: Synthetic oligonucleotide
  Target: ATXN2; (-) strand; PAM type: NRG; PAM sequence: CAG
ggacttttaggggctaacct

SEQ ID NO: 21062 - DNA, 20 bp, Artificial Sequence
  Description of Artificial Sequence: Synthetic oligonucleotide
  Target: ATXN2; (-) strand; PAM type: NRG; PAM sequence: GGG
ttaattaaatggacttttag

SEQ ID NO: 21063 - DNA, 20 bp, Artificial Sequence
  Description of Artificial Sequence: Synthetic oligonucleotide
  Target: ATXN2; (-) strand; PAM type: NRG; PAM sequence: GGG
attaattaaatggactttta

SEQ ID NO: 21064 - DNA, 20 bp, Artificial Sequence
  Description of Artificial Sequence: Synthetic oligonucleotide
  Target: ATXN2; (-) strand; PAM type: NRG; PAM sequence: AGG
tattaattaaatggactttt

SEQ ID NO: 21065 - DNA, 20 bp, Artificial Sequence
  Description of Artificial Sequence: Synthetic oligonucleotide
  Target: ATXN2; (-) strand; PAM type: NRG; PAM sequence: TAG
atattaattaaatggacttt

SEQ ID NO: 21066 - DNA, 20 bp, Artificial Sequence
  Description of Artificial Sequence: Synthetic oligonucleotide
  Target: ATXN2; (-) strand; PAM type: NRG; PAM sequence: TGG
cattcagtatattaattaaa

SEQ ID NO: 21067 - DNA, 20 bp, Artificial Sequence
  Description of Artificial Sequence: Synthetic oligonucleotide
  Target: ATXN2; (-) strand; PAM type: NRG; PAM sequence: CAG
tagacttaattctgcacatt

SEQ ID NO: 21068 - DNA, 20 bp, Artificial Sequence
  Description of Artificial Sequence: Synthetic oligonucleotide
  Target: ATXN2; (-) strand; PAM type: NRG; PAM sequence: TAG
aatgtttagatttgttaaga

SEQ ID NO: 21069 - DNA, 20 bp, Artificial Sequence
  Description of Artificial Sequence: Synthetic oligonucleotide
  Target: ATXN2; (-) strand; PAM type: NRG; PAM sequence: AAG
agttaatgtttagatttgtt

SEQ ID NO: 21070 - DNA, 20 bp, Artificial Sequence
  Description of Artificial Sequence: Synthetic oligonucleotide
  Target: ATXN2; (-) strand; PAM type: NRG; PAM sequence: TAG
actgtgttttagttaatgtt

SEQ ID NO: 21071 - DNA, 20 bp, Artificial Sequence
  Description of Artificial Sequence: Synthetic oligonucleotide
  Target: ATXN2; (-) strand; PAM type: NRG; PAM sequence: TAG
tttcatcagaaactgtgttt

SEQ ID NO: 21072 - DNA, 20 bp, Artificial Sequence
  Description of Artificial Sequence: Synthetic oligonucleotide
  Target: ATXN2; (-) strand; PAM type: NRG; PAM sequence: CAG
gaattcaaaatatttttcat

SEQ ID NO: 21073 - DNA, 20 bp, Artificial Sequence
  Description of Artificial Sequence: Synthetic oligonucleotide
  Target: ATXN2; (-) strand; PAM type: NRG; PAM sequence: TGG
aagcatgcggtgcttctact

SEQ ID NO: 21074 - DNA, 20 bp, Artificial Sequence
  Description of Artificial Sequence: Synthetic oligonucleotide
  Target: ATXN2; (-) strand; PAM type: NRG; PAM sequence: CGG
ctgtcaaggagagaagcatg

SEQ ID NO: 21075 - DNA, 20 bp, Artificial Sequence
  Description of Artificial Sequence: Synthetic oligonucleotide
  Target: ATXN2; (-) strand; PAM type: NRG; PAM sequence: AAG
actgccactgtcaaggagag

SEQ ID NO: 21076 - DNA, 20 bp, Artificial Sequence
  Description of Artificial Sequence: Synthetic oligonucleotide
  Target: ATXN2; (-) strand; PAM type: NRG; PAM sequence: GAG
aaaactgccactgtcaagga

SEQ ID NO: 21077 - DNA, 20 bp, Artificial Sequence
  Description of Artificial Sequence: Synthetic oligonucleotide
  Target: ATXN2; (-) strand; PAM type: NRG; PAM sequence: GAG
gaaaaactgccactgtcaag

SEQ ID NO: 21078 - DNA, 20 bp, Artificial Sequence
  Description of Artificial Sequence: Synthetic oligonucleotide
  Target: ATXN2; (-) strand; PAM type: NRG; PAM sequence: AGG
ttgaaaaactgccactgtca

SEQ ID NO: 21079 - DNA, 20 bp, Artificial Sequence
  Description of Artificial Sequence: Synthetic oligonucleotide
  Target: ATXN2; (-) strand; PAM type: NRG; PAM sequence: AAG
gttgaaaaactgccactgtc

SEQ ID NO: 21080 - DNA, 20 bp, Artificial Sequence
  Description of Artificial Sequence: Synthetic oligonucleotide
  Target: ATXN2; (-) strand; PAM type: NRG; PAM sequence: AGG
gtcaccctcactgtgctgct

SEQ ID NO: 21081 - DNA, 20 bp, Artificial Sequence
  Description of Artificial Sequence: Synthetic oligonucleotide
  Target: ATXN2; (-) strand; PAM type: NRG; PAM sequence: TAG
agtcaccctcactgtgctgc

SEQ ID NO: 21082 - DNA, 20 bp, Artificial Sequence
  Description of Artificial Sequence: Synthetic oligonucleotide
  Target: ATXN2; (-) strand; PAM type: NRG; PAM sequence: TAG
ctttactggattccactcat

SEQ ID NO: 21083 - DNA, 20 bp, Artificial Sequence
  Description of Artificial Sequence: Synthetic oligonucleotide
  Target: ATXN2; (-) strand; PAM type: NRG; PAM sequence: TGG
ttcaggggacctatctttac

SEQ ID NO: 21084 - DNA, 20 bp, Artificial Sequence
  Description of Artificial Sequence: Synthetic oligonucleotide
  Target: ATXN2; (-) strand; PAM type: NRG; PAM sequence: GGG
ttgaaaaattatcaattcag

SEQ ID NO: 21085 - DNA, 20 bp, Artificial Sequence
  Description of Artificial Sequence: Synthetic oligonucleotide
  Target: ATXN2; (-) strand; PAM type: NRG; PAM sequence: GGG
gttgaaaaattatcaattca

SEQ ID NO: 21086 - DNA, 20 bp, Artificial Sequence
  Description of Artificial Sequence: Synthetic oligonucleotide
  Target: ATXN2; (-) strand; PAM type: NRG; PAM sequence: AGG
agttgaaaaattatcaattc

SEQ ID NO: 21087 - DNA, 20 bp, Artificial Sequence
  Description of Artificial Sequence: Synthetic oligonucleotide
  Target: ATXN2; (-) strand; PAM type: NRG; PAM sequence: CAG
gagttgaaaaattatcaatt

SEQ ID NO: 21088 - DNA, 20 bp, Artificial Sequence
  Description of Artificial Sequence: Synthetic oligonucleotide
  Target: ATXN2; (-) strand; PAM type: NRG; PAM sequence: GAG
gtttttctgtaaatgaacag

SEQ ID NO: 21089 - DNA, 20 bp, Artificial Sequence
  Description of Artificial Sequence: Synthetic oligonucleotide
  Target: ATXN2; (-) strand; PAM type: NRG; PAM sequence: AGG
aagtttttctgtaaatgaac

SEQ ID NO: 21090 - DNA, 20 bp, Artificial Sequence
  Description of Artificial Sequence: Synthetic oligonucleotide
  Target: ATXN2; (-) strand; PAM type: NRG; PAM sequence: CAG
aaagtttttctgtaaatgaa

SEQ ID NO: 21091 - DNA, 20 bp, Artificial Sequence
  Description of Artificial Sequence: Synthetic oligonucleotide
  Target: ATXN2; (-) strand; PAM type: NRG; PAM sequence: AAG
aacaaggcataaattaagaa

SEQ ID NO: 21092 - DNA, 20 bp, Artificial Sequence
  Description of Artificial Sequence: Synthetic oligonucleotide
  Target: ATXN2; (-) strand; PAM type: NRG; PAM sequence: AAG
agaaaaacaaggcataaatt

SEQ ID NO: 21093 - DNA, 20 bp, Artificial Sequence
  Description of Artificial Sequence: Synthetic oligonucleotide
  Target: ATXN2; (-) strand; PAM type: NRG; PAM sequence: AGG
accccagggctagaaaaaca

SEQ ID NO: 21094 - DNA, 20 bp, Artificial Sequence
  Description of Artificial Sequence: Synthetic oligonucleotide
  Target: ATXN2; (-) strand; PAM type: NRG; PAM sequence: AAG
taccccagggctagaaaaac

SEQ ID NO: 21095 - DNA, 20 bp, Artificial Sequence
  Description of Artificial Sequence: Synthetic oligonucleotide
  Target: ATXN2; (-) strand; PAM type: NRG; PAM sequence: TAG
ccttttttgtaccccagggc

SEQ ID NO: 21096 - DNA, 20 bp, Artificial Sequence
  Description of Artificial Sequence: Synthetic oligonucleotide
  Target: ATXN2; (-) strand; PAM type: NRG; PAM sequence: GGG
ttccccttttttgtacccca

SEQ ID NO: 21097 - DNA, 20 bp, Artificial Sequence
  Description of Artificial Sequence: Synthetic oligonucleotide
  Target: ATXN2; (-) strand; PAM type: NRG; PAM sequence: AGG
cttccccttttttgtacccc

SEQ ID NO: 21098 - DNA, 20 bp, Artificial Sequence
  Description of Artificial Sequence: Synthetic oligonucleotide
  Target: ATXN2; (-) strand; PAM type: NRG; PAM sequence: CAG
tcttccccttttttgtaccc

SEQ ID NO: 21099 - DNA, 20 bp, Artificial Sequence
  Description of Artificial Sequence: Synthetic oligonucleotide
  Target: ATXN2; (-) strand; PAM type: NRG; PAM sequence: AGG
aatgacatcttaagtaaatg

SEQ ID NO: 21100 - DNA, 20 bp, Artificial Sequence
  Description of Artificial Sequence: Synthetic oligonucleotide
  Target: ATXN2; (-) strand; PAM type: NRG; PAM sequence: GAG
aaatgacatcttaagtaaat

SEQ ID NO: 21101 - DNA, 20 bp, Artificial Sequence
  Description of Artificial Sequence: Synthetic oligonucleotide
  Target: ATXN2; (-) strand; PAM type: NRG; PAM sequence: AAG
gtccaaacaaatgacatctt

SEQ ID NO: 21102 - DNA, 20 bp, Artificial Sequence
  Description of Artificial Sequence: Synthetic oligonucleotide
  Target: ATXN2; (-) strand; PAM type: NRG; PAM sequence: TAG
gcccttagtttacaaacagc

SEQ ID NO: 21103 - DNA, 20 bp, Artificial Sequence
  Description of Artificial Sequence: Synthetic oligonucleotide
  Target: ATXN2; (-) strand; PAM type: NRG; PAM sequence: CAG
cattgcccttagtttacaaa

SEQ ID NO: 21104 - DNA, 20 bp, Artificial Sequence
  Description of Artificial Sequence: Synthetic oligonucleotide
  Target: ATXN2; (-) strand; PAM type: NRG; PAM sequence: TAG
actactttatacattgccct

SEQ ID NO: 21105 - DNA, 20 bp, Artificial Sequence
  Description of Artificial Sequence: Synthetic oligonucleotide
  Target: ATXN2; (-) strand; PAM type: NRG; PAM sequence: TAG
gaagaatccatctggacttt

SEQ ID NO: 21106 - DNA, 20 bp, Artificial Sequence
  Description of Artificial Sequence: Synthetic oligonucleotide
  Target: ATXN2; (-) strand; PAM type: NRG; PAM sequence: TGG
ccaactgtgaagaatccatc

SEQ ID NO: 21107 - DNA, 20 bp, Artificial Sequence
  Description of Artificial Sequence: Synthetic oligonucleotide
  Target: ATXN2; (-) strand; PAM type: NRG; PAM sequence: AAG
tttaggtccttccaactgtg

SEQ ID NO: 21108 - DNA, 20 bp, Artificial Sequence
  Description of Artificial Sequence: Synthetic oligonucleotide
  Target: ATXN2; (-) strand; PAM type: NRG; PAM sequence: AGG
ttttttttttaaaggcattt

SEQ ID NO: 21109 - DNA, 20 bp, Artificial Sequence
  Description of Artificial Sequence: Synthetic oligonucleotide
  Target: ATXN2; (-) strand; PAM type: NRG; PAM sequence: TAG
tttttttttttaaaggcatt

SEQ ID NO: 21110 - DNA, 20 bp, Artificial Sequence
  Description of Artificial Sequence: Synthetic oligonucleotide
  Target: ATXN2; (-) strand; PAM type: NRG; PAM sequence: AGG
attaacttttttttttttaa

SEQ ID NO: 21111 - DNA, 20 bp, Artificial Sequence
  Description of Artificial Sequence: Synthetic oligonucleotide
  Target: ATXN2; (-) strand; PAM type: NRG; PAM sequence: AAG
aattaactttttttttttta

SEQ ID NO: 21112 - DNA, 20 bp, Artificial Sequence
  Description of Artificial Sequence: Synthetic oligonucleotide
  Target: ATXN2; (-) strand; PAM type: NRG; PAM sequence: TAG
gagtgagtaaacctggaact

SEQ ID NO: 21113 - DNA, 20 bp, Artificial Sequence
  Description of Artificial Sequence: Synthetic oligonucleotide
  Target: ATXN2; (-) strand; PAM type: NRG; PAM sequence: TGG
cgcagctgagtgagtaaacc

SEQ ID NO: 21114 - DNA, 20 bp, Artificial Sequence
  Description of Artificial Sequence: Synthetic oligonucleotide
  Target: ATXN2; (-) strand; PAM type: NRG; PAM sequence: GAG
gaagaaagacgcagctgagt

SEQ ID NO: 21115 - DNA, 20 bp, Artificial Sequence
  Description of Artificial Sequence: Synthetic oligonucleotide
  Target: ATXN2; (-) strand; PAM type: NRG; PAM sequence: GAG
aagagaagaaagacgcagct

SEQ ID NO: 21116 - DNA, 20 bp, Artificial Sequence
  Description of Artificial Sequence: Synthetic oligonucleotide
  Target: ATXN2; (-) strand; PAM type: NRG; PAM sequence: CAG
taaggaagagaagaaagacg

SEQ ID NO: 21117 - DNA, 20 bp, Artificial Sequence
  Description of Artificial Sequence: Synthetic oligonucleotide
  Target: ATXN2; (-) strand; PAM type: NRG; PAM sequence: AAG
agacgataaggaagagaaga

SEQ ID NO: 21118 - DNA, 20 bp, Artificial Sequence
  Description of Artificial Sequence: Synthetic oligonucleotide
  Target: ATXN2; (-) strand; PAM type: NRG; PAM sequence: AAG
agaaagacgataaggaagag

SEQ ID NO: 21119 - DNA, 20 bp, Artificial Sequence
  Description of Artificial Sequence: Synthetic oligonucleotide
  Target: ATXN2; (-) strand; PAM type: NRG; PAM sequence: GAG
aagagaaagacgataaggaa

SEQ ID NO: 21120 - DNA, 20 bp, Artificial Sequence
  Description of Artificial Sequence: Synthetic oligonucleotide
  Target: ATXN2; (-) strand; PAM type: NRG; PAM sequence: AAG
acaagagaaagacgataagg

SEQ ID NO: 21121 - DNA, 20 bp, Artificial Sequence
  Description of Artificial Sequence: Synthetic oligonucleotide
  Target: ATXN2; (-) strand; PAM type: NRG; PAM sequence: AGG
taaacaagagaaagacgata

SEQ ID NO: 21122 - DNA, 20 bp, Artificial Sequence
  Description of Artificial Sequence: Synthetic oligonucleotide
  Target: ATXN2; (-) strand; PAM type: NRG; PAM sequence: AAG
gtaaacaagagaaagacgat

SEQ ID NO: 21123 - DNA, 20 bp, Artificial Sequence
  Description of Artificial Sequence: Synthetic oligonucleotide
  Target: ATXN2; (-) strand; PAM type: NRG; PAM sequence: AAG
cccagcatgtaaacaagaga

SEQ ID NO: 21124 - DNA, 20 bp, Artificial Sequence
  Description of Artificial Sequence: Synthetic oligonucleotide
  Target: ATXN2; (-) strand; PAM type: NRG; PAM sequence: GAG
ccagcccagcatgtaaacaa

SEQ ID NO: 21125 - DNA, 20 bp, Artificial Sequence
  Description of Artificial Sequence: Synthetic oligonucleotide
  Target: ATXN2; (-) strand; PAM type: NRG; PAM sequence: AAG
ttccagcccagcatgtaaac

SEQ ID NO: 21126 - DNA, 20 bp, Artificial Sequence
  Description of Artificial Sequence: Synthetic oligonucleotide
  Target: ATXN2; (-) strand; PAM type: NRG; PAM sequence: CAG
aggggttcagacttccagcc

SEQ ID NO: 21127 - DNA, 20 bp, Artificial Sequence
  Description of Artificial Sequence: Synthetic oligonucleotide
  Target: ATXN2; (-) strand; PAM type: NRG; PAM sequence: CAG
tcccaaggggttcagacttc

SEQ ID NO: 21128 - DNA, 20 bp, Artificial Sequence
  Description of Artificial Sequence: Synthetic oligonucleotide
  Target: ATXN2; (-) strand; PAM type: NRG; PAM sequence: CAG
aggtcacttcccaaggggtt

SEQ ID NO: 21129 - DNA, 20 bp, Artificial Sequence
  Description of Artificial Sequence: Synthetic oligonucleotide
  Target: ATXN2; (-) strand; PAM type: NRG; PAM sequence: GGG
acctgaggtcacttcccaag

SEQ ID NO: 21130 - DNA, 20 bp, Artificial Sequence
  Description of Artificial Sequence: Synthetic oligonucleotide
  Target: ATXN2; (-) strand; PAM type: NRG; PAM sequence: GGG
gacctgaggtcacttcccaa

SEQ ID NO: 21131 - DNA, 20 bp, Artificial Sequence
  Description of Artificial Sequence: Synthetic oligonucleotide
  Target: ATXN2; (-) strand; PAM type: NRG; PAM sequence: AGG
ggacctgaggtcacttccca

SEQ ID NO: 21132 - DNA, 20 bp, Artificial Sequence
  Description of Artificial Sequence: Synthetic oligonucleotide
  Target: ATXN2; (-) strand; PAM type: NRG; PAM sequence: AAG
gggacctgaggtcacttccc

SEQ ID NO: 21133 - DNA, 20 bp, Artificial Sequence
  Description of Artificial Sequence: Synthetic oligonucleotide
  Target: ATXN2; (-) strand; PAM type: NRG; PAM sequence: AGG
ggagcacaagaggggacctg

SEQ ID NO: 21134 - DNA, 20 bp, Artificial Sequence
  Description of Artificial Sequence: Synthetic oligonucleotide
  Target: ATXN2; (-) strand; PAM type: NRG; PAM sequence: GAG
cggagcacaagaggggacct

SEQ ID NO: 21135 - DNA, 20 bp, Artificial Sequence
  Description of Artificial Sequence: Synthetic oligonucleotide
  Target: ATXN2; (-) strand; PAM type: NRG; PAM sequence: GGG
agtaacacggagcacaagag

SEQ ID NO: 21136 - DNA, 20 bp, Artificial Sequence
  Description of Artificial Sequence: Synthetic oligonucleotide
  Target: ATXN2; (-) strand; PAM type: NRG; PAM sequence: GGG
tagtaacacggagcacaaga

SEQ ID NO: 21137 - DNA, 20 bp, Artificial Sequence
  Description of Artificial Sequence: Synthetic oligonucleotide
  Target: ATXN2; (-) strand; PAM type: NRG; PAM sequence: AGG
ttagtaacacggagcacaag

SEQ ID NO: 21138 - DNA, 20 bp, Artificial Sequence
  Description of Artificial Sequence: Synthetic oligonucleotide
  Target: ATXN2; (-) strand; PAM type: NRG; PAM sequence: GAG
cttagtaacacggagcacaa

SEQ ID NO: 21139 - DNA, 20 bp, Artificial Sequence
  Description of Artificial Sequence: Synthetic oligonucleotide
  Target: ATXN2; (-) strand; PAM type: NRG; PAM sequence: AAG
tacttagtaacacggagcac

SEQ ID NO: 21140 - DNA, 20 bp, Artificial Sequence
  Description of Artificial Sequence: Synthetic oligonucleotide
  Target: ATXN2; (-) strand; PAM type: NRG; PAM sequence: GAG
cttcaatacttagtaacacg

SEQ ID NO: 21141 - DNA, 20 bp, Artificial Sequence
  Description of Artificial Sequence: Synthetic oligonucleotide
  Target: ATXN2; (-) strand; PAM type: NRG; PAM sequence: CGG
cccttcaatacttagtaaca

SEQ ID NO: 21142 - DNA, 20 bp, Artificial Sequence
  Description of Artificial Sequence: Synthetic oligonucleotide
  Target: ATXN2; (-) strand; PAM type: NRG; PAM sequence: TAG
agcatttccccttcaatact

SEQ ID NO: 21143 - DNA, 20 bp, Artificial Sequence
  Description of Artificial Sequence: Synthetic oligonucleotide
  Target: ATXN2; (-) strand; PAM type: NRG; PAM sequence: CAG
agcagcaagccgaatagccc

SEQ ID NO: 21144 - DNA, 20 bp, Artificial Sequence
  Description of Artificial Sequence: Synthetic oligonucleotide
  Target: ATXN2; (-) strand; PAM type: NRG; PAM sequence: TAG
agtggcagcagcaagccgaa

SEQ ID NO: 21145 - DNA, 20 bp, Artificial Sequence
  Description of Artificial Sequence: Synthetic oligonucleotide
  Target: ATXN2; (-) strand; PAM type: NRG; PAM sequence: AAG
actgtaccagtggcagcagc

SEQ ID NO: 21146 - DNA, 20 bp, Artificial Sequence
  Description of Artificial Sequence: Synthetic oligonucleotide
  Target: ATXN2; (-) strand; PAM type: NRG; PAM sequence: CAG
agcaactgtaccagtggcag

SEQ ID NO: 21147 - DNA, 20 bp, Artificial Sequence
  Description of Artificial Sequence: Synthetic oligonucleotide
  Target: ATXN2; (-) strand; PAM type: NRG; PAM sequence: CAG
agcagcaactgtaccagtgg

SEQ ID NO: 21148 - DNA, 20 bp, Artificial Sequence
  Description of Artificial Sequence: Synthetic oligonucleotide
  Target: ATXN2; (-) strand; PAM type: NRG; PAM sequence: TGG
agcagcagcaactgtaccag

SEQ ID NO: 21149 - DNA, 20 bp, Artificial Sequence
  Description of Artificial Sequence: Synthetic oligonucleotide
  Target: ATXN2; (-) strand; PAM type: NRG; PAM sequence: CAG
aatagcagcagcaactgtac

SEQ ID NO: 21150 - DNA, 20 bp, Artificial Sequence
  Description of Artificial Sequence: Synthetic oligonucleotide
  Target: ATXN2; (-) strand; PAM type: NRG; PAM sequence: CAG
tctttcattgaaaatagcag

SEQ ID NO: 21151 - DNA, 20 bp, Artificial Sequence
  Description of Artificial Sequence: Synthetic oligonucleotide
  Target: ATXN2; (-) strand; PAM type: NRG; PAM sequence: CAG
gattctttcattgaaaatag

SEQ ID NO: 21152 - DNA, 20 bp, Artificial Sequence
  Description of Artificial Sequence: Synthetic oligonucleotide
  Target: ATXN2; (-) strand; PAM type: NRG; PAM sequence: TAG
aaggattctttcattgaaaa

SEQ ID NO: 21153 - DNA, 20 bp, Artificial Sequence
  Description of Artificial Sequence: Synthetic oligonucleotide
  Target: ATXN2; (-) strand; PAM type: NRG; PAM sequence: AGG
caaaattgaaccaagtgcta

SEQ ID NO: 21154 - DNA, 20 bp, Artificial Sequence
  Description of Artificial Sequence: Synthetic oligonucleotide
  Target: ATXN2; (-) strand; PAM type: NRG; PAM sequence: AAG
acaaaattgaaccaagtgct

SEQ ID NO: 21155 - DNA, 20 bp, Artificial Sequence
  Description of Artificial Sequence: Synthetic oligonucleotide
  Target: ATXN2; (-) strand; PAM type: NRG; PAM sequence: AAG
atcaaagacaaaattgaacc

SEQ ID NO: 21156 - DNA, 20 bp, Artificial Sequence
  Description of Artificial Sequence: Synthetic oligonucleotide
  Target: ATXN2; (-) strand; PAM type: NRG; PAM sequence: AAG
aaaatcaagagatttgatca

SEQ ID NO: 21157 - DNA, 20 bp, Artificial Sequence
  Description of Artificial Sequence: Synthetic oligonucleotide
  Target: ATXN2; (-) strand; PAM type: NRG; PAM sequence: GAG
tagagagggagaaaaatcaa

SEQ ID NO: 21158 - DNA, 20 bp, Artificial Sequence
  Description of Artificial Sequence: Synthetic oligonucleotide
  Target: ATXN2; (-) strand; PAM type: NRG; PAM sequence: AAG
aatagagagggagaaaaatc

SEQ ID NO: 21159 - DNA, 20 bp, Artificial Sequence
  Description of Artificial Sequence: Synthetic oligonucleotide
  Target: ATXN2; (-) strand; PAM type: NRG; PAM sequence: GAG
actaaacaaaaatagagagg

SEQ ID NO: 21160 - DNA, 20 bp, Artificial Sequence
  Description of Artificial Sequence: Synthetic oligonucleotide
  Target: ATXN2; (-) strand; PAM type: NRG; PAM sequence: GGG
ctactaaacaaaaatagaga

SEQ ID NO: 21161 - DNA, 20 bp, Artificial Sequence
  Description of Artificial Sequence: Synthetic oligonucleotide
  Target: ATXN2; (-) strand; PAM type: NRG; PAM sequence: AGG
actactaaacaaaaatagag

SEQ ID NO: 21162 - DNA, 20 bp, Artificial Sequence
  Description of Artificial Sequence: Synthetic oligonucleotide
  Target: ATXN2; (-) strand; PAM type: NRG; PAM sequence: GAG
aactactaaacaaaaataga

SEQ ID NO: 21163 - DNA, 20 bp, Artificial Sequence
  Description of Artificial Sequence: Synthetic oligonucleotide
  Target: ATXN2; (-) strand; PAM type: NRG; PAM sequence: GAG
tcaactactaaacaaaaata

SEQ ID NO: 21164 - DNA, 20 bp, Artificial Sequence
  Description of Artificial Sequence: Synthetic oligonucleotide
  Target: ATXN2; (-) strand; PAM type: NRG; PAM sequence: TAG
gatcaactactaaacaaaaa

SEQ ID NO: 21165 - DNA, 20 bp, Artificial Sequence
  Description of Artificial Sequence: Synthetic oligonucleotide
  Target: ATXN2; (-) strand; PAM type: NRG; PAM sequence: TGG
aagttctacttctgaatcta

SEQ ID NO: 21166 - DNA, 20 bp, Artificial Sequence
  Description of Artificial Sequence: Synthetic oligonucleotide
  Target: ATXN2; (-) strand; PAM type: NRG; PAM sequence: AAG
tcctttatttagttacagcc

SEQ ID NO: 21167 - DNA, 20 bp, Artificial Sequence
  Description of Artificial Sequence: Synthetic oligonucleotide
  Target: ATXN2; (-) strand; PAM type: NRG; PAM sequence: CAG
ttgtttcctttatttagtta

SEQ ID NO: 21168 - DNA, 20 bp, Artificial Sequence
  Description of Artificial Sequence: Synthetic oligonucleotide
  Target: ATXN2; (-) strand; PAM type: NRG; PAM sequence: TAG
gtataattgtttcctttatt

SEQ ID NO: 21169 - DNA, 20 bp, Artificial Sequence
  Description of Artificial Sequence: Synthetic oligonucleotide
  Target: ATXN2; (-) strand; PAM type: NRG; PAM sequence: AAG
taaagttatttaagatattt

SEQ ID NO: 21170 - DNA, 20 bp, Artificial Sequence
  Description of Artificial Sequence: Synthetic oligonucleotide
  Target: ATXN2; (-) strand; PAM type: NRG; PAM sequence: AAG
atgtattactaaagttattt

SEQ ID NO: 21171 - DNA, 20 bp, Artificial Sequence
  Description of Artificial Sequence: Synthetic oligonucleotide
  Target: ATXN2; (-) strand; PAM type: NRG; PAM sequence: AAG
atggcaaaaatgtattacta

SEQ ID NO: 21172 - DNA, 20 bp, Artificial Sequence
  Description of Artificial Sequence: Synthetic oligonucleotide
  Target: ATXN2; (-) strand; PAM type: NRG; PAM sequence: TGG
tattacgtagcttgtgctca

SEQ ID NO: 21173 - DNA, 20 bp, Artificial Sequence
  Description of Artificial Sequence: Synthetic oligonucleotide
  Target: ATXN2; (-) strand; PAM type: NRG; PAM sequence: TAG
tgcgtatagttaatattacg

SEQ ID NO: 21174 - DNA, 20 bp, Artificial Sequence
  Description of Artificial Sequence: Synthetic oligonucleotide
  Target: ATXN2; (-) strand; PAM type: NRG; PAM sequence: TAG
ttcagaacatttcatgcgta

SEQ ID NO: 21175 - DNA, 20 bp, Artificial Sequence
  Description of Artificial Sequence: Synthetic oligonucleotide
  Target: ATXN2; (-) strand; PAM type: NRG; PAM sequence: CAG
agtatgaaaaaagccttatt

SEQ ID NO: 21176 - DNA, 20 bp, Artificial Sequence
  Description of Artificial Sequence: Synthetic oligonucleotide
  Target: ATXN2; (-) strand; PAM type: NRG; PAM sequence: AAG
ttactcttaaagtatgaaaa

SEQ ID NO: 21177 - DNA, 20 bp, Artificial Sequence
  Description of Artificial Sequence: Synthetic oligonucleotide
  Target: ATXN2; (-) strand; PAM type: NRG; PAM sequence: AAG
tagtaaaagcattactctta

SEQ ID NO: 21178 - DNA, 20 bp, Artificial Sequence
  Description of Artificial Sequence: Synthetic oligonucleotide
  Target: ATXN2; (-) strand; PAM type: NRG; PAM sequence: AAG
ttattgttagtttatagtaa

SEQ ID NO: 21179 - DNA, 20 bp, Artificial Sequence
  Description of Artificial Sequence: Synthetic oligonucleotide
  Target: ATXN2; (-) strand; PAM type: NRG; PAM sequence: TAG
actctgttattgttagttta

SEQ ID NO: 21180 - DNA, 20 bp, Artificial Sequence
  Description of Artificial Sequence: Synthetic oligonucleotide
  Target: ATXN2; (-) strand; PAM type: NRG; PAM sequence: TAG
tataggtactctgttattgt

SEQ ID NO: 21181 - DNA, 20 bp, Artificial Sequence
  Description of Artificial Sequence: Synthetic oligonucleotide
  Target: ATXN2; (-) strand; PAM type: NRG; PAM sequence: AGG
tgactgtggttgtgctatat

SEQ ID NO: 21182 - DNA, 20 bp, Artificial Sequence
  Description of Artificial Sequence: Synthetic oligonucleotide
  Target: ATXN2; (-) strand; PAM type: NRG; PAM sequence: TAG
gtgactgtggttgtgctata

SEQ ID NO: 21183 - DNA, 20 bp, Artificial Sequence
  Description of Artificial Sequence: Synthetic oligonucleotide
  Target: ATXN2; (-) strand; PAM type: NRG; PAM sequence: TGG
tttgagtgctttggtgactg

SEQ ID NO: 21184 - DNA, 20 bp, Artificial Sequence
  Description of Artificial Sequence: Synthetic oligonucleotide
  Target: ATXN2; (-) strand; PAM type: NRG; PAM sequence: TGG
gctaggacatttgagtgctt

SEQ ID NO: 21185 - DNA, 20 bp, Artificial Sequence
  Description of Artificial Sequence: Synthetic oligonucleotide
  Target: ATXN2; (-) strand; PAM type: NRG; PAM sequence: GAG
ctttagaggctaggacattt

SEQ ID NO: 21186 - DNA, 20 bp, Artificial Sequence
  Description of Artificial Sequence: Synthetic oligonucleotide
  Target: ATXN2; (-) strand; PAM type: NRG; PAM sequence: AGG
aatattgaactttagaggct

SEQ ID NO: 21187 - DNA, 20 bp, Artificial Sequence
  Description of Artificial Sequence: Synthetic oligonucleotide
  Target: ATXN2; (-) strand; PAM type: NRG; PAM sequence: TAG
aaatattgaactttagaggc

SEQ ID NO: 21188 - DNA, 20 bp, Artificial Sequence
  Description of Artificial Sequence: Synthetic oligonucleotide
  Target: ATXN2; (-) strand; PAM type: NRG; PAM sequence: AGG
cagtaaatattgaactttag

SEQ ID NO: 21189 - DNA, 20 bp, Artificial Sequence
  Description of Artificial Sequence: Synthetic oligonucleotide
  Target: ATXN2; (-) strand; PAM type: NRG; PAM sequence: GAG
tcagtaaatattgaacttta

SEQ ID NO: 21190 - DNA, 20 bp, Artificial Sequence
  Description of Artificial Sequence: Synthetic oligonucleotide
  Target: ATXN2; (-) strand; PAM type: NRG; PAM sequence: TAG
actcagtaaatattgaactt

SEQ ID NO: 21191 - DNA, 20 bp, Artificial Sequence
  Description of Artificial Sequence: Synthetic oligonucleotide
  Target: ATXN2; (-) strand; PAM type: NRG; PAM sequence: CAG
tctgacatgtggtaagcact

SEQ ID NO: 21192 - DNA, 20 bp, Artificial Sequence
  Description of Artificial Sequence: Synthetic oligonucleotide
  Target: ATXN2; (-) strand; PAM type: NRG; PAM sequence: AAG
cacaatttctgacatgtggt

SEQ ID NO: 21193 - DNA, 20 bp, Artificial Sequence
  Description of Artificial Sequence: Synthetic oligonucleotide
  Target: ATXN2; (-) strand; PAM type: NRG; PAM sequence: TGG
caggcacaatttctgacatg

SEQ ID NO: 21194 - DNA, 20 bp, Artificial Sequence
  Description of Artificial Sequence: Synthetic oligonucleotide
  Target: ATXN2; (-) strand; PAM type: NRG; PAM sequence: AGG
tcatatttttctcacccagc

SEQ ID NO: 21195 - DNA, 20 bp, Artificial Sequence
  Description of Artificial Sequence: Synthetic oligonucleotide
  Target: ATXN2; (-) strand; PAM type: NRG; PAM sequence: CAG
ttcatatttttctcacccag

SEQ ID NO: 21196 - DNA, 20 bp, Artificial Sequence
  Description of Artificial Sequence: Synthetic oligonucleotide
  Target: ATXN2; (-) strand; PAM type: NRG; PAM sequence: CAG
tatttcatatttttctcacc

SEQ ID NO: 21197 - DNA, 20 bp, Artificial Sequence
  Description of Artificial Sequence: Synthetic oligonucleotide
  Target: ATXN2; (-) strand; PAM type: NRG; PAM sequence: TAG
aaatgacaagtataagagga

SEQ ID NO: 21198 - DNA, 20 bp, Artificial Sequence
  Description of Artificial Sequence: Synthetic oligonucleotide
  Target: ATXN2; (-) strand; PAM type: NRG; PAM sequence: AGG
atttaaatgacaagtataag

SEQ ID NO: 21199 - DNA, 20 bp, Artificial Sequence
  Description of Artificial Sequence: Synthetic oligonucleotide
  Target: ATXN2; (-) strand; PAM type: NRG; PAM sequence: GAG
tatttaaatgacaagtataa

SEQ ID NO: 21200 - DNA, 20 bp, Artificial Sequence
  Description of Artificial Sequence: Synthetic oligonucleotide
  Target: ATXN2; (-) strand; PAM type: NRG; PAM sequence: AAG
cttatttaaatgacaagtat

SEQ ID NO: 21201 - DNA, 20 bp, Artificial Sequence
  Description of Artificial Sequence: Synthetic oligonucleotide
  Target: ATXN2; (-) strand; PAM type: NRG; PAM sequence: AAG
tctgatcttatttaaatgac

SEQ ID NO: 21202 - DNA, 20 bp, Artificial Sequence
  Description of Artificial Sequence: Synthetic oligonucleotide
  Target: ATXN2; (-) strand; PAM type: NRG; PAM sequence: AAG
catttactcattttattgtg

SEQ ID NO: 21203 - DNA, 20 bp, Artificial Sequence
  Description of Artificial Sequence: Synthetic oligonucleotide
  Target: ATXN2; (-) strand; PAM type: NRG; PAM sequence: TAG
gctttttctatagactctct

SEQ ID NO: 21204 - DNA, 20 bp, Artificial Sequence
  Description of Artificial Sequence: Synthetic oligonucleotide
  Target: ATXN2; (-) strand; PAM type: NRG; PAM sequence: TAG
tttataggttgctttttcta

SEQ ID NO: 21205 - DNA, 20 bp, Artificial Sequence
  Description of Artificial Sequence: Synthetic oligonucleotide
  Target: ATXN2; (-) strand; PAM type: NRG; PAM sequence: AGG
gagaaacctttcttttttat

SEQ ID NO: 21206 - DNA, 20 bp, Artificial Sequence
  Description of Artificial Sequence: Synthetic oligonucleotide
  Target: ATXN2; (-) strand; PAM type: NRG; PAM sequence: TAG
tgagaaacctttctttttta

SEQ ID NO: 21207 - DNA, 20 bp, Artificial Sequence
  Description of Artificial Sequence: Synthetic oligonucleotide
  Target: ATXN2; (-) strand; PAM type: NRG; PAM sequence: GAG
agactagctgacactttact

SEQ ID NO: 21208 - DNA, 20 bp, Artificial Sequence
  Description of Artificial Sequence: Synthetic oligonucleotide
  Target: ATXN2; (-) strand; PAM type: NRG; PAM sequence: TAG
acttctttcacaccttagac

SEQ ID NO: 21209 - DNA, 20 bp, Artificial Sequence
  Description of Artificial Sequence: Synthetic oligonucleotide
  Target: ATXN2; (-) strand; PAM type: NRG; PAM sequence: TAG
cctaaacttctttcacacct

SEQ ID NO: 21210 - DNA, 20 bp, Artificial Sequence
  Description of Artificial Sequence: Synthetic oligonucleotide
  Target: ATXN2; (-) strand; PAM type: NRG; PAM sequence: TAG
aacatactcttccttttact

SEQ ID NO: 21211 - DNA, 20 bp, Artificial Sequence
  Description of Artificial Sequence: Synthetic oligonucleotide
  Target: ATXN2; (-) strand; PAM type: NRG; PAM sequence: TGG
gccagcttctcccttttctt

SEQ ID NO: 21212 - DNA, 20 bp, Artificial Sequence
  Description of Artificial Sequence: Synthetic oligonucleotide
  Target: ATXN2; (-) strand; PAM type: NRG; PAM sequence: CAG
attgttttatgtgatagagc

SEQ ID NO: 21213 - DNA, 20 bp, Artificial Sequence
  Description of Artificial Sequence: Synthetic oligonucleotide
  Target: ATXN2; (-) strand; PAM type: NRG; PAM sequence: GAG
tgctattgttttatgtgata

SEQ ID NO: 21214 - DNA, 20 bp, Artificial Sequence
  Description of Artificial Sequence: Synthetic oligonucleotide
  Target: ATXN2; (-) strand; PAM type: NRG; PAM sequence: TAG
ggtgctattgttttatgtga

SEQ ID NO: 21215 - DNA, 20 bp, Artificial Sequence
  Description of Artificial Sequence: Synthetic oligonucleotide
  Target: ATXN2; (-) strand; PAM type: NRG; PAM sequence: TGG
ccaccgtgcccggcccccat

SEQ ID NO: 21216 - DNA, 20 bp, Artificial Sequence
  Description of Artificial Sequence: Synthetic oligonucleotide
  Target: ATXN2; (-) strand; PAM type: NRG; PAM sequence: CGG
caggcgtgagccaccgtgcc

SEQ ID NO: 21217 - DNA, 20 bp, Artificial Sequence
  Description of Artificial Sequence: Synthetic oligonucleotide
  Target: ATXN2; (-) strand; PAM type: NRG; PAM sequence: GAG
agtgctgggattacaggcgt

SEQ ID NO: 21218 - DNA, 20 bp, Artificial Sequence
  Description of Artificial Sequence: Synthetic oligonucleotide
  Target: ATXN2; (-) strand; PAM type: NRG; PAM sequence: AGG
tcccaaagtgctgggattac

SEQ ID NO: 21219 - DNA, 20 bp, Artificial Sequence
  Description of Artificial Sequence: Synthetic oligonucleotide
  Target: ATXN2; (-) strand; PAM type: NRG; PAM sequence: CAG
ctcccaaagtgctgggatta

SEQ ID NO: 21220 - DNA, 20 bp, Artificial Sequence
  Description of Artificial Sequence: Synthetic oligonucleotide
  Target: ATXN2; (-) strand; PAM type: NRG; PAM sequence: GGG
ccttggcctcccaaagtgct

SEQ ID NO: 21221 - DNA, 20 bp, Artificial Sequence
  Description of Artificial Sequence: Synthetic oligonucleotide
  Target: ATXN2; (-) strand; PAM type: NRG; PAM sequence: TGG
gccttggcctcccaaagtgc

SEQ ID NO: 21222 - DNA, 20 bp, Artificial Sequence
  Description of Artificial Sequence: Synthetic oligonucleotide
  Target: ATXN2; (-) strand; PAM type: NRG; PAM sequence: AAG
ccgcctgccttggcctccca

SEQ ID NO: 21223 - DNA, 20 bp, Artificial Sequence
  Description of Artificial Sequence: Synthetic oligonucleotide
  Target: ATXN2; (-) strand; PAM type: NRG; PAM sequence: TGG
acctcgtgatccgcctgcct

SEQ ID NO: 21224 - DNA, 20 bp, Artificial Sequence
  Description of Artificial Sequence: Synthetic oligonucleotide
  Target: ATXN2; (-) strand; PAM type: NRG; PAM sequence: TGG
tttcagcgtgtgagccaaga

SEQ ID NO: 21225 - DNA, 20 bp, Artificial Sequence
  Description of Artificial Sequence: Synthetic oligonucleotide
  Target: ATXN2; (-) strand; PAM type: NRG; PAM sequence: AAG
ggggtttcagcgtgtgagcc

SEQ ID NO: 21226 - DNA, 20 bp, Artificial Sequence
  Description of Artificial Sequence: Synthetic oligonucleotide
  Target: ATXN2; (-) strand; PAM type: NRG; PAM sequence: GAG
gagatggggtttcagcgtgt

SEQ ID NO: 21227 - DNA, 20 bp, Artificial Sequence
  Description of Artificial Sequence: Synthetic oligonucleotide
  Target: ATXN2; (-) strand; PAM type: NRG; PAM sequence: CAG
ttttagtagagatggggttt

SEQ ID NO: 21228 - DNA, 20 bp, Artificial Sequence
  Description of Artificial Sequence: Synthetic oligonucleotide
  Target: ATXN2; (-) strand; PAM type: NRG; PAM sequence: GGG
ttgtatttttagtagagatg

SEQ ID NO: 21229 - DNA, 20 bp, Artificial Sequence
  Description of Artificial Sequence: Synthetic oligonucleotide
  Target: ATXN2; (-) strand; PAM type: NRG; PAM sequence: GGG
tttgtatttttagtagagat

SEQ ID NO: 21230 - DNA, 20 bp, Artificial Sequence
  Description of Artificial Sequence: Synthetic oligonucleotide
  Target: ATXN2; (-) strand; PAM type: NRG; PAM sequence: TGG
ttttgtatttttagtagaga

SEQ ID NO: 21231 - DNA, 20 bp, Artificial Sequence
  Description of Artificial Sequence: Synthetic oligonucleotide
  Target: ATXN2; (-) strand; PAM type: NRG; PAM sequence: GAG
taatttttgtatttttagta

SEQ ID NO: 21232 - DNA, 20 bp, Artificial Sequence
  Description of Artificial Sequence: Synthetic oligonucleotide
  Target: ATXN2; (-) strand; PAM type: NRG; PAM sequence: TAG
gctaatttttgtatttttag

SEQ ID NO: 21233 - DNA, 20 bp, Artificial Sequence
  Description of Artificial Sequence: Synthetic oligonucleotide
  Target: ATXN2; (-) strand; PAM type: NRG; PAM sequence: TAG
ctggctaatttttgtatttt

SEQ ID NO: 21234 - DNA, 20 bp, Artificial Sequence
  Description of Artificial Sequence: Synthetic oligonucleotide
  Target: ATXN2; (-) strand; PAM type: NRG; PAM sequence: TGG
taggcgcctgccaccatgcc

SEQ ID NO: 21235 - DNA, 20 bp, Artificial Sequence
  Description of Artificial Sequence: Synthetic oligonucleotide
  Target: ATXN2; (-) strand; PAM type: NRG; PAM sequence: AGG
tcccgagtagcagggactat

SEQ ID NO: 21236 - DNA, 20 bp, Artificial Sequence
  Description of Artificial Sequence: Synthetic oligonucleotide
  Target: ATXN2; (-) strand; PAM type: NRG; PAM sequence: TAG
ctcccgagtagcagggacta

SEQ ID NO: 21237 - DNA, 20 bp, Artificial Sequence
  Description of Artificial Sequence: Synthetic oligonucleotide
  Target: ATXN2; (-) strand; PAM type: NRG; PAM sequence: GGG
cctcagcctcccgagtagca

SEQ ID NO: 21238 - DNA, 20 bp, Artificial Sequence
  Description of Artificial Sequence: Synthetic oligonucleotide
  Target: ATXN2; (-) strand; PAM type: NRG; PAM sequence: AGG
acctcagcctcccgagtagc

SEQ ID NO: 21239 - DNA, 20 bp, Artificial Sequence
  Description of Artificial Sequence: Synthetic oligonucleotide
  Target: ATXN2; (-) strand; PAM type: NRG; PAM sequence: CAG
tacctcagcctcccgagtag

SEQ ID NO: 21240 - DNA, 20 bp, Artificial Sequence
  Description of Artificial Sequence: Synthetic oligonucleotide
  Target: ATXN2; (-) strand; PAM type: NRG; PAM sequence: TAG
tcctacctcagcctcccgag

SEQ ID NO: 21241 - DNA, 20 bp, Artificial Sequence
  Description of Artificial Sequence: Synthetic oligonucleotide
  Target: ATXN2; (-) strand; PAM type: NRG; PAM sequence: GAG
ttctcctacctcagcctccc

SEQ ID NO: 21242 - DNA, 20 bp, Artificial Sequence
  Description of Artificial Sequence: Synthetic oligonucleotide
  Target: ATXN2; (-) strand; PAM type: NRG; PAM sequence: CAG
ttcacaccattctcctacct

SEQ ID NO: 21243 - DNA, 20 bp, Artificial Sequence
  Description of Artificial Sequence: Synthetic oligonucleotide
  Target: ATXN2; (-) strand; PAM type: NRG; PAM sequence: AGG
tcactgcagctccacttccc

SEQ ID NO: 21244 - DNA, 20 bp, Artificial Sequence
  Description of Artificial Sequence: Synthetic oligonucleotide
  Target: ATXN2; (-) strand; PAM type: NRG; PAM sequence: CAG
ctcactgcagctccacttcc

SEQ ID NO: 21245 - DNA, 20 bp, Artificial Sequence
  Description of Artificial Sequence: Synthetic oligonucleotide
  Target: ATXN2; (-) strand; PAM type: NRG; PAM sequence: CAG
ggcgtgatcttggctcactg

SEQ ID NO: 21246 - DNA, 20 bp, Artificial Sequence
  Description of Artificial Sequence: Synthetic oligonucleotide
  Target: ATXN2; (-) strand; PAM type: NRG; PAM sequence: TGG
ggagtgcagtggcgtgatct

SEQ ID NO: 21247 - DNA, 20 bp, Artificial Sequence
  Description of Artificial Sequence: Synthetic oligonucleotide
  Target: ATXN2; (-) strand; PAM type: NRG; PAM sequence: TGG
tcacccaggctggagtgcag

SEQ ID NO: 21248 - DNA, 20 bp, Artificial Sequence
  Description of Artificial Sequence: Synthetic oligonucleotide
  Target: ATXN2; (-) strand; PAM type: NRG; PAM sequence: CAG
ctgtcacccaggctggagtg

SEQ ID NO: 21249 - DNA, 20 bp, Artificial Sequence
  Description of Artificial Sequence: Synthetic oligonucleotide
  Target: ATXN2; (-) strand; PAM type: NRG; PAM sequence: GAG
tcgctctgtcacccaggctg

SEQ ID NO: 21250 - DNA, 20 bp, Artificial Sequence
  Description of Artificial Sequence: Synthetic oligonucleotide
  Target: ATXN2; (-) strand; PAM type: NRG; PAM sequence: TGG
tctcgctctgtcacccaggc

SEQ ID NO: 21251 - DNA, 20 bp, Artificial Sequence
  Description of Artificial Sequence: Synthetic oligonucleotide
  Target: ATXN2; (-) strand; PAM type: NRG; PAM sequence: AGG
ggagtctcgctctgtcaccc

SEQ ID NO: 21252 - DNA, 20 bp, Artificial Sequence
  Description of Artificial Sequence: Synthetic oligonucleotide
  Target: ATXN2; (-) strand; PAM type: NRG; PAM sequence: CAG
cggagtctcgctctgtcacc

SEQ ID NO: 21253 - DNA, 20 bp, Artificial Sequence
  Description of Artificial Sequence: Synthetic oligonucleotide
  Target: ATXN2; (-) strand; PAM type: NRG; PAM sequence: GAG
ttttttttttttttgagacg

SEQ ID NO: 21254 - DNA, 20 bp, Artificial Sequence
  Description of Artificial Sequence: Synthetic oligonucleotide
  Target: ATXN2; (-) strand; PAM type: NRG; PAM sequence: CGG
ctttttttttttttttgaga

SEQ ID NO: 21255 - DNA, 20 bp, Artificial Sequence
  Description of Artificial Sequence: Synthetic oligonucleotide
  Target: ATXN2; (-) strand; PAM type: NRG; PAM sequence: GAG
ctatcttttttttttttttt

SEQ ID NO: 21256 - DNA, 20 bp, Artificial Sequence
  Description of Artificial Sequence: Synthetic oligonucleotide
  Target: ATXN2; (-) strand; PAM type: NRG; PAM sequence: TGG
agctactgtgcccagctcat

SEQ ID NO: 21257 - DNA, 20 bp, Artificial Sequence
  Description of Artificial Sequence: Synthetic oligonucleotide
  Target: ATXN2; (-) strand; PAM type: NRG; PAM sequence: CAG
cagtgatgagctactgtgcc

SEQ ID NO: 21258 - DNA, 20 bp, Artificial Sequence
  Description of Artificial Sequence: Synthetic oligonucleotide
  Target: ATXN2; (-) strand; PAM type: NRG; PAM sequence: GAG
agggctggaattacagtgat

SEQ ID NO: 21259 - DNA, 20 bp, Artificial Sequence
  Description of Artificial Sequence: Synthetic oligonucleotide
  Target: ATXN2; (-) strand; PAM type: NRG; PAM sequence: CAG
ctcccaaagggctggaatta

SEQ ID NO: 21260 - DNA, 20 bp, Artificial Sequence
  Description of Artificial Sequence: Synthetic oligonucleotide
  Target: ATXN2; (-) strand; PAM type: NRG; PAM sequence: TGG
gtctcagcctcccaaagggc

SEQ ID NO: 21261 - DNA, 20 bp, Artificial Sequence
  Description of Artificial Sequence: Synthetic oligonucleotide
  Target: ATXN2; (-) strand; PAM type: NRG; PAM sequence: GGG
gcttgtctcagcctcccaaa

SEQ ID NO: 21262 - DNA, 20 bp, Artificial Sequence
  Description of Artificial Sequence: Synthetic oligonucleotide
  Target: ATXN2; (-) strand; PAM type: NRG; PAM sequence: AGG
tgcttgtctcagcctcccaa

SEQ ID NO: 21263 - DNA, 20 bp, Artificial Sequence
  Description of Artificial Sequence: Synthetic oligonucleotide
  Target: ATXN2; (-) strand; PAM type: NRG; PAM sequence: AAG
ctgcttgtctcagcctccca

SEQ ID NO: 21264 - DNA, 20 bp, Artificial Sequence
  Description of Artificial Sequence: Synthetic oligonucleotide
  Target: ATXN2; (-) strand; PAM type: NRG; PAM sequence: CAG
cttaagcagtctgcttgtct

SEQ ID NO: 21265 - DNA, 20 bp, Artificial Sequence
  Description of Artificial Sequence: Synthetic oligonucleotide
  Target: ATXN2; (-) strand; PAM type: NRG; PAM sequence: CAG
cttgaactcctgagcttaag

SEQ ID NO: 21266 - DNA, 20 bp, Artificial Sequence
  Description of Artificial Sequence: Synthetic oligonucleotide
  Target: ATXN2; (-) strand; PAM type: NRG; PAM sequence: AAG
ggtcttgaactcctgagctt

SEQ ID NO: 21267 - DNA, 20 bp, Artificial Sequence
  Description of Artificial Sequence: Synthetic oligonucleotide
  Target: ATXN2; (-) strand; PAM type: NRG; PAM sequence: GAG
caggctggtcttgaactcct

SEQ ID NO: 21268 - DNA, 20 bp, Artificial Sequence
  Description of Artificial Sequence: Synthetic oligonucleotide
  Target: ATXN2; (-) strand; PAM type: NRG; PAM sequence: TGG
tatcactatgttgcccaggc

SEQ ID NO: 21269 - DNA, 20 bp, Artificial Sequence
  Description of Artificial Sequence: Synthetic oligonucleotide
  Target: ATXN2; (-) strand; PAM type: NRG; PAM sequence: AGG
agggtatcactatgttgccc

SEQ ID NO: 21270 - DNA, 20 bp, Artificial Sequence
  Description of Artificial Sequence: Synthetic oligonucleotide
  Target: ATXN2; (-) strand; PAM type: NRG; PAM sequence: CAG
cagggtatcactatgttgcc

SEQ ID NO: 21271 - DNA, 20 bp, Artificial Sequence
  Description of Artificial Sequence: Synthetic oligonucleotide
  Target: ATXN2; (-) strand; PAM type: NRG; PAM sequence: GGG
attattttttaaatgagaca

SEQ ID NO: 21272 - DNA, 20 bp, Artificial Sequence
  Description of Artificial Sequence: Synthetic oligonucleotide
  Target: ATXN2; (-) strand; PAM type: NRG; PAM sequence: AGG
tattattttttaaatgagac

SEQ ID NO: 21273 - DNA, 20 bp, Artificial Sequence
  Description of Artificial Sequence: Synthetic oligonucleotide
  Target: ATXN2; (-) strand; PAM type: NRG; PAM sequence: CAG
ttattattttttaaatgaga

SEQ ID NO: 21274 - DNA, 20 bp, Artificial Sequence
  Description of Artificial Sequence: Synthetic oligonucleotide
  Target: ATXN2; (-) strand; PAM type: NRG; PAM sequence: GAG
tttattattattttttaaat

SEQ ID NO: 21275 - DNA, 20 bp, Artificial Sequence
  Description of Artificial Sequence: Synthetic oligonucleotide
  Target: ATXN2; (-) strand; PAM type: NRG; PAM sequence: TGG
ctcacccttggtccagccat

SEQ ID NO: 21276 - DNA, 20 bp, Artificial Sequence
  Description of Artificial Sequence: Synthetic oligonucleotide
  Target: ATXN2; (-) strand; PAM type: NRG; PAM sequence: CAG
tgtgtgtctcacccttggtc

SEQ ID NO: 21277 - DNA, 20 bp, Artificial Sequence
  Description of Artificial Sequence: Synthetic oligonucleotide
  Target: ATXN2; (-) strand; PAM type: NRG; PAM sequence: TGG
gtacatgtgtgtctcaccct

SEQ ID NO: 21278 - DNA, 20 bp, Artificial Sequence
  Description of Artificial Sequence: Synthetic oligonucleotide
  Target: ATXN2; (-) strand; PAM type: NRG; PAM sequence: GAG
attgtcatattccttttgac

SEQ ID NO: 21279 - DNA, 20 bp, Artificial Sequence
  Description of Artificial Sequence: Synthetic oligonucleotide
  Target: ATXN2; (-) strand; PAM type: NRG; PAM sequence: AAG
cagccctgaacatagctttt

SEQ ID NO: 21280 - DNA, 20 bp, Artificial Sequence
  Description of Artificial Sequence: Synthetic oligonucleotide
  Target: ATXN2; (-) strand; PAM type: NRG; PAM sequence: TAG
actgcacgcagccctgaaca

SEQ ID NO: 21281 - DNA, 20 bp, Artificial Sequence
  Description of Artificial Sequence: Synthetic oligonucleotide
  Target: ATXN2; (-) strand; PAM type: NRG; PAM sequence: CAG
taggtgttagccactgcacg

SEQ ID NO: 21282 - DNA, 20 bp, Artificial Sequence
  Description of Artificial Sequence: Synthetic oligonucleotide
  Target: ATXN2; (-) strand; PAM type: NRG; PAM sequence: TAG
agtgctaggatgataggtgt

SEQ ID NO: 21283 - DNA, 20 bp, Artificial Sequence
  Description of Artificial Sequence: Synthetic oligonucleotide
  Target: ATXN2; (-) strand; PAM type: NRG; PAM sequence: AGG
tcccaaagtgctaggatgat

SEQ ID NO: 21284 - DNA, 20 bp, Artificial Sequence
  Description of Artificial Sequence: Synthetic oligonucleotide
  Target: ATXN2; (-) strand; PAM type: NRG; PAM sequence: TAG
ttcccaaagtgctaggatga

SEQ ID NO: 21285 - DNA, 20 bp, Artificial Sequence
  Description of Artificial Sequence: Synthetic oligonucleotide
  Target: ATXN2; (-) strand; PAM type: NRG; PAM sequence: AGG
ccttggcttcccaaagtgct

SEQ ID NO: 21286 - DNA, 20 bp, Artificial Sequence
  Description of Artificial Sequence: Synthetic oligonucleotide
  Target: ATXN2; (-) strand; PAM type: NRG; PAM sequence: TAG
gccttggcttcccaaagtgc

SEQ ID NO: 21287 - DNA, 20 bp, Artificial Sequence
  Description of Artificial Sequence: Synthetic oligonucleotide
  Target: ATXN2; (-) strand; PAM type: NRG; PAM sequence: AAG
ccacctgccttggcttccca

SEQ ID NO: 21288 - DNA, 20 bp, Artificial Sequence
  Description of Artificial Sequence: Synthetic oligonucleotide
  Target: ATXN2; (-) strand; PAM type: NRG; PAM sequence: TGG
ctcaagtgatccacctgcct

SEQ ID NO: 21289 - DNA, 20 bp, Artificial Sequence
  Description of Artificial Sequence: Synthetic oligonucleotide
  Target: ATXN2; (-) strand; PAM type: NRG; PAM sequence: AAG
ggtcttaaactcctgacctc

SEQ ID NO: 21290 - DNA, 20 bp, Artificial Sequence
  Description of Artificial Sequence: Synthetic oligonucleotide
  Target: ATXN2; (-) strand; PAM type: NRG; PAM sequence: TGG
tttcaccatgttggccagtc

SEQ ID NO: 21291 - DNA, 20 bp, Artificial Sequence
  Description of Artificial Sequence: Synthetic oligonucleotide
  Target: ATXN2; (-) strand; PAM type: NRG; PAM sequence: CAG
cggagtttcaccatgttggc

SEQ ID NO: 21292 - DNA, 20 bp, Artificial Sequence
  Description of Artificial Sequence: Synthetic oligonucleotide
  Target: ATXN2; (-) strand; PAM type: NRG; PAM sequence: TGG
gagacggagtttcaccatgt

SEQ ID NO: 21293 - DNA, 20 bp, Artificial Sequence
  Description of Artificial Sequence: Synthetic oligonucleotide
  Target: ATXN2; (-) strand; PAM type: NRG; PAM sequence: GAG
ttttatctttagtagagacg

SEQ ID NO: 21294 - DNA, 20 bp, Artificial Sequence
  Description of Artificial Sequence: Synthetic oligonucleotide
  Target: ATXN2; (-) strand; PAM type: NRG; PAM sequence: CGG
ttttttatctttagtagaga

SEQ ID NO: 21295 - DNA, 20 bp, Artificial Sequence
  Description of Artificial Sequence: Synthetic oligonucleotide
  Target: ATXN2; (-) strand; PAM type: NRG; PAM sequence: GAG
ttttttttttatctttagta

SEQ ID NO: 21296 - DNA, 20 bp, Artificial Sequence
  Description of Artificial Sequence: Synthetic oligonucleotide
  Target: ATXN2; (-) strand; PAM type: NRG; PAM sequence: TAG
ttttttttttttatctttag

SEQ ID NO: 21297 - DNA, 20 bp, Artificial Sequence
  Description of Artificial Sequence: Synthetic oligonucleotide
  Target: ATXN2; (-) strand; PAM type: NRG; PAM sequence: TAG
taattttttttttttatctt

SEQ ID NO: 21298 - DNA, 20 bp, Artificial Sequence
  Description of Artificial Sequence: Synthetic oligonucleotide
  Target: ATXN2; (-) strand; PAM type: NRG; PAM sequence: TGG
tacacgtgtgccatcacgcc

SEQ ID NO: 21299 - DNA, 20 bp, Artificial Sequence
  Description of Artificial Sequence: Synthetic oligonucleotide
  Target: ATXN2; (-) strand; PAM type: NRG; PAM sequence: GGG
tgtcagcctcccaagtagct

SEQ ID NO: 21300 - DNA, 20 bp, Artificial Sequence
  Description of Artificial Sequence: Synthetic oligonucleotide
  Target: ATXN2; (-) strand; PAM type: NRG; PAM sequence: TGG
atgtcagcctcccaagtagc

SEQ ID NO: 21301 - DNA, 20 bp, Artificial Sequence
  Description of Artificial Sequence: Synthetic oligonucleotide
  Target: ATXN2; (-) strand; PAM type: NRG; PAM sequence: TAG
tcatatgtcagcctcccaag

SEQ ID NO: 21302 - DNA, 20 bp, Artificial Sequence
  Description of Artificial Sequence: Synthetic oligonucleotide
  Target: ATXN2; (-) strand; PAM type: NRG; PAM sequence: AAG
ttctcatatgtcagcctccc

SEQ ID NO: 21303 - DNA, 20 bp, Artificial Sequence
  Description of Artificial Sequence: Synthetic oligonucleotide
  Target: ATXN2; (-) strand; PAM type: NRG; PAM sequence: CAG
ttcaagcaattctcatatgt

SEQ ID NO: 21304 - DNA, 20 bp, Artificial Sequence
  Description of Artificial Sequence: Synthetic oligonucleotide
  Target: ATXN2; (-) strand; PAM type: NRG; PAM sequence: AAG
aacctccgcctcctgggttc

SEQ ID NO: 21305 - DNA, 20 bp, Artificial Sequence
  Description of Artificial Sequence: Synthetic oligonucleotide
  Target: ATXN2; (-) strand; PAM type: NRG; PAM sequence: GGG
cactgcaacctccgcctcct

SEQ ID NO: 21306 - DNA, 20 bp, Artificial Sequence
  Description of Artificial Sequence: Synthetic oligonucleotide
  Target: ATXN2; (-) strand; PAM type: NRG; PAM sequence: TGG
tcactgcaacctccgcctcc

SEQ ID NO: 21307 - DNA, 20 bp, Artificial Sequence
  Description of Artificial Sequence: Synthetic oligonucleotide
  Target: ATXN2; (-) strand; PAM type: NRG; PAM sequence: TGG
ggagtgcagtggtgtgatct

SEQ ID NO: 21308 - DNA, 20 bp, Artificial Sequence
  Description of Artificial Sequence: Synthetic oligonucleotide
  Target: ATXN2; (-) strand; PAM type: NRG; PAM sequence: TGG
tcacccaggctggagtgcag

SEQ ID NO: 21309 - DNA, 20 bp, Artificial Sequence
  Description of Artificial Sequence: Synthetic oligonucleotide
  Target: ATXN2; (-) strand; PAM type: NRG; PAM sequence: CAG
ctgtcacccaggctggagtg

SEQ ID NO: 21310 - DNA, 20 bp, Artificial Sequence
  Description of Artificial Sequence: Synthetic oligonucleotide
  Target: ATXN2; (-) strand; PAM type: NRG; PAM sequence: GAG
ttgctctgtcacccaggctg

SEQ ID NO: 21311 - DNA, 20 bp, Artificial Sequence
  Description of Artificial Sequence: Synthetic oligonucleotide
  Target: ATXN2; (-) strand; PAM type: NRG; PAM sequence: TGG
tcttgctctgtcacccaggc

SEQ ID NO: 21312 - DNA, 20 bp, Artificial Sequence
  Description of Artificial Sequence: Synthetic oligonucleotide
  Target: ATXN2; (-) strand; PAM type: NRG; PAM sequence: AGG
ggagtcttgctctgtcaccc

SEQ ID NO: 21313 - DNA, 20 bp, Artificial Sequence
  Description of Artificial Sequence: Synthetic oligonucleotide
  Target: ATXN2; (-) strand; PAM type: NRG; PAM sequence: CAG
tggagtcttgctctgtcacc

SEQ ID NO: 21314 - DNA, 20 bp, Artificial Sequence
  Description of Artificial Sequence: Synthetic oligonucleotide
  Target: ATXN2; (-) strand; PAM type: NRG; PAM sequence: GAG
ttttttttaatttttagatg

SEQ ID NO: 21315 - DNA, 20 bp, Artificial Sequence
  Description of Artificial Sequence: Synthetic oligonucleotide
  Target: ATXN2; (-) strand; PAM type: NRG; PAM sequence: TGG
ttttttttttaatttttaga

SEQ ID NO: 21316 - DNA, 20 bp, Artificial Sequence
  Description of Artificial Sequence: Synthetic oligonucleotide
  Target: ATXN2; (-) strand; PAM type: NRG; PAM sequence: TAG
ttttttttttttttaatttt

SEQ ID NO: 21317 - DNA, 20 bp, Artificial Sequence
  Description of Artificial Sequence: Synthetic oligonucleotide
  Target: ATXN2; (-) strand; PAM type: NRG; PAM sequence: TAG
aaaagccaaagtcctaaacg

SEQ ID NO: 21318 - DNA, 20 bp, Artificial Sequence
  Description of Artificial Sequence: Synthetic oligonucleotide
  Target: ATXN2; (-) strand; PAM type: NRG; PAM sequence: AAG
gccctgagaattaaaagcca

SEQ ID NO: 21319 - DNA, 20 bp, Artificial Sequence
  Description of Artificial Sequence: Synthetic oligonucleotide
  Target: ATXN2; (-) strand; PAM type: NRG; PAM sequence: AAG
ccatttgccctgagaattaa

SEQ ID NO: 21320 - DNA, 20 bp, Artificial Sequence
  Description of Artificial Sequence: Synthetic oligonucleotide
  Target: ATXN2; (-) strand; PAM type: NRG; PAM sequence: GAG
atagactgcccatttgccct

SEQ ID NO: 21321 - DNA, 20 bp, Artificial Sequence
  Description of Artificial Sequence: Synthetic oligonucleotide
  Target: ATXN2; (-) strand; PAM type: NRG; PAM sequence: TAG
accctacttaaaattccgta

SEQ ID NO: 21322 - DNA, 20 bp, Artificial Sequence
  Description of Artificial Sequence: Synthetic oligonucleotide
  Target: ATXN2; (-) strand; PAM type: NRG; PAM sequence: CAG
ttctgaactataaatctgcc

SEQ ID NO: 21323 - DNA, 20 bp, Artificial Sequence
  Description of Artificial Sequence: Synthetic oligonucleotide
  Target: ATXN2; (-) strand; PAM type: NRG; PAM sequence: AAG
cctccagttcatttcacaca

SEQ ID NO: 21324 - DNA, 20 bp, Artificial Sequence
  Description of Artificial Sequence: Synthetic oligonucleotide
  Target: ATXN2; (-) strand; PAM type: NRG; PAM sequence: CAG
catcctaattagcctccctc

SEQ ID NO: 21325 - DNA, 20 bp, Artificial Sequence
  Description of Artificial Sequence: Synthetic oligonucleotide
  Target: ATXN2; (-) strand; PAM type: NRG; PAM sequence: TAG
cggtccctccacatcctaat

SEQ ID NO: 21326 - DNA, 20 bp, Artificial Sequence
  Description of Artificial Sequence: Synthetic oligonucleotide
  Target: ATXN2; (-) strand; PAM type: NRG; PAM sequence: CGG
gcttagtccagcctccatga

SEQ ID NO: 21327 - DNA, 20 bp, Artificial Sequence
  Description of Artificial Sequence: Synthetic oligonucleotide
  Target: ATXN2; (-) strand; PAM type: NRG; PAM sequence: CAG
actaggcccagcgcttagtc

SEQ ID NO: 21328 - DNA, 20 bp, Artificial Sequence
  Description of Artificial Sequence: Synthetic oligonucleotide
  Target: ATXN2; (-) strand; PAM type: NRG; PAM sequence: TAG
agctgactaggcccagcgct

SEQ ID NO: 21329 - DNA, 20 bp, Artificial Sequence
  Description of Artificial Sequence: Synthetic oligonucleotide
  Target: ATXN2; (-) strand; PAM type: NRG; PAM sequence: CAG
ccttccaagctgactaggcc

SEQ ID NO: 21330 - DNA, 20 bp, Artificial Sequence
  Description of Artificial Sequence: Synthetic oligonucleotide
  Target: ATXN2; (-) strand; PAM type: NRG; PAM sequence: AGG
aatgaccttccaagctgact

SEQ ID NO: 21331 - DNA, 20 bp, Artificial Sequence
  Description of Artificial Sequence: Synthetic oligonucleotide
  Target: ATXN2; (-) strand; PAM type: NRG; PAM sequence: TAG
taatgaccttccaagctgac

SEQ ID NO: 21332 - DNA, 20 bp, Artificial Sequence
  Description of Artificial Sequence: Synthetic oligonucleotide
  Target: ATXN2; (-) strand; PAM type: NRG; PAM sequence: AAG
cacctacttaatgaccttcc

SEQ ID NO: 21333 - DNA, 20 bp, Artificial Sequence
  Description of Artificial Sequence: Synthetic oligonucleotide
  Target: ATXN2; (-) strand; PAM type: NRG; PAM sequence: AGG
actgaccaatatgtacagtc

SEQ ID NO: 21334 - DNA, 20 bp, Artificial Sequence
  Description of Artificial Sequence: Synthetic oligonucleotide
  Target: ATXN2; (-) strand; PAM type: NRG; PAM sequence: CAG
aactgaccaatatgtacagt

SEQ ID NO: 21335 - DNA, 20 bp, Artificial Sequence
  Description of Artificial Sequence: Synthetic oligonucleotide
  Target: ATXN2; (-) strand; PAM type: NRG; PAM sequence: CAG
gtctaactgaccaatatgta

SEQ ID NO: 21336 - DNA, 20 bp, Artificial Sequence
  Description of Artificial Sequence: Synthetic oligonucleotide
  Target: ATXN2; (-) strand; PAM type: NRG; PAM sequence: TAG
cctttttttacttaggggtt

SEQ ID NO: 21337 - DNA, 20 bp, Artificial Sequence
  Description of Artificial Sequence: Synthetic oligonucleotide
  Target: ATXN2; (-) strand; PAM type: NRG; PAM sequence: GGG
catctcctttttttacttag

SEQ ID NO: 21338 - DNA, 20 bp, Artificial Sequence
  Description of Artificial Sequence: Synthetic oligonucleotide
  Target: ATXN2; (-) strand; PAM type: NRG; PAM sequence: GGG
ccatctcctttttttactta

SEQ ID NO: 21339 - DNA, 20 bp, Artificial Sequence
  Description of Artificial Sequence: Synthetic oligonucleotide
  Target: ATXN2; (-) strand; PAM type: NRG; PAM sequence: AGG
gccatctcctttttttactt

SEQ ID NO: 21340 - DNA, 20 bp, Artificial Sequence
  Description of Artificial Sequence: Synthetic oligonucleotide
  Target: ATXN2; (-) strand; PAM type: NRG; PAM sequence: TAG
tgccatctcctttttttact

SEQ ID NO: 21341 - DNA, 20 bp, Artificial Sequence
  Description of Artificial Sequence: Synthetic oligonucleotide
  Target: ATXN2; (-) strand; PAM type: NRG; PAM sequence: TGG
gatcactggaaggttctgtt

SEQ ID NO: 21342 - DNA, 20 bp, Artificial Sequence
  Description of Artificial Sequence: Synthetic oligonucleotide
  Target: ATXN2; (-) strand; PAM type: NRG; PAM sequence: AGG
tgttggggatgatcactgga

SEQ ID NO: 21343 - DNA, 20 bp, Artificial Sequence
  Description of Artificial Sequence: Synthetic oligonucleotide
  Target: ATXN2; (-) strand; PAM type: NRG; PAM sequence: AAG
ttgttggggatgatcactgg

SEQ ID NO: 21344 - DNA, 20 bp, Artificial Sequence
  Description of Artificial Sequence: Synthetic oligonucleotide
  Target: ATXN2; (-) strand; PAM type: NRG; PAM sequence: TGG
tccttgttggggatgatcac

SEQ ID NO: 21345 - DNA, 20 bp, Artificial Sequence
  Description of Artificial Sequence: Synthetic oligonucleotide
  Target: ATXN2; (-) strand; PAM type: NRG; PAM sequence: GGG
caatttggtgctccttgttg

SEQ ID NO: 21346 - DNA, 20 bp, Artificial Sequence
  Description of Artificial Sequence: Synthetic oligonucleotide
  Target: ATXN2; (-) strand; PAM type: NRG; PAM sequence: GGG
tcaatttggtgctccttgtt

SEQ ID NO: 21347 - DNA, 20 bp, Artificial Sequence
  Description of Artificial Sequence: Synthetic oligonucleotide
  Target: ATXN2; (-) strand; PAM type: NRG; PAM sequence: TGG
ttcaatttggtgctccttgt

SEQ ID NO: 21348 - DNA, 20 bp, Artificial Sequence
  Description of Artificial Sequence: Synthetic oligonucleotide
  Target: ATXN2; (-) strand; PAM type: NRG; PAM sequence: TGG
gtgtggatagttgttcaatt

SEQ ID NO: 21349 - DNA, 20 bp, Artificial Sequence
  Description of Artificial Sequence: Synthetic oligonucleotide
  Target: ATXN2; (-) strand; PAM type: NRG; PAM sequence: TAG
aaggtgctttcttgtgtgga

SEQ ID NO: 21350 - DNA, 20 bp, Artificial Sequence
  Description of Artificial Sequence: Synthetic oligonucleotide
  Target: ATXN2; (-) strand; PAM type: NRG; PAM sequence: TGG
tatgaaggtgctttcttgtg

SEQ ID NO: 21351 - DNA, 20 bp, Artificial Sequence
  Description of Artificial Sequence: Synthetic oligonucleotide
  Target: ATXN2; (-) strand; PAM type: NRG; PAM sequence: AGG
ctaatttttggttcttatga

SEQ ID NO: 21352 - DNA, 20 bp, Artificial Sequence
  Description of Artificial Sequence: Synthetic oligonucleotide
  Target: ATXN2; (-) strand; PAM type: NRG; PAM sequence: AAG
cctaatttttggttcttatg

SEQ ID NO: 21353 - DNA, 20 bp, Artificial Sequence
  Description of Artificial Sequence: Synthetic oligonucleotide
  Target: ATXN2; (-) strand; PAM type: NRG; PAM sequence: TGG
gtgatcgcttacctaatttt

SEQ ID NO: 21354 - DNA, 20 bp, Artificial Sequence
  Description of Artificial Sequence: Synthetic oligonucleotide
  Target: ATXN2; (-) strand; PAM type: NRG; PAM sequence: GGG
cttgataggatgtcaaaact

SEQ ID NO: 21355 - DNA, 20 bp, Artificial Sequence
  Description of Artificial Sequence: Synthetic oligonucleotide
  Target: ATXN2; (-) strand; PAM type: NRG; PAM sequence: TGG
ccttgataggatgtcaaaac

SEQ ID NO: 21356 - DNA, 20 bp, Artificial Sequence
  Description of Artificial Sequence: Synthetic oligonucleotide
  Target: ATXN2; (-) strand; PAM type: NRG; PAM sequence: AGG
ttggtgtctttttccttgat

SEQ ID NO: 21357 - DNA, 20 bp, Artificial Sequence
  Description of Artificial Sequence: Synthetic oligonucleotide
  Target: ATXN2; (-) strand; PAM type: NRG; PAM sequence: TAG
tttggtgtctttttccttga

SEQ ID NO: 21358 - DNA, 20 bp, Artificial Sequence
  Description of Artificial Sequence: Synthetic oligonucleotide
  Target: ATXN2; (-) strand; PAM type: NRG; PAM sequence: TGG
actatcttccttatcttttt

SEQ ID NO: 21359 - DNA, 20 bp, Artificial Sequence
  Description of Artificial Sequence: Synthetic oligonucleotide
  Target: ATXN2; (-) strand; PAM type: NRG; PAM sequence: AAG
gggtgttggaggggcagttc

SEQ ID NO: 21360 - DNA, 20 bp, Artificial Sequence
  Description of Artificial Sequence: Synthetic oligonucleotide
  Target: ATXN2; (-) strand; PAM type: NRG; PAM sequence: CAG
tgtcaggggtgttggagggg

SEQ ID NO: 21361 - DNA, 20 bp, Artificial Sequence
  Description of Artificial Sequence: Synthetic oligonucleotide
  Target: ATXN2; (-) strand; PAM type: NRG; PAM sequence: GGG
gaatgtcaggggtgttggag

SEQ ID NO: 21362 - DNA, 20 bp, Artificial Sequence
  Description of Artificial Sequence: Synthetic oligonucleotide
  Target: ATXN2; (-) strand; PAM type: NRG; PAM sequence: GGG
ggaatgtcaggggtgttgga

SEQ ID NO: 21363 - DNA, 20 bp, Artificial Sequence
  Description of Artificial Sequence: Synthetic oligonucleotide
  Target: ATXN2; (-) strand; PAM type: NRG; PAM sequence: AGG
gggaatgtcaggggtgttgg

SEQ ID NO: 21364 - DNA, 20 bp, Artificial Sequence
  Description of Artificial Sequence: Synthetic oligonucleotide
  Target: ATXN2; (-) strand; PAM type: NRG; PAM sequence: GAG
ggggaatgtcaggggtgttg

SEQ ID NO: 21365 - DNA, 20 bp, Artificial Sequence
  Description of Artificial Sequence: Synthetic oligonucleotide
  Target: ATXN2; (-) strand; PAM type: NRG; PAM sequence: TGG
tgggggaatgtcaggggtgt

SEQ ID NO: 21366 - DNA, 20 bp, Artificial Sequence
  Description of Artificial Sequence: Synthetic oligonucleotide
  Target: ATXN2; (-) strand; PAM type: NRG; PAM sequence: GGG
gcattgtgggggaatgtcag

SEQ ID NO: 21367 - DNA, 20 bp, Artificial Sequence
  Description of Artificial Sequence: Synthetic oligonucleotide
  Target: ATXN2; (-) strand; PAM type: NRG; PAM sequence: GGG
tgcattgtgggggaatgtca

SEQ ID NO: 21368 - DNA, 20 bp, Artificial Sequence
  Description of Artificial Sequence: Synthetic oligonucleotide
  Target: ATXN2; (-) strand; PAM type: NRG; PAM sequence: AGG
ctgcattgtgggggaatgtc

SEQ ID NO: 21369 - DNA, 20 bp, Artificial Sequence
  Description of Artificial Sequence: Synthetic oligonucleotide
  Target: ATXN2; (-) strand; PAM type: NRG; PAM sequence: CAG
actgcattgtgggggaatgt

SEQ ID NO: 21370 - DNA, 20 bp, Artificial Sequence
  Description of Artificial Sequence: Synthetic oligonucleotide
  Target: ATXN2; (-) strand; PAM type: NRG; PAM sequence: GGG
caccccacactgcattgtgg

SEQ ID NO: 21371 - DNA, 20 bp, Artificial Sequence
  Description of Artificial Sequence: Synthetic oligonucleotide
  Target: ATXN2; (-) strand; PAM type: NRG; PAM sequence: GGG
ccaccccacactgcattgtg

SEQ ID NO: 21372 - DNA, 20 bp, Artificial Sequence
  Description of Artificial Sequence: Synthetic oligonucleotide
  Target: ATXN2; (-) strand; PAM type: NRG; PAM sequence: GGG
tccaccccacactgcattgt

SEQ ID NO: 21373 - DNA, 20 bp, Artificial Sequence
  Description of Artificial Sequence: Synthetic oligonucleotide
  Target: ATXN2; (-) strand; PAM type: NRG; PAM sequence: TGG
ctccaccccacactgcattg

SEQ ID NO: 21374 - DNA, 20 bp, Artificial Sequence
  Description of Artificial Sequence: Synthetic oligonucleotide
  Target: ATXN2; (-) strand; PAM type: NRG; PAM sequence: CAG
ctctctctcccccgagcaca

SEQ ID NO: 21375 - DNA, 20 bp, Artificial Sequence
  Description of Artificial Sequence: Synthetic oligonucleotide
  Target: ATXN2; (-) strand; PAM type: NRG; PAM sequence: GAG
catttctctctctctccccc

SEQ ID NO: 21376 - DNA, 20 bp, Artificial Sequence
  Description of Artificial Sequence: Synthetic oligonucleotide
  Target: ATXN2; (-) strand; PAM type: NRG; PAM sequence: CAG
agtttcaatgcaaaatccca

SEQ ID NO: 21377 - DNA, 20 bp, Artificial Sequence
  Description of Artificial Sequence: Synthetic oligonucleotide
  Target: ATXN2; (-) strand; PAM type: NRG; PAM sequence: GAG
cactgtgacagggcagcact

SEQ ID NO: 21378 - DNA, 20 bp, Artificial Sequence
  Description of Artificial Sequence: Synthetic oligonucleotide
  Target: ATXN2; (-) strand; PAM type: NRG; PAM sequence: CAG
tgctttccactgtgacaggg

SEQ ID NO: 21379 - DNA, 20 bp, Artificial Sequence
  Description of Artificial Sequence: Synthetic oligonucleotide
  Target: ATXN2; (-) strand; PAM type: NRG; PAM sequence: GGG
tgctgctttccactgtgaca

SEQ ID NO: 21380 - DNA, 20 bp, Artificial Sequence
  Description of Artificial Sequence: Synthetic oligonucleotide
  Target: ATXN2; (-) strand; PAM type: NRG; PAM sequence: AGG
atgctgctttccactgtgac

SEQ ID NO: 21381 - DNA, 20 bp, Artificial Sequence
  Description of Artificial Sequence: Synthetic oligonucleotide
  Target: ATXN2; (-) strand; PAM type: NRG; PAM sequence: CAG
tatgctgctttccactgtga

SEQ ID NO: 21382 - DNA, 20 bp, Artificial Sequence
  Description of Artificial Sequence: Synthetic oligonucleotide
  Target: ATXN2; (-) strand; PAM type: NRG; PAM sequence: TGG
aatactccctctgtgggtgc

SEQ ID NO: 21383 - DNA, 20 bp, Artificial Sequence
  Description of Artificial Sequence: Synthetic oligonucleotide
  Target: ATXN2; (-) strand; PAM type: NRG; PAM sequence: GGG
agtctaaatactccctctgt

SEQ ID NO: 21384 - DNA, 20 bp, Artificial Sequence
  Description of Artificial Sequence: Synthetic oligonucleotide
  Target: ATXN2; (-) strand; PAM type: NRG; PAM sequence: TGG
tagtctaaatactccctctg

SEQ ID NO: 21385 - DNA, 20 bp, Artificial Sequence
  Description of Artificial Sequence: Synthetic oligonucleotide
  Target: ATXN2; (-) strand; PAM type: NRG; PAM sequence: TAG
aattcccctctgactagggc

SEQ ID NO: 21386 - DNA, 20 bp, Artificial Sequence
  Description of Artificial Sequence: Synthetic oligonucleotide
  Target: ATXN2; (-) strand; PAM type: NRG; PAM sequence: GGG
ggacaattcccctctgacta

SEQ ID NO: 21387 - DNA, 20 bp, Artificial Sequence
  Description of Artificial Sequence: Synthetic oligonucleotide
  Target: ATXN2; (-) strand; PAM type: NRG; PAM sequence: AGG
tggacaattcccctctgact

SEQ ID NO: 21388 - DNA, 20 bp, Artificial Sequence
  Description of Artificial Sequence: Synthetic oligonucleotide
  Target: ATXN2; (-) strand; PAM type: NRG; PAM sequence: TAG
atggacaattcccctctgac

SEQ ID NO: 21389 - DNA, 20 bp, Artificial Sequence
  Description of Artificial Sequence: Synthetic oligonucleotide
  Target: ATXN2; (-) strand; PAM type: NRG; PAM sequence: TGG
tcagattctaatcactggga

SEQ ID NO: 21390 - DNA, 20 bp, Artificial Sequence
  Description of Artificial Sequence: Synthetic oligonucleotide
  Target: ATXN2; (-) strand; PAM type: NRG; PAM sequence: GGG
aaattcagattctaatcact

SEQ ID NO: 21391 - DNA, 20 bp, Artificial Sequence
  Description of Artificial Sequence: Synthetic oligonucleotide
  Target: ATXN2; (-) strand; PAM type: NRG; PAM sequence: TGG
gaaattcagattctaatcac

SEQ ID NO: 21392 - DNA, 20 bp, Artificial Sequence
  Description of Artificial Sequence: Synthetic oligonucleotide
  Target: ATXN2; (-) strand; PAM type: NRG; PAM sequence: CAG
atagtgcccagcccgaaatt

SEQ ID NO: 21393 - DNA, 20 bp, Artificial Sequence
  Description of Artificial Sequence: Synthetic oligonucleotide
  Target: ATXN2; (-) strand; PAM type: NRG; PAM sequence: CAG
ggattacagaccatagtgcc

SEQ ID NO: 21394 - DNA, 20 bp, Artificial Sequence
  Description of Artificial Sequence: Synthetic oligonucleotide
  Target: ATXN2; (-) strand; PAM type: NRG; PAM sequence: TAG
agtgctgggattacagacca

SEQ ID NO: 21395 - DNA, 20 bp, Artificial Sequence
  Description of Artificial Sequence: Synthetic oligonucleotide
  Target: ATXN2; (-) strand; PAM type: NRG; PAM sequence: CAG
ctcccaaagtgctgggatta

SEQ ID NO: 21396 - DNA, 20 bp, Artificial Sequence
  Description of Artificial Sequence: Synthetic oligonucleotide
  Target: ATXN2; (-) strand; PAM type: NRG; PAM sequence: GGG
cctcggcctcccaaagtgct

SEQ ID NO: 21397 - DNA, 20 bp, Artificial Sequence
  Description of Artificial Sequence: Synthetic oligonucleotide
  Target: ATXN2; (-) strand; PAM type: NRG; PAM sequence: TGG
gcctcggcctcccaaagtgc

SEQ ID NO: 21398 - DNA, 20 bp, Artificial Sequence
  Description of Artificial Sequence: Synthetic oligonucleotide
  Target: ATXN2; (-) strand; PAM type: NRG; PAM sequence: AAG
ccgtccgcctcggcctccca

SEQ ID NO: 21399 - DNA, 20 bp, Artificial Sequence
  Description of Artificial Sequence: Synthetic oligonucleotide
  Target: ATXN2; (-) strand; PAM type: NRG; PAM sequence: CGG
ctcaggttatccgtccgcct

SEQ ID NO: 21400 - DNA, 20 bp, Artificial Sequence
  Description of Artificial Sequence: Synthetic oligonucleotide
  Target: ATXN2; (-) strand; PAM type: NRG; PAM sequence: AGG
ggtcttgaactcccgacctc

SEQ ID NO: 21401 - DNA, 20 bp, Artificial Sequence
  Description of Artificial Sequence: Synthetic oligonucleotide
  Target: ATXN2; (-) strand; PAM type: NRG; PAM sequence: CAG
tggtcttgaactcccgacct

SEQ ID NO: 21402 - DNA, 20 bp, Artificial Sequence
  Description of Artificial Sequence: Synthetic oligonucleotide
  Target: ATXN2; (-) strand; PAM type: NRG; PAM sequence: TGG
tttctccatgttggtcaggc

SEQ ID NO: 21403 - DNA, 20 bp, Artificial Sequence
  Description of Artificial Sequence: Synthetic oligonucleotide
  Target: ATXN2; (-) strand; PAM type: NRG; PAM sequence: AGG
gaggtttctccatgttggtc

SEQ ID NO: 21404 - DNA, 20 bp, Artificial Sequence
  Description of Artificial Sequence: Synthetic oligonucleotide
  Target: ATXN2; (-) strand; PAM type: NRG; PAM sequence: CAG
tgaggtttctccatgttggt

SEQ ID NO: 21405 - DNA, 20 bp, Artificial Sequence
  Description of Artificial Sequence: Synthetic oligonucleotide
  Target: ATXN2; (-) strand; PAM type: NRG; PAM sequence: TGG
gagatgaggtttctccatgt

SEQ ID NO: 21406 - DNA, 20 bp, Artificial Sequence
  Description of Artificial Sequence: Synthetic oligonucleotide
  Target: ATXN2; (-) strand; PAM type: NRG; PAM sequence: AGG
tttgttttttagtagagatg

SEQ ID NO: 21407 - DNA, 20 bp, Artificial Sequence
  Description of Artificial Sequence: Synthetic oligonucleotide
  Target: ATXN2; (-) strand; PAM type: NRG; PAM sequence: GAG
ttttgttttttagtagagat

SEQ ID NO: 21408 - DNA, 20 bp, Artificial Sequence
  Description of Artificial Sequence: Synthetic oligonucleotide
  Target: ATXN2; (-) strand; PAM type: NRG; PAM sequence: GAG
aatttttttgttttttagta

SEQ ID NO: 21409 - DNA, 20 bp, Artificial Sequence
  Description of Artificial Sequence: Synthetic oligonucleotide
  Target: ATXN2; (-) strand; PAM type: NRG; PAM sequence: TAG
ctaatttttttgttttttag

SEQ ID NO: 21410 - DNA, 20 bp, Artificial Sequence
  Description of Artificial Sequence: Synthetic oligonucleotide
  Target: ATXN2; (-) strand; PAM type: NRG; PAM sequence: TAG
tggctaatttttttgttttt

SEQ ID NO: 21411 - DNA, 20 bp, Artificial Sequence
  Description of Artificial Sequence: Synthetic oligonucleotide
  Target: ATXN2; (-) strand; PAM type: NRG; PAM sequence: TGG
ccggcatgcgctaccacctc

SEQ ID NO: 21412 - DNA, 20 bp, Artificial Sequence
  Description of Artificial Sequence: Synthetic oligonucleotide
  Target: ATXN2; (-) strand; PAM type: NRG; PAM sequence: CGG
tcctgagtagctgggattac

SEQ ID NO: 21413 - DNA, 20 bp, Artificial Sequence
  Description of Artificial Sequence: Synthetic oligonucleotide
  Target: ATXN2; (-) strand; PAM type: NRG; PAM sequence: GGG
cctcagcctcctgagtagct

SEQ ID NO: 21414 - DNA, 20 bp, Artificial Sequence
  Description of Artificial Sequence: Synthetic oligonucleotide
  Target: ATXN2; (-) strand; PAM type: NRG; PAM sequence: TGG
acctcagcctcctgagtagc

SEQ ID NO: 21415 - DNA, 20 bp, Artificial Sequence
  Description of Artificial Sequence: Synthetic oligonucleotide
  Target: ATXN2; (-) strand; PAM type: NRG; PAM sequence: TAG
tcctacctcagcctcctgag

SEQ ID NO: 21416 - DNA, 20 bp, Artificial Sequence
  Description of Artificial Sequence: Synthetic oligonucleotide
  Target: ATXN2; (-) strand; PAM type: NRG; PAM sequence: GAG
ttctcctacctcagcctcct

SEQ ID NO: 21417 - DNA, 20 bp, Artificial Sequence
  Description of Artificial Sequence: Synthetic oligonucleotide
  Target: ATXN2; (-) strand; PAM type: NRG; PAM sequence: CAG
ttcaaataattctcctacct

SEQ ID NO: 21418 - DNA, 20 bp, Artificial Sequence
  Description of Artificial Sequence: Synthetic oligonucleotide
  Target: ATXN2; (-) strand; PAM type: NRG; PAM sequence: GGG
caccacaacctccgcctccc

SEQ ID NO: 21419 - DNA, 20 bp, Artificial Sequence
  Description of Artificial Sequence: Synthetic oligonucleotide
  Target: ATXN2; (-) strand; PAM type: NRG; PAM sequence: CGG
tcaccacaacctccgcctcc

SEQ ID NO: 21420 - DNA, 20 bp, Artificial Sequence
  Description of Artificial Sequence: Synthetic oligonucleotide
  Target: ATXN2; (-) strand; PAM type: NRG; PAM sequence: CAG
ggagtatagtgacgcaatct

SEQ ID NO: 21421 - DNA, 20 bp, Artificial Sequence
  Description of Artificial Sequence: Synthetic oligonucleotide
  Target: ATXN2; (-) strand; PAM type: NRG; PAM sequence: TAG
ttattgcccaggctggagta

SEQ ID NO: 21422 - DNA, 20 bp, Artificial Sequence
  Description of Artificial Sequence: Synthetic oligonucleotide
  Target: ATXN2; (-) strand; PAM type: NRG; PAM sequence: GAG
cgctcttattgcccaggctg

SEQ ID NO: 21423 - DNA, 20 bp, Artificial Sequence
  Description of Artificial Sequence: Synthetic oligonucleotide
  Target: ATXN2; (-) strand; PAM type: NRG; PAM sequence: TGG
ttcgctcttattgcccaggc

SEQ ID NO: 21424 - DNA, 20 bp, Artificial Sequence
  Description of Artificial Sequence: Synthetic oligonucleotide
  Target: ATXN2; (-) strand; PAM type: NRG; PAM sequence: AGG
gagtttcgctcttattgccc

SEQ ID NO: 21425 - DNA, 20 bp, Artificial Sequence
  Description of Artificial Sequence: Synthetic oligonucleotide
  Target: ATXN2; (-) strand; PAM type: NRG; PAM sequence: CAG
agagtttcgctcttattgcc

SEQ ID NO: 21426 - DNA, 20 bp, Artificial Sequence
  Description of Artificial Sequence: Synthetic oligonucleotide
  Target: ATXN2; (-) strand; PAM type: NRG; PAM sequence: GAG
tcttttggttttttttggca

SEQ ID NO: 21427 - DNA, 20 bp, Artificial Sequence
  Description of Artificial Sequence: Synthetic oligonucleotide
  Target: ATXN2; (-) strand; PAM type: NRG; PAM sequence: CAG
attcttttggttttttttgg

SEQ ID NO: 21428 - DNA, 20 bp, Artificial Sequence
  Description of Artificial Sequence: Synthetic oligonucleotide
  Target: ATXN2; (-) strand; PAM type: NRG; PAM sequence: TGG
aagattcttttggttttttt

SEQ ID NO: 21429 - DNA, 20 bp, Artificial Sequence
  Description of Artificial Sequence: Synthetic oligonucleotide
  Target: ATXN2; (-) strand; PAM type: NRG; PAM sequence: TGG
taccaaaattaagattcttt

SEQ ID NO: 21430 - DNA, 20 bp, Artificial Sequence
  Description of Artificial Sequence: Synthetic oligonucleotide
  Target: ATXN2; (-) strand; PAM type: NRG; PAM sequence: AAG
tggtggggcttaccaaaatt

SEQ ID NO: 21431 - DNA, 20 bp, Artificial Sequence
  Description of Artificial Sequence: Synthetic oligonucleotide
  Target: ATXN2; (-) strand; PAM type: NRG; PAM sequence: GGG
ggactttacccacggtggtg

SEQ ID NO: 21432 - DNA, 20 bp, Artificial Sequence
  Description of Artificial Sequence: Synthetic oligonucleotide
  Target: ATXN2; (-) strand; PAM type: NRG; PAM sequence: GGG
aggactttacccacggtggt

SEQ ID NO: 21433 - DNA, 20 bp, Artificial Sequence
  Description of Artificial Sequence: Synthetic oligonucleotide
  Target: ATXN2; (-) strand; PAM type: NRG; PAM sequence: TGG
gaggactttacccacggtgg

SEQ ID NO: 21434 - DNA, 20 bp, Artificial Sequence
  Description of Artificial Sequence: Synthetic oligonucleotide
  Target: ATXN2; (-) strand; PAM type: NRG; PAM sequence: TGG
ccagaggactttacccacgg

SEQ ID NO: 21435 - DNA, 20 bp, Artificial Sequence
  Description of Artificial Sequence: Synthetic oligonucleotide
  Target: ATXN2; (-) strand; PAM type: NRG; PAM sequence: CGG
accccagaggactttaccca

SEQ ID NO: 21436 - DNA, 20 bp, Artificial Sequence
  Description of Artificial Sequence: Synthetic oligonucleotide
  Target: ATXN2; (-) strand; PAM type: NRG; PAM sequence: AGG
aagtttatttaggaccccag

SEQ ID NO: 21437 - DNA, 20 bp, Artificial Sequence
  Description of Artificial Sequence: Synthetic oligonucleotide
  Target: ATXN2; (-) strand; PAM type: NRG; PAM sequence: GAG
caagtttatttaggacccca

SEQ ID NO: 21438 - DNA, 20 bp, Artificial Sequence
  Description of Artificial Sequence: Synthetic oligonucleotide
  Target: ATXN2; (-) strand; PAM type: NRG; PAM sequence: CAG
ttcaagtttatttaggaccc

SEQ ID NO: 21439 - DNA, 20 bp, Artificial Sequence
  Description of Artificial Sequence: Synthetic oligonucleotide
  Target: ATXN2; (-) strand; PAM type: NRG; PAM sequence: AGG
actgcctttcaagtttattt

SEQ ID NO: 21440 - DNA, 20 bp, Artificial Sequence
  Description of Artificial Sequence: Synthetic oligonucleotide
  Target: ATXN2; (-) strand; PAM type: NRG; PAM sequence: TAG
gactgcctttcaagtttatt

SEQ ID NO: 21441 - DNA, 20 bp, Artificial Sequence
  Description of Artificial Sequence: Synthetic oligonucleotide
  Target: ATXN2; (-) strand; PAM type: NRG; PAM sequence: AAG
tctggtctagactgcctttc

SEQ ID NO: 21442 - DNA, 20 bp, Artificial Sequence
  Description of Artificial Sequence: Synthetic oligonucleotide
  Target: ATXN2; (-) strand; PAM type: NRG; PAM sequence: TAG
gaattgcagtccttctggtc

SEQ ID NO: 21443 - DNA, 20 bp, Artificial Sequence
  Description of Artificial Sequence: Synthetic oligonucleotide
  Target: ATXN2; (-) strand; PAM type: NRG; PAM sequence: TGG
tccaggaattgcagtccttc

SEQ ID NO: 21444 - DNA, 20 bp, Artificial Sequence
  Description of Artificial Sequence: Synthetic oligonucleotide
  Target: ATXN2; (-) strand; PAM type: NRG; PAM sequence: CAG
catgacttgtccaggaattg

SEQ ID NO: 21445 - DNA, 20 bp, Artificial Sequence
  Description of Artificial Sequence: Synthetic oligonucleotide
  Target: ATXN2; (-) strand; PAM type: NRG; PAM sequence: AGG
cacagtaccatgacttgtcc

SEQ ID NO: 21446 - DNA, 20 bp, Artificial Sequence
  Description of Artificial Sequence: Synthetic oligonucleotide
  Target: ATXN2; (-) strand; PAM type: NRG; PAM sequence: CAG
gcacagtaccatgacttgtc

SEQ ID NO: 21447 - DNA, 20 bp, Artificial Sequence
  Description of Artificial Sequence: Synthetic oligonucleotide
  Target: ATXN2; (-) strand; PAM type: NRG; PAM sequence: CAG
cactgactatgagcccagca

SEQ ID NO: 21448 - DNA, 20 bp, Artificial Sequence
  Description of Artificial Sequence: Synthetic oligonucleotide
  Target: ATXN2; (-) strand; PAM type: NRG; PAM sequence: CAG
aagtccactgactatgagcc

SEQ ID NO: 21449 - DNA, 20 bp, Artificial Sequence
  Description of Artificial Sequence: Synthetic oligonucleotide
  Target: ATXN2; (-) strand; PAM type: NRG; PAM sequence: GAG
accccaagtccactgactat

SEQ ID NO: 21450 - DNA, 20 bp, Artificial Sequence
  Description of Artificial Sequence: Synthetic oligonucleotide
  Target: ATXN2; (-) strand; PAM type: NRG; PAM sequence: AAG
cagtgggtcacatgtacccc

SEQ ID NO: 21451 - DNA, 20 bp, Artificial Sequence
  Description of Artificial Sequence: Synthetic oligonucleotide
  Target: ATXN2; (-) strand; PAM type: NRG; PAM sequence: GGG
accctagctggtgtctcagt

SEQ ID NO: 21452 - DNA, 20 bp, Artificial Sequence
  Description of Artificial Sequence: Synthetic oligonucleotide
  Target: ATXN2; (-) strand; PAM type: NRG; PAM sequence: TGG
caccctagctggtgtctcag

SEQ ID NO: 21453 - DNA, 20 bp, Artificial Sequence
  Description of Artificial Sequence: Synthetic oligonucleotide
  Target: ATXN2; (-) strand; PAM type: NRG; PAM sequence: CAG
ggccaccctagctggtgtct

SEQ ID NO: 21454 - DNA, 20 bp, Artificial Sequence
  Description of Artificial Sequence: Synthetic oligonucleotide
  Target: ATXN2; (-) strand; PAM type: NRG; PAM sequence: TGG
actcccttggccaccctagc

SEQ ID NO: 21455 - DNA, 20 bp, Artificial Sequence
  Description of Artificial Sequence: Synthetic oligonucleotide
  Target: ATXN2; (-) strand; PAM type: NRG; PAM sequence: TAG
aagcactcccttggccaccc

SEQ ID NO: 21456 - DNA, 20 bp, Artificial Sequence
  Description of Artificial Sequence: Synthetic oligonucleotide
  Target: ATXN2; (-) strand; PAM type: NRG; PAM sequence: TGG
ggctggcacaagcactccct

SEQ ID NO: 21457 - DNA, 20 bp, Artificial Sequence
  Description of Artificial Sequence: Synthetic oligonucleotide
  Target: ATXN2; (-) strand; PAM type: NRG; PAM sequence: AAG
agttgggggaaggctggcac

SEQ ID NO: 21458 - DNA, 20 bp, Artificial Sequence
  Description of Artificial Sequence: Synthetic oligonucleotide
  Target: ATXN2; (-) strand; PAM type: NRG; PAM sequence: TGG
acctggagttgggggaaggc

SEQ ID NO: 21459 - DNA, 20 bp, Artificial Sequence
  Description of Artificial Sequence: Synthetic oligonucleotide
  Target: ATXN2; (-) strand; PAM type: NRG; PAM sequence: AGG
tggtacctggagttggggga

SEQ ID NO: 21460 - DNA, 20 bp, Artificial Sequence
  Description of Artificial Sequence: Synthetic oligonucleotide
  Target: ATXN2; (-) strand; PAM type: NRG; PAM sequence: AAG
gtggtacctggagttggggg

SEQ ID NO: 21461 - DNA, 20 bp, Artificial Sequence
  Description of Artificial Sequence: Synthetic oligonucleotide
  Target: ATXN2; (-) strand; PAM type: NRG; PAM sequence: GGG
gctgtggtacctggagttgg

SEQ ID NO: 21462 - DNA, 20 bp, Artificial Sequence
  Description of Artificial Sequence: Synthetic oligonucleotide
  Target: ATXN2; (-) strand; PAM type: NRG; PAM sequence: GGG
agctgtggtacctggagttg

SEQ ID NO: 21463 - DNA, 20 bp, Artificial Sequence
  Description of Artificial Sequence: Synthetic oligonucleotide
  Target: ATXN2; (-) strand; PAM type: NRG; PAM sequence: GGG
gagctgtggtacctggagtt

SEQ ID NO: 21464 - DNA, 20 bp, Artificial Sequence
  Description of Artificial Sequence: Synthetic oligonucleotide
  Target: ATXN2; (-) strand; PAM type: NRG; PAM sequence: TGG
tgagctgtggtacctggagt

SEQ ID NO: 21465 - DNA, 20 bp, Artificial Sequence
  Description of Artificial Sequence: Synthetic oligonucleotide
  Target: ATXN2; (-) strand; PAM type: NRG; PAM sequence: GAG
gctgtgagctgtggtacctg

SEQ ID NO: 21466 - DNA, 20 bp, Artificial Sequence
  Description of Artificial Sequence: Synthetic oligonucleotide
  Target: ATXN2; (-) strand; PAM type: NRG; PAM sequence: TGG
gagctgtgagctgtggtacc

SEQ ID NO: 21467 - DNA, 20 bp, Artificial Sequence
  Description of Artificial Sequence: Synthetic oligonucleotide
  Target: ATXN2; (-) strand; PAM type: NRG; PAM sequence: TGG
cctcccagagctgtgagctg

SEQ ID NO: 21468 - DNA, 20 bp, Artificial Sequence
  Description of Artificial Sequence: Synthetic oligonucleotide
  Target: ATXN2; (-) strand; PAM type: NRG; PAM sequence: GAG
ccctctcctcccagagctgt

SEQ ID NO: 21469 - DNA, 20 bp, Artificial Sequence
  Description of Artificial Sequence: Synthetic oligonucleotide
  Target: ATXN2; (-) strand; PAM type: NRG; PAM sequence: GAG
tactcttccctctcctccca

SEQ ID NO: 21470 - DNA, 20 bp, Artificial Sequence
  Description of Artificial Sequence: Synthetic oligonucleotide
  Target: ATXN2; (-) strand; PAM type: NRG; PAM sequence: CAG
cctactcttccctctcctcc

SEQ ID NO: 21471 - DNA, 20 bp, Artificial Sequence
  Description of Artificial Sequence: Synthetic oligonucleotide
  Target: ATXN2; (-) strand; PAM type: NRG; PAM sequence: AAG
agtatccacattgcaagaca

SEQ ID NO: 21472 - DNA, 20 bp, Artificial Sequence
  Description of Artificial Sequence: Synthetic oligonucleotide
  Target: ATXN2; (-) strand; PAM type: NRG; PAM sequence: AAG
tgaactagtatccacattgc

SEQ ID NO: 21473 - DNA, 20 bp, Artificial Sequence
  Description of Artificial Sequence: Synthetic oligonucleotide
  Target: ATXN2; (-) strand; PAM type: NRG; PAM sequence: TAG
ttattttactgtggctgaac

SEQ ID NO: 21474 - DNA, 20 bp, Artificial Sequence
  Description of Artificial Sequence: Synthetic oligonucleotide
  Target: ATXN2; (-) strand; PAM type: NRG; PAM sequence: TGG
cttggtgctttattttactg

SEQ ID NO: 21475 - DNA, 20 bp, Artificial Sequence
  Description of Artificial Sequence: Synthetic oligonucleotide
  Target: ATXN2; (-) strand; PAM type: NRG; PAM sequence: TGG
tgaggcttcagaactatgct

SEQ ID NO: 21476 - DNA, 20 bp, Artificial Sequence
  Description of Artificial Sequence: Synthetic oligonucleotide
  Target: ATXN2; (-) strand; PAM type: NRG; PAM sequence: CAG
atggcctagaattgaggctt

SEQ ID NO: 21477 - DNA, 20 bp, Artificial Sequence
  Description of Artificial Sequence: Synthetic oligonucleotide
  Target: ATXN2; (-) strand; PAM type: NRG; PAM sequence: AGG
ggagctatggcctagaattg

SEQ ID NO: 21478 - DNA, 20 bp, Artificial Sequence
  Description of Artificial Sequence: Synthetic oligonucleotide
  Target: ATXN2; (-) strand; PAM type: NRG; PAM sequence: GAG
gggagctatggcctagaatt

SEQ ID NO: 21479 - DNA, 20 bp, Artificial Sequence
  Description of Artificial Sequence: Synthetic oligonucleotide
  Target: ATXN2; (-) strand; PAM type: NRG; PAM sequence: TAG
gtcatctgggagctatggcc

SEQ ID NO: 21480 - DNA, 20 bp, Artificial Sequence
  Description of Artificial Sequence: Synthetic oligonucleotide
  Target: ATXN2; (-) strand; PAM type: NRG; PAM sequence: TGG
gaaatgtcatctgggagcta

SEQ ID NO: 21481 - DNA, 20 bp, Artificial Sequence
  Description of Artificial Sequence: Synthetic oligonucleotide
  Target: ATXN2; (-) strand; PAM type: NRG; PAM sequence: GAG
tgtctagaaatgtcatctgg

SEQ ID NO: 21482 - DNA, 20 bp, Artificial Sequence
  Description of Artificial Sequence: Synthetic oligonucleotide
  Target: ATXN2; (-) strand; PAM type: NRG; PAM sequence: GGG
tatgtctagaaatgtcatct

SEQ ID NO: 21483 - DNA, 20 bp, Artificial Sequence
  Description of Artificial Sequence: Synthetic oligonucleotide
  Target: ATXN2; (-) strand; PAM type: NRG; PAM sequence: TGG
atatgtctagaaatgtcatc

SEQ ID NO: 21484 - DNA, 20 bp, Artificial Sequence
  Description of Artificial Sequence: Synthetic oligonucleotide
  Target: ATXN2; (-) strand; PAM type: NRG; PAM sequence: TAG
cttctggtccagaatatgtc

SEQ ID NO: 21485 - DNA, 20 bp, Artificial Sequence
  Description of Artificial Sequence: Synthetic oligonucleotide
  Target: ATXN2; (-) strand; PAM type: NRG; PAM sequence: CAG
caatgggttcccttctggtc

SEQ ID NO: 21486 - DNA, 20 bp, Artificial Sequence
  Description of Artificial Sequence: Synthetic oligonucleotide
  Target: ATXN2; (-) strand; PAM type: NRG; PAM sequence: TGG
caaggcaatgggttcccttc

SEQ ID NO: 21487 - DNA, 20 bp, Artificial Sequence
  Description of Artificial Sequence: Synthetic oligonucleotide
  Target: ATXN2; (-) strand; PAM type: NRG; PAM sequence: GGG
gtatttcccttcaaggcaat

SEQ ID NO: 21488 - DNA, 20 bp, Artificial Sequence
  Description of Artificial Sequence: Synthetic oligonucleotide
  Target: ATXN2; (-) strand; PAM type: NRG; PAM sequence: TGG
ggtatttcccttcaaggcaa

SEQ ID NO: 21489 - DNA, 20 bp, Artificial Sequence
  Description of Artificial Sequence: Synthetic oligonucleotide
  Target: ATXN2; (-) strand; PAM type: NRG; PAM sequence: AGG
ggactaggtatttcccttca

SEQ ID NO: 21490 - DNA, 20 bp, Artificial Sequence
  Description of Artificial Sequence: Synthetic oligonucleotide
  Target: ATXN2; (-) strand; PAM type: NRG; PAM sequence: AAG
aggactaggtatttcccttc

SEQ ID NO: 21491 - DNA, 20 bp, Artificial Sequence
  Description of Artificial Sequence: Synthetic oligonucleotide
  Target: ATXN2; (-) strand; PAM type: NRG; PAM sequence: AGG
tggtgaatcctactaggact

SEQ ID NO: 21492 - DNA, 20 bp, Artificial Sequence
  Description of Artificial Sequence: Synthetic oligonucleotide
  Target: ATXN2; (-) strand; PAM type: NRG; PAM sequence: TAG
gtggtgaatcctactaggac

SEQ ID NO: 21493 - DNA, 20 bp, Artificial Sequence
  Description of Artificial Sequence: Synthetic oligonucleotide
  Target: ATXN2; (-) strand; PAM type: NRG; PAM sequence: AGG
agctggtggtgaatcctact

SEQ ID NO: 21494 - DNA, 20 bp, Artificial Sequence
  Description of Artificial Sequence: Synthetic oligonucleotide
  Target: ATXN2; (-) strand; PAM type: NRG; PAM sequence: TAG
cagctggtggtgaatcctac

SEQ ID NO: 21495 - DNA, 20 bp, Artificial Sequence
  Description of Artificial Sequence: Synthetic oligonucleotide
  Target: ATXN2; (-) strand; PAM type: NRG; PAM sequence: TGG
agggctctttagtcagctgg

SEQ ID NO: 21496 - DNA, 20 bp, Artificial Sequence
  Description of Artificial Sequence: Synthetic oligonucleotide
  Target: ATXN2; (-) strand; PAM type: NRG; PAM sequence: TGG
acaagggctctttagtcagc

SEQ ID NO: 21497 - DNA, 20 bp, Artificial Sequence
  Description of Artificial Sequence: Synthetic oligonucleotide
  Target: ATXN2; (-) strand; PAM type: NRG; PAM sequence: CAG
aggcacaagggctctttagt

SEQ ID NO: 21498 - DNA, 20 bp, Artificial Sequence
  Description of Artificial Sequence: Synthetic oligonucleotide
  Target: ATXN2; (-) strand; PAM type: NRG; PAM sequence: TAG
ttcaaggcacaagggctctt

SEQ ID NO: 21499 - DNA, 20 bp, Artificial Sequence
  Description of Artificial Sequence: Synthetic oligonucleotide
  Target: ATXN2; (-) strand; PAM type: NRG; PAM sequence: GGG
gttttttattcaaggcacaa

SEQ ID NO: 21500 - DNA, 20 bp, Artificial Sequence
  Description of Artificial Sequence: Synthetic oligonucleotide
  Target: ATXN2; (-) strand; PAM type: NRG; PAM sequence: AGG
tgttttttattcaaggcaca

SEQ ID NO: 21501 - DNA, 20 bp, Artificial Sequence
  Description of Artificial Sequence: Synthetic oligonucleotide
  Target: ATXN2; (-) strand; PAM type: NRG; PAM sequence: AAG
ttgttttttattcaaggcac

SEQ ID NO: 21502 - DNA, 20 bp, Artificial Sequence
  Description of Artificial Sequence: Synthetic oligonucleotide
  Target: ATXN2; (-) strand; PAM type: NRG; PAM sequence: AGG
ggcaccttgttttttattca

SEQ ID NO: 21503 - DNA, 20 bp, Artificial Sequence
  Description of Artificial Sequence: Synthetic oligonucleotide
  Target: ATXN2; (-) strand; PAM type: NRG; PAM sequence: AAG
tggcaccttgttttttattc

SEQ ID NO: 21504 - DNA, 20 bp, Artificial Sequence
  Description of Artificial Sequence: Synthetic oligonucleotide
  Target: ATXN2; (-) strand; PAM type: NRG; PAM sequence: TGG
gaagctggcacaatacgaca

SEQ ID NO: 21505 - DNA, 20 bp, Artificial Sequence
  Description of Artificial Sequence: Synthetic oligonucleotide
  Target: ATXN2; (-) strand; PAM type: NRG; PAM sequence: TGG
tgcggggtcatatctgaagc

SEQ ID NO: 21506 - DNA, 20 bp, Artificial Sequence
  Description of Artificial Sequence: Synthetic oligonucleotide
  Target: ATXN2; (-) strand; PAM type: NRG; PAM sequence: AAG
aatgtgcggggtcatatctg

SEQ ID NO: 21507 - DNA, 20 bp, Artificial Sequence
  Description of Artificial Sequence: Synthetic oligonucleotide
  Target: ATXN2; (-) strand; PAM type: NRG; PAM sequence: GGG
accacagctgtgaatgtgcg

SEQ ID NO: 21508 - DNA, 20 bp, Artificial Sequence
  Description of Artificial Sequence: Synthetic oligonucleotide
  Target: ATXN2; (-) strand; PAM type: NRG; PAM sequence: GGG
caccacagctgtgaatgtgc

SEQ ID NO: 21509 - DNA, 20 bp, Artificial Sequence
  Description of Artificial Sequence: Synthetic oligonucleotide
  Target: ATXN2; (-) strand; PAM type: NRG; PAM sequence: CGG
acaccacagctgtgaatgtg

SEQ ID NO: 21510 - DNA, 20 bp, Artificial Sequence
  Description of Artificial Sequence: Synthetic oligonucleotide
  Target: ATXN2; (-) strand; PAM type: NRG; PAM sequence: CAG
gggtctccccatggacacca

SEQ ID NO: 21511 - DNA, 20 bp, Artificial Sequence
  Description of Artificial Sequence: Synthetic oligonucleotide
  Target: ATXN2; (-) strand; PAM type: NRG; PAM sequence: TGG
caagcaggtgggtctcccca

SEQ ID NO: 21512 - DNA, 20 bp, Artificial Sequence
  Description of Artificial Sequence: Synthetic oligonucleotide
  Target: ATXN2; (-) strand; PAM type: NRG; PAM sequence: GGG
ttctctcacctcaagcaggt

SEQ ID NO: 21513 - DNA, 20 bp, Artificial Sequence
  Description of Artificial Sequence: Synthetic oligonucleotide
  Target: ATXN2; (-) strand; PAM type: NRG; PAM sequence: TGG
cttctctcacctcaagcagg

SEQ ID NO: 21514 - DNA, 20 bp, Artificial Sequence
  Description of Artificial Sequence: Synthetic oligonucleotide
  Target: ATXN2; (-) strand; PAM type: NRG; PAM sequence: AGG
actcttctctcacctcaagc

SEQ ID NO: 21515 - DNA, 20 bp, Artificial Sequence
  Description of Artificial Sequence: Synthetic oligonucleotide
  Target: ATXN2; (-) strand; PAM type: NRG; PAM sequence: CAG
tactcttctctcacctcaag

SEQ ID NO: 21516 - DNA, 20 bp, Artificial Sequence
  Description of Artificial Sequence: Synthetic oligonucleotide
  Target: ATXN2; (-) strand; PAM type: NRG; PAM sequence: AAG
ttttactcttctctcacctc

SEQ ID NO: 21517 - DNA, 20 bp, Artificial Sequence
  Description of Artificial Sequence: Synthetic oligonucleotide
  Target: ATXN2; (-) strand; PAM type: NRG; PAM sequence: AAG
tggcacccacttgcaagata

SEQ ID NO: 21518 - DNA, 20 bp, Artificial Sequence
  Description of Artificial Sequence: Synthetic oligonucleotide
  Target: ATXN2; (-) strand; PAM type: NRG; PAM sequence: AAG
ctgagctggcacccacttgc

SEQ ID NO: 21519 - DNA, 20 bp, Artificial Sequence
  Description of Artificial Sequence: Synthetic oligonucleotide
  Target: ATXN2; (-) strand; PAM type: NRG; PAM sequence: TGG
ttattgtactggggctgagc

SEQ ID NO: 21520 - DNA, 20 bp, Artificial Sequence
  Description of Artificial Sequence: Synthetic oligonucleotide
  Target: ATXN2; (-) strand; PAM type: NRG; PAM sequence: GAG
tgctttattgtactggggct

SEQ ID NO: 21521 - DNA, 20 bp, Artificial Sequence
  Description of Artificial Sequence: Synthetic oligonucleotide
  Target: ATXN2; (-) strand; PAM type: NRG; PAM sequence: GGG
gaatctgctttattgtactg

SEQ ID NO: 21522 - DNA, 20 bp, Artificial Sequence
  Description of Artificial Sequence: Synthetic oligonucleotide
  Target: ATXN2; (-) strand; PAM type: NRG; PAM sequence: GGG
ggaatctgctttattgtact

SEQ ID NO: 21523 - DNA, 20 bp, Artificial Sequence
  Description of Artificial Sequence: Synthetic oligonucleotide
  Target: ATXN2; (-) strand; PAM type: NRG; PAM sequence: TGG
aggaatctgctttattgtac

SEQ ID NO: 21524 - DNA, 20 bp, Artificial Sequence
  Description of Artificial Sequence: Synthetic oligonucleotide
  Target: ATXN2; (-) strand; PAM type: NRG; PAM sequence: AGG
ggcctgggatcgggagcttt

SEQ ID NO: 21525 - DNA, 20 bp, Artificial Sequence
  Description of Artificial Sequence: Synthetic oligonucleotide
  Target: ATXN2; (-) strand; PAM type: NRG; PAM sequence: TAG
gggcctgggatcgggagctt

SEQ ID NO: 21526 - DNA, 20 bp, Artificial Sequence
  Description of Artificial Sequence: Synthetic oligonucleotide
  Target: ATXN2; (-) strand; PAM type: NRG; PAM sequence: GAG
gagccagggcctgggatcgg

SEQ ID NO: 21527 - DNA, 20 bp, Artificial Sequence
  Description of Artificial Sequence: Synthetic oligonucleotide
  Target: ATXN2; (-) strand; PAM type: NRG; PAM sequence: GGG
aggagccagggcctgggatc

SEQ ID NO: 21528 - DNA, 20 bp, Artificial Sequence
  Description of Artificial Sequence: Synthetic oligonucleotide
  Target: ATXN2; (-) strand; PAM type: NRG; PAM sequence: CGG
caggagccagggcctgggat

SEQ ID NO: 21529 - DNA, 20 bp, Artificial Sequence
  Description of Artificial Sequence: Synthetic oligonucleotide
  Target: ATXN2; (-) strand; PAM type: NRG; PAM sequence: GGG
ctgcccaggagccagggcct

SEQ ID NO: 21530 - DNA, 20 bp, Artificial Sequence
  Description of Artificial Sequence: Synthetic oligonucleotide
  Target: ATXN2; (-) strand; PAM type: NRG; PAM sequence: TGG
gctgcccaggagccagggcc

SEQ ID NO: 21531 - DNA, 20 bp, Artificial Sequence
  Description of Artificial Sequence: Synthetic oligonucleotide
  Target: ATXN2; (-) strand; PAM type: NRG; PAM sequence: GGG
gaaatgctgcccaggagcca

SEQ ID NO: 21532 - DNA, 20 bp, Artificial Sequence
  Description of Artificial Sequence: Synthetic oligonucleotide
  Target: ATXN2; (-) strand; PAM type: NRG; PAM sequence: AGG
agaaatgctgcccaggagcc

SEQ ID NO: 21533 - DNA, 20 bp, Artificial Sequence
  Description of Artificial Sequence: Synthetic oligonucleotide
  Target: ATXN2; (-) strand; PAM type: NRG; PAM sequence: CAG
tagaaatgctgcccaggagc

SEQ ID NO: 21534 - DNA, 20 bp, Artificial Sequence
  Description of Artificial Sequence: Synthetic oligonucleotide
  Target: ATXN2; (-) strand; PAM type: NRG; PAM sequence: GAG
tgtctagaaatgctgcccag

SEQ ID NO: 21535 - DNA, 20 bp, Artificial Sequence
  Description of Artificial Sequence: Synthetic oligonucleotide
  Target: ATXN2; (-) strand; PAM type: NRG; PAM sequence: AGG
tgtgtctagaaatgctgccc

SEQ ID NO: 21536 - DNA, 20 bp, Artificial Sequence
  Description of Artificial Sequence: Synthetic oligonucleotide
  Target: ATXN2; (-) strand; PAM type: NRG; PAM sequence: CAG
gtgtgtctagaaatgctgcc

SEQ ID NO: 21537 - DNA, 20 bp, Artificial Sequence
  Description of Artificial Sequence: Synthetic oligonucleotide
  Target: ATXN2; (-) strand; PAM type: NRG; PAM sequence: TAG
cttctggcccagggtgtgtc

SEQ ID NO: 21538 - DNA, 20 bp, Artificial Sequence
  Description of Artificial Sequence: Synthetic oligonucleotide
  Target: ATXN2; (-) strand; PAM type: NRG; PAM sequence: GGG
gcaggttcccttctggccca

SEQ ID NO: 21539 - DNA, 20 bp, Artificial Sequence
  Description of Artificial Sequence: Synthetic oligonucleotide
  Target: ATXN2; (-) strand; PAM type: NRG; PAM sequence: AGG
agcaggttcccttctggccc

SEQ ID NO: 21540 - DNA, 20 bp, Artificial Sequence
  Description of Artificial Sequence: Synthetic oligonucleotide
  Target: ATXN2; (-) strand; PAM type: NRG; PAM sequence: CAG
cagcaggttcccttctggcc

SEQ ID NO: 21541 - DNA, 20 bp, Artificial Sequence
  Description of Artificial Sequence: Synthetic oligonucleotide
  Target: ATXN2; (-) strand; PAM type: NRG; PAM sequence: TGG
cagtgcagcaggttcccttc

SEQ ID NO: 21542 - DNA, 20 bp, Artificial Sequence
  Description of Artificial Sequence: Synthetic oligonucleotide
  Target: ATXN2; (-) strand; PAM type: NRG; PAM sequence: AGG
gtctttactttcagtgcagc

SEQ ID NO: 21543 - DNA, 20 bp, Artificial Sequence
  Description of Artificial Sequence: Synthetic oligonucleotide
  Target: ATXN2; (-) strand; PAM type: NRG; PAM sequence: CAG
ggtctttactttcagtgcag

SEQ ID NO: 21544 - DNA, 20 bp, Artificial Sequence
  Description of Artificial Sequence: Synthetic oligonucleotide
  Target: ATXN2; (-) strand; PAM type: NRG; PAM sequence: CAG
ctgggtctttactttcagtg

SEQ ID NO: 21545 - DNA, 20 bp, Artificial Sequence
  Description of Artificial Sequence: Synthetic oligonucleotide
  Target: ATXN2; (-) strand; PAM type: NRG; PAM sequence: CAG
aagaactgggtctttacttt

SEQ ID NO: 21546 - DNA, 20 bp, Artificial Sequence
  Description of Artificial Sequence: Synthetic oligonucleotide
  Target: ATXN2; (-) strand; PAM type: NRG; PAM sequence: GGG
tgaagaatcctgcaagaact

SEQ ID NO: 21547 - DNA, 20 bp, Artificial Sequence
  Description of Artificial Sequence: Synthetic oligonucleotide
  Target: ATXN2; (-) strand; PAM type: NRG; PAM sequence: TGG
gtgaagaatcctgcaagaac

SEQ ID NO: 21548 - DNA, 20 bp, Artificial Sequence
  Description of Artificial Sequence: Synthetic oligonucleotide
  Target: ATXN2; (-) strand; PAM type: NRG; PAM sequence: AAG
cagtaggtgaagaatcctgc

SEQ ID NO: 21549 - DNA, 20 bp, Artificial Sequence
  Description of Artificial Sequence: Synthetic oligonucleotide
  Target: ATXN2; (-) strand; PAM type: NRG; PAM sequence: AAG
ggtgctttagtcagtaggtg

SEQ ID NO: 21550 - DNA, 20 bp, Artificial Sequence
  Description of Artificial Sequence: Synthetic oligonucleotide
  Target: ATXN2; (-) strand; PAM type: NRG; PAM sequence: AGG
ccaagggtgctttagtcagt

SEQ ID NO: 21551 - DNA, 20 bp, Artificial Sequence
  Description of Artificial Sequence: Synthetic oligonucleotide
  Target: ATXN2; (-) strand; PAM type: NRG; PAM sequence: TAG
cccaagggtgctttagtcag

SEQ ID NO: 21552 - DNA, 20 bp, Artificial Sequence
  Description of Artificial Sequence: Synthetic oligonucleotide
  Target: ATXN2; (-) strand; PAM type: NRG; PAM sequence: CAG
aggcccaagggtgctttagt

SEQ ID NO: 21553 - DNA, 20 bp, Artificial Sequence
  Description of Artificial Sequence: Synthetic oligonucleotide
  Target: ATXN2; (-) strand; PAM type: NRG; PAM sequence: TAG
tttaaggcccaagggtgctt

SEQ ID NO: 21554 - DNA, 20 bp, Artificial Sequence
  Description of Artificial Sequence: Synthetic oligonucleotide
  Target: ATXN2; (-) strand; PAM type: NRG; PAM sequence: GGG
gatgttaatttaaggcccaa

SEQ ID NO: 21555 - DNA, 20 bp, Artificial Sequence
  Description of Artificial Sequence: Synthetic oligonucleotide
  Target: ATXN2; (-) strand; PAM type: NRG; PAM sequence: AGG
tgatgttaatttaaggccca

SEQ ID NO: 21556 - DNA, 20 bp, Artificial Sequence
  Description of Artificial Sequence: Synthetic oligonucleotide
  Target: ATXN2; (-) strand; PAM type: NRG; PAM sequence: AAG
ctgatgttaatttaaggccc

SEQ ID NO: 21557 - DNA, 20 bp, Artificial Sequence
  Description of Artificial Sequence: Synthetic oligonucleotide
  Target: ATXN2; (-) strand; PAM type: NRG; PAM sequence: AGG
ccaccactgatgttaattta

SEQ ID NO: 21558 - DNA, 20 bp, Artificial Sequence
  Description of Artificial Sequence: Synthetic oligonucleotide
  Target: ATXN2; (-) strand; PAM type: NRG; PAM sequence: AAG
gccaccactgatgttaattt

SEQ ID NO: 21559 - DNA, 20 bp, Artificial Sequence
  Description of Artificial Sequence: Synthetic oligonucleotide
  Target: ATXN2; (-) strand; PAM type: NRG; PAM sequence: TGG
ggcctgtggcagctattttc

SEQ ID NO: 21560 - DNA, 20 bp, Artificial Sequence
  Description of Artificial Sequence: Synthetic oligonucleotide
  Target: ATXN2; (-) strand; PAM type: NRG; PAM sequence: CAG
gtctcacccaaggcctgtgg

SEQ ID NO: 21561 - DNA, 20 bp, Artificial Sequence
  Description of Artificial Sequence: Synthetic oligonucleotide
  Target: ATXN2; (-) strand; PAM type: NRG; PAM sequence: TGG
ttggtctcacccaaggcctg

SEQ ID NO: 21562 - DNA, 20 bp, Artificial Sequence
  Description of Artificial Sequence: Synthetic oligonucleotide
  Target: ATXN2; (-) strand; PAM type: NRG; PAM sequence: AGG
actgtacttggtctcaccca

SEQ ID NO: 21563 - DNA, 20 bp, Artificial Sequence
  Description of Artificial Sequence: Synthetic oligonucleotide
  Target: ATXN2; (-) strand; PAM type: NRG; PAM sequence: AAG
aactgtacttggtctcaccc

SEQ ID NO: 21564 - DNA, 20 bp, Artificial Sequence
  Description of Artificial Sequence: Synthetic oligonucleotide
  Target: ATXN2; (-) strand; PAM type: NRG; PAM sequence: TGG
accgtcactggaactgtact

SEQ ID NO: 21565 - DNA, 20 bp, Artificial Sequence
  Description of Artificial Sequence: Synthetic oligonucleotide
  Target: ATXN2; (-) strand; PAM type: NRG; PAM sequence: TGG
actgccatggccaccgtcac

SEQ ID NO: 21566 - DNA, 20 bp, Artificial Sequence
  Description of Artificial Sequence: Synthetic oligonucleotide
  Target: ATXN2; (-) strand; PAM type: NRG; PAM sequence: TGG
gggtgacacaagcactgcca

SEQ ID NO: 21567 - DNA, 20 bp, Artificial Sequence
  Description of Artificial Sequence: Synthetic oligonucleotide
  Target: ATXN2; (-) strand; PAM type: NRG; PAM sequence: AAG
agtttggggaagggtgacac

SEQ ID NO: 21568 - DNA, 20 bp, Artificial Sequence
  Description of Artificial Sequence: Synthetic oligonucleotide
  Target: ATXN2; (-) strand; PAM type: NRG; PAM sequence: GGG
gctgcttggagtttggggaa

SEQ ID NO: 21569 - DNA, 20 bp, Artificial Sequence
  Description of Artificial Sequence: Synthetic oligonucleotide
  Target: ATXN2; (-) strand; PAM type: NRG; PAM sequence: AGG
agctgcttggagtttgggga

SEQ ID NO: 21570 - DNA, 20 bp, Artificial Sequence
  Description of Artificial Sequence: Synthetic oligonucleotide
  Target: ATXN2; (-) strand; PAM type: NRG; PAM sequence: AAG
gagctgcttggagtttgggg

SEQ ID NO: 21571 - DNA, 20 bp, Artificial Sequence
  Description of Artificial Sequence: Synthetic oligonucleotide
  Target: ATXN2; (-) strand; PAM type: NRG; PAM sequence: GGG
gctgagctgcttggagtttg

SEQ ID NO: 21572 - DNA, 20 bp, Artificial Sequence
  Description of Artificial Sequence: Synthetic oligonucleotide
  Target: ATXN2; (-) strand; PAM type: NRG; PAM sequence: GGG
tgctgagctgcttggagttt

SEQ ID NO: 21573 - DNA, 20 bp, Artificial Sequence
  Description of Artificial Sequence: Synthetic oligonucleotide
  Target: ATXN2; (-) strand; PAM type: NRG; PAM sequence: TGG
gtgctgagctgcttggagtt

SEQ ID NO: 21574 - DNA, 20 bp, Artificial Sequence
  Description of Artificial Sequence: Synthetic oligonucleotide
  Target: ATXN2; (-) strand; PAM type: NRG; PAM sequence: GAG
tctttgtgctgagctgcttg

SEQ ID NO: 21575 - DNA, 20 bp, Artificial Sequence
  Description of Artificial Sequence: Synthetic oligonucleotide
  Target: ATXN2; (-) strand; PAM type: NRG; PAM sequence: TGG
tctctttgtgctgagctgct

SEQ ID NO: 21576 - DNA, 20 bp, Artificial Sequence
  Description of Artificial Sequence: Synthetic oligonucleotide
  Target: ATXN2; (-) strand; PAM type: NRG; PAM sequence: GAG
atggagtctctctttgtgct

SEQ ID NO: 21577 - DNA, 20 bp, Artificial Sequence
  Description of Artificial Sequence: Synthetic oligonucleotide
  Target: ATXN2; (-) strand; PAM type: NRG; PAM sequence: GAG
tacatttctccaaacaaatg

SEQ ID NO: 21578 - DNA, 20 bp, Artificial Sequence
  Description of Artificial Sequence: Synthetic oligonucleotide
  Target: ATXN2; (-) strand; PAM type: NRG; PAM sequence: TGG
cttacatttctccaaacaaa

SEQ ID NO: 21579 - DNA, 20 bp, Artificial Sequence
  Description of Artificial Sequence: Synthetic oligonucleotide
  Target: ATXN2; (-) strand; PAM type: NRG; PAM sequence: CAG
gaattccctgtattaccagg

SEQ ID NO: 21580 - DNA, 20 bp, Artificial Sequence
  Description of Artificial Sequence: Synthetic oligonucleotide
  Target: ATXN2; (-) strand; PAM type: NRG; PAM sequence: AGG
ggagaattccctgtattacc

SEQ ID NO: 21581 - DNA, 20 bp, Artificial Sequence
  Description of Artificial Sequence: Synthetic oligonucleotide
  Target: ATXN2; (-) strand; PAM type: NRG; PAM sequence: CAG
gggagaattccctgtattac

SEQ ID NO: 21582 - DNA, 20 bp, Artificial Sequence
  Description of Artificial Sequence: Synthetic oligonucleotide
  Target: ATXN2; (-) strand; PAM type: NRG; PAM sequence: GAG
tagtcttggggaagatctgg

SEQ ID NO: 21583 - DNA, 20 bp, Artificial Sequence
  Description of Artificial Sequence: Synthetic oligonucleotide
  Target: ATXN2; (-) strand; PAM type: NRG; PAM sequence: GGG
ggtagtcttggggaagatct

SEQ ID NO: 21584 - DNA, 20 bp, Artificial Sequence
  Description of Artificial Sequence: Synthetic oligonucleotide
  Target: ATXN2; (-) strand; PAM type: NRG; PAM sequence: TGG
tggtagtcttggggaagatc

SEQ ID NO: 21585 - DNA, 20 bp, Artificial Sequence
  Description of Artificial Sequence: Synthetic oligonucleotide
  Target: ATXN2; (-) strand; PAM type: NRG; PAM sequence: AAG
tcaccttggtagtcttgggg

SEQ ID NO: 21586 - DNA, 20 bp, Artificial Sequence
  Description of Artificial Sequence: Synthetic oligonucleotide
  Target: ATXN2; (-) strand; PAM type: NRG; PAM sequence: GGG
gtatcaccttggtagtcttg

SEQ ID NO: 21587 - DNA, 20 bp, Artificial Sequence
  Description of Artificial Sequence: Synthetic oligonucleotide
  Target: ATXN2; (-) strand; PAM type: NRG; PAM sequence: GGG
ggtatcaccttggtagtctt

SEQ ID NO: 21588 - DNA, 20 bp, Artificial Sequence
  Description of Artificial Sequence: Synthetic oligonucleotide
  Target: ATXN2; (-) strand; PAM type: NRG; PAM sequence: TGG
aggtatcaccttggtagtct

SEQ ID NO: 21589 - DNA, 20 bp, Artificial Sequence
  Description of Artificial Sequence: Synthetic oligonucleotide
  Target: ATXN2; (-) strand; PAM type: NRG; PAM sequence: TAG
ctgtagaggtatcaccttgg

SEQ ID NO: 21590 - DNA, 20 bp, Artificial Sequence
  Description of Artificial Sequence: Synthetic oligonucleotide
  Target: ATXN2; (-) strand; PAM type: NRG; PAM sequence: TGG
actctgtagaggtatcacct

SEQ ID NO: 21591 - DNA, 20 bp, Artificial Sequence
  Description of Artificial Sequence: Synthetic oligonucleotide
  Target: ATXN2; (-) strand; PAM type: NRG; PAM sequence: AGG
gtaatgttgtgactctgtag

SEQ ID NO: 21592 - DNA, 20 bp, Artificial Sequence
  Description of Artificial Sequence: Synthetic oligonucleotide
  Target: ATXN2; (-) strand; PAM type: NRG; PAM sequence: GAG
agtaatgttgtgactctgta

SEQ ID NO: 21593 - DNA, 20 bp, Artificial Sequence
  Description of Artificial Sequence: Synthetic oligonucleotide
  Target: ATXN2; (-) strand; PAM type: NRG; PAM sequence: TAG
ctagtaatgttgtgactctg

SEQ ID NO: 21594 - DNA, 20 bp, Artificial Sequence
  Description of Artificial Sequence: Synthetic oligonucleotide
  Target: ATXN2; (-) strand; PAM type: NRG; PAM sequence: TAG
attagagggcaccccaagac

SEQ ID NO: 21595 - DNA, 20 bp, Artificial Sequence
  Description of Artificial Sequence: Synthetic oligonucleotide
  Target: ATXN2; (-) strand; PAM type: NRG; PAM sequence: AAG
catgcattagagggcacccc

SEQ ID NO: 21596 - DNA, 20 bp, Artificial Sequence
  Description of Artificial Sequence: Synthetic oligonucleotide
  Target: ATXN2; (-) strand; PAM type: NRG; PAM sequence: GGG
gcagccatacatgcattaga

SEQ ID NO: 21597 - DNA, 20 bp, Artificial Sequence
  Description of Artificial Sequence: Synthetic oligonucleotide
  Target: ATXN2; (-) strand; PAM type: NRG; PAM sequence: AGG
tgcagccatacatgcattag

SEQ ID NO: 21598 - DNA, 20 bp, Artificial Sequence
  Description of Artificial Sequence: Synthetic oligonucleotide
  Target: ATXN2; (-) strand; PAM type: NRG; PAM sequence: GAG
ctgcagccatacatgcatta

SEQ ID NO: 21599 - DNA, 20 bp, Artificial Sequence
  Description of Artificial Sequence: Synthetic oligonucleotide
  Target: ATXN2; (-) strand; PAM type: NRG; PAM sequence: TAG
cactgcagccatacatgcat

SEQ ID NO: 21600 - DNA, 20 bp, Artificial Sequence
  Description of Artificial Sequence: Synthetic oligonucleotide
  Target: ATXN2; (-) strand; PAM type: NRG; PAM sequence: CAG
atctaagtcttcgctcactg

SEQ ID NO: 21601 - DNA, 20 bp, Artificial Sequence
  Description of Artificial Sequence: Synthetic oligonucleotide
  Target: ATXN2; (-) strand; PAM type: NRG; PAM sequence: AAG
ggaattaagtgttgtcatct

SEQ ID NO: 21602 - DNA, 20 bp, Artificial Sequence
  Description of Artificial Sequence: Synthetic oligonucleotide
  Target: ATXN2; (-) strand; PAM type: NRG; PAM sequence: AAG
tcaagtattcaaagggaatt

SEQ ID NO: 21603 - DNA, 20 bp, Artificial Sequence
  Description of Artificial Sequence: Synthetic oligonucleotide
  Target: ATXN2; (-) strand; PAM type: NRG; PAM sequence: GGG
aggtttttcaagtattcaaa

SEQ ID NO: 21604 - DNA, 20 bp, Artificial Sequence
  Description of Artificial Sequence: Synthetic oligonucleotide
  Target: ATXN2; (-) strand; PAM type: NRG; PAM sequence: AGG
aaggtttttcaagtattcaa

SEQ ID NO: 21605 - DNA, 20 bp, Artificial Sequence
  Description of Artificial Sequence: Synthetic oligonucleotide
  Target: ATXN2; (-) strand; PAM type: NRG; PAM sequence: AAG
gaaggtttttcaagtattca

SEQ ID NO: 21606 - DNA, 20 bp, Artificial Sequence
  Description of Artificial Sequence: Synthetic oligonucleotide
  Target: ATXN2; (-) strand; PAM type: NRG; PAM sequence: AAG
tcttcttgagaaggtttttc

SEQ ID NO: 21607 - DNA, 20 bp, Artificial Sequence
  Description of Artificial Sequence: Synthetic oligonucleotide
  Target: ATXN2; (-) strand; PAM type: NRG; PAM sequence: AGG
ggctcccattcttcttgaga

SEQ ID NO: 21608 - DNA, 20 bp, Artificial Sequence
  Description of Artificial Sequence: Synthetic oligonucleotide
  Target: ATXN2; (-) strand; PAM type: NRG; PAM sequence: AAG
cggctcccattcttcttgag

SEQ ID NO: 21609 - DNA, 20 bp, Artificial Sequence
  Description of Artificial Sequence: Synthetic oligonucleotide
  Target: ATXN2; (-) strand; PAM type: NRG; PAM sequence: GAG
atccggctcccattcttctt

SEQ ID NO: 21610 - DNA, 20 bp, Artificial Sequence
  Description of Artificial Sequence: Synthetic oligonucleotide
  Target: ATXN2; (-) strand; PAM type: NRG; PAM sequence: CGG
caggcgttagccactgcatc

SEQ ID NO: 21611 - DNA, 20 bp, Artificial Sequence
  Description of Artificial Sequence: Synthetic oligonucleotide
  Target: ATXN2; (-) strand; PAM type: NRG; PAM sequence: TAG
agtgttgggattacaggcgt

SEQ ID NO: 21612 - DNA, 20 bp, Artificial Sequence
  Description of Artificial Sequence: Synthetic oligonucleotide
  Target: ATXN2; (-) strand; PAM type: NRG; PAM sequence: AGG
tctcagagtgttgggattac

SEQ ID NO: 21613 - DNA, 20 bp, Artificial Sequence
  Description of Artificial Sequence: Synthetic oligonucleotide
  Target: ATXN2; (-) strand; PAM type: NRG; PAM sequence: CAG
ctctcagagtgttgggatta

SEQ ID NO: 21614 - DNA, 20 bp, Artificial Sequence
  Description of Artificial Sequence: Synthetic oligonucleotide
  Target: ATXN2; (-) strand; PAM type: NRG; PAM sequence: GGG
ccttggcctctcagagtgtt

SEQ ID NO: 21615 - DNA, 20 bp, Artificial Sequence
  Description of Artificial Sequence: Synthetic oligonucleotide
  Target: ATXN2; (-) strand; PAM type: NRG; PAM sequence: TGG
gccttggcctctcagagtgt

SEQ ID NO: 21616 - DNA, 20 bp, Artificial Sequence
  Description of Artificial Sequence: Synthetic oligonucleotide
  Target: ATXN2; (-) strand; PAM type: NRG; PAM sequence: GAG
ctgtccgccttggcctctca

SEQ ID NO: 21617 - DNA, 20 bp, Artificial Sequence
  Description of Artificial Sequence: Synthetic oligonucleotide
  Target: ATXN2; (-) strand; PAM type: NRG; PAM sequence: CAG
atctgtccgccttggcctct

SEQ ID NO: 21618 - DNA, 20 bp, Artificial Sequence
  Description of Artificial Sequence: Synthetic oligonucleotide
  Target: ATXN2; (-) strand; PAM type: NRG; PAM sequence: TGG
acctcgtgatctgtccgcct

SEQ ID NO: 21619 - DNA, 20 bp, Artificial Sequence
  Description of Artificial Sequence: Synthetic oligonucleotide
  Target: ATXN2; (-) strand; PAM type: NRG; PAM sequence: TGG
tttcaccatgttggtcaggc

SEQ ID NO: 21620 - DNA, 20 bp, Artificial Sequence
  Description of Artificial Sequence: Synthetic oligonucleotide
  Target: ATXN2; (-) strand; PAM type: NRG; PAM sequence: AGG
ggtgtttcaccatgttggtc

SEQ ID NO: 21621 - DNA, 20 bp, Artificial Sequence
  Description of Artificial Sequence: Synthetic oligonucleotide
  Target: ATXN2; (-) strand; PAM type: NRG; PAM sequence: CAG
tggtgtttcaccatgttggt

SEQ ID NO: 21622 - DNA, 20 bp, Artificial Sequence
  Description of Artificial Sequence: Synthetic oligonucleotide
  Target: ATXN2; (-) strand; PAM type: NRG; PAM sequence: TGG
aatatggtgtttcaccatgt

SEQ ID NO: 21623 - DNA, 20 bp, Artificial Sequence
  Description of Artificial Sequence: Synthetic oligonucleotide
  Target: ATXN2; (-) strand; PAM type: NRG; PAM sequence: TGG
ttttgtatttttagtaaata

SEQ ID NO: 21624 - DNA, 20 bp, Artificial Sequence
  Description of Artificial Sequence: Synthetic oligonucleotide
  Target: ATXN2; (-) strand; PAM type: NRG; PAM sequence: TAG
ctggctaatttttgtatttt

SEQ ID NO: 21625 - DNA, 20 bp, Artificial Sequence
  Description of Artificial Sequence: Synthetic oligonucleotide
  Target: ATXN2; (-) strand; PAM type: NRG; PAM sequence: TGG
caggtgcgtgccaccacgcc

SEQ ID NO: 21626 - DNA, 20 bp, Artificial Sequence
  Description of Artificial Sequence: Synthetic oligonucleotide
  Target: ATXN2; (-) strand; PAM type: NRG; PAM sequence: AGG
tcctgagtagctgggattac

SEQ ID NO: 21627 - DNA, 20 bp, Artificial Sequence
  Description of Artificial Sequence: Synthetic oligonucleotide
  Target: ATXN2; (-) strand; PAM type: NRG; PAM sequence: CAG
ctcctgagtagctgggatta

SEQ ID NO: 21628 - DNA, 20 bp, Artificial Sequence
  Description of Artificial Sequence: Synthetic oligonucleotide
  Target: ATXN2; (-) strand; PAM type: NRG; PAM sequence: GGG
cctcagcctcctgagtagct

SEQ ID NO: 21629 - DNA, 20 bp, Artificial Sequence
  Description of Artificial Sequence: Synthetic oligonucleotide
  Target: ATXN2; (-) strand; PAM type: NRG; PAM sequence: TGG
gcctcagcctcctgagtagc

SEQ ID NO: 21630 - DNA, 20 bp, Artificial Sequence
  Description of Artificial Sequence: Synthetic oligonucleotide
  Target: ATXN2; (-) strand; PAM type: NRG; PAM sequence: TAG
tcctgcctcagcctcctgag

SEQ ID NO: 21631 - DNA, 20 bp, Artificial Sequence
  Description of Artificial Sequence: Synthetic oligonucleotide
  Target: ATXN2; (-) strand; PAM type: NRG; PAM sequence: GAG
ttctcctgcctcagcctcct

SEQ ID NO: 21632 - DNA, 20 bp, Artificial Sequence
  Description of Artificial Sequence: Synthetic oligonucleotide
  Target: ATXN2; (-) strand; PAM type: NRG; PAM sequence: CAG
ttcaagcaattctcctgcct

SEQ ID NO: 21633 - DNA, 20 bp, Artificial Sequence
  Description of Artificial Sequence: Synthetic oligonucleotide
  Target: ATXN2; (-) strand; PAM type: NRG; PAM sequence: AAG
aacctccgtctcccggattc

SEQ ID NO: 21634 - DNA, 20 bp, Artificial Sequence
  Description of Artificial Sequence: Synthetic oligonucleotide
  Target: ATXN2; (-) strand; PAM type: NRG; PAM sequence: CGG
tcaccgcaacctccgtctcc

SEQ ID NO: 21635 - DNA, 20 bp, Artificial Sequence
  Description of Artificial Sequence: Synthetic oligonucleotide
  Target: ATXN2; (-) strand; PAM type: NRG; PAM sequence: CAG
caggctggagtgcagtggca

SEQ ID NO: 21636 - DNA, 20 bp, Artificial Sequence
  Description of Artificial Sequence: Synthetic oligonucleotide
  Target: ATXN2; (-) strand; PAM type: NRG; PAM sequence: TGG
tcgcccaggctggagtgcag

SEQ ID NO: 21637 - DNA, 20 bp, Artificial Sequence
  Description of Artificial Sequence: Synthetic oligonucleotide
  Target: ATXN2; (-) strand; PAM type: NRG; PAM sequence: CAG
ctgtcgcccaggctggagtg

SEQ ID NO: 21638 - DNA, 20 bp, Artificial Sequence
  Description of Artificial Sequence: Synthetic oligonucleotide
  Target: ATXN2; (-) strand; PAM type: NRG; PAM sequence: GAG
tcgctctgtcgcccaggctg

SEQ ID NO: 21639 - DNA, 20 bp, Artificial Sequence
  Description of Artificial Sequence: Synthetic oligonucleotide
  Target: ATXN2; (-) strand; PAM type: NRG; PAM sequence: TGG
tctcgctctgtcgcccaggc

SEQ ID NO: 21640 - DNA, 20 bp, Artificial Sequence
  Description of Artificial Sequence: Synthetic oligonucleotide
  Target: ATXN2; (-) strand; PAM type: NRG; PAM sequence: AGG
agagtctcgctctgtcgccc

SEQ ID NO: 21641 - DNA, 20 bp, Artificial Sequence
  Description of Artificial Sequence: Synthetic oligonucleotide
  Target: ATXN2; (-) strand; PAM type: NRG; PAM sequence: CAG
cagagtctcgctctgtcgcc

SEQ ID NO: 21642 - DNA, 20 bp, Artificial Sequence
  Description of Artificial Sequence: Synthetic oligonucleotide
  Target: ATXN2; (-) strand; PAM type: NRG; PAM sequence: GAG
ttttttctgtttttgagaca

SEQ ID NO: 21643 - DNA, 20 bp, Artificial Sequence
  Description of Artificial Sequence: Synthetic oligonucleotide
  Target: ATXN2; (-) strand; PAM type: NRG; PAM sequence: CAG
ttttttttctgtttttgaga

SEQ ID NO: 21644 - DNA, 20 bp, Artificial Sequence
  Description of Artificial Sequence: Synthetic oligonucleotide
  Target: ATXN2; (-) strand; PAM type: NRG; PAM sequence: GAG
ttttttttttttctgttttt

SEQ ID NO: 21645 - DNA, 20 bp, Artificial Sequence
  Description of Artificial Sequence: Synthetic oligonucleotide
  Target: ATXN2; (-) strand; PAM type: NRG; PAM sequence: TGG
gtattctgttctttgtagtc

SEQ ID NO: 21646 - DNA, 20 bp, Artificial Sequence
  Description of Artificial Sequence: Synthetic oligonucleotide
  Target: ATXN2; (-) strand; PAM type: NRG; PAM sequence: TAG
gttgggtattctgttctttg

SEQ ID NO: 21647 - DNA, 20 bp, Artificial Sequence
  Description of Artificial Sequence: Synthetic oligonucleotide
  Target: ATXN2; (-) strand; PAM type: NRG; PAM sequence: GGG
tgtctgggcattgaagagtt

SEQ ID NO: 21648 - DNA, 20 bp, Artificial Sequence
  Description of Artificial Sequence: Synthetic oligonucleotide
  Target: ATXN2; (-) strand; PAM type: NRG; PAM sequence: TGG
gtgtctgggcattgaagagt

SEQ ID NO: 21649 - DNA, 20 bp, Artificial Sequence
  Description of Artificial Sequence: Synthetic oligonucleotide
  Target: ATXN2; (-) strand; PAM type: NRG; PAM sequence: GAG
atcagtgtctgggcattgaa

SEQ ID NO: 21650 - DNA, 20 bp, Artificial Sequence
  Description of Artificial Sequence: Synthetic oligonucleotide
  Target: ATXN2; (-) strand; PAM type: NRG; PAM sequence: AAG
tcatcagtgtctgggcattg

SEQ ID NO: 21651 - DNA, 20 bp, Artificial Sequence
  Description of Artificial Sequence: Synthetic oligonucleotide
  Target: ATXN2; (-) strand; PAM type: NRG; PAM sequence: GGG
gtggatgttcatcagtgtct

SEQ ID NO: 21652 - DNA, 20 bp, Artificial Sequence
  Description of Artificial Sequence: Synthetic oligonucleotide
  Target: ATXN2; (-) strand; PAM type: NRG; PAM sequence: TGG
tgtggatgttcatcagtgtc

SEQ ID NO: 21653 - DNA, 20 bp, Artificial Sequence
  Description of Artificial Sequence: Synthetic oligonucleotide
  Target: ATXN2; (-) strand; PAM type: NRG; PAM sequence: CAG
tgatgcttgtggatgttcat

SEQ ID NO: 21654 - DNA, 20 bp, Artificial Sequence
  Description of Artificial Sequence: Synthetic oligonucleotide
  Target: ATXN2; (-) strand; PAM type: NRG; PAM sequence: TGG
tcagatggccttgatgcttg

SEQ ID NO: 21655 - DNA, 20 bp, Artificial Sequence
  Description of Artificial Sequence: Synthetic oligonucleotide
  Target: ATXN2; (-) strand; PAM type: NRG; PAM sequence: TGG
tgaggtcatgttttctcaga

SEQ ID NO: 21656 - DNA, 20 bp, Artificial Sequence
  Description of Artificial Sequence: Synthetic oligonucleotide
  Target: ATXN2; (-) strand; PAM type: NRG; PAM sequence: CAG
ttggtgaggtcatgttttct

SEQ ID NO: 21657 - DNA, 20 bp, Artificial Sequence
  Description of Artificial Sequence: Synthetic oligonucleotide
  Target: ATXN2; (-) strand; PAM type: NRG; PAM sequence: AGG
tatttttagttcatttggtg

SEQ ID NO: 21658 - DNA, 20 bp, Artificial Sequence
  Description of Artificial Sequence: Synthetic oligonucleotide
  Target: ATXN2; (-) strand; PAM type: NRG; PAM sequence: GAG
ttatttttagttcatttggt

SEQ ID NO: 21659 - DNA, 20 bp, Artificial Sequence
  Description of Artificial Sequence: Synthetic oligonucleotide
  Target: ATXN2; (-) strand; PAM type: NRG; PAM sequence: TGG
tcctttatttttagttcatt

SEQ ID NO: 21660 - DNA, 20 bp, Artificial Sequence
  Description of Artificial Sequence: Synthetic oligonucleotide
  Target: ATXN2; (-) strand; PAM type: NRG; PAM sequence: TAG
tcactggtgtcctttatttt

SEQ ID NO: 21661 - DNA, 20 bp, Artificial Sequence
  Description of Artificial Sequence: Synthetic oligonucleotide
  Target: ATXN2; (-) strand; PAM type: NRG; PAM sequence: TGG
atcacttgggaattggtcac

SEQ ID NO: 21662 - DNA, 20 bp, Artificial Sequence
  Description of Artificial Sequence: Synthetic oligonucleotide
  Target: ATXN2; (-) strand; PAM type: NRG; PAM sequence: TGG
atctcttatcacttgggaat

SEQ ID NO: 21663 - DNA, 20 bp, Artificial Sequence
  Description of Artificial Sequence: Synthetic oligonucleotide
  Target: ATXN2; (-) strand; PAM type: NRG; PAM sequence: GGG
tcacatatctcttatcactt

SEQ ID NO: 21664 - DNA, 20 bp, Artificial Sequence
  Description of Artificial Sequence: Synthetic oligonucleotide
  Target: ATXN2; (-) strand; PAM type: NRG; PAM sequence: TGG
ttcacatatctcttatcact

SEQ ID NO: 21665 - DNA, 20 bp, Artificial Sequence
  Description of Artificial Sequence: Synthetic oligonucleotide
  Target: ATXN2; (-) strand; PAM type: NRG; PAM sequence: AAG
tcagcttgaattctgtctga

SEQ ID NO: 21666 - DNA, 20 bp, Artificial Sequence
  Description of Artificial Sequence: Synthetic oligonucleotide
  Target: ATXN2; (-) strand; PAM type: NRG; PAM sequence: CAG
ttgaactttctcaaagcatt

SEQ ID NO: 21667 - DNA, 20 bp, Artificial Sequence
  Description of Artificial Sequence: Synthetic oligonucleotide
  Target: ATXN2; (-) strand; PAM type: NRG; PAM sequence: AAG
gatttcgttgaactttctca

SEQ ID NO: 21668 - DNA, 20 bp, Artificial Sequence
  Description of Artificial Sequence: Synthetic oligonucleotide
  Target: ATXN2; (-) strand; PAM type: NRG; PAM sequence: TGG
atttgttctctgtattatct

SEQ ID NO: 21669 - DNA, 20 bp, Artificial Sequence
  Description of Artificial Sequence: Synthetic oligonucleotide
  Target: ATXN2; (-) strand; PAM type: NRG; PAM sequence: AGG
agtctcttttttaaatttat

SEQ ID NO: 21670 - DNA, 20 bp, Artificial Sequence
  Description of Artificial Sequence: Synthetic oligonucleotide
  Target: ATXN2; (-) strand; PAM type: NRG; PAM sequence: TAG
cagtctcttttttaaattta

SEQ ID NO: 21671 - DNA, 20 bp, Artificial Sequence
  Description of Artificial Sequence: Synthetic oligonucleotide
  Target: ATXN2; (-) strand; PAM type: NRG; PAM sequence: CAG
ctttttactaataattattg

SEQ ID NO: 21672 - DNA, 20 bp, Artificial Sequence
  Description of Artificial Sequence: Synthetic oligonucleotide
  Target: ATXN2; (-) strand; PAM type: NRG; PAM sequence: GGG
caattgaatttttccacttt

SEQ ID NO: 21673 - DNA, 20 bp, Artificial Sequence
  Description of Artificial Sequence: Synthetic oligonucleotide
  Target: ATXN2; (-) strand; PAM type: NRG; PAM sequence: TGG
tcaattgaatttttccactt

SEQ ID NO: 21674 - DNA, 20 bp, Artificial Sequence
  Description of Artificial Sequence: Synthetic oligonucleotide
  Target: ATXN2; (-) strand; PAM type: NRG; PAM sequence: CAG
tgagagactgatgcattttt

SEQ ID NO: 21675 - DNA, 20 bp, Artificial Sequence
  Description of Artificial Sequence: Synthetic oligonucleotide
  Target: ATXN2; (-) strand; PAM type: NRG; PAM sequence: GAG
tgatacatttctgctattga

SEQ ID NO: 21676 - DNA, 20 bp, Artificial Sequence
  Description of Artificial Sequence: Synthetic oligonucleotide
  Target: ATXN2; (-) strand; PAM type: NRG; PAM sequence: GAG
cttgatacatttctgctatt

SEQ ID NO: 21677 - DNA, 20 bp, Artificial Sequence
  Description of Artificial Sequence: Synthetic oligonucleotide
  Target: ATXN2; (-) strand; PAM type: NRG; PAM sequence: AAG
ttttcaaatagcctgaattc

SEQ ID NO: 21678 - DNA, 20 bp, Artificial Sequence
  Description of Artificial Sequence: Synthetic oligonucleotide
  Target: ATXN2; (-) strand; PAM type: NRG; PAM sequence: TAG
cttggttgtttattttcaaa

SEQ ID NO: 21679 - DNA, 20 bp, Artificial Sequence
  Description of Artificial Sequence: Synthetic oligonucleotide
  Target: ATXN2; (-) strand; PAM type: NRG; PAM sequence: TGG
gtgagtcatcgtgcccaact

SEQ ID NO: 21680 - DNA, 20 bp, Artificial Sequence
  Description of Artificial Sequence: Synthetic oligonucleotide
  Target: ATXN2; (-) strand; PAM type: NRG; PAM sequence: GAG
agtgctaggattataagcgt

SEQ ID NO: 21681 - DNA, 20 bp, Artificial Sequence
  Description of Artificial Sequence: Synthetic oligonucleotide
  Target: ATXN2; (-) strand; PAM type: NRG; PAM sequence: AAG
tcctaaagtgctaggattat

SEQ ID NO: 21682 - DNA, 20 bp, Artificial Sequence
  Description of Artificial Sequence: Synthetic oligonucleotide
  Target: ATXN2; (-) strand; PAM type: NRG; PAM sequence: AGG
ccttggcatcctaaagtgct

SEQ ID NO: 21683 - DNA, 20 bp, Artificial Sequence
  Description of Artificial Sequence: Synthetic oligonucleotide
  Target: ATXN2; (-) strand; PAM type: NRG; PAM sequence: TAG
gccttggcatcctaaagtgc

SEQ ID NO: 21684 - DNA, 20 bp, Artificial Sequence
  Description of Artificial Sequence: Synthetic oligonucleotide
  Target: ATXN2; (-) strand; PAM type: NRG; PAM sequence: AAG
ccgcccgccttggcatccta

SEQ ID NO: 21685 - DNA, 20 bp, Artificial Sequence
  Description of Artificial Sequence: Synthetic oligonucleotide
  Target: ATXN2; (-) strand; PAM type: NRG; PAM sequence: TGG
tcagggtgatccgcccgcct

SEQ ID NO: 21686 - DNA, 20 bp, Artificial Sequence
  Description of Artificial Sequence: Synthetic oligonucleotide
  Target: ATXN2; (-) strand; PAM type: NRG; PAM sequence: GGG
gtcttgagctcctgacctca

SEQ ID NO: 21687 - DNA, 20 bp, Artificial Sequence
  Description of Artificial Sequence: Synthetic oligonucleotide
  Target: ATXN2; (-) strand; PAM type: NRG; PAM sequence: AGG
ggtcttgagctcctgacctc

SEQ ID NO: 21688 - DNA, 20 bp, Artificial Sequence
  Description of Artificial Sequence: Synthetic oligonucleotide
  Target: ATXN2; (-) strand; PAM type: NRG; PAM sequence: CAG
tggtcttgagctcctgacct

SEQ ID NO: 21689 - DNA, 20 bp, Artificial Sequence
  Description of Artificial Sequence: Synthetic oligonucleotide
  Target: ATXN2; (-) strand; PAM type: NRG; PAM sequence: GAG
atatttgccaggctggtctt

SEQ ID NO: 21690 - DNA, 20 bp, Artificial Sequence
  Description of Artificial Sequence: Synthetic oligonucleotide
  Target: ATXN2; (-) strand; PAM type: NRG; PAM sequence: TGG
ttttgccatatttgccaggc

SEQ ID NO: 21691 - DNA, 20 bp, Artificial Sequence
  Description of Artificial Sequence: Synthetic oligonucleotide
  Target: ATXN2; (-) strand; PAM type: NRG; PAM sequence: AGG
ggggttttgccatatttgcc

SEQ ID NO: 21692 - DNA, 20 bp, Artificial Sequence
  Description of Artificial Sequence: Synthetic oligonucleotide
  Target: ATXN2; (-) strand; PAM type: NRG; PAM sequence: CAG
cggggttttgccatatttgc

SEQ ID NO: 21693 - DNA, 20 bp, Artificial Sequence
  Description of Artificial Sequence: Synthetic oligonucleotide
  Target: ATXN2; (-) strand; PAM type: NRG; PAM sequence: GGG
ttgtatttttagtaaagacg

SEQ ID NO: 21694 - DNA, 20 bp, Artificial Sequence
  Description of Artificial Sequence: Synthetic oligonucleotide
  Target: ATXN2; (-) strand; PAM type: NRG; PAM sequence: GGG
tttgtatttttagtaaagac

SEQ ID NO: 21695 - DNA, 20 bp, Artificial Sequence
  Description of Artificial Sequence: Synthetic oligonucleotide
  Target: ATXN2; (-) strand; PAM type: NRG; PAM sequence: CGG
ttttgtatttttagtaaaga

SEQ ID NO: 21696 - DNA, 20 bp, Artificial Sequence
  Description of Artificial Sequence: Synthetic oligonucleotide
  Target: ATXN2; (-) strand; PAM type: NRG; PAM sequence: AAG
tactttttgtatttttagta

SEQ ID NO: 21697 - DNA, 20 bp, Artificial Sequence
  Description of Artificial Sequence: Synthetic oligonucleotide
  Target: ATXN2; (-) strand; PAM type: NRG; PAM sequence: TAG
ccagctactttttgtatttt

SEQ ID NO: 21698 - DNA, 20 bp, Artificial Sequence
  Description of Artificial Sequence: Synthetic oligonucleotide
  Target: ATXN2; (-) strand; PAM type: NRG; PAM sequence: CAG
caagcatgtgccaccacgcc

SEQ ID NO: 21699 - DNA, 20 bp, Artificial Sequence
  Description of Artificial Sequence: Synthetic oligonucleotide
  Target: ATXN2; (-) strand; PAM type: NRG; PAM sequence: AAG
tcccaagtagctgggattac

SEQ ID NO: 21700 - DNA, 20 bp, Artificial Sequence
  Description of Artificial Sequence: Synthetic oligonucleotide
  Target: ATXN2; (-) strand; PAM type: NRG; PAM sequence: GGG
cctcagcctcccaagtagct

SEQ ID NO: 21701 - DNA, 20 bp, Artificial Sequence
  Description of Artificial Sequence: Synthetic oligonucleotide
  Target: ATXN2; (-) strand; PAM type: NRG; PAM sequence: TGG
gcctcagcctcccaagtagc

SEQ ID NO: 21702 - DNA, 20 bp, Artificial Sequence
  Description of Artificial Sequence: Synthetic oligonucleotide
  Target: ATXN2; (-) strand; PAM type: NRG; PAM sequence: TAG
ttctgcctcagcctcccaag

SEQ ID NO: 21703 - DNA, 20 bp, Artificial Sequence
  Description of Artificial Sequence: Synthetic oligonucleotide
  Target: ATXN2; (-) strand; PAM type: NRG; PAM sequence: AAG
ttcttctgcctcagcctccc

SEQ ID NO: 21704 - DNA, 20 bp, Artificial Sequence
  Description of Artificial Sequence: Synthetic oligonucleotide
  Target: ATXN2; (-) strand; PAM type: NRG; PAM sequence: CAG
ttcaagcgattcttctgcct

SEQ ID NO: 21705 - DNA, 20 bp, Artificial Sequence
  Description of Artificial Sequence: Synthetic oligonucleotide
  Target: ATXN2; (-) strand; PAM type: NRG; PAM sequence: AAG
aacctccaactcccaggttc

SEQ ID NO: 21706 - DNA, 20 bp, Artificial Sequence
  Description of Artificial Sequence: Synthetic oligonucleotide
  Target: ATXN2; (-) strand; PAM type: NRG; PAM sequence: AGG
cactacaacctccaactccc

SEQ ID NO: 21707 - DNA, 20 bp, Artificial Sequence
  Description of Artificial Sequence: Synthetic oligonucleotide
  Target: ATXN2; (-) strand; PAM type: NRG; PAM sequence: CAG
tcactacaacctccaactcc

SEQ ID NO: 21708 - DNA, 20 bp, Artificial Sequence
  Description of Artificial Sequence: Synthetic oligonucleotide
  Target: ATXN2; (-) strand; PAM type: NRG; PAM sequence: TGG
ggagtgcagtggtgccatct

SEQ ID NO: 21709 - DNA, 20 bp, Artificial Sequence
  Description of Artificial Sequence: Synthetic oligonucleotide
  Target: ATXN2; (-) strand; PAM type: NRG; PAM sequence: TGG
gttaccagcctggagtgcag

SEQ ID NO: 21710 - DNA, 20 bp, Artificial Sequence
  Description of Artificial Sequence: Synthetic oligonucleotide
  Target: ATXN2; (-) strand; PAM type: NRG; PAM sequence: CAG
tctgttaccagcctggagtg

SEQ ID NO: 21711 - DNA, 20 bp, Artificial Sequence
  Description of Artificial Sequence: Synthetic oligonucleotide
  Target: ATXN2; (-) strand; PAM type: NRG; PAM sequence: GAG
catgctctgttaccagcctg

SEQ ID NO: 21712 - DNA, 20 bp, Artificial Sequence
  Description of Artificial Sequence: Synthetic oligonucleotide
  Target: ATXN2; (-) strand; PAM type: NRG; PAM sequence: TGG
gtcatgctctgttaccagcc

SEQ ID NO: 21713 - DNA, 20 bp, Artificial Sequence
  Description of Artificial Sequence: Synthetic oligonucleotide
  Target: ATXN2; (-) strand; PAM type: NRG; PAM sequence: CAG
acagagtcatgctctgttac

SEQ ID NO: 21714 - DNA, 20 bp, Artificial Sequence
  Description of Artificial Sequence: Synthetic oligonucleotide
  Target: ATXN2; (-) strand; PAM type: NRG; PAM sequence: GAG
ttttttttttttttgagaca

SEQ ID NO: 21715 - DNA, 20 bp, Artificial Sequence
  Description of Artificial Sequence: Synthetic oligonucleotide
  Target: ATXN2; (-) strand; PAM type: NRG; PAM sequence: CAG
ttttttttttttttttgaga

SEQ ID NO: 21716 - DNA, 20 bp, Artificial Sequence
  Description of Artificial Sequence: Synthetic oligonucleotide
  Target: ATXN2; (-) strand; PAM type: NRG; PAM sequence: GAG
tttttttttttttttttttt

SEQ ID NO: 21717 - DNA, 20 bp, Artificial Sequence
  Description of Artificial Sequence: Synthetic oligonucleotide
  Target: ATXN2; (-) strand; PAM type: NRG; PAM sequence: AAG
catccttttcttgcagattg

SEQ ID NO: 21718 - DNA, 20 bp, Artificial Sequence
  Description of Artificial Sequence: Synthetic oligonucleotide
  Target: ATXN2; (-) strand; PAM type: NRG; PAM sequence: CAG
ttgttaacatccttttcttg

SEQ ID NO: 21719 - DNA, 20 bp, Artificial Sequence
  Description of Artificial Sequence: Synthetic oligonucleotide
  Target: ATXN2; (-) strand; PAM type: NRG; PAM sequence: AGG
cagtgagtttttgcaccttc

SEQ ID NO: 21720 - DNA, 20 bp, Artificial Sequence
  Description of Artificial Sequence: Synthetic oligonucleotide
  Target: ATXN2; (-) strand; PAM type: NRG; PAM sequence: CAG
ccagtgagtttttgcacctt

SEQ ID NO: 21721 - DNA, 20 bp, Artificial Sequence
  Description of Artificial Sequence: Synthetic oligonucleotide
  Target: ATXN2; (-) strand; PAM type: NRG; PAM sequence: GAG
tctgtgtacttgttaccagt

SEQ ID NO: 21722 - DNA, 20 bp, Artificial Sequence
  Description of Artificial Sequence: Synthetic oligonucleotide
  Target: ATXN2; (-) strand; PAM type: NRG; PAM sequence: CAG
tttttctgtgtacttgttac

SEQ ID NO: 21723 - DNA, 20 bp, Artificial Sequence
  Description of Artificial Sequence: Synthetic oligonucleotide
  Target: ATXN2; (-) strand; PAM type: NRG; PAM sequence: CAG
tagtttatacaccacaatta

SEQ ID NO: 21724 - DNA, 20 bp, Artificial Sequence
  Description of Artificial Sequence: Synthetic oligonucleotide
  Target: ATXN2; (-) strand; PAM type: NRG; PAM sequence: TAG
cctgctcaaaatatgagtag

SEQ ID NO: 21725 - DNA, 20 bp, Artificial Sequence
  Description of Artificial Sequence: Synthetic oligonucleotide
  Target: ATXN2; (-) strand; PAM type: NRG; PAM sequence: TAG
cttcctgctcaaaatatgag

SEQ ID NO: 21726 - DNA, 20 bp, Artificial Sequence
  Description of Artificial Sequence: Synthetic oligonucleotide
  Target: ATXN2; (-) strand; PAM type: NRG; PAM sequence: GAG
attcttcctgctcaaaatat

SEQ ID NO: 21727 - DNA, 20 bp, Artificial Sequence
  Description of Artificial Sequence: Synthetic oligonucleotide
  Target: ATXN2; (-) strand; PAM type: NRG; PAM sequence: AGG
ttgtagttcttatttttgaa

SEQ ID NO: 21728 - DNA, 20 bp, Artificial Sequence
  Description of Artificial Sequence: Synthetic oligonucleotide
  Target: ATXN2; (-) strand; PAM type: NRG; PAM sequence: AAG
attgtagttcttatttttga

SEQ ID NO: 21729 - DNA, 20 bp, Artificial Sequence
  Description of Artificial Sequence: Synthetic oligonucleotide
  Target: ATXN2; (-) strand; PAM type: NRG; PAM sequence: TAG
cacaaaaaaaaaaaaaattg

SEQ ID NO: 21730 - DNA, 20 bp, Artificial Sequence
  Description of Artificial Sequence: Synthetic oligonucleotide
  Target: ATXN2; (-) strand; PAM type: NRG; PAM sequence: AAG
tccagcctgggcagcagagc

SEQ ID NO: 21731 - DNA, 20 bp, Artificial Sequence
  Description of Artificial Sequence: Synthetic oligonucleotide
  Target: ATXN2; (-) strand; PAM type: NRG; PAM sequence: GAG
gccgtccagcctgggcagca

SEQ ID NO: 21732 - DNA, 20 bp, Artificial Sequence
  Description of Artificial Sequence: Synthetic oligonucleotide
  Target: ATXN2; (-) strand; PAM type: NRG; PAM sequence: CAG
ctgccgtccagcctgggcag

SEQ ID NO: 21733 - DNA, 20 bp, Artificial Sequence
  Description of Artificial Sequence: Synthetic oligonucleotide
  Target: ATXN2; (-) strand; PAM type: NRG; PAM sequence: CAG
ccactgccgtccagcctggg

SEQ ID NO: 21734 - DNA, 20 bp, Artificial Sequence
  Description of Artificial Sequence: Synthetic oligonucleotide
  Target: ATXN2; (-) strand; PAM type: NRG; PAM sequence: GGG
gcgccactgccgtccagcct

SEQ ID NO: 21735 - DNA, 20 bp, Artificial Sequence
  Description of Artificial Sequence: Synthetic oligonucleotide
  Target: ATXN2; (-) strand; PAM type: NRG; PAM sequence: TGG
cgcgccactgccgtccagcc

SEQ ID NO: 21736 - DNA, 20 bp, Artificial Sequence
  Description of Artificial Sequence: Synthetic oligonucleotide
  Target: ATXN2; (-) strand; PAM type: NRG; PAM sequence: CAG
gagatcgcgccactgccgtc

SEQ ID NO: 21737 - DNA, 20 bp, Artificial Sequence
  Description of Artificial Sequence: Synthetic oligonucleotide
  Target: ATXN2; (-) strand; PAM type: NRG; PAM sequence: GAG
ggcggaggttgcagttagcc

SEQ ID NO: 21738 - DNA, 20 bp, Artificial Sequence
  Description of Artificial Sequence: Synthetic oligonucleotide
  Target: ATXN2; (-) strand; PAM type: NRG; PAM sequence: TAG
tgggaggcggaggttgcagt

SEQ ID NO: 21739 - DNA, 20 bp, Artificial Sequence
  Description of Artificial Sequence: Synthetic oligonucleotide
  Target: ATXN2; (-) strand; PAM type: NRG; PAM sequence: CAG
aacctgggaggcggaggttg

SEQ ID NO: 21740 - DNA, 20 bp, Artificial Sequence
  Description of Artificial Sequence: Synthetic oligonucleotide
  Target: ATXN2; (-) strand; PAM type: NRG; PAM sequence: AGG
cgcttgaacctgggaggcgg

SEQ ID NO: 21741 - DNA, 20 bp, Artificial Sequence
  Description of Artificial Sequence: Synthetic oligonucleotide
  Target: ATXN2; (-) strand; PAM type: NRG; PAM sequence: GAG
tcgcttgaacctgggaggcg

SEQ ID NO: 21742 - DNA, 20 bp, Artificial Sequence
  Description of Artificial Sequence: Synthetic oligonucleotide
  Target: ATXN2; (-) strand; PAM type: NRG; PAM sequence: CGG
aatcgcttgaacctgggagg

SEQ ID NO: 21743 - DNA, 20 bp, Artificial Sequence
  Description of Artificial Sequence: Synthetic oligonucleotide
  Target: ATXN2; (-) strand; PAM type: NRG; PAM sequence: AGG
gagaatcgcttgaacctggg

SEQ ID NO: 21744 - DNA, 20 bp, Artificial Sequence
  Description of Artificial Sequence: Synthetic oligonucleotide
  Target: ATXN2; (-) strand; PAM type: NRG; PAM sequence: GAG
ggagaatcgcttgaacctgg

SEQ ID NO: 21745 - DNA, 20 bp, Artificial Sequence
  Description of Artificial Sequence: Synthetic oligonucleotide
  Target: ATXN2; (-) strand; PAM type: NRG; PAM sequence: GGG
caggagaatcgcttgaacct

SEQ ID NO: 21746 - DNA, 20 bp, Artificial Sequence
  Description of Artificial Sequence: Synthetic oligonucleotide
  Target: ATXN2; (-) strand; PAM type: NRG; PAM sequence: TGG
gcaggagaatcgcttgaacc

SEQ ID NO: 21747 - DNA, 20 bp, Artificial Sequence
  Description of Artificial Sequence: Synthetic oligonucleotide
  Target: ATXN2; (-) strand; PAM type: NRG; PAM sequence: GAG
tactcaggaggctgaggcag

SEQ ID NO: 21748 - DNA, 20 bp, Artificial Sequence
  Description of Artificial Sequence: Synthetic oligonucleotide
  Target: ATXN2; (-) strand; PAM type: NRG; PAM sequence: AGG
gctactcaggaggctgaggc

SEQ ID NO: 21749 - DNA, 20 bp, Artificial Sequence
  Description of Artificial Sequence: Synthetic oligonucleotide
  Target: ATXN2; (-) strand; PAM type: NRG; PAM sequence: CAG
agctactcaggaggctgagg

SEQ ID NO: 21750 - DNA, 20 bp, Artificial Sequence
  Description of Artificial Sequence: Synthetic oligonucleotide
  Target: ATXN2; (-) strand; PAM type: NRG; PAM sequence: AGG
cctagctactcaggaggctg

SEQ ID NO: 21751 - DNA, 20 bp, Artificial Sequence
  Description of Artificial Sequence: Synthetic oligonucleotide
  Target: ATXN2; (-) strand; PAM type: NRG; PAM sequence: GAG
tcctagctactcaggaggct

SEQ ID NO: 21752 - DNA, 20 bp, Artificial Sequence
  Description of Artificial Sequence: Synthetic oligonucleotide
  Target: ATXN2; (-) strand; PAM type: NRG; PAM sequence: AGG
tgtaatcctagctactcagg

SEQ ID NO: 21753 - DNA, 20 bp, Artificial Sequence
  Description of Artificial Sequence: Synthetic oligonucleotide
  Target: ATXN2; (-) strand; PAM type: NRG; PAM sequence: GAG
ctgtaatcctagctactcag

SEQ ID NO: 21754 - DNA, 20 bp, Artificial Sequence
  Description of Artificial Sequence: Synthetic oligonucleotide
  Target: ATXN2; (-) strand; PAM type: NRG; PAM sequence: AGG
acctgtaatcctagctactc

SEQ ID NO: 21755 - DNA, 20 bp, Artificial Sequence
  Description of Artificial Sequence: Synthetic oligonucleotide
  Target: ATXN2; (-) strand; PAM type: NRG; PAM sequence: CAG
cacctgtaatcctagctact

SEQ ID NO: 21756 - DNA, 20 bp, Artificial Sequence
  Description of Artificial Sequence: Synthetic oligonucleotide
  Target: ATXN2; (-) strand; PAM type: NRG; PAM sequence: TAG
gtggcacgcacctgtaatcc

SEQ ID NO: 21757 - DNA, 20 bp, Artificial Sequence
  Description of Artificial Sequence: Synthetic oligonucleotide
  Target: ATXN2; (-) strand; PAM type: NRG; PAM sequence: TGG
caaaaattagccaggcgtgg

SEQ ID NO: 21758 - DNA, 20 bp, Artificial Sequence
  Description of Artificial Sequence: Synthetic oligonucleotide
  Target: ATXN2; (-) strand; PAM type: NRG; PAM sequence: TGG
atacaaaaattagccaggcg

SEQ ID NO: 21759 - DNA, 20 bp, Artificial Sequence
  Description of Artificial Sequence: Synthetic oligonucleotide
  Target: ATXN2; (-) strand; PAM type: NRG; PAM sequence: AGG
taaaaatacaaaaattagcc

SEQ ID NO: 21760 - DNA, 20 bp, Artificial Sequence
  Description of Artificial Sequence: Synthetic oligonucleotide
  Target: ATXN2; (-) strand; PAM type: NRG; PAM sequence: CAG
ctaaaaatacaaaaattagc

SEQ ID NO: 21761 - DNA, 20 bp, Artificial Sequence
  Description of Artificial Sequence: Synthetic oligonucleotide
  Target: ATXN2; (-) strand; PAM type: NRG; PAM sequence: TAG
tctactaaaaatacaaaaat

SEQ ID NO: 21762 - DNA, 20 bp, Artificial Sequence
  Description of Artificial Sequence: Synthetic oligonucleotide
  Target: ATXN2; (-) strand; PAM type: NRG; PAM sequence: TGG
cgagaccagcctgaccaacg

SEQ ID NO: 21763 - DNA, 20 bp, Artificial Sequence
  Description of Artificial Sequence: Synthetic oligonucleotide
  Target: ATXN2; (-) strand; PAM type: NRG; PAM sequence: CAG
caaggttaggagttcgagac

SEQ ID NO: 21764 - DNA, 20 bp, Artificial Sequence
  Description of Artificial Sequence: Synthetic oligonucleotide
  Target: ATXN2; (-) strand; PAM type: NRG; PAM sequence: GAG
aatcacaaggttaggagttc

SEQ ID NO: 21765 - DNA, 20 bp, Artificial Sequence
  Description of Artificial Sequence: Synthetic oligonucleotide
  Target: ATXN2; (-) strand; PAM type: NRG; PAM sequence: GAG
ggggcgaatcacaaggttag

SEQ ID NO: 21766 - DNA, 20 bp, Artificial Sequence
  Description of Artificial Sequence: Synthetic oligonucleotide
  Target: ATXN2; (-) strand; PAM type: NRG; PAM sequence: AGG
gtggggcgaatcacaaggtt

SEQ ID NO: 21767 - DNA, 20 bp, Artificial Sequence
  Description of Artificial Sequence: Synthetic oligonucleotide
  Target: ATXN2; (-) strand; PAM type: NRG; PAM sequence: TAG
ggtggggcgaatcacaaggt

SEQ ID NO: 21768 - DNA, 20 bp, Artificial Sequence
  Description of Artificial Sequence: Synthetic oligonucleotide
  Target: ATXN2; (-) strand; PAM type: NRG; PAM sequence: AGG
caaaggtggggcgaatcaca

SEQ ID NO: 21769 - DNA, 20 bp, Artificial Sequence
  Description of Artificial Sequence: Synthetic oligonucleotide
  Target: ATXN2; (-) strand; PAM type: NRG; PAM sequence: AAG
gcaaaggtggggcgaatcac

SEQ ID NO: 21770 - DNA, 20 bp, Artificial Sequence
  Description of Artificial Sequence: Synthetic oligonucleotide
  Target: ATXN2; (-) strand; PAM type: NRG; PAM sequence: GGG
cactttggaaggcaaaggtg

SEQ ID NO: 21771 - DNA, 20 bp, Artificial Sequence
  Description of Artificial Sequence: Synthetic oligonucleotide
  Target: ATXN2; (-) strand; PAM type: NRG; PAM sequence: GGG
gcactttggaaggcaaaggt

SEQ ID NO: 21772 - DNA, 20 bp, Artificial Sequence
  Description of Artificial Sequence: Synthetic oligonucleotide
  Target: ATXN2; (-) strand; PAM type: NRG; PAM sequence: TGG
agcactttggaaggcaaagg

SEQ ID NO: 21773 - DNA, 20 bp, Artificial Sequence
  Description of Artificial Sequence: Synthetic oligonucleotide
  Target: ATXN2; (-) strand; PAM type: NRG; PAM sequence: AGG
cccagcactttggaaggcaa

SEQ ID NO: 21774 - DNA, 20 bp, Artificial Sequence
  Description of Artificial Sequence: Synthetic oligonucleotide
  Target: ATXN2; (-) strand; PAM type: NRG; PAM sequence: AAG
tcccagcactttggaaggca

SEQ ID NO: 21775 - DNA, 20 bp, Artificial Sequence
  Description of Artificial Sequence: Synthetic oligonucleotide
  Target: ATXN2; (-) strand; PAM type: NRG; PAM sequence: AGG
cctaatcccagcactttgga

SEQ ID NO: 21776 - DNA, 20 bp, Artificial Sequence
  Description of Artificial Sequence: Synthetic oligonucleotide
  Target: ATXN2; (-) strand; PAM type: NRG; PAM sequence: AAG
gcctaatcccagcactttgg

SEQ ID NO: 21777 - DNA, 20 bp, Artificial Sequence
  Description of Artificial Sequence: Synthetic oligonucleotide
  Target: ATXN2; (-) strand; PAM type: NRG; PAM sequence: TGG
cacgcctaatcccagcactt

SEQ ID NO: 21778 - DNA, 20 bp, Artificial Sequence
  Description of Artificial Sequence: Synthetic oligonucleotide
  Target: ATXN2; (-) strand; PAM type: NRG; PAM sequence: CAG
tagtggctcacgcctaatcc

SEQ ID NO: 21779 - DNA, 20 bp, Artificial Sequence
  Description of Artificial Sequence: Synthetic oligonucleotide
  Target: ATXN2; (-) strand; PAM type: NRG; PAM sequence: TGG
aaaacaaaaccctggcctag

SEQ ID NO: 21780 - DNA, 20 bp, Artificial Sequence
  Description of Artificial Sequence: Synthetic oligonucleotide
  Target: ATXN2; (-) strand; PAM type: NRG; PAM sequence: TAG
aacaaaacaaaaccctggcc

SEQ ID NO: 21781 - DNA, 20 bp, Artificial Sequence
  Description of Artificial Sequence: Synthetic oligonucleotide
  Target: ATXN2; (-) strand; PAM type: NRG; PAM sequence: TGG
tacaaaacaaaacaaaaccc

SEQ ID NO: 21782 - DNA, 20 bp, Artificial Sequence
  Description of Artificial Sequence: Synthetic oligonucleotide
  Target: ATXN2; (-) strand; PAM type: NRG; PAM sequence: AAG
tccagtctgggcaacagagt

SEQ ID NO: 21783 - DNA, 20 bp, Artificial Sequence
  Description of Artificial Sequence: Synthetic oligonucleotide
  Target: ATXN2; (-) strand; PAM type: NRG; PAM sequence: GAG
gcactccagtctgggcaaca

SEQ ID NO: 21784 - DNA, 20 bp, Artificial Sequence
  Description of Artificial Sequence: Synthetic oligonucleotide
  Target: ATXN2; (-) strand; PAM type: NRG; PAM sequence: CAG
ctgcactccagtctgggcaa

SEQ ID NO: 21785 - DNA, 20 bp, Artificial Sequence
  Description of Artificial Sequence: Synthetic oligonucleotide
  Target: ATXN2; (-) strand; PAM type: NRG; PAM sequence: GGG
gcgccactgcactccagtct

SEQ ID NO: 21786 - DNA, 20 bp, Artificial Sequence
  Description of Artificial Sequence: Synthetic oligonucleotide
  Target: ATXN2; (-) strand; PAM type: NRG; PAM sequence: TGG
tgcgccactgcactccagtc

SEQ ID NO: 21787 - DNA, 20 bp, Artificial Sequence
  Description of Artificial Sequence: Synthetic oligonucleotide
  Target: ATXN2; (-) strand; PAM type: NRG; PAM sequence: CAG
gagagtgcgccactgcactc

SEQ ID NO: 21788 - DNA, 20 bp, Artificial Sequence
  Description of Artificial Sequence: Synthetic oligonucleotide
  Target: ATXN2; (-) strand; PAM type: NRG; PAM sequence: GAG
cccaggttgcagtgagccga

SEQ ID NO: 21789 - DNA, 20 bp, Artificial Sequence
  Description of Artificial Sequence: Synthetic oligonucleotide
  Target: ATXN2; (-) strand; PAM type: NRG; PAM sequence: GAG
ggcccaggttgcagtgagcc

SEQ ID NO: 21790 - DNA, 20 bp, Artificial Sequence
  Description of Artificial Sequence: Synthetic oligonucleotide
  Target: ATXN2; (-) strand; PAM type: NRG; PAM sequence: GAG
caggaggcccaggttgcagt

SEQ ID NO: 21791 - DNA, 20 bp, Artificial Sequence
  Description of Artificial Sequence: Synthetic oligonucleotide
  Target: ATXN2; (-) strand; PAM type: NRG; PAM sequence: CAG
aacccaggaggcccaggttg

SEQ ID NO: 21792 - DNA, 20 bp, Artificial Sequence
  Description of Artificial Sequence: Synthetic oligonucleotide
  Target: ATXN2; (-) strand; PAM type: NRG; PAM sequence: AGG
cacttgaacccaggaggccc

SEQ ID NO: 21793 - DNA, 20 bp, Artificial Sequence
  Description of Artificial Sequence: Synthetic oligonucleotide
  Target: ATXN2; (-) strand; PAM type: NRG; PAM sequence: CAG
tcacttgaacccaggaggcc

SEQ ID NO: 21794 - DNA, 20 bp, Artificial Sequence
  Description of Artificial Sequence: Synthetic oligonucleotide
  Target: ATXN2; (-) strand; PAM type: NRG; PAM sequence: AGG
gagaatcacttgaacccagg

SEQ ID NO: 21795 - DNA, 20 bp, Artificial Sequence
  Description of Artificial Sequence: Synthetic oligonucleotide
  Target: ATXN2; (-) strand; PAM type: NRG; PAM sequence: GAG
ggagaatcacttgaacccag

SEQ ID NO: 21796 - DNA, 20 bp, Artificial Sequence
  Description of Artificial Sequence: Synthetic oligonucleotide
  Target: ATXN2; (-) strand; PAM type: NRG; PAM sequence: AGG
caggagaatcacttgaaccc

SEQ ID NO: 21797 - DNA, 20 bp, Artificial Sequence
  Description of Artificial Sequence: Synthetic oligonucleotide
  Target: ATXN2; (-) strand; PAM type: NRG; PAM sequence: CAG
gcaggagaatcacttgaacc

SEQ ID NO: 21798 - DNA, 20 bp, Artificial Sequence
  Description of Artificial Sequence: Synthetic oligonucleotide
  Target: ATXN2; (-) strand; PAM type: NRG; PAM sequence: GAG
ctactcggaggctgaggcag

SEQ ID NO: 21799 - DNA, 20 bp, Artificial Sequence
  Description of Artificial Sequence: Synthetic oligonucleotide
  Target: ATXN2; (-) strand; PAM type: NRG; PAM sequence: AGG
agctactcggaggctgaggc

SEQ ID NO: 21800 - DNA, 20 bp, Artificial Sequence
  Description of Artificial Sequence: Synthetic oligonucleotide
  Target: ATXN2; (-) strand; PAM type: NRG; PAM sequence: CAG
cagctactcggaggctgagg

SEQ ID NO: 21801 - DNA, 20 bp, Artificial Sequence
  Description of Artificial Sequence: Synthetic oligonucleotide
  Target: ATXN2; (-) strand; PAM type: NRG; PAM sequence: AGG
tcccagctactcggaggctg

SEQ ID NO: 21802 - DNA, 20 bp, Artificial Sequence
  Description of Artificial Sequence: Synthetic oligonucleotide
  Target: ATXN2; (-) strand; PAM type: NRG; PAM sequence: GAG
atcccagctactcggaggct

SEQ ID NO: 21803 - DNA, 20 bp, Artificial Sequence
  Description of Artificial Sequence: Synthetic oligonucleotide
  Target: ATXN2; (-) strand; PAM type: NRG; PAM sequence: AGG
ctgtaatcccagctactcgg

SEQ ID NO: 21804 - DNA, 20 bp, Artificial Sequence
  Description of Artificial Sequence: Synthetic oligonucleotide
  Target: ATXN2; (-) strand; PAM type: NRG; PAM sequence: GAG
cctgtaatcccagctactcg

SEQ ID NO: 21805 - DNA, 20 bp, Artificial Sequence
  Description of Artificial Sequence: Synthetic oligonucleotide
  Target: ATXN2; (-) strand; PAM type: NRG; PAM sequence: CGG
tgcctgtaatcccagctact

SEQ ID NO: 21806 - DNA, 20 bp, Artificial Sequence
  Description of Artificial Sequence: Synthetic oligonucleotide
  Target: ATXN2; (-) strand; PAM type: NRG; PAM sequence: CAG
gtggcgggtgcctgtaatcc

SEQ ID NO: 21807 - DNA, 20 bp, Artificial Sequence
  Description of Artificial Sequence: Synthetic oligonucleotide
  Target: ATXN2; (-) strand; PAM type: NRG; PAM sequence: GGG
aattagccggacatggtggc

SEQ ID NO: 21808 - DNA, 20 bp, Artificial Sequence
  Description of Artificial Sequence: Synthetic oligonucleotide
  Target: ATXN2; (-) strand; PAM type: NRG; PAM sequence: CGG
aaattagccggacatggtgg

SEQ ID NO: 21809 - DNA, 20 bp, Artificial Sequence
  Description of Artificial Sequence: Synthetic oligonucleotide
  Target: ATXN2; (-) strand; PAM type: NRG; PAM sequence: TGG
gaaaaattagccggacatgg

SEQ ID NO: 21810 - DNA, 20 bp, Artificial Sequence
  Description of Artificial Sequence: Synthetic oligonucleotide
  Target: ATXN2; (-) strand; PAM type: NRG; PAM sequence: TGG
atagaaaaattagccggaca

SEQ ID NO: 21811 - DNA, 20 bp, Artificial Sequence
  Description of Artificial Sequence: Synthetic oligonucleotide
  Target: ATXN2; (-) strand; PAM type: NRG; PAM sequence: CGG
ctaaaaatagaaaaattagc

SEQ ID NO: 21812 - DNA, 20 bp, Artificial Sequence
  Description of Artificial Sequence: Synthetic oligonucleotide
  Target: ATXN2; (-) strand; PAM type: NRG; PAM sequence: TAG
tctactaaaaatagaaaaat

SEQ ID NO: 21813 - DNA, 20 bp, Artificial Sequence
  Description of Artificial Sequence: Synthetic oligonucleotide
  Target: ATXN2; (-) strand; PAM type: NRG; PAM sequence: TAG
aaccccctctctactaaaaa

SEQ ID NO: 21814 - DNA, 20 bp, Artificial Sequence
  Description of Artificial Sequence: Synthetic oligonucleotide
  Target: ATXN2; (-) strand; PAM type: NRG; PAM sequence: TGG
cgagaccagcctagccaata

SEQ ID NO: 21815 - DNA, 20 bp, Artificial Sequence
  Description of Artificial Sequence: Synthetic oligonucleotide
  Target: ATXN2; (-) strand; PAM type: NRG; PAM sequence: TAG
tcaggagttcgagaccagcc

SEQ ID NO: 21816 - DNA, 20 bp, Artificial Sequence
  Description of Artificial Sequence: Synthetic oligonucleotide
  Target: ATXN2; (-) strand; PAM type: NRG; PAM sequence: CAG
taaggtcaggagttcgagac

SEQ ID NO: 21817 - DNA, 20 bp, Artificial Sequence
  Description of Artificial Sequence: Synthetic oligonucleotide
  Target: ATXN2; (-) strand; PAM type: NRG; PAM sequence: GAG
tcacctaaggtcaggagttc

SEQ ID NO: 21818 - DNA, 20 bp, Artificial Sequence
  Description of Artificial Sequence: Synthetic oligonucleotide
  Target: ATXN2; (-) strand; PAM type: NRG; PAM sequence: GAG
ggcggatcacctaaggtcag

SEQ ID NO: 21819 - DNA, 20 bp, Artificial Sequence
  Description of Artificial Sequence: Synthetic oligonucleotide
  Target: ATXN2; (-) strand; PAM type: NRG; PAM sequence: AGG
tgggcggatcacctaaggtc

SEQ ID NO: 21820 - DNA, 20 bp, Artificial Sequence
  Description of Artificial Sequence: Synthetic oligonucleotide
  Target: ATXN2; (-) strand; PAM type: NRG; PAM sequence: CAG
gtgggcggatcacctaaggt

SEQ ID NO: 21821 - DNA, 20 bp, Artificial Sequence
  Description of Artificial Sequence: Synthetic oligonucleotide
  Target: ATXN2; (-) strand; PAM type: NRG; PAM sequence: AGG
tgaggtgggcggatcaccta

SEQ ID NO: 21822 - DNA, 20 bp, Artificial Sequence
  Description of Artificial Sequence: Synthetic oligonucleotide
  Target: ATXN2; (-) strand; PAM type: NRG; PAM sequence: AAG
ctgaggtgggcggatcacct

SEQ ID NO: 21823 - DNA, 20 bp, Artificial Sequence
  Description of Artificial Sequence: Synthetic oligonucleotide
  Target: ATXN2; (-) strand; PAM type: NRG; PAM sequence: CGG
ctttgggaggctgaggtggg

SEQ ID NO: 21824 - DNA, 20 bp, Artificial Sequence
  Description of Artificial Sequence: Synthetic oligonucleotide
  Target: ATXN2; (-) strand; PAM type: NRG; PAM sequence: GGG
gcactttgggaggctgaggt

SEQ ID NO: 21825 - DNA, 20 bp, Artificial Sequence
  Description of Artificial Sequence: Synthetic oligonucleotide
  Target: ATXN2; (-) strand; PAM type: NRG; PAM sequence: TGG
agcactttgggaggctgagg

SEQ ID NO: 21826 - DNA, 20 bp, Artificial Sequence
  Description of Artificial Sequence: Synthetic oligonucleotide
  Target: ATXN2; (-) strand; PAM type: NRG; PAM sequence: AGG
cccagcactttgggaggctg

SEQ ID NO: 21827 - DNA, 20 bp, Artificial Sequence
  Description of Artificial Sequence: Synthetic oligonucleotide
  Target: ATXN2; (-) strand; PAM type: NRG; PAM sequence: GAG
tcccagcactttgggaggct

SEQ ID NO: 21828 - DNA, 20 bp, Artificial Sequence
  Description of Artificial Sequence: Synthetic oligonucleotide
  Target: ATXN2; (-) strand; PAM type: NRG; PAM sequence: AGG
tgtaatcccagcactttggg

SEQ ID NO: 21829 - DNA, 20 bp, Artificial Sequence
  Description of Artificial Sequence: Synthetic oligonucleotide
  Target: ATXN2; (-) strand; PAM type: NRG; PAM sequence: GAG
gtgtaatcccagcactttgg

SEQ ID NO: 21830 - DNA, 20 bp, Artificial Sequence
  Description of Artificial Sequence: Synthetic oligonucleotide
  Target: ATXN2; (-) strand; PAM type: NRG; PAM sequence: GGG
gtgtgtaatcccagcacttt

SEQ ID NO: 21831 - DNA, 20 bp, Artificial Sequence
  Description of Artificial Sequence: Synthetic oligonucleotide
  Target: ATXN2; (-) strand; PAM type: NRG; PAM sequence: TGG
cgtgtgtaatcccagcactt

SEQ ID NO: 21832 - DNA, 20 bp, Artificial Sequence
  Description of Artificial Sequence: Synthetic oligonucleotide
  Target: ATXN2; (-) strand; PAM type: NRG; PAM sequence: CAG
gtggttcacgtgtgtaatcc

SEQ ID NO: 21833 - DNA, 20 bp, Artificial Sequence
  Description of Artificial Sequence: Synthetic oligonucleotide
  Target: ATXN2; (-) strand; PAM type: NRG; PAM sequence: TGG
tagttataagccaggcgcag

SEQ ID NO: 21834 - DNA, 20 bp, Artificial Sequence
  Description of Artificial Sequence: Synthetic oligonucleotide
  Target: ATXN2; (-) strand; PAM type: NRG; PAM sequence: CAG
ctgtagttataagccaggcg

SEQ ID NO: 21835 - DNA, 20 bp, Artificial Sequence
  Description of Artificial Sequence: Synthetic oligonucleotide
  Target: ATXN2; (-) strand; PAM type: NRG; PAM sequence: AGG
aaaaactgtagttataagcc

SEQ ID NO: 21836 - DNA, 20 bp, Artificial Sequence
  Description of Artificial Sequence: Synthetic oligonucleotide
  Target: ATXN2; (-) strand; PAM type: NRG; PAM sequence: CAG
aaaaaactgtagttataagc

SEQ ID NO: 21837 - DNA, 20 bp, Artificial Sequence
  Description of Artificial Sequence: Synthetic oligonucleotide
  Target: ATXN2; (-) strand; PAM type: NRG; PAM sequence: AAG
tcttaaaaaactgtagttat

SEQ ID NO: 21838 - DNA, 20 bp, Artificial Sequence
  Description of Artificial Sequence: Synthetic oligonucleotide
  Target: ATXN2; (-) strand; PAM type: NRG; PAM sequence: TAG
tactatgtcttaaaaaactg

SEQ ID NO: 21839 - DNA, 20 bp, Artificial Sequence
  Description of Artificial Sequence: Synthetic oligonucleotide
  Target: ATXN2; (-) strand; PAM type: NRG; PAM sequence: GAG
tgcaaaaacaagcaagcaaa

SEQ ID NO: 21840 - DNA, 20 bp, Artificial Sequence
  Description of Artificial Sequence: Synthetic oligonucleotide
  Target: ATXN2; (-) strand; PAM type: NRG; PAM sequence: AAG
attgcaaaaacaagcaagca

SEQ ID NO: 21841 - DNA, 20 bp, Artificial Sequence
  Description of Artificial Sequence: Synthetic oligonucleotide
  Target: ATXN2; (-) strand; PAM type: NRG; PAM sequence: AAG
ctttgattgcaaaaacaagc

SEQ ID NO: 21842 - DNA, 20 bp, Artificial Sequence
  Description of Artificial Sequence: Synthetic oligonucleotide
  Target: ATXN2; (-) strand; PAM type: NRG; PAM sequence: AAG
gaaactttgattgcaaaaac

SEQ ID NO: 21843 - DNA, 20 bp, Artificial Sequence
  Description of Artificial Sequence: Synthetic oligonucleotide
  Target: ATXN2; (-) strand; PAM type: NRG; PAM sequence: GGG
aaaaaaaagagatcacataa

SEQ ID NO: 21844 - DNA, 20 bp, Artificial Sequence
  Description of Artificial Sequence: Synthetic oligonucleotide
  Target: ATXN2; (-) strand; PAM type: NRG; PAM sequence: AGG
aaaaaaaaagagatcacata

SEQ ID NO: 21845 - DNA, 20 bp, Artificial Sequence
  Description of Artificial Sequence: Synthetic oligonucleotide
  Target: ATXN2; (-) strand; PAM type: NRG; PAM sequence: AAG
aaaaaaaaaagagatcacat

SEQ ID NO: 21846 - DNA, 20 bp, Artificial Sequence
  Description of Artificial Sequence: Synthetic oligonucleotide
  Target: ATXN2; (-) strand; PAM type: NRG; PAM sequence: GAG
tcaaaaaaaaaaaaaaaaaa

SEQ ID NO: 21847 - DNA, 20 bp, Artificial Sequence
  Description of Artificial Sequence: Synthetic oligonucleotide
  Target: ATXN2; (-) strand; PAM type: NRG; PAM sequence: AAG
tctcaaaaaaaaaaaaaaaa

SEQ ID NO: 21848 - DNA, 20 bp, Artificial Sequence
  Description of Artificial Sequence: Synthetic oligonucleotide
  Target: ATXN2; (-) strand; PAM type: NRG; PAM sequence: GAG
cccagcctgggcgacagagt

SEQ ID NO: 21849 - DNA, 20 bp, Artificial Sequence
  Description of Artificial Sequence: Synthetic oligonucleotide
  Target: ATXN2; (-) strand; PAM type: NRG; PAM sequence: GAG
gcaccccagcctgggcgaca

SEQ ID NO: 21850 - DNA, 20 bp, Artificial Sequence
  Description of Artificial Sequence: Synthetic oligonucleotide
  Target: ATXN2; (-) strand; PAM type: NRG; PAM sequence: CAG
ctgcaccccagcctgggcga

SEQ ID NO: 21851 - DNA, 20 bp, Artificial Sequence
  Description of Artificial Sequence: Synthetic oligonucleotide
  Target: ATXN2; (-) strand; PAM type: NRG; PAM sequence: GGG
gtgccactgcaccccagcct

SEQ ID NO: 21852 - DNA, 20 bp, Artificial Sequence
  Description of Artificial Sequence: Synthetic oligonucleotide
  Target: ATXN2; (-) strand; PAM type: NRG; PAM sequence: TGG
tgtgccactgcaccccagcc

SEQ ID NO: 21853 - DNA, 20 bp, Artificial Sequence
  Description of Artificial Sequence: Synthetic oligonucleotide
  Target: ATXN2; (-) strand; PAM type: NRG; PAM sequence: CAG
aatattgtgccactgcaccc

SEQ ID NO: 21854 - DNA, 20 bp, Artificial Sequence
  Description of Artificial Sequence: Synthetic oligonucleotide
  Target: ATXN2; (-) strand; PAM type: NRG; PAM sequence: GAG
caggaggcagaggttgcagt

SEQ ID NO: 21855 - DNA, 20 bp, Artificial Sequence
  Description of Artificial Sequence: Synthetic oligonucleotide
  Target: ATXN2; (-) strand; PAM type: NRG; PAM sequence: CAG
aacccaggaggcagaggttg

SEQ ID NO: 21856 - DNA, 20 bp, Artificial Sequence
  Description of Artificial Sequence: Synthetic oligonucleotide
  Target: ATXN2; (-) strand; PAM type: NRG; PAM sequence: AGG
tgcttgaacccaggaggcag

SEQ ID NO: 21857 - DNA, 20 bp, Artificial Sequence
  Description of Artificial Sequence: Synthetic oligonucleotide
  Target: ATXN2; (-) strand; PAM type: NRG; PAM sequence: GAG
ttgcttgaacccaggaggca

SEQ ID NO: 21858 - DNA, 20 bp, Artificial Sequence
  Description of Artificial Sequence: Synthetic oligonucleotide
  Target: ATXN2; (-) strand; PAM type: NRG; PAM sequence: CAG
aattgcttgaacccaggagg

SEQ ID NO: 21859 - DNA, 20 bp, Artificial Sequence
  Description of Artificial Sequence: Synthetic oligonucleotide
  Target: ATXN2; (-) strand; PAM type: NRG; PAM sequence: AGG
gagaattgcttgaacccagg

SEQ ID NO: 21860 - DNA, 20 bp, Artificial Sequence
  Description of Artificial Sequence: Synthetic oligonucleotide
  Target: ATXN2; (-) strand; PAM type: NRG; PAM sequence: GAG
ggagaattgcttgaacccag

SEQ ID NO: 21861 - DNA, 20 bp, Artificial Sequence
  Description of Artificial Sequence: Synthetic oligonucleotide
  Target: ATXN2; (-) strand; PAM type: NRG; PAM sequence: AGG
caggagaattgcttgaaccc

SEQ ID NO: 21862 - DNA, 20 bp, Artificial Sequence
  Description of Artificial Sequence: Synthetic oligonucleotide
  Target: ATXN2; (-) strand; PAM type: NRG; PAM sequence: CAG
gcaggagaattgcttgaacc

SEQ ID NO: 21863 - DNA, 20 bp, Artificial Sequence
  Description of Artificial Sequence: Synthetic oligonucleotide
  Target: ATXN2; (-) strand; PAM type: NRG; PAM sequence: GAG
tactcaggaggctgaggcag

SEQ ID NO: 21864 - DNA, 20 bp, Artificial Sequence
  Description of Artificial Sequence: Synthetic oligonucleotide
  Target: ATXN2; (-) strand; PAM type: NRG; PAM sequence: AGG
gatactcaggaggctgaggc

SEQ ID NO: 21865 - DNA, 20 bp, Artificial Sequence
  Description of Artificial Sequence: Synthetic oligonucleotide
  Target: ATXN2; (-) strand; PAM type: NRG; PAM sequence: CAG
agatactcaggaggctgagg

SEQ ID NO: 21866 - DNA, 20 bp, Artificial Sequence
  Description of Artificial Sequence: Synthetic oligonucleotide
  Target: ATXN2; (-) strand; PAM type: NRG; PAM sequence: AGG
ctcagatactcaggaggctg

SEQ ID NO: 21867 - DNA, 20 bp, Artificial Sequence
  Description of Artificial Sequence: Synthetic oligonucleotide
  Target: ATXN2; (-) strand; PAM type: NRG; PAM sequence: GAG
tctcagatactcaggaggct

SEQ ID NO: 21868 - DNA, 20 bp, Artificial Sequence
  Description of Artificial Sequence: Synthetic oligonucleotide
  Target: ATXN2; (-) strand; PAM type: NRG; PAM sequence: AGG
tgtaatctcagatactcagg

SEQ ID NO: 21869 - DNA, 20 bp, Artificial Sequence
  Description of Artificial Sequence: Synthetic oligonucleotide
  Target: ATXN2; (-) strand; PAM type: NRG; PAM sequence: GAG
ctgtaatctcagatactcag

SEQ ID NO: 21870 - DNA, 20 bp, Artificial Sequence
  Description of Artificial Sequence: Synthetic oligonucleotide
  Target: ATXN2; (-) strand; PAM type: NRG; PAM sequence: AGG
gcctgtaatctcagatactc

SEQ ID NO: 21871 - DNA, 20 bp, Artificial Sequence
  Description of Artificial Sequence: Synthetic oligonucleotide
  Target: ATXN2; (-) strand; PAM type: NRG; PAM sequence: CAG
tgcctgtaatctcagatact

SEQ ID NO: 21872 - DNA, 20 bp, Artificial Sequence
  Description of Artificial Sequence: Synthetic oligonucleotide
  Target: ATXN2; (-) strand; PAM type: NRG; PAM sequence: CAG
gaggcacgtgcctgtaatct

SEQ ID NO: 21873 - DNA, 20 bp, Artificial Sequence
  Description of Artificial Sequence: Synthetic oligonucleotide
  Target: ATXN2; (-) strand; PAM type: NRG; PAM sequence: AGG
caaaacttagccaggcgtgg

SEQ ID NO: 21874 - DNA, 20 bp, Artificial Sequence
  Description of Artificial Sequence: Synthetic oligonucleotide
  Target: ATXN2; (-) strand; PAM type: NRG; PAM sequence: GAG
acaaaacttagccaggcgtg

SEQ ID NO: 21875 - DNA, 20 bp, Artificial Sequence
  Description of Artificial Sequence: Synthetic oligonucleotide
  Target: ATXN2; (-) strand; PAM type: NRG; PAM sequence: TGG
atacaaaacttagccaggcg

SEQ ID NO: 21876 - DNA, 20 bp, Artificial Sequence
  Description of Artificial Sequence: Synthetic oligonucleotide
  Target: ATXN2; (-) strand; PAM type: NRG; PAM sequence: AGG
taaaaatacaaaacttagcc

SEQ ID NO: 21877 - DNA, 20 bp, Artificial Sequence
  Description of Artificial Sequence: Synthetic oligonucleotide
  Target: ATXN2; (-) strand; PAM type: NRG; PAM sequence: CAG
ctaaaaatacaaaacttagc

SEQ ID NO: 21878 - DNA, 20 bp, Artificial Sequence
  Description of Artificial Sequence: Synthetic oligonucleotide
  Target: ATXN2; (-) strand; PAM type: NRG; PAM sequence: TAG
tctactaaaaatacaaaact

SEQ ID NO: 21879 - DNA, 20 bp, Artificial Sequence
  Description of Artificial Sequence: Synthetic oligonucleotide
  Target: ATXN2; (-) strand; PAM type: NRG; PAM sequence: TGG
tgagaccagcctggctaaca

SEQ ID NO: 21880 - DNA, 20 bp, Artificial Sequence
  Description of Artificial Sequence: Synthetic oligonucleotide
  Target: ATXN2; (-) strand; PAM type: NRG; PAM sequence: TGG
tcaggagattgagaccagcc

SEQ ID NO: 21881 - DNA, 20 bp, Artificial Sequence
  Description of Artificial Sequence: Synthetic oligonucleotide
  Target: ATXN2; (-) strand; PAM type: NRG; PAM sequence: CAG
agaggtcaggagattgagac

SEQ ID NO: 21882 - DNA, 20 bp, Artificial Sequence
  Description of Artificial Sequence: Synthetic oligonucleotide
  Target: ATXN2; (-) strand; PAM type: NRG; PAM sequence: GAG
gatcaagaggtcaggagatt

SEQ ID NO: 21883 - DNA, 20 bp, Artificial Sequence
  Description of Artificial Sequence: Synthetic oligonucleotide
  Target: ATXN2; (-) strand; PAM type: NRG; PAM sequence: GAG
tgggtggatcaagaggtcag

SEQ ID NO: 21884 - DNA, 20 bp, Artificial Sequence
  Description of Artificial Sequence: Synthetic oligonucleotide
  Target: ATXN2; (-) strand; PAM type: NRG; PAM sequence: AGG
ggtgggtggatcaagaggtc

SEQ ID NO: 21885 - DNA, 20 bp, Artificial Sequence
  Description of Artificial Sequence: Synthetic oligonucleotide
  Target: ATXN2; (-) strand; PAM type: NRG; PAM sequence: CAG
aggtgggtggatcaagaggt

SEQ ID NO: 21886 - DNA, 20 bp, Artificial Sequence
  Description of Artificial Sequence: Synthetic oligonucleotide
  Target: ATXN2; (-) strand; PAM type: NRG; PAM sequence: AGG
gccgaggtgggtggatcaag

SEQ ID NO: 21887 - DNA, 20 bp, Artificial Sequence
  Description of Artificial Sequence: Synthetic oligonucleotide
  Target: ATXN2; (-) strand; PAM type: NRG; PAM sequence: GAG
ggccgaggtgggtggatcaa

SEQ ID NO: 21888 - DNA, 20 bp, Artificial Sequence
  Description of Artificial Sequence: Synthetic oligonucleotide
  Target: ATXN2; (-) strand; PAM type: NRG; PAM sequence: AAG
gaggccgaggtgggtggatc

SEQ ID NO: 21889 - DNA, 20 bp, Artificial Sequence
  Description of Artificial Sequence: Synthetic oligonucleotide
  Target: ATXN2; (-) strand; PAM type: NRG; PAM sequence: TGG
ctttgggaggccgaggtggg

SEQ ID NO: 21890 - DNA, 20 bp, Artificial Sequence
  Description of Artificial Sequence: Synthetic oligonucleotide
  Target: ATXN2; (-) strand; PAM type: NRG; PAM sequence: GGG
gcactttgggaggccgaggt

SEQ ID NO: 21891 - DNA, 20 bp, Artificial Sequence
  Description of Artificial Sequence: Synthetic oligonucleotide
  Target: ATXN2; (-) strand; PAM type: NRG; PAM sequence: TGG
agcactttgggaggccgagg

SEQ ID NO: 21892 - DNA, 20 bp, Artificial Sequence
  Description of Artificial Sequence: Synthetic oligonucleotide
  Target: ATXN2; (-) strand; PAM type: NRG; PAM sequence: AGG
cccagcactttgggaggccg

SEQ ID NO: 21893 - DNA, 20 bp, Artificial Sequence
  Description of Artificial Sequence: Synthetic oligonucleotide
  Target: ATXN2; (-) strand; PAM type: NRG; PAM sequence: GAG
tcccagcactttgggaggcc

SEQ ID NO: 21894 - DNA, 20 bp, Artificial Sequence
  Description of Artificial Sequence: Synthetic oligonucleotide
  Target: ATXN2; (-) strand; PAM type: NRG; PAM sequence: AGG
tgtaatcccagcactttggg

SEQ ID NO: 21895 - DNA, 20 bp, Artificial Sequence
  Description of Artificial Sequence: Synthetic oligonucleotide
  Target: ATXN2; (-) strand; PAM type: NRG; PAM sequence: GAG
ctgtaatcccagcactttgg

SEQ ID NO: 21896 - DNA, 20 bp, Artificial Sequence
  Description of Artificial Sequence: Synthetic oligonucleotide
  Target: ATXN2; (-) strand; PAM type: NRG; PAM sequence: GGG
acctgtaatcccagcacttt

SEQ ID NO: 21897 - DNA, 20 bp, Artificial Sequence
  Description of Artificial Sequence: Synthetic oligonucleotide
  Target: ATXN2; (-) strand; PAM type: NRG; PAM sequence: TGG
cacctgtaatcccagcactt

SEQ ID NO: 21898 - DNA, 20 bp, Artificial Sequence
  Description of Artificial Sequence: Synthetic oligonucleotide
  Target: ATXN2; (-) strand; PAM type: NRG; PAM sequence: CAG
gtggttcacacctgtaatcc

SEQ ID NO: 21899 - DNA, 20 bp, Artificial Sequence
  Description of Artificial Sequence: Synthetic oligonucleotide
  Target: ATXN2; (-) strand; PAM type: NRG; PAM sequence: TGG
accatgacagctgggtgcag

SEQ ID NO: 21900 - DNA, 20 bp, Artificial Sequence
  Description of Artificial Sequence: Synthetic oligonucleotide
  Target: ATXN2; (-) strand; PAM type: NRG; PAM sequence: CAG
atcaccatgacagctgggtg

SEQ ID NO: 21901 - DNA, 20 bp, Artificial Sequence
  Description of Artificial Sequence: Synthetic oligonucleotide
  Target: ATXN2; (-) strand; PAM type: NRG; PAM sequence: GGG
ttaagatcaccatgacagct

SEQ ID NO: 21902 - DNA, 20 bp, Artificial Sequence
  Description of Artificial Sequence: Synthetic oligonucleotide
  Target: ATXN2; (-) strand; PAM type: NRG; PAM sequence: TGG
tttaagatcaccatgacagc

SEQ ID NO: 21903 - DNA, 20 bp, Artificial Sequence
  Description of Artificial Sequence: Synthetic oligonucleotide
  Target: ATXN2; (-) strand; PAM type: NRG; PAM sequence: CAG
ttgatttaagatcaccatga

SEQ ID NO: 21904 - DNA, 20 bp, Artificial Sequence
  Description of Artificial Sequence: Synthetic oligonucleotide
  Target: ATXN2; (-) strand; PAM type: NRG; PAM sequence: AAG
gttgtaggtgtttttgattt

SEQ ID NO: 21905 - DNA, 20 bp, Artificial Sequence
  Description of Artificial Sequence: Synthetic oligonucleotide
  Target: ATXN2; (-) strand; PAM type: NRG; PAM sequence: AGG
attttttgtgtatctgttgt

SEQ ID NO: 21906 - DNA, 20 bp, Artificial Sequence
  Description of Artificial Sequence: Synthetic oligonucleotide
  Target: ATXN2; (-) strand; PAM type: NRG; PAM sequence: TAG
tattttttgtgtatctgttg

SEQ ID NO: 21907 - DNA, 20 bp, Artificial Sequence
  Description of Artificial Sequence: Synthetic oligonucleotide
  Target: ATXN2; (-) strand; PAM type: NRG; PAM sequence: TGG
ttgaaagtgattttctctgg

SEQ ID NO: 21908 - DNA, 20 bp, Artificial Sequence
  Description of Artificial Sequence: Synthetic oligonucleotide
  Target: ATXN2; (-) strand; PAM type: NRG; PAM sequence: TGG
gttttgaaagtgattttctc

SEQ ID NO: 21909 - DNA, 20 bp, Artificial Sequence
  Description of Artificial Sequence: Synthetic oligonucleotide
  Target: ATXN2; (-) strand; PAM type: NRG; PAM sequence: AAG
ccctcccttccttgttttga

SEQ ID NO: 21910 - DNA, 20 bp, Artificial Sequence
  Description of Artificial Sequence: Synthetic oligonucleotide
  Target: ATXN2; (-) strand; PAM type: NRG; PAM sequence: TAG
cttattatctggttgttttg

SEQ ID NO: 21911 - DNA, 20 bp, Artificial Sequence
  Description of Artificial Sequence: Synthetic oligonucleotide
  Target: ATXN2; (-) strand; PAM type: NRG; PAM sequence: TGG
ccattttgttacttattatc

SEQ ID NO: 21912 - DNA, 20 bp, Artificial Sequence
  Description of Artificial Sequence: Synthetic oligonucleotide
  Target: ATXN2; (-) strand; PAM type: NRG; PAM sequence: AGG
agtgttgttactgattagtg

SEQ ID NO: 21913 - DNA, 20 bp, Artificial Sequence
  Description of Artificial Sequence: Synthetic oligonucleotide
  Target: ATXN2; (-) strand; PAM type: NRG; PAM sequence: GAG
cagtgttgttactgattagt

SEQ ID NO: 21914 - DNA, 20 bp, Artificial Sequence
  Description of Artificial Sequence: Synthetic oligonucleotide
  Target: ATXN2; (-) strand; PAM type: NRG; PAM sequence: TAG
cattcagtgttgttactgat

SEQ ID NO: 21915 - DNA, 20 bp, Artificial Sequence
  Description of Artificial Sequence: Synthetic oligonucleotide
  Target: ATXN2; (-) strand; PAM type: NRG; PAM sequence: CAG
gagtttagtcgatttacatt

SEQ ID NO: 21916 - DNA, 20 bp, Artificial Sequence
  Description of Artificial Sequence: Synthetic oligonucleotide
  Target: ATXN2; (-) strand; PAM type: NRG; PAM sequence: TAG
tatcttttgattggagagtt

SEQ ID NO: 21917 - DNA, 20 bp, Artificial Sequence
  Description of Artificial Sequence: Synthetic oligonucleotide
  Target: ATXN2; (-) strand; PAM type: NRG; PAM sequence: GAG
ctctgtatcttttgattgga

SEQ ID NO: 21918 - DNA, 20 bp, Artificial Sequence
  Description of Artificial Sequence: Synthetic oligonucleotide
  Target: ATXN2; (-) strand; PAM type: NRG; PAM sequence: GAG
cactctgtatcttttgattg

SEQ ID NO: 21919 - DNA, 20 bp, Artificial Sequence
  Description of Artificial Sequence: Synthetic oligonucleotide
  Target: ATXN2; (-) strand; PAM type: NRG; PAM sequence: TGG
gccactctgtatcttttgat

SEQ ID NO: 21920 - DNA, 20 bp, Artificial Sequence
  Description of Artificial Sequence: Synthetic oligonucleotide
  Target: ATXN2; (-) strand; PAM type: NRG; PAM sequence: TAG
gccttttttttaaatccatt

SEQ ID NO: 21921 - DNA, 20 bp, Artificial Sequence
  Description of Artificial Sequence: Synthetic oligonucleotide
  Target: ATXN2; (-) strand; PAM type: NRG; PAM sequence: CAG
caggcgtgagccaccgcacc

SEQ ID NO: 21922 - DNA, 20 bp, Artificial Sequence
  Description of Artificial Sequence: Synthetic oligonucleotide
  Target: ATXN2; (-) strand; PAM type: NRG; PAM sequence: GAG
agtcctgggattacaggcgt

SEQ ID NO: 21923 - DNA, 20 bp, Artificial Sequence
  Description of Artificial Sequence: Synthetic oligonucleotide
  Target: ATXN2; (-) strand; PAM type: NRG; PAM sequence: AGG
tcccaaagtcctgggattac

SEQ ID NO: 21924 - DNA, 20 bp, Artificial Sequence
  Description of Artificial Sequence: Synthetic oligonucleotide
  Target: ATXN2; (-) strand; PAM type: NRG; PAM sequence: CAG
ctcccaaagtcctgggatta

SEQ ID NO: 21925 - DNA, 20 bp, Artificial Sequence
  Description of Artificial Sequence: Synthetic oligonucleotide
  Target: ATXN2; (-) strand; PAM type: NRG; PAM sequence: GGG
ccttggcctcccaaagtcct

SEQ ID NO: 21926 - DNA, 20 bp, Artificial Sequence
  Description of Artificial Sequence: Synthetic oligonucleotide
  Target: ATXN2; (-) strand; PAM type: NRG; PAM sequence: TGG
gccttggcctcccaaagtcc

SEQ ID NO: 21927 - DNA, 20 bp, Artificial Sequence
  Description of Artificial Sequence: Synthetic oligonucleotide
  Target: ATXN2; (-) strand; PAM type: NRG; PAM sequence: AAG
ttgcctgccttggcctccca

SEQ ID NO: 21928 - DNA, 20 bp, Artificial Sequence
  Description of Artificial Sequence: Synthetic oligonucleotide
  Target: ATXN2; (-) strand; PAM type: NRG; PAM sequence: TGG
ctcaggtgatttgcctgcct

SEQ ID NO: 21929 - DNA, 20 bp, Artificial Sequence
  Description of Artificial Sequence: Synthetic oligonucleotide
  Target: ATXN2; (-) strand; PAM type: NRG; PAM sequence: AGG
gttcttgaactcctaacctc

SEQ ID NO: 21930 - DNA, 20 bp, Artificial Sequence
  Description of Artificial Sequence: Synthetic oligonucleotide
  Target: ATXN2; (-) strand; PAM type: NRG; PAM sequence: CAG
tgttcttgaactcctaacct

SEQ ID NO: 21931 - DNA, 20 bp, Artificial Sequence
  Description of Artificial Sequence: Synthetic oligonucleotide
  Target: ATXN2; (-) strand; PAM type: NRG; PAM sequence: AGG
ggggtttcagtatgttcgtc

SEQ ID NO: 21932 - DNA, 20 bp, Artificial Sequence
  Description of Artificial Sequence: Synthetic oligonucleotide
  Target: ATXN2; (-) strand; PAM type: NRG; PAM sequence: CAG
tggggtttcagtatgttcgt

SEQ ID NO: 21933 - DNA, 20 bp, Artificial Sequence
  Description of Artificial Sequence: Synthetic oligonucleotide
  Target: ATXN2; (-) strand; PAM type: NRG; PAM sequence: CAG
tttcagtagagatggggttt

SEQ ID NO: 21934 - DNA, 20 bp, Artificial Sequence
  Description of Artificial Sequence: Synthetic oligonucleotide
  Target: ATXN2; (-) strand; PAM type: NRG; PAM sequence: GGG
ttgtattttcagtagagatg

SEQ ID NO: 21935 - DNA, 20 bp, Artificial Sequence
  Description of Artificial Sequence: Synthetic oligonucleotide
  Target: ATXN2; (-) strand; PAM type: NRG; PAM sequence: GGG
tttgtattttcagtagagat

SEQ ID NO: 21936 - DNA, 20 bp, Artificial Sequence
  Description of Artificial Sequence: Synthetic oligonucleotide
  Target: ATXN2; (-) strand; PAM type: NRG; PAM sequence: TGG
ttttgtattttcagtagaga

SEQ ID NO: 21937 - DNA, 20 bp, Artificial Sequence
  Description of Artificial Sequence: Synthetic oligonucleotide
  Target: ATXN2; (-) strand; PAM type: NRG; PAM sequence: GAG
aattttttgtattttcagta

SEQ ID NO: 21938 - DNA, 20 bp, Artificial Sequence
  Description of Artificial Sequence: Synthetic oligonucleotide
  Target: ATXN2; (-) strand; PAM type: NRG; PAM sequence: TAG
taaattttttgtattttcag

SEQ ID NO: 21939 - DNA, 20 bp, Artificial Sequence
  Description of Artificial Sequence: Synthetic oligonucleotide
  Target: ATXN2; (-) strand; PAM type: NRG; PAM sequence: CAG
agctaaattttttgtatttt

SEQ ID NO: 21940 - DNA, 20 bp, Artificial Sequence
  Description of Artificial Sequence: Synthetic oligonucleotide
  Target: ATXN2; (-) strand; PAM type: NRG; PAM sequence: CAG
caggcgcctgccaccaagcc

SEQ ID NO: 21941 - DNA, 20 bp, Artificial Sequence
  Description of Artificial Sequence: Synthetic oligonucleotide
  Target: ATXN2; (-) strand; PAM type: NRG; PAM sequence: AAG
gattacaggcgcctgccacc

SEQ ID NO: 21942 - DNA, 20 bp, Artificial Sequence
  Description of Artificial Sequence: Synthetic oligonucleotide
  Target: ATXN2; (-) strand; PAM type: NRG; PAM sequence: AGG
tcccaagtagctgggattac

SEQ ID NO: 21943 - DNA, 20 bp, Artificial Sequence
  Description of Artificial Sequence: Synthetic oligonucleotide
  Target: ATXN2; (-) strand; PAM type: NRG; PAM sequence: CAG
ctcccaagtagctgggatta

SEQ ID NO: 21944 - DNA, 20 bp, Artificial Sequence
  Description of Artificial Sequence: Synthetic oligonucleotide
  Target: ATXN2; (-) strand; PAM type: NRG; PAM sequence: GGG
cctcagcctcccaagtagct

SEQ ID NO: 21945 - DNA, 20 bp, Artificial Sequence
  Description of Artificial Sequence: Synthetic oligonucleotide
  Target: ATXN2; (-) strand; PAM type: NRG; PAM sequence: TGG
gcctcagcctcccaagtagc

SEQ ID NO: 21946 - DNA, 20 bp, Artificial Sequence
  Description of Artificial Sequence: Synthetic oligonucleotide
  Target: ATXN2; (-) strand; PAM type: NRG; PAM sequence: TAG
tcctgcctcagcctcccaag

SEQ ID NO: 21947 - DNA, 20 bp, Artificial Sequence
  Description of Artificial Sequence: Synthetic oligonucleotide
  Target: ATXN2; (-) strand; PAM type: NRG; PAM sequence: AAG
ttctcctgcctcagcctccc

SEQ ID NO: 21948 - DNA, 20 bp, Artificial Sequence
  Description of Artificial Sequence: Synthetic oligonucleotide
  Target: ATXN2; (-) strand; PAM type: NRG; PAM sequence: CAG
ttcaagcgattctcctgcct

SEQ ID NO: 21949 - DNA, 20 bp, Artificial Sequence
  Description of Artificial Sequence: Synthetic oligonucleotide
  Target: ATXN2; (-) strand; PAM type: NRG; PAM sequence: AAG
aacctccgcctcctgagttc

SEQ ID NO: 21950 - DNA, 20 bp, Artificial Sequence
  Description of Artificial Sequence: Synthetic oligonucleotide
  Target: ATXN2; (-) strand; PAM type: NRG; PAM sequence: GAG
cactgcaacctccgcctcct

SEQ ID NO: 21951 - DNA, 20 bp, Artificial Sequence
  Description of Artificial Sequence: Synthetic oligonucleotide
  Target: ATXN2; (-) strand; PAM type: NRG; PAM sequence: CAG
ggagggcaatggcgctatct

SEQ ID NO: 21952 - DNA, 20 bp, Artificial Sequence
  Description of Artificial Sequence: Synthetic oligonucleotide
  Target: ATXN2; (-) strand; PAM type: NRG; PAM sequence: TGG
ttgcccaggctggagggcaa

SEQ ID NO: 21953 - DNA, 20 bp, Artificial Sequence
  Description of Artificial Sequence: Synthetic oligonucleotide
  Target: ATXN2; (-) strand; PAM type: NRG; PAM sequence: GGG
ctattgttgcccaggctgga

SEQ ID NO: 21954 - DNA, 20 bp, Artificial Sequence
  Description of Artificial Sequence: Synthetic oligonucleotide
  Target: ATXN2; (-) strand; PAM type: NRG; PAM sequence: AGG
gctattgttgcccaggctgg

SEQ ID NO: 21955 - DNA, 20 bp, Artificial Sequence
  Description of Artificial Sequence: Synthetic oligonucleotide
  Target: ATXN2; (-) strand; PAM type: NRG; PAM sequence: GAG
tgctattgttgcccaggctg

SEQ ID NO: 21956 - DNA, 20 bp, Artificial Sequence
  Description of Artificial Sequence: Synthetic oligonucleotide
  Target: ATXN2; (-) strand; PAM type: NRG; PAM sequence: TGG
tttgctattgttgcccaggc

SEQ ID NO: 21957 - DNA, 20 bp, Artificial Sequence
  Description of Artificial Sequence: Synthetic oligonucleotide
  Target: ATXN2; (-) strand; PAM type: NRG; PAM sequence: AGG
gagttttgctattgttgccc

SEQ ID NO: 21958 - DNA, 20 bp, Artificial Sequence
  Description of Artificial Sequence: Synthetic oligonucleotide
  Target: ATXN2; (-) strand; PAM type: NRG; PAM sequence: CAG
agagttttgctattgttgcc

SEQ ID NO: 21959 - DNA, 20 bp, Artificial Sequence
  Description of Artificial Sequence: Synthetic oligonucleotide
  Target: ATXN2; (-) strand; PAM type: NRG; PAM sequence: GAG
ttttttttttttttgagaca

SEQ ID NO: 21960 - DNA, 20 bp, Artificial Sequence
  Description of Artificial Sequence: Synthetic oligonucleotide
  Target: ATXN2; (-) strand; PAM type: NRG; PAM sequence: CAG
ttttttttttttttttgaga

SEQ ID NO: 21961 - DNA, 20 bp, Artificial Sequence
  Description of Artificial Sequence: Synthetic oligonucleotide
  Target: ATXN2; (-) strand; PAM type: NRG; PAM sequence: GAG
gttttttttttttttttttt

SEQ ID NO: 21962 - DNA, 20 bp, Artificial Sequence
  Description of Artificial Sequence: Synthetic oligonucleotide
  Target: ATXN2; (-) strand; PAM type: NRG; PAM sequence: TGG
tcttgtaggcaatggatctt

SEQ ID NO: 21963 - DNA, 20 bp, Artificial Sequence
  Description of Artificial Sequence: Synthetic oligonucleotide
  Target: ATXN2; (-) strand; PAM type: NRG; PAM sequence: TGG
agtgtgtttcttgtaggcaa

SEQ ID NO: 21964 - DNA, 20 bp, Artificial Sequence
  Description of Artificial Sequence: Synthetic oligonucleotide
  Target: ATXN2; (-) strand; PAM type: NRG; PAM sequence: AGG
aggtaaagtgtgtttcttgt

SEQ ID NO: 21965 - DNA, 20 bp, Artificial Sequence
  Description of Artificial Sequence: Synthetic oligonucleotide
  Target: ATXN2; (-) strand; PAM type: NRG; PAM sequence: TAG
taggtaaagtgtgtttcttg

SEQ ID NO: 21966 - DNA, 20 bp, Artificial Sequence
  Description of Artificial Sequence: Synthetic oligonucleotide
  Target: ATXN2; (-) strand; PAM type: NRG; PAM sequence: AAG
tatgtgtgattttataggta

SEQ ID NO: 21967 - DNA, 20 bp, Artificial Sequence
  Description of Artificial Sequence: Synthetic oligonucleotide
  Target: ATXN2; (-) strand; PAM type: NRG; PAM sequence: AGG
tagtctatgtgtgattttat

SEQ ID NO: 21968 - DNA, 20 bp, Artificial Sequence
  Description of Artificial Sequence: Synthetic oligonucleotide
  Target: ATXN2; (-) strand; PAM type: NRG; PAM sequence: TAG
ttagtctatgtgtgatttta

SEQ ID NO: 21969 - DNA, 20 bp, Artificial Sequence
  Description of Artificial Sequence: Synthetic oligonucleotide
  Target: ATXN2; (-) strand; PAM type: NRG; PAM sequence: TAG
gttttccagctcttcaattt

SEQ ID NO: 21970 - DNA, 20 bp, Artificial Sequence
  Description of Artificial Sequence: Synthetic oligonucleotide
  Target: ATXN2; (-) strand; PAM type: NRG; PAM sequence: CAG
ttgcatggaatattgttttc

SEQ ID NO: 21971 - DNA, 20 bp, Artificial Sequence
  Description of Artificial Sequence: Synthetic oligonucleotide
  Target: ATXN2; (-) strand; PAM type: NRG; PAM sequence: TGG
ttttctggtttccatttgca

SEQ ID NO: 21972 - DNA, 20 bp, Artificial Sequence
  Description of Artificial Sequence: Synthetic oligonucleotide
  Target: ATXN2; (-) strand; PAM type: NRG; PAM sequence: TGG
tagctactcctgttcttttc

SEQ ID NO: 21973 - DNA, 20 bp, Artificial Sequence
  Description of Artificial Sequence: Synthetic oligonucleotide
  Target: ATXN2; (-) strand; PAM type: NRG; PAM sequence: TAG
aaatctattttatctaagca

SEQ ID NO: 21974 - DNA, 20 bp, Artificial Sequence
  Description of Artificial Sequence: Synthetic oligonucleotide
  Target: ATXN2; (-) strand; PAM type: NRG; PAM sequence: AAG
tctcaaaatctattttatct

SEQ ID NO: 21975 - DNA, 20 bp, Artificial Sequence
  Description of Artificial Sequence: Synthetic oligonucleotide
  Target: ATXN2; (-) strand; PAM type: NRG; PAM sequence: TAG
atcttctttgtctgttttta

SEQ ID NO: 21976 - DNA, 20 bp, Artificial Sequence
  Description of Artificial Sequence: Synthetic oligonucleotide
  Target: ATXN2; (-) strand; PAM type: NRG; PAM sequence: TGG
atatctggatgctccagtat

SEQ ID NO: 21977 - DNA, 20 bp, Artificial Sequence
  Description of Artificial Sequence: Synthetic oligonucleotide
  Target: ATXN2; (-) strand; PAM type: NRG; PAM sequence: CAG
ctttatatatctggatgctc

SEQ ID NO: 21978 - DNA, 20 bp, Artificial Sequence
  Description of Artificial Sequence: Synthetic oligonucleotide
  Target: ATXN2; (-) strand; PAM type: NRG; PAM sequence: TGG
taatgtttgctttatatatc

SEQ ID NO: 21979 - DNA, 20 bp, Artificial Sequence
  Description of Artificial Sequence: Synthetic oligonucleotide
  Target: ATXN2; (-) strand; PAM type: NRG; PAM sequence: AGG
gaagtttccgactgttactg

SEQ ID NO: 21980 - DNA, 20 bp, Artificial Sequence
  Description of Artificial Sequence: Synthetic oligonucleotide
  Target: ATXN2; (-) strand; PAM type: NRG; PAM sequence: GAG
tgaagtttccgactgttact

SEQ ID NO: 21981 - DNA, 20 bp, Artificial Sequence
  Description of Artificial Sequence: Synthetic oligonucleotide
  Target: ATXN2; (-) strand; PAM type: NRG; PAM sequence: AAG
ttgctgagagtggggtgttg

SEQ ID NO: 21982 - DNA, 20 bp, Artificial Sequence
  Description of Artificial Sequence: Synthetic oligonucleotide
  Target: ATXN2; (-) strand; PAM type: NRG; PAM sequence: GGG
tctgtccattgctgagagtg

SEQ ID NO: 21983 - DNA, 20 bp, Artificial Sequence
  Description of Artificial Sequence: Synthetic oligonucleotide
  Target: ATXN2; (-) strand; PAM type: NRG; PAM sequence: GGG
atctgtccattgctgagagt

SEQ ID NO: 21984 - DNA, 20 bp, Artificial Sequence
  Description of Artificial Sequence: Synthetic oligonucleotide
  Target: ATXN2; (-) strand; PAM type: NRG; PAM sequence: TGG
gatctgtccattgctgagag

SEQ ID NO: 21985 - DNA, 20 bp, Artificial Sequence
  Description of Artificial Sequence: Synthetic oligonucleotide
  Target: ATXN2; (-) strand; PAM type: NRG; PAM sequence: GAG
aatgatctgtccattgctga

SEQ ID NO: 21986 - DNA, 20 bp, Artificial Sequence
  Description of Artificial Sequence: Synthetic oligonucleotide
  Target: ATXN2; (-) strand; PAM type: NRG; PAM sequence: GAG
tgaatgatctgtccattgct

SEQ ID NO: 21987 - DNA, 20 bp, Artificial Sequence
  Description of Artificial Sequence: Synthetic oligonucleotide
  Target: ATXN2; (-) strand; PAM type: NRG; PAM sequence: AGG
tttggtctatagagcaaatt

SEQ ID NO: 21988 - DNA, 20 bp, Artificial Sequence
  Description of Artificial Sequence: Synthetic oligonucleotide
  Target: ATXN2; (-) strand; PAM type: NRG; PAM sequence: TAG
atttggtctatagagcaaat

SEQ ID NO: 21989 - DNA, 20 bp, Artificial Sequence
  Description of Artificial Sequence: Synthetic oligonucleotide
  Target: ATXN2; (-) strand; PAM type: NRG; PAM sequence: GAG
ttgggcctatttggtctata

SEQ ID NO: 21990 - DNA, 20 bp, Artificial Sequence
  Description of Artificial Sequence: Synthetic oligonucleotide
  Target: ATXN2; (-) strand; PAM type: NRG; PAM sequence: TAG
tattgggcctatttggtcta

SEQ ID NO: 21991 - DNA, 20 bp, Artificial Sequence
  Description of Artificial Sequence: Synthetic oligonucleotide
  Target: ATXN2; (-) strand; PAM type: NRG; PAM sequence: TGG
aaatatgtattgggcctatt

SEQ ID NO: 21992 - DNA, 20 bp, Artificial Sequence
  Description of Artificial Sequence: Synthetic oligonucleotide
  Target: ATXN2; (-) strand; PAM type: NRG; PAM sequence: GGG
atgttctgtaaatatgtatt

SEQ ID NO: 21993 - DNA, 20 bp, Artificial Sequence
  Description of Artificial Sequence: Synthetic oligonucleotide
  Target: ATXN2; (-) strand; PAM type: NRG; PAM sequence: TGG
aatgttctgtaaatatgtat

SEQ ID NO: 21994 - DNA, 20 bp, Artificial Sequence
  Description of Artificial Sequence: Synthetic oligonucleotide
  Target: ATXN2; (-) strand; PAM type: NRG; PAM sequence: TGG
aatgtgtattctatagctgt

SEQ ID NO: 21995 - DNA, 20 bp, Artificial Sequence
  Description of Artificial Sequence: Synthetic oligonucleotide
  Target: ATXN2; (-) strand; PAM type: NRG; PAM sequence: TAG
ggagaagaatgtgtattcta

SEQ ID NO: 21996 - DNA, 20 bp, Artificial Sequence
  Description of Artificial Sequence: Synthetic oligonucleotide
  Target: ATXN2; (-) strand; PAM type: NRG; PAM sequence: AAG
gcaatccatatgttgaggag

SEQ ID NO: 21997 - DNA, 20 bp, Artificial Sequence
  Description of Artificial Sequence: Synthetic oligonucleotide
  Target: ATXN2; (-) strand; PAM type: NRG; PAM sequence: GAG
agagcaatccatatgttgag

SEQ ID NO: 21998 - DNA, 20 bp, Artificial Sequence
  Description of Artificial Sequence: Synthetic oligonucleotide
  Target: ATXN2; (-) strand; PAM type: NRG; PAM sequence: AGG
tgagagcaatccatatgttg

SEQ ID NO: 21999 - DNA, 20 bp, Artificial Sequence
  Description of Artificial Sequence: Synthetic oligonucleotide
  Target: ATXN2; (-) strand; PAM type: NRG; PAM sequence: GAG
ttgagagcaatccatatgtt

SEQ ID NO: 22000 - DNA, 20 bp, Artificial Sequence
  Description of Artificial Sequence: Synthetic oligonucleotide
  Target: ATXN2; (-) strand; PAM type: NRG; PAM sequence: GAG
aacatagggtctatctttga

SEQ ID NO: 22001 - DNA, 20 bp, Artificial Sequence
  Description of Artificial Sequence: Synthetic oligonucleotide
  Target: ATXN2; (-) strand; PAM type: NRG; PAM sequence: GAG
ttaacatagggtctatcttt

SEQ ID NO: 22002 - DNA, 20 bp, Artificial Sequence
  Description of Artificial Sequence: Synthetic oligonucleotide
  Target: ATXN2; (-) strand; PAM type: NRG; PAM sequence: GGG
ttgttttgtggcttaacata

SEQ ID NO: 22003 - DNA, 20 bp, Artificial Sequence
  Description of Artificial Sequence: Synthetic oligonucleotide
  Target: ATXN2; (-) strand; PAM type: NRG; PAM sequence: AGG
cttgttttgtggcttaacat

SEQ ID NO: 22004 - DNA, 20 bp, Artificial Sequence
  Description of Artificial Sequence: Synthetic oligonucleotide
  Target: ATXN2; (-) strand; PAM type: NRG; PAM sequence: TAG
acttgttttgtggcttaaca

SEQ ID NO: 22005 - DNA, 20 bp, Artificial Sequence
  Description of Artificial Sequence: Synthetic oligonucleotide
  Target: ATXN2; (-) strand; PAM type: NRG; PAM sequence: TGG
aaatctttagacttgttttg

SEQ ID NO: 22006 - DNA, 20 bp, Artificial Sequence
  Description of Artificial Sequence: Synthetic oligonucleotide
  Target: ATXN2; (-) strand; PAM type: NRG; PAM sequence: TAG
actgtgccacgtcaaatctt

SEQ ID NO: 22007 - DNA, 20 bp, Artificial Sequence
  Description of Artificial Sequence: Synthetic oligonucleotide
  Target: ATXN2; (-) strand; PAM type: NRG; PAM sequence: GAG
ggtgctgggattacagacat

SEQ ID NO: 22008 - DNA, 20 bp, Artificial Sequence
  Description of Artificial Sequence: Synthetic oligonucleotide
  Target: ATXN2; (-) strand; PAM type: NRG; PAM sequence: CAG
ctcccaaggtgctgggatta

SEQ ID NO: 22009 - DNA, 20 bp, Artificial Sequence
  Description of Artificial Sequence: Synthetic oligonucleotide
  Target: ATXN2; (-) strand; PAM type: NRG; PAM sequence: GGG
tttcggcctcccaaggtgct

SEQ ID NO: 22010 - DNA, 20 bp, Artificial Sequence
  Description of Artificial Sequence: Synthetic oligonucleotide
  Target: ATXN2; (-) strand; PAM type: NRG; PAM sequence: TGG
atttcggcctcccaaggtgc

SEQ ID NO: 22011 - DNA, 20 bp, Artificial Sequence
  Description of Artificial Sequence: Synthetic oligonucleotide
  Target: ATXN2; (-) strand; PAM type: NRG; PAM sequence: AGG
ccacctatttcggcctccca

SEQ ID NO: 22012 - DNA, 20 bp, Artificial Sequence
  Description of Artificial Sequence: Synthetic oligonucleotide
  Target: ATXN2; (-) strand; PAM type: NRG; PAM sequence: AAG
tccacctatttcggcctccc

SEQ ID NO: 22013 - DNA, 20 bp, Artificial Sequence
  Description of Artificial Sequence: Synthetic oligonucleotide
  Target: ATXN2; (-) strand; PAM type: NRG; PAM sequence: CGG
ctcaagcaatccacctattt

SEQ ID NO: 22014 - DNA, 20 bp, Artificial Sequence
  Description of Artificial Sequence: Synthetic oligonucleotide
  Target: ATXN2; (-) strand; PAM type: NRG; PAM sequence: AAG
tgtttcgaactcctgagctc

SEQ ID NO: 22015 - DNA, 20 bp, Artificial Sequence
  Description of Artificial Sequence: Synthetic oligonucleotide
  Target: ATXN2; (-) strand; PAM type: NRG; PAM sequence: GAG
cagggttgtttcgaactcct

SEQ ID NO: 22016 - DNA, 20 bp, Artificial Sequence
  Description of Artificial Sequence: Synthetic oligonucleotide
  Target: ATXN2; (-) strand; PAM type: NRG; PAM sequence: GGG
gggctttgcgatgtgtccca

SEQ ID NO: 22017 - DNA, 20 bp, Artificial Sequence
  Description of Artificial Sequence: Synthetic oligonucleotide
  Target: ATXN2; (-) strand; PAM type: NRG; PAM sequence: AGG
ggggctttgcgatgtgtccc

SEQ ID NO: 22018 - DNA, 20 bp, Artificial Sequence
  Description of Artificial Sequence: Synthetic oligonucleotide
  Target: ATXN2; (-) strand; PAM type: NRG; PAM sequence: CAG
tggggctttgcgatgtgtcc

SEQ ID NO: 22019 - DNA, 20 bp, Artificial Sequence
  Description of Artificial Sequence: Synthetic oligonucleotide
  Target: ATXN2; (-) strand; PAM type: NRG; PAM sequence: GGG
tttttttttttgtagagatg

SEQ ID NO: 22020 - DNA, 20 bp, Artificial Sequence
  Description of Artificial Sequence: Synthetic oligonucleotide
  Target: ATXN2; (-) strand; PAM type: NRG; PAM sequence: GGG
ttttttttttttgtagagat

SEQ ID NO: 22021 - DNA, 20 bp, Artificial Sequence
  Description of Artificial Sequence: Synthetic oligonucleotide
  Target: ATXN2; (-) strand; PAM type: NRG; PAM sequence: TGG
tttttttttttttgtagaga

SEQ ID NO: 22022 - DNA, 20 bp, Artificial Sequence
  Description of Artificial Sequence: Synthetic oligonucleotide
  Target: ATXN2; (-) strand; PAM type: NRG; PAM sequence: GAG
ggattttttttttttttgta

SEQ ID NO: 22023 - DNA, 20 bp, Artificial Sequence
  Description of Artificial Sequence: Synthetic oligonucleotide
  Target: ATXN2; (-) strand; PAM type: NRG; PAM sequence: TAG
ttggattttttttttttttg

SEQ ID NO: 22024 - DNA, 20 bp, Artificial Sequence
  Description of Artificial Sequence: Synthetic oligonucleotide
  Target: ATXN2; (-) strand; PAM type: NRG; PAM sequence: TGG
tcacatatggctgatatttt

SEQ ID NO: 22025 - DNA, 20 bp, Artificial Sequence
  Description of Artificial Sequence: Synthetic oligonucleotide
  Target: ATXN2; (-) strand; PAM type: NRG; PAM sequence: TGG
caggcacatgccgtcacata

SEQ ID NO: 22026 - DNA, 20 bp, Artificial Sequence
  Description of Artificial Sequence: Synthetic oligonucleotide
  Target: ATXN2; (-) strand; PAM type: NRG; PAM sequence: AGG
ttccaagtagctgggactac

SEQ ID NO: 22027 - DNA, 20 bp, Artificial Sequence
  Description of Artificial Sequence: Synthetic oligonucleotide
  Target: ATXN2; (-) strand; PAM type: NRG; PAM sequence: CAG
cttccaagtagctgggacta

SEQ ID NO: 22028 - DNA, 20 bp, Artificial Sequence
  Description of Artificial Sequence: Synthetic oligonucleotide
  Target: ATXN2; (-) strand; PAM type: NRG; PAM sequence: GGG
ccttagccttccaagtagct

SEQ ID NO: 22029 - DNA, 20 bp, Artificial Sequence
  Description of Artificial Sequence: Synthetic oligonucleotide
  Target: ATXN2; (-) strand; PAM type: NRG; PAM sequence: TGG
accttagccttccaagtagc

SEQ ID NO: 22030 - DNA, 20 bp, Artificial Sequence
  Description of Artificial Sequence: Synthetic oligonucleotide
  Target: ATXN2; (-) strand; PAM type: NRG; PAM sequence: TAG
tcccaccttagccttccaag

SEQ ID NO: 22031 - DNA, 20 bp, Artificial Sequence
  Description of Artificial Sequence: Synthetic oligonucleotide
  Target: ATXN2; (-) strand; PAM type: NRG; PAM sequence: AAG
tcctcccaccttagccttcc

SEQ ID NO: 22032 - DNA, 20 bp, Artificial Sequence
  Description of Artificial Sequence: Synthetic oligonucleotide
  Target: ATXN2; (-) strand; PAM type: NRG; PAM sequence: TAG
ctcaagcaatcctcccacct

SEQ ID NO: 22033 - DNA, 20 bp, Artificial Sequence
  Description of Artificial Sequence: Synthetic oligonucleotide
  Target: ATXN2; (-) strand; PAM type: NRG; PAM sequence: AAG
aacctccgccttcctggctc

SEQ ID NO: 22034 - DNA, 20 bp, Artificial Sequence
  Description of Artificial Sequence: Synthetic oligonucleotide
  Target: ATXN2; (-) strand; PAM type: NRG; PAM sequence: TGG
acctgcaacctccgccttcc

SEQ ID NO: 22035 - DNA, 20 bp, Artificial Sequence
  Description of Artificial Sequence: Synthetic oligonucleotide
  Target: ATXN2; (-) strand; PAM type: NRG; PAM sequence: TGG
tggagtacatgtcatgatct

SEQ ID NO: 22036 - DNA, 20 bp, Artificial Sequence
  Description of Artificial Sequence: Synthetic oligonucleotide
  Target: ATXN2; (-) strand; PAM type: NRG; PAM sequence: GAG
tcactctgttacccaggctg

SEQ ID NO: 22037 - DNA, 20 bp, Artificial Sequence
  Description of Artificial Sequence: Synthetic oligonucleotide
  Target: ATXN2; (-) strand; PAM type: NRG; PAM sequence: TGG
tctcactctgttacccaggc

SEQ ID NO: 22038 - DNA, 20 bp, Artificial Sequence
  Description of Artificial Sequence: Synthetic oligonucleotide
  Target: ATXN2; (-) strand; PAM type: NRG; PAM sequence: AGG
agagtctcactctgttaccc

SEQ ID NO: 22039 - DNA, 20 bp, Artificial Sequence
  Description of Artificial Sequence: Synthetic oligonucleotide
  Target: ATXN2; (-) strand; PAM type: NRG; PAM sequence: CAG
cagagtctcactctgttacc

SEQ ID NO: 22040 - DNA, 20 bp, Artificial Sequence
  Description of Artificial Sequence: Synthetic oligonucleotide
  Target: ATXN2; (-) strand; PAM type: NRG; PAM sequence: GAG
ttgtttgtttgtttgtaaca

SEQ ID NO: 22041 - DNA, 20 bp, Artificial Sequence
  Description of Artificial Sequence: Synthetic oligonucleotide
  Target: ATXN2; (-) strand; PAM type: NRG; PAM sequence: CAG
gtttgtttgtttgtttgtaa

SEQ ID NO: 22042 - DNA, 20 bp, Artificial Sequence
  Description of Artificial Sequence: Synthetic oligonucleotide
  Target: ATXN2; (-) strand; PAM type: NRG; PAM sequence: TAG
cttattgtgatcagagaaga

SEQ ID NO: 22043 - DNA, 20 bp, Artificial Sequence
  Description of Artificial Sequence: Synthetic oligonucleotide
  Target: ATXN2; (-) strand; PAM type: NRG; PAM sequence: AAG
ttatcttattgtgatcagag

SEQ ID NO: 22044 - DNA, 20 bp, Artificial Sequence
  Description of Artificial Sequence: Synthetic oligonucleotide
  Target: ATXN2; (-) strand; PAM type: NRG; PAM sequence: GAG
gtgttatcttattgtgatca

SEQ ID NO: 22045 - DNA, 20 bp, Artificial Sequence
  Description of Artificial Sequence: Synthetic oligonucleotide
  Target: ATXN2; (-) strand; PAM type: NRG; PAM sequence: CAG
tagtgttatcttattgtgat

SEQ ID NO: 22046 - DNA, 20 bp, Artificial Sequence
  Description of Artificial Sequence: Synthetic oligonucleotide
  Target: ATXN2; (-) strand; PAM type: NRG; PAM sequence: TAG
gagccaccgtgcccggcctc

SEQ ID NO: 22047 - DNA, 20 bp, Artificial Sequence
  Description of Artificial Sequence: Synthetic oligonucleotide
  Target: ATXN2; (-) strand; PAM type: NRG; PAM sequence: CGG
caggcatgagccaccgtgcc

SEQ ID NO: 22048 - DNA, 20 bp, Artificial Sequence
  Description of Artificial Sequence: Synthetic oligonucleotide
  Target: ATXN2; (-) strand; PAM type: NRG; PAM sequence: GAG
agtgctggaattacaggcat

SEQ ID NO: 22049 - DNA, 20 bp, Artificial Sequence
  Description of Artificial Sequence: Synthetic oligonucleotide
  Target: ATXN2; (-) strand; PAM type: NRG; PAM sequence: AGG
tcctaaagtgctggaattac

SEQ ID NO: 22050 - DNA, 20 bp, Artificial Sequence
  Description of Artificial Sequence: Synthetic oligonucleotide
  Target: ATXN2; (-) strand; PAM type: NRG; PAM sequence: CAG
ctcctaaagtgctggaatta

SEQ ID NO: 22051 - DNA, 20 bp, Artificial Sequence
  Description of Artificial Sequence: Synthetic oligonucleotide
  Target: ATXN2; (-) strand; PAM type: NRG; PAM sequence: TGG
accttggcctcctaaagtgc

SEQ ID NO: 22052 - DNA, 20 bp, Artificial Sequence
  Description of Artificial Sequence: Synthetic oligonucleotide
  Target: ATXN2; (-) strand; PAM type: NRG; PAM sequence: AAG
ccacccaccttggcctccta

SEQ ID NO: 22053 - DNA, 20 bp, Artificial Sequence
  Description of Artificial Sequence: Synthetic oligonucleotide
  Target: ATXN2; (-) strand; PAM type: NRG; PAM sequence: TGG
ctcagatgatccacccacct

SEQ ID NO: 22054 - DNA, 20 bp, Artificial Sequence
  Description of Artificial Sequence: Synthetic oligonucleotide
  Target: ATXN2; (-) strand; PAM type: NRG; PAM sequence: CAG
tgatctcgaactcctgacct

SEQ ID NO: 22055 - DNA, 20 bp, Artificial Sequence
  Description of Artificial Sequence: Synthetic oligonucleotide
  Target: ATXN2; (-) strand; PAM type: NRG; PAM sequence: AAG
ggggtttcaccatgttggtc

SEQ ID NO: 22056 - DNA, 20 bp, Artificial Sequence
  Description of Artificial Sequence: Synthetic oligonucleotide
  Target: ATXN2; (-) strand; PAM type: NRG; PAM sequence: TGG
gagagggggtttcaccatgt

SEQ ID NO: 22057 - DNA, 20 bp, Artificial Sequence
  Description of Artificial Sequence: Synthetic oligonucleotide
  Target: ATXN2; (-) strand; PAM type: NRG; PAM sequence: GGG
ttgtatttttagtagagagg

SEQ ID NO: 22058 - DNA, 20 bp, Artificial Sequence
  Description of Artificial Sequence: Synthetic oligonucleotide
  Target: ATXN2; (-) strand; PAM type: NRG; PAM sequence: GGG
tttgtatttttagtagagag

SEQ ID NO: 22059 - DNA, 20 bp, Artificial Sequence
  Description of Artificial Sequence: Synthetic oligonucleotide
  Target: ATXN2; (-) strand; PAM type: NRG; PAM sequence: GGG
ttttgtatttttagtagaga

SEQ ID NO: 22060 - DNA, 20 bp, Artificial Sequence
  Description of Artificial Sequence: Synthetic oligonucleotide
  Target: ATXN2; (-) strand; PAM type: NRG; PAM sequence: AGG
tttttgtatttttagtagag

SEQ ID NO: 22061 - DNA, 20 bp, Artificial Sequence
  Description of Artificial Sequence: Synthetic oligonucleotide
  Target: ATXN2; (-) strand; PAM type: NRG; PAM sequence: GAG
ttttttgtatttttagtaga

SEQ ID NO: 22062 - DNA, 20 bp, Artificial Sequence
  Description of Artificial Sequence: Synthetic oligonucleotide
  Target: ATXN2; (-) strand; PAM type: NRG; PAM sequence: GAG
ttttttttgtatttttagta

SEQ ID NO: 22063 - DNA, 20 bp, Artificial Sequence
  Description of Artificial Sequence: Synthetic oligonucleotide
  Target: ATXN2; (-) strand; PAM type: NRG; PAM sequence: TAG
atttttttttgtatttttag

SEQ ID NO: 22064 - DNA, 20 bp, Artificial Sequence
  Description of Artificial Sequence: Synthetic oligonucleotide
  Target: ATXN2; (-) strand; PAM type: NRG; PAM sequence: TAG
ctaatttttttttgtatttt

SEQ ID NO: 22065 - DNA, 20 bp, Artificial Sequence
  Description of Artificial Sequence: Synthetic oligonucleotide
  Target: ATXN2; (-) strand; PAM type: NRG; PAM sequence: TGG
caggcatgtaccaccactcc

SEQ ID NO: 22066 - DNA, 20 bp, Artificial Sequence
  Description of Artificial Sequence: Synthetic oligonucleotide
  Target: ATXN2; (-) strand; PAM type: NRG; PAM sequence: AGG
tcctgagtagctgggattac

SEQ ID NO: 22067 - DNA, 20 bp, Artificial Sequence
  Description of Artificial Sequence: Synthetic oligonucleotide
  Target: ATXN2; (-) strand; PAM type: NRG; PAM sequence: CAG
ctcctgagtagctgggatta

SEQ ID NO: 22068 - DNA, 20 bp, Artificial Sequence
  Description of Artificial Sequence: Synthetic oligonucleotide
  Target: ATXN2; (-) strand; PAM type: NRG; PAM sequence: GGG
cctcagcctcctgagtagct

SEQ ID NO: 22069 - DNA, 20 bp, Artificial Sequence
  Description of Artificial Sequence: Synthetic oligonucleotide
  Target: ATXN2; (-) strand; PAM type: NRG; PAM sequence: TGG
gcctcagcctcctgagtagc

SEQ ID NO: 22070 - DNA, 20 bp, Artificial Sequence
  Description of Artificial Sequence: Synthetic oligonucleotide
  Target: ATXN2; (-) strand; PAM type: NRG; PAM sequence: TAG
ttctgcctcagcctcctgag

SEQ ID NO: 22071 - DNA, 20 bp, Artificial Sequence
  Description of Artificial Sequence: Synthetic oligonucleotide
  Target: ATXN2; (-) strand; PAM type: NRG; PAM sequence: GAG
ttcttctgcctcagcctcct

SEQ ID NO: 22072 - DNA, 20 bp, Artificial Sequence
  Description of Artificial Sequence: Synthetic oligonucleotide
  Target: ATXN2; (-) strand; PAM type: NRG; PAM sequence: CAG
ttcaagtgattcttctgcct

SEQ ID NO: 22073 - DNA, 20 bp, Artificial Sequence
  Description of Artificial Sequence: Synthetic oligonucleotide
  Target: ATXN2; (-) strand; PAM type: NRG; PAM sequence: AAG
aacctctgcctccccagttc

SEQ ID NO: 22074 - DNA, 20 bp, Artificial Sequence
  Description of Artificial Sequence: Synthetic oligonucleotide
  Target: ATXN2; (-) strand; PAM type: NRG; PAM sequence: CAG
tactgcaacctctgcctccc

SEQ ID NO: 22075 - DNA, 20 bp, Artificial Sequence
  Description of Artificial Sequence: Synthetic oligonucleotide
  Target: ATXN2; (-) strand; PAM type: NRG; PAM sequence: CGG
ggagtgtagtggcgcgatct

SEQ ID NO: 22076 - DNA, 20 bp, Artificial Sequence
  Description of Artificial Sequence: Synthetic oligonucleotide
  Target: ATXN2; (-) strand; PAM type: NRG; PAM sequence: TGG
tcacccatgctggagtgtag

SEQ ID NO: 22077 - DNA, 20 bp, Artificial Sequence
  Description of Artificial Sequence: Synthetic oligonucleotide
  Target: ATXN2; (-) strand; PAM type: NRG; PAM sequence: TAG
ctgtcacccatgctggagtg

SEQ ID NO: 22078 - DNA, 20 bp, Artificial Sequence
  Description of Artificial Sequence: Synthetic oligonucleotide
  Target: ATXN2; (-) strand; PAM type: NRG; PAM sequence: GAG
tcgctctgtcacccatgctg

SEQ ID NO: 22079 - DNA, 20 bp, Artificial Sequence
  Description of Artificial Sequence: Synthetic oligonucleotide
  Target: ATXN2; (-) strand; PAM type: NRG; PAM sequence: TGG
tctcgctctgtcacccatgc

SEQ ID NO: 22080 - DNA, 20 bp, Artificial Sequence
  Description of Artificial Sequence: Synthetic oligonucleotide
  Target: ATXN2; (-) strand; PAM type: NRG; PAM sequence: GAG
atttttgtttttttgagatg

SEQ ID NO: 22081 - DNA, 20 bp, Artificial Sequence
  Description of Artificial Sequence: Synthetic oligonucleotide
  Target: ATXN2; (-) strand; PAM type: NRG; PAM sequence: TGG
ttatttttgtttttttgaga

SEQ ID NO: 22082 - DNA, 20 bp, Artificial Sequence
  Description of Artificial Sequence: Synthetic oligonucleotide
  Target: ATXN2; (-) strand; PAM type: NRG; PAM sequence: GAG
atttttatttttgttttttt

SEQ ID NO: 22083 - DNA, 20 bp, Artificial Sequence
  Description of Artificial Sequence: Synthetic oligonucleotide
  Target: ATXN2; (-) strand; PAM type: NRG; PAM sequence: TAG
ccaaagttcctcttgttatc

SEQ ID NO: 22084 - DNA, 20 bp, Artificial Sequence
  Description of Artificial Sequence: Synthetic oligonucleotide
  Target: ATXN2; (-) strand; PAM type: NRG; PAM sequence: AAG
atgtatttgtatactttcca

SEQ ID NO: 22085 - DNA, 20 bp, Artificial Sequence
  Description of Artificial Sequence: Synthetic oligonucleotide
  Target: ATXN2; (-) strand; PAM type: NRG; PAM sequence: GAG
tggacccactggtcattcag

SEQ ID NO: 22086 - DNA, 20 bp, Artificial Sequence
  Description of Artificial Sequence: Synthetic oligonucleotide
  Target: ATXN2; (-) strand; PAM type: NRG; PAM sequence: AGG
catggacccactggtcattc

SEQ ID NO: 22087 - DNA, 20 bp, Artificial Sequence
  Description of Artificial Sequence: Synthetic oligonucleotide
  Target: ATXN2; (-) strand; PAM type: NRG; PAM sequence: CAG
tcatggacccactggtcatt

SEQ ID NO: 22088 - DNA, 20 bp, Artificial Sequence
  Description of Artificial Sequence: Synthetic oligonucleotide
  Target: ATXN2; (-) strand; PAM type: NRG; PAM sequence: TGG
taatttcttcatggacccac

SEQ ID NO: 22089 - DNA, 20 bp, Artificial Sequence
  Description of Artificial Sequence: Synthetic oligonucleotide
  Target: ATXN2; (-) strand; PAM type: NRG; PAM sequence: TGG
ttttcttcttaatttcttca

SEQ ID NO: 22090 - DNA, 20 bp, Artificial Sequence
  Description of Artificial Sequence: Synthetic oligonucleotide
  Target: ATXN2; (-) strand; PAM type: NRG; PAM sequence: CAG
atttgtttcaaggaattttc

SEQ ID NO: 22091 - DNA, 20 bp, Artificial Sequence
  Description of Artificial Sequence: Synthetic oligonucleotide
  Target: ATXN2; (-) strand; PAM type: NRG; PAM sequence: AGG
ttccattttcatttgtttca

SEQ ID NO: 22092 - DNA, 20 bp, Artificial Sequence
  Description of Artificial Sequence: Synthetic oligonucleotide
  Target: ATXN2; (-) strand; PAM type: NRG; PAM sequence: AAG
tttccattttcatttgtttc

SEQ ID NO: 22093 - DNA, 20 bp, Artificial Sequence
  Description of Artificial Sequence: Synthetic oligonucleotide
  Target: ATXN2; (-) strand; PAM type: NRG; PAM sequence: AAG
tgtatcctataggttttgat

SEQ ID NO: 22094 - DNA, 20 bp, Artificial Sequence
  Description of Artificial Sequence: Synthetic oligonucleotide
  Target: ATXN2; (-) strand; PAM type: NRG; PAM sequence: AGG
ttgcttttactgtatcctat

SEQ ID NO: 22095 - DNA, 20 bp, Artificial Sequence
  Description of Artificial Sequence: Synthetic oligonucleotide
  Target: ATXN2; (-) strand; PAM type: NRG; PAM sequence: TAG
gttgcttttactgtatccta

SEQ ID NO: 22096 - DNA, 20 bp, Artificial Sequence
  Description of Artificial Sequence: Synthetic oligonucleotide
  Target: ATXN2; (-) strand; PAM type: NRG; PAM sequence: AGG
tttttccacttttttgatgt

SEQ ID NO: 22097 - DNA, 20 bp, Artificial Sequence
  Description of Artificial Sequence: Synthetic oligonucleotide
  Target: ATXN2; (-) strand; PAM type: NRG; PAM sequence: TAG
gtttttccacttttttgatg

SEQ ID NO: 22098 - DNA, 20 bp, Artificial Sequence
  Description of Artificial Sequence: Synthetic oligonucleotide
  Target: ATXN2; (-) strand; PAM type: NRG; PAM sequence: AAG
ttaggatgtattggcagatg

SEQ ID NO: 22099 - DNA, 20 bp, Artificial Sequence
  Description of Artificial Sequence: Synthetic oligonucleotide
  Target: ATXN2; (-) strand; PAM type: NRG; PAM sequence: CAG
agttctttaggatgtattgg

SEQ ID NO: 22100 - DNA, 20 bp, Artificial Sequence
  Description of Artificial Sequence: Synthetic oligonucleotide
  Target: ATXN2; (-) strand; PAM type: NRG; PAM sequence: TGG
tctagttctttaggatgtat

SEQ ID NO: 22101 - DNA, 20 bp, Artificial Sequence
  Description of Artificial Sequence: Synthetic oligonucleotide
  Target: ATXN2; (-) strand; PAM type: NRG; PAM sequence: AGG
ccttgcttttctagttcttt

SEQ ID NO: 22102 - DNA, 20 bp, Artificial Sequence
  Description of Artificial Sequence: Synthetic oligonucleotide
  Target: ATXN2; (-) strand; PAM type: NRG; PAM sequence: TAG
tccttgcttttctagttctt

SEQ ID NO: 22103 - DNA, 20 bp, Artificial Sequence
  Description of Artificial Sequence: Synthetic oligonucleotide
  Target: ATXN2; (-) strand; PAM type: NRG; PAM sequence: TAG
aggttttgtccttgcttttc

SEQ ID NO: 22104 - DNA, 20 bp, Artificial Sequence
  Description of Artificial Sequence: Synthetic oligonucleotide
  Target: ATXN2; (-) strand; PAM type: NRG; PAM sequence: AGG
ttatttcttctactgatttt

SEQ ID NO: 22105 - DNA, 20 bp, Artificial Sequence
  Description of Artificial Sequence: Synthetic oligonucleotide
  Target: ATXN2; (-) strand; PAM type: NRG; PAM sequence: TAG
tttatttcttctactgattt

SEQ ID NO: 22106 - DNA, 20 bp, Artificial Sequence
  Description of Artificial Sequence: Synthetic oligonucleotide
  Target: ATXN2; (-) strand; PAM type: NRG; PAM sequence: CAG
gagtctggctaaaggtttgt

SEQ ID NO: 22107 - DNA, 20 bp, Artificial Sequence
  Description of Artificial Sequence: Synthetic oligonucleotide
  Target: ATXN2; (-) strand; PAM type: NRG; PAM sequence: AGG
ttttttctgagtctggctaa

SEQ ID NO: 22108 - DNA, 20 bp, Artificial Sequence
  Description of Artificial Sequence: Synthetic oligonucleotide
  Target: ATXN2; (-) strand; PAM type: NRG; PAM sequence: AAG
tttttttctgagtctggcta

SEQ ID NO: 22109 - DNA, 20 bp, Artificial Sequence
  Description of Artificial Sequence: Synthetic oligonucleotide
  Target: ATXN2; (-) strand; PAM type: NRG; PAM sequence: TGG
ttctcttttttttctgagtc

SEQ ID NO: 22110 - DNA, 20 bp, Artificial Sequence
  Description of Artificial Sequence: Synthetic oligonucleotide
  Target: ATXN2; (-) strand; PAM type: NRG; PAM sequence: GAG
gggttttctcttttttttct

SEQ ID NO: 22111 - DNA, 20 bp, Artificial Sequence
  Description of Artificial Sequence: Synthetic oligonucleotide
  Target: ATXN2; (-) strand; PAM type: NRG; PAM sequence: GGG
catctctcattttattattt

SEQ ID NO: 22112 - DNA, 20 bp, Artificial Sequence
  Description of Artificial Sequence: Synthetic oligonucleotide
  Target: ATXN2; (-) strand; PAM type: NRG; PAM sequence: TGG
tcatctctcattttattatt

SEQ ID NO: 22113 - DNA, 20 bp, Artificial Sequence
  Description of Artificial Sequence: Synthetic oligonucleotide
  Target: ATXN2; (-) strand; PAM type: NRG; PAM sequence: TGG
aatgatcctttgaatttcgg

SEQ ID NO: 22114 - DNA, 20 bp, Artificial Sequence
  Description of Artificial Sequence: Synthetic oligonucleotide
  Target: ATXN2; (-) strand; PAM type: NRG; PAM sequence: CGG
tctaatgatcctttgaattt

SEQ ID NO: 22115 - DNA, 20 bp, Artificial Sequence
  Description of Artificial Sequence: Synthetic oligonucleotide
  Target: ATXN2; (-) strand; PAM type: NRG; PAM sequence: TAG
cagcatatagatgctcatag

SEQ ID NO: 22116 - DNA, 20 bp, Artificial Sequence
  Description of Artificial Sequence: Synthetic oligonucleotide
  Target: ATXN2; (-) strand; PAM type: NRG; PAM sequence: TAG
tatcagcatatagatgctca

SEQ ID NO: 22117 - DNA, 20 bp, Artificial Sequence
  Description of Artificial Sequence: Synthetic oligonucleotide
  Target: ATXN2; (-) strand; PAM type: NRG; PAM sequence: TAG
ttttccaatgtatcagcata

SEQ ID NO: 22118 - DNA, 20 bp, Artificial Sequence
  Description of Artificial Sequence: Synthetic oligonucleotide
  Target: ATXN2; (-) strand; PAM type: NRG; PAM sequence: CAG
ttcaaggttttccaatgtat

SEQ ID NO: 22119 - DNA, 20 bp, Artificial Sequence
  Description of Artificial Sequence: Synthetic oligonucleotide
  Target: ATXN2; (-) strand; PAM type: NRG; PAM sequence: AGG
ggaatttatccatttcttca

SEQ ID NO: 22120 - DNA, 20 bp, Artificial Sequence
  Description of Artificial Sequence: Synthetic oligonucleotide
  Target: ATXN2; (-) strand; PAM type: NRG; PAM sequence: AAG
aggaatttatccatttcttc

SEQ ID NO: 22121 - DNA, 20 bp, Artificial Sequence
  Description of Artificial Sequence: Synthetic oligonucleotide
  Target: ATXN2; (-) strand; PAM type: NRG; PAM sequence: AGG
ttggtaggttgtatgtgtct

SEQ ID NO: 22122 - DNA, 20 bp, Artificial Sequence
  Description of Artificial Sequence: Synthetic oligonucleotide
  Target: ATXN2; (-) strand; PAM type: NRG; PAM sequence: TAG
cttggtaggttgtatgtgtc

SEQ ID NO: 22123 - DNA, 20 bp, Artificial Sequence
  Description of Artificial Sequence: Synthetic oligonucleotide
  Target: ATXN2; (-) strand; PAM type: NRG; PAM sequence: AGG
ctttgtggttcagtcttggt

SEQ ID NO: 22124 - DNA, 20 bp, Artificial Sequence
  Description of Artificial Sequence: Synthetic oligonucleotide
  Target: ATXN2; (-) strand; PAM type: NRG; PAM sequence: TAG
tctttgtggttcagtcttgg

SEQ ID NO: 22125 - DNA, 20 bp, Artificial Sequence
  Description of Artificial Sequence: Synthetic oligonucleotide
  Target: ATXN2; (-) strand; PAM type: NRG; PAM sequence: TGG
atttctttgtggttcagtct

SEQ ID NO: 22126 - DNA, 20 bp, Artificial Sequence
  Description of Artificial Sequence: Synthetic oligonucleotide
  Target: ATXN2; (-) strand; PAM type: NRG; PAM sequence: CAG
ttttggatttctttgtggtt

SEQ ID NO: 22127 - DNA, 20 bp, Artificial Sequence
  Description of Artificial Sequence: Synthetic oligonucleotide
  Target: ATXN2; (-) strand; PAM type: NRG; PAM sequence: TGG
ttgggttttggatttctttg

SEQ ID NO: 22128 - DNA, 20 bp, Artificial Sequence
  Description of Artificial Sequence: Synthetic oligonucleotide
  Target: ATXN2; (-) strand; PAM type: NRG; PAM sequence: TGG
ttgttattgtatttgggttt

SEQ ID NO: 22129 - DNA, 20 bp, Artificial Sequence
  Description of Artificial Sequence: Synthetic oligonucleotide
  Target: ATXN2; (-) strand; PAM type: NRG; PAM sequence: GGG
cgttacttgttattgtattt

SEQ ID NO: 22130 - DNA, 20 bp, Artificial Sequence
  Description of Artificial Sequence: Synthetic oligonucleotide
  Target: ATXN2; (-) strand; PAM type: NRG; PAM sequence: TGG
tcgttacttgttattgtatt

SEQ ID NO: 22131 - DNA, 20 bp, Artificial Sequence
  Description of Artificial Sequence: Synthetic oligonucleotide
  Target: ATXN2; (-) strand; PAM type: NRG; PAM sequence: TGG
ttgatctcgttacttgttat

SEQ ID NO: 22132 - DNA, 20 bp, Artificial Sequence
  Description of Artificial Sequence: Synthetic oligonucleotide
  Target: ATXN2; (-) strand; PAM type: NRG; PAM sequence: TAG
tgctgggagactatttctta

SEQ ID NO: 22133 - DNA, 20 bp, Artificial Sequence
  Description of Artificial Sequence: Synthetic oligonucleotide
  Target: ATXN2; (-) strand; PAM type: NRG; PAM sequence: GAG
ccatggcttttctttgctgg

SEQ ID NO: 22134 - DNA, 20 bp, Artificial Sequence
  Description of Artificial Sequence: Synthetic oligonucleotide
  Target: ATXN2; (-) strand; PAM type: NRG; PAM sequence: GGG
gtccatggcttttctttgct

SEQ ID NO: 22135 - DNA, 20 bp, Artificial Sequence
  Description of Artificial Sequence: Synthetic oligonucleotide
  Target: ATXN2; (-) strand; PAM type: NRG; PAM sequence: TGG
ggtccatggcttttctttgc

SEQ ID NO: 22136 - DNA, 20 bp, Artificial Sequence
  Description of Artificial Sequence: Synthetic oligonucleotide
  Target: ATXN2; (-) strand; PAM type: NRG; PAM sequence: TGG
cagtgaagccatcaggtcca

SEQ ID NO: 22137 - DNA, 20 bp, Artificial Sequence
  Description of Artificial Sequence: Synthetic oligonucleotide
  Target: ATXN2; (-) strand; PAM type: NRG; PAM sequence: AGG
aattcagcagtgaagccatc

SEQ ID NO: 22138 - DNA, 20 bp, Artificial Sequence
  Description of Artificial Sequence: Synthetic oligonucleotide
  Target: ATXN2; (-) strand; PAM type: NRG; PAM sequence: CAG
gaattcagcagtgaagccat

SEQ ID NO: 22139 - DNA, 20 bp, Artificial Sequence
  Description of Artificial Sequence: Synthetic oligonucleotide
  Target: ATXN2; (-) strand; PAM type: NRG; PAM sequence: AAG
tttagtagaattcagcagtg

SEQ ID NO: 22140 - DNA, 20 bp, Artificial Sequence
  Description of Artificial Sequence: Synthetic oligonucleotide
  Target: ATXN2; (-) strand; PAM type: NRG; PAM sequence: CAG
aaaggtttagtagaattcag

SEQ ID NO: 22141 - DNA, 20 bp, Artificial Sequence
  Description of Artificial Sequence: Synthetic oligonucleotide
  Target: ATXN2; (-) strand; PAM type: NRG; PAM sequence: CAG
tttaaaggtttagtagaatt

SEQ ID NO: 22142 - DNA, 20 bp, Artificial Sequence
  Description of Artificial Sequence: Synthetic oligonucleotide
  Target: ATXN2; (-) strand; PAM type: NRG; PAM sequence: TAG
gttcttctttaaaggtttag

SEQ ID NO: 22143 - DNA, 20 bp, Artificial Sequence
  Description of Artificial Sequence: Synthetic oligonucleotide
  Target: ATXN2; (-) strand; PAM type: NRG; PAM sequence: TAG
ttagttcttctttaaaggtt

SEQ ID NO: 22144 - DNA, 20 bp, Artificial Sequence
  Description of Artificial Sequence: Synthetic oligonucleotide
  Target: ATXN2; (-) strand; PAM type: NRG; PAM sequence: AGG
tggtattagttcttctttaa

SEQ ID NO: 22145 - DNA, 20 bp, Artificial Sequence
  Description of Artificial Sequence: Synthetic oligonucleotide
  Target: ATXN2; (-) strand; PAM type: NRG; PAM sequence: AAG
ttggtattagttcttcttta

SEQ ID NO: 22146 - DNA, 20 bp, Artificial Sequence
  Description of Artificial Sequence: Synthetic oligonucleotide
  Target: ATXN2; (-) strand; PAM type: NRG; PAM sequence: TAG
agtttgagtaggattggtat

SEQ ID NO: 22147 - DNA, 20 bp, Artificial Sequence
  Description of Artificial Sequence: Synthetic oligonucleotide
  Target: ATXN2; (-) strand; PAM type: NRG; PAM sequence: TGG
tggaatagtttgagtaggat

SEQ ID NO: 22148 - DNA, 20 bp, Artificial Sequence
  Description of Artificial Sequence: Synthetic oligonucleotide
  Target: ATXN2; (-) strand; PAM type: NRG; PAM sequence: AGG
tgtgttggaatagtttgagt

SEQ ID NO: 22149 - DNA, 20 bp, Artificial Sequence
  Description of Artificial Sequence: Synthetic oligonucleotide
  Target: ATXN2; (-) strand; PAM type: NRG; PAM sequence: TAG
ttgtgttggaatagtttgag

SEQ ID NO: 22150 - DNA, 20 bp, Artificial Sequence
  Description of Artificial Sequence: Synthetic oligonucleotide
  Target: ATXN2; (-) strand; PAM type: NRG; PAM sequence: GAG
gtattgtgttggaatagttt

SEQ ID NO: 22151 - DNA, 20 bp, Artificial Sequence
  Description of Artificial Sequence: Synthetic oligonucleotide
  Target: ATXN2; (-) strand; PAM type: NRG; PAM sequence: TAG
cttcctgtattgtgttggaa

SEQ ID NO: 22152 - DNA, 20 bp, Artificial Sequence
  Description of Artificial Sequence: Synthetic oligonucleotide
  Target: ATXN2; (-) strand; PAM type: NRG; PAM sequence: TGG
tccctcttcctgtattgtgt

SEQ ID NO: 22153 - DNA, 20 bp, Artificial Sequence
  Description of Artificial Sequence: Synthetic oligonucleotide
  Target: ATXN2; (-) strand; PAM type: NRG; PAM sequence: AAG
gccttgtagaatgagtttag

SEQ ID NO: 22154 - DNA, 20 bp, Artificial Sequence
  Description of Artificial Sequence: Synthetic oligonucleotide
  Target: ATXN2; (-) strand; PAM type: NRG; PAM sequence: TAG
gtggccttgtagaatgagtt

SEQ ID NO: 22155 - DNA, 20 bp, Artificial Sequence
  Description of Artificial Sequence: Synthetic oligonucleotide
  Target: ATXN2; (-) strand; PAM type: NRG; PAM sequence: GAG
taatagtggccttgtagaat

SEQ ID NO: 22156 - DNA, 20 bp, Artificial Sequence
  Description of Artificial Sequence: Synthetic oligonucleotide
  Target: ATXN2; (-) strand; PAM type: NRG; PAM sequence: TAG
atagggtaatagtggccttg

SEQ ID NO: 22157 - DNA, 20 bp, Artificial Sequence
  Description of Artificial Sequence: Synthetic oligonucleotide
  Target: ATXN2; (-) strand; PAM type: NRG; PAM sequence: TGG
ggttttgtatagggtaatag

SEQ ID NO: 22158 - DNA, 20 bp, Artificial Sequence
  Description of Artificial Sequence: Synthetic oligonucleotide
  Target: ATXN2; (-) strand; PAM type: NRG; PAM sequence: TAG
tttggttttgtatagggtaa

SEQ ID NO: 22159 - DNA, 20 bp, Artificial Sequence
  Description of Artificial Sequence: Synthetic oligonucleotide
  Target: ATXN2; (-) strand; PAM type: NRG; PAM sequence: GGG
gtgtcctttggttttgtata

SEQ ID NO: 22160 - DNA, 20 bp, Artificial Sequence
  Description of Artificial Sequence: Synthetic oligonucleotide
  Target: ATXN2; (-) strand; PAM type: NRG; PAM sequence: AGG
tgtgtcctttggttttgtat

SEQ ID NO: 22161 - DNA, 20 bp, Artificial Sequence
  Description of Artificial Sequence: Synthetic oligonucleotide
  Target: ATXN2; (-) strand; PAM type: NRG; PAM sequence: TAG
atgtgtcctttggttttgta

SEQ ID NO: 22162 - DNA, 20 bp, Artificial Sequence
  Description of Artificial Sequence: Synthetic oligonucleotide
  Target: ATXN2; (-) strand; PAM type: NRG; PAM sequence: TGG
tccctttttgatgtgtcctt

SEQ ID NO: 22163 - DNA, 20 bp, Artificial Sequence
  Description of Artificial Sequence: Synthetic oligonucleotide
  Target: ATXN2; (-) strand; PAM type: NRG; PAM sequence: TAG
tcttcagagacactggcttc

SEQ ID NO: 22164 - DNA, 20 bp, Artificial Sequence
  Description of Artificial Sequence: Synthetic oligonucleotide
  Target: ATXN2; (-) strand; PAM type: NRG; PAM sequence: TGG
ataatgttcttcagagacac

SEQ ID NO: 22165 - DNA, 20 bp, Artificial Sequence
  Description of Artificial Sequence: Synthetic oligonucleotide
  Target: ATXN2; (-) strand; PAM type: NRG; PAM sequence: GAG
tttttgcataatgttcttca

SEQ ID NO: 22166 - DNA, 20 bp, Artificial Sequence
  Description of Artificial Sequence: Synthetic oligonucleotide
  Target: ATXN2; (-) strand; PAM type: NRG; PAM sequence: CAG
gatttttgcataatgttctt

SEQ ID NO: 22167 - DNA, 20 bp, Artificial Sequence
  Description of Artificial Sequence: Synthetic oligonucleotide
  Target: ATXN2; (-) strand; PAM type: NRG; PAM sequence: AGG
ggtttgctagtattatattg

SEQ ID NO: 22168 - DNA, 20 bp, Artificial Sequence
  Description of Artificial Sequence: Synthetic oligonucleotide
  Target: ATXN2; (-) strand; PAM type: NRG; PAM sequence: GAG
cggtttgctagtattatatt

SEQ ID NO: 22169 - DNA, 20 bp, Artificial Sequence
  Description of Artificial Sequence: Synthetic oligonucleotide
  Target: ATXN2; (-) strand; PAM type: NRG; PAM sequence: TAG
tgttactgaattcggtttgc

SEQ ID NO: 22170 - DNA, 20 bp, Artificial Sequence
  Description of Artificial Sequence: Synthetic oligonucleotide
  Target: ATXN2; (-) strand; PAM type: NRG; PAM sequence: CGG
ttttaatgtgttactgaatt

SEQ ID NO: 22171 - DNA, 20 bp, Artificial Sequence
  Description of Artificial Sequence: Synthetic oligonucleotide
  Target: ATXN2; (-) strand; PAM type: NRG; PAM sequence: TAG
tccctgggatgaatcccact

SEQ ID NO: 22172 - DNA, 20 bp, Artificial Sequence
  Description of Artificial Sequence: Synthetic oligonucleotide
  Target: ATXN2; (-) strand; PAM type: NRG; PAM sequence: GGG
cgaaccatccttgcatccct

SEQ ID NO: 22173 - DNA, 20 bp, Artificial Sequence
  Description of Artificial Sequence: Synthetic oligonucleotide
  Target: ATXN2; (-) strand; PAM type: NRG; PAM sequence: TGG
tcgaaccatccttgcatccc

SEQ ID NO: 22174 - DNA, 20 bp, Artificial Sequence
  Description of Artificial Sequence: Synthetic oligonucleotide
  Target: ATXN2; (-) strand; PAM type: NRG; PAM sequence: AAG
tctttgtcttttattctgtt

SEQ ID NO: 22175 - DNA, 20 bp, Artificial Sequence
  Description of Artificial Sequence: Synthetic oligonucleotide
  Target: ATXN2; (-) strand; PAM type: NRG; PAM sequence: TAG
taatatatatatatattttt

SEQ ID NO: 22176 - DNA, 20 bp, Artificial Sequence
  Description of Artificial Sequence: Synthetic oligonucleotide
  Target: ATXN2; (-) strand; PAM type: NRG; PAM sequence: CAG
atatatatttatatcataca

SEQ ID NO: 22177 - DNA, 20 bp, Artificial Sequence
  Description of Artificial Sequence: Synthetic oligonucleotide
  Target: ATXN2; (-) strand; PAM type: NRG; PAM sequence: TGG
gttttaatcataaggggatg

SEQ ID NO: 22178 - DNA, 20 bp, Artificial Sequence
  Description of Artificial Sequence: Synthetic oligonucleotide
  Target: ATXN2; (-) strand; PAM type: NRG; PAM sequence: GGG
ccaagggttttaatcataag

SEQ ID NO: 22179 - DNA, 20 bp, Artificial Sequence
  Description of Artificial Sequence: Synthetic oligonucleotide
  Target: ATXN2; (-) strand; PAM type: NRG; PAM sequence: GGG
gccaagggttttaatcataa

SEQ ID NO: 22180 - DNA, 20 bp, Artificial Sequence
  Description of Artificial Sequence: Synthetic oligonucleotide
  Target: ATXN2; (-) strand; PAM type: NRG; PAM sequence: AGG
ggccaagggttttaatcata

SEQ ID NO: 22181 - DNA, 20 bp, Artificial Sequence
  Description of Artificial Sequence: Synthetic oligonucleotide
  Target: ATXN2; (-) strand; PAM type: NRG; PAM sequence: AAG
cggccaagggttttaatcat

SEQ ID NO: 22182 - DNA, 20 bp, Artificial Sequence
  Description of Artificial Sequence: Synthetic oligonucleotide
  Target: ATXN2; (-) strand; PAM type: NRG; PAM sequence: GGG
gagccaccacgcccggccaa

SEQ ID NO: 22183 - DNA, 20 bp, Artificial Sequence
  Description of Artificial Sequence: Synthetic oligonucleotide
  Target: ATXN2; (-) strand; PAM type: NRG; PAM sequence: AGG
tgagccaccacgcccggcca

SEQ ID NO: 22184 - DNA, 20 bp, Artificial Sequence
  Description of Artificial Sequence: Synthetic oligonucleotide
  Target: ATXN2; (-) strand; PAM type: NRG; PAM sequence: AAG
gtgagccaccacgcccggcc

SEQ ID NO: 22185 - DNA, 20 bp, Artificial Sequence
  Description of Artificial Sequence: Synthetic oligonucleotide
  Target: ATXN2; (-) strand; PAM type: NRG; PAM sequence: CGG
caggcgtgagccaccacgcc

SEQ ID NO: 22186 - DNA, 20 bp, Artificial Sequence
  Description of Artificial Sequence: Synthetic oligonucleotide
  Target: ATXN2; (-) strand; PAM type: NRG; PAM sequence: GAG
agtgctgggattacaggcgt

SEQ ID NO: 22187 - DNA, 20 bp, Artificial Sequence
  Description of Artificial Sequence: Synthetic oligonucleotide
  Target: ATXN2; (-) strand; PAM type: NRG; PAM sequence: AGG
tcccaaagtgctgggattac

SEQ ID NO: 22188 - DNA, 20 bp, Artificial Sequence
  Description of Artificial Sequence: Synthetic oligonucleotide
  Target: ATXN2; (-) strand; PAM type: NRG; PAM sequence: CAG
ctcccaaagtgctgggatta

SEQ ID NO: 22189 - DNA, 20 bp, Artificial Sequence
  Description of Artificial Sequence: Synthetic oligonucleotide
  Target: ATXN2; (-) strand; PAM type: NRG; PAM sequence: GGG
tctcagcctcccaaagtgct

SEQ ID NO: 22190 - DNA, 20 bp, Artificial Sequence
  Description of Artificial Sequence: Synthetic oligonucleotide
  Target: ATXN2; (-) strand; PAM type: NRG; PAM sequence: TGG
gtctcagcctcccaaagtgc

SEQ ID NO: 22191 - DNA, 20 bp, Artificial Sequence
  Description of Artificial Sequence: Synthetic oligonucleotide
  Target: ATXN2; (-) strand; PAM type: NRG; PAM sequence: AAG
ctgcccgtctcagcctccca

SEQ ID NO: 22192 - DNA, 20 bp, Artificial Sequence
  Description of Artificial Sequence: Synthetic oligonucleotide
  Target: ATXN2; (-) strand; PAM type: NRG; PAM sequence: CAG
acctcatgatctgcccgtct

SEQ ID NO: 22193 - DNA, 20 bp, Artificial Sequence
  Description of Artificial Sequence: Synthetic oligonucleotide
  Target: ATXN2; (-) strand; PAM type: NRG; PAM sequence: TGG
tttcaccgtgttagccagga

SEQ ID NO: 22194 - DNA, 20 bp, Artificial Sequence
  Description of Artificial Sequence: Synthetic oligonucleotide
  Target: ATXN2; (-) strand; PAM type: NRG; PAM sequence: AGG
ggggtttcaccgtgttagcc

SEQ ID NO: 22195 - DNA, 20 bp, Artificial Sequence
  Description of Artificial Sequence: Synthetic oligonucleotide
  Target: ATXN2; (-) strand; PAM type: NRG; PAM sequence: CAG
cggggtttcaccgtgttagc

SEQ ID NO: 22196 - DNA, 20 bp, Artificial Sequence
  Description of Artificial Sequence: Synthetic oligonucleotide
  Target: ATXN2; (-) strand; PAM type: NRG; PAM sequence: TAG
gagacggggtttcaccgtgt

SEQ ID NO: 22197 - DNA, 20 bp, Artificial Sequence
  Description of Artificial Sequence: Synthetic oligonucleotide
  Target: ATXN2; (-) strand; PAM type: NRG; PAM sequence: GGG
ttgtatttttagtagagacg

SEQ ID NO: 22198 - DNA, 20 bp, Artificial Sequence
  Description of Artificial Sequence: Synthetic oligonucleotide
  Target: ATXN2; (-) strand; PAM type: NRG; PAM sequence: GGG
tttgtatttttagtagagac

SEQ ID NO: 22199 - DNA, 20 bp, Artificial Sequence
  Description of Artificial Sequence: Synthetic oligonucleotide
  Target: ATXN2; (-) strand; PAM type: NRG; PAM sequence: CGG
ttttgtatttttagtagaga

SEQ ID NO: 22200 - DNA, 20 bp, Artificial Sequence
  Description of Artificial Sequence: Synthetic oligonucleotide
  Target: ATXN2; (-) strand; PAM type: NRG; PAM sequence: GAG
aattttttgtatttttagta

SEQ ID NO: 22201 - DNA, 20 bp, Artificial Sequence
  Description of Artificial Sequence: Synthetic oligonucleotide
  Target: ATXN2; (-) strand; PAM type: NRG; PAM sequence: TAG
ctaattttttgtatttttag

SEQ ID NO: 22202 - DNA, 20 bp, Artificial Sequence
  Description of Artificial Sequence: Synthetic oligonucleotide
  Target: ATXN2; (-) strand; PAM type: NRG; PAM sequence: TAG
cggctaattttttgtatttt

SEQ ID NO: 22203 - DNA, 20 bp, Artificial Sequence
  Description of Artificial Sequence: Synthetic oligonucleotide
  Target: ATXN2; (-) strand; PAM type: NRG; PAM sequence: CGG
caggtgtccgctaacacgcc

SEQ ID NO: 22204 - DNA, 20 bp, Artificial Sequence
  Description of Artificial Sequence: Synthetic oligonucleotide
  Target: ATXN2; (-) strand; PAM type: NRG; PAM sequence: AGG
tcccgagtagctgggactac

SEQ ID NO: 22205 - DNA, 20 bp, Artificial Sequence
  Description of Artificial Sequence: Synthetic oligonucleotide
  Target: ATXN2; (-) strand; PAM type: NRG; PAM sequence: CAG
ctcccgagtagctgggacta

SEQ ID NO: 22206 - DNA, 20 bp, Artificial Sequence
  Description of Artificial Sequence: Synthetic oligonucleotide
  Target: ATXN2; (-) strand; PAM type: NRG; PAM sequence: GGG
cctcagcctcccgagtagct

SEQ ID NO: 22207 - DNA, 20 bp, Artificial Sequence
  Description of Artificial Sequence: Synthetic oligonucleotide
  Target: ATXN2; (-) strand; PAM type: NRG; PAM sequence: TGG
gcctcagcctcccgagtagc

SEQ ID NO: 22208 - DNA, 20 bp, Artificial Sequence
  Description of Artificial Sequence: Synthetic oligonucleotide
  Target: ATXN2; (-) strand; PAM type: NRG; PAM sequence: TAG
tcctgcctcagcctcccgag

SEQ ID NO: 22209 - DNA, 20 bp, Artificial Sequence
  Description of Artificial Sequence: Synthetic oligonucleotide
  Target: ATXN2; (-) strand; PAM type: NRG; PAM sequence: GAG
ttctcctgcctcagcctccc

SEQ ID NO: 22210 - DNA, 20 bp, Artificial Sequence
  Description of Artificial Sequence: Synthetic oligonucleotide
  Target: ATXN2; (-) strand; PAM type: NRG; PAM sequence: CAG
ttcatgccgttctcctgcct

SEQ ID NO: 22211 - DNA, 20 bp, Artificial Sequence
  Description of Artificial Sequence: Synthetic oligonucleotide
  Target: ATXN2; (-) strand; PAM type: NRG; PAM sequence: GGG
cactgcaagctccacctcct

SEQ ID NO: 22212 - DNA, 20 bp, Artificial Sequence
  Description of Artificial Sequence: Synthetic oligonucleotide
  Target: ATXN2; (-) strand; PAM type: NRG; PAM sequence: TGG
tcactgcaagctccacctcc

SEQ ID NO: 22213 - DNA, 20 bp, Artificial Sequence
  Description of Artificial Sequence: Synthetic oligonucleotide
  Target: ATXN2; (-) strand; PAM type: NRG; PAM sequence: AAG
gcgcaatgttggctcactgc

SEQ ID NO: 22214 - DNA, 20 bp, Artificial Sequence
  Description of Artificial Sequence: Synthetic oligonucleotide
  Target: ATXN2; (-) strand; PAM type: NRG; PAM sequence: TGG
ggagtgcagtggcgcaatgt

SEQ ID NO: 22215 - DNA, 20 bp, Artificial Sequence
  Description of Artificial Sequence: Synthetic oligonucleotide
  Target: ATXN2; (-) strand; PAM type: NRG; PAM sequence: TGG
tcacccaggctggagtgcag

SEQ ID NO: 22216 - DNA, 20 bp, Artificial Sequence
  Description of Artificial Sequence: Synthetic oligonucleotide
  Target: ATXN2; (-) strand; PAM type: NRG; PAM sequence: CAG
ctgtcacccaggctggagtg

SEQ ID NO: 22217 - DNA, 20 bp, Artificial Sequence
  Description of Artificial Sequence: Synthetic oligonucleotide
  Target: ATXN2; (-) strand; PAM type: NRG; PAM sequence: GAG
tcactctgtcacccaggctg

SEQ ID NO: 22218 - DNA, 20 bp, Artificial Sequence
  Description of Artificial Sequence: Synthetic oligonucleotide
  Target: ATXN2; (-) strand; PAM type: NRG; PAM sequence: TGG
tctcactctgtcacccaggc

SEQ ID NO: 22219 - DNA, 20 bp, Artificial Sequence
  Description of Artificial Sequence: Synthetic oligonucleotide
  Target: ATXN2; (-) strand; PAM type: NRG; PAM sequence: AGG
ggagtctcactctgtcaccc

SEQ ID NO: 22220 - DNA, 20 bp, Artificial Sequence
  Description of Artificial Sequence: Synthetic oligonucleotide
  Target: ATXN2; (-) strand; PAM type: NRG; PAM sequence: CAG
tggagtctcactctgtcacc

SEQ ID NO: 22221 - DNA, 20 bp, Artificial Sequence
  Description of Artificial Sequence: Synthetic oligonucleotide
  Target: ATXN2; (-) strand; PAM type: NRG; PAM sequence: GAG
gtttgtttgtttttgagatg

SEQ ID NO: 22222 - DNA, 20 bp, Artificial Sequence
  Description of Artificial Sequence: Synthetic oligonucleotide
  Target: ATXN2; (-) strand; PAM type: NRG; PAM sequence: TGG
ttgtttgtttgtttttgaga

SEQ ID NO: 22223 - DNA, 20 bp, Artificial Sequence
  Description of Artificial Sequence: Synthetic oligonucleotide
  Target: ATXN2; (-) strand; PAM type: NRG; PAM sequence: GAG
ttttttgtttgtttgttttt

SEQ ID NO: 22224 - DNA, 20 bp, Artificial Sequence
  Description of Artificial Sequence: Synthetic oligonucleotide
  Target: ATXN2; (-) strand; PAM type: NRG; PAM sequence: GGG
cttctatacccagttctttg

SEQ ID NO: 22225 - DNA, 20 bp, Artificial Sequence
  Description of Artificial Sequence: Synthetic oligonucleotide
  Target: ATXN2; (-) strand; PAM type: NRG; PAM sequence: GGG
ccttctatacccagttcttt

SEQ ID NO: 22226 - DNA, 20 bp, Artificial Sequence
  Description of Artificial Sequence: Synthetic oligonucleotide
  Target: ATXN2; (-) strand; PAM type: NRG; PAM sequence: TGG
tccttctatacccagttctt

SEQ ID NO: 22227 - DNA, 20 bp, Artificial Sequence
  Description of Artificial Sequence: Synthetic oligonucleotide
  Target: ATXN2; (-) strand; PAM type: NRG; PAM sequence: CAG
aggtatattccttctatacc

SEQ ID NO: 22228 - DNA, 20 bp, Artificial Sequence
  Description of Artificial Sequence: Synthetic oligonucleotide
  Target: ATXN2; (-) strand; PAM type: NRG; PAM sequence: AGG
atatggcttctgttttgttg

SEQ ID NO: 22229 - DNA, 20 bp, Artificial Sequence
  Description of Artificial Sequence: Synthetic oligonucleotide
  Target: ATXN2; (-) strand; PAM type: NRG; PAM sequence: GAG
tatatggcttctgttttgtt

SEQ ID NO: 22230 - DNA, 20 bp, Artificial Sequence
  Description of Artificial Sequence: Synthetic oligonucleotide
  Target: ATXN2; (-) strand; PAM type: NRG; PAM sequence: TGG
agttatgggtctgtcatata

SEQ ID NO: 22231 - DNA, 20 bp, Artificial Sequence
  Description of Artificial Sequence: Synthetic oligonucleotide
  Target: ATXN2; (-) strand; PAM type: NRG; PAM sequence: GGG
ttcagtatggtactagttat

SEQ ID NO: 22232 - DNA, 20 bp, Artificial Sequence
  Description of Artificial Sequence: Synthetic oligonucleotide
  Target: ATXN2; (-) strand; PAM type: NRG; PAM sequence: TGG
tttcagtatggtactagtta

SEQ ID NO: 22233 - DNA, 20 bp, Artificial Sequence
  Description of Artificial Sequence: Synthetic oligonucleotide
  Target: ATXN2; (-) strand; PAM type: NRG; PAM sequence: TAG
ttcccttttcagtatggtac

SEQ ID NO: 22234 - DNA, 20 bp, Artificial Sequence
  Description of Artificial Sequence: Synthetic oligonucleotide
  Target: ATXN2; (-) strand; PAM type: NRG; PAM sequence: TGG
cagtttttcccttttcagta

SEQ ID NO: 22235 - DNA, 20 bp, Artificial Sequence
  Description of Artificial Sequence: Synthetic oligonucleotide
  Target: ATXN2; (-) strand; PAM type: NRG; PAM sequence: CAG
cctttcagtttttccctttt

SEQ ID NO: 22236 - DNA, 20 bp, Artificial Sequence
  Description of Artificial Sequence: Synthetic oligonucleotide
  Target: ATXN2; (-) strand; PAM type: NRG; PAM sequence: CAG
gatcttagaggaaagccttt

SEQ ID NO: 22237 - DNA, 20 bp, Artificial Sequence
  Description of Artificial Sequence: Synthetic oligonucleotide
  Target: ATXN2; (-) strand; PAM type: NRG; PAM sequence: AAG
ttgttccagatcttagagga

SEQ ID NO: 22238 - DNA, 20 bp, Artificial Sequence
  Description of Artificial Sequence: Synthetic oligonucleotide
  Target: ATXN2; (-) strand; PAM type: NRG; PAM sequence: AGG
tgtcttgttccagatcttag

SEQ ID NO: 22239 - DNA, 20 bp, Artificial Sequence
  Description of Artificial Sequence: Synthetic oligonucleotide
  Target: ATXN2; (-) strand; PAM type: NRG; PAM sequence: GAG
ttgtcttgttccagatctta

SEQ ID NO: 22240 - DNA, 20 bp, Artificial Sequence
  Description of Artificial Sequence: Synthetic oligonucleotide
  Target: ATXN2; (-) strand; PAM type: NRG; PAM sequence: TAG
ccttgtcttgttccagatct

SEQ ID NO: 22241 - DNA, 20 bp, Artificial Sequence
  Description of Artificial Sequence: Synthetic oligonucleotide
  Target: ATXN2; (-) strand; PAM type: NRG; PAM sequence: CAG
tgggcatccttgtcttgttc

SEQ ID NO: 22242 - DNA, 20 bp, Artificial Sequence
  Description of Artificial Sequence: Synthetic oligonucleotide
  Target: ATXN2; (-) strand; PAM type: NRG; PAM sequence: GGG
tgaataacaatggtgaaagt

SEQ ID NO: 22243 - DNA, 20 bp, Artificial Sequence
  Description of Artificial Sequence: Synthetic oligonucleotide
  Target: ATXN2; (-) strand; PAM type: NRG; PAM sequence: TGG
ttgaataacaatggtgaaag

SEQ ID NO: 22244 - DNA, 20 bp, Artificial Sequence
  Description of Artificial Sequence: Synthetic oligonucleotide
  Target: ATXN2; (-) strand; PAM type: NRG; PAM sequence: AAG
atgttgaataacaatggtga

SEQ ID NO: 22245 - DNA, 20 bp, Artificial Sequence
  Description of Artificial Sequence: Synthetic oligonucleotide
  Target: ATXN2; (-) strand; PAM type: NRG; PAM sequence: TGG
agtattatgttgaataacaa

SEQ ID NO: 22246 - DNA, 20 bp, Artificial Sequence
  Description of Artificial Sequence: Synthetic oligonucleotide
  Target: ATXN2; (-) strand; PAM type: NRG; PAM sequence: GAG
ttgctccaattaggacttcc

SEQ ID NO: 22247 - DNA, 20 bp, Artificial Sequence
  Description of Artificial Sequence: Synthetic oligonucleotide
  Target: ATXN2; (-) strand; PAM type: NRG; PAM sequence: AGG
gttgtctgattgctccaatt

SEQ ID NO: 22248 - DNA, 20 bp, Artificial Sequence
  Description of Artificial Sequence: Synthetic oligonucleotide
  Target: ATXN2; (-) strand; PAM type: NRG; PAM sequence: TAG
tgttgtctgattgctccaat

SEQ ID NO: 22249 - DNA, 20 bp, Artificial Sequence
  Description of Artificial Sequence: Synthetic oligonucleotide
  Target: ATXN2; (-) strand; PAM type: NRG; PAM sequence: TGG
tgacttcttccattccagtg

SEQ ID NO: 22250 - DNA, 20 bp, Artificial Sequence
  Description of Artificial Sequence: Synthetic oligonucleotide
  Target: ATXN2; (-) strand; PAM type: NRG; PAM sequence: CAG
taatttgacttcttccattc

SEQ ID NO: 22251 - DNA, 20 bp, Artificial Sequence
  Description of Artificial Sequence: Synthetic oligonucleotide
  Target: ATXN2; (-) strand; PAM type: NRG; PAM sequence: AGG
gatcatattatctgcaaaca

SEQ ID NO: 22252 - DNA, 20 bp, Artificial Sequence
  Description of Artificial Sequence: Synthetic oligonucleotide
  Target: ATXN2; (-) strand; PAM type: NRG; PAM sequence: AAG
agatcatattatctgcaaac

SEQ ID NO: 22253 - DNA, 20 bp, Artificial Sequence
  Description of Artificial Sequence: Synthetic oligonucleotide
  Target: ATXN2; (-) strand; PAM type: NRG; PAM sequence: AAG
gtctaggtttttccaaatgt

SEQ ID NO: 22254 - DNA, 20 bp, Artificial Sequence
  Description of Artificial Sequence: Synthetic oligonucleotide
  Target: ATXN2; (-) strand; PAM type: NRG; PAM sequence: AGG
gtttttcttttttggagtct

SEQ ID NO: 22255 - DNA, 20 bp, Artificial Sequence
  Description of Artificial Sequence: Synthetic oligonucleotide
  Target: ATXN2; (-) strand; PAM type: NRG; PAM sequence: TAG
ggtttttcttttttggagtc

SEQ ID NO: 22256 - DNA, 20 bp, Artificial Sequence
  Description of Artificial Sequence: Synthetic oligonucleotide
  Target: ATXN2; (-) strand; PAM type: NRG; PAM sequence: GAG
taataggtttttcttttttg

SEQ ID NO: 22257 - DNA, 20 bp, Artificial Sequence
  Description of Artificial Sequence: Synthetic oligonucleotide
  Target: ATXN2; (-) strand; PAM type: NRG; PAM sequence: TGG
tctaataggtttttcttttt

SEQ ID NO: 22258 - DNA, 20 bp, Artificial Sequence
  Description of Artificial Sequence: Synthetic oligonucleotide
  Target: ATXN2; (-) strand; PAM type: NRG; PAM sequence: AGG
atttgtttgtcagttctaat

SEQ ID NO: 22259 - DNA, 20 bp, Artificial Sequence
  Description of Artificial Sequence: Synthetic oligonucleotide
  Target: ATXN2; (-) strand; PAM type: NRG; PAM sequence: TAG
aatttgtttgtcagttctaa

SEQ ID NO: 22260 - DNA, 20 bp, Artificial Sequence
  Description of Artificial Sequence: Synthetic oligonucleotide
  Target: ATXN2; (-) strand; PAM type: NRG; PAM sequence: CAG
attttactgaatttgtttgt

SEQ ID NO: 22261 - DNA, 20 bp, Artificial Sequence
  Description of Artificial Sequence: Synthetic oligonucleotide
  Target: ATXN2; (-) strand; PAM type: NRG; PAM sequence: CAG
attgcgtttaaaaaattttt

SEQ ID NO: 22262 - DNA, 20 bp, Artificial Sequence
  Description of Artificial Sequence: Synthetic oligonucleotide
  Target: ATXN2; (-) strand; PAM type: NRG; PAM sequence: GGG
tatttgtagctattgtaaat

SEQ ID NO: 22263 - DNA, 20 bp, Artificial Sequence
  Description of Artificial Sequence: Synthetic oligonucleotide
  Target: ATXN2; (-) strand; PAM type: NRG; PAM sequence: TGG
atatttgtagctattgtaaa

SEQ ID NO: 22264 - DNA, 20 bp, Artificial Sequence
  Description of Artificial Sequence: Synthetic oligonucleotide
  Target: ATXN2; (-) strand; PAM type: NRG; PAM sequence: TAG
taagtattttattatatttg

SEQ ID NO: 22265 - DNA, 20 bp, Artificial Sequence
  Description of Artificial Sequence: Synthetic oligonucleotide
  Target: ATXN2; (-) strand; PAM type: NRG; PAM sequence: AAG
atttggttaagtttattcct

SEQ ID NO: 22266 - DNA, 20 bp, Artificial Sequence
  Description of Artificial Sequence: Synthetic oligonucleotide
  Target: ATXN2; (-) strand; PAM type: NRG; PAM sequence: AAG
aatcttttactcatttggtt

SEQ ID NO: 22267 - DNA, 20 bp, Artificial Sequence
  Description of Artificial Sequence: Synthetic oligonucleotide
  Target: ATXN2; (-) strand; PAM type: NRG; PAM sequence: TGG
atagaaatcttttactcatt

SEQ ID NO: 22268 - DNA, 20 bp, Artificial Sequence
  Description of Artificial Sequence: Synthetic oligonucleotide
  Target: ATXN2; (-) strand; PAM type: NRG; PAM sequence: TAG
gtgttttaaagttgtcatta

SEQ ID NO: 22269 - DNA, 20 bp, Artificial Sequence
  Description of Artificial Sequence: Synthetic oligonucleotide
  Target: ATXN2; (-) strand; PAM type: NRG; PAM sequence: AAG
tcatcaatttcagtgtttta

SEQ ID NO: 22270 - DNA, 20 bp, Artificial Sequence
  Description of Artificial Sequence: Synthetic oligonucleotide
  Target: ATXN2; (-) strand; PAM type: NRG; PAM sequence: CAG
tttttctgtgtcatcaattt

SEQ ID NO: 22271 - DNA, 20 bp, Artificial Sequence
  Description of Artificial Sequence: Synthetic oligonucleotide
  Target: ATXN2; (-) strand; PAM type: NRG; PAM sequence: TGG
attcttctaatccataaaca

SEQ ID NO: 22272 - DNA, 20 bp, Artificial Sequence
  Description of Artificial Sequence: Synthetic oligonucleotide
  Target: ATXN2; (-) strand; PAM type: NRG; PAM sequence: TAG
tttgagtattatcaacattt

SEQ ID NO: 22273 - DNA, 20 bp, Artificial Sequence
  Description of Artificial Sequence: Synthetic oligonucleotide
  Target: ATXN2; (-) strand; PAM type: NRG; PAM sequence: GAG
ctgaatctgtagattgcttt

SEQ ID NO: 22274 - DNA, 20 bp, Artificial Sequence
  Description of Artificial Sequence: Synthetic oligonucleotide
  Target: ATXN2; (-) strand; PAM type: NRG; PAM sequence: TAG
tagggattgcactgaatctg

SEQ ID NO: 22275 - DNA, 20 bp, Artificial Sequence
  Description of Artificial Sequence: Synthetic oligonucleotide
  Target: ATXN2; (-) strand; PAM type: NRG; PAM sequence: GGG
atgtcattggtattttgata

SEQ ID NO: 22276 - DNA, 20 bp, Artificial Sequence
  Description of Artificial Sequence: Synthetic oligonucleotide
  Target: ATXN2; (-) strand; PAM type: NRG; PAM sequence: AGG
aatgtcattggtattttgat

SEQ ID NO: 22277 - DNA, 20 bp, Artificial Sequence
  Description of Artificial Sequence: Synthetic oligonucleotide
  Target: ATXN2; (-) strand; PAM type: NRG; PAM sequence: TAG
gaatgtcattggtattttga

SEQ ID NO: 22278 - DNA, 20 bp, Artificial Sequence
  Description of Artificial Sequence: Synthetic oligonucleotide
  Target: ATXN2; (-) strand; PAM type: NRG; PAM sequence: TGG
acttctgtgaggaatgtcat

SEQ ID NO: 22279 - DNA, 20 bp, Artificial Sequence
  Description of Artificial Sequence: Synthetic oligonucleotide
  Target: ATXN2; (-) strand; PAM type: NRG; PAM sequence: AGG
tatttttgtctacttctgtg

SEQ ID NO: 22280 - DNA, 20 bp, Artificial Sequence
  Description of Artificial Sequence: Synthetic oligonucleotide
  Target: ATXN2; (-) strand; PAM type: NRG; PAM sequence: GAG
ttatttttgtctacttctgt

SEQ ID NO: 22281 - DNA, 20 bp, Artificial Sequence
  Description of Artificial Sequence: Synthetic oligonucleotide
  Target: ATXN2; (-) strand; PAM type: NRG; PAM sequence: TAG
ttgtggttccctacaaattt

SEQ ID NO: 22282 - DNA, 20 bp, Artificial Sequence
  Description of Artificial Sequence: Synthetic oligonucleotide
  Target: ATXN2; (-) strand; PAM type: NRG; PAM sequence: TGG
ttgctcttttgggccttttg

SEQ ID NO: 22283 - DNA, 20 bp, Artificial Sequence
  Description of Artificial Sequence: Synthetic oligonucleotide
  Target: ATXN2; (-) strand; PAM type: NRG; PAM sequence: GGG
agtatggcttttgctctttt

SEQ ID NO: 22284 - DNA, 20 bp, Artificial Sequence
  Description of Artificial Sequence: Synthetic oligonucleotide
  Target: ATXN2; (-) strand; PAM type: NRG; PAM sequence: TGG
cagtatggcttttgctcttt

SEQ ID NO: 22285 - DNA, 20 bp, Artificial Sequence
  Description of Artificial Sequence: Synthetic oligonucleotide
  Target: ATXN2; (-) strand; PAM type: NRG; PAM sequence: TGG
tttgttcattttgctcagta

SEQ ID NO: 22286 - DNA, 20 bp, Artificial Sequence
  Description of Artificial Sequence: Synthetic oligonucleotide
  Target: ATXN2; (-) strand; PAM type: NRG; PAM sequence: CAG
cccgttttgttcattttgct

SEQ ID NO: 22287 - DNA, 20 bp, Artificial Sequence
  Description of Artificial Sequence: Synthetic oligonucleotide
  Target: ATXN2; (-) strand; PAM type: NRG; PAM sequence: CAG
tggttacaataatttgaagt

SEQ ID NO: 22288 - DNA, 20 bp, Artificial Sequence
  Description of Artificial Sequence: Synthetic oligonucleotide
  Target: ATXN2; (-) strand; PAM type: NRG; PAM sequence: AAG
attttggttacaataatttg

SEQ ID NO: 22289 - DNA, 20 bp, Artificial Sequence
  Description of Artificial Sequence: Synthetic oligonucleotide
  Target: ATXN2; (-) strand; PAM type: NRG; PAM sequence: TGG
atgccagtaccatgccattt

SEQ ID NO: 22290 - DNA, 20 bp, Artificial Sequence
  Description of Artificial Sequence: Synthetic oligonucleotide
  Target: ATXN2; (-) strand; PAM type: NRG; PAM sequence: CAG
atctatatctttttttatgc

SEQ ID NO: 22291 - DNA, 20 bp, Artificial Sequence
  Description of Artificial Sequence: Synthetic oligonucleotide
  Target: ATXN2; (-) strand; PAM type: NRG; PAM sequence: GAG
agacgtatggattcatttct

SEQ ID NO: 22292 - DNA, 20 bp, Artificial Sequence
  Description of Artificial Sequence: Synthetic oligonucleotide
  Target: ATXN2; (-) strand; PAM type: NRG; PAM sequence: TGG
aatgagttcacttagacgta

SEQ ID NO: 22293 - DNA, 20 bp, Artificial Sequence
  Description of Artificial Sequence: Synthetic oligonucleotide
  Target: ATXN2; (-) strand; PAM type: NRG; PAM sequence: TAG
ttgtggaaaatgagttcact

SEQ ID NO: 22294 - DNA, 20 bp, Artificial Sequence
  Description of Artificial Sequence: Synthetic oligonucleotide
  Target: ATXN2; (-) strand; PAM type: NRG; PAM sequence: GAG
atggcttctttgtggaaaat

SEQ ID NO: 22295 - DNA, 20 bp, Artificial Sequence
  Description of Artificial Sequence: Synthetic oligonucleotide
  Target: ATXN2; (-) strand; PAM type: NRG; PAM sequence: TGG
gtatgttcatggcttctttg

SEQ ID NO: 22296 - DNA, 20 bp, Artificial Sequence
  Description of Artificial Sequence: Synthetic oligonucleotide
  Target: ATXN2; (-) strand; PAM type: NRG; PAM sequence: TGG
ctttccccagtgtatgttca

SEQ ID NO: 22297 - DNA, 20 bp, Artificial Sequence
  Description of Artificial Sequence: Synthetic oligonucleotide
  Target: ATXN2; (-) strand; PAM type: NRG; PAM sequence: CAG
tgaagagactgtcctttccc

SEQ ID NO: 22298 - DNA, 20 bp, Artificial Sequence
  Description of Artificial Sequence: Synthetic oligonucleotide
  Target: ATXN2; (-) strand; PAM type: NRG; PAM sequence: GAG
tcccagcaccatttattgaa

SEQ ID NO: 22299 - DNA, 20 bp, Artificial Sequence
  Description of Artificial Sequence: Synthetic oligonucleotide
  Target: ATXN2; (-) strand; PAM type: NRG; PAM sequence: AAG
tttcccagcaccatttattg

SEQ ID NO: 22300 - DNA, 20 bp, Artificial Sequence
  Description of Artificial Sequence: Synthetic oligonucleotide
  Target: ATXN2; (-) strand; PAM type: NRG; PAM sequence: CAG
atatggatatccagttttcc

SEQ ID NO: 22301 - DNA, 20 bp, Artificial Sequence
  Description of Artificial Sequence: Synthetic oligonucleotide
  Target: ATXN2; (-) strand; PAM type: NRG; PAM sequence: CAG
ttcttctgcatatggatatc

SEQ ID NO: 22302 - DNA, 20 bp, Artificial Sequence
  Description of Artificial Sequence: Synthetic oligonucleotide
  Target: ATXN2; (-) strand; PAM type: NRG; PAM sequence: TGG
tggtttcattcttctgcata

SEQ ID NO: 22303 - DNA, 20 bp, Artificial Sequence
  Description of Artificial Sequence: Synthetic oligonucleotide
  Target: ATXN2; (-) strand; PAM type: NRG; PAM sequence: TGG
tatggtgggacacaggggtc

SEQ ID NO: 22304 - DNA, 20 bp, Artificial Sequence
  Description of Artificial Sequence: Synthetic oligonucleotide
  Target: ATXN2; (-) strand; PAM type: NRG; PAM sequence: GGG
tttaatatggtgggacacag

SEQ ID NO: 22305 - DNA, 20 bp, Artificial Sequence
  Description of Artificial Sequence: Synthetic oligonucleotide
  Target: ATXN2; (-) strand; PAM type: NRG; PAM sequence: GGG
ttttaatatggtgggacaca

SEQ ID NO: 22306 - DNA, 20 bp, Artificial Sequence
  Description of Artificial Sequence: Synthetic oligonucleotide
  Target: ATXN2; (-) strand; PAM type: NRG; PAM sequence: AGG
tttttaatatggtgggacac

SEQ ID NO: 22307 - DNA, 20 bp, Artificial Sequence
  Description of Artificial Sequence: Synthetic oligonucleotide
  Target: ATXN2; (-) strand; PAM type: NRG; PAM sequence: CAG
ttttttaatatggtgggaca

SEQ ID NO: 22308 - DNA, 20 bp, Artificial Sequence
  Description of Artificial Sequence: Synthetic oligonucleotide
  Target: ATXN2; (-) strand; PAM type: NRG; PAM sequence: GGG
tgatttttttttaatatggt

SEQ ID NO: 22309 - DNA, 20 bp, Artificial Sequence
  Description of Artificial Sequence: Synthetic oligonucleotide
  Target: ATXN2; (-) strand; PAM type: NRG; PAM sequence: TGG
ttgatttttttttaatatgg

SEQ ID NO: 22310 - DNA, 20 bp, Artificial Sequence
  Description of Artificial Sequence: Synthetic oligonucleotide
  Target: ATXN2; (-) strand; PAM type: NRG; PAM sequence: TGG
gatttgatttttttttaata

SEQ ID NO: 22311 - DNA, 20 bp, Artificial Sequence
  Description of Artificial Sequence: Synthetic oligonucleotide
  Target: ATXN2; (-) strand; PAM type: NRG; PAM sequence: TAG
aggtcttagatttaaatctt

SEQ ID NO: 22312 - DNA, 20 bp, Artificial Sequence
  Description of Artificial Sequence: Synthetic oligonucleotide
  Target: ATXN2; (-) strand; PAM type: NRG; PAM sequence: TAG
agtttcatagtttgaggtct

SEQ ID NO: 22313 - DNA, 20 bp, Artificial Sequence
  Description of Artificial Sequence: Synthetic oligonucleotide
  Target: ATXN2; (-) strand; PAM type: NRG; PAM sequence: AGG
tttagtagtttcatagtttg

SEQ ID NO: 22314 - DNA, 20 bp, Artificial Sequence
  Description of Artificial Sequence: Synthetic oligonucleotide
  Target: ATXN2; (-) strand; PAM type: NRG; PAM sequence: GAG
ttttagtagtttcatagttt

SEQ ID NO: 22315 - DNA, 20 bp, Artificial Sequence
  Description of Artificial Sequence: Synthetic oligonucleotide
  Target: ATXN2; (-) strand; PAM type: NRG; PAM sequence: TAG
gttttcttttagtagtttca

SEQ ID NO: 22316 - DNA, 20 bp, Artificial Sequence
  Description of Artificial Sequence: Synthetic oligonucleotide
  Target: ATXN2; (-) strand; PAM type: NRG; PAM sequence: TAG
agtttaatgttttcttttag

SEQ ID NO: 22317 - DNA, 20 bp, Artificial Sequence
  Description of Artificial Sequence: Synthetic oligonucleotide
  Target: ATXN2; (-) strand; PAM type: NRG; PAM sequence: TAG
gggagtttaatgttttcttt

SEQ ID NO: 22318 - DNA, 20 bp, Artificial Sequence
  Description of Artificial Sequence: Synthetic oligonucleotide
  Target: ATXN2; (-) strand; PAM type: NRG; PAM sequence: GAG
gcccagagtaatgtccctgg

SEQ ID NO: 22319 - DNA, 20 bp, Artificial Sequence
  Description of Artificial Sequence: Synthetic oligonucleotide
  Target: ATXN2; (-) strand; PAM type: NRG; PAM sequence: GGG
ttgcccagagtaatgtccct

SEQ ID NO: 22320 - DNA, 20 bp, Artificial Sequence
  Description of Artificial Sequence: Synthetic oligonucleotide
  Target: ATXN2; (-) strand; PAM type: NRG; PAM sequence: TGG
tttgcccagagtaatgtccc

SEQ ID NO: 22321 - DNA, 20 bp, Artificial Sequence
  Description of Artificial Sequence: Synthetic oligonucleotide
  Target: ATXN2; (-) strand; PAM type: NRG; PAM sequence: GAG
actcaagaaatctttgccca

SEQ ID NO: 22322 - DNA, 20 bp, Artificial Sequence
  Description of Artificial Sequence: Synthetic oligonucleotide
  Target: ATXN2; (-) strand; PAM type: NRG; PAM sequence: CAG
ttactcaagaaatctttgcc

SEQ ID NO: 22323 - DNA, 20 bp, Artificial Sequence
  Description of Artificial Sequence: Synthetic oligonucleotide
  Target: ATXN2; (-) strand; PAM type: NRG; PAM sequence: AAG
gtacttttggggtattactc

SEQ ID NO: 22324 - DNA, 20 bp, Artificial Sequence
  Description of Artificial Sequence: Synthetic oligonucleotide
  Target: ATXN2; (-) strand; PAM type: NRG; PAM sequence: GGG
tttggttgcctgtacttttg

SEQ ID NO: 22325 - DNA, 20 bp, Artificial Sequence
  Description of Artificial Sequence: Synthetic oligonucleotide
  Target: ATXN2; (-) strand; PAM type: NRG; PAM sequence: GGG
ctttggttgcctgtactttt

SEQ ID NO: 22326 - DNA, 20 bp, Artificial Sequence
  Description of Artificial Sequence: Synthetic oligonucleotide
  Target: ATXN2; (-) strand; PAM type: NRG; PAM sequence: TGG
gctttggttgcctgtacttt

SEQ ID NO: 22327 - DNA, 20 bp, Artificial Sequence
  Description of Artificial Sequence: Synthetic oligonucleotide
  Target: ATXN2; (-) strand; PAM type: NRG; PAM sequence: TGG
ccatttgtccatctttgctt

SEQ ID NO: 22328 - DNA, 20 bp, Artificial Sequence
  Description of Artificial Sequence: Synthetic oligonucleotide
  Target: ATXN2; (-) strand; PAM type: NRG; PAM sequence: AAG
tggtttcctttgctgtgcag

SEQ ID NO: 22329 - DNA, 20 bp, Artificial Sequence
  Description of Artificial Sequence: Synthetic oligonucleotide
  Target: ATXN2; (-) strand; PAM type: NRG; PAM sequence: CAG
tgatggtttcctttgctgtg

SEQ ID NO: 22330 - DNA, 20 bp, Artificial Sequence
  Description of Artificial Sequence: Synthetic oligonucleotide
  Target: ATXN2; (-) strand; PAM type: NRG; PAM sequence: TGG
ctgtctcttcactttgttga

SEQ ID NO: 22331 - DNA, 20 bp, Artificial Sequence
  Description of Artificial Sequence: Synthetic oligonucleotide
  Target: ATXN2; (-) strand; PAM type: NRG; PAM sequence: GGG
aatattttctcccattctgt

SEQ ID NO: 22332 - DNA, 20 bp, Artificial Sequence
  Description of Artificial Sequence: Synthetic oligonucleotide
  Target: ATXN2; (-) strand; PAM type: NRG; PAM sequence: TGG
aaatattttctcccattctg

SEQ ID NO: 22333 - DNA, 20 bp, Artificial Sequence
  Description of Artificial Sequence: Synthetic oligonucleotide
  Target: ATXN2; (-) strand; PAM type: NRG; PAM sequence: TAG
ttgatcccttgtcagatgag

SEQ ID NO: 22334 - DNA, 20 bp, Artificial Sequence
  Description of Artificial Sequence: Synthetic oligonucleotide
  Target: ATXN2; (-) strand; PAM type: NRG; PAM sequence: GAG
ttattgatcccttgtcagat

SEQ ID NO: 22335 - DNA, 20 bp, Artificial Sequence
  Description of Artificial Sequence: Synthetic oligonucleotide
  Target: ATXN2; (-) strand; PAM type: NRG; PAM sequence: CAG
tctggttattgatcccttgt

SEQ ID NO: 22336 - DNA, 20 bp, Artificial Sequence
  Description of Artificial Sequence: Synthetic oligonucleotide
  Target: ATXN2; (-) strand; PAM type: NRG; PAM sequence: TGG
cttgagtgccttttatattc

SEQ ID NO: 22337 - DNA, 20 bp, Artificial Sequence
  Description of Artificial Sequence: Synthetic oligonucleotide
  Target: ATXN2; (-) strand; PAM type: NRG; PAM sequence: GAG
ttttccctatggagttgctt

SEQ ID NO: 22338 - DNA, 20 bp, Artificial Sequence
  Description of Artificial Sequence: Synthetic oligonucleotide
  Target: ATXN2; (-) strand; PAM type: NRG; PAM sequence: GAG
ttactaaaattttccctatg

SEQ ID NO: 22339 - DNA, 20 bp, Artificial Sequence
  Description of Artificial Sequence: Synthetic oligonucleotide
  Target: ATXN2; (-) strand; PAM type: NRG; PAM sequence: TGG
agttactaaaattttcccta

SEQ ID NO: 22340 - DNA, 20 bp, Artificial Sequence
  Description of Artificial Sequence: Synthetic oligonucleotide
  Target: ATXN2; (-) strand; PAM type: NRG; PAM sequence: GAG
tcttttgcccatttttaatt

SEQ ID NO: 22341 - DNA, 20 bp, Artificial Sequence
  Description of Artificial Sequence: Synthetic oligonucleotide
  Target: ATXN2; (-) strand; PAM type: NRG; PAM sequence: CAG
tcttttgagaaatgtctatt

SEQ ID NO: 22342 - DNA, 20 bp, Artificial Sequence
  Description of Artificial Sequence: Synthetic oligonucleotide
  Target: ATXN2; (-) strand; PAM type: NRG; PAM sequence: GAG
cagcctgtatgtcgtctttt

SEQ ID NO: 22343 - DNA, 20 bp, Artificial Sequence
  Description of Artificial Sequence: Synthetic oligonucleotide
  Target: ATXN2; (-) strand; PAM type: NRG; PAM sequence: CAG
caggcgtgagctgctgcgcc

SEQ ID NO: 22344 - DNA, 20 bp, Artificial Sequence
  Description of Artificial Sequence: Synthetic oligonucleotide
  Target: ATXN2; (-) strand; PAM type: NRG; PAM sequence: GAG
agtgctaggattacaggcgt

SEQ ID NO: 22345 - DNA, 20 bp, Artificial Sequence
  Description of Artificial Sequence: Synthetic oligonucleotide
  Target: ATXN2; (-) strand; PAM type: NRG; PAM sequence: AGG
tcccaaagtgctaggattac

SEQ ID NO: 22346 - DNA, 20 bp, Artificial Sequence
  Description of Artificial Sequence: Synthetic oligonucleotide
  Target: ATXN2; (-) strand; PAM type: NRG; PAM sequence: CAG
ctcccaaagtgctaggatta

SEQ ID NO: 22347 - DNA, 20 bp, Artificial Sequence
  Description of Artificial Sequence: Synthetic oligonucleotide
  Target: ATXN2; (-) strand; PAM type: NRG; PAM sequence: AGG
cctcagcctcccaaagtgct

SEQ ID NO: 22348 - DNA, 20 bp, Artificial Sequence
  Description of Artificial Sequence: Synthetic oligonucleotide
  Target: ATXN2; (-) strand; PAM type: NRG; PAM sequence: TAG
gcctcagcctcccaaagtgc

SEQ ID NO: 22349 - DNA, 20 bp, Artificial Sequence
  Description of Artificial Sequence: Synthetic oligonucleotide
  Target: ATXN2; (-) strand; PAM type: NRG; PAM sequence: AAG
ttacctgcctcagcctccca

SEQ ID NO: 22350 - DNA, 20 bp, Artificial Sequence
  Description of Artificial Sequence: Synthetic oligonucleotide
  Target: ATXN2; (-) strand; PAM type: NRG; PAM sequence: CAG
ctcaggtgatttacctgcct

SEQ ID NO: 22351 - DNA, 20 bp, Artificial Sequence
  Description of Artificial Sequence: Synthetic oligonucleotide
  Target: ATXN2; (-) strand; PAM type: NRG; PAM sequence: AGG
ggtcttgaactcctaacctc

SEQ ID NO: 22352 - DNA, 20 bp, Artificial Sequence
  Description of Artificial Sequence: Synthetic oligonucleotide
  Target: ATXN2; (-) strand; PAM type: NRG; PAM sequence: CAG
tggtcttgaactcctaacct

SEQ ID NO: 22353 - DNA, 20 bp, Artificial Sequence
  Description of Artificial Sequence: Synthetic oligonucleotide
  Target: ATXN2; (-) strand; PAM type: NRG; PAM sequence: TGG
tttctccttgttgcccaggc

SEQ ID NO: 22354 - DNA, 20 bp, Artificial Sequence
  Description of Artificial Sequence: Synthetic oligonucleotide
  Target: ATXN2; (-) strand; PAM type: NRG; PAM sequence: AGG
gggatttctccttgttgccc

SEQ ID NO: 22355 - DNA, 20 bp, Artificial Sequence
  Description of Artificial Sequence: Synthetic oligonucleotide
  Target: ATXN2; (-) strand; PAM type: NRG; PAM sequence: CAG
cgggatttctccttgttgcc

SEQ ID NO: 22356 - DNA, 20 bp, Artificial Sequence
  Description of Artificial Sequence: Synthetic oligonucleotide
  Target: ATXN2; (-) strand; PAM type: NRG; PAM sequence: GGG
tttgtatttttagtagagac

SEQ ID NO: 22357 - DNA, 20 bp, Artificial Sequence
  Description of Artificial Sequence: Synthetic oligonucleotide
  Target: ATXN2; (-) strand; PAM type: NRG; PAM sequence: CGG
ttttgtatttttagtagaga

SEQ ID NO: 22358 - DNA, 20 bp, Artificial Sequence
  Description of Artificial Sequence: Synthetic oligonucleotide
  Target: ATXN2; (-) strand; PAM type: NRG; PAM sequence: GAG
taatttttgtatttttagta

SEQ ID NO: 22359 - DNA, 20 bp, Artificial Sequence
  Description of Artificial Sequence: Synthetic oligonucleotide
  Target: ATXN2; (-) strand; PAM type: NRG; PAM sequence: TAG
cctaatttttgtatttttag

SEQ ID NO: 22360 - DNA, 20 bp, Artificial Sequence
  Description of Artificial Sequence: Synthetic oligonucleotide
  Target: ATXN2; (-) strand; PAM type: NRG; PAM sequence: TAG
ctgcctaatttttgtatttt

SEQ ID NO: 22361 - DNA, 20 bp, Artificial Sequence
  Description of Artificial Sequence: Synthetic oligonucleotide
  Target: ATXN2; (-) strand; PAM type: NRG; PAM sequence: AAG
gccctacacctcccggattc

SEQ ID NO: 22362 - DNA, 20 bp, Artificial Sequence
  Description of Artificial Sequence: Synthetic oligonucleotide
  Target: ATXN2; (-) strand; PAM type: NRG; PAM sequence: CGG
tcactgcgccctacacctcc

SEQ ID NO: 22363 - DNA, 20 bp, Artificial Sequence
  Description of Artificial Sequence: Synthetic oligonucleotide
  Target: ATXN2; (-) strand; PAM type: NRG; PAM sequence: TGG
ggagcgtagtggtgtgatct

SEQ ID NO: 22364 - DNA, 20 bp, Artificial Sequence
  Description of Artificial Sequence: Synthetic oligonucleotide
  Target: ATXN2; (-) strand; PAM type: NRG; PAM sequence: TGG
ttgcccaggctggagcgtag

SEQ ID NO: 22365 - DNA, 20 bp, Artificial Sequence
  Description of Artificial Sequence: Synthetic oligonucleotide
  Target: ATXN2; (-) strand; PAM type: NRG; PAM sequence: TAG
ttgttgcccaggctggagcg

SEQ ID NO: 22366 - DNA, 20 bp, Artificial Sequence
  Description of Artificial Sequence: Synthetic oligonucleotide
  Target: ATXN2; (-) strand; PAM type: NRG; PAM sequence: GAG
tcactttgttgcccaggctg

SEQ ID NO: 22367 - DNA, 20 bp, Artificial Sequence
  Description of Artificial Sequence: Synthetic oligonucleotide
  Target: ATXN2; (-) strand; PAM type: NRG; PAM sequence: TGG
tctcactttgttgcccaggc

SEQ ID NO: 22368 - DNA, 20 bp, Artificial Sequence
  Description of Artificial Sequence: Synthetic oligonucleotide
  Target: ATXN2; (-) strand; PAM type: NRG; PAM sequence: AGG
agagtctcactttgttgccc

SEQ ID NO: 22369 - DNA, 20 bp, Artificial Sequence
  Description of Artificial Sequence: Synthetic oligonucleotide
  Target: ATXN2; (-) strand; PAM type: NRG; PAM sequence: CAG
cagagtctcactttgttgcc

SEQ ID NO: 22370 - DNA, 20 bp, Artificial Sequence
  Description of Artificial Sequence: Synthetic oligonucleotide
  Target: ATXN2; (-) strand; PAM type: NRG; PAM sequence: GAG
tttgttttgtttttgagaca

SEQ ID NO: 22371 - DNA, 20 bp, Artificial Sequence
  Description of Artificial Sequence: Synthetic oligonucleotide
  Target: ATXN2; (-) strand; PAM type: NRG; PAM sequence: CAG
gttttgttttgtttttgaga

SEQ ID NO: 22372 - DNA, 20 bp, Artificial Sequence
  Description of Artificial Sequence: Synthetic oligonucleotide
  Target: ATXN2; (-) strand; PAM type: NRG; PAM sequence: GAG
ttttgttttgttttgttttt

SEQ ID NO: 22373 - DNA, 20 bp, Artificial Sequence
  Description of Artificial Sequence: Synthetic oligonucleotide
  Target: ATXN2; (-) strand; PAM type: NRG; PAM sequence: TGG
tagttgtgagccactgcacc

SEQ ID NO: 22374 - DNA, 20 bp, Artificial Sequence
  Description of Artificial Sequence: Synthetic oligonucleotide
  Target: ATXN2; (-) strand; PAM type: NRG; PAM sequence: GAG
aatgctgaaattatagttgt

SEQ ID NO: 22375 - DNA, 20 bp, Artificial Sequence
  Description of Artificial Sequence: Synthetic oligonucleotide
  Target: ATXN2; (-) strand; PAM type: NRG; PAM sequence: TAG
ttcccaaaatgctgaaatta

SEQ ID NO: 22376 - DNA, 20 bp, Artificial Sequence
  Description of Artificial Sequence: Synthetic oligonucleotide
  Target: ATXN2; (-) strand; PAM type: NRG; PAM sequence: TGG
ctcaagcaatcctcccacct

SEQ ID NO: 22377 - DNA, 20 bp, Artificial Sequence
  Description of Artificial Sequence: Synthetic oligonucleotide
  Target: ATXN2; (-) strand; PAM type: NRG; PAM sequence: AAG
ggtctcgaactcctgggctc

SEQ ID NO: 22378 - DNA, 20 bp, Artificial Sequence
  Description of Artificial Sequence: Synthetic oligonucleotide
  Target: ATXN2; (-) strand; PAM type: NRG; PAM sequence: GGG
caggctggtctcgaactcct

SEQ ID NO: 22379 - DNA, 20 bp, Artificial Sequence
  Description of Artificial Sequence: Synthetic oligonucleotide
  Target: ATXN2; (-) strand; PAM type: NRG; PAM sequence: TGG
ccaggctggtctcgaactcc

SEQ ID NO: 22380 - DNA, 20 bp, Artificial Sequence
  Description of Artificial Sequence: Synthetic oligonucleotide
  Target: ATXN2; (-) strand; PAM type: NRG; PAM sequence: TGG
tcttgctgtttggcccaggc

SEQ ID NO: 22381 - DNA, 20 bp, Artificial Sequence
  Description of Artificial Sequence: Synthetic oligonucleotide
  Target: ATXN2; (-) strand; PAM type: NRG; PAM sequence: AGG
gaggtcttgctgtttggccc

SEQ ID NO: 22382 - DNA, 20 bp, Artificial Sequence
  Description of Artificial Sequence: Synthetic oligonucleotide
  Target: ATXN2; (-) strand; PAM type: NRG; PAM sequence: CAG
tgaggtcttgctgtttggcc

SEQ ID NO: 22383 - DNA, 20 bp, Artificial Sequence
  Description of Artificial Sequence: Synthetic oligonucleotide
  Target: ATXN2; (-) strand; PAM type: NRG; PAM sequence: TGG
aacgatgaggtcttgctgtt

SEQ ID NO: 22384 - DNA, 20 bp, Artificial Sequence
  Description of Artificial Sequence: Synthetic oligonucleotide
  Target: ATXN2; (-) strand; PAM type: NRG; PAM sequence: AGG
gccattcataaataacgatg

SEQ ID NO: 22385 - DNA, 20 bp, Artificial Sequence
  Description of Artificial Sequence: Synthetic oligonucleotide
  Target: ATXN2; (-) strand; PAM type: NRG; PAM sequence: GAG
tgccattcataaataacgat

SEQ ID NO: 22386 - DNA, 20 bp, Artificial Sequence
  Description of Artificial Sequence: Synthetic oligonucleotide
  Target: ATXN2; (-) strand; PAM type: NRG; PAM sequence: TAG
tccatttttctggtgatcag

SEQ ID NO: 22387 - DNA, 20 bp, Artificial Sequence
  Description of Artificial Sequence: Synthetic oligonucleotide
  Target: ATXN2; (-) strand; PAM type: NRG; PAM sequence: CAG
atttccatttttctggtgat

SEQ ID NO: 22388 - DNA, 20 bp, Artificial Sequence
  Description of Artificial Sequence: Synthetic oligonucleotide
  Target: ATXN2; (-) strand; PAM type: NRG; PAM sequence: TGG
agttttaatttccatttttc

SEQ ID NO: 22389 - DNA, 20 bp, Artificial Sequence
  Description of Artificial Sequence: Synthetic oligonucleotide
  Target: ATXN2; (-) strand; PAM type: NRG; PAM sequence: TAG
ggtgagatgatatcttgttg

SEQ ID NO: 22390 - DNA, 20 bp, Artificial Sequence
  Description of Artificial Sequence: Synthetic oligonucleotide
  Target: ATXN2; (-) strand; PAM type: NRG; PAM sequence: GAG
aaagccattttaactggggt

SEQ ID NO: 22391 - DNA, 20 bp, Artificial Sequence
  Description of Artificial Sequence: Synthetic oligonucleotide
  Target: ATXN2; (-) strand; PAM type: NRG; PAM sequence: GGG
gataaaagccattttaactg

SEQ ID NO: 22392 - DNA, 20 bp, Artificial Sequence
  Description of Artificial Sequence: Synthetic oligonucleotide
  Target: ATXN2; (-) strand; PAM type: NRG; PAM sequence: GGG
ggataaaagccattttaact

SEQ ID NO: 22393 - DNA, 20 bp, Artificial Sequence
  Description of Artificial Sequence: Synthetic oligonucleotide
  Target: ATXN2; (-) strand; PAM type: NRG; PAM sequence: TGG
tggataaaagccattttaac

SEQ ID NO: 22394 - DNA, 20 bp, Artificial Sequence
  Description of Artificial Sequence: Synthetic oligonucleotide
  Target: ATXN2; (-) strand; PAM type: NRG; PAM sequence: AAG
attgcctgtcttttggataa

SEQ ID NO: 22395 - DNA, 20 bp, Artificial Sequence
  Description of Artificial Sequence: Synthetic oligonucleotide
  Target: ATXN2; (-) strand; PAM type: NRG; PAM sequence: TGG
atttgttattgcctgtcttt

SEQ ID NO: 22396 - DNA, 20 bp, Artificial Sequence
  Description of Artificial Sequence: Synthetic oligonucleotide
  Target: ATXN2; (-) strand; PAM type: NRG; PAM sequence: CAG
ccctttatccacatcgttac

SEQ ID NO: 22397 - DNA, 20 bp, Artificial Sequence
  Description of Artificial Sequence: Synthetic oligonucleotide
  Target: ATXN2; (-) strand; PAM type: NRG; PAM sequence: AGG
tgtccaccaacagtgtgtga

SEQ ID NO: 22398 - DNA, 20 bp, Artificial Sequence
  Description of Artificial Sequence: Synthetic oligonucleotide
  Target: ATXN2; (-) strand; PAM type: NRG; PAM sequence: AAG
atgtccaccaacagtgtgtg

SEQ ID NO: 22399 - DNA, 20 bp, Artificial Sequence
  Description of Artificial Sequence: Synthetic oligonucleotide
  Target: ATXN2; (-) strand; PAM type: NRG; PAM sequence: CAG
ccaatttacatgtccaccaa

SEQ ID NO: 22400 - DNA, 20 bp, Artificial Sequence
  Description of Artificial Sequence: Synthetic oligonucleotide
  Target: ATXN2; (-) strand; PAM type: NRG; PAM sequence: TGG
ttccatactgttctccatag

SEQ ID NO: 22401 - DNA, 20 bp, Artificial Sequence
  Description of Artificial Sequence: Synthetic oligonucleotide
  Target: ATXN2; (-) strand; PAM type: NRG; PAM sequence: TAG
aatttccatactgttctcca

SEQ ID NO: 22402 - DNA, 20 bp, Artificial Sequence
  Description of Artificial Sequence: Synthetic oligonucleotide
  Target: ATXN2; (-) strand; PAM type: NRG; PAM sequence: AGG
gctctatttttagttttttg

SEQ ID NO: 22403 - DNA, 20 bp, Artificial Sequence
  Description of Artificial Sequence: Synthetic oligonucleotide
  Target: ATXN2; (-) strand; PAM type: NRG; PAM sequence: GAG
agctctatttttagtttttt

SEQ ID NO: 22404 - DNA, 20 bp, Artificial Sequence
  Description of Artificial Sequence: Synthetic oligonucleotide
  Target: ATXN2; (-) strand; PAM type: NRG; PAM sequence: TAG
tcatatggtagctctatttt

SEQ ID NO: 22405 - DNA, 20 bp, Artificial Sequence
  Description of Artificial Sequence: Synthetic oligonucleotide
  Target: ATXN2; (-) strand; PAM type: NRG; PAM sequence: TAG
gcaattgctggatcatatgg

SEQ ID NO: 22406 - DNA, 20 bp, Artificial Sequence
  Description of Artificial Sequence: Synthetic oligonucleotide
  Target: ATXN2; (-) strand; PAM type: NRG; PAM sequence: TGG
agtgcaattgctggatcata

SEQ ID NO: 22407 - DNA, 20 bp, Artificial Sequence
  Description of Artificial Sequence: Synthetic oligonucleotide
  Target: ATXN2; (-) strand; PAM type: NRG; PAM sequence: TGG
atacctagcagtgcaattgc

SEQ ID NO: 22408 - DNA, 20 bp, Artificial Sequence
  Description of Artificial Sequence: Synthetic oligonucleotide
  Target: ATXN2; (-) strand; PAM type: NRG; PAM sequence: CAG
ctttctgagtatatacctag

SEQ ID NO: 22409 - DNA, 20 bp, Artificial Sequence
  Description of Artificial Sequence: Synthetic oligonucleotide
  Target: ATXN2; (-) strand; PAM type: NRG; PAM sequence: TAG
ttcctttctgagtatatacc

SEQ ID NO: 22410 - DNA, 20 bp, Artificial Sequence
  Description of Artificial Sequence: Synthetic oligonucleotide
  Target: ATXN2; (-) strand; PAM type: NRG; PAM sequence: GAG
aataaactgatttcctttct

SEQ ID NO: 22411 - DNA, 20 bp, Artificial Sequence
  Description of Artificial Sequence: Synthetic oligonucleotide
  Target: ATXN2; (-) strand; PAM type: NRG; PAM sequence: CAG
ccgtagtaaacatgggagtg

SEQ ID NO: 22412 - DNA, 20 bp, Artificial Sequence
  Description of Artificial Sequence: Synthetic oligonucleotide
  Target: ATXN2; (-) strand; PAM type: NRG; PAM sequence: GAG
tagtgccgtagtaaacatgg

SEQ ID NO: 22413 - DNA, 20 bp, Artificial Sequence
  Description of Artificial Sequence: Synthetic oligonucleotide
  Target: ATXN2; (-) strand; PAM type: NRG; PAM sequence: GGG
tatagtgccgtagtaaacat

SEQ ID NO: 22414 - DNA, 20 bp, Artificial Sequence
  Description of Artificial Sequence: Synthetic oligonucleotide
  Target: ATXN2; (-) strand; PAM type: NRG; PAM sequence: TGG
atatagtgccgtagtaaaca

SEQ ID NO: 22415 - DNA, 20 bp, Artificial Sequence
  Description of Artificial Sequence: Synthetic oligonucleotide
  Target: ATXN2; (-) strand; PAM type: NRG; PAM sequence: TAG
ctgttgtgtatatagtgccg

SEQ ID NO: 22416 - DNA, 20 bp, Artificial Sequence
  Description of Artificial Sequence: Synthetic oligonucleotide
  Target: ATXN2; (-) strand; PAM type: NRG; PAM sequence: TAG
aatcttggctgttgtgtata

SEQ ID NO: 22417 - DNA, 20 bp, Artificial Sequence
  Description of Artificial Sequence: Synthetic oligonucleotide
  Target: ATXN2; (-) strand; PAM type: NRG; PAM sequence: TGG
cgtaggttgattccaaatct

SEQ ID NO: 22418 - DNA, 20 bp, Artificial Sequence
  Description of Artificial Sequence: Synthetic oligonucleotide
  Target: ATXN2; (-) strand; PAM type: NRG; PAM sequence: AGG
ttgtctgtcagtggacacgt

SEQ ID NO: 22419 - DNA, 20 bp, Artificial Sequence
  Description of Artificial Sequence: Synthetic oligonucleotide
  Target: ATXN2; (-) strand; PAM type: NRG; PAM sequence: TAG
tttgtctgtcagtggacacg

SEQ ID NO: 22420 - DNA, 20 bp, Artificial Sequence
  Description of Artificial Sequence: Synthetic oligonucleotide
  Target: ATXN2; (-) strand; PAM type: NRG; PAM sequence: TGG
tttctccatttgtctgtcag

SEQ ID NO: 22421 - DNA, 20 bp, Artificial Sequence
  Description of Artificial Sequence: Synthetic oligonucleotide
  Target: ATXN2; (-) strand; PAM type: NRG; PAM sequence: CAG
ttctttctccatttgtctgt

SEQ ID NO: 22422 - DNA, 20 bp, Artificial Sequence
  Description of Artificial Sequence: Synthetic oligonucleotide
  Target: ATXN2; (-) strand; PAM type: NRG; PAM sequence: TGG
cattcttttttatggctgaa

SEQ ID NO: 22423 - DNA, 20 bp, Artificial Sequence
  Description of Artificial Sequence: Synthetic oligonucleotide
  Target: ATXN2; (-) strand; PAM type: NRG; PAM sequence: TGG
caggatctcattctttttta

SEQ ID NO: 22424 - DNA, 20 bp, Artificial Sequence
  Description of Artificial Sequence: Synthetic oligonucleotide
  Target: ATXN2; (-) strand; PAM type: NRG; PAM sequence: AGG
tctacattgctgcaaatgac

SEQ ID NO: 22425 - DNA, 20 bp, Artificial Sequence
  Description of Artificial Sequence: Synthetic oligonucleotide
  Target: ATXN2; (-) strand; PAM type: NRG; PAM sequence: CAG
atctacattgctgcaaatga

SEQ ID NO: 22426 - DNA, 20 bp, Artificial Sequence
  Description of Artificial Sequence: Synthetic oligonucleotide
  Target: ATXN2; (-) strand; PAM type: NRG; PAM sequence: CAG
ttacttaacataatgtcctc

SEQ ID NO: 22427 - DNA, 20 bp, Artificial Sequence
  Description of Artificial Sequence: Synthetic oligonucleotide
  Target: ATXN2; (-) strand; PAM type: NRG; PAM sequence: TGG
aaagtttatctttctgtccc

SEQ ID NO: 22428 - DNA, 20 bp, Artificial Sequence
  Description of Artificial Sequence: Synthetic oligonucleotide
  Target: ATXN2; (-) strand; PAM type: NRG; PAM sequence: AAG
caaacgagtaagaatatgca

SEQ ID NO: 22429 - DNA, 20 bp, Artificial Sequence
  Description of Artificial Sequence: Synthetic oligonucleotide
  Target: ATXN2; (-) strand; PAM type: NRG; PAM sequence: AAG
tttagtgcctgcaaacgagt

SEQ ID NO: 22430 - DNA, 20 bp, Artificial Sequence
  Description of Artificial Sequence: Synthetic oligonucleotide
  Target: ATXN2; (-) strand; PAM type: NRG; PAM sequence: GAG
tatttttagtgcctgcaaac

SEQ ID NO: 22431 - DNA, 20 bp, Artificial Sequence
  Description of Artificial Sequence: Synthetic oligonucleotide
  Target: ATXN2; (-) strand; PAM type: NRG; PAM sequence: TAG
tgttcaattgtttttatttt

SEQ ID NO: 22432 - DNA, 20 bp, Artificial Sequence
  Description of Artificial Sequence: Synthetic oligonucleotide
  Target: ATXN2; (-) strand; PAM type: NRG; PAM sequence: TGG
ccattacccttcccaacttc

SEQ ID NO: 22433 - DNA, 20 bp, Artificial Sequence
  Description of Artificial Sequence: Synthetic oligonucleotide
  Target: ATXN2; (-) strand; PAM type: NRG; PAM sequence: GAG
tttctgcctccggtcctgca

SEQ ID NO: 22434 - DNA, 20 bp, Artificial Sequence
  Description of Artificial Sequence: Synthetic oligonucleotide
  Target: ATXN2; (-) strand; PAM type: NRG; PAM sequence: CAG
catttctgcctccggtcctg

SEQ ID NO: 22435 - DNA, 20 bp, Artificial Sequence
  Description of Artificial Sequence: Synthetic oligonucleotide
  Target: ATXN2; (-) strand; PAM type: NRG; PAM sequence: CGG
atctttttcatttctgcctc

SEQ ID NO: 22436 - DNA, 20 bp, Artificial Sequence
  Description of Artificial Sequence: Synthetic oligonucleotide
  Target: ATXN2; (-) strand; PAM type: NRG; PAM sequence: CGG
caggcgtgagccaccgtgcc

SEQ ID NO: 22437 - DNA, 20 bp, Artificial Sequence
  Description of Artificial Sequence: Synthetic oligonucleotide
  Target: ATXN2; (-) strand; PAM type: NRG; PAM sequence: GAG
agtgctggggttgcaggcgt

SEQ ID NO: 22438 - DNA, 20 bp, Artificial Sequence
  Description of Artificial Sequence: Synthetic oligonucleotide
  Target: ATXN2; (-) strand; PAM type: NRG; PAM sequence: AGG
tcccaaagtgctggggttgc

SEQ ID NO: 22439 - DNA, 20 bp, Artificial Sequence
  Description of Artificial Sequence: Synthetic oligonucleotide
  Target: ATXN2; (-) strand; PAM type: NRG; PAM sequence: CAG
ctcccaaagtgctggggttg

SEQ ID NO: 22440 - DNA, 20 bp, Artificial Sequence
  Description of Artificial Sequence: Synthetic oligonucleotide
  Target: ATXN2; (-) strand; PAM type: NRG; PAM sequence: GGG
cacagcctcccaaagtgctg

SEQ ID NO: 22441 - DNA, 20 bp, Artificial Sequence
  Description of Artificial Sequence: Synthetic oligonucleotide
  Target: ATXN2; (-) strand; PAM type: NRG; PAM sequence: GGG
ccacagcctcccaaagtgct

SEQ ID NO: 22442 - DNA, 20 bp, Artificial Sequence
  Description of Artificial Sequence: Synthetic oligonucleotide
  Target: ATXN2; (-) strand; PAM type: NRG; PAM sequence: TGG
gccacagcctcccaaagtgc

SEQ ID NO: 22443 - DNA, 20 bp, Artificial Sequence
  Description of Artificial Sequence: Synthetic oligonucleotide
  Target: ATXN2; (-) strand; PAM type: NRG; PAM sequence: AAG
ccggctgccacagcctccca

SEQ ID NO: 22444 - DNA, 20 bp, Artificial Sequence
  Description of Artificial Sequence: Synthetic oligonucleotide
  Target: ATXN2; (-) strand; PAM type: NRG; PAM sequence: CAG
accttgtgatccggctgcca

SEQ ID NO: 22445 - DNA, 20 bp, Artificial Sequence
  Description of Artificial Sequence: Synthetic oligonucleotide
  Target: ATXN2; (-) strand; PAM type: NRG; PAM sequence: CGG
gatctcttgaccttgtgatc

SEQ ID NO: 22446 - DNA, 20 bp, Artificial Sequence
  Description of Artificial Sequence: Synthetic oligonucleotide
  Target: ATXN2; (-) strand; PAM type: NRG; PAM sequence: TGG
tttcactatgttggctggga

SEQ ID NO: 22447 - DNA, 20 bp, Artificial Sequence
  Description of Artificial Sequence: Synthetic oligonucleotide
  Target: ATXN2; (-) strand; PAM type: NRG; PAM sequence: GGG
ggggtttcactatgttggct

SEQ ID NO: 22448 - DNA, 20 bp, Artificial Sequence
  Description of Artificial Sequence: Synthetic oligonucleotide
  Target: ATXN2; (-) strand; PAM type: NRG; PAM sequence: TGG
cggggtttcactatgttggc

SEQ ID NO: 22449 - DNA, 20 bp, Artificial Sequence
  Description of Artificial Sequence: Synthetic oligonucleotide
  Target: ATXN2; (-) strand; PAM type: NRG; PAM sequence: TGG
gagacggggtttcactatgt

SEQ ID NO: 22450 - DNA, 20 bp, Artificial Sequence
  Description of Artificial Sequence: Synthetic oligonucleotide
  Target: ATXN2; (-) strand; PAM type: NRG; PAM sequence: GGG
ttgtatttttagtagagacg

SEQ ID NO: 22451 - DNA, 20 bp, Artificial Sequence
  Description of Artificial Sequence: Synthetic oligonucleotide
  Target: ATXN2; (-) strand; PAM type: NRG; PAM sequence: GGG
tttgtatttttagtagagac

SEQ ID NO: 22452 - DNA, 20 bp, Artificial Sequence
  Description of Artificial Sequence: Synthetic oligonucleotide
  Target: ATXN2; (-) strand; PAM type: NRG; PAM sequence: CGG
ttttgtatttttagtagaga

SEQ ID NO: 22453 - DNA, 20 bp, Artificial Sequence
  Description of Artificial Sequence: Synthetic oligonucleotide
  Target: ATXN2; (-) strand; PAM type: NRG; PAM sequence: GAG
taatttttgtatttttagta

SEQ ID NO: 22454 - DNA, 20 bp, Artificial Sequence
  Description of Artificial Sequence: Synthetic oligonucleotide
  Target: ATXN2; (-) strand; PAM type: NRG; PAM sequence: TAG
gctaatttttgtatttttag

SEQ ID NO: 22455 - DNA, 20 bp, Artificial Sequence
  Description of Artificial Sequence: Synthetic oligonucleotide
  Target: ATXN2; (-) strand; PAM type: NRG; PAM sequence: TAG
ccagctaatttttgtatttt

SEQ ID NO: 22456 - DNA, 20 bp, Artificial Sequence
  Description of Artificial Sequence: Synthetic oligonucleotide
  Target: ATXN2; (-) strand; PAM type: NRG; PAM sequence: CAG
caggcacgtgccaccacgcc

SEQ ID NO: 22457 - DNA, 20 bp, Artificial Sequence
  Description of Artificial Sequence: Synthetic oligonucleotide
  Target: ATXN2; (-) strand; PAM type: NRG; PAM sequence: AGG
tcctgactagctggaactac

SEQ ID NO: 22458 - DNA, 20 bp, Artificial Sequence
  Description of Artificial Sequence: Synthetic oligonucleotide
  Target: ATXN2; (-) strand; PAM type: NRG; PAM sequence: CAG
ctcctgactagctggaacta

SEQ ID NO: 22459 - DNA, 20 bp, Artificial Sequence
  Description of Artificial Sequence: Synthetic oligonucleotide
  Target: ATXN2; (-) strand; PAM type: NRG; PAM sequence: TGG
gcctcagcctcctgactagc

SEQ ID NO: 22460 - DNA, 20 bp, Artificial Sequence
  Description of Artificial Sequence: Synthetic oligonucleotide
  Target: ATXN2; (-) strand; PAM type: NRG; PAM sequence: TAG
tcctgcctcagcctcctgac

SEQ ID NO: 22461 - DNA, 20 bp, Artificial Sequence
  Description of Artificial Sequence: Synthetic oligonucleotide
  Target: ATXN2; (-) strand; PAM type: NRG; PAM sequence: CAG
ttcaagtgattctcctgcct

SEQ ID NO: 22462 - DNA, 20 bp, Artificial Sequence
  Description of Artificial Sequence: Synthetic oligonucleotide
  Target: ATXN2; (-) strand; PAM type: NRG; PAM sequence: AAG
aacctccgcctccagggttc

SEQ ID NO: 22463 - DNA, 20 bp, Artificial Sequence
  Description of Artificial Sequence: Synthetic oligonucleotide
  Target: ATXN2; (-) strand; PAM type: NRG; PAM sequence: GGG
cactgcaacctccgcctcca

SEQ ID NO: 22464 - DNA, 20 bp, Artificial Sequence
  Description of Artificial Sequence: Synthetic oligonucleotide
  Target: ATXN2; (-) strand; PAM type: NRG; PAM sequence: AGG
tcactgcaacctccgcctcc

SEQ ID NO: 22465 - DNA, 20 bp, Artificial Sequence
  Description of Artificial Sequence: Synthetic oligonucleotide
  Target: ATXN2; (-) strand; PAM type: NRG; PAM sequence: CAG
ctcactgcaacctccgcctc

SEQ ID NO: 22466 - DNA, 20 bp, Artificial Sequence
  Description of Artificial Sequence: Synthetic oligonucleotide
  Target: ATXN2; (-) strand; PAM type: NRG; PAM sequence: CAG
caggctggagtgcggtggcg

SEQ ID NO: 22467 - DNA, 20 bp, Artificial Sequence
  Description of Artificial Sequence: Synthetic oligonucleotide
  Target: ATXN2; (-) strand; PAM type: NRG; PAM sequence: TGG
gtcgccaggctggagtgcgg

SEQ ID NO: 22468 - DNA, 20 bp, Artificial Sequence
  Description of Artificial Sequence: Synthetic oligonucleotide
  Target: ATXN2; (-) strand; PAM type: NRG; PAM sequence: CGG
tctgtcgccaggctggagtg

SEQ ID NO: 22469 - DNA, 20 bp, Artificial Sequence
  Description of Artificial Sequence: Synthetic oligonucleotide
  Target: ATXN2; (-) strand; PAM type: NRG; PAM sequence: GAG
ctcactctgtcgccaggctg

SEQ ID NO: 22470 - DNA, 20 bp, Artificial Sequence
  Description of Artificial Sequence: Synthetic oligonucleotide
  Target: ATXN2; (-) strand; PAM type: NRG; PAM sequence: TGG
gtctcactctgtcgccaggc

SEQ ID NO: 22471 - DNA, 20 bp, Artificial Sequence
  Description of Artificial Sequence: Synthetic oligonucleotide
  Target: ATXN2; (-) strand; PAM type: NRG; PAM sequence: AGG
cggagtctcactctgtcgcc

SEQ ID NO: 22472 - DNA, 20 bp, Artificial Sequence
  Description of Artificial Sequence: Synthetic oligonucleotide
  Target: ATXN2; (-) strand; PAM type: NRG; PAM sequence: CAG
acggagtctcactctgtcgc

SEQ ID NO: 22473 - DNA, 20 bp, Artificial Sequence
  Description of Artificial Sequence: Synthetic oligonucleotide
  Target: ATXN2; (-) strand; PAM type: NRG; PAM sequence: GAG
tatttatttatttttagacg

SEQ ID NO: 22474 - DNA, 20 bp, Artificial Sequence
  Description of Artificial Sequence: Synthetic oligonucleotide
  Target: ATXN2; (-) strand; PAM type: NRG; PAM sequence: CGG
tttatttatttatttttaga

SEQ ID NO: 22475 - DNA, 20 bp, Artificial Sequence
  Description of Artificial Sequence: Synthetic oligonucleotide
  Target: ATXN2; (-) strand; PAM type: NRG; PAM sequence: TAG
ttattttatttatttatttt

SEQ ID NO: 22476 - DNA, 20 bp, Artificial Sequence
  Description of Artificial Sequence: Synthetic oligonucleotide
  Target: ATXN2; (-) strand; PAM type: NRG; PAM sequence: TAG
cctgctttgttgtcaaatac

SEQ ID NO: 22477 - DNA, 20 bp, Artificial Sequence
  Description of Artificial Sequence: Synthetic oligonucleotide
  Target: ATXN2; (-) strand; PAM type: NRG; PAM sequence: TAG
caacaaattaatgctgactg

SEQ ID NO: 22478 - DNA, 20 bp, Artificial Sequence
  Description of Artificial Sequence: Synthetic oligonucleotide
  Target: ATXN2; (-) strand; PAM type: NRG; PAM sequence: AAG
actccctcagttattctaaa

SEQ ID NO: 22479 - DNA, 20 bp, Artificial Sequence
  Description of Artificial Sequence: Synthetic oligonucleotide
  Target: ATXN2; (-) strand; PAM type: NRG; PAM sequence: CAG
acgttgcaattgtactccct

SEQ ID NO: 22480 - DNA, 20 bp, Artificial Sequence
  Description of Artificial Sequence: Synthetic oligonucleotide
  Target: ATXN2; (-) strand; PAM type: NRG; PAM sequence: GGG
taatcacattagggtaaatg

SEQ ID NO: 22481 - DNA, 20 bp, Artificial Sequence
  Description of Artificial Sequence: Synthetic oligonucleotide
  Target: ATXN2; (-) strand; PAM type: NRG; PAM sequence: GGG
ataatcacattagggtaaat

SEQ ID NO: 22482 - DNA, 20 bp, Artificial Sequence
  Description of Artificial Sequence: Synthetic oligonucleotide
  Target: ATXN2; (-) strand; PAM type: NRG; PAM sequence: TGG
aataatcacattagggtaaa

SEQ ID NO: 22483 - DNA, 20 bp, Artificial Sequence
  Description of Artificial Sequence: Synthetic oligonucleotide
  Target: ATXN2; (-) strand; PAM type: NRG; PAM sequence: GGG
aatgtgtaataatcacatta

SEQ ID NO: 22484 - DNA, 20 bp, Artificial Sequence
  Description of Artificial Sequence: Synthetic oligonucleotide
  Target: ATXN2; (-) strand; PAM type: NRG; PAM sequence: AGG
taatgtgtaataatcacatt

SEQ ID NO: 22485 - DNA, 20 bp, Artificial Sequence
  Description of Artificial Sequence: Synthetic oligonucleotide
  Target: ATXN2; (-) strand; PAM type: NRG; PAM sequence: TAG
ataatgtgtaataatcacat

SEQ ID NO: 22486 - DNA, 20 bp, Artificial Sequence
  Description of Artificial Sequence: Synthetic oligonucleotide
  Target: ATXN2; (-) strand; PAM type: NRG; PAM sequence: AGG
tctgtgagatatttagataa

SEQ ID NO: 22487 - DNA, 20 bp, Artificial Sequence
  Description of Artificial Sequence: Synthetic oligonucleotide
  Target: ATXN2; (-) strand; PAM type: NRG; PAM sequence: AAG
gtctgtgagatatttagata

SEQ ID NO: 22488 - DNA, 20 bp, Artificial Sequence
  Description of Artificial Sequence: Synthetic oligonucleotide
  Target: ATXN2; (-) strand; PAM type: NRG; PAM sequence: TAG
catagggtctgtgagatatt

SEQ ID NO: 22489 - DNA, 20 bp, Artificial Sequence
  Description of Artificial Sequence: Synthetic oligonucleotide
  Target: ATXN2; (-) strand; PAM type: NRG; PAM sequence: GAG
gtattattcatagggtctgt

SEQ ID NO: 22490 - DNA, 20 bp, Artificial Sequence
  Description of Artificial Sequence: Synthetic oligonucleotide
  Target: ATXN2; (-) strand; PAM type: NRG; PAM sequence: GGG
tagtagacgtattattcata

SEQ ID NO: 22491 - DNA, 20 bp, Artificial Sequence
  Description of Artificial Sequence: Synthetic oligonucleotide
  Target: ATXN2; (-) strand; PAM type: NRG; PAM sequence: AGG
atagtagacgtattattcat

SEQ ID NO: 22492 - DNA, 20 bp, Artificial Sequence
  Description of Artificial Sequence: Synthetic oligonucleotide
  Target: ATXN2; (-) strand; PAM type: NRG; PAM sequence: TAG
catagtagacgtattattca

SEQ ID NO: 22493 - DNA, 20 bp, Artificial Sequence
  Description of Artificial Sequence: Synthetic oligonucleotide
  Target: ATXN2; (-) strand; PAM type: NRG; PAM sequence: TAG
atttttttatgggtacatag

SEQ ID NO: 22494 - DNA, 20 bp, Artificial Sequence
  Description of Artificial Sequence: Synthetic oligonucleotide
  Target: ATXN2; (-) strand; PAM type: NRG; PAM sequence: TAG
tttatttttttatgggtaca

SEQ ID NO: 22495 - DNA, 20 bp, Artificial Sequence
  Description of Artificial Sequence: Synthetic oligonucleotide
  Target: ATXN2; (-) strand; PAM type: NRG; PAM sequence: GGG
aaaggtttttatttttttat

SEQ ID NO: 22496 - DNA, 20 bp, Artificial Sequence
  Description of Artificial Sequence: Synthetic oligonucleotide
  Target: ATXN2; (-) strand; PAM type: NRG; PAM sequence: TGG
taaaggtttttattttttta

SEQ ID NO: 22497 - DNA, 20 bp, Artificial Sequence
  Description of Artificial Sequence: Synthetic oligonucleotide
  Target: ATXN2; (-) strand; PAM type: NRG; PAM sequence: AGG
ggttttgcagtctactttaa

SEQ ID NO: 22498 - DNA, 20 bp, Artificial Sequence
  Description of Artificial Sequence: Synthetic oligonucleotide
  Target: ATXN2; (-) strand; PAM type: NRG; PAM sequence: AAG
tggttttgcagtctacttta

SEQ ID NO: 22499 - DNA, 20 bp, Artificial Sequence
  Description of Artificial Sequence: Synthetic oligonucleotide
  Target: ATXN2; (-) strand; PAM type: NRG; PAM sequence: CAG
tttgatggtccttggttttg

SEQ ID NO: 22500 - DNA, 20 bp, Artificial Sequence
  Description of Artificial Sequence: Synthetic oligonucleotide
  Target: ATXN2; (-) strand; PAM type: NRG; PAM sequence: TGG
ctgttctttttgatggtcct

SEQ ID NO: 22501 - DNA, 20 bp, Artificial Sequence
  Description of Artificial Sequence: Synthetic oligonucleotide
  Target: ATXN2; (-) strand; PAM type: NRG; PAM sequence: TGG
ttgtcttctgttctttttga

SEQ ID NO: 22502 - DNA, 20 bp, Artificial Sequence
  Description of Artificial Sequence: Synthetic oligonucleotide
  Target: ATXN2; (-) strand; PAM type: NRG; PAM sequence: TGG
tggtagcattttattttttc

SEQ ID NO: 22503 - DNA, 20 bp, Artificial Sequence
  Description of Artificial Sequence: Synthetic oligonucleotide
  Target: ATXN2; (-) strand; PAM type: NRG; PAM sequence: TAG
aaatcatcttcagccagtgg

SEQ ID NO: 22504 - DNA, 20 bp, Artificial Sequence
  Description of Artificial Sequence: Synthetic oligonucleotide
  Target: ATXN2; (-) strand; PAM type: NRG; PAM sequence: TGG
cttaaatcatcttcagccag

SEQ ID NO: 22505 - DNA, 20 bp, Artificial Sequence
  Description of Artificial Sequence: Synthetic oligonucleotide
  Target: ATXN2; (-) strand; PAM type: NRG; PAM sequence: CAG
catcttaaatcatcttcagc

SEQ ID NO: 22506 - DNA, 20 bp, Artificial Sequence
  Description of Artificial Sequence: Synthetic oligonucleotide
  Target: ATXN2; (-) strand; PAM type: NRG; PAM sequence: CAG
atgccatcttaaatcatctt

SEQ ID NO: 22507 - DNA, 20 bp, Artificial Sequence
  Description of Artificial Sequence: Synthetic oligonucleotide
  Target: ATXN2; (-) strand; PAM type: NRG; PAM sequence: AGG
ctgttttctttcttttgtag

SEQ ID NO: 22508 - DNA, 20 bp, Artificial Sequence
  Description of Artificial Sequence: Synthetic oligonucleotide
  Target: ATXN2; (-) strand; PAM type: NRG; PAM sequence: GAG
cctgttttctttcttttgta

SEQ ID NO: 22509 - DNA, 20 bp, Artificial Sequence
  Description of Artificial Sequence: Synthetic oligonucleotide
  Target: ATXN2; (-) strand; PAM type: NRG; PAM sequence: TAG
ttcctgttttctttcttttg

SEQ ID NO: 22510 - DNA, 20 bp, Artificial Sequence
  Description of Artificial Sequence: Synthetic oligonucleotide
  Target: ATXN2; (-) strand; PAM type: NRG; PAM sequence: CAG
gtacttgctccccctttttt

SEQ ID NO: 22511 - DNA, 20 bp, Artificial Sequence
  Description of Artificial Sequence: Synthetic oligonucleotide
  Target: ATXN2; (-) strand; PAM type: NRG; PAM sequence: AGG
gttgtcctaacctgtggctt

SEQ ID NO: 22512 - DNA, 20 bp, Artificial Sequence
  Description of Artificial Sequence: Synthetic oligonucleotide
  Target: ATXN2; (-) strand; PAM type: NRG; PAM sequence: TAG
cgttgtcctaacctgtggct

SEQ ID NO: 22513 - DNA, 20 bp, Artificial Sequence
  Description of Artificial Sequence: Synthetic oligonucleotide
  Target: ATXN2; (-) strand; PAM type: NRG; PAM sequence: TGG
aggtccgttgtcctaacctg

SEQ ID NO: 22514 - DNA, 20 bp, Artificial Sequence
  Description of Artificial Sequence: Synthetic oligonucleotide
  Target: ATXN2; (-) strand; PAM type: NRG; PAM sequence: AGG
accacctggggctgtggctt

SEQ ID NO: 22515 - DNA, 20 bp, Artificial Sequence
  Description of Artificial Sequence: Synthetic oligonucleotide
  Target: ATXN2; (-) strand; PAM type: NRG; PAM sequence: TAG
caccacctggggctgtggct

SEQ ID NO: 22516 - DNA, 20 bp, Artificial Sequence
  Description of Artificial Sequence: Synthetic oligonucleotide
  Target: ATXN2; (-) strand; PAM type: NRG; PAM sequence: TGG
tttctcaccacctggggctg

SEQ ID NO: 22517 - DNA, 20 bp, Artificial Sequence
  Description of Artificial Sequence: Synthetic oligonucleotide
  Target: ATXN2; (-) strand; PAM type: NRG; PAM sequence: GGG
agcttgtttctcaccacctg

SEQ ID NO: 22518 - DNA, 20 bp, Artificial Sequence
  Description of Artificial Sequence: Synthetic oligonucleotide
  Target: ATXN2; (-) strand; PAM type: NRG; PAM sequence: GGG
tagcttgtttctcaccacct

SEQ ID NO: 22519 - DNA, 20 bp, Artificial Sequence
  Description of Artificial Sequence: Synthetic oligonucleotide
  Target: ATXN2; (-) strand; PAM type: NRG; PAM sequence: TGG
ttagcttgtttctcaccacc

SEQ ID NO: 22520 - DNA, 20 bp, Artificial Sequence
  Description of Artificial Sequence: Synthetic oligonucleotide
  Target: ATXN2; (-) strand; PAM type: NRG; PAM sequence: TAG
tggctgtgtaggtttctctt

SEQ ID NO: 22521 - DNA, 20 bp, Artificial Sequence
  Description of Artificial Sequence: Synthetic oligonucleotide
  Target: ATXN2; (-) strand; PAM type: NRG; PAM sequence: AGG
ggcaacctttttggctgtgt

SEQ ID NO: 22522 - DNA, 20 bp, Artificial Sequence
  Description of Artificial Sequence: Synthetic oligonucleotide
  Target: ATXN2; (-) strand; PAM type: NRG; PAM sequence: TAG
aggcaacctttttggctgtg

SEQ ID NO: 22523 - DNA, 20 bp, Artificial Sequence
  Description of Artificial Sequence: Synthetic oligonucleotide
  Target: ATXN2; (-) strand; PAM type: NRG; PAM sequence: TGG
taattttaaggcaacctttt

SEQ ID NO: 22524 - DNA, 20 bp, Artificial Sequence
  Description of Artificial Sequence: Synthetic oligonucleotide
  Target: ATXN2; (-) strand; PAM type: NRG; PAM sequence: AGG
atcttggctctctaatttta

SEQ ID NO: 22525 - DNA, 20 bp, Artificial Sequence
  Description of Artificial Sequence: Synthetic oligonucleotide
  Target: ATXN2; (-) strand; PAM type: NRG; PAM sequence: AAG
tatcttggctctctaatttt

SEQ ID NO: 22526 - DNA, 20 bp, Artificial Sequence
  Description of Artificial Sequence: Synthetic oligonucleotide
  Target: ATXN2; (-) strand; PAM type: NRG; PAM sequence: TGG
ctgaggctgaagaggtatct

SEQ ID NO: 22527 - DNA, 20 bp, Artificial Sequence
  Description of Artificial Sequence: Synthetic oligonucleotide
  Target: ATXN2; (-) strand; PAM type: NRG; PAM sequence: AGG
tgcctatactgaggctgaag

SEQ ID NO: 22528 - DNA, 20 bp, Artificial Sequence
  Description of Artificial Sequence: Synthetic oligonucleotide
  Target: ATXN2; (-) strand; PAM type: NRG; PAM sequence: GAG
ttgcctatactgaggctgaa

SEQ ID NO: 22529 - DNA, 20 bp, Artificial Sequence
  Description of Artificial Sequence: Synthetic oligonucleotide
  Target: ATXN2; (-) strand; PAM type: NRG; PAM sequence: AAG
gtttgcctatactgaggctg

SEQ ID NO: 22530 - DNA, 20 bp, Artificial Sequence
  Description of Artificial Sequence: Synthetic oligonucleotide
  Target: ATXN2; (-) strand; PAM type: NRG; PAM sequence: AGG
aaattggtttgcctatactg

SEQ ID NO: 22531 - DNA, 20 bp, Artificial Sequence
  Description of Artificial Sequence: Synthetic oligonucleotide
  Target: ATXN2; (-) strand; PAM type: NRG; PAM sequence: GAG
gaaattggtttgcctatact

SEQ ID NO: 22532 - DNA, 20 bp, Artificial Sequence
  Description of Artificial Sequence: Synthetic oligonucleotide
  Target: ATXN2; (-) strand; PAM type: NRG; PAM sequence: TGG
ggtaatgaaaccattgaaat

SEQ ID NO: 22533 - DNA, 20 bp, Artificial Sequence
  Description of Artificial Sequence: Synthetic oligonucleotide
  Target: ATXN2; (-) strand; PAM type: NRG; PAM sequence: TGG
tgccatgacaccaagagcct

SEQ ID NO: 22534 - DNA, 20 bp, Artificial Sequence
  Description of Artificial Sequence: Synthetic oligonucleotide
  Target: ATXN2; (-) strand; PAM type: NRG; PAM sequence: GAG
gctgtttgccatgacaccaa

SEQ ID NO: 22535 - DNA, 20 bp, Artificial Sequence
  Description of Artificial Sequence: Synthetic oligonucleotide
  Target: ATXN2; (-) strand; PAM type: NRG; PAM sequence: AAG
atgctgtttgccatgacacc

SEQ ID NO: 22536 - DNA, 20 bp, Artificial Sequence
  Description of Artificial Sequence: Synthetic oligonucleotide
  Target: ATXN2; (-) strand; PAM type: NRG; PAM sequence: GAG
gtaaagcttgcgatgcgcca

SEQ ID NO: 22537 - DNA, 20 bp, Artificial Sequence
  Description of Artificial Sequence: Synthetic oligonucleotide
  Target: ATXN2; (-) strand; PAM type: NRG; PAM sequence: CAG
cagtaaagcttgcgatgcgc

SEQ ID NO: 22538 - DNA, 20 bp, Artificial Sequence
  Description of Artificial Sequence: Synthetic oligonucleotide
  Target: ATXN2; (-) strand; PAM type: NRG; PAM sequence: AAG
gctatattggtaatgcagta

SEQ ID NO: 22539 - DNA, 20 bp, Artificial Sequence
  Description of Artificial Sequence: Synthetic oligonucleotide
  Target: ATXN2; (-) strand; PAM type: NRG; PAM sequence: CAG
ctttagctatattggtaatg

SEQ ID NO: 22540 - DNA, 20 bp, Artificial Sequence
  Description of Artificial Sequence: Synthetic oligonucleotide
  Target: ATXN2; (-) strand; PAM type: NRG; PAM sequence: TGG
acttgactctttagctatat

SEQ ID NO: 22541 - DNA, 20 bp, Artificial Sequence
  Description of Artificial Sequence: Synthetic oligonucleotide
  Target: ATXN2; (-) strand; PAM type: NRG; PAM sequence: TAG
cccttagccacttgactctt

SEQ ID NO: 22542 - DNA, 20 bp, Artificial Sequence
  Description of Artificial Sequence: Synthetic oligonucleotide
  Target: ATXN2; (-) strand; PAM type: NRG; PAM sequence: TAG
accctgtcaacatttgccct

SEQ ID NO: 22543 - DNA, 20 bp, Artificial Sequence
  Description of Artificial Sequence: Synthetic oligonucleotide
  Target: ATXN2; (-) strand; PAM type: NRG; PAM sequence: CAG
tacatcgtgacttaaattgc

SEQ ID NO: 22544 - DNA, 20 bp, Artificial Sequence
  Description of Artificial Sequence: Synthetic oligonucleotide
  Target: ATXN2; (-) strand; PAM type: NRG; PAM sequence: AAG
caaatgaaagtttaagtagt

SEQ ID NO: 22545 - DNA, 20 bp, Artificial Sequence
  Description of Artificial Sequence: Synthetic oligonucleotide
  Target: ATXN2; (-) strand; PAM type: NRG; PAM sequence: TAG
tgaacaaatgaaagtttaag

SEQ ID NO: 22546 - DNA, 20 bp, Artificial Sequence
  Description of Artificial Sequence: Synthetic oligonucleotide
  Target: ATXN2; (-) strand; PAM type: NRG; PAM sequence: AAG
ttgtgaacaaatgaaagttt

SEQ ID NO: 22547 - DNA, 20 bp, Artificial Sequence
  Description of Artificial Sequence: Synthetic oligonucleotide
  Target: ATXN2; (-) strand; PAM type: NRG; PAM sequence: AAG
agatttttgtgaacaaatga

SEQ ID NO: 22548 - DNA, 20 bp, Artificial Sequence
  Description of Artificial Sequence: Synthetic oligonucleotide
  Target: ATXN2; (-) strand; PAM type: NRG; PAM sequence: AAG
tatgtggatcgcctctacta

SEQ ID NO: 22549 - DNA, 20 bp, Artificial Sequence
  Description of Artificial Sequence: Synthetic oligonucleotide
  Target: ATXN2; (-) strand; PAM type: NRG; PAM sequence: TGG
tatatagttggtctgttatg

SEQ ID NO: 22550 - DNA, 20 bp, Artificial Sequence
  Description of Artificial Sequence: Synthetic oligonucleotide
  Target: ATXN2; (-) strand; PAM type: NRG; PAM sequence: TGG
tccttggcaatatatatagt

SEQ ID NO: 22551 - DNA, 20 bp, Artificial Sequence
  Description of Artificial Sequence: Synthetic oligonucleotide
  Target: ATXN2; (-) strand; PAM type: NRG; PAM sequence: TAG
gaagtccttggcaatatata

SEQ ID NO: 22552 - DNA, 20 bp, Artificial Sequence
  Description of Artificial Sequence: Synthetic oligonucleotide
  Target: ATXN2; (-) strand; PAM type: NRG; PAM sequence: TGG
taattaaactccgaagtcct

SEQ ID NO: 22553 - DNA, 20 bp, Artificial Sequence
  Description of Artificial Sequence: Synthetic oligonucleotide
  Target: ATXN2; (-) strand; PAM type: NRG; PAM sequence: AAG
cttatgataattaaactccg

SEQ ID NO: 22554 - DNA, 20 bp, Artificial Sequence
  Description of Artificial Sequence: Synthetic oligonucleotide
  Target: ATXN2; (-) strand; PAM type: NRG; PAM sequence: AAG
tctgatttttgccttcactc

SEQ ID NO: 22555 - DNA, 20 bp, Artificial Sequence
  Description of Artificial Sequence: Synthetic oligonucleotide
  Target: ATXN2; (-) strand; PAM type: NRG; PAM sequence: AAG
gtaagaaaaagcaacaccaa

SEQ ID NO: 22556 - DNA, 20 bp, Artificial Sequence
  Description of Artificial Sequence: Synthetic oligonucleotide
  Target: ATXN2; (-) strand; PAM type: NRG; PAM sequence: AAG
gtgtttgacattgtaagaaa

SEQ ID NO: 22557 - DNA, 20 bp, Artificial Sequence
  Description of Artificial Sequence: Synthetic oligonucleotide
  Target: ATXN2; (-) strand; PAM type: NRG; PAM sequence: AAG
gcagatgtgtttgacattgt

SEQ ID NO: 22558 - DNA, 20 bp, Artificial Sequence
  Description of Artificial Sequence: Synthetic oligonucleotide
  Target: ATXN2; (-) strand; PAM type: NRG; PAM sequence: CAG
ccaacccatagtaagaaatg

SEQ ID NO: 22559 - DNA, 20 bp, Artificial Sequence
  Description of Artificial Sequence: Synthetic oligonucleotide
  Target: ATXN2; (-) strand; PAM type: NRG; PAM sequence: AAG
aaaagtgtccaacccatagt

SEQ ID NO: 22560 - DNA, 20 bp, Artificial Sequence
  Description of Artificial Sequence: Synthetic oligonucleotide
  Target: ATXN2; (-) strand; PAM type: NRG; PAM sequence: TAG
aaaaaaaagtgtccaaccca

SEQ ID NO: 22561 - DNA, 20 bp, Artificial Sequence
  Description of Artificial Sequence: Synthetic oligonucleotide
  Target: ATXN2; (-) strand; PAM type: NRG; PAM sequence: AAG
ctgtttggaaaaaaaaaaaa

SEQ ID NO: 22562 - DNA, 20 bp, Artificial Sequence
  Description of Artificial Sequence: Synthetic oligonucleotide
  Target: ATXN2; (-) strand; PAM type: NRG; PAM sequence: TGG
caacggagtcagaccctgtt

SEQ ID NO: 22563 - DNA, 20 bp, Artificial Sequence
  Description of Artificial Sequence: Synthetic oligonucleotide
  Target: ATXN2; (-) strand; PAM type: NRG; PAM sequence: CAG
tccagtctgggcaacggagt

SEQ ID NO: 22564 - DNA, 20 bp, Artificial Sequence
  Description of Artificial Sequence: Synthetic oligonucleotide
  Target: ATXN2; (-) strand; PAM type: NRG; PAM sequence: GAG
gcgctccagtctgggcaacg

SEQ ID NO: 22565 - DNA, 20 bp, Artificial Sequence
  Description of Artificial Sequence: Synthetic oligonucleotide
  Target: ATXN2; (-) strand; PAM type: NRG; PAM sequence: CGG
ctgcgctccagtctgggcaa

SEQ ID NO: 22566 - DNA, 20 bp, Artificial Sequence
  Description of Artificial Sequence: Synthetic oligonucleotide
  Target: ATXN2; (-) strand; PAM type: NRG; PAM sequence: GGG
gcaccactgcgctccagtct

SEQ ID NO: 22567 - DNA, 20 bp, Artificial Sequence
  Description of Artificial Sequence: Synthetic oligonucleotide
  Target: ATXN2; (-) strand; PAM type: NRG; PAM sequence: TGG
tgcaccactgcgctccagtc

SEQ ID NO: 22568 - DNA, 20 bp, Artificial Sequence
  Description of Artificial Sequence: Synthetic oligonucleotide
  Target: ATXN2; (-) strand; PAM type: NRG; PAM sequence: CAG
gagcttgcaccactgcgctc

SEQ ID NO: 22569 - DNA, 20 bp, Artificial Sequence
  Description of Artificial Sequence: Synthetic oligonucleotide
  Target: ATXN2; (-) strand; PAM type: NRG; PAM sequence: GAG
gatggaggttgcagtgaggt

SEQ ID NO: 22570 - DNA, 20 bp, Artificial Sequence
  Description of Artificial Sequence: Synthetic oligonucleotide
  Target: ATXN2; (-) strand; PAM type: NRG; PAM sequence: AGG
gggagatggaggttgcagtg

SEQ ID NO: 22571 - DNA, 20 bp, Artificial Sequence
  Description of Artificial Sequence: Synthetic oligonucleotide
  Target: ATXN2; (-) strand; PAM type: NRG; PAM sequence: GAG
tgggagatggaggttgcagt

SEQ ID NO: 22572 - DNA, 20 bp, Artificial Sequence
  Description of Artificial Sequence: Synthetic oligonucleotide
  Target: ATXN2; (-) strand; PAM type: NRG; PAM sequence: CAG
agcctgggagatggaggttg

SEQ ID NO: 22573 - DNA, 20 bp, Artificial Sequence
  Description of Artificial Sequence: Synthetic oligonucleotide
  Target: ATXN2; (-) strand; PAM type: NRG; PAM sequence: AGG
cacttgagcctgggagatgg

SEQ ID NO: 22574 - DNA, 20 bp, Artificial Sequence
  Description of Artificial Sequence: Synthetic oligonucleotide
  Target: ATXN2; (-) strand; PAM type: NRG; PAM sequence: GAG
tcacttgagcctgggagatg

SEQ ID NO: 22575 - DNA, 20 bp, Artificial Sequence
  Description of Artificial Sequence: Synthetic oligonucleotide
  Target: ATXN2; (-) strand; PAM type: NRG; PAM sequence: TGG
aatcacttgagcctgggaga

SEQ ID NO: 22576 - DNA, 20 bp, Artificial Sequence
  Description of Artificial Sequence: Synthetic oligonucleotide
  Target: ATXN2; (-) strand; PAM type: NRG; PAM sequence: GAG
ggagaatcacttgagcctgg

SEQ ID NO: 22577 - DNA, 20 bp, Artificial Sequence
  Description of Artificial Sequence: Synthetic oligonucleotide
  Target: ATXN2; (-) strand; PAM type: NRG; PAM sequence: GGG
tgggagaatcacttgagcct

SEQ ID NO: 22578 - DNA, 20 bp, Artificial Sequence
  Description of Artificial Sequence: Synthetic oligonucleotide
  Target: ATXN2; (-) strand; PAM type: NRG; PAM sequence: TGG
gtgggagaatcacttgagcc

SEQ ID NO: 22579 - DNA, 20 bp, Artificial Sequence
  Description of Artificial Sequence: Synthetic oligonucleotide
  Target: ATXN2; (-) strand; PAM type: NRG; PAM sequence: GAG
ctgaggtgggagaatcactt

SEQ ID NO: 22580 - DNA, 20 bp, Artificial Sequence
  Description of Artificial Sequence: Synthetic oligonucleotide
  Target: ATXN2; (-) strand; PAM type: NRG; PAM sequence: GAG
tactcaggaggctgaggtgg

SEQ ID NO: 22581 - DNA, 20 bp, Artificial Sequence
  Description of Artificial Sequence: Synthetic oligonucleotide
  Target: ATXN2; (-) strand; PAM type: NRG; PAM sequence: GGG
gctactcaggaggctgaggt

SEQ ID NO: 22582 - DNA, 20 bp, Artificial Sequence
  Description of Artificial Sequence: Synthetic oligonucleotide
  Target: ATXN2; (-) strand; PAM type: NRG; PAM sequence: TGG
agctactcaggaggctgagg

SEQ ID NO: 22583 - DNA, 20 bp, Artificial Sequence
  Description of Artificial Sequence: Synthetic oligonucleotide
  Target: ATXN2; (-) strand; PAM type: NRG; PAM sequence: AGG
accagctactcaggaggctg

SEQ ID NO: 22584 - DNA, 20 bp, Artificial Sequence
  Description of Artificial Sequence: Synthetic oligonucleotide
  Target: ATXN2; (-) strand; PAM type: NRG; PAM sequence: GAG
taccagctactcaggaggct

SEQ ID NO: 22585 - DNA, 20 bp, Artificial Sequence
  Description of Artificial Sequence: Synthetic oligonucleotide
  Target: ATXN2; (-) strand; PAM type: NRG; PAM sequence: AGG
aatagtaccagctactcagg

SEQ ID NO: 22586 - DNA, 20 bp, Artificial Sequence
  Description of Artificial Sequence: Synthetic oligonucleotide
  Target: ATXN2; (-) strand; PAM type: NRG; PAM sequence: GAG
taatagtaccagctactcag

SEQ ID NO: 22587 - DNA, 20 bp, Artificial Sequence
  Description of Artificial Sequence: Synthetic oligonucleotide
  Target: ATXN2; (-) strand; PAM type: NRG; PAM sequence: AGG
gctaatagtaccagctactc

SEQ ID NO: 22588 - DNA, 20 bp, Artificial Sequence
  Description of Artificial Sequence: Synthetic oligonucleotide
  Target: ATXN2; (-) strand; PAM type: NRG; PAM sequence: CAG
tgctaatagtaccagctact

SEQ ID NO: 22589 - DNA, 20 bp, Artificial Sequence
  Description of Artificial Sequence: Synthetic oligonucleotide
  Target: ATXN2; (-) strand; PAM type: NRG; PAM sequence: CAG
gtggcacatgctaatagtac

SEQ ID NO: 22590 - DNA, 20 bp, Artificial Sequence
  Description of Artificial Sequence: Synthetic oligonucleotide
  Target: ATXN2; (-) strand; PAM type: NRG; PAM sequence: TAG
ggtgtggtggcacatgctaa

SEQ ID NO: 22591 - DNA, 20 bp, Artificial Sequence
  Description of Artificial Sequence: Synthetic oligonucleotide
  Target: ATXN2; (-) strand; PAM type: NRG; PAM sequence: TGG
cacacattagccaggtgtgg

SEQ ID NO: 22592 - DNA, 20 bp, Artificial Sequence
  Description of Artificial Sequence: Synthetic oligonucleotide
  Target: ATXN2; (-) strand; PAM type: NRG; PAM sequence: TGG
atacacacattagccaggtg

SEQ ID NO: 22593 - DNA, 20 bp, Artificial Sequence
  Description of Artificial Sequence: Synthetic oligonucleotide
  Target: ATXN2; (-) strand; PAM type: NRG; PAM sequence: AGG
aaaaaatacacacattagcc

SEQ ID NO: 22594 - DNA, 20 bp, Artificial Sequence
  Description of Artificial Sequence: Synthetic oligonucleotide
  Target: ATXN2; (-) strand; PAM type: NRG; PAM sequence: CAG
aaaaaaatacacacattagc

SEQ ID NO: 22595 - DNA, 20 bp, Artificial Sequence
  Description of Artificial Sequence: Synthetic oligonucleotide
  Target: ATXN2; (-) strand; PAM type: NRG; PAM sequence: TAG
ctacaaaaaaatacacacat

SEQ ID NO: 22596 - DNA, 20 bp, Artificial Sequence
  Description of Artificial Sequence: Synthetic oligonucleotide
  Target: ATXN2; (-) strand; PAM type: NRG; PAM sequence: TGG
aaagaccaacctgggtaaca

SEQ ID NO: 22597 - DNA, 20 bp, Artificial Sequence
  Description of Artificial Sequence: Synthetic oligonucleotide
  Target: ATXN2; (-) strand; PAM type: NRG; PAM sequence: GGG
caggcattaaagaccaacct

SEQ ID NO: 22598 - DNA, 20 bp, Artificial Sequence
  Description of Artificial Sequence: Synthetic oligonucleotide
  Target: ATXN2; (-) strand; PAM type: NRG; PAM sequence: TGG
tcaggcattaaagaccaacc

SEQ ID NO: 22599 - DNA, 20 bp, Artificial Sequence
  Description of Artificial Sequence: Synthetic oligonucleotide
  Target: ATXN2; (-) strand; PAM type: NRG; PAM sequence: AAG
tagcttgagctcaggcatta

SEQ ID NO: 22600 - DNA, 20 bp, Artificial Sequence
  Description of Artificial Sequence: Synthetic oligonucleotide
  Target: ATXN2; (-) strand; PAM type: NRG; PAM sequence: AGG
caggtggatagcttgagctc

SEQ ID NO: 22601 - DNA, 20 bp, Artificial Sequence
  Description of Artificial Sequence: Synthetic oligonucleotide
  Target: ATXN2; (-) strand; PAM type: NRG; PAM sequence: CAG
acaggtggatagcttgagct

SEQ ID NO: 22602 - DNA, 20 bp, Artificial Sequence
  Description of Artificial Sequence: Synthetic oligonucleotide
  Target: ATXN2; (-) strand; PAM type: NRG; PAM sequence: GAG
ctgagacaggtggatagctt

SEQ ID NO: 22603 - DNA, 20 bp, Artificial Sequence
  Description of Artificial Sequence: Synthetic oligonucleotide
  Target: ATXN2; (-) strand; PAM type: NRG; PAM sequence: TAG
gggaggctgagacaggtgga

SEQ ID NO: 22604 - DNA, 20 bp, Artificial Sequence
  Description of Artificial Sequence: Synthetic oligonucleotide
  Target: ATXN2; (-) strand; PAM type: NRG; PAM sequence: TGG
ctttgggaggctgagacagg

SEQ ID NO: 22605 - DNA, 20 bp, Artificial Sequence
  Description of Artificial Sequence: Synthetic oligonucleotide
  Target: ATXN2; (-) strand; PAM type: NRG; PAM sequence: AGG
gcactttgggaggctgagac

SEQ ID NO: 22606 - DNA, 20 bp, Artificial Sequence
  Description of Artificial Sequence: Synthetic oligonucleotide
  Target: ATXN2; (-) strand; PAM type: NRG; PAM sequence: CAG
agcactttgggaggctgaga

SEQ ID NO: 22607 - DNA, 20 bp, Artificial Sequence
  Description of Artificial Sequence: Synthetic oligonucleotide
  Target: ATXN2; (-) strand; PAM type: NRG; PAM sequence: GAG
tcttagcactttgggaggct

SEQ ID NO: 22608 - DNA, 20 bp, Artificial Sequence
  Description of Artificial Sequence: Synthetic oligonucleotide
  Target: ATXN2; (-) strand; PAM type: NRG; PAM sequence: AGG
ctgaatcttagcactttggg

SEQ ID NO: 22609 - DNA, 20 bp, Artificial Sequence
  Description of Artificial Sequence: Synthetic oligonucleotide
  Target: ATXN2; (-) strand; PAM type: NRG; PAM sequence: GAG
cctgaatcttagcactttgg

SEQ ID NO: 22610 - DNA, 20 bp, Artificial Sequence
  Description of Artificial Sequence: Synthetic oligonucleotide
  Target: ATXN2; (-) strand; PAM type: NRG; PAM sequence: GGG
tgcctgaatcttagcacttt

SEQ ID NO: 22611 - DNA, 20 bp, Artificial Sequence
  Description of Artificial Sequence: Synthetic oligonucleotide
  Target: ATXN2; (-) strand; PAM type: NRG; PAM sequence: TGG
atgcctgaatcttagcactt

SEQ ID NO: 22612 - DNA, 20 bp, Artificial Sequence
  Description of Artificial Sequence: Synthetic oligonucleotide
  Target: ATXN2; (-) strand; PAM type: NRG; PAM sequence: TAG
agtggctcatgcctgaatct

SEQ ID NO: 22613 - DNA, 20 bp, Artificial Sequence
  Description of Artificial Sequence: Synthetic oligonucleotide
  Target: ATXN2; (-) strand; PAM type: NRG; PAM sequence: TGG
cagtgtctggacaggtacag

SEQ ID NO: 22614 - DNA, 20 bp, Artificial Sequence
  Description of Artificial Sequence: Synthetic oligonucleotide
  Target: ATXN2; (-) strand; PAM type: NRG; PAM sequence: CAG
gaacagtgtctggacaggta

SEQ ID NO: 22615 - DNA, 20 bp, Artificial Sequence
  Description of Artificial Sequence: Synthetic oligonucleotide
  Target: ATXN2; (-) strand; PAM type: NRG; PAM sequence: AGG
gtttagaacagtgtctggac

SEQ ID NO: 22616 - DNA, 20 bp, Artificial Sequence
  Description of Artificial Sequence: Synthetic oligonucleotide
  Target: ATXN2; (-) strand; PAM type: NRG; PAM sequence: CAG
agtttagaacagtgtctgga

SEQ ID NO: 22617 - DNA, 20 bp, Artificial Sequence
  Description of Artificial Sequence: Synthetic oligonucleotide
  Target: ATXN2; (-) strand; PAM type: NRG; PAM sequence: TGG
aaatagtttagaacagtgtc

SEQ ID NO: 22618 - DNA, 20 bp, Artificial Sequence
  Description of Artificial Sequence: Synthetic oligonucleotide
  Target: ATXN2; (-) strand; PAM type: NRG; PAM sequence: CAG
agtctataaatagtttagaa

SEQ ID NO: 22619 - DNA, 20 bp, Artificial Sequence
  Description of Artificial Sequence: Synthetic oligonucleotide
  Target: ATXN2; (-) strand; PAM type: NRG; PAM sequence: TAG
gaataagtctataaatagtt

SEQ ID NO: 22620 - DNA, 20 bp, Artificial Sequence
  Description of Artificial Sequence: Synthetic oligonucleotide
  Target: ATXN2; (-) strand; PAM type: NRG; PAM sequence: TAG
taaatgaataagtctataaa

SEQ ID NO: 22621 - DNA, 20 bp, Artificial Sequence
  Description of Artificial Sequence: Synthetic oligonucleotide
  Target: ATXN2; (-) strand; PAM type: NRG; PAM sequence: AAG
gttgtgaagactaaatgaat

SEQ ID NO: 22622 - DNA, 20 bp, Artificial Sequence
  Description of Artificial Sequence: Synthetic oligonucleotide
  Target: ATXN2; (-) strand; PAM type: NRG; PAM sequence: AAG
catcaaatagggctgttgtg

SEQ ID NO: 22623 - DNA, 20 bp, Artificial Sequence
  Description of Artificial Sequence: Synthetic oligonucleotide
  Target: ATXN2; (-) strand; PAM type: NRG; PAM sequence: GGG
aatagtatctacatcaaata

SEQ ID NO: 22624 - DNA, 20 bp, Artificial Sequence
  Description of Artificial Sequence: Synthetic oligonucleotide
  Target: ATXN2; (-) strand; PAM type: NRG; PAM sequence: AGG
taatagtatctacatcaaat

SEQ ID NO: 22625 - DNA, 20 bp, Artificial Sequence
  Description of Artificial Sequence: Synthetic oligonucleotide
  Target: ATXN2; (-) strand; PAM type: NRG; PAM sequence: TAG
ataatagtatctacatcaaa

SEQ ID NO: 22626 - DNA, 20 bp, Artificial Sequence
  Description of Artificial Sequence: Synthetic oligonucleotide
  Target: ATXN2; (-) strand; PAM type: NRG; PAM sequence: TAG
tatttgtaagatggcaataa

SEQ ID NO: 22627 - DNA, 20 bp, Artificial Sequence
  Description of Artificial Sequence: Synthetic oligonucleotide
  Target: ATXN2; (-) strand; PAM type: NRG; PAM sequence: TGG
tggacttgctatttgtaaga

SEQ ID NO: 22628 - DNA, 20 bp, Artificial Sequence
  Description of Artificial Sequence: Synthetic oligonucleotide
  Target: ATXN2; (-) strand; PAM type: NRG; PAM sequence: AAG
ctagtggacttgctatttgt

SEQ ID NO: 22629 - DNA, 20 bp, Artificial Sequence
  Description of Artificial Sequence: Synthetic oligonucleotide
  Target: ATXN2; (-) strand; PAM type: NRG; PAM sequence: TGG
tatattcagataccaactag

SEQ ID NO: 22630 - DNA, 20 bp, Artificial Sequence
  Description of Artificial Sequence: Synthetic oligonucleotide
  Target: ATXN2; (-) strand; PAM type: NRG; PAM sequence: TAG
tgctatattcagataccaac

SEQ ID NO: 22631 - DNA, 20 bp, Artificial Sequence
  Description of Artificial Sequence: Synthetic oligonucleotide
  Target: ATXN2; (-) strand; PAM type: NRG; PAM sequence: CAG
atacagcagagtgctatatt

SEQ ID NO: 22632 - DNA, 20 bp, Artificial Sequence
  Description of Artificial Sequence: Synthetic oligonucleotide
  Target: ATXN2; (-) strand; PAM type: NRG; PAM sequence: GAG
caatatattccaatacagca

SEQ ID NO: 22633 - DNA, 20 bp, Artificial Sequence
  Description of Artificial Sequence: Synthetic oligonucleotide
  Target: ATXN2; (-) strand; PAM type: NRG; PAM sequence: CAG
aacaatatattccaatacag

SEQ ID NO: 22634 - DNA, 20 bp, Artificial Sequence
  Description of Artificial Sequence: Synthetic oligonucleotide
  Target: ATXN2; (-) strand; PAM type: NRG; PAM sequence: CAG
tagaacaatatattccaata

SEQ ID NO: 22635 - DNA, 20 bp, Artificial Sequence
  Description of Artificial Sequence: Synthetic oligonucleotide
  Target: ATXN2; (-) strand; PAM type: NRG; PAM sequence: TAG
catatatagcaatatagcat

SEQ ID NO: 22636 - DNA, 20 bp, Artificial Sequence
  Description of Artificial Sequence: Synthetic oligonucleotide
  Target: ATXN2; (-) strand; PAM type: NRG; PAM sequence: TAG
atattccatatatagcaata

SEQ ID NO: 22637 - DNA, 20 bp, Artificial Sequence
  Description of Artificial Sequence: Synthetic oligonucleotide
  Target: ATXN2; (-) strand; PAM type: NRG; PAM sequence: TAG
agagtgctatattccatata

SEQ ID NO: 22638 - DNA, 20 bp, Artificial Sequence
  Description of Artificial Sequence: Synthetic oligonucleotide
  Target: ATXN2; (-) strand; PAM type: NRG; PAM sequence: GAG
tgcagagaggaaatacagca

SEQ ID NO: 22639 - DNA, 20 bp, Artificial Sequence
  Description of Artificial Sequence: Synthetic oligonucleotide
  Target: ATXN2; (-) strand; PAM type: NRG; PAM sequence: CAG
agtgcagagaggaaatacag

SEQ ID NO: 22640 - DNA, 20 bp, Artificial Sequence
  Description of Artificial Sequence: Synthetic oligonucleotide
  Target: ATXN2; (-) strand; PAM type: NRG; PAM sequence: CAG
tatagtgcagagaggaaata

SEQ ID NO: 22641 - DNA, 20 bp, Artificial Sequence
  Description of Artificial Sequence: Synthetic oligonucleotide
  Target: ATXN2; (-) strand; PAM type: NRG; PAM sequence: AGG
agatttagtatagtgcagag

SEQ ID NO: 22642 - DNA, 20 bp, Artificial Sequence
  Description of Artificial Sequence: Synthetic oligonucleotide
  Target: ATXN2; (-) strand; PAM type: NRG; PAM sequence: GAG
tagatttagtatagtgcaga

SEQ ID NO: 22643 - DNA, 20 bp, Artificial Sequence
  Description of Artificial Sequence: Synthetic oligonucleotide
  Target: ATXN2; (-) strand; PAM type: NRG; PAM sequence: GAG
attagatttagtatagtgca

SEQ ID NO: 22644 - DNA, 20 bp, Artificial Sequence
  Description of Artificial Sequence: Synthetic oligonucleotide
  Target: ATXN2; (-) strand; PAM type: NRG; PAM sequence: CAG
ccattagatttagtatagtg

SEQ ID NO: 22645 - DNA, 20 bp, Artificial Sequence
  Description of Artificial Sequence: Synthetic oligonucleotide
  Target: ATXN2; (-) strand; PAM type: NRG; PAM sequence: TAG
gttttccattagatttagta

SEQ ID NO: 22646 - DNA, 20 bp, Artificial Sequence
  Description of Artificial Sequence: Synthetic oligonucleotide
  Target: ATXN2; (-) strand; PAM type: NRG; PAM sequence: TAG
cttaagttttccattagatt

SEQ ID NO: 22647 - DNA, 20 bp, Artificial Sequence
  Description of Artificial Sequence: Synthetic oligonucleotide
  Target: ATXN2; (-) strand; PAM type: NRG; PAM sequence: TAG
aaagaacttaagttttccat

SEQ ID NO: 22648 - DNA, 20 bp, Artificial Sequence
  Description of Artificial Sequence: Synthetic oligonucleotide
  Target: ATXN2; (-) strand; PAM type: NRG; PAM sequence: AAG
aaaagaaaaaaaaagaactt

SEQ ID NO: 22649 - DNA, 20 bp, Artificial Sequence
  Description of Artificial Sequence: Synthetic oligonucleotide
  Target: ATXN2; (-) strand; PAM type: NRG; PAM sequence: AAG
ctccaaaaaaaagaaaaaaa

SEQ ID NO: 22650 - DNA, 20 bp, Artificial Sequence
  Description of Artificial Sequence: Synthetic oligonucleotide
  Target: ATXN2; (-) strand; PAM type: NRG; PAM sequence: AAG
gaaactccgtctccaaaaaa

SEQ ID NO: 22651 - DNA, 20 bp, Artificial Sequence
  Description of Artificial Sequence: Synthetic oligonucleotide
  Target: ATXN2; (-) strand; PAM type: NRG; PAM sequence: GAG
cactccagcctgggcaataa

SEQ ID NO: 22652 - DNA, 20 bp, Artificial Sequence
  Description of Artificial Sequence: Synthetic oligonucleotide
  Target: ATXN2; (-) strand; PAM type: NRG; PAM sequence: AAG
tgcactccagcctgggcaat

SEQ ID NO: 22653 - DNA, 20 bp, Artificial Sequence
  Description of Artificial Sequence: Synthetic oligonucleotide
  Target: ATXN2; (-) strand; PAM type: NRG; PAM sequence: GGG
gtgccgctgcactccagcct

SEQ ID NO: 22654 - DNA, 20 bp, Artificial Sequence
  Description of Artificial Sequence: Synthetic oligonucleotide
  Target: ATXN2; (-) strand; PAM type: NRG; PAM sequence: TGG
cgtgccgctgcactccagcc

SEQ ID NO: 22655 - DNA, 20 bp, Artificial Sequence
  Description of Artificial Sequence: Synthetic oligonucleotide
  Target: ATXN2; (-) strand; PAM type: NRG; PAM sequence: CAG
aagatcgtgccgctgcactc

SEQ ID NO: 22656 - DNA, 20 bp, Artificial Sequence
  Description of Artificial Sequence: Synthetic oligonucleotide
  Target: ATXN2; (-) strand; PAM type: NRG; PAM sequence: AAG
ggcggtggttgccatgagtt

SEQ ID NO: 22657 - DNA, 20 bp, Artificial Sequence
  Description of Artificial Sequence: Synthetic oligonucleotide
  Target: ATXN2; (-) strand; PAM type: NRG; PAM sequence: GAG
cgggaggcggtggttgccat

SEQ ID NO: 22658 - DNA, 20 bp, Artificial Sequence
  Description of Artificial Sequence: Synthetic oligonucleotide
  Target: ATXN2; (-) strand; PAM type: NRG; PAM sequence: TGG
tgcttgaacccgggaggcgg

SEQ ID NO: 22659 - DNA, 20 bp, Artificial Sequence
  Description of Artificial Sequence: Synthetic oligonucleotide
  Target: ATXN2; (-) strand; PAM type: NRG; PAM sequence: CGG
aaatgcttgaacccgggagg

SEQ ID NO: 22660 - DNA, 20 bp, Artificial Sequence
  Description of Artificial Sequence: Synthetic oligonucleotide
  Target: ATXN2; (-) strand; PAM type: NRG; PAM sequence: AGG
gagaaatgcttgaacccggg

SEQ ID NO: 22661 - DNA, 20 bp, Artificial Sequence
  Description of Artificial Sequence: Synthetic oligonucleotide
  Target: ATXN2; (-) strand; PAM type: NRG; PAM sequence: GAG
ggagaaatgcttgaacccgg

SEQ ID NO: 22662 - DNA, 20 bp, Artificial Sequence
  Description of Artificial Sequence: Synthetic oligonucleotide
  Target: ATXN2; (-) strand; PAM type: NRG; PAM sequence: GGG
caggagaaatgcttgaaccc

SEQ ID NO: 22663 - DNA, 20 bp, Artificial Sequence
  Description of Artificial Sequence: Synthetic oligonucleotide
  Target: ATXN2; (-) strand; PAM type: NRG; PAM sequence: CGG
gcaggagaaatgcttgaacc

SEQ ID NO: 22664 - DNA, 20 bp, Artificial Sequence
  Description of Artificial Sequence: Synthetic oligonucleotide
  Target: ATXN2; (-) strand; PAM type: NRG; PAM sequence: GAG
tactcgcaagactgaggcag

SEQ ID NO: 22665 - DNA, 20 bp, Artificial Sequence
  Description of Artificial Sequence: Synthetic oligonucleotide
  Target: ATXN2; (-) strand; PAM type: NRG; PAM sequence: AGG
gctactcgcaagactgaggc

SEQ ID NO: 22666 - DNA, 20 bp, Artificial Sequence
  Description of Artificial Sequence: Synthetic oligonucleotide
  Target: ATXN2; (-) strand; PAM type: NRG; PAM sequence: CAG
agctactcgcaagactgagg

SEQ ID NO: 22667 - DNA, 20 bp, Artificial Sequence
  Description of Artificial Sequence: Synthetic oligonucleotide
  Target: ATXN2; (-) strand; PAM type: NRG; PAM sequence: AGG
cccagctactcgcaagactg

SEQ ID NO: 22668 - DNA, 20 bp, Artificial Sequence
  Description of Artificial Sequence: Synthetic oligonucleotide
  Target: ATXN2; (-) strand; PAM type: NRG; PAM sequence: GAG
tcccagctactcgcaagact

SEQ ID NO: 22669 - DNA, 20 bp, Artificial Sequence
  Description of Artificial Sequence: Synthetic oligonucleotide
  Target: ATXN2; (-) strand; PAM type: NRG; PAM sequence: AAG
ctgtaatcccagctactcgc

SEQ ID NO: 22670 - DNA, 20 bp, Artificial Sequence
  Description of Artificial Sequence: Synthetic oligonucleotide
  Target: ATXN2; (-) strand; PAM type: NRG; PAM sequence: CAG
gtggcaggtgcctgtaatcc

SEQ ID NO: 22671 - DNA, 20 bp, Artificial Sequence
  Description of Artificial Sequence: Synthetic oligonucleotide
  Target: ATXN2; (-) strand; PAM type: NRG; PAM sequence: AGG
aattagccaggcgtggtggc

SEQ ID NO: 22672 - DNA, 20 bp, Artificial Sequence
  Description of Artificial Sequence: Synthetic oligonucleotide
  Target: ATXN2; (-) strand; PAM type: NRG; PAM sequence: CAG
aaattagccaggcgtggtgg

SEQ ID NO: 22673 - DNA, 20 bp, Artificial Sequence
  Description of Artificial Sequence: Synthetic oligonucleotide
  Target: ATXN2; (-) strand; PAM type: NRG; PAM sequence: TGG
aaaaaattagccaggcgtgg

SEQ ID NO: 22674 - DNA, 20 bp, Artificial Sequence
  Description of Artificial Sequence: Synthetic oligonucleotide
  Target: ATXN2; (-) strand; PAM type: NRG; PAM sequence: TGG
tacaaaaaattagccaggcg

SEQ ID NO: 22675 - DNA, 20 bp, Artificial Sequence
  Description of Artificial Sequence: Synthetic oligonucleotide
  Target: ATXN2; (-) strand; PAM type: NRG; PAM sequence: AGG
aaaaatacaaaaaattagcc

SEQ ID NO: 22676 - DNA, 20 bp, Artificial Sequence
  Description of Artificial Sequence: Synthetic oligonucleotide
  Target: ATXN2; (-) strand; PAM type: NRG; PAM sequence: CAG
taaaaatacaaaaaattagc

SEQ ID NO: 22677 - DNA, 20 bp, Artificial Sequence
  Description of Artificial Sequence: Synthetic oligonucleotide
  Target: ATXN2; (-) strand; PAM type: NRG; PAM sequence: TAG
ctactaaaaatacaaaaaat

SEQ ID NO: 22678 - DNA, 20 bp, Artificial Sequence
  Description of Artificial Sequence: Synthetic oligonucleotide
  Target: ATXN2; (-) strand; PAM type: NRG; PAM sequence: TGG
tcaggagttccagaccagcc

SEQ ID NO: 22679 - DNA, 20 bp, Artificial Sequence
  Description of Artificial Sequence: Synthetic oligonucleotide
  Target: ATXN2; (-) strand; PAM type: NRG; PAM sequence: CAG
tgaggtcaggagttccagac

SEQ ID NO: 22680 - DNA, 20 bp, Artificial Sequence
  Description of Artificial Sequence: Synthetic oligonucleotide
  Target: ATXN2; (-) strand; PAM type: NRG; PAM sequence: CAG
tcagctgaggtcaggagttc

SEQ ID NO: 22681 - DNA, 20 bp, Artificial Sequence
  Description of Artificial Sequence: Synthetic oligonucleotide
  Target: ATXN2; (-) strand; PAM type: NRG; PAM sequence: GAG
gatggatcagctgaggtcag

SEQ ID NO: 22682 - DNA, 20 bp, Artificial Sequence
  Description of Artificial Sequence: Synthetic oligonucleotide
  Target: ATXN2; (-) strand; PAM type: NRG; PAM sequence: AGG
tggatggatcagctgaggtc

SEQ ID NO: 22683 - DNA, 20 bp, Artificial Sequence
  Description of Artificial Sequence: Synthetic oligonucleotide
  Target: ATXN2; (-) strand; PAM type: NRG; PAM sequence: CAG
gtggatggatcagctgaggt

SEQ ID NO: 22684 - DNA, 20 bp, Artificial Sequence
  Description of Artificial Sequence: Synthetic oligonucleotide
  Target: ATXN2; (-) strand; PAM type: NRG; PAM sequence: AGG
tgaggtggatggatcagctg

SEQ ID NO: 22685 - DNA, 20 bp, Artificial Sequence
  Description of Artificial Sequence: Synthetic oligonucleotide
  Target: ATXN2; (-) strand; PAM type: NRG; PAM sequence: GAG
ctgaggtggatggatcagct

SEQ ID NO: 22686 - DNA, 20 bp, Artificial Sequence
  Description of Artificial Sequence: Synthetic oligonucleotide
  Target: ATXN2; (-) strand; PAM type: NRG; PAM sequence: CAG
ggaggctgaggtggatggat

SEQ ID NO: 22687 - DNA, 20 bp, Artificial Sequence
  Description of Artificial Sequence: Synthetic oligonucleotide
  Target: ATXN2; (-) strand; PAM type: NRG; PAM sequence: TGG
ctttgggaggctgaggtgga

SEQ ID NO: 22688 - DNA, 20 bp, Artificial Sequence
  Description of Artificial Sequence: Synthetic oligonucleotide
  Target: ATXN2; (-) strand; PAM type: NRG; PAM sequence: TGG
agcactttgggaggctgagg

SEQ ID NO: 22689 - DNA, 20 bp, Artificial Sequence
  Description of Artificial Sequence: Synthetic oligonucleotide
  Target: ATXN2; (-) strand; PAM type: NRG; PAM sequence: AGG
cccagcactttgggaggctg

SEQ ID NO: 22690 - DNA, 20 bp, Artificial Sequence
  Description of Artificial Sequence: Synthetic oligonucleotide
  Target: ATXN2; (-) strand; PAM type: NRG; PAM sequence: GAG
tcccagcactttgggaggct

SEQ ID NO: 22691 - DNA, 20 bp, Artificial Sequence
  Description of Artificial Sequence: Synthetic oligonucleotide
  Target: ATXN2; (-) strand; PAM type: NRG; PAM sequence: AGG
tgtaatcccagcactttggg

SEQ ID NO: 22692 - DNA, 20 bp, Artificial Sequence
  Description of Artificial Sequence: Synthetic oligonucleotide
  Target: ATXN2; (-) strand; PAM type: NRG; PAM sequence: GAG
ctgtaatcccagcactttgg

SEQ ID NO: 22693 - DNA, 20 bp, Artificial Sequence
  Description of Artificial Sequence: Synthetic oligonucleotide
  Target: ATXN2; (-) strand; PAM type: NRG; PAM sequence: GGG
tcctgtaatcccagcacttt

SEQ ID NO: 22694 - DNA, 20 bp, Artificial Sequence
  Description of Artificial Sequence: Synthetic oligonucleotide
  Target: ATXN2; (-) strand; PAM type: NRG; PAM sequence: TGG
ctcctgtaatcccagcactt

SEQ ID NO: 22695 - DNA, 20 bp, Artificial Sequence
  Description of Artificial Sequence: Synthetic oligonucleotide
  Target: ATXN2; (-) strand; PAM type: NRG; PAM sequence: CAG
atggctcactcctgtaatcc

SEQ ID NO: 22696 - DNA, 20 bp, Artificial Sequence
  Description of Artificial Sequence: Synthetic oligonucleotide
  Target: ATXN2; (-) strand; PAM type: NRG; PAM sequence: TGG
cagttttctgctgggcatga

SEQ ID NO: 22697 - DNA, 20 bp, Artificial Sequence
  Description of Artificial Sequence: Synthetic oligonucleotide
  Target: ATXN2; (-) strand; PAM type: NRG; PAM sequence: GGG
aagaatttcagttttctgct

SEQ ID NO: 22698 - DNA, 20 bp, Artificial Sequence
  Description of Artificial Sequence: Synthetic oligonucleotide
  Target: ATXN2; (-) strand; PAM type: NRG; PAM sequence: TGG
taagaatttcagttttctgc

SEQ ID NO: 22699 - DNA, 20 bp, Artificial Sequence
  Description of Artificial Sequence: Synthetic oligonucleotide
  Target: ATXN2; (-) strand; PAM type: NRG; PAM sequence: CAG
gtggagtcacataagaattt

SEQ ID NO: 22700 - DNA, 20 bp, Artificial Sequence
  Description of Artificial Sequence: Synthetic oligonucleotide
  Target: ATXN2; (-) strand; PAM type: NRG; PAM sequence: AAG
catttcatgtggagtcacat

SEQ ID NO: 22701 - DNA, 20 bp, Artificial Sequence
  Description of Artificial Sequence: Synthetic oligonucleotide
  Target: ATXN2; (-) strand; PAM type: NRG; PAM sequence: GAG
tcattgtaccatttcatgtg

SEQ ID NO: 22702 - DNA, 20 bp, Artificial Sequence
  Description of Artificial Sequence: Synthetic oligonucleotide
  Target: ATXN2; (-) strand; PAM type: NRG; PAM sequence: TGG
tgtcattgtaccatttcatg

SEQ ID NO: 22703 - DNA, 20 bp, Artificial Sequence
  Description of Artificial Sequence: Synthetic oligonucleotide
  Target: ATXN2; (-) strand; PAM type: NRG; PAM sequence: TGG
attgtacagagtatgtacaa

SEQ ID NO: 22704 - DNA, 20 bp, Artificial Sequence
  Description of Artificial Sequence: Synthetic oligonucleotide
  Target: ATXN2; (-) strand; PAM type: NRG; PAM sequence: GAG
agatgacccagtattgtaca

SEQ ID NO: 22705 - DNA, 20 bp, Artificial Sequence
  Description of Artificial Sequence: Synthetic oligonucleotide
  Target: ATXN2; (-) strand; PAM type: NRG; PAM sequence: CAG
atagatgacccagtattgta

SEQ ID NO: 22706 - DNA, 20 bp, Artificial Sequence
  Description of Artificial Sequence: Synthetic oligonucleotide
  Target: ATXN2; (-) strand; PAM type: NRG; PAM sequence: CAG
ctagcaaaatatagatgacc

SEQ ID NO: 22707 - DNA, 20 bp, Artificial Sequence
  Description of Artificial Sequence: Synthetic oligonucleotide
  Target: ATXN2; (-) strand; PAM type: NRG; PAM sequence: TAG
tcattcttactagcaaaata

SEQ ID NO: 22708 - DNA, 20 bp, Artificial Sequence
  Description of Artificial Sequence: Synthetic oligonucleotide
  Target: ATXN2; (-) strand; PAM type: NRG; PAM sequence: TAG
caatacatgttcattcttac
